United States Patent Application Publication US 2015/0232836 A1 - sequence listing, part 45

SEQ ID NO: 1794608 - DNA, 15 bp, Homo sapiens
ttgcccttgggcccc

SEQ ID NO: 1794609 - DNA, 15 bp, Homo sapiens
tgcccttgggcccct

SEQ ID NO: 1794610 - DNA, 15 bp, Homo sapiens
gcccttgggcccctc

SEQ ID NO: 1794611 - DNA, 15 bp, Homo sapiens
cccttgggcccctcc

SEQ ID NO: 1794612 - DNA, 15 bp, Homo sapiens
ccttgggcccctcca

SEQ ID NO: 1794613 - DNA, 15 bp, Homo sapiens
cttgggcccctccat

SEQ ID NO: 1794614 - DNA, 15 bp, Homo sapiens
ttgggcccctccata

SEQ ID NO: 1794615 - DNA, 15 bp, Homo sapiens
tgggcccctccatag

SEQ ID NO: 1794616 - DNA, 15 bp, Homo sapiens
gggcccctccatagt

SEQ ID NO: 1794617 - DNA, 15 bp, Homo sapiens
ggcccctccatagta

SEQ ID NO: 1794618 - DNA, 15 bp, Homo sapiens
gcccctccatagtac

SEQ ID NO: 1794619 - DNA, 15 bp, Homo sapiens
cccctccatagtact

SEQ ID NO: 1794620 - DNA, 15 bp, Homo sapiens
ccctccatagtactg

SEQ ID NO: 1794621 - DNA, 15 bp, Homo sapiens
cctccatagtactgc

SEQ ID NO: 1794622 - DNA, 15 bp, Homo sapiens
ctccatagtactgct

SEQ ID NO: 1794623 - DNA, 15 bp, Homo sapiens
tccatagtactgctt

SEQ ID NO: 1794624 - DNA, 15 bp, Homo sapiens
ccatagtactgcttg

SEQ ID NO: 1794625 - DNA, 15 bp, Homo sapiens
catagtactgcttgc

SEQ ID NO: 1794626 - DNA, 15 bp, Homo sapiens
atagtactgcttgct

SEQ ID NO: 1794627 - DNA, 15 bp, Homo sapiens
tagtactgcttgcta

SEQ ID NO: 1794628 - DNA, 15 bp, Homo sapiens
agtactgcttgctat

SEQ ID NO: 1794629 - DNA, 15 bp, Homo sapiens
gtactgcttgctatt

SEQ ID NO: 1794630 - DNA, 15 bp, Homo sapiens
tactgcttgctattc

SEQ ID NO: 1794631 - DNA, 15 bp, Homo sapiens
actgcttgctattca

SEQ ID NO: 1794632 - DNA, 15 bp, Homo sapiens
ctgcttgctattcac

SEQ ID NO: 1794633 - DNA, 15 bp, Homo sapiens
tgcttgctattcaca

SEQ ID NO: 1794634 - DNA, 15 bp, Homo sapiens
gcttgctattcacaa

SEQ ID NO: 1794635 - DNA, 15 bp, Homo sapiens
cttgctattcacaac

SEQ ID NO: 1794636 - DNA, 15 bp, Homo sapiens
ttgctattcacaaca

SEQ ID NO: 1794637 - DNA, 15 bp, Homo sapiens
tgctattcacaacat

SEQ ID NO: 1794638 - DNA, 15 bp, Homo sapiens
gctattcacaacatg

SEQ ID NO: 1794639 - DNA, 15 bp, Homo sapiens
ctattcacaacatgg

SEQ ID NO: 1794640 - DNA, 15 bp, Homo sapiens
tattcacaacatggc

SEQ ID NO: 1794641 - DNA, 15 bp, Homo sapiens
attcacaacatggca

SEQ ID NO: 1794642 - DNA, 15 bp, Homo sapiens
ttcacaacatggcag

SEQ ID NO: 1794643 - DNA, 15 bp, Homo sapiens
tcacaacatggcagc

SEQ ID NO: 1794644 - DNA, 15 bp, Homo sapiens
cacaacatggcagct

SEQ ID NO: 1794645 - DNA, 15 bp, Homo sapiens
acaacatggcagctt

SEQ ID NO: 1794646 - DNA, 15 bp, Homo sapiens
caacatggcagcttg

SEQ ID NO: 1794647 - DNA, 15 bp, Homo sapiens
aacatggcagcttgc

SEQ ID NO: 1794648 - DNA, 15 bp, Homo sapiens
acatggcagcttgct

SEQ ID NO: 1794649 - DNA, 15 bp, Homo sapiens
catggcagcttgctt

SEQ ID NO: 1794650 - DNA, 15 bp, Homo sapiens
atggcagcttgcttt

SEQ ID NO: 1794651 - DNA, 15 bp, Homo sapiens
tggcagcttgctttg

SEQ ID NO: 1794652 - DNA, 15 bp, Homo sapiens
ggcagcttgctttgc

SEQ ID NO: 1794653 - DNA, 15 bp, Homo sapiens
gcagcttgctttgcc

SEQ ID NO: 1794654 - DNA, 15 bp, Homo sapiens
cagcttgctttgccc

SEQ ID NO: 1794655 - DNA, 15 bp, Homo sapiens
agcttgctttgccca

SEQ ID NO: 1794656 - DNA, 15 bp, Homo sapiens
gcttgctttgcccag

SEQ ID NO: 1794657 - DNA, 15 bp, Homo sapiens
cttgctttgcccaga

SEQ ID NO: 1794658 - DNA, 15 bp, Homo sapiens
ttgctttgcccagag

SEQ ID NO: 1794659 - DNA, 15 bp, Homo sapiens
tgctttgcccagagc

SEQ ID NO: 1794660 - DNA, 15 bp, Homo sapiens
gctttgcccagagca

SEQ ID NO: 1794661 - DNA, 15 bp, Homo sapiens
ctttgcccagagcag

SEQ ID NO: 1794662 - DNA, 15 bp, Homo sapiens
tttgcccagagcagg

SEQ ID NO: 1794663 - DNA, 15 bp, Homo sapiens
ttgcccagagcaggg

SEQ ID NO: 1794664 - DNA, 15 bp, Homo sapiens
tgcccagagcaggga

SEQ ID NO: 1794665 - DNA, 15 bp, Homo sapiens
gcccagagcagggac

SEQ ID NO: 1794666 - DNA, 15 bp, Homo sapiens
cccagagcagggact

SEQ ID NO: 1794667 - DNA, 15 bp, Homo sapiens
ccagagcagggactc

SEQ ID NO: 1794668 - DNA, 15 bp, Homo sapiens
cagagcagggactct

SEQ ID NO: 1794669 - DNA, 15 bp, Homo sapiens
agagcagggactctg

SEQ ID NO: 1794670 - DNA, 15 bp, Homo sapiens
gagcagggactctga

SEQ ID NO: 1794671 - DNA, 15 bp, Homo sapiens
agcagggactctgag

SEQ ID NO: 1794672 - DNA, 15 bp, Homo sapiens
gcagggactctgagg

SEQ ID NO: 1794673 - DNA, 15 bp, Homo sapiens
cagggactctgaggg

SEQ ID NO: 1794674 - DNA, 15 bp, Homo sapiens
agggactctgaggga

SEQ ID NO: 1794675 - DNA, 15 bp, Homo sapiens
gggactctgagggag

SEQ ID NO: 1794676 - DNA, 15 bp, Homo sapiens
ggactctgagggagg

SEQ ID NO: 1794677 - DNA, 15 bp, Homo sapiens
gactctgagggaggc

SEQ ID NO: 1794678 - DNA, 15 bp, Homo sapiens
actctgagggaggca

SEQ ID NO: 1794679 - DNA, 15 bp, Homo sapiens
ctctgagggaggcag

SEQ ID NO: 1794680 - DNA, 15 bp, Homo sapiens
tctgagggaggcagg

SEQ ID NO: 1794681 - DNA, 15 bp, Homo sapiens
ctgagggaggcaggg

SEQ ID NO: 1794682 - DNA, 15 bp, Homo sapiens
tgagggaggcaggga

SEQ ID NO: 1794683 - DNA, 15 bp, Homo sapiens
gagggaggcagggaa

SEQ ID NO: 1794684 - DNA, 15 bp, Homo sapiens
agggaggcagggaaa

SEQ ID NO: 1794685 - DNA, 15 bp, Homo sapiens
gggaggcagggaaat

SEQ ID NO: 1794686 - DNA, 15 bp, Homo sapiens
ggaggcagggaaata

SEQ ID NO: 1794687 - DNA, 15 bp, Homo sapiens
gaggcagggaaataa

SEQ ID NO: 1794688 - DNA, 15 bp, Homo sapiens
aggcagggaaataaa

SEQ ID NO: 1794689 - DNA, 15 bp, Homo sapiens
ggcagggaaataaag

SEQ ID NO: 1794690 - DNA, 15 bp, Homo sapiens
gcagggaaataaaga

SEQ ID NO: 1794691 - DNA, 15 bp, Homo sapiens
cagggaaataaagag

SEQ ID NO: 1794692 - DNA, 15 bp, Homo sapiens
agggaaataaagagc

SEQ ID NO: 1794693 - DNA, 15 bp, Homo sapiens
gggaaataaagagca

SEQ ID NO: 1794694 - DNA, 15 bp, Homo sapiens
ggaaataaagagcaa

SEQ ID NO: 1794695 - DNA, 15 bp, Homo sapiens
gaaataaagagcaag

SEQ ID NO: 1794696 - DNA, 15 bp, Homo sapiens
aaataaagagcaaga

SEQ ID NO: 1794697 - DNA, 15 bp, Homo sapiens
aataaagagcaagag

SEQ ID NO: 1794698 - DNA, 15 bp, Homo sapiens
ataaagagcaagaga

SEQ ID NO: 1794699 - DNA, 15 bp, Homo sapiens
taaagagcaagagag

SEQ ID NO: 1794700 - DNA, 15 bp, Homo sapiens
aaagagcaagagaga

SEQ ID NO: 1794701 - DNA, 15 bp, Homo sapiens
aagagcaagagagag

SEQ ID NO: 1794702 - DNA, 15 bp, Homo sapiens
agagcaagagagagg

SEQ ID NO: 1794703 - DNA, 15 bp, Homo sapiens
gagcaagagagaggt

SEQ ID NO: 1794704 - DNA, 15 bp, Homo sapiens
agcaagagagaggtc

SEQ ID NO: 1794705 - DNA, 15 bp, Homo sapiens
gcaagagagaggtca

SEQ ID NO: 1794706 - DNA, 15 bp, Homo sapiens
caagagagaggtcac

SEQ ID NO: 1794707 - DNA, 15 bp, Homo sapiens
aagagagaggtcaca

SEQ ID NO: 1794708 - DNA, 15 bp, Homo sapiens
agagagaggtcacag

SEQ ID NO: 1794709 - DNA, 15 bp, Homo sapiens
gagagaggtcacagt

SEQ ID NO: 1794710 - DNA, 15 bp, Homo sapiens
agagaggtcacagtc

SEQ ID NO: 1794711 - DNA, 15 bp, Homo sapiens
gagaggtcacagtct

SEQ ID NO: 1794712 - DNA, 15 bp, Homo sapiens
agaggtcacagtctt

SEQ ID NO: 1794713 - DNA, 15 bp, Homo sapiens
gaggtcacagtctta

SEQ ID NO: 1794714 - DNA, 15 bp, Homo sapiens
aggtcacagtcttat

SEQ ID NO: 1794715 - DNA, 15 bp, Homo sapiens
ggtcacagtcttatt

SEQ ID NO: 1794716 - DNA, 15 bp, Homo sapiens
gtcacagtcttattg

SEQ ID NO: 1794717 - DNA, 15 bp, Homo sapiens
tcacagtcttattgt

SEQ ID NO: 1794718 - DNA, 15 bp, Homo sapiens
cacagtcttattgta

SEQ ID NO: 1794719 - DNA, 15 bp, Homo sapiens
acagtcttattgtaa

SEQ ID NO: 1794720 - DNA, 15 bp, Homo sapiens
cagtcttattgtaat

SEQ ID NO: 1794721 - DNA, 15 bp, Homo sapiens
agtcttattgtaatc

SEQ ID NO: 1794722 - DNA, 15 bp, Homo sapiens
gtcttattgtaatct

SEQ ID NO: 1794723 - DNA, 15 bp, Homo sapiens
tcttattgtaatcta

SEQ ID NO: 1794724 - DNA, 15 bp, Homo sapiens
cttattgtaatctaa

SEQ ID NO: 1794725 - DNA, 15 bp, Homo sapiens
ttattgtaatctaat

SEQ ID NO: 1794726 - DNA, 15 bp, Homo sapiens
tattgtaatctaatt

SEQ ID NO: 1794727 - DNA, 15 bp, Homo sapiens
attgtaatctaattc

SEQ ID NO: 1794728 - DNA, 15 bp, Homo sapiens
ttgtaatctaattct

SEQ ID NO: 1794729 - DNA, 15 bp, Homo sapiens
tgtaatctaattctg

SEQ ID NO: 1794730 - DNA, 15 bp, Homo sapiens
gtaatctaattctgg

SEQ ID NO: 1794731 - DNA, 15 bp, Homo sapiens
taatctaattctgga

SEQ ID NO: 1794732 - DNA, 15 bp, Homo sapiens
aatctaattctggaa

SEQ ID NO: 1794733 - DNA, 15 bp, Homo sapiens
atctaattctggaaa

SEQ ID NO: 1794734 - DNA, 15 bp, Homo sapiens
tctaattctggaaat

SEQ ID NO: 1794735 - DNA, 15 bp, Homo sapiens
aattctggaaatgac

SEQ ID NO: 1794736 - DNA, 15 bp, Homo sapiens
attctggaaatgaca

SEQ ID NO: 1794737 - DNA, 15 bp, Homo sapiens
ttctggaaatgacag

SEQ ID NO: 1794738 - DNA, 15 bp, Homo sapiens
tctggaaatgacagc

SEQ ID NO: 1794739 - DNA, 15 bp, Homo sapiens
ctggaaatgacagcc

SEQ ID NO: 1794740 - DNA, 15 bp, Homo sapiens
tggaaatgacagccc

SEQ ID NO: 1794741 - DNA, 15 bp, Homo sapiens
ggaaatgacagccca

SEQ ID NO: 1794742 - DNA, 15 bp, Homo sapiens
gaaatgacagcccat

SEQ ID NO: 1794743 - DNA, 15 bp, Homo sapiens
aaatgacagcccatt

SEQ ID NO: 1794744 - DNA, 15 bp, Homo sapiens
aatgacagcccatta

SEQ ID NO: 1794745 - DNA, 15 bp, Homo sapiens
atgacagcccattac

SEQ ID NO: 1794746 - DNA, 15 bp, Homo sapiens
tgacagcccattact

SEQ ID NO: 1794747 - DNA, 15 bp, Homo sapiens
gacagcccattactt

SEQ ID NO: 1794748 - DNA, 15 bp, Homo sapiens
acagcccattacttt

SEQ ID NO: 1794749 - DNA, 15 bp, Homo sapiens
cagcccattactttt

SEQ ID NO: 1794750 - DNA, 15 bp, Homo sapiens
agcccattacttttg

SEQ ID NO: 1794751 - DNA, 15 bp, Homo sapiens
gcccattacttttgg

SEQ ID NO: 1794752 - DNA, 15 bp, Homo sapiens
cccattacttttggc

SEQ ID NO: 1794753 - DNA, 15 bp, Homo sapiens
ccattacttttggca

SEQ ID NO: 1794754 - DNA, 15 bp, Homo sapiens
cattacttttggcat

SEQ ID NO: 1794755 - DNA, 15 bp, Homo sapiens
attacttttggcata

SEQ ID NO: 1794756 - DNA, 15 bp, Homo sapiens
ttacttttggcatat

SEQ ID NO: 1794757 - DNA, 15 bp, Homo sapiens
tacttttggcatatt

SEQ ID NO: 1794758 - DNA, 15 bp, Homo sapiens
acttttggcatatta

SEQ ID NO: 1794759 - DNA, 15 bp, Homo sapiens
cttttggcatattat

SEQ ID NO: 1794760 - DNA, 15 bp, Homo sapiens
ttttggcatattatt

SEQ ID NO: 1794761 - DNA, 15 bp, Homo sapiens
tttggcatattattt

SEQ ID NO: 1794762 - DNA, 15 bp, Homo sapiens
ttggcatattatttt

SEQ ID NO: 1794763 - DNA, 15 bp, Homo sapiens
tggcatattattttg

SEQ ID NO: 1794764 - DNA, 15 bp, Homo sapiens
ggcatattattttgg

SEQ ID NO: 1794765 - DNA, 15 bp, Homo sapiens
gcatattattttggt

SEQ ID NO: 1794766 - DNA, 15 bp, Homo sapiens
catattattttggtt

SEQ ID NO: 1794767 - DNA, 15 bp, Homo sapiens
atattattttggtta

SEQ ID NO: 1794768 - DNA, 15 bp, Homo sapiens
tattattttggttag

SEQ ID NO: 1794769 - DNA, 15 bp, Homo sapiens
attattttggttaga

SEQ ID NO: 1794770 - DNA, 15 bp, Homo sapiens
ttattttggttagaa

SEQ ID NO: 1794771 - DNA, 15 bp, Homo sapiens
tattttggttagaag

SEQ ID NO: 1794772 - DNA, 15 bp, Homo sapiens
attttggttagaagc

SEQ ID NO: 1794773 - DNA, 15 bp, Homo sapiens
ttttggttagaagca

SEQ ID NO: 1794774 - DNA, 15 bp, Homo sapiens
tttggttagaagcaa

SEQ ID NO: 1794775 - DNA, 15 bp, Homo sapiens
ttggttagaagcaag

SEQ ID NO: 1794776 - DNA, 15 bp, Homo sapiens
tggttagaagcaaga

SEQ ID NO: 1794777 - DNA, 15 bp, Homo sapiens
ggttagaagcaagac

SEQ ID NO: 1794778 - DNA, 15 bp, Homo sapiens
gttagaagcaagaca

SEQ ID NO: 1794779 - DNA, 15 bp, Homo sapiens
ttagaagcaagacaa

SEQ ID NO: 1794780 - DNA, 15 bp, Homo sapiens
tagaagcaagacaac

SEQ ID NO: 1794781 - DNA, 15 bp, Homo sapiens
agaagcaagacaaca

SEQ ID NO: 1794782 - DNA, 15 bp, Homo sapiens
gaagcaagacaacag

SEQ ID NO: 1794783 - DNA, 15 bp, Homo sapiens
aagcaagacaacagt

SEQ ID NO: 1794784 - DNA, 15 bp, Homo sapiens
agcaagacaacagta

SEQ ID NO: 1794785 - DNA, 15 bp, Homo sapiens
gcaagacaacagtag

SEQ ID NO: 1794786 - DNA, 15 bp, Homo sapiens
caagacaacagtaga

SEQ ID NO: 1794787 - DNA, 15 bp, Homo sapiens
aagacaacagtagat

SEQ ID NO: 1794788 - DNA, 15 bp, Homo sapiens
agacaacagtagatc

SEQ ID NO: 1794789 - DNA, 15 bp, Homo sapiens
gacaacagtagatct

SEQ ID NO: 1794790 - DNA, 15 bp, Homo sapiens
acaacagtagatcta

SEQ ID NO: 1794791 - DNA, 15 bp, Homo sapiens
caacagtagatctag

SEQ ID NO: 1794792 - DNA, 15 bp, Homo sapiens
aacagtagatctagc

SEQ ID NO: 1794793 - DNA, 15 bp, Homo sapiens
acagtagatctagcc

SEQ ID NO: 1794794 - DNA, 15 bp, Homo sapiens
cagtagatctagccc

SEQ ID NO: 1794795 - DNA, 15 bp, Homo sapiens
agtagatctagccca

SEQ ID NO: 1794796 - DNA, 15 bp, Homo sapiens
gtagatctagcccac

SEQ ID NO: 1794797 - DNA, 15 bp, Homo sapiens
tagatctagcccaca

SEQ ID NO: 1794798 - DNA, 15 bp, Homo sapiens
agatctagcccacac

SEQ ID NO: 1794799 - DNA, 15 bp, Homo sapiens
gatctagcccacaca

SEQ ID NO: 1794800 - DNA, 15 bp, Homo sapiens
atctagcccacacac

SEQ ID NO: 1794801 - DNA, 15 bp, Homo sapiens
tctagcccacacacg

SEQ ID NO: 1794802 - DNA, 15 bp, Homo sapiens
ctagcccacacacga

SEQ ID NO: 1794803 - DNA, 15 bp, Homo sapiens
tagcccacacacgag

SEQ ID NO: 1794804 - DNA, 15 bp, Homo sapiens
agcccacacacgagg

SEQ ID NO: 1794805 - DNA, 15 bp, Homo sapiens
gcccacacacgaggg

SEQ ID NO: 1794806 - DNA, 15 bp, Homo sapiens
cccacacacgagggg

SEQ ID NO: 1794807 - DNA, 15 bp, Homo sapiens
ccacacacgagggga

SEQ ID NO: 1794808 - DNA, 15 bp, Homo sapiens
cacacacgaggggag

SEQ ID NO: 1794809 - DNA, 15 bp, Homo sapiens
acacacgaggggagg

SEQ ID NO: 1794810 - DNA, 15 bp, Homo sapiens
cacacgaggggagga

SEQ ID NO: 1794811 - DNA, 15 bp, Homo sapiens
acacgaggggaggag

SEQ ID NO: 1794812 - DNA, 15 bp, Homo sapiens
cacgaggggaggagg

SEQ ID NO: 1794813 - DNA, 15 bp, Homo sapiens
acgaggggaggagga

SEQ ID NO: 1794814 - DNA, 15 bp, Homo sapiens
cgaggggaggaggat

SEQ ID NO: 1794815 - DNA, 15 bp, Homo sapiens
gaggggaggaggatc

SEQ ID NO: 1794816 - DNA, 15 bp, Homo sapiens
aggggaggaggatca

SEQ ID NO: 1794817 - DNA, 15 bp, Homo sapiens
ggggaggaggatcac

SEQ ID NO: 1794818 - DNA, 15 bp, Homo sapiens
gggaggaggatcaca

SEQ ID NO: 1794819 - DNA, 15 bp, Homo sapiens
ggaggaggatcacac

SEQ ID NO: 1794820 - DNA, 15 bp, Homo sapiens
gaggaggatcacaca

SEQ ID NO: 1794821 - DNA, 15 bp, Homo sapiens
aggaggatcacacaa

SEQ ID NO: 1794822 - DNA, 15 bp, Homo sapiens
ggaggatcacacaag

SEQ ID NO: 1794823 - DNA, 15 bp, Homo sapiens
gaggatcacacaagg

SEQ ID NO: 1794824 - DNA, 15 bp, Homo sapiens
aggatcacacaagga

SEQ ID NO: 1794825 - DNA, 15 bp, Homo sapiens
ggatcacacaaggag

SEQ ID NO: 1794826 - DNA, 15 bp, Homo sapiens
gatcacacaaggagg

SEQ ID NO: 1794827 - DNA, 15 bp, Homo sapiens
atcacacaaggaggt

SEQ ID NO: 1794828 - DNA, 15 bp, Homo sapiens
tcacacaaggaggtg

SEQ ID NO: 1794829 - DNA, 15 bp, Homo sapiens
cacacaaggaggtga

SEQ ID NO: 1794830 - DNA, 15 bp, Homo sapiens
acacaaggaggtgaa

SEQ ID NO: 1794831 - DNA, 15 bp, Homo sapiens
cacaaggaggtgaat

SEQ ID NO: 1794832 - DNA, 15 bp, Homo sapiens
acaaggaggtgaata

SEQ ID NO: 1794833 - DNA, 15 bp, Homo sapiens
caaggaggtgaatac

SEQ ID NO: 1794834 - DNA, 15 bp, Homo sapiens
aaggaggtgaatacc

SEQ ID NO: 1794835 - DNA, 15 bp, Homo sapiens
aggaggtgaatacca

SEQ ID NO: 1794836 - DNA, 15 bp, Homo sapiens
ggaggtgaataccag

SEQ ID NO: 1794837 - DNA, 15 bp, Homo sapiens
gaggtgaataccagg

SEQ ID NO: 1794838 - DNA, 15 bp, Homo sapiens
aggtgaataccagga

SEQ ID NO: 1794839 - DNA, 15 bp, Homo sapiens
ggtgaataccaggag

SEQ ID NO: 1794840 - DNA, 15 bp, Homo sapiens
gtgaataccaggagg

SEQ ID NO: 1794841 - DNA, 15 bp, Homo sapiens
tgaataccaggaggt

SEQ ID NO: 1794842 - DNA, 15 bp, Homo sapiens
gaataccaggaggtg

SEQ ID NO: 1794843 - DNA, 15 bp, Homo sapiens
aataccaggaggtgg

SEQ ID NO: 1794844 - DNA, 15 bp, Homo sapiens
ataccaggaggtggg

SEQ ID NO: 1794845 - DNA, 15 bp, Homo sapiens
taccaggaggtgggg

SEQ ID NO: 1794846 - DNA, 15 bp, Homo sapiens
accaggaggtggggt

SEQ ID NO: 1794847 - DNA, 15 bp, Homo sapiens
ccaggaggtggggtc

SEQ ID NO: 1794848 - DNA, 15 bp, Homo sapiens
caggaggtggggtca

SEQ ID NO: 1794849 - DNA, 15 bp, Homo sapiens
aggaggtggggtcat

SEQ ID NO: 1794850 - DNA, 15 bp, Homo sapiens
ggaggtggggtcatt

SEQ ID NO: 1794851 - DNA, 15 bp, Homo sapiens
gaggtggggtcattg

SEQ ID NO: 1794852 - DNA, 15 bp, Homo sapiens
aggtggggtcattgg

SEQ ID NO: 1794853 - DNA, 15 bp, Homo sapiens
ggtggggtcattggg

SEQ ID NO: 1794854 - DNA, 15 bp, Homo sapiens
gtggggtcattggga

SEQ ID NO: 1794855 - DNA, 15 bp, Homo sapiens
tggggtcattgggag

SEQ ID NO: 1794856 - DNA, 15 bp, Homo sapiens
ggggtcattgggagc

SEQ ID NO: 1794857 - DNA, 15 bp, Homo sapiens
gggtcattgggagcc

SEQ ID NO: 1794858 - DNA, 15 bp, Homo sapiens
ggtcattgggagcca

SEQ ID NO: 1794859 - DNA, 15 bp, Homo sapiens
gtcattgggagccat

SEQ ID NO: 1794860 - DNA, 15 bp, Homo sapiens
tcattgggagccatc

SEQ ID NO: 1794861 - DNA, 15 bp, Homo sapiens
cattgggagccatct

SEQ ID NO: 1794862 - DNA, 15 bp, Homo sapiens
attgggagccatctg

SEQ ID NO: 1794863 - DNA, 15 bp, Homo sapiens
ttgggagccatctga

SEQ ID NO: 1794864 - DNA, 15 bp, Homo sapiens
tgggagccatctgag

SEQ ID NO: 1794865 - DNA, 15 bp, Homo sapiens
gggagccatctgaga

SEQ ID NO: 1794866 - DNA, 15 bp, Homo sapiens
ggagccatctgagag

SEQ ID NO: 1794867 - DNA, 15 bp, Homo sapiens
gagccatctgagagg

SEQ ID NO: 1794868 - DNA, 15 bp, Homo sapiens
agccatctgagaggc

SEQ ID NO: 1794869 - DNA, 15 bp, Homo sapiens
gccatctgagaggct

SEQ ID NO: 1794870 - DNA, 15 bp, Homo sapiens
ccatctgagaggctg

SEQ ID NO: 1794871 - DNA, 15 bp, Homo sapiens
catctgagaggctgc

SEQ ID NO: 1794872 - DNA, 15 bp, Homo sapiens
atctgagaggctgcc

SEQ ID NO: 1794873 - DNA, 15 bp, Homo sapiens
tctgagaggctgccc

SEQ ID NO: 1794874 - DNA, 15 bp, Homo sapiens
ctgagaggctgccca

SEQ ID NO: 1794875 - DNA, 15 bp, Homo sapiens
tgagaggctgcccac

SEQ ID NO: 1794876 - DNA, 15 bp, Homo sapiens
gagaggctgcccacc

SEQ ID NO: 1794877 - DNA, 15 bp, Homo sapiens
agaggctgcccacca

SEQ ID NO: 1794878 - DNA, 15 bp, Homo sapiens
gaggctgcccaccac

SEQ ID NO: 1794879 - DNA, 15 bp, Homo sapiens
aggctgcccaccaca

SEQ ID NO: 1794880 - DNA, 15 bp, Homo sapiens
ggctgcccaccacac

SEQ ID NO: 1794881 - DNA, 15 bp, Homo sapiens
gctgcccaccacact

SEQ ID NO: 1794882 - DNA, 15 bp, Homo sapiens
ctgcccaccacactg

SEQ ID NO: 1794883 - DNA, 15 bp, Homo sapiens
tgcccaccacactgc

SEQ ID NO: 1794884 - DNA, 15 bp, Homo sapiens
gcccaccacactgcc

SEQ ID NO: 1794885 - DNA, 15 bp, Homo sapiens
cccaccacactgcct

SEQ ID NO: 1794886 - DNA, 15 bp, Homo sapiens
ccaccacactgcctc

SEQ ID NO: 1794887 - DNA, 15 bp, Homo sapiens
caccacactgcctca

SEQ ID NO: 1794888 - DNA, 15 bp, Homo sapiens
accacactgcctcaa

SEQ ID NO: 1794889 - DNA, 15 bp, Homo sapiens
ccacactgcctcaag

SEQ ID NO: 1794890 - DNA, 15 bp, Homo sapiens
cacactgcctcaagt

SEQ ID NO: 1794891 - DNA, 15 bp, Homo sapiens
acactgcctcaagta

SEQ ID NO: 1794892 - DNA, 15 bp, Homo sapiens
cactgcctcaagtaa

SEQ ID NO: 1794893 - DNA, 15 bp, Homo sapiens
actgcctcaagtaac

SEQ ID NO: 1794894 - DNA, 15 bp, Homo sapiens
ctgcctcaagtaact

SEQ ID NO: 1794895 - DNA, 15 bp, Homo sapiens
tgcctcaagtaacta

SEQ ID NO: 1794896 - DNA, 15 bp, Homo sapiens
gcctcaagtaactag

SEQ ID NO: 1794897 - DNA, 15 bp, Homo sapiens
cctcaagtaactagg

SEQ ID NO: 1794898 - DNA, 15 bp, Homo sapiens
ctcaagtaactaggg

SEQ ID NO: 1794899 - DNA, 15 bp, Homo sapiens
tcaagtaactaggga

SEQ ID NO: 1794900 - DNA, 15 bp, Homo sapiens
caagtaactagggag

SEQ ID NO: 1794901 - DNA, 15 bp, Homo sapiens
aagtaactagggaga

SEQ ID NO: 1794902 - DNA, 15 bp, Homo sapiens
agtaactagggagag

SEQ ID NO: 1794903 - DNA, 15 bp, Homo sapiens
gtaactagggagagg

SEQ ID NO: 1794904 - DNA, 15 bp, Homo sapiens
taactagggagaggt

SEQ ID NO: 1794905 - DNA, 15 bp, Homo sapiens
aactagggagaggta

SEQ ID NO: 1794906 - DNA, 15 bp, Homo sapiens
actagggagaggtaa

SEQ ID NO: 1794907 - DNA, 15 bp, Homo sapiens
ctagggagaggtaaa

SEQ ID NO: 1794908 - DNA, 15 bp, Homo sapiens
tagggagaggtaaaa

SEQ ID NO: 1794909 - DNA, 15 bp, Homo sapiens
agggagaggtaaaag

SEQ ID NO: 1794910 - DNA, 15 bp, Homo sapiens
gggagaggtaaaagt

SEQ ID NO: 1794911 - DNA, 15 bp, Homo sapiens
ggagaggtaaaagtt

SEQ ID NO: 1794912 - DNA, 15 bp, Homo sapiens
gagaggtaaaagttt

SEQ ID NO: 1794913 - DNA, 15 bp, Homo sapiens
agaggtaaaagttta

SEQ ID NO: 1794914 - DNA, 15 bp, Homo sapiens
gaggtaaaagtttat

SEQ ID NO: 1794915 - DNA, 15 bp, Homo sapiens
aggtaaaagtttata

SEQ ID NO: 1794916 - DNA, 15 bp, Homo sapiens
ggtaaaagtttatat

SEQ ID NO: 1794917 - DNA, 15 bp, Homo sapiens
gtaaaagtttatatg

SEQ ID NO: 1794918 - DNA, 15 bp, Homo sapiens
taaaagtttatatgc

SEQ ID NO: 1794919 - DNA, 15 bp, Homo sapiens
aaaagtttatatgcc

SEQ ID NO: 1794920 - DNA, 15 bp, Homo sapiens
aaagtttatatgcca

SEQ ID NO: 1794921 - DNA, 15 bp, Homo sapiens
aagtttatatgccag

SEQ ID NO: 1794922 - DNA, 15 bp, Homo sapiens
agtttatatgccaga

SEQ ID NO: 1794923 - DNA, 15 bp, Homo sapiens
gtttatatgccagat

SEQ ID NO: 1794924 - DNA, 15 bp, Homo sapiens
tttatatgccagatg

SEQ ID NO: 1794925 - DNA, 15 bp, Homo sapiens
ttatatgccagatga

SEQ ID NO: 1794926 - DNA, 15 bp, Homo sapiens
tatatgccagatgac

SEQ ID NO: 1794927 - DNA, 15 bp, Homo sapiens
atatgccagatgacc

SEQ ID NO: 1794928 - DNA, 15 bp, Homo sapiens
tatgccagatgacca

SEQ ID NO: 1794929 - DNA, 15 bp, Homo sapiens
atgccagatgaccaa

SEQ ID NO: 1794930 - DNA, 15 bp, Homo sapiens
tgccagatgaccaaa

SEQ ID NO: 1794931 - DNA, 15 bp, Homo sapiens
gccagatgaccaaat

SEQ ID NO: 1794932 - DNA, 15 bp, Homo sapiens
ccagatgaccaaata

SEQ ID NO: 1794933 - DNA, 15 bp, Homo sapiens
cagatgaccaaatat

SEQ ID NO: 1794934 - DNA, 15 bp, Homo sapiens
agatgaccaaatatt

SEQ ID NO: 1794935 - DNA, 15 bp, Homo sapiens
gatgaccaaatatta

SEQ ID NO: 1794936 - DNA, 15 bp, Homo sapiens
atgaccaaatattaa

SEQ ID NO: 1794937 - DNA, 15 bp, Homo sapiens
tgaccaaatattaaa

SEQ ID NO: 1794938 - DNA, 15 bp, Homo sapiens
gaccaaatattaaaa

SEQ ID NO: 1794939 - DNA, 15 bp, Homo sapiens
accaaatattaaaat

SEQ ID NO: 1794940 - DNA, 15 bp, Homo sapiens
ccaaatattaaaatg

SEQ ID NO: 1794941 - DNA, 15 bp, Homo sapiens
aaatattaaaatgtg

SEQ ID NO: 1794942 - DNA, 15 bp, Homo sapiens
aatattaaaatgtgt

SEQ ID NO: 1794943 - DNA, 15 bp, Homo sapiens
atattaaaatgtgtg

SEQ ID NO: 1794944 - DNA, 15 bp, Homo sapiens
attaaaatgtgtgtt

SEQ ID NO: 1794945 - DNA, 15 bp, Homo sapiens
ttaaaatgtgtgtta

SEQ ID NO: 1794946 - DNA, 15 bp, Homo sapiens
taaaatgtgtgttac

SEQ ID NO: 1794947 - DNA, 15 bp, Homo sapiens
aaaatgtgtgttaca

SEQ ID NO: 1794948 - DNA, 15 bp, Homo sapiens
aaatgtgtgttacaa

SEQ ID NO: 1794949 - DNA, 15 bp, Homo sapiens
aatgtgtgttacaaa

SEQ ID NO: 1794950 - DNA, 15 bp, Homo sapiens
atgtgtgttacaaat

SEQ ID NO: 1794951 - DNA, 15 bp, Homo sapiens
tgtgtgttacaaata

SEQ ID NO: 1794952 - DNA, 15 bp, Homo sapiens
gtgtgttacaaatag

SEQ ID NO: 1794953 - DNA, 15 bp, Homo sapiens
tgtgttacaaatagt

SEQ ID NO: 1794954 - DNA, 15 bp, Homo sapiens
gtgttacaaatagtt

SEQ ID NO: 1794955 - DNA, 15 bp, Homo sapiens
tgttacaaatagttc

SEQ ID NO: 1794956 - DNA, 15 bp, Homo sapiens
gttacaaatagttca

SEQ ID NO: 1794957 - DNA, 15 bp, Homo sapiens
ttacaaatagttcac

SEQ ID NO: 1794958 - DNA, 15 bp, Homo sapiens
tacaaatagttcacg

SEQ ID NO: 1794959 - DNA, 15 bp, Homo sapiens
acaaatagttcacga

SEQ ID NO: 1794960 - DNA, 15 bp, Homo sapiens
caaatagttcacgat

SEQ ID NO: 1794961 - DNA, 15 bp, Homo sapiens
aaatagttcacgatg

SEQ ID NO: 1794962 - DNA, 15 bp, Homo sapiens
aatagttcacgatgg

SEQ ID NO: 1794963 - DNA, 15 bp, Homo sapiens
atagttcacgatggg

SEQ ID NO: 1794964 - DNA, 15 bp, Homo sapiens
tagttcacgatgggc

SEQ ID NO: 1794965 - DNA, 15 bp, Homo sapiens
agttcacgatgggct

SEQ ID NO: 1794966 - DNA, 15 bp, Homo sapiens
gttcacgatgggctc

SEQ ID NO: 1794967 - DNA, 15 bp, Homo sapiens
ttcacgatgggctca

SEQ ID NO: 1794968 - DNA, 15 bp, Homo sapiens
tcacgatgggctcag

SEQ ID NO: 1794969 - DNA, 15 bp, Homo sapiens
cacgatgggctcagc

SEQ ID NO: 1794970 - DNA, 15 bp, Homo sapiens
acgatgggctcagct

SEQ ID NO: 1794971 - DNA, 15 bp, Homo sapiens
cgatgggctcagctg

SEQ ID NO: 1794972 - DNA, 15 bp, Homo sapiens
gatgggctcagctgt

SEQ ID NO: 1794973 - DNA, 15 bp, Homo sapiens
atgggctcagctgtc

SEQ ID NO: 1794974 - DNA, 15 bp, Homo sapiens
tgggctcagctgtca

SEQ ID NO: 1794975 - DNA, 15 bp, Homo sapiens
gggctcagctgtcag

SEQ ID NO: 1794976 - DNA, 15 bp, Homo sapiens
ggctcagctgtcaga

SEQ ID NO: 1794977 - DNA, 15 bp, Homo sapiens
gctcagctgtcagac

SEQ ID NO: 1794978 - DNA, 15 bp, Homo sapiens
ctcagctgtcagact

SEQ ID NO: 1794979 - DNA, 15 bp, Homo sapiens
tcagctgtcagactt

SEQ ID NO: 1794980 - DNA, 15 bp, Homo sapiens
cagctgtcagacttt

SEQ ID NO: 1794981 - DNA, 15 bp, Homo sapiens
agctgtcagacttta

SEQ ID NO: 1794982 - DNA, 15 bp, Homo sapiens
gctgtcagactttac

SEQ ID NO: 1794983 - DNA, 15 bp, Homo sapiens
ctgtcagactttaca

SEQ ID NO: 1794984 - DNA, 15 bp, Homo sapiens
tgtcagactttacaa

SEQ ID NO: 1794985 - DNA, 15 bp, Homo sapiens
gtcagactttacaaa

SEQ ID NO: 1794986 - DNA, 15 bp, Homo sapiens
tcagactttacaaag

SEQ ID NO: 1794987 - DNA, 15 bp, Homo sapiens
cagactttacaaagg

SEQ ID NO: 1794988 - DNA, 15 bp, Homo sapiens
agactttacaaagga

SEQ ID NO: 1794989 - DNA, 15 bp, Homo sapiens
gactttacaaaggag

SEQ ID NO: 1794990 - DNA, 15 bp, Homo sapiens
actttacaaaggagc

SEQ ID NO: 1794991 - DNA, 15 bp, Homo sapiens
ctttacaaaggagct

SEQ ID NO: 1794992 - DNA, 15 bp, Homo sapiens
tttacaaaggagcta

SEQ ID NO: 1794993 - DNA, 15 bp, Homo sapiens
ttacaaaggagctat

SEQ ID NO: 1794994 - DNA, 15 bp, Homo sapiens
tacaaaggagctatg

SEQ ID NO: 1794995 - DNA, 15 bp, Homo sapiens
acaaaggagctatgg

SEQ ID NO: 1794996 - DNA, 15 bp, Homo sapiens
caaaggagctatggg

SEQ ID NO: 1794997 - DNA, 15 bp, Homo sapiens
aaaggagctatggga

SEQ ID NO: 1794998 - DNA, 15 bp, Homo sapiens
aaggagctatgggac

SEQ ID NO: 1794999 - DNA, 15 bp, Homo sapiens
aggagctatgggacc

SEQ ID NO: 1795000 - DNA, 15 bp, Homo sapiens
ggagctatgggacct

SEQ ID NO: 1795001 - DNA, 15 bp, Homo sapiens
gagctatgggacctt

SEQ ID NO: 1795002 - DNA, 15 bp, Homo sapiens
agctatgggacctta

SEQ ID NO: 1795003 - DNA, 15 bp, Homo sapiens
gctatgggaccttat

SEQ ID NO: 1795004 - DNA, 15 bp, Homo sapiens
ctatgggaccttata

SEQ ID NO: 1795005 - DNA, 15 bp, Homo sapiens
tatgggaccttataa

SEQ ID NO: 1795006 - DNA, 15 bp, Homo sapiens
atgggaccttataag

SEQ ID NO: 1795007 - DNA, 15 bp, Homo sapiens
tgggaccttataagg

SEQ ID NO: 1795008 - DNA, 15 bp, Homo sapiens
gggaccttataagga

SEQ ID NO: 1795009 - DNA, 15 bp, Homo sapiens
ggaccttataaggac

SEQ ID NO: 1795010 - DNA, 15 bp, Homo sapiens
gaccttataaggaca

SEQ ID NO: 1795011 - DNA, 15 bp, Homo sapiens
accttataaggacag

SEQ ID NO: 1795012 - DNA, 15 bp, Homo sapiens
ccttataaggacagt

SEQ ID NO: 1795013 - DNA, 15 bp, Homo sapiens
cttataaggacagtt

SEQ ID NO: 1795014 - DNA, 15 bp, Homo sapiens
ttataaggacagttg

SEQ ID NO: 1795015 - DNA, 15 bp, Homo sapiens
tataaggacagttgg

SEQ ID NO: 1795016 - DNA, 15 bp, Homo sapiens
ataaggacagttgga

SEQ ID NO: 1795017 - DNA, 15 bp, Homo sapiens
taaggacagttggaa

SEQ ID NO: 1795018 - DNA, 15 bp, Homo sapiens
aaggacagttggaac

SEQ ID NO: 1795019 - DNA, 15 bp, Homo sapiens
aggacagttggaact

SEQ ID NO: 1795020 - DNA, 15 bp, Homo sapiens
ggacagttggaactg

SEQ ID NO: 1795021 - DNA, 15 bp, Homo sapiens
gacagttggaactgg

SEQ ID NO: 1795022 - DNA, 15 bp, Homo sapiens
acagttggaactggc

SEQ ID NO: 1795023 - DNA, 15 bp, Homo sapiens
cagttggaactggct

SEQ ID NO: 1795024 - DNA, 15 bp, Homo sapiens
agttggaactggcta

SEQ ID NO: 1795025 - DNA, 15 bp, Homo sapiens
gttggaactggctag

SEQ ID NO: 1795026 - DNA, 15 bp, Homo sapiens
ttggaactggctagg

SEQ ID NO: 1795027 - DNA, 15 bp, Homo sapiens
tggaactggctaggt

SEQ ID NO: 1795028 - DNA, 15 bp, Homo sapiens
ggaactggctaggta

SEQ ID NO: 1795029 - DNA, 15 bp, Homo sapiens
gaactggctaggtat

SEQ ID NO: 1795030 - DNA, 15 bp, Homo sapiens
aactggctaggtatc

SEQ ID NO: 1795031 - DNA, 15 bp, Homo sapiens
actggctaggtatca

SEQ ID NO: 1795032 - DNA, 15 bp, Homo sapiens
ctggctaggtatcac

SEQ ID NO: 1795033 - DNA, 15 bp, Homo sapiens
tggctaggtatcaca

SEQ ID NO: 1795034 - DNA, 15 bp, Homo sapiens
ggctaggtatcacat

SEQ ID NO: 1795035 - DNA, 15 bp, Homo sapiens
gctaggtatcacata

SEQ ID NO: 1795036 - DNA, 15 bp, Homo sapiens
ctaggtatcacatag

SEQ ID NO: 1795037 - DNA, 15 bp, Homo sapiens
taggtatcacatagt

SEQ ID NO: 1795038 - DNA, 15 bp, Homo sapiens
aggtatcacatagtg

SEQ ID NO: 1795039 - DNA, 15 bp, Homo sapiens
ggtatcacatagtgg

SEQ ID NO: 1795040 - DNA, 15 bp, Homo sapiens
gtatcacatagtggt

SEQ ID NO: 1795041 - DNA, 15 bp, Homo sapiens
tatcacatagtggtc

SEQ ID NO: 1795042 - DNA, 15 bp, Homo sapiens
atcacatagtggtct

SEQ ID NO: 1795043 - DNA, 15 bp, Homo sapiens
tcacatagtggtctt

SEQ ID NO: 1795044 - DNA, 15 bp, Homo sapiens
cacatagtggtcttc

SEQ ID NO: 1795045 - DNA, 15 bp, Homo sapiens
acatagtggtcttca

SEQ ID NO: 1795046 - DNA, 15 bp, Homo sapiens
catagtggtcttcaa

SEQ ID NO: 1795047 - DNA, 15 bp, Homo sapiens
atagtggtcttcaaa

SEQ ID NO: 1795048 - DNA, 15 bp, Homo sapiens
tagtggtcttcaaac

SEQ ID NO: 1795049 - DNA, 15 bp, Homo sapiens
agtggtcttcaaaca

SEQ ID NO: 1795050 - DNA, 15 bp, Homo sapiens
gtggtcttcaaacat

SEQ ID NO: 1795051 - DNA, 15 bp, Homo sapiens
tggtcttcaaacatt

SEQ ID NO: 1795052 - DNA, 15 bp, Homo sapiens
ggtcttcaaacattt

SEQ ID NO: 1795053 - DNA, 15 bp, Homo sapiens
gtcttcaaacatttt

SEQ ID NO: 1795054 - DNA, 15 bp, Homo sapiens
tcttcaaacattttt

SEQ ID NO: 1795055 - DNA, 15 bp, Homo sapiens
cttcaaacatttttg

SEQ ID NO: 1795056 - DNA, 15 bp, Homo sapiens
ttcaaacatttttgc

SEQ ID NO: 1795057 - DNA, 15 bp, Homo sapiens
tcaaacatttttgct

SEQ ID NO: 1795058 - DNA, 15 bp, Homo sapiens
caaacatttttgctt

SEQ ID NO: 1795059 - DNA, 15 bp, Homo sapiens
aaacatttttgcttg

SEQ ID NO: 1795060 - DNA, 15 bp, Homo sapiens
aacatttttgcttgc

SEQ ID NO: 1795061 - DNA, 15 bp, Homo sapiens
acatttttgcttgcc

SEQ ID NO: 1795062 - DNA, 15 bp, Homo sapiens
catttttgcttgcca

SEQ ID NO: 1795063 - DNA, 15 bp, Homo sapiens
atttttgcttgccat

SEQ ID NO: 1795064 - DNA, 15 bp, Homo sapiens
tttttgcttgccata

SEQ ID NO: 1795065 - DNA, 15 bp, Homo sapiens
ttttgcttgccataa

SEQ ID NO: 1795066 - DNA, 15 bp, Homo sapiens
tttgcttgccataac

SEQ ID NO: 1795067 - DNA, 15 bp, Homo sapiens
ttgcttgccataacc

SEQ ID NO: 1795068 - DNA, 15 bp, Homo sapiens
tgcttgccataacct

SEQ ID NO: 1795069 - DNA, 15 bp, Homo sapiens
gcttgccataacctc

SEQ ID NO: 1795070 - DNA, 15 bp, Homo sapiens
cttgccataacctct

SEQ ID NO: 1795071 - DNA, 15 bp, Homo sapiens
ttgccataacctcta

SEQ ID NO: 1795072 - DNA, 15 bp, Homo sapiens
tgccataacctctaa

SEQ ID NO: 1795073 - DNA, 15 bp, Homo sapiens
gccataacctctaaa

SEQ ID NO: 1795074 - DNA, 15 bp, Homo sapiens
ccataacctctaaaa

SEQ ID NO: 1795075 - DNA, 15 bp, Homo sapiens
cataacctctaaaat

SEQ ID NO: 1795076 - DNA, 15 bp, Homo sapiens
ataacctctaaaata

SEQ ID NO: 1795077 - DNA, 15 bp, Homo sapiens
taacctctaaaataa

SEQ ID NO: 1795078 - DNA, 15 bp, Homo sapiens
aacctctaaaataat

SEQ ID NO: 1795079 - DNA, 15 bp, Homo sapiens
acctctaaaataatt

SEQ ID NO: 1795080 - DNA, 15 bp, Homo sapiens
cctctaaaataattg

SEQ ID NO: 1795081 - DNA, 15 bp, Homo sapiens
ctctaaaataattgg

SEQ ID NO: 1795082 - DNA, 15 bp, Homo sapiens
tctaaaataattggg

SEQ ID NO: 1795083 - DNA, 15 bp, Homo sapiens
ctaaaataattggga

SEQ ID NO: 1795084 - DNA, 15 bp, Homo sapiens
taaaataattgggaa

SEQ ID NO: 1795085 - DNA, 15 bp, Homo sapiens
aaaataattgggaaa

SEQ ID NO: 1795086 - DNA, 15 bp, Homo sapiens
aaataattgggaaaa

SEQ ID NO: 1795087 - DNA, 15 bp, Homo sapiens
aataattgggaaaaa

SEQ ID NO: 1795088 - DNA, 15 bp, Homo sapiens
ataattgggaaaaag

SEQ ID NO: 1795089 - DNA, 15 bp, Homo sapiens
taattgggaaaaagt

SEQ ID NO: 1795090 - DNA, 15 bp, Homo sapiens
aattgggaaaaagtt

SEQ ID NO: 1795091 - DNA, 15 bp, Homo sapiens
attgggaaaaagttg

SEQ ID NO: 1795092 - DNA, 15 bp, Homo sapiens
ttgggaaaaagttga

SEQ ID NO: 1795093 - DNA, 15 bp, Homo sapiens
tgggaaaaagttgaa

SEQ ID NO: 1795094 - DNA, 15 bp, Homo sapiens
gggaaaaagttgaat

SEQ ID NO: 1795095 - DNA, 15 bp, Homo sapiens
ggaaaaagttgaatg

SEQ ID NO: 1795096 - DNA, 15 bp, Homo sapiens
gaaaaagttgaatgt

SEQ ID NO: 1795097 - DNA, 15 bp, Homo sapiens
aaaaagttgaatgta

SEQ ID NO: 1795098 - DNA, 15 bp, Homo sapiens
aaaagttgaatgtac

SEQ ID NO: 1795099 - DNA, 15 bp, Homo sapiens
aaagttgaatgtact

SEQ ID NO: 1795100 - DNA, 15 bp, Homo sapiens
aagttgaatgtactt

SEQ ID NO: 1795101 - DNA, 15 bp, Homo sapiens
agttgaatgtacttc

SEQ ID NO: 1795102 - DNA, 15 bp, Homo sapiens
gttgaatgtacttcc

SEQ ID NO: 1795103 - DNA, 15 bp, Homo sapiens
ttgaatgtacttcca

SEQ ID NO: 1795104 - DNA, 15 bp, Homo sapiens
tgaatgtacttccat

SEQ ID NO: 1795105 - DNA, 15 bp, Homo sapiens
gaatgtacttccata

SEQ ID NO: 1795106 - DNA, 15 bp, Homo sapiens
aatgtacttccatat

SEQ ID NO: 1795107 - DNA, 15 bp, Homo sapiens
atgtacttccatatc

SEQ ID NO: 1795108 - DNA, 15 bp, Homo sapiens
tgtacttccatatct

SEQ ID NO: 1795109 - DNA, 15 bp, Homo sapiens
gtacttccatatctt

SEQ ID NO: 1795110 - DNA, 15 bp, Homo sapiens
tacttccatatctta

SEQ ID NO: 1795111 - DNA, 15 bp, Homo sapiens
acttccatatcttaa

SEQ ID NO: 1795112 - DNA, 15 bp, Homo sapiens
cttccatatcttaaa

SEQ ID NO: 1795113 - DNA, 15 bp, Homo sapiens
ttccatatcttaaag

SEQ ID NO: 1795114 - DNA, 15 bp, Homo sapiens
tccatatcttaaagc

SEQ ID NO: 1795115 - DNA, 15 bp, Homo sapiens
ccatatcttaaagct

SEQ ID NO: 1795116 - DNA, 15 bp, Homo sapiens
catatcttaaagctg

SEQ ID NO: 1795117 - DNA, 15 bp, Homo sapiens
atatcttaaagctga

SEQ ID NO: 1795118 - DNA, 15 bp, Homo sapiens
tatcttaaagctgat

SEQ ID NO: 1795119 - DNA, 15 bp, Homo sapiens
atcttaaagctgata

SEQ ID NO: 1795120 - DNA, 15 bp, Homo sapiens
tcttaaagctgataa

SEQ ID NO: 1795121 - DNA, 15 bp, Homo sapiens
cttaaagctgataat

SEQ ID NO: 1795122 - DNA, 15 bp, Homo sapiens
ttaaagctgataatt

SEQ ID NO: 1795123 - DNA, 15 bp, Homo sapiens
taaagctgataattt

SEQ ID NO: 1795124 - DNA, 15 bp, Homo sapiens
aaagctgataattta

SEQ ID NO: 1795125 - DNA, 15 bp, Homo sapiens
aagctgataatttaa

SEQ ID NO: 1795126 - DNA, 15 bp, Homo sapiens
agctgataatttaaa

SEQ ID NO: 1795127 - DNA, 15 bp, Homo sapiens
gctgataatttaaaa

SEQ ID NO: 1795128 - DNA, 15 bp, Homo sapiens
ctgataatttaaaat

SEQ ID NO: 1795129 - DNA, 15 bp, Homo sapiens
tgataatttaaaata

SEQ ID NO: 1795130 - DNA, 15 bp, Homo sapiens
gataatttaaaatat

SEQ ID NO: 1795131 - DNA, 15 bp, Homo sapiens
ataatttaaaatatt

SEQ ID NO: 1795132 - DNA, 15 bp, Homo sapiens
taatttaaaatatta

SEQ ID NO: 1795133 - DNA, 15 bp, Homo sapiens
aatttaaaatattat

SEQ ID NO: 1795134 - DNA, 15 bp, Homo sapiens
atttaaaatattata

SEQ ID NO: 1795135 - DNA, 15 bp, Homo sapiens
tttaaaatattatac

SEQ ID NO: 1795136 - DNA, 15 bp, Homo sapiens
ttaaaatattataca

SEQ ID NO: 1795137 - DNA, 15 bp, Homo sapiens
taaaatattatacat

SEQ ID NO: 1795138 - DNA, 15 bp, Homo sapiens
aaaatattatacatt

SEQ ID NO: 1795139 - DNA, 15 bp, Homo sapiens
aaatattatacattt

SEQ ID NO: 1795140 - DNA, 15 bp, Homo sapiens
aatattatacattta

SEQ ID NO: 1795141 - DNA, 15 bp, Homo sapiens
atattatacatttaa

SEQ ID NO: 1795142 - DNA, 15 bp, Homo sapiens
tattatacatttaat

SEQ ID NO: 1795143 - DNA, 15 bp, Homo sapiens
attatacatttaata

SEQ ID NO: 1795144 - DNA, 15 bp, Homo sapiens
ttatacatttaatag

SEQ ID NO: 1795145 - DNA, 15 bp, Homo sapiens
tatacatttaatagc

SEQ ID NO: 1795146 - DNA, 15 bp, Homo sapiens
atacatttaatagca

SEQ ID NO: 1795147 - DNA, 15 bp, Homo sapiens
tacatttaatagcag

SEQ ID NO: 1795148 - DNA, 15 bp, Homo sapiens
acatttaatagcagc

SEQ ID NO: 1795149 - DNA, 15 bp, Homo sapiens
catttaatagcagca

SEQ ID NO: 1795150 - DNA, 15 bp, Homo sapiens
atttaatagcagcac

SEQ ID NO: 1795151 - DNA, 15 bp, Homo sapiens
tttaatagcagcacg

SEQ ID NO: 1795152 - DNA, 15 bp, Homo sapiens
ttaatagcagcacgg

SEQ ID NO: 1795153 - DNA, 15 bp, Homo sapiens
taatagcagcacggg

SEQ ID NO: 1795154 - DNA, 15 bp, Homo sapiens
aatagcagcacggga

SEQ ID NO: 1795155 - DNA, 15 bp, Homo sapiens
atagcagcacgggat

SEQ ID NO: 1795156 - DNA, 15 bp, Homo sapiens
tagcagcacgggatt

SEQ ID NO: 1795157 - DNA, 15 bp, Homo sapiens
agcagcacgggattt

SEQ ID NO: 1795158 - DNA, 15 bp, Homo sapiens
gcagcacgggattta

SEQ ID NO: 1795159 - DNA, 15 bp, Homo sapiens
cagcacgggatttag

SEQ ID NO: 1795160 - DNA, 15 bp, Homo sapiens
agcacgggatttagt

SEQ ID NO: 1795161 - DNA, 15 bp, Homo sapiens
gcacgggatttagtt

SEQ ID NO: 1795162 - DNA, 15 bp, Homo sapiens
cacgggatttagttt

SEQ ID NO: 1795163 - DNA, 15 bp, Homo sapiens
acgggatttagtttt

SEQ ID NO: 1795164 - DNA, 15 bp, Homo sapiens
cgggatttagttttt

SEQ ID NO: 1795165 - DNA, 15 bp, Homo sapiens
gggatttagtttttg

SEQ ID NO: 1795166 - DNA, 15 bp, Homo sapiens
ggatttagtttttgt

SEQ ID NO: 1795167 - DNA, 15 bp, Homo sapiens
gatttagtttttgtt

SEQ ID NO: 1795168 - DNA, 15 bp, Homo sapiens
atttagtttttgtta

SEQ ID NO: 1795169 - DNA, 15 bp, Homo sapiens
tttagtttttgttaa

SEQ ID NO: 1795170 - DNA, 15 bp, Homo sapiens
ttagtttttgttaaa

SEQ ID NO: 1795171 - DNA, 15 bp, Homo sapiens
tagtttttgttaaat

SEQ ID NO: 1795172 - DNA, 15 bp, Homo sapiens
agtttttgttaaatt

SEQ ID NO: 1795173 - DNA, 15 bp, Homo sapiens
gtttttgttaaattg

SEQ ID NO: 1795174 - DNA, 15 bp, Homo sapiens
tttttgttaaattgt

SEQ ID NO: 1795175 - DNA, 15 bp, Homo sapiens
ttttgttaaattgta

SEQ ID NO: 1795176 - DNA, 15 bp, Homo sapiens
tttgttaaattgtat

SEQ ID NO: 1795177 - DNA, 15 bp, Homo sapiens
ttgttaaattgtata

SEQ ID NO: 1795178 - DNA, 15 bp, Homo sapiens
tgttaaattgtatat

SEQ ID NO: 1795179 - DNA, 15 bp, Homo sapiens
gttaaattgtatatg

SEQ ID NO: 1795180 - DNA, 15 bp, Homo sapiens
ttaaattgtatatgt

SEQ ID NO: 1795181 - DNA, 15 bp, Homo sapiens
taaattgtatatgtg

SEQ ID NO: 1795182 - DNA, 15 bp, Homo sapiens
aaattgtatatgtgc

SEQ ID NO: 1795183 - DNA, 15 bp, Homo sapiens
aattgtatatgtgct

SEQ ID NO: 1795184 - DNA, 15 bp, Homo sapiens
attgtatatgtgctc

SEQ ID NO: 1795185 - DNA, 15 bp, Homo sapiens
ttgtatatgtgctcc

SEQ ID NO: 1795186 - DNA, 15 bp, Homo sapiens
tgtatatgtgctcca

SEQ ID NO: 1795187 - DNA, 15 bp, Homo sapiens
gtatatgtgctccaa

SEQ ID NO: 1795188 - DNA, 15 bp, Homo sapiens
tatatgtgctccaaa

SEQ ID NO: 1795189 - DNA, 15 bp, Homo sapiens
atatgtgctccaaat

SEQ ID NO: 1795190 - DNA, 15 bp, Homo sapiens
tatgtgctccaaata

SEQ ID NO: 1795191 - DNA, 15 bp, Homo sapiens
atgtgctccaaatag

SEQ ID NO: 1795192 - DNA, 15 bp, Homo sapiens
tgtgctccaaataga

SEQ ID NO: 1795193 - DNA, 15 bp, Homo sapiens
gtgctccaaatagat

SEQ ID NO: 1795194 - DNA, 15 bp, Homo sapiens
tgctccaaatagatt

SEQ ID NO: 1795195 - DNA, 15 bp, Homo sapiens
gctccaaatagattt

SEQ ID NO: 1795196 - DNA, 15 bp, Homo sapiens
ctccaaatagattta

SEQ ID NO: 1795197 - DNA, 15 bp, Homo sapiens
tccaaatagatttac

SEQ ID NO: 1795198 - DNA, 15 bp, Homo sapiens
ccaaatagatttacc

SEQ ID NO: 1795199 - DNA, 15 bp, Homo sapiens
caaatagatttacca

SEQ ID NO: 1795200 - DNA, 15 bp, Homo sapiens
aaatagatttaccat

SEQ ID NO: 1795201 - DNA, 15 bp, Homo sapiens
aatagatttaccatc

SEQ ID NO: 1795202 - DNA, 15 bp, Homo sapiens
atagatttaccatca

SEQ ID NO: 1795203 - DNA, 15 bp, Homo sapiens
tagatttaccatcaa

SEQ ID NO: 1795204 - DNA, 15 bp, Homo sapiens
agatttaccatcaaa

SEQ ID NO: 1795205 - DNA, 15 bp, Homo sapiens
gatttaccatcaaaa

SEQ ID NO: 1795206 - DNA, 15 bp, Homo sapiens
atttaccatcaaaac

SEQ ID NO: 1795207 - DNA, 15 bp, Homo sapiens
tttaccatcaaaacc

SEQ ID NO: 1795208 - DNA, 15 bp, Homo sapiens
ttaccatcaaaacct

SEQ ID NO: 1795209 - DNA, 15 bp, Homo sapiens
taccatcaaaacctg

SEQ ID NO: 1795210 - DNA, 15 bp, Homo sapiens
accatcaaaacctgt

SEQ ID NO: 1795211 - DNA, 15 bp, Homo sapiens
ccatcaaaacctgtt

SEQ ID NO: 1795212 - DNA, 15 bp, Homo sapiens
catcaaaacctgttt

SEQ ID NO: 1795213 - DNA, 15 bp, Homo sapiens
atcaaaacctgtttt

SEQ ID NO: 1795214 - DNA, 15 bp, Homo sapiens
tcaaaacctgttttg

SEQ ID NO: 1795215 - DNA, 15 bp, Homo sapiens
caaaacctgttttga

SEQ ID NO: 1795216 - DNA, 15 bp, Homo sapiens
aaaacctgttttgaa

SEQ ID NO: 1795217 - DNA, 15 bp, Homo sapiens
aaacctgttttgaat

SEQ ID NO: 1795218 - DNA, 15 bp, Homo sapiens
aacctgttttgaatt

SEQ ID NO: 1795219 - DNA, 15 bp, Homo sapiens
acctgttttgaattt

SEQ ID NO: 1795220 - DNA, 15 bp, Homo sapiens
cctgttttgaattta

SEQ ID NO: 1795221 - DNA, 15 bp, Homo sapiens
ctgttttgaatttaa

SEQ ID NO: 1795222 - DNA, 15 bp, Homo sapiens
tgttttgaatttaat

SEQ ID NO: 1795223 - DNA, 15 bp, Homo sapiens
gttttgaatttaata

SEQ ID NO: 1795224 - DNA, 15 bp, Homo sapiens
ttttgaatttaatat

SEQ ID NO: 1795225 - DNA, 15 bp, Homo sapiens
tttgaatttaatatt

SEQ ID NO: 1795226 - DNA, 15 bp, Homo sapiens
ttgaatttaatattg

SEQ ID NO: 1795227 - DNA, 15 bp, Homo sapiens
tgaatttaatattgg

SEQ ID NO: 1795228 - DNA, 15 bp, Homo sapiens
gaatttaatattggg

SEQ ID NO: 1795229 - DNA, 15 bp, Homo sapiens
aatttaatattggga

SEQ ID NO: 1795230 - DNA, 15 bp, Homo sapiens
atttaatattgggag

SEQ ID NO: 1795231 - DNA, 15 bp, Homo sapiens
tttaatattgggaga

SEQ ID NO: 1795232 - DNA, 15 bp, Homo sapiens
ttaatattgggagaa

SEQ ID NO: 1795233 - DNA, 15 bp, Homo sapiens
taatattgggagaat

SEQ ID NO: 1795234 - DNA, 15 bp, Homo sapiens
aatattgggagaatt

SEQ ID NO: 1795235 - DNA, 15 bp, Homo sapiens
atattgggagaattc

SEQ ID NO: 1795236 - DNA, 15 bp, Homo sapiens
tattgggagaattcg

SEQ ID NO: 1795237 - DNA, 15 bp, Homo sapiens
attgggagaattcgc

SEQ ID NO: 1795238 - DNA, 15 bp, Homo sapiens
ttgggagaattcgct

SEQ ID NO: 1795239 - DNA, 15 bp, Homo sapiens
tgggagaattcgcta

SEQ ID NO: 1795240 - DNA, 15 bp, Homo sapiens
gggagaattcgctag

SEQ ID NO: 1795241 - DNA, 15 bp, Homo sapiens
ggagaattcgctagt

SEQ ID NO: 1795242 - DNA, 15 bp, Homo sapiens
gagaattcgctagtt

SEQ ID NO: 1795243 - DNA, 15 bp, Homo sapiens
agaattcgctagttt

SEQ ID NO: 1795244 - DNA, 15 bp, Homo sapiens
gaattcgctagttta

SEQ ID NO: 1795245 - DNA, 15 bp, Homo sapiens
aattcgctagtttaa

SEQ ID NO: 1795246 - DNA, 15 bp, Homo sapiens
attcgctagtttaat

SEQ ID NO: 1795247 - DNA, 15 bp, Homo sapiens
ttcgctagtttaatt

SEQ ID NO: 1795248 - DNA, 15 bp, Homo sapiens
tcgctagtttaattt

SEQ ID NO: 1795249 - DNA, 15 bp, Homo sapiens
cgctagtttaatttt

SEQ ID NO: 1795250 - DNA, 15 bp, Homo sapiens
gctagtttaattttt

SEQ ID NO: 1795251 - DNA, 15 bp, Homo sapiens
ctagtttaatttttg

SEQ ID NO: 1795252 - DNA, 15 bp, Homo sapiens
tagtttaatttttgg

SEQ ID NO: 1795253 - DNA, 15 bp, Homo sapiens
agtttaatttttgga

SEQ ID NO: 1795254 - DNA, 15 bp, Homo sapiens
gtttaatttttggaa

SEQ ID NO: 1795255 - DNA, 15 bp, Homo sapiens
tttaatttttggaaa

SEQ ID NO: 1795256 - DNA, 15 bp, Homo sapiens
ttaatttttggaaaa

SEQ ID NO: 1795257 - DNA, 15 bp, Homo sapiens
taatttttggaaaat

SEQ ID NO: 1795258 - DNA, 15 bp, Homo sapiens
aatttttggaaaata

SEQ ID NO: 1795259 - DNA, 15 bp, Homo sapiens
ttttggaaaataaag

SEQ ID NO: 1795260 - DNA, 15 bp, Homo sapiens
tttggaaaataaagt

SEQ ID NO: 1795261 - DNA, 15 bp, Homo sapiens
ttggaaaataaagta

SEQ ID NO: 1795262 - DNA, 15 bp, Homo sapiens
tggaaaataaagtat

SEQ ID NO: 1795263 - DNA, 15 bp, Homo sapiens
ggaaaataaagtata

SEQ ID NO: 1795264 - DNA, 15 bp, Homo sapiens
gaaaataaagtataa

SEQ ID NO: 1795265 - DNA, 15 bp, Homo sapiens
aaaataaagtataat

SEQ ID NO: 1795266 - DNA, 15 bp, Homo sapiens
aaataaagtataatt

SEQ ID NO: 1795267 - DNA, 15 bp, Homo sapiens
aataaagtataattg

SEQ ID NO: 1795268 - DNA, 15 bp, Homo sapiens
ataaagtataattgg

SEQ ID NO: 1795269 - DNA, 15 bp, Homo sapiens
taaagtataattggc

SEQ ID NO: 1795270 - DNA, 15 bp, Homo sapiens
aaagtataattggca

SEQ ID NO: 1795271 - DNA, 15 bp, Homo sapiens
aagtataattggcaa

SEQ ID NO: 1795272 - DNA, 15 bp, Homo sapiens
agtataattggcaaa

SEQ ID NO: 1795273 - DNA, 15 bp, Homo sapiens
gtataattggcaaag

SEQ ID NO: 1795274 - DNA, 15 bp, Homo sapiens
tataattggcaaagc

SEQ ID NO: 1795275 - DNA, 15 bp, Homo sapiens
ataattggcaaagct

SEQ ID NO: 1795276 - DNA, 15 bp, Homo sapiens
taattggcaaagcta

SEQ ID NO: 1795277 - DNA, 15 bp, Homo sapiens
aattggcaaagctaa

SEQ ID NO: 1795278 - DNA, 15 bp, Homo sapiens
attggcaaagctaat

SEQ ID NO: 1795279 - DNA, 15 bp, Homo sapiens
ttggcaaagctaatc

SEQ ID NO: 1795280 - DNA, 15 bp, Homo sapiens
tggcaaagctaatcc

SEQ ID NO: 1795281 - DNA, 15 bp, Homo sapiens
ggcaaagctaatcct

SEQ ID NO: 1795282 - DNA, 15 bp, Homo sapiens
gcaaagctaatcctc

SEQ ID NO: 1795283 - DNA, 15 bp, Homo sapiens
caaagctaatcctca

SEQ ID NO: 1795284 - DNA, 15 bp, Homo sapiens
aaagctaatcctcac

SEQ ID NO: 1795285 - DNA, 15 bp, Homo sapiens
aagctaatcctcact

SEQ ID NO: 1795286 - DNA, 15 bp, Homo sapiens
agctaatcctcactg

SEQ ID NO: 1795287 - DNA, 15 bp, Homo sapiens
gctaatcctcactgt

SEQ ID NO: 1795288 - DNA, 15 bp, Homo sapiens
ctaatcctcactgtt

SEQ ID NO: 1795289 - DNA, 15 bp, Homo sapiens
taatcctcactgttg

SEQ ID NO: 1795290 - DNA, 15 bp, Homo sapiens
aatcctcactgttga

SEQ ID NO: 1795291 - DNA, 15 bp, Homo sapiens
atcctcactgttgaa

SEQ ID NO: 1795292 - DNA, 15 bp, Homo sapiens
tcctcactgttgaat

SEQ ID NO: 1795293 - DNA, 15 bp, Homo sapiens
cctcactgttgaatc

SEQ ID NO: 1795294 - DNA, 15 bp, Homo sapiens
ctcactgttgaatct

SEQ ID NO: 1795295 - DNA, 15 bp, Homo sapiens
tcactgttgaatcta

SEQ ID NO: 1795296 - DNA, 15 bp, Homo sapiens
cactgttgaatctat

SEQ ID NO: 1795297 - DNA, 15 bp, Homo sapiens
actgttgaatctatc

SEQ ID NO: 1795298 - DNA, 15 bp, Homo sapiens
ctgttgaatctatcc

SEQ ID NO: 1795299 - DNA, 15 bp, Homo sapiens
tgttgaatctatccg

SEQ ID NO: 1795300 - DNA, 15 bp, Homo sapiens
gttgaatctatccgt

SEQ ID NO: 1795301 - DNA, 15 bp, Homo sapiens
ttgaatctatccgtc

SEQ ID NO: 1795302 - DNA, 15 bp, Homo sapiens
tgaatctatccgtca

SEQ ID NO: 1795303 - DNA, 15 bp, Homo sapiens
gaatctatccgtcaa

SEQ ID NO: 1795304 - DNA, 15 bp, Homo sapiens
aatctatccgtcaaa

SEQ ID NO: 1795305 - DNA, 15 bp, Homo sapiens
atctatccgtcaaat

SEQ ID NO: 1795306 - DNA, 15 bp, Homo sapiens
tctatccgtcaaatc

SEQ ID NO: 1795307 - DNA, 15 bp, Homo sapiens
ctatccgtcaaatca

SEQ ID NO: 1795308 - DNA, 15 bp, Homo sapiens
tatccgtcaaatcag

SEQ ID NO: 1795309 - DNA, 15 bp, Homo sapiens
atccgtcaaatcaga

SEQ ID NO: 1795310 - DNA, 15 bp, Homo sapiens
tccgtcaaatcagat

SEQ ID NO: 1795311 - DNA, 15 bp, Homo sapiens
ccgtcaaatcagata

SEQ ID NO: 1795312 - DNA, 15 bp, Homo sapiens
cgtcaaatcagatat

SEQ ID NO: 1795313 - DNA, 15 bp, Homo sapiens
gtcaaatcagatata

SEQ ID NO: 1795314 - DNA, 15 bp, Homo sapiens
tcaaatcagatataa

SEQ ID NO: 1795315 - DNA, 15 bp, Homo sapiens
caaatcagatataat

SEQ ID NO: 1795316 - DNA, 15 bp, Homo sapiens
aaatcagatataatt

SEQ ID NO: 1795317 - DNA, 15 bp, Homo sapiens
aatcagatataattt

SEQ ID NO: 1795318 - DNA, 15 bp, Homo sapiens
atcagatataatttc

SEQ ID NO: 1795319 - DNA, 15 bp, Homo sapiens
tcagatataatttct

SEQ ID NO: 1795320 - DNA, 15 bp, Homo sapiens
cagatataatttcta

SEQ ID NO: 1795321 - DNA, 15 bp, Homo sapiens
agatataatttctat

SEQ ID NO: 1795322 - DNA, 15 bp, Homo sapiens
gatataatttctatc

SEQ ID NO: 1795323 - DNA, 15 bp, Homo sapiens
atataatttctatca

SEQ ID NO: 1795324 - DNA, 15 bp, Homo sapiens
tataatttctatcag

SEQ ID NO: 1795325 - DNA, 15 bp, Homo sapiens
ataatttctatcaga

SEQ ID NO: 1795326 - DNA, 15 bp, Homo sapiens
taatttctatcagaa

SEQ ID NO: 1795327 - DNA, 15 bp, Homo sapiens
aatttctatcagaaa

SEQ ID NO: 1795328 - DNA, 15 bp, Homo sapiens
atttctatcagaaag

SEQ ID NO: 1795329 - DNA, 15 bp, Homo sapiens
tttctatcagaaagt

SEQ ID NO: 1795330 - DNA, 15 bp, Homo sapiens
ttctatcagaaagtc

SEQ ID NO: 1795331 - DNA, 15 bp, Homo sapiens
tctatcagaaagtct

SEQ ID NO: 1795332 - DNA, 15 bp, Homo sapiens
ctatcagaaagtcta

SEQ ID NO: 1795333 - DNA, 15 bp, Homo sapiens
tatcagaaagtctat

SEQ ID NO: 1795334 - DNA, 15 bp, Homo sapiens
atcagaaagtctata

SEQ ID NO: 1795335 - DNA, 15 bp, Homo sapiens
tcagaaagtctatat

SEQ ID NO: 1795336 - DNA, 15 bp, Homo sapiens
cagaaagtctatatg

SEQ ID NO: 1795337 - DNA, 15 bp, Homo sapiens
agaaagtctatatga

SEQ ID NO: 1795338 - DNA, 15 bp, Homo sapiens
gaaagtctatatgac

SEQ ID NO: 1795339 - DNA, 15 bp, Homo sapiens
aaagtctatatgact

SEQ ID NO: 1795340 - DNA, 15 bp, Homo sapiens
aagtctatatgactt

SEQ ID NO: 1795341 - DNA, 15 bp, Homo sapiens
agtctatatgacttg

SEQ ID NO: 1795342 - DNA, 15 bp, Homo sapiens
gtctatatgacttgt

SEQ ID NO: 1795343 - DNA, 15 bp, Homo sapiens
tctatatgacttgtc

SEQ ID NO: 1795344 - DNA, 15 bp, Homo sapiens
ctatatgacttgtca

SEQ ID NO: 1795345 - DNA, 15 bp, Homo sapiens
tatatgacttgtcaa

SEQ ID NO: 1795346 - DNA, 15 bp, Homo sapiens
atatgacttgtcaac

SEQ ID NO: 1795347 - DNA, 15 bp, Homo sapiens
tatgacttgtcaaca

SEQ ID NO: 1795348 - DNA, 15 bp, Homo sapiens
atgacttgtcaacat

SEQ ID NO: 1795349 - DNA, 15 bp, Homo sapiens
tgacttgtcaacata

SEQ ID NO: 1795350 - DNA, 15 bp, Homo sapiens
gacttgtcaacataa

SEQ ID NO: 1795351 - DNA, 15 bp, Homo sapiens
acttgtcaacataat

SEQ ID NO: 1795352 - DNA, 15 bp, Homo sapiens
cttgtcaacataata

SEQ ID NO: 1795353 - DNA, 15 bp, Homo sapiens
ttgtcaacataatac

SEQ ID NO: 1795354 - DNA, 15 bp, Homo sapiens
tgtcaacataatacc

SEQ ID NO: 1795355 - DNA, 15 bp, Homo sapiens
gtcaacataataccc

SEQ ID NO: 1795356 - DNA, 15 bp, Homo sapiens
tcaacataataccca

SEQ ID NO: 1795357 - DNA, 15 bp, Homo sapiens
caacataatacccat

SEQ ID NO: 1795358 - DNA, 15 bp, Homo sapiens
aacataatacccata

SEQ ID NO: 1795359 - DNA, 15 bp, Homo sapiens
acataatacccataa

SEQ ID NO: 1795360 - DNA, 15 bp, Homo sapiens
cataatacccataaa

SEQ ID NO: 1795361 - DNA, 15 bp, Homo sapiens
ataatacccataaag

SEQ ID NO: 1795362 - DNA, 15 bp, Homo sapiens
taatacccataaagt

SEQ ID NO: 1795363 - DNA, 15 bp, Homo sapiens
aatacccataaagtg

SEQ ID NO: 1795364 - DNA, 15 bp, Homo sapiens
atacccataaagtga

SEQ ID NO: 1795365 - DNA, 15 bp, Homo sapiens
tacccataaagtgaa

SEQ ID NO: 1795366 - DNA, 15 bp, Homo sapiens
acccataaagtgaat

SEQ ID NO: 1795367 - DNA, 15 bp, Homo sapiens
cccataaagtgaatc

SEQ ID NO: 1795368 - DNA, 15 bp, Homo sapiens
ccataaagtgaatca

SEQ ID NO: 1795369 - DNA, 15 bp, Homo sapiens
cataaagtgaatcaa

SEQ ID NO: 1795370 - DNA, 15 bp, Homo sapiens
ataaagtgaatcaaa

SEQ ID NO: 1795371 - DNA, 15 bp, Homo sapiens
taaagtgaatcaaaa

SEQ ID NO: 1795372 - DNA, 15 bp, Homo sapiens
aaagtgaatcaaaaa

SEQ ID NO: 1795373 - DNA, 15 bp, Homo sapiens
aagtgaatcaaaaat

SEQ ID NO: 1795374 - DNA, 15 bp, Homo sapiens
agtgaatcaaaaatt

SEQ ID NO: 1795375 - DNA, 15 bp, Homo sapiens
gtgaatcaaaaatta

SEQ ID NO: 1795376 - DNA, 15 bp, Homo sapiens
tgaatcaaaaattat

SEQ ID NO: 1795377 - DNA, 15 bp, Homo sapiens
gaatcaaaaattatt

SEQ ID NO: 1795378 - DNA, 15 bp, Homo sapiens
aatcaaaaattatta

SEQ ID NO: 1795379 - DNA, 15 bp, Homo sapiens
atcaaaaattattat

SEQ ID NO: 1795380 - DNA, 15 bp, Homo sapiens
tcaaaaattattatt

SEQ ID NO: 1795381 - DNA, 15 bp, Homo sapiens
caaaaattattattc

SEQ ID NO: 1795382 - DNA, 15 bp, Homo sapiens
aaaaattattattca

SEQ ID NO: 1795383 - DNA, 15 bp, Homo sapiens
aaaattattattcat

SEQ ID NO: 1795384 - DNA, 15 bp, Homo sapiens
aaattattattcatt

SEQ ID NO: 1795385 - DNA, 15 bp, Homo sapiens
aattattattcattg

SEQ ID NO: 1795386 - DNA, 15 bp, Homo sapiens
attattattcattga

SEQ ID NO: 1795387 - DNA, 15 bp, Homo sapiens
ttattattcattgaa

SEQ ID NO: 1795388 - DNA, 15 bp, Homo sapiens
tattattcattgaac

SEQ ID NO: 1795389 - DNA, 15 bp, Homo sapiens
attattcattgaaca

SEQ ID NO: 1795390 - DNA, 15 bp, Homo sapiens
ttattcattgaacac

SEQ ID NO: 1795391 - DNA, 15 bp, Homo sapiens
tattcattgaacaca

SEQ ID NO: 1795392 - DNA, 15 bp, Homo sapiens
attcattgaacacat

SEQ ID NO: 1795393 - DNA, 15 bp, Homo sapiens
ttcattgaacacatc

SEQ ID NO: 1795394 - DNA, 15 bp, Homo sapiens
tcattgaacacatca

SEQ ID NO: 1795395 - DNA, 15 bp, Homo sapiens
cattgaacacatcat

SEQ ID NO: 1795396 - DNA, 15 bp, Homo sapiens
attgaacacatcatc

SEQ ID NO: 1795397 - DNA, 15 bp, Homo sapiens
ttgaacacatcatct

SEQ ID NO: 1795398 - DNA, 15 bp, Homo sapiens
tgaacacatcatctc

SEQ ID NO: 1795399 - DNA, 15 bp, Homo sapiens
gaacacatcatctct

SEQ ID NO: 1795400 - DNA, 15 bp, Homo sapiens
aacacatcatctctt

SEQ ID NO: 1795401 - DNA, 15 bp, Homo sapiens
acacatcatctctta

SEQ ID NO: 1795402 - DNA, 15 bp, Homo sapiens
cacatcatctcttat

SEQ ID NO: 1795403 - DNA, 15 bp, Homo sapiens
acatcatctcttatc

SEQ ID NO: 1795404 - DNA, 15 bp, Homo sapiens
catcatctcttatca

SEQ ID NO: 1795405 - DNA, 15 bp, Homo sapiens
atcatctcttatcaa

SEQ ID NO: 1795406 - DNA, 15 bp, Homo sapiens
tcatctcttatcaaa

SEQ ID NO: 1795407 - DNA, 15 bp, Homo sapiens
catctcttatcaaat

SEQ ID NO: 1795408 - DNA, 15 bp, Homo sapiens
atctcttatcaaatt

SEQ ID NO: 1795409 - DNA, 15 bp, Homo sapiens
tctcttatcaaattc

SEQ ID NO: 1795410 - DNA, 15 bp, Homo sapiens
ctcttatcaaattct

SEQ ID NO: 1795411 - DNA, 15 bp, Homo sapiens
tcttatcaaattctt

SEQ ID NO: 1795412 - DNA, 15 bp, Homo sapiens
cttatcaaattcttg

SEQ ID NO: 1795413 - DNA, 15 bp, Homo sapiens
ttatcaaattcttgt

SEQ ID NO: 1795414 - DNA, 15 bp, Homo sapiens
tatcaaattcttgtg

SEQ ID NO: 1795415 - DNA, 15 bp, Homo sapiens
atcaaattcttgtga

SEQ ID NO: 1795416 - DNA, 15 bp, Homo sapiens
tcaaattcttgtgac

SEQ ID NO: 1795417 - DNA, 15 bp, Homo sapiens
caaattcttgtgacc

SEQ ID NO: 1795418 - DNA, 15 bp, Homo sapiens
aaattcttgtgacct

SEQ ID NO: 1795419 - DNA, 15 bp, Homo sapiens
aattcttgtgacctt

SEQ ID NO: 1795420 - DNA, 15 bp, Homo sapiens
attcttgtgaccttc

SEQ ID NO: 1795421 - DNA, 15 bp, Homo sapiens
ttcttgtgaccttcc

SEQ ID NO: 1795422 - DNA, 15 bp, Homo sapiens
tcttgtgaccttcct

SEQ ID NO: 1795423 - DNA, 15 bp, Homo sapiens
cttgtgaccttcctt

SEQ ID NO: 1795424 - DNA, 15 bp, Homo sapiens
ttgtgaccttccttc

SEQ ID NO: 1795425 - DNA, 15 bp, Homo sapiens
tgtgaccttccttct

SEQ ID NO: 1795426 - DNA, 15 bp, Homo sapiens
gtgaccttccttctg

SEQ ID NO: 1795427 - DNA, 15 bp, Homo sapiens
tgaccttccttctgg

SEQ ID NO: 1795428 - DNA, 15 bp, Homo sapiens
gaccttccttctggt

SEQ ID NO: 1795429 - DNA, 15 bp, Homo sapiens
accttccttctggtt

SEQ ID NO: 1795430 - DNA, 15 bp, Homo sapiens
ccttccttctggttg

SEQ ID NO: 1795431 - DNA, 15 bp, Homo sapiens
cttccttctggttgt

SEQ ID NO: 1795432 - DNA, 15 bp, Homo sapiens
ttccttctggttgta

SEQ ID NO: 1795433 - DNA, 15 bp, Homo sapiens
tccttctggttgtat

SEQ ID NO: 1795434 - DNA, 15 bp, Homo sapiens
ccttctggttgtata

SEQ ID NO: 1795435 - DNA, 15 bp, Homo sapiens
cttctggttgtataa

SEQ ID NO: 1795436 - DNA, 15 bp, Homo sapiens
ttctggttgtataat

SEQ ID NO: 1795437 - DNA, 15 bp, Homo sapiens
tctggttgtataata

SEQ ID NO: 1795438 - DNA, 15 bp, Homo sapiens
ctggttgtataatag

SEQ ID NO: 1795439 - DNA, 15 bp, Homo sapiens
tggttgtataatagc

SEQ ID NO: 1795440 - DNA, 15 bp, Homo sapiens
ggttgtataatagcc

SEQ ID NO: 1795441 - DNA, 15 bp, Homo sapiens
gttgtataatagcct

SEQ ID NO: 1795442 - DNA, 15 bp, Homo sapiens
ttgtataatagccta

SEQ ID NO: 1795443 - DNA, 15 bp, Homo sapiens
tgtataatagcctaa

SEQ ID NO: 1795444 - DNA, 15 bp, Homo sapiens
gtataatagcctaaa

SEQ ID NO: 1795445 - DNA, 15 bp, Homo sapiens
tataatagcctaaaa

SEQ ID NO: 1795446 - DNA, 15 bp, Homo sapiens
ataatagcctaaaaa

SEQ ID NO: 1795447 - DNA, 15 bp, Homo sapiens
taatagcctaaaaaa

SEQ ID NO: 1795448 - DNA, 15 bp, Homo sapiens
aatagcctaaaaaac

SEQ ID NO: 1795449 - DNA, 15 bp, Homo sapiens
atagcctaaaaaaca

SEQ ID NO: 1795450 - DNA, 15 bp, Homo sapiens
tagcctaaaaaacaa

SEQ ID NO: 1795451 - DNA, 15 bp, Homo sapiens
agcctaaaaaacaaa

SEQ ID NO: 1795452 - DNA, 15 bp, Homo sapiens
gcctaaaaaacaaaa

SEQ ID NO: 1795453 - DNA, 15 bp, Homo sapiens
cctaaaaaacaaaaa

SEQ ID NO: 1795454 - DNA, 15 bp, Homo sapiens
ctaaaaaacaaaaaa

SEQ ID NO: 1795455 - DNA, 15 bp, Homo sapiens
taaaaaacaaaaaaa

SEQ ID NO: 1795456 - DNA, 15 bp, Homo sapiens
aaaacaaaaaaagga

SEQ ID NO: 1795457 - DNA, 15 bp, Homo sapiens
aaacaaaaaaaggac

SEQ ID NO: 1795458 - DNA, 15 bp, Homo sapiens
aacaaaaaaaggaca

SEQ ID NO: 1795459 - DNA, 15 bp, Homo sapiens
acaaaaaaaggacaa

SEQ ID NO: 1795460 - DNA, 15 bp, Homo sapiens
caaaaaaaggacaaa

SEQ ID NO: 1795461 - DNA, 15 bp, Homo sapiens
aaaaaaaggacaaaa

SEQ ID NO: 1795462 - DNA, 15 bp, Homo sapiens
aaaaaaggacaaaag

SEQ ID NO: 1795463 - DNA, 15 bp, Homo sapiens
aaaaaggacaaaagc

SEQ ID NO: 1795464 - DNA, 15 bp, Homo sapiens
aaaaggacaaaagca

SEQ ID NO: 1795465 - DNA, 15 bp, Homo sapiens
aaaggacaaaagcaa

SEQ ID NO: 1795466 - DNA, 15 bp, Homo sapiens
aaggacaaaagcaag

SEQ ID NO: 1795467 - DNA, 15 bp, Homo sapiens
aggacaaaagcaagt

SEQ ID NO: 1795468 - DNA, 15 bp, Homo sapiens
ggacaaaagcaagtt

SEQ ID NO: 1795469 - DNA, 15 bp, Homo sapiens
gacaaaagcaagttt

SEQ ID NO: 1795470 - DNA, 15 bp, Homo sapiens
acaaaagcaagtttc

SEQ ID NO: 1795471 - DNA, 15 bp, Homo sapiens
caaaagcaagtttcc

SEQ ID NO: 1795472 - DNA, 15 bp, Homo sapiens
aaaagcaagtttcca

SEQ ID NO: 1795473 - DNA, 15 bp, Homo sapiens
aaagcaagtttccag

SEQ ID NO: 1795474 - DNA, 15 bp, Homo sapiens
aagcaagtttccaga

SEQ ID NO: 1795475 - DNA, 15 bp, Homo sapiens
agcaagtttccagaa

SEQ ID NO: 1795476 - DNA, 15 bp, Homo sapiens
gcaagtttccagaaa

SEQ ID NO: 1795477 - DNA, 15 bp, Homo sapiens
caagtttccagaaag

SEQ ID NO: 1795478 - DNA, 15 bp, Homo sapiens
aagtttccagaaagc

SEQ ID NO: 1795479 - DNA, 15 bp, Homo sapiens
agtttccagaaagct

SEQ ID NO: 1795480 - DNA, 15 bp, Homo sapiens
gtttccagaaagctg

SEQ ID NO: 1795481 - DNA, 15 bp, Homo sapiens
tttccagaaagctgt

SEQ ID NO: 1795482 - DNA, 15 bp, Homo sapiens
ttccagaaagctgtt

SEQ ID NO: 1795483 - DNA, 15 bp, Homo sapiens
tccagaaagctgttc

SEQ ID NO: 1795484 - DNA, 15 bp, Homo sapiens
ccagaaagctgttct

SEQ ID NO: 1795485 - DNA, 15 bp, Homo sapiens
cagaaagctgttctg

SEQ ID NO: 1795486 - DNA, 15 bp, Homo sapiens
agaaagctgttctga

SEQ ID NO: 1795487 - DNA, 15 bp, Homo sapiens
gaaagctgttctgac

SEQ ID NO: 1795488 - DNA, 15 bp, Homo sapiens
aaagctgttctgact

SEQ ID NO: 1795489 - DNA, 15 bp, Homo sapiens
aagctgttctgactt

SEQ ID NO: 1795490 - DNA, 15 bp, Homo sapiens
agctgttctgacttg

SEQ ID NO: 1795491 - DNA, 15 bp, Homo sapiens
gctgttctgacttgc

SEQ ID NO: 1795492 - DNA, 15 bp, Homo sapiens
ctgttctgacttgcc

SEQ ID NO: 1795493 - DNA, 15 bp, Homo sapiens
tgttctgacttgcct

SEQ ID NO: 1795494 - DNA, 15 bp, Homo sapiens
gttctgacttgccta

SEQ ID NO: 1795495 - DNA, 15 bp, Homo sapiens
ttctgacttgcctac

SEQ ID NO: 1795496 - DNA, 15 bp, Homo sapiens
tctgacttgcctact

SEQ ID NO: 1795497 - DNA, 15 bp, Homo sapiens
ctgacttgcctactt

SEQ ID NO: 1795498 - DNA, 15 bp, Homo sapiens
tgacttgcctacttc

SEQ ID NO: 1795499 - DNA, 15 bp, Homo sapiens
gacttgcctacttct

SEQ ID NO: 1795500 - DNA, 15 bp, Homo sapiens
acttgcctacttctg

SEQ ID NO: 1795501 - DNA, 15 bp, Homo sapiens
cttgcctacttctga

SEQ ID NO: 1795502 - DNA, 15 bp, Homo sapiens
ttgcctacttctgaa

SEQ ID NO: 1795503 - DNA, 15 bp, Homo sapiens
tgcctacttctgaaa

SEQ ID NO: 1795504 - DNA, 15 bp, Homo sapiens
gcctacttctgaaaa

SEQ ID NO: 1795505 - DNA, 15 bp, Homo sapiens
cctacttctgaaaag

SEQ ID NO: 1795506 - DNA, 15 bp, Homo sapiens
ctacttctgaaaagt

SEQ ID NO: 1795507 - DNA, 15 bp, Homo sapiens
tacttctgaaaagta

SEQ ID NO: 1795508 - DNA, 15 bp, Homo sapiens
acttctgaaaagtag

SEQ ID NO: 1795509 - DNA, 15 bp, Homo sapiens
cttctgaaaagtagt

SEQ ID NO: 1795510 - DNA, 15 bp, Homo sapiens
ttctgaaaagtagtc

SEQ ID NO: 1795511 - DNA, 15 bp, Homo sapiens
tctgaaaagtagtcc

SEQ ID NO: 1795512 - DNA, 15 bp, Homo sapiens
ctgaaaagtagtcct

SEQ ID NO: 1795513 - DNA, 15 bp, Homo sapiens
tgaaaagtagtcctg

SEQ ID NO: 1795514 - DNA, 15 bp, Homo sapiens
gaaaagtagtcctgt

SEQ ID NO: 1795515 - DNA, 15 bp, Homo sapiens
aaaagtagtcctgta

SEQ ID NO: 1795516 - DNA, 15 bp, Homo sapiens
aaagtagtcctgtat

SEQ ID NO: 1795517 - DNA, 15 bp, Homo sapiens
aagtagtcctgtatg

SEQ ID NO: 1795518 - DNA, 15 bp, Homo sapiens
agtagtcctgtatgg

SEQ ID NO: 1795519 - DNA, 15 bp, Homo sapiens
gtagtcctgtatggt

SEQ ID NO: 1795520 - DNA, 15 bp, Homo sapiens
tagtcctgtatggtg

SEQ ID NO: 1795521 - DNA, 15 bp, Homo sapiens
agtcctgtatggtgg

SEQ ID NO: 1795522 - DNA, 15 bp, Homo sapiens
gtcctgtatggtggg

SEQ ID NO: 1795523 - DNA, 15 bp, Homo sapiens
tcctgtatggtgggt

SEQ ID NO: 1795524 - DNA, 15 bp, Homo sapiens
cctgtatggtgggtt

SEQ ID NO: 1795525 - DNA, 15 bp, Homo sapiens
ctgtatggtgggttc

SEQ ID NO: 1795526 - DNA, 15 bp, Homo sapiens
tgtatggtgggttct

SEQ ID NO: 1795527 - DNA, 15 bp, Homo sapiens
gtatggtgggttctg

SEQ ID NO: 1795528 - DNA, 15 bp, Homo sapiens
tatggtgggttctga

SEQ ID NO: 1795529 - DNA, 15 bp, Homo sapiens
atggtgggttctgaa

SEQ ID NO: 1795530 - DNA, 15 bp, Homo sapiens
tggtgggttctgaaa

SEQ ID NO: 1795531 - DNA, 15 bp, Homo sapiens
ggtgggttctgaaaa

SEQ ID NO: 1795532 - DNA, 15 bp, Homo sapiens
gtgggttctgaaaat

SEQ ID NO: 1795533 - DNA, 15 bp, Homo sapiens
tgggttctgaaaatg

SEQ ID NO: 1795534 - DNA, 15 bp, Homo sapiens
gggttctgaaaatga

SEQ ID NO: 1795535 - DNA, 15 bp, Homo sapiens
ggttctgaaaatgag

SEQ ID NO: 1795536 - DNA, 15 bp, Homo sapiens
gttctgaaaatgagg

SEQ ID NO: 1795537 - DNA, 15 bp, Homo sapiens
ttctgaaaatgagga

SEQ ID NO: 1795538 - DNA, 15 bp, Homo sapiens
tctgaaaatgaggaa

SEQ ID NO: 1795539 - DNA, 15 bp, Homo sapiens
ctgaaaatgaggaac

SEQ ID NO: 1795540 - DNA, 15 bp, Homo sapiens
tgaaaatgaggaacc

SEQ ID NO: 1795541 - DNA, 15 bp, Homo sapiens
gaaaatgaggaacca

SEQ ID NO: 1795542 - DNA, 15 bp, Homo sapiens
aaaatgaggaaccag

SEQ ID NO: 1795543 - DNA, 15 bp, Homo sapiens
aaatgaggaaccagg

SEQ ID NO: 1795544 - DNA, 15 bp, Homo sapiens
aatgaggaaccagga

SEQ ID NO: 1795545 - DNA, 15 bp, Homo sapiens
atgaggaaccaggac

SEQ ID NO: 1795546 - DNA, 15 bp, Homo sapiens
tgaggaaccaggact

SEQ ID NO: 1795547 - DNA, 15 bp, Homo sapiens
gaggaaccaggactt

SEQ ID NO: 1795548 - DNA, 15 bp, Homo sapiens
aggaaccaggacttg

SEQ ID NO: 1795549 - DNA, 15 bp, Homo sapiens
ggaaccaggacttgc

SEQ ID NO: 1795550 - DNA, 15 bp, Homo sapiens
gaaccaggacttgca

SEQ ID NO: 1795551 - DNA, 15 bp, Homo sapiens
aaccaggacttgcag

SEQ ID NO: 1795552 - DNA, 15 bp, Homo sapiens
accaggacttgcaga

SEQ ID NO: 1795553 - DNA, 15 bp, Homo sapiens
ccaggacttgcagag

SEQ ID NO: 1795554 - DNA, 15 bp, Homo sapiens
caggacttgcagagt

SEQ ID NO: 1795555 - DNA, 15 bp, Homo sapiens
aggacttgcagagta

SEQ ID NO: 1795556 - DNA, 15 bp, Homo sapiens
ggacttgcagagtag

SEQ ID NO: 1795557 - DNA, 15 bp, Homo sapiens
gacttgcagagtagg

SEQ ID NO: 1795558 - DNA, 15 bp, Homo sapiens
acttgcagagtaggc

SEQ ID NO: 1795559 - DNA, 15 bp, Homo sapiens
cttgcagagtaggca

SEQ ID NO: 1795560 - DNA, 15 bp, Homo sapiens
ttgcagagtaggcag

SEQ ID NO: 1795561 - DNA, 15 bp, Homo sapiens
tgcagagtaggcagt

SEQ ID NO: 1795562 - DNA, 15 bp, Homo sapiens
gcagagtaggcagtt

SEQ ID NO: 1795563 - DNA, 15 bp, Homo sapiens
cagagtaggcagttg

SEQ ID NO: 1795564 - DNA, 15 bp, Homo sapiens
agagtaggcagttgc

SEQ ID NO: 1795565 - DNA, 15 bp, Homo sapiens
gagtaggcagttgct

SEQ ID NO: 1795566 - DNA, 15 bp, Homo sapiens
agtaggcagttgctg

SEQ ID NO: 1795567 - DNA, 15 bp, Homo sapiens
gtaggcagttgctgg

SEQ ID NO: 1795568 - DNA, 15 bp, Homo sapiens
taggcagttgctgga

SEQ ID NO: 1795569 - DNA, 15 bp, Homo sapiens
aggcagttgctggag

SEQ ID NO: 1795570 - DNA, 15 bp, Homo sapiens
ggcagttgctggagg

SEQ ID NO: 1795571 - DNA, 15 bp, Homo sapiens
gcagttgctggagga

SEQ ID NO: 1795572 - DNA, 15 bp, Homo sapiens
cagttgctggaggaa

SEQ ID NO: 1795573 - DNA, 15 bp, Homo sapiens
agttgctggaggaag

SEQ ID NO: 1795574 - DNA, 15 bp, Homo sapiens
gttgctggaggaaga

SEQ ID NO: 1795575 - DNA, 15 bp, Homo sapiens
ttgctggaggaagaa

SEQ ID NO: 1795576 - DNA, 15 bp, Homo sapiens
tgctggaggaagaat

SEQ ID NO: 1795577 - DNA, 15 bp, Homo sapiens
gctggaggaagaatg

SEQ ID NO: 1795578 - DNA, 15 bp, Homo sapiens
ctggaggaagaatgt

SEQ ID NO: 1795579 - DNA, 15 bp, Homo sapiens
tggaggaagaatgtg

SEQ ID NO: 1795580 - DNA, 15 bp, Homo sapiens
ggaggaagaatgtga

SEQ ID NO: 1795581 - DNA, 15 bp, Homo sapiens
gaggaagaatgtgag

SEQ ID NO: 1795582 - DNA, 15 bp, Homo sapiens
aggaagaatgtgagc

SEQ ID NO: 1795583 - DNA, 15 bp, Homo sapiens
ggaagaatgtgagct

SEQ ID NO: 1795584 - DNA, 15 bp, Homo sapiens
gaagaatgtgagctg

SEQ ID NO: 1795585 - DNA, 15 bp, Homo sapiens
aagaatgtgagctgc

SEQ ID NO: 1795586 - DNA, 15 bp, Homo sapiens
agaatgtgagctgca

SEQ ID NO: 1795587 - DNA, 15 bp, Homo sapiens
gaatgtgagctgcat

SEQ ID NO: 1795588 - DNA, 15 bp, Homo sapiens
aatgtgagctgcatg

SEQ ID NO: 1795589 - DNA, 15 bp, Homo sapiens
atgtgagctgcatgg

SEQ ID NO: 1795590 - DNA, 15 bp, Homo sapiens
tgtgagctgcatggg

SEQ ID NO: 1795591 - DNA, 15 bp, Homo sapiens
gtgagctgcatggga

SEQ ID NO: 1795592 - DNA, 15 bp, Homo sapiens
tgagctgcatgggaa

SEQ ID NO: 1795593 - DNA, 15 bp, Homo sapiens
gagctgcatgggaaa

SEQ ID NO: 1795594 - DNA, 15 bp, Homo sapiens
agctgcatgggaaaa

SEQ ID NO: 1795595 - DNA, 15 bp, Homo sapiens
gctgcatgggaaaag

SEQ ID NO: 1795596 - DNA, 15 bp, Homo sapiens
ctgcatgggaaaaga

SEQ ID NO: 1795597 - DNA, 15 bp, Homo sapiens
tgcatgggaaaagac

SEQ ID NO: 1795598 - DNA, 15 bp, Homo sapiens
gcatgggaaaagaca

SEQ ID NO: 1795599 - DNA, 15 bp, Homo sapiens
catgggaaaagacag

SEQ ID NO: 1795600 - DNA, 15 bp, Homo sapiens
atgggaaaagacagg

SEQ ID NO: 1795601 - DNA, 15 bp, Homo sapiens
tgggaaaagacagga

SEQ ID NO: 1795602 - DNA, 15 bp, Homo sapiens
gggaaaagacaggag

SEQ ID NO: 1795603 - DNA, 15 bp, Homo sapiens
ggaaaagacaggagg

SEQ ID NO: 1795604 - DNA, 15 bp, Homo sapiens
gaaaagacaggagga

SEQ ID NO: 1795605 - DNA, 15 bp, Homo sapiens
aaaagacaggaggat

SEQ ID NO: 1795606 - DNA, 15 bp, Homo sapiens
aaagacaggaggatt

SEQ ID NO: 1795607 - DNA, 15 bp, Homo sapiens
aagacaggaggattt

SEQ ID NO: 1795608 - DNA, 15 bp, Homo sapiens
agacaggaggattta

SEQ ID NO: 1795609 - DNA, 15 bp, Homo sapiens
gacaggaggatttac

SEQ ID NO: 1795610 - DNA, 15 bp, Homo sapiens
acaggaggatttaca

SEQ ID NO: 1795611 - DNA, 15 bp, Homo sapiens
caggaggatttacaa

SEQ ID NO: 1795612 - DNA, 15 bp, Homo sapiens
aggaggatttacaaa

SEQ ID NO: 1795613 - DNA, 15 bp, Homo sapiens
ggaggatttacaaag

SEQ ID NO: 1795614 - DNA, 15 bp, Homo sapiens
gaggatttacaaaga

SEQ ID NO: 1795615 - DNA, 15 bp, Homo sapiens
aggatttacaaagag

SEQ ID NO: 1795616 - DNA, 15 bp, Homo sapiens
ggatttacaaagagt

SEQ ID NO: 1795617 - DNA, 15 bp, Homo sapiens
gatttacaaagagtg

SEQ ID NO: 1795618 - DNA, 15 bp, Homo sapiens
atttacaaagagtgg

SEQ ID NO: 1795619 - DNA, 15 bp, Homo sapiens
tttacaaagagtggg

SEQ ID NO: 1795620 - DNA, 15 bp, Homo sapiens
ttacaaagagtgggt

SEQ ID NO: 1795621 - DNA, 15 bp, Homo sapiens
tacaaagagtgggtg

SEQ ID NO: 1795622 - DNA, 15 bp, Homo sapiens
acaaagagtgggtgt

SEQ ID NO: 1795623 - DNA, 15 bp, Homo sapiens
caaagagtgggtgtt

SEQ ID NO: 1795624 - DNA, 15 bp, Homo sapiens
aaagagtgggtgttt

SEQ ID NO: 1795625 - DNA, 15 bp, Homo sapiens
aagagtgggtgttta

SEQ ID NO: 1795626 - DNA, 15 bp, Homo sapiens
agagtgggtgtttaa

SEQ ID NO: 1795627 - DNA, 15 bp, Homo sapiens
gagtgggtgtttaat

SEQ ID NO: 1795628 - DNA, 15 bp, Homo sapiens
agtgggtgtttaatt

SEQ ID NO: 1795629 - DNA, 15 bp, Homo sapiens
gtgggtgtttaattg

SEQ ID NO: 1795630 - DNA, 15 bp, Homo sapiens
tgggtgtttaattgg

SEQ ID NO: 1795631 - DNA, 15 bp, Homo sapiens
gggtgtttaattggg

SEQ ID NO: 1795632 - DNA, 15 bp, Homo sapiens
ggtgtttaattgggg

SEQ ID NO: 1795633 - DNA, 15 bp, Homo sapiens
gtgtttaattgggga

SEQ ID NO: 1795634 - DNA, 15 bp, Homo sapiens
tgtttaattggggat

SEQ ID NO: 1795635 - DNA, 15 bp, Homo sapiens
gtttaattggggatg

SEQ ID NO: 1795636 - DNA, 15 bp, Homo sapiens
tttaattggggatgg

SEQ ID NO: 1795637 - DNA, 15 bp, Homo sapiens
ttaattggggatgga

SEQ ID NO: 1795638 - DNA, 15 bp, Homo sapiens
taattggggatggaa

SEQ ID NO: 1795639 - DNA, 15 bp, Homo sapiens
aattggggatggaat

SEQ ID NO: 1795640 - DNA, 15 bp, Homo sapiens
attggggatggaatt

SEQ ID NO: 1795641 - DNA, 15 bp, Homo sapiens
ttggggatggaatta

SEQ ID NO: 1795642 - DNA, 15 bp, Homo sapiens
tggggatggaattag

SEQ ID NO: 1795643 - DNA, 15 bp, Homo sapiens
ggggatggaattagg

SEQ ID NO: 1795644 - DNA, 15 bp, Homo sapiens
gggatggaattaggt

SEQ ID NO: 1795645 - DNA, 15 bp, Homo sapiens
ggatggaattaggta

SEQ ID NO: 1795646 - DNA, 15 bp, Homo sapiens
gatggaattaggtag

SEQ ID NO: 1795647 - DNA, 15 bp, Homo sapiens
atggaattaggtagt

SEQ ID NO: 1795648 - DNA, 15 bp, Homo sapiens
tggaattaggtagtt

SEQ ID NO: 1795649 - DNA, 15 bp, Homo sapiens
ggaattaggtagtta

SEQ ID NO: 1795650 - DNA, 15 bp, Homo sapiens
gaattaggtagttat

SEQ ID NO: 1795651 - DNA, 15 bp, Homo sapiens
aattaggtagttatt

SEQ ID NO: 1795652 - DNA, 15 bp, Homo sapiens
attaggtagttattc

SEQ ID NO: 1795653 - DNA, 15 bp, Homo sapiens
ttaggtagttattct

SEQ ID NO: 1795654 - DNA, 15 bp, Homo sapiens
taggtagttattctg

SEQ ID NO: 1795655 - DNA, 15 bp, Homo sapiens
aggtagttattctga

SEQ ID NO: 1795656 - DNA, 15 bp, Homo sapiens
ggtagttattctgat

SEQ ID NO: 1795657 - DNA, 15 bp, Homo sapiens
gtagttattctgatt

SEQ ID NO: 1795658 - DNA, 15 bp, Homo sapiens
tagttattctgattt

SEQ ID NO: 1795659 - DNA, 15 bp, Homo sapiens
agttattctgatttt

SEQ ID NO: 1795660 - DNA, 15 bp, Homo sapiens
gttattctgattttt

SEQ ID NO: 1795661 - DNA, 15 bp, Homo sapiens
tattctgatttttag

SEQ ID NO: 1795662 - DNA, 15 bp, Homo sapiens
attctgatttttaga

SEQ ID NO: 1795663 - DNA, 15 bp, Homo sapiens
ttctgatttttagat

SEQ ID NO: 1795664 - DNA, 15 bp, Homo sapiens
tctgatttttagatt

SEQ ID NO: 1795665 - DNA, 15 bp, Homo sapiens
ctgatttttagattt

SEQ ID NO: 1795666 - DNA, 15 bp, Homo sapiens
tgatttttagatttt

SEQ ID NO: 1795667 - DNA, 15 bp, Homo sapiens
gatttttagattttt

SEQ ID NO: 1795668 - DNA, 15 bp, Homo sapiens
atttttagatttttc

SEQ ID NO: 1795669 - DNA, 15 bp, Homo sapiens
tttttagatttttca

SEQ ID NO: 1795670 - DNA, 15 bp, Homo sapiens
ttttagatttttcat

SEQ ID NO: 1795671 - DNA, 15 bp, Homo sapiens
tttagatttttcata

SEQ ID NO: 1795672 - DNA, 15 bp, Homo sapiens
ttagatttttcatat

SEQ ID NO: 1795673 - DNA, 15 bp, Homo sapiens
tagatttttcatatc

SEQ ID NO: 1795674 - DNA, 15 bp, Homo sapiens
agatttttcatatct

SEQ ID NO: 1795675 - DNA, 15 bp, Homo sapiens
gatttttcatatctt

SEQ ID NO: 1795676 - DNA, 15 bp, Homo sapiens
atttttcatatcttt

SEQ ID NO: 1795677 - DNA, 15 bp, Homo sapiens
tttttcatatctttt

SEQ ID NO: 1795678 - DNA, 15 bp, Homo sapiens
ttttcatatctttta

SEQ ID NO: 1795679 - DNA, 15 bp, Homo sapiens
tttcatatcttttat

SEQ ID NO: 1795680 - DNA, 15 bp, Homo sapiens
ttcatatcttttatt

SEQ ID NO: 1795681 - DNA, 15 bp, Homo sapiens
tcatatcttttattt

SEQ ID NO: 1795682 - DNA, 15 bp, Homo sapiens
catatcttttatttg

SEQ ID NO: 1795683 - DNA, 15 bp, Homo sapiens
atatcttttatttgg

SEQ ID NO: 1795684 - DNA, 15 bp, Homo sapiens
tatcttttatttggt

SEQ ID NO: 1795685 - DNA, 15 bp, Homo sapiens
atcttttatttggtc

SEQ ID NO: 1795686 - DNA, 15 bp, Homo sapiens
tcttttatttggtcc

SEQ ID NO: 1795687 - DNA, 15 bp, Homo sapiens
cttttatttggtcca

SEQ ID NO: 1795688 - DNA, 15 bp, Homo sapiens
ttttatttggtccaa

SEQ ID NO: 1795689 - DNA, 15 bp, Homo sapiens
tttatttggtccaat

SEQ ID NO: 1795690 - DNA, 15 bp, Homo sapiens
ttatttggtccaatg

SEQ ID NO: 1795691 - DNA, 15 bp, Homo sapiens
tatttggtccaatga

SEQ ID NO: 1795692 - DNA, 15 bp, Homo sapiens
atttggtccaatgaa

SEQ ID NO: 1795693 - DNA, 15 bp, Homo sapiens
tttggtccaatgaag

SEQ ID NO: 1795694 - DNA, 15 bp, Homo sapiens
ttggtccaatgaagc

SEQ ID NO: 1795695 - DNA, 15 bp, Homo sapiens
tggtccaatgaagca

SEQ ID NO: 1795696 - DNA, 15 bp, Homo sapiens
ggtccaatgaagcag

SEQ ID NO: 1795697 - DNA, 15 bp, Homo sapiens
gtccaatgaagcaga

SEQ ID NO: 1795698 - DNA, 15 bp, Homo sapiens
tccaatgaagcagaa

SEQ ID NO: 1795699 - DNA, 15 bp, Homo sapiens
ccaatgaagcagaaa

SEQ ID NO: 1795700 - DNA, 15 bp, Homo sapiens
caatgaagcagaaaa

SEQ ID NO: 1795701 - DNA, 15 bp, Homo sapiens
aatgaagcagaaaat

SEQ ID NO: 1795702 - DNA, 15 bp, Homo sapiens
atgaagcagaaaatt

SEQ ID NO: 1795703 - DNA, 15 bp, Homo sapiens
tgaagcagaaaattt

SEQ ID NO: 1795704 - DNA, 15 bp, Homo sapiens
gaagcagaaaattta

SEQ ID NO: 1795705 - DNA, 15 bp, Homo sapiens
aagcagaaaatttaa

SEQ ID NO: 1795706 - DNA, 15 bp, Homo sapiens
agcagaaaatttaaa

SEQ ID NO: 1795707 - DNA, 15 bp, Homo sapiens
gcagaaaatttaaat

SEQ ID NO: 1795708 - DNA, 15 bp, Homo sapiens
cagaaaatttaaatg

SEQ ID NO: 1795709 - DNA, 15 bp, Homo sapiens
agaaaatttaaatga

SEQ ID NO: 1795710 - DNA, 15 bp, Homo sapiens
gaaaatttaaatgaa

SEQ ID NO: 1795711 - DNA, 15 bp, Homo sapiens
aaaatttaaatgaag

SEQ ID NO: 1795712 - DNA, 15 bp, Homo sapiens
aaatttaaatgaagt

SEQ ID NO: 1795713 - DNA, 15 bp, Homo sapiens
aatttaaatgaagtt

SEQ ID NO: 1795714 - DNA, 15 bp, Homo sapiens
atttaaatgaagtta

SEQ ID NO: 1795715 - DNA, 15 bp, Homo sapiens
tttaaatgaagttat

SEQ ID NO: 1795716 - DNA, 15 bp, Homo sapiens
ttaaatgaagttatt

SEQ ID NO: 1795717 - DNA, 15 bp, Homo sapiens
taaatgaagttatta

SEQ ID NO: 1795718 - DNA, 15 bp, Homo sapiens
aaatgaagttattac

SEQ ID NO: 1795719 - DNA, 15 bp, Homo sapiens
aatgaagttattacc

SEQ ID NO: 1795720 - DNA, 15 bp, Homo sapiens
atgaagttattacct

SEQ ID NO: 1795721 - DNA, 15 bp, Homo sapiens
tgaagttattacctt

SEQ ID NO: 1795722 - DNA, 15 bp, Homo sapiens
gaagttattaccttt

SEQ ID NO: 1795723 - DNA, 15 bp, Homo sapiens
aagttattacctttg

SEQ ID NO: 1795724 - DNA, 15 bp, Homo sapiens
agttattacctttgc

SEQ ID NO: 1795725 - DNA, 15 bp, Homo sapiens
gttattacctttgcc

SEQ ID NO: 1795726 - DNA, 15 bp, Homo sapiens
ttattacctttgcct

SEQ ID NO: 1795727 - DNA, 15 bp, Homo sapiens
tattacctttgcctg

SEQ ID NO: 1795728 - DNA, 15 bp, Homo sapiens
attacctttgcctga

SEQ ID NO: 1795729 - DNA, 15 bp, Homo sapiens
ttacctttgcctgat

SEQ ID NO: 1795730 - DNA, 15 bp, Homo sapiens
tacctttgcctgatt

SEQ ID NO: 1795731 - DNA, 15 bp, Homo sapiens
acctttgcctgattt

SEQ ID NO: 1795732 - DNA, 15 bp, Homo sapiens
cctttgcctgatttt

SEQ ID NO: 1795733 - DNA, 15 bp, Homo sapiens
ctttgcctgattttt

SEQ ID NO: 1795734 - DNA, 15 bp, Homo sapiens
tttgcctgatttttg

SEQ ID NO: 1795735 - DNA, 15 bp, Homo sapiens
ttgcctgatttttga

SEQ ID NO: 1795736 - DNA, 15 bp, Homo sapiens
tgcctgatttttgac

SEQ ID NO: 1795737 - DNA, 15 bp, Homo sapiens
gcctgatttttgaca

SEQ ID NO: 1795738 - DNA, 15 bp, Homo sapiens
cctgatttttgacac

SEQ ID NO: 1795739 - DNA, 15 bp, Homo sapiens
ctgatttttgacaca

SEQ ID NO: 1795740 - DNA, 15 bp, Homo sapiens
tgatttttgacacac

SEQ ID NO: 1795741 - DNA, 15 bp, Homo sapiens
gatttttgacacacc

SEQ ID NO: 1795742 - DNA, 15 bp, Homo sapiens
atttttgacacacct

SEQ ID NO: 1795743 - DNA, 15 bp, Homo sapiens
tttttgacacacctc

SEQ ID NO: 1795744 - DNA, 15 bp, Homo sapiens
ttttgacacacctca

SEQ ID NO: 1795745 - DNA, 15 bp, Homo sapiens
tttgacacacctcaa

SEQ ID NO: 1795746 - DNA, 15 bp, Homo sapiens
ttgacacacctcaaa

SEQ ID NO: 1795747 - DNA, 15 bp, Homo sapiens
tgacacacctcaaac

SEQ ID NO: 1795748 - DNA, 15 bp, Homo sapiens
gacacacctcaaact

SEQ ID NO: 1795749 - DNA, 15 bp, Homo sapiens
acacacctcaaacta

SEQ ID NO: 1795750 - DNA, 15 bp, Homo sapiens
cacacctcaaactat

SEQ ID NO: 1795751 - DNA, 15 bp, Homo sapiens
acacctcaaactata

SEQ ID NO: 1795752 - DNA, 15 bp, Homo sapiens
cacctcaaactataa

SEQ ID NO: 1795753 - DNA, 15 bp, Homo sapiens
acctcaaactataac

SEQ ID NO: 1795754 - DNA, 15 bp, Homo sapiens
cctcaaactataact

SEQ ID NO: 1795755 - DNA, 15 bp, Homo sapiens
ctcaaactataactt

SEQ ID NO: 1795756 - DNA, 15 bp, Homo sapiens
tcaaactataacttg

SEQ ID NO: 1795757 - DNA, 15 bp, Homo sapiens
caaactataacttga

SEQ ID NO: 1795758 - DNA, 15 bp, Homo sapiens
aaactataacttgag

SEQ ID NO: 1795759 - DNA, 15 bp, Homo sapiens
aactataacttgagg

SEQ ID NO: 1795760 - DNA, 15 bp, Homo sapiens
actataacttgaggt

SEQ ID NO: 1795761 - DNA, 15 bp, Homo sapiens
ctataacttgaggtt

SEQ ID NO: 1795762 - DNA, 15 bp, Homo sapiens
tataacttgaggttg

SEQ ID NO: 1795763 - DNA, 15 bp, Homo sapiens
ataacttgaggttgc

SEQ ID NO: 1795764 - DNA, 15 bp, Homo sapiens
taacttgaggttgct

SEQ ID NO: 1795765 - DNA, 15 bp, Homo sapiens
aacttgaggttgcta

SEQ ID NO: 1795766 - DNA, 15 bp, Homo sapiens
acttgaggttgctaa

SEQ ID NO: 1795767 - DNA, 15 bp, Homo sapiens
cttgaggttgctaac

SEQ ID NO: 1795768 - DNA, 15 bp, Homo sapiens
ttgaggttgctaact

SEQ ID NO: 1795769 - DNA, 15 bp, Homo sapiens
tgaggttgctaacta

SEQ ID NO: 1795770 - DNA, 15 bp, Homo sapiens
gaggttgctaactat

SEQ ID NO: 1795771 - DNA, 15 bp, Homo sapiens
aggttgctaactatg

SEQ ID NO: 1795772 - DNA, 15 bp, Homo sapiens
ggttgctaactatga

SEQ ID NO: 1795773 - DNA, 15 bp, Homo sapiens
gttgctaactatgaa

SEQ ID NO: 1795774 - DNA, 15 bp, Homo sapiens
ttgctaactatgaaa

SEQ ID NO: 1795775 - DNA, 15 bp, Homo sapiens
tgctaactatgaaac

SEQ ID NO: 1795776 - DNA, 15 bp, Homo sapiens
gctaactatgaaaca

SEQ ID NO: 1795777 - DNA, 15 bp, Homo sapiens
ctaactatgaaacac

SEQ ID NO: 1795778 - DNA, 15 bp, Homo sapiens
taactatgaaacact

SEQ ID NO: 1795779 - DNA, 15 bp, Homo sapiens
aactatgaaacactg

SEQ ID NO: 1795780 - DNA, 15 bp, Homo sapiens
actatgaaacactgg

SEQ ID NO: 1795781 - DNA, 15 bp, Homo sapiens
ctatgaaacactggc

SEQ ID NO: 1795782 - DNA, 15 bp, Homo sapiens
tatgaaacactggca

SEQ ID NO: 1795783 - DNA, 15 bp, Homo sapiens
atgaaacactggcat

SEQ ID NO: 1795784 - DNA, 15 bp, Homo sapiens
tgaaacactggcatt

SEQ ID NO: 1795785 - DNA, 15 bp, Homo sapiens
gaaacactggcattt

SEQ ID NO: 1795786 - DNA, 15 bp, Homo sapiens
aaacactggcattta

SEQ ID NO: 1795787 - DNA, 15 bp, Homo sapiens
aacactggcatttaa

SEQ ID NO: 1795788 - DNA, 15 bp, Homo sapiens
acactggcatttaat

SEQ ID NO: 1795789 - DNA, 15 bp, Homo sapiens
cactggcatttaatg

SEQ ID NO: 1795790 - DNA, 15 bp, Homo sapiens
actggcatttaatga

SEQ ID NO: 1795791 - DNA, 15 bp, Homo sapiens
ctggcatttaatgat

SEQ ID NO: 1795792 - DNA, 15 bp, Homo sapiens
tggcatttaatgatt

SEQ ID NO: 1795793 - DNA, 15 bp, Homo sapiens
ggcatttaatgattt

SEQ ID NO: 1795794 - DNA, 15 bp, Homo sapiens
gcatttaatgattta

SEQ ID NO: 1795795 - DNA, 15 bp, Homo sapiens
catttaatgatttaa

SEQ ID NO: 1795796 - DNA, 15 bp, Homo sapiens
atttaatgatttaaa

SEQ ID NO: 1795797 - DNA, 15 bp, Homo sapiens
tttaatgatttaaag

SEQ ID NO: 1795798 - DNA, 15 bp, Homo sapiens
ttaatgatttaaagt

SEQ ID NO: 1795799 - DNA, 15 bp, Homo sapiens
taatgatttaaagta

SEQ ID NO: 1795800 - DNA, 15 bp, Homo sapiens
aatgatttaaagtaa

SEQ ID NO: 1795801 - DNA, 15 bp, Homo sapiens
atgatttaaagtaaa

SEQ ID NO: 1795802 - DNA, 15 bp, Homo sapiens
tgatttaaagtaaag

SEQ ID NO: 1795803 - DNA, 15 bp, Homo sapiens
gatttaaagtaaaga

SEQ ID NO: 1795804 - DNA, 15 bp, Homo sapiens
atttaaagtaaagaa

SEQ ID NO: 1795805 - DNA, 15 bp, Homo sapiens
tttaaagtaaagaat

SEQ ID NO: 1795806 - DNA, 15 bp, Homo sapiens
ttaaagtaaagaatt

SEQ ID NO: 1795807 - DNA, 15 bp, Homo sapiens
taaagtaaagaattc

SEQ ID NO: 1795808 - DNA, 15 bp, Homo sapiens
aaagtaaagaattct

SEQ ID NO: 1795809 - DNA, 15 bp, Homo sapiens
aagtaaagaattctg

SEQ ID NO: 1795810 - DNA, 15 bp, Homo sapiens
agtaaagaattctgt

SEQ ID NO: 1795811 - DNA, 15 bp, Homo sapiens
gtaaagaattctgta

SEQ ID NO: 1795812 - DNA, 15 bp, Homo sapiens
taaagaattctgtaa

SEQ ID NO: 1795813 - DNA, 15 bp, Homo sapiens
aaagaattctgtaat

SEQ ID NO: 1795814 - DNA, 15 bp, Homo sapiens
aagaattctgtaatt

SEQ ID NO: 1795815 - DNA, 15 bp, Homo sapiens
agaattctgtaattt

SEQ ID NO: 1795816 - DNA, 15 bp, Homo sapiens
gaattctgtaatttg

SEQ ID NO: 1795817 - DNA, 15 bp, Homo sapiens
aattctgtaatttgt

SEQ ID NO: 1795818 - DNA, 15 bp, Homo sapiens
attctgtaatttgta

SEQ ID NO: 1795819 - DNA, 15 bp, Homo sapiens
ttctgtaatttgtag

SEQ ID NO: 1795820 - DNA, 15 bp, Homo sapiens
tctgtaatttgtaga

SEQ ID NO: 1795821 - DNA, 15 bp, Homo sapiens
ctgtaatttgtagac

SEQ ID NO: 1795822 - DNA, 15 bp, Homo sapiens
tgtaatttgtagact

SEQ ID NO: 1795823 - DNA, 15 bp, Homo sapiens
gtaatttgtagactt

SEQ ID NO: 1795824 - DNA, 15 bp, Homo sapiens
taatttgtagacttc

SEQ ID NO: 1795825 - DNA, 15 bp, Homo sapiens
aatttgtagacttct

SEQ ID NO: 1795826 - DNA, 15 bp, Homo sapiens
atttgtagacttctg

SEQ ID NO: 1795827 - DNA, 15 bp, Homo sapiens
tttgtagacttctga

SEQ ID NO: 1795828 - DNA, 15 bp, Homo sapiens
ttgtagacttctgag

SEQ ID NO: 1795829 - DNA, 15 bp, Homo sapiens
tgtagacttctgaga

SEQ ID NO: 1795830 - DNA, 15 bp, Homo sapiens
gtagacttctgagaa

SEQ ID NO: 1795831 - DNA, 15 bp, Homo sapiens
tagacttctgagaag

SEQ ID NO: 1795832 - DNA, 15 bp, Homo sapiens
agacttctgagaagt

SEQ ID NO: 1795833 - DNA, 15 bp, Homo sapiens
gacttctgagaagtt

SEQ ID NO: 1795834 - DNA, 15 bp, Homo sapiens
acttctgagaagttc

SEQ ID NO: 1795835 - DNA, 15 bp, Homo sapiens
cttctgagaagttcc

SEQ ID NO: 1795836 - DNA, 15 bp, Homo sapiens
ttctgagaagttcca

SEQ ID NO: 1795837 - DNA, 15 bp, Homo sapiens
tctgagaagttccag

SEQ ID NO: 1795838 - DNA, 15 bp, Homo sapiens
ctgagaagttccaga

SEQ ID NO: 1795839 - DNA, 15 bp, Homo sapiens
tgagaagttccagaa

SEQ ID NO: 1795840 - DNA, 15 bp, Homo sapiens
gagaagttccagaaa

SEQ ID NO: 1795841 - DNA, 15 bp, Homo sapiens
agaagttccagaaaa

SEQ ID NO: 1795842 - DNA, 15 bp, Homo sapiens
gaagttccagaaaat

SEQ ID NO: 1795843 - DNA, 15 bp, Homo sapiens
aagttccagaaaata

SEQ ID NO: 1795844 - DNA, 15 bp, Homo sapiens
agttccagaaaataa

SEQ ID NO: 1795845 - DNA, 15 bp, Homo sapiens
gttccagaaaataaa

SEQ ID NO: 1795846 - DNA, 15 bp, Homo sapiens
ttccagaaaataaat

SEQ ID NO: 1795847 - DNA, 15 bp, Homo sapiens
tccagaaaataaatc

SEQ ID NO: 1795848 - DNA, 15 bp, Homo sapiens
ccagaaaataaatca

SEQ ID NO: 1795849 - DNA, 15 bp, Homo sapiens
cagaaaataaatcag

SEQ ID NO: 1795850 - DNA, 15 bp, Homo sapiens
agaaaataaatcaga

SEQ ID NO: 1795851 - DNA, 15 bp, Homo sapiens
gaaaataaatcagat

SEQ ID NO: 1795852 - DNA, 15 bp, Homo sapiens
aaaataaatcagatg

SEQ ID NO: 1795853 - DNA, 15 bp, Homo sapiens
aaataaatcagatgg

SEQ ID NO: 1795854 - DNA, 15 bp, Homo sapiens
aataaatcagatggt

SEQ ID NO: 1795855 - DNA, 15 bp, Homo sapiens
ataaatcagatggta

SEQ ID NO: 1795856 - DNA, 15 bp, Homo sapiens
taaatcagatggtat

SEQ ID NO: 1795857 - DNA, 15 bp, Homo sapiens
aaatcagatggtatg

SEQ ID NO: 1795858 - DNA, 15 bp, Homo sapiens
aatcagatggtatgt

SEQ ID NO: 1795859 - DNA, 15 bp, Homo sapiens
atcagatggtatgta

SEQ ID NO: 1795860 - DNA, 15 bp, Homo sapiens
tcagatggtatgtaa

SEQ ID NO: 1795861 - DNA, 15 bp, Homo sapiens
cagatggtatgtaac

SEQ ID NO: 1795862 - DNA, 15 bp, Homo sapiens
agatggtatgtaaca

SEQ ID NO: 1795863 - DNA, 15 bp, Homo sapiens
gatggtatgtaacag

SEQ ID NO: 1795864 - DNA, 15 bp, Homo sapiens
atggtatgtaacagc

SEQ ID NO: 1795865 - DNA, 15 bp, Homo sapiens
tggtatgtaacagcg

SEQ ID NO: 1795866 - DNA, 15 bp, Homo sapiens
ggtatgtaacagcga

SEQ ID NO: 1795867 - DNA, 15 bp, Homo sapiens
gtatgtaacagcgac

SEQ ID NO: 1795868 - DNA, 15 bp, Homo sapiens
tatgtaacagcgacc

SEQ ID NO: 1795869 - DNA, 15 bp, Homo sapiens
atgtaacagcgaccg

SEQ ID NO: 1795870 - DNA, 15 bp, Homo sapiens
tgtaacagcgaccgt

SEQ ID NO: 1795871 - DNA, 15 bp, Homo sapiens
gtaacagcgaccgtg

SEQ ID NO: 1795872 - DNA, 15 bp, Homo sapiens
taacagcgaccgtgt

SEQ ID NO: 1795873 - DNA, 15 bp, Homo sapiens
aacagcgaccgtgtg

SEQ ID NO: 1795874 - DNA, 15 bp, Homo sapiens
acagcgaccgtgtgc

SEQ ID NO: 1795875 - DNA, 15 bp, Homo sapiens
cagcgaccgtgtgct

SEQ ID NO: 1795876 - DNA, 15 bp, Homo sapiens
agcgaccgtgtgctc

SEQ ID NO: 1795877 - DNA, 15 bp, Homo sapiens
gcgaccgtgtgctca

SEQ ID NO: 1795878 - DNA, 15 bp, Homo sapiens
cgaccgtgtgctcaa

SEQ ID NO: 1795879 - DNA, 15 bp, Homo sapiens
gaccgtgtgctcaaa

SEQ ID NO: 1795880 - DNA, 15 bp, Homo sapiens
accgtgtgctcaaaa

SEQ ID NO: 1795881 - DNA, 15 bp, Homo sapiens
ccgtgtgctcaaaag

SEQ ID NO: 1795882 - DNA, 15 bp, Homo sapiens
cgtgtgctcaaaaga

SEQ ID NO: 1795883 - DNA, 15 bp, Homo sapiens
gtgtgctcaaaagaa

SEQ ID NO: 1795884 - DNA, 15 bp, Homo sapiens
tgtgctcaaaagaag

SEQ ID NO: 1795885 - DNA, 15 bp, Homo sapiens
gtgctcaaaagaagt

SEQ ID NO: 1795886 - DNA, 15 bp, Homo sapiens
tgctcaaaagaagtg

SEQ ID NO: 1795887 - DNA, 15 bp, Homo sapiens
gctcaaaagaagtgc

SEQ ID NO: 1795888 - DNA, 15 bp, Homo sapiens
ctcaaaagaagtgct

SEQ ID NO: 1795889 - DNA, 15 bp, Homo sapiens
tcaaaagaagtgctg

SEQ ID NO: 1795890 - DNA, 15 bp, Homo sapiens
caaaagaagtgctga

SEQ ID NO: 1795891 - DNA, 15 bp, Homo sapiens
aaaagaagtgctgaa

SEQ ID NO: 1795892 - DNA, 15 bp, Homo sapiens
aaagaagtgctgaag

SEQ ID NO: 1795893 - DNA, 15 bp, Homo sapiens
aagaagtgctgaagg

SEQ ID NO: 1795894 - DNA, 15 bp, Homo sapiens
agaagtgctgaagga

SEQ ID NO: 1795895 - DNA, 15 bp, Homo sapiens
gaagtgctgaaggaa

SEQ ID NO: 1795896 - DNA, 15 bp, Homo sapiens
aagtgctgaaggaag

SEQ ID NO: 1795897 - DNA, 15 bp, Homo sapiens
agtgctgaaggaagc

SEQ ID NO: 1795898 - DNA, 15 bp, Homo sapiens
gtgctgaaggaagca

SEQ ID NO: 1795899 - DNA, 15 bp, Homo sapiens
tgctgaaggaagcaa

SEQ ID NO: 1795900 - DNA, 15 bp, Homo sapiens
gctgaaggaagcaac

SEQ ID NO: 1795901 - DNA, 15 bp, Homo sapiens
ctgaaggaagcaacc

SEQ ID NO: 1795902 - DNA, 15 bp, Homo sapiens
tgaaggaagcaaccc

SEQ ID NO: 1795903 - DNA, 15 bp, Homo sapiens
gaaggaagcaaccct

SEQ ID NO: 1795904 - DNA, 15 bp, Homo sapiens
aaggaagcaaccctc

SEQ ID NO: 1795905 - DNA, 15 bp, Homo sapiens
aggaagcaaccctcc

SEQ ID NO: 1795906 - DNA, 15 bp, Homo sapiens
ggaagcaaccctcct

SEQ ID NO: 1795907 - DNA, 15 bp, Homo sapiens
gaagcaaccctccta

SEQ ID NO: 1795908 - DNA, 15 bp, Homo sapiens
aagcaaccctcctaa

SEQ ID NO: 1795909 - DNA, 15 bp, Homo sapiens
agcaaccctcctaaa

SEQ ID NO: 1795910 - DNA, 15 bp, Homo sapiens
gcaaccctcctaaac

SEQ ID NO: 1795911 - DNA, 15 bp, Homo sapiens
caaccctcctaaacc

SEQ ID NO: 1795912 - DNA, 15 bp, Homo sapiens
aaccctcctaaacca

SEQ ID NO: 1795913 - DNA, 15 bp, Homo sapiens
accctcctaaaccac

SEQ ID NO: 1795914 - DNA, 15 bp, Homo sapiens
ccctcctaaaccact

SEQ ID NO: 1795915 - DNA, 15 bp, Homo sapiens
cctcctaaaccactg

SEQ ID NO: 1795916 - DNA, 15 bp, Homo sapiens
ctcctaaaccactga

SEQ ID NO: 1795917 - DNA, 15 bp, Homo sapiens
tcctaaaccactgaa

SEQ ID NO: 1795918 - DNA, 15 bp, Homo sapiens
cctaaaccactgaaa

SEQ ID NO: 1795919 - DNA, 15 bp, Homo sapiens
ctaaaccactgaaaa

SEQ ID NO: 1795920 - DNA, 15 bp, Homo sapiens
taaaccactgaaaaa

SEQ ID NO: 1795921 - DNA, 15 bp, Homo sapiens
aaaccactgaaaaaa

SEQ ID NO: 1795922 - DNA, 15 bp, Homo sapiens
aaccactgaaaaaac

SEQ ID NO: 1795923 - DNA, 15 bp, Homo sapiens
accactgaaaaaact

SEQ ID NO: 1795924 - DNA, 15 bp, Homo sapiens
ccactgaaaaaacta

SEQ ID NO: 1795925 - DNA, 15 bp, Homo sapiens
cactgaaaaaactac

SEQ ID NO: 1795926 - DNA, 15 bp, Homo sapiens
actgaaaaaactacg

SEQ ID NO: 1795927 - DNA, 15 bp, Homo sapiens
ctgaaaaaactacgc

SEQ ID NO: 1795928 - DNA, 15 bp, Homo sapiens
tgaaaaaactacgct

SEQ ID NO: 1795929 - DNA, 15 bp, Homo sapiens
gaaaaaactacgctt

SEQ ID NO: 1795930 - DNA, 15 bp, Homo sapiens
aaaaaactacgcttt

SEQ ID NO: 1795931 - DNA, 15 bp, Homo sapiens
aaaaactacgctttg

SEQ ID NO: 1795932 - DNA, 15 bp, Homo sapiens
aaaactacgctttga

SEQ ID NO: 1795933 - DNA, 15 bp, Homo sapiens
aaactacgctttgat

SEQ ID NO: 1795934 - DNA, 15 bp, Homo sapiens
aactacgctttgata

SEQ ID NO: 1795935 - DNA, 15 bp, Homo sapiens
actacgctttgatat

SEQ ID NO: 1795936 - DNA, 15 bp, Homo sapiens
ctacgctttgatatt

SEQ ID NO: 1795937 - DNA, 15 bp, Homo sapiens
tacgctttgatattg

SEQ ID NO: 1795938 - DNA, 15 bp, Homo sapiens
acgctttgatattga

SEQ ID NO: 1795939 - DNA, 15 bp, Homo sapiens
cgctttgatattgaa

SEQ ID NO: 1795940 - DNA, 15 bp, Homo sapiens
gctttgatattgaag

SEQ ID NO: 1795941 - DNA, 15 bp, Homo sapiens
ctttgatattgaagg

SEQ ID NO: 1795942 - DNA, 15 bp, Homo sapiens
tttgatattgaagga

SEQ ID NO: 1795943 - DNA, 15 bp, Homo sapiens
ttgatattgaaggat

SEQ ID NO: 1795944 - DNA, 15 bp, Homo sapiens
tgatattgaaggatc

SEQ ID NO: 1795945 - DNA, 15 bp, Homo sapiens
gatattgaaggatca

SEQ ID NO: 1795946 - DNA, 15 bp, Homo sapiens
atattgaaggatcag

SEQ ID NO: 1795947 - DNA, 15 bp, Homo sapiens
tattgaaggatcaga

SEQ ID NO: 1795948 - DNA, 15 bp, Homo sapiens
attgaaggatcagat

SEQ ID NO: 1795949 - DNA, 15 bp, Homo sapiens
ttgaaggatcagatg

SEQ ID NO: 1795950 - DNA, 15 bp, Homo sapiens
tgaaggatcagatga

SEQ ID NO: 1795951 - DNA, 15 bp, Homo sapiens
gaaggatcagatgaa

SEQ ID NO: 1795952 - DNA, 15 bp, Homo sapiens
aaggatcagatgaag

SEQ ID NO: 1795953 - DNA, 15 bp, Homo sapiens
aggatcagatgaagc

SEQ ID NO: 1795954 - DNA, 15 bp, Homo sapiens
ggatcagatgaagca

SEQ ID NO: 1795955 - DNA, 15 bp, Homo sapiens
gatcagatgaagcag

SEQ ID NO: 1795956 - DNA, 15 bp, Homo sapiens
atcagatgaagcaga

SEQ ID NO: 1795957 - DNA, 15 bp, Homo sapiens
tcagatgaagcagat

SEQ ID NO: 1795958 - DNA, 15 bp, Homo sapiens
cagatgaagcagatg

SEQ ID NO: 1795959 - DNA, 15 bp, Homo sapiens
agatgaagcagatgg

SEQ ID NO: 1795960 - DNA, 15 bp, Homo sapiens
gatgaagcagatgga

SEQ ID NO: 1795961 - DNA, 15 bp, Homo sapiens
atgaagcagatggaa

SEQ ID NO: 1795962 - DNA, 15 bp, Homo sapiens
tgaagcagatggaag

SEQ ID NO: 1795963 - DNA, 15 bp, Homo sapiens
gaagcagatggaagg

SEQ ID NO: 1795964 - DNA, 15 bp, Homo sapiens
aagcagatggaaggt

SEQ ID NO: 1795965 - DNA, 15 bp, Homo sapiens
agcagatggaaggta

SEQ ID NO: 1795966 - DNA, 15 bp, Homo sapiens
gcagatggaaggtag

SEQ ID NO: 1795967 - DNA, 15 bp, Homo sapiens
cagatggaaggtagg

SEQ ID NO: 1795968 - DNA, 15 bp, Homo sapiens
agatggaaggtagga

SEQ ID NO: 1795969 - DNA, 15 bp, Homo sapiens
gatggaaggtaggaa

SEQ ID NO: 1795970 - DNA, 15 bp, Homo sapiens
atggaaggtaggaac

SEQ ID NO: 1795971 - DNA, 15 bp, Homo sapiens
tggaaggtaggaacc

SEQ ID NO: 1795972 - DNA, 15 bp, Homo sapiens
ggaaggtaggaacca

SEQ ID NO: 1795973 - DNA, 15 bp, Homo sapiens
gaaggtaggaaccag

SEQ ID NO: 1795974 - DNA, 15 bp, Homo sapiens
aaggtaggaaccagt

SEQ ID NO: 1795975 - DNA, 15 bp, Homo sapiens
aggtaggaaccagtt

SEQ ID NO: 1795976 - DNA, 15 bp, Homo sapiens
ggtaggaaccagttt

SEQ ID NO: 1795977 - DNA, 15 bp, Homo sapiens
gtaggaaccagtttt

SEQ ID NO: 1795978 - DNA, 15 bp, Homo sapiens
taggaaccagttttg

SEQ ID NO: 1795979 - DNA, 15 bp, Homo sapiens
aggaaccagttttga

SEQ ID NO: 1795980 - DNA, 15 bp, Homo sapiens
ggaaccagttttgaa

SEQ ID NO: 1795981 - DNA, 15 bp, Homo sapiens
gaaccagttttgaat

SEQ ID NO: 1795982 - DNA, 15 bp, Homo sapiens
aaccagttttgaatg

SEQ ID NO: 1795983 - DNA, 15 bp, Homo sapiens
accagttttgaatgt

SEQ ID NO: 1795984 - DNA, 15 bp, Homo sapiens
ccagttttgaatgtt

SEQ ID NO: 1795985 - DNA, 15 bp, Homo sapiens
cagttttgaatgttt

SEQ ID NO: 1795986 - DNA, 15 bp, Homo sapiens
agttttgaatgtttt

SEQ ID NO: 1795987 - DNA, 15 bp, Homo sapiens
gttttgaatgttttc

SEQ ID NO: 1795988 - DNA, 15 bp, Homo sapiens
ttttgaatgttttcc

SEQ ID NO: 1795989 - DNA, 15 bp, Homo sapiens
tttgaatgttttcca

SEQ ID NO: 1795990 - DNA, 15 bp, Homo sapiens
ttgaatgttttccag

SEQ ID NO: 1795991 - DNA, 15 bp, Homo sapiens
tgaatgttttccagt

SEQ ID NO: 1795992 - DNA, 15 bp, Homo sapiens
gaatgttttccagta

SEQ ID NO: 1795993 - DNA, 15 bp, Homo sapiens
aatgttttccagtag

SEQ ID NO: 1795994 - DNA, 15 bp, Homo sapiens
atgttttccagtagc

SEQ ID NO: 1795995 - DNA, 15 bp, Homo sapiens
tgttttccagtagcc

SEQ ID NO: 1795996 - DNA, 15 bp, Homo sapiens
gttttccagtagccg

SEQ ID NO: 1795997 - DNA, 15 bp, Homo sapiens
ttttccagtagccga

SEQ ID NO: 1795998 - DNA, 15 bp, Homo sapiens
tttccagtagccgag

SEQ ID NO: 1795999 - DNA, 15 bp, Homo sapiens
ttccagtagccgaga

SEQ ID NO: 1796000 - DNA, 15 bp, Homo sapiens
tccagtagccgagat

SEQ ID NO: 1796001 - DNA, 15 bp, Homo sapiens
ccagtagccgagatg

SEQ ID NO: 1796002 - DNA, 15 bp, Homo sapiens
cagtagccgagatgg

SEQ ID NO: 1796003 - DNA, 15 bp, Homo sapiens
agtagccgagatggt

SEQ ID NO: 1796004 - DNA, 15 bp, Homo sapiens
gtagccgagatggtc

SEQ ID NO: 1796005 - DNA, 15 bp, Homo sapiens
tagccgagatggtca

SEQ ID NO: 1796006 - DNA, 15 bp, Homo sapiens
agccgagatggtcat

SEQ ID NO: 1796007 - DNA, 15 bp, Homo sapiens
gccgagatggtcatc

SEQ ID NO: 1796008 - DNA, 15 bp, Homo sapiens
ccgagatggtcatct

SEQ ID NO: 1796009 - DNA, 15 bp, Homo sapiens
cgagatggtcatctg

SEQ ID NO: 1796010 - DNA, 15 bp, Homo sapiens
gagatggtcatctgg

SEQ ID NO: 1796011 - DNA, 15 bp, Homo sapiens
agatggtcatctggg

SEQ ID NO: 1796012 - DNA, 15 bp, Homo sapiens
gatggtcatctgggg

SEQ ID NO: 1796013 - DNA, 15 bp, Homo sapiens
atggtcatctgggga

SEQ ID NO: 1796014 - DNA, 15 bp, Homo sapiens
tggtcatctggggaa

SEQ ID NO: 1796015 - DNA, 15 bp, Homo sapiens
ggtcatctggggaat

SEQ ID NO: 1796016 - DNA, 15 bp, Homo sapiens
gtcatctggggaatc

SEQ ID NO: 1796017 - DNA, 15 bp, Homo sapiens
tcatctggggaatcc

SEQ ID NO: 1796018 - DNA, 15 bp, Homo sapiens
catctggggaatcca

SEQ ID NO: 1796019 - DNA, 15 bp, Homo sapiens
atctggggaatccag

SEQ ID NO: 1796020 - DNA, 15 bp, Homo sapiens
tctggggaatccaga

SEQ ID NO: 1796021 - DNA, 15 bp, Homo sapiens
ctggggaatccagag

SEQ ID NO: 1796022 - DNA, 15 bp, Homo sapiens
tggggaatccagagt

SEQ ID NO: 1796023 - DNA, 15 bp, Homo sapiens
ggggaatccagagtc

SEQ ID NO: 1796024 - DNA, 15 bp, Homo sapiens
gggaatccagagtct

SEQ ID NO: 1796025 - DNA, 15 bp, Homo sapiens
ggaatccagagtctc

SEQ ID NO: 1796026 - DNA, 15 bp, Homo sapiens
gaatccagagtctca

SEQ ID NO: 1796027 - DNA, 15 bp, Homo sapiens
aatccagagtctcag

SEQ ID NO: 1796028 - DNA, 15 bp, Homo sapiens
atccagagtctcagc

SEQ ID NO: 1796029 - DNA, 15 bp, Homo sapiens
tccagagtctcagca

SEQ ID NO: 1796030 - DNA, 15 bp, Homo sapiens
ccagagtctcagcac

SEQ ID NO: 1796031 - DNA, 15 bp, Homo sapiens
cagagtctcagcact

SEQ ID NO: 1796032 - DNA, 15 bp, Homo sapiens
agagtctcagcactg

SEQ ID NO: 1796033 - DNA, 15 bp, Homo sapiens
gagtctcagcactgc

SEQ ID NO: 1796034 - DNA, 15 bp, Homo sapiens
agtctcagcactgct

SEQ ID NO: 1796035 - DNA, 15 bp, Homo sapiens
gtctcagcactgctc

SEQ ID NO: 1796036 - DNA, 15 bp, Homo sapiens
tctcagcactgctcc

SEQ ID NO: 1796037 - DNA, 15 bp, Homo sapiens
ctcagcactgctcct

SEQ ID NO: 1796038 - DNA, 15 bp, Homo sapiens
tcagcactgctcctg

SEQ ID NO: 1796039 - DNA, 15 bp, Homo sapiens
cagcactgctcctgg

SEQ ID NO: 1796040 - DNA, 15 bp, Homo sapiens
agcactgctcctggc

SEQ ID NO: 1796041 - DNA, 15 bp, Homo sapiens
gcactgctcctggct

SEQ ID NO: 1796042 - DNA, 15 bp, Homo sapiens
cactgctcctggctt

SEQ ID NO: 1796043 - DNA, 15 bp, Homo sapiens
actgctcctggctta

SEQ ID NO: 1796044 - DNA, 15 bp, Homo sapiens
ctgctcctggcttat

SEQ ID NO: 1796045 - DNA, 15 bp, Homo sapiens
tgctcctggcttata

SEQ ID NO: 1796046 - DNA, 15 bp, Homo sapiens
gctcctggcttatac

SEQ ID NO: 1796047 - DNA, 15 bp, Homo sapiens
ctcctggcttatacc

SEQ ID NO: 1796048 - DNA, 15 bp, Homo sapiens
tcctggcttatacca

SEQ ID NO: 1796049 - DNA, 15 bp, Homo sapiens
cctggcttataccaa

SEQ ID NO: 1796050 - DNA, 15 bp, Homo sapiens
ctggcttataccaat

SEQ ID NO: 1796051 - DNA, 15 bp, Homo sapiens
tggcttataccaatt

SEQ ID NO: 1796052 - DNA, 15 bp, Homo sapiens
ggcttataccaattt

SEQ ID NO: 1796053 - DNA, 15 bp, Homo sapiens
gcttataccaatttc

SEQ ID NO: 1796054 - DNA, 15 bp, Homo sapiens
cttataccaatttct

SEQ ID NO: 1796055 - DNA, 15 bp, Homo sapiens
ttataccaatttctt

SEQ ID NO: 1796056 - DNA, 15 bp, Homo sapiens
tataccaatttcttt

SEQ ID NO: 1796057 - DNA, 15 bp, Homo sapiens
ataccaatttctttc

SEQ ID NO: 1796058 - DNA, 15 bp, Homo sapiens
taccaatttctttca

SEQ ID NO: 1796059 - DNA, 15 bp, Homo sapiens
accaatttctttcat

SEQ ID NO: 1796060 - DNA, 15 bp, Homo sapiens
ccaatttctttcatg

SEQ ID NO: 1796061 - DNA, 15 bp, Homo sapiens
caatttctttcatgc

SEQ ID NO: 1796062 - DNA, 15 bp, Homo sapiens
aatttctttcatgcc

SEQ ID NO: 1796063 - DNA, 15 bp, Homo sapiens
atttctttcatgcca

SEQ ID NO: 1796064 - DNA, 15 bp, Homo sapiens
tttctttcatgccaa

SEQ ID NO: 1796065 - DNA, 15 bp, Homo sapiens
ttctttcatgccaag

SEQ ID NO: 1796066 - DNA, 15 bp, Homo sapiens
tctttcatgccaagt

SEQ ID NO: 1796067 - DNA, 15 bp, Homo sapiens
ctttcatgccaagtt

SEQ ID NO: 1796068 - DNA, 15 bp, Homo sapiens
tttcatgccaagttt

SEQ ID NO: 1796069 - DNA, 15 bp, Homo sapiens
ttcatgccaagttta

SEQ ID NO: 1796070 - DNA, 15 bp, Homo sapiens
tcatgccaagtttat

SEQ ID NO: 1796071 - DNA, 15 bp, Homo sapiens
catgccaagtttatt

SEQ ID NO: 1796072 - DNA, 15 bp, Homo sapiens
atgccaagtttattt

SEQ ID NO: 1796073 - DNA, 15 bp, Homo sapiens
tgccaagtttatttg

SEQ ID NO: 1796074 - DNA, 15 bp, Homo sapiens
gccaagtttatttgg

SEQ ID NO: 1796075 - DNA, 15 bp, Homo sapiens
ccaagtttatttgga

SEQ ID NO: 1796076 - DNA, 15 bp, Homo sapiens
caagtttatttggaa

SEQ ID NO: 1796077 - DNA, 15 bp, Homo sapiens
aagtttatttggaag

SEQ ID NO: 1796078 - DNA, 15 bp, Homo sapiens
agtttatttggaagt

SEQ ID NO: 1796079 - DNA, 15 bp, Homo sapiens
gtttatttggaagtt

SEQ ID NO: 1796080 - DNA, 15 bp, Homo sapiens
tttatttggaagttg

SEQ ID NO: 1796081 - DNA, 15 bp, Homo sapiens
ttatttggaagttgt

SEQ ID NO: 1796082 - DNA, 15 bp, Homo sapiens
tatttggaagttgtg

SEQ ID NO: 1796083 - DNA, 15 bp, Homo sapiens
atttggaagttgtga

SEQ ID NO: 1796084 - DNA, 15 bp, Homo sapiens
tttggaagttgtgag

SEQ ID NO: 1796085 - DNA, 15 bp, Homo sapiens
ttggaagttgtgaga

SEQ ID NO: 1796086 - DNA, 15 bp, Homo sapiens
tggaagttgtgagaa

SEQ ID NO: 1796087 - DNA, 15 bp, Homo sapiens
ggaagttgtgagaat

SEQ ID NO: 1796088 - DNA, 15 bp, Homo sapiens
gaagttgtgagaatg

SEQ ID NO: 1796089 - DNA, 15 bp, Homo sapiens
aagttgtgagaatgg

SEQ ID NO: 1796090 - DNA, 15 bp, Homo sapiens
agttgtgagaatggc

SEQ ID NO: 1796091 - DNA, 15 bp, Homo sapiens
gttgtgagaatggct

SEQ ID NO: 1796092 - DNA, 15 bp, Homo sapiens
ttgtgagaatggctc

SEQ ID NO: 1796093 - DNA, 15 bp, Homo sapiens
tgtgagaatggctca

SEQ ID NO: 1796094 - DNA, 15 bp, Homo sapiens
gtgagaatggctcaa

SEQ ID NO: 1796095 - DNA, 15 bp, Homo sapiens
tgagaatggctcaaa

SEQ ID NO: 1796096 - DNA, 15 bp, Homo sapiens
gagaatggctcaaaa

SEQ ID NO: 1796097 - DNA, 15 bp, Homo sapiens
agaatggctcaaaat

SEQ ID NO: 1796098 - DNA, 15 bp, Homo sapiens
gaatggctcaaaata

SEQ ID NO: 1796099 - DNA, 15 bp, Homo sapiens
aatggctcaaaataa

SEQ ID NO: 1796100 - DNA, 15 bp, Homo sapiens
atggctcaaaataat

SEQ ID NO: 1796101 - DNA, 15 bp, Homo sapiens
tggctcaaaataata

SEQ ID NO: 1796102 - DNA, 15 bp, Homo sapiens
ggctcaaaataatag

SEQ ID NO: 1796103 - DNA, 15 bp, Homo sapiens
gctcaaaataataga

SEQ ID NO: 1796104 - DNA, 15 bp, Homo sapiens
ctcaaaataatagat

SEQ ID NO: 1796105 - DNA, 15 bp, Homo sapiens
tcaaaataatagata

SEQ ID NO: 1796106 - DNA, 15 bp, Homo sapiens
caaaataatagatat

SEQ ID NO: 1796107 - DNA, 15 bp, Homo sapiens
aaaataatagatatg

SEQ ID NO: 1796108 - DNA, 15 bp, Homo sapiens
aaataatagatatga

SEQ ID NO: 1796109 - DNA, 15 bp, Homo sapiens
aataatagatatgag

SEQ ID NO: 1796110 - DNA, 15 bp, Homo sapiens
ataatagatatgagt

SEQ ID NO: 1796111 - DNA, 15 bp, Homo sapiens
taatagatatgagtg

SEQ ID NO: 1796112 - DNA, 15 bp, Homo sapiens
aatagatatgagtgt

SEQ ID NO: 1796113 - DNA, 15 bp, Homo sapiens
atagatatgagtgta

SEQ ID NO: 1796114 - DNA, 15 bp, Homo sapiens
tagatatgagtgtag

SEQ ID NO: 1796115 - DNA, 15 bp, Homo sapiens
agatatgagtgtagt

SEQ ID NO: 1796116 - DNA, 15 bp, Homo sapiens
gatatgagtgtagtg

SEQ ID NO: 1796117 - DNA, 15 bp, Homo sapiens
atatgagtgtagtgc

SEQ ID NO: 1796118 - DNA, 15 bp, Homo sapiens
tatgagtgtagtgca

SEQ ID NO: 1796119 - DNA, 15 bp, Homo sapiens
atgagtgtagtgcaa

SEQ ID NO: 1796120 - DNA, 15 bp, Homo sapiens
tgagtgtagtgcaaa

SEQ ID NO: 1796121 - DNA, 15 bp, Homo sapiens
gagtgtagtgcaaag

SEQ ID NO: 1796122 - DNA, 15 bp, Homo sapiens
agtgtagtgcaaagt

SEQ ID NO: 1796123 - DNA, 15 bp, Homo sapiens
gtgtagtgcaaagtt

SEQ ID NO: 1796124 - DNA, 15 bp, Homo sapiens
tgtagtgcaaagtta

SEQ ID NO: 1796125 - DNA, 15 bp, Homo sapiens
gtagtgcaaagttaa

SEQ ID NO: 1796126 - DNA, 15 bp, Homo sapiens
tagtgcaaagttaaa

SEQ ID NO: 1796127 - DNA, 15 bp, Homo sapiens
agtgcaaagttaaaa

SEQ ID NO: 1796128 - DNA, 15 bp, Homo sapiens
gtgcaaagttaaaaa

SEQ ID NO: 1796129 - DNA, 15 bp, Homo sapiens
tgcaaagttaaaaac

SEQ ID NO: 1796130 - DNA, 15 bp, Homo sapiens
gcaaagttaaaaaca

SEQ ID NO: 1796131 - DNA, 15 bp, Homo sapiens
caaagttaaaaacat

SEQ ID NO: 1796132 - DNA, 15 bp, Homo sapiens
aaagttaaaaacatc

SEQ ID NO: 1796133 - DNA, 15 bp, Homo sapiens
aagttaaaaacatct

SEQ ID NO: 1796134 - DNA, 15 bp, Homo sapiens
agttaaaaacatctt

SEQ ID NO: 1796135 - DNA, 15 bp, Homo sapiens
gttaaaaacatctta

SEQ ID NO: 1796136 - DNA, 15 bp, Homo sapiens
ttaaaaacatcttac

SEQ ID NO: 1796137 - DNA, 15 bp, Homo sapiens
taaaaacatcttaca

SEQ ID NO: 1796138 - DNA, 15 bp, Homo sapiens
aaaaacatcttacaa

SEQ ID NO: 1796139 - DNA, 15 bp, Homo sapiens
aaaacatcttacaaa

SEQ ID NO: 1796140 - DNA, 15 bp, Homo sapiens
aaacatcttacaaat

SEQ ID NO: 1796141 - DNA, 15 bp, Homo sapiens
aacatcttacaaatt

SEQ ID NO: 1796142 - DNA, 15 bp, Homo sapiens
acatcttacaaattg

SEQ ID NO: 1796143 - DNA, 15 bp, Homo sapiens
catcttacaaattgc

SEQ ID NO: 1796144 - DNA, 15 bp, Homo sapiens
atcttacaaattgca

SEQ ID NO: 1796145 - DNA, 15 bp, Homo sapiens
tcttacaaattgcat

SEQ ID NO: 1796146 - DNA, 15 bp, Homo sapiens
cttacaaattgcata

SEQ ID NO: 1796147 - DNA, 15 bp, Homo sapiens
ttacaaattgcatac

SEQ ID NO: 1796148 - DNA, 15 bp, Homo sapiens
tacaaattgcatacc

SEQ ID NO: 1796149 - DNA, 15 bp, Homo sapiens
acaaattgcatacca

SEQ ID NO: 1796150 - DNA, 15 bp, Homo sapiens
caaattgcataccaa

SEQ ID NO: 1796151 - DNA, 15 bp, Homo sapiens
aaattgcataccaac

SEQ ID NO: 1796152 - DNA, 15 bp, Homo sapiens
aattgcataccaaca

SEQ ID NO: 1796153 - DNA, 15 bp, Homo sapiens
attgcataccaacat

SEQ ID NO: 1796154 - DNA, 15 bp, Homo sapiens
ttgcataccaacatt

SEQ ID NO: 1796155 - DNA, 15 bp, Homo sapiens
tgcataccaacattc

SEQ ID NO: 1796156 - DNA, 15 bp, Homo sapiens
gcataccaacattca

SEQ ID NO: 1796157 - DNA, 15 bp, Homo sapiens
cataccaacattcag

SEQ ID NO: 1796158 - DNA, 15 bp, Homo sapiens
ataccaacattcagt

SEQ ID NO: 1796159 - DNA, 15 bp, Homo sapiens
taccaacattcagtg

SEQ ID NO: 1796160 - DNA, 15 bp, Homo sapiens
accaacattcagtga

SEQ ID NO: 1796161 - DNA, 15 bp, Homo sapiens
ccaacattcagtgaa

SEQ ID NO: 1796162 - DNA, 15 bp, Homo sapiens
caacattcagtgaag

SEQ ID NO: 1796163 - DNA, 15 bp, Homo sapiens
aacattcagtgaaga

SEQ ID NO: 1796164 - DNA, 15 bp, Homo sapiens
acattcagtgaagat

SEQ ID NO: 1796165 - DNA, 15 bp, Homo sapiens
cattcagtgaagata

SEQ ID NO: 1796166 - DNA, 15 bp, Homo sapiens
attcagtgaagatat

SEQ ID NO: 1796167 - DNA, 15 bp, Homo sapiens
ttcagtgaagatatc

SEQ ID NO: 1796168 - DNA, 15 bp, Homo sapiens
tcagtgaagatatct

SEQ ID NO: 1796169 - DNA, 15 bp, Homo sapiens
cagtgaagatatcta

SEQ ID NO: 1796170 - DNA, 15 bp, Homo sapiens
agtgaagatatctaa

SEQ ID NO: 1796171 - DNA, 15 bp, Homo sapiens
gtgaagatatctaat

SEQ ID NO: 1796172 - DNA, 15 bp, Homo sapiens
tgaagatatctaata

SEQ ID NO: 1796173 - DNA, 15 bp, Homo sapiens
gaagatatctaataa

SEQ ID NO: 1796174 - DNA, 15 bp, Homo sapiens
aagatatctaataaa

SEQ ID NO: 1796175 - DNA, 15 bp, Homo sapiens
agatatctaataaac

SEQ ID NO: 1796176 - DNA, 15 bp, Homo sapiens
gatatctaataaacc

SEQ ID NO: 1796177 - DNA, 15 bp, Homo sapiens
atatctaataaaccc

SEQ ID NO: 1796178 - DNA, 15 bp, Homo sapiens
tatctaataaaccct

SEQ ID NO: 1796179 - DNA, 15 bp, Homo sapiens
atctaataaaccctg

SEQ ID NO: 1796180 - DNA, 15 bp, Homo sapiens
tctaataaaccctga

SEQ ID NO: 1796181 - DNA, 15 bp, Homo sapiens
ctaataaaccctgat

SEQ ID NO: 1796182 - DNA, 15 bp, Homo sapiens
taataaaccctgatc

SEQ ID NO: 1796183 - DNA, 15 bp, Homo sapiens
aataaaccctgatct

SEQ ID NO: 1796184 - DNA, 15 bp, Homo sapiens
ataaaccctgatctt

SEQ ID NO: 1796185 - DNA, 15 bp, Homo sapiens
taaaccctgatcttt

SEQ ID NO: 1796186 - DNA, 15 bp, Homo sapiens
aaaccctgatctttt

SEQ ID NO: 1796187 - DNA, 15 bp, Homo sapiens
aaccctgatcttttt

SEQ ID NO: 1796188 - DNA, 15 bp, Homo sapiens
accctgatctttttt

SEQ ID NO: 1796189 - DNA, 15 bp, Homo sapiens
ccctgatctttttta

SEQ ID NO: 1796190 - DNA, 15 bp, Homo sapiens
cctgatcttttttac

SEQ ID NO: 1796191 - DNA, 15 bp, Homo sapiens
ctgatcttttttaca

SEQ ID NO: 1796192 - DNA, 15 bp, Homo sapiens
tgatcttttttacaa

SEQ ID NO: 1796193 - DNA, 15 bp, Homo sapiens
gatcttttttacaaa

SEQ ID NO: 1796194 - DNA, 15 bp, Homo sapiens
atcttttttacaaag

SEQ ID NO: 1796195 - DNA, 15 bp, Homo sapiens
tcttttttacaaagc

SEQ ID NO: 1796196 - DNA, 15 bp, Homo sapiens
cttttttacaaagct

SEQ ID NO: 1796197 - DNA, 15 bp, Homo sapiens
ttttttacaaagcta

SEQ ID NO: 1796198 - DNA, 15 bp, Homo sapiens
tttttacaaagctat

SEQ ID NO: 1796199 - DNA, 15 bp, Homo sapiens
ttttacaaagctatt

SEQ ID NO: 1796200 - DNA, 15 bp, Homo sapiens
tttacaaagctattg

SEQ ID NO: 1796201 - DNA, 15 bp, Homo sapiens
ttacaaagctattga

SEQ ID NO: 1796202 - DNA, 15 bp, Homo sapiens
tacaaagctattgat

SEQ ID NO: 1796203 - DNA, 15 bp, Homo sapiens
acaaagctattgata

SEQ ID NO: 1796204 - DNA, 15 bp, Homo sapiens
caaagctattgataa

SEQ ID NO: 1796205 - DNA, 15 bp, Homo sapiens
aaagctattgataaa

SEQ ID NO: 1796206 - DNA, 15 bp, Homo sapiens
aagctattgataaaa

SEQ ID NO: 1796207 - DNA, 15 bp, Homo sapiens
agctattgataaaat

SEQ ID NO: 1796208 - DNA, 15 bp, Homo sapiens
gctattgataaaatt

SEQ ID NO: 1796209 - DNA, 15 bp, Homo sapiens
ctattgataaaattt

SEQ ID NO: 1796210 - DNA, 15 bp, Homo sapiens
tattgataaaatttt

SEQ ID NO: 1796211 - DNA, 15 bp, Homo sapiens
attgataaaattttg

SEQ ID NO: 1796212 - DNA, 15 bp, Homo sapiens
ttgataaaattttgt

SEQ ID NO: 1796213 - DNA, 15 bp, Homo sapiens
tgataaaattttgtt

SEQ ID NO: 1796214 - DNA, 15 bp, Homo sapiens
gataaaattttgtta

SEQ ID NO: 1796215 - DNA, 15 bp, Homo sapiens
ataaaattttgttat

SEQ ID NO: 1796216 - DNA, 15 bp, Homo sapiens
taaaattttgttatt

SEQ ID NO: 1796217 - DNA, 15 bp, Homo sapiens
aaaattttgttattc

SEQ ID NO: 1796218 - DNA, 15 bp, Homo sapiens
aaattttgttattct

SEQ ID NO: 1796219 - DNA, 15 bp, Homo sapiens
aattttgttattctt

SEQ ID NO: 1796220 - DNA, 15 bp, Homo sapiens
attttgttattctta

SEQ ID NO: 1796221 - DNA, 15 bp, Homo sapiens
ttttgttattcttaa

SEQ ID NO: 1796222 - DNA, 15 bp, Homo sapiens
tttgttattcttaac

SEQ ID NO: 1796223 - DNA, 15 bp, Homo sapiens
ttgttattcttaaca

SEQ ID NO: 1796224 - DNA, 15 bp, Homo sapiens
tgttattcttaacat

SEQ ID NO: 1796225 - DNA, 15 bp, Homo sapiens
gttattcttaacatt

SEQ ID NO: 1796226 - DNA, 15 bp, Homo sapiens
tattcttaacattaa

SEQ ID NO: 1796227 - DNA, 15 bp, Homo sapiens
attcttaacattaaa

SEQ ID NO: 1796228 - DNA, 15 bp, Homo sapiens
ttcttaacattaaat

SEQ ID NO: 1796229 - DNA, 15 bp, Homo sapiens
tcttaacattaaatt

SEQ ID NO: 1796230 - DNA, 15 bp, Homo sapiens
cttaacattaaattt

SEQ ID NO: 1796231 - DNA, 15 bp, Homo sapiens
ttaacattaaattta

SEQ ID NO: 1796232 - DNA, 15 bp, Homo sapiens
taacattaaatttaa

SEQ ID NO: 1796233 - DNA, 15 bp, Homo sapiens
aacattaaatttaaa

SEQ ID NO: 1796234 - DNA, 15 bp, Homo sapiens
acattaaatttaaaa

SEQ ID NO: 1796235 - DNA, 15 bp, Homo sapiens
cattaaatttaaaaa

SEQ ID NO: 1796236 - DNA, 15 bp, Homo sapiens
attaaatttaaaaat

SEQ ID NO: 1796237 - DNA, 15 bp, Homo sapiens
ttaaatttaaaaatg

SEQ ID NO: 1796238 - DNA, 15 bp, Homo sapiens
taaatttaaaaatgt

SEQ ID NO: 1796239 - DNA, 15 bp, Homo sapiens
aaatttaaaaatgtt

SEQ ID NO: 1796240 - DNA, 15 bp, Homo sapiens
aatttaaaaatgttt

SEQ ID NO: 1796241 - DNA, 15 bp, Homo sapiens
atttaaaaatgttta

SEQ ID NO: 1796242 - DNA, 15 bp, Homo sapiens
tttaaaaatgtttac

SEQ ID NO: 1796243 - DNA, 15 bp, Homo sapiens
ttaaaaatgtttact

SEQ ID NO: 1796244 - DNA, 15 bp, Homo sapiens
taaaaatgtttactc

SEQ ID NO: 1796245 - DNA, 15 bp, Homo sapiens
aaaaatgtttactct

SEQ ID NO: 1796246 - DNA, 15 bp, Homo sapiens
aaaatgtttactctt

SEQ ID NO: 1796247 - DNA, 15 bp, Homo sapiens
aaatgtttactcttg

SEQ ID NO: 1796248 - DNA, 15 bp, Homo sapiens
aatgtttactcttga

SEQ ID NO: 1796249 - DNA, 15 bp, Homo sapiens
atgtttactcttgaa

SEQ ID NO: 1796250 - DNA, 15 bp, Homo sapiens
tgtttactcttgaaa

SEQ ID NO: 1796251 - DNA, 15 bp, Homo sapiens
gtttactcttgaaaa

SEQ ID NO: 1796252 - DNA, 15 bp, Homo sapiens
tttactcttgaaaaa

SEQ ID NO: 1796253 - DNA, 15 bp, Homo sapiens
ttactcttgaaaaat

SEQ ID NO: 1796254 - DNA, 15 bp, Homo sapiens
tactcttgaaaaata

SEQ ID NO: 1796255 - DNA, 15 bp, Homo sapiens
actcttgaaaaatat

SEQ ID NO: 1796256 - DNA, 15 bp, Homo sapiens
ctcttgaaaaatatt

SEQ ID NO: 1796257 - DNA, 15 bp, Homo sapiens
tcttgaaaaatatta

SEQ ID NO: 1796258 - DNA, 15 bp, Homo sapiens
cttgaaaaatattaa

SEQ ID NO: 1796259 - DNA, 15 bp, Homo sapiens
ttgaaaaatattaac

SEQ ID NO: 1796260 - DNA, 15 bp, Homo sapiens
tgaaaaatattaacc

SEQ ID NO: 1796261 - DNA, 15 bp, Homo sapiens
gaaaaatattaacca

SEQ ID NO: 1796262 - DNA, 15 bp, Homo sapiens
aaaaatattaaccac

SEQ ID NO: 1796263 - DNA, 15 bp, Homo sapiens
aaaatattaaccact

SEQ ID NO: 1796264 - DNA, 15 bp, Homo sapiens
aaatattaaccactg

SEQ ID NO: 1796265 - DNA, 15 bp, Homo sapiens
aatattaaccactgt

SEQ ID NO: 1796266 - DNA, 15 bp, Homo sapiens
atattaaccactgta

SEQ ID NO: 1796267 - DNA, 15 bp, Homo sapiens
tattaaccactgtat

SEQ ID NO: 1796268 - DNA, 15 bp, Homo sapiens
attaaccactgtatt

SEQ ID NO: 1796269 - DNA, 15 bp, Homo sapiens
ttaaccactgtattt

SEQ ID NO: 1796270 - DNA, 15 bp, Homo sapiens
taaccactgtatttt

SEQ ID NO: 1796271 - DNA, 15 bp, Homo sapiens
aaccactgtattttg

SEQ ID NO: 1796272 - DNA, 15 bp, Homo sapiens
accactgtattttgt

SEQ ID NO: 1796273 - DNA, 15 bp, Homo sapiens
ccactgtattttgtg

SEQ ID NO: 1796274 - DNA, 15 bp, Homo sapiens
cactgtattttgtga

SEQ ID NO: 1796275 - DNA, 15 bp, Homo sapiens
actgtattttgtgag

SEQ ID NO: 1796276 - DNA, 15 bp, Homo sapiens
ctgtattttgtgaga

SEQ ID NO: 1796277 - DNA, 15 bp, Homo sapiens
tgtattttgtgagaa

SEQ ID NO: 1796278 - DNA, 15 bp, Homo sapiens
gtattttgtgagaac

SEQ ID NO: 1796279 - DNA, 15 bp, Homo sapiens
tattttgtgagaacc

SEQ ID NO: 1796280 - DNA, 15 bp, Homo sapiens
attttgtgagaacca

SEQ ID NO: 1796281 - DNA, 15 bp, Homo sapiens
ttttgtgagaaccac

SEQ ID NO: 1796282 - DNA, 15 bp, Homo sapiens
tttgtgagaaccact

SEQ ID NO: 1796283 - DNA, 15 bp, Homo sapiens
ttgtgagaaccactg

SEQ ID NO: 1796284 - DNA, 15 bp, Homo sapiens
tgtgagaaccactga

SEQ ID NO: 1796285 - DNA, 15 bp, Homo sapiens
gtgagaaccactgaa

SEQ ID NO: 1796286 - DNA, 15 bp, Homo sapiens
gagaaccactgaaaa

SEQ ID NO: 1796287 - DNA, 15 bp, Homo sapiens
agaaccactgaaaaa

SEQ ID NO: 1796288 - DNA, 15 bp, Homo sapiens
gaaccactgaaaaaa

SEQ ID NO: 1796289 - DNA, 15 bp, Homo sapiens
aaccactgaaaaaat

SEQ ID NO: 1796290 - DNA, 15 bp, Homo sapiens
accactgaaaaaata

SEQ ID NO: 1796291 - DNA, 15 bp, Homo sapiens
ccactgaaaaaatac

SEQ ID NO: 1796292 - DNA, 15 bp, Homo sapiens
cactgaaaaaataca

SEQ ID NO: 1796293 - DNA, 15 bp, Homo sapiens
actgaaaaaatacat

SEQ ID NO: 1796294 - DNA, 15 bp, Homo sapiens
ctgaaaaaatacata

SEQ ID NO: 1796295 - DNA, 15 bp, Homo sapiens
tgaaaaaatacatag

SEQ ID NO: 1796296 - DNA, 15 bp, Homo sapiens
gaaaaaatacatagc

SEQ ID NO: 1796297 - DNA, 15 bp, Homo sapiens
aaaaaatacatagca

SEQ ID NO: 1796298 - DNA, 15 bp, Homo sapiens
aaaaatacatagcat

SEQ ID NO: 1796299 - DNA, 15 bp, Homo sapiens
aaaatacatagcatc

SEQ ID NO: 1796300 - DNA, 15 bp, Homo sapiens
aaatacatagcatca

SEQ ID NO: 1796301 - DNA, 15 bp, Homo sapiens
aatacatagcatcat

SEQ ID NO: 1796302 - DNA, 15 bp, Homo sapiens
atacatagcatcata

SEQ ID NO: 1796303 - DNA, 15 bp, Homo sapiens
tacatagcatcataa

SEQ ID NO: 1796304 - DNA, 15 bp, Homo sapiens
acatagcatcataaa

SEQ ID NO: 1796305 - DNA, 15 bp, Homo sapiens
catagcatcataaat

SEQ ID NO: 1796306 - DNA, 15 bp, Homo sapiens
atagcatcataaatt

SEQ ID NO: 1796307 - DNA, 15 bp, Homo sapiens
tagcatcataaattt

SEQ ID NO: 1796308 - DNA, 15 bp, Homo sapiens
agcatcataaatttg

SEQ ID NO: 1796309 - DNA, 15 bp, Homo sapiens
gcatcataaatttgt

SEQ ID NO: 1796310 - DNA, 15 bp, Homo sapiens
catcataaatttgtg

SEQ ID NO: 1796311 - DNA, 15 bp, Homo sapiens
atcataaatttgtga

SEQ ID NO: 1796312 - DNA, 15 bp, Homo sapiens
tcataaatttgtgac

SEQ ID NO: 1796313 - DNA, 15 bp, Homo sapiens
cataaatttgtgaca

SEQ ID NO: 1796314 - DNA, 15 bp, Homo sapiens
ataaatttgtgacat

SEQ ID NO: 1796315 - DNA, 15 bp, Homo sapiens
taaatttgtgacatt

SEQ ID NO: 1796316 - DNA, 15 bp, Homo sapiens
aaatttgtgacattt

SEQ ID NO: 1796317 - DNA, 15 bp, Homo sapiens
aatttgtgacattta

SEQ ID NO: 1796318 - DNA, 15 bp, Homo sapiens
atttgtgacatttat

SEQ ID NO: 1796319 - DNA, 15 bp, Homo sapiens
tttgtgacatttatg

SEQ ID NO: 1796320 - DNA, 15 bp, Homo sapiens
ttgtgacatttatgt

SEQ ID NO: 1796321 - DNA, 15 bp, Homo sapiens
tgtgacatttatgtt

SEQ ID NO: 1796322 - DNA, 15 bp, Homo sapiens
gtgacatttatgttt

SEQ ID NO: 1796323 - DNA, 15 bp, Homo sapiens
tgacatttatgtttt

SEQ ID NO: 1796324 - DNA, 15 bp, Homo sapiens
gacatttatgtttta

SEQ ID NO: 1796325 - DNA, 15 bp, Homo sapiens
acatttatgttttag

SEQ ID NO: 1796326 - DNA, 15 bp, Homo sapiens
catttatgttttaga

SEQ ID NO: 1796327 - DNA, 15 bp, Homo sapiens
atttatgttttagat

SEQ ID NO: 1796328 - DNA, 15 bp, Homo sapiens
tttatgttttagatg

SEQ ID NO: 1796329 - DNA, 15 bp, Homo sapiens
ttatgttttagatgg

SEQ ID NO: 1796330 - DNA, 15 bp, Homo sapiens
tatgttttagatggt

SEQ ID NO: 1796331 - DNA, 15 bp, Homo sapiens
atgttttagatggtt

SEQ ID NO: 1796332 - DNA, 15 bp, Homo sapiens
tgttttagatggtta

SEQ ID NO: 1796333 - DNA, 15 bp, Homo sapiens
gttttagatggttag

SEQ ID NO: 1796334 - DNA, 15 bp, Homo sapiens
ttttagatggttagt

SEQ ID NO: 1796335 - DNA, 15 bp, Homo sapiens
tttagatggttagtt

SEQ ID NO: 1796336 - DNA, 15 bp, Homo sapiens
ttagatggttagttt

SEQ ID NO: 1796337 - DNA, 15 bp, Homo sapiens
tagatggttagtttt

SEQ ID NO: 1796338 - DNA, 15 bp, Homo sapiens
agatggttagttttt

SEQ ID NO: 1796339 - DNA, 15 bp, Homo sapiens
atggttagtttttaa

SEQ ID NO: 1796340 - DNA, 15 bp, Homo sapiens
tggttagtttttaaa

SEQ ID NO: 1796341 - DNA, 15 bp, Homo sapiens
ggttagtttttaaat

SEQ ID NO: 1796342 - DNA, 15 bp, Homo sapiens
gttagtttttaaatt

SEQ ID NO: 1796343 - DNA, 15 bp, Homo sapiens
ttagtttttaaattt

SEQ ID NO: 1796344 - DNA, 15 bp, Homo sapiens
tagtttttaaatttt

SEQ ID NO: 1796345 - DNA, 15 bp, Homo sapiens
agtttttaaatttta

SEQ ID NO: 1796346 - DNA, 15 bp, Homo sapiens
gtttttaaattttaa

SEQ ID NO: 1796347 - DNA, 15 bp, Homo sapiens
tttttaaattttaaa

SEQ ID NO: 1796348 - DNA, 15 bp, Homo sapiens
ttttaaattttaaaa

SEQ ID NO: 1796349 - DNA, 15 bp, Homo sapiens
tttaaattttaaaat

SEQ ID NO: 1796350 - DNA, 15 bp, Homo sapiens
ttaaattttaaaatt

SEQ ID NO: 1796351 - DNA, 15 bp, Homo sapiens
aaattttaaaattaa

SEQ ID NO: 1796352 - DNA, 15 bp, Homo sapiens
aattttaaaattaaa

SEQ ID NO: 1796353 - DNA, 15 bp, Homo sapiens
attttaaaattaaaa

SEQ ID NO: 1796354 - DNA, 15 bp, Homo sapiens
ttttaaaattaaaag

SEQ ID NO: 1796355 - DNA, 15 bp, Homo sapiens
tttaaaattaaaagc

SEQ ID NO: 1796356 - DNA, 15 bp, Homo sapiens
ttaaaattaaaagct

SEQ ID NO: 1796357 - DNA, 15 bp, Homo sapiens
taaaattaaaagcta

SEQ ID NO: 1796358 - DNA, 15 bp, Homo sapiens
aaaattaaaagctac

SEQ ID NO: 1796359 - DNA, 15 bp, Homo sapiens
aaattaaaagctact

SEQ ID NO: 1796360 - DNA, 15 bp, Homo sapiens
aattaaaagctactc

SEQ ID NO: 1796361 - DNA, 15 bp, Homo sapiens
attaaaagctactca

SEQ ID NO: 1796362 - DNA, 15 bp, Homo sapiens
ttaaaagctactcac

SEQ ID NO: 1796363 - DNA, 15 bp, Homo sapiens
taaaagctactcact

SEQ ID NO: 1796364 - DNA, 15 bp, Homo sapiens
aaaagctactcacta

SEQ ID NO: 1796365 - DNA, 15 bp, Homo sapiens
aaagctactcactaa

SEQ ID NO: 1796366 - DNA, 15 bp, Homo sapiens
aagctactcactaaa

SEQ ID NO: 1796367 - DNA, 15 bp, Homo sapiens
agctactcactaaaa

SEQ ID NO: 1796368 - DNA, 15 bp, Homo sapiens
gctactcactaaaat

SEQ ID NO: 1796369 - DNA, 15 bp, Homo sapiens
ctactcactaaaata

SEQ ID NO: 1796370 - DNA, 15 bp, Homo sapiens
tactcactaaaataa

SEQ ID NO: 1796371 - DNA, 15 bp, Homo sapiens
actcactaaaataat

SEQ ID NO: 1796372 - DNA, 15 bp, Homo sapiens
ctcactaaaataata

SEQ ID NO: 1796373 - DNA, 15 bp, Homo sapiens
tcactaaaataatag

SEQ ID NO: 1796374 - DNA, 15 bp, Homo sapiens
cactaaaataatagc

SEQ ID NO: 1796375 - DNA, 15 bp, Homo sapiens
actaaaataatagca

SEQ ID NO: 1796376 - DNA, 15 bp, Homo sapiens
ctaaaataatagcat

SEQ ID NO: 1796377 - DNA, 15 bp, Homo sapiens
taaaataatagcata

SEQ ID NO: 1796378 - DNA, 15 bp, Homo sapiens
aaaataatagcataa

SEQ ID NO: 1796379 - DNA, 15 bp, Homo sapiens
aaataatagcataaa

SEQ ID NO: 1796380 - DNA, 15 bp, Homo sapiens
aataatagcataaag

SEQ ID NO: 1796381 - DNA, 15 bp, Homo sapiens
ataatagcataaagt

SEQ ID NO: 1796382 - DNA, 15 bp, Homo sapiens
taatagcataaagta

SEQ ID NO: 1796383 - DNA, 15 bp, Homo sapiens
aatagcataaagtaa

SEQ ID NO: 1796384 - DNA, 15 bp, Homo sapiens
atagcataaagtaag

SEQ ID NO: 1796385 - DNA, 15 bp, Homo sapiens
tagcataaagtaagt

SEQ ID NO: 1796386 - DNA, 15 bp, Homo sapiens
agcataaagtaagtc

SEQ ID NO: 1796387 - DNA, 15 bp, Homo sapiens
gcataaagtaagtca

SEQ ID NO: 1796388 - DNA, 15 bp, Homo sapiens
cataaagtaagtcat

SEQ ID NO: 1796389 - DNA, 15 bp, Homo sapiens
ataaagtaagtcatc

SEQ ID NO: 1796390 - DNA, 15 bp, Homo sapiens
taaagtaagtcatcg

SEQ ID NO: 1796391 - DNA, 15 bp, Homo sapiens
aaagtaagtcatcga

SEQ ID NO: 1796392 - DNA, 15 bp, Homo sapiens
aagtaagtcatcgaa

SEQ ID NO: 1796393 - DNA, 15 bp, Homo sapiens
agtaagtcatcgaaa

SEQ ID NO: 1796394 - DNA, 15 bp, Homo sapiens
gtaagtcatcgaaag

SEQ ID NO: 1796395 - DNA, 15 bp, Homo sapiens
taagtcatcgaaagc

SEQ ID NO: 1796396 - DNA, 15 bp, Homo sapiens
aagtcatcgaaagca

SEQ ID NO: 1796397 - DNA, 15 bp, Homo sapiens
agtcatcgaaagcat

SEQ ID NO: 1796398 - DNA, 15 bp, Homo sapiens
gtcatcgaaagcatc

SEQ ID NO: 1796399 - DNA, 15 bp, Homo sapiens
tcatcgaaagcatca

SEQ ID NO: 1796400 - DNA, 15 bp, Homo sapiens
catcgaaagcatcat

SEQ ID NO: 1796401 - DNA, 15 bp, Homo sapiens
atcgaaagcatcata

SEQ ID NO: 1796402 - DNA, 15 bp, Homo sapiens
tcgaaagcatcatag

SEQ ID NO: 1796403 - DNA, 15 bp, Homo sapiens
cgaaagcatcatagt

SEQ ID NO: 1796404 - DNA, 15 bp, Homo sapiens
gaaagcatcatagtt

SEQ ID NO: 1796405 - DNA, 15 bp, Homo sapiens
aaagcatcatagtta

SEQ ID NO: 1796406 - DNA, 15 bp, Homo sapiens
aagcatcatagttac

SEQ ID NO: 1796407 - DNA, 15 bp, Homo sapiens
agcatcatagttact

SEQ ID NO: 1796408 - DNA, 15 bp, Homo sapiens
gcatcatagttactg

SEQ ID NO: 1796409 - DNA, 15 bp, Homo sapiens
catcatagttactgg

SEQ ID NO: 1796410 - DNA, 15 bp, Homo sapiens
atcatagttactgga

SEQ ID NO: 1796411 - DNA, 15 bp, Homo sapiens
tcatagttactggaa

SEQ ID NO: 1796412 - DNA, 15 bp, Homo sapiens
catagttactggaaa

SEQ ID NO: 1796413 - DNA, 15 bp, Homo sapiens
atagttactggaaat

SEQ ID NO: 1796414 - DNA, 15 bp, Homo sapiens
tagttactggaaatt

SEQ ID NO: 1796415 - DNA, 15 bp, Homo sapiens
agttactggaaattt

SEQ ID NO: 1796416 - DNA, 15 bp, Homo sapiens
gttactggaaatttg

SEQ ID NO: 1796417 - DNA, 15 bp, Homo sapiens
ttactggaaatttga

SEQ ID NO: 1796418 - DNA, 15 bp, Homo sapiens
tactggaaatttgag

SEQ ID NO: 1796419 - DNA, 15 bp, Homo sapiens
actggaaatttgagt

SEQ ID NO: 1796420 - DNA, 15 bp, Homo sapiens
ctggaaatttgagtt

SEQ ID NO: 1796421 - DNA, 15 bp, Homo sapiens
tggaaatttgagttt

SEQ ID NO: 1796422 - DNA, 15 bp, Homo sapiens
ggaaatttgagtttt

SEQ ID NO: 1796423 - DNA, 15 bp, Homo sapiens
gaaatttgagttttc

SEQ ID NO: 1796424 - DNA, 15 bp, Homo sapiens
aaatttgagttttcc

SEQ ID NO: 1796425 - DNA, 15 bp, Homo sapiens
aatttgagttttcca

SEQ ID NO: 1796426 - DNA, 15 bp, Homo sapiens
atttgagttttccat

SEQ ID NO: 1796427 - DNA, 15 bp, Homo sapiens
tttgagttttccatt

SEQ ID NO: 1796428 - DNA, 15 bp, Homo sapiens
ttgagttttccattt

SEQ ID NO: 1796429 - DNA, 15 bp, Homo sapiens
tgagttttccattta

SEQ ID NO: 1796430 - DNA, 15 bp, Homo sapiens
gagttttccatttat

SEQ ID NO: 1796431 - DNA, 15 bp, Homo sapiens
agttttccatttata

SEQ ID NO: 1796432 - DNA, 15 bp, Homo sapiens
gttttccatttataa

SEQ ID NO: 1796433 - DNA, 15 bp, Homo sapiens
ttttccatttataaa

SEQ ID NO: 1796434 - DNA, 15 bp, Homo sapiens
tttccatttataaat

SEQ ID NO: 1796435 - DNA, 15 bp, Homo sapiens
ttccatttataaata

SEQ ID NO: 1796436 - DNA, 15 bp, Homo sapiens
tccatttataaatac

SEQ ID NO: 1796437 - DNA, 15 bp, Homo sapiens
ccatttataaataca

SEQ ID NO: 1796438 - DNA, 15 bp, Homo sapiens
catttataaatacac

SEQ ID NO: 1796439 - DNA, 15 bp, Homo sapiens
atttataaatacaca

SEQ ID NO: 1796440 - DNA, 15 bp, Homo sapiens
tttataaatacacat

SEQ ID NO: 1796441 - DNA, 15 bp, Homo sapiens
ttataaatacacatg

SEQ ID NO: 1796442 - DNA, 15 bp, Homo sapiens
tataaatacacatga

SEQ ID NO: 1796443 - DNA, 15 bp, Homo sapiens
ataaatacacatgaa

SEQ ID NO: 1796444 - DNA, 15 bp, Homo sapiens
taaatacacatgaaa

SEQ ID NO: 1796445 - DNA, 15 bp, Homo sapiens
aaatacacatgaaat

SEQ ID NO: 1796446 - DNA, 15 bp, Homo sapiens
aatacacatgaaatg

SEQ ID NO: 1796447 - DNA, 15 bp, Homo sapiens
atacacatgaaatgt

SEQ ID NO: 1796448 - DNA, 15 bp, Homo sapiens
tacacatgaaatgtt

SEQ ID NO: 1796449 - DNA, 15 bp, Homo sapiens
acacatgaaatgttt

SEQ ID NO: 1796450 - DNA, 15 bp, Homo sapiens
cacatgaaatgtttt

SEQ ID NO: 1796451 - DNA, 15 bp, Homo sapiens
acatgaaatgttttg

SEQ ID NO: 1796452 - DNA, 15 bp, Homo sapiens
catgaaatgttttgc

SEQ ID NO: 1796453 - DNA, 15 bp, Homo sapiens
atgaaatgttttgca

SEQ ID NO: 1796454 - DNA, 15 bp, Homo sapiens
tgaaatgttttgcat

SEQ ID NO: 1796455 - DNA, 15 bp, Homo sapiens
gaaatgttttgcatt

SEQ ID NO: 1796456 - DNA, 15 bp, Homo sapiens
aaatgttttgcattt

SEQ ID NO: 1796457 - DNA, 15 bp, Homo sapiens
aatgttttgcatttt

SEQ ID NO: 1796458 - DNA, 15 bp, Homo sapiens
atgttttgcattttt

SEQ ID NO: 1796459 - DNA, 15 bp, Homo sapiens
tgttttgcatttttt

SEQ ID NO: 1796460 - DNA, 15 bp, Homo sapiens
gttttgcattttttt

SEQ ID NO: 1796461 - DNA, 15 bp, Homo sapiens
ttttgcattttttta

SEQ ID NO: 1796462 - DNA, 15 bp, Homo sapiens
tttgcatttttttaa

SEQ ID NO: 1796463 - DNA, 15 bp, Homo sapiens
ttgcatttttttaat

SEQ ID NO: 1796464 - DNA, 15 bp, Homo sapiens
tgcatttttttaatc

SEQ ID NO: 1796465 - DNA, 15 bp, Homo sapiens
gcatttttttaatct

SEQ ID NO: 1796466 - DNA, 15 bp, Homo sapiens
catttttttaatctg

SEQ ID NO: 1796467 - DNA, 15 bp, Homo sapiens
atttttttaatctgc

SEQ ID NO: 1796468 - DNA, 15 bp, Homo sapiens
tttttttaatctgca

SEQ ID NO: 1796469 - DNA, 15 bp, Homo sapiens
ttttttaatctgcag

SEQ ID NO: 1796470 - DNA, 15 bp, Homo sapiens
tttttaatctgcagt

SEQ ID NO: 1796471 - DNA, 15 bp, Homo sapiens
ttttaatctgcagta

SEQ ID NO: 1796472 - DNA, 15 bp, Homo sapiens
tttaatctgcagtaa

SEQ ID NO: 1796473 - DNA, 15 bp, Homo sapiens
ttaatctgcagtaaa

SEQ ID NO: 1796474 - DNA, 15 bp, Homo sapiens
taatctgcagtaaac

SEQ ID NO: 1796475 - DNA, 15 bp, Homo sapiens
aatctgcagtaaaca

SEQ ID NO: 1796476 - DNA, 15 bp, Homo sapiens
atctgcagtaaacat

SEQ ID NO: 1796477 - DNA, 15 bp, Homo sapiens
tctgcagtaaacatc

SEQ ID NO: 1796478 - DNA, 15 bp, Homo sapiens
ctgcagtaaacatct

SEQ ID NO: 1796479 - DNA, 15 bp, Homo sapiens
tgcagtaaacatctc

SEQ ID NO: 1796480 - DNA, 15 bp, Homo sapiens
gcagtaaacatctcc

SEQ ID NO: 1796481 - DNA, 15 bp, Homo sapiens
cagtaaacatctccc

SEQ ID NO: 1796482 - DNA, 15 bp, Homo sapiens
agtaaacatctccca

SEQ ID NO: 1796483 - DNA, 15 bp, Homo sapiens
gtaaacatctcccag

SEQ ID NO: 1796484 - DNA, 15 bp, Homo sapiens
taaacatctcccagg

SEQ ID NO: 1796485 - DNA, 15 bp, Homo sapiens
aaacatctcccagga

SEQ ID NO: 1796486 - DNA, 15 bp, Homo sapiens
aacatctcccaggag

SEQ ID NO: 1796487 - DNA, 15 bp, Homo sapiens
acatctcccaggaga

SEQ ID NO: 1796488 - DNA, 15 bp, Homo sapiens
catctcccaggagag

SEQ ID NO: 1796489 - DNA, 15 bp, Homo sapiens
atctcccaggagagt

SEQ ID NO: 1796490 - DNA, 15 bp, Homo sapiens
tctcccaggagagtc

SEQ ID NO: 1796491 - DNA, 15 bp, Homo sapiens
ctcccaggagagtcc

SEQ ID NO: 1796492 - DNA, 15 bp, Homo sapiens
tcccaggagagtcca

SEQ ID NO: 1796493 - DNA, 15 bp, Homo sapiens
cccaggagagtccaa

SEQ ID NO: 1796494 - DNA, 15 bp, Homo sapiens
ccaggagagtccaaa

SEQ ID NO: 1796495 - DNA, 15 bp, Homo sapiens
caggagagtccaaat

SEQ ID NO: 1796496 - DNA, 15 bp, Homo sapiens
aggagagtccaaatt

SEQ ID NO: 1796497 - DNA, 15 bp, Homo sapiens
ggagagtccaaattt

SEQ ID NO: 1796498 - DNA, 15 bp, Homo sapiens
gagagtccaaatttc

SEQ ID NO: 1796499 - DNA, 15 bp, Homo sapiens
agagtccaaatttca

SEQ ID NO: 1796500 - DNA, 15 bp, Homo sapiens
gagtccaaatttcag

SEQ ID NO: 1796501 - DNA, 15 bp, Homo sapiens
agtccaaatttcagc

SEQ ID NO: 1796502 - DNA, 15 bp, Homo sapiens
gtccaaatttcagca

SEQ ID NO: 1796503 - DNA, 15 bp, Homo sapiens
tccaaatttcagcag

SEQ ID NO: 1796504 - DNA, 15 bp, Homo sapiens
ccaaatttcagcaga

SEQ ID NO: 1796505 - DNA, 15 bp, Homo sapiens
caaatttcagcagaa

SEQ ID NO: 1796506 - DNA, 15 bp, Homo sapiens
aaatttcagcagaaa

SEQ ID NO: 1796507 - DNA, 15 bp, Homo sapiens
aatttcagcagaaac

SEQ ID NO: 1796508 - DNA, 15 bp, Homo sapiens
atttcagcagaaact

SEQ ID NO: 1796509 - DNA, 15 bp, Homo sapiens
tttcagcagaaactg

SEQ ID NO: 1796510 - DNA, 15 bp, Homo sapiens
ttcagcagaaactgg

SEQ ID NO: 1796511 - DNA, 15 bp, Homo sapiens
tcagcagaaactggc

SEQ ID NO: 1796512 - DNA, 15 bp, Homo sapiens
cagcagaaactggca

SEQ ID NO: 1796513 - DNA, 15 bp, Homo sapiens
agcagaaactggcag

SEQ ID NO: 1796514 - DNA, 15 bp, Homo sapiens
gcagaaactggcaga

SEQ ID NO: 1796515 - DNA, 15 bp, Homo sapiens
cagaaactggcagaa

SEQ ID NO: 1796516 - DNA, 15 bp, Homo sapiens
agaaactggcagaaa

SEQ ID NO: 1796517 - DNA, 15 bp, Homo sapiens
gaaactggcagaaat

SEQ ID NO: 1796518 - DNA, 15 bp, Homo sapiens
aaactggcagaaatg

SEQ ID NO: 1796519 - DNA, 15 bp, Homo sapiens
aactggcagaaatga

SEQ ID NO: 1796520 - DNA, 15 bp, Homo sapiens
actggcagaaatgag

SEQ ID NO: 1796521 - DNA, 15 bp, Homo sapiens
ctggcagaaatgagt

SEQ ID NO: 1796522 - DNA, 15 bp, Homo sapiens
tggcagaaatgagta

SEQ ID NO: 1796523 - DNA, 15 bp, Homo sapiens
ggcagaaatgagtaa

SEQ ID NO: 1796524 - DNA, 15 bp, Homo sapiens
gcagaaatgagtaag

SEQ ID NO: 1796525 - DNA, 15 bp, Homo sapiens
cagaaatgagtaagt

SEQ ID NO: 1796526 - DNA, 15 bp, Homo sapiens
agaaatgagtaagta

SEQ ID NO: 1796527 - DNA, 15 bp, Homo sapiens
gaaatgagtaagtac

SEQ ID NO: 1796528 - DNA, 15 bp, Homo sapiens
aaatgagtaagtact

SEQ ID NO: 1796529 - DNA, 15 bp, Homo sapiens
aatgagtaagtactt

SEQ ID NO: 1796530 - DNA, 15 bp, Homo sapiens
atgagtaagtacttt

SEQ ID NO: 1796531 - DNA, 15 bp, Homo sapiens
tgagtaagtactttt

SEQ ID NO: 1796532 - DNA, 15 bp, Homo sapiens
gagtaagtacttttt

SEQ ID NO: 1796533 - DNA, 15 bp, Homo sapiens
agtaagtactttttt

SEQ ID NO: 1796534 - DNA, 15 bp, Homo sapiens
gtaagtacttttttc

SEQ ID NO: 1796535 - DNA, 15 bp, Homo sapiens
taagtacttttttca

SEQ ID NO: 1796536 - DNA, 15 bp, Homo sapiens
aagtacttttttcac

SEQ ID NO: 1796537 - DNA, 15 bp, Homo sapiens
agtacttttttcacc

SEQ ID NO: 1796538 - DNA, 15 bp, Homo sapiens
gtacttttttcacct

SEQ ID NO: 1796539 - DNA, 15 bp, Homo sapiens
tacttttttcacctt

SEQ ID NO: 1796540 - DNA, 15 bp, Homo sapiens
acttttttcaccttg

SEQ ID NO: 1796541 - DNA, 15 bp, Homo sapiens
cttttttcaccttgt

SEQ ID NO: 1796542 - DNA, 15 bp, Homo sapiens
ttttttcaccttgtg

SEQ ID NO: 1796543 - DNA, 15 bp, Homo sapiens
tttttcaccttgtgt

SEQ ID NO: 1796544 - DNA, 15 bp, Homo sapiens
ttttcaccttgtgta

SEQ ID NO: 1796545 - DNA, 15 bp, Homo sapiens
tttcaccttgtgtaa

SEQ ID NO: 1796546 - DNA, 15 bp, Homo sapiens
ttcaccttgtgtaaa

SEQ ID NO: 1796547 - DNA, 15 bp, Homo sapiens
tcaccttgtgtaaat

SEQ ID NO: 1796548 - DNA, 15 bp, Homo sapiens
caccttgtgtaaatg

SEQ ID NO: 1796549 - DNA, 15 bp, Homo sapiens
accttgtgtaaatga

SEQ ID NO: 1796550 - DNA, 15 bp, Homo sapiens
ccttgtgtaaatgaa

SEQ ID NO: 1796551 - DNA, 15 bp, Homo sapiens
ttgtgtaaatgaaat

SEQ ID NO: 1796552 - DNA, 15 bp, Homo sapiens
tgtgtaaatgaaata

SEQ ID NO: 1796553 - DNA, 15 bp, Homo sapiens
gtgtaaatgaaataa

SEQ ID NO: 1796554 - DNA, 15 bp, Homo sapiens
tgtaaatgaaataaa

SEQ ID NO: 1796555 - DNA, 15 bp, Homo sapiens
gtaaatgaaataaac

SEQ ID NO: 1796556 - DNA, 15 bp, Homo sapiens
taaatgaaataaaca

SEQ ID NO: 1796557 - DNA, 15 bp, Homo sapiens
aaatgaaataaacaa

SEQ ID NO: 1796558 - DNA, 15 bp, Homo sapiens
aatgaaataaacaat

SEQ ID NO: 1796559 - DNA, 15 bp, Homo sapiens
atgaaataaacaatt

SEQ ID NO: 1796560 - DNA, 15 bp, Homo sapiens
tgaaataaacaattg

SEQ ID NO: 1796561 - DNA, 15 bp, Homo sapiens
gaaataaacaattgt

SEQ ID NO: 1796562 - DNA, 15 bp, Homo sapiens
aaataaacaattgtt

SEQ ID NO: 1796563 - DNA, 15 bp, Homo sapiens
aataaacaattgttt

SEQ ID NO: 1796564 - DNA, 15 bp, Homo sapiens
ataaacaattgttta

SEQ ID NO: 1796565 - DNA, 15 bp, Homo sapiens
taaacaattgtttac

SEQ ID NO: 1796566 - DNA, 15 bp, Homo sapiens
aaacaattgtttaca

SEQ ID NO: 1796567 - DNA, 15 bp, Homo sapiens
aacaattgtttacac

SEQ ID NO: 1796568 - DNA, 15 bp, Homo sapiens
acaattgtttacact

SEQ ID NO: 1796569 - DNA, 15 bp, Homo sapiens
caattgtttacactg

SEQ ID NO: 1796570 - DNA, 15 bp, Homo sapiens
aattgtttacactgc

SEQ ID NO: 1796571 - DNA, 15 bp, Homo sapiens
attgtttacactgca

SEQ ID NO: 1796572 - DNA, 15 bp, Homo sapiens
ttgtttacactgcaa

SEQ ID NO: 1796573 - DNA, 15 bp, Homo sapiens
tgtttacactgcaag

SEQ ID NO: 1796574 - DNA, 15 bp, Homo sapiens
gtttacactgcaaga

SEQ ID NO: 1796575 - DNA, 15 bp, Homo sapiens
tttacactgcaagaa

SEQ ID NO: 1796576 - DNA, 15 bp, Homo sapiens
ttacactgcaagaag

SEQ ID NO: 1796577 - DNA, 15 bp, Homo sapiens
tacactgcaagaagt

SEQ ID NO: 1796578 - DNA, 15 bp, Homo sapiens
acactgcaagaagtc

SEQ ID NO: 1796579 - DNA, 15 bp, Homo sapiens
cactgcaagaagtct

SEQ ID NO: 1796580 - DNA, 15 bp, Homo sapiens
actgcaagaagtctt

SEQ ID NO: 1796581 - DNA, 15 bp, Homo sapiens
ctgcaagaagtcttt

SEQ ID NO: 1796582 - DNA, 15 bp, Homo sapiens
tgcaagaagtctttt

SEQ ID NO: 1796583 - DNA, 15 bp, Homo sapiens
gcaagaagtcttttc

SEQ ID NO: 1796584 - DNA, 15 bp, Homo sapiens
caagaagtcttttcg

SEQ ID NO: 1796585 - DNA, 15 bp, Homo sapiens
aagaagtcttttcgt

SEQ ID NO: 1796586 - DNA, 15 bp, Homo sapiens
agaagtcttttcgtt

SEQ ID NO: 1796587 - DNA, 15 bp, Homo sapiens
gaagtcttttcgtta

SEQ ID NO: 1796588 - DNA, 15 bp, Homo sapiens
aagtcttttcgttat

SEQ ID NO: 1796589 - DNA, 15 bp, Homo sapiens
agtcttttcgttata

SEQ ID NO: 1796590 - DNA, 15 bp, Homo sapiens
gtcttttcgttatat

SEQ ID NO: 1796591 - DNA, 15 bp, Homo sapiens
tcttttcgttatata

SEQ ID NO: 1796592 - DNA, 15 bp, Homo sapiens
cttttcgttatataa

SEQ ID NO: 1796593 - DNA, 15 bp, Homo sapiens
ttttcgttatataaa

SEQ ID NO: 1796594 - DNA, 15 bp, Homo sapiens
tttcgttatataaaa

SEQ ID NO: 1796595 - DNA, 15 bp, Homo sapiens
ttcgttatataaaag

SEQ ID NO: 1796596 - DNA, 15 bp, Homo sapiens
tcgttatataaaaga

SEQ ID NO: 1796597 - DNA, 15 bp, Homo sapiens
cgttatataaaagaa

SEQ ID NO: 1796598 - DNA, 15 bp, Homo sapiens
gttatataaaagaat

SEQ ID NO: 1796599 - DNA, 15 bp, Homo sapiens
ttatataaaagaatg

SEQ ID NO: 1796600 - DNA, 15 bp, Homo sapiens
tatataaaagaatgt

SEQ ID NO: 1796601 - DNA, 15 bp, Homo sapiens
atataaaagaatgta

SEQ ID NO: 1796602 - DNA, 15 bp, Homo sapiens
tataaaagaatgtat

SEQ ID NO: 1796603 - DNA, 15 bp, Homo sapiens
ataaaagaatgtata

SEQ ID NO: 1796604 - DNA, 15 bp, Homo sapiens
taaaagaatgtataa

SEQ ID NO: 1796605 - DNA, 15 bp, Homo sapiens
aaaagaatgtataat

SEQ ID NO: 1796606 - DNA, 15 bp, Homo sapiens
aaagaatgtataatt

SEQ ID NO: 1796607 - DNA, 15 bp, Homo sapiens
aagaatgtataattt

SEQ ID NO: 1796608 - DNA, 15 bp, Homo sapiens
agaatgtataatttc

SEQ ID NO: 1796609 - DNA, 15 bp, Homo sapiens
gaatgtataatttct

SEQ ID NO: 1796610 - DNA, 15 bp, Homo sapiens
aatgtataatttctt

SEQ ID NO: 1796611 - DNA, 15 bp, Homo sapiens
atgtataatttcttc

SEQ ID NO: 1796612 - DNA, 15 bp, Homo sapiens
tgtataatttcttca

SEQ ID NO: 1796613 - DNA, 15 bp, Homo sapiens
gtataatttcttcag

SEQ ID NO: 1796614 - DNA, 15 bp, Homo sapiens
tataatttcttcagt

SEQ ID NO: 1796615 - DNA, 15 bp, Homo sapiens
ataatttcttcagtt

SEQ ID NO: 1796616 - DNA, 15 bp, Homo sapiens
taatttcttcagttg

SEQ ID NO: 1796617 - DNA, 15 bp, Homo sapiens
aatttcttcagttgg

SEQ ID NO: 1796618 - DNA, 15 bp, Homo sapiens
atttcttcagttggc

SEQ ID NO: 1796619 - DNA, 15 bp, Homo sapiens
tttcttcagttggca

SEQ ID NO: 1796620 - DNA, 15 bp, Homo sapiens
ttcttcagttggcag

SEQ ID NO: 1796621 - DNA, 15 bp, Homo sapiens
tcttcagttggcagg

SEQ ID NO: 1796622 - DNA, 15 bp, Homo sapiens
cttcagttggcaggt

SEQ ID NO: 1796623 - DNA, 15 bp, Homo sapiens
ttcagttggcaggtt

SEQ ID NO: 1796624 - DNA, 15 bp, Homo sapiens
tcagttggcaggttt

SEQ ID NO: 1796625 - DNA, 15 bp, Homo sapiens
cagttggcaggtttg

SEQ ID NO: 1796626 - DNA, 15 bp, Homo sapiens
agttggcaggtttgt

SEQ ID NO: 1796627 - DNA, 15 bp, Homo sapiens
gttggcaggtttgtt

SEQ ID NO: 1796628 - DNA, 15 bp, Homo sapiens
ttggcaggtttgttt

SEQ ID NO: 1796629 - DNA, 15 bp, Homo sapiens
tggcaggtttgttta

SEQ ID NO: 1796630 - DNA, 15 bp, Homo sapiens
ggcaggtttgtttat

SEQ ID NO: 1796631 - DNA, 15 bp, Homo sapiens
gcaggtttgtttatg

SEQ ID NO: 1796632 - DNA, 15 bp, Homo sapiens
caggtttgtttatgc

SEQ ID NO: 1796633 - DNA, 15 bp, Homo sapiens
aggtttgtttatgca

SEQ ID NO: 1796634 - DNA, 15 bp, Homo sapiens
ggtttgtttatgcat

SEQ ID NO: 1796635 - DNA, 15 bp, Homo sapiens
gtttgtttatgcatt

SEQ ID NO: 1796636 - DNA, 15 bp, Homo sapiens
tttgtttatgcattt

SEQ ID NO: 1796637 - DNA, 15 bp, Homo sapiens
ttgtttatgcattta

SEQ ID NO: 1796638 - DNA, 15 bp, Homo sapiens
tgtttatgcatttaa

SEQ ID NO: 1796639 - DNA, 15 bp, Homo sapiens
gtttatgcatttaaa

SEQ ID NO: 1796640 - DNA, 15 bp, Homo sapiens
tttatgcatttaaaa

SEQ ID NO: 1796641 - DNA, 15 bp, Homo sapiens
ttatgcatttaaaat

SEQ ID NO: 1796642 - DNA, 15 bp, Homo sapiens
tatgcatttaaaata

SEQ ID NO: 1796643 - DNA, 15 bp, Homo sapiens
atgcatttaaaatat

SEQ ID NO: 1796644 - DNA, 15 bp, Homo sapiens
tgcatttaaaatata

SEQ ID NO: 1796645 - DNA, 15 bp, Homo sapiens
gcatttaaaatataa

SEQ ID NO: 1796646 - DNA, 15 bp, Homo sapiens
atttaaaatataatt

SEQ ID NO: 1796647 - DNA, 15 bp, Homo sapiens
tttaaaatataattc

SEQ ID NO: 1796648 - DNA, 15 bp, Homo sapiens
ttaaaatataattca

SEQ ID NO: 1796649 - DNA, 15 bp, Homo sapiens
taaaatataattcaa

SEQ ID NO: 1796650 - DNA, 15 bp, Homo sapiens
aaaatataattcaat

SEQ ID NO: 1796651 - DNA, 15 bp, Homo sapiens
aaatataattcaatc

SEQ ID NO: 1796652 - DNA, 15 bp, Homo sapiens
aatataattcaatca

SEQ ID NO: 1796653 - DNA, 15 bp, Homo sapiens
atataattcaatcaa

SEQ ID NO: 1796654 - DNA, 15 bp, Homo sapiens
tataattcaatcaag

SEQ ID NO: 1796655 - DNA, 15 bp, Homo sapiens
ataattcaatcaagg

SEQ ID NO: 1796656 - DNA, 15 bp, Homo sapiens
taattcaatcaaggt

SEQ ID NO: 1796657 - DNA, 15 bp, Homo sapiens
aattcaatcaaggtt

SEQ ID NO: 1796658 - DNA, 15 bp, Homo sapiens
attcaatcaaggtta

SEQ ID NO: 1796659 - DNA, 15 bp, Homo sapiens
ttcaatcaaggttat

SEQ ID NO: 1796660 - DNA, 15 bp, Homo sapiens
tcaatcaaggttatt

SEQ ID NO: 1796661 - DNA, 15 bp, Homo sapiens
caatcaaggttattt

SEQ ID NO: 1796662 - DNA, 15 bp, Homo sapiens
aatcaaggttattta

SEQ ID NO: 1796663 - DNA, 15 bp, Homo sapiens
atcaaggttatttat

SEQ ID NO: 1796664 - DNA, 15 bp, Homo sapiens
tcaaggttatttatc

SEQ ID NO: 1796665 - DNA, 15 bp, Homo sapiens
caaggttatttatct

SEQ ID NO: 1796666 - DNA, 15 bp, Homo sapiens
aaggttatttatcta

SEQ ID NO: 1796667 - DNA, 15 bp, Homo sapiens
aggttatttatctac

SEQ ID NO: 1796668 - DNA, 15 bp, Homo sapiens
ggttatttatctaca

SEQ ID NO: 1796669 - DNA, 15 bp, Homo sapiens
gttatttatctacaa

SEQ ID NO: 1796670 - DNA, 15 bp, Homo sapiens
ttatttatctacaaa

SEQ ID NO: 1796671 - DNA, 15 bp, Homo sapiens
tatttatctacaaac

SEQ ID NO: 1796672 - DNA, 15 bp, Homo sapiens
atttatctacaaaca

SEQ ID NO: 1796673 - DNA, 15 bp, Homo sapiens
tttatctacaaacat

SEQ ID NO: 1796674 - DNA, 15 bp, Homo sapiens
ttatctacaaacatt

SEQ ID NO: 1796675 - DNA, 15 bp, Homo sapiens
tatctacaaacattt

SEQ ID NO: 1796676 - DNA, 15 bp, Homo sapiens
atctacaaacatttg

SEQ ID NO: 1796677 - DNA, 15 bp, Homo sapiens
tctacaaacatttgt

SEQ ID NO: 1796678 - DNA, 15 bp, Homo sapiens
ctacaaacatttgtg

SEQ ID NO: 1796679 - DNA, 15 bp, Homo sapiens
tacaaacatttgtgg

SEQ ID NO: 1796680 - DNA, 15 bp, Homo sapiens
acaaacatttgtgga

SEQ ID NO: 1796681 - DNA, 15 bp, Homo sapiens
caaacatttgtggat

SEQ ID NO: 1796682 - DNA, 15 bp, Homo sapiens
aaacatttgtggatt

SEQ ID NO: 1796683 - DNA, 15 bp, Homo sapiens
aacatttgtggatta

SEQ ID NO: 1796684 - DNA, 15 bp, Homo sapiens
acatttgtggattaa

SEQ ID NO: 1796685 - DNA, 15 bp, Homo sapiens
catttgtggattaaa

SEQ ID NO: 1796686 - DNA, 15 bp, Homo sapiens
atttgtggattaaat

SEQ ID NO: 1796687 - DNA, 15 bp, Homo sapiens
tttgtggattaaatg

SEQ ID NO: 1796688 - DNA, 15 bp, Homo sapiens
ttgtggattaaatgt

SEQ ID NO: 1796689 - DNA, 15 bp, Homo sapiens
tgtggattaaatgta

SEQ ID NO: 1796690 - DNA, 15 bp, Homo sapiens
gtggattaaatgtat

SEQ ID NO: 1796691 - DNA, 15 bp, Homo sapiens
tggattaaatgtatg

SEQ ID NO: 1796692 - DNA, 15 bp, Homo sapiens
ggattaaatgtatga

SEQ ID NO: 1796693 - DNA, 15 bp, Homo sapiens
gattaaatgtatgat

SEQ ID NO: 1796694 - DNA, 15 bp, Homo sapiens
attaaatgtatgatg

SEQ ID NO: 1796695 - DNA, 15 bp, Homo sapiens
ttaaatgtatgatgt

SEQ ID NO: 1796696 - DNA, 15 bp, Homo sapiens
taaatgtatgatgta

SEQ ID NO: 1796697 - DNA, 15 bp, Homo sapiens
aaatgtatgatgtaa

SEQ ID NO: 1796698 - DNA, 15 bp, Homo sapiens
aatgtatgatgtaaa

SEQ ID NO: 1796699 - DNA, 15 bp, Homo sapiens
atgtatgatgtaaaa

SEQ ID NO: 1796700 - DNA, 15 bp, Homo sapiens
tgtatgatgtaaaat

SEQ ID NO: 1796701 - DNA, 15 bp, Homo sapiens
gtatgatgtaaaatg

SEQ ID NO: 1796702 - DNA, 15 bp, Homo sapiens
tatgatgtaaaatga

SEQ ID NO: 1796703 - DNA, 15 bp, Homo sapiens
atgatgtaaaatgaa

SEQ ID NO: 1796704 - DNA, 15 bp, Homo sapiens
tgatgtaaaatgaag

SEQ ID NO: 1796705 - DNA, 15 bp, Homo sapiens
gatgtaaaatgaagg

SEQ ID NO: 1796706 - DNA, 15 bp, Homo sapiens
atgtaaaatgaaggt

SEQ ID NO: 1796707 - DNA, 15 bp, Homo sapiens
tgtaaaatgaaggtc

SEQ ID NO: 1796708 - DNA, 15 bp, Homo sapiens
gtaaaatgaaggtca

SEQ ID NO: 1796709 - DNA, 15 bp, Homo sapiens
taaaatgaaggtcat

SEQ ID NO: 1796710 - DNA, 15 bp, Homo sapiens
aaaatgaaggtcatt

SEQ ID NO: 1796711 - DNA, 15 bp, Homo sapiens
aaatgaaggtcattt

SEQ ID NO: 1796712 - DNA, 15 bp, Homo sapiens
aatgaaggtcatttt

SEQ ID NO: 1796713 - DNA, 15 bp, Homo sapiens
atgaaggtcattttt

SEQ ID NO: 1796714 - DNA, 15 bp, Homo sapiens
tgaaggtcattttta

SEQ ID NO: 1796715 - DNA, 15 bp, Homo sapiens
gaaggtcatttttac

SEQ ID NO: 1796716 - DNA, 15 bp, Homo sapiens
aaggtcatttttacc

SEQ ID NO: 1796717 - DNA, 15 bp, Homo sapiens
aggtcatttttaccc

SEQ ID NO: 1796718 - DNA, 15 bp, Homo sapiens
ggtcatttttaccct

SEQ ID NO: 1796719 - DNA, 15 bp, Homo sapiens
gtcatttttaccctt

SEQ ID NO: 1796720 - DNA, 15 bp, Homo sapiens
tcatttttacccttt

SEQ ID NO: 1796721 - DNA, 15 bp, Homo sapiens
catttttaccctttc

SEQ ID NO: 1796722 - DNA, 15 bp, Homo sapiens
atttttaccctttct

SEQ ID NO: 1796723 - DNA, 15 bp, Homo sapiens
tttttaccctttcta

SEQ ID NO: 1796724 - DNA, 15 bp, Homo sapiens
ttttaccctttctat

SEQ ID NO: 1796725 - DNA, 15 bp, Homo sapiens
tttaccctttctatg

SEQ ID NO: 1796726 - DNA, 15 bp, Homo sapiens
ttaccctttctatga

SEQ ID NO: 1796727 - DNA, 15 bp, Homo sapiens
taccctttctatgat

SEQ ID NO: 1796728 - DNA, 15 bp, Homo sapiens
accctttctatgatc

SEQ ID NO: 1796729 - DNA, 15 bp, Homo sapiens
ccctttctatgatct

SEQ ID NO: 1796730 - DNA, 15 bp, Homo sapiens
cctttctatgatctt

SEQ ID NO: 1796731 - DNA, 15 bp, Homo sapiens
ctttctatgatcttt

SEQ ID NO: 1796732 - DNA, 15 bp, Homo sapiens
tttctatgatctttc

SEQ ID NO: 1796733 - DNA, 15 bp, Homo sapiens
ttctatgatctttca

SEQ ID NO: 1796734 - DNA, 15 bp, Homo sapiens
tctatgatctttcat

SEQ ID NO: 1796735 - DNA, 15 bp, Homo sapiens
ctatgatctttcatg

SEQ ID NO: 1796736 - DNA, 15 bp, Homo sapiens
tatgatctttcatgc

SEQ ID NO: 1796737 - DNA, 15 bp, Homo sapiens
atgatctttcatgca

SEQ ID NO: 1796738 - DNA, 15 bp, Homo sapiens
tgatctttcatgcag

SEQ ID NO: 1796739 - DNA, 15 bp, Homo sapiens
gatctttcatgcagg

SEQ ID NO: 1796740 - DNA, 15 bp, Homo sapiens
atctttcatgcagga

SEQ ID NO: 1796741 - DNA, 15 bp, Homo sapiens
tctttcatgcaggaa

SEQ ID NO: 1796742 - DNA, 15 bp, Homo sapiens
ctttcatgcaggaag

SEQ ID NO: 1796743 - DNA, 15 bp, Homo sapiens
tttcatgcaggaaga

SEQ ID NO: 1796744 - DNA, 15 bp, Homo sapiens
ttcatgcaggaagac

SEQ ID NO: 1796745 - DNA, 15 bp, Homo sapiens
tcatgcaggaagact

SEQ ID NO: 1796746 - DNA, 15 bp, Homo sapiens
catgcaggaagacta

SEQ ID NO: 1796747 - DNA, 15 bp, Homo sapiens
atgcaggaagactaa

SEQ ID NO: 1796748 - DNA, 15 bp, Homo sapiens
tgcaggaagactaag

SEQ ID NO: 1796749 - DNA, 15 bp, Homo sapiens
gcaggaagactaaga

SEQ ID NO: 1796750 - DNA, 15 bp, Homo sapiens
caggaagactaagaa

SEQ ID NO: 1796751 - DNA, 15 bp, Homo sapiens
aggaagactaagaag

SEQ ID NO: 1796752 - DNA, 15 bp, Homo sapiens
ggaagactaagaagt

SEQ ID NO: 1796753 - DNA, 15 bp, Homo sapiens
gaagactaagaagtg

SEQ ID NO: 1796754 - DNA, 15 bp, Homo sapiens
aagactaagaagtga

SEQ ID NO: 1796755 - DNA, 15 bp, Homo sapiens
agactaagaagtgaa

SEQ ID NO: 1796756 - DNA, 15 bp, Homo sapiens
gactaagaagtgaaa

SEQ ID NO: 1796757 - DNA, 15 bp, Homo sapiens
actaagaagtgaaac

SEQ ID NO: 1796758 - DNA, 15 bp, Homo sapiens
ctaagaagtgaaaca

SEQ ID NO: 1796759 - DNA, 15 bp, Homo sapiens
taagaagtgaaacat

SEQ ID NO: 1796760 - DNA, 15 bp, Homo sapiens
aagaagtgaaacatt

SEQ ID NO: 1796761 - DNA, 15 bp, Homo sapiens
agaagtgaaacattg

SEQ ID NO: 1796762 - DNA, 15 bp, Homo sapiens
gaagtgaaacattgc

SEQ ID NO: 1796763 - DNA, 15 bp, Homo sapiens
aagtgaaacattgct

SEQ ID NO: 1796764 - DNA, 15 bp, Homo sapiens
agtgaaacattgctt

SEQ ID NO: 1796765 - DNA, 15 bp, Homo sapiens
gtgaaacattgcttg

SEQ ID NO: 1796766 - DNA, 15 bp, Homo sapiens
tgaaacattgcttga

SEQ ID NO: 1796767 - DNA, 15 bp, Homo sapiens
gaaacattgcttgac

SEQ ID NO: 1796768 - DNA, 15 bp, Homo sapiens
aaacattgcttgacc

SEQ ID NO: 1796769 - DNA, 15 bp, Homo sapiens
aacattgcttgacca

SEQ ID NO: 1796770 - DNA, 15 bp, Homo sapiens
acattgcttgaccac

SEQ ID NO: 1796771 - DNA, 15 bp, Homo sapiens
cattgcttgaccaca

SEQ ID NO: 1796772 - DNA, 15 bp, Homo sapiens
attgcttgaccacat

SEQ ID NO: 1796773 - DNA, 15 bp, Homo sapiens
attctattcaaaact

SEQ ID NO: 1796774 - DNA, 15 bp, Homo sapiens
ttctattcaaaacta

SEQ ID NO: 1796775 - DNA, 15 bp, Homo sapiens
tctattcaaaactac

SEQ ID NO: 1796776 - DNA, 15 bp, Homo sapiens
ctattcaaaactact

SEQ ID NO: 1796777 - DNA, 15 bp, Homo sapiens
tattcaaaactactc

SEQ ID NO: 1796778 - DNA, 15 bp, Homo sapiens
attcaaaactactct

SEQ ID NO: 1796779 - DNA, 15 bp, Homo sapiens
ttcaaaactactctg

SEQ ID NO: 1796780 - DNA, 15 bp, Homo sapiens
tcaaaactactctga

SEQ ID NO: 1796781 - DNA, 15 bp, Homo sapiens
caaaactactctgag

SEQ ID NO: 1796782 - DNA, 15 bp, Homo sapiens
aaaactactctgaga

SEQ ID NO: 1796783 - DNA, 15 bp, Homo sapiens
aaactactctgagac

SEQ ID NO: 1796784 - DNA, 15 bp, Homo sapiens
aactactctgagact

SEQ ID NO: 1796785 - DNA, 15 bp, Homo sapiens
actactctgagacta

SEQ ID NO: 1796786 - DNA, 15 bp, Homo sapiens
ctactctgagactag

SEQ ID NO: 1796787 - DNA, 15 bp, Homo sapiens
tactctgagactaga

SEQ ID NO: 1796788 - DNA, 15 bp, Homo sapiens
actctgagactagac

SEQ ID NO: 1796789 - DNA, 15 bp, Homo sapiens
ctctgagactagaca

SEQ ID NO: 1796790 - DNA, 15 bp, Homo sapiens
tctgagactagacaa

SEQ ID NO: 1796791 - DNA, 15 bp, Homo sapiens
ctgagactagacaaa

SEQ ID NO: 1796792 - DNA, 15 bp, Homo sapiens
tgagactagacaaaa

SEQ ID NO: 1796793 - DNA, 15 bp, Homo sapiens
gagactagacaaaaa

SEQ ID NO: 1796794 - DNA, 15 bp, Homo sapiens
agactagacaaaaaa

SEQ ID NO: 1796795 - DNA, 15 bp, Homo sapiens
gactagacaaaaaaa

SEQ ID NO: 1796796 - DNA, 15 bp, Homo sapiens
actagacaaaaaaaa

SEQ ID NO: 1796797 - DNA, 15 bp, Homo sapiens
ctagacaaaaaaaat

SEQ ID NO: 1796798 - DNA, 15 bp, Homo sapiens
tagacaaaaaaaata

SEQ ID NO: 1796799 - DNA, 15 bp, Homo sapiens
agacaaaaaaaataa

SEQ ID NO: 1796800 - DNA, 15 bp, Homo sapiens
gacaaaaaaaataat

SEQ ID NO: 1796801 - DNA, 15 bp, Homo sapiens
acaaaaaaaataatc

SEQ ID NO: 1796802 - DNA, 15 bp, Homo sapiens
caaaaaaaataatcc

SEQ ID NO: 1796803 - DNA, 15 bp, Homo sapiens
aaaaaaaataatcca

SEQ ID NO: 1796804 - DNA, 15 bp, Homo sapiens
aaaaaaataatccaa

SEQ ID NO: 1796805 - DNA, 15 bp, Homo sapiens
aaaaaataatccaag

SEQ ID NO: 1796806 - DNA, 15 bp, Homo sapiens
aaaaataatccaagg

SEQ ID NO: 1796807 - DNA, 15 bp, Homo sapiens
aaaataatccaagga

SEQ ID NO: 1796808 - DNA, 15 bp, Homo sapiens
aaataatccaaggat

SEQ ID NO: 1796809 - DNA, 15 bp, Homo sapiens
aataatccaaggata

SEQ ID NO: 1796810 - DNA, 15 bp, Homo sapiens
ataatccaaggatag

SEQ ID NO: 1796811 - DNA, 15 bp, Homo sapiens
taatccaaggatagt

SEQ ID NO: 1796812 - DNA, 15 bp, Homo sapiens
aatccaaggatagta

SEQ ID NO: 1796813 - DNA, 15 bp, Homo sapiens
atccaaggatagtag

SEQ ID NO: 1796814 - DNA, 15 bp, Homo sapiens
tccaaggatagtaga

SEQ ID NO: 1796815 - DNA, 15 bp, Homo sapiens
ccaaggatagtagat

SEQ ID NO: 1796816 - DNA, 15 bp, Homo sapiens
caaggatagtagatg

SEQ ID NO: 1796817 - DNA, 15 bp, Homo sapiens
aaggatagtagatgg

SEQ ID NO: 1796818 - DNA, 15 bp, Homo sapiens
aggatagtagatgga

SEQ ID NO: 1796819 - DNA, 15 bp, Homo sapiens
ggatagtagatggaa

SEQ ID NO: 1796820 - DNA, 15 bp, Homo sapiens
gatagtagatggaaa

SEQ ID NO: 1796821 - DNA, 15 bp, Homo sapiens
atagtagatggaaag

SEQ ID NO: 1796822 - DNA, 15 bp, Homo sapiens
tagtagatggaaagc

SEQ ID NO: 1796823 - DNA, 15 bp, Homo sapiens
agtagatggaaagca

SEQ ID NO: 1796824 - DNA, 15 bp, Homo sapiens
gtagatggaaagcac

SEQ ID NO: 1796825 - DNA, 15 bp, Homo sapiens
tagatggaaagcaca

SEQ ID NO: 1796826 - DNA, 15 bp, Homo sapiens
agatggaaagcacat

SEQ ID NO: 1796827 - DNA, 15 bp, Homo sapiens
gatggaaagcacatt

SEQ ID NO: 1796828 - DNA, 15 bp, Homo sapiens
atggaaagcacatta

SEQ ID NO: 1796829 - DNA, 15 bp, Homo sapiens
tggaaagcacattag

SEQ ID NO: 1796830 - DNA, 15 bp, Homo sapiens
ggaaagcacattagg

SEQ ID NO: 1796831 - DNA, 15 bp, Homo sapiens
gaaagcacattagga

SEQ ID NO: 1796832 - DNA, 15 bp, Homo sapiens
aaagcacattaggaa

SEQ ID NO: 1796833 - DNA, 15 bp, Homo sapiens
aagcacattaggaaa

SEQ ID NO: 1796834 - DNA, 15 bp, Homo sapiens
agcacattaggaaag

SEQ ID NO: 1796835 - DNA, 15 bp, Homo sapiens
gcacattaggaaaga

SEQ ID NO: 1796836 - DNA, 15 bp, Homo sapiens
cacattaggaaagag

SEQ ID NO: 1796837 - DNA, 15 bp, Homo sapiens
acattaggaaagaga

SEQ ID NO: 1796838 - DNA, 15 bp, Homo sapiens
cattaggaaagagat

SEQ ID NO: 1796839 - DNA, 15 bp, Homo sapiens
attaggaaagagata

SEQ ID NO: 1796840 - DNA, 15 bp, Homo sapiens
ttaggaaagagataa

SEQ ID NO: 1796841 - DNA, 15 bp, Homo sapiens
taggaaagagataaa

SEQ ID NO: 1796842 - DNA, 15 bp, Homo sapiens
aggaaagagataaat

SEQ ID NO: 1796843 - DNA, 15 bp, Homo sapiens
ggaaagagataaatg

SEQ ID NO: 1796844 - DNA, 15 bp, Homo sapiens
gaaagagataaatgt

SEQ ID NO: 1796845 - DNA, 15 bp, Homo sapiens
aaagagataaatgtt

SEQ ID NO: 1796846 - DNA, 15 bp, Homo sapiens
aagagataaatgttc

SEQ ID NO: 1796847 - DNA, 15 bp, Homo sapiens
agagataaatgttca

SEQ ID NO: 1796848 - DNA, 15 bp, Homo sapiens
gagataaatgttcac

SEQ ID NO: 1796849 - DNA, 15 bp, Homo sapiens
agataaatgttcact

SEQ ID NO: 1796850 - DNA, 15 bp, Homo sapiens
gataaatgttcacta

SEQ ID NO: 1796851 - DNA, 15 bp, Homo sapiens
ataaatgttcactaa

SEQ ID NO: 1796852 - DNA, 15 bp, Homo sapiens
taaatgttcactaac

SEQ ID NO: 1796853 - DNA, 15 bp, Homo sapiens
aaatgttcactaact

SEQ ID NO: 1796854 - DNA, 15 bp, Homo sapiens
aatgttcactaacta

SEQ ID NO: 1796855 - DNA, 15 bp, Homo sapiens
atgttcactaactac

SEQ ID NO: 1796856 - DNA, 15 bp, Homo sapiens
tgttcactaactact

SEQ ID NO: 1796857 - DNA, 15 bp, Homo sapiens
gttcactaactacta

SEQ ID NO: 1796858 - DNA, 15 bp, Homo sapiens
ttcactaactactat

SEQ ID NO: 1796859 - DNA, 15 bp, Homo sapiens
tcactaactactatt

SEQ ID NO: 1796860 - DNA, 15 bp, Homo sapiens
cactaactactattg

SEQ ID NO: 1796861 - DNA, 15 bp, Homo sapiens
actaactactattgg

SEQ ID NO: 1796862 - DNA, 15 bp, Homo sapiens
ctaactactattggg

SEQ ID NO: 1796863 - DNA, 15 bp, Homo sapiens
taactactattgggt

SEQ ID NO: 1796864 - DNA, 15 bp, Homo sapiens
aactactattgggtt

SEQ ID NO: 1796865 - DNA, 15 bp, Homo sapiens
actactattgggttg

SEQ ID NO: 1796866 - DNA, 15 bp, Homo sapiens
ctactattgggttgt

SEQ ID NO: 1796867 - DNA, 15 bp, Homo sapiens
tactattgggttgtc

SEQ ID NO: 1796868 - DNA, 15 bp, Homo sapiens
actattgggttgtct

SEQ ID NO: 1796869 - DNA, 15 bp, Homo sapiens
ctattgggttgtctt

SEQ ID NO: 1796870 - DNA, 15 bp, Homo sapiens
tattgggttgtctta

SEQ ID NO: 1796871 - DNA, 15 bp, Homo sapiens
attgggttgtcttag

SEQ ID NO: 1796872 - DNA, 15 bp, Homo sapiens
ttgggttgtcttagg

SEQ ID NO: 1796873 - DNA, 15 bp, Homo sapiens
tgggttgtcttaggt

SEQ ID NO: 1796874 - DNA, 15 bp, Homo sapiens
gggttgtcttaggta

SEQ ID NO: 1796875 - DNA, 15 bp, Homo sapiens
ggttgtcttaggtag

SEQ ID NO: 1796876 - DNA, 15 bp, Homo sapiens
gttgtcttaggtagt

SEQ ID NO: 1796877 - DNA, 15 bp, Homo sapiens
ttgtcttaggtagtt

SEQ ID NO: 1796878 - DNA, 15 bp, Homo sapiens
tgtcttaggtagtta

SEQ ID NO: 1796879 - DNA, 15 bp, Homo sapiens
gtcttaggtagttat

SEQ ID NO: 1796880 - DNA, 15 bp, Homo sapiens
tcttaggtagttatg

SEQ ID NO: 1796881 - DNA, 15 bp, Homo sapiens
cttaggtagttatgg

SEQ ID NO: 1796882 - DNA, 15 bp, Homo sapiens
ttaggtagttatggt

SEQ ID NO: 1796883 - DNA, 15 bp, Homo sapiens
taggtagttatggta

SEQ ID NO: 1796884 - DNA, 15 bp, Homo sapiens
aggtagttatggtag

SEQ ID NO: 1796885 - DNA, 15 bp, Homo sapiens
ggtagttatggtagt

SEQ ID NO: 1796886 - DNA, 15 bp, Homo sapiens
gtagttatggtagtg

SEQ ID NO: 1796887 - DNA, 15 bp, Homo sapiens
tagttatggtagtga

SEQ ID NO: 1796888 - DNA, 15 bp, Homo sapiens
agttatggtagtgag

SEQ ID NO: 1796889 - DNA, 15 bp, Homo sapiens
gttatggtagtgagt

SEQ ID NO: 1796890 - DNA, 15 bp, Homo sapiens
ttatggtagtgagtg

SEQ ID NO: 1796891 - DNA, 15 bp, Homo sapiens
tatggtagtgagtgt

SEQ ID NO: 1796892 - DNA, 15 bp, Homo sapiens
atggtagtgagtgta

SEQ ID NO: 1796893 - DNA, 15 bp, Homo sapiens
tggtagtgagtgtaa

SEQ ID NO: 1796894 - DNA, 15 bp, Homo sapiens
ggtagtgagtgtaac

SEQ ID NO: 1796895 - DNA, 15 bp, Homo sapiens
gtagtgagtgtaaca

SEQ ID NO: 1796896 - DNA, 15 bp, Homo sapiens
tagtgagtgtaacat

SEQ ID NO: 1796897 - DNA, 15 bp, Homo sapiens
agtgagtgtaacatt

SEQ ID NO: 1796898 - DNA, 15 bp, Homo sapiens
gtgagtgtaacattt

SEQ ID NO: 1796899 - DNA, 15 bp, Homo sapiens
tgagtgtaacatttc

SEQ ID NO: 1796900 - DNA, 15 bp, Homo sapiens
gagtgtaacatttcc

SEQ ID NO: 1796901 - DNA, 15 bp, Homo sapiens
agtgtaacatttccc

SEQ ID NO: 1796902 - DNA, 15 bp, Homo sapiens
gtgtaacatttccca

SEQ ID NO: 1796903 - DNA, 15 bp, Homo sapiens
tgtaacatttcccag

SEQ ID NO: 1796904 - DNA, 15 bp, Homo sapiens
gtaacatttcccagt

SEQ ID NO: 1796905 - DNA, 15 bp, Homo sapiens
taacatttcccagta

SEQ ID NO: 1796906 - DNA, 15 bp, Homo sapiens
aacatttcccagtat

SEQ ID NO: 1796907 - DNA, 15 bp, Homo sapiens
acatttcccagtatc

SEQ ID NO: 1796908 - DNA, 15 bp, Homo sapiens
catttcccagtatct

SEQ ID NO: 1796909 - DNA, 15 bp, Homo sapiens
atttcccagtatctg

SEQ ID NO: 1796910 - DNA, 15 bp, Homo sapiens
tttcccagtatctgc

SEQ ID NO: 1796911 - DNA, 15 bp, Homo sapiens
ttcccagtatctgct

SEQ ID NO: 1796912 - DNA, 15 bp, Homo sapiens
tcccagtatctgctg

SEQ ID NO: 1796913 - DNA, 15 bp, Homo sapiens
cccagtatctgctgc

SEQ ID NO: 1796914 - DNA, 15 bp, Homo sapiens
ccagtatctgctgcc

SEQ ID NO: 1796915 - DNA, 15 bp, Homo sapiens
cagtatctgctgcca

SEQ ID NO: 1796916 - DNA, 15 bp, Homo sapiens
agtatctgctgccag

SEQ ID NO: 1796917 - DNA, 15 bp, Homo sapiens
gtatctgctgccaga

SEQ ID NO: 1796918 - DNA, 15 bp, Homo sapiens
tatctgctgccagat

SEQ ID NO: 1796919 - DNA, 15 bp, Homo sapiens
atctgctgccagatc

SEQ ID NO: 1796920 - DNA, 15 bp, Homo sapiens
tctgctgccagatcc

SEQ ID NO: 1796921 - DNA, 15 bp, Homo sapiens
ctgctgccagatcca

SEQ ID NO: 1796922 - DNA, 15 bp, Homo sapiens
tgctgccagatccat

SEQ ID NO: 1796923 - DNA, 15 bp, Homo sapiens
gctgccagatccatt

SEQ ID NO: 1796924 - DNA, 15 bp, Homo sapiens
ctgccagatccattg

SEQ ID NO: 1796925 - DNA, 15 bp, Homo sapiens
tgccagatccattga

SEQ ID NO: 1796926 - DNA, 15 bp, Homo sapiens
gccagatccattgat

SEQ ID NO: 1796927 - DNA, 15 bp, Homo sapiens
ccagatccattgata

SEQ ID NO: 1796928 - DNA, 15 bp, Homo sapiens
cagatccattgatag

SEQ ID NO: 1796929 - DNA, 15 bp, Homo sapiens
agatccattgatagg

SEQ ID NO: 1796930 - DNA, 15 bp, Homo sapiens
gatccattgatagga

SEQ ID NO: 1796931 - DNA, 15 bp, Homo sapiens
atccattgataggaa

SEQ ID NO: 1796932 - DNA, 15 bp, Homo sapiens
tccattgataggaaa

SEQ ID NO: 1796933 - DNA, 15 bp, Homo sapiens
ccattgataggaaaa

SEQ ID NO: 1796934 - DNA, 15 bp, Homo sapiens
cattgataggaaaag

SEQ ID NO: 1796935 - DNA, 15 bp, Homo sapiens
attgataggaaaagg

SEQ ID NO: 1796936 - DNA, 15 bp, Homo sapiens
ttgataggaaaagga

SEQ ID NO: 1796937 - DNA, 15 bp, Homo sapiens
tgataggaaaaggaa

SEQ ID NO: 1796938 - DNA, 15 bp, Homo sapiens
gataggaaaaggaac

SEQ ID NO: 1796939 - DNA, 15 bp, Homo sapiens
ataggaaaaggaact

SEQ ID NO: 1796940 - DNA, 15 bp, Homo sapiens
taggaaaaggaactg

SEQ ID NO: 1796941 - DNA, 15 bp, Homo sapiens
aggaaaaggaactgg

SEQ ID NO: 1796942 - DNA, 15 bp, Homo sapiens
ggaaaaggaactggg

SEQ ID NO: 1796943 - DNA, 15 bp, Homo sapiens
gaaaaggaactggga

SEQ ID NO: 1796944 - DNA, 15 bp, Homo sapiens
aaaaggaactgggat

SEQ ID NO: 1796945 - DNA, 15 bp, Homo sapiens
aaaggaactgggatt

SEQ ID NO: 1796946 - DNA, 15 bp, Homo sapiens
aaggaactgggattt

SEQ ID NO: 1796947 - DNA, 15 bp, Homo sapiens
aggaactgggatttt

SEQ ID NO: 1796948 - DNA, 15 bp, Homo sapiens
ggaactgggattttg

SEQ ID NO: 1796949 - DNA, 15 bp, Homo sapiens
gaactgggattttga

SEQ ID NO: 1796950 - DNA, 15 bp, Homo sapiens
aactgggattttgaa

SEQ ID NO: 1796951 - DNA, 15 bp, Homo sapiens
actgggattttgaaa

SEQ ID NO: 1796952 - DNA, 15 bp, Homo sapiens
ctgggattttgaaag

SEQ ID NO: 1796953 - DNA, 15 bp, Homo sapiens
tgggattttgaaaga

SEQ ID NO: 1796954 - DNA, 15 bp, Homo sapiens
gggattttgaaagaa

SEQ ID NO: 1796955 - DNA, 15 bp, Homo sapiens
ggattttgaaagaag

SEQ ID NO: 1796956 - DNA, 15 bp, Homo sapiens
gattttgaaagaaga

SEQ ID NO: 1796957 - DNA, 15 bp, Homo sapiens
attttgaaagaagac

SEQ ID NO: 1796958 - DNA, 15 bp, Homo sapiens
ttttgaaagaagaca

SEQ ID NO: 1796959 - DNA, 15 bp, Homo sapiens
tttgaaagaagacaa

SEQ ID NO: 1796960 - DNA, 15 bp, Homo sapiens
ttgaaagaagacaaa

SEQ ID NO: 1796961 - DNA, 15 bp, Homo sapiens
tgaaagaagacaaat

SEQ ID NO: 1796962 - DNA, 15 bp, Homo sapiens
gaaagaagacaaata

SEQ ID NO: 1796963 - DNA, 15 bp, Homo sapiens
aaagaagacaaatat

SEQ ID NO: 1796964 - DNA, 15 bp, Homo sapiens
aagaagacaaatatt

SEQ ID NO: 1796965 - DNA, 15 bp, Homo sapiens
agaagacaaatattc

SEQ ID NO: 1796966 - DNA, 15 bp, Homo sapiens
gaagacaaatattca

SEQ ID NO: 1796967 - DNA, 15 bp, Homo sapiens
aagacaaatattcag

SEQ ID NO: 1796968 - DNA, 15 bp, Homo sapiens
agacaaatattcagg

SEQ ID NO: 1796969 - DNA, 15 bp, Homo sapiens
gacaaatattcagga

SEQ ID NO: 1796970 - DNA, 15 bp, Homo sapiens
acaaatattcaggag

SEQ ID NO: 1796971 - DNA, 15 bp, Homo sapiens
caaatattcaggaga

SEQ ID NO: 1796972 - DNA, 15 bp, Homo sapiens
aaatattcaggagat

SEQ ID NO: 1796973 - DNA, 15 bp, Homo sapiens
aatattcaggagata

SEQ ID NO: 1796974 - DNA, 15 bp, Homo sapiens
atattcaggagatag

SEQ ID NO: 1796975 - DNA, 15 bp, Homo sapiens
tattcaggagatagg

SEQ ID NO: 1796976 - DNA, 15 bp, Homo sapiens
attcaggagataggt

SEQ ID NO: 1796977 - DNA, 15 bp, Homo sapiens
ttcaggagataggtg

SEQ ID NO: 1796978 - DNA, 15 bp, Homo sapiens
tcaggagataggtgt

SEQ ID NO: 1796979 - DNA, 15 bp, Homo sapiens
caggagataggtgtt

SEQ ID NO: 1796980 - DNA, 15 bp, Homo sapiens
aggagataggtgtta

SEQ ID NO: 1796981 - DNA, 15 bp, Homo sapiens
ggagataggtgttaa

SEQ ID NO: 1796982 - DNA, 15 bp, Homo sapiens
gagataggtgttaaa

SEQ ID NO: 1796983 - DNA, 15 bp, Homo sapiens
agataggtgttaaaa

SEQ ID NO: 1796984 - DNA, 15 bp, Homo sapiens
gataggtgttaaaac

SEQ ID NO: 1796985 - DNA, 15 bp, Homo sapiens
ataggtgttaaaaca

SEQ ID NO: 1796986 - DNA, 15 bp, Homo sapiens
taggtgttaaaacaa

SEQ ID NO: 1796987 - DNA, 15 bp, Homo sapiens
aggtgttaaaacaat

SEQ ID NO: 1796988 - DNA, 15 bp, Homo sapiens
ggtgttaaaacaatc

SEQ ID NO: 1796989 - DNA, 15 bp, Homo sapiens
gtgttaaaacaatca

SEQ ID NO: 1796990 - DNA, 15 bp, Homo sapiens
tgttaaaacaatcat

SEQ ID NO: 1796991 - DNA, 15 bp, Homo sapiens
gttaaaacaatcatt

SEQ ID NO: 1796992 - DNA, 15 bp, Homo sapiens
ttaaaacaatcattc

SEQ ID NO: 1796993 - DNA, 15 bp, Homo sapiens
taaaacaatcattcc

SEQ ID NO: 1796994 - DNA, 15 bp, Homo sapiens
aaaacaatcattcct

SEQ ID NO: 1796995 - DNA, 15 bp, Homo sapiens
aaacaatcattccta

SEQ ID NO: 1796996 - DNA, 15 bp, Homo sapiens
aacaatcattcctag

SEQ ID NO: 1796997 - DNA, 15 bp, Homo sapiens
acaatcattcctagg

SEQ ID NO: 1796998 - DNA, 15 bp, Homo sapiens
caatcattcctaggt

SEQ ID NO: 1796999 - DNA, 15 bp, Homo sapiens
aatcattcctaggtc

SEQ ID NO: 1797000 - DNA, 15 bp, Homo sapiens
atcattcctaggtca

SEQ ID NO: 1797001 - DNA, 15 bp, Homo sapiens
tcattcctaggtcac

SEQ ID NO: 1797002 - DNA, 15 bp, Homo sapiens
cattcctaggtcaca

SEQ ID NO: 1797003 - DNA, 15 bp, Homo sapiens
attcctaggtcacag

SEQ ID NO: 1797004 - DNA, 15 bp, Homo sapiens
ttcctaggtcacagg

SEQ ID NO: 1797005 - DNA, 15 bp, Homo sapiens
tcctaggtcacagga

SEQ ID NO: 1797006 - DNA, 15 bp, Homo sapiens
cctaggtcacaggac

SEQ ID NO: 1797007 - DNA, 15 bp, Homo sapiens
ctaggtcacaggaca

SEQ ID NO: 1797008 - DNA, 15 bp, Homo sapiens
taggtcacaggacac

SEQ ID NO: 1797009 - DNA, 15 bp, Homo sapiens
ggtcacaggacacac

SEQ ID NO: 1797010 - DNA, 15 bp, Homo sapiens
gtcacaggacacact

SEQ ID NO: 1797011 - DNA, 15 bp, Homo sapiens
tcacaggacacacta

SEQ ID NO: 1797012 - DNA, 15 bp, Homo sapiens
cacaggacacactaa

SEQ ID NO: 1797013 - DNA, 15 bp, Homo sapiens
acaggacacactaat

SEQ ID NO: 1797014 - DNA, 15 bp, Homo sapiens
caggacacactaatg

SEQ ID NO: 1797015 - DNA, 15 bp, Homo sapiens
aggacacactaatga

SEQ ID NO: 1797016 - DNA, 15 bp, Homo sapiens
ggacacactaatgag

SEQ ID NO: 1797017 - DNA, 15 bp, Homo sapiens
gacacactaatgaga

SEQ ID NO: 1797018 - DNA, 15 bp, Homo sapiens
acacactaatgagaa

SEQ ID NO: 1797019 - DNA, 15 bp, Homo sapiens
cacactaatgagaac

SEQ ID NO: 1797020 - DNA, 15 bp, Homo sapiens
acactaatgagaaca

SEQ ID NO: 1797021 - DNA, 15 bp, Homo sapiens
cactaatgagaacaa

SEQ ID NO: 1797022 - DNA, 15 bp, Homo sapiens
actaatgagaacaat

SEQ ID NO: 1797023 - DNA, 15 bp, Homo sapiens
ctaatgagaacaata

SEQ ID NO: 1797024 - DNA, 15 bp, Homo sapiens
taatgagaacaatac

SEQ ID NO: 1797025 - DNA, 15 bp, Homo sapiens
aatgagaacaatacc

SEQ ID NO: 1797026 - DNA, 15 bp, Homo sapiens
atgagaacaatacca

SEQ ID NO: 1797027 - DNA, 15 bp, Homo sapiens
tgagaacaataccaa

SEQ ID NO: 1797028 - DNA, 15 bp, Homo sapiens
gagaacaataccaat

SEQ ID NO: 1797029 - DNA, 15 bp, Homo sapiens
agaacaataccaatt

SEQ ID NO: 1797030 - DNA, 15 bp, Homo sapiens
gaacaataccaatta

SEQ ID NO: 1797031 - DNA, 15 bp, Homo sapiens
aacaataccaattaa

SEQ ID NO: 1797032 - DNA, 15 bp, Homo sapiens
acaataccaattaaa

SEQ ID NO: 1797033 - DNA, 15 bp, Homo sapiens
caataccaattaaaa

SEQ ID NO: 1797034 - DNA, 15 bp, Homo sapiens
aataccaattaaaat

SEQ ID NO: 1797035 - DNA, 15 bp, Homo sapiens
ataccaattaaaatg

SEQ ID NO: 1797036 - DNA, 15 bp, Homo sapiens
taccaattaaaatga

SEQ ID NO: 1797037 - DNA, 15 bp, Homo sapiens
accaattaaaatgag

SEQ ID NO: 1797038 - DNA, 15 bp, Homo sapiens
ccaattaaaatgaga

SEQ ID NO: 1797039 - DNA, 15 bp, Homo sapiens
caattaaaatgagag

SEQ ID NO: 1797040 - DNA, 15 bp, Homo sapiens
aattaaaatgagagg

SEQ ID NO: 1797041 - DNA, 15 bp, Homo sapiens
attaaaatgagaggc

SEQ ID NO: 1797042 - DNA, 15 bp, Homo sapiens
ttaaaatgagaggct

SEQ ID NO: 1797043 - DNA, 15 bp, Homo sapiens
taaaatgagaggctt

SEQ ID NO: 1797044 - DNA, 15 bp, Homo sapiens
aaaatgagaggcttt

SEQ ID NO: 1797045 - DNA, 15 bp, Homo sapiens
aaatgagaggctttc

SEQ ID NO: 1797046 - DNA, 15 bp, Homo sapiens
aatgagaggctttct

SEQ ID NO: 1797047 - DNA, 15 bp, Homo sapiens
atgagaggctttctt

SEQ ID NO: 1797048 - DNA, 15 bp, Homo sapiens
tgagaggctttcttt

SEQ ID NO: 1797049 - DNA, 15 bp, Homo sapiens
gagaggctttctttt

SEQ ID NO: 1797050 - DNA, 15 bp, Homo sapiens
agaggctttctttta

SEQ ID NO: 1797051 - DNA, 15 bp, Homo sapiens
ggctttcttttaata

SEQ ID NO: 1797052 - DNA, 15 bp, Homo sapiens
gctttcttttaatac

SEQ ID NO: 1797053 - DNA, 15 bp, Homo sapiens
ctttcttttaataca

SEQ ID NO: 1797054 - DNA, 15 bp, Homo sapiens
tttcttttaatacat

SEQ ID NO: 1797055 - DNA, 15 bp, Homo sapiens
ttcttttaatacatc

SEQ ID NO: 1797056 - DNA, 15 bp, Homo sapiens
tcttttaatacatct

SEQ ID NO: 1797057 - DNA, 15 bp, Homo sapiens
cttttaatacatctt

SEQ ID NO: 1797058 - DNA, 15 bp, Homo sapiens
ttttaatacatcttt

SEQ ID NO: 1797059 - DNA, 15 bp, Homo sapiens
tttaatacatctttg

SEQ ID NO: 1797060 - DNA, 15 bp, Homo sapiens
ttaatacatctttgt

SEQ ID NO: 1797061 - DNA, 15 bp, Homo sapiens
taatacatctttgta

SEQ ID NO: 1797062 - DNA, 15 bp, Homo sapiens
aatacatctttgtag

SEQ ID NO: 1797063 - DNA, 15 bp, Homo sapiens
atacatctttgtaga

SEQ ID NO: 1797064 - DNA, 15 bp, Homo sapiens
tacatctttgtagat

SEQ ID NO: 1797065 - DNA, 15 bp, Homo sapiens
acatctttgtagata

SEQ ID NO: 1797066 - DNA, 15 bp, Homo sapiens
catctttgtagatac

SEQ ID NO: 1797067 - DNA, 15 bp, Homo sapiens
atctttgtagatact

SEQ ID NO: 1797068 - DNA, 15 bp, Homo sapiens
tctttgtagatacta

SEQ ID NO: 1797069 - DNA, 15 bp, Homo sapiens
ctttgtagatactaa

SEQ ID NO: 1797070 - DNA, 15 bp, Homo sapiens
tttgtagatactaac

SEQ ID NO: 1797071 - DNA, 15 bp, Homo sapiens
ttgtagatactaact

SEQ ID NO: 1797072 - DNA, 15 bp, Homo sapiens
tgtagatactaactt

SEQ ID NO: 1797073 - DNA, 15 bp, Homo sapiens
gtagatactaacttt

SEQ ID NO: 1797074 - DNA, 15 bp, Homo sapiens
tagatactaactttg

SEQ ID NO: 1797075 - DNA, 15 bp, Homo sapiens
agatactaactttga

SEQ ID NO: 1797076 - DNA, 15 bp, Homo sapiens
gatactaactttgaa

SEQ ID NO: 1797077 - DNA, 15 bp, Homo sapiens
atactaactttgaaa

SEQ ID NO: 1797078 - DNA, 15 bp, Homo sapiens
tactaactttgaaaa

SEQ ID NO: 1797079 - DNA, 15 bp, Homo sapiens
actaactttgaaaat

SEQ ID NO: 1797080 - DNA, 15 bp, Homo sapiens
ctaactttgaaaata

SEQ ID NO: 1797081 - DNA, 15 bp, Homo sapiens
taactttgaaaataa

SEQ ID NO: 1797082 - DNA, 15 bp, Homo sapiens
aactttgaaaataag

SEQ ID NO: 1797083 - DNA, 15 bp, Homo sapiens
actttgaaaataaga

SEQ ID NO: 1797084 - DNA, 15 bp, Homo sapiens
ctttgaaaataagat

SEQ ID NO: 1797085 - DNA, 15 bp, Homo sapiens
tttgaaaataagata

SEQ ID NO: 1797086 - DNA, 15 bp, Homo sapiens
ttgaaaataagatat

SEQ ID NO: 1797087 - DNA, 15 bp, Homo sapiens
tgaaaataagatatt

SEQ ID NO: 1797088 - DNA, 15 bp, Homo sapiens
gaaaataagatattt

SEQ ID NO: 1797089 - DNA, 15 bp, Homo sapiens
aaaataagatattta

SEQ ID NO: 1797090 - DNA, 15 bp, Homo sapiens
aaataagatatttaa

SEQ ID NO: 1797091 - DNA, 15 bp, Homo sapiens
aataagatatttaaa

SEQ ID NO: 1797092 - DNA, 15 bp, Homo sapiens
ataagatatttaaaa

SEQ ID NO: 1797093 - DNA, 15 bp, Homo sapiens
taagatatttaaaag

SEQ ID NO: 1797094 - DNA, 15 bp, Homo sapiens
aagatatttaaaagg

SEQ ID NO: 1797095 - DNA, 15 bp, Homo sapiens
agatatttaaaagga

SEQ ID NO: 1797096 - DNA, 15 bp, Homo sapiens
gatatttaaaaggat

SEQ ID NO: 1797097 - DNA, 15 bp, Homo sapiens
atatttaaaaggatg

SEQ ID NO: 1797098 - DNA, 15 bp, Homo sapiens
tatttaaaaggatgc

SEQ ID NO: 1797099 - DNA, 15 bp, Homo sapiens
atttaaaaggatgct

SEQ ID NO: 1797100 - DNA, 15 bp, Homo sapiens
tttaaaaggatgctt

SEQ ID NO: 1797101 - DNA, 15 bp, Homo sapiens
ttaaaaggatgcttt

SEQ ID NO: 1797102 - DNA, 15 bp, Homo sapiens
taaaaggatgctttt

SEQ ID NO: 1797103 - DNA, 15 bp, Homo sapiens
aaaaggatgcttttt

SEQ ID NO: 1797104 - DNA, 15 bp, Homo sapiens
aaaggatgctttttt

SEQ ID NO: 1797105 - DNA, 15 bp, Homo sapiens
aaggatgcttttttt

SEQ ID NO: 1797106 - DNA, 15 bp, Homo sapiens
aggatgctttttttc

SEQ ID NO: 1797107 - DNA, 15 bp, Homo sapiens
ggatgctttttttct

SEQ ID NO: 1797108 - DNA, 15 bp, Homo sapiens
gatgctttttttcta

SEQ ID NO: 1797109 - DNA, 15 bp, Homo sapiens
atgctttttttctat

SEQ ID NO: 1797110 - DNA, 15 bp, Homo sapiens
tgctttttttctatg

SEQ ID NO: 1797111 - DNA, 15 bp, Homo sapiens
gctttttttctatgt

SEQ ID NO: 1797112 - DNA, 15 bp, Homo sapiens
ctttttttctatgta

SEQ ID NO: 1797113 - DNA, 15 bp, Homo sapiens
tttttttctatgtat

SEQ ID NO: 1797114 - DNA, 15 bp, Homo sapiens
ttttttctatgtatt

SEQ ID NO: 1797115 - DNA, 15 bp, Homo sapiens
tttttctatgtattt

SEQ ID NO: 1797116 - DNA, 15 bp, Homo sapiens
ttttctatgtatttt

SEQ ID NO: 1797117 - DNA, 15 bp, Homo sapiens
tttctatgtattttt

SEQ ID NO: 1797118 - DNA, 15 bp, Homo sapiens
ttctatgtatttttt

SEQ ID NO: 1797119 - DNA, 15 bp, Homo sapiens
tctatgtattttttt

SEQ ID NO: 1797120 - DNA, 15 bp, Homo sapiens
ctatgtattttttta

SEQ ID NO: 1797121 - DNA, 15 bp, Homo sapiens
tatgtatttttttaa

SEQ ID NO: 1797122 - DNA, 15 bp, Homo sapiens
atgtatttttttaaa

SEQ ID NO: 1797123 - DNA, 15 bp, Homo sapiens
tgtatttttttaaag

SEQ ID NO: 1797124 - DNA, 15 bp, Homo sapiens
gtatttttttaaagt

SEQ ID NO: 1797125 - DNA, 15 bp, Homo sapiens
tatttttttaaagtg

SEQ ID NO: 1797126 - DNA, 15 bp, Homo sapiens
atttttttaaagtgt

SEQ ID NO: 1797127 - DNA, 15 bp, Homo sapiens
tttttttaaagtgta

SEQ ID NO: 1797128 - DNA, 15 bp, Homo sapiens
ttttttaaagtgtaa

SEQ ID NO: 1797129 - DNA, 15 bp, Homo sapiens
tttttaaagtgtaat

SEQ ID NO: 1797130 - DNA, 15 bp, Homo sapiens
ttttaaagtgtaatt

SEQ ID NO: 1797131 - DNA, 15 bp, Homo sapiens
tttaaagtgtaatta

SEQ ID NO: 1797132 - DNA, 15 bp, Homo sapiens
ttaaagtgtaattaa

SEQ ID NO: 1797133 - DNA, 15 bp, Homo sapiens
taaagtgtaattaaa

SEQ ID NO: 1797134 - DNA, 15 bp, Homo sapiens
aaagtgtaattaaaa

SEQ ID NO: 1797135 - DNA, 15 bp, Homo sapiens
aagtgtaattaaaac

SEQ ID NO: 1797136 - DNA, 15 bp, Homo sapiens
agtgtaattaaaact

SEQ ID NO: 1797137 - DNA, 15 bp, Homo sapiens
gtgtaattaaaacta

SEQ ID NO: 1797138 - DNA, 15 bp, Homo sapiens
tgtaattaaaactaa

SEQ ID NO: 1797139 - DNA, 15 bp, Homo sapiens
gtaattaaaactaaa

SEQ ID NO: 1797140 - DNA, 15 bp, Homo sapiens
taattaaaactaaat

SEQ ID NO: 1797141 - DNA, 15 bp, Homo sapiens
aattaaaactaaata

SEQ ID NO: 1797142 - DNA, 15 bp, Homo sapiens
attaaaactaaataa

SEQ ID NO: 1797143 - DNA, 15 bp, Homo sapiens
ttaaaactaaataac

SEQ ID NO: 1797144 - DNA, 15 bp, Homo sapiens
taaaactaaataact

SEQ ID NO: 1797145 - DNA, 15 bp, Homo sapiens
aaaactaaataacta

SEQ ID NO: 1797146 - DNA, 15 bp, Homo sapiens
aaactaaataactaa

SEQ ID NO: 1797147 - DNA, 15 bp, Homo sapiens
aactaaataactaaa

SEQ ID NO: 1797148 - DNA, 15 bp, Homo sapiens
actaaataactaaaa

SEQ ID NO: 1797149 - DNA, 15 bp, Homo sapiens
ctaaataactaaaac

SEQ ID NO: 1797150 - DNA, 15 bp, Homo sapiens
taaataactaaaaca

SEQ ID NO: 1797151 - DNA, 15 bp, Homo sapiens
aaataactaaaacaa

SEQ ID NO: 1797152 - DNA, 15 bp, Homo sapiens
aataactaaaacaaa

SEQ ID NO: 1797153 - DNA, 15 bp, Homo sapiens
ataactaaaacaaaa

SEQ ID NO: 1797154 - DNA, 15 bp, Homo sapiens
taactaaaacaaaat

SEQ ID NO: 1797155 - DNA, 15 bp, Homo sapiens
aactaaaacaaaatt

SEQ ID NO: 1797156 - DNA, 15 bp, Homo sapiens
actaaaacaaaattt

SEQ ID NO: 1797157 - DNA, 15 bp, Homo sapiens
ctaaaacaaaatttt

SEQ ID NO: 1797158 - DNA, 15 bp, Homo sapiens
taaaacaaaattttc

SEQ ID NO: 1797159 - DNA, 15 bp, Homo sapiens
aaaacaaaattttct

SEQ ID NO: 1797160 - DNA, 15 bp, Homo sapiens
aaacaaaattttcta

SEQ ID NO: 1797161 - DNA, 15 bp, Homo sapiens
aacaaaattttctag

SEQ ID NO: 1797162 - DNA, 15 bp, Homo sapiens
acaaaattttctagt

SEQ ID NO: 1797163 - DNA, 15 bp, Homo sapiens
caaaattttctagtt

SEQ ID NO: 1797164 - DNA, 15 bp, Homo sapiens
aaaattttctagtta

SEQ ID NO: 1797165 - DNA, 15 bp, Homo sapiens
aaattttctagttat

SEQ ID NO: 1797166 - DNA, 15 bp, Homo sapiens
aattttctagttata

SEQ ID NO: 1797167 - DNA, 15 bp, Homo sapiens
attttctagttataa

SEQ ID NO: 1797168 - DNA, 15 bp, Homo sapiens
ttttctagttataaa

SEQ ID NO: 1797169 - DNA, 15 bp, Homo sapiens
tttctagttataaat

SEQ ID NO: 1797170 - DNA, 15 bp, Homo sapiens
ttctagttataaatg

SEQ ID NO: 1797171 - DNA, 15 bp, Homo sapiens
tctagttataaatga

SEQ ID NO: 1797172 - DNA, 15 bp, Homo sapiens
ctagttataaatgaa

SEQ ID NO: 1797173 - DNA, 15 bp, Homo sapiens
tagttataaatgaat

SEQ ID NO: 1797174 - DNA, 15 bp, Homo sapiens
agttataaatgaatc

SEQ ID NO: 1797175 - DNA, 15 bp, Homo sapiens
gttataaatgaatct

SEQ ID NO: 1797176 - DNA, 15 bp, Homo sapiens
ttataaatgaatctc

SEQ ID NO: 1797177 - DNA, 15 bp, Homo sapiens
tataaatgaatctct

SEQ ID NO: 1797178 - DNA, 15 bp, Homo sapiens
ataaatgaatctctt

SEQ ID NO: 1797179 - DNA, 15 bp, Homo sapiens
taaatgaatctcttt

SEQ ID NO: 1797180 - DNA, 15 bp, Homo sapiens
aaatgaatctctttt

SEQ ID NO: 1797181 - DNA, 15 bp, Homo sapiens
aatgaatctcttttt

SEQ ID NO: 1797182 - DNA, 15 bp, Homo sapiens
atgaatctctttttg

SEQ ID NO: 1797183 - DNA, 15 bp, Homo sapiens
tgaatctctttttgg

SEQ ID NO: 1797184 - DNA, 15 bp, Homo sapiens
gaatctctttttgga

SEQ ID NO: 1797185 - DNA, 15 bp, Homo sapiens
aatctctttttggat

SEQ ID NO: 1797186 - DNA, 15 bp, Homo sapiens
atctctttttggatt

SEQ ID NO: 1797187 - DNA, 15 bp, Homo sapiens
tctctttttggattt

SEQ ID NO: 1797188 - DNA, 15 bp, Homo sapiens
ctctttttggatttt

SEQ ID NO: 1797189 - DNA, 15 bp, Homo sapiens
tctttttggatttta

SEQ ID NO: 1797190 - DNA, 15 bp, Homo sapiens
ctttttggattttat

SEQ ID NO: 1797191 - DNA, 15 bp, Homo sapiens
tttttggattttatg

SEQ ID NO: 1797192 - DNA, 15 bp, Homo sapiens
ttttggattttatgt

SEQ ID NO: 1797193 - DNA, 15 bp, Homo sapiens
tttggattttatgtc

SEQ ID NO: 1797194 - DNA, 15 bp, Homo sapiens
ttggattttatgtca

SEQ ID NO: 1797195 - DNA, 15 bp, Homo sapiens
tggattttatgtcaa

SEQ ID NO: 1797196 - DNA, 15 bp, Homo sapiens
ggattttatgtcaac

SEQ ID NO: 1797197 - DNA, 15 bp, Homo sapiens
gattttatgtcaact

SEQ ID NO: 1797198 - DNA, 15 bp, Homo sapiens
attttatgtcaactt

SEQ ID NO: 1797199 - DNA, 15 bp, Homo sapiens
ttttatgtcaactta

SEQ ID NO: 1797200 - DNA, 15 bp, Homo sapiens
tttatgtcaacttac

SEQ ID NO: 1797201 - DNA, 15 bp, Homo sapiens
ttatgtcaacttaca

SEQ ID NO: 1797202 - DNA, 15 bp, Homo sapiens
tatgtcaacttacat

SEQ ID NO: 1797203 - DNA, 15 bp, Homo sapiens
atgtcaacttacata

SEQ ID NO: 1797204 - DNA, 15 bp, Homo sapiens
tgtcaacttacatat

SEQ ID NO: 1797205 - DNA, 15 bp, Homo sapiens
gtcaacttacatatt

SEQ ID NO: 1797206 - DNA, 15 bp, Homo sapiens
tcaacttacatattc

SEQ ID NO: 1797207 - DNA, 15 bp, Homo sapiens
caacttacatattcc

SEQ ID NO: 1797208 - DNA, 15 bp, Homo sapiens
aacttacatattcct

SEQ ID NO: 1797209 - DNA, 15 bp, Homo sapiens
acttacatattccta

SEQ ID NO: 1797210 - DNA, 15 bp, Homo sapiens
cttacatattcctat

SEQ ID NO: 1797211 - DNA, 15 bp, Homo sapiens
ttacatattcctatt

SEQ ID NO: 1797212 - DNA, 15 bp, Homo sapiens
tacatattcctattt

SEQ ID NO: 1797213 - DNA, 15 bp, Homo sapiens
acatattcctatttt

SEQ ID NO: 1797214 - DNA, 15 bp, Homo sapiens
catattcctatttta

SEQ ID NO: 1797215 - DNA, 15 bp, Homo sapiens
atattcctattttaa

SEQ ID NO: 1797216 - DNA, 15 bp, Homo sapiens
tattcctattttaac

SEQ ID NO: 1797217 - DNA, 15 bp, Homo sapiens
attcctattttaact

SEQ ID NO: 1797218 - DNA, 15 bp, Homo sapiens
ttcctattttaactc

SEQ ID NO: 1797219 - DNA, 15 bp, Homo sapiens
tcctattttaactct

SEQ ID NO: 1797220 - DNA, 15 bp, Homo sapiens
cctattttaactctt

SEQ ID NO: 1797221 - DNA, 15 bp, Homo sapiens
ctattttaactctta

SEQ ID NO: 1797222 - DNA, 15 bp, Homo sapiens
tattttaactcttaa

SEQ ID NO: 1797223 - DNA, 15 bp, Homo sapiens
attttaactcttaaa

SEQ ID NO: 1797224 - DNA, 15 bp, Homo sapiens
ttttaactcttaaat

SEQ ID NO: 1797225 - DNA, 15 bp, Homo sapiens
tttaactcttaaata

SEQ ID NO: 1797226 - DNA, 15 bp, Homo sapiens
ttaactcttaaatag

SEQ ID NO: 1797227 - DNA, 15 bp, Homo sapiens
taactcttaaatagt

SEQ ID NO: 1797228 - DNA, 15 bp, Homo sapiens
aactcttaaatagtt

SEQ ID NO: 1797229 - DNA, 15 bp, Homo sapiens
actcttaaatagttg

SEQ ID NO: 1797230 - DNA, 15 bp, Homo sapiens
ctcttaaatagttgc

SEQ ID NO: 1797231 - DNA, 15 bp, Homo sapiens
tcttaaatagttgca

SEQ ID NO: 1797232 - DNA, 15 bp, Homo sapiens
cttaaatagttgcat

SEQ ID NO: 1797233 - DNA, 15 bp, Homo sapiens
ttaaatagttgcatc

SEQ ID NO: 1797234 - DNA, 15 bp, Homo sapiens
taaatagttgcatct

SEQ ID NO: 1797235 - DNA, 15 bp, Homo sapiens
aaatagttgcatctt

SEQ ID NO: 1797236 - DNA, 15 bp, Homo sapiens
aatagttgcatcttt

SEQ ID NO: 1797237 - DNA, 15 bp, Homo sapiens
atagttgcatctttt

SEQ ID NO: 1797238 - DNA, 15 bp, Homo sapiens
tagttgcatcttttc

SEQ ID NO: 1797239 - DNA, 15 bp, Homo sapiens
agttgcatcttttcc

SEQ ID NO: 1797240 - DNA, 15 bp, Homo sapiens
gttgcatcttttccc

SEQ ID NO: 1797241 - DNA, 15 bp, Homo sapiens
ttgcatcttttcccc

SEQ ID NO: 1797242 - DNA, 15 bp, Homo sapiens
tgcatcttttcccct

SEQ ID NO: 1797243 - DNA, 15 bp, Homo sapiens
gcatcttttcccctc

SEQ ID NO: 1797244 - DNA, 15 bp, Homo sapiens
catcttttcccctca

SEQ ID NO: 1797245 - DNA, 15 bp, Homo sapiens
atcttttcccctcag

SEQ ID NO: 1797246 - DNA, 15 bp, Homo sapiens
tcttttcccctcagt

SEQ ID NO: 1797247 - DNA, 15 bp, Homo sapiens
cttttcccctcagta

SEQ ID NO: 1797248 - DNA, 15 bp, Homo sapiens
ttttcccctcagtac

SEQ ID NO: 1797249 - DNA, 15 bp, Homo sapiens
tttcccctcagtaca

SEQ ID NO: 1797250 - DNA, 15 bp, Homo sapiens
ttcccctcagtacat

SEQ ID NO: 1797251 - DNA, 15 bp, Homo sapiens
tcccctcagtacatg

SEQ ID NO: 1797252 - DNA, 15 bp, Homo sapiens
cccctcagtacatga

SEQ ID NO: 1797253 - DNA, 15 bp, Homo sapiens
ccctcagtacatgaa

SEQ ID NO: 1797254 - DNA, 15 bp, Homo sapiens
cctcagtacatgaaa

SEQ ID NO: 1797255 - DNA, 15 bp, Homo sapiens
ctcagtacatgaaaa

SEQ ID NO: 1797256 - DNA, 15 bp, Homo sapiens
tcagtacatgaaaat

SEQ ID NO: 1797257 - DNA, 15 bp, Homo sapiens
cagtacatgaaaata

SEQ ID NO: 1797258 - DNA, 15 bp, Homo sapiens
agtacatgaaaatag

SEQ ID NO: 1797259 - DNA, 15 bp, Homo sapiens
gtacatgaaaataga

SEQ ID NO: 1797260 - DNA, 15 bp, Homo sapiens
tacatgaaaatagac

SEQ ID NO: 1797261 - DNA, 15 bp, Homo sapiens
acatgaaaatagaca

SEQ ID NO: 1797262 - DNA, 15 bp, Homo sapiens
catgaaaatagacaa

SEQ ID NO: 1797263 - DNA, 15 bp, Homo sapiens
atgaaaatagacaag

SEQ ID NO: 1797264 - DNA, 15 bp, Homo sapiens
tgaaaatagacaaga

SEQ ID NO: 1797265 - DNA, 15 bp, Homo sapiens
gaaaatagacaagag

SEQ ID NO: 1797266 - DNA, 15 bp, Homo sapiens
aaaatagacaagagg

SEQ ID NO: 1797267 - DNA, 15 bp, Homo sapiens
aaatagacaagaggc

SEQ ID NO: 1797268 - DNA, 15 bp, Homo sapiens
aatagacaagaggct

SEQ ID NO: 1797269 - DNA, 15 bp, Homo sapiens
atagacaagaggctc

SEQ ID NO: 1797270 - DNA, 15 bp, Homo sapiens
tagacaagaggctca

SEQ ID NO: 1797271 - DNA, 15 bp, Homo sapiens
agacaagaggctcat

SEQ ID NO: 1797272 - DNA, 15 bp, Homo sapiens
gacaagaggctcata

SEQ ID NO: 1797273 - DNA, 15 bp, Homo sapiens
acaagaggctcataa

SEQ ID NO: 1797274 - DNA, 15 bp, Homo sapiens
caagaggctcataac

SEQ ID NO: 1797275 - DNA, 15 bp, Homo sapiens
aagaggctcataacc

SEQ ID NO: 1797276 - DNA, 15 bp, Homo sapiens
agaggctcataacca

SEQ ID NO: 1797277 - DNA, 15 bp, Homo sapiens
gaggctcataaccaa

SEQ ID NO: 1797278 - DNA, 15 bp, Homo sapiens
aggctcataaccaaa

SEQ ID NO: 1797279 - DNA, 15 bp, Homo sapiens
ggctcataaccaaaa

SEQ ID NO: 1797280 - DNA, 15 bp, Homo sapiens
gctcataaccaaaat

SEQ ID NO: 1797281 - DNA, 15 bp, Homo sapiens
ctcataaccaaaatc

SEQ ID NO: 1797282 - DNA, 15 bp, Homo sapiens
tcataaccaaaatca

SEQ ID NO: 1797283 - DNA, 15 bp, Homo sapiens
cataaccaaaatcag

SEQ ID NO: 1797284 - DNA, 15 bp, Homo sapiens
ataaccaaaatcagg

SEQ ID NO: 1797285 - DNA, 15 bp, Homo sapiens
taaccaaaatcaggc

SEQ ID NO: 1797286 - DNA, 15 bp, Homo sapiens
aaccaaaatcaggcc

SEQ ID NO: 1797287 - DNA, 15 bp, Homo sapiens
accaaaatcaggcct

SEQ ID NO: 1797288 - DNA, 15 bp, Homo sapiens
ccaaaatcaggcctt

SEQ ID NO: 1797289 - DNA, 15 bp, Homo sapiens
caaaatcaggccttg

SEQ ID NO: 1797290 - DNA, 15 bp, Homo sapiens
aaaatcaggccttga

SEQ ID NO: 1797291 - DNA, 15 bp, Homo sapiens
aaatcaggccttgaa

SEQ ID NO: 1797292 - DNA, 15 bp, Homo sapiens
aatcaggccttgaag

SEQ ID NO: 1797293 - DNA, 15 bp, Homo sapiens
atcaggccttgaaga

SEQ ID NO: 1797294 - DNA, 15 bp, Homo sapiens
tcaggccttgaagac

SEQ ID NO: 1797295 - DNA, 15 bp, Homo sapiens
caggccttgaagaca

SEQ ID NO: 1797296 - DNA, 15 bp, Homo sapiens
aggccttgaagacat

SEQ ID NO: 1797297 - DNA, 15 bp, Homo sapiens
ggccttgaagacata

SEQ ID NO: 1797298 - DNA, 15 bp, Homo sapiens
gccttgaagacatat

SEQ ID NO: 1797299 - DNA, 15 bp, Homo sapiens
ccttgaagacatatg

SEQ ID NO: 1797300 - DNA, 15 bp, Homo sapiens
cttgaagacatatgg

SEQ ID NO: 1797301 - DNA, 15 bp, Homo sapiens
ttgaagacatatgga

SEQ ID NO: 1797302 - DNA, 15 bp, Homo sapiens
tgaagacatatggaa

SEQ ID NO: 1797303 - DNA, 15 bp, Homo sapiens
gaagacatatggaaa

SEQ ID NO: 1797304 - DNA, 15 bp, Homo sapiens
aagacatatggaaac

SEQ ID NO: 1797305 - DNA, 15 bp, Homo sapiens
agacatatggaaaca

SEQ ID NO: 1797306 - DNA, 15 bp, Homo sapiens
gacatatggaaacat

SEQ ID NO: 1797307 - DNA, 15 bp, Homo sapiens
acatatggaaacatt

SEQ ID NO: 1797308 - DNA, 15 bp, Homo sapiens
catatggaaacattt

SEQ ID NO: 1797309 - DNA, 15 bp, Homo sapiens
atatggaaacatttt

SEQ ID NO: 1797310 - DNA, 15 bp, Homo sapiens
tatggaaacattttg

SEQ ID NO: 1797311 - DNA, 15 bp, Homo sapiens
atggaaacattttgg

SEQ ID NO: 1797312 - DNA, 15 bp, Homo sapiens
tggaaacattttgga

SEQ ID NO: 1797313 - DNA, 15 bp, Homo sapiens
ggaaacattttggaa

SEQ ID NO: 1797314 - DNA, 15 bp, Homo sapiens
gaaacattttggaac

SEQ ID NO: 1797315 - DNA, 15 bp, Homo sapiens
aaacattttggaacc

SEQ ID NO: 1797316 - DNA, 15 bp, Homo sapiens
aacattttggaaccc

SEQ ID NO: 1797317 - DNA, 15 bp, Homo sapiens
acattttggaaccca

SEQ ID NO: 1797318 - DNA, 15 bp, Homo sapiens
cattttggaacccac

SEQ ID NO: 1797319 - DNA, 15 bp, Homo sapiens
attttggaacccaca

SEQ ID NO: 1797320 - DNA, 15 bp, Homo sapiens
ttttggaacccacaa

SEQ ID NO: 1797321 - DNA, 15 bp, Homo sapiens
tttggaacccacaaa

SEQ ID NO: 1797322 - DNA, 15 bp, Homo sapiens
ttggaacccacaaat

SEQ ID NO: 1797323 - DNA, 15 bp, Homo sapiens
tggaacccacaaata

SEQ ID NO: 1797324 - DNA, 15 bp, Homo sapiens
ggaacccacaaatat

SEQ ID NO: 1797325 - DNA, 15 bp, Homo sapiens
gaacccacaaatatg

SEQ ID NO: 1797326 - DNA, 15 bp, Homo sapiens
aacccacaaatatgc

SEQ ID NO: 1797327 - DNA, 15 bp, Homo sapiens
acccacaaatatgca

SEQ ID NO: 1797328 - DNA, 15 bp, Homo sapiens
cccacaaatatgcac

SEQ ID NO: 1797329 - DNA, 15 bp, Homo sapiens
ccacaaatatgcact

SEQ ID NO: 1797330 - DNA, 15 bp, Homo sapiens
cacaaatatgcactt

SEQ ID NO: 1797331 - DNA, 15 bp, Homo sapiens
acaaatatgcactta

SEQ ID NO: 1797332 - DNA, 15 bp, Homo sapiens
caaatatgcacttaa

SEQ ID NO: 1797333 - DNA, 15 bp, Homo sapiens
aaatatgcacttaaa

SEQ ID NO: 1797334 - DNA, 15 bp, Homo sapiens
aatatgcacttaaaa

SEQ ID NO: 1797335 - DNA, 15 bp, Homo sapiens
atatgcacttaaaaa

SEQ ID NO: 1797336 - DNA, 15 bp, Homo sapiens
tatgcacttaaaaag

SEQ ID NO: 1797337 - DNA, 15 bp, Homo sapiens
atgcacttaaaaagg

SEQ ID NO: 1797338 - DNA, 15 bp, Homo sapiens
tgcacttaaaaagga

SEQ ID NO: 1797339 - DNA, 15 bp, Homo sapiens
gcacttaaaaaggag

SEQ ID NO: 1797340 - DNA, 15 bp, Homo sapiens
cacttaaaaaggagc

SEQ ID NO: 1797341 - DNA, 15 bp, Homo sapiens
acttaaaaaggagct

SEQ ID NO: 1797342 - DNA, 15 bp, Homo sapiens
cttaaaaaggagctg

SEQ ID NO: 1797343 - DNA, 15 bp, Homo sapiens
ttaaaaaggagctga

SEQ ID NO: 1797344 - DNA, 15 bp, Homo sapiens
taaaaaggagctgaa

SEQ ID NO: 1797345 - DNA, 15 bp, Homo sapiens
aaaaaggagctgaaa

SEQ ID NO: 1797346 - DNA, 15 bp, Homo sapiens
aaaaggagctgaaag

SEQ ID NO: 1797347 - DNA, 15 bp, Homo sapiens
aaaggagctgaaagc

SEQ ID NO: 1797348 - DNA, 15 bp, Homo sapiens
aaggagctgaaagct

SEQ ID NO: 1797349 - DNA, 15 bp, Homo sapiens
aggagctgaaagctg

SEQ ID NO: 1797350 - DNA, 15 bp, Homo sapiens
ggagctgaaagctgt

SEQ ID NO: 1797351 - DNA, 15 bp, Homo sapiens
gagctgaaagctgta

SEQ ID NO: 1797352 - DNA, 15 bp, Homo sapiens
agctgaaagctgtaa

SEQ ID NO: 1797353 - DNA, 15 bp, Homo sapiens
gctgaaagctgtaaa

SEQ ID NO: 1797354 - DNA, 15 bp, Homo sapiens
ctgaaagctgtaaaa

SEQ ID NO: 1797355 - DNA, 15 bp, Homo sapiens
tgaaagctgtaaaaa

SEQ ID NO: 1797356 - DNA, 15 bp, Homo sapiens
gaaagctgtaaaaac

SEQ ID NO: 1797357 - DNA, 15 bp, Homo sapiens
aaagctgtaaaaaca

SEQ ID NO: 1797358 - DNA, 15 bp, Homo sapiens
aagctgtaaaaacat

SEQ ID NO: 1797359 - DNA, 15 bp, Homo sapiens
agctgtaaaaacatg

SEQ ID NO: 1797360 - DNA, 15 bp, Homo sapiens
gctgtaaaaacatgt

SEQ ID NO: 1797361 - DNA, 15 bp, Homo sapiens
ctgtaaaaacatgta

SEQ ID NO: 1797362 - DNA, 15 bp, Homo sapiens
tgtaaaaacatgtat

SEQ ID NO: 1797363 - DNA, 15 bp, Homo sapiens
taaaaacatgtatat

SEQ ID NO: 1797364 - DNA, 15 bp, Homo sapiens
aaaaacatgtatatt

SEQ ID NO: 1797365 - DNA, 15 bp, Homo sapiens
aaaacatgtatattt

SEQ ID NO: 1797366 - DNA, 15 bp, Homo sapiens
aaacatgtatatttt

SEQ ID NO: 1797367 - DNA, 15 bp, Homo sapiens
aacatgtatattttc

SEQ ID NO: 1797368 - DNA, 15 bp, Homo sapiens
acatgtatattttct

SEQ ID NO: 1797369 - DNA, 15 bp, Homo sapiens
catgtatattttctt

SEQ ID NO: 1797370 - DNA, 15 bp, Homo sapiens
atgtatattttctta

SEQ ID NO: 1797371 - DNA, 15 bp, Homo sapiens
tgtatattttcttag

SEQ ID NO: 1797372 - DNA, 15 bp, Homo sapiens
gtatattttcttaga

SEQ ID NO: 1797373 - DNA, 15 bp, Homo sapiens
tatattttcttagag

SEQ ID NO: 1797374 - DNA, 15 bp, Homo sapiens
atattttcttagaga

SEQ ID NO: 1797375 - DNA, 15 bp, Homo sapiens
tattttcttagagaa

SEQ ID NO: 1797376 - DNA, 15 bp, Homo sapiens
attttcttagagaag

SEQ ID NO: 1797377 - DNA, 15 bp, Homo sapiens
ttttcttagagaagt

SEQ ID NO: 1797378 - DNA, 15 bp, Homo sapiens
tttcttagagaagtg

SEQ ID NO: 1797379 - DNA, 15 bp, Homo sapiens
ttcttagagaagtgt

SEQ ID NO: 1797380 - DNA, 15 bp, Homo sapiens
tcttagagaagtgtt

SEQ ID NO: 1797381 - DNA, 15 bp, Homo sapiens
cttagagaagtgttc

SEQ ID NO: 1797382 - DNA, 15 bp, Homo sapiens
ttagagaagtgttca

SEQ ID NO: 1797383 - DNA, 15 bp, Homo sapiens
tagagaagtgttcag

SEQ ID NO: 1797384 - DNA, 15 bp, Homo sapiens
agagaagtgttcagt

SEQ ID NO: 1797385 - DNA, 15 bp, Homo sapiens
gagaagtgttcagtt

SEQ ID NO: 1797386 - DNA, 15 bp, Homo sapiens
agaagtgttcagttg

SEQ ID NO: 1797387 - DNA, 15 bp, Homo sapiens
gaagtgttcagttgc

SEQ ID NO: 1797388 - DNA, 15 bp, Homo sapiens
aagtgttcagttgct

SEQ ID NO: 1797389 - DNA, 15 bp, Homo sapiens
agtgttcagttgcta

SEQ ID NO: 1797390 - DNA, 15 bp, Homo sapiens
gtgttcagttgctat

SEQ ID NO: 1797391 - DNA, 15 bp, Homo sapiens
tgttcagttgctata

SEQ ID NO: 1797392 - DNA, 15 bp, Homo sapiens
gttcagttgctatag

SEQ ID NO: 1797393 - DNA, 15 bp, Homo sapiens
ttcagttgctatagt

SEQ ID NO: 1797394 - DNA, 15 bp, Homo sapiens
tcagttgctatagtt

SEQ ID NO: 1797395 - DNA, 15 bp, Homo sapiens
cagttgctatagtta

SEQ ID NO: 1797396 - DNA, 15 bp, Homo sapiens
agttgctatagttag

SEQ ID NO: 1797397 - DNA, 15 bp, Homo sapiens
gttgctatagttagt

SEQ ID NO: 1797398 - DNA, 15 bp, Homo sapiens
ttgctatagttagta

SEQ ID NO: 1797399 - DNA, 15 bp, Homo sapiens
tgctatagttagtac

SEQ ID NO: 1797400 - DNA, 15 bp, Homo sapiens
gctatagttagtaca

SEQ ID NO: 1797401 - DNA, 15 bp, Homo sapiens
ctatagttagtacat

SEQ ID NO: 1797402 - DNA, 15 bp, Homo sapiens
tatagttagtacatt

SEQ ID NO: 1797403 - DNA, 15 bp, Homo sapiens
atagttagtacattt

SEQ ID NO: 1797404 - DNA, 15 bp, Homo sapiens
tagttagtacatttc

SEQ ID NO: 1797405 - DNA, 15 bp, Homo sapiens
agttagtacatttcc

SEQ ID NO: 1797406 - DNA, 15 bp, Homo sapiens
gttagtacatttccc

SEQ ID NO: 1797407 - DNA, 15 bp, Homo sapiens
ttagtacatttccca

SEQ ID NO: 1797408 - DNA, 15 bp, Homo sapiens
tagtacatttcccag

SEQ ID NO: 1797409 - DNA, 15 bp, Homo sapiens
agtacatttcccagt

SEQ ID NO: 1797410 - DNA, 15 bp, Homo sapiens
gtacatttcccagtg

SEQ ID NO: 1797411 - DNA, 15 bp, Homo sapiens
tacatttcccagtga

SEQ ID NO: 1797412 - DNA, 15 bp, Homo sapiens
acatttcccagtgac

SEQ ID NO: 1797413 - DNA, 15 bp, Homo sapiens
catttcccagtgaca

SEQ ID NO: 1797414 - DNA, 15 bp, Homo sapiens
atttcccagtgacac

SEQ ID NO: 1797415 - DNA, 15 bp, Homo sapiens
tttcccagtgacaca

SEQ ID NO: 1797416 - DNA, 15 bp, Homo sapiens
ttcccagtgacacac

SEQ ID NO: 1797417 - DNA, 15 bp, Homo sapiens
tcccagtgacacact

SEQ ID NO: 1797418 - DNA, 15 bp, Homo sapiens
cccagtgacacactt

SEQ ID NO: 1797419 - DNA, 15 bp, Homo sapiens
ccagtgacacactta

SEQ ID NO: 1797420 - DNA, 15 bp, Homo sapiens
cagtgacacacttag

SEQ ID NO: 1797421 - DNA, 15 bp, Homo sapiens
agtgacacacttagc

SEQ ID NO: 1797422 - DNA, 15 bp, Homo sapiens
gtgacacacttagct

SEQ ID NO: 1797423 - DNA, 15 bp, Homo sapiens
tgacacacttagcta

SEQ ID NO: 1797424 - DNA, 15 bp, Homo sapiens
gacacacttagctat

SEQ ID NO: 1797425 - DNA, 15 bp, Homo sapiens
acacacttagctatg

SEQ ID NO: 1797426 - DNA, 15 bp, Homo sapiens
cacacttagctatga

SEQ ID NO: 1797427 - DNA, 15 bp, Homo sapiens
acacttagctatgat

SEQ ID NO: 1797428 - DNA, 15 bp, Homo sapiens
cacttagctatgatg

SEQ ID NO: 1797429 - DNA, 15 bp, Homo sapiens
acttagctatgatgg

SEQ ID NO: 1797430 - DNA, 15 bp, Homo sapiens
cttagctatgatggc

SEQ ID NO: 1797431 - DNA, 15 bp, Homo sapiens
ttagctatgatggcg

SEQ ID NO: 1797432 - DNA, 15 bp, Homo sapiens
tagctatgatggcga

SEQ ID NO: 1797433 - DNA, 15 bp, Homo sapiens
agctatgatggcgag

SEQ ID NO: 1797434 - DNA, 15 bp, Homo sapiens
gctatgatggcgagc

SEQ ID NO: 1797435 - DNA, 15 bp, Homo sapiens
ctatgatggcgagct

SEQ ID NO: 1797436 - DNA, 15 bp, Homo sapiens
tatgatggcgagctt

SEQ ID NO: 1797437 - DNA, 15 bp, Homo sapiens
atgatggcgagcttc

SEQ ID NO: 1797438 - DNA, 15 bp, Homo sapiens
tgatggcgagcttcc

SEQ ID NO: 1797439 - DNA, 15 bp, Homo sapiens
gatggcgagcttcct

SEQ ID NO: 1797440 - DNA, 15 bp, Homo sapiens
atggcgagcttcctc

SEQ ID NO: 1797441 - DNA, 15 bp, Homo sapiens
tggcgagcttcctct

SEQ ID NO: 1797442 - DNA, 15 bp, Homo sapiens
ggcgagcttcctctg

SEQ ID NO: 1797443 - DNA, 15 bp, Homo sapiens
gcgagcttcctctgc

SEQ ID NO: 1797444 - DNA, 15 bp, Homo sapiens
cgagcttcctctgcc

SEQ ID NO: 1797445 - DNA, 15 bp, Homo sapiens
gagcttcctctgcca

SEQ ID NO: 1797446 - DNA, 15 bp, Homo sapiens
agcttcctctgccag

SEQ ID NO: 1797447 - DNA, 15 bp, Homo sapiens
gcttcctctgccagg

SEQ ID NO: 1797448 - DNA, 15 bp, Homo sapiens
cttcctctgccaggc

SEQ ID NO: 1797449 - DNA, 15 bp, Homo sapiens
ttcctctgccaggcc

SEQ ID NO: 1797450 - DNA, 15 bp, Homo sapiens
tcctctgccaggcca

SEQ ID NO: 1797451 - DNA, 15 bp, Homo sapiens
cctctgccaggccaa

SEQ ID NO: 1797452 - DNA, 15 bp, Homo sapiens
ctctgccaggccaaa

SEQ ID NO: 1797453 - DNA, 15 bp, Homo sapiens
tctgccaggccaaag

SEQ ID NO: 1797454 - DNA, 15 bp, Homo sapiens
ctgccaggccaaagt

SEQ ID NO: 1797455 - DNA, 15 bp, Homo sapiens
tgccaggccaaagtt

SEQ ID NO: 1797456 - DNA, 15 bp, Homo sapiens
gccaggccaaagttc

SEQ ID NO: 1797457 - DNA, 15 bp, Homo sapiens
ccaggccaaagttca

SEQ ID NO: 1797458 - DNA, 15 bp, Homo sapiens
caggccaaagttcag

SEQ ID NO: 1797459 - DNA, 15 bp, Homo sapiens
aggccaaagttcagg

SEQ ID NO: 1797460 - DNA, 15 bp, Homo sapiens
ggccaaagttcagga

SEQ ID NO: 1797461 - DNA, 15 bp, Homo sapiens
gccaaagttcaggac

SEQ ID NO: 1797462 - DNA, 15 bp, Homo sapiens
ccaaagttcaggacc

SEQ ID NO: 1797463 - DNA, 15 bp, Homo sapiens
caaagttcaggacct

SEQ ID NO: 1797464 - DNA, 15 bp, Homo sapiens
aaagttcaggacctt

SEQ ID NO: 1797465 - DNA, 15 bp, Homo sapiens
aagttcaggaccttt

SEQ ID NO: 1797466 - DNA, 15 bp, Homo sapiens
agttcaggacctttg

SEQ ID NO: 1797467 - DNA, 15 bp, Homo sapiens
gttcaggacctttgt

SEQ ID NO: 1797468 - DNA, 15 bp, Homo sapiens
ttcaggacctttgtg

SEQ ID NO: 1797469 - DNA, 15 bp, Homo sapiens
tcaggacctttgtgc

SEQ ID NO: 1797470 - DNA, 15 bp, Homo sapiens
caggacctttgtgca

SEQ ID NO: 1797471 - DNA, 15 bp, Homo sapiens
aggacctttgtgcat

SEQ ID NO: 1797472 - DNA, 15 bp, Homo sapiens
ggacctttgtgcatc

SEQ ID NO: 1797473 - DNA, 15 bp, Homo sapiens
gacctttgtgcatct

SEQ ID NO: 1797474 - DNA, 15 bp, Homo sapiens
acctttgtgcatcta

SEQ ID NO: 1797475 - DNA, 15 bp, Homo sapiens
cctttgtgcatctac

SEQ ID NO: 1797476 - DNA, 15 bp, Homo sapiens
ctttgtgcatctaca

SEQ ID NO: 1797477 - DNA, 15 bp, Homo sapiens
tttgtgcatctacaa

SEQ ID NO: 1797478 - DNA, 15 bp, Homo sapiens
ttgtgcatctacaaa

SEQ ID NO: 1797479 - DNA, 15 bp, Homo sapiens
tgtgcatctacaaaa

SEQ ID NO: 1797480 - DNA, 15 bp, Homo sapiens
gtgcatctacaaaat

SEQ ID NO: 1797481 - DNA, 15 bp, Homo sapiens
tgcatctacaaaatt

SEQ ID NO: 1797482 - DNA, 15 bp, Homo sapiens
gcatctacaaaattg

SEQ ID NO: 1797483 - DNA, 15 bp, Homo sapiens
catctacaaaattgt

SEQ ID NO: 1797484 - DNA, 15 bp, Homo sapiens
atctacaaaattgtg

SEQ ID NO: 1797485 - DNA, 15 bp, Homo sapiens
tctacaaaattgtga

SEQ ID NO: 1797486 - DNA, 15 bp, Homo sapiens
ctacaaaattgtgac

SEQ ID NO: 1797487 - DNA, 15 bp, Homo sapiens
tacaaaattgtgaca

SEQ ID NO: 1797488 - DNA, 15 bp, Homo sapiens
acaaaattgtgacaa

SEQ ID NO: 1797489 - DNA, 15 bp, Homo sapiens
caaaattgtgacaaa

SEQ ID NO: 1797490 - DNA, 15 bp, Homo sapiens
aaaattgtgacaaag

SEQ ID NO: 1797491 - DNA, 15 bp, Homo sapiens
aaattgtgacaaagc

SEQ ID NO: 1797492 - DNA, 15 bp, Homo sapiens
aattgtgacaaagca

SEQ ID NO: 1797493 - DNA, 15 bp, Homo sapiens
attgtgacaaagcag

SEQ ID NO: 1797494 - DNA, 15 bp, Homo sapiens
ttgtgacaaagcagg

SEQ ID NO: 1797495 - DNA, 15 bp, Homo sapiens
tgtgacaaagcaggc

SEQ ID NO: 1797496 - DNA, 15 bp, Homo sapiens
gtgacaaagcaggca

SEQ ID NO: 1797497 - DNA, 15 bp, Homo sapiens
tgacaaagcaggcag

SEQ ID NO: 1797498 - DNA, 15 bp, Homo sapiens
gacaaagcaggcaga

SEQ ID NO: 1797499 - DNA, 15 bp, Homo sapiens
acaaagcaggcagaa

SEQ ID NO: 1797500 - DNA, 15 bp, Homo sapiens
caaagcaggcagaat

SEQ ID NO: 1797501 - DNA, 15 bp, Homo sapiens
aaagcaggcagaatt

SEQ ID NO: 1797502 - DNA, 15 bp, Homo sapiens
aagcaggcagaattt

SEQ ID NO: 1797503 - DNA, 15 bp, Homo sapiens
agcaggcagaatttt

SEQ ID NO: 1797504 - DNA, 15 bp, Homo sapiens
gcaggcagaatttta

SEQ ID NO: 1797505 - DNA, 15 bp, Homo sapiens
caggcagaattttaa

SEQ ID NO: 1797506 - DNA, 15 bp, Homo sapiens
aggcagaattttaac

SEQ ID NO: 1797507 - DNA, 15 bp, Homo sapiens
ggcagaattttaacc

SEQ ID NO: 1797508 - DNA, 15 bp, Homo sapiens
gcagaattttaaccc

SEQ ID NO: 1797509 - DNA, 15 bp, Homo sapiens
cagaattttaacccc

SEQ ID NO: 1797510 - DNA, 15 bp, Homo sapiens
agaattttaacccct

SEQ ID NO: 1797511 - DNA, 15 bp, Homo sapiens
gaattttaacccctg

SEQ ID NO: 1797512 - DNA, 15 bp, Homo sapiens
aattttaacccctga

SEQ ID NO: 1797513 - DNA, 15 bp, Homo sapiens
attttaacccctgag

SEQ ID NO: 1797514 - DNA, 15 bp, Homo sapiens
ttttaacccctgagg

SEQ ID NO: 1797515 - DNA, 15 bp, Homo sapiens
tttaacccctgaggc

SEQ ID NO: 1797516 - DNA, 15 bp, Homo sapiens
ttaacccctgaggct

SEQ ID NO: 1797517 - DNA, 15 bp, Homo sapiens
taacccctgaggcta

SEQ ID NO: 1797518 - DNA, 15 bp, Homo sapiens
aacccctgaggctaa

SEQ ID NO: 1797519 - DNA, 15 bp, Homo sapiens
acccctgaggctaag

SEQ ID NO: 1797520 - DNA, 15 bp, Homo sapiens
cccctgaggctaagg

SEQ ID NO: 1797521 - DNA, 15 bp, Homo sapiens
ccctgaggctaaggc

SEQ ID NO: 1797522 - DNA, 15 bp, Homo sapiens
cctgaggctaaggca

SEQ ID NO: 1797523 - DNA, 15 bp, Homo sapiens
ctgaggctaaggcat

SEQ ID NO: 1797524 - DNA, 15 bp, Homo sapiens
tgaggctaaggcatt

SEQ ID NO: 1797525 - DNA, 15 bp, Homo sapiens
gaggctaaggcattt

SEQ ID NO: 1797526 - DNA, 15 bp, Homo sapiens
aggctaaggcatttc

SEQ ID NO: 1797527 - DNA, 15 bp, Homo sapiens
ggctaaggcatttct

SEQ ID NO: 1797528 - DNA, 15 bp, Homo sapiens
gctaaggcatttctt

SEQ ID NO: 1797529 - DNA, 15 bp, Homo sapiens
ctaaggcatttcttt

SEQ ID NO: 1797530 - DNA, 15 bp, Homo sapiens
taaggcatttcttta

SEQ ID NO: 1797531 - DNA, 15 bp, Homo sapiens
aaggcatttctttag

SEQ ID NO: 1797532 - DNA, 15 bp, Homo sapiens
aggcatttctttagg

SEQ ID NO: 1797533 - DNA, 15 bp, Homo sapiens
ggcatttctttagga

SEQ ID NO: 1797534 - DNA, 15 bp, Homo sapiens
gcatttctttaggat

SEQ ID NO: 1797535 - DNA, 15 bp, Homo sapiens
catttctttaggatg

SEQ ID NO: 1797536 - DNA, 15 bp, Homo sapiens
atttctttaggatgc

SEQ ID NO: 1797537 - DNA, 15 bp, Homo sapiens
tttctttaggatgct

SEQ ID NO: 1797538 - DNA, 15 bp, Homo sapiens
ttctttaggatgctc

SEQ ID NO: 1797539 - DNA, 15 bp, Homo sapiens
tctttaggatgctct

SEQ ID NO: 1797540 - DNA, 15 bp, Homo sapiens
ctttaggatgctctt

SEQ ID NO: 1797541 - DNA, 15 bp, Homo sapiens
tttaggatgctcttc

SEQ ID NO: 1797542 - DNA, 15 bp, Homo sapiens
ttaggatgctcttca

SEQ ID NO: 1797543 - DNA, 15 bp, Homo sapiens
taggatgctcttcag

SEQ ID NO: 1797544 - DNA, 15 bp, Homo sapiens
aggatgctcttcagc

SEQ ID NO: 1797545 - DNA, 15 bp, Homo sapiens
ggatgctcttcagct

SEQ ID NO: 1797546 - DNA, 15 bp, Homo sapiens
gatgctcttcagctt

SEQ ID NO: 1797547 - DNA, 15 bp, Homo sapiens
atgctcttcagcttt

SEQ ID NO: 1797548 - DNA, 15 bp, Homo sapiens
tgctcttcagctttt

SEQ ID NO: 1797549 - DNA, 15 bp, Homo sapiens
gctcttcagcttttc

SEQ ID NO: 1797550 - DNA, 15 bp, Homo sapiens
ctcttcagcttttct

SEQ ID NO: 1797551 - DNA, 15 bp, Homo sapiens
tcttcagcttttctt

SEQ ID NO: 1797552 - DNA, 15 bp, Homo sapiens
cttcagcttttctta

SEQ ID NO: 1797553 - DNA, 15 bp, Homo sapiens
ttcagcttttcttaa

SEQ ID NO: 1797554 - DNA, 15 bp, Homo sapiens
tcagcttttcttaaa

SEQ ID NO: 1797555 - DNA, 15 bp, Homo sapiens
cagcttttcttaaag

SEQ ID NO: 1797556 - DNA, 15 bp, Homo sapiens
agcttttcttaaaga

SEQ ID NO: 1797557 - DNA, 15 bp, Homo sapiens
gcttttcttaaagaa

SEQ ID NO: 1797558 - DNA, 15 bp, Homo sapiens
cttttcttaaagaat

SEQ ID NO: 1797559 - DNA, 15 bp, Homo sapiens
ttttcttaaagaatt

SEQ ID NO: 1797560 - DNA, 15 bp, Homo sapiens
tttcttaaagaatta

SEQ ID NO: 1797561 - DNA, 15 bp, Homo sapiens
ttcttaaagaattac

SEQ ID NO: 1797562 - DNA, 15 bp, Homo sapiens
tcttaaagaattaca

SEQ ID NO: 1797563 - DNA, 15 bp, Homo sapiens
cttaaagaattacat

SEQ ID NO: 1797564 - DNA, 15 bp, Homo sapiens
ttaaagaattacatt

SEQ ID NO: 1797565 - DNA, 15 bp, Homo sapiens
taaagaattacattt

SEQ ID NO: 1797566 - DNA, 15 bp, Homo sapiens
aaagaattacattta

SEQ ID NO: 1797567 - DNA, 15 bp, Homo sapiens
aagaattacatttag

SEQ ID NO: 1797568 - DNA, 15 bp, Homo sapiens
agaattacatttaga

SEQ ID NO: 1797569 - DNA, 15 bp, Homo sapiens
gaattacatttagaa

SEQ ID NO: 1797570 - DNA, 15 bp, Homo sapiens
aattacatttagaaa

SEQ ID NO: 1797571 - DNA, 15 bp, Homo sapiens
attacatttagaaaa

SEQ ID NO: 1797572 - DNA, 15 bp, Homo sapiens
ttacatttagaaaag

SEQ ID NO: 1797573 - DNA, 15 bp, Homo sapiens
tacatttagaaaaga

SEQ ID NO: 1797574 - DNA, 15 bp, Homo sapiens
acatttagaaaagat

SEQ ID NO: 1797575 - DNA, 15 bp, Homo sapiens
catttagaaaagatc

SEQ ID NO: 1797576 - DNA, 15 bp, Homo sapiens
atttagaaaagatca

SEQ ID NO: 1797577 - DNA, 15 bp, Homo sapiens
tttagaaaagatcat

SEQ ID NO: 1797578 - DNA, 15 bp, Homo sapiens
ttagaaaagatcatc

SEQ ID NO: 1797579 - DNA, 15 bp, Homo sapiens
tagaaaagatcatca

SEQ ID NO: 1797580 - DNA, 15 bp, Homo sapiens
agaaaagatcatcat

SEQ ID NO: 1797581 - DNA, 15 bp, Homo sapiens
gaaaagatcatcata

SEQ ID NO: 1797582 - DNA, 15 bp, Homo sapiens
aaaagatcatcatac

SEQ ID NO: 1797583 - DNA, 15 bp, Homo sapiens
aaagatcatcataca

SEQ ID NO: 1797584 - DNA, 15 bp, Homo sapiens
aagatcatcatacaa

SEQ ID NO: 1797585 - DNA, 15 bp, Homo sapiens
agatcatcatacaat

SEQ ID NO: 1797586 - DNA, 15 bp, Homo sapiens
gatcatcatacaatg

SEQ ID NO: 1797587 - DNA, 15 bp, Homo sapiens
atcatcatacaatgc

SEQ ID NO: 1797588 - DNA, 15 bp, Homo sapiens
tcatcatacaatgct

SEQ ID NO: 1797589 - DNA, 15 bp, Homo sapiens
catcatacaatgctg

SEQ ID NO: 1797590 - DNA, 15 bp, Homo sapiens
atcatacaatgctgg

SEQ ID NO: 1797591 - DNA, 15 bp, Homo sapiens
tcatacaatgctgga

SEQ ID NO: 1797592 - DNA, 15 bp, Homo sapiens
catacaatgctggat

SEQ ID NO: 1797593 - DNA, 15 bp, Homo sapiens
atacaatgctggatt

SEQ ID NO: 1797594 - DNA, 15 bp, Homo sapiens
tacaatgctggattg

SEQ ID NO: 1797595 - DNA, 15 bp, Homo sapiens
acaatgctggattgc

SEQ ID NO: 1797596 - DNA, 15 bp, Homo sapiens
caatgctggattgcc

SEQ ID NO: 1797597 - DNA, 15 bp, Homo sapiens
aatgctggattgccc

SEQ ID NO: 1797598 - DNA, 15 bp, Homo sapiens
atgctggattgccca

SEQ ID NO: 1797599 - DNA, 15 bp, Homo sapiens
tgctggattgcccag

SEQ ID NO: 1797600 - DNA, 15 bp, Homo sapiens
gctggattgcccaga

SEQ ID NO: 1797601 - DNA, 15 bp, Homo sapiens
ctggattgcccagaa

SEQ ID NO: 1797602 - DNA, 15 bp, Homo sapiens
tggattgcccagaat

SEQ ID NO: 1797603 - DNA, 15 bp, Homo sapiens
ggattgcccagaatg

SEQ ID NO: 1797604 - DNA, 15 bp, Homo sapiens
gattgcccagaatgg

SEQ ID NO: 1797605 - DNA, 15 bp, Homo sapiens
attgcccagaatgga

SEQ ID NO: 1797606 - DNA, 15 bp, Homo sapiens
ttgcccagaatggaa

SEQ ID NO: 1797607 - DNA, 15 bp, Homo sapiens
tgcccagaatggaag

SEQ ID NO: 1797608 - DNA, 15 bp, Homo sapiens
gcccagaatggaagg

SEQ ID NO: 1797609 - DNA, 15 bp, Homo sapiens
cccagaatggaaggg

SEQ ID NO: 1797610 - DNA, 15 bp, Homo sapiens
ccagaatggaagggc

SEQ ID NO: 1797611 - DNA, 15 bp, Homo sapiens
cagaatggaagggca

SEQ ID NO: 1797612 - DNA, 15 bp, Homo sapiens
agaatggaagggcat

SEQ ID NO: 1797613 - DNA, 15 bp, Homo sapiens
gaatggaagggcatt

SEQ ID NO: 1797614 - DNA, 15 bp, Homo sapiens
aatggaagggcattc

SEQ ID NO: 1797615 - DNA, 15 bp, Homo sapiens
atggaagggcattcc

SEQ ID NO: 1797616 - DNA, 15 bp, Homo sapiens
tggaagggcattcca

SEQ ID NO: 1797617 - DNA, 15 bp, Homo sapiens
ggaagggcattccat

SEQ ID NO: 1797618 - DNA, 15 bp, Homo sapiens
gaagggcattccatt

SEQ ID NO: 1797619 - DNA, 15 bp, Homo sapiens
aagggcattccattt

SEQ ID NO: 1797620 - DNA, 15 bp, Homo sapiens
agggcattccatttt

SEQ ID NO: 1797621 - DNA, 15 bp, Homo sapiens
gggcattccattttt

SEQ ID NO: 1797622 - DNA, 15 bp, Homo sapiens
ggcattccatttttc

SEQ ID NO: 1797623 - DNA, 15 bp, Homo sapiens
gcattccatttttcc

SEQ ID NO: 1797624 - DNA, 15 bp, Homo sapiens
cattccatttttcca

SEQ ID NO: 1797625 - DNA, 15 bp, Homo sapiens
attccatttttccaa

SEQ ID NO: 1797626 - DNA, 15 bp, Homo sapiens
ttccatttttccaaa

SEQ ID NO: 1797627 - DNA, 15 bp, Homo sapiens
tccatttttccaaat

SEQ ID NO: 1797628 - DNA, 15 bp, Homo sapiens
ccatttttccaaatg

SEQ ID NO: 1797629 - DNA, 15 bp, Homo sapiens
catttttccaaatgt

SEQ ID NO: 1797630 - DNA, 15 bp, Homo sapiens
atttttccaaatgtg

SEQ ID NO: 1797631 - DNA, 15 bp, Homo sapiens
tttttccaaatgtgc

SEQ ID NO: 1797632 - DNA, 15 bp, Homo sapiens
ttttccaaatgtgct

SEQ ID NO: 1797633 - DNA, 15 bp, Homo sapiens
tttccaaatgtgctt

SEQ ID NO: 1797634 - DNA, 15 bp, Homo sapiens
ttccaaatgtgcttc

SEQ ID NO: 1797635 - DNA, 15 bp, Homo sapiens
tccaaatgtgcttct

SEQ ID NO: 1797636 - DNA, 15 bp, Homo sapiens
ccaaatgtgcttctt

SEQ ID NO: 1797637 - DNA, 15 bp, Homo sapiens
caaatgtgcttcttt

SEQ ID NO: 1797638 - DNA, 15 bp, Homo sapiens
aaatgtgcttcttta

SEQ ID NO: 1797639 - DNA, 15 bp, Homo sapiens
aatgtgcttctttat

SEQ ID NO: 1797640 - DNA, 15 bp, Homo sapiens
atgtgcttctttata

SEQ ID NO: 1797641 - DNA, 15 bp, Homo sapiens
tgtgcttctttataa

SEQ ID NO: 1797642 - DNA, 15 bp, Homo sapiens
gtgcttctttataaa

SEQ ID NO: 1797643 - DNA, 15 bp, Homo sapiens
tgcttctttataaag

SEQ ID NO: 1797644 - DNA, 15 bp, Homo sapiens
gcttctttataaaga

SEQ ID NO: 1797645 - DNA, 15 bp, Homo sapiens
cttctttataaagaa

SEQ ID NO: 1797646 - DNA, 15 bp, Homo sapiens
ttctttataaagaac

SEQ ID NO: 1797647 - DNA, 15 bp, Homo sapiens
tctttataaagaact

SEQ ID NO: 1797648 - DNA, 15 bp, Homo sapiens
ctttataaagaactc

SEQ ID NO: 1797649 - DNA, 15 bp, Homo sapiens
tttataaagaactca

SEQ ID NO: 1797650 - DNA, 15 bp, Homo sapiens
ttataaagaactcat

SEQ ID NO: 1797651 - DNA, 15 bp, Homo sapiens
tataaagaactcatg

SEQ ID NO: 1797652 - DNA, 15 bp, Homo sapiens
ataaagaactcatgc

SEQ ID NO: 1797653 - DNA, 15 bp, Homo sapiens
taaagaactcatgcc

SEQ ID NO: 1797654 - DNA, 15 bp, Homo sapiens
aaagaactcatgcct

SEQ ID NO: 1797655 - DNA, 15 bp, Homo sapiens
aagaactcatgccta

SEQ ID NO: 1797656 - DNA, 15 bp, Homo sapiens
agaactcatgcctac

SEQ ID NO: 1797657 - DNA, 15 bp, Homo sapiens
gaactcatgcctacc

SEQ ID NO: 1797658 - DNA, 15 bp, Homo sapiens
aactcatgcctacct

SEQ ID NO: 1797659 - DNA, 15 bp, Homo sapiens
actcatgcctacctc

SEQ ID NO: 1797660 - DNA, 15 bp, Homo sapiens
ctcatgcctacctct

SEQ ID NO: 1797661 - DNA, 15 bp, Homo sapiens
tcatgcctacctcta

SEQ ID NO: 1797662 - DNA, 15 bp, Homo sapiens
catgcctacctctaa

SEQ ID NO: 1797663 - DNA, 15 bp, Homo sapiens
atgcctacctctaaa

SEQ ID NO: 1797664 - DNA, 15 bp, Homo sapiens
tgcctacctctaaaa

SEQ ID NO: 1797665 - DNA, 15 bp, Homo sapiens
gcctacctctaaaat

SEQ ID NO: 1797666 - DNA, 15 bp, Homo sapiens
cctacctctaaaatc

SEQ ID NO: 1797667 - DNA, 15 bp, Homo sapiens
ctacctctaaaatca

SEQ ID NO: 1797668 - DNA, 15 bp, Homo sapiens
tacctctaaaatcaa

SEQ ID NO: 1797669 - DNA, 15 bp, Homo sapiens
acctctaaaatcaag

SEQ ID NO: 1797670 - DNA, 15 bp, Homo sapiens
cctctaaaatcaagt

SEQ ID NO: 1797671 - DNA, 15 bp, Homo sapiens
ctctaaaatcaagtt

SEQ ID NO: 1797672 - DNA, 15 bp, Homo sapiens
tctaaaatcaagtta

SEQ ID NO: 1797673 - DNA, 15 bp, Homo sapiens
ctaaaatcaagttaa

SEQ ID NO: 1797674 - DNA, 15 bp, Homo sapiens
taaaatcaagttaag

SEQ ID NO: 1797675 - DNA, 15 bp, Homo sapiens
aaaatcaagttaaga

SEQ ID NO: 1797676 - DNA, 15 bp, Homo sapiens
aaatcaagttaagaa

SEQ ID NO: 1797677 - DNA, 15 bp, Homo sapiens
aatcaagttaagaat

SEQ ID NO: 1797678 - DNA, 15 bp, Homo sapiens
atcaagttaagaatt

SEQ ID NO: 1797679 - DNA, 15 bp, Homo sapiens
tcaagttaagaattt

SEQ ID NO: 1797680 - DNA, 15 bp, Homo sapiens
caagttaagaatttt

SEQ ID NO: 1797681 - DNA, 15 bp, Homo sapiens
aagttaagaattttt

SEQ ID NO: 1797682 - DNA, 15 bp, Homo sapiens
gttaagaatttttaa

SEQ ID NO: 1797683 - DNA, 15 bp, Homo sapiens
ttaagaatttttaag

SEQ ID NO: 1797684 - DNA, 15 bp, Homo sapiens
taagaatttttaaga

SEQ ID NO: 1797685 - DNA, 15 bp, Homo sapiens
aagaatttttaagaa

SEQ ID NO: 1797686 - DNA, 15 bp, Homo sapiens
agaatttttaagaaa

SEQ ID NO: 1797687 - DNA, 15 bp, Homo sapiens
gaatttttaagaaat

SEQ ID NO: 1797688 - DNA, 15 bp, Homo sapiens
aatttttaagaaatt

SEQ ID NO: 1797689 - DNA, 15 bp, Homo sapiens
atttttaagaaattt

SEQ ID NO: 1797690 - DNA, 15 bp, Homo sapiens
tttttaagaaattta

SEQ ID NO: 1797691 - DNA, 15 bp, Homo sapiens
ttttaagaaatttaa

SEQ ID NO: 1797692 - DNA, 15 bp, Homo sapiens
ttaagaaatttaata

SEQ ID NO: 1797693 - DNA, 15 bp, Homo sapiens
taagaaatttaataa

SEQ ID NO: 1797694 - DNA, 15 bp, Homo sapiens
aagaaatttaataag

SEQ ID NO: 1797695 - DNA, 15 bp, Homo sapiens
agaaatttaataagt

SEQ ID NO: 1797696 - DNA, 15 bp, Homo sapiens
gaaatttaataagta

SEQ ID NO: 1797697 - DNA, 15 bp, Homo sapiens
aaatttaataagtat

SEQ ID NO: 1797698 - DNA, 15 bp, Homo sapiens
aatttaataagtatc

SEQ ID NO: 1797699 - DNA, 15 bp, Homo sapiens
atttaataagtatcc

SEQ ID NO: 1797700 - DNA, 15 bp, Homo sapiens
tttaataagtatccc

SEQ ID NO: 1797701 - DNA, 15 bp, Homo sapiens
ttaataagtatcccg

SEQ ID NO: 1797702 - DNA, 15 bp, Homo sapiens
taataagtatcccgg

SEQ ID NO: 1797703 - DNA, 15 bp, Homo sapiens
aataagtatcccggc

SEQ ID NO: 1797704 - DNA, 15 bp, Homo sapiens
ataagtatcccggct

SEQ ID NO: 1797705 - DNA, 15 bp, Homo sapiens
taagtatcccggctt

SEQ ID NO: 1797706 - DNA, 15 bp, Homo sapiens
aagtatcccggcttt

SEQ ID NO: 1797707 - DNA, 15 bp, Homo sapiens
agtatcccggctttg

SEQ ID NO: 1797708 - DNA, 15 bp, Homo sapiens
gtatcccggctttgt

SEQ ID NO: 1797709 - DNA, 15 bp, Homo sapiens
tatcccggctttgtc

SEQ ID NO: 1797710 - DNA, 15 bp, Homo sapiens
atcccggctttgtct

SEQ ID NO: 1797711 - DNA, 15 bp, Homo sapiens
tcccggctttgtcta

SEQ ID NO: 1797712 - DNA, 15 bp, Homo sapiens
cccggctttgtctat

SEQ ID NO: 1797713 - DNA, 15 bp, Homo sapiens
ccggctttgtctata

SEQ ID NO: 1797714 - DNA, 15 bp, Homo sapiens
cggctttgtctatat

SEQ ID NO: 1797715 - DNA, 15 bp, Homo sapiens
ggctttgtctatatt

SEQ ID NO: 1797716 - DNA, 15 bp, Homo sapiens
gctttgtctatattg

SEQ ID NO: 1797717 - DNA, 15 bp, Homo sapiens
ctttgtctatattgt

SEQ ID NO: 1797718 - DNA, 15 bp, Homo sapiens
tttgtctatattgta

SEQ ID NO: 1797719 - DNA, 15 bp, Homo sapiens
ttgtctatattgtaa

SEQ ID NO: 1797720 - DNA, 15 bp, Homo sapiens
tgtctatattgtaat

SEQ ID NO: 1797721 - DNA, 15 bp, Homo sapiens
gtctatattgtaatt

SEQ ID NO: 1797722 - DNA, 15 bp, Homo sapiens
tctatattgtaattc

SEQ ID NO: 1797723 - DNA, 15 bp, Homo sapiens
ctatattgtaattca

SEQ ID NO: 1797724 - DNA, 15 bp, Homo sapiens
tatattgtaattcat

SEQ ID NO: 1797725 - DNA, 15 bp, Homo sapiens
atattgtaattcata

SEQ ID NO: 1797726 - DNA, 15 bp, Homo sapiens
tattgtaattcataa

SEQ ID NO: 1797727 - DNA, 15 bp, Homo sapiens
attgtaattcataat

SEQ ID NO: 1797728 - DNA, 15 bp, Homo sapiens
ttgtaattcataata

SEQ ID NO: 1797729 - DNA, 15 bp, Homo sapiens
tgtaattcataatat

SEQ ID NO: 1797730 - DNA, 15 bp, Homo sapiens
gtaattcataatatg

SEQ ID NO: 1797731 - DNA, 15 bp, Homo sapiens
taattcataatatgc

SEQ ID NO: 1797732 - DNA, 15 bp, Homo sapiens
aattcataatatgct

SEQ ID NO: 1797733 - DNA, 15 bp, Homo sapiens
attcataatatgctt

SEQ ID NO: 1797734 - DNA, 15 bp, Homo sapiens
ttcataatatgcttt

SEQ ID NO: 1797735 - DNA, 15 bp, Homo sapiens
tcataatatgctttt

SEQ ID NO: 1797736 - DNA, 15 bp, Homo sapiens
cataatatgctttta

SEQ ID NO: 1797737 - DNA, 15 bp, Homo sapiens
ataatatgcttttaa

SEQ ID NO: 1797738 - DNA, 15 bp, Homo sapiens
taatatgcttttaac

SEQ ID NO: 1797739 - DNA, 15 bp, Homo sapiens
aatatgcttttaaca

SEQ ID NO: 1797740 - DNA, 15 bp, Homo sapiens
atatgcttttaacat

SEQ ID NO: 1797741 - DNA, 15 bp, Homo sapiens
tatgcttttaacatg

SEQ ID NO: 1797742 - DNA, 15 bp, Homo sapiens
atgcttttaacatgg

SEQ ID NO: 1797743 - DNA, 15 bp, Homo sapiens
tgcttttaacatggc

SEQ ID NO: 1797744 - DNA, 15 bp, Homo sapiens
gcttttaacatggcc

SEQ ID NO: 1797745 - DNA, 15 bp, Homo sapiens
cttttaacatggcca

SEQ ID NO: 1797746 - DNA, 15 bp, Homo sapiens
ttttaacatggccat

SEQ ID NO: 1797747 - DNA, 15 bp, Homo sapiens
tttaacatggccatg

SEQ ID NO: 1797748 - DNA, 15 bp, Homo sapiens
ttaacatggccatgc

SEQ ID NO: 1797749 - DNA, 15 bp, Homo sapiens
taacatggccatgcc

SEQ ID NO: 1797750 - DNA, 15 bp, Homo sapiens
aacatggccatgccc

SEQ ID NO: 1797751 - DNA, 15 bp, Homo sapiens
acatggccatgcccc

SEQ ID NO: 1797752 - DNA, 15 bp, Homo sapiens
catggccatgccccg

SEQ ID NO: 1797753 - DNA, 15 bp, Homo sapiens
atggccatgccccgg

SEQ ID NO: 1797754 - DNA, 15 bp, Homo sapiens
tggccatgccccggg

SEQ ID NO: 1797755 - DNA, 15 bp, Homo sapiens
ggccatgccccgggt

SEQ ID NO: 1797756 - DNA, 15 bp, Homo sapiens
gccatgccccgggta

SEQ ID NO: 1797757 - DNA, 15 bp, Homo sapiens
ccatgccccgggtag

SEQ ID NO: 1797758 - DNA, 15 bp, Homo sapiens
catgccccgggtagg

SEQ ID NO: 1797759 - DNA, 15 bp, Homo sapiens
atgccccgggtaggc

SEQ ID NO: 1797760 - DNA, 15 bp, Homo sapiens
tgccccgggtaggca

SEQ ID NO: 1797761 - DNA, 15 bp, Homo sapiens
gccccgggtaggcat

SEQ ID NO: 1797762 - DNA, 15 bp, Homo sapiens
ccccgggtaggcatg

SEQ ID NO: 1797763 - DNA, 15 bp, Homo sapiens
cccgggtaggcatga

SEQ ID NO: 1797764 - DNA, 15 bp, Homo sapiens
ccgggtaggcatgat

SEQ ID NO: 1797765 - DNA, 15 bp, Homo sapiens
cgggtaggcatgatg

SEQ ID NO: 1797766 - DNA, 15 bp, Homo sapiens
gggtaggcatgatgg

SEQ ID NO: 1797767 - DNA, 15 bp, Homo sapiens
ggtaggcatgatggc

SEQ ID NO: 1797768 - DNA, 15 bp, Homo sapiens
gtaggcatgatggct

SEQ ID NO: 1797769 - DNA, 15 bp, Homo sapiens
taggcatgatggctt

SEQ ID NO: 1797770 - DNA, 15 bp, Homo sapiens
aggcatgatggctta

SEQ ID NO: 1797771 - DNA, 15 bp, Homo sapiens
ggcatgatggcttat

SEQ ID NO: 1797772 - DNA, 15 bp, Homo sapiens
gcatgatggcttatg

SEQ ID NO: 1797773 - DNA, 15 bp, Homo sapiens
catgatggcttatgt

SEQ ID NO: 1797774 - DNA, 15 bp, Homo sapiens
atgatggcttatgtc

SEQ ID NO: 1797775 - DNA, 15 bp, Homo sapiens
tgatggcttatgtct

SEQ ID NO: 1797776 - DNA, 15 bp, Homo sapiens
gatggcttatgtctg

SEQ ID NO: 1797777 - DNA, 15 bp, Homo sapiens
atggcttatgtctgt

SEQ ID NO: 1797778 - DNA, 15 bp, Homo sapiens
tggcttatgtctgta

SEQ ID NO: 1797779 - DNA, 15 bp, Homo sapiens
ggcttatgtctgtaa

SEQ ID NO: 1797780 - DNA, 15 bp, Homo sapiens
gcttatgtctgtaat

SEQ ID NO: 1797781 - DNA, 15 bp, Homo sapiens
cttatgtctgtaata

SEQ ID NO: 1797782 - DNA, 15 bp, Homo sapiens
ttatgtctgtaatac

SEQ ID NO: 1797783 - DNA, 15 bp, Homo sapiens
tatgtctgtaatacc

SEQ ID NO: 1797784 - DNA, 15 bp, Homo sapiens
atgtctgtaatacca

SEQ ID NO: 1797785 - DNA, 15 bp, Homo sapiens
tgtctgtaataccag

SEQ ID NO: 1797786 - DNA, 15 bp, Homo sapiens
gtctgtaataccagc

SEQ ID NO: 1797787 - DNA, 15 bp, Homo sapiens
tctgtaataccagca

SEQ ID NO: 1797788 - DNA, 15 bp, Homo sapiens
ctgtaataccagcac

SEQ ID NO: 1797789 - DNA, 15 bp, Homo sapiens
tgtaataccagcact

SEQ ID NO: 1797790 - DNA, 15 bp, Homo sapiens
gtaataccagcacta

SEQ ID NO: 1797791 - DNA, 15 bp, Homo sapiens
taataccagcactat

SEQ ID NO: 1797792 - DNA, 15 bp, Homo sapiens
aataccagcactatg

SEQ ID NO: 1797793 - DNA, 15 bp, Homo sapiens
ataccagcactatgg

SEQ ID NO: 1797794 - DNA, 15 bp, Homo sapiens
taccagcactatggg

SEQ ID NO: 1797795 - DNA, 15 bp, Homo sapiens
accagcactatggga

SEQ ID NO: 1797796 - DNA, 15 bp, Homo sapiens
ccagcactatgggag

SEQ ID NO: 1797797 - DNA, 15 bp, Homo sapiens
cagcactatgggagg

SEQ ID NO: 1797798 - DNA, 15 bp, Homo sapiens
agcactatgggaggg

SEQ ID NO: 1797799 - DNA, 15 bp, Homo sapiens
gcactatgggagggc

SEQ ID NO: 1797800 - DNA, 15 bp, Homo sapiens
cactatgggagggca

SEQ ID NO: 1797801 - DNA, 15 bp, Homo sapiens
actatgggagggcaa

SEQ ID NO: 1797802 - DNA, 15 bp, Homo sapiens
ctatgggagggcaag

SEQ ID NO: 1797803 - DNA, 15 bp, Homo sapiens
tatgggagggcaagg

SEQ ID NO: 1797804 - DNA, 15 bp, Homo sapiens
atgggagggcaaggt

SEQ ID NO: 1797805 - DNA, 15 bp, Homo sapiens
tgggagggcaaggtg

SEQ ID NO: 1797806 - DNA, 15 bp, Homo sapiens
gggagggcaaggtga

SEQ ID NO: 1797807 - DNA, 15 bp, Homo sapiens
ggagggcaaggtgag

SEQ ID NO: 1797808 - DNA, 15 bp, Homo sapiens
gagggcaaggtgaga

SEQ ID NO: 1797809 - DNA, 15 bp, Homo sapiens
agggcaaggtgagag

SEQ ID NO: 1797810 - DNA, 15 bp, Homo sapiens
gggcaaggtgagagg

SEQ ID NO: 1797811 - DNA, 15 bp, Homo sapiens
ggcaaggtgagagga

SEQ ID NO: 1797812 - DNA, 15 bp, Homo sapiens
gcaaggtgagaggat

SEQ ID NO: 1797813 - DNA, 15 bp, Homo sapiens
ggattgcttgaggcc

SEQ ID NO: 1797814 - DNA, 15 bp, Homo sapiens
acatagcaagacccc

SEQ ID NO: 1797815 - DNA, 15 bp, Homo sapiens
catagcaagacccca

SEQ ID NO: 1797816 - DNA, 15 bp, Homo sapiens
atagcaagaccccat

SEQ ID NO: 1797817 - DNA, 15 bp, Homo sapiens
tagcaagaccccatc

SEQ ID NO: 1797818 - DNA, 15 bp, Homo sapiens
gcaagaccccatctt

SEQ ID NO: 1797819 - DNA, 15 bp, Homo sapiens
caagaccccatcttt

SEQ ID NO: 1797820 - DNA, 15 bp, Homo sapiens
aagaccccatcttta

SEQ ID NO: 1797821 - DNA, 15 bp, Homo sapiens
agaccccatctttac

SEQ ID NO: 1797822 - DNA, 15 bp, Homo sapiens
gaccccatctttaca

SEQ ID NO: 1797823 - DNA, 15 bp, Homo sapiens
accccatctttacaa

SEQ ID NO: 1797824 - DNA, 15 bp, Homo sapiens
ccccatctttacaaa

SEQ ID NO: 1797825 - DNA, 15 bp, Homo sapiens
cccatctttacaaaa

SEQ ID NO: 1797826 - DNA, 15 bp, Homo sapiens
ccatctttacaaaaa

SEQ ID NO: 1797827 - DNA, 15 bp, Homo sapiens
catctttacaaaaaa

SEQ ID NO: 1797828 - DNA, 15 bp, Homo sapiens
atctttacaaaaaaa

SEQ ID NO: 1797829 - DNA, 15 bp, Homo sapiens
tctttacaaaaaaat

SEQ ID NO: 1797830 - DNA, 15 bp, Homo sapiens
ctttacaaaaaaatc

SEQ ID NO: 1797831 - DNA, 15 bp, Homo sapiens
tttacaaaaaaatcc

SEQ ID NO: 1797832 - DNA, 15 bp, Homo sapiens
ttacaaaaaaatcca

SEQ ID NO: 1797833 - DNA, 15 bp, Homo sapiens
tacaaaaaaatccaa

SEQ ID NO: 1797834 - DNA, 15 bp, Homo sapiens
acaaaaaaatccaaa

SEQ ID NO: 1797835 - DNA, 15 bp, Homo sapiens
caaaaaaatccaaaa

SEQ ID NO: 1797836 - DNA, 15 bp, Homo sapiens
aaaaaaatccaaaaa

SEQ ID NO: 1797837 - DNA, 15 bp, Homo sapiens
aaaattagccaggcc

SEQ ID NO: 1797838 - DNA, 15 bp, Homo sapiens
aaattagccaggcct

SEQ ID NO: 1797839 - DNA, 15 bp, Homo sapiens
aattagccaggcctg

SEQ ID NO: 1797840 - DNA, 15 bp, Homo sapiens
attagccaggcctgg

SEQ ID NO: 1797841 - DNA, 15 bp, Homo sapiens
ttagccaggcctggt

SEQ ID NO: 1797842 - DNA, 15 bp, Homo sapiens
tagccaggcctggtg

SEQ ID NO: 1797843 - DNA, 15 bp, Homo sapiens
ccaggcctggtggca

SEQ ID NO: 1797844 - DNA, 15 bp, Homo sapiens
caggcctggtggcat

SEQ ID NO: 1797845 - DNA, 15 bp, Homo sapiens
aggcctggtggcatg

SEQ ID NO: 1797846 - DNA, 15 bp, Homo sapiens
ggcctggtggcatgt

SEQ ID NO: 1797847 - DNA, 15 bp, Homo sapiens
gcctggtggcatgtg

SEQ ID NO: 1797848 - DNA, 15 bp, Homo sapiens
cctggtggcatgtgc

SEQ ID NO: 1797849 - DNA, 15 bp, Homo sapiens
ctggtggcatgtgcc

SEQ ID NO: 1797850 - DNA, 15 bp, Homo sapiens
atgtgcctgtagtct

SEQ ID NO: 1797851 - DNA, 15 bp, Homo sapiens
tgtgcctgtagtctt

SEQ ID NO: 1797852 - DNA, 15 bp, Homo sapiens
gtgcctgtagtcttg

SEQ ID NO: 1797853 - DNA, 15 bp, Homo sapiens
tgcctgtagtcttgg

SEQ ID NO: 1797854 - DNA, 15 bp, Homo sapiens
gcctgtagtcttggc

SEQ ID NO: 1797855 - DNA, 15 bp, Homo sapiens
cctgtagtcttggct

SEQ ID NO: 1797856 - DNA, 15 bp, Homo sapiens
ctgtagtcttggcta

SEQ ID NO: 1797857 - DNA, 15 bp, Homo sapiens
tgtagtcttggctac

SEQ ID NO: 1797858 - DNA, 15 bp, Homo sapiens
gtagtcttggctact

SEQ ID NO: 1797859 - DNA, 15 bp, Homo sapiens
tagtcttggctactg

SEQ ID NO: 1797860 - DNA, 15 bp, Homo sapiens
agtcttggctactgg

SEQ ID NO: 1797861 - DNA, 15 bp, Homo sapiens
gtcttggctactgga

SEQ ID NO: 1797862 - DNA, 15 bp, Homo sapiens
tcttggctactggag

SEQ ID NO: 1797863 - DNA, 15 bp, Homo sapiens
cttggctactggaga

SEQ ID NO: 1797864 - DNA, 15 bp, Homo sapiens
ttggctactggagag

SEQ ID NO: 1797865 - DNA, 15 bp, Homo sapiens
tggctactggagagg

SEQ ID NO: 1797866 - DNA, 15 bp, Homo sapiens
ggctactggagaggc

SEQ ID NO: 1797867 - DNA, 15 bp, Homo sapiens
gctactggagaggct

SEQ ID NO: 1797868 - DNA, 15 bp, Homo sapiens
ctactggagaggctg

SEQ ID NO: 1797869 - DNA, 15 bp, Homo sapiens
tactggagaggctga

SEQ ID NO: 1797870 - DNA, 15 bp, Homo sapiens
tggagaggctgaggt

SEQ ID NO: 1797871 - DNA, 15 bp, Homo sapiens
ggagaggctgaggtg

SEQ ID NO: 1797872 - DNA, 15 bp, Homo sapiens
gagaggctgaggtga

SEQ ID NO: 1797873 - DNA, 15 bp, Homo sapiens
agaggctgaggtgag

SEQ ID NO: 1797874 - DNA, 15 bp, Homo sapiens
gaggctgaggtgaga

SEQ ID NO: 1797875 - DNA, 15 bp, Homo sapiens
aggctgaggtgagag

SEQ ID NO: 1797876 - DNA, 15 bp, Homo sapiens
ggctgaggtgagaga

SEQ ID NO: 1797877 - DNA, 15 bp, Homo sapiens
gctgaggtgagagaa

SEQ ID NO: 1797878 - DNA, 15 bp, Homo sapiens
ctgaggtgagagaat

SEQ ID NO: 1797879 - DNA, 15 bp, Homo sapiens
tgaggtgagagaatt

SEQ ID NO: 1797880 - DNA, 15 bp, Homo sapiens
gaggtgagagaattg

SEQ ID NO: 1797881 - DNA, 15 bp, Homo sapiens
aggtgagagaattgc

SEQ ID NO: 1797882 - DNA, 15 bp, Homo sapiens
ggtgagagaattgct

SEQ ID NO: 1797883 - DNA, 15 bp, Homo sapiens
gtgagagaattgctt

SEQ ID NO: 1797884 - DNA, 15 bp, Homo sapiens
tgagagaattgcttg

SEQ ID NO: 1797885 - DNA, 15 bp, Homo sapiens
gagagaattgcttga

SEQ ID NO: 1797886 - DNA, 15 bp, Homo sapiens
agagaattgcttgag

SEQ ID NO: 1797887 - DNA, 15 bp, Homo sapiens
gaattgcttgagccc

SEQ ID NO: 1797888 - DNA, 15 bp, Homo sapiens
aattgcttgagccca

SEQ ID NO: 1797889 - DNA, 15 bp, Homo sapiens
cttgagcccagaagg

SEQ ID NO: 1797890 - DNA, 15 bp, Homo sapiens
ttgagcccagaaggt

SEQ ID NO: 1797891 - DNA, 15 bp, Homo sapiens
tgagcccagaaggtc

SEQ ID NO: 1797892 - DNA, 15 bp, Homo sapiens
gagcccagaaggtca

SEQ ID NO: 1797893 - DNA, 15 bp, Homo sapiens
agcccagaaggtcaa

SEQ ID NO: 1797894 - DNA, 15 bp, Homo sapiens
gcccagaaggtcaaa

SEQ ID NO: 1797895 - DNA, 15 bp, Homo sapiens
cccagaaggtcaaag

SEQ ID NO: 1797896 - DNA, 15 bp, Homo sapiens
ccagaaggtcaaagc

SEQ ID NO: 1797897 - DNA, 15 bp, Homo sapiens
cagaaggtcaaagct

SEQ ID NO: 1797898 - DNA, 15 bp, Homo sapiens
agaaggtcaaagctg

SEQ ID NO: 1797899 - DNA, 15 bp, Homo sapiens
gaaggtcaaagctgt

SEQ ID NO: 1797900 - DNA, 15 bp, Homo sapiens
aaggtcaaagctgta

SEQ ID NO: 1797901 - DNA, 15 bp, Homo sapiens
aggtcaaagctgtag

SEQ ID NO: 1797902 - DNA, 15 bp, Homo sapiens
ggtcaaagctgtagt

SEQ ID NO: 1797903 - DNA, 15 bp, Homo sapiens
gtcaaagctgtagtg

SEQ ID NO: 1797904 - DNA, 15 bp, Homo sapiens
tcaaagctgtagtga

SEQ ID NO: 1797905 - DNA, 15 bp, Homo sapiens
caaagctgtagtgag

SEQ ID NO: 1797906 - DNA, 15 bp, Homo sapiens
aaagctgtagtgagc

SEQ ID NO: 1797907 - DNA, 15 bp, Homo sapiens
aagctgtagtgagcc

SEQ ID NO: 1797908 - DNA, 15 bp, Homo sapiens
agctgtagtgagcca

SEQ ID NO: 1797909 - DNA, 15 bp, Homo sapiens
gctgtagtgagccat

SEQ ID NO: 1797910 - DNA, 15 bp, Homo sapiens
ctgtagtgagccatg

SEQ ID NO: 1797911 - DNA, 15 bp, Homo sapiens
tgtagtgagccatga

SEQ ID NO: 1797912 - DNA, 15 bp, Homo sapiens
gtagtgagccatgat

SEQ ID NO: 1797913 - DNA, 15 bp, Homo sapiens
tagtgagccatgatc

SEQ ID NO: 1797914 - DNA, 15 bp, Homo sapiens
cactccagcttgggc

SEQ ID NO: 1797915 - DNA, 15 bp, Homo sapiens
actccagcttgggca

SEQ ID NO: 1797916 - DNA, 15 bp, Homo sapiens
ctccagcttgggcaa

SEQ ID NO: 1797917 - DNA, 15 bp, Homo sapiens
tccagcttgggcaac

SEQ ID NO: 1797918 - DNA, 15 bp, Homo sapiens
cagcttgggcaacag

SEQ ID NO: 1797919 - DNA, 15 bp, Homo sapiens
agcttgggcaacaga

SEQ ID NO: 1797920 - DNA, 15 bp, Homo sapiens
gcttgggcaacagag

SEQ ID NO: 1797921 - DNA, 15 bp, Homo sapiens
cttgggcaacagagc

SEQ ID NO: 1797922 - DNA, 15 bp, Homo sapiens
ttgggcaacagagca

SEQ ID NO: 1797923 - DNA, 15 bp, Homo sapiens
tcaaaaaaaaaaaat

SEQ ID NO: 1797924 - DNA, 15 bp, Homo sapiens
caaaaaaaaaaaatc

SEQ ID NO: 1797925 - DNA, 15 bp, Homo sapiens
aaaaaaaaatccatg

SEQ ID NO: 1797926 - DNA, 15 bp, Homo sapiens
aaaaaaaatccatgc

SEQ ID NO: 1797927 - DNA, 15 bp, Homo sapiens
aaaaaaatccatgcc

SEQ ID NO: 1797928 - DNA, 15 bp, Homo sapiens
aaaaaatccatgccc

SEQ ID NO: 1797929 - DNA, 15 bp, Homo sapiens
aaaaatccatgccca

SEQ ID NO: 1797930 - DNA, 15 bp, Homo sapiens
aaaatccatgcccag

SEQ ID NO: 1797931 - DNA, 15 bp, Homo sapiens
aaatccatgcccagt

SEQ ID NO: 1797932 - DNA, 15 bp, Homo sapiens
aatccatgcccagtt

SEQ ID NO: 1797933 - DNA, 15 bp, Homo sapiens
atccatgcccagttt

SEQ ID NO: 1797934 - DNA, 15 bp, Homo sapiens
tccatgcccagttta

SEQ ID NO: 1797935 - DNA, 15 bp, Homo sapiens
ccatgcccagtttaa

SEQ ID NO: 1797936 - DNA, 15 bp, Homo sapiens
catgcccagtttaaa

SEQ ID NO: 1797937 - DNA, 15 bp, Homo sapiens
atgcccagtttaaat

SEQ ID NO: 1797938 - DNA, 15 bp, Homo sapiens
tgcccagtttaaatg

SEQ ID NO: 1797939 - DNA, 15 bp, Homo sapiens
gcccagtttaaatga

SEQ ID NO: 1797940 - DNA, 15 bp, Homo sapiens
cccagtttaaatgag

SEQ ID NO: 1797941 - DNA, 15 bp, Homo sapiens
ccagtttaaatgagc

SEQ ID NO: 1797942 - DNA, 15 bp, Homo sapiens
cagtttaaatgagct

SEQ ID NO: 1797943 - DNA, 15 bp, Homo sapiens
agtttaaatgagcta

SEQ ID NO: 1797944 - DNA, 15 bp, Homo sapiens
gtttaaatgagctat

SEQ ID NO: 1797945 - DNA, 15 bp, Homo sapiens
tttaaatgagctatg

SEQ ID NO: 1797946 - DNA, 15 bp, Homo sapiens
ttaaatgagctatga

SEQ ID NO: 1797947 - DNA, 15 bp, Homo sapiens
taaatgagctatgat

SEQ ID NO: 1797948 - DNA, 15 bp, Homo sapiens
aaatgagctatgatt

SEQ ID NO: 1797949 - DNA, 15 bp, Homo sapiens
aatgagctatgattt

SEQ ID NO: 1797950 - DNA, 15 bp, Homo sapiens
atgagctatgatttg

SEQ ID NO: 1797951 - DNA, 15 bp, Homo sapiens
tgagctatgatttga

SEQ ID NO: 1797952 - DNA, 15 bp, Homo sapiens
gagctatgatttgat

SEQ ID NO: 1797953 - DNA, 15 bp, Homo sapiens
agctatgatttgatg

SEQ ID NO: 1797954 - DNA, 15 bp, Homo sapiens
gctatgatttgatgt

SEQ ID NO: 1797955 - DNA, 15 bp, Homo sapiens
ctatgatttgatgta

SEQ ID NO: 1797956 - DNA, 15 bp, Homo sapiens
tatgatttgatgtat

SEQ ID NO: 1797957 - DNA, 15 bp, Homo sapiens
atgatttgatgtatt

SEQ ID NO: 1797958 - DNA, 15 bp, Homo sapiens
tgatttgatgtattt

SEQ ID NO: 1797959 - DNA, 15 bp, Homo sapiens
gatttgatgtatttg

SEQ ID NO: 1797960 - DNA, 15 bp, Homo sapiens
atttgatgtatttgc

SEQ ID NO: 1797961 - DNA, 15 bp, Homo sapiens
tttgatgtatttgca

SEQ ID NO: 1797962 - DNA, 15 bp, Homo sapiens
ttgatgtatttgcag

SEQ ID NO: 1797963 - DNA, 15 bp, Homo sapiens
tgatgtatttgcagt

SEQ ID NO: 1797964 - DNA, 15 bp, Homo sapiens
gatgtatttgcagta

SEQ ID NO: 1797965 - DNA, 15 bp, Homo sapiens
atgtatttgcagtac

SEQ ID NO: 1797966 - DNA, 15 bp, Homo sapiens
tgtatttgcagtacc

SEQ ID NO: 1797967 - DNA, 15 bp, Homo sapiens
gtatttgcagtacct

SEQ ID NO: 1797968 - DNA, 15 bp, Homo sapiens
tatttgcagtacctg

SEQ ID NO: 1797969 - DNA, 15 bp, Homo sapiens
atttgcagtacctgc

SEQ ID NO: 1797970 - DNA, 15 bp, Homo sapiens
tttgcagtacctgca

SEQ ID NO: 1797971 - DNA, 15 bp, Homo sapiens
ttgcagtacctgcaa

SEQ ID NO: 1797972 - DNA, 15 bp, Homo sapiens
tgcagtacctgcaag

SEQ ID NO: 1797973 - DNA, 15 bp, Homo sapiens
gcagtacctgcaagg

SEQ ID NO: 1797974 - DNA, 15 bp, Homo sapiens
cagtacctgcaaggc

SEQ ID NO: 1797975 - DNA, 15 bp, Homo sapiens
agtacctgcaaggca

SEQ ID NO: 1797976 - DNA, 15 bp, Homo sapiens
gtacctgcaaggcat

SEQ ID NO: 1797977 - DNA, 15 bp, Homo sapiens
tacctgcaaggcatc

SEQ ID NO: 1797978 - DNA, 15 bp, Homo sapiens
acctgcaaggcatct

SEQ ID NO: 1797979 - DNA, 15 bp, Homo sapiens
cctgcaaggcatctg

SEQ ID NO: 1797980 - DNA, 15 bp, Homo sapiens
ctgcaaggcatctgc

SEQ ID NO: 1797981 - DNA, 15 bp, Homo sapiens
tgcaaggcatctgca

SEQ ID NO: 1797982 - DNA, 15 bp, Homo sapiens
gcaaggcatctgcaa

SEQ ID NO: 1797983 - DNA, 15 bp, Homo sapiens
caaggcatctgcaaa

SEQ ID NO: 1797984 - DNA, 15 bp, Homo sapiens
aaggcatctgcaaac

SEQ ID NO: 1797985 - DNA, 15 bp, Homo sapiens
aggcatctgcaaaca

SEQ ID NO: 1797986 - DNA, 15 bp, Homo sapiens
ggcatctgcaaacat

SEQ ID NO: 1797987 - DNA, 15 bp, Homo sapiens
gcatctgcaaacata

SEQ ID NO: 1797988 - DNA, 15 bp, Homo sapiens
catctgcaaacataa

SEQ ID NO: 1797989 - DNA, 15 bp, Homo sapiens
atctgcaaacataag

SEQ ID NO: 1797990 - DNA, 15 bp, Homo sapiens
tctgcaaacataagg

SEQ ID NO: 1797991 - DNA, 15 bp, Homo sapiens
ctgcaaacataaggg

SEQ ID NO: 1797992 - DNA, 15 bp, Homo sapiens
tgcaaacataaggga

SEQ ID NO: 1797993 - DNA, 15 bp, Homo sapiens
gcaaacataagggaa

SEQ ID NO: 1797994 - DNA, 15 bp, Homo sapiens
caaacataagggaac

SEQ ID NO: 1797995 - DNA, 15 bp, Homo sapiens
aaacataagggaacc

SEQ ID NO: 1797996 - DNA, 15 bp, Homo sapiens
aacataagggaacct

SEQ ID NO: 1797997 - DNA, 15 bp, Homo sapiens
acataagggaaccta

SEQ ID NO: 1797998 - DNA, 15 bp, Homo sapiens
cataagggaacctat

SEQ ID NO: 1797999 - DNA, 15 bp, Homo sapiens
ataagggaacctata

SEQ ID NO: 1798000 - DNA, 15 bp, Homo sapiens
taagggaacctatag

SEQ ID NO: 1798001 - DNA, 15 bp, Homo sapiens
aagggaacctatagc

SEQ ID NO: 1798002 - DNA, 15 bp, Homo sapiens
agggaacctatagct

SEQ ID NO: 1798003 - DNA, 15 bp, Homo sapiens
gggaacctatagctt

SEQ ID NO: 1798004 - DNA, 15 bp, Homo sapiens
ggaacctatagcttt

SEQ ID NO: 1798005 - DNA, 15 bp, Homo sapiens
gaacctatagctttg

SEQ ID NO: 1798006 - DNA, 15 bp, Homo sapiens
aacctatagctttgt

SEQ ID NO: 1798007 - DNA, 15 bp, Homo sapiens
acctatagctttgta

SEQ ID NO: 1798008 - DNA, 15 bp, Homo sapiens
cctatagctttgtaa

SEQ ID NO: 1798009 - DNA, 15 bp, Homo sapiens
ctatagctttgtaaa

SEQ ID NO: 1798010 - DNA, 15 bp, Homo sapiens
tatagctttgtaaag

SEQ ID NO: 1798011 - DNA, 15 bp, Homo sapiens
atagctttgtaaaga

SEQ ID NO: 1798012 - DNA, 15 bp, Homo sapiens
tagctttgtaaagaa

SEQ ID NO: 1798013 - DNA, 15 bp, Homo sapiens
agctttgtaaagaat

SEQ ID NO: 1798014 - DNA, 15 bp, Homo sapiens
gctttgtaaagaata

SEQ ID NO: 1798015 - DNA, 15 bp, Homo sapiens
ctttgtaaagaatac

SEQ ID NO: 1798016 - DNA, 15 bp, Homo sapiens
tttgtaaagaatacc

SEQ ID NO: 1798017 - DNA, 15 bp, Homo sapiens
ttgtaaagaatacca

SEQ ID NO: 1798018 - DNA, 15 bp, Homo sapiens
tgtaaagaataccac

SEQ ID NO: 1798019 - DNA, 15 bp, Homo sapiens
gtaaagaataccacc

SEQ ID NO: 1798020 - DNA, 15 bp, Homo sapiens
taaagaataccacca

SEQ ID NO: 1798021 - DNA, 15 bp, Homo sapiens
aaagaataccaccac

SEQ ID NO: 1798022 - DNA, 15 bp, Homo sapiens
aagaataccaccact

SEQ ID NO: 1798023 - DNA, 15 bp, Homo sapiens
agaataccaccactc

SEQ ID NO: 1798024 - DNA, 15 bp, Homo sapiens
gaataccaccactca

SEQ ID NO: 1798025 - DNA, 15 bp, Homo sapiens
aataccaccactcac

SEQ ID NO: 1798026 - DNA, 15 bp, Homo sapiens
ataccaccactcact

SEQ ID NO: 1798027 - DNA, 15 bp, Homo sapiens
taccaccactcactc

SEQ ID NO: 1798028 - DNA, 15 bp, Homo sapiens
accaccactcactct

SEQ ID NO: 1798029 - DNA, 15 bp, Homo sapiens
ccaccactcactctg

SEQ ID NO: 1798030 - DNA, 15 bp, Homo sapiens
caccactcactctgg

SEQ ID NO: 1798031 - DNA, 15 bp, Homo sapiens
accactcactctggc

SEQ ID NO: 1798032 - DNA, 15 bp, Homo sapiens
ccactcactctggca

SEQ ID NO: 1798033 - DNA, 15 bp, Homo sapiens
cactcactctggcag

SEQ ID NO: 1798034 - DNA, 15 bp, Homo sapiens
actcactctggcaga

SEQ ID NO: 1798035 - DNA, 15 bp, Homo sapiens
ctcactctggcagat

SEQ ID NO: 1798036 - DNA, 15 bp, Homo sapiens
tcactctggcagatt

SEQ ID NO: 1798037 - DNA, 15 bp, Homo sapiens
cactctggcagattc

SEQ ID NO: 1798038 - DNA, 15 bp, Homo sapiens
actctggcagattca

SEQ ID NO: 1798039 - DNA, 15 bp, Homo sapiens
ctctggcagattcag

SEQ ID NO: 1798040 - DNA, 15 bp, Homo sapiens
tctggcagattcagt

SEQ ID NO: 1798041 - DNA, 15 bp, Homo sapiens
ctggcagattcagtc

SEQ ID NO: 1798042 - DNA, 15 bp, Homo sapiens
tggcagattcagtct

SEQ ID NO: 1798043 - DNA, 15 bp, Homo sapiens
ggcagattcagtctg

SEQ ID NO: 1798044 - DNA, 15 bp, Homo sapiens
gcagattcagtctgg

SEQ ID NO: 1798045 - DNA, 15 bp, Homo sapiens
cagattcagtctggg

SEQ ID NO: 1798046 - DNA, 15 bp, Homo sapiens
agattcagtctgggc

SEQ ID NO: 1798047 - DNA, 15 bp, Homo sapiens
gattcagtctgggcc

SEQ ID NO: 1798048 - DNA, 15 bp, Homo sapiens
attcagtctgggcca

SEQ ID NO: 1798049 - DNA, 15 bp, Homo sapiens
ttcagtctgggccag

SEQ ID NO: 1798050 - DNA, 15 bp, Homo sapiens
tcagtctgggccagc

SEQ ID NO: 1798051 - DNA, 15 bp, Homo sapiens
cagtctgggccagcc

SEQ ID NO: 1798052 - DNA, 15 bp, Homo sapiens
agtctgggccagccg

SEQ ID NO: 1798053 - DNA, 15 bp, Homo sapiens
gtctgggccagccga

SEQ ID NO: 1798054 - DNA, 15 bp, Homo sapiens
tctgggccagccgag

SEQ ID NO: 1798055 - DNA, 15 bp, Homo sapiens
ctgggccagccgagt

SEQ ID NO: 1798056 - DNA, 15 bp, Homo sapiens
tgggccagccgagta

SEQ ID NO: 1798057 - DNA, 15 bp, Homo sapiens
gggccagccgagtat

SEQ ID NO: 1798058 - DNA, 15 bp, Homo sapiens
ggccagccgagtatt

SEQ ID NO: 1798059 - DNA, 15 bp, Homo sapiens
gccagccgagtattc

SEQ ID NO: 1798060 - DNA, 15 bp, Homo sapiens
ccagccgagtattct

SEQ ID NO: 1798061 - DNA, 15 bp, Homo sapiens
cagccgagtattcta

SEQ ID NO: 1798062 - DNA, 15 bp, Homo sapiens
agccgagtattctag

SEQ ID NO: 1798063 - DNA, 15 bp, Homo sapiens
gccgagtattctagt

SEQ ID NO: 1798064 - DNA, 15 bp, Homo sapiens
ccgagtattctagtc

SEQ ID NO: 1798065 - DNA, 15 bp, Homo sapiens
cgagtattctagtct

SEQ ID NO: 1798066 - DNA, 15 bp, Homo sapiens
gagtattctagtctg

SEQ ID NO: 1798067 - DNA, 15 bp, Homo sapiens
agtattctagtctgc

SEQ ID NO: 1798068 - DNA, 15 bp, Homo sapiens
gtattctagtctgct

SEQ ID NO: 1798069 - DNA, 15 bp, Homo sapiens
tattctagtctgctg

SEQ ID NO: 1798070 - DNA, 15 bp, Homo sapiens
attctagtctgctga

SEQ ID NO: 1798071 - DNA, 15 bp, Homo sapiens
ttctagtctgctgaa

SEQ ID NO: 1798072 - DNA, 15 bp, Homo sapiens
tctagtctgctgaag

SEQ ID NO: 1798073 - DNA, 15 bp, Homo sapiens
ctagtctgctgaagt

SEQ ID NO: 1798074 - DNA, 15 bp, Homo sapiens
tagtctgctgaagta

SEQ ID NO: 1798075 - DNA, 15 bp, Homo sapiens
agtctgctgaagtat

SEQ ID NO: 1798076 - DNA, 15 bp, Homo sapiens
gtctgctgaagtata

SEQ ID NO: 1798077 - DNA, 15 bp, Homo sapiens
tctgctgaagtatat

SEQ ID NO: 1798078 - DNA, 15 bp, Homo sapiens
ctgctgaagtatatg

SEQ ID NO: 1798079 - DNA, 15 bp, Homo sapiens
tgctgaagtatatgc

SEQ ID NO: 1798080 - DNA, 15 bp, Homo sapiens
gctgaagtatatgcc

SEQ ID NO: 1798081 - DNA, 15 bp, Homo sapiens
ctgaagtatatgcca

SEQ ID NO: 1798082 - DNA, 15 bp, Homo sapiens
tgaagtatatgccaa

SEQ ID NO: 1798083 - DNA, 15 bp, Homo sapiens
gaagtatatgccaag

SEQ ID NO: 1798084 - DNA, 15 bp, Homo sapiens
aagtatatgccaagc

SEQ ID NO: 1798085 - DNA, 15 bp, Homo sapiens
agtatatgccaagca

SEQ ID NO: 1798086 - DNA, 15 bp, Homo sapiens
gtatatgccaagcat

SEQ ID NO: 1798087 - DNA, 15 bp, Homo sapiens
tatatgccaagcatc

SEQ ID NO: 1798088 - DNA, 15 bp, Homo sapiens
atatgccaagcatca

SEQ ID NO: 1798089 - DNA, 15 bp, Homo sapiens
tatgccaagcatcaa

SEQ ID NO: 1798090 - DNA, 15 bp, Homo sapiens
atgccaagcatcaac

SEQ ID NO: 1798091 - DNA, 15 bp, Homo sapiens
tgccaagcatcaacc

SEQ ID NO: 1798092 - DNA, 15 bp, Homo sapiens
gccaagcatcaacca

SEQ ID NO: 1798093 - DNA, 15 bp, Homo sapiens
ccaagcatcaaccac

SEQ ID NO: 1798094 - DNA, 15 bp, Homo sapiens
caagcatcaaccacc

SEQ ID NO: 1798095 - DNA, 15 bp, Homo sapiens
aagcatcaaccacct

SEQ ID NO: 1798096 - DNA, 15 bp, Homo sapiens
agcatcaaccacctc

SEQ ID NO: 1798097 - DNA, 15 bp, Homo sapiens
gcatcaaccacctca

SEQ ID NO: 1798098 - DNA, 15 bp, Homo sapiens
catcaaccacctcat

SEQ ID NO: 1798099 - DNA, 15 bp, Homo sapiens
atcaaccacctcatc

SEQ ID NO: 1798100 - DNA, 15 bp, Homo sapiens
tcaaccacctcatct

SEQ ID NO: 1798101 - DNA, 15 bp, Homo sapiens
caaccacctcatctc

SEQ ID NO: 1798102 - DNA, 15 bp, Homo sapiens
aaccacctcatctct

SEQ ID NO: 1798103 - DNA, 15 bp, Homo sapiens
accacctcatctcta

SEQ ID NO: 1798104 - DNA, 15 bp, Homo sapiens
ccacctcatctctag

SEQ ID NO: 1798105 - DNA, 15 bp, Homo sapiens
cacctcatctctaga

SEQ ID NO: 1798106 - DNA, 15 bp, Homo sapiens
acctcatctctagaa

SEQ ID NO: 1798107 - DNA, 15 bp, Homo sapiens
cctcatctctagaat

SEQ ID NO: 1798108 - DNA, 15 bp, Homo sapiens
ctcatctctagaata

SEQ ID NO: 1798109 - DNA, 15 bp, Homo sapiens
tcatctctagaatag

SEQ ID NO: 1798110 - DNA, 15 bp, Homo sapiens
catctctagaatagt

SEQ ID NO: 1798111 - DNA, 15 bp, Homo sapiens
atctctagaatagtg

SEQ ID NO: 1798112 - DNA, 15 bp, Homo sapiens
tctctagaatagtgg

SEQ ID NO: 1798113 - DNA, 15 bp, Homo sapiens
ctctagaatagtggc

SEQ ID NO: 1798114 - DNA, 15 bp, Homo sapiens
tctagaatagtggcc

SEQ ID NO: 1798115 - DNA, 15 bp, Homo sapiens
ctagaatagtggcct

SEQ ID NO: 1798116 - DNA, 15 bp, Homo sapiens
tagaatagtggccta

SEQ ID NO: 1798117 - DNA, 15 bp, Homo sapiens
agaatagtggcctac

SEQ ID NO: 1798118 - DNA, 15 bp, Homo sapiens
gaatagtggcctaca

SEQ ID NO: 1798119 - DNA, 15 bp, Homo sapiens
aatagtggcctacaa

SEQ ID NO: 1798120 - DNA, 15 bp, Homo sapiens
atagtggcctacaaa

SEQ ID NO: 1798121 - DNA, 15 bp, Homo sapiens
tagtggcctacaaaa

SEQ ID NO: 1798122 - DNA, 15 bp, Homo sapiens
agtggcctacaaaat

SEQ ID NO: 1798123 - DNA, 15 bp, Homo sapiens
gtggcctacaaaatg

SEQ ID NO: 1798124 - DNA, 15 bp, Homo sapiens
tggcctacaaaatgg

SEQ ID NO: 1798125 - DNA, 15 bp, Homo sapiens
ggcctacaaaatggg

SEQ ID NO: 1798126 - DNA, 15 bp, Homo sapiens
gcctacaaaatgggg

SEQ ID NO: 1798127 - DNA, 15 bp, Homo sapiens
cctacaaaatggggc

SEQ ID NO: 1798128 - DNA, 15 bp, Homo sapiens
ctacaaaatggggca

SEQ ID NO: 1798129 - DNA, 15 bp, Homo sapiens
tacaaaatggggcat

SEQ ID NO: 1798130 - DNA, 15 bp, Homo sapiens
acaaaatggggcata

SEQ ID NO: 1798131 - DNA, 15 bp, Homo sapiens
caaaatggggcatac

SEQ ID NO: 1798132 - DNA, 15 bp, Homo sapiens
aaaatggggcatacc

SEQ ID NO: 1798133 - DNA, 15 bp, Homo sapiens
aaatggggcatacct

SEQ ID NO: 1798134 - DNA, 15 bp, Homo sapiens
aatggggcatacctg

SEQ ID NO: 1798135 - DNA, 15 bp, Homo sapiens
atggggcatacctga

SEQ ID NO: 1798136 - DNA, 15 bp, Homo sapiens
tggggcatacctgaa

SEQ ID NO: 1798137 - DNA, 15 bp, Homo sapiens
ggggcatacctgaag

SEQ ID NO: 1798138 - DNA, 15 bp, Homo sapiens
gggcatacctgaagt

SEQ ID NO: 1798139 - DNA, 15 bp, Homo sapiens
ggcatacctgaagta

SEQ ID NO: 1798140 - DNA, 15 bp, Homo sapiens
gcatacctgaagtat

SEQ ID NO: 1798141 - DNA, 15 bp, Homo sapiens
catacctgaagtatg

SEQ ID NO: 1798142 - DNA, 15 bp, Homo sapiens
atacctgaagtatgc

SEQ ID NO: 1798143 - DNA, 15 bp, Homo sapiens
tacctgaagtatgca

SEQ ID NO: 1798144 - DNA, 15 bp, Homo sapiens
acctgaagtatgcaa

SEQ ID NO: 1798145 - DNA, 15 bp, Homo sapiens
cctgaagtatgcaaa

SEQ ID NO: 1798146 - DNA, 15 bp, Homo sapiens
ctgaagtatgcaaag

SEQ ID NO: 1798147 - DNA, 15 bp, Homo sapiens
tgaagtatgcaaagt

SEQ ID NO: 1798148 - DNA, 15 bp, Homo sapiens
gaagtatgcaaagtc

SEQ ID NO: 1798149 - DNA, 15 bp, Homo sapiens
aagtatgcaaagtca

SEQ ID NO: 1798150 - DNA, 15 bp, Homo sapiens
agtatgcaaagtcat

SEQ ID NO: 1798151 - DNA, 15 bp, Homo sapiens
gtatgcaaagtcatc

SEQ ID NO: 1798152 - DNA, 15 bp, Homo sapiens
tatgcaaagtcatct

SEQ ID NO: 1798153 - DNA, 15 bp, Homo sapiens
tgcaaagtcatcttt

SEQ ID NO: 1798154 - DNA, 15 bp, Homo sapiens
gcaaagtcatctttt

SEQ ID NO: 1798155 - DNA, 15 bp, Homo sapiens
caaagtcatcttttg

SEQ ID NO: 1798156 - DNA, 15 bp, Homo sapiens
aaagtcatcttttgg

SEQ ID NO: 1798157 - DNA, 15 bp, Homo sapiens
aagtcatcttttggg

SEQ ID NO: 1798158 - DNA, 15 bp, Homo sapiens
agtcatcttttgggg

SEQ ID NO: 1798159 - DNA, 15 bp, Homo sapiens
gtcatcttttggggt

SEQ ID NO: 1798160 - DNA, 15 bp, Homo sapiens
tcatcttttggggta

SEQ ID NO: 1798161 - DNA, 15 bp, Homo sapiens
catcttttggggtac

SEQ ID NO: 1798162 - DNA, 15 bp, Homo sapiens
atcttttggggtaca

SEQ ID NO: 1798163 - DNA, 15 bp, Homo sapiens
tcttttggggtacat

SEQ ID NO: 1798164 - DNA, 15 bp, Homo sapiens
cttttggggtacata

SEQ ID NO: 1798165 - DNA, 15 bp, Homo sapiens
ttttggggtacataa

SEQ ID NO: 1798166 - DNA, 15 bp, Homo sapiens
tttggggtacataaa

SEQ ID NO: 1798167 - DNA, 15 bp, Homo sapiens
ttggggtacataaag

SEQ ID NO: 1798168 - DNA, 15 bp, Homo sapiens
tggggtacataaagt

SEQ ID NO: 1798169 - DNA, 15 bp, Homo sapiens
ggggtacataaagta

SEQ ID NO: 1798170 - DNA, 15 bp, Homo sapiens
gggtacataaagtag

SEQ ID NO: 1798171 - DNA, 15 bp, Homo sapiens
ggtacataaagtaga

SEQ ID NO: 1798172 - DNA, 15 bp, Homo sapiens
gtacataaagtagaa

SEQ ID NO: 1798173 - DNA, 15 bp, Homo sapiens
tacataaagtagaag

SEQ ID NO: 1798174 - DNA, 15 bp, Homo sapiens
acataaagtagaagt

SEQ ID NO: 1798175 - DNA, 15 bp, Homo sapiens
cataaagtagaagtt

SEQ ID NO: 1798176 - DNA, 15 bp, Homo sapiens
ataaagtagaagttc

SEQ ID NO: 1798177 - DNA, 15 bp, Homo sapiens
taaagtagaagttct

SEQ ID NO: 1798178 - DNA, 15 bp, Homo sapiens
aaagtagaagttcta

SEQ ID NO: 1798179 - DNA, 15 bp, Homo sapiens
aagtagaagttctat

SEQ ID NO: 1798180 - DNA, 15 bp, Homo sapiens
agtagaagttctatt

SEQ ID NO: 1798181 - DNA, 15 bp, Homo sapiens
gtagaagttctattt

SEQ ID NO: 1798182 - DNA, 15 bp, Homo sapiens
tagaagttctattta

SEQ ID NO: 1798183 - DNA, 15 bp, Homo sapiens
agaagttctatttat

SEQ ID NO: 1798184 - DNA, 15 bp, Homo sapiens
gaagttctatttatc

SEQ ID NO: 1798185 - DNA, 15 bp, Homo sapiens
aagttctatttatct

SEQ ID NO: 1798186 - DNA, 15 bp, Homo sapiens
agttctatttatctc

SEQ ID NO: 1798187 - DNA, 15 bp, Homo sapiens
gttctatttatctca

SEQ ID NO: 1798188 - DNA, 15 bp, Homo sapiens
ttctatttatctcat

SEQ ID NO: 1798189 - DNA, 15 bp, Homo sapiens
tctatttatctcatt

SEQ ID NO: 1798190 - DNA, 15 bp, Homo sapiens
ctatttatctcattt

SEQ ID NO: 1798191 - DNA, 15 bp, Homo sapiens
tatttatctcatttt

SEQ ID NO: 1798192 - DNA, 15 bp, Homo sapiens
atttatctcatttta

SEQ ID NO: 1798193 - DNA, 15 bp, Homo sapiens
tttatctcattttaa

SEQ ID NO: 1798194 - DNA, 15 bp, Homo sapiens
ttatctcattttaat

SEQ ID NO: 1798195 - DNA, 15 bp, Homo sapiens
tatctcattttaatg

SEQ ID NO: 1798196 - DNA, 15 bp, Homo sapiens
atctcattttaatgt

SEQ ID NO: 1798197 - DNA, 15 bp, Homo sapiens
tctcattttaatgtt

SEQ ID NO: 1798198 - DNA, 15 bp, Homo sapiens
ctcattttaatgttt

SEQ ID NO: 1798199 - DNA, 15 bp, Homo sapiens
tcattttaatgtttg

SEQ ID NO: 1798200 - DNA, 15 bp, Homo sapiens
cattttaatgtttgc

SEQ ID NO: 1798201 - DNA, 15 bp, Homo sapiens
attttaatgtttgct

SEQ ID NO: 1798202 - DNA, 15 bp, Homo sapiens
ttttaatgtttgctt

SEQ ID NO: 1798203 - DNA, 15 bp, Homo sapiens
tttaatgtttgcttg

SEQ ID NO: 1798204 - DNA, 15 bp, Homo sapiens
ttaatgtttgcttgg

SEQ ID NO: 1798205 - DNA, 15 bp, Homo sapiens
taatgtttgcttggg

SEQ ID NO: 1798206 - DNA, 15 bp, Homo sapiens
aatgtttgcttgggg

SEQ ID NO: 1798207 - DNA, 15 bp, Homo sapiens
atgtttgcttggggt

SEQ ID NO: 1798208 - DNA, 15 bp, Homo sapiens
tgtttgcttggggta

SEQ ID NO: 1798209 - DNA, 15 bp, Homo sapiens
gtttgcttggggtat

SEQ ID NO: 1798210 - DNA, 15 bp, Homo sapiens
tttgcttggggtatg

SEQ ID NO: 1798211 - DNA, 15 bp, Homo sapiens
ttgcttggggtatgt

SEQ ID NO: 1798212 - DNA, 15 bp, Homo sapiens
tgcttggggtatgtg

SEQ ID NO: 1798213 - DNA, 15 bp, Homo sapiens
gcttggggtatgtgt

SEQ ID NO: 1798214 - DNA, 15 bp, Homo sapiens
cttggggtatgtgtt

SEQ ID NO: 1798215 - DNA, 15 bp, Homo sapiens
ttggggtatgtgttt

SEQ ID NO: 1798216 - DNA, 15 bp, Homo sapiens
tggggtatgtgtttt

SEQ ID NO: 1798217 - DNA, 15 bp, Homo sapiens
ggggtatgtgtttta

SEQ ID NO: 1798218 - DNA, 15 bp, Homo sapiens
gggtatgtgttttat

SEQ ID NO: 1798219 - DNA, 15 bp, Homo sapiens
ggtatgtgttttata

SEQ ID NO: 1798220 - DNA, 15 bp, Homo sapiens
gtatgtgttttataa

SEQ ID NO: 1798221 - DNA, 15 bp, Homo sapiens
tatgtgttttataat

SEQ ID NO: 1798222 - DNA, 15 bp, Homo sapiens
atgtgttttataatt

SEQ ID NO: 1798223 - DNA, 15 bp, Homo sapiens
tgtgttttataattt

SEQ ID NO: 1798224 - DNA, 15 bp, Homo sapiens
gtgttttataatttg

SEQ ID NO: 1798225 - DNA, 15 bp, Homo sapiens
tgttttataatttgt

SEQ ID NO: 1798226 - DNA, 15 bp, Homo sapiens
gttttataatttgta

SEQ ID NO: 1798227 - DNA, 15 bp, Homo sapiens
ttttataatttgtac

SEQ ID NO: 1798228 - DNA, 15 bp, Homo sapiens
tttataatttgtaca

SEQ ID NO: 1798229 - DNA, 15 bp, Homo sapiens
ttataatttgtacat

SEQ ID NO: 1798230 - DNA, 15 bp, Homo sapiens
tataatttgtacata

SEQ ID NO: 1798231 - DNA, 15 bp, Homo sapiens
ataatttgtacatac

SEQ ID NO: 1798232 - DNA, 15 bp, Homo sapiens
taatttgtacataca

SEQ ID NO: 1798233 - DNA, 15 bp, Homo sapiens
aatttgtacatacat

SEQ ID NO: 1798234 - DNA, 15 bp, Homo sapiens
atttgtacatacata

SEQ ID NO: 1798235 - DNA, 15 bp, Homo sapiens
tttgtacatacatac

SEQ ID NO: 1798236 - DNA, 15 bp, Homo sapiens
ttgtacatacatacg

SEQ ID NO: 1798237 - DNA, 15 bp, Homo sapiens
tgtacatacatacgt

SEQ ID NO: 1798238 - DNA, 15 bp, Homo sapiens
gtacatacatacgta

SEQ ID NO: 1798239 - DNA, 15 bp, Homo sapiens
tacatacatacgtat

SEQ ID NO: 1798240 - DNA, 15 bp, Homo sapiens
acatacatacgtatt

SEQ ID NO: 1798241 - DNA, 15 bp, Homo sapiens
catacatacgtattt

SEQ ID NO: 1798242 - DNA, 15 bp, Homo sapiens
atacatacgtatttt

SEQ ID NO: 1798243 - DNA, 15 bp, Homo sapiens
tacatacgtattttt

SEQ ID NO: 1798244 - DNA, 15 bp, Homo sapiens
acatacgtatttttg

SEQ ID NO: 1798245 - DNA, 15 bp, Homo sapiens
catacgtatttttgt

SEQ ID NO: 1798246 - DNA, 15 bp, Homo sapiens
atacgtatttttgtg

SEQ ID NO: 1798247 - DNA, 15 bp, Homo sapiens
tacgtatttttgtgg

SEQ ID NO: 1798248 - DNA, 15 bp, Homo sapiens
acgtatttttgtggt

SEQ ID NO: 1798249 - DNA, 15 bp, Homo sapiens
cgtatttttgtggta

SEQ ID NO: 1798250 - DNA, 15 bp, Homo sapiens
gtatttttgtggtac

SEQ ID NO: 1798251 - DNA, 15 bp, Homo sapiens
tatttttgtggtaca

SEQ ID NO: 1798252 - DNA, 15 bp, Homo sapiens
atttttgtggtacag

SEQ ID NO: 1798253 - DNA, 15 bp, Homo sapiens
tttttgtggtacagg

SEQ ID NO: 1798254 - DNA, 15 bp, Homo sapiens
ttttgtggtacaggc

SEQ ID NO: 1798255 - DNA, 15 bp, Homo sapiens
tttgtggtacaggct

SEQ ID NO: 1798256 - DNA, 15 bp, Homo sapiens
ttgtggtacaggctt

SEQ ID NO: 1798257 - DNA, 15 bp, Homo sapiens
tgtggtacaggcttg

SEQ ID NO: 1798258 - DNA, 15 bp, Homo sapiens
gtggtacaggcttgg

SEQ ID NO: 1798259 - DNA, 15 bp, Homo sapiens
tggtacaggcttgga

SEQ ID NO: 1798260 - DNA, 15 bp, Homo sapiens
ggtacaggcttggaa

SEQ ID NO: 1798261 - DNA, 15 bp, Homo sapiens
gtacaggcttggaaa

SEQ ID NO: 1798262 - DNA, 15 bp, Homo sapiens
tacaggcttggaaaa

SEQ ID NO: 1798263 - DNA, 15 bp, Homo sapiens
acaggcttggaaaaa

SEQ ID NO: 1798264 - DNA, 15 bp, Homo sapiens
caggcttggaaaaaa

SEQ ID NO: 1798265 - DNA, 15 bp, Homo sapiens
aggcttggaaaaaaa

SEQ ID NO: 1798266 - DNA, 15 bp, Homo sapiens
ggcttggaaaaaaat

SEQ ID NO: 1798267 - DNA, 15 bp, Homo sapiens
gcttggaaaaaaatt

SEQ ID NO: 1798268 - DNA, 15 bp, Homo sapiens
cttggaaaaaaattt

SEQ ID NO: 1798269 - DNA, 15 bp, Homo sapiens
ttggaaaaaaattta

SEQ ID NO: 1798270 - DNA, 15 bp, Homo sapiens
tggaaaaaaatttac

SEQ ID NO: 1798271 - DNA, 15 bp, Homo sapiens
ggaaaaaaatttact

SEQ ID NO: 1798272 - DNA, 15 bp, Homo sapiens
aaaaaatttactcac

SEQ ID NO: 1798273 - DNA, 15 bp, Homo sapiens
aaaaatttactcaca

SEQ ID NO: 1798274 - DNA, 15 bp, Homo sapiens
aaaatttactcacag

SEQ ID NO: 1798275 - DNA, 15 bp, Homo sapiens
aaatttactcacagg

SEQ ID NO: 1798276 - DNA, 15 bp, Homo sapiens
aatttactcacaggg

SEQ ID NO: 1798277 - DNA, 15 bp, Homo sapiens
atttactcacaggga

SEQ ID NO: 1798278 - DNA, 15 bp, Homo sapiens
tttactcacagggat

SEQ ID NO: 1798279 - DNA, 15 bp, Homo sapiens
ttactcacagggata

SEQ ID NO: 1798280 - DNA, 15 bp, Homo sapiens
tactcacagggatat

SEQ ID NO: 1798281 - DNA, 15 bp, Homo sapiens
actcacagggatata

SEQ ID NO: 1798282 - DNA, 15 bp, Homo sapiens
ctcacagggatatat

SEQ ID NO: 1798283 - DNA, 15 bp, Homo sapiens
tcacagggatatatg

SEQ ID NO: 1798284 - DNA, 15 bp, Homo sapiens
cacagggatatatga

SEQ ID NO: 1798285 - DNA, 15 bp, Homo sapiens
acagggatatatgat

SEQ ID NO: 1798286 - DNA, 15 bp, Homo sapiens
cagggatatatgatt

SEQ ID NO: 1798287 - DNA, 15 bp, Homo sapiens
agggatatatgattt

SEQ ID NO: 1798288 - DNA, 15 bp, Homo sapiens
gggatatatgatttt

SEQ ID NO: 1798289 - DNA, 15 bp, Homo sapiens
ggatatatgattttt

SEQ ID NO: 1798290 - DNA, 15 bp, Homo sapiens
gatatatgattttta

SEQ ID NO: 1798291 - DNA, 15 bp, Homo sapiens
atatatgatttttaa

SEQ ID NO: 1798292 - DNA, 15 bp, Homo sapiens
tatatgatttttaaa

SEQ ID NO: 1798293 - DNA, 15 bp, Homo sapiens
atatgatttttaaag

SEQ ID NO: 1798294 - DNA, 15 bp, Homo sapiens
tatgatttttaaaga

SEQ ID NO: 1798295 - DNA, 15 bp, Homo sapiens
atgatttttaaagat

SEQ ID NO: 1798296 - DNA, 15 bp, Homo sapiens
tgatttttaaagatt

SEQ ID NO: 1798297 - DNA, 15 bp, Homo sapiens
gatttttaaagattt

SEQ ID NO: 1798298 - DNA, 15 bp, Homo sapiens
atttttaaagatttg

SEQ ID NO: 1798299 - DNA, 15 bp, Homo sapiens
tttttaaagatttgg

SEQ ID NO: 1798300 - DNA, 15 bp, Homo sapiens
ttttaaagatttgga

SEQ ID NO: 1798301 - DNA, 15 bp, Homo sapiens
tttaaagatttggag

SEQ ID NO: 1798302 - DNA, 15 bp, Homo sapiens
ttaaagatttggaga

SEQ ID NO: 1798303 - DNA, 15 bp, Homo sapiens
taaagatttggagac

SEQ ID NO: 1798304 - DNA, 15 bp, Homo sapiens
aaagatttggagacc

SEQ ID NO: 1798305 - DNA, 15 bp, Homo sapiens
aagatttggagacca

SEQ ID NO: 1798306 - DNA, 15 bp, Homo sapiens
agatttggagaccac

SEQ ID NO: 1798307 - DNA, 15 bp, Homo sapiens
gatttggagaccact

SEQ ID NO: 1798308 - DNA, 15 bp, Homo sapiens
atttggagaccactg

SEQ ID NO: 1798309 - DNA, 15 bp, Homo sapiens
tttggagaccactgt

SEQ ID NO: 1798310 - DNA, 15 bp, Homo sapiens
ttggagaccactgtt

SEQ ID NO: 1798311 - DNA, 15 bp, Homo sapiens
tggagaccactgttt

SEQ ID NO: 1798312 - DNA, 15 bp, Homo sapiens
ggagaccactgtttt

SEQ ID NO: 1798313 - DNA, 15 bp, Homo sapiens
gagaccactgttttt

SEQ ID NO: 1798314 - DNA, 15 bp, Homo sapiens
agaccactgtttttt

SEQ ID NO: 1798315 - DNA, 15 bp, Homo sapiens
gaccactgttttttt

SEQ ID NO: 1798316 - DNA, 15 bp, Homo sapiens
accactgtttttttg

SEQ ID NO: 1798317 - DNA, 15 bp, Homo sapiens
ccactgtttttttgg

SEQ ID NO: 1798318 - DNA, 15 bp, Homo sapiens
cactgtttttttggg

SEQ ID NO: 1798319 - DNA, 15 bp, Homo sapiens
actgtttttttgggg

SEQ ID NO: 1798320 - DNA, 15 bp, Homo sapiens
ctgtttttttggggg

SEQ ID NO: 1798321 - DNA, 15 bp, Homo sapiens
tgtttttttgggggg

SEQ ID NO: 1798322 - DNA, 15 bp, Homo sapiens
gtttttttggggggt

SEQ ID NO: 1798323 - DNA, 15 bp, Homo sapiens
tttttttggggggtg

SEQ ID NO: 1798324 - DNA, 15 bp, Homo sapiens
ttttttggggggtgg

SEQ ID NO: 1798325 - DNA, 15 bp, Homo sapiens
tttttggggggtggg

SEQ ID NO: 1798326 - DNA, 15 bp, Homo sapiens
ttttggggggtgggg

SEQ ID NO: 1798327 - DNA, 15 bp, Homo sapiens
tttggggggtgggga

SEQ ID NO: 1798328 - DNA, 15 bp, Homo sapiens
ttggggggtggggag

SEQ ID NO: 1798329 - DNA, 15 bp, Homo sapiens
tggggggtggggagg

SEQ ID NO: 1798330 - DNA, 15 bp, Homo sapiens
ggggggtggggaggg

SEQ ID NO: 1798331 - DNA, 15 bp, Homo sapiens
gggggtggggaggga

SEQ ID NO: 1798332 - DNA, 15 bp, Homo sapiens
ggggtggggagggaa

SEQ ID NO: 1798333 - DNA, 15 bp, Homo sapiens
gggtggggagggaat

SEQ ID NO: 1798334 - DNA, 15 bp, Homo sapiens
ggtggggagggaatt

SEQ ID NO: 1798335 - DNA, 15 bp, Homo sapiens
gtggggagggaattt

SEQ ID NO: 1798336 - DNA, 15 bp, Homo sapiens
tggggagggaatttt

SEQ ID NO: 1798337 - DNA, 15 bp, Homo sapiens
ggggagggaattttt

SEQ ID NO: 1798338 - DNA, 15 bp, Homo sapiens
gggagggaatttttt

SEQ ID NO: 1798339 - DNA, 15 bp, Homo sapiens
ggagggaattttttt

SEQ ID NO: 1798340 - DNA, 15 bp, Homo sapiens
gagggaatttttttt

SEQ ID NO: 1798341 - DNA, 15 bp, Homo sapiens
agggaattttttttt

SEQ ID NO: 1798342 - DNA, 15 bp, Homo sapiens
gggaatttttttttt

SEQ ID NO: 1798343 - DNA, 15 bp, Homo sapiens
ggaatttttttttta

SEQ ID NO: 1798344 - DNA, 15 bp, Homo sapiens
tttttttttaattga

SEQ ID NO: 1798345 - DNA, 15 bp, Homo sapiens
ttttttttaattgat

SEQ ID NO: 1798346 - DNA, 15 bp, Homo sapiens
tttttttaattgata

SEQ ID NO: 1798347 - DNA, 15 bp, Homo sapiens
ttttttaattgatat

SEQ ID NO: 1798348 - DNA, 15 bp, Homo sapiens
tttttaattgatata

SEQ ID NO: 1798349 - DNA, 15 bp, Homo sapiens
ttttaattgatatat

SEQ ID NO: 1798350 - DNA, 15 bp, Homo sapiens
tttaattgatatatc

SEQ ID NO: 1798351 - DNA, 15 bp, Homo sapiens
ttaattgatatatca

SEQ ID NO: 1798352 - DNA, 15 bp, Homo sapiens
taattgatatatcat

SEQ ID NO: 1798353 - DNA, 15 bp, Homo sapiens
aattgatatatcata

SEQ ID NO: 1798354 - DNA, 15 bp, Homo sapiens
attgatatatcatag

SEQ ID NO: 1798355 - DNA, 15 bp, Homo sapiens
ttgatatatcatagt

SEQ ID NO: 1798356 - DNA, 15 bp, Homo sapiens
tgatatatcatagtt

SEQ ID NO: 1798357 - DNA, 15 bp, Homo sapiens
gatatatcatagtta

SEQ ID NO: 1798358 - DNA, 15 bp, Homo sapiens
atatatcatagttat

SEQ ID NO: 1798359 - DNA, 15 bp, Homo sapiens
tatatcatagttata

SEQ ID NO: 1798360 - DNA, 15 bp, Homo sapiens
atatcatagttatac

SEQ ID NO: 1798361 - DNA, 15 bp, Homo sapiens
tatcatagttataca

SEQ ID NO: 1798362 - DNA, 15 bp, Homo sapiens
atcatagttatacat

SEQ ID NO: 1798363 - DNA, 15 bp, Homo sapiens
tcatagttatacata

SEQ ID NO: 1798364 - DNA, 15 bp, Homo sapiens
catagttatacatat

SEQ ID NO: 1798365 - DNA, 15 bp, Homo sapiens
atagttatacatatt

SEQ ID NO: 1798366 - DNA, 15 bp, Homo sapiens
tagttatacatattt

SEQ ID NO: 1798367 - DNA, 15 bp, Homo sapiens
agttatacatatttt

SEQ ID NO: 1798368 - DNA, 15 bp, Homo sapiens
gttatacatatttta

SEQ ID NO: 1798369 - DNA, 15 bp, Homo sapiens
ttatacatattttag

SEQ ID NO: 1798370 - DNA, 15 bp, Homo sapiens
tatacatattttagg

SEQ ID NO: 1798371 - DNA, 15 bp, Homo sapiens
atacatattttaggg

SEQ ID NO: 1798372 - DNA, 15 bp, Homo sapiens
tacatattttagggg

SEQ ID NO: 1798373 - DNA, 15 bp, Homo sapiens
acatattttaggggt

SEQ ID NO: 1798374 - DNA, 15 bp, Homo sapiens
catattttaggggta

SEQ ID NO: 1798375 - DNA, 15 bp, Homo sapiens
atattttaggggtac

SEQ ID NO: 1798376 - DNA, 15 bp, Homo sapiens
tattttaggggtaca

SEQ ID NO: 1798377 - DNA, 15 bp, Homo sapiens
attttaggggtacat

SEQ ID NO: 1798378 - DNA, 15 bp, Homo sapiens
ttttaggggtacatg

SEQ ID NO: 1798379 - DNA, 15 bp, Homo sapiens
tttaggggtacatgt

SEQ ID NO: 1798380 - DNA, 15 bp, Homo sapiens
ttaggggtacatgtg

SEQ ID NO: 1798381 - DNA, 15 bp, Homo sapiens
taggggtacatgtga

SEQ ID NO: 1798382 - DNA, 15 bp, Homo sapiens
gggtacatgtgatgt

SEQ ID NO: 1798383 - DNA, 15 bp, Homo sapiens
ggtacatgtgatgtt

SEQ ID NO: 1798384 - DNA, 15 bp, Homo sapiens
gtacatgtgatgttt

SEQ ID NO: 1798385 - DNA, 15 bp, Homo sapiens
tgatgttttgatacg

SEQ ID NO: 1798386 - DNA, 15 bp, Homo sapiens
gatgttttgatacgt

SEQ ID NO: 1798387 - DNA, 15 bp, Homo sapiens
atgttttgatacgtg

SEQ ID NO: 1798388 - DNA, 15 bp, Homo sapiens
tgttttgatacgtgt

SEQ ID NO: 1798389 - DNA, 15 bp, Homo sapiens
gttttgatacgtgta

SEQ ID NO: 1798390 - DNA, 15 bp, Homo sapiens
ttttgatacgtgtac

SEQ ID NO: 1798391 - DNA, 15 bp, Homo sapiens
tttgatacgtgtaca

SEQ ID NO: 1798392 - DNA, 15 bp, Homo sapiens
ttgatacgtgtacac

SEQ ID NO: 1798393 - DNA, 15 bp, Homo sapiens
tgatacgtgtacaca

SEQ ID NO: 1798394 - DNA, 15 bp, Homo sapiens
gatacgtgtacacaa

SEQ ID NO: 1798395 - DNA, 15 bp, Homo sapiens
atacgtgtacacaat

SEQ ID NO: 1798396 - DNA, 15 bp, Homo sapiens
tacgtgtacacaatg

SEQ ID NO: 1798397 - DNA, 15 bp, Homo sapiens
acgtgtacacaatgt

SEQ ID NO: 1798398 - DNA, 15 bp, Homo sapiens
cgtgtacacaatgtg

SEQ ID NO: 1798399 - DNA, 15 bp, Homo sapiens
gtgtacacaatgtgt

SEQ ID NO: 1798400 - DNA, 15 bp, Homo sapiens
tgtacacaatgtgta

SEQ ID NO: 1798401 - DNA, 15 bp, Homo sapiens
gtacacaatgtgtaa

SEQ ID NO: 1798402 - DNA, 15 bp, Homo sapiens
tacacaatgtgtaat

SEQ ID NO: 1798403 - DNA, 15 bp, Homo sapiens
acacaatgtgtaatg

SEQ ID NO: 1798404 - DNA, 15 bp, Homo sapiens
cacaatgtgtaatga

SEQ ID NO: 1798405 - DNA, 15 bp, Homo sapiens
acaatgtgtaatgat

SEQ ID NO: 1798406 - DNA, 15 bp, Homo sapiens
caatgtgtaatgatc

SEQ ID NO: 1798407 - DNA, 15 bp, Homo sapiens
aatgtgtaatgatca

SEQ ID NO: 1798408 - DNA, 15 bp, Homo sapiens
atgtgtaatgatcaa

SEQ ID NO: 1798409 - DNA, 15 bp, Homo sapiens
tgtgtaatgatcaaa

SEQ ID NO: 1798410 - DNA, 15 bp, Homo sapiens
gtgtaatgatcaaat

SEQ ID NO: 1798411 - DNA, 15 bp, Homo sapiens
tgtaatgatcaaatc

SEQ ID NO: 1798412 - DNA, 15 bp, Homo sapiens
gtaatgatcaaatca

SEQ ID NO: 1798413 - DNA, 15 bp, Homo sapiens
taatgatcaaatcag

SEQ ID NO: 1798414 - DNA, 15 bp, Homo sapiens
aatgatcaaatcagg

SEQ ID NO: 1798415 - DNA, 15 bp, Homo sapiens
atgatcaaatcaggg

SEQ ID NO: 1798416 - DNA, 15 bp, Homo sapiens
tgatcaaatcagggt

SEQ ID NO: 1798417 - DNA, 15 bp, Homo sapiens
gatcaaatcagggtt

SEQ ID NO: 1798418 - DNA, 15 bp, Homo sapiens
tcaaatcagggttat

SEQ ID NO: 1798419 - DNA, 15 bp, Homo sapiens
caaatcagggttatt

SEQ ID NO: 1798420 - DNA, 15 bp, Homo sapiens
aaatcagggttattg

SEQ ID NO: 1798421 - DNA, 15 bp, Homo sapiens
aatcagggttattgg

SEQ ID NO: 1798422 - DNA, 15 bp, Homo sapiens
atcagggttattggg

SEQ ID NO: 1798423 - DNA, 15 bp, Homo sapiens
tcagggttattggga

SEQ ID NO: 1798424 - DNA, 15 bp, Homo sapiens
cagggttattgggat

SEQ ID NO: 1798425 - DNA, 15 bp, Homo sapiens
agggttattgggata

SEQ ID NO: 1798426 - DNA, 15 bp, Homo sapiens
gggttattgggatat

SEQ ID NO: 1798427 - DNA, 15 bp, Homo sapiens
ggttattgggatata

SEQ ID NO: 1798428 - DNA, 15 bp, Homo sapiens
gttattgggatatat

SEQ ID NO: 1798429 - DNA, 15 bp, Homo sapiens
ttattgggatatata

SEQ ID NO: 1798430 - DNA, 15 bp, Homo sapiens
tattgggatatatat

SEQ ID NO: 1798431 - DNA, 15 bp, Homo sapiens
attgggatatatatc

SEQ ID NO: 1798432 - DNA, 15 bp, Homo sapiens
ttgggatatatatca

SEQ ID NO: 1798433 - DNA, 15 bp, Homo sapiens
tgggatatatatcac

SEQ ID NO: 1798434 - DNA, 15 bp, Homo sapiens
gggatatatatcacc

SEQ ID NO: 1798435 - DNA, 15 bp, Homo sapiens
ggatatatatcacct

SEQ ID NO: 1798436 - DNA, 15 bp, Homo sapiens
gatatatatcacctc

SEQ ID NO: 1798437 - DNA, 15 bp, Homo sapiens
atatatatcacctca

SEQ ID NO: 1798438 - DNA, 15 bp, Homo sapiens
tatatatcacctcaa

SEQ ID NO: 1798439 - DNA, 15 bp, Homo sapiens
atatatcacctcaaa

SEQ ID NO: 1798440 - DNA, 15 bp, Homo sapiens
tatatcacctcaaac

SEQ ID NO: 1798441 - DNA, 15 bp, Homo sapiens
atatcacctcaaaca

SEQ ID NO: 1798442 - DNA, 15 bp, Homo sapiens
tatcacctcaaacat

SEQ ID NO: 1798443 - DNA, 15 bp, Homo sapiens
atcacctcaaacatt

SEQ ID NO: 1798444 - DNA, 15 bp, Homo sapiens
tcacctcaaacattt

SEQ ID NO: 1798445 - DNA, 15 bp, Homo sapiens
cacctcaaacatttt

SEQ ID NO: 1798446 - DNA, 15 bp, Homo sapiens
acctcaaacattttt

SEQ ID NO: 1798447 - DNA, 15 bp, Homo sapiens
cctcaaacatttttc

SEQ ID NO: 1798448 - DNA, 15 bp, Homo sapiens
ctcaaacatttttct

SEQ ID NO: 1798449 - DNA, 15 bp, Homo sapiens
tcaaacatttttctt

SEQ ID NO: 1798450 - DNA, 15 bp, Homo sapiens
caaacatttttcttt

SEQ ID NO: 1798451 - DNA, 15 bp, Homo sapiens
aaacatttttctttg

SEQ ID NO: 1798452 - DNA, 15 bp, Homo sapiens
aacatttttctttgc

SEQ ID NO: 1798453 - DNA, 15 bp, Homo sapiens
acatttttctttgca

SEQ ID NO: 1798454 - DNA, 15 bp, Homo sapiens
catttttctttgcat

SEQ ID NO: 1798455 - DNA, 15 bp, Homo sapiens
atttttctttgcatt

SEQ ID NO: 1798456 - DNA, 15 bp, Homo sapiens
tttttctttgcattg

SEQ ID NO: 1798457 - DNA, 15 bp, Homo sapiens
ttttctttgcattgg

SEQ ID NO: 1798458 - DNA, 15 bp, Homo sapiens
tttctttgcattggg

SEQ ID NO: 1798459 - DNA, 15 bp, Homo sapiens
ttctttgcattggga

SEQ ID NO: 1798460 - DNA, 15 bp, Homo sapiens
tctttgcattgggaa

SEQ ID NO: 1798461 - DNA, 15 bp, Homo sapiens
ctttgcattgggaac

SEQ ID NO: 1798462 - DNA, 15 bp, Homo sapiens
tttgcattgggaaca

SEQ ID NO: 1798463 - DNA, 15 bp, Homo sapiens
ttgcattgggaacat

SEQ ID NO: 1798464 - DNA, 15 bp, Homo sapiens
tgcattgggaacatt

SEQ ID NO: 1798465 - DNA, 15 bp, Homo sapiens
gcattgggaacatta

SEQ ID NO: 1798466 - DNA, 15 bp, Homo sapiens
cattgggaacattac

SEQ ID NO: 1798467 - DNA, 15 bp, Homo sapiens
attgggaacattaca

SEQ ID NO: 1798468 - DNA, 15 bp, Homo sapiens
ttgggaacattacaa

SEQ ID NO: 1798469 - DNA, 15 bp, Homo sapiens
tgggaacattacaat

SEQ ID NO: 1798470 - DNA, 15 bp, Homo sapiens
gggaacattacaatt

SEQ ID NO: 1798471 - DNA, 15 bp, Homo sapiens
ggaacattacaattc

SEQ ID NO: 1798472 - DNA, 15 bp, Homo sapiens
gaacattacaattct

SEQ ID NO: 1798473 - DNA, 15 bp, Homo sapiens
aacattacaattcta

SEQ ID NO: 1798474 - DNA, 15 bp, Homo sapiens
acattacaattctag

SEQ ID NO: 1798475 - DNA, 15 bp, Homo sapiens
cattacaattctagc

SEQ ID NO: 1798476 - DNA, 15 bp, Homo sapiens
attacaattctagct

SEQ ID NO: 1798477 - DNA, 15 bp, Homo sapiens
ttacaattctagcta

SEQ ID NO: 1798478 - DNA, 15 bp, Homo sapiens
tacaattctagctat

SEQ ID NO: 1798479 - DNA, 15 bp, Homo sapiens
acaattctagctatt

SEQ ID NO: 1798480 - DNA, 15 bp, Homo sapiens
caattctagctattt

SEQ ID NO: 1798481 - DNA, 15 bp, Homo sapiens
aattctagctatttt

SEQ ID NO: 1798482 - DNA, 15 bp, Homo sapiens
attctagctattttg

SEQ ID NO: 1798483 - DNA, 15 bp, Homo sapiens
ttctagctattttga

SEQ ID NO: 1798484 - DNA, 15 bp, Homo sapiens
tctagctattttgaa

SEQ ID NO: 1798485 - DNA, 15 bp, Homo sapiens
ctagctattttgaaa

SEQ ID NO: 1798486 - DNA, 15 bp, Homo sapiens
tagctattttgaaat

SEQ ID NO: 1798487 - DNA, 15 bp, Homo sapiens
agctattttgaaata

SEQ ID NO: 1798488 - DNA, 15 bp, Homo sapiens
gctattttgaaatat

SEQ ID NO: 1798489 - DNA, 15 bp, Homo sapiens
ctattttgaaatatg

SEQ ID NO: 1798490 - DNA, 15 bp, Homo sapiens
tattttgaaatatgc

SEQ ID NO: 1798491 - DNA, 15 bp, Homo sapiens
attttgaaatatgca

SEQ ID NO: 1798492 - DNA, 15 bp, Homo sapiens
ttttgaaatatgcag

SEQ ID NO: 1798493 - DNA, 15 bp, Homo sapiens
tttgaaatatgcagt

SEQ ID NO: 1798494 - DNA, 15 bp, Homo sapiens
ttgaaatatgcagta

SEQ ID NO: 1798495 - DNA, 15 bp, Homo sapiens
tgaaatatgcagtaa

SEQ ID NO: 1798496 - DNA, 15 bp, Homo sapiens
gaaatatgcagtaaa

SEQ ID NO: 1798497 - DNA, 15 bp, Homo sapiens
aaatatgcagtaaat

SEQ ID NO: 1798498 - DNA, 15 bp, Homo sapiens
aatatgcagtaaatt

SEQ ID NO: 1798499 - DNA, 15 bp, Homo sapiens
atatgcagtaaatta

SEQ ID NO: 1798500 - DNA, 15 bp, Homo sapiens
tatgcagtaaattaa

SEQ ID NO: 1798501 - DNA, 15 bp, Homo sapiens
atgcagtaaattaac

SEQ ID NO: 1798502 - DNA, 15 bp, Homo sapiens
tgcagtaaattaact

SEQ ID NO: 1798503 - DNA, 15 bp, Homo sapiens
gcagtaaattaactg

SEQ ID NO: 1798504 - DNA, 15 bp, Homo sapiens
cagtaaattaactgt

SEQ ID NO: 1798505 - DNA, 15 bp, Homo sapiens
agtaaattaactgta

SEQ ID NO: 1798506 - DNA, 15 bp, Homo sapiens
gtaaattaactgtaa

SEQ ID NO: 1798507 - DNA, 15 bp, Homo sapiens
taaattaactgtaac

SEQ ID NO: 1798508 - DNA, 15 bp, Homo sapiens
aaattaactgtaact

SEQ ID NO: 1798509 - DNA, 15 bp, Homo sapiens
aattaactgtaactc

SEQ ID NO: 1798510 - DNA, 15 bp, Homo sapiens
attaactgtaactcc

SEQ ID NO: 1798511 - DNA, 15 bp, Homo sapiens
ttaactgtaactccc

SEQ ID NO: 1798512 - DNA, 15 bp, Homo sapiens
taactgtaactccct

SEQ ID NO: 1798513 - DNA, 15 bp, Homo sapiens
aactgtaactcccta

SEQ ID NO: 1798514 - DNA, 15 bp, Homo sapiens
actgtaactccctac

SEQ ID NO: 1798515 - DNA, 15 bp, Homo sapiens
ctgtaactccctacg

SEQ ID NO: 1798516 - DNA, 15 bp, Homo sapiens
tgtaactccctacgg

SEQ ID NO: 1798517 - DNA, 15 bp, Homo sapiens
gtaactccctacggt

SEQ ID NO: 1798518 - DNA, 15 bp, Homo sapiens
taactccctacggta

SEQ ID NO: 1798519 - DNA, 15 bp, Homo sapiens
aactccctacggtac

SEQ ID NO: 1798520 - DNA, 15 bp, Homo sapiens
actccctacggtact

SEQ ID NO: 1798521 - DNA, 15 bp, Homo sapiens
ctccctacggtactg

SEQ ID NO: 1798522 - DNA, 15 bp, Homo sapiens
tccctacggtactgt

SEQ ID NO: 1798523 - DNA, 15 bp, Homo sapiens
ccctacggtactgtc

SEQ ID NO: 1798524 - DNA, 15 bp, Homo sapiens
cctacggtactgtca

SEQ ID NO: 1798525 - DNA, 15 bp, Homo sapiens
ctacggtactgtcaa

SEQ ID NO: 1798526 - DNA, 15 bp, Homo sapiens
tacggtactgtcaaa

SEQ ID NO: 1798527 - DNA, 15 bp, Homo sapiens
acggtactgtcaaat

SEQ ID NO: 1798528 - DNA, 15 bp, Homo sapiens
cggtactgtcaaata

SEQ ID NO: 1798529 - DNA, 15 bp, Homo sapiens
ggtactgtcaaatac

SEQ ID NO: 1798530 - DNA, 15 bp, Homo sapiens
gtactgtcaaatact

SEQ ID NO: 1798531 - DNA, 15 bp, Homo sapiens
tactgtcaaatacta

SEQ ID NO: 1798532 - DNA, 15 bp, Homo sapiens
actgtcaaatactag

SEQ ID NO: 1798533 - DNA, 15 bp, Homo sapiens
ctgtcaaatactaga

SEQ ID NO: 1798534 - DNA, 15 bp, Homo sapiens
tgtcaaatactagaa

SEQ ID NO: 1798535 - DNA, 15 bp, Homo sapiens
gtcaaatactagaat

SEQ ID NO: 1798536 - DNA, 15 bp, Homo sapiens
tcaaatactagaatg

SEQ ID NO: 1798537 - DNA, 15 bp, Homo sapiens
caaatactagaatga

SEQ ID NO: 1798538 - DNA, 15 bp, Homo sapiens
aaatactagaatgaa

SEQ ID NO: 1798539 - DNA, 15 bp, Homo sapiens
aatactagaatgaag

SEQ ID NO: 1798540 - DNA, 15 bp, Homo sapiens
atactagaatgaaga

SEQ ID NO: 1798541 - DNA, 15 bp, Homo sapiens
tactagaatgaagac

SEQ ID NO: 1798542 - DNA, 15 bp, Homo sapiens
actagaatgaagacc

SEQ ID NO: 1798543 - DNA, 15 bp, Homo sapiens
ctagaatgaagacca

SEQ ID NO: 1798544 - DNA, 15 bp, Homo sapiens
tagaatgaagaccac

SEQ ID NO: 1798545 - DNA, 15 bp, Homo sapiens
agaatgaagaccact

SEQ ID NO: 1798546 - DNA, 15 bp, Homo sapiens
gaatgaagaccactg

SEQ ID NO: 1798547 - DNA, 15 bp, Homo sapiens
aatgaagaccactgc

SEQ ID NO: 1798548 - DNA, 15 bp, Homo sapiens
atgaagaccactgct

SEQ ID NO: 1798549 - DNA, 15 bp, Homo sapiens
tgaagaccactgctt

SEQ ID NO: 1798550 - DNA, 15 bp, Homo sapiens
gaagaccactgcttt

SEQ ID NO: 1798551 - DNA, 15 bp, Homo sapiens
aagaccactgctttt

SEQ ID NO: 1798552 - DNA, 15 bp, Homo sapiens
agaccactgcttttg

SEQ ID NO: 1798553 - DNA, 15 bp, Homo sapiens
gaccactgcttttgc

SEQ ID NO: 1798554 - DNA, 15 bp, Homo sapiens
accactgcttttgca

SEQ ID NO: 1798555 - DNA, 15 bp, Homo sapiens
ccactgcttttgcaa

SEQ ID NO: 1798556 - DNA, 15 bp, Homo sapiens
cactgcttttgcaag

SEQ ID NO: 1798557 - DNA, 15 bp, Homo sapiens
actgcttttgcaagg

SEQ ID NO: 1798558 - DNA, 15 bp, Homo sapiens
ctgcttttgcaaggt

SEQ ID NO: 1798559 - DNA, 15 bp, Homo sapiens
tgcttttgcaaggtc

SEQ ID NO: 1798560 - DNA, 15 bp, Homo sapiens
gcttttgcaaggtcc

SEQ ID NO: 1798561 - DNA, 15 bp, Homo sapiens
cttttgcaaggtcct

SEQ ID NO: 1798562 - DNA, 15 bp, Homo sapiens
ttttgcaaggtcctg

SEQ ID NO: 1798563 - DNA, 15 bp, Homo sapiens
tttgcaaggtcctga

SEQ ID NO: 1798564 - DNA, 15 bp, Homo sapiens
ttgcaaggtcctgag

SEQ ID NO: 1798565 - DNA, 15 bp, Homo sapiens
tgcaaggtcctgagc

SEQ ID NO: 1798566 - DNA, 15 bp, Homo sapiens
gcaaggtcctgagcg

SEQ ID NO: 1798567 - DNA, 15 bp, Homo sapiens
caaggtcctgagcgc

SEQ ID NO: 1798568 - DNA, 15 bp, Homo sapiens
aaggtcctgagcgcc

SEQ ID NO: 1798569 - DNA, 15 bp, Homo sapiens
aggtcctgagcgcca

SEQ ID NO: 1798570 - DNA, 15 bp, Homo sapiens
ggtcctgagcgccat

SEQ ID NO: 1798571 - DNA, 15 bp, Homo sapiens
gtcctgagcgccatc

SEQ ID NO: 1798572 - DNA, 15 bp, Homo sapiens
tcctgagcgccatca

SEQ ID NO: 1798573 - DNA, 15 bp, Homo sapiens
cctgagcgccatcag

SEQ ID NO: 1798574 - DNA, 15 bp, Homo sapiens
ctgagcgccatcagt

SEQ ID NO: 1798575 - DNA, 15 bp, Homo sapiens
tgagcgccatcagtt

SEQ ID NO: 1798576 - DNA, 15 bp, Homo sapiens
gagcgccatcagttt

SEQ ID NO: 1798577 - DNA, 15 bp, Homo sapiens
agcgccatcagtttg

SEQ ID NO: 1798578 - DNA, 15 bp, Homo sapiens
gcgccatcagtttga

SEQ ID NO: 1798579 - DNA, 15 bp, Homo sapiens
cgccatcagtttgac

SEQ ID NO: 1798580 - DNA, 15 bp, Homo sapiens
gccatcagtttgaca

SEQ ID NO: 1798581 - DNA, 15 bp, Homo sapiens
ccatcagtttgacat

SEQ ID NO: 1798582 - DNA, 15 bp, Homo sapiens
catcagtttgacatg

SEQ ID NO: 1798583 - DNA, 15 bp, Homo sapiens
atcagtttgacatga

SEQ ID NO: 1798584 - DNA, 15 bp, Homo sapiens
tcagtttgacatgag

SEQ ID NO: 1798585 - DNA, 15 bp, Homo sapiens
cagtttgacatgagc

SEQ ID NO: 1798586 - DNA, 15 bp, Homo sapiens
agtttgacatgagca

SEQ ID NO: 1798587 - DNA, 15 bp, Homo sapiens
gtttgacatgagcat

SEQ ID NO: 1798588 - DNA, 15 bp, Homo sapiens
tttgacatgagcata

SEQ ID NO: 1798589 - DNA, 15 bp, Homo sapiens
ttgacatgagcataa

SEQ ID NO: 1798590 - DNA, 15 bp, Homo sapiens
tgacatgagcataat

SEQ ID NO: 1798591 - DNA, 15 bp, Homo sapiens
gacatgagcataata

SEQ ID NO: 1798592 - DNA, 15 bp, Homo sapiens
acatgagcataatat

SEQ ID NO: 1798593 - DNA, 15 bp, Homo sapiens
catgagcataatata

SEQ ID NO: 1798594 - DNA, 15 bp, Homo sapiens
atgagcataatatat

SEQ ID NO: 1798595 - DNA, 15 bp, Homo sapiens
tgagcataatatata

SEQ ID NO: 1798596 - DNA, 15 bp, Homo sapiens
gagcataatatatat

SEQ ID NO: 1798597 - DNA, 15 bp, Homo sapiens
agcataatatatatg

SEQ ID NO: 1798598 - DNA, 15 bp, Homo sapiens
gcataatatatatgg

SEQ ID NO: 1798599 - DNA, 15 bp, Homo sapiens
cataatatatatggc

SEQ ID NO: 1798600 - DNA, 15 bp, Homo sapiens
ataatatatatggca

SEQ ID NO: 1798601 - DNA, 15 bp, Homo sapiens
taatatatatggcag

SEQ ID NO: 1798602 - DNA, 15 bp, Homo sapiens
aatatatatggcagc

SEQ ID NO: 1798603 - DNA, 15 bp, Homo sapiens
atatatatggcagcc

SEQ ID NO: 1798604 - DNA, 15 bp, Homo sapiens
tatatatggcagcca

SEQ ID NO: 1798605 - DNA, 15 bp, Homo sapiens
atatatggcagccac

SEQ ID NO: 1798606 - DNA, 15 bp, Homo sapiens
tatatggcagccact

SEQ ID NO: 1798607 - DNA, 15 bp, Homo sapiens
atatggcagccactt

SEQ ID NO: 1798608 - DNA, 15 bp, Homo sapiens
tatggcagccacttg

SEQ ID NO: 1798609 - DNA, 15 bp, Homo sapiens
atggcagccacttgc

SEQ ID NO: 1798610 - DNA, 15 bp, Homo sapiens
tggcagccacttgcc

SEQ ID NO: 1798611 - DNA, 15 bp, Homo sapiens
ggcagccacttgcca

SEQ ID NO: 1798612 - DNA, 15 bp, Homo sapiens
gcagccacttgccaa

SEQ ID NO: 1798613 - DNA, 15 bp, Homo sapiens
cagccacttgccaac

SEQ ID NO: 1798614 - DNA, 15 bp, Homo sapiens
agccacttgccaact

SEQ ID NO: 1798615 - DNA, 15 bp, Homo sapiens
gccacttgccaactt

SEQ ID NO: 1798616 - DNA, 15 bp, Homo sapiens
ccacttgccaactta

SEQ ID NO: 1798617 - DNA, 15 bp, Homo sapiens
cacttgccaacttac

SEQ ID NO: 1798618 - DNA, 15 bp, Homo sapiens
acttgccaacttacc

SEQ ID NO: 1798619 - DNA, 15 bp, Homo sapiens
cttgccaacttaccc

SEQ ID NO: 1798620 - DNA, 15 bp, Homo sapiens
ttgccaacttaccca

SEQ ID NO: 1798621 - DNA, 15 bp, Homo sapiens
tgccaacttacccag

SEQ ID NO: 1798622 - DNA, 15 bp, Homo sapiens
gccaacttacccagt

SEQ ID NO: 1798623 - DNA, 15 bp, Homo sapiens
ccaacttacccagta

SEQ ID NO: 1798624 - DNA, 15 bp, Homo sapiens
caacttacccagtac

SEQ ID NO: 1798625 - DNA, 15 bp, Homo sapiens
aacttacccagtacc

SEQ ID NO: 1798626 - DNA, 15 bp, Homo sapiens
acttacccagtacca

SEQ ID NO: 1798627 - DNA, 15 bp, Homo sapiens
cttacccagtaccat

SEQ ID NO: 1798628 - DNA, 15 bp, Homo sapiens
ttacccagtaccatc

SEQ ID NO: 1798629 - DNA, 15 bp, Homo sapiens
tacccagtaccatca

SEQ ID NO: 1798630 - DNA, 15 bp, Homo sapiens
acccagtaccatcaa

SEQ ID NO: 1798631 - DNA, 15 bp, Homo sapiens
cccagtaccatcaat

SEQ ID NO: 1798632 - DNA, 15 bp, Homo sapiens
ccagtaccatcaatg

SEQ ID NO: 1798633 - DNA, 15 bp, Homo sapiens
cagtaccatcaatgc

SEQ ID NO: 1798634 - DNA, 15 bp, Homo sapiens
agtaccatcaatgct

SEQ ID NO: 1798635 - DNA, 15 bp, Homo sapiens
gtaccatcaatgctg

SEQ ID NO: 1798636 - DNA, 15 bp, Homo sapiens
taccatcaatgctgt

SEQ ID NO: 1798637 - DNA, 15 bp, Homo sapiens
accatcaatgctgtt

SEQ ID NO: 1798638 - DNA, 15 bp, Homo sapiens
ccatcaatgctgtta

SEQ ID NO: 1798639 - DNA, 15 bp, Homo sapiens
catcaatgctgttaa

SEQ ID NO: 1798640 - DNA, 15 bp, Homo sapiens
atcaatgctgttaac

SEQ ID NO: 1798641 - DNA, 15 bp, Homo sapiens
tcaatgctgttaaca

SEQ ID NO: 1798642 - DNA, 15 bp, Homo sapiens
caatgctgttaacag

SEQ ID NO: 1798643 - DNA, 15 bp, Homo sapiens
aatgctgttaacagt

SEQ ID NO: 1798644 - DNA, 15 bp, Homo sapiens
atgctgttaacagtt

SEQ ID NO: 1798645 - DNA, 15 bp, Homo sapiens
tgctgttaacagttc

SEQ ID NO: 1798646 - DNA, 15 bp, Homo sapiens
gctgttaacagttct

SEQ ID NO: 1798647 - DNA, 15 bp, Homo sapiens
ctgttaacagttctt

SEQ ID NO: 1798648 - DNA, 15 bp, Homo sapiens
tgttaacagttcttc

SEQ ID NO: 1798649 - DNA, 15 bp, Homo sapiens
gttaacagttcttca

SEQ ID NO: 1798650 - DNA, 15 bp, Homo sapiens
ttaacagttcttcat

SEQ ID NO: 1798651 - DNA, 15 bp, Homo sapiens
taacagttcttcatc

SEQ ID NO: 1798652 - DNA, 15 bp, Homo sapiens
aacagttcttcatcc

SEQ ID NO: 1798653 - DNA, 15 bp, Homo sapiens
acagttcttcatcct

SEQ ID NO: 1798654 - DNA, 15 bp, Homo sapiens
cagttcttcatcctt

SEQ ID NO: 1798655 - DNA, 15 bp, Homo sapiens
agttcttcatccttt

SEQ ID NO: 1798656 - DNA, 15 bp, Homo sapiens
gttcttcatcctttt

SEQ ID NO: 1798657 - DNA, 15 bp, Homo sapiens
ttcttcatccttttt

SEQ ID NO: 1798658 - DNA, 15 bp, Homo sapiens
tcttcatcctttttc

SEQ ID NO: 1798659 - DNA, 15 bp, Homo sapiens
cttcatcctttttcc

SEQ ID NO: 1798660 - DNA, 15 bp, Homo sapiens
ttcatcctttttcca

SEQ ID NO: 1798661 - DNA, 15 bp, Homo sapiens
tcatcctttttccag

SEQ ID NO: 1798662 - DNA, 15 bp, Homo sapiens
catcctttttccagc

SEQ ID NO: 1798663 - DNA, 15 bp, Homo sapiens
atcctttttccagct

SEQ ID NO: 1798664 - DNA, 15 bp, Homo sapiens
tcctttttccagctt

SEQ ID NO: 1798665 - DNA, 15 bp, Homo sapiens
cctttttccagcttc

SEQ ID NO: 1798666 - DNA, 15 bp, Homo sapiens
ctttttccagcttct

SEQ ID NO: 1798667 - DNA, 15 bp, Homo sapiens
tttttccagcttcta

SEQ ID NO: 1798668 - DNA, 15 bp, Homo sapiens
ttttccagcttctac

SEQ ID NO: 1798669 - DNA, 15 bp, Homo sapiens
tttccagcttctact

SEQ ID NO: 1798670 - DNA, 15 bp, Homo sapiens
ttccagcttctactc

SEQ ID NO: 1798671 - DNA, 15 bp, Homo sapiens
tccagcttctactcg

SEQ ID NO: 1798672 - DNA, 15 bp, Homo sapiens
ccagcttctactcga

SEQ ID NO: 1798673 - DNA, 15 bp, Homo sapiens
cagcttctactcgaa

SEQ ID NO: 1798674 - DNA, 15 bp, Homo sapiens
agcttctactcgaac

SEQ ID NO: 1798675 - DNA, 15 bp, Homo sapiens
gcttctactcgaaca

SEQ ID NO: 1798676 - DNA, 15 bp, Homo sapiens
cttctactcgaacac

SEQ ID NO: 1798677 - DNA, 15 bp, Homo sapiens
ttctactcgaacacg

SEQ ID NO: 1798678 - DNA, 15 bp, Homo sapiens
tctactcgaacacga

SEQ ID NO: 1798679 - DNA, 15 bp, Homo sapiens
ctactcgaacacgaa

SEQ ID NO: 1798680 - DNA, 15 bp, Homo sapiens
tactcgaacacgaat

SEQ ID NO: 1798681 - DNA, 15 bp, Homo sapiens
actcgaacacgaatg

SEQ ID NO: 1798682 - DNA, 15 bp, Homo sapiens
ctcgaacacgaatgc

SEQ ID NO: 1798683 - DNA, 15 bp, Homo sapiens
tcgaacacgaatgca

SEQ ID NO: 1798684 - DNA, 15 bp, Homo sapiens
cgaacacgaatgcaa

SEQ ID NO: 1798685 - DNA, 15 bp, Homo sapiens
gaacacgaatgcaaa

SEQ ID NO: 1798686 - DNA, 15 bp, Homo sapiens
aacacgaatgcaaaa

SEQ ID NO: 1798687 - DNA, 15 bp, Homo sapiens
acacgaatgcaaaag

SEQ ID NO: 1798688 - DNA, 15 bp, Homo sapiens
cacgaatgcaaaagc

SEQ ID NO: 1798689 - DNA, 15 bp, Homo sapiens
acgaatgcaaaagca

SEQ ID NO: 1798690 - DNA, 15 bp, Homo sapiens
cgaatgcaaaagcag

SEQ ID NO: 1798691 - DNA, 15 bp, Homo sapiens
gaatgcaaaagcaga

SEQ ID NO: 1798692 - DNA, 15 bp, Homo sapiens
aatgcaaaagcagaa

SEQ ID NO: 1798693 - DNA, 15 bp, Homo sapiens
atgcaaaagcagaaa

SEQ ID NO: 1798694 - DNA, 15 bp, Homo sapiens
tgcaaaagcagaaaa

SEQ ID NO: 1798695 - DNA, 15 bp, Homo sapiens
gcaaaagcagaaaat

SEQ ID NO: 1798696 - DNA, 15 bp, Homo sapiens
caaaagcagaaaatg

SEQ ID NO: 1798697 - DNA, 15 bp, Homo sapiens
aaaagcagaaaatga

SEQ ID NO: 1798698 - DNA, 15 bp, Homo sapiens
agcagaaaatgaatg

SEQ ID NO: 1798699 - DNA, 15 bp, Homo sapiens
gcagaaaatgaatga

SEQ ID NO: 1798700 - DNA, 15 bp, Homo sapiens
cagaaaatgaatgat

SEQ ID NO: 1798701 - DNA, 15 bp, Homo sapiens
agaaaatgaatgata

SEQ ID NO: 1798702 - DNA, 15 bp, Homo sapiens
gaaaatgaatgatag

SEQ ID NO: 1798703 - DNA, 15 bp, Homo sapiens
aaaatgaatgatagc

SEQ ID NO: 1798704 - DNA, 15 bp, Homo sapiens
aaatgaatgatagca

SEQ ID NO: 1798705 - DNA, 15 bp, Homo sapiens
aatgaatgatagcat

SEQ ID NO: 1798706 - DNA, 15 bp, Homo sapiens
atgaatgatagcatg

SEQ ID NO: 1798707 - DNA, 15 bp, Homo sapiens
tgaatgatagcatgg

SEQ ID NO: 1798708 - DNA, 15 bp, Homo sapiens
gaatgatagcatgga

SEQ ID NO: 1798709 - DNA, 15 bp, Homo sapiens
aatgatagcatggat

SEQ ID NO: 1798710 - DNA, 15 bp, Homo sapiens
atgatagcatggata

SEQ ID NO: 1798711 - DNA, 15 bp, Homo sapiens
tgatagcatggatac

SEQ ID NO: 1798712 - DNA, 15 bp, Homo sapiens
gatagcatggatacc

SEQ ID NO: 1798713 - DNA, 15 bp, Homo sapiens
atagcatggatacct

SEQ ID NO: 1798714 - DNA, 15 bp, Homo sapiens
tagcatggatacctc

SEQ ID NO: 1798715 - DNA, 15 bp, Homo sapiens
agcatggatacctca

SEQ ID NO: 1798716 - DNA, 15 bp, Homo sapiens
gcatggatacctcaa

SEQ ID NO: 1798717 - DNA, 15 bp, Homo sapiens
catggatacctcaaa

SEQ ID NO: 1798718 - DNA, 15 bp, Homo sapiens
atggatacctcaaac

SEQ ID NO: 1798719 - DNA, 15 bp, Homo sapiens
tggatacctcaaaca

SEQ ID NO: 1798720 - DNA, 15 bp, Homo sapiens
ggatacctcaaacaa

SEQ ID NO: 1798721 - DNA, 15 bp, Homo sapiens
gatacctcaaacaag

SEQ ID NO: 1798722 - DNA, 15 bp, Homo sapiens
atacctcaaacaagg

SEQ ID NO: 1798723 - DNA, 15 bp, Homo sapiens
tacctcaaacaagga

SEQ ID NO: 1798724 - DNA, 15 bp, Homo sapiens
acctcaaacaaggaa

SEQ ID NO: 1798725 - DNA, 15 bp, Homo sapiens
cctcaaacaaggaag

SEQ ID NO: 1798726 - DNA, 15 bp, Homo sapiens
ctcaaacaaggaaga

SEQ ID NO: 1798727 - DNA, 15 bp, Homo sapiens
tcaaacaaggaagag

SEQ ID NO: 1798728 - DNA, 15 bp, Homo sapiens
caaacaaggaagaga

SEQ ID NO: 1798729 - DNA, 15 bp, Homo sapiens
aaacaaggaagagaa

SEQ ID NO: 1798730 - DNA, 15 bp, Homo sapiens
aacaaggaagagaaa

SEQ ID NO: 1798731 - DNA, 15 bp, Homo sapiens
acaaggaagagaaat

SEQ ID NO: 1798732 - DNA, 15 bp, Homo sapiens
caaggaagagaaatg

SEQ ID NO: 1798733 - DNA, 15 bp, Homo sapiens
aaggaagagaaatga

SEQ ID NO: 1798734 - DNA, 15 bp, Homo sapiens
aggaagagaaatgag

SEQ ID NO: 1798735 - DNA, 15 bp, Homo sapiens
ggaagagaaatgagg

SEQ ID NO: 1798736 - DNA, 15 bp, Homo sapiens
gaagagaaatgagga

SEQ ID NO: 1798737 - DNA, 15 bp, Homo sapiens
aagagaaatgaggat

SEQ ID NO: 1798738 - DNA, 15 bp, Homo sapiens
agagaaatgaggatc

SEQ ID NO: 1798739 - DNA, 15 bp, Homo sapiens
gagaaatgaggatct

SEQ ID NO: 1798740 - DNA, 15 bp, Homo sapiens
agaaatgaggatctc

SEQ ID NO: 1798741 - DNA, 15 bp, Homo sapiens
gaaatgaggatctca

SEQ ID NO: 1798742 - DNA, 15 bp, Homo sapiens
aaatgaggatctcag

SEQ ID NO: 1798743 - DNA, 15 bp, Homo sapiens
aatgaggatctcagg

SEQ ID NO: 1798744 - DNA, 15 bp, Homo sapiens
atgaggatctcagga

SEQ ID NO: 1798745 - DNA, 15 bp, Homo sapiens
tgaggatctcaggac

SEQ ID NO: 1798746 - DNA, 15 bp, Homo sapiens
gaggatctcaggacc

SEQ ID NO: 1798747 - DNA, 15 bp, Homo sapiens
aggatctcaggacct

SEQ ID NO: 1798748 - DNA, 15 bp, Homo sapiens
ggatctcaggacctt

SEQ ID NO: 1798749 - DNA, 15 bp, Homo sapiens
gatctcaggaccttg

SEQ ID NO: 1798750 - DNA, 15 bp, Homo sapiens
atctcaggaccttgg

SEQ ID NO: 1798751 - DNA, 15 bp, Homo sapiens
tctcaggaccttggt

SEQ ID NO: 1798752 - DNA, 15 bp, Homo sapiens
ctcaggaccttggtg

SEQ ID NO: 1798753 - DNA, 15 bp, Homo sapiens
tcaggaccttggtgg

SEQ ID NO: 1798754 - DNA, 15 bp, Homo sapiens
caggaccttggtgga

SEQ ID NO: 1798755 - DNA, 15 bp, Homo sapiens
aggaccttggtggac

SEQ ID NO: 1798756 - DNA, 15 bp, Homo sapiens
ggaccttggtggaca

SEQ ID NO: 1798757 - DNA, 15 bp, Homo sapiens
gaccttggtggacac

SEQ ID NO: 1798758 - DNA, 15 bp, Homo sapiens
accttggtggacact

SEQ ID NO: 1798759 - DNA, 15 bp, Homo sapiens
ccttggtggacactg

SEQ ID NO: 1798760 - DNA, 15 bp, Homo sapiens
cttggtggacactgt

SEQ ID NO: 1798761 - DNA, 15 bp, Homo sapiens
ttggtggacactgtg

SEQ ID NO: 1798762 - DNA, 15 bp, Homo sapiens
tggtggacactgtgt

SEQ ID NO: 1798763 - DNA, 15 bp, Homo sapiens
ggtggacactgtgta

SEQ ID NO: 1798764 - DNA, 15 bp, Homo sapiens
gtggacactgtgtac

SEQ ID NO: 1798765 - DNA, 15 bp, Homo sapiens
tggacactgtgtaca

SEQ ID NO: 1798766 - DNA, 15 bp, Homo sapiens
ggacactgtgtacac

SEQ ID NO: 1798767 - DNA, 15 bp, Homo sapiens
gacactgtgtacacc

SEQ ID NO: 1798768 - DNA, 15 bp, Homo sapiens
acactgtgtacacct

SEQ ID NO: 1798769 - DNA, 15 bp, Homo sapiens
cactgtgtacacctc

SEQ ID NO: 1798770 - DNA, 15 bp, Homo sapiens
actgtgtacacctct

SEQ ID NO: 1798771 - DNA, 15 bp, Homo sapiens
ctgtgtacacctctg

SEQ ID NO: 1798772 - DNA, 15 bp, Homo sapiens
tgtgtacacctctgg

SEQ ID NO: 1798773 - DNA, 15 bp, Homo sapiens
gtgtacacctctgga

SEQ ID NO: 1798774 - DNA, 15 bp, Homo sapiens
tgtacacctctggat

SEQ ID NO: 1798775 - DNA, 15 bp, Homo sapiens
gtacacctctggatt

SEQ ID NO: 1798776 - DNA, 15 bp, Homo sapiens
tacacctctggattc

SEQ ID NO: 1798777 - DNA, 15 bp, Homo sapiens
acacctctggattca

SEQ ID NO: 1798778 - DNA, 15 bp, Homo sapiens
cacctctggattcat

SEQ ID NO: 1798779 - DNA, 15 bp, Homo sapiens
acctctggattcatt

SEQ ID NO: 1798780 - DNA, 15 bp, Homo sapiens
cctctggattcattg

SEQ ID NO: 1798781 - DNA, 15 bp, Homo sapiens
ctctggattcattgt

SEQ ID NO: 1798782 - DNA, 15 bp, Homo sapiens
tctggattcattgtc

SEQ ID NO: 1798783 - DNA, 15 bp, Homo sapiens
ctggattcattgtct

SEQ ID NO: 1798784 - DNA, 15 bp, Homo sapiens
tggattcattgtctc

SEQ ID NO: 1798785 - DNA, 15 bp, Homo sapiens
ggattcattgtctct

SEQ ID NO: 1798786 - DNA, 15 bp, Homo sapiens
gattcattgtctctc

SEQ ID NO: 1798787 - DNA, 15 bp, Homo sapiens
attcattgtctctca

SEQ ID NO: 1798788 - DNA, 15 bp, Homo sapiens
ttcattgtctctcac

SEQ ID NO: 1798789 - DNA, 15 bp, Homo sapiens
tcattgtctctcaca

SEQ ID NO: 1798790 - DNA, 15 bp, Homo sapiens
cattgtctctcacag

SEQ ID NO: 1798791 - DNA, 15 bp, Homo sapiens
attgtctctcacaga

SEQ ID NO: 1798792 - DNA, 15 bp, Homo sapiens
ttgtctctcacagat

SEQ ID NO: 1798793 - DNA, 15 bp, Homo sapiens
tgtctctcacagatg

SEQ ID NO: 1798794 - DNA, 15 bp, Homo sapiens
gtctctcacagatgt

SEQ ID NO: 1798795 - DNA, 15 bp, Homo sapiens
tctctcacagatgtg

SEQ ID NO: 1798796 - DNA, 15 bp, Homo sapiens
ctctcacagatgtga

SEQ ID NO: 1798797 - DNA, 15 bp, Homo sapiens
tctcacagatgtgac

SEQ ID NO: 1798798 - DNA, 15 bp, Homo sapiens
ctcacagatgtgact

SEQ ID NO: 1798799 - DNA, 15 bp, Homo sapiens
tcacagatgtgactg

SEQ ID NO: 1798800 - DNA, 15 bp, Homo sapiens
cacagatgtgactgt

SEQ ID NO: 1798801 - DNA, 15 bp, Homo sapiens
acagatgtgactgta

SEQ ID NO: 1798802 - DNA, 15 bp, Homo sapiens
cagatgtgactgtat

SEQ ID NO: 1798803 - DNA, 15 bp, Homo sapiens
agatgtgactgtata

SEQ ID NO: 1798804 - DNA, 15 bp, Homo sapiens
gatgtgactgtataa

SEQ ID NO: 1798805 - DNA, 15 bp, Homo sapiens
atgtgactgtataac

SEQ ID NO: 1798806 - DNA, 15 bp, Homo sapiens
tgtgactgtataact

SEQ ID NO: 1798807 - DNA, 15 bp, Homo sapiens
gtgactgtataactt

SEQ ID NO: 1798808 - DNA, 15 bp, Homo sapiens
tgactgtataacttt

SEQ ID NO: 1798809 - DNA, 15 bp, Homo sapiens
gactgtataactttc

SEQ ID NO: 1798810 - DNA, 15 bp, Homo sapiens
actgtataactttcc

SEQ ID NO: 1798811 - DNA, 15 bp, Homo sapiens
ctgtataactttccc

SEQ ID NO: 1798812 - DNA, 15 bp, Homo sapiens
tgtataactttccca

SEQ ID NO: 1798813 - DNA, 15 bp, Homo sapiens
gtataactttcccag

SEQ ID NO: 1798814 - DNA, 15 bp, Homo sapiens
tataactttcccagg

SEQ ID NO: 1798815 - DNA, 15 bp, Homo sapiens
ataactttcccaggt

SEQ ID NO: 1798816 - DNA, 15 bp, Homo sapiens
taactttcccaggtt

SEQ ID NO: 1798817 - DNA, 15 bp, Homo sapiens
aactttcccaggttc

SEQ ID NO: 1798818 - DNA, 15 bp, Homo sapiens
actttcccaggttct

SEQ ID NO: 1798819 - DNA, 15 bp, Homo sapiens
ctttcccaggttctg

SEQ ID NO: 1798820 - DNA, 15 bp, Homo sapiens
tttcccaggttctgt

SEQ ID NO: 1798821 - DNA, 15 bp, Homo sapiens
cccaggttctgttta

SEQ ID NO: 1798822 - DNA, 15 bp, Homo sapiens
ccaggttctgtttat

SEQ ID NO: 1798823 - DNA, 15 bp, Homo sapiens
caggttctgtttatg

SEQ ID NO: 1798824 - DNA, 15 bp, Homo sapiens
aggttctgtttatgg

SEQ ID NO: 1798825 - DNA, 15 bp, Homo sapiens
ggttctgtttatggc

SEQ ID NO: 1798826 - DNA, 15 bp, Homo sapiens
gttctgtttatggcc

SEQ ID NO: 1798827 - DNA, 15 bp, Homo sapiens
ttctgtttatggcca

SEQ ID NO: 1798828 - DNA, 15 bp, Homo sapiens
tctgtttatggccac

SEQ ID NO: 1798829 - DNA, 15 bp, Homo sapiens
ctgtttatggccaca

SEQ ID NO: 1798830 - DNA, 15 bp, Homo sapiens
tgtttatggccacat

SEQ ID NO: 1798831 - DNA, 15 bp, Homo sapiens
gtttatggccacatt

SEQ ID NO: 1798832 - DNA, 15 bp, Homo sapiens
tttatggccacattt

SEQ ID NO: 1798833 - DNA, 15 bp, Homo sapiens
ttatggccacattta

SEQ ID NO: 1798834 - DNA, 15 bp, Homo sapiens
tatggccacatttaa

SEQ ID NO: 1798835 - DNA, 15 bp, Homo sapiens
atggccacatttaat

SEQ ID NO: 1798836 - DNA, 15 bp, Homo sapiens
tggccacatttaata

SEQ ID NO: 1798837 - DNA, 15 bp, Homo sapiens
ggccacatttaatat

SEQ ID NO: 1798838 - DNA, 15 bp, Homo sapiens
gccacatttaatatc

SEQ ID NO: 1798839 - DNA, 15 bp, Homo sapiens
ccacatttaatatct

SEQ ID NO: 1798840 - DNA, 15 bp, Homo sapiens
cacatttaatatctt

SEQ ID NO: 1798841 - DNA, 15 bp, Homo sapiens
acatttaatatcttc

SEQ ID NO: 1798842 - DNA, 15 bp, Homo sapiens
catttaatatcttca

SEQ ID NO: 1798843 - DNA, 15 bp, Homo sapiens
atttaatatcttcag

SEQ ID NO: 1798844 - DNA, 15 bp, Homo sapiens
tttaatatcttcagc

SEQ ID NO: 1798845 - DNA, 15 bp, Homo sapiens
ttaatatcttcagct

SEQ ID NO: 1798846 - DNA, 15 bp, Homo sapiens
taatatcttcagctc

SEQ ID NO: 1798847 - DNA, 15 bp, Homo sapiens
aatatcttcagctct

SEQ ID NO: 1798848 - DNA, 15 bp, Homo sapiens
atatcttcagctctt

SEQ ID NO: 1798849 - DNA, 15 bp, Homo sapiens
tatcttcagctcttt

SEQ ID NO: 1798850 - DNA, 15 bp, Homo sapiens
atcttcagctctttt

SEQ ID NO: 1798851 - DNA, 15 bp, Homo sapiens
tcttcagctcttttt

SEQ ID NO: 1798852 - DNA, 15 bp, Homo sapiens
cttcagctctttttg

SEQ ID NO: 1798853 - DNA, 15 bp, Homo sapiens
ttcagctctttttgt

SEQ ID NO: 1798854 - DNA, 15 bp, Homo sapiens
tcagctctttttgtg

SEQ ID NO: 1798855 - DNA, 15 bp, Homo sapiens
cagctctttttgtgg

SEQ ID NO: 1798856 - DNA, 15 bp, Homo sapiens
agctctttttgtgga

SEQ ID NO: 1798857 - DNA, 15 bp, Homo sapiens
gctctttttgtggat

SEQ ID NO: 1798858 - DNA, 15 bp, Homo sapiens
ctctttttgtggata

SEQ ID NO: 1798859 - DNA, 15 bp, Homo sapiens
tctttttgtggatat

SEQ ID NO: 1798860 - DNA, 15 bp, Homo sapiens
ctttttgtggatata

SEQ ID NO: 1798861 - DNA, 15 bp, Homo sapiens
tttttgtggatataa

SEQ ID NO: 1798862 - DNA, 15 bp, Homo sapiens
ttttgtggatataaa

SEQ ID NO: 1798863 - DNA, 15 bp, Homo sapiens
tttgtggatataaaa

SEQ ID NO: 1798864 - DNA, 15 bp, Homo sapiens
ttgtggatataaaat

SEQ ID NO: 1798865 - DNA, 15 bp, Homo sapiens
tgtggatataaaatg

SEQ ID NO: 1798866 - DNA, 15 bp, Homo sapiens
gtggatataaaatgt

SEQ ID NO: 1798867 - DNA, 15 bp, Homo sapiens
tggatataaaatgtg

SEQ ID NO: 1798868 - DNA, 15 bp, Homo sapiens
ggatataaaatgtgc

SEQ ID NO: 1798869 - DNA, 15 bp, Homo sapiens
gatataaaatgtgca

SEQ ID NO: 1798870 - DNA, 15 bp, Homo sapiens
atataaaatgtgcag

SEQ ID NO: 1798871 - DNA, 15 bp, Homo sapiens
tataaaatgtgcaga

SEQ ID NO: 1798872 - DNA, 15 bp, Homo sapiens
ataaaatgtgcagat

SEQ ID NO: 1798873 - DNA, 15 bp, Homo sapiens
taaaatgtgcagatg

SEQ ID NO: 1798874 - DNA, 15 bp, Homo sapiens
aaaatgtgcagatgc

SEQ ID NO: 1798875 - DNA, 15 bp, Homo sapiens
aaatgtgcagatgca

SEQ ID NO: 1798876 - DNA, 15 bp, Homo sapiens
aatgtgcagatgcaa

SEQ ID NO: 1798877 - DNA, 15 bp, Homo sapiens
atgtgcagatgcaat

SEQ ID NO: 1798878 - DNA, 15 bp, Homo sapiens
tgtgcagatgcaatt

SEQ ID NO: 1798879 - DNA, 15 bp, Homo sapiens
gtgcagatgcaattg

SEQ ID NO: 1798880 - DNA, 15 bp, Homo sapiens
tgcagatgcaattgt

SEQ ID NO: 1798881 - DNA, 15 bp, Homo sapiens
gcagatgcaattgtt

SEQ ID NO: 1798882 - DNA, 15 bp, Homo sapiens
cagatgcaattgttt

SEQ ID NO: 1798883 - DNA, 15 bp, Homo sapiens
agatgcaattgtttg

SEQ ID NO: 1798884 - DNA, 15 bp, Homo sapiens
gatgcaattgtttgg

SEQ ID NO: 1798885 - DNA, 15 bp, Homo sapiens
atgcaattgtttggg

SEQ ID NO: 1798886 - DNA, 15 bp, Homo sapiens
tgcaattgtttgggt

SEQ ID NO: 1798887 - DNA, 15 bp, Homo sapiens
gcaattgtttgggtg

SEQ ID NO: 1798888 - DNA, 15 bp, Homo sapiens
caattgtttgggtga

SEQ ID NO: 1798889 - DNA, 15 bp, Homo sapiens
aattgtttgggtgat

SEQ ID NO: 1798890 - DNA, 15 bp, Homo sapiens
attgtttgggtgatt

SEQ ID NO: 1798891 - DNA, 15 bp, Homo sapiens
ttgtttgggtgattc

SEQ ID NO: 1798892 - DNA, 15 bp, Homo sapiens
tgtttgggtgattcc

SEQ ID NO: 1798893 - DNA, 15 bp, Homo sapiens
gtttgggtgattcct

SEQ ID NO: 1798894 - DNA, 15 bp, Homo sapiens
tttgggtgattccta

SEQ ID NO: 1798895 - DNA, 15 bp, Homo sapiens
ttgggtgattcctaa

SEQ ID NO: 1798896 - DNA, 15 bp, Homo sapiens
tgggtgattcctaag

SEQ ID NO: 1798897 - DNA, 15 bp, Homo sapiens
gggtgattcctaagc

SEQ ID NO: 1798898 - DNA, 15 bp, Homo sapiens
ggtgattcctaagcc

SEQ ID NO: 1798899 - DNA, 15 bp, Homo sapiens
gtgattcctaagcca

SEQ ID NO: 1798900 - DNA, 15 bp, Homo sapiens
tgattcctaagccac

SEQ ID NO: 1798901 - DNA, 15 bp, Homo sapiens
gattcctaagccact

SEQ ID NO: 1798902 - DNA, 15 bp, Homo sapiens
attcctaagccactt

SEQ ID NO: 1798903 - DNA, 15 bp, Homo sapiens
ttcctaagccacttg

SEQ ID NO: 1798904 - DNA, 15 bp, Homo sapiens
tcctaagccacttga

SEQ ID NO: 1798905 - DNA, 15 bp, Homo sapiens
cctaagccacttgaa

SEQ ID NO: 1798906 - DNA, 15 bp, Homo sapiens
ctaagccacttgaaa

SEQ ID NO: 1798907 - DNA, 15 bp, Homo sapiens
taagccacttgaaat

SEQ ID NO: 1798908 - DNA, 15 bp, Homo sapiens
aagccacttgaaatg

SEQ ID NO: 1798909 - DNA, 15 bp, Homo sapiens
agccacttgaaatgt

SEQ ID NO: 1798910 - DNA, 15 bp, Homo sapiens
gccacttgaaatgtt

SEQ ID NO: 1798911 - DNA, 15 bp, Homo sapiens
ccacttgaaatgtta

SEQ ID NO: 1798912 - DNA, 15 bp, Homo sapiens
cacttgaaatgttag

SEQ ID NO: 1798913 - DNA, 15 bp, Homo sapiens
acttgaaatgttagt

SEQ ID NO: 1798914 - DNA, 15 bp, Homo sapiens
cttgaaatgttagtc

SEQ ID NO: 1798915 - DNA, 15 bp, Homo sapiens
ttgaaatgttagtca

SEQ ID NO: 1798916 - DNA, 15 bp, Homo sapiens
tgaaatgttagtcat

SEQ ID NO: 1798917 - DNA, 15 bp, Homo sapiens
gaaatgttagtcatt

SEQ ID NO: 1798918 - DNA, 15 bp, Homo sapiens
aaatgttagtcattg

SEQ ID NO: 1798919 - DNA, 15 bp, Homo sapiens
aatgttagtcattgt

SEQ ID NO: 1798920 - DNA, 15 bp, Homo sapiens
atgttagtcattgtt

SEQ ID NO: 1798921 - DNA, 15 bp, Homo sapiens
tgttagtcattgtta

SEQ ID NO: 1798922 - DNA, 15 bp, Homo sapiens
gttagtcattgttat

SEQ ID NO: 1798923 - DNA, 15 bp, Homo sapiens
ttagtcattgttatt

SEQ ID NO: 1798924 - DNA, 15 bp, Homo sapiens
tagtcattgttattt

SEQ ID NO: 1798925 - DNA, 15 bp, Homo sapiens
agtcattgttattta

SEQ ID NO: 1798926 - DNA, 15 bp, Homo sapiens
gtcattgttatttat

SEQ ID NO: 1798927 - DNA, 15 bp, Homo sapiens
tcattgttatttata

SEQ ID NO: 1798928 - DNA, 15 bp, Homo sapiens
cattgttatttatac

SEQ ID NO: 1798929 - DNA, 15 bp, Homo sapiens
attgttatttataca

SEQ ID NO: 1798930 - DNA, 15 bp, Homo sapiens
ttgttatttatacaa

SEQ ID NO: 1798931 - DNA, 15 bp, Homo sapiens
tgttatttatacaag

SEQ ID NO: 1798932 - DNA, 15 bp, Homo sapiens
gttatttatacaaga

SEQ ID NO: 1798933 - DNA, 15 bp, Homo sapiens
ttatttatacaagat

SEQ ID NO: 1798934 - DNA, 15 bp, Homo sapiens
tatttatacaagatt

SEQ ID NO: 1798935 - DNA, 15 bp, Homo sapiens
atttatacaagattg

SEQ ID NO: 1798936 - DNA, 15 bp, Homo sapiens
tttatacaagattga

SEQ ID NO: 1798937 - DNA, 15 bp, Homo sapiens
ttatacaagattgaa

SEQ ID NO: 1798938 - DNA, 15 bp, Homo sapiens
tatacaagattgaaa

SEQ ID NO: 1798939 - DNA, 15 bp, Homo sapiens
atacaagattgaaaa

SEQ ID NO: 1798940 - DNA, 15 bp, Homo sapiens
tacaagattgaaaat

SEQ ID NO: 1798941 - DNA, 15 bp, Homo sapiens
acaagattgaaaatc

SEQ ID NO: 1798942 - DNA, 15 bp, Homo sapiens
caagattgaaaatct

SEQ ID NO: 1798943 - DNA, 15 bp, Homo sapiens
aagattgaaaatctt

SEQ ID NO: 1798944 - DNA, 15 bp, Homo sapiens
agattgaaaatcttg

SEQ ID NO: 1798945 - DNA, 15 bp, Homo sapiens
gattgaaaatcttgt

SEQ ID NO: 1798946 - DNA, 15 bp, Homo sapiens
attgaaaatcttgtg

SEQ ID NO: 1798947 - DNA, 15 bp, Homo sapiens
ttgaaaatcttgtgt

SEQ ID NO: 1798948 - DNA, 15 bp, Homo sapiens
tgaaaatcttgtgta

SEQ ID NO: 1798949 - DNA, 15 bp, Homo sapiens
gaaaatcttgtgtaa

SEQ ID NO: 1798950 - DNA, 15 bp, Homo sapiens
aaaatcttgtgtaaa

SEQ ID NO: 1798951 - DNA, 15 bp, Homo sapiens
aaatcttgtgtaaat

SEQ ID NO: 1798952 - DNA, 15 bp, Homo sapiens
aatcttgtgtaaatc

SEQ ID NO: 1798953 - DNA, 15 bp, Homo sapiens
atcttgtgtaaatcc

SEQ ID NO: 1798954 - DNA, 15 bp, Homo sapiens
tcttgtgtaaatcct

SEQ ID NO: 1798955 - DNA, 15 bp, Homo sapiens
cttgtgtaaatcctg

SEQ ID NO: 1798956 - DNA, 15 bp, Homo sapiens
ttgtgtaaatcctgc

SEQ ID NO: 1798957 - DNA, 15 bp, Homo sapiens
tgtgtaaatcctgcc

SEQ ID NO: 1798958 - DNA, 15 bp, Homo sapiens
gtgtaaatcctgcca

SEQ ID NO: 1798959 - DNA, 15 bp, Homo sapiens
tgtaaatcctgccat

SEQ ID NO: 1798960 - DNA, 15 bp, Homo sapiens
gtaaatcctgccatt

SEQ ID NO: 1798961 - DNA, 15 bp, Homo sapiens
taaatcctgccattt

SEQ ID NO: 1798962 - DNA, 15 bp, Homo sapiens
aaatcctgccattta

SEQ ID NO: 1798963 - DNA, 15 bp, Homo sapiens
aatcctgccatttaa

SEQ ID NO: 1798964 - DNA, 15 bp, Homo sapiens
atcctgccatttaaa

SEQ ID NO: 1798965 - DNA, 15 bp, Homo sapiens
tcctgccatttaaaa

SEQ ID NO: 1798966 - DNA, 15 bp, Homo sapiens
cctgccatttaaaaa

SEQ ID NO: 1798967 - DNA, 15 bp, Homo sapiens
ctgccatttaaaaag

SEQ ID NO: 1798968 - DNA, 15 bp, Homo sapiens
tgccatttaaaaagt

SEQ ID NO: 1798969 - DNA, 15 bp, Homo sapiens
gccatttaaaaagtt

SEQ ID NO: 1798970 - DNA, 15 bp, Homo sapiens
ccatttaaaaagttg

SEQ ID NO: 1798971 - DNA, 15 bp, Homo sapiens
catttaaaaagttgt

SEQ ID NO: 1798972 - DNA, 15 bp, Homo sapiens
atttaaaaagttgta

SEQ ID NO: 1798973 - DNA, 15 bp, Homo sapiens
tttaaaaagttgtag

SEQ ID NO: 1798974 - DNA, 15 bp, Homo sapiens
ttaaaaagttgtagc

SEQ ID NO: 1798975 - DNA, 15 bp, Homo sapiens
taaaaagttgtagca

SEQ ID NO: 1798976 - DNA, 15 bp, Homo sapiens
aaaaagttgtagcag

SEQ ID NO: 1798977 - DNA, 15 bp, Homo sapiens
aaaagttgtagcaga

SEQ ID NO: 1798978 - DNA, 15 bp, Homo sapiens
aaagttgtagcagat

SEQ ID NO: 1798979 - DNA, 15 bp, Homo sapiens
aagttgtagcagatt

SEQ ID NO: 1798980 - DNA, 15 bp, Homo sapiens
agttgtagcagattg

SEQ ID NO: 1798981 - DNA, 15 bp, Homo sapiens
gttgtagcagattgt

SEQ ID NO: 1798982 - DNA, 15 bp, Homo sapiens
ttgtagcagattgtt

SEQ ID NO: 1798983 - DNA, 15 bp, Homo sapiens
tgtagcagattgttt

SEQ ID NO: 1798984 - DNA, 15 bp, Homo sapiens
gtagcagattgtttc

SEQ ID NO: 1798985 - DNA, 15 bp, Homo sapiens
tagcagattgtttcc

SEQ ID NO: 1798986 - DNA, 15 bp, Homo sapiens
agcagattgtttcct

SEQ ID NO: 1798987 - DNA, 15 bp, Homo sapiens
gcagattgtttcctc

SEQ ID NO: 1798988 - DNA, 15 bp, Homo sapiens
cagattgtttcctct

SEQ ID NO: 1798989 - DNA, 15 bp, Homo sapiens
agattgtttcctctt

SEQ ID NO: 1798990 - DNA, 15 bp, Homo sapiens
gattgtttcctcttc

SEQ ID NO: 1798991 - DNA, 15 bp, Homo sapiens
attgtttcctcttcc

SEQ ID NO: 1798992 - DNA, 15 bp, Homo sapiens
ttgtttcctcttcca

SEQ ID NO: 1798993 - DNA, 15 bp, Homo sapiens
tgtttcctcttccaa

SEQ ID NO: 1798994 - DNA, 15 bp, Homo sapiens
gtttcctcttccaaa

SEQ ID NO: 1798995 - DNA, 15 bp, Homo sapiens
tttcctcttccaaag

SEQ ID NO: 1798996 - DNA, 15 bp, Homo sapiens
ttcctcttccaaagt

SEQ ID NO: 1798997 - DNA, 15 bp, Homo sapiens
tcctcttccaaagta

SEQ ID NO: 1798998 - DNA, 15 bp, Homo sapiens
cctcttccaaagtaa

SEQ ID NO: 1798999 - DNA, 15 bp, Homo sapiens
ctcttccaaagtaaa

SEQ ID NO: 1799000 - DNA, 15 bp, Homo sapiens
tcttccaaagtaaaa

SEQ ID NO: 1799001 - DNA, 15 bp, Homo sapiens
cttccaaagtaaaat

SEQ ID NO: 1799002 - DNA, 15 bp, Homo sapiens
ttccaaagtaaaatt

SEQ ID NO: 1799003 - DNA, 15 bp, Homo sapiens
tccaaagtaaaattg

SEQ ID NO: 1799004 - DNA, 15 bp, Homo sapiens
ccaaagtaaaattgc

SEQ ID NO: 1799005 - DNA, 15 bp, Homo sapiens
caaagtaaaattgct

SEQ ID NO: 1799006 - DNA, 15 bp, Homo sapiens
aaagtaaaattgctg

SEQ ID NO: 1799007 - DNA, 15 bp, Homo sapiens
aagtaaaattgctgt

SEQ ID NO: 1799008 - DNA, 15 bp, Homo sapiens
agtaaaattgctgtg

SEQ ID NO: 1799009 - DNA, 15 bp, Homo sapiens
gtaaaattgctgtgc

SEQ ID NO: 1799010 - DNA, 15 bp, Homo sapiens
taaaattgctgtgct

SEQ ID NO: 1799011 - DNA, 15 bp, Homo sapiens
aaaattgctgtgctt

SEQ ID NO: 1799012 - DNA, 15 bp, Homo sapiens
aaattgctgtgcttt

SEQ ID NO: 1799013 - DNA, 15 bp, Homo sapiens
aattgctgtgcttta

SEQ ID NO: 1799014 - DNA, 15 bp, Homo sapiens
attgctgtgctttat

SEQ ID NO: 1799015 - DNA, 15 bp, Homo sapiens
ttgctgtgctttatg

SEQ ID NO: 1799016 - DNA, 15 bp, Homo sapiens
tgctgtgctttatgg

SEQ ID NO: 1799017 - DNA, 15 bp, Homo sapiens
gctgtgctttatgga

SEQ ID NO: 1799018 - DNA, 15 bp, Homo sapiens
ctgtgctttatggat

SEQ ID NO: 1799019 - DNA, 15 bp, Homo sapiens
tgtgctttatggata

SEQ ID NO: 1799020 - DNA, 15 bp, Homo sapiens
gtgctttatggatag

SEQ ID NO: 1799021 - DNA, 15 bp, Homo sapiens
tgctttatggatagt

SEQ ID NO: 1799022 - DNA, 15 bp, Homo sapiens
gctttatggatagta

SEQ ID NO: 1799023 - DNA, 15 bp, Homo sapiens
ctttatggatagtaa

SEQ ID NO: 1799024 - DNA, 15 bp, Homo sapiens
tttatggatagtaag

SEQ ID NO: 1799025 - DNA, 15 bp, Homo sapiens
ttatggatagtaaga

SEQ ID NO: 1799026 - DNA, 15 bp, Homo sapiens
tatggatagtaagaa

SEQ ID NO: 1799027 - DNA, 15 bp, Homo sapiens
atggatagtaagaat

SEQ ID NO: 1799028 - DNA, 15 bp, Homo sapiens
tggatagtaagaatg

SEQ ID NO: 1799029 - DNA, 15 bp, Homo sapiens
ggatagtaagaatgg

SEQ ID NO: 1799030 - DNA, 15 bp, Homo sapiens
gatagtaagaatggc

SEQ ID NO: 1799031 - DNA, 15 bp, Homo sapiens
atagtaagaatggcc

SEQ ID NO: 1799032 - DNA, 15 bp, Homo sapiens
tagtaagaatggccc

SEQ ID NO: 1799033 - DNA, 15 bp, Homo sapiens
agtaagaatggccct

SEQ ID NO: 1799034 - DNA, 15 bp, Homo sapiens
gtaagaatggcccta

SEQ ID NO: 1799035 - DNA, 15 bp, Homo sapiens
taagaatggccctag

SEQ ID NO: 1799036 - DNA, 15 bp, Homo sapiens
aagaatggccctaga

SEQ ID NO: 1799037 - DNA, 15 bp, Homo sapiens
agaatggccctagag

SEQ ID NO: 1799038 - DNA, 15 bp, Homo sapiens
gaatggccctagagt

SEQ ID NO: 1799039 - DNA, 15 bp, Homo sapiens
aatggccctagagtg

SEQ ID NO: 1799040 - DNA, 15 bp, Homo sapiens
atggccctagagtgg

SEQ ID NO: 1799041 - DNA, 15 bp, Homo sapiens
tggccctagagtggg

SEQ ID NO: 1799042 - DNA, 15 bp, Homo sapiens
ggccctagagtggga

SEQ ID NO: 1799043 - DNA, 15 bp, Homo sapiens
gccctagagtgggag

SEQ ID NO: 1799044 - DNA, 15 bp, Homo sapiens
ccctagagtgggagt

SEQ ID NO: 1799045 - DNA, 15 bp, Homo sapiens
cctagagtgggagtc

SEQ ID NO: 1799046 - DNA, 15 bp, Homo sapiens
ctagagtgggagtcc

SEQ ID NO: 1799047 - DNA, 15 bp, Homo sapiens
tagagtgggagtcct

SEQ ID NO: 1799048 - DNA, 15 bp, Homo sapiens
agagtgggagtcctg

SEQ ID NO: 1799049 - DNA, 15 bp, Homo sapiens
gagtgggagtcctga

SEQ ID NO: 1799050 - DNA, 15 bp, Homo sapiens
agtgggagtcctgat

SEQ ID NO: 1799051 - DNA, 15 bp, Homo sapiens
gtgggagtcctgata

SEQ ID NO: 1799052 - DNA, 15 bp, Homo sapiens
tgggagtcctgataa

SEQ ID NO: 1799053 - DNA, 15 bp, Homo sapiens
gggagtcctgataac

SEQ ID NO: 1799054 - DNA, 15 bp, Homo sapiens
ggagtcctgataacc

SEQ ID NO: 1799055 - DNA, 15 bp, Homo sapiens
gagtcctgataaccc

SEQ ID NO: 1799056 - DNA, 15 bp, Homo sapiens
agtcctgataaccca

SEQ ID NO: 1799057 - DNA, 15 bp, Homo sapiens
gtcctgataacccag

SEQ ID NO: 1799058 - DNA, 15 bp, Homo sapiens
tcctgataacccagg

SEQ ID NO: 1799059 - DNA, 15 bp, Homo sapiens
cctgataacccaggc

SEQ ID NO: 1799060 - DNA, 15 bp, Homo sapiens
ctgataacccaggcc

SEQ ID NO: 1799061 - DNA, 15 bp, Homo sapiens
tgataacccaggcct

SEQ ID NO: 1799062 - DNA, 15 bp, Homo sapiens
gataacccaggcctg

SEQ ID NO: 1799063 - DNA, 15 bp, Homo sapiens
ataacccaggcctgt

SEQ ID NO: 1799064 - DNA, 15 bp, Homo sapiens
taacccaggcctgtc

SEQ ID NO: 1799065 - DNA, 15 bp, Homo sapiens
aacccaggcctgtct

SEQ ID NO: 1799066 - DNA, 15 bp, Homo sapiens
acccaggcctgtctg

SEQ ID NO: 1799067 - DNA, 15 bp, Homo sapiens
cccaggcctgtctga

SEQ ID NO: 1799068 - DNA, 15 bp, Homo sapiens
ccaggcctgtctgac

SEQ ID NO: 1799069 - DNA, 15 bp, Homo sapiens
caggcctgtctgact

SEQ ID NO: 1799070 - DNA, 15 bp, Homo sapiens
aggcctgtctgacta

SEQ ID NO: 1799071 - DNA, 15 bp, Homo sapiens
ggcctgtctgactac

SEQ ID NO: 1799072 - DNA, 15 bp, Homo sapiens
gcctgtctgactact

SEQ ID NO: 1799073 - DNA, 15 bp, Homo sapiens
cctgtctgactactt

SEQ ID NO: 1799074 - DNA, 15 bp, Homo sapiens
ctgtctgactacttt

SEQ ID NO: 1799075 - DNA, 15 bp, Homo sapiens
tgtctgactactttg

SEQ ID NO: 1799076 - DNA, 15 bp, Homo sapiens
gtctgactactttgc

SEQ ID NO: 1799077 - DNA, 15 bp, Homo sapiens
tctgactactttgcc

SEQ ID NO: 1799078 - DNA, 15 bp, Homo sapiens
ctgactactttgcct

SEQ ID NO: 1799079 - DNA, 15 bp, Homo sapiens
tgactactttgcctt

SEQ ID NO: 1799080 - DNA, 15 bp, Homo sapiens
gactactttgccttc

SEQ ID NO: 1799081 - DNA, 15 bp, Homo sapiens
actactttgccttct

SEQ ID NO: 1799082 - DNA, 15 bp, Homo sapiens
ctactttgccttctt

SEQ ID NO: 1799083 - DNA, 15 bp, Homo sapiens
tactttgccttcttt

SEQ ID NO: 1799084 - DNA, 15 bp, Homo sapiens
actttgccttctttt

SEQ ID NO: 1799085 - DNA, 15 bp, Homo sapiens
ctttgccttcttttg

SEQ ID NO: 1799086 - DNA, 15 bp, Homo sapiens
tttgccttcttttgt

SEQ ID NO: 1799087 - DNA, 15 bp, Homo sapiens
ttgccttcttttgta

SEQ ID NO: 1799088 - DNA, 15 bp, Homo sapiens
tgccttcttttgtag

SEQ ID NO: 1799089 - DNA, 15 bp, Homo sapiens
gccttcttttgtagc

SEQ ID NO: 1799090 - DNA, 15 bp, Homo sapiens
ccttcttttgtagca

SEQ ID NO: 1799091 - DNA, 15 bp, Homo sapiens
cttcttttgtagcat

SEQ ID NO: 1799092 - DNA, 15 bp, Homo sapiens
ttcttttgtagcata

SEQ ID NO: 1799093 - DNA, 15 bp, Homo sapiens
tcttttgtagcatat

SEQ ID NO: 1799094 - DNA, 15 bp, Homo sapiens
cttttgtagcatata

SEQ ID NO: 1799095 - DNA, 15 bp, Homo sapiens
ttttgtagcatatag

SEQ ID NO: 1799096 - DNA, 15 bp, Homo sapiens
tttgtagcatatagg

SEQ ID NO: 1799097 - DNA, 15 bp, Homo sapiens
ttgtagcatataggt

SEQ ID NO: 1799098 - DNA, 15 bp, Homo sapiens
tgtagcatataggtg

SEQ ID NO: 1799099 - DNA, 15 bp, Homo sapiens
gtagcatataggtga

SEQ ID NO: 1799100 - DNA, 15 bp, Homo sapiens
tagcatataggtgat

SEQ ID NO: 1799101 - DNA, 15 bp, Homo sapiens
agcatataggtgatg

SEQ ID NO: 1799102 - DNA, 15 bp, Homo sapiens
gcatataggtgatgt

SEQ ID NO: 1799103 - DNA, 15 bp, Homo sapiens
catataggtgatgtt

SEQ ID NO: 1799104 - DNA, 15 bp, Homo sapiens
atataggtgatgttt

SEQ ID NO: 1799105 - DNA, 15 bp, Homo sapiens
tataggtgatgtttg

SEQ ID NO: 1799106 - DNA, 15 bp, Homo sapiens
ataggtgatgtttgc

SEQ ID NO: 1799107 - DNA, 15 bp, Homo sapiens
taggtgatgtttgct

SEQ ID NO: 1799108 - DNA, 15 bp, Homo sapiens
aggtgatgtttgctc

SEQ ID NO: 1799109 - DNA, 15 bp, Homo sapiens
ggtgatgtttgctct

SEQ ID NO: 1799110 - DNA, 15 bp, Homo sapiens
gtgatgtttgctctt

SEQ ID NO: 1799111 - DNA, 15 bp, Homo sapiens
tgatgtttgctcttg

SEQ ID NO: 1799112 - DNA, 15 bp, Homo sapiens
gatgtttgctcttgt

SEQ ID NO: 1799113 - DNA, 15 bp, Homo sapiens
atgtttgctcttgtt

SEQ ID NO: 1799114 - DNA, 15 bp, Homo sapiens
tgtttgctcttgttt

SEQ ID NO: 1799115 - DNA, 15 bp, Homo sapiens
gtttgctcttgtttt

SEQ ID NO: 1799116 - DNA, 15 bp, Homo sapiens
tttgctcttgttttt

SEQ ID NO: 1799117 - DNA, 15 bp, Homo sapiens
ttgctcttgttttta

SEQ ID NO: 1799118 - DNA, 15 bp, Homo sapiens
tgctcttgtttttat

SEQ ID NO: 1799119 - DNA, 15 bp, Homo sapiens
gctcttgtttttatt

SEQ ID NO: 1799120 - DNA, 15 bp, Homo sapiens
ctcttgtttttatta

SEQ ID NO: 1799121 - DNA, 15 bp, Homo sapiens
tcttgtttttattaa

SEQ ID NO: 1799122 - DNA, 15 bp, Homo sapiens
cttgtttttattaat

SEQ ID NO: 1799123 - DNA, 15 bp, Homo sapiens
ttgtttttattaatt

SEQ ID NO: 1799124 - DNA, 15 bp, Homo sapiens
tgtttttattaattt

SEQ ID NO: 1799125 - DNA, 15 bp, Homo sapiens
gtttttattaattta

SEQ ID NO: 1799126 - DNA, 15 bp, Homo sapiens
tttttattaatttat

SEQ ID NO: 1799127 - DNA, 15 bp, Homo sapiens
ttttattaatttata

SEQ ID NO: 1799128 - DNA, 15 bp, Homo sapiens
tttattaatttatat

SEQ ID NO: 1799129 - DNA, 15 bp, Homo sapiens
ttattaatttatatg

SEQ ID NO: 1799130 - DNA, 15 bp, Homo sapiens
tattaatttatatgt

SEQ ID NO: 1799131 - DNA, 15 bp, Homo sapiens
attaatttatatgta

SEQ ID NO: 1799132 - DNA, 15 bp, Homo sapiens
ttaatttatatgtat

SEQ ID NO: 1799133 - DNA, 15 bp, Homo sapiens
taatttatatgtata

SEQ ID NO: 1799134 - DNA, 15 bp, Homo sapiens
aatttatatgtatat

SEQ ID NO: 1799135 - DNA, 15 bp, Homo sapiens
atttatatgtatatt

SEQ ID NO: 1799136 - DNA, 15 bp, Homo sapiens
tttatatgtatattt

SEQ ID NO: 1799137 - DNA, 15 bp, Homo sapiens
ttatatgtatatttt

SEQ ID NO: 1799138 - DNA, 15 bp, Homo sapiens
tatatgtatattttt

SEQ ID NO: 1799139 - DNA, 15 bp, Homo sapiens
atatgtatatttttt

SEQ ID NO: 1799140 - DNA, 15 bp, Homo sapiens
tatgtatattttttt

SEQ ID NO: 1799141 - DNA, 15 bp, Homo sapiens
atgtatattttttta

SEQ ID NO: 1799142 - DNA, 15 bp, Homo sapiens
tgtatatttttttaa

SEQ ID NO: 1799143 - DNA, 15 bp, Homo sapiens
gtatatttttttaat

SEQ ID NO: 1799144 - DNA, 15 bp, Homo sapiens
tatatttttttaatt

SEQ ID NO: 1799145 - DNA, 15 bp, Homo sapiens
atatttttttaattt

SEQ ID NO: 1799146 - DNA, 15 bp, Homo sapiens
tatttttttaattta

SEQ ID NO: 1799147 - DNA, 15 bp, Homo sapiens
atttttttaatttaa

SEQ ID NO: 1799148 - DNA, 15 bp, Homo sapiens
ttttttaatttaaca

SEQ ID NO: 1799149 - DNA, 15 bp, Homo sapiens
tttttaatttaacat

SEQ ID NO: 1799150 - DNA, 15 bp, Homo sapiens
ttttaatttaacatg

SEQ ID NO: 1799151 - DNA, 15 bp, Homo sapiens
tttaatttaacatga

SEQ ID NO: 1799152 - DNA, 15 bp, Homo sapiens
ttaatttaacatgaa

SEQ ID NO: 1799153 - DNA, 15 bp, Homo sapiens
taatttaacatgaac

SEQ ID NO: 1799154 - DNA, 15 bp, Homo sapiens
aatttaacatgaaca

SEQ ID NO: 1799155 - DNA, 15 bp, Homo sapiens
atttaacatgaacac

SEQ ID NO: 1799156 - DNA, 15 bp, Homo sapiens
tttaacatgaacacc

SEQ ID NO: 1799157 - DNA, 15 bp, Homo sapiens
ttaacatgaacaccc

SEQ ID NO: 1799158 - DNA, 15 bp, Homo sapiens
taacatgaacaccct

SEQ ID NO: 1799159 - DNA, 15 bp, Homo sapiens
aacatgaacaccctt

SEQ ID NO: 1799160 - DNA, 15 bp, Homo sapiens
acatgaacaccctta

SEQ ID NO: 1799161 - DNA, 15 bp, Homo sapiens
catgaacacccttag

SEQ ID NO: 1799162 - DNA, 15 bp, Homo sapiens
atgaacacccttaga

SEQ ID NO: 1799163 - DNA, 15 bp, Homo sapiens
tgaacacccttagaa

SEQ ID NO: 1799164 - DNA, 15 bp, Homo sapiens
gaacacccttagaaa

SEQ ID NO: 1799165 - DNA, 15 bp, Homo sapiens
aacacccttagaaaa

SEQ ID NO: 1799166 - DNA, 15 bp, Homo sapiens
acacccttagaaaat

SEQ ID NO: 1799167 - DNA, 15 bp, Homo sapiens
cacccttagaaaatg

SEQ ID NO: 1799168 - DNA, 15 bp, Homo sapiens
acccttagaaaatgt

SEQ ID NO: 1799169 - DNA, 15 bp, Homo sapiens
cccttagaaaatgtg

SEQ ID NO: 1799170 - DNA, 15 bp, Homo sapiens
ccttagaaaatgtgt

SEQ ID NO: 1799171 - DNA, 15 bp, Homo sapiens
cttagaaaatgtgtc

SEQ ID NO: 1799172 - DNA, 15 bp, Homo sapiens
ttagaaaatgtgtcc

SEQ ID NO: 1799173 - DNA, 15 bp, Homo sapiens
tagaaaatgtgtcct

SEQ ID NO: 1799174 - DNA, 15 bp, Homo sapiens
agaaaatgtgtccta

SEQ ID NO: 1799175 - DNA, 15 bp, Homo sapiens
gaaaatgtgtcctat

SEQ ID NO: 1799176 - DNA, 15 bp, Homo sapiens
aaaatgtgtcctatc

SEQ ID NO: 1799177 - DNA, 15 bp, Homo sapiens
aaatgtgtcctatct

SEQ ID NO: 1799178 - DNA, 15 bp, Homo sapiens
aatgtgtcctatcta

SEQ ID NO: 1799179 - DNA, 15 bp, Homo sapiens
atgtgtcctatctat

SEQ ID NO: 1799180 - DNA, 15 bp, Homo sapiens
tgtgtcctatctatc

SEQ ID NO: 1799181 - DNA, 15 bp, Homo sapiens
gtgtcctatctatct

SEQ ID NO: 1799182 - DNA, 15 bp, Homo sapiens
tgtcctatctatctt

SEQ ID NO: 1799183 - DNA, 15 bp, Homo sapiens
gtcctatctatcttc

SEQ ID NO: 1799184 - DNA, 15 bp, Homo sapiens
tcctatctatcttcc

SEQ ID NO: 1799185 - DNA, 15 bp, Homo sapiens
cctatctatcttcca

SEQ ID NO: 1799186 - DNA, 15 bp, Homo sapiens
ctatctatcttccaa

SEQ ID NO: 1799187 - DNA, 15 bp, Homo sapiens
tatctatcttccaaa

SEQ ID NO: 1799188 - DNA, 15 bp, Homo sapiens
atctatcttccaaat

SEQ ID NO: 1799189 - DNA, 15 bp, Homo sapiens
tctatcttccaaatg

SEQ ID NO: 1799190 - DNA, 15 bp, Homo sapiens
ctatcttccaaatgc

SEQ ID NO: 1799191 - DNA, 15 bp, Homo sapiens
tatcttccaaatgca

SEQ ID NO: 1799192 - DNA, 15 bp, Homo sapiens
atcttccaaatgcaa

SEQ ID NO: 1799193 - DNA, 15 bp, Homo sapiens
tcttccaaatgcaat

SEQ ID NO: 1799194 - DNA, 15 bp, Homo sapiens
cttccaaatgcaatt

SEQ ID NO: 1799195 - DNA, 15 bp, Homo sapiens
ttccaaatgcaattt

SEQ ID NO: 1799196 - DNA, 15 bp, Homo sapiens
tccaaatgcaatttg

SEQ ID NO: 1799197 - DNA, 15 bp, Homo sapiens
ccaaatgcaatttga

SEQ ID NO: 1799198 - DNA, 15 bp, Homo sapiens
caaatgcaatttgat

SEQ ID NO: 1799199 - DNA, 15 bp, Homo sapiens
aaatgcaatttgatt

SEQ ID NO: 1799200 - DNA, 15 bp, Homo sapiens
aatgcaatttgattg

SEQ ID NO: 1799201 - DNA, 15 bp, Homo sapiens
atgcaatttgattga

SEQ ID NO: 1799202 - DNA, 15 bp, Homo sapiens
tgcaatttgattgac

SEQ ID NO: 1799203 - DNA, 15 bp, Homo sapiens
gcaatttgattgact

SEQ ID NO: 1799204 - DNA, 15 bp, Homo sapiens
caatttgattgactg

SEQ ID NO: 1799205 - DNA, 15 bp, Homo sapiens
aatttgattgactgc

SEQ ID NO: 1799206 - DNA, 15 bp, Homo sapiens
atttgattgactgcc

SEQ ID NO: 1799207 - DNA, 15 bp, Homo sapiens
tttgattgactgccc

SEQ ID NO: 1799208 - DNA, 15 bp, Homo sapiens
ttgattgactgccca

SEQ ID NO: 1799209 - DNA, 15 bp, Homo sapiens
tgattgactgcccat

SEQ ID NO: 1799210 - DNA, 15 bp, Homo sapiens
gattgactgcccatt

SEQ ID NO: 1799211 - DNA, 15 bp, Homo sapiens
attgactgcccattc

SEQ ID NO: 1799212 - DNA, 15 bp, Homo sapiens
ttgactgcccattca

SEQ ID NO: 1799213 - DNA, 15 bp, Homo sapiens
tgactgcccattcac

SEQ ID NO: 1799214 - DNA, 15 bp, Homo sapiens
gactgcccattcacc

SEQ ID NO: 1799215 - DNA, 15 bp, Homo sapiens
actgcccattcacca

SEQ ID NO: 1799216 - DNA, 15 bp, Homo sapiens
ctgcccattcaccaa

SEQ ID NO: 1799217 - DNA, 15 bp, Homo sapiens
tgcccattcaccaaa

SEQ ID NO: 1799218 - DNA, 15 bp, Homo sapiens
gcccattcaccaaaa

SEQ ID NO: 1799219 - DNA, 15 bp, Homo sapiens
cccattcaccaaaat

SEQ ID NO: 1799220 - DNA, 15 bp, Homo sapiens
ccattcaccaaaatt

SEQ ID NO: 1799221 - DNA, 15 bp, Homo sapiens
cattcaccaaaatta

SEQ ID NO: 1799222 - DNA, 15 bp, Homo sapiens
attcaccaaaattat

SEQ ID NO: 1799223 - DNA, 15 bp, Homo sapiens
ttcaccaaaattatc

SEQ ID NO: 1799224 - DNA, 15 bp, Homo sapiens
tcaccaaaattatcc

SEQ ID NO: 1799225 - DNA, 15 bp, Homo sapiens
caccaaaattatcct

SEQ ID NO: 1799226 - DNA, 15 bp, Homo sapiens
accaaaattatcctg

SEQ ID NO: 1799227 - DNA, 15 bp, Homo sapiens
ccaaaattatcctga

SEQ ID NO: 1799228 - DNA, 15 bp, Homo sapiens
caaaattatcctgaa

SEQ ID NO: 1799229 - DNA, 15 bp, Homo sapiens
aaaattatcctgaac

SEQ ID NO: 1799230 - DNA, 15 bp, Homo sapiens
aaattatcctgaact

SEQ ID NO: 1799231 - DNA, 15 bp, Homo sapiens
aattatcctgaactc

SEQ ID NO: 1799232 - DNA, 15 bp, Homo sapiens
attatcctgaactct

SEQ ID NO: 1799233 - DNA, 15 bp, Homo sapiens
ttatcctgaactctt

SEQ ID NO: 1799234 - DNA, 15 bp, Homo sapiens
tatcctgaactcttc

SEQ ID NO: 1799235 - DNA, 15 bp, Homo sapiens
atcctgaactcttct

SEQ ID NO: 1799236 - DNA, 15 bp, Homo sapiens
tcctgaactcttctg

SEQ ID NO: 1799237 - DNA, 15 bp, Homo sapiens
cctgaactcttctgc

SEQ ID NO: 1799238 - DNA, 15 bp, Homo sapiens
ctgaactcttctgca

SEQ ID NO: 1799239 - DNA, 15 bp, Homo sapiens
tgaactcttctgcaa

SEQ ID NO: 1799240 - DNA, 15 bp, Homo sapiens
gaactcttctgcaaa

SEQ ID NO: 1799241 - DNA, 15 bp, Homo sapiens
aactcttctgcaaaa

SEQ ID NO: 1799242 - DNA, 15 bp, Homo sapiens
actcttctgcaaaaa

SEQ ID NO: 1799243 - DNA, 15 bp, Homo sapiens
ctcttctgcaaaaat

SEQ ID NO: 1799244 - DNA, 15 bp, Homo sapiens
tcttctgcaaaaatg

SEQ ID NO: 1799245 - DNA, 15 bp, Homo sapiens
cttctgcaaaaatgg

SEQ ID NO: 1799246 - DNA, 15 bp, Homo sapiens
ttctgcaaaaatgga

SEQ ID NO: 1799247 - DNA, 15 bp, Homo sapiens
tctgcaaaaatggat

SEQ ID NO: 1799248 - DNA, 15 bp, Homo sapiens
ctgcaaaaatggata

SEQ ID NO: 1799249 - DNA, 15 bp, Homo sapiens
tgcaaaaatggatat

SEQ ID NO: 1799250 - DNA, 15 bp, Homo sapiens
gcaaaaatggatatt

SEQ ID NO: 1799251 - DNA, 15 bp, Homo sapiens
caaaaatggatatta

SEQ ID NO: 1799252 - DNA, 15 bp, Homo sapiens
aaaaatggatattat

SEQ ID NO: 1799253 - DNA, 15 bp, Homo sapiens
aaaatggatattatt

SEQ ID NO: 1799254 - DNA, 15 bp, Homo sapiens
aaatggatattatta

SEQ ID NO: 1799255 - DNA, 15 bp, Homo sapiens
aatggatattattag

SEQ ID NO: 1799256 - DNA, 15 bp, Homo sapiens
atggatattattaga

SEQ ID NO: 1799257 - DNA, 15 bp, Homo sapiens
tggatattattagaa

SEQ ID NO: 1799258 - DNA, 15 bp, Homo sapiens
ggatattattagaaa

SEQ ID NO: 1799259 - DNA, 15 bp, Homo sapiens
gatattattagaaat

SEQ ID NO: 1799260 - DNA, 15 bp, Homo sapiens
atattattagaaatt

SEQ ID NO: 1799261 - DNA, 15 bp, Homo sapiens
tattattagaaatta

SEQ ID NO: 1799262 - DNA, 15 bp, Homo sapiens
attattagaaattag

SEQ ID NO: 1799263 - DNA, 15 bp, Homo sapiens
ttattagaaattaga

SEQ ID NO: 1799264 - DNA, 15 bp, Homo sapiens
tattagaaattagaa

SEQ ID NO: 1799265 - DNA, 15 bp, Homo sapiens
attagaaattagaaa

SEQ ID NO: 1799266 - DNA, 15 bp, Homo sapiens
ttagaaattagaaaa

SEQ ID NO: 1799267 - DNA, 15 bp, Homo sapiens
tagaaattagaaaaa

SEQ ID NO: 1799268 - DNA, 15 bp, Homo sapiens
agaaattagaaaaaa

SEQ ID NO: 1799269 - DNA, 15 bp, Homo sapiens
gaaattagaaaaaaa

SEQ ID NO: 1799270 - DNA, 15 bp, Homo sapiens
aaattagaaaaaaat

SEQ ID NO: 1799271 - DNA, 15 bp, Homo sapiens
aattagaaaaaaatt

SEQ ID NO: 1799272 - DNA, 15 bp, Homo sapiens
attagaaaaaaatta

SEQ ID NO: 1799273 - DNA, 15 bp, Homo sapiens
ttagaaaaaaattac

SEQ ID NO: 1799274 - DNA, 15 bp, Homo sapiens
tagaaaaaaattact

SEQ ID NO: 1799275 - DNA, 15 bp, Homo sapiens
agaaaaaaattacta

SEQ ID NO: 1799276 - DNA, 15 bp, Homo sapiens
gaaaaaaattactaa

SEQ ID NO: 1799277 - DNA, 15 bp, Homo sapiens
aaaaaaattactaat

SEQ ID NO: 1799278 - DNA, 15 bp, Homo sapiens
aaaaaattactaatt

SEQ ID NO: 1799279 - DNA, 15 bp, Homo sapiens
aaaaattactaattt

SEQ ID NO: 1799280 - DNA, 15 bp, Homo sapiens
aaaattactaatttt

SEQ ID NO: 1799281 - DNA, 15 bp, Homo sapiens
aaattactaatttta

SEQ ID NO: 1799282 - DNA, 15 bp, Homo sapiens
aattactaattttac

SEQ ID NO: 1799283 - DNA, 15 bp, Homo sapiens
attactaattttaca

SEQ ID NO: 1799284 - DNA, 15 bp, Homo sapiens
ttactaattttacac

SEQ ID NO: 1799285 - DNA, 15 bp, Homo sapiens
tactaattttacaca

SEQ ID NO: 1799286 - DNA, 15 bp, Homo sapiens
actaattttacacat

SEQ ID NO: 1799287 - DNA, 15 bp, Homo sapiens
ctaattttacacatt

SEQ ID NO: 1799288 - DNA, 15 bp, Homo sapiens
taattttacacatta

SEQ ID NO: 1799289 - DNA, 15 bp, Homo sapiens
aattttacacattag

SEQ ID NO: 1799290 - DNA, 15 bp, Homo sapiens
attttacacattaga

SEQ ID NO: 1799291 - DNA, 15 bp, Homo sapiens
ttttacacattagat

SEQ ID NO: 1799292 - DNA, 15 bp, Homo sapiens
tttacacattagatt

SEQ ID NO: 1799293 - DNA, 15 bp, Homo sapiens
ttacacattagattt

SEQ ID NO: 1799294 - DNA, 15 bp, Homo sapiens
tacacattagatttt

SEQ ID NO: 1799295 - DNA, 15 bp, Homo sapiens
acacattagatttta

SEQ ID NO: 1799296 - DNA, 15 bp, Homo sapiens
cacattagattttat

SEQ ID NO: 1799297 - DNA, 15 bp, Homo sapiens
acattagattttatt

SEQ ID NO: 1799298 - DNA, 15 bp, Homo sapiens
cattagattttattt

SEQ ID NO: 1799299 - DNA, 15 bp, Homo sapiens
attagattttatttt

SEQ ID NO: 1799300 - DNA, 15 bp, Homo sapiens
ttagattttatttta

SEQ ID NO: 1799301 - DNA, 15 bp, Homo sapiens
tagattttattttac

SEQ ID NO: 1799302 - DNA, 15 bp, Homo sapiens
agattttattttact

SEQ ID NO: 1799303 - DNA, 15 bp, Homo sapiens
gattttattttacta

SEQ ID NO: 1799304 - DNA, 15 bp, Homo sapiens
attttattttactat

SEQ ID NO: 1799305 - DNA, 15 bp, Homo sapiens
ttttattttactatt

SEQ ID NO: 1799306 - DNA, 15 bp, Homo sapiens
tttattttactattg

SEQ ID NO: 1799307 - DNA, 15 bp, Homo sapiens
ttattttactattgg

SEQ ID NO: 1799308 - DNA, 15 bp, Homo sapiens
tattttactattgga

SEQ ID NO: 1799309 - DNA, 15 bp, Homo sapiens
attttactattggaa

SEQ ID NO: 1799310 - DNA, 15 bp, Homo sapiens
ttttactattggaat

SEQ ID NO: 1799311 - DNA, 15 bp, Homo sapiens
tttactattggaatc

SEQ ID NO: 1799312 - DNA, 15 bp, Homo sapiens
ttactattggaatct

SEQ ID NO: 1799313 - DNA, 15 bp, Homo sapiens
tactattggaatctg

SEQ ID NO: 1799314 - DNA, 15 bp, Homo sapiens
actattggaatctga

SEQ ID NO: 1799315 - DNA, 15 bp, Homo sapiens
ctattggaatctgat

SEQ ID NO: 1799316 - DNA, 15 bp, Homo sapiens
tattggaatctgata

SEQ ID NO: 1799317 - DNA, 15 bp, Homo sapiens
attggaatctgatat

SEQ ID NO: 1799318 - DNA, 15 bp, Homo sapiens
ttggaatctgatata

SEQ ID NO: 1799319 - DNA, 15 bp, Homo sapiens
tggaatctgatatac

SEQ ID NO: 1799320 - DNA, 15 bp, Homo sapiens
ggaatctgatatact

SEQ ID NO: 1799321 - DNA, 15 bp, Homo sapiens
gaatctgatatactg

SEQ ID NO: 1799322 - DNA, 15 bp, Homo sapiens
aatctgatatactgt

SEQ ID NO: 1799323 - DNA, 15 bp, Homo sapiens
atctgatatactgtg

SEQ ID NO: 1799324 - DNA, 15 bp, Homo sapiens
tctgatatactgtgt

SEQ ID NO: 1799325 - DNA, 15 bp, Homo sapiens
ctgatatactgtgtg

SEQ ID NO: 1799326 - DNA, 15 bp, Homo sapiens
tgatatactgtgtgc

SEQ ID NO: 1799327 - DNA, 15 bp, Homo sapiens
gatatactgtgtgct

SEQ ID NO: 1799328 - DNA, 15 bp, Homo sapiens
atatactgtgtgctt

SEQ ID NO: 1799329 - DNA, 15 bp, Homo sapiens
tatactgtgtgcttg

SEQ ID NO: 1799330 - DNA, 15 bp, Homo sapiens
atactgtgtgcttgt

SEQ ID NO: 1799331 - DNA, 15 bp, Homo sapiens
tactgtgtgcttgtt

SEQ ID NO: 1799332 - DNA, 15 bp, Homo sapiens
actgtgtgcttgttt

SEQ ID NO: 1799333 - DNA, 15 bp, Homo sapiens
ctgtgtgcttgtttt

SEQ ID NO: 1799334 - DNA, 15 bp, Homo sapiens
tgtgtgcttgtttta

SEQ ID NO: 1799335 - DNA, 15 bp, Homo sapiens
gtgtgcttgttttat

SEQ ID NO: 1799336 - DNA, 15 bp, Homo sapiens
tgtgcttgttttata

SEQ ID NO: 1799337 - DNA, 15 bp, Homo sapiens
gtgcttgttttataa

SEQ ID NO: 1799338 - DNA, 15 bp, Homo sapiens
tgcttgttttataaa

SEQ ID NO: 1799339 - DNA, 15 bp, Homo sapiens
gcttgttttataaaa

SEQ ID NO: 1799340 - DNA, 15 bp, Homo sapiens
cttgttttataaaat

SEQ ID NO: 1799341 - DNA, 15 bp, Homo sapiens
ttgttttataaaatt

SEQ ID NO: 1799342 - DNA, 15 bp, Homo sapiens
tgttttataaaattt

SEQ ID NO: 1799343 - DNA, 15 bp, Homo sapiens
gttttataaaatttt

SEQ ID NO: 1799344 - DNA, 15 bp, Homo sapiens
ttttataaaattttg

SEQ ID NO: 1799345 - DNA, 15 bp, Homo sapiens
tttataaaattttgc

SEQ ID NO: 1799346 - DNA, 15 bp, Homo sapiens
ttataaaattttgct

SEQ ID NO: 1799347 - DNA, 15 bp, Homo sapiens
tataaaattttgctt

SEQ ID NO: 1799348 - DNA, 15 bp, Homo sapiens
ataaaattttgcttt

SEQ ID NO: 1799349 - DNA, 15 bp, Homo sapiens
taaaattttgctttt

SEQ ID NO: 1799350 - DNA, 15 bp, Homo sapiens
aaaattttgctttta

SEQ ID NO: 1799351 - DNA, 15 bp, Homo sapiens
aaattttgcttttaa

SEQ ID NO: 1799352 - DNA, 15 bp, Homo sapiens
aattttgcttttaat

SEQ ID NO: 1799353 - DNA, 15 bp, Homo sapiens
attttgcttttaatt

SEQ ID NO: 1799354 - DNA, 15 bp, Homo sapiens
ttttgcttttaatta

SEQ ID NO: 1799355 - DNA, 15 bp, Homo sapiens
tttgcttttaattaa

SEQ ID NO: 1799356 - DNA, 15 bp, Homo sapiens
ttgcttttaattaaa

SEQ ID NO: 1799357 - DNA, 15 bp, Homo sapiens
tgcttttaattaaat

SEQ ID NO: 1799358 - DNA, 15 bp, Homo sapiens
gcttttaattaaata

SEQ ID NO: 1799359 - DNA, 15 bp, Homo sapiens
cttttaattaaataa

SEQ ID NO: 1799360 - DNA, 15 bp, Homo sapiens
ttttaattaaataaa

SEQ ID NO: 1799361 - DNA, 15 bp, Homo sapiens
tttaattaaataaaa

SEQ ID NO: 1799362 - DNA, 15 bp, Homo sapiens
ttaattaaataaaag

SEQ ID NO: 1799363 - DNA, 15 bp, Homo sapiens
taattaaataaaagc

SEQ ID NO: 1799364 - DNA, 15 bp, Homo sapiens
aattaaataaaagct

SEQ ID NO: 1799365 - DNA, 15 bp, Homo sapiens
attaaataaaagctg

SEQ ID NO: 1799366 - DNA, 15 bp, Homo sapiens
ttaaataaaagctgg

SEQ ID NO: 1799367 - DNA, 15 bp, Homo sapiens
taaataaaagctgga

SEQ ID NO: 1799368 - DNA, 15 bp, Homo sapiens
aaataaaagctggaa

SEQ ID NO: 1799369 - DNA, 15 bp, Homo sapiens
aataaaagctggaag

SEQ ID NO: 1799370 - DNA, 15 bp, Homo sapiens
ataaaagctggaagc

SEQ ID NO: 1799371 - DNA, 15 bp, Homo sapiens
taaaagctggaagca

SEQ ID NO: 1799372 - DNA, 15 bp, Homo sapiens
aaaagctggaagcaa

SEQ ID NO: 1799373 - DNA, 15 bp, Homo sapiens
aaagctggaagcaaa

SEQ ID NO: 1799374 - DNA, 15 bp, Homo sapiens
aagctggaagcaaag

SEQ ID NO: 1799375 - DNA, 15 bp, Homo sapiens
agctggaagcaaagt

SEQ ID NO: 1799376 - DNA, 15 bp, Homo sapiens
gctggaagcaaagta

SEQ ID NO: 1799377 - DNA, 15 bp, Homo sapiens
ctggaagcaaagtat

SEQ ID NO: 1799378 - DNA, 15 bp, Homo sapiens
tggaagcaaagtata

SEQ ID NO: 1799379 - DNA, 15 bp, Homo sapiens
ggaagcaaagtataa

SEQ ID NO: 1799380 - DNA, 15 bp, Homo sapiens
gaagcaaagtataac

SEQ ID NO: 1799381 - DNA, 15 bp, Homo sapiens
aagcaaagtataacc

SEQ ID NO: 1799382 - DNA, 15 bp, Homo sapiens
agcaaagtataacca

SEQ ID NO: 1799383 - DNA, 15 bp, Homo sapiens
gcaaagtataaccat

SEQ ID NO: 1799384 - DNA, 15 bp, Homo sapiens
caaagtataaccata

SEQ ID NO: 1799385 - DNA, 15 bp, Homo sapiens
aaagtataaccatat

SEQ ID NO: 1799386 - DNA, 15 bp, Homo sapiens
aagtataaccatatg

SEQ ID NO: 1799387 - DNA, 15 bp, Homo sapiens
agtataaccatatga

SEQ ID NO: 1799388 - DNA, 15 bp, Homo sapiens
gtataaccatatgat

SEQ ID NO: 1799389 - DNA, 15 bp, Homo sapiens
tataaccatatgata

SEQ ID NO: 1799390 - DNA, 15 bp, Homo sapiens
ataaccatatgatac

SEQ ID NO: 1799391 - DNA, 15 bp, Homo sapiens
taaccatatgatact

SEQ ID NO: 1799392 - DNA, 15 bp, Homo sapiens
aaccatatgatacta

SEQ ID NO: 1799393 - DNA, 15 bp, Homo sapiens
accatatgatactat

SEQ ID NO: 1799394 - DNA, 15 bp, Homo sapiens
ccatatgatactatc

SEQ ID NO: 1799395 - DNA, 15 bp, Homo sapiens
catatgatactatca

SEQ ID NO: 1799396 - DNA, 15 bp, Homo sapiens
atatgatactatcat

SEQ ID NO: 1799397 - DNA, 15 bp, Homo sapiens
tatgatactatcata

SEQ ID NO: 1799398 - DNA, 15 bp, Homo sapiens
atgatactatcatac

SEQ ID NO: 1799399 - DNA, 15 bp, Homo sapiens
tgatactatcatact

SEQ ID NO: 1799400 - DNA, 15 bp, Homo sapiens
gatactatcatacta

SEQ ID NO: 1799401 - DNA, 15 bp, Homo sapiens
atactatcatactac

SEQ ID NO: 1799402 - DNA, 15 bp, Homo sapiens
tactatcatactact

SEQ ID NO: 1799403 - DNA, 15 bp, Homo sapiens
actatcatactactg

SEQ ID NO: 1799404 - DNA, 15 bp, Homo sapiens
ctatcatactactga

SEQ ID NO: 1799405 - DNA, 15 bp, Homo sapiens
tatcatactactgaa

SEQ ID NO: 1799406 - DNA, 15 bp, Homo sapiens
atcatactactgaaa

SEQ ID NO: 1799407 - DNA, 15 bp, Homo sapiens
tcatactactgaaac

SEQ ID NO: 1799408 - DNA, 15 bp, Homo sapiens
catactactgaaaca

SEQ ID NO: 1799409 - DNA, 15 bp, Homo sapiens
atactactgaaacag

SEQ ID NO: 1799410 - DNA, 15 bp, Homo sapiens
tactactgaaacaga

SEQ ID NO: 1799411 - DNA, 15 bp, Homo sapiens
actactgaaacagat

SEQ ID NO: 1799412 - DNA, 15 bp, Homo sapiens
ctactgaaacagatt

SEQ ID NO: 1799413 - DNA, 15 bp, Homo sapiens
tactgaaacagattt

SEQ ID NO: 1799414 - DNA, 15 bp, Homo sapiens
actgaaacagatttc

SEQ ID NO: 1799415 - DNA, 15 bp, Homo sapiens
ctgaaacagatttca

SEQ ID NO: 1799416 - DNA, 15 bp, Homo sapiens
tgaaacagatttcat

SEQ ID NO: 1799417 - DNA, 15 bp, Homo sapiens
gaaacagatttcata

SEQ ID NO: 1799418 - DNA, 15 bp, Homo sapiens
aaacagatttcatac

SEQ ID NO: 1799419 - DNA, 15 bp, Homo sapiens
aacagatttcatacc

SEQ ID NO: 1799420 - DNA, 15 bp, Homo sapiens
acagatttcatacct

SEQ ID NO: 1799421 - DNA, 15 bp, Homo sapiens
cagatttcatacctc

SEQ ID NO: 1799422 - DNA, 15 bp, Homo sapiens
agatttcatacctca

SEQ ID NO: 1799423 - DNA, 15 bp, Homo sapiens
gatttcatacctcag

SEQ ID NO: 1799424 - DNA, 15 bp, Homo sapiens
atttcatacctcaga

SEQ ID NO: 1799425 - DNA, 15 bp, Homo sapiens
tttcatacctcagaa

SEQ ID NO: 1799426 - DNA, 15 bp, Homo sapiens
ttcatacctcagaat

SEQ ID NO: 1799427 - DNA, 15 bp, Homo sapiens
tcatacctcagaatg

SEQ ID NO: 1799428 - DNA, 15 bp, Homo sapiens
catacctcagaatgt

SEQ ID NO: 1799429 - DNA, 15 bp, Homo sapiens
atacctcagaatgta

SEQ ID NO: 1799430 - DNA, 15 bp, Homo sapiens
tacctcagaatgtaa

SEQ ID NO: 1799431 - DNA, 15 bp, Homo sapiens
acctcagaatgtaaa

SEQ ID NO: 1799432 - DNA, 15 bp, Homo sapiens
cctcagaatgtaaaa

SEQ ID NO: 1799433 - DNA, 15 bp, Homo sapiens
ctcagaatgtaaaag

SEQ ID NO: 1799434 - DNA, 15 bp, Homo sapiens
tcagaatgtaaaaga

SEQ ID NO: 1799435 - DNA, 15 bp, Homo sapiens
cagaatgtaaaagaa

SEQ ID NO: 1799436 - DNA, 15 bp, Homo sapiens
agaatgtaaaagaac

SEQ ID NO: 1799437 - DNA, 15 bp, Homo sapiens
gaatgtaaaagaact

SEQ ID NO: 1799438 - DNA, 15 bp, Homo sapiens
aatgtaaaagaactt

SEQ ID NO: 1799439 - DNA, 15 bp, Homo sapiens
atgtaaaagaactta

SEQ ID NO: 1799440 - DNA, 15 bp, Homo sapiens
tgtaaaagaacttac

SEQ ID NO: 1799441 - DNA, 15 bp, Homo sapiens
gtaaaagaacttact

SEQ ID NO: 1799442 - DNA, 15 bp, Homo sapiens
taaaagaacttactg

SEQ ID NO: 1799443 - DNA, 15 bp, Homo sapiens
aaaagaacttactga

SEQ ID NO: 1799444 - DNA, 15 bp, Homo sapiens
aaagaacttactgat

SEQ ID NO: 1799445 - DNA, 15 bp, Homo sapiens
aagaacttactgatt

SEQ ID NO: 1799446 - DNA, 15 bp, Homo sapiens
agaacttactgatta

SEQ ID NO: 1799447 - DNA, 15 bp, Homo sapiens
gaacttactgattat

SEQ ID NO: 1799448 - DNA, 15 bp, Homo sapiens
aacttactgattatt

SEQ ID NO: 1799449 - DNA, 15 bp, Homo sapiens
acttactgattattt

SEQ ID NO: 1799450 - DNA, 15 bp, Homo sapiens
cttactgattatttt

SEQ ID NO: 1799451 - DNA, 15 bp, Homo sapiens
ttactgattattttc

SEQ ID NO: 1799452 - DNA, 15 bp, Homo sapiens
tactgattattttct

SEQ ID NO: 1799453 - DNA, 15 bp, Homo sapiens
actgattattttctt

SEQ ID NO: 1799454 - DNA, 15 bp, Homo sapiens
ctgattattttcttc

SEQ ID NO: 1799455 - DNA, 15 bp, Homo sapiens
tgattattttcttca

SEQ ID NO: 1799456 - DNA, 15 bp, Homo sapiens
gattattttcttcat

SEQ ID NO: 1799457 - DNA, 15 bp, Homo sapiens
attattttcttcatc

SEQ ID NO: 1799458 - DNA, 15 bp, Homo sapiens
ttattttcttcatcc

SEQ ID NO: 1799459 - DNA, 15 bp, Homo sapiens
tattttcttcatcca

SEQ ID NO: 1799460 - DNA, 15 bp, Homo sapiens
attttcttcatccaa

SEQ ID NO: 1799461 - DNA, 15 bp, Homo sapiens
ttttcttcatccaac

SEQ ID NO: 1799462 - DNA, 15 bp, Homo sapiens
tttcttcatccaact

SEQ ID NO: 1799463 - DNA, 15 bp, Homo sapiens
ttcttcatccaactt

SEQ ID NO: 1799464 - DNA, 15 bp, Homo sapiens
tcttcatccaactta

SEQ ID NO: 1799465 - DNA, 15 bp, Homo sapiens
cttcatccaacttat

SEQ ID NO: 1799466 - DNA, 15 bp, Homo sapiens
ttcatccaacttatg

SEQ ID NO: 1799467 - DNA, 15 bp, Homo sapiens
tcatccaacttatgt

SEQ ID NO: 1799468 - DNA, 15 bp, Homo sapiens
catccaacttatgtt

SEQ ID NO: 1799469 - DNA, 15 bp, Homo sapiens
atccaacttatgttt

SEQ ID NO: 1799470 - DNA, 15 bp, Homo sapiens
tccaacttatgtttt

SEQ ID NO: 1799471 - DNA, 15 bp, Homo sapiens
ccaacttatgttttt

SEQ ID NO: 1799472 - DNA, 15 bp, Homo sapiens
caacttatgttttta

SEQ ID NO: 1799473 - DNA, 15 bp, Homo sapiens
aacttatgtttttaa

SEQ ID NO: 1799474 - DNA, 15 bp, Homo sapiens
acttatgtttttaaa

SEQ ID NO: 1799475 - DNA, 15 bp, Homo sapiens
cttatgtttttaaat

SEQ ID NO: 1799476 - DNA, 15 bp, Homo sapiens
ttatgtttttaaatg

SEQ ID NO: 1799477 - DNA, 15 bp, Homo sapiens
tatgtttttaaatga

SEQ ID NO: 1799478 - DNA, 15 bp, Homo sapiens
atgtttttaaatgag

SEQ ID NO: 1799479 - DNA, 15 bp, Homo sapiens
tgtttttaaatgagg

SEQ ID NO: 1799480 - DNA, 15 bp, Homo sapiens
gtttttaaatgagga

SEQ ID NO: 1799481 - DNA, 15 bp, Homo sapiens
tttttaaatgaggat

SEQ ID NO: 1799482 - DNA, 15 bp, Homo sapiens
ttttaaatgaggatt

SEQ ID NO: 1799483 - DNA, 15 bp, Homo sapiens
tttaaatgaggatta

SEQ ID NO: 1799484 - DNA, 15 bp, Homo sapiens
ttaaatgaggattat

SEQ ID NO: 1799485 - DNA, 15 bp, Homo sapiens
taaatgaggattatt

SEQ ID NO: 1799486 - DNA, 15 bp, Homo sapiens
aaatgaggattattg

SEQ ID NO: 1799487 - DNA, 15 bp, Homo sapiens
aatgaggattattga

SEQ ID NO: 1799488 - DNA, 15 bp, Homo sapiens
atgaggattattgat

SEQ ID NO: 1799489 - DNA, 15 bp, Homo sapiens
tgaggattattgata

SEQ ID NO: 1799490 - DNA, 15 bp, Homo sapiens
gaggattattgatag

SEQ ID NO: 1799491 - DNA, 15 bp, Homo sapiens
aggattattgatagt

SEQ ID NO: 1799492 - DNA, 15 bp, Homo sapiens
ggattattgatagta

SEQ ID NO: 1799493 - DNA, 15 bp, Homo sapiens
gattattgatagtac

SEQ ID NO: 1799494 - DNA, 15 bp, Homo sapiens
attattgatagtact

SEQ ID NO: 1799495 - DNA, 15 bp, Homo sapiens
ttattgatagtactc

SEQ ID NO: 1799496 - DNA, 15 bp, Homo sapiens
tattgatagtactct

SEQ ID NO: 1799497 - DNA, 15 bp, Homo sapiens
attgatagtactctt

SEQ ID NO: 1799498 - DNA, 15 bp, Homo sapiens
ttgatagtactcttg

SEQ ID NO: 1799499 - DNA, 15 bp, Homo sapiens
tgatagtactcttgg

SEQ ID NO: 1799500 - DNA, 15 bp, Homo sapiens
gatagtactcttggt

SEQ ID NO: 1799501 - DNA, 15 bp, Homo sapiens
atagtactcttggtt

SEQ ID NO: 1799502 - DNA, 15 bp, Homo sapiens
tagtactcttggttt

SEQ ID NO: 1799503 - DNA, 15 bp, Homo sapiens
agtactcttggtttt

SEQ ID NO: 1799504 - DNA, 15 bp, Homo sapiens
gtactcttggttttt

SEQ ID NO: 1799505 - DNA, 15 bp, Homo sapiens
tactcttggttttta

SEQ ID NO: 1799506 - DNA, 15 bp, Homo sapiens
actcttggtttttat

SEQ ID NO: 1799507 - DNA, 15 bp, Homo sapiens
ctcttggtttttata

SEQ ID NO: 1799508 - DNA, 15 bp, Homo sapiens
tcttggtttttatac

SEQ ID NO: 1799509 - DNA, 15 bp, Homo sapiens
cttggtttttatacc

SEQ ID NO: 1799510 - DNA, 15 bp, Homo sapiens
ttggtttttatacca

SEQ ID NO: 1799511 - DNA, 15 bp, Homo sapiens
tggtttttataccat

SEQ ID NO: 1799512 - DNA, 15 bp, Homo sapiens
ggtttttataccatt

SEQ ID NO: 1799513 - DNA, 15 bp, Homo sapiens
gtttttataccattc

SEQ ID NO: 1799514 - DNA, 15 bp, Homo sapiens
tttttataccattca

SEQ ID NO: 1799515 - DNA, 15 bp, Homo sapiens
ttttataccattcag

SEQ ID NO: 1799516 - DNA, 15 bp, Homo sapiens
tttataccattcaga

SEQ ID NO: 1799517 - DNA, 15 bp, Homo sapiens
ttataccattcagat

SEQ ID NO: 1799518 - DNA, 15 bp, Homo sapiens
tataccattcagatc

SEQ ID NO: 1799519 - DNA, 15 bp, Homo sapiens
ataccattcagatca

SEQ ID NO: 1799520 - DNA, 15 bp, Homo sapiens
taccattcagatcac

SEQ ID NO: 1799521 - DNA, 15 bp, Homo sapiens
accattcagatcact

SEQ ID NO: 1799522 - DNA, 15 bp, Homo sapiens
ccattcagatcactg

SEQ ID NO: 1799523 - DNA, 15 bp, Homo sapiens
cattcagatcactga

SEQ ID NO: 1799524 - DNA, 15 bp, Homo sapiens
attcagatcactgaa

SEQ ID NO: 1799525 - DNA, 15 bp, Homo sapiens
ttcagatcactgaat

SEQ ID NO: 1799526 - DNA, 15 bp, Homo sapiens
tcagatcactgaatt

SEQ ID NO: 1799527 - DNA, 15 bp, Homo sapiens
cagatcactgaattt

SEQ ID NO: 1799528 - DNA, 15 bp, Homo sapiens
agatcactgaattta

SEQ ID NO: 1799529 - DNA, 15 bp, Homo sapiens
gatcactgaatttat

SEQ ID NO: 1799530 - DNA, 15 bp, Homo sapiens
atcactgaatttata

SEQ ID NO: 1799531 - DNA, 15 bp, Homo sapiens
tcactgaatttataa

SEQ ID NO: 1799532 - DNA, 15 bp, Homo sapiens
cactgaatttataaa

SEQ ID NO: 1799533 - DNA, 15 bp, Homo sapiens
ctgaatttataaagt

SEQ ID NO: 1799534 - DNA, 15 bp, Homo sapiens
tgaatttataaagta

SEQ ID NO: 1799535 - DNA, 15 bp, Homo sapiens
gaatttataaagtac

SEQ ID NO: 1799536 - DNA, 15 bp, Homo sapiens
aatttataaagtacc

SEQ ID NO: 1799537 - DNA, 15 bp, Homo sapiens
atttataaagtaccc

SEQ ID NO: 1799538 - DNA, 15 bp, Homo sapiens
tttataaagtaccca

SEQ ID NO: 1799539 - DNA, 15 bp, Homo sapiens
ttataaagtacccat

SEQ ID NO: 1799540 - DNA, 15 bp, Homo sapiens
tataaagtacccatc

SEQ ID NO: 1799541 - DNA, 15 bp, Homo sapiens
ataaagtacccatct

SEQ ID NO: 1799542 - DNA, 15 bp, Homo sapiens
taaagtacccatcta

SEQ ID NO: 1799543 - DNA, 15 bp, Homo sapiens
aaagtacccatctag

SEQ ID NO: 1799544 - DNA, 15 bp, Homo sapiens
aagtacccatctagt

SEQ ID NO: 1799545 - DNA, 15 bp, Homo sapiens
agtacccatctagta

SEQ ID NO: 1799546 - DNA, 15 bp, Homo sapiens
gtacccatctagtac

SEQ ID NO: 1799547 - DNA, 15 bp, Homo sapiens
tacccatctagtact

SEQ ID NO: 1799548 - DNA, 15 bp, Homo sapiens
acccatctagtactt

SEQ ID NO: 1799549 - DNA, 15 bp, Homo sapiens
cccatctagtacttg

SEQ ID NO: 1799550 - DNA, 15 bp, Homo sapiens
ccatctagtacttga

SEQ ID NO: 1799551 - DNA, 15 bp, Homo sapiens
catctagtacttgaa

SEQ ID NO: 1799552 - DNA, 15 bp, Homo sapiens
atctagtacttgaaa

SEQ ID NO: 1799553 - DNA, 15 bp, Homo sapiens
tctagtacttgaaaa

SEQ ID NO: 1799554 - DNA, 15 bp, Homo sapiens
ctagtacttgaaaaa

SEQ ID NO: 1799555 - DNA, 15 bp, Homo sapiens
tagtacttgaaaaag

SEQ ID NO: 1799556 - DNA, 15 bp, Homo sapiens
agtacttgaaaaagt

SEQ ID NO: 1799557 - DNA, 15 bp, Homo sapiens
gtacttgaaaaagta

SEQ ID NO: 1799558 - DNA, 15 bp, Homo sapiens
tacttgaaaaagtaa

SEQ ID NO: 1799559 - DNA, 15 bp, Homo sapiens
acttgaaaaagtaaa

SEQ ID NO: 1799560 - DNA, 15 bp, Homo sapiens
cttgaaaaagtaaag

SEQ ID NO: 1799561 - DNA, 15 bp, Homo sapiens
ttgaaaaagtaaagt

SEQ ID NO: 1799562 - DNA, 15 bp, Homo sapiens
tgaaaaagtaaagtg

SEQ ID NO: 1799563 - DNA, 15 bp, Homo sapiens
gaaaaagtaaagtgt

SEQ ID NO: 1799564 - DNA, 15 bp, Homo sapiens
aaaaagtaaagtgtt

SEQ ID NO: 1799565 - DNA, 15 bp, Homo sapiens
aaaagtaaagtgttc

SEQ ID NO: 1799566 - DNA, 15 bp, Homo sapiens
aaagtaaagtgttct

SEQ ID NO: 1799567 - DNA, 15 bp, Homo sapiens
aagtaaagtgttctg

SEQ ID NO: 1799568 - DNA, 15 bp, Homo sapiens
agtaaagtgttctgc

SEQ ID NO: 1799569 - DNA, 15 bp, Homo sapiens
gtaaagtgttctgcc

SEQ ID NO: 1799570 - DNA, 15 bp, Homo sapiens
taaagtgttctgcca

SEQ ID NO: 1799571 - DNA, 15 bp, Homo sapiens
aaagtgttctgccag

SEQ ID NO: 1799572 - DNA, 15 bp, Homo sapiens
aagtgttctgccaga

SEQ ID NO: 1799573 - DNA, 15 bp, Homo sapiens
agtgttctgccagat

SEQ ID NO: 1799574 - DNA, 15 bp, Homo sapiens
gtgttctgccagatc

SEQ ID NO: 1799575 - DNA, 15 bp, Homo sapiens
tgttctgccagatct

SEQ ID NO: 1799576 - DNA, 15 bp, Homo sapiens
gttctgccagatctt

SEQ ID NO: 1799577 - DNA, 15 bp, Homo sapiens
ttctgccagatctta

SEQ ID NO: 1799578 - DNA, 15 bp, Homo sapiens
tctgccagatcttag

SEQ ID NO: 1799579 - DNA, 15 bp, Homo sapiens
ctgccagatcttagg

SEQ ID NO: 1799580 - DNA, 15 bp, Homo sapiens
tgccagatcttaggt

SEQ ID NO: 1799581 - DNA, 15 bp, Homo sapiens
gccagatcttaggta

SEQ ID NO: 1799582 - DNA, 15 bp, Homo sapiens
ccagatcttaggtat

SEQ ID NO: 1799583 - DNA, 15 bp, Homo sapiens
cagatcttaggtata

SEQ ID NO: 1799584 - DNA, 15 bp, Homo sapiens
agatcttaggtatag

SEQ ID NO: 1799585 - DNA, 15 bp, Homo sapiens
gatcttaggtataga

SEQ ID NO: 1799586 - DNA, 15 bp, Homo sapiens
atcttaggtatagag

SEQ ID NO: 1799587 - DNA, 15 bp, Homo sapiens
tcttaggtatagagg

SEQ ID NO: 1799588 - DNA, 15 bp, Homo sapiens
cttaggtatagagga

SEQ ID NO: 1799589 - DNA, 15 bp, Homo sapiens
ttaggtatagaggac

SEQ ID NO: 1799590 - DNA, 15 bp, Homo sapiens
taggtatagaggacc

SEQ ID NO: 1799591 - DNA, 15 bp, Homo sapiens
aggtatagaggaccc

SEQ ID NO: 1799592 - DNA, 15 bp, Homo sapiens
ggtatagaggaccct

SEQ ID NO: 1799593 - DNA, 15 bp, Homo sapiens
gtatagaggacccta

SEQ ID NO: 1799594 - DNA, 15 bp, Homo sapiens
tatagaggaccctaa

SEQ ID NO: 1799595 - DNA, 15 bp, Homo sapiens
atagaggaccctaac

SEQ ID NO: 1799596 - DNA, 15 bp, Homo sapiens
tagaggaccctaaca

SEQ ID NO: 1799597 - DNA, 15 bp, Homo sapiens
agaggaccctaacac

SEQ ID NO: 1799598 - DNA, 15 bp, Homo sapiens
gaggaccctaacaca

SEQ ID NO: 1799599 - DNA, 15 bp, Homo sapiens
aggaccctaacacag

SEQ ID NO: 1799600 - DNA, 15 bp, Homo sapiens
ggaccctaacacagt

SEQ ID NO: 1799601 - DNA, 15 bp, Homo sapiens
gaccctaacacagta

SEQ ID NO: 1799602 - DNA, 15 bp, Homo sapiens
accctaacacagtat

SEQ ID NO: 1799603 - DNA, 15 bp, Homo sapiens
ccctaacacagtata

SEQ ID NO: 1799604 - DNA, 15 bp, Homo sapiens
cctaacacagtatat

SEQ ID NO: 1799605 - DNA, 15 bp, Homo sapiens
ctaacacagtatatc

SEQ ID NO: 1799606 - DNA, 15 bp, Homo sapiens
taacacagtatatcc

SEQ ID NO: 1799607 - DNA, 15 bp, Homo sapiens
aacacagtatatccc

SEQ ID NO: 1799608 - DNA, 15 bp, Homo sapiens
acacagtatatccca

SEQ ID NO: 1799609 - DNA, 15 bp, Homo sapiens
cacagtatatcccaa

SEQ ID NO: 1799610 - DNA, 15 bp, Homo sapiens
acagtatatcccaag

SEQ ID NO: 1799611 - DNA, 15 bp, Homo sapiens
cagtatatcccaagt

SEQ ID NO: 1799612 - DNA, 15 bp, Homo sapiens
agtatatcccaagtg

SEQ ID NO: 1799613 - DNA, 15 bp, Homo sapiens
gtatatcccaagtgc

SEQ ID NO: 1799614 - DNA, 15 bp, Homo sapiens
tatatcccaagtgca

SEQ ID NO: 1799615 - DNA, 15 bp, Homo sapiens
atatcccaagtgcac

SEQ ID NO: 1799616 - DNA, 15 bp, Homo sapiens
tatcccaagtgcact

SEQ ID NO: 1799617 - DNA, 15 bp, Homo sapiens
atcccaagtgcactt

SEQ ID NO: 1799618 - DNA, 15 bp, Homo sapiens
tcccaagtgcacttt

SEQ ID NO: 1799619 - DNA, 15 bp, Homo sapiens
cccaagtgcactttc

SEQ ID NO: 1799620 - DNA, 15 bp, Homo sapiens
ccaagtgcactttct

SEQ ID NO: 1799621 - DNA, 15 bp, Homo sapiens
caagtgcactttcta

SEQ ID NO: 1799622 - DNA, 15 bp, Homo sapiens
aagtgcactttctaa

SEQ ID NO: 1799623 - DNA, 15 bp, Homo sapiens
agtgcactttctaat

SEQ ID NO: 1799624 - DNA, 15 bp, Homo sapiens
gtgcactttctaatg

SEQ ID NO: 1799625 - DNA, 15 bp, Homo sapiens
tgcactttctaatgt

SEQ ID NO: 1799626 - DNA, 15 bp, Homo sapiens
gcactttctaatgtt

SEQ ID NO: 1799627 - DNA, 15 bp, Homo sapiens
cactttctaatgttt

SEQ ID NO: 1799628 - DNA, 15 bp, Homo sapiens
actttctaatgtttc

SEQ ID NO: 1799629 - DNA, 15 bp, Homo sapiens
ctttctaatgtttct

SEQ ID NO: 1799630 - DNA, 15 bp, Homo sapiens
tttctaatgtttctg

SEQ ID NO: 1799631 - DNA, 15 bp, Homo sapiens
ttctaatgtttctgg

SEQ ID NO: 1799632 - DNA, 15 bp, Homo sapiens
tctaatgtttctggg

SEQ ID NO: 1799633 - DNA, 15 bp, Homo sapiens
ctaatgtttctgggt

SEQ ID NO: 1799634 - DNA, 15 bp, Homo sapiens
taatgtttctgggtc

SEQ ID NO: 1799635 - DNA, 15 bp, Homo sapiens
aatgtttctgggtcc

SEQ ID NO: 1799636 - DNA, 15 bp, Homo sapiens
atgtttctgggtcct

SEQ ID NO: 1799637 - DNA, 15 bp, Homo sapiens
tgtttctgggtcctg

SEQ ID NO: 1799638 - DNA, 15 bp, Homo sapiens
gtttctgggtcctga

SEQ ID NO: 1799639 - DNA, 15 bp, Homo sapiens
tttctgggtcctgaa

SEQ ID NO: 1799640 - DNA, 15 bp, Homo sapiens
ttctgggtcctgaag

SEQ ID NO: 1799641 - DNA, 15 bp, Homo sapiens
tctgggtcctgaaga

SEQ ID NO: 1799642 - DNA, 15 bp, Homo sapiens
ctgggtcctgaagaa

SEQ ID NO: 1799643 - DNA, 15 bp, Homo sapiens
tgggtcctgaagaat

SEQ ID NO: 1799644 - DNA, 15 bp, Homo sapiens
gggtcctgaagaatt

SEQ ID NO: 1799645 - DNA, 15 bp, Homo sapiens
ggtcctgaagaatta

SEQ ID NO: 1799646 - DNA, 15 bp, Homo sapiens
gtcctgaagaattaa

SEQ ID NO: 1799647 - DNA, 15 bp, Homo sapiens
tcctgaagaattaag

SEQ ID NO: 1799648 - DNA, 15 bp, Homo sapiens
cctgaagaattaaga

SEQ ID NO: 1799649 - DNA, 15 bp, Homo sapiens
ctgaagaattaagat

SEQ ID NO: 1799650 - DNA, 15 bp, Homo sapiens
tgaagaattaagata

SEQ ID NO: 1799651 - DNA, 15 bp, Homo sapiens
gaagaattaagatac

SEQ ID NO: 1799652 - DNA, 15 bp, Homo sapiens
aagaattaagataca

SEQ ID NO: 1799653 - DNA, 15 bp, Homo sapiens
agaattaagatacaa

SEQ ID NO: 1799654 - DNA, 15 bp, Homo sapiens
gaattaagatacaaa

SEQ ID NO: 1799655 - DNA, 15 bp, Homo sapiens
aattaagatacaaat

SEQ ID NO: 1799656 - DNA, 15 bp, Homo sapiens
attaagatacaaatt

SEQ ID NO: 1799657 - DNA, 15 bp, Homo sapiens
ttaagatacaaatta

SEQ ID NO: 1799658 - DNA, 15 bp, Homo sapiens
taagatacaaattaa

SEQ ID NO: 1799659 - DNA, 15 bp, Homo sapiens
aagatacaaattaat

SEQ ID NO: 1799660 - DNA, 15 bp, Homo sapiens
agatacaaattaatt

SEQ ID NO: 1799661 - DNA, 15 bp, Homo sapiens
gatacaaattaattt

SEQ ID NO: 1799662 - DNA, 15 bp, Homo sapiens
acaaattaattttac

SEQ ID NO: 1799663 - DNA, 15 bp, Homo sapiens
caaattaattttact

SEQ ID NO: 1799664 - DNA, 15 bp, Homo sapiens
aaattaattttactc

SEQ ID NO: 1799665 - DNA, 15 bp, Homo sapiens
aattaattttactcc

SEQ ID NO: 1799666 - DNA, 15 bp, Homo sapiens
attaattttactcca

SEQ ID NO: 1799667 - DNA, 15 bp, Homo sapiens
ttaattttactccat

SEQ ID NO: 1799668 - DNA, 15 bp, Homo sapiens
taattttactccata

SEQ ID NO: 1799669 - DNA, 15 bp, Homo sapiens
aattttactccataa

SEQ ID NO: 1799670 - DNA, 15 bp, Homo sapiens
ttttactccataaac

SEQ ID NO: 1799671 - DNA, 15 bp, Homo sapiens
tttactccataaaca

SEQ ID NO: 1799672 - DNA, 15 bp, Homo sapiens
ttactccataaacag

SEQ ID NO: 1799673 - DNA, 15 bp, Homo sapiens
tactccataaacaga

SEQ ID NO: 1799674 - DNA, 15 bp, Homo sapiens
actccataaacagac

SEQ ID NO: 1799675 - DNA, 15 bp, Homo sapiens
ctccataaacagact

SEQ ID NO: 1799676 - DNA, 15 bp, Homo sapiens
tccataaacagactg

SEQ ID NO: 1799677 - DNA, 15 bp, Homo sapiens
ccataaacagactgt

SEQ ID NO: 1799678 - DNA, 15 bp, Homo sapiens
cataaacagactgtt

SEQ ID NO: 1799679 - DNA, 15 bp, Homo sapiens
ataaacagactgtta

SEQ ID NO: 1799680 - DNA, 15 bp, Homo sapiens
taaacagactgttaa

SEQ ID NO: 1799681 - DNA, 15 bp, Homo sapiens
aaacagactgttaat

SEQ ID NO: 1799682 - DNA, 15 bp, Homo sapiens
aacagactgttaatt

SEQ ID NO: 1799683 - DNA, 15 bp, Homo sapiens
acagactgttaatta

SEQ ID NO: 1799684 - DNA, 15 bp, Homo sapiens
cagactgttaattat

SEQ ID NO: 1799685 - DNA, 15 bp, Homo sapiens
agactgttaattata

SEQ ID NO: 1799686 - DNA, 15 bp, Homo sapiens
gactgttaattatag

SEQ ID NO: 1799687 - DNA, 15 bp, Homo sapiens
actgttaattatagg

SEQ ID NO: 1799688 - DNA, 15 bp, Homo sapiens
ctgttaattatagga

SEQ ID NO: 1799689 - DNA, 15 bp, Homo sapiens
tgttaattataggag

SEQ ID NO: 1799690 - DNA, 15 bp, Homo sapiens
gttaattataggagc

SEQ ID NO: 1799691 - DNA, 15 bp, Homo sapiens
ttaattataggagcc

SEQ ID NO: 1799692 - DNA, 15 bp, Homo sapiens
taattataggagcct

SEQ ID NO: 1799693 - DNA, 15 bp, Homo sapiens
aattataggagcctt

SEQ ID NO: 1799694 - DNA, 15 bp, Homo sapiens
attataggagcctta

SEQ ID NO: 1799695 - DNA, 15 bp, Homo sapiens
ttataggagccttaa

SEQ ID NO: 1799696 - DNA, 15 bp, Homo sapiens
tataggagccttaat

SEQ ID NO: 1799697 - DNA, 15 bp, Homo sapiens
ataggagccttaatt

SEQ ID NO: 1799698 - DNA, 15 bp, Homo sapiens
taggagccttaattt

SEQ ID NO: 1799699 - DNA, 15 bp, Homo sapiens
aggagccttaatttt

SEQ ID NO: 1799700 - DNA, 15 bp, Homo sapiens
ggagccttaattttt

SEQ ID NO: 1799701 - DNA, 15 bp, Homo sapiens
gagccttaatttttt

SEQ ID NO: 1799702 - DNA, 15 bp, Homo sapiens
agccttaattttttt

SEQ ID NO: 1799703 - DNA, 15 bp, Homo sapiens
gccttaatttttttt

SEQ ID NO: 1799704 - DNA, 15 bp, Homo sapiens
ccttaattttttttt

SEQ ID NO: 1799705 - DNA, 15 bp, Homo sapiens
cttaatttttttttc

SEQ ID NO: 1799706 - DNA, 15 bp, Homo sapiens
taatttttttttcat

SEQ ID NO: 1799707 - DNA, 15 bp, Homo sapiens
aatttttttttcata

SEQ ID NO: 1799708 - DNA, 15 bp, Homo sapiens
atttttttttcatag

SEQ ID NO: 1799709 - DNA, 15 bp, Homo sapiens
tttttttttcataga

SEQ ID NO: 1799710 - DNA, 15 bp, Homo sapiens
ttttttttcatagag

SEQ ID NO: 1799711 - DNA, 15 bp, Homo sapiens
tttttttcatagaga

SEQ ID NO: 1799712 - DNA, 15 bp, Homo sapiens
ttttttcatagagat

SEQ ID NO: 1799713 - DNA, 15 bp, Homo sapiens
tttttcatagagatt

SEQ ID NO: 1799714 - DNA, 15 bp, Homo sapiens
ttttcatagagattt

SEQ ID NO: 1799715 - DNA, 15 bp, Homo sapiens
tttcatagagatttg

SEQ ID NO: 1799716 - DNA, 15 bp, Homo sapiens
ttcatagagatttgt

SEQ ID NO: 1799717 - DNA, 15 bp, Homo sapiens
tcatagagatttgtc

SEQ ID NO: 1799718 - DNA, 15 bp, Homo sapiens
catagagatttgtct

SEQ ID NO: 1799719 - DNA, 15 bp, Homo sapiens
atagagatttgtcta

SEQ ID NO: 1799720 - DNA, 15 bp, Homo sapiens
tagagatttgtctaa

SEQ ID NO: 1799721 - DNA, 15 bp, Homo sapiens
agagatttgtctaat

SEQ ID NO: 1799722 - DNA, 15 bp, Homo sapiens
gagatttgtctaatt

SEQ ID NO: 1799723 - DNA, 15 bp, Homo sapiens
agatttgtctaattg

SEQ ID NO: 1799724 - DNA, 15 bp, Homo sapiens
gatttgtctaattgc

SEQ ID NO: 1799725 - DNA, 15 bp, Homo sapiens
atttgtctaattgca

SEQ ID NO: 1799726 - DNA, 15 bp, Homo sapiens
tttgtctaattgcat

SEQ ID NO: 1799727 - DNA, 15 bp, Homo sapiens
ttgtctaattgcatc

SEQ ID NO: 1799728 - DNA, 15 bp, Homo sapiens
tgtctaattgcatct

SEQ ID NO: 1799729 - DNA, 15 bp, Homo sapiens
gtctaattgcatctc

SEQ ID NO: 1799730 - DNA, 15 bp, Homo sapiens
tctaattgcatctca

SEQ ID NO: 1799731 - DNA, 15 bp, Homo sapiens
ctaattgcatctcaa

SEQ ID NO: 1799732 - DNA, 15 bp, Homo sapiens
taattgcatctcaaa

SEQ ID NO: 1799733 - DNA, 15 bp, Homo sapiens
aattgcatctcaaaa

SEQ ID NO: 1799734 - DNA, 15 bp, Homo sapiens
attgcatctcaaaat

SEQ ID NO: 1799735 - DNA, 15 bp, Homo sapiens
ttgcatctcaaaatt

SEQ ID NO: 1799736 - DNA, 15 bp, Homo sapiens
tgcatctcaaaatta

SEQ ID NO: 1799737 - DNA, 15 bp, Homo sapiens
gcatctcaaaattat

SEQ ID NO: 1799738 - DNA, 15 bp, Homo sapiens
catctcaaaattatt

SEQ ID NO: 1799739 - DNA, 15 bp, Homo sapiens
atctcaaaattattc

SEQ ID NO: 1799740 - DNA, 15 bp, Homo sapiens
tctcaaaattattct

SEQ ID NO: 1799741 - DNA, 15 bp, Homo sapiens
ctcaaaattattctg

SEQ ID NO: 1799742 - DNA, 15 bp, Homo sapiens
tcaaaattattctgc

SEQ ID NO: 1799743 - DNA, 15 bp, Homo sapiens
caaaattattctgcc

SEQ ID NO: 1799744 - DNA, 15 bp, Homo sapiens
aaaattattctgccc

SEQ ID NO: 1799745 - DNA, 15 bp, Homo sapiens
aaattattctgccct

SEQ ID NO: 1799746 - DNA, 15 bp, Homo sapiens
aattattctgccctc

SEQ ID NO: 1799747 - DNA, 15 bp, Homo sapiens
attattctgccctcc

SEQ ID NO: 1799748 - DNA, 15 bp, Homo sapiens
ttattctgccctcct

SEQ ID NO: 1799749 - DNA, 15 bp, Homo sapiens
tattctgccctcctt

SEQ ID NO: 1799750 - DNA, 15 bp, Homo sapiens
attctgccctcctta

SEQ ID NO: 1799751 - DNA, 15 bp, Homo sapiens
ttctgccctccttaa

SEQ ID NO: 1799752 - DNA, 15 bp, Homo sapiens
tctgccctccttaat

SEQ ID NO: 1799753 - DNA, 15 bp, Homo sapiens
ctgccctccttaatt

SEQ ID NO: 1799754 - DNA, 15 bp, Homo sapiens
tgccctccttaattt

SEQ ID NO: 1799755 - DNA, 15 bp, Homo sapiens
gccctccttaatttg

SEQ ID NO: 1799756 - DNA, 15 bp, Homo sapiens
ccctccttaatttgg

SEQ ID NO: 1799757 - DNA, 15 bp, Homo sapiens
cctccttaatttggg

SEQ ID NO: 1799758 - DNA, 15 bp, Homo sapiens
ctccttaatttggga

SEQ ID NO: 1799759 - DNA, 15 bp, Homo sapiens
tccttaatttgggaa

SEQ ID NO: 1799760 - DNA, 15 bp, Homo sapiens
ccttaatttgggaag

SEQ ID NO: 1799761 - DNA, 15 bp, Homo sapiens
cttaatttgggaagg

SEQ ID NO: 1799762 - DNA, 15 bp, Homo sapiens
ttaatttgggaaggt

SEQ ID NO: 1799763 - DNA, 15 bp, Homo sapiens
taatttgggaaggtt

SEQ ID NO: 1799764 - DNA, 15 bp, Homo sapiens
aatttgggaaggttt

SEQ ID NO: 1799765 - DNA, 15 bp, Homo sapiens
atttgggaaggtttg

SEQ ID NO: 1799766 - DNA, 15 bp, Homo sapiens
tttgggaaggtttgt

SEQ ID NO: 1799767 - DNA, 15 bp, Homo sapiens
ttgggaaggtttgtg

SEQ ID NO: 1799768 - DNA, 15 bp, Homo sapiens
tgggaaggtttgtgt

SEQ ID NO: 1799769 - DNA, 15 bp, Homo sapiens
gggaaggtttgtgtt

SEQ ID NO: 1799770 - DNA, 15 bp, Homo sapiens
ggaaggtttgtgttt

SEQ ID NO: 1799771 - DNA, 15 bp, Homo sapiens
gaaggtttgtgtttt

SEQ ID NO: 1799772 - DNA, 15 bp, Homo sapiens
aaggtttgtgttttc

SEQ ID NO: 1799773 - DNA, 15 bp, Homo sapiens
aggtttgtgttttct

SEQ ID NO: 1799774 - DNA, 15 bp, Homo sapiens
ggtttgtgttttctc

SEQ ID NO: 1799775 - DNA, 15 bp, Homo sapiens
gtttgtgttttctct

SEQ ID NO: 1799776 - DNA, 15 bp, Homo sapiens
tttgtgttttctctg

SEQ ID NO: 1799777 - DNA, 15 bp, Homo sapiens
ttgtgttttctctgg

SEQ ID NO: 1799778 - DNA, 15 bp, Homo sapiens
tgtgttttctctgga

SEQ ID NO: 1799779 - DNA, 15 bp, Homo sapiens
gtgttttctctggaa

SEQ ID NO: 1799780 - DNA, 15 bp, Homo sapiens
tgttttctctggaat

SEQ ID NO: 1799781 - DNA, 15 bp, Homo sapiens
gttttctctggaatg

SEQ ID NO: 1799782 - DNA, 15 bp, Homo sapiens
ttttctctggaatgg

SEQ ID NO: 1799783 - DNA, 15 bp, Homo sapiens
tttctctggaatggt

SEQ ID NO: 1799784 - DNA, 15 bp, Homo sapiens
ttctctggaatggta

SEQ ID NO: 1799785 - DNA, 15 bp, Homo sapiens
tctctggaatggtac

SEQ ID NO: 1799786 - DNA, 15 bp, Homo sapiens
ctctggaatggtaca

SEQ ID NO: 1799787 - DNA, 15 bp, Homo sapiens
tctggaatggtacat

SEQ ID NO: 1799788 - DNA, 15 bp, Homo sapiens
ctggaatggtacatg

SEQ ID NO: 1799789 - DNA, 15 bp, Homo sapiens
tggaatggtacatgt

SEQ ID NO: 1799790 - DNA, 15 bp, Homo sapiens
ggaatggtacatgtc

SEQ ID NO: 1799791 - DNA, 15 bp, Homo sapiens
gaatggtacatgtct

SEQ ID NO: 1799792 - DNA, 15 bp, Homo sapiens
aatggtacatgtctt

SEQ ID NO: 1799793 - DNA, 15 bp, Homo sapiens
atggtacatgtcttc

SEQ ID NO: 1799794 - DNA, 15 bp, Homo sapiens
tggtacatgtcttcc

SEQ ID NO: 1799795 - DNA, 15 bp, Homo sapiens
ggtacatgtcttcca

SEQ ID NO: 1799796 - DNA, 15 bp, Homo sapiens
gtacatgtcttccat

SEQ ID NO: 1799797 - DNA, 15 bp, Homo sapiens
tacatgtcttccatg

SEQ ID NO: 1799798 - DNA, 15 bp, Homo sapiens
acatgtcttccatgt

SEQ ID NO: 1799799 - DNA, 15 bp, Homo sapiens
catgtcttccatgta

SEQ ID NO: 1799800 - DNA, 15 bp, Homo sapiens
atgtcttccatgtat

SEQ ID NO: 1799801 - DNA, 15 bp, Homo sapiens
tgtcttccatgtatc

SEQ ID NO: 1799802 - DNA, 15 bp, Homo sapiens
gtcttccatgtatct

SEQ ID NO: 1799803 - DNA, 15 bp, Homo sapiens
tcttccatgtatctt

SEQ ID NO: 1799804 - DNA, 15 bp, Homo sapiens
cttccatgtatcttt

SEQ ID NO: 1799805 - DNA, 15 bp, Homo sapiens
ttccatgtatctttt

SEQ ID NO: 1799806 - DNA, 15 bp, Homo sapiens
tccatgtatcttttg

SEQ ID NO: 1799807 - DNA, 15 bp, Homo sapiens
ccatgtatcttttga

SEQ ID NO: 1799808 - DNA, 15 bp, Homo sapiens
catgtatcttttgaa

SEQ ID NO: 1799809 - DNA, 15 bp, Homo sapiens
atgtatcttttgaac

SEQ ID NO: 1799810 - DNA, 15 bp, Homo sapiens
tgtatcttttgaact

SEQ ID NO: 1799811 - DNA, 15 bp, Homo sapiens
gtatcttttgaactg

SEQ ID NO: 1799812 - DNA, 15 bp, Homo sapiens
tatcttttgaactgg

SEQ ID NO: 1799813 - DNA, 15 bp, Homo sapiens
atcttttgaactggc

SEQ ID NO: 1799814 - DNA, 15 bp, Homo sapiens
tcttttgaactggca

SEQ ID NO: 1799815 - DNA, 15 bp, Homo sapiens
cttttgaactggcaa

SEQ ID NO: 1799816 - DNA, 15 bp, Homo sapiens
ttttgaactggcaat

SEQ ID NO: 1799817 - DNA, 15 bp, Homo sapiens
tttgaactggcaatt

SEQ ID NO: 1799818 - DNA, 15 bp, Homo sapiens
ttgaactggcaattg

SEQ ID NO: 1799819 - DNA, 15 bp, Homo sapiens
tgaactggcaattgt

SEQ ID NO: 1799820 - DNA, 15 bp, Homo sapiens
gaactggcaattgtc

SEQ ID NO: 1799821 - DNA, 15 bp, Homo sapiens
aactggcaattgtct

SEQ ID NO: 1799822 - DNA, 15 bp, Homo sapiens
actggcaattgtcta

SEQ ID NO: 1799823 - DNA, 15 bp, Homo sapiens
ctggcaattgtctat

SEQ ID NO: 1799824 - DNA, 15 bp, Homo sapiens
tggcaattgtctatt

SEQ ID NO: 1799825 - DNA, 15 bp, Homo sapiens
ggcaattgtctattt

SEQ ID NO: 1799826 - DNA, 15 bp, Homo sapiens
gcaattgtctattta

SEQ ID NO: 1799827 - DNA, 15 bp, Homo sapiens
caattgtctatttat

SEQ ID NO: 1799828 - DNA, 15 bp, Homo sapiens
aattgtctatttatc

SEQ ID NO: 1799829 - DNA, 15 bp, Homo sapiens
attgtctatttatct

SEQ ID NO: 1799830 - DNA, 15 bp, Homo sapiens
ttgtctatttatctt

SEQ ID NO: 1799831 - DNA, 15 bp, Homo sapiens
tgtctatttatcttt

SEQ ID NO: 1799832 - DNA, 15 bp, Homo sapiens
gtctatttatctttt

SEQ ID NO: 1799833 - DNA, 15 bp, Homo sapiens
tctatttatctttta

SEQ ID NO: 1799834 - DNA, 15 bp, Homo sapiens
ctatttatcttttat

SEQ ID NO: 1799835 - DNA, 15 bp, Homo sapiens
tatttatcttttatt

SEQ ID NO: 1799836 - DNA, 15 bp, Homo sapiens
atttatcttttattt

SEQ ID NO: 1799837 - DNA, 15 bp, Homo sapiens
tttatcttttatttt

SEQ ID NO: 1799838 - DNA, 15 bp, Homo sapiens
ttatcttttattttt

SEQ ID NO: 1799839 - DNA, 15 bp, Homo sapiens
tatcttttatttttt

SEQ ID NO: 1799840 - DNA, 15 bp, Homo sapiens
atcttttattttttt

SEQ ID NO: 1799841 - DNA, 15 bp, Homo sapiens
tcttttattttttta

SEQ ID NO: 1799842 - DNA, 15 bp, Homo sapiens
cttttatttttttaa

SEQ ID NO: 1799843 - DNA, 15 bp, Homo sapiens
ttttatttttttaag

SEQ ID NO: 1799844 - DNA, 15 bp, Homo sapiens
ttatttttttaagtc

SEQ ID NO: 1799845 - DNA, 15 bp, Homo sapiens
tatttttttaagtca

SEQ ID NO: 1799846 - DNA, 15 bp, Homo sapiens
atttttttaagtcag

SEQ ID NO: 1799847 - DNA, 15 bp, Homo sapiens
tttttttaagtcagt

SEQ ID NO: 1799848 - DNA, 15 bp, Homo sapiens
ttttttaagtcagta

SEQ ID NO: 1799849 - DNA, 15 bp, Homo sapiens
tttttaagtcagtat

SEQ ID NO: 1799850 - DNA, 15 bp, Homo sapiens
ttttaagtcagtatg

SEQ ID NO: 1799851 - DNA, 15 bp, Homo sapiens
tttaagtcagtatgg

SEQ ID NO: 1799852 - DNA, 15 bp, Homo sapiens
ttaagtcagtatggt

SEQ ID NO: 1799853 - DNA, 15 bp, Homo sapiens
taagtcagtatggtc

SEQ ID NO: 1799854 - DNA, 15 bp, Homo sapiens
aagtcagtatggtct

SEQ ID NO: 1799855 - DNA, 15 bp, Homo sapiens
agtcagtatggtcta

SEQ ID NO: 1799856 - DNA, 15 bp, Homo sapiens
gtcagtatggtctaa

SEQ ID NO: 1799857 - DNA, 15 bp, Homo sapiens
tcagtatggtctaac

SEQ ID NO: 1799858 - DNA, 15 bp, Homo sapiens
cagtatggtctaaca

SEQ ID NO: 1799859 - DNA, 15 bp, Homo sapiens
agtatggtctaacac

SEQ ID NO: 1799860 - DNA, 15 bp, Homo sapiens
gtatggtctaacact

SEQ ID NO: 1799861 - DNA, 15 bp, Homo sapiens
tatggtctaacactg

SEQ ID NO: 1799862 - DNA, 15 bp, Homo sapiens
atggtctaacactgg

SEQ ID NO: 1799863 - DNA, 15 bp, Homo sapiens
tggtctaacactggc

SEQ ID NO: 1799864 - DNA, 15 bp, Homo sapiens
ggtctaacactggca

SEQ ID NO: 1799865 - DNA, 15 bp, Homo sapiens
gtctaacactggcat

SEQ ID NO: 1799866 - DNA, 15 bp, Homo sapiens
tctaacactggcatg

SEQ ID NO: 1799867 - DNA, 15 bp, Homo sapiens
ctaacactggcatgt

SEQ ID NO: 1799868 - DNA, 15 bp, Homo sapiens
taacactggcatgtt

SEQ ID NO: 1799869 - DNA, 15 bp, Homo sapiens
aacactggcatgttc

SEQ ID NO: 1799870 - DNA, 15 bp, Homo sapiens
acactggcatgttca

SEQ ID NO: 1799871 - DNA, 15 bp, Homo sapiens
cactggcatgttcaa

SEQ ID NO: 1799872 - DNA, 15 bp, Homo sapiens
actggcatgttcaaa

SEQ ID NO: 1799873 - DNA, 15 bp, Homo sapiens
ctggcatgttcaaag

SEQ ID NO: 1799874 - DNA, 15 bp, Homo sapiens
tggcatgttcaaagc

SEQ ID NO: 1799875 - DNA, 15 bp, Homo sapiens
ggcatgttcaaagcc

SEQ ID NO: 1799876 - DNA, 15 bp, Homo sapiens
gcatgttcaaagcca

SEQ ID NO: 1799877 - DNA, 15 bp, Homo sapiens
catgttcaaagccac

SEQ ID NO: 1799878 - DNA, 15 bp, Homo sapiens
atgttcaaagccaca

SEQ ID NO: 1799879 - DNA, 15 bp, Homo sapiens
tgttcaaagccacat

SEQ ID NO: 1799880 - DNA, 15 bp, Homo sapiens
gttcaaagccacatt

SEQ ID NO: 1799881 - DNA, 15 bp, Homo sapiens
ttcaaagccacatta

SEQ ID NO: 1799882 - DNA, 15 bp, Homo sapiens
tcaaagccacattat

SEQ ID NO: 1799883 - DNA, 15 bp, Homo sapiens
caaagccacattatt

SEQ ID NO: 1799884 - DNA, 15 bp, Homo sapiens
aaagccacattattt

SEQ ID NO: 1799885 - DNA, 15 bp, Homo sapiens
aagccacattatttc

SEQ ID NO: 1799886 - DNA, 15 bp, Homo sapiens
agccacattatttct

SEQ ID NO: 1799887 - DNA, 15 bp, Homo sapiens
gccacattatttcta

SEQ ID NO: 1799888 - DNA, 15 bp, Homo sapiens
ccacattatttctag

SEQ ID NO: 1799889 - DNA, 15 bp, Homo sapiens
cacattatttctagt

SEQ ID NO: 1799890 - DNA, 15 bp, Homo sapiens
acattatttctagtc

SEQ ID NO: 1799891 - DNA, 15 bp, Homo sapiens
cattatttctagtcc

SEQ ID NO: 1799892 - DNA, 15 bp, Homo sapiens
attatttctagtcca

SEQ ID NO: 1799893 - DNA, 15 bp, Homo sapiens
ttatttctagtccaa

SEQ ID NO: 1799894 - DNA, 15 bp, Homo sapiens
tatttctagtccaaa

SEQ ID NO: 1799895 - DNA, 15 bp, Homo sapiens
atttctagtccaaaa

SEQ ID NO: 1799896 - DNA, 15 bp, Homo sapiens
tttctagtccaaaat

SEQ ID NO: 1799897 - DNA, 15 bp, Homo sapiens
ttctagtccaaaatt

SEQ ID NO: 1799898 - DNA, 15 bp, Homo sapiens
tctagtccaaaatta

SEQ ID NO: 1799899 - DNA, 15 bp, Homo sapiens
ctagtccaaaattac

SEQ ID NO: 1799900 - DNA, 15 bp, Homo sapiens
tagtccaaaattaca

SEQ ID NO: 1799901 - DNA, 15 bp, Homo sapiens
agtccaaaattacaa

SEQ ID NO: 1799902 - DNA, 15 bp, Homo sapiens
gtccaaaattacaag

SEQ ID NO: 1799903 - DNA, 15 bp, Homo sapiens
tccaaaattacaagt

SEQ ID NO: 1799904 - DNA, 15 bp, Homo sapiens
ccaaaattacaagta

SEQ ID NO: 1799905 - DNA, 15 bp, Homo sapiens
caaaattacaagtaa

SEQ ID NO: 1799906 - DNA, 15 bp, Homo sapiens
aaaattacaagtaat

SEQ ID NO: 1799907 - DNA, 15 bp, Homo sapiens
aaattacaagtaatc

SEQ ID NO: 1799908 - DNA, 15 bp, Homo sapiens
aattacaagtaatca

SEQ ID NO: 1799909 - DNA, 15 bp, Homo sapiens
attacaagtaatcaa

SEQ ID NO: 1799910 - DNA, 15 bp, Homo sapiens
ttacaagtaatcaag

SEQ ID NO: 1799911 - DNA, 15 bp, Homo sapiens
tacaagtaatcaagg

SEQ ID NO: 1799912 - DNA, 15 bp, Homo sapiens
acaagtaatcaaggg

SEQ ID NO: 1799913 - DNA, 15 bp, Homo sapiens
caagtaatcaagggt

SEQ ID NO: 1799914 - DNA, 15 bp, Homo sapiens
aagtaatcaagggtc

SEQ ID NO: 1799915 - DNA, 15 bp, Homo sapiens
agtaatcaagggtca

SEQ ID NO: 1799916 - DNA, 15 bp, Homo sapiens
gtaatcaagggtcat

SEQ ID NO: 1799917 - DNA, 15 bp, Homo sapiens
taatcaagggtcatt

SEQ ID NO: 1799918 - DNA, 15 bp, Homo sapiens
aatcaagggtcatta

SEQ ID NO: 1799919 - DNA, 15 bp, Homo sapiens
atcaagggtcattat

SEQ ID NO: 1799920 - DNA, 15 bp, Homo sapiens
tcaagggtcattatg

SEQ ID NO: 1799921 - DNA, 15 bp, Homo sapiens
caagggtcattatgg

SEQ ID NO: 1799922 - DNA, 15 bp, Homo sapiens
aagggtcattatggg

SEQ ID NO: 1799923 - DNA, 15 bp, Homo sapiens
agggtcattatgggt

SEQ ID NO: 1799924 - DNA, 15 bp, Homo sapiens
gggtcattatgggtt

SEQ ID NO: 1799925 - DNA, 15 bp, Homo sapiens
ggtcattatgggtta

SEQ ID NO: 1799926 - DNA, 15 bp, Homo sapiens
gtcattatgggttag

SEQ ID NO: 1799927 - DNA, 15 bp, Homo sapiens
tcattatgggttagg

SEQ ID NO: 1799928 - DNA, 15 bp, Homo sapiens
cattatgggttaggc

SEQ ID NO: 1799929 - DNA, 15 bp, Homo sapiens
attatgggttaggca

SEQ ID NO: 1799930 - DNA, 15 bp, Homo sapiens
ttatgggttaggcat

SEQ ID NO: 1799931 - DNA, 15 bp, Homo sapiens
tatgggttaggcatt

SEQ ID NO: 1799932 - DNA, 15 bp, Homo sapiens
atgggttaggcatta

SEQ ID NO: 1799933 - DNA, 15 bp, Homo sapiens
tgggttaggcattaa

SEQ ID NO: 1799934 - DNA, 15 bp, Homo sapiens
gggttaggcattaat

SEQ ID NO: 1799935 - DNA, 15 bp, Homo sapiens
ggttaggcattaatg

SEQ ID NO: 1799936 - DNA, 15 bp, Homo sapiens
gttaggcattaatgt

SEQ ID NO: 1799937 - DNA, 15 bp, Homo sapiens
ttaggcattaatgtt

SEQ ID NO: 1799938 - DNA, 15 bp, Homo sapiens
taggcattaatgttt

SEQ ID NO: 1799939 - DNA, 15 bp, Homo sapiens
aggcattaatgtttc

SEQ ID NO: 1799940 - DNA, 15 bp, Homo sapiens
ggcattaatgtttct

SEQ ID NO: 1799941 - DNA, 15 bp, Homo sapiens
gcattaatgtttcta

SEQ ID NO: 1799942 - DNA, 15 bp, Homo sapiens
cattaatgtttctat

SEQ ID NO: 1799943 - DNA, 15 bp, Homo sapiens
attaatgtttctatc

SEQ ID NO: 1799944 - DNA, 15 bp, Homo sapiens
ttaatgtttctatct

SEQ ID NO: 1799945 - DNA, 15 bp, Homo sapiens
taatgtttctatctg

SEQ ID NO: 1799946 - DNA, 15 bp, Homo sapiens
aatgtttctatctga

SEQ ID NO: 1799947 - DNA, 15 bp, Homo sapiens
atgtttctatctgat

SEQ ID NO: 1799948 - DNA, 15 bp, Homo sapiens
tgtttctatctgatt

SEQ ID NO: 1799949 - DNA, 15 bp, Homo sapiens
gtttctatctgattt

SEQ ID NO: 1799950 - DNA, 15 bp, Homo sapiens
tttctatctgatttt

SEQ ID NO: 1799951 - DNA, 15 bp, Homo sapiens
ttctatctgattttg

SEQ ID NO: 1799952 - DNA, 15 bp, Homo sapiens
tctatctgattttgt

SEQ ID NO: 1799953 - DNA, 15 bp, Homo sapiens
ctatctgattttgtg

SEQ ID NO: 1799954 - DNA, 15 bp, Homo sapiens
tatctgattttgtgc

SEQ ID NO: 1799955 - DNA, 15 bp, Homo sapiens
atctgattttgtgca

SEQ ID NO: 1799956 - DNA, 15 bp, Homo sapiens
tctgattttgtgcaa

SEQ ID NO: 1799957 - DNA, 15 bp, Homo sapiens
ctgattttgtgcaaa

SEQ ID NO: 1799958 - DNA, 15 bp, Homo sapiens
tgattttgtgcaaaa

SEQ ID NO: 1799959 - DNA, 15 bp, Homo sapiens
gattttgtgcaaaag

SEQ ID NO: 1799960 - DNA, 15 bp, Homo sapiens
attttgtgcaaaagc

SEQ ID NO: 1799961 - DNA, 15 bp, Homo sapiens
ttttgtgcaaaagct

SEQ ID NO: 1799962 - DNA, 15 bp, Homo sapiens
tttgtgcaaaagctt

SEQ ID NO: 1799963 - DNA, 15 bp, Homo sapiens
ttgtgcaaaagcttc

SEQ ID NO: 1799964 - DNA, 15 bp, Homo sapiens
tgtgcaaaagcttca

SEQ ID NO: 1799965 - DNA, 15 bp, Homo sapiens
gtgcaaaagcttcaa

SEQ ID NO: 1799966 - DNA, 15 bp, Homo sapiens
tgcaaaagcttcaaa

SEQ ID NO: 1799967 - DNA, 15 bp, Homo sapiens
gcaaaagcttcaaat

SEQ ID NO: 1799968 - DNA, 15 bp, Homo sapiens
caaaagcttcaaatt

SEQ ID NO: 1799969 - DNA, 15 bp, Homo sapiens
aaaagcttcaaatta

SEQ ID NO: 1799970 - DNA, 15 bp, Homo sapiens
aaagcttcaaattaa

SEQ ID NO: 1799971 - DNA, 15 bp, Homo sapiens
aagcttcaaattaaa

SEQ ID NO: 1799972 - DNA, 15 bp, Homo sapiens
agcttcaaattaaaa

SEQ ID NO: 1799973 - DNA, 15 bp, Homo sapiens
gcttcaaattaaaac

SEQ ID NO: 1799974 - DNA, 15 bp, Homo sapiens
cttcaaattaaaaca

SEQ ID NO: 1799975 - DNA, 15 bp, Homo sapiens
ttcaaattaaaacag

SEQ ID NO: 1799976 - DNA, 15 bp, Homo sapiens
tcaaattaaaacagc

SEQ ID NO: 1799977 - DNA, 15 bp, Homo sapiens
caaattaaaacagct

SEQ ID NO: 1799978 - DNA, 15 bp, Homo sapiens
aaattaaaacagctg

SEQ ID NO: 1799979 - DNA, 15 bp, Homo sapiens
aattaaaacagctgc

SEQ ID NO: 1799980 - DNA, 15 bp, Homo sapiens
attaaaacagctgca

SEQ ID NO: 1799981 - DNA, 15 bp, Homo sapiens
ttaaaacagctgcat

SEQ ID NO: 1799982 - DNA, 15 bp, Homo sapiens
taaaacagctgcatt

SEQ ID NO: 1799983 - DNA, 15 bp, Homo sapiens
aaaacagctgcatta

SEQ ID NO: 1799984 - DNA, 15 bp, Homo sapiens
aaacagctgcattag

SEQ ID NO: 1799985 - DNA, 15 bp, Homo sapiens
aacagctgcattaga

SEQ ID NO: 1799986 - DNA, 15 bp, Homo sapiens
acagctgcattagaa

SEQ ID NO: 1799987 - DNA, 15 bp, Homo sapiens
cagctgcattagaaa

SEQ ID NO: 1799988 - DNA, 15 bp, Homo sapiens
agctgcattagaaaa

SEQ ID NO: 1799989 - DNA, 15 bp, Homo sapiens
gctgcattagaaaaa

SEQ ID NO: 1799990 - DNA, 15 bp, Homo sapiens
ctgcattagaaaaag

SEQ ID NO: 1799991 - DNA, 15 bp, Homo sapiens
tgcattagaaaaaga

SEQ ID NO: 1799992 - DNA, 15 bp, Homo sapiens
gcattagaaaaagag

SEQ ID NO: 1799993 - DNA, 15 bp, Homo sapiens
cattagaaaaagagg

SEQ ID NO: 1799994 - DNA, 15 bp, Homo sapiens
attagaaaaagaggc

SEQ ID NO: 1799995 - DNA, 15 bp, Homo sapiens
ttagaaaaagaggcg

SEQ ID NO: 1799996 - DNA, 15 bp, Homo sapiens
tagaaaaagaggcgc

SEQ ID NO: 1799997 - DNA, 15 bp, Homo sapiens
agaaaaagaggcgct

SEQ ID NO: 1799998 - DNA, 15 bp, Homo sapiens
gaaaaagaggcgctt

SEQ ID NO: 1799999 - DNA, 15 bp, Homo sapiens
aaaaagaggcgcttc

SEQ ID NO: 1800000 - DNA, 15 bp, Homo sapiens
aaaagaggcgcttct

SEQ ID NO: 1800001 - DNA, 15 bp, Homo sapiens
aaagaggcgcttctc

SEQ ID NO: 1800002 - DNA, 15 bp, Homo sapiens
aagaggcgcttctcc

SEQ ID NO: 1800003 - DNA, 15 bp, Homo sapiens
agaggcgcttctccc

SEQ ID NO: 1800004 - DNA, 15 bp, Homo sapiens
gaggcgcttctcccc

SEQ ID NO: 1800005 - DNA, 15 bp, Homo sapiens
aggcgcttctcccct

SEQ ID NO: 1800006 - DNA, 15 bp, Homo sapiens
ggcgcttctcccctc

SEQ ID NO: 1800007 - DNA, 15 bp, Homo sapiens
gcgcttctcccctcc

SEQ ID NO: 1800008 - DNA, 15 bp, Homo sapiens
cgcttctcccctccc

SEQ ID NO: 1800009 - DNA, 15 bp, Homo sapiens
gcttctcccctcccc

SEQ ID NO: 1800010 - DNA, 15 bp, Homo sapiens
cttctcccctcccct

SEQ ID NO: 1800011 - DNA, 15 bp, Homo sapiens
ttctcccctccccta

SEQ ID NO: 1800012 - DNA, 15 bp, Homo sapiens
tctcccctcccctac

SEQ ID NO: 1800013 - DNA, 15 bp, Homo sapiens
ctcccctcccctaca

SEQ ID NO: 1800014 - DNA, 15 bp, Homo sapiens
tcccctcccctacac

SEQ ID NO: 1800015 - DNA, 15 bp, Homo sapiens
cccctcccctacacc

SEQ ID NO: 1800016 - DNA, 15 bp, Homo sapiens
ccctcccctacacct

SEQ ID NO: 1800017 - DNA, 15 bp, Homo sapiens
cctcccctacaccta

SEQ ID NO: 1800018 - DNA, 15 bp, Homo sapiens
ctcccctacacctaa

SEQ ID NO: 1800019 - DNA, 15 bp, Homo sapiens
tcccctacacctaaa

SEQ ID NO: 1800020 - DNA, 15 bp, Homo sapiens
cccctacacctaaag

SEQ ID NO: 1800021 - DNA, 15 bp, Homo sapiens
ccctacacctaaagg

SEQ ID NO: 1800022 - DNA, 15 bp, Homo sapiens
cctacacctaaaggt

SEQ ID NO: 1800023 - DNA, 15 bp, Homo sapiens
ctacacctaaaggtg

SEQ ID NO: 1800024 - DNA, 15 bp, Homo sapiens
tacacctaaaggtgt

SEQ ID NO: 1800025 - DNA, 15 bp, Homo sapiens
acacctaaaggtgta

SEQ ID NO: 1800026 - DNA, 15 bp, Homo sapiens
cacctaaaggtgtat

SEQ ID NO: 1800027 - DNA, 15 bp, Homo sapiens
acctaaaggtgtatt

SEQ ID NO: 1800028 - DNA, 15 bp, Homo sapiens
cctaaaggtgtattt

SEQ ID NO: 1800029 - DNA, 15 bp, Homo sapiens
ctaaaggtgtattta

SEQ ID NO: 1800030 - DNA, 15 bp, Homo sapiens
taaaggtgtatttaa

SEQ ID NO: 1800031 - DNA, 15 bp, Homo sapiens
aaaggtgtatttaaa

SEQ ID NO: 1800032 - DNA, 15 bp, Homo sapiens
aaggtgtatttaaac

SEQ ID NO: 1800033 - DNA, 15 bp, Homo sapiens
aggtgtatttaaact

SEQ ID NO: 1800034 - DNA, 15 bp, Homo sapiens
ggtgtatttaaacta

SEQ ID NO: 1800035 - DNA, 15 bp, Homo sapiens
gtgtatttaaactat

SEQ ID NO: 1800036 - DNA, 15 bp, Homo sapiens
tgtatttaaactatc

SEQ ID NO: 1800037 - DNA, 15 bp, Homo sapiens
gtatttaaactatct

SEQ ID NO: 1800038 - DNA, 15 bp, Homo sapiens
tatttaaactatctt

SEQ ID NO: 1800039 - DNA, 15 bp, Homo sapiens
atttaaactatcttg

SEQ ID NO: 1800040 - DNA, 15 bp, Homo sapiens
tttaaactatcttgt

SEQ ID NO: 1800041 - DNA, 15 bp, Homo sapiens
ttaaactatcttgtg

SEQ ID NO: 1800042 - DNA, 15 bp, Homo sapiens
taaactatcttgtgt

SEQ ID NO: 1800043 - DNA, 15 bp, Homo sapiens
aaactatcttgtgtg

SEQ ID NO: 1800044 - DNA, 15 bp, Homo sapiens
aactatcttgtgtga

SEQ ID NO: 1800045 - DNA, 15 bp, Homo sapiens
actatcttgtgtgat

SEQ ID NO: 1800046 - DNA, 15 bp, Homo sapiens
ctatcttgtgtgatt

SEQ ID NO: 1800047 - DNA, 15 bp, Homo sapiens
tatcttgtgtgatta

SEQ ID NO: 1800048 - DNA, 15 bp, Homo sapiens
atcttgtgtgattaa

SEQ ID NO: 1800049 - DNA, 15 bp, Homo sapiens
tcttgtgtgattaac

SEQ ID NO: 1800050 - DNA, 15 bp, Homo sapiens
cttgtgtgattaact

SEQ ID NO: 1800051 - DNA, 15 bp, Homo sapiens
ttgtgtgattaactt

SEQ ID NO: 1800052 - DNA, 15 bp, Homo sapiens
tgtgtgattaactta

SEQ ID NO: 1800053 - DNA, 15 bp, Homo sapiens
gtgtgattaacttat

SEQ ID NO: 1800054 - DNA, 15 bp, Homo sapiens
tgtgattaacttatt

SEQ ID NO: 1800055 - DNA, 15 bp, Homo sapiens
gtgattaacttattt

SEQ ID NO: 1800056 - DNA, 15 bp, Homo sapiens
tgattaacttattta

SEQ ID NO: 1800057 - DNA, 15 bp, Homo sapiens
gattaacttatttag

SEQ ID NO: 1800058 - DNA, 15 bp, Homo sapiens
attaacttatttaga

SEQ ID NO: 1800059 - DNA, 15 bp, Homo sapiens
ttaacttatttagag

SEQ ID NO: 1800060 - DNA, 15 bp, Homo sapiens
taacttatttagaga

SEQ ID NO: 1800061 - DNA, 15 bp, Homo sapiens
aacttatttagagat

SEQ ID NO: 1800062 - DNA, 15 bp, Homo sapiens
acttatttagagatg

SEQ ID NO: 1800063 - DNA, 15 bp, Homo sapiens
cttatttagagatgc

SEQ ID NO: 1800064 - DNA, 15 bp, Homo sapiens
ttatttagagatgct

SEQ ID NO: 1800065 - DNA, 15 bp, Homo sapiens
tatttagagatgctg

SEQ ID NO: 1800066 - DNA, 15 bp, Homo sapiens
atttagagatgctgt

SEQ ID NO: 1800067 - DNA, 15 bp, Homo sapiens
tttagagatgctgta

SEQ ID NO: 1800068 - DNA, 15 bp, Homo sapiens
ttagagatgctgtaa

SEQ ID NO: 1800069 - DNA, 15 bp, Homo sapiens
tagagatgctgtaac

SEQ ID NO: 1800070 - DNA, 15 bp, Homo sapiens
agagatgctgtaact

SEQ ID NO: 1800071 - DNA, 15 bp, Homo sapiens
gagatgctgtaactt

SEQ ID NO: 1800072 - DNA, 15 bp, Homo sapiens
agatgctgtaactta

SEQ ID NO: 1800073 - DNA, 15 bp, Homo sapiens
gatgctgtaacttaa

SEQ ID NO: 1800074 - DNA, 15 bp, Homo sapiens
atgctgtaacttaaa

SEQ ID NO: 1800075 - DNA, 15 bp, Homo sapiens
tgctgtaacttaaaa

SEQ ID NO: 1800076 - DNA, 15 bp, Homo sapiens
gctgtaacttaaaat

SEQ ID NO: 1800077 - DNA, 15 bp, Homo sapiens
ctgtaacttaaaata

SEQ ID NO: 1800078 - DNA, 15 bp, Homo sapiens
tgtaacttaaaatag

SEQ ID NO: 1800079 - DNA, 15 bp, Homo sapiens
gtaacttaaaatagg

SEQ ID NO: 1800080 - DNA, 15 bp, Homo sapiens
taacttaaaataggg

SEQ ID NO: 1800081 - DNA, 15 bp, Homo sapiens
aacttaaaatagggg

SEQ ID NO: 1800082 - DNA, 15 bp, Homo sapiens
acttaaaatagggga

SEQ ID NO: 1800083 - DNA, 15 bp, Homo sapiens
cttaaaataggggat

SEQ ID NO: 1800084 - DNA, 15 bp, Homo sapiens
ttaaaataggggata

SEQ ID NO: 1800085 - DNA, 15 bp, Homo sapiens
taaaataggggatat

SEQ ID NO: 1800086 - DNA, 15 bp, Homo sapiens
aaaataggggatatt

SEQ ID NO: 1800087 - DNA, 15 bp, Homo sapiens
aaataggggatattt

SEQ ID NO: 1800088 - DNA, 15 bp, Homo sapiens
aataggggatattta

SEQ ID NO: 1800089 - DNA, 15 bp, Homo sapiens
ataggggatatttaa

SEQ ID NO: 1800090 - DNA, 15 bp, Homo sapiens
taggggatatttaag

SEQ ID NO: 1800091 - DNA, 15 bp, Homo sapiens
aggggatatttaagg

SEQ ID NO: 1800092 - DNA, 15 bp, Homo sapiens
ggggatatttaaggt

SEQ ID NO: 1800093 - DNA, 15 bp, Homo sapiens
gggatatttaaggta

SEQ ID NO: 1800094 - DNA, 15 bp, Homo sapiens
ggatatttaaggtag

SEQ ID NO: 1800095 - DNA, 15 bp, Homo sapiens
gatatttaaggtagc

SEQ ID NO: 1800096 - DNA, 15 bp, Homo sapiens
atatttaaggtagct

SEQ ID NO: 1800097 - DNA, 15 bp, Homo sapiens
tatttaaggtagctt

SEQ ID NO: 1800098 - DNA, 15 bp, Homo sapiens
atttaaggtagcttc

SEQ ID NO: 1800099 - DNA, 15 bp, Homo sapiens
tttaaggtagcttca

SEQ ID NO: 1800100 - DNA, 15 bp, Homo sapiens
ttaaggtagcttcag

SEQ ID NO: 1800101 - DNA, 15 bp, Homo sapiens
taaggtagcttcagc

SEQ ID NO: 1800102 - DNA, 15 bp, Homo sapiens
aaggtagcttcagct

SEQ ID NO: 1800103 - DNA, 15 bp, Homo sapiens
aggtagcttcagcta

SEQ ID NO: 1800104 - DNA, 15 bp, Homo sapiens
ggtagcttcagctag

SEQ ID NO: 1800105 - DNA, 15 bp, Homo sapiens
gtagcttcagctagc

SEQ ID NO: 1800106 - DNA, 15 bp, Homo sapiens
tagcttcagctagct

SEQ ID NO: 1800107 - DNA, 15 bp, Homo sapiens
agcttcagctagctt

SEQ ID NO: 1800108 - DNA, 15 bp, Homo sapiens
gcttcagctagcttt

SEQ ID NO: 1800109 - DNA, 15 bp, Homo sapiens
cttcagctagctttt

SEQ ID NO: 1800110 - DNA, 15 bp, Homo sapiens
ttcagctagctttta

SEQ ID NO: 1800111 - DNA, 15 bp, Homo sapiens
tcagctagcttttag

SEQ ID NO: 1800112 - DNA, 15 bp, Homo sapiens
cagctagcttttagg

SEQ ID NO: 1800113 - DNA, 15 bp, Homo sapiens
agctagcttttagga

SEQ ID NO: 1800114 - DNA, 15 bp, Homo sapiens
gctagcttttaggaa

SEQ ID NO: 1800115 - DNA, 15 bp, Homo sapiens
ctagcttttaggaaa

SEQ ID NO: 1800116 - DNA, 15 bp, Homo sapiens
tagcttttaggaaaa

SEQ ID NO: 1800117 - DNA, 15 bp, Homo sapiens
agcttttaggaaaat

SEQ ID NO: 1800118 - DNA, 15 bp, Homo sapiens
gcttttaggaaaatc

SEQ ID NO: 1800119 - DNA, 15 bp, Homo sapiens
cttttaggaaaatca

SEQ ID NO: 1800120 - DNA, 15 bp, Homo sapiens
ttttaggaaaatcac

SEQ ID NO: 1800121 - DNA, 15 bp, Homo sapiens
tttaggaaaatcact

SEQ ID NO: 1800122 - DNA, 15 bp, Homo sapiens
ttaggaaaatcactt

SEQ ID NO: 1800123 - DNA, 15 bp, Homo sapiens
taggaaaatcacttt

SEQ ID NO: 1800124 - DNA, 15 bp, Homo sapiens
aggaaaatcactttg

SEQ ID NO: 1800125 - DNA, 15 bp, Homo sapiens
ggaaaatcactttgt

SEQ ID NO: 1800126 - DNA, 15 bp, Homo sapiens
gaaaatcactttgtc

SEQ ID NO: 1800127 - DNA, 15 bp, Homo sapiens
aaaatcactttgtct

SEQ ID NO: 1800128 - DNA, 15 bp, Homo sapiens
aaatcactttgtcta

SEQ ID NO: 1800129 - DNA, 15 bp, Homo sapiens
aatcactttgtctaa

SEQ ID NO: 1800130 - DNA, 15 bp, Homo sapiens
atcactttgtctaac

SEQ ID NO: 1800131 - DNA, 15 bp, Homo sapiens
tcactttgtctaact

SEQ ID NO: 1800132 - DNA, 15 bp, Homo sapiens
cactttgtctaactc

SEQ ID NO: 1800133 - DNA, 15 bp, Homo sapiens
actttgtctaactca

SEQ ID NO: 1800134 - DNA, 15 bp, Homo sapiens
ctttgtctaactcag

SEQ ID NO: 1800135 - DNA, 15 bp, Homo sapiens
tttgtctaactcaga

SEQ ID NO: 1800136 - DNA, 15 bp, Homo sapiens
ttgtctaactcagaa

SEQ ID NO: 1800137 - DNA, 15 bp, Homo sapiens
tgtctaactcagaat

SEQ ID NO: 1800138 - DNA, 15 bp, Homo sapiens
gtctaactcagaatt

SEQ ID NO: 1800139 - DNA, 15 bp, Homo sapiens
tctaactcagaatta

SEQ ID NO: 1800140 - DNA, 15 bp, Homo sapiens
ctaactcagaattat

SEQ ID NO: 1800141 - DNA, 15 bp, Homo sapiens
taactcagaattatt

SEQ ID NO: 1800142 - DNA, 15 bp, Homo sapiens
aactcagaattattt

SEQ ID NO: 1800143 - DNA, 15 bp, Homo sapiens
actcagaattatttt

SEQ ID NO: 1800144 - DNA, 15 bp, Homo sapiens
ctcagaattattttt

SEQ ID NO: 1800145 - DNA, 15 bp, Homo sapiens
tcagaattattttta

SEQ ID NO: 1800146 - DNA, 15 bp, Homo sapiens
cagaattatttttaa

SEQ ID NO: 1800147 - DNA, 15 bp, Homo sapiens
agaattatttttaaa

SEQ ID NO: 1800148 - DNA, 15 bp, Homo sapiens
gaattatttttaaaa

SEQ ID NO: 1800149 - DNA, 15 bp, Homo sapiens
tttttaaaaagaaat

SEQ ID NO: 1800150 - DNA, 15 bp, Homo sapiens
ttttaaaaagaaatc

SEQ ID NO: 1800151 - DNA, 15 bp, Homo sapiens
tttaaaaagaaatct

SEQ ID NO: 1800152 - DNA, 15 bp, Homo sapiens
taaaaagaaatctgg

SEQ ID NO: 1800153 - DNA, 15 bp, Homo sapiens
aaaaagaaatctggt

SEQ ID NO: 1800154 - DNA, 15 bp, Homo sapiens
aaaagaaatctggtc

SEQ ID NO: 1800155 - DNA, 15 bp, Homo sapiens
aaagaaatctggtct

SEQ ID NO: 1800156 - DNA, 15 bp, Homo sapiens
aagaaatctggtctt

SEQ ID NO: 1800157 - DNA, 15 bp, Homo sapiens
agaaatctggtcttg

SEQ ID NO: 1800158 - DNA, 15 bp, Homo sapiens
gaaatctggtcttgt

SEQ ID NO: 1800159 - DNA, 15 bp, Homo sapiens
aaatctggtcttgtt

SEQ ID NO: 1800160 - DNA, 15 bp, Homo sapiens
aatctggtcttgtta

SEQ ID NO: 1800161 - DNA, 15 bp, Homo sapiens
atctggtcttgttag

SEQ ID NO: 1800162 - DNA, 15 bp, Homo sapiens
tctggtcttgttaga

SEQ ID NO: 1800163 - DNA, 15 bp, Homo sapiens
ctggtcttgttagaa

SEQ ID NO: 1800164 - DNA, 15 bp, Homo sapiens
tggtcttgttagaaa

SEQ ID NO: 1800165 - DNA, 15 bp, Homo sapiens
ggtcttgttagaaaa

SEQ ID NO: 1800166 - DNA, 15 bp, Homo sapiens
gtcttgttagaaaac

SEQ ID NO: 1800167 - DNA, 15 bp, Homo sapiens
tcttgttagaaaaca

SEQ ID NO: 1800168 - DNA, 15 bp, Homo sapiens
cttgttagaaaacaa

SEQ ID NO: 1800169 - DNA, 15 bp, Homo sapiens
ttgttagaaaacaaa

SEQ ID NO: 1800170 - DNA, 15 bp, Homo sapiens
tgttagaaaacaaaa

SEQ ID NO: 1800171 - DNA, 15 bp, Homo sapiens
gttagaaaacaaaat

SEQ ID NO: 1800172 - DNA, 15 bp, Homo sapiens
ttagaaaacaaaatt

SEQ ID NO: 1800173 - DNA, 15 bp, Homo sapiens
tagaaaacaaaattt

SEQ ID NO: 1800174 - DNA, 15 bp, Homo sapiens
agaaaacaaaatttt

SEQ ID NO: 1800175 - DNA, 15 bp, Homo sapiens
gaaaacaaaatttta

SEQ ID NO: 1800176 - DNA, 15 bp, Homo sapiens
aaaacaaaattttat

SEQ ID NO: 1800177 - DNA, 15 bp, Homo sapiens
aaacaaaattttatt

SEQ ID NO: 1800178 - DNA, 15 bp, Homo sapiens
aacaaaattttattt

SEQ ID NO: 1800179 - DNA, 15 bp, Homo sapiens
acaaaattttatttt

SEQ ID NO: 1800180 - DNA, 15 bp, Homo sapiens
caaaattttattttg

SEQ ID NO: 1800181 - DNA, 15 bp, Homo sapiens
aaaattttattttgt

SEQ ID NO: 1800182 - DNA, 15 bp, Homo sapiens
aaattttattttgtg

SEQ ID NO: 1800183 - DNA, 15 bp, Homo sapiens
aattttattttgtgc

SEQ ID NO: 1800184 - DNA, 15 bp, Homo sapiens
attttattttgtgct

SEQ ID NO: 1800185 - DNA, 15 bp, Homo sapiens
ttttattttgtgctc

SEQ ID NO: 1800186 - DNA, 15 bp, Homo sapiens
tttattttgtgctca

SEQ ID NO: 1800187 - DNA, 15 bp, Homo sapiens
ttattttgtgctcat

SEQ ID NO: 1800188 - DNA, 15 bp, Homo sapiens
tattttgtgctcatt

SEQ ID NO: 1800189 - DNA, 15 bp, Homo sapiens
attttgtgctcattt

SEQ ID NO: 1800190 - DNA, 15 bp, Homo sapiens
ttttgtgctcattta

SEQ ID NO: 1800191 - DNA, 15 bp, Homo sapiens
tttgtgctcatttaa

SEQ ID NO: 1800192 - DNA, 15 bp, Homo sapiens
ttgtgctcatttaag

SEQ ID NO: 1800193 - DNA, 15 bp, Homo sapiens
tgtgctcatttaagt

SEQ ID NO: 1800194 - DNA, 15 bp, Homo sapiens
gtgctcatttaagtt

SEQ ID NO: 1800195 - DNA, 15 bp, Homo sapiens
tgctcatttaagttt

SEQ ID NO: 1800196 - DNA, 15 bp, Homo sapiens
gctcatttaagtttc

SEQ ID NO: 1800197 - DNA, 15 bp, Homo sapiens
ctcatttaagtttca

SEQ ID NO: 1800198 - DNA, 15 bp, Homo sapiens
tcatttaagtttcaa

SEQ ID NO: 1800199 - DNA, 15 bp, Homo sapiens
catttaagtttcaaa

SEQ ID NO: 1800200 - DNA, 15 bp, Homo sapiens
atttaagtttcaaac

SEQ ID NO: 1800201 - DNA, 15 bp, Homo sapiens
tttaagtttcaaact

SEQ ID NO: 1800202 - DNA, 15 bp, Homo sapiens
ttaagtttcaaactt

SEQ ID NO: 1800203 - DNA, 15 bp, Homo sapiens
taagtttcaaactta

SEQ ID NO: 1800204 - DNA, 15 bp, Homo sapiens
aagtttcaaacttac

SEQ ID NO: 1800205 - DNA, 15 bp, Homo sapiens
agtttcaaacttact

SEQ ID NO: 1800206 - DNA, 15 bp, Homo sapiens
gtttcaaacttacta

SEQ ID NO: 1800207 - DNA, 15 bp, Homo sapiens
tttcaaacttactat

SEQ ID NO: 1800208 - DNA, 15 bp, Homo sapiens
ttcaaacttactatt

SEQ ID NO: 1800209 - DNA, 15 bp, Homo sapiens
tcaaacttactattt

SEQ ID NO: 1800210 - DNA, 15 bp, Homo sapiens
caaacttactatttt

SEQ ID NO: 1800211 - DNA, 15 bp, Homo sapiens
aaacttactattttg

SEQ ID NO: 1800212 - DNA, 15 bp, Homo sapiens
aacttactattttga

SEQ ID NO: 1800213 - DNA, 15 bp, Homo sapiens
acttactattttgac

SEQ ID NO: 1800214 - DNA, 15 bp, Homo sapiens
cttactattttgaca

SEQ ID NO: 1800215 - DNA, 15 bp, Homo sapiens
ttactattttgacag

SEQ ID NO: 1800216 - DNA, 15 bp, Homo sapiens
tactattttgacagt

SEQ ID NO: 1800217 - DNA, 15 bp, Homo sapiens
actattttgacagtt

SEQ ID NO: 1800218 - DNA, 15 bp, Homo sapiens
ctattttgacagtta

SEQ ID NO: 1800219 - DNA, 15 bp, Homo sapiens
tattttgacagttat

SEQ ID NO: 1800220 - DNA, 15 bp, Homo sapiens
attttgacagttatt

SEQ ID NO: 1800221 - DNA, 15 bp, Homo sapiens
ttttgacagttattt

SEQ ID NO: 1800222 - DNA, 15 bp, Homo sapiens
tttgacagttatttt

SEQ ID NO: 1800223 - DNA, 15 bp, Homo sapiens
ttgacagttattttg

SEQ ID NO: 1800224 - DNA, 15 bp, Homo sapiens
tgacagttattttga

SEQ ID NO: 1800225 - DNA, 15 bp, Homo sapiens
gacagttattttgat

SEQ ID NO: 1800226 - DNA, 15 bp, Homo sapiens
acagttattttgata

SEQ ID NO: 1800227 - DNA, 15 bp, Homo sapiens
cagttattttgataa

SEQ ID NO: 1800228 - DNA, 15 bp, Homo sapiens
agttattttgataac

SEQ ID NO: 1800229 - DNA, 15 bp, Homo sapiens
gttattttgataaca

SEQ ID NO: 1800230 - DNA, 15 bp, Homo sapiens
ttattttgataacaa

SEQ ID NO: 1800231 - DNA, 15 bp, Homo sapiens
tattttgataacaat

SEQ ID NO: 1800232 - DNA, 15 bp, Homo sapiens
attttgataacaatg

SEQ ID NO: 1800233 - DNA, 15 bp, Homo sapiens
ttttgataacaatga

SEQ ID NO: 1800234 - DNA, 15 bp, Homo sapiens
tttgataacaatgac

SEQ ID NO: 1800235 - DNA, 15 bp, Homo sapiens
ttgataacaatgaca

SEQ ID NO: 1800236 - DNA, 15 bp, Homo sapiens
tgataacaatgacac

SEQ ID NO: 1800237 - DNA, 15 bp, Homo sapiens
gataacaatgacact

SEQ ID NO: 1800238 - DNA, 15 bp, Homo sapiens
ataacaatgacacta

SEQ ID NO: 1800239 - DNA, 15 bp, Homo sapiens
taacaatgacactag

SEQ ID NO: 1800240 - DNA, 15 bp, Homo sapiens
aacaatgacactaga

SEQ ID NO: 1800241 - DNA, 15 bp, Homo sapiens
acaatgacactagaa

SEQ ID NO: 1800242 - DNA, 15 bp, Homo sapiens
caatgacactagaaa

SEQ ID NO: 1800243 - DNA, 15 bp, Homo sapiens
aatgacactagaaaa

SEQ ID NO: 1800244 - DNA, 15 bp, Homo sapiens
atgacactagaaaac

SEQ ID NO: 1800245 - DNA, 15 bp, Homo sapiens
tgacactagaaaact

SEQ ID NO: 1800246 - DNA, 15 bp, Homo sapiens
gacactagaaaactt

SEQ ID NO: 1800247 - DNA, 15 bp, Homo sapiens
acactagaaaacttg

SEQ ID NO: 1800248 - DNA, 15 bp, Homo sapiens
cactagaaaacttga

SEQ ID NO: 1800249 - DNA, 15 bp, Homo sapiens
actagaaaacttgac

SEQ ID NO: 1800250 - DNA, 15 bp, Homo sapiens
ctagaaaacttgact

SEQ ID NO: 1800251 - DNA, 15 bp, Homo sapiens
tagaaaacttgactc

SEQ ID NO: 1800252 - DNA, 15 bp, Homo sapiens
agaaaacttgactcc

SEQ ID NO: 1800253 - DNA, 15 bp, Homo sapiens
gaaaacttgactcca

SEQ ID NO: 1800254 - DNA, 15 bp, Homo sapiens
aaaacttgactccat

SEQ ID NO: 1800255 - DNA, 15 bp, Homo sapiens
aaacttgactccatt

SEQ ID NO: 1800256 - DNA, 15 bp, Homo sapiens
aacttgactccattt

SEQ ID NO: 1800257 - DNA, 15 bp, Homo sapiens
acttgactccatttc

SEQ ID NO: 1800258 - DNA, 15 bp, Homo sapiens
cttgactccatttca

SEQ ID NO: 1800259 - DNA, 15 bp, Homo sapiens
ttgactccatttcat

SEQ ID NO: 1800260 - DNA, 15 bp, Homo sapiens
tgactccatttcatc

SEQ ID NO: 1800261 - DNA, 15 bp, Homo sapiens
gactccatttcatca

SEQ ID NO: 1800262 - DNA, 15 bp, Homo sapiens
actccatttcatcat

SEQ ID NO: 1800263 - DNA, 15 bp, Homo sapiens
ctccatttcatcatt

SEQ ID NO: 1800264 - DNA, 15 bp, Homo sapiens
tccatttcatcattg

SEQ ID NO: 1800265 - DNA, 15 bp, Homo sapiens
ccatttcatcattgt

SEQ ID NO: 1800266 - DNA, 15 bp, Homo sapiens
catttcatcattgtt

SEQ ID NO: 1800267 - DNA, 15 bp, Homo sapiens
atttcatcattgttt

SEQ ID NO: 1800268 - DNA, 15 bp, Homo sapiens
tttcatcattgtttc

SEQ ID NO: 1800269 - DNA, 15 bp, Homo sapiens
ttcatcattgtttct

SEQ ID NO: 1800270 - DNA, 15 bp, Homo sapiens
tcatcattgtttctg

SEQ ID NO: 1800271 - DNA, 15 bp, Homo sapiens
catcattgtttctgc

SEQ ID NO: 1800272 - DNA, 15 bp, Homo sapiens
atcattgtttctgca

SEQ ID NO: 1800273 - DNA, 15 bp, Homo sapiens
tcattgtttctgcat

SEQ ID NO: 1800274 - DNA, 15 bp, Homo sapiens
cattgtttctgcatg

SEQ ID NO: 1800275 - DNA, 15 bp, Homo sapiens
attgtttctgcatga

SEQ ID NO: 1800276 - DNA, 15 bp, Homo sapiens
ttgtttctgcatgaa

SEQ ID NO: 1800277 - DNA, 15 bp, Homo sapiens
tgtttctgcatgaat

SEQ ID NO: 1800278 - DNA, 15 bp, Homo sapiens
gtttctgcatgaata

SEQ ID NO: 1800279 - DNA, 15 bp, Homo sapiens
tttctgcatgaatat

SEQ ID NO: 1800280 - DNA, 15 bp, Homo sapiens
ttctgcatgaatatc

SEQ ID NO: 1800281 - DNA, 15 bp, Homo sapiens
tctgcatgaatatca

SEQ ID NO: 1800282 - DNA, 15 bp, Homo sapiens
ctgcatgaatatcat

SEQ ID NO: 1800283 - DNA, 15 bp, Homo sapiens
tgcatgaatatcata

SEQ ID NO: 1800284 - DNA, 15 bp, Homo sapiens
gcatgaatatcatac

SEQ ID NO: 1800285 - DNA, 15 bp, Homo sapiens
catgaatatcataca

SEQ ID NO: 1800286 - DNA, 15 bp, Homo sapiens
atgaatatcatacaa

SEQ ID NO: 1800287 - DNA, 15 bp, Homo sapiens
tgaatatcatacaaa

SEQ ID NO: 1800288 - DNA, 15 bp, Homo sapiens
gaatatcatacaaat

SEQ ID NO: 1800289 - DNA, 15 bp, Homo sapiens
aatatcatacaaatc

SEQ ID NO: 1800290 - DNA, 15 bp, Homo sapiens
atatcatacaaatca

SEQ ID NO: 1800291 - DNA, 15 bp, Homo sapiens
tatcatacaaatcag

SEQ ID NO: 1800292 - DNA, 15 bp, Homo sapiens
atcatacaaatcagt

SEQ ID NO: 1800293 - DNA, 15 bp, Homo sapiens
tcatacaaatcagtt

SEQ ID NO: 1800294 - DNA, 15 bp, Homo sapiens
catacaaatcagtta

SEQ ID NO: 1800295 - DNA, 15 bp, Homo sapiens
atacaaatcagttag

SEQ ID NO: 1800296 - DNA, 15 bp, Homo sapiens
tacaaatcagttagt

SEQ ID NO: 1800297 - DNA, 15 bp, Homo sapiens
acaaatcagttagtt

SEQ ID NO: 1800298 - DNA, 15 bp, Homo sapiens
caaatcagttagttt

SEQ ID NO: 1800299 - DNA, 15 bp, Homo sapiens
aaatcagttagtttt

SEQ ID NO: 1800300 - DNA, 15 bp, Homo sapiens
aatcagttagttttt

SEQ ID NO: 1800301 - DNA, 15 bp, Homo sapiens
atcagttagttttta

SEQ ID NO: 1800302 - DNA, 15 bp, Homo sapiens
tcagttagtttttag

SEQ ID NO: 1800303 - DNA, 15 bp, Homo sapiens
cagttagtttttagg

SEQ ID NO: 1800304 - DNA, 15 bp, Homo sapiens
agttagtttttaggt

SEQ ID NO: 1800305 - DNA, 15 bp, Homo sapiens
gttagtttttaggtc

SEQ ID NO: 1800306 - DNA, 15 bp, Homo sapiens
ttagtttttaggtca

SEQ ID NO: 1800307 - DNA, 15 bp, Homo sapiens
tagtttttaggtcaa

SEQ ID NO: 1800308 - DNA, 15 bp, Homo sapiens
agtttttaggtcaag

SEQ ID NO: 1800309 - DNA, 15 bp, Homo sapiens
gtttttaggtcaagg

SEQ ID NO: 1800310 - DNA, 15 bp, Homo sapiens
tttttaggtcaaggg

SEQ ID NO: 1800311 - DNA, 15 bp, Homo sapiens
ttttaggtcaagggc

SEQ ID NO: 1800312 - DNA, 15 bp, Homo sapiens
tttaggtcaagggct

SEQ ID NO: 1800313 - DNA, 15 bp, Homo sapiens
ttaggtcaagggctt

SEQ ID NO: 1800314 - DNA, 15 bp, Homo sapiens
taggtcaagggctta

SEQ ID NO: 1800315 - DNA, 15 bp, Homo sapiens
aggtcaagggcttac

SEQ ID NO: 1800316 - DNA, 15 bp, Homo sapiens
ggtcaagggcttact

SEQ ID NO: 1800317 - DNA, 15 bp, Homo sapiens
gtcaagggcttacta

SEQ ID NO: 1800318 - DNA, 15 bp, Homo sapiens
tcaagggcttactat

SEQ ID NO: 1800319 - DNA, 15 bp, Homo sapiens
caagggcttactatt

SEQ ID NO: 1800320 - DNA, 15 bp, Homo sapiens
aagggcttactattt

SEQ ID NO: 1800321 - DNA, 15 bp, Homo sapiens
agggcttactatttc

SEQ ID NO: 1800322 - DNA, 15 bp, Homo sapiens
gggcttactatttct

SEQ ID NO: 1800323 - DNA, 15 bp, Homo sapiens
ggcttactatttctg

SEQ ID NO: 1800324 - DNA, 15 bp, Homo sapiens
gcttactatttctgg

SEQ ID NO: 1800325 - DNA, 15 bp, Homo sapiens
cttactatttctggg

SEQ ID NO: 1800326 - DNA, 15 bp, Homo sapiens
ttactatttctgggt

SEQ ID NO: 1800327 - DNA, 15 bp, Homo sapiens
tactatttctgggtc

SEQ ID NO: 1800328 - DNA, 15 bp, Homo sapiens
actatttctgggtct

SEQ ID NO: 1800329 - DNA, 15 bp, Homo sapiens
ctatttctgggtctt

SEQ ID NO: 1800330 - DNA, 15 bp, Homo sapiens
tatttctgggtcttt

SEQ ID NO: 1800331 - DNA, 15 bp, Homo sapiens
atttctgggtctttt

SEQ ID NO: 1800332 - DNA, 15 bp, Homo sapiens
tttctgggtcttttg

SEQ ID NO: 1800333 - DNA, 15 bp, Homo sapiens
ttctgggtcttttgc

SEQ ID NO: 1800334 - DNA, 15 bp, Homo sapiens
tctgggtcttttgct

SEQ ID NO: 1800335 - DNA, 15 bp, Homo sapiens
ctgggtcttttgcta

SEQ ID NO: 1800336 - DNA, 15 bp, Homo sapiens
tgggtcttttgctac

SEQ ID NO: 1800337 - DNA, 15 bp, Homo sapiens
gggtcttttgctact

SEQ ID NO: 1800338 - DNA, 15 bp, Homo sapiens
ggtcttttgctacta

SEQ ID NO: 1800339 - DNA, 15 bp, Homo sapiens
gtcttttgctactaa

SEQ ID NO: 1800340 - DNA, 15 bp, Homo sapiens
tcttttgctactaag

SEQ ID NO: 1800341 - DNA, 15 bp, Homo sapiens
cttttgctactaagt

SEQ ID NO: 1800342 - DNA, 15 bp, Homo sapiens
ttttgctactaagtt

SEQ ID NO: 1800343 - DNA, 15 bp, Homo sapiens
tttgctactaagttc

SEQ ID NO: 1800344 - DNA, 15 bp, Homo sapiens
ttgctactaagttca

SEQ ID NO: 1800345 - DNA, 15 bp, Homo sapiens
tgctactaagttcac

SEQ ID NO: 1800346 - DNA, 15 bp, Homo sapiens
gctactaagttcaca

SEQ ID NO: 1800347 - DNA, 15 bp, Homo sapiens
ctactaagttcacat

SEQ ID NO: 1800348 - DNA, 15 bp, Homo sapiens
tactaagttcacatt

SEQ ID NO: 1800349 - DNA, 15 bp, Homo sapiens
actaagttcacatta

SEQ ID NO: 1800350 - DNA, 15 bp, Homo sapiens
ctaagttcacattag

SEQ ID NO: 1800351 - DNA, 15 bp, Homo sapiens
taagttcacattaga

SEQ ID NO: 1800352 - DNA, 15 bp, Homo sapiens
aagttcacattagaa

SEQ ID NO: 1800353 - DNA, 15 bp, Homo sapiens
agttcacattagaat

SEQ ID NO: 1800354 - DNA, 15 bp, Homo sapiens
gttcacattagaatt

SEQ ID NO: 1800355 - DNA, 15 bp, Homo sapiens
ttcacattagaatta

SEQ ID NO: 1800356 - DNA, 15 bp, Homo sapiens
tcacattagaattag

SEQ ID NO: 1800357 - DNA, 15 bp, Homo sapiens
cacattagaattagt

SEQ ID NO: 1800358 - DNA, 15 bp, Homo sapiens
acattagaattagtg

SEQ ID NO: 1800359 - DNA, 15 bp, Homo sapiens
cattagaattagtgc

SEQ ID NO: 1800360 - DNA, 15 bp, Homo sapiens
attagaattagtgcc

SEQ ID NO: 1800361 - DNA, 15 bp, Homo sapiens
ttagaattagtgcca

SEQ ID NO: 1800362 - DNA, 15 bp, Homo sapiens
tagaattagtgccag

SEQ ID NO: 1800363 - DNA, 15 bp, Homo sapiens
agaattagtgccaga

SEQ ID NO: 1800364 - DNA, 15 bp, Homo sapiens
gaattagtgccagaa

SEQ ID NO: 1800365 - DNA, 15 bp, Homo sapiens
aattagtgccagaat

SEQ ID NO: 1800366 - DNA, 15 bp, Homo sapiens
attagtgccagaatt

SEQ ID NO: 1800367 - DNA, 15 bp, Homo sapiens
ttagtgccagaattt

SEQ ID NO: 1800368 - DNA, 15 bp, Homo sapiens
tagtgccagaatttt

SEQ ID NO: 1800369 - DNA, 15 bp, Homo sapiens
agtgccagaatttta

SEQ ID NO: 1800370 - DNA, 15 bp, Homo sapiens
gtgccagaattttag

SEQ ID NO: 1800371 - DNA, 15 bp, Homo sapiens
tgccagaattttagg

SEQ ID NO: 1800372 - DNA, 15 bp, Homo sapiens
gccagaattttagga

SEQ ID NO: 1800373 - DNA, 15 bp, Homo sapiens
ccagaattttaggaa

SEQ ID NO: 1800374 - DNA, 15 bp, Homo sapiens
cagaattttaggaac

SEQ ID NO: 1800375 - DNA, 15 bp, Homo sapiens
agaattttaggaact

SEQ ID NO: 1800376 - DNA, 15 bp, Homo sapiens
gaattttaggaactt

SEQ ID NO: 1800377 - DNA, 15 bp, Homo sapiens
aattttaggaacttc

SEQ ID NO: 1800378 - DNA, 15 bp, Homo sapiens
attttaggaacttca

SEQ ID NO: 1800379 - DNA, 15 bp, Homo sapiens
ttttaggaacttcag

SEQ ID NO: 1800380 - DNA, 15 bp, Homo sapiens
tttaggaacttcaga

SEQ ID NO: 1800381 - DNA, 15 bp, Homo sapiens
ttaggaacttcagag

SEQ ID NO: 1800382 - DNA, 15 bp, Homo sapiens
taggaacttcagaga

SEQ ID NO: 1800383 - DNA, 15 bp, Homo sapiens
aggaacttcagagat

SEQ ID NO: 1800384 - DNA, 15 bp, Homo sapiens
ggaacttcagagatc

SEQ ID NO: 1800385 - DNA, 15 bp, Homo sapiens
gaacttcagagatcg

SEQ ID NO: 1800386 - DNA, 15 bp, Homo sapiens
aacttcagagatcgt

SEQ ID NO: 1800387 - DNA, 15 bp, Homo sapiens
acttcagagatcgtg

SEQ ID NO: 1800388 - DNA, 15 bp, Homo sapiens
cttcagagatcgtgt

SEQ ID NO: 1800389 - DNA, 15 bp, Homo sapiens
ttcagagatcgtgta

SEQ ID NO: 1800390 - DNA, 15 bp, Homo sapiens
tcagagatcgtgtat

SEQ ID NO: 1800391 - DNA, 15 bp, Homo sapiens
cagagatcgtgtatt

SEQ ID NO: 1800392 - DNA, 15 bp, Homo sapiens
agagatcgtgtattg

SEQ ID NO: 1800393 - DNA, 15 bp, Homo sapiens
gagatcgtgtattga

SEQ ID NO: 1800394 - DNA, 15 bp, Homo sapiens
agatcgtgtattgag

SEQ ID NO: 1800395 - DNA, 15 bp, Homo sapiens
gatcgtgtattgaga

SEQ ID NO: 1800396 - DNA, 15 bp, Homo sapiens
atcgtgtattgagat

SEQ ID NO: 1800397 - DNA, 15 bp, Homo sapiens
tcgtgtattgagatt

SEQ ID NO: 1800398 - DNA, 15 bp, Homo sapiens
cgtgtattgagattt

SEQ ID NO: 1800399 - DNA, 15 bp, Homo sapiens
gtgtattgagatttc

SEQ ID NO: 1800400 - DNA, 15 bp, Homo sapiens
tgtattgagatttct

SEQ ID NO: 1800401 - DNA, 15 bp, Homo sapiens
gtattgagatttctt

SEQ ID NO: 1800402 - DNA, 15 bp, Homo sapiens
tattgagatttctta

SEQ ID NO: 1800403 - DNA, 15 bp, Homo sapiens
attgagatttcttaa

SEQ ID NO: 1800404 - DNA, 15 bp, Homo sapiens
tgagatttcttaaat

SEQ ID NO: 1800405 - DNA, 15 bp, Homo sapiens
gagatttcttaaata

SEQ ID NO: 1800406 - DNA, 15 bp, Homo sapiens
agatttcttaaataa

SEQ ID NO: 1800407 - DNA, 15 bp, Homo sapiens
gatttcttaaataat

SEQ ID NO: 1800408 - DNA, 15 bp, Homo sapiens
atttcttaaataatg

SEQ ID NO: 1800409 - DNA, 15 bp, Homo sapiens
tttcttaaataatgc

SEQ ID NO: 1800410 - DNA, 15 bp, Homo sapiens
ttcttaaataatgct

SEQ ID NO: 1800411 - DNA, 15 bp, Homo sapiens
tcttaaataatgctt

SEQ ID NO: 1800412 - DNA, 15 bp, Homo sapiens
cttaaataatgcttc

SEQ ID NO: 1800413 - DNA, 15 bp, Homo sapiens
ttaaataatgcttca

SEQ ID NO: 1800414 - DNA, 15 bp, Homo sapiens
taaataatgcttcag

SEQ ID NO: 1800415 - DNA, 15 bp, Homo sapiens
aaataatgcttcaga

SEQ ID NO: 1800416 - DNA, 15 bp, Homo sapiens
aataatgcttcagat

SEQ ID NO: 1800417 - DNA, 15 bp, Homo sapiens
ataatgcttcagata

SEQ ID NO: 1800418 - DNA, 15 bp, Homo sapiens
taatgcttcagatat

SEQ ID NO: 1800419 - DNA, 15 bp, Homo sapiens
aatgcttcagatatt

SEQ ID NO: 1800420 - DNA, 15 bp, Homo sapiens
atgcttcagatatta

SEQ ID NO: 1800421 - DNA, 15 bp, Homo sapiens
tgcttcagatattat

SEQ ID NO: 1800422 - DNA, 15 bp, Homo sapiens
gcttcagatattatt

SEQ ID NO: 1800423 - DNA, 15 bp, Homo sapiens
cttcagatattattg

SEQ ID NO: 1800424 - DNA, 15 bp, Homo sapiens
ttcagatattattgc

SEQ ID NO: 1800425 - DNA, 15 bp, Homo sapiens
tcagatattattgct

SEQ ID NO: 1800426 - DNA, 15 bp, Homo sapiens
cagatattattgctt

SEQ ID NO: 1800427 - DNA, 15 bp, Homo sapiens
agatattattgcttt

SEQ ID NO: 1800428 - DNA, 15 bp, Homo sapiens
gatattattgcttta

SEQ ID NO: 1800429 - DNA, 15 bp, Homo sapiens
atattattgctttat

SEQ ID NO: 1800430 - DNA, 15 bp, Homo sapiens
tattattgctttatt

SEQ ID NO: 1800431 - DNA, 15 bp, Homo sapiens
attattgctttattg

SEQ ID NO: 1800432 - DNA, 15 bp, Homo sapiens
ttattgctttattgc

SEQ ID NO: 1800433 - DNA, 15 bp, Homo sapiens
tattgctttattgct

SEQ ID NO: 1800434 - DNA, 15 bp, Homo sapiens
attgctttattgctt

SEQ ID NO: 1800435 - DNA, 15 bp, Homo sapiens
ttgctttattgcttt

SEQ ID NO: 1800436 - DNA, 15 bp, Homo sapiens
tgctttattgctttt

SEQ ID NO: 1800437 - DNA, 15 bp, Homo sapiens
gctttattgcttttt

SEQ ID NO: 1800438 - DNA, 15 bp, Homo sapiens
ctttattgctttttt

SEQ ID NO: 1800439 - DNA, 15 bp, Homo sapiens
tttattgcttttttg

SEQ ID NO: 1800440 - DNA, 15 bp, Homo sapiens
ttattgcttttttgt

SEQ ID NO: 1800441 - DNA, 15 bp, Homo sapiens
tattgcttttttgta

SEQ ID NO: 1800442 - DNA, 15 bp, Homo sapiens
attgcttttttgtat

SEQ ID NO: 1800443 - DNA, 15 bp, Homo sapiens
ttgcttttttgtatt

SEQ ID NO: 1800444 - DNA, 15 bp, Homo sapiens
tgcttttttgtattg

SEQ ID NO: 1800445 - DNA, 15 bp, Homo sapiens
gcttttttgtattgg

SEQ ID NO: 1800446 - DNA, 15 bp, Homo sapiens
cttttttgtattggt

SEQ ID NO: 1800447 - DNA, 15 bp, Homo sapiens
ttttttgtattggtt

SEQ ID NO: 1800448 - DNA, 15 bp, Homo sapiens
tttttgtattggtta

SEQ ID NO: 1800449 - DNA, 15 bp, Homo sapiens
ttttgtattggttaa

SEQ ID NO: 1800450 - DNA, 15 bp, Homo sapiens
tttgtattggttaaa

SEQ ID NO: 1800451 - DNA, 15 bp, Homo sapiens
ttgtattggttaaaa

SEQ ID NO: 1800452 - DNA, 15 bp, Homo sapiens
tgtattggttaaaac

SEQ ID NO: 1800453 - DNA, 15 bp, Homo sapiens
gtattggttaaaact

SEQ ID NO: 1800454 - DNA, 15 bp, Homo sapiens
tattggttaaaactg

SEQ ID NO: 1800455 - DNA, 15 bp, Homo sapiens
attggttaaaactgt

SEQ ID NO: 1800456 - DNA, 15 bp, Homo sapiens
ttggttaaaactgta

SEQ ID NO: 1800457 - DNA, 15 bp, Homo sapiens
tggttaaaactgtac

SEQ ID NO: 1800458 - DNA, 15 bp, Homo sapiens
ggttaaaactgtaca

SEQ ID NO: 1800459 - DNA, 15 bp, Homo sapiens
gttaaaactgtacat

SEQ ID NO: 1800460 - DNA, 15 bp, Homo sapiens
ttaaaactgtacatt

SEQ ID NO: 1800461 - DNA, 15 bp, Homo sapiens
taaaactgtacattt

SEQ ID NO: 1800462 - DNA, 15 bp, Homo sapiens
aaaactgtacattta

SEQ ID NO: 1800463 - DNA, 15 bp, Homo sapiens
aaactgtacatttaa

SEQ ID NO: 1800464 - DNA, 15 bp, Homo sapiens
aactgtacatttaaa

SEQ ID NO: 1800465 - DNA, 15 bp, Homo sapiens
actgtacatttaaaa

SEQ ID NO: 1800466 - DNA, 15 bp, Homo sapiens
ctgtacatttaaaat

SEQ ID NO: 1800467 - DNA, 15 bp, Homo sapiens
tgtacatttaaaatt

SEQ ID NO: 1800468 - DNA, 15 bp, Homo sapiens
gtacatttaaaattg

SEQ ID NO: 1800469 - DNA, 15 bp, Homo sapiens
tacatttaaaattgc

SEQ ID NO: 1800470 - DNA, 15 bp, Homo sapiens
acatttaaaattgct

SEQ ID NO: 1800471 - DNA, 15 bp, Homo sapiens
catttaaaattgcta

SEQ ID NO: 1800472 - DNA, 15 bp, Homo sapiens
atttaaaattgctat

SEQ ID NO: 1800473 - DNA, 15 bp, Homo sapiens
tttaaaattgctatg

SEQ ID NO: 1800474 - DNA, 15 bp, Homo sapiens
ttaaaattgctatgt

SEQ ID NO: 1800475 - DNA, 15 bp, Homo sapiens
taaaattgctatgtt

SEQ ID NO: 1800476 - DNA, 15 bp, Homo sapiens
aaaattgctatgtta

SEQ ID NO: 1800477 - DNA, 15 bp, Homo sapiens
aaattgctatgttac

SEQ ID NO: 1800478 - DNA, 15 bp, Homo sapiens
aattgctatgttact

SEQ ID NO: 1800479 - DNA, 15 bp, Homo sapiens
attgctatgttacta

SEQ ID NO: 1800480 - DNA, 15 bp, Homo sapiens
ttgctatgttactat

SEQ ID NO: 1800481 - DNA, 15 bp, Homo sapiens
tgctatgttactatt

SEQ ID NO: 1800482 - DNA, 15 bp, Homo sapiens
gctatgttactattt

SEQ ID NO: 1800483 - DNA, 15 bp, Homo sapiens
ctatgttactatttt

SEQ ID NO: 1800484 - DNA, 15 bp, Homo sapiens
tatgttactattttc

SEQ ID NO: 1800485 - DNA, 15 bp, Homo sapiens
atgttactattttct

SEQ ID NO: 1800486 - DNA, 15 bp, Homo sapiens
tgttactattttcta

SEQ ID NO: 1800487 - DNA, 15 bp, Homo sapiens
gttactattttctac

SEQ ID NO: 1800488 - DNA, 15 bp, Homo sapiens
ttactattttctaca

SEQ ID NO: 1800489 - DNA, 15 bp, Homo sapiens
tactattttctacaa

SEQ ID NO: 1800490 - DNA, 15 bp, Homo sapiens
actattttctacaat

SEQ ID NO: 1800491 - DNA, 15 bp, Homo sapiens
ctattttctacaatt

SEQ ID NO: 1800492 - DNA, 15 bp, Homo sapiens
tattttctacaatta

SEQ ID NO: 1800493 - DNA, 15 bp, Homo sapiens
attttctacaattaa

SEQ ID NO: 1800494 - DNA, 15 bp, Homo sapiens
ttttctacaattaat

SEQ ID NO: 1800495 - DNA, 15 bp, Homo sapiens
tttctacaattaata

SEQ ID NO: 1800496 - DNA, 15 bp, Homo sapiens
ttctacaattaatag

SEQ ID NO: 1800497 - DNA, 15 bp, Homo sapiens
tctacaattaatagt

SEQ ID NO: 1800498 - DNA, 15 bp, Homo sapiens
ctacaattaatagtt

SEQ ID NO: 1800499 - DNA, 15 bp, Homo sapiens
tacaattaatagttt

SEQ ID NO: 1800500 - DNA, 15 bp, Homo sapiens
acaattaatagtttg

SEQ ID NO: 1800501 - DNA, 15 bp, Homo sapiens
caattaatagtttgt

SEQ ID NO: 1800502 - DNA, 15 bp, Homo sapiens
aattaatagtttgtc

SEQ ID NO: 1800503 - DNA, 15 bp, Homo sapiens
attaatagtttgtct

SEQ ID NO: 1800504 - DNA, 15 bp, Homo sapiens
ttaatagtttgtcta

SEQ ID NO: 1800505 - DNA, 15 bp, Homo sapiens
taatagtttgtctat

SEQ ID NO: 1800506 - DNA, 15 bp, Homo sapiens
aatagtttgtctatt

SEQ ID NO: 1800507 - DNA, 15 bp, Homo sapiens
atagtttgtctattt

SEQ ID NO: 1800508 - DNA, 15 bp, Homo sapiens
tagtttgtctatttt

SEQ ID NO: 1800509 - DNA, 15 bp, Homo sapiens
agtttgtctatttta

SEQ ID NO: 1800510 - DNA, 15 bp, Homo sapiens
gtttgtctattttaa

SEQ ID NO: 1800511 - DNA, 15 bp, Homo sapiens
tttgtctattttaaa

SEQ ID NO: 1800512 - DNA, 15 bp, Homo sapiens
ttgtctattttaaaa

SEQ ID NO: 1800513 - DNA, 15 bp, Homo sapiens
tgtctattttaaaat

SEQ ID NO: 1800514 - DNA, 15 bp, Homo sapiens
gtctattttaaaata

SEQ ID NO: 1800515 - DNA, 15 bp, Homo sapiens
tctattttaaaataa

SEQ ID NO: 1800516 - DNA, 15 bp, Homo sapiens
ctattttaaaataaa

SEQ ID NO: 1800517 - DNA, 15 bp, Homo sapiens
ttttaaaataaatta

SEQ ID NO: 1800518 - DNA, 15 bp, Homo sapiens
tttaaaataaattag

SEQ ID NO: 1800519 - DNA, 15 bp, Homo sapiens
ttaaaataaattagt

SEQ ID NO: 1800520 - DNA, 15 bp, Homo sapiens
taaaataaattagtt

SEQ ID NO: 1800521 - DNA, 15 bp, Homo sapiens
aaaataaattagttg

SEQ ID NO: 1800522 - DNA, 15 bp, Homo sapiens
aaataaattagttgt

SEQ ID NO: 1800523 - DNA, 15 bp, Homo sapiens
aataaattagttgtt

SEQ ID NO: 1800524 - DNA, 15 bp, Homo sapiens
ataaattagttgtta

SEQ ID NO: 1800525 - DNA, 15 bp, Homo sapiens
taaattagttgttaa

SEQ ID NO: 1800526 - DNA, 15 bp, Homo sapiens
aaattagttgttaag

SEQ ID NO: 1800527 - DNA, 15 bp, Homo sapiens
aattagttgttaaga

SEQ ID NO: 1800528 - DNA, 15 bp, Homo sapiens
attagttgttaagag

SEQ ID NO: 1800529 - DNA, 15 bp, Homo sapiens
ttagttgttaagagt

SEQ ID NO: 1800530 - DNA, 15 bp, Homo sapiens
tagttgttaagagtc

SEQ ID NO: 1800531 - DNA, 15 bp, Homo sapiens
agttgttaagagtct

SEQ ID NO: 1800532 - DNA, 15 bp, Homo sapiens
gttgttaagagtctt

SEQ ID NO: 1800533 - DNA, 15 bp, Homo sapiens
ttgttaagagtctta

SEQ ID NO: 1800534 - DNA, 15 bp, Homo sapiens
tgttaagagtcttaa

SEQ ID NO: 1800535 - DNA, 15 bp, Homo sapiens
gttaagagtcttaat

SEQ ID NO: 1800536 - DNA, 15 bp, Homo sapiens
ttaagagtcttaatg

SEQ ID NO: 1800537 - DNA, 15 bp, Homo sapiens
taagagtcttaatgg

SEQ ID NO: 1800538 - DNA, 15 bp, Homo sapiens
aagagtcttaatggt

SEQ ID NO: 1800539 - DNA, 15 bp, Homo sapiens
agagtcttaatggtc

SEQ ID NO: 1800540 - DNA, 15 bp, Homo sapiens
gagtcttaatggtct

SEQ ID NO: 1800541 - DNA, 15 bp, Homo sapiens
agtcttaatggtctg

SEQ ID NO: 1800542 - DNA, 15 bp, Homo sapiens
gtcttaatggtctga

SEQ ID NO: 1800543 - DNA, 15 bp, Homo sapiens
tcttaatggtctgat

SEQ ID NO: 1800544 - DNA, 15 bp, Homo sapiens
cttaatggtctgatg

SEQ ID NO: 1800545 - DNA, 15 bp, Homo sapiens
ttaatggtctgatgt

SEQ ID NO: 1800546 - DNA, 15 bp, Homo sapiens
taatggtctgatgtt

SEQ ID NO: 1800547 - DNA, 15 bp, Homo sapiens
aatggtctgatgttg

SEQ ID NO: 1800548 - DNA, 15 bp, Homo sapiens
atggtctgatgttgt

SEQ ID NO: 1800549 - DNA, 15 bp, Homo sapiens
tggtctgatgttgtg

SEQ ID NO: 1800550 - DNA, 15 bp, Homo sapiens
ggtctgatgttgtgt

SEQ ID NO: 1800551 - DNA, 15 bp, Homo sapiens
gtctgatgttgtgtt

SEQ ID NO: 1800552 - DNA, 15 bp, Homo sapiens
tctgatgttgtgttc

SEQ ID NO: 1800553 - DNA, 15 bp, Homo sapiens
ctgatgttgtgttct

SEQ ID NO: 1800554 - DNA, 15 bp, Homo sapiens
tgatgttgtgttctt

SEQ ID NO: 1800555 - DNA, 15 bp, Homo sapiens
gatgttgtgttcttt

SEQ ID NO: 1800556 - DNA, 15 bp, Homo sapiens
atgttgtgttctttg

SEQ ID NO: 1800557 - DNA, 15 bp, Homo sapiens
tgttgtgttctttgt

SEQ ID NO: 1800558 - DNA, 15 bp, Homo sapiens
gttgtgttctttgta

SEQ ID NO: 1800559 - DNA, 15 bp, Homo sapiens
ttgtgttctttgtat

SEQ ID NO: 1800560 - DNA, 15 bp, Homo sapiens
tgtgttctttgtatt

SEQ ID NO: 1800561 - DNA, 15 bp, Homo sapiens
gtgttctttgtatta

SEQ ID NO: 1800562 - DNA, 15 bp, Homo sapiens
tgttctttgtattaa

SEQ ID NO: 1800563 - DNA, 15 bp, Homo sapiens
gttctttgtattaag

SEQ ID NO: 1800564 - DNA, 15 bp, Homo sapiens
ttctttgtattaagt

SEQ ID NO: 1800565 - DNA, 15 bp, Homo sapiens
tctttgtattaagta

SEQ ID NO: 1800566 - DNA, 15 bp, Homo sapiens
ctttgtattaagtac

SEQ ID NO: 1800567 - DNA, 15 bp, Homo sapiens
tttgtattaagtaca

SEQ ID NO: 1800568 - DNA, 15 bp, Homo sapiens
ttgtattaagtacac

SEQ ID NO: 1800569 - DNA, 15 bp, Homo sapiens
tgtattaagtacact

SEQ ID NO: 1800570 - DNA, 15 bp, Homo sapiens
gtattaagtacacta

SEQ ID NO: 1800571 - DNA, 15 bp, Homo sapiens
tattaagtacactaa

SEQ ID NO: 1800572 - DNA, 15 bp, Homo sapiens
attaagtacactaat

SEQ ID NO: 1800573 - DNA, 15 bp, Homo sapiens
ttaagtacactaatg

SEQ ID NO: 1800574 - DNA, 15 bp, Homo sapiens
taagtacactaatgt

SEQ ID NO: 1800575 - DNA, 15 bp, Homo sapiens
aagtacactaatgtt

SEQ ID NO: 1800576 - DNA, 15 bp, Homo sapiens
agtacactaatgttc

SEQ ID NO: 1800577 - DNA, 15 bp, Homo sapiens
gtacactaatgttct

SEQ ID NO: 1800578 - DNA, 15 bp, Homo sapiens
tacactaatgttctc

SEQ ID NO: 1800579 - DNA, 15 bp, Homo sapiens
acactaatgttctct

SEQ ID NO: 1800580 - DNA, 15 bp, Homo sapiens
cactaatgttctctt

SEQ ID NO: 1800581 - DNA, 15 bp, Homo sapiens
actaatgttctcttt

SEQ ID NO: 1800582 - DNA, 15 bp, Homo sapiens
ctaatgttctctttt

SEQ ID NO: 1800583 - DNA, 15 bp, Homo sapiens
taatgttctcttttc

SEQ ID NO: 1800584 - DNA, 15 bp, Homo sapiens
aatgttctcttttct

SEQ ID NO: 1800585 - DNA, 15 bp, Homo sapiens
atgttctcttttctg

SEQ ID NO: 1800586 - DNA, 15 bp, Homo sapiens
tgttctcttttctgt

SEQ ID NO: 1800587 - DNA, 15 bp, Homo sapiens
gttctcttttctgtc

SEQ ID NO: 1800588 - DNA, 15 bp, Homo sapiens
ttctcttttctgtct

SEQ ID NO: 1800589 - DNA, 15 bp, Homo sapiens
tctcttttctgtcta

SEQ ID NO: 1800590 - DNA, 15 bp, Homo sapiens
ctcttttctgtctag

SEQ ID NO: 1800591 - DNA, 15 bp, Homo sapiens
tcttttctgtctagg

SEQ ID NO: 1800592 - DNA, 15 bp, Homo sapiens
cttttctgtctagga

SEQ ID NO: 1800593 - DNA, 15 bp, Homo sapiens
ttttctgtctaggag

SEQ ID NO: 1800594 - DNA, 15 bp, Homo sapiens
tttctgtctaggaga

SEQ ID NO: 1800595 - DNA, 15 bp, Homo sapiens
ttctgtctaggagaa

SEQ ID NO: 1800596 - DNA, 15 bp, Homo sapiens
tctgtctaggagaag

SEQ ID NO: 1800597 - DNA, 15 bp, Homo sapiens
ctgtctaggagaaga

SEQ ID NO: 1800598 - DNA, 15 bp, Homo sapiens
tgtctaggagaagat

SEQ ID NO: 1800599 - DNA, 15 bp, Homo sapiens
gtctaggagaagata

SEQ ID NO: 1800600 - DNA, 15 bp, Homo sapiens
tctaggagaagatag

SEQ ID NO: 1800601 - DNA, 15 bp, Homo sapiens
ctaggagaagataga

SEQ ID NO: 1800602 - DNA, 15 bp, Homo sapiens
taggagaagatagat

SEQ ID NO: 1800603 - DNA, 15 bp, Homo sapiens
aggagaagatagata

SEQ ID NO: 1800604 - DNA, 15 bp, Homo sapiens
ggagaagatagatag

SEQ ID NO: 1800605 - DNA, 15 bp, Homo sapiens
gagaagatagataga

SEQ ID NO: 1800606 - DNA, 15 bp, Homo sapiens
agaagatagatagaa

SEQ ID NO: 1800607 - DNA, 15 bp, Homo sapiens
gaagatagatagaag

SEQ ID NO: 1800608 - DNA, 15 bp, Homo sapiens
aagatagatagaaga

SEQ ID NO: 1800609 - DNA, 15 bp, Homo sapiens
agatagatagaagat

SEQ ID NO: 1800610 - DNA, 15 bp, Homo sapiens
gatagatagaagata

SEQ ID NO: 1800611 - DNA, 15 bp, Homo sapiens
atagatagaagataa

SEQ ID NO: 1800612 - DNA, 15 bp, Homo sapiens
tagatagaagataac

SEQ ID NO: 1800613 - DNA, 15 bp, Homo sapiens
agatagaagataact

SEQ ID NO: 1800614 - DNA, 15 bp, Homo sapiens
gatagaagataactc

SEQ ID NO: 1800615 - DNA, 15 bp, Homo sapiens
atagaagataactct

SEQ ID NO: 1800616 - DNA, 15 bp, Homo sapiens
tagaagataactctc

SEQ ID NO: 1800617 - DNA, 15 bp, Homo sapiens
agaagataactctcc

SEQ ID NO: 1800618 - DNA, 15 bp, Homo sapiens
gaagataactctcct

SEQ ID NO: 1800619 - DNA, 15 bp, Homo sapiens
aagataactctccta

SEQ ID NO: 1800620 - DNA, 15 bp, Homo sapiens
agataactctcctag

SEQ ID NO: 1800621 - DNA, 15 bp, Homo sapiens
gataactctcctagt

SEQ ID NO: 1800622 - DNA, 15 bp, Homo sapiens
ataactctcctagta

SEQ ID NO: 1800623 - DNA, 15 bp, Homo sapiens
taactctcctagtat

SEQ ID NO: 1800624 - DNA, 15 bp, Homo sapiens
aactctcctagtatc

SEQ ID NO: 1800625 - DNA, 15 bp, Homo sapiens
actctcctagtatct

SEQ ID NO: 1800626 - DNA, 15 bp, Homo sapiens
ctctcctagtatctc

SEQ ID NO: 1800627 - DNA, 15 bp, Homo sapiens
tctcctagtatctca

SEQ ID NO: 1800628 - DNA, 15 bp, Homo sapiens
ctcctagtatctcat

SEQ ID NO: 1800629 - DNA, 15 bp, Homo sapiens
tcctagtatctcatc

SEQ ID NO: 1800630 - DNA, 15 bp, Homo sapiens
cctagtatctcatcc

SEQ ID NO: 1800631 - DNA, 15 bp, Homo sapiens
ctagtatctcatcca

SEQ ID NO: 1800632 - DNA, 15 bp, Homo sapiens
tagtatctcatccat

SEQ ID NO: 1800633 - DNA, 15 bp, Homo sapiens
agtatctcatccatt

SEQ ID NO: 1800634 - DNA, 15 bp, Homo sapiens
gtatctcatccattc

SEQ ID NO: 1800635 - DNA, 15 bp, Homo sapiens
tatctcatccattcc

SEQ ID NO: 1800636 - DNA, 15 bp, Homo sapiens
atctcatccattcct

SEQ ID NO: 1800637 - DNA, 15 bp, Homo sapiens
tctcatccattccta

SEQ ID NO: 1800638 - DNA, 15 bp, Homo sapiens
ctcatccattcctag

SEQ ID NO: 1800639 - DNA, 15 bp, Homo sapiens
tcatccattcctagc

SEQ ID NO: 1800640 - DNA, 15 bp, Homo sapiens
catccattcctagcc

SEQ ID NO: 1800641 - DNA, 15 bp, Homo sapiens
atccattcctagcct

SEQ ID NO: 1800642 - DNA, 15 bp, Homo sapiens
tccattcctagcctt

SEQ ID NO: 1800643 - DNA, 15 bp, Homo sapiens
ccattcctagccttt

SEQ ID NO: 1800644 - DNA, 15 bp, Homo sapiens
cattcctagccttta

SEQ ID NO: 1800645 - DNA, 15 bp, Homo sapiens
attcctagcctttaa

SEQ ID NO: 1800646 - DNA, 15 bp, Homo sapiens
ttcctagcctttaag

SEQ ID NO: 1800647 - DNA, 15 bp, Homo sapiens
tcctagcctttaagg

SEQ ID NO: 1800648 - DNA, 15 bp, Homo sapiens
cctagcctttaaggg

SEQ ID NO: 1800649 - DNA, 15 bp, Homo sapiens
ctagcctttaagggg

SEQ ID NO: 1800650 - DNA, 15 bp, Homo sapiens
tagcctttaaggggc

SEQ ID NO: 1800651 - DNA, 15 bp, Homo sapiens
agcctttaaggggct

SEQ ID NO: 1800652 - DNA, 15 bp, Homo sapiens
gcctttaaggggctc

SEQ ID NO: 1800653 - DNA, 15 bp, Homo sapiens
cctttaaggggctct

SEQ ID NO: 1800654 - DNA, 15 bp, Homo sapiens
ctttaaggggctcta

SEQ ID NO: 1800655 - DNA, 15 bp, Homo sapiens
tttaaggggctctat

SEQ ID NO: 1800656 - DNA, 15 bp, Homo sapiens
ttaaggggctctata

SEQ ID NO: 1800657 - DNA, 15 bp, Homo sapiens
taaggggctctatat

SEQ ID NO: 1800658 - DNA, 15 bp, Homo sapiens
aaggggctctatatg

SEQ ID NO: 1800659 - DNA, 15 bp, Homo sapiens
aggggctctatatgc

SEQ ID NO: 1800660 - DNA, 15 bp, Homo sapiens
ggggctctatatgct

SEQ ID NO: 1800661 - DNA, 15 bp, Homo sapiens
gggctctatatgcta

SEQ ID NO: 1800662 - DNA, 15 bp, Homo sapiens
ggctctatatgctag

SEQ ID NO: 1800663 - DNA, 15 bp, Homo sapiens
gctctatatgctaga

SEQ ID NO: 1800664 - DNA, 15 bp, Homo sapiens
ctctatatgctagag

SEQ ID NO: 1800665 - DNA, 15 bp, Homo sapiens
tctatatgctagaga

SEQ ID NO: 1800666 - DNA, 15 bp, Homo sapiens
ctatatgctagagat

SEQ ID NO: 1800667 - DNA, 15 bp, Homo sapiens
tatatgctagagatt

SEQ ID NO: 1800668 - DNA, 15 bp, Homo sapiens
atatgctagagattt

SEQ ID NO: 1800669 - DNA, 15 bp, Homo sapiens
tatgctagagatttc

SEQ ID NO: 1800670 - DNA, 15 bp, Homo sapiens
atgctagagatttcc

SEQ ID NO: 1800671 - DNA, 15 bp, Homo sapiens
tgctagagatttcca

SEQ ID NO: 1800672 - DNA, 15 bp, Homo sapiens
gctagagatttccaa

SEQ ID NO: 1800673 - DNA, 15 bp, Homo sapiens
ctagagatttccaaa

SEQ ID NO: 1800674 - DNA, 15 bp, Homo sapiens
tagagatttccaaat

SEQ ID NO: 1800675 - DNA, 15 bp, Homo sapiens
agagatttccaaatt

SEQ ID NO: 1800676 - DNA, 15 bp, Homo sapiens
gagatttccaaattt

SEQ ID NO: 1800677 - DNA, 15 bp, Homo sapiens
agatttccaaattta

SEQ ID NO: 1800678 - DNA, 15 bp, Homo sapiens
gatttccaaatttat

SEQ ID NO: 1800679 - DNA, 15 bp, Homo sapiens
atttccaaatttatt

SEQ ID NO: 1800680 - DNA, 15 bp, Homo sapiens
tttccaaatttattt

SEQ ID NO: 1800681 - DNA, 15 bp, Homo sapiens
ttccaaatttatttc

SEQ ID NO: 1800682 - DNA, 15 bp, Homo sapiens
tccaaatttatttct

SEQ ID NO: 1800683 - DNA, 15 bp, Homo sapiens
ccaaatttatttctt

SEQ ID NO: 1800684 - DNA, 15 bp, Homo sapiens
caaatttatttcttc

SEQ ID NO: 1800685 - DNA, 15 bp, Homo sapiens
aaatttatttcttca

SEQ ID NO: 1800686 - DNA, 15 bp, Homo sapiens
aatttatttcttcag

SEQ ID NO: 1800687 - DNA, 15 bp, Homo sapiens
atttatttcttcagc

SEQ ID NO: 1800688 - DNA, 15 bp, Homo sapiens
tttatttcttcagcc

SEQ ID NO: 1800689 - DNA, 15 bp, Homo sapiens
ttatttcttcagccc

SEQ ID NO: 1800690 - DNA, 15 bp, Homo sapiens
tatttcttcagccct

SEQ ID NO: 1800691 - DNA, 15 bp, Homo sapiens
atttcttcagccctg

SEQ ID NO: 1800692 - DNA, 15 bp, Homo sapiens
tttcttcagccctga

SEQ ID NO: 1800693 - DNA, 15 bp, Homo sapiens
ttcttcagccctgat

SEQ ID NO: 1800694 - DNA, 15 bp, Homo sapiens
tcttcagccctgatc

SEQ ID NO: 1800695 - DNA, 15 bp, Homo sapiens
cttcagccctgatct

SEQ ID NO: 1800696 - DNA, 15 bp, Homo sapiens
ttcagccctgatctt

SEQ ID NO: 1800697 - DNA, 15 bp, Homo sapiens
tcagccctgatcttt

SEQ ID NO: 1800698 - DNA, 15 bp, Homo sapiens
cagccctgatctttt

SEQ ID NO: 1800699 - DNA, 15 bp, Homo sapiens
agccctgatcttttc

SEQ ID NO: 1800700 - DNA, 15 bp, Homo sapiens
gccctgatcttttca

SEQ ID NO: 1800701 - DNA, 15 bp, Homo sapiens
ccctgatcttttcac

SEQ ID NO: 1800702 - DNA, 15 bp, Homo sapiens
cctgatcttttcaca

SEQ ID NO: 1800703 - DNA, 15 bp, Homo sapiens
ctgatcttttcacag

SEQ ID NO: 1800704 - DNA, 15 bp, Homo sapiens
tgatcttttcacaga

SEQ ID NO: 1800705 - DNA, 15 bp, Homo sapiens
gatcttttcacagag

SEQ ID NO: 1800706 - DNA, 15 bp, Homo sapiens
atcttttcacagagg

SEQ ID NO: 1800707 - DNA, 15 bp, Homo sapiens
tcttttcacagaggt

SEQ ID NO: 1800708 - DNA, 15 bp, Homo sapiens
cttttcacagaggtc

SEQ ID NO: 1800709 - DNA, 15 bp, Homo sapiens
ttttcacagaggtca

SEQ ID NO: 1800710 - DNA, 15 bp, Homo sapiens
tttcacagaggtcaa

SEQ ID NO: 1800711 - DNA, 15 bp, Homo sapiens
ttcacagaggtcaag

SEQ ID NO: 1800712 - DNA, 15 bp, Homo sapiens
tcacagaggtcaagg

SEQ ID NO: 1800713 - DNA, 15 bp, Homo sapiens
cacagaggtcaaggc

SEQ ID NO: 1800714 - DNA, 15 bp, Homo sapiens
acagaggtcaaggct

SEQ ID NO: 1800715 - DNA, 15 bp, Homo sapiens
cagaggtcaaggctt

SEQ ID NO: 1800716 - DNA, 15 bp, Homo sapiens
agaggtcaaggcttt

SEQ ID NO: 1800717 - DNA, 15 bp, Homo sapiens
gaggtcaaggctttt

SEQ ID NO: 1800718 - DNA, 15 bp, Homo sapiens
aggtcaaggctttta

SEQ ID NO: 1800719 - DNA, 15 bp, Homo sapiens
ggtcaaggcttttat

SEQ ID NO: 1800720 - DNA, 15 bp, Homo sapiens
gtcaaggcttttata

SEQ ID NO: 1800721 - DNA, 15 bp, Homo sapiens
tcaaggcttttatag

SEQ ID NO: 1800722 - DNA, 15 bp, Homo sapiens
caaggcttttatagc

SEQ ID NO: 1800723 - DNA, 15 bp, Homo sapiens
aaggcttttatagcc

SEQ ID NO: 1800724 - DNA, 15 bp, Homo sapiens
aggcttttatagcca

SEQ ID NO: 1800725 - DNA, 15 bp, Homo sapiens
ggcttttatagccaa

SEQ ID NO: 1800726 - DNA, 15 bp, Homo sapiens
gcttttatagccaac

SEQ ID NO: 1800727 - DNA, 15 bp, Homo sapiens
cttttatagccaaca

SEQ ID NO: 1800728 - DNA, 15 bp, Homo sapiens
ttttatagccaacag

SEQ ID NO: 1800729 - DNA, 15 bp, Homo sapiens
tttatagccaacaga

SEQ ID NO: 1800730 - DNA, 15 bp, Homo sapiens
ttatagccaacagaa

SEQ ID NO: 1800731 - DNA, 15 bp, Homo sapiens
tatagccaacagaac

SEQ ID NO: 1800732 - DNA, 15 bp, Homo sapiens
atagccaacagaact

SEQ ID NO: 1800733 - DNA, 15 bp, Homo sapiens
tagccaacagaactc

SEQ ID NO: 1800734 - DNA, 15 bp, Homo sapiens
agccaacagaactct

SEQ ID NO: 1800735 - DNA, 15 bp, Homo sapiens
gccaacagaactctt

SEQ ID NO: 1800736 - DNA, 15 bp, Homo sapiens
ccaacagaactcttg

SEQ ID NO: 1800737 - DNA, 15 bp, Homo sapiens
caacagaactcttga

SEQ ID NO: 1800738 - DNA, 15 bp, Homo sapiens
aacagaactcttgat

SEQ ID NO: 1800739 - DNA, 15 bp, Homo sapiens
acagaactcttgatt

SEQ ID NO: 1800740 - DNA, 15 bp, Homo sapiens
cagaactcttgattc

SEQ ID NO: 1800741 - DNA, 15 bp, Homo sapiens
agaactcttgattcc

SEQ ID NO: 1800742 - DNA, 15 bp, Homo sapiens
gaactcttgattcct

SEQ ID NO: 1800743 - DNA, 15 bp, Homo sapiens
aactcttgattccta

SEQ ID NO: 1800744 - DNA, 15 bp, Homo sapiens
actcttgattcctac

SEQ ID NO: 1800745 - DNA, 15 bp, Homo sapiens
ctcttgattcctact

SEQ ID NO: 1800746 - DNA, 15 bp, Homo sapiens
tcttgattcctactc

SEQ ID NO: 1800747 - DNA, 15 bp, Homo sapiens
cttgattcctactcc

SEQ ID NO: 1800748 - DNA, 15 bp, Homo sapiens
ttgattcctactccc

SEQ ID NO: 1800749 - DNA, 15 bp, Homo sapiens
tgattcctactcccc

SEQ ID NO: 1800750 - DNA, 15 bp, Homo sapiens
gattcctactcccct

SEQ ID NO: 1800751 - DNA, 15 bp, Homo sapiens
attcctactcccctc

SEQ ID NO: 1800752 - DNA, 15 bp, Homo sapiens
ttcctactcccctct

SEQ ID NO: 1800753 - DNA, 15 bp, Homo sapiens
tcctactcccctcta

SEQ ID NO: 1800754 - DNA, 15 bp, Homo sapiens
cctactcccctctac

SEQ ID NO: 1800755 - DNA, 15 bp, Homo sapiens
ctactcccctctacc

SEQ ID NO: 1800756 - DNA, 15 bp, Homo sapiens
tactcccctctaccc

SEQ ID NO: 1800757 - DNA, 15 bp, Homo sapiens
actcccctctaccca

SEQ ID NO: 1800758 - DNA, 15 bp, Homo sapiens
ctcccctctacccaa

SEQ ID NO: 1800759 - DNA, 15 bp, Homo sapiens
tcccctctacccaat

SEQ ID NO: 1800760 - DNA, 15 bp, Homo sapiens
cccctctacccaatg

SEQ ID NO: 1800761 - DNA, 15 bp, Homo sapiens
ccctctacccaatgt

SEQ ID NO: 1800762 - DNA, 15 bp, Homo sapiens
cctctacccaatgtc

SEQ ID NO: 1800763 - DNA, 15 bp, Homo sapiens
ctctacccaatgtct

SEQ ID NO: 1800764 - DNA, 15 bp, Homo sapiens
tctacccaatgtctc

SEQ ID NO: 1800765 - DNA, 15 bp, Homo sapiens
ctacccaatgtctcc

SEQ ID NO: 1800766 - DNA, 15 bp, Homo sapiens
tacccaatgtctcca

SEQ ID NO: 1800767 - DNA, 15 bp, Homo sapiens
acccaatgtctccaa

SEQ ID NO: 1800768 - DNA, 15 bp, Homo sapiens
cccaatgtctccaaa

SEQ ID NO: 1800769 - DNA, 15 bp, Homo sapiens
ccaatgtctccaaat

SEQ ID NO: 1800770 - DNA, 15 bp, Homo sapiens
caatgtctccaaata

SEQ ID NO: 1800771 - DNA, 15 bp, Homo sapiens
aatgtctccaaatat

SEQ ID NO: 1800772 - DNA, 15 bp, Homo sapiens
atgtctccaaatata

SEQ ID NO: 1800773 - DNA, 15 bp, Homo sapiens
tgtctccaaatataa

SEQ ID NO: 1800774 - DNA, 15 bp, Homo sapiens
gtctccaaatataaa

SEQ ID NO: 1800775 - DNA, 15 bp, Homo sapiens
tctccaaatataaac

SEQ ID NO: 1800776 - DNA, 15 bp, Homo sapiens
ctccaaatataaact

SEQ ID NO: 1800777 - DNA, 15 bp, Homo sapiens
tccaaatataaacta

SEQ ID NO: 1800778 - DNA, 15 bp, Homo sapiens
ccaaatataaactaa

SEQ ID NO: 1800779 - DNA, 15 bp, Homo sapiens
caaatataaactaaa

SEQ ID NO: 1800780 - DNA, 15 bp, Homo sapiens
aaatataaactaaaa

SEQ ID NO: 1800781 - DNA, 15 bp, Homo sapiens
aatataaactaaaat

SEQ ID NO: 1800782 - DNA, 15 bp, Homo sapiens
atataaactaaaatc

SEQ ID NO: 1800783 - DNA, 15 bp, Homo sapiens
tataaactaaaatca

SEQ ID NO: 1800784 - DNA, 15 bp, Homo sapiens
ataaactaaaatcaa

SEQ ID NO: 1800785 - DNA, 15 bp, Homo sapiens
taaactaaaatcaaa

SEQ ID NO: 1800786 - DNA, 15 bp, Homo sapiens
aaactaaaatcaaat

SEQ ID NO: 1800787 - DNA, 15 bp, Homo sapiens
aactaaaatcaaata

SEQ ID NO: 1800788 - DNA, 15 bp, Homo sapiens
actaaaatcaaataa

SEQ ID NO: 1800789 - DNA, 15 bp, Homo sapiens
ctaaaatcaaataaa

SEQ ID NO: 1800790 - DNA, 15 bp, Homo sapiens
taaaatcaaataaat

SEQ ID NO: 1800791 - DNA, 15 bp, Homo sapiens
aaaatcaaataaata

SEQ ID NO: 1800792 - DNA, 15 bp, Homo sapiens
aaatcaaataaataa

SEQ ID NO: 1800793 - DNA, 15 bp, Homo sapiens
aatcaaataaataaa

SEQ ID NO: 1800794 - DNA, 15 bp, Homo sapiens
atcaaataaataaaa

SEQ ID NO: 1800795 - DNA, 15 bp, Homo sapiens
tcaaataaataaaaa

SEQ ID NO: 1800796 - DNA, 15 bp, Homo sapiens
caaataaataaaaat

SEQ ID NO: 1800797 - DNA, 15 bp, Homo sapiens
aaataaataaaaatc

SEQ ID NO: 1800798 - DNA, 15 bp, Homo sapiens
aataaataaaaatct

SEQ ID NO: 1800799 - DNA, 15 bp, Homo sapiens
ataaataaaaatctt

SEQ ID NO: 1800800 - DNA, 15 bp, Homo sapiens
taaataaaaatcttt

SEQ ID NO: 1800801 - DNA, 15 bp, Homo sapiens
aaataaaaatctttt

SEQ ID NO: 1800802 - DNA, 15 bp, Homo sapiens
aataaaaatcttttt

SEQ ID NO: 1800803 - DNA, 15 bp, Homo sapiens
ataaaaatctttttt

SEQ ID NO: 1800804 - DNA, 15 bp, Homo sapiens
taaaaatcttttttt

SEQ ID NO: 1800805 - DNA, 15 bp, Homo sapiens
aaaatcttttttttc

SEQ ID NO: 1800806 - DNA, 15 bp, Homo sapiens
aaatcttttttttct

SEQ ID NO: 1800807 - DNA, 15 bp, Homo sapiens
aatcttttttttcta

SEQ ID NO: 1800808 - DNA, 15 bp, Homo sapiens
atcttttttttctac

SEQ ID NO: 1800809 - DNA, 15 bp, Homo sapiens
tcttttttttctacc

SEQ ID NO: 1800810 - DNA, 15 bp, Homo sapiens
cttttttttctaccc

SEQ ID NO: 1800811 - DNA, 15 bp, Homo sapiens
ttttttttctaccct

SEQ ID NO: 1800812 - DNA, 15 bp, Homo sapiens
tttttttctaccctg

SEQ ID NO: 1800813 - DNA, 15 bp, Homo sapiens
ttttttctaccctgg

SEQ ID NO: 1800814 - DNA, 15 bp, Homo sapiens
tttttctaccctggt

SEQ ID NO: 1800815 - DNA, 15 bp, Homo sapiens
ttttctaccctggtc

SEQ ID NO: 1800816 - DNA, 15 bp, Homo sapiens
tttctaccctggtct

SEQ ID NO: 1800817 - DNA, 15 bp, Homo sapiens
ttctaccctggtctt

SEQ ID NO: 1800818 - DNA, 15 bp, Homo sapiens
tctaccctggtcttt

SEQ ID NO: 1800819 - DNA, 15 bp, Homo sapiens
ctaccctggtctttc

SEQ ID NO: 1800820 - DNA, 15 bp, Homo sapiens
taccctggtctttct

SEQ ID NO: 1800821 - DNA, 15 bp, Homo sapiens
accctggtctttctc

SEQ ID NO: 1800822 - DNA, 15 bp, Homo sapiens
ccctggtctttctcc

SEQ ID NO: 1800823 - DNA, 15 bp, Homo sapiens
cctggtctttctcca

SEQ ID NO: 1800824 - DNA, 15 bp, Homo sapiens
ctggtctttctccat

SEQ ID NO: 1800825 - DNA, 15 bp, Homo sapiens
tggtctttctccatt

SEQ ID NO: 1800826 - DNA, 15 bp, Homo sapiens
ggtctttctccattt

SEQ ID NO: 1800827 - DNA, 15 bp, Homo sapiens
gtctttctccatttt

SEQ ID NO: 1800828 - DNA, 15 bp, Homo sapiens
tctttctccatttta

SEQ ID NO: 1800829 - DNA, 15 bp, Homo sapiens
ctttctccattttat

SEQ ID NO: 1800830 - DNA, 15 bp, Homo sapiens
tttctccattttatt

SEQ ID NO: 1800831 - DNA, 15 bp, Homo sapiens
ttctccattttatta

SEQ ID NO: 1800832 - DNA, 15 bp, Homo sapiens
tctccattttattaa

SEQ ID NO: 1800833 - DNA, 15 bp, Homo sapiens
ctccattttattaaa

SEQ ID NO: 1800834 - DNA, 15 bp, Homo sapiens
tccattttattaaac

SEQ ID NO: 1800835 - DNA, 15 bp, Homo sapiens
ccattttattaaaca

SEQ ID NO: 1800836 - DNA, 15 bp, Homo sapiens
cattttattaaacat

SEQ ID NO: 1800837 - DNA, 15 bp, Homo sapiens
attttattaaacatt

SEQ ID NO: 1800838 - DNA, 15 bp, Homo sapiens
ttttattaaacattt

SEQ ID NO: 1800839 - DNA, 15 bp, Homo sapiens
tttattaaacattta

SEQ ID NO: 1800840 - DNA, 15 bp, Homo sapiens
ttattaaacatttat

SEQ ID NO: 1800841 - DNA, 15 bp, Homo sapiens
tattaaacatttatc

SEQ ID NO: 1800842 - DNA, 15 bp, Homo sapiens
attaaacatttatca

SEQ ID NO: 1800843 - DNA, 15 bp, Homo sapiens
ttaaacatttatcaa

SEQ ID NO: 1800844 - DNA, 15 bp, Homo sapiens
taaacatttatcaag

SEQ ID NO: 1800845 - DNA, 15 bp, Homo sapiens
aaacatttatcaagt

SEQ ID NO: 1800846 - DNA, 15 bp, Homo sapiens
aacatttatcaagtc

SEQ ID NO: 1800847 - DNA, 15 bp, Homo sapiens
acatttatcaagtca

SEQ ID NO: 1800848 - DNA, 15 bp, Homo sapiens
catttatcaagtcaa

SEQ ID NO: 1800849 - DNA, 15 bp, Homo sapiens
atttatcaagtcaaa

SEQ ID NO: 1800850 - DNA, 15 bp, Homo sapiens
tttatcaagtcaaaa

SEQ ID NO: 1800851 - DNA, 15 bp, Homo sapiens
ttatcaagtcaaaaa

SEQ ID NO: 1800852 - DNA, 15 bp, Homo sapiens
tatcaagtcaaaaac

SEQ ID NO: 1800853 - DNA, 15 bp, Homo sapiens
atcaagtcaaaaact

SEQ ID NO: 1800854 - DNA, 15 bp, Homo sapiens
tcaagtcaaaaactt

SEQ ID NO: 1800855 - DNA, 15 bp, Homo sapiens
caagtcaaaaactta

SEQ ID NO: 1800856 - DNA, 15 bp, Homo sapiens
aagtcaaaaacttag

SEQ ID NO: 1800857 - DNA, 15 bp, Homo sapiens
agtcaaaaacttagg

SEQ ID NO: 1800858 - DNA, 15 bp, Homo sapiens
gtcaaaaacttagga

SEQ ID NO: 1800859 - DNA, 15 bp, Homo sapiens
tcaaaaacttaggag

SEQ ID NO: 1800860 - DNA, 15 bp, Homo sapiens
caaaaacttaggagc

SEQ ID NO: 1800861 - DNA, 15 bp, Homo sapiens
aaaaacttaggagct

SEQ ID NO: 1800862 - DNA, 15 bp, Homo sapiens
aaaacttaggagcta

SEQ ID NO: 1800863 - DNA, 15 bp, Homo sapiens
aaacttaggagctat

SEQ ID NO: 1800864 - DNA, 15 bp, Homo sapiens
aacttaggagctatc

SEQ ID NO: 1800865 - DNA, 15 bp, Homo sapiens
acttaggagctatct

SEQ ID NO: 1800866 - DNA, 15 bp, Homo sapiens
cttaggagctatcta

SEQ ID NO: 1800867 - DNA, 15 bp, Homo sapiens
ttaggagctatctat

SEQ ID NO: 1800868 - DNA, 15 bp, Homo sapiens
taggagctatctatt

SEQ ID NO: 1800869 - DNA, 15 bp, Homo sapiens
aggagctatctatta

SEQ ID NO: 1800870 - DNA, 15 bp, Homo sapiens
ggagctatctattaa

SEQ ID NO: 1800871 - DNA, 15 bp, Homo sapiens
gagctatctattaat

SEQ ID NO: 1800872 - DNA, 15 bp, Homo sapiens
agctatctattaatt

SEQ ID NO: 1800873 - DNA, 15 bp, Homo sapiens
gctatctattaattc

SEQ ID NO: 1800874 - DNA, 15 bp, Homo sapiens
ctatctattaattct

SEQ ID NO: 1800875 - DNA, 15 bp, Homo sapiens
tatctattaattctt

SEQ ID NO: 1800876 - DNA, 15 bp, Homo sapiens
atctattaattcttg

SEQ ID NO: 1800877 - DNA, 15 bp, Homo sapiens
tctattaattcttgt

SEQ ID NO: 1800878 - DNA, 15 bp, Homo sapiens
ctattaattcttgtc

SEQ ID NO: 1800879 - DNA, 15 bp, Homo sapiens
tattaattcttgtct

SEQ ID NO: 1800880 - DNA, 15 bp, Homo sapiens
attaattcttgtctg

SEQ ID NO: 1800881 - DNA, 15 bp, Homo sapiens
ttaattcttgtctgg

SEQ ID NO: 1800882 - DNA, 15 bp, Homo sapiens
taattcttgtctgga

SEQ ID NO: 1800883 - DNA, 15 bp, Homo sapiens
aattcttgtctggac

SEQ ID NO: 1800884 - DNA, 15 bp, Homo sapiens
attcttgtctggacc

SEQ ID NO: 1800885 - DNA, 15 bp, Homo sapiens
ttcttgtctggacca

SEQ ID NO: 1800886 - DNA, 15 bp, Homo sapiens
tcttgtctggaccac

SEQ ID NO: 1800887 - DNA, 15 bp, Homo sapiens
cttgtctggaccact

SEQ ID NO: 1800888 - DNA, 15 bp, Homo sapiens
ttgtctggaccactg

SEQ ID NO: 1800889 - DNA, 15 bp, Homo sapiens
tgtctggaccactgc

SEQ ID NO: 1800890 - DNA, 15 bp, Homo sapiens
gtctggaccactgct

SEQ ID NO: 1800891 - DNA, 15 bp, Homo sapiens
tctggaccactgcta

SEQ ID NO: 1800892 - DNA, 15 bp, Homo sapiens
ctggaccactgctaa

SEQ ID NO: 1800893 - DNA, 15 bp, Homo sapiens
tggaccactgctaaa

SEQ ID NO: 1800894 - DNA, 15 bp, Homo sapiens
ggaccactgctaaag

SEQ ID NO: 1800895 - DNA, 15 bp, Homo sapiens
gaccactgctaaaga

SEQ ID NO: 1800896 - DNA, 15 bp, Homo sapiens
accactgctaaagac

SEQ ID NO: 1800897 - DNA, 15 bp, Homo sapiens
ccactgctaaagact

SEQ ID NO: 1800898 - DNA, 15 bp, Homo sapiens
cactgctaaagactt

SEQ ID NO: 1800899 - DNA, 15 bp, Homo sapiens
actgctaaagacttc

SEQ ID NO: 1800900 - DNA, 15 bp, Homo sapiens
ctgctaaagacttct

SEQ ID NO: 1800901 - DNA, 15 bp, Homo sapiens
tgctaaagacttcta

SEQ ID NO: 1800902 - DNA, 15 bp, Homo sapiens
gctaaagacttctaa

SEQ ID NO: 1800903 - DNA, 15 bp, Homo sapiens
ctaaagacttctaac

SEQ ID NO: 1800904 - DNA, 15 bp, Homo sapiens
taaagacttctaacc

SEQ ID NO: 1800905 - DNA, 15 bp, Homo sapiens
aaagacttctaacca

SEQ ID NO: 1800906 - DNA, 15 bp, Homo sapiens
aagacttctaaccag

SEQ ID NO: 1800907 - DNA, 15 bp, Homo sapiens
agacttctaaccagt

SEQ ID NO: 1800908 - DNA, 15 bp, Homo sapiens
gacttctaaccagtc

SEQ ID NO: 1800909 - DNA, 15 bp, Homo sapiens
acttctaaccagtct

SEQ ID NO: 1800910 - DNA, 15 bp, Homo sapiens
cttctaaccagtctc

SEQ ID NO: 1800911 - DNA, 15 bp, Homo sapiens
ttctaaccagtctcc

SEQ ID NO: 1800912 - DNA, 15 bp, Homo sapiens
tctaaccagtctccc

SEQ ID NO: 1800913 - DNA, 15 bp, Homo sapiens
ctaaccagtctccct

SEQ ID NO: 1800914 - DNA, 15 bp, Homo sapiens
taaccagtctccctg

SEQ ID NO: 1800915 - DNA, 15 bp, Homo sapiens
aaccagtctccctgt

SEQ ID NO: 1800916 - DNA, 15 bp, Homo sapiens
accagtctccctgtt

SEQ ID NO: 1800917 - DNA, 15 bp, Homo sapiens
ccagtctccctgttc

SEQ ID NO: 1800918 - DNA, 15 bp, Homo sapiens
cagtctccctgttcc

SEQ ID NO: 1800919 - DNA, 15 bp, Homo sapiens
agtctccctgttccc

SEQ ID NO: 1800920 - DNA, 15 bp, Homo sapiens
gtctccctgttccct

SEQ ID NO: 1800921 - DNA, 15 bp, Homo sapiens
tctccctgttccctt

SEQ ID NO: 1800922 - DNA, 15 bp, Homo sapiens
ctccctgttcccttt

SEQ ID NO: 1800923 - DNA, 15 bp, Homo sapiens
tccctgttccctttc

SEQ ID NO: 1800924 - DNA, 15 bp, Homo sapiens
ccctgttccctttct

SEQ ID NO: 1800925 - DNA, 15 bp, Homo sapiens
cctgttccctttctt

SEQ ID NO: 1800926 - DNA, 15 bp, Homo sapiens
ctgttccctttcttt

SEQ ID NO: 1800927 - DNA, 15 bp, Homo sapiens
tgttccctttctttc

SEQ ID NO: 1800928 - DNA, 15 bp, Homo sapiens
gttccctttctttct

SEQ ID NO: 1800929 - DNA, 15 bp, Homo sapiens
ttccctttctttctt

SEQ ID NO: 1800930 - DNA, 15 bp, Homo sapiens
tccctttctttcttt

SEQ ID NO: 1800931 - DNA, 15 bp, Homo sapiens
ccctttctttcttta

SEQ ID NO: 1800932 - DNA, 15 bp, Homo sapiens
cctttctttctttac

SEQ ID NO: 1800933 - DNA, 15 bp, Homo sapiens
ctttctttctttact

SEQ ID NO: 1800934 - DNA, 15 bp, Homo sapiens
tttctttctttactg

SEQ ID NO: 1800935 - DNA, 15 bp, Homo sapiens
ttctttctttactgt

SEQ ID NO: 1800936 - DNA, 15 bp, Homo sapiens
tctttctttactgtc

SEQ ID NO: 1800937 - DNA, 15 bp, Homo sapiens
ctttctttactgtca

SEQ ID NO: 1800938 - DNA, 15 bp, Homo sapiens
tttctttactgtcaa

SEQ ID NO: 1800939 - DNA, 15 bp, Homo sapiens
ttctttactgtcaaa

SEQ ID NO: 1800940 - DNA, 15 bp, Homo sapiens
tctttactgtcaaac

SEQ ID NO: 1800941 - DNA, 15 bp, Homo sapiens
ctttactgtcaaact

SEQ ID NO: 1800942 - DNA, 15 bp, Homo sapiens
tttactgtcaaactc

SEQ ID NO: 1800943 - DNA, 15 bp, Homo sapiens
ttactgtcaaactcc

SEQ ID NO: 1800944 - DNA, 15 bp, Homo sapiens
tactgtcaaactcca

SEQ ID NO: 1800945 - DNA, 15 bp, Homo sapiens
actgtcaaactccac

SEQ ID NO: 1800946 - DNA, 15 bp, Homo sapiens
ctgtcaaactccaca

SEQ ID NO: 1800947 - DNA, 15 bp, Homo sapiens
tgtcaaactccacaa

SEQ ID NO: 1800948 - DNA, 15 bp, Homo sapiens
gtcaaactccacaaa

SEQ ID NO: 1800949 - DNA, 15 bp, Homo sapiens
tcaaactccacaaag

SEQ ID NO: 1800950 - DNA, 15 bp, Homo sapiens
caaactccacaaaga

SEQ ID NO: 1800951 - DNA, 15 bp, Homo sapiens
aaactccacaaagaa

SEQ ID NO: 1800952 - DNA, 15 bp, Homo sapiens
aactccacaaagaac

SEQ ID NO: 1800953 - DNA, 15 bp, Homo sapiens
actccacaaagaaca

SEQ ID NO: 1800954 - DNA, 15 bp, Homo sapiens
ctccacaaagaacaa

SEQ ID NO: 1800955 - DNA, 15 bp, Homo sapiens
tccacaaagaacaaa

SEQ ID NO: 1800956 - DNA, 15 bp, Homo sapiens
caaagaacaaaaatg

SEQ ID NO: 1800957 - DNA, 15 bp, Homo sapiens
aaagaacaaaaatga

SEQ ID NO: 1800958 - DNA, 15 bp, Homo sapiens
aagaacaaaaatgat

SEQ ID NO: 1800959 - DNA, 15 bp, Homo sapiens
agaacaaaaatgatt

SEQ ID NO: 1800960 - DNA, 15 bp, Homo sapiens
gaacaaaaatgattg

SEQ ID NO: 1800961 - DNA, 15 bp, Homo sapiens
aacaaaaatgattgt

SEQ ID NO: 1800962 - DNA, 15 bp, Homo sapiens
acaaaaatgattgtt

SEQ ID NO: 1800963 - DNA, 15 bp, Homo sapiens
caaaaatgattgttt

SEQ ID NO: 1800964 - DNA, 15 bp, Homo sapiens
aaaaatgattgttta

SEQ ID NO: 1800965 - DNA, 15 bp, Homo sapiens
aaaatgattgtttaa

SEQ ID NO: 1800966 - DNA, 15 bp, Homo sapiens
aaatgattgtttaaa

SEQ ID NO: 1800967 - DNA, 15 bp, Homo sapiens
aatgattgtttaaaa

SEQ ID NO: 1800968 - DNA, 15 bp, Homo sapiens
atgattgtttaaaaa

SEQ ID NO: 1800969 - DNA, 15 bp, Homo sapiens
tgattgtttaaaaat

SEQ ID NO: 1800970 - DNA, 15 bp, Homo sapiens
gattgtttaaaaata

SEQ ID NO: 1800971 - DNA, 15 bp, Homo sapiens
attgtttaaaaatat

SEQ ID NO: 1800972 - DNA, 15 bp, Homo sapiens
ttgtttaaaaatata

SEQ ID NO: 1800973 - DNA, 15 bp, Homo sapiens
tgtttaaaaatataa

SEQ ID NO: 1800974 - DNA, 15 bp, Homo sapiens
gtttaaaaatataaa

SEQ ID NO: 1800975 - DNA, 15 bp, Homo sapiens
tttaaaaatataaat

SEQ ID NO: 1800976 - DNA, 15 bp, Homo sapiens
ttaaaaatataaatt

SEQ ID NO: 1800977 - DNA, 15 bp, Homo sapiens
taaaaatataaattg

SEQ ID NO: 1800978 - DNA, 15 bp, Homo sapiens
aaaaatataaattga

SEQ ID NO: 1800979 - DNA, 15 bp, Homo sapiens
aaaatataaattgat

SEQ ID NO: 1800980 - DNA, 15 bp, Homo sapiens
aaatataaattgatt

SEQ ID NO: 1800981 - DNA, 15 bp, Homo sapiens
aatataaattgattc

SEQ ID NO: 1800982 - DNA, 15 bp, Homo sapiens
atataaattgattca

SEQ ID NO: 1800983 - DNA, 15 bp, Homo sapiens
tataaattgattcac

SEQ ID NO: 1800984 - DNA, 15 bp, Homo sapiens
ataaattgattcaca

SEQ ID NO: 1800985 - DNA, 15 bp, Homo sapiens
taaattgattcacat

SEQ ID NO: 1800986 - DNA, 15 bp, Homo sapiens
aaattgattcacatt

SEQ ID NO: 1800987 - DNA, 15 bp, Homo sapiens
aattgattcacattg

SEQ ID NO: 1800988 - DNA, 15 bp, Homo sapiens
attgattcacattgc

SEQ ID NO: 1800989 - DNA, 15 bp, Homo sapiens
ttgattcacattgct

SEQ ID NO: 1800990 - DNA, 15 bp, Homo sapiens
tgattcacattgctc

SEQ ID NO: 1800991 - DNA, 15 bp, Homo sapiens
gattcacattgctct

SEQ ID NO: 1800992 - DNA, 15 bp, Homo sapiens
attcacattgctctc

SEQ ID NO: 1800993 - DNA, 15 bp, Homo sapiens
ttcacattgctctct

SEQ ID NO: 1800994 - DNA, 15 bp, Homo sapiens
tcacattgctctcta

SEQ ID NO: 1800995 - DNA, 15 bp, Homo sapiens
cacattgctctctac

SEQ ID NO: 1800996 - DNA, 15 bp, Homo sapiens
acattgctctctact

SEQ ID NO: 1800997 - DNA, 15 bp, Homo sapiens
cattgctctctactt

SEQ ID NO: 1800998 - DNA, 15 bp, Homo sapiens
attgctctctacttg

SEQ ID NO: 1800999 - DNA, 15 bp, Homo sapiens
ttgctctctacttga

SEQ ID NO: 1801000 - DNA, 15 bp, Homo sapiens
tgctctctacttgaa

SEQ ID NO: 1801001 - DNA, 15 bp, Homo sapiens
gctctctacttgaag

SEQ ID NO: 1801002 - DNA, 15 bp, Homo sapiens
ctctctacttgaagt

SEQ ID NO: 1801003 - DNA, 15 bp, Homo sapiens
tctctacttgaagta

SEQ ID NO: 1801004 - DNA, 15 bp, Homo sapiens
ctctacttgaagtac

SEQ ID NO: 1801005 - DNA, 15 bp, Homo sapiens
tctacttgaagtact

SEQ ID NO: 1801006 - DNA, 15 bp, Homo sapiens
ctacttgaagtactt

SEQ ID NO: 1801007 - DNA, 15 bp, Homo sapiens
tacttgaagtactta

SEQ ID NO: 1801008 - DNA, 15 bp, Homo sapiens
acttgaagtacttaa

SEQ ID NO: 1801009 - DNA, 15 bp, Homo sapiens
cttgaagtacttaac

SEQ ID NO: 1801010 - DNA, 15 bp, Homo sapiens
ttgaagtacttaaca

SEQ ID NO: 1801011 - DNA, 15 bp, Homo sapiens
tgaagtacttaacag

SEQ ID NO: 1801012 - DNA, 15 bp, Homo sapiens
gaagtacttaacagg

SEQ ID NO: 1801013 - DNA, 15 bp, Homo sapiens
aagtacttaacagga

SEQ ID NO: 1801014 - DNA, 15 bp, Homo sapiens
agtacttaacaggaa

SEQ ID NO: 1801015 - DNA, 15 bp, Homo sapiens
gtacttaacaggaat

SEQ ID NO: 1801016 - DNA, 15 bp, Homo sapiens
tacttaacaggaatt

SEQ ID NO: 1801017 - DNA, 15 bp, Homo sapiens
acttaacaggaatta

SEQ ID NO: 1801018 - DNA, 15 bp, Homo sapiens
cttaacaggaattat

SEQ ID NO: 1801019 - DNA, 15 bp, Homo sapiens
ttaacaggaattata

SEQ ID NO: 1801020 - DNA, 15 bp, Homo sapiens
taacaggaattataa

SEQ ID NO: 1801021 - DNA, 15 bp, Homo sapiens
aacaggaattataaa

SEQ ID NO: 1801022 - DNA, 15 bp, Homo sapiens
acaggaattataaag

SEQ ID NO: 1801023 - DNA, 15 bp, Homo sapiens
caggaattataaagc

SEQ ID NO: 1801024 - DNA, 15 bp, Homo sapiens
aggaattataaagcc

SEQ ID NO: 1801025 - DNA, 15 bp, Homo sapiens
ggaattataaagccc

SEQ ID NO: 1801026 - DNA, 15 bp, Homo sapiens
gaattataaagcccc

SEQ ID NO: 1801027 - DNA, 15 bp, Homo sapiens
aattataaagcccct

SEQ ID NO: 1801028 - DNA, 15 bp, Homo sapiens
attataaagccccta

SEQ ID NO: 1801029 - DNA, 15 bp, Homo sapiens
ttataaagcccctac

SEQ ID NO: 1801030 - DNA, 15 bp, Homo sapiens
tataaagcccctact

SEQ ID NO: 1801031 - DNA, 15 bp, Homo sapiens
ataaagcccctactg

SEQ ID NO: 1801032 - DNA, 15 bp, Homo sapiens
taaagcccctactga

SEQ ID NO: 1801033 - DNA, 15 bp, Homo sapiens
aaagcccctactgac

SEQ ID NO: 1801034 - DNA, 15 bp, Homo sapiens
aagcccctactgact

SEQ ID NO: 1801035 - DNA, 15 bp, Homo sapiens
agcccctactgactt

SEQ ID NO: 1801036 - DNA, 15 bp, Homo sapiens
gcccctactgacttc

SEQ ID NO: 1801037 - DNA, 15 bp, Homo sapiens
cccctactgacttcc

SEQ ID NO: 1801038 - DNA, 15 bp, Homo sapiens
ccctactgacttccc

SEQ ID NO: 1801039 - DNA, 15 bp, Homo sapiens
cctactgacttccca

SEQ ID NO: 1801040 - DNA, 15 bp, Homo sapiens
ctactgacttcccat

SEQ ID NO: 1801041 - DNA, 15 bp, Homo sapiens
tactgacttcccatc

SEQ ID NO: 1801042 - DNA, 15 bp, Homo sapiens
actgacttcccatcc

SEQ ID NO: 1801043 - DNA, 15 bp, Homo sapiens
ctgacttcccatcct

SEQ ID NO: 1801044 - DNA, 15 bp, Homo sapiens
tgacttcccatcctc

SEQ ID NO: 1801045 - DNA, 15 bp, Homo sapiens
gacttcccatcctca

SEQ ID NO: 1801046 - DNA, 15 bp, Homo sapiens
acttcccatcctcat

SEQ ID NO: 1801047 - DNA, 15 bp, Homo sapiens
cttcccatcctcatc

SEQ ID NO: 1801048 - DNA, 15 bp, Homo sapiens
ttcccatcctcatct

SEQ ID NO: 1801049 - DNA, 15 bp, Homo sapiens
tcccatcctcatctt

SEQ ID NO: 1801050 - DNA, 15 bp, Homo sapiens
cccatcctcatcttg

SEQ ID NO: 1801051 - DNA, 15 bp, Homo sapiens
ccatcctcatcttgt

SEQ ID NO: 1801052 - DNA, 15 bp, Homo sapiens
catcctcatcttgta

SEQ ID NO: 1801053 - DNA, 15 bp, Homo sapiens
atcctcatcttgtag

SEQ ID NO: 1801054 - DNA, 15 bp, Homo sapiens
tcctcatcttgtaga

SEQ ID NO: 1801055 - DNA, 15 bp, Homo sapiens
cctcatcttgtagaa

SEQ ID NO: 1801056 - DNA, 15 bp, Homo sapiens
ctcatcttgtagaat

SEQ ID NO: 1801057 - DNA, 15 bp, Homo sapiens
tcatcttgtagaatt

SEQ ID NO: 1801058 - DNA, 15 bp, Homo sapiens
catcttgtagaattt

SEQ ID NO: 1801059 - DNA, 15 bp, Homo sapiens
atcttgtagaatttt

SEQ ID NO: 1801060 - DNA, 15 bp, Homo sapiens
tcttgtagaattttc

SEQ ID NO: 1801061 - DNA, 15 bp, Homo sapiens
cttgtagaattttct

SEQ ID NO: 1801062 - DNA, 15 bp, Homo sapiens
ttgtagaattttctc

SEQ ID NO: 1801063 - DNA, 15 bp, Homo sapiens
tgtagaattttctcc

SEQ ID NO: 1801064 - DNA, 15 bp, Homo sapiens
gtagaattttctcct

SEQ ID NO: 1801065 - DNA, 15 bp, Homo sapiens
tagaattttctcctt

SEQ ID NO: 1801066 - DNA, 15 bp, Homo sapiens
agaattttctccttg

SEQ ID NO: 1801067 - DNA, 15 bp, Homo sapiens
gaattttctccttgt

SEQ ID NO: 1801068 - DNA, 15 bp, Homo sapiens
aattttctccttgtc

SEQ ID NO: 1801069 - DNA, 15 bp, Homo sapiens
attttctccttgtca

SEQ ID NO: 1801070 - DNA, 15 bp, Homo sapiens
ttttctccttgtcac

SEQ ID NO: 1801071 - DNA, 15 bp, Homo sapiens
tttctccttgtcact

SEQ ID NO: 1801072 - DNA, 15 bp, Homo sapiens
ttctccttgtcactg

SEQ ID NO: 1801073 - DNA, 15 bp, Homo sapiens
tctccttgtcactgt

SEQ ID NO: 1801074 - DNA, 15 bp, Homo sapiens
ctccttgtcactgtg

SEQ ID NO: 1801075 - DNA, 15 bp, Homo sapiens
tccttgtcactgtgc

SEQ ID NO: 1801076 - DNA, 15 bp, Homo sapiens
ccttgtcactgtgct

SEQ ID NO: 1801077 - DNA, 15 bp, Homo sapiens
cttgtcactgtgctt

SEQ ID NO: 1801078 - DNA, 15 bp, Homo sapiens
ttgtcactgtgcttt

SEQ ID NO: 1801079 - DNA, 15 bp, Homo sapiens
tgtcactgtgcttta

SEQ ID NO: 1801080 - DNA, 15 bp, Homo sapiens
gtcactgtgctttag

SEQ ID NO: 1801081 - DNA, 15 bp, Homo sapiens
tcactgtgctttagc

SEQ ID NO: 1801082 - DNA, 15 bp, Homo sapiens
cactgtgctttagcc

SEQ ID NO: 1801083 - DNA, 15 bp, Homo sapiens
actgtgctttagcca

SEQ ID NO: 1801084 - DNA, 15 bp, Homo sapiens
ctgtgctttagccac

SEQ ID NO: 1801085 - DNA, 15 bp, Homo sapiens
tgtgctttagccaca

SEQ ID NO: 1801086 - DNA, 15 bp, Homo sapiens
gtgctttagccacac

SEQ ID NO: 1801087 - DNA, 15 bp, Homo sapiens
tgctttagccacact

SEQ ID NO: 1801088 - DNA, 15 bp, Homo sapiens
gctttagccacactg

SEQ ID NO: 1801089 - DNA, 15 bp, Homo sapiens
ctttagccacactga

SEQ ID NO: 1801090 - DNA, 15 bp, Homo sapiens
tttagccacactgaa

SEQ ID NO: 1801091 - DNA, 15 bp, Homo sapiens
ttagccacactgaac

SEQ ID NO: 1801092 - DNA, 15 bp, Homo sapiens
tagccacactgaacc

SEQ ID NO: 1801093 - DNA, 15 bp, Homo sapiens
agccacactgaacct

SEQ ID NO: 1801094 - DNA, 15 bp, Homo sapiens
gccacactgaacctt

SEQ ID NO: 1801095 - DNA, 15 bp, Homo sapiens
ccacactgaaccttt

SEQ ID NO: 1801096 - DNA, 15 bp, Homo sapiens
cacactgaacctttt

SEQ ID NO: 1801097 - DNA, 15 bp, Homo sapiens
acactgaaccttttt

SEQ ID NO: 1801098 - DNA, 15 bp, Homo sapiens
cactgaacctttttc

SEQ ID NO: 1801099 - DNA, 15 bp, Homo sapiens
actgaacctttttct

SEQ ID NO: 1801100 - DNA, 15 bp, Homo sapiens
ctgaacctttttctt

SEQ ID NO: 1801101 - DNA, 15 bp, Homo sapiens
tgaacctttttcttt

SEQ ID NO: 1801102 - DNA, 15 bp, Homo sapiens
gaacctttttcttta

SEQ ID NO: 1801103 - DNA, 15 bp, Homo sapiens
aacctttttctttaa

SEQ ID NO: 1801104 - DNA, 15 bp, Homo sapiens
acctttttctttaaa

SEQ ID NO: 1801105 - DNA, 15 bp, Homo sapiens
cctttttctttaaaa

SEQ ID NO: 1801106 - DNA, 15 bp, Homo sapiens
ctttttctttaaaat

SEQ ID NO: 1801107 - DNA, 15 bp, Homo sapiens
tttttctttaaaatg

SEQ ID NO: 1801108 - DNA, 15 bp, Homo sapiens
ttttctttaaaatgc

SEQ ID NO: 1801109 - DNA, 15 bp, Homo sapiens
tttctttaaaatgcc

SEQ ID NO: 1801110 - DNA, 15 bp, Homo sapiens
ttctttaaaatgcca

SEQ ID NO: 1801111 - DNA, 15 bp, Homo sapiens
tctttaaaatgccaa

SEQ ID NO: 1801112 - DNA, 15 bp, Homo sapiens
ctttaaaatgccaag

SEQ ID NO: 1801113 - DNA, 15 bp, Homo sapiens
tttaaaatgccaagc

SEQ ID NO: 1801114 - DNA, 15 bp, Homo sapiens
ttaaaatgccaagcc

SEQ ID NO: 1801115 - DNA, 15 bp, Homo sapiens
taaaatgccaagcct

SEQ ID NO: 1801116 - DNA, 15 bp, Homo sapiens
aaaatgccaagccta

SEQ ID NO: 1801117 - DNA, 15 bp, Homo sapiens
aaatgccaagcctat

SEQ ID NO: 1801118 - DNA, 15 bp, Homo sapiens
aatgccaagcctatt

SEQ ID NO: 1801119 - DNA, 15 bp, Homo sapiens
atgccaagcctattc

SEQ ID NO: 1801120 - DNA, 15 bp, Homo sapiens
tgccaagcctattct

SEQ ID NO: 1801121 - DNA, 15 bp, Homo sapiens
gccaagcctattctt

SEQ ID NO: 1801122 - DNA, 15 bp, Homo sapiens
ccaagcctattctta

SEQ ID NO: 1801123 - DNA, 15 bp, Homo sapiens
caagcctattcttac

SEQ ID NO: 1801124 - DNA, 15 bp, Homo sapiens
aagcctattcttacc

SEQ ID NO: 1801125 - DNA, 15 bp, Homo sapiens
agcctattcttacct

SEQ ID NO: 1801126 - DNA, 15 bp, Homo sapiens
gcctattcttacctt

SEQ ID NO: 1801127 - DNA, 15 bp, Homo sapiens
cctattcttacctta

SEQ ID NO: 1801128 - DNA, 15 bp, Homo sapiens
ctattcttaccttag

SEQ ID NO: 1801129 - DNA, 15 bp, Homo sapiens
tattcttaccttagg

SEQ ID NO: 1801130 - DNA, 15 bp, Homo sapiens
attcttaccttaggc

SEQ ID NO: 1801131 - DNA, 15 bp, Homo sapiens
ttcttaccttaggct

SEQ ID NO: 1801132 - DNA, 15 bp, Homo sapiens
tcttaccttaggctt

SEQ ID NO: 1801133 - DNA, 15 bp, Homo sapiens
cttaccttaggcttt

SEQ ID NO: 1801134 - DNA, 15 bp, Homo sapiens
ttaccttaggctttt

SEQ ID NO: 1801135 - DNA, 15 bp, Homo sapiens
taccttaggctttta

SEQ ID NO: 1801136 - DNA, 15 bp, Homo sapiens
accttaggcttttat

SEQ ID NO: 1801137 - DNA, 15 bp, Homo sapiens
ccttaggcttttata

SEQ ID NO: 1801138 - DNA, 15 bp, Homo sapiens
cttaggcttttatat

SEQ ID NO: 1801139 - DNA, 15 bp, Homo sapiens
ttaggcttttatatt

SEQ ID NO: 1801140 - DNA, 15 bp, Homo sapiens
taggcttttatattt

SEQ ID NO: 1801141 - DNA, 15 bp, Homo sapiens
aggcttttatatttc

SEQ ID NO: 1801142 - DNA, 15 bp, Homo sapiens
ggcttttatatttct

SEQ ID NO: 1801143 - DNA, 15 bp, Homo sapiens
gcttttatatttctt

SEQ ID NO: 1801144 - DNA, 15 bp, Homo sapiens
cttttatatttcttc

SEQ ID NO: 1801145 - DNA, 15 bp, Homo sapiens
ttttatatttcttct

SEQ ID NO: 1801146 - DNA, 15 bp, Homo sapiens
tttatatttcttctt

SEQ ID NO: 1801147 - DNA, 15 bp, Homo sapiens
ttatatttcttcttc

SEQ ID NO: 1801148 - DNA, 15 bp, Homo sapiens
tatatttcttcttcc

SEQ ID NO: 1801149 - DNA, 15 bp, Homo sapiens
atatttcttcttcct

SEQ ID NO: 1801150 - DNA, 15 bp, Homo sapiens
tatttcttcttcctt

SEQ ID NO: 1801151 - DNA, 15 bp, Homo sapiens
atttcttcttccttc

SEQ ID NO: 1801152 - DNA, 15 bp, Homo sapiens
tttcttcttccttct

SEQ ID NO: 1801153 - DNA, 15 bp, Homo sapiens
ttcttcttccttctg

SEQ ID NO: 1801154 - DNA, 15 bp, Homo sapiens
tcttcttccttctgc

SEQ ID NO: 1801155 - DNA, 15 bp, Homo sapiens
cttcttccttctgcc

SEQ ID NO: 1801156 - DNA, 15 bp, Homo sapiens
ttcttccttctgcct

SEQ ID NO: 1801157 - DNA, 15 bp, Homo sapiens
tcttccttctgcctg

SEQ ID NO: 1801158 - DNA, 15 bp, Homo sapiens
cttccttctgcctgg

SEQ ID NO: 1801159 - DNA, 15 bp, Homo sapiens
ttccttctgcctgga

SEQ ID NO: 1801160 - DNA, 15 bp, Homo sapiens
tccttctgcctggaa

SEQ ID NO: 1801161 - DNA, 15 bp, Homo sapiens
ccttctgcctggaat

SEQ ID NO: 1801162 - DNA, 15 bp, Homo sapiens
cttctgcctggaata

SEQ ID NO: 1801163 - DNA, 15 bp, Homo sapiens
ttctgcctggaatac

SEQ ID NO: 1801164 - DNA, 15 bp, Homo sapiens
tctgcctggaatact

SEQ ID NO: 1801165 - DNA, 15 bp, Homo sapiens
ctgcctggaatactc

SEQ ID NO: 1801166 - DNA, 15 bp, Homo sapiens
tgcctggaatactct

SEQ ID NO: 1801167 - DNA, 15 bp, Homo sapiens
gcctggaatactctt

SEQ ID NO: 1801168 - DNA, 15 bp, Homo sapiens
cctggaatactcttt

SEQ ID NO: 1801169 - DNA, 15 bp, Homo sapiens
ctggaatactctttt

SEQ ID NO: 1801170 - DNA, 15 bp, Homo sapiens
tggaatactcttttc

SEQ ID NO: 1801171 - DNA, 15 bp, Homo sapiens
ggaatactcttttcc

SEQ ID NO: 1801172 - DNA, 15 bp, Homo sapiens
gaatactcttttccc

SEQ ID NO: 1801173 - DNA, 15 bp, Homo sapiens
aatactcttttccca

SEQ ID NO: 1801174 - DNA, 15 bp, Homo sapiens
atactcttttcccac

SEQ ID NO: 1801175 - DNA, 15 bp, Homo sapiens
tactcttttcccaca

SEQ ID NO: 1801176 - DNA, 15 bp, Homo sapiens
actcttttcccacag

SEQ ID NO: 1801177 - DNA, 15 bp, Homo sapiens
ctcttttcccacagt

SEQ ID NO: 1801178 - DNA, 15 bp, Homo sapiens
tcttttcccacagtt

SEQ ID NO: 1801179 - DNA, 15 bp, Homo sapiens
cttttcccacagttt

SEQ ID NO: 1801180 - DNA, 15 bp, Homo sapiens
ttttcccacagtttt

SEQ ID NO: 1801181 - DNA, 15 bp, Homo sapiens
tttcccacagttttg

SEQ ID NO: 1801182 - DNA, 15 bp, Homo sapiens
ttcccacagttttgc

SEQ ID NO: 1801183 - DNA, 15 bp, Homo sapiens
tcccacagttttgca

SEQ ID NO: 1801184 - DNA, 15 bp, Homo sapiens
cccacagttttgcat

SEQ ID NO: 1801185 - DNA, 15 bp, Homo sapiens
ccacagttttgcata

SEQ ID NO: 1801186 - DNA, 15 bp, Homo sapiens
cacagttttgcatag

SEQ ID NO: 1801187 - DNA, 15 bp, Homo sapiens
acagttttgcatagc

SEQ ID NO: 1801188 - DNA, 15 bp, Homo sapiens
cagttttgcatagcc

SEQ ID NO: 1801189 - DNA, 15 bp, Homo sapiens
agttttgcatagcca

SEQ ID NO: 1801190 - DNA, 15 bp, Homo sapiens
gttttgcatagccag

SEQ ID NO: 1801191 - DNA, 15 bp, Homo sapiens
ttttgcatagccagt

SEQ ID NO: 1801192 - DNA, 15 bp, Homo sapiens
tttgcatagccagtg

SEQ ID NO: 1801193 - DNA, 15 bp, Homo sapiens
ttgcatagccagtgc

SEQ ID NO: 1801194 - DNA, 15 bp, Homo sapiens
tgcatagccagtgcc

SEQ ID NO: 1801195 - DNA, 15 bp, Homo sapiens
gcatagccagtgcct

SEQ ID NO: 1801196 - DNA, 15 bp, Homo sapiens
catagccagtgcctt

SEQ ID NO: 1801197 - DNA, 15 bp, Homo sapiens
atagccagtgccttt

SEQ ID NO: 1801198 - DNA, 15 bp, Homo sapiens
tagccagtgcctttc

SEQ ID NO: 1801199 - DNA, 15 bp, Homo sapiens
agccagtgcctttct

SEQ ID NO: 1801200 - DNA, 15 bp, Homo sapiens
gccagtgcctttctg

SEQ ID NO: 1801201 - DNA, 15 bp, Homo sapiens
ccagtgcctttctgt

SEQ ID NO: 1801202 - DNA, 15 bp, Homo sapiens
cagtgcctttctgtc

SEQ ID NO: 1801203 - DNA, 15 bp, Homo sapiens
agtgcctttctgtct

SEQ ID NO: 1801204 - DNA, 15 bp, Homo sapiens
gtgcctttctgtctt

SEQ ID NO: 1801205 - DNA, 15 bp, Homo sapiens
tgcctttctgtcttt

SEQ ID NO: 1801206 - DNA, 15 bp, Homo sapiens
gcctttctgtctttc

SEQ ID NO: 1801207 - DNA, 15 bp, Homo sapiens
cctttctgtctttca

SEQ ID NO: 1801208 - DNA, 15 bp, Homo sapiens
tttctgtctttcaga

SEQ ID NO: 1801209 - DNA, 15 bp, Homo sapiens
ttctgtctttcagaa

SEQ ID NO: 1801210 - DNA, 15 bp, Homo sapiens
tctgtctttcagaac

SEQ ID NO: 1801211 - DNA, 15 bp, Homo sapiens
ctgtctttcagaact

SEQ ID NO: 1801212 - DNA, 15 bp, Homo sapiens
tgtctttcagaactc

SEQ ID NO: 1801213 - DNA, 15 bp, Homo sapiens
gtctttcagaactca

SEQ ID NO: 1801214 - DNA, 15 bp, Homo sapiens
tctttcagaactcag

SEQ ID NO: 1801215 - DNA, 15 bp, Homo sapiens
ctttcagaactcagc

SEQ ID NO: 1801216 - DNA, 15 bp, Homo sapiens
tttcagaactcagct

SEQ ID NO: 1801217 - DNA, 15 bp, Homo sapiens
ttcagaactcagctc

SEQ ID NO: 1801218 - DNA, 15 bp, Homo sapiens
tcagaactcagctca

SEQ ID NO: 1801219 - DNA, 15 bp, Homo sapiens
cagaactcagctcag

SEQ ID NO: 1801220 - DNA, 15 bp, Homo sapiens
agaactcagctcaga

SEQ ID NO: 1801221 - DNA, 15 bp, Homo sapiens
gaactcagctcagag

SEQ ID NO: 1801222 - DNA, 15 bp, Homo sapiens
aactcagctcagagg

SEQ ID NO: 1801223 - DNA, 15 bp, Homo sapiens
actcagctcagaggg

SEQ ID NO: 1801224 - DNA, 15 bp, Homo sapiens
ctcagctcagagggc

SEQ ID NO: 1801225 - DNA, 15 bp, Homo sapiens
tcagctcagagggct

SEQ ID NO: 1801226 - DNA, 15 bp, Homo sapiens
cagctcagagggctt

SEQ ID NO: 1801227 - DNA, 15 bp, Homo sapiens
agctcagagggcttc

SEQ ID NO: 1801228 - DNA, 15 bp, Homo sapiens
gctcagagggcttcc

SEQ ID NO: 1801229 - DNA, 15 bp, Homo sapiens
ctcagagggcttcct

SEQ ID NO: 1801230 - DNA, 15 bp, Homo sapiens
tcagagggcttcctt

SEQ ID NO: 1801231 - DNA, 15 bp, Homo sapiens
cagagggcttccttg

SEQ ID NO: 1801232 - DNA, 15 bp, Homo sapiens
agagggcttccttga

SEQ ID NO: 1801233 - DNA, 15 bp, Homo sapiens
gagggcttccttgac

SEQ ID NO: 1801234 - DNA, 15 bp, Homo sapiens
agggcttccttgacc

SEQ ID NO: 1801235 - DNA, 15 bp, Homo sapiens
gggcttccttgacca

SEQ ID NO: 1801236 - DNA, 15 bp, Homo sapiens
ggcttccttgaccac

SEQ ID NO: 1801237 - DNA, 15 bp, Homo sapiens
gcttccttgaccacc

SEQ ID NO: 1801238 - DNA, 15 bp, Homo sapiens
cttccttgaccacca

SEQ ID NO: 1801239 - DNA, 15 bp, Homo sapiens
ttccttgaccaccaa

SEQ ID NO: 1801240 - DNA, 15 bp, Homo sapiens
tccttgaccaccaag

SEQ ID NO: 1801241 - DNA, 15 bp, Homo sapiens
ccttgaccaccaagc

SEQ ID NO: 1801242 - DNA, 15 bp, Homo sapiens
cttgaccaccaagct

SEQ ID NO: 1801243 - DNA, 15 bp, Homo sapiens
ttgaccaccaagcta

SEQ ID NO: 1801244 - DNA, 15 bp, Homo sapiens
tgaccaccaagctaa

SEQ ID NO: 1801245 - DNA, 15 bp, Homo sapiens
gaccaccaagctaaa

SEQ ID NO: 1801246 - DNA, 15 bp, Homo sapiens
accaccaagctaaaa

SEQ ID NO: 1801247 - DNA, 15 bp, Homo sapiens
ccaccaagctaaaat

SEQ ID NO: 1801248 - DNA, 15 bp, Homo sapiens
caccaagctaaaatc

SEQ ID NO: 1801249 - DNA, 15 bp, Homo sapiens
accaagctaaaatca

SEQ ID NO: 1801250 - DNA, 15 bp, Homo sapiens
ccaagctaaaatcat

SEQ ID NO: 1801251 - DNA, 15 bp, Homo sapiens
caagctaaaatcatc

SEQ ID NO: 1801252 - DNA, 15 bp, Homo sapiens
aagctaaaatcatca

SEQ ID NO: 1801253 - DNA, 15 bp, Homo sapiens
agctaaaatcatcac

SEQ ID NO: 1801254 - DNA, 15 bp, Homo sapiens
gctaaaatcatcact

SEQ ID NO: 1801255 - DNA, 15 bp, Homo sapiens
ctaaaatcatcactg

SEQ ID NO: 1801256 - DNA, 15 bp, Homo sapiens
taaaatcatcactgt

SEQ ID NO: 1801257 - DNA, 15 bp, Homo sapiens
aaaatcatcactgtg

SEQ ID NO: 1801258 - DNA, 15 bp, Homo sapiens
aaatcatcactgtgt

SEQ ID NO: 1801259 - DNA, 15 bp, Homo sapiens
aatcatcactgtgta

SEQ ID NO: 1801260 - DNA, 15 bp, Homo sapiens
atcatcactgtgtat

SEQ ID NO: 1801261 - DNA, 15 bp, Homo sapiens
tcatcactgtgtatt

SEQ ID NO: 1801262 - DNA, 15 bp, Homo sapiens
catcactgtgtattg

SEQ ID NO: 1801263 - DNA, 15 bp, Homo sapiens
atcactgtgtattgt

SEQ ID NO: 1801264 - DNA, 15 bp, Homo sapiens
tcactgtgtattgta

SEQ ID NO: 1801265 - DNA, 15 bp, Homo sapiens
cactgtgtattgtat

SEQ ID NO: 1801266 - DNA, 15 bp, Homo sapiens
actgtgtattgtatc

SEQ ID NO: 1801267 - DNA, 15 bp, Homo sapiens
ctgtgtattgtatca

SEQ ID NO: 1801268 - DNA, 15 bp, Homo sapiens
tgtgtattgtatcat

SEQ ID NO: 1801269 - DNA, 15 bp, Homo sapiens
gtgtattgtatcatt

SEQ ID NO: 1801270 - DNA, 15 bp, Homo sapiens
tgtattgtatcattc

SEQ ID NO: 1801271 - DNA, 15 bp, Homo sapiens
gtattgtatcattct

SEQ ID NO: 1801272 - DNA, 15 bp, Homo sapiens
tattgtatcattctc

SEQ ID NO: 1801273 - DNA, 15 bp, Homo sapiens
attgtatcattctcc

SEQ ID NO: 1801274 - DNA, 15 bp, Homo sapiens
ttgtatcattctcct

SEQ ID NO: 1801275 - DNA, 15 bp, Homo sapiens
tgtatcattctcctt

SEQ ID NO: 1801276 - DNA, 15 bp, Homo sapiens
gtatcattctccttc

SEQ ID NO: 1801277 - DNA, 15 bp, Homo sapiens
tatcattctccttca

SEQ ID NO: 1801278 - DNA, 15 bp, Homo sapiens
atcattctccttcaa

SEQ ID NO: 1801279 - DNA, 15 bp, Homo sapiens
tcattctccttcaaa

SEQ ID NO: 1801280 - DNA, 15 bp, Homo sapiens
cattctccttcaaaa

SEQ ID NO: 1801281 - DNA, 15 bp, Homo sapiens
attctccttcaaaag

SEQ ID NO: 1801282 - DNA, 15 bp, Homo sapiens
ttctccttcaaaagt

SEQ ID NO: 1801283 - DNA, 15 bp, Homo sapiens
tctccttcaaaagtg

SEQ ID NO: 1801284 - DNA, 15 bp, Homo sapiens
ctccttcaaaagtgt

SEQ ID NO: 1801285 - DNA, 15 bp, Homo sapiens
tccttcaaaagtgta

SEQ ID NO: 1801286 - DNA, 15 bp, Homo sapiens
ccttcaaaagtgtaa

SEQ ID NO: 1801287 - DNA, 15 bp, Homo sapiens
cttcaaaagtgtaac

SEQ ID NO: 1801288 - DNA, 15 bp, Homo sapiens
ttcaaaagtgtaaca

SEQ ID NO: 1801289 - DNA, 15 bp, Homo sapiens
tcaaaagtgtaacag

SEQ ID NO: 1801290 - DNA, 15 bp, Homo sapiens
caaaagtgtaacagc

SEQ ID NO: 1801291 - DNA, 15 bp, Homo sapiens
aaaagtgtaacagca

SEQ ID NO: 1801292 - DNA, 15 bp, Homo sapiens
aaagtgtaacagcat

SEQ ID NO: 1801293 - DNA, 15 bp, Homo sapiens
aagtgtaacagcatc

SEQ ID NO: 1801294 - DNA, 15 bp, Homo sapiens
agtgtaacagcatcc

SEQ ID NO: 1801295 - DNA, 15 bp, Homo sapiens
gtgtaacagcatcca

SEQ ID NO: 1801296 - DNA, 15 bp, Homo sapiens
tgtaacagcatccat

SEQ ID NO: 1801297 - DNA, 15 bp, Homo sapiens
gtaacagcatccatc

SEQ ID NO: 1801298 - DNA, 15 bp, Homo sapiens
taacagcatccatct

SEQ ID NO: 1801299 - DNA, 15 bp, Homo sapiens
aacagcatccatcta

SEQ ID NO: 1801300 - DNA, 15 bp, Homo sapiens
acagcatccatctat

SEQ ID NO: 1801301 - DNA, 15 bp, Homo sapiens
cagcatccatctatg

SEQ ID NO: 1801302 - DNA, 15 bp, Homo sapiens
agcatccatctatga

SEQ ID NO: 1801303 - DNA, 15 bp, Homo sapiens
gcatccatctatgac

SEQ ID NO: 1801304 - DNA, 15 bp, Homo sapiens
catccatctatgact

SEQ ID NO: 1801305 - DNA, 15 bp, Homo sapiens
atccatctatgacta

SEQ ID NO: 1801306 - DNA, 15 bp, Homo sapiens
tccatctatgactat

SEQ ID NO: 1801307 - DNA, 15 bp, Homo sapiens
ccatctatgactatt

SEQ ID NO: 1801308 - DNA, 15 bp, Homo sapiens
catctatgactattt

SEQ ID NO: 1801309 - DNA, 15 bp, Homo sapiens
atctatgactatttc

SEQ ID NO: 1801310 - DNA, 15 bp, Homo sapiens
tctatgactatttcc

SEQ ID NO: 1801311 - DNA, 15 bp, Homo sapiens
ctatgactatttccc

SEQ ID NO: 1801312 - DNA, 15 bp, Homo sapiens
tatgactatttccca

SEQ ID NO: 1801313 - DNA, 15 bp, Homo sapiens
atgactatttcccac

SEQ ID NO: 1801314 - DNA, 15 bp, Homo sapiens
tgactatttcccacc

SEQ ID NO: 1801315 - DNA, 15 bp, Homo sapiens
gactatttcccacca

SEQ ID NO: 1801316 - DNA, 15 bp, Homo sapiens
actatttcccaccat

SEQ ID NO: 1801317 - DNA, 15 bp, Homo sapiens
ctatttcccaccatc

SEQ ID NO: 1801318 - DNA, 15 bp, Homo sapiens
tatttcccaccatct

SEQ ID NO: 1801319 - DNA, 15 bp, Homo sapiens
atttcccaccatctg

SEQ ID NO: 1801320 - DNA, 15 bp, Homo sapiens
tttcccaccatctga

SEQ ID NO: 1801321 - DNA, 15 bp, Homo sapiens
ttcccaccatctgaa

SEQ ID NO: 1801322 - DNA, 15 bp, Homo sapiens
tcccaccatctgaaa

SEQ ID NO: 1801323 - DNA, 15 bp, Homo sapiens
cccaccatctgaaat

SEQ ID NO: 1801324 - DNA, 15 bp, Homo sapiens
ccaccatctgaaatt

SEQ ID NO: 1801325 - DNA, 15 bp, Homo sapiens
caccatctgaaattg

SEQ ID NO: 1801326 - DNA, 15 bp, Homo sapiens
accatctgaaattgc

SEQ ID NO: 1801327 - DNA, 15 bp, Homo sapiens
ccatctgaaattgcc

SEQ ID NO: 1801328 - DNA, 15 bp, Homo sapiens
catctgaaattgcct

SEQ ID NO: 1801329 - DNA, 15 bp, Homo sapiens
atctgaaattgcctt

SEQ ID NO: 1801330 - DNA, 15 bp, Homo sapiens
tctgaaattgccttt

SEQ ID NO: 1801331 - DNA, 15 bp, Homo sapiens
ctgaaattgcctttc

SEQ ID NO: 1801332 - DNA, 15 bp, Homo sapiens
tgaaattgcctttct

SEQ ID NO: 1801333 - DNA, 15 bp, Homo sapiens
gaaattgcctttctt

SEQ ID NO: 1801334 - DNA, 15 bp, Homo sapiens
aaattgcctttcttg

SEQ ID NO: 1801335 - DNA, 15 bp, Homo sapiens
aattgcctttcttgt

SEQ ID NO: 1801336 - DNA, 15 bp, Homo sapiens
attgcctttcttgtt

SEQ ID NO: 1801337 - DNA, 15 bp, Homo sapiens
ttgcctttcttgtta

SEQ ID NO: 1801338 - DNA, 15 bp, Homo sapiens
tgcctttcttgttac

SEQ ID NO: 1801339 - DNA, 15 bp, Homo sapiens
gcctttcttgttacc

SEQ ID NO: 1801340 - DNA, 15 bp, Homo sapiens
cctttcttgttacct

SEQ ID NO: 1801341 - DNA, 15 bp, Homo sapiens
ctttcttgttacctg

SEQ ID NO: 1801342 - DNA, 15 bp, Homo sapiens
tttcttgttacctgt

SEQ ID NO: 1801343 - DNA, 15 bp, Homo sapiens
ttcttgttacctgtc

SEQ ID NO: 1801344 - DNA, 15 bp, Homo sapiens
tcttgttacctgtct

SEQ ID NO: 1801345 - DNA, 15 bp, Homo sapiens
cttgttacctgtctc

SEQ ID NO: 1801346 - DNA, 15 bp, Homo sapiens
ttgttacctgtctcc

SEQ ID NO: 1801347 - DNA, 15 bp, Homo sapiens
tgttacctgtctccc

SEQ ID NO: 1801348 - DNA, 15 bp, Homo sapiens
gttacctgtctcccc

SEQ ID NO: 1801349 - DNA, 15 bp, Homo sapiens
ttacctgtctcccca

SEQ ID NO: 1801350 - DNA, 15 bp, Homo sapiens
tacctgtctccccat

SEQ ID NO: 1801351 - DNA, 15 bp, Homo sapiens
acctgtctccccatc

SEQ ID NO: 1801352 - DNA, 15 bp, Homo sapiens
cctgtctccccatcc

SEQ ID NO: 1801353 - DNA, 15 bp, Homo sapiens
ctgtctccccatccc

SEQ ID NO: 1801354 - DNA, 15 bp, Homo sapiens
tgtctccccatccct

SEQ ID NO: 1801355 - DNA, 15 bp, Homo sapiens
gtctccccatcccta

SEQ ID NO: 1801356 - DNA, 15 bp, Homo sapiens
tctccccatccctag

SEQ ID NO: 1801357 - DNA, 15 bp, Homo sapiens
ctccccatccctagc

SEQ ID NO: 1801358 - DNA, 15 bp, Homo sapiens
tccccatccctagcc

SEQ ID NO: 1801359 - DNA, 15 bp, Homo sapiens
ccccatccctagcca

SEQ ID NO: 1801360 - DNA, 15 bp, Homo sapiens
cccatccctagccac

SEQ ID NO: 1801361 - DNA, 15 bp, Homo sapiens
ccatccctagccact

SEQ ID NO: 1801362 - DNA, 15 bp, Homo sapiens
catccctagccactc

SEQ ID NO: 1801363 - DNA, 15 bp, Homo sapiens
atccctagccactcc

SEQ ID NO: 1801364 - DNA, 15 bp, Homo sapiens
tccctagccactccc

SEQ ID NO: 1801365 - DNA, 15 bp, Homo sapiens
ccctagccactcccc

SEQ ID NO: 1801366 - DNA, 15 bp, Homo sapiens
cctagccactcccca

SEQ ID NO: 1801367 - DNA, 15 bp, Homo sapiens
ctagccactccccac

SEQ ID NO: 1801368 - DNA, 15 bp, Homo sapiens
tagccactccccacc

SEQ ID NO: 1801369 - DNA, 15 bp, Homo sapiens
agccactccccaccc

SEQ ID NO: 1801370 - DNA, 15 bp, Homo sapiens
gccactccccacccc

SEQ ID NO: 1801371 - DNA, 15 bp, Homo sapiens
ccactccccacccca

SEQ ID NO: 1801372 - DNA, 15 bp, Homo sapiens
cactccccaccccag

SEQ ID NO: 1801373 - DNA, 15 bp, Homo sapiens
actccccaccccaga

SEQ ID NO: 1801374 - DNA, 15 bp, Homo sapiens
ctccccaccccagat

SEQ ID NO: 1801375 - DNA, 15 bp, Homo sapiens
tccccaccccagatt

SEQ ID NO: 1801376 - DNA, 15 bp, Homo sapiens
ccccaccccagattg

SEQ ID NO: 1801377 - DNA, 15 bp, Homo sapiens
cccaccccagattgt

SEQ ID NO: 1801378 - DNA, 15 bp, Homo sapiens
ccaccccagattgta

SEQ ID NO: 1801379 - DNA, 15 bp, Homo sapiens
caccccagattgtaa

SEQ ID NO: 1801380 - DNA, 15 bp, Homo sapiens
accccagattgtaac

SEQ ID NO: 1801381 - DNA, 15 bp, Homo sapiens
ccccagattgtaacc

SEQ ID NO: 1801382 - DNA, 15 bp, Homo sapiens
cccagattgtaacca

SEQ ID NO: 1801383 - DNA, 15 bp, Homo sapiens
ccagattgtaaccat

SEQ ID NO: 1801384 - DNA, 15 bp, Homo sapiens
cagattgtaaccatc

SEQ ID NO: 1801385 - DNA, 15 bp, Homo sapiens
agattgtaaccatca

SEQ ID NO: 1801386 - DNA, 15 bp, Homo sapiens
gattgtaaccatcag

SEQ ID NO: 1801387 - DNA, 15 bp, Homo sapiens
attgtaaccatcagc

SEQ ID NO: 1801388 - DNA, 15 bp, Homo sapiens
ttgtaaccatcagcc

SEQ ID NO: 1801389 - DNA, 15 bp, Homo sapiens
tgtaaccatcagcct

SEQ ID NO: 1801390 - DNA, 15 bp, Homo sapiens
gtaaccatcagccta

SEQ ID NO: 1801391 - DNA, 15 bp, Homo sapiens
taaccatcagcctat

SEQ ID NO: 1801392 - DNA, 15 bp, Homo sapiens
aaccatcagcctatc

SEQ ID NO: 1801393 - DNA, 15 bp, Homo sapiens
accatcagcctatct

SEQ ID NO: 1801394 - DNA, 15 bp, Homo sapiens
ccatcagcctatcta

SEQ ID NO: 1801395 - DNA, 15 bp, Homo sapiens
catcagcctatctat

SEQ ID NO: 1801396 - DNA, 15 bp, Homo sapiens
atcagcctatctatt

SEQ ID NO: 1801397 - DNA, 15 bp, Homo sapiens
tcagcctatctattc

SEQ ID NO: 1801398 - DNA, 15 bp, Homo sapiens
cagcctatctattct

SEQ ID NO: 1801399 - DNA, 15 bp, Homo sapiens
agcctatctattctt

SEQ ID NO: 1801400 - DNA, 15 bp, Homo sapiens
gcctatctattctta

SEQ ID NO: 1801401 - DNA, 15 bp, Homo sapiens
cctatctattcttat

SEQ ID NO: 1801402 - DNA, 15 bp, Homo sapiens
ctatctattcttatt

SEQ ID NO: 1801403 - DNA, 15 bp, Homo sapiens
tatctattcttattt

SEQ ID NO: 1801404 - DNA, 15 bp, Homo sapiens
atctattcttattta

SEQ ID NO: 1801405 - DNA, 15 bp, Homo sapiens
tctattcttatttac

SEQ ID NO: 1801406 - DNA, 15 bp, Homo sapiens
ctattcttatttacc

SEQ ID NO: 1801407 - DNA, 15 bp, Homo sapiens
tattcttatttacca

SEQ ID NO: 1801408 - DNA, 15 bp, Homo sapiens
attcttatttaccac

SEQ ID NO: 1801409 - DNA, 15 bp, Homo sapiens
ttcttatttaccact

SEQ ID NO: 1801410 - DNA, 15 bp, Homo sapiens
tcttatttaccactt

SEQ ID NO: 1801411 - DNA, 15 bp, Homo sapiens
cttatttaccacttt

SEQ ID NO: 1801412 - DNA, 15 bp, Homo sapiens
ttatttaccacttta

SEQ ID NO: 1801413 - DNA, 15 bp, Homo sapiens
tatttaccactttag

SEQ ID NO: 1801414 - DNA, 15 bp, Homo sapiens
atttaccactttagg

SEQ ID NO: 1801415 - DNA, 15 bp, Homo sapiens
tttaccactttaggt

SEQ ID NO: 1801416 - DNA, 15 bp, Homo sapiens
ttaccactttaggtc

SEQ ID NO: 1801417 - DNA, 15 bp, Homo sapiens
taccactttaggtct

SEQ ID NO: 1801418 - DNA, 15 bp, Homo sapiens
accactttaggtcta

SEQ ID NO: 1801419 - DNA, 15 bp, Homo sapiens
ccactttaggtctag

SEQ ID NO: 1801420 - DNA, 15 bp, Homo sapiens
cactttaggtctagc

SEQ ID NO: 1801421 - DNA, 15 bp, Homo sapiens
actttaggtctagca

SEQ ID NO: 1801422 - DNA, 15 bp, Homo sapiens
ctttaggtctagcac

SEQ ID NO: 1801423 - DNA, 15 bp, Homo sapiens
tttaggtctagcacc

SEQ ID NO: 1801424 - DNA, 15 bp, Homo sapiens
ttaggtctagcacct

SEQ ID NO: 1801425 - DNA, 15 bp, Homo sapiens
taggtctagcaccta

SEQ ID NO: 1801426 - DNA, 15 bp, Homo sapiens
aggtctagcacctag

SEQ ID NO: 1801427 - DNA, 15 bp, Homo sapiens
ggtctagcacctaga

SEQ ID NO: 1801428 - DNA, 15 bp, Homo sapiens
gtctagcacctagaa

SEQ ID NO: 1801429 - DNA, 15 bp, Homo sapiens
tctagcacctagaaa

SEQ ID NO: 1801430 - DNA, 15 bp, Homo sapiens
ctagcacctagaaag

SEQ ID NO: 1801431 - DNA, 15 bp, Homo sapiens
tagcacctagaaagt

SEQ ID NO: 1801432 - DNA, 15 bp, Homo sapiens
agcacctagaaagtc

SEQ ID NO: 1801433 - DNA, 15 bp, Homo sapiens
gcacctagaaagtcc

SEQ ID NO: 1801434 - DNA, 15 bp, Homo sapiens
cacctagaaagtcca

SEQ ID NO: 1801435 - DNA, 15 bp, Homo sapiens
acctagaaagtccat

SEQ ID NO: 1801436 - DNA, 15 bp, Homo sapiens
cctagaaagtccatc

SEQ ID NO: 1801437 - DNA, 15 bp, Homo sapiens
ctagaaagtccatct

SEQ ID NO: 1801438 - DNA, 15 bp, Homo sapiens
tagaaagtccatctg

SEQ ID NO: 1801439 - DNA, 15 bp, Homo sapiens
agaaagtccatctgt

SEQ ID NO: 1801440 - DNA, 15 bp, Homo sapiens
gaaagtccatctgta

SEQ ID NO: 1801441 - DNA, 15 bp, Homo sapiens
aaagtccatctgtag

SEQ ID NO: 1801442 - DNA, 15 bp, Homo sapiens
aagtccatctgtaga

SEQ ID NO: 1801443 - DNA, 15 bp, Homo sapiens
agtccatctgtagag

SEQ ID NO: 1801444 - DNA, 15 bp, Homo sapiens
gtccatctgtagagt

SEQ ID NO: 1801445 - DNA, 15 bp, Homo sapiens
tccatctgtagagta

SEQ ID NO: 1801446 - DNA, 15 bp, Homo sapiens
ccatctgtagagtaa

SEQ ID NO: 1801447 - DNA, 15 bp, Homo sapiens
catctgtagagtaag

SEQ ID NO: 1801448 - DNA, 15 bp, Homo sapiens
atctgtagagtaaga

SEQ ID NO: 1801449 - DNA, 15 bp, Homo sapiens
tctgtagagtaagaa

SEQ ID NO: 1801450 - DNA, 15 bp, Homo sapiens
ctgtagagtaagaaa

SEQ ID NO: 1801451 - DNA, 15 bp, Homo sapiens
tgtagagtaagaaac

SEQ ID NO: 1801452 - DNA, 15 bp, Homo sapiens
tagagtaagaaacag

SEQ ID NO: 1801453 - DNA, 15 bp, Homo sapiens
agagtaagaaacaga

SEQ ID NO: 1801454 - DNA, 15 bp, Homo sapiens
gagtaagaaacagaa

SEQ ID NO: 1801455 - DNA, 15 bp, Homo sapiens
agtaagaaacagaat

SEQ ID NO: 1801456 - DNA, 15 bp, Homo sapiens
gtaagaaacagaata

SEQ ID NO: 1801457 - DNA, 15 bp, Homo sapiens
taagaaacagaatat

SEQ ID NO: 1801458 - DNA, 15 bp, Homo sapiens
aagaaacagaatata

SEQ ID NO: 1801459 - DNA, 15 bp, Homo sapiens
agaaacagaatatat

SEQ ID NO: 1801460 - DNA, 15 bp, Homo sapiens
gaaacagaatatatg

SEQ ID NO: 1801461 - DNA, 15 bp, Homo sapiens
aaacagaatatatgt

SEQ ID NO: 1801462 - DNA, 15 bp, Homo sapiens
aacagaatatatgtt

SEQ ID NO: 1801463 - DNA, 15 bp, Homo sapiens
acagaatatatgttt

SEQ ID NO: 1801464 - DNA, 15 bp, Homo sapiens
cagaatatatgtttt

SEQ ID NO: 1801465 - DNA, 15 bp, Homo sapiens
agaatatatgttttc

SEQ ID NO: 1801466 - DNA, 15 bp, Homo sapiens
gaatatatgttttcc

SEQ ID NO: 1801467 - DNA, 15 bp, Homo sapiens
aatatatgttttcca

SEQ ID NO: 1801468 - DNA, 15 bp, Homo sapiens
atatatgttttccat

SEQ ID NO: 1801469 - DNA, 15 bp, Homo sapiens
tatatgttttccata

SEQ ID NO: 1801470 - DNA, 15 bp, Homo sapiens
atatgttttccatat

SEQ ID NO: 1801471 - DNA, 15 bp, Homo sapiens
tatgttttccatatt

SEQ ID NO: 1801472 - DNA, 15 bp, Homo sapiens
atgttttccatattt

SEQ ID NO: 1801473 - DNA, 15 bp, Homo sapiens
tgttttccatatttt

SEQ ID NO: 1801474 - DNA, 15 bp, Homo sapiens
gttttccatattttt

SEQ ID NO: 1801475 - DNA, 15 bp, Homo sapiens
ttttccatatttttc

SEQ ID NO: 1801476 - DNA, 15 bp, Homo sapiens
tttccatatttttcc

SEQ ID NO: 1801477 - DNA, 15 bp, Homo sapiens
ttccatatttttcca

SEQ ID NO: 1801478 - DNA, 15 bp, Homo sapiens
tccatatttttccaa

SEQ ID NO: 1801479 - DNA, 15 bp, Homo sapiens
ccatatttttccaag

SEQ ID NO: 1801480 - DNA, 15 bp, Homo sapiens
catatttttccaagt

SEQ ID NO: 1801481 - DNA, 15 bp, Homo sapiens
atatttttccaagta

SEQ ID NO: 1801482 - DNA, 15 bp, Homo sapiens
tatttttccaagtat

SEQ ID NO: 1801483 - DNA, 15 bp, Homo sapiens
atttttccaagtatg

SEQ ID NO: 1801484 - DNA, 15 bp, Homo sapiens
tttttccaagtatgt

SEQ ID NO: 1801485 - DNA, 15 bp, Homo sapiens
ttttccaagtatgtg

SEQ ID NO: 1801486 - DNA, 15 bp, Homo sapiens
tttccaagtatgtga

SEQ ID NO: 1801487 - DNA, 15 bp, Homo sapiens
ttccaagtatgtgac

SEQ ID NO: 1801488 - DNA, 15 bp, Homo sapiens
tccaagtatgtgaca

SEQ ID NO: 1801489 - DNA, 15 bp, Homo sapiens
ccaagtatgtgacaa

SEQ ID NO: 1801490 - DNA, 15 bp, Homo sapiens
caagtatgtgacaac

SEQ ID NO: 1801491 - DNA, 15 bp, Homo sapiens
aagtatgtgacaaca

SEQ ID NO: 1801492 - DNA, 15 bp, Homo sapiens
agtatgtgacaacaa

SEQ ID NO: 1801493 - DNA, 15 bp, Homo sapiens
gtatgtgacaacaaa

SEQ ID NO: 1801494 - DNA, 15 bp, Homo sapiens
tatgtgacaacaaac

SEQ ID NO: 1801495 - DNA, 15 bp, Homo sapiens
atgtgacaacaaaca

SEQ ID NO: 1801496 - DNA, 15 bp, Homo sapiens
tgtgacaacaaacaa

SEQ ID NO: 1801497 - DNA, 15 bp, Homo sapiens
gtgacaacaaacaac

SEQ ID NO: 1801498 - DNA, 15 bp, Homo sapiens
tgacaacaaacaaca

SEQ ID NO: 1801499 - DNA, 15 bp, Homo sapiens
gacaacaaacaacac

SEQ ID NO: 1801500 - DNA, 15 bp, Homo sapiens
acaacaaacaacact

SEQ ID NO: 1801501 - DNA, 15 bp, Homo sapiens
caacaaacaacactc

SEQ ID NO: 1801502 - DNA, 15 bp, Homo sapiens
aacaaacaacactct

SEQ ID NO: 1801503 - DNA, 15 bp, Homo sapiens
acaaacaacactctc

SEQ ID NO: 1801504 - DNA, 15 bp, Homo sapiens
caaacaacactctct

SEQ ID NO: 1801505 - DNA, 15 bp, Homo sapiens
aaacaacactctctt

SEQ ID NO: 1801506 - DNA, 15 bp, Homo sapiens
aacaacactctcttc

SEQ ID NO: 1801507 - DNA, 15 bp, Homo sapiens
acaacactctcttcc

SEQ ID NO: 1801508 - DNA, 15 bp, Homo sapiens
caacactctcttcct

SEQ ID NO: 1801509 - DNA, 15 bp, Homo sapiens
aacactctcttcctc

SEQ ID NO: 1801510 - DNA, 15 bp, Homo sapiens
acactctcttcctct

SEQ ID NO: 1801511 - DNA, 15 bp, Homo sapiens
cactctcttcctctt

SEQ ID NO: 1801512 - DNA, 15 bp, Homo sapiens
actctcttcctcttt

SEQ ID NO: 1801513 - DNA, 15 bp, Homo sapiens
ctctcttcctctttt

SEQ ID NO: 1801514 - DNA, 15 bp, Homo sapiens
tctcttcctctttta

SEQ ID NO: 1801515 - DNA, 15 bp, Homo sapiens
ctcttcctcttttaa

SEQ ID NO: 1801516 - DNA, 15 bp, Homo sapiens
tcttcctcttttaaa

SEQ ID NO: 1801517 - DNA, 15 bp, Homo sapiens
cttcctcttttaaaa

SEQ ID NO: 1801518 - DNA, 15 bp, Homo sapiens
ttcctcttttaaaat

SEQ ID NO: 1801519 - DNA, 15 bp, Homo sapiens
tcctcttttaaaatg

SEQ ID NO: 1801520 - DNA, 15 bp, Homo sapiens
cctcttttaaaatgc

SEQ ID NO: 1801521 - DNA, 15 bp, Homo sapiens
ctcttttaaaatgcc

SEQ ID NO: 1801522 - DNA, 15 bp, Homo sapiens
tcttttaaaatgcca

SEQ ID NO: 1801523 - DNA, 15 bp, Homo sapiens
cttttaaaatgccat

SEQ ID NO: 1801524 - DNA, 15 bp, Homo sapiens
ttttaaaatgccatg

SEQ ID NO: 1801525 - DNA, 15 bp, Homo sapiens
tttaaaatgccatgt

SEQ ID NO: 1801526 - DNA, 15 bp, Homo sapiens
ttaaaatgccatgta

SEQ ID NO: 1801527 - DNA, 15 bp, Homo sapiens
taaaatgccatgtac

SEQ ID NO: 1801528 - DNA, 15 bp, Homo sapiens
aaaatgccatgtact

SEQ ID NO: 1801529 - DNA, 15 bp, Homo sapiens
aaatgccatgtacta

SEQ ID NO: 1801530 - DNA, 15 bp, Homo sapiens
aatgccatgtactag

SEQ ID NO: 1801531 - DNA, 15 bp, Homo sapiens
atgccatgtactagt

SEQ ID NO: 1801532 - DNA, 15 bp, Homo sapiens
tgccatgtactagta

SEQ ID NO: 1801533 - DNA, 15 bp, Homo sapiens
gccatgtactagtat

SEQ ID NO: 1801534 - DNA, 15 bp, Homo sapiens
ccatgtactagtatc

SEQ ID NO: 1801535 - DNA, 15 bp, Homo sapiens
catgtactagtatct

SEQ ID NO: 1801536 - DNA, 15 bp, Homo sapiens
atgtactagtatcta

SEQ ID NO: 1801537 - DNA, 15 bp, Homo sapiens
tgtactagtatctac

SEQ ID NO: 1801538 - DNA, 15 bp, Homo sapiens
gtactagtatctacc

SEQ ID NO: 1801539 - DNA, 15 bp, Homo sapiens
tactagtatctacca

SEQ ID NO: 1801540 - DNA, 15 bp, Homo sapiens
actagtatctaccat

SEQ ID NO: 1801541 - DNA, 15 bp, Homo sapiens
ctagtatctaccata

SEQ ID NO: 1801542 - DNA, 15 bp, Homo sapiens
tagtatctaccatat

SEQ ID NO: 1801543 - DNA, 15 bp, Homo sapiens
agtatctaccatatt

SEQ ID NO: 1801544 - DNA, 15 bp, Homo sapiens
gtatctaccatattc

SEQ ID NO: 1801545 - DNA, 15 bp, Homo sapiens
tatctaccatattcc

SEQ ID NO: 1801546 - DNA, 15 bp, Homo sapiens
atctaccatattcca

SEQ ID NO: 1801547 - DNA, 15 bp, Homo sapiens
tctaccatattccag

SEQ ID NO: 1801548 - DNA, 15 bp, Homo sapiens
ctaccatattccagg

SEQ ID NO: 1801549 - DNA, 15 bp, Homo sapiens
taccatattccaggc

SEQ ID NO: 1801550 - DNA, 15 bp, Homo sapiens
accatattccaggca

SEQ ID NO: 1801551 - DNA, 15 bp, Homo sapiens
ccatattccaggcac

SEQ ID NO: 1801552 - DNA, 15 bp, Homo sapiens
catattccaggcaca

SEQ ID NO: 1801553 - DNA, 15 bp, Homo sapiens
atattccaggcacag

SEQ ID NO: 1801554 - DNA, 15 bp, Homo sapiens
tattccaggcacagt

SEQ ID NO: 1801555 - DNA, 15 bp, Homo sapiens
attccaggcacagtt

SEQ ID NO: 1801556 - DNA, 15 bp, Homo sapiens
ttccaggcacagttc

SEQ ID NO: 1801557 - DNA, 15 bp, Homo sapiens
tccaggcacagttct

SEQ ID NO: 1801558 - DNA, 15 bp, Homo sapiens
ccaggcacagttcta

SEQ ID NO: 1801559 - DNA, 15 bp, Homo sapiens
caggcacagttctaa

SEQ ID NO: 1801560 - DNA, 15 bp, Homo sapiens
aggcacagttctaaa

SEQ ID NO: 1801561 - DNA, 15 bp, Homo sapiens
ggcacagttctaaat

SEQ ID NO: 1801562 - DNA, 15 bp, Homo sapiens
gcacagttctaaatg

SEQ ID NO: 1801563 - DNA, 15 bp, Homo sapiens
cacagttctaaatgc

SEQ ID NO: 1801564 - DNA, 15 bp, Homo sapiens
acagttctaaatgct

SEQ ID NO: 1801565 - DNA, 15 bp, Homo sapiens
cagttctaaatgcta

SEQ ID NO: 1801566 - DNA, 15 bp, Homo sapiens
agttctaaatgctag

SEQ ID NO: 1801567 - DNA, 15 bp, Homo sapiens
gttctaaatgctaga

SEQ ID NO: 1801568 - DNA, 15 bp, Homo sapiens
ttctaaatgctagag

SEQ ID NO: 1801569 - DNA, 15 bp, Homo sapiens
tctaaatgctagagc

SEQ ID NO: 1801570 - DNA, 15 bp, Homo sapiens
ctaaatgctagagct

SEQ ID NO: 1801571 - DNA, 15 bp, Homo sapiens
taaatgctagagcta

SEQ ID NO: 1801572 - DNA, 15 bp, Homo sapiens
aaatgctagagctat

SEQ ID NO: 1801573 - DNA, 15 bp, Homo sapiens
aatgctagagctata

SEQ ID NO: 1801574 - DNA, 15 bp, Homo sapiens
atgctagagctataa

SEQ ID NO: 1801575 - DNA, 15 bp, Homo sapiens
tgctagagctataac

SEQ ID NO: 1801576 - DNA, 15 bp, Homo sapiens
gctagagctataaca

SEQ ID NO: 1801577 - DNA, 15 bp, Homo sapiens
ctagagctataacaa

SEQ ID NO: 1801578 - DNA, 15 bp, Homo sapiens
tagagctataacaat

SEQ ID NO: 1801579 - DNA, 15 bp, Homo sapiens
agagctataacaatg

SEQ ID NO: 1801580 - DNA, 15 bp, Homo sapiens
gagctataacaatga

SEQ ID NO: 1801581 - DNA, 15 bp, Homo sapiens
agctataacaatgaa

SEQ ID NO: 1801582 - DNA, 15 bp, Homo sapiens
gctataacaatgaat

SEQ ID NO: 1801583 - DNA, 15 bp, Homo sapiens
ctataacaatgaata

SEQ ID NO: 1801584 - DNA, 15 bp, Homo sapiens
tataacaatgaataa

SEQ ID NO: 1801585 - DNA, 15 bp, Homo sapiens
ataacaatgaataaa

SEQ ID NO: 1801586 - DNA, 15 bp, Homo sapiens
taacaatgaataaat

SEQ ID NO: 1801587 - DNA, 15 bp, Homo sapiens
aacaatgaataaata

SEQ ID NO: 1801588 - DNA, 15 bp, Homo sapiens
acaatgaataaataa

SEQ ID NO: 1801589 - DNA, 15 bp, Homo sapiens
caatgaataaataaa

SEQ ID NO: 1801590 - DNA, 15 bp, Homo sapiens
aatgaataaataaaa

SEQ ID NO: 1801591 - DNA, 15 bp, Homo sapiens
atgaataaataaaac

SEQ ID NO: 1801592 - DNA, 15 bp, Homo sapiens
tgaataaataaaacc

SEQ ID NO: 1801593 - DNA, 15 bp, Homo sapiens
gaataaataaaacca

SEQ ID NO: 1801594 - DNA, 15 bp, Homo sapiens
aataaataaaaccaa

SEQ ID NO: 1801595 - DNA, 15 bp, Homo sapiens
ataaataaaaccaaa

SEQ ID NO: 1801596 - DNA, 15 bp, Homo sapiens
taaataaaaccaaaa

SEQ ID NO: 1801597 - DNA, 15 bp, Homo sapiens
aataaaaccaaaatc

SEQ ID NO: 1801598 - DNA, 15 bp, Homo sapiens
ataaaaccaaaatcc

SEQ ID NO: 1801599 - DNA, 15 bp, Homo sapiens
taaaaccaaaatccc

SEQ ID NO: 1801600 - DNA, 15 bp, Homo sapiens
aaaaccaaaatcccc

SEQ ID NO: 1801601 - DNA, 15 bp, Homo sapiens
aaaccaaaatcccca

SEQ ID NO: 1801602 - DNA, 15 bp, Homo sapiens
aaccaaaatccccat

SEQ ID NO: 1801603 - DNA, 15 bp, Homo sapiens
accaaaatccccatc

SEQ ID NO: 1801604 - DNA, 15 bp, Homo sapiens
ccaaaatccccatcc

SEQ ID NO: 1801605 - DNA, 15 bp, Homo sapiens
caaaatccccatcct

SEQ ID NO: 1801606 - DNA, 15 bp, Homo sapiens
aaaatccccatcctt

SEQ ID NO: 1801607 - DNA, 15 bp, Homo sapiens
aaatccccatccttg

SEQ ID NO: 1801608 - DNA, 15 bp, Homo sapiens
aatccccatccttgc

SEQ ID NO: 1801609 - DNA, 15 bp, Homo sapiens
atccccatccttgca

SEQ ID NO: 1801610 - DNA, 15 bp, Homo sapiens
tccccatccttgcag

SEQ ID NO: 1801611 - DNA, 15 bp, Homo sapiens
ccccatccttgcaga

SEQ ID NO: 1801612 - DNA, 15 bp, Homo sapiens
cccatccttgcagaa

SEQ ID NO: 1801613 - DNA, 15 bp, Homo sapiens
ccatccttgcagaac

SEQ ID NO: 1801614 - DNA, 15 bp, Homo sapiens
catccttgcagaact

SEQ ID NO: 1801615 - DNA, 15 bp, Homo sapiens
atccttgcagaactg

SEQ ID NO: 1801616 - DNA, 15 bp, Homo sapiens
tccttgcagaactga

SEQ ID NO: 1801617 - DNA, 15 bp, Homo sapiens
ccttgcagaactgac

SEQ ID NO: 1801618 - DNA, 15 bp, Homo sapiens
cttgcagaactgact

SEQ ID NO: 1801619 - DNA, 15 bp, Homo sapiens
ttgcagaactgactt

SEQ ID NO: 1801620 - DNA, 15 bp, Homo sapiens
tgcagaactgacttt

SEQ ID NO: 1801621 - DNA, 15 bp, Homo sapiens
gcagaactgactttc

SEQ ID NO: 1801622 - DNA, 15 bp, Homo sapiens
cagaactgactttct

SEQ ID NO: 1801623 - DNA, 15 bp, Homo sapiens
agaactgactttcta

SEQ ID NO: 1801624 - DNA, 15 bp, Homo sapiens
gaactgactttctag

SEQ ID NO: 1801625 - DNA, 15 bp, Homo sapiens
aactgactttctagt

SEQ ID NO: 1801626 - DNA, 15 bp, Homo sapiens
actgactttctagtt

SEQ ID NO: 1801627 - DNA, 15 bp, Homo sapiens
ctgactttctagttt

SEQ ID NO: 1801628 - DNA, 15 bp, Homo sapiens
tgactttctagtttc

SEQ ID NO: 1801629 - DNA, 15 bp, Homo sapiens
gactttctagtttca

SEQ ID NO: 1801630 - DNA, 15 bp, Homo sapiens
actttctagtttcag

SEQ ID NO: 1801631 - DNA, 15 bp, Homo sapiens
ctttctagtttcagg

SEQ ID NO: 1801632 - DNA, 15 bp, Homo sapiens
tttctagtttcaggc

SEQ ID NO: 1801633 - DNA, 15 bp, Homo sapiens
ttctagtttcaggca

SEQ ID NO: 1801634 - DNA, 15 bp, Homo sapiens
tctagtttcaggcaa

SEQ ID NO: 1801635 - DNA, 15 bp, Homo sapiens
ctagtttcaggcaaa

SEQ ID NO: 1801636 - DNA, 15 bp, Homo sapiens
tagtttcaggcaaag

SEQ ID NO: 1801637 - DNA, 15 bp, Homo sapiens
agtttcaggcaaaga

SEQ ID NO: 1801638 - DNA, 15 bp, Homo sapiens
gtttcaggcaaagag

SEQ ID NO: 1801639 - DNA, 15 bp, Homo sapiens
tttcaggcaaagaga

SEQ ID NO: 1801640 - DNA, 15 bp, Homo sapiens
ttcaggcaaagagag

SEQ ID NO: 1801641 - DNA, 15 bp, Homo sapiens
tcaggcaaagagagc

SEQ ID NO: 1801642 - DNA, 15 bp, Homo sapiens
caggcaaagagagca

SEQ ID NO: 1801643 - DNA, 15 bp, Homo sapiens
aggcaaagagagcaa

SEQ ID NO: 1801644 - DNA, 15 bp, Homo sapiens
ggcaaagagagcaaa

SEQ ID NO: 1801645 - DNA, 15 bp, Homo sapiens
gcaaagagagcaaat

SEQ ID NO: 1801646 - DNA, 15 bp, Homo sapiens
caaagagagcaaatg

SEQ ID NO: 1801647 - DNA, 15 bp, Homo sapiens
aaagagagcaaatga

SEQ ID NO: 1801648 - DNA, 15 bp, Homo sapiens
aagagagcaaatgaa

SEQ ID NO: 1801649 - DNA, 15 bp, Homo sapiens
agagagcaaatgaat

SEQ ID NO: 1801650 - DNA, 15 bp, Homo sapiens
gagagcaaatgaatg

SEQ ID NO: 1801651 - DNA, 15 bp, Homo sapiens
agagcaaatgaatga

SEQ ID NO: 1801652 - DNA, 15 bp, Homo sapiens
gagcaaatgaatgaa

SEQ ID NO: 1801653 - DNA, 15 bp, Homo sapiens
agcaaatgaatgaat

SEQ ID NO: 1801654 - DNA, 15 bp, Homo sapiens
gcaaatgaatgaata

SEQ ID NO: 1801655 - DNA, 15 bp, Homo sapiens
caaatgaatgaataa

SEQ ID NO: 1801656 - DNA, 15 bp, Homo sapiens
aaatgaatgaataaa

SEQ ID NO: 1801657 - DNA, 15 bp, Homo sapiens
gaatgaataaatgag

SEQ ID NO: 1801658 - DNA, 15 bp, Homo sapiens
aatgaataaatgagg

SEQ ID NO: 1801659 - DNA, 15 bp, Homo sapiens
atgaataaatgagga

SEQ ID NO: 1801660 - DNA, 15 bp, Homo sapiens
tgaataaatgaggaa

SEQ ID NO: 1801661 - DNA, 15 bp, Homo sapiens
gaataaatgaggaat

SEQ ID NO: 1801662 - DNA, 15 bp, Homo sapiens
aataaatgaggaata

SEQ ID NO: 1801663 - DNA, 15 bp, Homo sapiens
ataaatgaggaatac

SEQ ID NO: 1801664 - DNA, 15 bp, Homo sapiens
taaatgaggaataca

SEQ ID NO: 1801665 - DNA, 15 bp, Homo sapiens
aaatgaggaatacat

SEQ ID NO: 1801666 - DNA, 15 bp, Homo sapiens
aatgaggaatacata

SEQ ID NO: 1801667 - DNA, 15 bp, Homo sapiens
atgaggaatacatag

SEQ ID NO: 1801668 - DNA, 15 bp, Homo sapiens
tgaggaatacatagt

SEQ ID NO: 1801669 - DNA, 15 bp, Homo sapiens
gaggaatacatagta

SEQ ID NO: 1801670 - DNA, 15 bp, Homo sapiens
aggaatacatagtat

SEQ ID NO: 1801671 - DNA, 15 bp, Homo sapiens
ggaatacatagtatg

SEQ ID NO: 1801672 - DNA, 15 bp, Homo sapiens
gaatacatagtatgt

SEQ ID NO: 1801673 - DNA, 15 bp, Homo sapiens
aatacatagtatgtg

SEQ ID NO: 1801674 - DNA, 15 bp, Homo sapiens
atacatagtatgtga

SEQ ID NO: 1801675 - DNA, 15 bp, Homo sapiens
tacatagtatgtgag

SEQ ID NO: 1801676 - DNA, 15 bp, Homo sapiens
acatagtatgtgaga

SEQ ID NO: 1801677 - DNA, 15 bp, Homo sapiens
catagtatgtgagat

SEQ ID NO: 1801678 - DNA, 15 bp, Homo sapiens
atagtatgtgagatt

SEQ ID NO: 1801679 - DNA, 15 bp, Homo sapiens
tagtatgtgagattg

SEQ ID NO: 1801680 - DNA, 15 bp, Homo sapiens
agtatgtgagattgt

SEQ ID NO: 1801681 - DNA, 15 bp, Homo sapiens
gtatgtgagattgta

SEQ ID NO: 1801682 - DNA, 15 bp, Homo sapiens
tatgtgagattgtat

SEQ ID NO: 1801683 - DNA, 15 bp, Homo sapiens
atgtgagattgtatt

SEQ ID NO: 1801684 - DNA, 15 bp, Homo sapiens
tgtgagattgtatta

SEQ ID NO: 1801685 - DNA, 15 bp, Homo sapiens
gtgagattgtattaa

SEQ ID NO: 1801686 - DNA, 15 bp, Homo sapiens
tgagattgtattaaa

SEQ ID NO: 1801687 - DNA, 15 bp, Homo sapiens
gagattgtattaaag

SEQ ID NO: 1801688 - DNA, 15 bp, Homo sapiens
agattgtattaaaga

SEQ ID NO: 1801689 - DNA, 15 bp, Homo sapiens
gattgtattaaagac

SEQ ID NO: 1801690 - DNA, 15 bp, Homo sapiens
attgtattaaagact

SEQ ID NO: 1801691 - DNA, 15 bp, Homo sapiens
ttgtattaaagactg

SEQ ID NO: 1801692 - DNA, 15 bp, Homo sapiens
tgtattaaagactgc

SEQ ID NO: 1801693 - DNA, 15 bp, Homo sapiens
gtattaaagactgca

SEQ ID NO: 1801694 - DNA, 15 bp, Homo sapiens
tattaaagactgcag

SEQ ID NO: 1801695 - DNA, 15 bp, Homo sapiens
attaaagactgcaga

SEQ ID NO: 1801696 - DNA, 15 bp, Homo sapiens
ttaaagactgcagag

SEQ ID NO: 1801697 - DNA, 15 bp, Homo sapiens
taaagactgcagaga

SEQ ID NO: 1801698 - DNA, 15 bp, Homo sapiens
aaagactgcagagaa

SEQ ID NO: 1801699 - DNA, 15 bp, Homo sapiens
aagactgcagagaaa

SEQ ID NO: 1801700 - DNA, 15 bp, Homo sapiens
agactgcagagaaaa

SEQ ID NO: 1801701 - DNA, 15 bp, Homo sapiens
gactgcagagaaaaa

SEQ ID NO: 1801702 - DNA, 15 bp, Homo sapiens
actgcagagaaaaac

SEQ ID NO: 1801703 - DNA, 15 bp, Homo sapiens
ctgcagagaaaaaca

SEQ ID NO: 1801704 - DNA, 15 bp, Homo sapiens
tgcagagaaaaacaa

SEQ ID NO: 1801705 - DNA, 15 bp, Homo sapiens
gcagagaaaaacaaa

SEQ ID NO: 1801706 - DNA, 15 bp, Homo sapiens
cagagaaaaacaaag

SEQ ID NO: 1801707 - DNA, 15 bp, Homo sapiens
agagaaaaacaaagc

SEQ ID NO: 1801708 - DNA, 15 bp, Homo sapiens
gagaaaaacaaagca

SEQ ID NO: 1801709 - DNA, 15 bp, Homo sapiens
agaaaaacaaagcaa

SEQ ID NO: 1801710 - DNA, 15 bp, Homo sapiens
gaaaaacaaagcaaa

SEQ ID NO: 1801711 - DNA, 15 bp, Homo sapiens
aaaaacaaagcaaag

SEQ ID NO: 1801712 - DNA, 15 bp, Homo sapiens
aaaacaaagcaaaga

SEQ ID NO: 1801713 - DNA, 15 bp, Homo sapiens
aaacaaagcaaagag

SEQ ID NO: 1801714 - DNA, 15 bp, Homo sapiens
aacaaagcaaagagg

SEQ ID NO: 1801715 - DNA, 15 bp, Homo sapiens
acaaagcaaagagga

SEQ ID NO: 1801716 - DNA, 15 bp, Homo sapiens
caaagcaaagaggag

SEQ ID NO: 1801717 - DNA, 15 bp, Homo sapiens
aaagcaaagaggagg

SEQ ID NO: 1801718 - DNA, 15 bp, Homo sapiens
aagcaaagaggaggg

SEQ ID NO: 1801719 - DNA, 15 bp, Homo sapiens
agcaaagaggagggc

SEQ ID NO: 1801720 - DNA, 15 bp, Homo sapiens
gcaaagaggagggca

SEQ ID NO: 1801721 - DNA, 15 bp, Homo sapiens
caaagaggagggcaa

SEQ ID NO: 1801722 - DNA, 15 bp, Homo sapiens
aaagaggagggcaag

SEQ ID NO: 1801723 - DNA, 15 bp, Homo sapiens
aagaggagggcaagg

SEQ ID NO: 1801724 - DNA, 15 bp, Homo sapiens
agaggagggcaagga

SEQ ID NO: 1801725 - DNA, 15 bp, Homo sapiens
gaggagggcaaggaa

SEQ ID NO: 1801726 - DNA, 15 bp, Homo sapiens
aggagggcaaggaag

SEQ ID NO: 1801727 - DNA, 15 bp, Homo sapiens
ggagggcaaggaagg

SEQ ID NO: 1801728 - DNA, 15 bp, Homo sapiens
gagggcaaggaaggc

SEQ ID NO: 1801729 - DNA, 15 bp, Homo sapiens
agggcaaggaaggct

SEQ ID NO: 1801730 - DNA, 15 bp, Homo sapiens
gggcaaggaaggctg

SEQ ID NO: 1801731 - DNA, 15 bp, Homo sapiens
ggcaaggaaggctgg

SEQ ID NO: 1801732 - DNA, 15 bp, Homo sapiens
gcaaggaaggctggt

SEQ ID NO: 1801733 - DNA, 15 bp, Homo sapiens
caaggaaggctggta

SEQ ID NO: 1801734 - DNA, 15 bp, Homo sapiens
aaggaaggctggtag

SEQ ID NO: 1801735 - DNA, 15 bp, Homo sapiens
aggaaggctggtagg

SEQ ID NO: 1801736 - DNA, 15 bp, Homo sapiens
ggaaggctggtaggg

SEQ ID NO: 1801737 - DNA, 15 bp, Homo sapiens
gaaggctggtaggga

SEQ ID NO: 1801738 - DNA, 15 bp, Homo sapiens
aaggctggtagggaa

SEQ ID NO: 1801739 - DNA, 15 bp, Homo sapiens
aggctggtagggaaa

SEQ ID NO: 1801740 - DNA, 15 bp, Homo sapiens
ggctggtagggaaag

SEQ ID NO: 1801741 - DNA, 15 bp, Homo sapiens
gctggtagggaaagg

SEQ ID NO: 1801742 - DNA, 15 bp, Homo sapiens
ctggtagggaaagga

SEQ ID NO: 1801743 - DNA, 15 bp, Homo sapiens
tggtagggaaaggag

SEQ ID NO: 1801744 - DNA, 15 bp, Homo sapiens
ggtagggaaaggagt

SEQ ID NO: 1801745 - DNA, 15 bp, Homo sapiens
gtagggaaaggagtt

SEQ ID NO: 1801746 - DNA, 15 bp, Homo sapiens
tagggaaaggagttt

SEQ ID NO: 1801747 - DNA, 15 bp, Homo sapiens
agggaaaggagtttt

SEQ ID NO: 1801748 - DNA, 15 bp, Homo sapiens
gggaaaggagtttta

SEQ ID NO: 1801749 - DNA, 15 bp, Homo sapiens
ggaaaggagttttaa

SEQ ID NO: 1801750 - DNA, 15 bp, Homo sapiens
gaaaggagttttaaa

SEQ ID NO: 1801751 - DNA, 15 bp, Homo sapiens
aaaggagttttaaaa

SEQ ID NO: 1801752 - DNA, 15 bp, Homo sapiens
aaggagttttaaaat

SEQ ID NO: 1801753 - DNA, 15 bp, Homo sapiens
aggagttttaaaatt

SEQ ID NO: 1801754 - DNA, 15 bp, Homo sapiens
ggagttttaaaattt

SEQ ID NO: 1801755 - DNA, 15 bp, Homo sapiens
gagttttaaaattta

SEQ ID NO: 1801756 - DNA, 15 bp, Homo sapiens
agttttaaaatttaa

SEQ ID NO: 1801757 - DNA, 15 bp, Homo sapiens
gttttaaaatttaaa

SEQ ID NO: 1801758 - DNA, 15 bp, Homo sapiens
tttaaaatttaaaag

SEQ ID NO: 1801759 - DNA, 15 bp, Homo sapiens
ttaaaatttaaaaga

SEQ ID NO: 1801760 - DNA, 15 bp, Homo sapiens
taaaatttaaaagag

SEQ ID NO: 1801761 - DNA, 15 bp, Homo sapiens
aaaatttaaaagaga

SEQ ID NO: 1801762 - DNA, 15 bp, Homo sapiens
aaatttaaaagagag

SEQ ID NO: 1801763 - DNA, 15 bp, Homo sapiens
aatttaaaagagagt

SEQ ID NO: 1801764 - DNA, 15 bp, Homo sapiens
atttaaaagagagtg

SEQ ID NO: 1801765 - DNA, 15 bp, Homo sapiens
tttaaaagagagtga

SEQ ID NO: 1801766 - DNA, 15 bp, Homo sapiens
ttaaaagagagtgat

SEQ ID NO: 1801767 - DNA, 15 bp, Homo sapiens
taaaagagagtgatc

SEQ ID NO: 1801768 - DNA, 15 bp, Homo sapiens
aaaagagagtgatca

SEQ ID NO: 1801769 - DNA, 15 bp, Homo sapiens
aaagagagtgatcag

SEQ ID NO: 1801770 - DNA, 15 bp, Homo sapiens
aagagagtgatcagg

SEQ ID NO: 1801771 - DNA, 15 bp, Homo sapiens
agagagtgatcaggg

SEQ ID NO: 1801772 - DNA, 15 bp, Homo sapiens
gagagtgatcaggga

SEQ ID NO: 1801773 - DNA, 15 bp, Homo sapiens
agagtgatcagggaa

SEQ ID NO: 1801774 - DNA, 15 bp, Homo sapiens
gagtgatcagggaaa

SEQ ID NO: 1801775 - DNA, 15 bp, Homo sapiens
agtgatcagggaaag

SEQ ID NO: 1801776 - DNA, 15 bp, Homo sapiens
gtgatcagggaaaga

SEQ ID NO: 1801777 - DNA, 15 bp, Homo sapiens
tgatcagggaaagac

SEQ ID NO: 1801778 - DNA, 15 bp, Homo sapiens
gatcagggaaagact

SEQ ID NO: 1801779 - DNA, 15 bp, Homo sapiens
atcagggaaagactt

SEQ ID NO: 1801780 - DNA, 15 bp, Homo sapiens
tcagggaaagacttg

SEQ ID NO: 1801781 - DNA, 15 bp, Homo sapiens
cagggaaagacttga

SEQ ID NO: 1801782 - DNA, 15 bp, Homo sapiens
agggaaagacttgag

SEQ ID NO: 1801783 - DNA, 15 bp, Homo sapiens
gggaaagacttgagt

SEQ ID NO: 1801784 - DNA, 15 bp, Homo sapiens
ggaaagacttgagtg

SEQ ID NO: 1801785 - DNA, 15 bp, Homo sapiens
gaaagacttgagtga

SEQ ID NO: 1801786 - DNA, 15 bp, Homo sapiens
aaagacttgagtgat

SEQ ID NO: 1801787 - DNA, 15 bp, Homo sapiens
aagacttgagtgata

SEQ ID NO: 1801788 - DNA, 15 bp, Homo sapiens
agacttgagtgatat

SEQ ID NO: 1801789 - DNA, 15 bp, Homo sapiens
gacttgagtgatatt

SEQ ID NO: 1801790 - DNA, 15 bp, Homo sapiens
acttgagtgatattt

SEQ ID NO: 1801791 - DNA, 15 bp, Homo sapiens
cttgagtgatatttg

SEQ ID NO: 1801792 - DNA, 15 bp, Homo sapiens
ttgagtgatatttgg

SEQ ID NO: 1801793 - DNA, 15 bp, Homo sapiens
tgagtgatatttggg

SEQ ID NO: 1801794 - DNA, 15 bp, Homo sapiens
gagtgatatttgggc

SEQ ID NO: 1801795 - DNA, 15 bp, Homo sapiens
agtgatatttgggca

SEQ ID NO: 1801796 - DNA, 15 bp, Homo sapiens
gtgatatttgggcaa

SEQ ID NO: 1801797 - DNA, 15 bp, Homo sapiens
tgatatttgggcaaa

SEQ ID NO: 1801798 - DNA, 15 bp, Homo sapiens
gatatttgggcaaag

SEQ ID NO: 1801799 - DNA, 15 bp, Homo sapiens
atatttgggcaaaga

SEQ ID NO: 1801800 - DNA, 15 bp, Homo sapiens
tatttgggcaaagat

SEQ ID NO: 1801801 - DNA, 15 bp, Homo sapiens
atttgggcaaagatc

SEQ ID NO: 1801802 - DNA, 15 bp, Homo sapiens
tttgggcaaagatct

SEQ ID NO: 1801803 - DNA, 15 bp, Homo sapiens
ttgggcaaagatctg

SEQ ID NO: 1801804 - DNA, 15 bp, Homo sapiens
tgggcaaagatctga

SEQ ID NO: 1801805 - DNA, 15 bp, Homo sapiens
gggcaaagatctgaa

SEQ ID NO: 1801806 - DNA, 15 bp, Homo sapiens
ggcaaagatctgaag

SEQ ID NO: 1801807 - DNA, 15 bp, Homo sapiens
gcaaagatctgaagg

SEQ ID NO: 1801808 - DNA, 15 bp, Homo sapiens
caaagatctgaagga

SEQ ID NO: 1801809 - DNA, 15 bp, Homo sapiens
aaagatctgaaggag

SEQ ID NO: 1801810 - DNA, 15 bp, Homo sapiens
aagatctgaaggaga

SEQ ID NO: 1801811 - DNA, 15 bp, Homo sapiens
agatctgaaggagac

SEQ ID NO: 1801812 - DNA, 15 bp, Homo sapiens
gatctgaaggagaca

SEQ ID NO: 1801813 - DNA, 15 bp, Homo sapiens
atctgaaggagacaa

SEQ ID NO: 1801814 - DNA, 15 bp, Homo sapiens
tctgaaggagacaag

SEQ ID NO: 1801815 - DNA, 15 bp, Homo sapiens
ctgaaggagacaaga

SEQ ID NO: 1801816 - DNA, 15 bp, Homo sapiens
tgaaggagacaagag

SEQ ID NO: 1801817 - DNA, 15 bp, Homo sapiens
gaaggagacaagaga

SEQ ID NO: 1801818 - DNA, 15 bp, Homo sapiens
aaggagacaagagag

SEQ ID NO: 1801819 - DNA, 15 bp, Homo sapiens
aggagacaagagagt

SEQ ID NO: 1801820 - DNA, 15 bp, Homo sapiens
ggagacaagagagtg

SEQ ID NO: 1801821 - DNA, 15 bp, Homo sapiens
gagacaagagagtga

SEQ ID NO: 1801822 - DNA, 15 bp, Homo sapiens
agacaagagagtgag

SEQ ID NO: 1801823 - DNA, 15 bp, Homo sapiens
gacaagagagtgagc

SEQ ID NO: 1801824 - DNA, 15 bp, Homo sapiens
acaagagagtgagcc

SEQ ID NO: 1801825 - DNA, 15 bp, Homo sapiens
caagagagtgagcca

SEQ ID NO: 1801826 - DNA, 15 bp, Homo sapiens
aagagagtgagccag

SEQ ID NO: 1801827 - DNA, 15 bp, Homo sapiens
agagagtgagccaga

SEQ ID NO: 1801828 - DNA, 15 bp, Homo sapiens
gagagtgagccagac

SEQ ID NO: 1801829 - DNA, 15 bp, Homo sapiens
agagtgagccagaca

SEQ ID NO: 1801830 - DNA, 15 bp, Homo sapiens
gagtgagccagacac

SEQ ID NO: 1801831 - DNA, 15 bp, Homo sapiens
agtgagccagacaca

SEQ ID NO: 1801832 - DNA, 15 bp, Homo sapiens
gtgagccagacacaa

SEQ ID NO: 1801833 - DNA, 15 bp, Homo sapiens
tgagccagacacaaa

SEQ ID NO: 1801834 - DNA, 15 bp, Homo sapiens
gagccagacacaaac

SEQ ID NO: 1801835 - DNA, 15 bp, Homo sapiens
agccagacacaaaca

SEQ ID NO: 1801836 - DNA, 15 bp, Homo sapiens
gccagacacaaacag

SEQ ID NO: 1801837 - DNA, 15 bp, Homo sapiens
ccagacacaaacagg

SEQ ID NO: 1801838 - DNA, 15 bp, Homo sapiens
cagacacaaacagga

SEQ ID NO: 1801839 - DNA, 15 bp, Homo sapiens
agacacaaacaggag

SEQ ID NO: 1801840 - DNA, 15 bp, Homo sapiens
gacacaaacaggagt

SEQ ID NO: 1801841 - DNA, 15 bp, Homo sapiens
acacaaacaggagtc

SEQ ID NO: 1801842 - DNA, 15 bp, Homo sapiens
cacaaacaggagtca

SEQ ID NO: 1801843 - DNA, 15 bp, Homo sapiens
acaaacaggagtcaa

SEQ ID NO: 1801844 - DNA, 15 bp, Homo sapiens
caaacaggagtcaaa

SEQ ID NO: 1801845 - DNA, 15 bp, Homo sapiens
aaacaggagtcaaac

SEQ ID NO: 1801846 - DNA, 15 bp, Homo sapiens
aacaggagtcaaaca

SEQ ID NO: 1801847 - DNA, 15 bp, Homo sapiens
acaggagtcaaacat

SEQ ID NO: 1801848 - DNA, 15 bp, Homo sapiens
caggagtcaaacatt

SEQ ID NO: 1801849 - DNA, 15 bp, Homo sapiens
aggagtcaaacattc

SEQ ID NO: 1801850 - DNA, 15 bp, Homo sapiens
ggagtcaaacattcc

SEQ ID NO: 1801851 - DNA, 15 bp, Homo sapiens
gagtcaaacattcca

SEQ ID NO: 1801852 - DNA, 15 bp, Homo sapiens
agtcaaacattccac

SEQ ID NO: 1801853 - DNA, 15 bp, Homo sapiens
gtcaaacattccaca

SEQ ID NO: 1801854 - DNA, 15 bp, Homo sapiens
tcaaacattccacag

SEQ ID NO: 1801855 - DNA, 15 bp, Homo sapiens
caaacattccacaga

SEQ ID NO: 1801856 - DNA, 15 bp, Homo sapiens
aaacattccacagag

SEQ ID NO: 1801857 - DNA, 15 bp, Homo sapiens
aacattccacagaga

SEQ ID NO: 1801858 - DNA, 15 bp, Homo sapiens
acattccacagagag

SEQ ID NO: 1801859 - DNA, 15 bp, Homo sapiens
cattccacagagaga

SEQ ID NO: 1801860 - DNA, 15 bp, Homo sapiens
attccacagagagag

SEQ ID NO: 1801861 - DNA, 15 bp, Homo sapiens
ttccacagagagagg

SEQ ID NO: 1801862 - DNA, 15 bp, Homo sapiens
tccacagagagaggt

SEQ ID NO: 1801863 - DNA, 15 bp, Homo sapiens
ccacagagagaggta

SEQ ID NO: 1801864 - DNA, 15 bp, Homo sapiens
cacagagagaggtag

SEQ ID NO: 1801865 - DNA, 15 bp, Homo sapiens
acagagagaggtagg

SEQ ID NO: 1801866 - DNA, 15 bp, Homo sapiens
cagagagaggtagga

SEQ ID NO: 1801867 - DNA, 15 bp, Homo sapiens
agagagaggtaggag

SEQ ID NO: 1801868 - DNA, 15 bp, Homo sapiens
gagagaggtaggagt

SEQ ID NO: 1801869 - DNA, 15 bp, Homo sapiens
agagaggtaggagta

SEQ ID NO: 1801870 - DNA, 15 bp, Homo sapiens
gagaggtaggagtat

SEQ ID NO: 1801871 - DNA, 15 bp, Homo sapiens
agaggtaggagtatg

SEQ ID NO: 1801872 - DNA, 15 bp, Homo sapiens
gaggtaggagtatgt

SEQ ID NO: 1801873 - DNA, 15 bp, Homo sapiens
aggtaggagtatgtc

SEQ ID NO: 1801874 - DNA, 15 bp, Homo sapiens
ggtaggagtatgtct

SEQ ID NO: 1801875 - DNA, 15 bp, Homo sapiens
gtaggagtatgtctg

SEQ ID NO: 1801876 - DNA, 15 bp, Homo sapiens
taggagtatgtctgg

SEQ ID NO: 1801877 - DNA, 15 bp, Homo sapiens
aggagtatgtctggt

SEQ ID NO: 1801878 - DNA, 15 bp, Homo sapiens
ggagtatgtctggtg

SEQ ID NO: 1801879 - DNA, 15 bp, Homo sapiens
gagtatgtctggtgt

SEQ ID NO: 1801880 - DNA, 15 bp, Homo sapiens
agtatgtctggtgtg

SEQ ID NO: 1801881 - DNA, 15 bp, Homo sapiens
gtatgtctggtgtgt

SEQ ID NO: 1801882 - DNA, 15 bp, Homo sapiens
tatgtctggtgtgtt

SEQ ID NO: 1801883 - DNA, 15 bp, Homo sapiens
atgtctggtgtgttt

SEQ ID NO: 1801884 - DNA, 15 bp, Homo sapiens
tgtctggtgtgtttg

SEQ ID NO: 1801885 - DNA, 15 bp, Homo sapiens
gtctggtgtgtttga

SEQ ID NO: 1801886 - DNA, 15 bp, Homo sapiens
tctggtgtgtttgaa

SEQ ID NO: 1801887 - DNA, 15 bp, Homo sapiens
ctggtgtgtttgaag

SEQ ID NO: 1801888 - DNA, 15 bp, Homo sapiens
tggtgtgtttgaaga

SEQ ID NO: 1801889 - DNA, 15 bp, Homo sapiens
ggtgtgtttgaagaa

SEQ ID NO: 1801890 - DNA, 15 bp, Homo sapiens
gtgtgtttgaagaac

SEQ ID NO: 1801891 - DNA, 15 bp, Homo sapiens
tgtgtttgaagaacg

SEQ ID NO: 1801892 - DNA, 15 bp, Homo sapiens
gtgtttgaagaacga

SEQ ID NO: 1801893 - DNA, 15 bp, Homo sapiens
tgtttgaagaacgat

SEQ ID NO: 1801894 - DNA, 15 bp, Homo sapiens
gtttgaagaacgatt

SEQ ID NO: 1801895 - DNA, 15 bp, Homo sapiens
tttgaagaacgatta

SEQ ID NO: 1801896 - DNA, 15 bp, Homo sapiens
ttgaagaacgattag

SEQ ID NO: 1801897 - DNA, 15 bp, Homo sapiens
tgaagaacgattagg

SEQ ID NO: 1801898 - DNA, 15 bp, Homo sapiens
gaagaacgattagga

SEQ ID NO: 1801899 - DNA, 15 bp, Homo sapiens
aagaacgattaggag

SEQ ID NO: 1801900 - DNA, 15 bp, Homo sapiens
agaacgattaggagg

SEQ ID NO: 1801901 - DNA, 15 bp, Homo sapiens
gaacgattaggaggt

SEQ ID NO: 1801902 - DNA, 15 bp, Homo sapiens
aacgattaggaggtc

SEQ ID NO: 1801903 - DNA, 15 bp, Homo sapiens
acgattaggaggtca

SEQ ID NO: 1801904 - DNA, 15 bp, Homo sapiens
cgattaggaggtcat

SEQ ID NO: 1801905 - DNA, 15 bp, Homo sapiens
gattaggaggtcata

SEQ ID NO: 1801906 - DNA, 15 bp, Homo sapiens
attaggaggtcatag

SEQ ID NO: 1801907 - DNA, 15 bp, Homo sapiens
ttaggaggtcatagc

SEQ ID NO: 1801908 - DNA, 15 bp, Homo sapiens
taggaggtcatagca

SEQ ID NO: 1801909 - DNA, 15 bp, Homo sapiens
aggaggtcatagcaa

SEQ ID NO: 1801910 - DNA, 15 bp, Homo sapiens
ggaggtcatagcaaa

SEQ ID NO: 1801911 - DNA, 15 bp, Homo sapiens
gaggtcatagcaaaa

SEQ ID NO: 1801912 - DNA, 15 bp, Homo sapiens
aggtcatagcaaaat

SEQ ID NO: 1801913 - DNA, 15 bp, Homo sapiens
ggtcatagcaaaatg

SEQ ID NO: 1801914 - DNA, 15 bp, Homo sapiens
gtcatagcaaaatgg

SEQ ID NO: 1801915 - DNA, 15 bp, Homo sapiens
tcatagcaaaatggg

SEQ ID NO: 1801916 - DNA, 15 bp, Homo sapiens
catagcaaaatgggc

SEQ ID NO: 1801917 - DNA, 15 bp, Homo sapiens
atagcaaaatgggca

SEQ ID NO: 1801918 - DNA, 15 bp, Homo sapiens
tagcaaaatgggcag

SEQ ID NO: 1801919 - DNA, 15 bp, Homo sapiens
agcaaaatgggcagc

SEQ ID NO: 1801920 - DNA, 15 bp, Homo sapiens
gcaaaatgggcagca

SEQ ID NO: 1801921 - DNA, 15 bp, Homo sapiens
caaaatgggcagcaa

SEQ ID NO: 1801922 - DNA, 15 bp, Homo sapiens
aaaatgggcagcaag

SEQ ID NO: 1801923 - DNA, 15 bp, Homo sapiens
aaatgggcagcaagt

SEQ ID NO: 1801924 - DNA, 15 bp, Homo sapiens
aatgggcagcaagta

SEQ ID NO: 1801925 - DNA, 15 bp, Homo sapiens
atgggcagcaagtat

SEQ ID NO: 1801926 - DNA, 15 bp, Homo sapiens
tgggcagcaagtatc

SEQ ID NO: 1801927 - DNA, 15 bp, Homo sapiens
gggcagcaagtatct

SEQ ID NO: 1801928 - DNA, 15 bp, Homo sapiens
ggcagcaagtatctc

SEQ ID NO: 1801929 - DNA, 15 bp, Homo sapiens
gcagcaagtatctct

SEQ ID NO: 1801930 - DNA, 15 bp, Homo sapiens
cagcaagtatctctc

SEQ ID NO: 1801931 - DNA, 15 bp, Homo sapiens
agcaagtatctctct

SEQ ID NO: 1801932 - DNA, 15 bp, Homo sapiens
gcaagtatctctctt

SEQ ID NO: 1801933 - DNA, 15 bp, Homo sapiens
caagtatctctcttc

SEQ ID NO: 1801934 - DNA, 15 bp, Homo sapiens
aagtatctctcttcg

SEQ ID NO: 1801935 - DNA, 15 bp, Homo sapiens
agtatctctcttcgt

SEQ ID NO: 1801936 - DNA, 15 bp, Homo sapiens
gtatctctcttcgtc

SEQ ID NO: 1801937 - DNA, 15 bp, Homo sapiens
tatctctcttcgtct

SEQ ID NO: 1801938 - DNA, 15 bp, Homo sapiens
atctctcttcgtcta

SEQ ID NO: 1801939 - DNA, 15 bp, Homo sapiens
tctctcttcgtctaa

SEQ ID NO: 1801940 - DNA, 15 bp, Homo sapiens
ctctcttcgtctaat

SEQ ID NO: 1801941 - DNA, 15 bp, Homo sapiens
tctcttcgtctaatg

SEQ ID NO: 1801942 - DNA, 15 bp, Homo sapiens
ctcttcgtctaatgc

SEQ ID NO: 1801943 - DNA, 15 bp, Homo sapiens
tcttcgtctaatgca

SEQ ID NO: 1801944 - DNA, 15 bp, Homo sapiens
cttcgtctaatgcaa

SEQ ID NO: 1801945 - DNA, 15 bp, Homo sapiens
ttcgtctaatgcaaa

SEQ ID NO: 1801946 - DNA, 15 bp, Homo sapiens
tcgtctaatgcaaag

SEQ ID NO: 1801947 - DNA, 15 bp, Homo sapiens
cgtctaatgcaaagt

SEQ ID NO: 1801948 - DNA, 15 bp, Homo sapiens
gtctaatgcaaagta

SEQ ID NO: 1801949 - DNA, 15 bp, Homo sapiens
tctaatgcaaagtat

SEQ ID NO: 1801950 - DNA, 15 bp, Homo sapiens
ctaatgcaaagtata

SEQ ID NO: 1801951 - DNA, 15 bp, Homo sapiens
taatgcaaagtataa

SEQ ID NO: 1801952 - DNA, 15 bp, Homo sapiens
aatgcaaagtataaa

SEQ ID NO: 1801953 - DNA, 15 bp, Homo sapiens
atgcaaagtataaaa

SEQ ID NO: 1801954 - DNA, 15 bp, Homo sapiens
tgcaaagtataaaag

SEQ ID NO: 1801955 - DNA, 15 bp, Homo sapiens
gcaaagtataaaagg

SEQ ID NO: 1801956 - DNA, 15 bp, Homo sapiens
caaagtataaaaggc

SEQ ID NO: 1801957 - DNA, 15 bp, Homo sapiens
aaagtataaaaggcc

SEQ ID NO: 1801958 - DNA, 15 bp, Homo sapiens
aagtataaaaggcct

SEQ ID NO: 1801959 - DNA, 15 bp, Homo sapiens
agtataaaaggcctt

SEQ ID NO: 1801960 - DNA, 15 bp, Homo sapiens
gtataaaaggccttt

SEQ ID NO: 1801961 - DNA, 15 bp, Homo sapiens
tataaaaggccttta

SEQ ID NO: 1801962 - DNA, 15 bp, Homo sapiens
ataaaaggcctttat

SEQ ID NO: 1801963 - DNA, 15 bp, Homo sapiens
taaaaggcctttatg

SEQ ID NO: 1801964 - DNA, 15 bp, Homo sapiens
aaaaggcctttatgt

SEQ ID NO: 1801965 - DNA, 15 bp, Homo sapiens
aaaggcctttatgta

SEQ ID NO: 1801966 - DNA, 15 bp, Homo sapiens
aaggcctttatgtat

SEQ ID NO: 1801967 - DNA, 15 bp, Homo sapiens
aggcctttatgtata

SEQ ID NO: 1801968 - DNA, 15 bp, Homo sapiens
ggcctttatgtatat

SEQ ID NO: 1801969 - DNA, 15 bp, Homo sapiens
gcctttatgtatatt

SEQ ID NO: 1801970 - DNA, 15 bp, Homo sapiens
cctttatgtatatta

SEQ ID NO: 1801971 - DNA, 15 bp, Homo sapiens
ctttatgtatattac

SEQ ID NO: 1801972 - DNA, 15 bp, Homo sapiens
tttatgtatattaca

SEQ ID NO: 1801973 - DNA, 15 bp, Homo sapiens
ttatgtatattacaa

SEQ ID NO: 1801974 - DNA, 15 bp, Homo sapiens
tatgtatattacaag

SEQ ID NO: 1801975 - DNA, 15 bp, Homo sapiens
atgtatattacaagt

SEQ ID NO: 1801976 - DNA, 15 bp, Homo sapiens
tgtatattacaagtc

SEQ ID NO: 1801977 - DNA, 15 bp, Homo sapiens
gtatattacaagtct

SEQ ID NO: 1801978 - DNA, 15 bp, Homo sapiens
tatattacaagtcta

SEQ ID NO: 1801979 - DNA, 15 bp, Homo sapiens
atattacaagtctat

SEQ ID NO: 1801980 - DNA, 15 bp, Homo sapiens
tattacaagtctata

SEQ ID NO: 1801981 - DNA, 15 bp, Homo sapiens
attacaagtctataa

SEQ ID NO: 1801982 - DNA, 15 bp, Homo sapiens
ttacaagtctataat

SEQ ID NO: 1801983 - DNA, 15 bp, Homo sapiens
tacaagtctataatc

SEQ ID NO: 1801984 - DNA, 15 bp, Homo sapiens
acaagtctataatcc

SEQ ID NO: 1801985 - DNA, 15 bp, Homo sapiens
caagtctataatcct

SEQ ID NO: 1801986 - DNA, 15 bp, Homo sapiens
aagtctataatcctt

SEQ ID NO: 1801987 - DNA, 15 bp, Homo sapiens
agtctataatccttt

SEQ ID NO: 1801988 - DNA, 15 bp, Homo sapiens
gtctataatccttta

SEQ ID NO: 1801989 - DNA, 15 bp, Homo sapiens
tctataatcctttat

SEQ ID NO: 1801990 - DNA, 15 bp, Homo sapiens
ctataatcctttatc

SEQ ID NO: 1801991 - DNA, 15 bp, Homo sapiens
tataatcctttatct

SEQ ID NO: 1801992 - DNA, 15 bp, Homo sapiens
ataatcctttatctg

SEQ ID NO: 1801993 - DNA, 15 bp, Homo sapiens
taatcctttatctgt

SEQ ID NO: 1801994 - DNA, 15 bp, Homo sapiens
aatcctttatctgta

SEQ ID NO: 1801995 - DNA, 15 bp, Homo sapiens
atcctttatctgtag

SEQ ID NO: 1801996 - DNA, 15 bp, Homo sapiens
tcctttatctgtagt

SEQ ID NO: 1801997 - DNA, 15 bp, Homo sapiens
cctttatctgtagtt

SEQ ID NO: 1801998 - DNA, 15 bp, Homo sapiens
ctttatctgtagttc

SEQ ID NO: 1801999 - DNA, 15 bp, Homo sapiens
tttatctgtagttcc

SEQ ID NO: 1802000 - DNA, 15 bp, Homo sapiens
ttatctgtagttcca

SEQ ID NO: 1802001 - DNA, 15 bp, Homo sapiens
tatctgtagttccaa

SEQ ID NO: 1802002 - DNA, 15 bp, Homo sapiens
atctgtagttccaaa

SEQ ID NO: 1802003 - DNA, 15 bp, Homo sapiens
tctgtagttccaaaa

SEQ ID NO: 1802004 - DNA, 15 bp, Homo sapiens
ctgtagttccaaaat

SEQ ID NO: 1802005 - DNA, 15 bp, Homo sapiens
tgtagttccaaaatt

SEQ ID NO: 1802006 - DNA, 15 bp, Homo sapiens
gtagttccaaaattg

SEQ ID NO: 1802007 - DNA, 15 bp, Homo sapiens
tagttccaaaattga

SEQ ID NO: 1802008 - DNA, 15 bp, Homo sapiens
agttccaaaattgag

SEQ ID NO: 1802009 - DNA, 15 bp, Homo sapiens
gttccaaaattgaga

SEQ ID NO: 1802010 - DNA, 15 bp, Homo sapiens
ttccaaaattgagaa

SEQ ID NO: 1802011 - DNA, 15 bp, Homo sapiens
tccaaaattgagaaa

SEQ ID NO: 1802012 - DNA, 15 bp, Homo sapiens
ccaaaattgagaaag

SEQ ID NO: 1802013 - DNA, 15 bp, Homo sapiens
caaaattgagaaagc

SEQ ID NO: 1802014 - DNA, 15 bp, Homo sapiens
aaaattgagaaagct

SEQ ID NO: 1802015 - DNA, 15 bp, Homo sapiens
aaattgagaaagctt

SEQ ID NO: 1802016 - DNA, 15 bp, Homo sapiens
aattgagaaagcttt

SEQ ID NO: 1802017 - DNA, 15 bp, Homo sapiens
attgagaaagcttta

SEQ ID NO: 1802018 - DNA, 15 bp, Homo sapiens
ttgagaaagctttaa

SEQ ID NO: 1802019 - DNA, 15 bp, Homo sapiens
tgagaaagctttaaa

SEQ ID NO: 1802020 - DNA, 15 bp, Homo sapiens
gagaaagctttaaaa

SEQ ID NO: 1802021 - DNA, 15 bp, Homo sapiens
agaaagctttaaaat

SEQ ID NO: 1802022 - DNA, 15 bp, Homo sapiens
gaaagctttaaaatc

SEQ ID NO: 1802023 - DNA, 15 bp, Homo sapiens
aaagctttaaaatcc

SEQ ID NO: 1802024 - DNA, 15 bp, Homo sapiens
aagctttaaaatcca

SEQ ID NO: 1802025 - DNA, 15 bp, Homo sapiens
agctttaaaatccag

SEQ ID NO: 1802026 - DNA, 15 bp, Homo sapiens
gctttaaaatccagt

SEQ ID NO: 1802027 - DNA, 15 bp, Homo sapiens
ctttaaaatccagtg

SEQ ID NO: 1802028 - DNA, 15 bp, Homo sapiens
tttaaaatccagtga

SEQ ID NO: 1802029 - DNA, 15 bp, Homo sapiens
ttaaaatccagtgat

SEQ ID NO: 1802030 - DNA, 15 bp, Homo sapiens
taaaatccagtgatt

SEQ ID NO: 1802031 - DNA, 15 bp, Homo sapiens
aaaatccagtgattc

SEQ ID NO: 1802032 - DNA, 15 bp, Homo sapiens
aaatccagtgattct

SEQ ID NO: 1802033 - DNA, 15 bp, Homo sapiens
aatccagtgattctg

SEQ ID NO: 1802034 - DNA, 15 bp, Homo sapiens
atccagtgattctgt

SEQ ID NO: 1802035 - DNA, 15 bp, Homo sapiens
tccagtgattctgtg

SEQ ID NO: 1802036 - DNA, 15 bp, Homo sapiens
ccagtgattctgtgt

SEQ ID NO: 1802037 - DNA, 15 bp, Homo sapiens
cagtgattctgtgtg

SEQ ID NO: 1802038 - DNA, 15 bp, Homo sapiens
agtgattctgtgtgt

SEQ ID NO: 1802039 - DNA, 15 bp, Homo sapiens
gtgattctgtgtgtt

SEQ ID NO: 1802040 - DNA, 15 bp, Homo sapiens
tgattctgtgtgttt

SEQ ID NO: 1802041 - DNA, 15 bp, Homo sapiens
gattctgtgtgtttt

SEQ ID NO: 1802042 - DNA, 15 bp, Homo sapiens
attctgtgtgttttg

SEQ ID NO: 1802043 - DNA, 15 bp, Homo sapiens
ttctgtgtgttttgt

SEQ ID NO: 1802044 - DNA, 15 bp, Homo sapiens
tctgtgtgttttgtg

SEQ ID NO: 1802045 - DNA, 15 bp, Homo sapiens
ctgtgtgttttgtgc

SEQ ID NO: 1802046 - DNA, 15 bp, Homo sapiens
tgtgtgttttgtgcc

SEQ ID NO: 1802047 - DNA, 15 bp, Homo sapiens
gtgtgttttgtgcca

SEQ ID NO: 1802048 - DNA, 15 bp, Homo sapiens
tgtgttttgtgccaa

SEQ ID NO: 1802049 - DNA, 15 bp, Homo sapiens
gtgttttgtgccaaa

SEQ ID NO: 1802050 - DNA, 15 bp, Homo sapiens
tgttttgtgccaaaa

SEQ ID NO: 1802051 - DNA, 15 bp, Homo sapiens
gttttgtgccaaaag

SEQ ID NO: 1802052 - DNA, 15 bp, Homo sapiens
ttttgtgccaaaagt

SEQ ID NO: 1802053 - DNA, 15 bp, Homo sapiens
tttgtgccaaaagtc

SEQ ID NO: 1802054 - DNA, 15 bp, Homo sapiens
ttgtgccaaaagtca

SEQ ID NO: 1802055 - DNA, 15 bp, Homo sapiens
tgtgccaaaagtcat

SEQ ID NO: 1802056 - DNA, 15 bp, Homo sapiens
gtgccaaaagtcata

SEQ ID NO: 1802057 - DNA, 15 bp, Homo sapiens
tgccaaaagtcatat

SEQ ID NO: 1802058 - DNA, 15 bp, Homo sapiens
gccaaaagtcatatg

SEQ ID NO: 1802059 - DNA, 15 bp, Homo sapiens
ccaaaagtcatatgg

SEQ ID NO: 1802060 - DNA, 15 bp, Homo sapiens
caaaagtcatatggc

SEQ ID NO: 1802061 - DNA, 15 bp, Homo sapiens
aaaagtcatatggca

SEQ ID NO: 1802062 - DNA, 15 bp, Homo sapiens
aaagtcatatggcat

SEQ ID NO: 1802063 - DNA, 15 bp, Homo sapiens
aagtcatatggcatc

SEQ ID NO: 1802064 - DNA, 15 bp, Homo sapiens
agtcatatggcatca

SEQ ID NO: 1802065 - DNA, 15 bp, Homo sapiens
gtcatatggcatcaa

SEQ ID NO: 1802066 - DNA, 15 bp, Homo sapiens
tcatatggcatcaaa

SEQ ID NO: 1802067 - DNA, 15 bp, Homo sapiens
catatggcatcaaaa

SEQ ID NO: 1802068 - DNA, 15 bp, Homo sapiens
atatggcatcaaaac

SEQ ID NO: 1802069 - DNA, 15 bp, Homo sapiens
tatggcatcaaaacc

SEQ ID NO: 1802070 - DNA, 15 bp, Homo sapiens
atggcatcaaaacca

SEQ ID NO: 1802071 - DNA, 15 bp, Homo sapiens
tggcatcaaaaccat

SEQ ID NO: 1802072 - DNA, 15 bp, Homo sapiens
ggcatcaaaaccata

SEQ ID NO: 1802073 - DNA, 15 bp, Homo sapiens
gcatcaaaaccatat

SEQ ID NO: 1802074 - DNA, 15 bp, Homo sapiens
catcaaaaccatatg

SEQ ID NO: 1802075 - DNA, 15 bp, Homo sapiens
atcaaaaccatatgt

SEQ ID NO: 1802076 - DNA, 15 bp, Homo sapiens
tcaaaaccatatgta

SEQ ID NO: 1802077 - DNA, 15 bp, Homo sapiens
caaaaccatatgtaa

SEQ ID NO: 1802078 - DNA, 15 bp, Homo sapiens
aaaaccatatgtaaa

SEQ ID NO: 1802079 - DNA, 15 bp, Homo sapiens
aaaccatatgtaaac

SEQ ID NO: 1802080 - DNA, 15 bp, Homo sapiens
aaccatatgtaaact

SEQ ID NO: 1802081 - DNA, 15 bp, Homo sapiens
accatatgtaaactg

SEQ ID NO: 1802082 - DNA, 15 bp, Homo sapiens
ccatatgtaaactgg

SEQ ID NO: 1802083 - DNA, 15 bp, Homo sapiens
catatgtaaactggc

SEQ ID NO: 1802084 - DNA, 15 bp, Homo sapiens
atatgtaaactggca

SEQ ID NO: 1802085 - DNA, 15 bp, Homo sapiens
tatgtaaactggcac

SEQ ID NO: 1802086 - DNA, 15 bp, Homo sapiens
atgtaaactggcaca

SEQ ID NO: 1802087 - DNA, 15 bp, Homo sapiens
tgtaaactggcacag

SEQ ID NO: 1802088 - DNA, 15 bp, Homo sapiens
gtaaactggcacaga

SEQ ID NO: 1802089 - DNA, 15 bp, Homo sapiens
taaactggcacagag

SEQ ID NO: 1802090 - DNA, 15 bp, Homo sapiens
aaactggcacagagc

SEQ ID NO: 1802091 - DNA, 15 bp, Homo sapiens
aactggcacagagct

SEQ ID NO: 1802092 - DNA, 15 bp, Homo sapiens
actggcacagagcta

SEQ ID NO: 1802093 - DNA, 15 bp, Homo sapiens
ctggcacagagctat

SEQ ID NO: 1802094 - DNA, 15 bp, Homo sapiens
tggcacagagctatt

SEQ ID NO: 1802095 - DNA, 15 bp, Homo sapiens
ggcacagagctattt

SEQ ID NO: 1802096 - DNA, 15 bp, Homo sapiens
gcacagagctattta

SEQ ID NO: 1802097 - DNA, 15 bp, Homo sapiens
cacagagctatttat

SEQ ID NO: 1802098 - DNA, 15 bp, Homo sapiens
acagagctatttata

SEQ ID NO: 1802099 - DNA, 15 bp, Homo sapiens
cagagctatttataa

SEQ ID NO: 1802100 - DNA, 15 bp, Homo sapiens
agagctatttataat

SEQ ID NO: 1802101 - DNA, 15 bp, Homo sapiens
gagctatttataatc

SEQ ID NO: 1802102 - DNA, 15 bp, Homo sapiens
agctatttataatct

SEQ ID NO: 1802103 - DNA, 15 bp, Homo sapiens
gctatttataatctt

SEQ ID NO: 1802104 - DNA, 15 bp, Homo sapiens
ctatttataatcttt

SEQ ID NO: 1802105 - DNA, 15 bp, Homo sapiens
tatttataatcttta

SEQ ID NO: 1802106 - DNA, 15 bp, Homo sapiens
atttataatctttat

SEQ ID NO: 1802107 - DNA, 15 bp, Homo sapiens
tttataatctttatc

SEQ ID NO: 1802108 - DNA, 15 bp, Homo sapiens
ttataatctttatca

SEQ ID NO: 1802109 - DNA, 15 bp, Homo sapiens
tataatctttatcat

SEQ ID NO: 1802110 - DNA, 15 bp, Homo sapiens
ataatctttatcata

SEQ ID NO: 1802111 - DNA, 15 bp, Homo sapiens
taatctttatcataa

SEQ ID NO: 1802112 - DNA, 15 bp, Homo sapiens
aatctttatcataat

SEQ ID NO: 1802113 - DNA, 15 bp, Homo sapiens
atctttatcataatt

SEQ ID NO: 1802114 - DNA, 15 bp, Homo sapiens
ctttatcataattgg

SEQ ID NO: 1802115 - DNA, 15 bp, Homo sapiens
tttatcataattgga

SEQ ID NO: 1802116 - DNA, 15 bp, Homo sapiens
ttatcataattggaa

SEQ ID NO: 1802117 - DNA, 15 bp, Homo sapiens
tatcataattggaat

SEQ ID NO: 1802118 - DNA, 15 bp, Homo sapiens
atcataattggaata

SEQ ID NO: 1802119 - DNA, 15 bp, Homo sapiens
tcataattggaatat

SEQ ID NO: 1802120 - DNA, 15 bp, Homo sapiens
cataattggaatatt

SEQ ID NO: 1802121 - DNA, 15 bp, Homo sapiens
ataattggaatattc

SEQ ID NO: 1802122 - DNA, 15 bp, Homo sapiens
taattggaatattct

SEQ ID NO: 1802123 - DNA, 15 bp, Homo sapiens
aattggaatattctc

SEQ ID NO: 1802124 - DNA, 15 bp, Homo sapiens
attggaatattctca

SEQ ID NO: 1802125 - DNA, 15 bp, Homo sapiens
ttggaatattctcat

SEQ ID NO: 1802126 - DNA, 15 bp, Homo sapiens
tggaatattctcatt

SEQ ID NO: 1802127 - DNA, 15 bp, Homo sapiens
ggaatattctcattt

SEQ ID NO: 1802128 - DNA, 15 bp, Homo sapiens
gaatattctcatttc

SEQ ID NO: 1802129 - DNA, 15 bp, Homo sapiens
aatattctcatttca

SEQ ID NO: 1802130 - DNA, 15 bp, Homo sapiens
atattctcatttcac

SEQ ID NO: 1802131 - DNA, 15 bp, Homo sapiens
tattctcatttcact

SEQ ID NO: 1802132 - DNA, 15 bp, Homo sapiens
attctcatttcactg

SEQ ID NO: 1802133 - DNA, 15 bp, Homo sapiens
ttctcatttcactgc

SEQ ID NO: 1802134 - DNA, 15 bp, Homo sapiens
tctcatttcactgca

SEQ ID NO: 1802135 - DNA, 15 bp, Homo sapiens
ctcatttcactgcag

SEQ ID NO: 1802136 - DNA, 15 bp, Homo sapiens
tcatttcactgcaga

SEQ ID NO: 1802137 - DNA, 15 bp, Homo sapiens
catttcactgcagaa

SEQ ID NO: 1802138 - DNA, 15 bp, Homo sapiens
atttcactgcagaaa

SEQ ID NO: 1802139 - DNA, 15 bp, Homo sapiens
tttcactgcagaaat

SEQ ID NO: 1802140 - DNA, 15 bp, Homo sapiens
ttcactgcagaaata

SEQ ID NO: 1802141 - DNA, 15 bp, Homo sapiens
tcactgcagaaatat

SEQ ID NO: 1802142 - DNA, 15 bp, Homo sapiens
cactgcagaaatatt

SEQ ID NO: 1802143 - DNA, 15 bp, Homo sapiens
actgcagaaatatta

SEQ ID NO: 1802144 - DNA, 15 bp, Homo sapiens
ctgcagaaatattaa

SEQ ID NO: 1802145 - DNA, 15 bp, Homo sapiens
tgcagaaatattaat

SEQ ID NO: 1802146 - DNA, 15 bp, Homo sapiens
gcagaaatattaata

SEQ ID NO: 1802147 - DNA, 15 bp, Homo sapiens
cagaaatattaatat

SEQ ID NO: 1802148 - DNA, 15 bp, Homo sapiens
agaaatattaatatg

SEQ ID NO: 1802149 - DNA, 15 bp, Homo sapiens
gaaatattaatatgt

SEQ ID NO: 1802150 - DNA, 15 bp, Homo sapiens
aaatattaatatgtt

SEQ ID NO: 1802151 - DNA, 15 bp, Homo sapiens
aatattaatatgttt

SEQ ID NO: 1802152 - DNA, 15 bp, Homo sapiens
atattaatatgtttg

SEQ ID NO: 1802153 - DNA, 15 bp, Homo sapiens
tattaatatgtttga

SEQ ID NO: 1802154 - DNA, 15 bp, Homo sapiens
attaatatgtttgat

SEQ ID NO: 1802155 - DNA, 15 bp, Homo sapiens
ttaatatgtttgatt

SEQ ID NO: 1802156 - DNA, 15 bp, Homo sapiens
taatatgtttgattg

SEQ ID NO: 1802157 - DNA, 15 bp, Homo sapiens
aatatgtttgattgg

SEQ ID NO: 1802158 - DNA, 15 bp, Homo sapiens
atatgtttgattggg

SEQ ID NO: 1802159 - DNA, 15 bp, Homo sapiens
tatgtttgattggga

SEQ ID NO: 1802160 - DNA, 15 bp, Homo sapiens
atgtttgattgggag

SEQ ID NO: 1802161 - DNA, 15 bp, Homo sapiens
tgtttgattgggagc

SEQ ID NO: 1802162 - DNA, 15 bp, Homo sapiens
gtttgattgggagct

SEQ ID NO: 1802163 - DNA, 15 bp, Homo sapiens
tttgattgggagcta

SEQ ID NO: 1802164 - DNA, 15 bp, Homo sapiens
ttgattgggagctaa

SEQ ID NO: 1802165 - DNA, 15 bp, Homo sapiens
tgattgggagctaac

SEQ ID NO: 1802166 - DNA, 15 bp, Homo sapiens
gattgggagctaacc

SEQ ID NO: 1802167 - DNA, 15 bp, Homo sapiens
attgggagctaaccc

SEQ ID NO: 1802168 - DNA, 15 bp, Homo sapiens
ttgggagctaaccca

SEQ ID NO: 1802169 - DNA, 15 bp, Homo sapiens
tgggagctaacccag

SEQ ID NO: 1802170 - DNA, 15 bp, Homo sapiens
gggagctaacccaga

SEQ ID NO: 1802171 - DNA, 15 bp, Homo sapiens
ggagctaacccagac

SEQ ID NO: 1802172 - DNA, 15 bp, Homo sapiens
gagctaacccagacc

SEQ ID NO: 1802173 - DNA, 15 bp, Homo sapiens
agctaacccagaccc

SEQ ID NO: 1802174 - DNA, 15 bp, Homo sapiens
gctaacccagaccca

SEQ ID NO: 1802175 - DNA, 15 bp, Homo sapiens
ctaacccagacccac

SEQ ID NO: 1802176 - DNA, 15 bp, Homo sapiens
taacccagacccacc

SEQ ID NO: 1802177 - DNA, 15 bp, Homo sapiens
aacccagacccacct

SEQ ID NO: 1802178 - DNA, 15 bp, Homo sapiens
acccagacccacctt

SEQ ID NO: 1802179 - DNA, 15 bp, Homo sapiens
cccagacccacctta

SEQ ID NO: 1802180 - DNA, 15 bp, Homo sapiens
ccagacccaccttag

SEQ ID NO: 1802181 - DNA, 15 bp, Homo sapiens
cagacccaccttagg

SEQ ID NO: 1802182 - DNA, 15 bp, Homo sapiens
agacccaccttaggt

SEQ ID NO: 1802183 - DNA, 15 bp, Homo sapiens
gacccaccttaggtg

SEQ ID NO: 1802184 - DNA, 15 bp, Homo sapiens
acccaccttaggtgt

SEQ ID NO: 1802185 - DNA, 15 bp, Homo sapiens
cccaccttaggtgtt

SEQ ID NO: 1802186 - DNA, 15 bp, Homo sapiens
ccaccttaggtgtta

SEQ ID NO: 1802187 - DNA, 15 bp, Homo sapiens
caccttaggtgttag

SEQ ID NO: 1802188 - DNA, 15 bp, Homo sapiens
accttaggtgttagg

SEQ ID NO: 1802189 - DNA, 15 bp, Homo sapiens
ccttaggtgttaggt

SEQ ID NO: 1802190 - DNA, 15 bp, Homo sapiens
cttaggtgttaggta

SEQ ID NO: 1802191 - DNA, 15 bp, Homo sapiens
ttaggtgttaggtat

SEQ ID NO: 1802192 - DNA, 15 bp, Homo sapiens
taggtgttaggtatt

SEQ ID NO: 1802193 - DNA, 15 bp, Homo sapiens
aggtgttaggtatta

SEQ ID NO: 1802194 - DNA, 15 bp, Homo sapiens
ggtgttaggtattat

SEQ ID NO: 1802195 - DNA, 15 bp, Homo sapiens
gtgttaggtattatt

SEQ ID NO: 1802196 - DNA, 15 bp, Homo sapiens
tgttaggtattattt

SEQ ID NO: 1802197 - DNA, 15 bp, Homo sapiens
gttaggtattatttg

SEQ ID NO: 1802198 - DNA, 15 bp, Homo sapiens
ttaggtattatttgg

SEQ ID NO: 1802199 - DNA, 15 bp, Homo sapiens
taggtattatttggc

SEQ ID NO: 1802200 - DNA, 15 bp, Homo sapiens
aggtattatttggca

SEQ ID NO: 1802201 - DNA, 15 bp, Homo sapiens
ggtattatttggcat

SEQ ID NO: 1802202 - DNA, 15 bp, Homo sapiens
gtattatttggcata

SEQ ID NO: 1802203 - DNA, 15 bp, Homo sapiens
tattatttggcatac

SEQ ID NO: 1802204 - DNA, 15 bp, Homo sapiens
attatttggcatacg

SEQ ID NO: 1802205 - DNA, 15 bp, Homo sapiens
ttatttggcatacgt

SEQ ID NO: 1802206 - DNA, 15 bp, Homo sapiens
tatttggcatacgta

SEQ ID NO: 1802207 - DNA, 15 bp, Homo sapiens
atttggcatacgtac

SEQ ID NO: 1802208 - DNA, 15 bp, Homo sapiens
tttggcatacgtacc

SEQ ID NO: 1802209 - DNA, 15 bp, Homo sapiens
ttggcatacgtacca

SEQ ID NO: 1802210 - DNA, 15 bp, Homo sapiens
tggcatacgtaccat

SEQ ID NO: 1802211 - DNA, 15 bp, Homo sapiens
ggcatacgtaccata

SEQ ID NO: 1802212 - DNA, 15 bp, Homo sapiens
gcatacgtaccatat

SEQ ID NO: 1802213 - DNA, 15 bp, Homo sapiens
catacgtaccatatt

SEQ ID NO: 1802214 - DNA, 15 bp, Homo sapiens
atacgtaccatatta

SEQ ID NO: 1802215 - DNA, 15 bp, Homo sapiens
tacgtaccatattat

SEQ ID NO: 1802216 - DNA, 15 bp, Homo sapiens
acgtaccatattatc

SEQ ID NO: 1802217 - DNA, 15 bp, Homo sapiens
cgtaccatattatca

SEQ ID NO: 1802218 - DNA, 15 bp, Homo sapiens
gtaccatattatcat

SEQ ID NO: 1802219 - DNA, 15 bp, Homo sapiens
taccatattatcatt

SEQ ID NO: 1802220 - DNA, 15 bp, Homo sapiens
accatattatcattc

SEQ ID NO: 1802221 - DNA, 15 bp, Homo sapiens
ccatattatcattct

SEQ ID NO: 1802222 - DNA, 15 bp, Homo sapiens
catattatcattcta

SEQ ID NO: 1802223 - DNA, 15 bp, Homo sapiens
atattatcattctaa

SEQ ID NO: 1802224 - DNA, 15 bp, Homo sapiens
tattatcattctaat

SEQ ID NO: 1802225 - DNA, 15 bp, Homo sapiens
attatcattctaatc

SEQ ID NO: 1802226 - DNA, 15 bp, Homo sapiens
ttatcattctaatca

SEQ ID NO: 1802227 - DNA, 15 bp, Homo sapiens
tatcattctaatcat

SEQ ID NO: 1802228 - DNA, 15 bp, Homo sapiens
atcattctaatcatt

SEQ ID NO: 1802229 - DNA, 15 bp, Homo sapiens
tcattctaatcattc

SEQ ID NO: 1802230 - DNA, 15 bp, Homo sapiens
cattctaatcattct

SEQ ID NO: 1802231 - DNA, 15 bp, Homo sapiens
attctaatcattcta

SEQ ID NO: 1802232 - DNA, 15 bp, Homo sapiens
ttctaatcattctaa

SEQ ID NO: 1802233 - DNA, 15 bp, Homo sapiens
tctaatcattctaaa

SEQ ID NO: 1802234 - DNA, 15 bp, Homo sapiens
ctaatcattctaaac

SEQ ID NO: 1802235 - DNA, 15 bp, Homo sapiens
taatcattctaaact

SEQ ID NO: 1802236 - DNA, 15 bp, Homo sapiens
aatcattctaaactc

SEQ ID NO: 1802237 - DNA, 15 bp, Homo sapiens
atcattctaaactcc

SEQ ID NO: 1802238 - DNA, 15 bp, Homo sapiens
tcattctaaactccc

SEQ ID NO: 1802239 - DNA, 15 bp, Homo sapiens
cattctaaactcccc

SEQ ID NO: 1802240 - DNA, 15 bp, Homo sapiens
attctaaactccccc

SEQ ID NO: 1802241 - DNA, 15 bp, Homo sapiens
ttctaaactccccca

SEQ ID NO: 1802242 - DNA, 15 bp, Homo sapiens
tctaaactcccccaa

SEQ ID NO: 1802243 - DNA, 15 bp, Homo sapiens
ctaaactcccccaaa

SEQ ID NO: 1802244 - DNA, 15 bp, Homo sapiens
taaactcccccaaaa

SEQ ID NO: 1802245 - DNA, 15 bp, Homo sapiens
aaactcccccaaaat

SEQ ID NO: 1802246 - DNA, 15 bp, Homo sapiens
aactcccccaaaatt

SEQ ID NO: 1802247 - DNA, 15 bp, Homo sapiens
actcccccaaaatta

SEQ ID NO: 1802248 - DNA, 15 bp, Homo sapiens
ctcccccaaaattat

SEQ ID NO: 1802249 - DNA, 15 bp, Homo sapiens
tcccccaaaattatg

SEQ ID NO: 1802250 - DNA, 15 bp, Homo sapiens
cccccaaaattatga

SEQ ID NO: 1802251 - DNA, 15 bp, Homo sapiens
ccccaaaattatgaa

SEQ ID NO: 1802252 - DNA, 15 bp, Homo sapiens
cccaaaattatgaaa

SEQ ID NO: 1802253 - DNA, 15 bp, Homo sapiens
ccaaaattatgaaac

SEQ ID NO: 1802254 - DNA, 15 bp, Homo sapiens
caaaattatgaaacc

SEQ ID NO: 1802255 - DNA, 15 bp, Homo sapiens
aaaattatgaaaccc

SEQ ID NO: 1802256 - DNA, 15 bp, Homo sapiens
aaattatgaaaccca

SEQ ID NO: 1802257 - DNA, 15 bp, Homo sapiens
aattatgaaacccat

SEQ ID NO: 1802258 - DNA, 15 bp, Homo sapiens
attatgaaacccatc

SEQ ID NO: 1802259 - DNA, 15 bp, Homo sapiens
ttatgaaacccatct

SEQ ID NO: 1802260 - DNA, 15 bp, Homo sapiens
tatgaaacccatctg

SEQ ID NO: 1802261 - DNA, 15 bp, Homo sapiens
atgaaacccatctgg

SEQ ID NO: 1802262 - DNA, 15 bp, Homo sapiens
tgaaacccatctggc

SEQ ID NO: 1802263 - DNA, 15 bp, Homo sapiens
gaaacccatctggca

SEQ ID NO: 1802264 - DNA, 15 bp, Homo sapiens
aaacccatctggcac

SEQ ID NO: 1802265 - DNA, 15 bp, Homo sapiens
aacccatctggcacc

SEQ ID NO: 1802266 - DNA, 15 bp, Homo sapiens
acccatctggcacca

SEQ ID NO: 1802267 - DNA, 15 bp, Homo sapiens
cccatctggcaccaa

SEQ ID NO: 1802268 - DNA, 15 bp, Homo sapiens
ccatctggcaccaag

SEQ ID NO: 1802269 - DNA, 15 bp, Homo sapiens
catctggcaccaagg

SEQ ID NO: 1802270 - DNA, 15 bp, Homo sapiens
atctggcaccaaggg

SEQ ID NO: 1802271 - DNA, 15 bp, Homo sapiens
tctggcaccaagggt

SEQ ID NO: 1802272 - DNA, 15 bp, Homo sapiens
ctggcaccaagggtt

SEQ ID NO: 1802273 - DNA, 15 bp, Homo sapiens
tggcaccaagggttt

SEQ ID NO: 1802274 - DNA, 15 bp, Homo sapiens
ggcaccaagggtttc

SEQ ID NO: 1802275 - DNA, 15 bp, Homo sapiens
gcaccaagggtttca

SEQ ID NO: 1802276 - DNA, 15 bp, Homo sapiens
caccaagggtttcag

SEQ ID NO: 1802277 - DNA, 15 bp, Homo sapiens
accaagggtttcaga

SEQ ID NO: 1802278 - DNA, 15 bp, Homo sapiens
ccaagggtttcagac

SEQ ID NO: 1802279 - DNA, 15 bp, Homo sapiens
caagggtttcagaca

SEQ ID NO: 1802280 - DNA, 15 bp, Homo sapiens
aagggtttcagacaa

SEQ ID NO: 1802281 - DNA, 15 bp, Homo sapiens
agggtttcagacaag

SEQ ID NO: 1802282 - DNA, 15 bp, Homo sapiens
gggtttcagacaagg

SEQ ID NO: 1802283 - DNA, 15 bp, Homo sapiens
ggtttcagacaaggg

SEQ ID NO: 1802284 - DNA, 15 bp, Homo sapiens
gtttcagacaaggga

SEQ ID NO: 1802285 - DNA, 15 bp, Homo sapiens
tttcagacaagggat

SEQ ID NO: 1802286 - DNA, 15 bp, Homo sapiens
ttcagacaagggatt

SEQ ID NO: 1802287 - DNA, 15 bp, Homo sapiens
tcagacaagggatta

SEQ ID NO: 1802288 - DNA, 15 bp, Homo sapiens
cagacaagggattat

SEQ ID NO: 1802289 - DNA, 15 bp, Homo sapiens
agacaagggattatc

SEQ ID NO: 1802290 - DNA, 15 bp, Homo sapiens
gacaagggattatct

SEQ ID NO: 1802291 - DNA, 15 bp, Homo sapiens
acaagggattatctt

SEQ ID NO: 1802292 - DNA, 15 bp, Homo sapiens
caagggattatctta

SEQ ID NO: 1802293 - DNA, 15 bp, Homo sapiens
aagggattatcttaa

SEQ ID NO: 1802294 - DNA, 15 bp, Homo sapiens
agggattatcttaaa

SEQ ID NO: 1802295 - DNA, 15 bp, Homo sapiens
gggattatcttaaat

SEQ ID NO: 1802296 - DNA, 15 bp, Homo sapiens
ggattatcttaaatt

SEQ ID NO: 1802297 - DNA, 15 bp, Homo sapiens
gattatcttaaattt

SEQ ID NO: 1802298 - DNA, 15 bp, Homo sapiens
attatcttaaattta

SEQ ID NO: 1802299 - DNA, 15 bp, Homo sapiens
ttatcttaaatttat

SEQ ID NO: 1802300 - DNA, 15 bp, Homo sapiens
tatcttaaatttata

SEQ ID NO: 1802301 - DNA, 15 bp, Homo sapiens
atcttaaatttatat

SEQ ID NO: 1802302 - DNA, 15 bp, Homo sapiens
tcttaaatttatatg

SEQ ID NO: 1802303 - DNA, 15 bp, Homo sapiens
cttaaatttatatga

SEQ ID NO: 1802304 - DNA, 15 bp, Homo sapiens
ttaaatttatatgat

SEQ ID NO: 1802305 - DNA, 15 bp, Homo sapiens
taaatttatatgatt

SEQ ID NO: 1802306 - DNA, 15 bp, Homo sapiens
aaatttatatgattt

SEQ ID NO: 1802307 - DNA, 15 bp, Homo sapiens
aatttatatgatttc

SEQ ID NO: 1802308 - DNA, 15 bp, Homo sapiens
atttatatgatttct

SEQ ID NO: 1802309 - DNA, 15 bp, Homo sapiens
tttatatgatttctc

SEQ ID NO: 1802310 - DNA, 15 bp, Homo sapiens
ttatatgatttctca

SEQ ID NO: 1802311 - DNA, 15 bp, Homo sapiens
tatatgatttctcaa

SEQ ID NO: 1802312 - DNA, 15 bp, Homo sapiens
atatgatttctcaaa

SEQ ID NO: 1802313 - DNA, 15 bp, Homo sapiens
tatgatttctcaaaa

SEQ ID NO: 1802314 - DNA, 15 bp, Homo sapiens
atgatttctcaaaaa

SEQ ID NO: 1802315 - DNA, 15 bp, Homo sapiens
tgatttctcaaaaac

SEQ ID NO: 1802316 - DNA, 15 bp, Homo sapiens
gatttctcaaaaaca

SEQ ID NO: 1802317 - DNA, 15 bp, Homo sapiens
atttctcaaaaacat

SEQ ID NO: 1802318 - DNA, 15 bp, Homo sapiens
tttctcaaaaacatg

SEQ ID NO: 1802319 - DNA, 15 bp, Homo sapiens
ttctcaaaaacatgg

SEQ ID NO: 1802320 - DNA, 15 bp, Homo sapiens
tctcaaaaacatggc

SEQ ID NO: 1802321 - DNA, 15 bp, Homo sapiens
ctcaaaaacatggca

SEQ ID NO: 1802322 - DNA, 15 bp, Homo sapiens
tcaaaaacatggcag

SEQ ID NO: 1802323 - DNA, 15 bp, Homo sapiens
caaaaacatggcaga

SEQ ID NO: 1802324 - DNA, 15 bp, Homo sapiens
aaaaacatggcagat

SEQ ID NO: 1802325 - DNA, 15 bp, Homo sapiens
aaaacatggcagatg

SEQ ID NO: 1802326 - DNA, 15 bp, Homo sapiens
aaacatggcagatga

SEQ ID NO: 1802327 - DNA, 15 bp, Homo sapiens
aacatggcagatgaa

SEQ ID NO: 1802328 - DNA, 15 bp, Homo sapiens
acatggcagatgaaa

SEQ ID NO: 1802329 - DNA, 15 bp, Homo sapiens
catggcagatgaaat

SEQ ID NO: 1802330 - DNA, 15 bp, Homo sapiens
atggcagatgaaatt

SEQ ID NO: 1802331 - DNA, 15 bp, Homo sapiens
tggcagatgaaattc

SEQ ID NO: 1802332 - DNA, 15 bp, Homo sapiens
ggcagatgaaattct

SEQ ID NO: 1802333 - DNA, 15 bp, Homo sapiens
gcagatgaaattctt

SEQ ID NO: 1802334 - DNA, 15 bp, Homo sapiens
agatgaaattctttc

SEQ ID NO: 1802335 - DNA, 15 bp, Homo sapiens
gatgaaattctttcc

SEQ ID NO: 1802336 - DNA, 15 bp, Homo sapiens
atgaaattctttcct

SEQ ID NO: 1802337 - DNA, 15 bp, Homo sapiens
tgaaattctttcctt

SEQ ID NO: 1802338 - DNA, 15 bp, Homo sapiens
gaaattctttccttc

SEQ ID NO: 1802339 - DNA, 15 bp, Homo sapiens
aaattctttccttct

SEQ ID NO: 1802340 - DNA, 15 bp, Homo sapiens
aattctttccttctg

SEQ ID NO: 1802341 - DNA, 15 bp, Homo sapiens
attctttccttctgg

SEQ ID NO: 1802342 - DNA, 15 bp, Homo sapiens
ttctttccttctggg

SEQ ID NO: 1802343 - DNA, 15 bp, Homo sapiens
tctttccttctggga

SEQ ID NO: 1802344 - DNA, 15 bp, Homo sapiens
ctttccttctgggac

SEQ ID NO: 1802345 - DNA, 15 bp, Homo sapiens
tttccttctgggaca

SEQ ID NO: 1802346 - DNA, 15 bp, Homo sapiens
ttccttctgggacag

SEQ ID NO: 1802347 - DNA, 15 bp, Homo sapiens
tccttctgggacagt

SEQ ID NO: 1802348 - DNA, 15 bp, Homo sapiens
ccttctgggacagtg

SEQ ID NO: 1802349 - DNA, 15 bp, Homo sapiens
cttctgggacagtga

SEQ ID NO: 1802350 - DNA, 15 bp, Homo sapiens
ttctgggacagtgac

SEQ ID NO: 1802351 - DNA, 15 bp, Homo sapiens
tctgggacagtgaca

SEQ ID NO: 1802352 - DNA, 15 bp, Homo sapiens
ctgggacagtgacat

SEQ ID NO: 1802353 - DNA, 15 bp, Homo sapiens
tgggacagtgacatg

SEQ ID NO: 1802354 - DNA, 15 bp, Homo sapiens
gggacagtgacatgt

SEQ ID NO: 1802355 - DNA, 15 bp, Homo sapiens
ggacagtgacatgtt

SEQ ID NO: 1802356 - DNA, 15 bp, Homo sapiens
gacagtgacatgttt

SEQ ID NO: 1802357 - DNA, 15 bp, Homo sapiens
acagtgacatgtttg

SEQ ID NO: 1802358 - DNA, 15 bp, Homo sapiens
cagtgacatgtttgt

SEQ ID NO: 1802359 - DNA, 15 bp, Homo sapiens
agtgacatgtttgtt

SEQ ID NO: 1802360 - DNA, 15 bp, Homo sapiens
gtgacatgtttgttc

SEQ ID NO: 1802361 - DNA, 15 bp, Homo sapiens
tgacatgtttgttcc

SEQ ID NO: 1802362 - DNA, 15 bp, Homo sapiens
gacatgtttgttcct

SEQ ID NO: 1802363 - DNA, 15 bp, Homo sapiens
acatgtttgttcctg

SEQ ID NO: 1802364 - DNA, 15 bp, Homo sapiens
catgtttgttcctga

SEQ ID NO: 1802365 - DNA, 15 bp, Homo sapiens
atgtttgttcctgaa

SEQ ID NO: 1802366 - DNA, 15 bp, Homo sapiens
tgtttgttcctgaaa

SEQ ID NO: 1802367 - DNA, 15 bp, Homo sapiens
gtttgttcctgaaag

SEQ ID NO: 1802368 - DNA, 15 bp, Homo sapiens
tttgttcctgaaaga

SEQ ID NO: 1802369 - DNA, 15 bp, Homo sapiens
ttgttcctgaaagaa

SEQ ID NO: 1802370 - DNA, 15 bp, Homo sapiens
tgttcctgaaagaag

SEQ ID NO: 1802371 - DNA, 15 bp, Homo sapiens
gttcctgaaagaaga

SEQ ID NO: 1802372 - DNA, 15 bp, Homo sapiens
ttcctgaaagaagaa

SEQ ID NO: 1802373 - DNA, 15 bp, Homo sapiens
tcctgaaagaagaaa

SEQ ID NO: 1802374 - DNA, 15 bp, Homo sapiens
cctgaaagaagaaag

SEQ ID NO: 1802375 - DNA, 15 bp, Homo sapiens
ctgaaagaagaaagg

SEQ ID NO: 1802376 - DNA, 15 bp, Homo sapiens
tgaaagaagaaaggc

SEQ ID NO: 1802377 - DNA, 15 bp, Homo sapiens
gaaagaagaaaggca

SEQ ID NO: 1802378 - DNA, 15 bp, Homo sapiens
aaagaagaaaggcaa

SEQ ID NO: 1802379 - DNA, 15 bp, Homo sapiens
aagaagaaaggcaaa

SEQ ID NO: 1802380 - DNA, 15 bp, Homo sapiens
agaagaaaggcaaag

SEQ ID NO: 1802381 - DNA, 15 bp, Homo sapiens
gaagaaaggcaaagt

SEQ ID NO: 1802382 - DNA, 15 bp, Homo sapiens
aagaaaggcaaagtg

SEQ ID NO: 1802383 - DNA, 15 bp, Homo sapiens
agaaaggcaaagtgc

SEQ ID NO: 1802384 - DNA, 15 bp, Homo sapiens
gaaaggcaaagtgcg

SEQ ID NO: 1802385 - DNA, 15 bp, Homo sapiens
aaaggcaaagtgcgc

SEQ ID NO: 1802386 - DNA, 15 bp, Homo sapiens
aaggcaaagtgcgca

SEQ ID NO: 1802387 - DNA, 15 bp, Homo sapiens
aggcaaagtgcgcag

SEQ ID NO: 1802388 - DNA, 15 bp, Homo sapiens
ggcaaagtgcgcaga

SEQ ID NO: 1802389 - DNA, 15 bp, Homo sapiens
gcaaagtgcgcagag

SEQ ID NO: 1802390 - DNA, 15 bp, Homo sapiens
caaagtgcgcagagc

SEQ ID NO: 1802391 - DNA, 15 bp, Homo sapiens
aaagtgcgcagagca

SEQ ID NO: 1802392 - DNA, 15 bp, Homo sapiens
aagtgcgcagagcag

SEQ ID NO: 1802393 - DNA, 15 bp, Homo sapiens
agtgcgcagagcagg

SEQ ID NO: 1802394 - DNA, 15 bp, Homo sapiens
gtgcgcagagcagga

SEQ ID NO: 1802395 - DNA, 15 bp, Homo sapiens
tgcgcagagcaggaa

SEQ ID NO: 1802396 - DNA, 15 bp, Homo sapiens
gcgcagagcaggaaa

SEQ ID NO: 1802397 - DNA, 15 bp, Homo sapiens
cgcagagcaggaaaa

SEQ ID NO: 1802398 - DNA, 15 bp, Homo sapiens
gcagagcaggaaaag

SEQ ID NO: 1802399 - DNA, 15 bp, Homo sapiens
cagagcaggaaaagc

SEQ ID NO: 1802400 - DNA, 15 bp, Homo sapiens
agagcaggaaaagca

SEQ ID NO: 1802401 - DNA, 15 bp, Homo sapiens
gagcaggaaaagcag

SEQ ID NO: 1802402 - DNA, 15 bp, Homo sapiens
agcaggaaaagcagc

SEQ ID NO: 1802403 - DNA, 15 bp, Homo sapiens
gcaggaaaagcagca

SEQ ID NO: 1802404 - DNA, 15 bp, Homo sapiens
caggaaaagcagcaa

SEQ ID NO: 1802405 - DNA, 15 bp, Homo sapiens
aggaaaagcagcaag

SEQ ID NO: 1802406 - DNA, 15 bp, Homo sapiens
ggaaaagcagcaagc

SEQ ID NO: 1802407 - DNA, 15 bp, Homo sapiens
gaaaagcagcaagca

SEQ ID NO: 1802408 - DNA, 15 bp, Homo sapiens
aaaagcagcaagcat

SEQ ID NO: 1802409 - DNA, 15 bp, Homo sapiens
aaagcagcaagcata

SEQ ID NO: 1802410 - DNA, 15 bp, Homo sapiens
aagcagcaagcatat

SEQ ID NO: 1802411 - DNA, 15 bp, Homo sapiens
agcagcaagcatatc

SEQ ID NO: 1802412 - DNA, 15 bp, Homo sapiens
gcagcaagcatatct

SEQ ID NO: 1802413 - DNA, 15 bp, Homo sapiens
cagcaagcatatctc

SEQ ID NO: 1802414 - DNA, 15 bp, Homo sapiens
agcaagcatatctca

SEQ ID NO: 1802415 - DNA, 15 bp, Homo sapiens
gcaagcatatctcag

SEQ ID NO: 1802416 - DNA, 15 bp, Homo sapiens
caagcatatctcagt

SEQ ID NO: 1802417 - DNA, 15 bp, Homo sapiens
aagcatatctcagta

SEQ ID NO: 1802418 - DNA, 15 bp, Homo sapiens
agcatatctcagtag

SEQ ID NO: 1802419 - DNA, 15 bp, Homo sapiens
gcatatctcagtagg

SEQ ID NO: 1802420 - DNA, 15 bp, Homo sapiens
catatctcagtaggc

SEQ ID NO: 1802421 - DNA, 15 bp, Homo sapiens
atatctcagtaggct

SEQ ID NO: 1802422 - DNA, 15 bp, Homo sapiens
tatctcagtaggctg

SEQ ID NO: 1802423 - DNA, 15 bp, Homo sapiens
atctcagtaggctgt

SEQ ID NO: 1802424 - DNA, 15 bp, Homo sapiens
tctcagtaggctgta

SEQ ID NO: 1802425 - DNA, 15 bp, Homo sapiens
ctcagtaggctgtat

SEQ ID NO: 1802426 - DNA, 15 bp, Homo sapiens
tcagtaggctgtatt

SEQ ID NO: 1802427 - DNA, 15 bp, Homo sapiens
cagtaggctgtattt

SEQ ID NO: 1802428 - DNA, 15 bp, Homo sapiens
agtaggctgtattta

SEQ ID NO: 1802429 - DNA, 15 bp, Homo sapiens
gtaggctgtatttat

SEQ ID NO: 1802430 - DNA, 15 bp, Homo sapiens
taggctgtatttata

SEQ ID NO: 1802431 - DNA, 15 bp, Homo sapiens
aggctgtatttatat

SEQ ID NO: 1802432 - DNA, 15 bp, Homo sapiens
ggctgtatttatatt

SEQ ID NO: 1802433 - DNA, 15 bp, Homo sapiens
gctgtatttatattg

SEQ ID NO: 1802434 - DNA, 15 bp, Homo sapiens
ctgtatttatattgg

SEQ ID NO: 1802435 - DNA, 15 bp, Homo sapiens
tgtatttatattggg

SEQ ID NO: 1802436 - DNA, 15 bp, Homo sapiens
gtatttatattgggc

SEQ ID NO: 1802437 - DNA, 15 bp, Homo sapiens
tatttatattgggcg

SEQ ID NO: 1802438 - DNA, 15 bp, Homo sapiens
atttatattgggcgg

SEQ ID NO: 1802439 - DNA, 15 bp, Homo sapiens
tttatattgggcggg

SEQ ID NO: 1802440 - DNA, 15 bp, Homo sapiens
ttatattgggcgggg

SEQ ID NO: 1802441 - DNA, 15 bp, Homo sapiens
tatattgggcgggga

SEQ ID NO: 1802442 - DNA, 15 bp, Homo sapiens
atattgggcggggat

SEQ ID NO: 1802443 - DNA, 15 bp, Homo sapiens
tattgggcggggatc

SEQ ID NO: 1802444 - DNA, 15 bp, Homo sapiens
attgggcggggatct

SEQ ID NO: 1802445 - DNA, 15 bp, Homo sapiens
ttgggcggggatctt

SEQ ID NO: 1802446 - DNA, 15 bp, Homo sapiens
tgggcggggatctta

SEQ ID NO: 1802447 - DNA, 15 bp, Homo sapiens
gggcggggatcttaa

SEQ ID NO: 1802448 - DNA, 15 bp, Homo sapiens
ggcggggatcttaaa

SEQ ID NO: 1802449 - DNA, 15 bp, Homo sapiens
gcggggatcttaaat

SEQ ID NO: 1802450 - DNA, 15 bp, Homo sapiens
cggggatcttaaatg

SEQ ID NO: 1802451 - DNA, 15 bp, Homo sapiens
ggggatcttaaatga

SEQ ID NO: 1802452 - DNA, 15 bp, Homo sapiens
gggatcttaaatgaa

SEQ ID NO: 1802453 - DNA, 15 bp, Homo sapiens
ggatcttaaatgaaa

SEQ ID NO: 1802454 - DNA, 15 bp, Homo sapiens
gatcttaaatgaaat

SEQ ID NO: 1802455 - DNA, 15 bp, Homo sapiens
atcttaaatgaaatg

SEQ ID NO: 1802456 - DNA, 15 bp, Homo sapiens
tcttaaatgaaatgc

SEQ ID NO: 1802457 - DNA, 15 bp, Homo sapiens
cttaaatgaaatgca

SEQ ID NO: 1802458 - DNA, 15 bp, Homo sapiens
ttaaatgaaatgcag

SEQ ID NO: 1802459 - DNA, 15 bp, Homo sapiens
taaatgaaatgcagt

SEQ ID NO: 1802460 - DNA, 15 bp, Homo sapiens
aaatgaaatgcagtc

SEQ ID NO: 1802461 - DNA, 15 bp, Homo sapiens
aatgaaatgcagtct

SEQ ID NO: 1802462 - DNA, 15 bp, Homo sapiens
atgaaatgcagtctc

SEQ ID NO: 1802463 - DNA, 15 bp, Homo sapiens
tgaaatgcagtctct

SEQ ID NO: 1802464 - DNA, 15 bp, Homo sapiens
gaaatgcagtctctt

SEQ ID NO: 1802465 - DNA, 15 bp, Homo sapiens
aaatgcagtctctta

SEQ ID NO: 1802466 - DNA, 15 bp, Homo sapiens
aatgcagtctcttag

SEQ ID NO: 1802467 - DNA, 15 bp, Homo sapiens
atgcagtctcttagg

SEQ ID NO: 1802468 - DNA, 15 bp, Homo sapiens
tgcagtctcttaggt

SEQ ID NO: 1802469 - DNA, 15 bp, Homo sapiens
gcagtctcttaggtc

SEQ ID NO: 1802470 - DNA, 15 bp, Homo sapiens
cagtctcttaggtca

SEQ ID NO: 1802471 - DNA, 15 bp, Homo sapiens
agtctcttaggtcac

SEQ ID NO: 1802472 - DNA, 15 bp, Homo sapiens
gtctcttaggtcacg

SEQ ID NO: 1802473 - DNA, 15 bp, Homo sapiens
tctcttaggtcacgt

SEQ ID NO: 1802474 - DNA, 15 bp, Homo sapiens
ctcttaggtcacgtc

SEQ ID NO: 1802475 - DNA, 15 bp, Homo sapiens
tcttaggtcacgtca

SEQ ID NO: 1802476 - DNA, 15 bp, Homo sapiens
cttaggtcacgtcaa

SEQ ID NO: 1802477 - DNA, 15 bp, Homo sapiens
ttaggtcacgtcaaa

SEQ ID NO: 1802478 - DNA, 15 bp, Homo sapiens
taggtcacgtcaaaa

SEQ ID NO: 1802479 - DNA, 15 bp, Homo sapiens
aggtcacgtcaaaat

SEQ ID NO: 1802480 - DNA, 15 bp, Homo sapiens
ggtcacgtcaaaatc

SEQ ID NO: 1802481 - DNA, 15 bp, Homo sapiens
gtcacgtcaaaatca

SEQ ID NO: 1802482 - DNA, 15 bp, Homo sapiens
tcacgtcaaaatcaa

SEQ ID NO: 1802483 - DNA, 15 bp, Homo sapiens
cacgtcaaaatcaag

SEQ ID NO: 1802484 - DNA, 15 bp, Homo sapiens
acgtcaaaatcaagc

SEQ ID NO: 1802485 - DNA, 15 bp, Homo sapiens
cgtcaaaatcaagca

SEQ ID NO: 1802486 - DNA, 15 bp, Homo sapiens
gtcaaaatcaagcag

SEQ ID NO: 1802487 - DNA, 15 bp, Homo sapiens
tcaaaatcaagcagc

SEQ ID NO: 1802488 - DNA, 15 bp, Homo sapiens
caaaatcaagcagcc

SEQ ID NO: 1802489 - DNA, 15 bp, Homo sapiens
aaaatcaagcagcct

SEQ ID NO: 1802490 - DNA, 15 bp, Homo sapiens
aaatcaagcagccta

SEQ ID NO: 1802491 - DNA, 15 bp, Homo sapiens
aatcaagcagcctaa

SEQ ID NO: 1802492 - DNA, 15 bp, Homo sapiens
atcaagcagcctaaa

SEQ ID NO: 1802493 - DNA, 15 bp, Homo sapiens
tcaagcagcctaaat

SEQ ID NO: 1802494 - DNA, 15 bp, Homo sapiens
caagcagcctaaatg

SEQ ID NO: 1802495 - DNA, 15 bp, Homo sapiens
aagcagcctaaatga

SEQ ID NO: 1802496 - DNA, 15 bp, Homo sapiens
agcagcctaaatgac

SEQ ID NO: 1802497 - DNA, 15 bp, Homo sapiens
gcagcctaaatgaca

SEQ ID NO: 1802498 - DNA, 15 bp, Homo sapiens
cagcctaaatgacac

SEQ ID NO: 1802499 - DNA, 15 bp, Homo sapiens
agcctaaatgacact

SEQ ID NO: 1802500 - DNA, 15 bp, Homo sapiens
gcctaaatgacacta

SEQ ID NO: 1802501 - DNA, 15 bp, Homo sapiens
cctaaatgacactaa

SEQ ID NO: 1802502 - DNA, 15 bp, Homo sapiens
ctaaatgacactaaa

SEQ ID NO: 1802503 - DNA, 15 bp, Homo sapiens
taaatgacactaaaa

SEQ ID NO: 1802504 - DNA, 15 bp, Homo sapiens
aaatgacactaaaaa

SEQ ID NO: 1802505 - DNA, 15 bp, Homo sapiens
aatgacactaaaaaa

SEQ ID NO: 1802506 - DNA, 15 bp, Homo sapiens
atgacactaaaaaat

SEQ ID NO: 1802507 - DNA, 15 bp, Homo sapiens
tgacactaaaaaatt

SEQ ID NO: 1802508 - DNA, 15 bp, Homo sapiens
gacactaaaaaattt

SEQ ID NO: 1802509 - DNA, 15 bp, Homo sapiens
acactaaaaaatttt

SEQ ID NO: 1802510 - DNA, 15 bp, Homo sapiens
cactaaaaaattttg

SEQ ID NO: 1802511 - DNA, 15 bp, Homo sapiens
actaaaaaattttgt

SEQ ID NO: 1802512 - DNA, 15 bp, Homo sapiens
ctaaaaaattttgtc

SEQ ID NO: 1802513 - DNA, 15 bp, Homo sapiens
taaaaaattttgtct

SEQ ID NO: 1802514 - DNA, 15 bp, Homo sapiens
aaaaaattttgtctg

SEQ ID NO: 1802515 - DNA, 15 bp, Homo sapiens
aaaaattttgtctgc

SEQ ID NO: 1802516 - DNA, 15 bp, Homo sapiens
aaaattttgtctgca

SEQ ID NO: 1802517 - DNA, 15 bp, Homo sapiens
aaattttgtctgcat

SEQ ID NO: 1802518 - DNA, 15 bp, Homo sapiens
aattttgtctgcatg

SEQ ID NO: 1802519 - DNA, 15 bp, Homo sapiens
attttgtctgcatgg

SEQ ID NO: 1802520 - DNA, 15 bp, Homo sapiens
ttttgtctgcatggc

SEQ ID NO: 1802521 - DNA, 15 bp, Homo sapiens
tttgtctgcatggca

SEQ ID NO: 1802522 - DNA, 15 bp, Homo sapiens
ttgtctgcatggcag

SEQ ID NO: 1802523 - DNA, 15 bp, Homo sapiens
tgtctgcatggcaga

SEQ ID NO: 1802524 - DNA, 15 bp, Homo sapiens
gtctgcatggcagag

SEQ ID NO: 1802525 - DNA, 15 bp, Homo sapiens
tctgcatggcagaga

SEQ ID NO: 1802526 - DNA, 15 bp, Homo sapiens
ctgcatggcagagaa

SEQ ID NO: 1802527 - DNA, 15 bp, Homo sapiens
tgcatggcagagaat

SEQ ID NO: 1802528 - DNA, 15 bp, Homo sapiens
gcatggcagagaatt

SEQ ID NO: 1802529 - DNA, 15 bp, Homo sapiens
catggcagagaattg

SEQ ID NO: 1802530 - DNA, 15 bp, Homo sapiens
atggcagagaattgt

SEQ ID NO: 1802531 - DNA, 15 bp, Homo sapiens
tggcagagaattgtt

SEQ ID NO: 1802532 - DNA, 15 bp, Homo sapiens
ggcagagaattgttc

SEQ ID NO: 1802533 - DNA, 15 bp, Homo sapiens
gcagagaattgttca

SEQ ID NO: 1802534 - DNA, 15 bp, Homo sapiens
cagagaattgttcac

SEQ ID NO: 1802535 - DNA, 15 bp, Homo sapiens
agagaattgttcact

SEQ ID NO: 1802536 - DNA, 15 bp, Homo sapiens
gagaattgttcactt

SEQ ID NO: 1802537 - DNA, 15 bp, Homo sapiens
agaattgttcacttc

SEQ ID NO: 1802538 - DNA, 15 bp, Homo sapiens
gaattgttcacttct

SEQ ID NO: 1802539 - DNA, 15 bp, Homo sapiens
aattgttcacttcta

SEQ ID NO: 1802540 - DNA, 15 bp, Homo sapiens
attgttcacttctag

SEQ ID NO: 1802541 - DNA, 15 bp, Homo sapiens
ttgttcacttctaga

SEQ ID NO: 1802542 - DNA, 15 bp, Homo sapiens
tgttcacttctagag

SEQ ID NO: 1802543 - DNA, 15 bp, Homo sapiens
gttcacttctagaga

SEQ ID NO: 1802544 - DNA, 15 bp, Homo sapiens
ttcacttctagagat

SEQ ID NO: 1802545 - DNA, 15 bp, Homo sapiens
tcacttctagagatg

SEQ ID NO: 1802546 - DNA, 15 bp, Homo sapiens
cacttctagagatga

SEQ ID NO: 1802547 - DNA, 15 bp, Homo sapiens
acttctagagatgaa

SEQ ID NO: 1802548 - DNA, 15 bp, Homo sapiens
cttctagagatgaat

SEQ ID NO: 1802549 - DNA, 15 bp, Homo sapiens
ttctagagatgaatt

SEQ ID NO: 1802550 - DNA, 15 bp, Homo sapiens
tctagagatgaattt

SEQ ID NO: 1802551 - DNA, 15 bp, Homo sapiens
ctagagatgaattta

SEQ ID NO: 1802552 - DNA, 15 bp, Homo sapiens
tagagatgaatttag

SEQ ID NO: 1802553 - DNA, 15 bp, Homo sapiens
agagatgaatttagt

SEQ ID NO: 1802554 - DNA, 15 bp, Homo sapiens
gagatgaatttagta

SEQ ID NO: 1802555 - DNA, 15 bp, Homo sapiens
agatgaatttagtat

SEQ ID NO: 1802556 - DNA, 15 bp, Homo sapiens
gatgaatttagtatt

SEQ ID NO: 1802557 - DNA, 15 bp, Homo sapiens
atgaatttagtattc

SEQ ID NO: 1802558 - DNA, 15 bp, Homo sapiens
tgaatttagtattcc

SEQ ID NO: 1802559 - DNA, 15 bp, Homo sapiens
gaatttagtattcca

SEQ ID NO: 1802560 - DNA, 15 bp, Homo sapiens
aatttagtattccaa

SEQ ID NO: 1802561 - DNA, 15 bp, Homo sapiens
atttagtattccaat

SEQ ID NO: 1802562 - DNA, 15 bp, Homo sapiens
tttagtattccaatg

SEQ ID NO: 1802563 - DNA, 15 bp, Homo sapiens
ttagtattccaatga

SEQ ID NO: 1802564 - DNA, 15 bp, Homo sapiens
tagtattccaatgaa

SEQ ID NO: 1802565 - DNA, 15 bp, Homo sapiens
agtattccaatgaat

SEQ ID NO: 1802566 - DNA, 15 bp, Homo sapiens
gtattccaatgaata

SEQ ID NO: 1802567 - DNA, 15 bp, Homo sapiens
tattccaatgaataa

SEQ ID NO: 1802568 - DNA, 15 bp, Homo sapiens
attccaatgaataaa

SEQ ID NO: 1802569 - DNA, 15 bp, Homo sapiens
ttccaatgaataaat

SEQ ID NO: 1802570 - DNA, 15 bp, Homo sapiens
tccaatgaataaata

SEQ ID NO: 1802571 - DNA, 15 bp, Homo sapiens
ccaatgaataaatac

SEQ ID NO: 1802572 - DNA, 15 bp, Homo sapiens
caatgaataaatact

SEQ ID NO: 1802573 - DNA, 15 bp, Homo sapiens
aatgaataaatactc

SEQ ID NO: 1802574 - DNA, 15 bp, Homo sapiens
atgaataaatactca

SEQ ID NO: 1802575 - DNA, 15 bp, Homo sapiens
tgaataaatactcac

SEQ ID NO: 1802576 - DNA, 15 bp, Homo sapiens
gaataaatactcact

SEQ ID NO: 1802577 - DNA, 15 bp, Homo sapiens
aataaatactcacta

SEQ ID NO: 1802578 - DNA, 15 bp, Homo sapiens
ataaatactcactat

SEQ ID NO: 1802579 - DNA, 15 bp, Homo sapiens
taaatactcactata

SEQ ID NO: 1802580 - DNA, 15 bp, Homo sapiens
aaatactcactataa

SEQ ID NO: 1802581 - DNA, 15 bp, Homo sapiens
aatactcactataat

SEQ ID NO: 1802582 - DNA, 15 bp, Homo sapiens
atactcactataata

SEQ ID NO: 1802583 - DNA, 15 bp, Homo sapiens
tactcactataataa

SEQ ID NO: 1802584 - DNA, 15 bp, Homo sapiens
actcactataataaa

SEQ ID NO: 1802585 - DNA, 15 bp, Homo sapiens
ctcactataataaaa

SEQ ID NO: 1802586 - DNA, 15 bp, Homo sapiens
tcactataataaaag

SEQ ID NO: 1802587 - DNA, 15 bp, Homo sapiens
cactataataaaagg

SEQ ID NO: 1802588 - DNA, 15 bp, Homo sapiens
actataataaaaggg

SEQ ID NO: 1802589 - DNA, 15 bp, Homo sapiens
ctataataaaagggg

SEQ ID NO: 1802590 - DNA, 15 bp, Homo sapiens
tataataaaaggggc

SEQ ID NO: 1802591 - DNA, 15 bp, Homo sapiens
ataataaaaggggca

SEQ ID NO: 1802592 - DNA, 15 bp, Homo sapiens
taataaaaggggcaa

SEQ ID NO: 1802593 - DNA, 15 bp, Homo sapiens
aataaaaggggcaaa

SEQ ID NO: 1802594 - DNA, 15 bp, Homo sapiens
ataaaaggggcaaat

SEQ ID NO: 1802595 - DNA, 15 bp, Homo sapiens
taaaaggggcaaatt

SEQ ID NO: 1802596 - DNA, 15 bp, Homo sapiens
aaaaggggcaaattc

SEQ ID NO: 1802597 - DNA, 15 bp, Homo sapiens
aaaggggcaaattca

SEQ ID NO: 1802598 - DNA, 15 bp, Homo sapiens
aaggggcaaattcaa

SEQ ID NO: 1802599 - DNA, 15 bp, Homo sapiens
aggggcaaattcaaa

SEQ ID NO: 1802600 - DNA, 15 bp, Homo sapiens
ggggcaaattcaaat

SEQ ID NO: 1802601 - DNA, 15 bp, Homo sapiens
gggcaaattcaaatt

SEQ ID NO: 1802602 - DNA, 15 bp, Homo sapiens
ggcaaattcaaattc

SEQ ID NO: 1802603 - DNA, 15 bp, Homo sapiens
gcaaattcaaattca

SEQ ID NO: 1802604 - DNA, 15 bp, Homo sapiens
caaattcaaattcat

SEQ ID NO: 1802605 - DNA, 15 bp, Homo sapiens
aaattcaaattcata

SEQ ID NO: 1802606 - DNA, 15 bp, Homo sapiens
aattcaaattcatat

SEQ ID NO: 1802607 - DNA, 15 bp, Homo sapiens
attcaaattcatata

SEQ ID NO: 1802608 - DNA, 15 bp, Homo sapiens
ttcaaattcatatat

SEQ ID NO: 1802609 - DNA, 15 bp, Homo sapiens
tcaaattcatatatt

SEQ ID NO: 1802610 - DNA, 15 bp, Homo sapiens
caaattcatatattt

SEQ ID NO: 1802611 - DNA, 15 bp, Homo sapiens
aaattcatatattta

SEQ ID NO: 1802612 - DNA, 15 bp, Homo sapiens
aattcatatatttac

SEQ ID NO: 1802613 - DNA, 15 bp, Homo sapiens
attcatatatttact

SEQ ID NO: 1802614 - DNA, 15 bp, Homo sapiens
ttcatatatttactt

SEQ ID NO: 1802615 - DNA, 15 bp, Homo sapiens
tcatatatttacttt

SEQ ID NO: 1802616 - DNA, 15 bp, Homo sapiens
catatatttactttt

SEQ ID NO: 1802617 - DNA, 15 bp, Homo sapiens
atatatttacttttt

SEQ ID NO: 1802618 - DNA, 15 bp, Homo sapiens
tatatttactttttt

SEQ ID NO: 1802619 - DNA, 15 bp, Homo sapiens
atatttacttttttt

SEQ ID NO: 1802620 - DNA, 15 bp, Homo sapiens
tatttactttttttt

SEQ ID NO: 1802621 - DNA, 15 bp, Homo sapiens
atttacttttttttt

SEQ ID NO: 1802622 - DNA, 15 bp, Homo sapiens
tggagtctcactctt

SEQ ID NO: 1802623 - DNA, 15 bp, Homo sapiens
ggagtctcactcttg

SEQ ID NO: 1802624 - DNA, 15 bp, Homo sapiens
gagtctcactcttgt

SEQ ID NO: 1802625 - DNA, 15 bp, Homo sapiens
agtctcactcttgtt

SEQ ID NO: 1802626 - DNA, 15 bp, Homo sapiens
tctcactcttgttgc

SEQ ID NO: 1802627 - DNA, 15 bp, Homo sapiens
ctcactcttgttgcc

SEQ ID NO: 1802628 - DNA, 15 bp, Homo sapiens
tgcccaggctggaat

SEQ ID NO: 1802629 - DNA, 15 bp, Homo sapiens
caggctggaatgcaa

SEQ ID NO: 1802630 - DNA, 15 bp, Homo sapiens
aggctggaatgcaat

SEQ ID NO: 1802631 - DNA, 15 bp, Homo sapiens
gctggaatgcaatgg

SEQ ID NO: 1802632 - DNA, 15 bp, Homo sapiens
gcaacctctacctcc

SEQ ID NO: 1802633 - DNA, 15 bp, Homo sapiens
caacctctacctccc

SEQ ID NO: 1802634 - DNA, 15 bp, Homo sapiens
aacctctacctcccg

SEQ ID NO: 1802635 - DNA, 15 bp, Homo sapiens
acctctacctcccgg

SEQ ID NO: 1802636 - DNA, 15 bp, Homo sapiens
cctctacctcccggg

SEQ ID NO: 1802637 - DNA, 15 bp, Homo sapiens
ctctacctcccgggc

SEQ ID NO: 1802638 - DNA, 15 bp, Homo sapiens
tctacctcccgggct

SEQ ID NO: 1802639 - DNA, 15 bp, Homo sapiens
ctacctcccgggctc

SEQ ID NO: 1802640 - DNA, 15 bp, Homo sapiens
tacctcccgggctca

SEQ ID NO: 1802641 - DNA, 15 bp, Homo sapiens
ctcccgggctcaggc

SEQ ID NO: 1802642 - DNA, 15 bp, Homo sapiens
tcccgggctcaggcg

SEQ ID NO: 1802643 - DNA, 15 bp, Homo sapiens
cccgggctcaggcga

SEQ ID NO: 1802644 - DNA, 15 bp, Homo sapiens
ccgggctcaggcgat

SEQ ID NO: 1802645 - DNA, 15 bp, Homo sapiens
cgggctcaggcgatt

SEQ ID NO: 1802646 - DNA, 15 bp, Homo sapiens
gggctcaggcgattc

SEQ ID NO: 1802647 - DNA, 15 bp, Homo sapiens
ggctcaggcgattct

SEQ ID NO: 1802648 - DNA, 15 bp, Homo sapiens
gctcaggcgattctc

SEQ ID NO: 1802649 - DNA, 15 bp, Homo sapiens
ctcaggcgattctcc

SEQ ID NO: 1802650 - DNA, 15 bp, Homo sapiens
aggcgattctcctgc

SEQ ID NO: 1802651 - DNA, 15 bp, Homo sapiens
ggcgattctcctgcc

SEQ ID NO: 1802652 - DNA, 15 bp, Homo sapiens
cagtagctgggattg

SEQ ID NO: 1802653 - DNA, 15 bp, Homo sapiens
agctgggattgcagg

SEQ ID NO: 1802654 - DNA, 15 bp, Homo sapiens
gctgggattgcagga

SEQ ID NO: 1802655 - DNA, 15 bp, Homo sapiens
ctgggattgcaggag

SEQ ID NO: 1802656 - DNA, 15 bp, Homo sapiens
tgggattgcaggagc

SEQ ID NO: 1802657 - DNA, 15 bp, Homo sapiens
gggattgcaggagca

SEQ ID NO: 1802658 - DNA, 15 bp, Homo sapiens
ggattgcaggagcac

SEQ ID NO: 1802659 - DNA, 15 bp, Homo sapiens
gattgcaggagcaca

SEQ ID NO: 1802660 - DNA, 15 bp, Homo sapiens
attgcaggagcacac

SEQ ID NO: 1802661 - DNA, 15 bp, Homo sapiens
ttgcaggagcacacc

SEQ ID NO: 1802662 - DNA, 15 bp, Homo sapiens
tgcaggagcacacca

SEQ ID NO: 1802663 - DNA, 15 bp, Homo sapiens
gcaggagcacaccac

SEQ ID NO: 1802664 - DNA, 15 bp, Homo sapiens
caggagcacaccacc

SEQ ID NO: 1802665 - DNA, 15 bp, Homo sapiens
aggagcacaccacca

SEQ ID NO: 1802666 - DNA, 15 bp, Homo sapiens
ggagcacaccaccac

SEQ ID NO: 1802667 - DNA, 15 bp, Homo sapiens
gagcacaccaccacg

SEQ ID NO: 1802668 - DNA, 15 bp, Homo sapiens
agcacaccaccacgc

SEQ ID NO: 1802669 - DNA, 15 bp, Homo sapiens
acaccaccacgccgg

SEQ ID NO: 1802670 - DNA, 15 bp, Homo sapiens
caccaccacgccggc

SEQ ID NO: 1802671 - DNA, 15 bp, Homo sapiens
accaccacgccggct

SEQ ID NO: 1802672 - DNA, 15 bp, Homo sapiens
ccaccacgccggcta

SEQ ID NO: 1802673 - DNA, 15 bp, Homo sapiens
caccacgccggctac

SEQ ID NO: 1802674 - DNA, 15 bp, Homo sapiens
accacgccggctact

SEQ ID NO: 1802675 - DNA, 15 bp, Homo sapiens
ccacgccggctactt

SEQ ID NO: 1802676 - DNA, 15 bp, Homo sapiens
cacgccggctacttt

SEQ ID NO: 1802677 - DNA, 15 bp, Homo sapiens
acgccggctactttt

SEQ ID NO: 1802678 - DNA, 15 bp, Homo sapiens
cgccggctacttttt

SEQ ID NO: 1802679 - DNA, 15 bp, Homo sapiens
gccggctactttttg

SEQ ID NO: 1802680 - DNA, 15 bp, Homo sapiens
ccggctactttttgt

SEQ ID NO: 1802681 - DNA, 15 bp, Homo sapiens
cggctactttttgta

SEQ ID NO: 1802682 - DNA, 15 bp, Homo sapiens
ggctactttttgtat

SEQ ID NO: 1802683 - DNA, 15 bp, Homo sapiens
gctactttttgtatt

SEQ ID NO: 1802684 - DNA, 15 bp, Homo sapiens
ctactttttgtattt

SEQ ID NO: 1802685 - DNA, 15 bp, Homo sapiens
tactttttgtatttt

SEQ ID NO: 1802686 - DNA, 15 bp, Homo sapiens
actttttgtattttc

SEQ ID NO: 1802687 - DNA, 15 bp, Homo sapiens
ctttttgtattttca

SEQ ID NO: 1802688 - DNA, 15 bp, Homo sapiens
attttcagtagagat

SEQ ID NO: 1802689 - DNA, 15 bp, Homo sapiens
ttttcagtagagatg

SEQ ID NO: 1802690 - DNA, 15 bp, Homo sapiens
tttcagtagagatgg

SEQ ID NO: 1802691 - DNA, 15 bp, Homo sapiens
ttcagtagagatggg

SEQ ID NO: 1802692 - DNA, 15 bp, Homo sapiens
tcagtagagatgggg

SEQ ID NO: 1802693 - DNA, 15 bp, Homo sapiens
cagtagagatggggt

SEQ ID NO: 1802694 - DNA, 15 bp, Homo sapiens
gagatggggttttgt

SEQ ID NO: 1802695 - DNA, 15 bp, Homo sapiens
agatggggttttgtc

SEQ ID NO: 1802696 - DNA, 15 bp, Homo sapiens
gatggggttttgtca

SEQ ID NO: 1802697 - DNA, 15 bp, Homo sapiens
atggggttttgtcat

SEQ ID NO: 1802698 - DNA, 15 bp, Homo sapiens
tggggttttgtcatg

SEQ ID NO: 1802699 - DNA, 15 bp, Homo sapiens
ggggttttgtcatgt

SEQ ID NO: 1802700 - DNA, 15 bp, Homo sapiens
gggttttgtcatgtt

SEQ ID NO: 1802701 - DNA, 15 bp, Homo sapiens
ggttttgtcatgttg

SEQ ID NO: 1802702 - DNA, 15 bp, Homo sapiens
gttttgtcatgttga

SEQ ID NO: 1802703 - DNA, 15 bp, Homo sapiens
ttttgtcatgttgac

SEQ ID NO: 1802704 - DNA, 15 bp, Homo sapiens
tttgtcatgttgacc

SEQ ID NO: 1802705 - DNA, 15 bp, Homo sapiens
ttgtcatgttgacca

SEQ ID NO: 1802706 - DNA, 15 bp, Homo sapiens
tgtcatgttgaccag

SEQ ID NO: 1802707 - DNA, 15 bp, Homo sapiens
gtcatgttgaccagg

SEQ ID NO: 1802708 - DNA, 15 bp, Homo sapiens
ggtgatccgcccact

SEQ ID NO: 1802709 - DNA, 15 bp, Homo sapiens
gtgatccgcccactt

SEQ ID NO: 1802710 - DNA, 15 bp, Homo sapiens
tgatccgcccacttt

SEQ ID NO: 1802711 - DNA, 15 bp, Homo sapiens
gatccgcccactttg

SEQ ID NO: 1802712 - DNA, 15 bp, Homo sapiens
atccgcccactttgg

SEQ ID NO: 1802713 - DNA, 15 bp, Homo sapiens
tccgcccactttggc

SEQ ID NO: 1802714 - DNA, 15 bp, Homo sapiens
ccgcccactttggcc

SEQ ID NO: 1802715 - DNA, 15 bp, Homo sapiens
cgcccactttggcct

SEQ ID NO: 1802716 - DNA, 15 bp, Homo sapiens
gcccactttggcctc

SEQ ID NO: 1802717 - DNA, 15 bp, Homo sapiens
caggtgtgaaccact

SEQ ID NO: 1802718 - DNA, 15 bp, Homo sapiens
aggtgtgaaccactg

SEQ ID NO: 1802719 - DNA, 15 bp, Homo sapiens
ggtgtgaaccactgc

SEQ ID NO: 1802720 - DNA, 15 bp, Homo sapiens
gtgtgaaccactgca

SEQ ID NO: 1802721 - DNA, 15 bp, Homo sapiens
tgtgaaccactgcac

SEQ ID NO: 1802722 - DNA, 15 bp, Homo sapiens
gtgaaccactgcacc

SEQ ID NO: 1802723 - DNA, 15 bp, Homo sapiens
tgaaccactgcacct

SEQ ID NO: 1802724 - DNA, 15 bp, Homo sapiens
gaaccactgcacctg

SEQ ID NO: 1802725 - DNA, 15 bp, Homo sapiens
aaccactgcacctgg

SEQ ID NO: 1802726 - DNA, 15 bp, Homo sapiens
accactgcacctggc

SEQ ID NO: 1802727 - DNA, 15 bp, Homo sapiens
actgcacctggccta

SEQ ID NO: 1802728 - DNA, 15 bp, Homo sapiens
tgcacctggcctatt

SEQ ID NO: 1802729 - DNA, 15 bp, Homo sapiens
gcacctggcctattt

SEQ ID NO: 1802730 - DNA, 15 bp, Homo sapiens
cacctggcctattta

SEQ ID NO: 1802731 - DNA, 15 bp, Homo sapiens
acctggcctatttac

SEQ ID NO: 1802732 - DNA, 15 bp, Homo sapiens
cctggcctatttact

SEQ ID NO: 1802733 - DNA, 15 bp, Homo sapiens
ctggcctatttactt

SEQ ID NO: 1802734 - DNA, 15 bp, Homo sapiens
tggcctatttacttt

SEQ ID NO: 1802735 - DNA, 15 bp, Homo sapiens
ggcctatttactttt

SEQ ID NO: 1802736 - DNA, 15 bp, Homo sapiens
gcctatttacttttt

SEQ ID NO: 1802737 - DNA, 15 bp, Homo sapiens
cctatttactttttc

SEQ ID NO: 1802738 - DNA, 15 bp, Homo sapiens
ctatttactttttca

SEQ ID NO: 1802739 - DNA, 15 bp, Homo sapiens
tatttactttttcat

SEQ ID NO: 1802740 - DNA, 15 bp, Homo sapiens
atttactttttcatt

SEQ ID NO: 1802741 - DNA, 15 bp, Homo sapiens
tttactttttcatta

SEQ ID NO: 1802742 - DNA, 15 bp, Homo sapiens
ttactttttcattac

SEQ ID NO: 1802743 - DNA, 15 bp, Homo sapiens
tactttttcattaca

SEQ ID NO: 1802744 - DNA, 15 bp, Homo sapiens
actttttcattacag

SEQ ID NO: 1802745 - DNA, 15 bp, Homo sapiens
ctttttcattacagc

SEQ ID NO: 1802746 - DNA, 15 bp, Homo sapiens
tttttcattacagct

SEQ ID NO: 1802747 - DNA, 15 bp, Homo sapiens
ttttcattacagctt

SEQ ID NO: 1802748 - DNA, 15 bp, Homo sapiens
tttcattacagcttt

SEQ ID NO: 1802749 - DNA, 15 bp, Homo sapiens
ttcattacagctttc

SEQ ID NO: 1802750 - DNA, 15 bp, Homo sapiens
tcattacagctttct

SEQ ID NO: 1802751 - DNA, 15 bp, Homo sapiens
cattacagctttcta

SEQ ID NO: 1802752 - DNA, 15 bp, Homo sapiens
attacagctttctaa

SEQ ID NO: 1802753 - DNA, 15 bp, Homo sapiens
ttacagctttctaaa

SEQ ID NO: 1802754 - DNA, 15 bp, Homo sapiens
tacagctttctaaag

SEQ ID NO: 1802755 - DNA, 15 bp, Homo sapiens
acagctttctaaagg

SEQ ID NO: 1802756 - DNA, 15 bp, Homo sapiens
cagctttctaaaggt

SEQ ID NO: 1802757 - DNA, 15 bp, Homo sapiens
agctttctaaaggta

SEQ ID NO: 1802758 - DNA, 15 bp, Homo sapiens
gctttctaaaggtac

SEQ ID NO: 1802759 - DNA, 15 bp, Homo sapiens
ctttctaaaggtaca

SEQ ID NO: 1802760 - DNA, 15 bp, Homo sapiens
tttctaaaggtacaa

SEQ ID NO: 1802761 - DNA, 15 bp, Homo sapiens
ttctaaaggtacaaa

SEQ ID NO: 1802762 - DNA, 15 bp, Homo sapiens
tctaaaggtacaaat

SEQ ID NO: 1802763 - DNA, 15 bp, Homo sapiens
ctaaaggtacaaatg

SEQ ID NO: 1802764 - DNA, 15 bp, Homo sapiens
taaaggtacaaatgg

SEQ ID NO: 1802765 - DNA, 15 bp, Homo sapiens
aaaggtacaaatggc

SEQ ID NO: 1802766 - DNA, 15 bp, Homo sapiens
aaggtacaaatggcc

SEQ ID NO: 1802767 - DNA, 15 bp, Homo sapiens
aggtacaaatggcca

SEQ ID NO: 1802768 - DNA, 15 bp, Homo sapiens
ggtacaaatggccag

SEQ ID NO: 1802769 - DNA, 15 bp, Homo sapiens
gtacaaatggccagg

SEQ ID NO: 1802770 - DNA, 15 bp, Homo sapiens
tacaaatggccagga

SEQ ID NO: 1802771 - DNA, 15 bp, Homo sapiens
acaaatggccaggaa

SEQ ID NO: 1802772 - DNA, 15 bp, Homo sapiens
caaatggccaggaac

SEQ ID NO: 1802773 - DNA, 15 bp, Homo sapiens
aaatggccaggaaca

SEQ ID NO: 1802774 - DNA, 15 bp, Homo sapiens
aatggccaggaacaa

SEQ ID NO: 1802775 - DNA, 15 bp, Homo sapiens
atggccaggaacaaa

SEQ ID NO: 1802776 - DNA, 15 bp, Homo sapiens
tggccaggaacaaac

SEQ ID NO: 1802777 - DNA, 15 bp, Homo sapiens
ggccaggaacaaact

SEQ ID NO: 1802778 - DNA, 15 bp, Homo sapiens
gccaggaacaaacta

SEQ ID NO: 1802779 - DNA, 15 bp, Homo sapiens
ccaggaacaaactag

SEQ ID NO: 1802780 - DNA, 15 bp, Homo sapiens
caggaacaaactagt

SEQ ID NO: 1802781 - DNA, 15 bp, Homo sapiens
aggaacaaactagtt

SEQ ID NO: 1802782 - DNA, 15 bp, Homo sapiens
ggaacaaactagtta

SEQ ID NO: 1802783 - DNA, 15 bp, Homo sapiens
gaacaaactagttat

SEQ ID NO: 1802784 - DNA, 15 bp, Homo sapiens
aacaaactagttata

SEQ ID NO: 1802785 - DNA, 15 bp, Homo sapiens
acaaactagttatac

SEQ ID NO: 1802786 - DNA, 15 bp, Homo sapiens
caaactagttatact

SEQ ID NO: 1802787 - DNA, 15 bp, Homo sapiens
aaactagttatacta

SEQ ID NO: 1802788 - DNA, 15 bp, Homo sapiens
aactagttatactag

SEQ ID NO: 1802789 - DNA, 15 bp, Homo sapiens
actagttatactagt

SEQ ID NO: 1802790 - DNA, 15 bp, Homo sapiens
ctagttatactagtt

SEQ ID NO: 1802791 - DNA, 15 bp, Homo sapiens
tagttatactagttc

SEQ ID NO: 1802792 - DNA, 15 bp, Homo sapiens
agttatactagttct

SEQ ID NO: 1802793 - DNA, 15 bp, Homo sapiens
gttatactagttcta

SEQ ID NO: 1802794 - DNA, 15 bp, Homo sapiens
ttatactagttctat

SEQ ID NO: 1802795 - DNA, 15 bp, Homo sapiens
tatactagttctatt

SEQ ID NO: 1802796 - DNA, 15 bp, Homo sapiens
atactagttctatta

SEQ ID NO: 1802797 - DNA, 15 bp, Homo sapiens
tactagttctattat

SEQ ID NO: 1802798 - DNA, 15 bp, Homo sapiens
actagttctattatc

SEQ ID NO: 1802799 - DNA, 15 bp, Homo sapiens
ctagttctattatca

SEQ ID NO: 1802800 - DNA, 15 bp, Homo sapiens
tagttctattatcat

SEQ ID NO: 1802801 - DNA, 15 bp, Homo sapiens
agttctattatcatc

SEQ ID NO: 1802802 - DNA, 15 bp, Homo sapiens
gttctattatcatct

SEQ ID NO: 1802803 - DNA, 15 bp, Homo sapiens
ttctattatcatctg

SEQ ID NO: 1802804 - DNA, 15 bp, Homo sapiens
tctattatcatctgg

SEQ ID NO: 1802805 - DNA, 15 bp, Homo sapiens
ctattatcatctgga

SEQ ID NO: 1802806 - DNA, 15 bp, Homo sapiens
tattatcatctggat

SEQ ID NO: 1802807 - DNA, 15 bp, Homo sapiens
attatcatctggatg

SEQ ID NO: 1802808 - DNA, 15 bp, Homo sapiens
ttatcatctggatgg

SEQ ID NO: 1802809 - DNA, 15 bp, Homo sapiens
tatcatctggatggt

SEQ ID NO: 1802810 - DNA, 15 bp, Homo sapiens
atcatctggatggtt

SEQ ID NO: 1802811 - DNA, 15 bp, Homo sapiens
tcatctggatggttt

SEQ ID NO: 1802812 - DNA, 15 bp, Homo sapiens
catctggatggtttc

SEQ ID NO: 1802813 - DNA, 15 bp, Homo sapiens
atctggatggtttca

SEQ ID NO: 1802814 - DNA, 15 bp, Homo sapiens
tctggatggtttcat

SEQ ID NO: 1802815 - DNA, 15 bp, Homo sapiens
ctggatggtttcata

SEQ ID NO: 1802816 - DNA, 15 bp, Homo sapiens
tggatggtttcatag

SEQ ID NO: 1802817 - DNA, 15 bp, Homo sapiens
ggatggtttcataga

SEQ ID NO: 1802818 - DNA, 15 bp, Homo sapiens
gatggtttcatagaa

SEQ ID NO: 1802819 - DNA, 15 bp, Homo sapiens
atggtttcatagaaa

SEQ ID NO: 1802820 - DNA, 15 bp, Homo sapiens
tggtttcatagaaac

SEQ ID NO: 1802821 - DNA, 15 bp, Homo sapiens
ggtttcatagaaact

SEQ ID NO: 1802822 - DNA, 15 bp, Homo sapiens
gtttcatagaaactt

SEQ ID NO: 1802823 - DNA, 15 bp, Homo sapiens
tttcatagaaacttg

SEQ ID NO: 1802824 - DNA, 15 bp, Homo sapiens
ttcatagaaacttgc

SEQ ID NO: 1802825 - DNA, 15 bp, Homo sapiens
tcatagaaacttgct

SEQ ID NO: 1802826 - DNA, 15 bp, Homo sapiens
catagaaacttgctt

SEQ ID NO: 1802827 - DNA, 15 bp, Homo sapiens
atagaaacttgcttt

SEQ ID NO: 1802828 - DNA, 15 bp, Homo sapiens
tagaaacttgctttt

SEQ ID NO: 1802829 - DNA, 15 bp, Homo sapiens
agaaacttgctttta

SEQ ID NO: 1802830 - DNA, 15 bp, Homo sapiens
gaaacttgcttttag

SEQ ID NO: 1802831 - DNA, 15 bp, Homo sapiens
aaacttgcttttaga

SEQ ID NO: 1802832 - DNA, 15 bp, Homo sapiens
aacttgcttttagaa

SEQ ID NO: 1802833 - DNA, 15 bp, Homo sapiens
acttgcttttagaag

SEQ ID NO: 1802834 - DNA, 15 bp, Homo sapiens
gcttttagaagtaca

SEQ ID NO: 1802835 - DNA, 15 bp, Homo sapiens
cttttagaagtacat

SEQ ID NO: 1802836 - DNA, 15 bp, Homo sapiens
ttttagaagtacatt

SEQ ID NO: 1802837 - DNA, 15 bp, Homo sapiens
tttagaagtacattt

SEQ ID NO: 1802838 - DNA, 15 bp, Homo sapiens
ttagaagtacatttt

SEQ ID NO: 1802839 - DNA, 15 bp, Homo sapiens
tagaagtacattttt

SEQ ID NO: 1802840 - DNA, 15 bp, Homo sapiens
agaagtacatttttg

SEQ ID NO: 1802841 - DNA, 15 bp, Homo sapiens
gaagtacatttttgt

SEQ ID NO: 1802842 - DNA, 15 bp, Homo sapiens
aagtacatttttgtt

SEQ ID NO: 1802843 - DNA, 15 bp, Homo sapiens
agtacatttttgttc

SEQ ID NO: 1802844 - DNA, 15 bp, Homo sapiens
gtacatttttgttcc

SEQ ID NO: 1802845 - DNA, 15 bp, Homo sapiens
tacatttttgttcct

SEQ ID NO: 1802846 - DNA, 15 bp, Homo sapiens
acatttttgttcctc

SEQ ID NO: 1802847 - DNA, 15 bp, Homo sapiens
catttttgttcctca

SEQ ID NO: 1802848 - DNA, 15 bp, Homo sapiens
atttttgttcctcat

SEQ ID NO: 1802849 - DNA, 15 bp, Homo sapiens
tttttgttcctcatt

SEQ ID NO: 1802850 - DNA, 15 bp, Homo sapiens
ttttgttcctcattt

SEQ ID NO: 1802851 - DNA, 15 bp, Homo sapiens
tttgttcctcatttt

SEQ ID NO: 1802852 - DNA, 15 bp, Homo sapiens
ttgttcctcatttta

SEQ ID NO: 1802853 - DNA, 15 bp, Homo sapiens
tgttcctcattttag

SEQ ID NO: 1802854 - DNA, 15 bp, Homo sapiens
gttcctcattttagg

SEQ ID NO: 1802855 - DNA, 15 bp, Homo sapiens
ttcctcattttaggg

SEQ ID NO: 1802856 - DNA, 15 bp, Homo sapiens
tcctcattttagggc

SEQ ID NO: 1802857 - DNA, 15 bp, Homo sapiens
cctcattttagggcc

SEQ ID NO: 1802858 - DNA, 15 bp, Homo sapiens
ctcattttagggcca

SEQ ID NO: 1802859 - DNA, 15 bp, Homo sapiens
tcattttagggccaa

SEQ ID NO: 1802860 - DNA, 15 bp, Homo sapiens
cattttagggccaat

SEQ ID NO: 1802861 - DNA, 15 bp, Homo sapiens
attttagggccaata

SEQ ID NO: 1802862 - DNA, 15 bp, Homo sapiens
ttttagggccaatat

SEQ ID NO: 1802863 - DNA, 15 bp, Homo sapiens
tttagggccaatata

SEQ ID NO: 1802864 - DNA, 15 bp, Homo sapiens
ttagggccaatatag

SEQ ID NO: 1802865 - DNA, 15 bp, Homo sapiens
tagggccaatatagt

SEQ ID NO: 1802866 - DNA, 15 bp, Homo sapiens
agggccaatatagta

SEQ ID NO: 1802867 - DNA, 15 bp, Homo sapiens
gggccaatatagtat

SEQ ID NO: 1802868 - DNA, 15 bp, Homo sapiens
ggccaatatagtata

SEQ ID NO: 1802869 - DNA, 15 bp, Homo sapiens
gccaatatagtatac

SEQ ID NO: 1802870 - DNA, 15 bp, Homo sapiens
ccaatatagtataca

SEQ ID NO: 1802871 - DNA, 15 bp, Homo sapiens
caatatagtatacat

SEQ ID NO: 1802872 - DNA, 15 bp, Homo sapiens
aatatagtatacata

SEQ ID NO: 1802873 - DNA, 15 bp, Homo sapiens
atatagtatacatag

SEQ ID NO: 1802874 - DNA, 15 bp, Homo sapiens
tatagtatacatagc

SEQ ID NO: 1802875 - DNA, 15 bp, Homo sapiens
atagtatacatagca

SEQ ID NO: 1802876 - DNA, 15 bp, Homo sapiens
tagtatacatagcat

SEQ ID NO: 1802877 - DNA, 15 bp, Homo sapiens
agtatacatagcata

SEQ ID NO: 1802878 - DNA, 15 bp, Homo sapiens
gtatacatagcataa

SEQ ID NO: 1802879 - DNA, 15 bp, Homo sapiens
tatacatagcataag

SEQ ID NO: 1802880 - DNA, 15 bp, Homo sapiens
atacatagcataagt

SEQ ID NO: 1802881 - DNA, 15 bp, Homo sapiens
tacatagcataagta

SEQ ID NO: 1802882 - DNA, 15 bp, Homo sapiens
acatagcataagtaa

SEQ ID NO: 1802883 - DNA, 15 bp, Homo sapiens
catagcataagtaaa

SEQ ID NO: 1802884 - DNA, 15 bp, Homo sapiens
atagcataagtaaag

SEQ ID NO: 1802885 - DNA, 15 bp, Homo sapiens
tagcataagtaaagt

SEQ ID NO: 1802886 - DNA, 15 bp, Homo sapiens
agcataagtaaagtt

SEQ ID NO: 1802887 - DNA, 15 bp, Homo sapiens
gcataagtaaagttt

SEQ ID NO: 1802888 - DNA, 15 bp, Homo sapiens
cataagtaaagtttc

SEQ ID NO: 1802889 - DNA, 15 bp, Homo sapiens
ataagtaaagtttca

SEQ ID NO: 1802890 - DNA, 15 bp, Homo sapiens
taagtaaagtttcag

SEQ ID NO: 1802891 - DNA, 15 bp, Homo sapiens
aagtaaagtttcagt

SEQ ID NO: 1802892 - DNA, 15 bp, Homo sapiens
agtaaagtttcagta

SEQ ID NO: 1802893 - DNA, 15 bp, Homo sapiens
gtaaagtttcagtag

SEQ ID NO: 1802894 - DNA, 15 bp, Homo sapiens
taaagtttcagtaga

SEQ ID NO: 1802895 - DNA, 15 bp, Homo sapiens
aaagtttcagtagaa

SEQ ID NO: 1802896 - DNA, 15 bp, Homo sapiens
aagtttcagtagaat

SEQ ID NO: 1802897 - DNA, 15 bp, Homo sapiens
agtttcagtagaatt

SEQ ID NO: 1802898 - DNA, 15 bp, Homo sapiens
gtttcagtagaattt

SEQ ID NO: 1802899 - DNA, 15 bp, Homo sapiens
tttcagtagaatttt

SEQ ID NO: 1802900 - DNA, 15 bp, Homo sapiens
ttcagtagaattttc

SEQ ID NO: 1802901 - DNA, 15 bp, Homo sapiens
tcagtagaattttcc

SEQ ID NO: 1802902 - DNA, 15 bp, Homo sapiens
cagtagaattttcct

SEQ ID NO: 1802903 - DNA, 15 bp, Homo sapiens
agtagaattttcctt

SEQ ID NO: 1802904 - DNA, 15 bp, Homo sapiens
gtagaattttccttt

SEQ ID NO: 1802905 - DNA, 15 bp, Homo sapiens
tagaattttcctttg

SEQ ID NO: 1802906 - DNA, 15 bp, Homo sapiens
agaattttcctttgg

SEQ ID NO: 1802907 - DNA, 15 bp, Homo sapiens
gaattttcctttgga

SEQ ID NO: 1802908 - DNA, 15 bp, Homo sapiens
aattttcctttggac

SEQ ID NO: 1802909 - DNA, 15 bp, Homo sapiens
attttcctttggact

SEQ ID NO: 1802910 - DNA, 15 bp, Homo sapiens
ttttcctttggacta

SEQ ID NO: 1802911 - DNA, 15 bp, Homo sapiens
tttcctttggactaa

SEQ ID NO: 1802912 - DNA, 15 bp, Homo sapiens
cctttggactaaata

SEQ ID NO: 1802913 - DNA, 15 bp, Homo sapiens
ctttggactaaatag

SEQ ID NO: 1802914 - DNA, 15 bp, Homo sapiens
tttggactaaataga

SEQ ID NO: 1802915 - DNA, 15 bp, Homo sapiens
ttggactaaatagat

SEQ ID NO: 1802916 - DNA, 15 bp, Homo sapiens
tggactaaatagata

SEQ ID NO: 1802917 - DNA, 15 bp, Homo sapiens
ggactaaatagatat

SEQ ID NO: 1802918 - DNA, 15 bp, Homo sapiens
gactaaatagatatt

SEQ ID NO: 1802919 - DNA, 15 bp, Homo sapiens
actaaatagatattt

SEQ ID NO: 1802920 - DNA, 15 bp, Homo sapiens
ctaaatagatatttt

SEQ ID NO: 1802921 - DNA, 15 bp, Homo sapiens
taaatagatatttta

SEQ ID NO: 1802922 - DNA, 15 bp, Homo sapiens
aaatagatattttac

SEQ ID NO: 1802923 - DNA, 15 bp, Homo sapiens
aatagatattttaca

SEQ ID NO: 1802924 - DNA, 15 bp, Homo sapiens
atagatattttacag

SEQ ID NO: 1802925 - DNA, 15 bp, Homo sapiens
tagatattttacagg

SEQ ID NO: 1802926 - DNA, 15 bp, Homo sapiens
agatattttacagga

SEQ ID NO: 1802927 - DNA, 15 bp, Homo sapiens
gatattttacaggac

SEQ ID NO: 1802928 - DNA, 15 bp, Homo sapiens
atattttacaggacg

SEQ ID NO: 1802929 - DNA, 15 bp, Homo sapiens
tattttacaggacga

SEQ ID NO: 1802930 - DNA, 15 bp, Homo sapiens
attttacaggacgac

SEQ ID NO: 1802931 - DNA, 15 bp, Homo sapiens
ttttacaggacgact

SEQ ID NO: 1802932 - DNA, 15 bp, Homo sapiens
tttacaggacgactc

SEQ ID NO: 1802933 - DNA, 15 bp, Homo sapiens
ttacaggacgactca

SEQ ID NO: 1802934 - DNA, 15 bp, Homo sapiens
tacaggacgactcaa

SEQ ID NO: 1802935 - DNA, 15 bp, Homo sapiens
acaggacgactcaaa

SEQ ID NO: 1802936 - DNA, 15 bp, Homo sapiens
caggacgactcaaac

SEQ ID NO: 1802937 - DNA, 15 bp, Homo sapiens
aggacgactcaaacc

SEQ ID NO: 1802938 - DNA, 15 bp, Homo sapiens
ggacgactcaaacct

SEQ ID NO: 1802939 - DNA, 15 bp, Homo sapiens
gacgactcaaacctt

SEQ ID NO: 1802940 - DNA, 15 bp, Homo sapiens
acgactcaaacctta

SEQ ID NO: 1802941 - DNA, 15 bp, Homo sapiens
cgactcaaaccttac

SEQ ID NO: 1802942 - DNA, 15 bp, Homo sapiens
gactcaaaccttacc

SEQ ID NO: 1802943 - DNA, 15 bp, Homo sapiens
actcaaaccttacct

SEQ ID NO: 1802944 - DNA, 15 bp, Homo sapiens
ctcaaaccttacctc

SEQ ID NO: 1802945 - DNA, 15 bp, Homo sapiens
tcaaaccttacctcc

SEQ ID NO: 1802946 - DNA, 15 bp, Homo sapiens
caaaccttacctcca

SEQ ID NO: 1802947 - DNA, 15 bp, Homo sapiens
aaaccttacctccag

SEQ ID NO: 1802948 - DNA, 15 bp, Homo sapiens
aaccttacctccaga

SEQ ID NO: 1802949 - DNA, 15 bp, Homo sapiens
accttacctccagaa

SEQ ID NO: 1802950 - DNA, 15 bp, Homo sapiens
ccttacctccagaaa

SEQ ID NO: 1802951 - DNA, 15 bp, Homo sapiens
cttacctccagaaat

SEQ ID NO: 1802952 - DNA, 15 bp, Homo sapiens
ttacctccagaaata

SEQ ID NO: 1802953 - DNA, 15 bp, Homo sapiens
tacctccagaaatat

SEQ ID NO: 1802954 - DNA, 15 bp, Homo sapiens
acctccagaaatatt

SEQ ID NO: 1802955 - DNA, 15 bp, Homo sapiens
cctccagaaatatta

SEQ ID NO: 1802956 - DNA, 15 bp, Homo sapiens
ctccagaaatattaa

SEQ ID NO: 1802957 - DNA, 15 bp, Homo sapiens
tccagaaatattaaa

SEQ ID NO: 1802958 - DNA, 15 bp, Homo sapiens
ccagaaatattaaat

SEQ ID NO: 1802959 - DNA, 15 bp, Homo sapiens
cagaaatattaaatt

SEQ ID NO: 1802960 - DNA, 15 bp, Homo sapiens
agaaatattaaattt

SEQ ID NO: 1802961 - DNA, 15 bp, Homo sapiens
gaaatattaaatttc

SEQ ID NO: 1802962 - DNA, 15 bp, Homo sapiens
aaatattaaatttcc

SEQ ID NO: 1802963 - DNA, 15 bp, Homo sapiens
aatattaaatttcca

SEQ ID NO: 1802964 - DNA, 15 bp, Homo sapiens
atattaaatttccac

SEQ ID NO: 1802965 - DNA, 15 bp, Homo sapiens
tattaaatttccacc

SEQ ID NO: 1802966 - DNA, 15 bp, Homo sapiens
attaaatttccacca

SEQ ID NO: 1802967 - DNA, 15 bp, Homo sapiens
ttaaatttccaccat

SEQ ID NO: 1802968 - DNA, 15 bp, Homo sapiens
taaatttccaccata

SEQ ID NO: 1802969 - DNA, 15 bp, Homo sapiens
aaatttccaccatag

SEQ ID NO: 1802970 - DNA, 15 bp, Homo sapiens
aatttccaccatagg

SEQ ID NO: 1802971 - DNA, 15 bp, Homo sapiens
atttccaccataggt

SEQ ID NO: 1802972 - DNA, 15 bp, Homo sapiens
tttccaccataggtg

SEQ ID NO: 1802973 - DNA, 15 bp, Homo sapiens
ttccaccataggtgt

SEQ ID NO: 1802974 - DNA, 15 bp, Homo sapiens
tccaccataggtgta

SEQ ID NO: 1802975 - DNA, 15 bp, Homo sapiens
ccaccataggtgtag

SEQ ID NO: 1802976 - DNA, 15 bp, Homo sapiens
caccataggtgtagc

SEQ ID NO: 1802977 - DNA, 15 bp, Homo sapiens
accataggtgtagct

SEQ ID NO: 1802978 - DNA, 15 bp, Homo sapiens
ccataggtgtagctt

SEQ ID NO: 1802979 - DNA, 15 bp, Homo sapiens
cataggtgtagcttc

SEQ ID NO: 1802980 - DNA, 15 bp, Homo sapiens
ataggtgtagcttct

SEQ ID NO: 1802981 - DNA, 15 bp, Homo sapiens
taggtgtagcttctt

SEQ ID NO: 1802982 - DNA, 15 bp, Homo sapiens
aggtgtagcttctta

SEQ ID NO: 1802983 - DNA, 15 bp, Homo sapiens
ggtgtagcttcttaa

SEQ ID NO: 1802984 - DNA, 15 bp, Homo sapiens
gtgtagcttcttaaa

SEQ ID NO: 1802985 - DNA, 15 bp, Homo sapiens
tgtagcttcttaaat

SEQ ID NO: 1802986 - DNA, 15 bp, Homo sapiens
gtagcttcttaaata

SEQ ID NO: 1802987 - DNA, 15 bp, Homo sapiens
tagcttcttaaatag

SEQ ID NO: 1802988 - DNA, 15 bp, Homo sapiens
agcttcttaaataga

SEQ ID NO: 1802989 - DNA, 15 bp, Homo sapiens
gcttcttaaatagaa

SEQ ID NO: 1802990 - DNA, 15 bp, Homo sapiens
cttcttaaatagaaa

SEQ ID NO: 1802991 - DNA, 15 bp, Homo sapiens
ttcttaaatagaaat

SEQ ID NO: 1802992 - DNA, 15 bp, Homo sapiens
tcttaaatagaaata

SEQ ID NO: 1802993 - DNA, 15 bp, Homo sapiens
cttaaatagaaatat

SEQ ID NO: 1802994 - DNA, 15 bp, Homo sapiens
ttaaatagaaatatg

SEQ ID NO: 1802995 - DNA, 15 bp, Homo sapiens
taaatagaaatatgg

SEQ ID NO: 1802996 - DNA, 15 bp, Homo sapiens
aaatagaaatatggt

SEQ ID NO: 1802997 - DNA, 15 bp, Homo sapiens
aatagaaatatggta

SEQ ID NO: 1802998 - DNA, 15 bp, Homo sapiens
atagaaatatggtag

SEQ ID NO: 1802999 - DNA, 15 bp, Homo sapiens
tagaaatatggtagc

SEQ ID NO: 1803000 - DNA, 15 bp, Homo sapiens
agaaatatggtagca

SEQ ID NO: 1803001 - DNA, 15 bp, Homo sapiens
gaaatatggtagcac

SEQ ID NO: 1803002 - DNA, 15 bp, Homo sapiens
aaatatggtagcact

SEQ ID NO: 1803003 - DNA, 15 bp, Homo sapiens
aatatggtagcactg

SEQ ID NO: 1803004 - DNA, 15 bp, Homo sapiens
atatggtagcactgt

SEQ ID NO: 1803005 - DNA, 15 bp, Homo sapiens
tatggtagcactgta

SEQ ID NO: 1803006 - DNA, 15 bp, Homo sapiens
atggtagcactgtat

SEQ ID NO: 1803007 - DNA, 15 bp, Homo sapiens
tggtagcactgtata

SEQ ID NO: 1803008 - DNA, 15 bp, Homo sapiens
ggtagcactgtataa

SEQ ID NO: 1803009 - DNA, 15 bp, Homo sapiens
gtagcactgtataat

SEQ ID NO: 1803010 - DNA, 15 bp, Homo sapiens
tagcactgtataata

SEQ ID NO: 1803011 - DNA, 15 bp, Homo sapiens
agcactgtataatat

SEQ ID NO: 1803012 - DNA, 15 bp, Homo sapiens
gcactgtataatatc

SEQ ID NO: 1803013 - DNA, 15 bp, Homo sapiens
cactgtataatatct

SEQ ID NO: 1803014 - DNA, 15 bp, Homo sapiens
actgtataatatcta

SEQ ID NO: 1803015 - DNA, 15 bp, Homo sapiens
ctgtataatatctac

SEQ ID NO: 1803016 - DNA, 15 bp, Homo sapiens
tgtataatatctacg

SEQ ID NO: 1803017 - DNA, 15 bp, Homo sapiens
gtataatatctacgt

SEQ ID NO: 1803018 - DNA, 15 bp, Homo sapiens
tataatatctacgtg

SEQ ID NO: 1803019 - DNA, 15 bp, Homo sapiens
ataatatctacgtga

SEQ ID NO: 1803020 - DNA, 15 bp, Homo sapiens
taatatctacgtgag

SEQ ID NO: 1803021 - DNA, 15 bp, Homo sapiens
aatatctacgtgaga

SEQ ID NO: 1803022 - DNA, 15 bp, Homo sapiens
atatctacgtgagat

SEQ ID NO: 1803023 - DNA, 15 bp, Homo sapiens
tatctacgtgagatt

SEQ ID NO: 1803024 - DNA, 15 bp, Homo sapiens
atctacgtgagattc

SEQ ID NO: 1803025 - DNA, 15 bp, Homo sapiens
tctacgtgagattca

SEQ ID NO: 1803026 - DNA, 15 bp, Homo sapiens
ctacgtgagattcaa

SEQ ID NO: 1803027 - DNA, 15 bp, Homo sapiens
tacgtgagattcaaa

SEQ ID NO: 1803028 - DNA, 15 bp, Homo sapiens
acgtgagattcaaac

SEQ ID NO: 1803029 - DNA, 15 bp, Homo sapiens
cgtgagattcaaaca

SEQ ID NO: 1803030 - DNA, 15 bp, Homo sapiens
gtgagattcaaacaa

SEQ ID NO: 1803031 - DNA, 15 bp, Homo sapiens
tgagattcaaacaag

SEQ ID NO: 1803032 - DNA, 15 bp, Homo sapiens
gagattcaaacaagc

SEQ ID NO: 1803033 - DNA, 15 bp, Homo sapiens
agattcaaacaagct

SEQ ID NO: 1803034 - DNA, 15 bp, Homo sapiens
gattcaaacaagctc

SEQ ID NO: 1803035 - DNA, 15 bp, Homo sapiens
attcaaacaagctct

SEQ ID NO: 1803036 - DNA, 15 bp, Homo sapiens
ttcaaacaagctctt

SEQ ID NO: 1803037 - DNA, 15 bp, Homo sapiens
tcaaacaagctcttt

SEQ ID NO: 1803038 - DNA, 15 bp, Homo sapiens
caaacaagctctttt

SEQ ID NO: 1803039 - DNA, 15 bp, Homo sapiens
aaacaagctctttta

SEQ ID NO: 1803040 - DNA, 15 bp, Homo sapiens
aacaagctcttttaa

SEQ ID NO: 1803041 - DNA, 15 bp, Homo sapiens
acaagctcttttaat

SEQ ID NO: 1803042 - DNA, 15 bp, Homo sapiens
caagctcttttaata

SEQ ID NO: 1803043 - DNA, 15 bp, Homo sapiens
aagctcttttaatac

SEQ ID NO: 1803044 - DNA, 15 bp, Homo sapiens
agctcttttaataca

SEQ ID NO: 1803045 - DNA, 15 bp, Homo sapiens
gctcttttaatacac

SEQ ID NO: 1803046 - DNA, 15 bp, Homo sapiens
ctcttttaatacaca

SEQ ID NO: 1803047 - DNA, 15 bp, Homo sapiens
tcttttaatacacag

SEQ ID NO: 1803048 - DNA, 15 bp, Homo sapiens
cttttaatacacagt

SEQ ID NO: 1803049 - DNA, 15 bp, Homo sapiens
ttttaatacacagta

SEQ ID NO: 1803050 - DNA, 15 bp, Homo sapiens
tttaatacacagtaa

SEQ ID NO: 1803051 - DNA, 15 bp, Homo sapiens
ttaatacacagtaag

SEQ ID NO: 1803052 - DNA, 15 bp, Homo sapiens
taatacacagtaagc

SEQ ID NO: 1803053 - DNA, 15 bp, Homo sapiens
aatacacagtaagca

SEQ ID NO: 1803054 - DNA, 15 bp, Homo sapiens
atacacagtaagcat

SEQ ID NO: 1803055 - DNA, 15 bp, Homo sapiens
tacacagtaagcata

SEQ ID NO: 1803056 - DNA, 15 bp, Homo sapiens
acacagtaagcatag

SEQ ID NO: 1803057 - DNA, 15 bp, Homo sapiens
cacagtaagcatagt

SEQ ID NO: 1803058 - DNA, 15 bp, Homo sapiens
acagtaagcatagtc

SEQ ID NO: 1803059 - DNA, 15 bp, Homo sapiens
cagtaagcatagtca

SEQ ID NO: 1803060 - DNA, 15 bp, Homo sapiens
agtaagcatagtcat

SEQ ID NO: 1803061 - DNA, 15 bp, Homo sapiens
gtaagcatagtcatc

SEQ ID NO: 1803062 - DNA, 15 bp, Homo sapiens
taagcatagtcatcc

SEQ ID NO: 1803063 - DNA, 15 bp, Homo sapiens
aagcatagtcatcca

SEQ ID NO: 1803064 - DNA, 15 bp, Homo sapiens
agcatagtcatccat

SEQ ID NO: 1803065 - DNA, 15 bp, Homo sapiens
gcatagtcatccatt

SEQ ID NO: 1803066 - DNA, 15 bp, Homo sapiens
catagtcatccattc

SEQ ID NO: 1803067 - DNA, 15 bp, Homo sapiens
atagtcatccattct

SEQ ID NO: 1803068 - DNA, 15 bp, Homo sapiens
tagtcatccattctc

SEQ ID NO: 1803069 - DNA, 15 bp, Homo sapiens
agtcatccattctca

SEQ ID NO: 1803070 - DNA, 15 bp, Homo sapiens
gtcatccattctcaa

SEQ ID NO: 1803071 - DNA, 15 bp, Homo sapiens
tcatccattctcaat

SEQ ID NO: 1803072 - DNA, 15 bp, Homo sapiens
catccattctcaata

SEQ ID NO: 1803073 - DNA, 15 bp, Homo sapiens
atccattctcaatac

SEQ ID NO: 1803074 - DNA, 15 bp, Homo sapiens
tccattctcaatact

SEQ ID NO: 1803075 - DNA, 15 bp, Homo sapiens
ccattctcaatactt

SEQ ID NO: 1803076 - DNA, 15 bp, Homo sapiens
cattctcaatacttt

SEQ ID NO: 1803077 - DNA, 15 bp, Homo sapiens
attctcaatactttt

SEQ ID NO: 1803078 - DNA, 15 bp, Homo sapiens
ttctcaatacttttt

SEQ ID NO: 1803079 - DNA, 15 bp, Homo sapiens
tctcaatactttttt

SEQ ID NO: 1803080 - DNA, 15 bp, Homo sapiens
ctcaatacttttttt

SEQ ID NO: 1803081 - DNA, 15 bp, Homo sapiens
tcaatactttttttg

SEQ ID NO: 1803082 - DNA, 15 bp, Homo sapiens
caatactttttttgt

SEQ ID NO: 1803083 - DNA, 15 bp, Homo sapiens
aatactttttttgtg

SEQ ID NO: 1803084 - DNA, 15 bp, Homo sapiens
atactttttttgtgt

SEQ ID NO: 1803085 - DNA, 15 bp, Homo sapiens
tactttttttgtgtg

SEQ ID NO: 1803086 - DNA, 15 bp, Homo sapiens
actttttttgtgtgt

SEQ ID NO: 1803087 - DNA, 15 bp, Homo sapiens
ctttttttgtgtgtc

SEQ ID NO: 1803088 - DNA, 15 bp, Homo sapiens
tttttttgtgtgtcc

SEQ ID NO: 1803089 - DNA, 15 bp, Homo sapiens
ttttttgtgtgtcca

SEQ ID NO: 1803090 - DNA, 15 bp, Homo sapiens
tttttgtgtgtccat

SEQ ID NO: 1803091 - DNA, 15 bp, Homo sapiens
ttttgtgtgtccatt

SEQ ID NO: 1803092 - DNA, 15 bp, Homo sapiens
tttgtgtgtccatta

SEQ ID NO: 1803093 - DNA, 15 bp, Homo sapiens
ttgtgtgtccattat

SEQ ID NO: 1803094 - DNA, 15 bp, Homo sapiens
tgtgtgtccattatc

SEQ ID NO: 1803095 - DNA, 15 bp, Homo sapiens
gtgtgtccattatct

SEQ ID NO: 1803096 - DNA, 15 bp, Homo sapiens
tgtgtccattatctt

SEQ ID NO: 1803097 - DNA, 15 bp, Homo sapiens
gtgtccattatcttg

SEQ ID NO: 1803098 - DNA, 15 bp, Homo sapiens
tgtccattatcttgg

SEQ ID NO: 1803099 - DNA, 15 bp, Homo sapiens
gtccattatcttggg

SEQ ID NO: 1803100 - DNA, 15 bp, Homo sapiens
tccattatcttggga

SEQ ID NO: 1803101 - DNA, 15 bp, Homo sapiens
ccattatcttgggac

SEQ ID NO: 1803102 - DNA, 15 bp, Homo sapiens
cattatcttgggact

SEQ ID NO: 1803103 - DNA, 15 bp, Homo sapiens
attatcttgggacta

SEQ ID NO: 1803104 - DNA, 15 bp, Homo sapiens
ttatcttgggactat

SEQ ID NO: 1803105 - DNA, 15 bp, Homo sapiens
tatcttgggactata

SEQ ID NO: 1803106 - DNA, 15 bp, Homo sapiens
atcttgggactatat

SEQ ID NO: 1803107 - DNA, 15 bp, Homo sapiens
tcttgggactatata

SEQ ID NO: 1803108 - DNA, 15 bp, Homo sapiens
cttgggactatatat

SEQ ID NO: 1803109 - DNA, 15 bp, Homo sapiens
ttgggactatatata

SEQ ID NO: 1803110 - DNA, 15 bp, Homo sapiens
tgggactatatatag

SEQ ID NO: 1803111 - DNA, 15 bp, Homo sapiens
gggactatatatagt

SEQ ID NO: 1803112 - DNA, 15 bp, Homo sapiens
ggactatatatagta

SEQ ID NO: 1803113 - DNA, 15 bp, Homo sapiens
gactatatatagtag

SEQ ID NO: 1803114 - DNA, 15 bp, Homo sapiens
actatatatagtagt

SEQ ID NO: 1803115 - DNA, 15 bp, Homo sapiens
ctatatatagtagta

SEQ ID NO: 1803116 - DNA, 15 bp, Homo sapiens
tatatatagtagtat

SEQ ID NO: 1803117 - DNA, 15 bp, Homo sapiens
atatatagtagtatt

SEQ ID NO: 1803118 - DNA, 15 bp, Homo sapiens
tatatagtagtattg

SEQ ID NO: 1803119 - DNA, 15 bp, Homo sapiens
atatagtagtattga

SEQ ID NO: 1803120 - DNA, 15 bp, Homo sapiens
tatagtagtattgac

SEQ ID NO: 1803121 - DNA, 15 bp, Homo sapiens
atagtagtattgaca

SEQ ID NO: 1803122 - DNA, 15 bp, Homo sapiens
tagtagtattgacat

SEQ ID NO: 1803123 - DNA, 15 bp, Homo sapiens
agtagtattgacata

SEQ ID NO: 1803124 - DNA, 15 bp, Homo sapiens
gtagtattgacatat

SEQ ID NO: 1803125 - DNA, 15 bp, Homo sapiens
tagtattgacatatg

SEQ ID NO: 1803126 - DNA, 15 bp, Homo sapiens
agtattgacatatga

SEQ ID NO: 1803127 - DNA, 15 bp, Homo sapiens
gtattgacatatgac

SEQ ID NO: 1803128 - DNA, 15 bp, Homo sapiens
tattgacatatgaca

SEQ ID NO: 1803129 - DNA, 15 bp, Homo sapiens
attgacatatgacaa

SEQ ID NO: 1803130 - DNA, 15 bp, Homo sapiens
ttgacatatgacaat

SEQ ID NO: 1803131 - DNA, 15 bp, Homo sapiens
tgacatatgacaatt

SEQ ID NO: 1803132 - DNA, 15 bp, Homo sapiens
gacatatgacaattg

SEQ ID NO: 1803133 - DNA, 15 bp, Homo sapiens
acatatgacaattgt

SEQ ID NO: 1803134 - DNA, 15 bp, Homo sapiens
catatgacaattgtc

SEQ ID NO: 1803135 - DNA, 15 bp, Homo sapiens
atatgacaattgtca

SEQ ID NO: 1803136 - DNA, 15 bp, Homo sapiens
tatgacaattgtcat

SEQ ID NO: 1803137 - DNA, 15 bp, Homo sapiens
atgacaattgtcata

SEQ ID NO: 1803138 - DNA, 15 bp, Homo sapiens
tgacaattgtcatat

SEQ ID NO: 1803139 - DNA, 15 bp, Homo sapiens
gacaattgtcatatt

SEQ ID NO: 1803140 - DNA, 15 bp, Homo sapiens
acaattgtcatatta

SEQ ID NO: 1803141 - DNA, 15 bp, Homo sapiens
caattgtcatattaa

SEQ ID NO: 1803142 - DNA, 15 bp, Homo sapiens
aattgtcatattaaa

SEQ ID NO: 1803143 - DNA, 15 bp, Homo sapiens
attgtcatattaaac

SEQ ID NO: 1803144 - DNA, 15 bp, Homo sapiens
ttgtcatattaaaca

SEQ ID NO: 1803145 - DNA, 15 bp, Homo sapiens
tgtcatattaaacaa

SEQ ID NO: 1803146 - DNA, 15 bp, Homo sapiens
gtcatattaaacaat

SEQ ID NO: 1803147 - DNA, 15 bp, Homo sapiens
tcatattaaacaatg

SEQ ID NO: 1803148 - DNA, 15 bp, Homo sapiens
catattaaacaatga

SEQ ID NO: 1803149 - DNA, 15 bp, Homo sapiens
atattaaacaatgac

SEQ ID NO: 1803150 - DNA, 15 bp, Homo sapiens
tattaaacaatgaca

SEQ ID NO: 1803151 - DNA, 15 bp, Homo sapiens
attaaacaatgacaa

SEQ ID NO: 1803152 - DNA, 15 bp, Homo sapiens
ttaaacaatgacaat

SEQ ID NO: 1803153 - DNA, 15 bp, Homo sapiens
taaacaatgacaata

SEQ ID NO: 1803154 - DNA, 15 bp, Homo sapiens
aaacaatgacaatac

SEQ ID NO: 1803155 - DNA, 15 bp, Homo sapiens
aacaatgacaatacg

SEQ ID NO: 1803156 - DNA, 15 bp, Homo sapiens
acaatgacaatacga

SEQ ID NO: 1803157 - DNA, 15 bp, Homo sapiens
caatgacaatacgaa

SEQ ID NO: 1803158 - DNA, 15 bp, Homo sapiens
aatgacaatacgaaa

SEQ ID NO: 1803159 - DNA, 15 bp, Homo sapiens
atgacaatacgaaag

SEQ ID NO: 1803160 - DNA, 15 bp, Homo sapiens
tgacaatacgaaagg

SEQ ID NO: 1803161 - DNA, 15 bp, Homo sapiens
gacaatacgaaaggt

SEQ ID NO: 1803162 - DNA, 15 bp, Homo sapiens
acaatacgaaaggtt

SEQ ID NO: 1803163 - DNA, 15 bp, Homo sapiens
caatacgaaaggtta

SEQ ID NO: 1803164 - DNA, 15 bp, Homo sapiens
aatacgaaaggttaa

SEQ ID NO: 1803165 - DNA, 15 bp, Homo sapiens
atacgaaaggttaaa

SEQ ID NO: 1803166 - DNA, 15 bp, Homo sapiens
tacgaaaggttaaat

SEQ ID NO: 1803167 - DNA, 15 bp, Homo sapiens
acgaaaggttaaatt

SEQ ID NO: 1803168 - DNA, 15 bp, Homo sapiens
cgaaaggttaaattt

SEQ ID NO: 1803169 - DNA, 15 bp, Homo sapiens
gaaaggttaaattta

SEQ ID NO: 1803170 - DNA, 15 bp, Homo sapiens
aaaggttaaatttac

SEQ ID NO: 1803171 - DNA, 15 bp, Homo sapiens
aaggttaaatttact

SEQ ID NO: 1803172 - DNA, 15 bp, Homo sapiens
aggttaaatttacta

SEQ ID NO: 1803173 - DNA, 15 bp, Homo sapiens
ggttaaatttactac

SEQ ID NO: 1803174 - DNA, 15 bp, Homo sapiens
gttaaatttactaca

SEQ ID NO: 1803175 - DNA, 15 bp, Homo sapiens
ttaaatttactacac

SEQ ID NO: 1803176 - DNA, 15 bp, Homo sapiens
taaatttactacaca

SEQ ID NO: 1803177 - DNA, 15 bp, Homo sapiens
aaatttactacacag

SEQ ID NO: 1803178 - DNA, 15 bp, Homo sapiens
aatttactacacaga

SEQ ID NO: 1803179 - DNA, 15 bp, Homo sapiens
atttactacacagac

SEQ ID NO: 1803180 - DNA, 15 bp, Homo sapiens
tttactacacagacc

SEQ ID NO: 1803181 - DNA, 15 bp, Homo sapiens
ttactacacagacca

SEQ ID NO: 1803182 - DNA, 15 bp, Homo sapiens
tactacacagaccaa

SEQ ID NO: 1803183 - DNA, 15 bp, Homo sapiens
actacacagaccaac

SEQ ID NO: 1803184 - DNA, 15 bp, Homo sapiens
ctacacagaccaacc

SEQ ID NO: 1803185 - DNA, 15 bp, Homo sapiens
tacacagaccaacct

SEQ ID NO: 1803186 - DNA, 15 bp, Homo sapiens
acacagaccaacctc

SEQ ID NO: 1803187 - DNA, 15 bp, Homo sapiens
cacagaccaacctca

SEQ ID NO: 1803188 - DNA, 15 bp, Homo sapiens
acagaccaacctcag

SEQ ID NO: 1803189 - DNA, 15 bp, Homo sapiens
cagaccaacctcagt

SEQ ID NO: 1803190 - DNA, 15 bp, Homo sapiens
agaccaacctcagtt

SEQ ID NO: 1803191 - DNA, 15 bp, Homo sapiens
gaccaacctcagtta

SEQ ID NO: 1803192 - DNA, 15 bp, Homo sapiens
accaacctcagttac

SEQ ID NO: 1803193 - DNA, 15 bp, Homo sapiens
ccaacctcagttact

SEQ ID NO: 1803194 - DNA, 15 bp, Homo sapiens
caacctcagttactt

SEQ ID NO: 1803195 - DNA, 15 bp, Homo sapiens
aacctcagttacttc

SEQ ID NO: 1803196 - DNA, 15 bp, Homo sapiens
acctcagttacttcc

SEQ ID NO: 1803197 - DNA, 15 bp, Homo sapiens
cctcagttacttcct

SEQ ID NO: 1803198 - DNA, 15 bp, Homo sapiens
ctcagttacttccta

SEQ ID NO: 1803199 - DNA, 15 bp, Homo sapiens
tcagttacttcctaa

SEQ ID NO: 1803200 - DNA, 15 bp, Homo sapiens
cagttacttcctaaa

SEQ ID NO: 1803201 - DNA, 15 bp, Homo sapiens
agttacttcctaaat

SEQ ID NO: 1803202 - DNA, 15 bp, Homo sapiens
gttacttcctaaatg

SEQ ID NO: 1803203 - DNA, 15 bp, Homo sapiens
ttacttcctaaatgc

SEQ ID NO: 1803204 - DNA, 15 bp, Homo sapiens
tacttcctaaatgca

SEQ ID NO: 1803205 - DNA, 15 bp, Homo sapiens
acttcctaaatgcaa

SEQ ID NO: 1803206 - DNA, 15 bp, Homo sapiens
cttcctaaatgcaaa

SEQ ID NO: 1803207 - DNA, 15 bp, Homo sapiens
ttcctaaatgcaaaa

SEQ ID NO: 1803208 - DNA, 15 bp, Homo sapiens
tcctaaatgcaaaat

SEQ ID NO: 1803209 - DNA, 15 bp, Homo sapiens
cctaaatgcaaaatg

SEQ ID NO: 1803210 - DNA, 15 bp, Homo sapiens
ctaaatgcaaaatgt

SEQ ID NO: 1803211 - DNA, 15 bp, Homo sapiens
taaatgcaaaatgtt

SEQ ID NO: 1803212 - DNA, 15 bp, Homo sapiens
aaatgcaaaatgtta

SEQ ID NO: 1803213 - DNA, 15 bp, Homo sapiens
aatgcaaaatgttat

SEQ ID NO: 1803214 - DNA, 15 bp, Homo sapiens
atgcaaaatgttatt

SEQ ID NO: 1803215 - DNA, 15 bp, Homo sapiens
tgcaaaatgttattt

SEQ ID NO: 1803216 - DNA, 15 bp, Homo sapiens
gcaaaatgttatttt

SEQ ID NO: 1803217 - DNA, 15 bp, Homo sapiens
caaaatgttattttt

SEQ ID NO: 1803218 - DNA, 15 bp, Homo sapiens
aaaatgttattttta

SEQ ID NO: 1803219 - DNA, 15 bp, Homo sapiens
aaatgttatttttaa

SEQ ID NO: 1803220 - DNA, 15 bp, Homo sapiens
aatgttatttttaac

SEQ ID NO: 1803221 - DNA, 15 bp, Homo sapiens
atgttatttttaact

SEQ ID NO: 1803222 - DNA, 15 bp, Homo sapiens
tgttatttttaactg

SEQ ID NO: 1803223 - DNA, 15 bp, Homo sapiens
gttatttttaactga

SEQ ID NO: 1803224 - DNA, 15 bp, Homo sapiens
ttatttttaactgaa

SEQ ID NO: 1803225 - DNA, 15 bp, Homo sapiens
tatttttaactgaat

SEQ ID NO: 1803226 - DNA, 15 bp, Homo sapiens
atttttaactgaatt

SEQ ID NO: 1803227 - DNA, 15 bp, Homo sapiens
tttttaactgaattt

SEQ ID NO: 1803228 - DNA, 15 bp, Homo sapiens
ttttaactgaattta

SEQ ID NO: 1803229 - DNA, 15 bp, Homo sapiens
tttaactgaatttac

SEQ ID NO: 1803230 - DNA, 15 bp, Homo sapiens
ttaactgaatttact

SEQ ID NO: 1803231 - DNA, 15 bp, Homo sapiens
taactgaatttactg

SEQ ID NO: 1803232 - DNA, 15 bp, Homo sapiens
aactgaatttactga

SEQ ID NO: 1803233 - DNA, 15 bp, Homo sapiens
actgaatttactgag

SEQ ID NO: 1803234 - DNA, 15 bp, Homo sapiens
ctgaatttactgaga

SEQ ID NO: 1803235 - DNA, 15 bp, Homo sapiens
tgaatttactgagaa

SEQ ID NO: 1803236 - DNA, 15 bp, Homo sapiens
gaatttactgagaaa

SEQ ID NO: 1803237 - DNA, 15 bp, Homo sapiens
aatttactgagaaaa

SEQ ID NO: 1803238 - DNA, 15 bp, Homo sapiens
atttactgagaaaat

SEQ ID NO: 1803239 - DNA, 15 bp, Homo sapiens
tttactgagaaaatt

SEQ ID NO: 1803240 - DNA, 15 bp, Homo sapiens
ttactgagaaaattg

SEQ ID NO: 1803241 - DNA, 15 bp, Homo sapiens
tactgagaaaattgg

SEQ ID NO: 1803242 - DNA, 15 bp, Homo sapiens
actgagaaaattggt

SEQ ID NO: 1803243 - DNA, 15 bp, Homo sapiens
ctgagaaaattggta

SEQ ID NO: 1803244 - DNA, 15 bp, Homo sapiens
tgagaaaattggtaa

SEQ ID NO: 1803245 - DNA, 15 bp, Homo sapiens
gagaaaattggtaag

SEQ ID NO: 1803246 - DNA, 15 bp, Homo sapiens
agaaaattggtaagc

SEQ ID NO: 1803247 - DNA, 15 bp, Homo sapiens
gaaaattggtaagct

SEQ ID NO: 1803248 - DNA, 15 bp, Homo sapiens
aaaattggtaagctt

SEQ ID NO: 1803249 - DNA, 15 bp, Homo sapiens
aaattggtaagcttt

SEQ ID NO: 1803250 - DNA, 15 bp, Homo sapiens
aattggtaagctttg

SEQ ID NO: 1803251 - DNA, 15 bp, Homo sapiens
attggtaagctttgt

SEQ ID NO: 1803252 - DNA, 15 bp, Homo sapiens
ttggtaagctttgta

SEQ ID NO: 1803253 - DNA, 15 bp, Homo sapiens
tggtaagctttgtat

SEQ ID NO: 1803254 - DNA, 15 bp, Homo sapiens
ggtaagctttgtatt

SEQ ID NO: 1803255 - DNA, 15 bp, Homo sapiens
gtaagctttgtattt

SEQ ID NO: 1803256 - DNA, 15 bp, Homo sapiens
taagctttgtatttc

SEQ ID NO: 1803257 - DNA, 15 bp, Homo sapiens
aagctttgtatttct

SEQ ID NO: 1803258 - DNA, 15 bp, Homo sapiens
agctttgtatttcta

SEQ ID NO: 1803259 - DNA, 15 bp, Homo sapiens
gctttgtatttctat

SEQ ID NO: 1803260 - DNA, 15 bp, Homo sapiens
ctttgtatttctatg

SEQ ID NO: 1803261 - DNA, 15 bp, Homo sapiens
tttgtatttctatgt

SEQ ID NO: 1803262 - DNA, 15 bp, Homo sapiens
ttgtatttctatgtg

SEQ ID NO: 1803263 - DNA, 15 bp, Homo sapiens
tgtatttctatgtgt

SEQ ID NO: 1803264 - DNA, 15 bp, Homo sapiens
gtatttctatgtgtt

SEQ ID NO: 1803265 - DNA, 15 bp, Homo sapiens
tatttctatgtgttt

SEQ ID NO: 1803266 - DNA, 15 bp, Homo sapiens
atttctatgtgtttt

SEQ ID NO: 1803267 - DNA, 15 bp, Homo sapiens
tttctatgtgttttg

SEQ ID NO: 1803268 - DNA, 15 bp, Homo sapiens
ttctatgtgttttga

SEQ ID NO: 1803269 - DNA, 15 bp, Homo sapiens
tctatgtgttttgac

SEQ ID NO: 1803270 - DNA, 15 bp, Homo sapiens
ctatgtgttttgaca

SEQ ID NO: 1803271 - DNA, 15 bp, Homo sapiens
tatgtgttttgacaa

SEQ ID NO: 1803272 - DNA, 15 bp, Homo sapiens
atgtgttttgacaaa

SEQ ID NO: 1803273 - DNA, 15 bp, Homo sapiens
tgtgttttgacaaag

SEQ ID NO: 1803274 - DNA, 15 bp, Homo sapiens
gtgttttgacaaaga

SEQ ID NO: 1803275 - DNA, 15 bp, Homo sapiens
tgttttgacaaagat

SEQ ID NO: 1803276 - DNA, 15 bp, Homo sapiens
gttttgacaaagatt

SEQ ID NO: 1803277 - DNA, 15 bp, Homo sapiens
ttttgacaaagattg

SEQ ID NO: 1803278 - DNA, 15 bp, Homo sapiens
tttgacaaagattga

SEQ ID NO: 1803279 - DNA, 15 bp, Homo sapiens
ttgacaaagattgaa

SEQ ID NO: 1803280 - DNA, 15 bp, Homo sapiens
tgacaaagattgaat

SEQ ID NO: 1803281 - DNA, 15 bp, Homo sapiens
gacaaagattgaatt

SEQ ID NO: 1803282 - DNA, 15 bp, Homo sapiens
acaaagattgaatta

SEQ ID NO: 1803283 - DNA, 15 bp, Homo sapiens
caaagattgaattaa

SEQ ID NO: 1803284 - DNA, 15 bp, Homo sapiens
aaagattgaattaaa

SEQ ID NO: 1803285 - DNA, 15 bp, Homo sapiens
aagattgaattaaaa

SEQ ID NO: 1803286 - DNA, 15 bp, Homo sapiens
agattgaattaaaaa

SEQ ID NO: 1803287 - DNA, 15 bp, Homo sapiens
gattgaattaaaaat

SEQ ID NO: 1803288 - DNA, 15 bp, Homo sapiens
attgaattaaaaata

SEQ ID NO: 1803289 - DNA, 15 bp, Homo sapiens
ttgaattaaaaataa

SEQ ID NO: 1803290 - DNA, 15 bp, Homo sapiens
tgaattaaaaataac

SEQ ID NO: 1803291 - DNA, 15 bp, Homo sapiens
gaattaaaaataaca

SEQ ID NO: 1803292 - DNA, 15 bp, Homo sapiens
aattaaaaataacag

SEQ ID NO: 1803293 - DNA, 15 bp, Homo sapiens
attaaaaataacagt

SEQ ID NO: 1803294 - DNA, 15 bp, Homo sapiens
ttaaaaataacagta

SEQ ID NO: 1803295 - DNA, 15 bp, Homo sapiens
taaaaataacagtaa

SEQ ID NO: 1803296 - DNA, 15 bp, Homo sapiens
aaaaataacagtaag

SEQ ID NO: 1803297 - DNA, 15 bp, Homo sapiens
aaaataacagtaaga

SEQ ID NO: 1803298 - DNA, 15 bp, Homo sapiens
aaataacagtaagat

SEQ ID NO: 1803299 - DNA, 15 bp, Homo sapiens
aataacagtaagatt

SEQ ID NO: 1803300 - DNA, 15 bp, Homo sapiens
ataacagtaagattt

SEQ ID NO: 1803301 - DNA, 15 bp, Homo sapiens
taacagtaagatttg

SEQ ID NO: 1803302 - DNA, 15 bp, Homo sapiens
aacagtaagatttga

SEQ ID NO: 1803303 - DNA, 15 bp, Homo sapiens
acagtaagatttgat

SEQ ID NO: 1803304 - DNA, 15 bp, Homo sapiens
cagtaagatttgatt

SEQ ID NO: 1803305 - DNA, 15 bp, Homo sapiens
agtaagatttgattt

SEQ ID NO: 1803306 - DNA, 15 bp, Homo sapiens
gtaagatttgatttt

SEQ ID NO: 1803307 - DNA, 15 bp, Homo sapiens
taagatttgattttt

SEQ ID NO: 1803308 - DNA, 15 bp, Homo sapiens
aagatttgatttttt

SEQ ID NO: 1803309 - DNA, 15 bp, Homo sapiens
agatttgattttttc

SEQ ID NO: 1803310 - DNA, 15 bp, Homo sapiens
gatttgattttttcc

SEQ ID NO: 1803311 - DNA, 15 bp, Homo sapiens
atttgattttttcct

SEQ ID NO: 1803312 - DNA, 15 bp, Homo sapiens
tttgattttttcctt

SEQ ID NO: 1803313 - DNA, 15 bp, Homo sapiens
ttgattttttccttt

SEQ ID NO: 1803314 - DNA, 15 bp, Homo sapiens
tgattttttcctttc

SEQ ID NO: 1803315 - DNA, 15 bp, Homo sapiens
gattttttcctttct

SEQ ID NO: 1803316 - DNA, 15 bp, Homo sapiens
attttttcctttctc

SEQ ID NO: 1803317 - DNA, 15 bp, Homo sapiens
ttttttcctttctct

SEQ ID NO: 1803318 - DNA, 15 bp, Homo sapiens
tttttcctttctctt

SEQ ID NO: 1803319 - DNA, 15 bp, Homo sapiens
ttttcctttctcttc

SEQ ID NO: 1803320 - DNA, 15 bp, Homo sapiens
tttcctttctcttca

SEQ ID NO: 1803321 - DNA, 15 bp, Homo sapiens
ttcctttctcttcac

SEQ ID NO: 1803322 - DNA, 15 bp, Homo sapiens
tcctttctcttcaca

SEQ ID NO: 1803323 - DNA, 15 bp, Homo sapiens
cctttctcttcacaa

SEQ ID NO: 1803324 - DNA, 15 bp, Homo sapiens
ctttctcttcacaat

SEQ ID NO: 1803325 - DNA, 15 bp, Homo sapiens
tttctcttcacaatt

SEQ ID NO: 1803326 - DNA, 15 bp, Homo sapiens
ttctcttcacaattc

SEQ ID NO: 1803327 - DNA, 15 bp, Homo sapiens
tctcttcacaattct

SEQ ID NO: 1803328 - DNA, 15 bp, Homo sapiens
ctcttcacaattctc

SEQ ID NO: 1803329 - DNA, 15 bp, Homo sapiens
tcttcacaattctcc

SEQ ID NO: 1803330 - DNA, 15 bp, Homo sapiens
cttcacaattctccc

SEQ ID NO: 1803331 - DNA, 15 bp, Homo sapiens
ttcacaattctccca

SEQ ID NO: 1803332 - DNA, 15 bp, Homo sapiens
tcacaattctcccaa

SEQ ID NO: 1803333 - DNA, 15 bp, Homo sapiens
cacaattctcccaac

SEQ ID NO: 1803334 - DNA, 15 bp, Homo sapiens
acaattctcccaact

SEQ ID NO: 1803335 - DNA, 15 bp, Homo sapiens
caattctcccaactc

SEQ ID NO: 1803336 - DNA, 15 bp, Homo sapiens
aattctcccaactct

SEQ ID NO: 1803337 - DNA, 15 bp, Homo sapiens
attctcccaactctg

SEQ ID NO: 1803338 - DNA, 15 bp, Homo sapiens
ttctcccaactctgt

SEQ ID NO: 1803339 - DNA, 15 bp, Homo sapiens
tctcccaactctgtt

SEQ ID NO: 1803340 - DNA, 15 bp, Homo sapiens
ctcccaactctgttg

SEQ ID NO: 1803341 - DNA, 15 bp, Homo sapiens
tcccaactctgttga

SEQ ID NO: 1803342 - DNA, 15 bp, Homo sapiens
cccaactctgttgat

SEQ ID NO: 1803343 - DNA, 15 bp, Homo sapiens
ccaactctgttgatg

SEQ ID NO: 1803344 - DNA, 15 bp, Homo sapiens
caactctgttgatgt

SEQ ID NO: 1803345 - DNA, 15 bp, Homo sapiens
aactctgttgatgta

SEQ ID NO: 1803346 - DNA, 15 bp, Homo sapiens
actctgttgatgtaa

SEQ ID NO: 1803347 - DNA, 15 bp, Homo sapiens
ctctgttgatgtaat

SEQ ID NO: 1803348 - DNA, 15 bp, Homo sapiens
tctgttgatgtaata

SEQ ID NO: 1803349 - DNA, 15 bp, Homo sapiens
ctgttgatgtaataa

SEQ ID NO: 1803350 - DNA, 15 bp, Homo sapiens
tgttgatgtaataaa

SEQ ID NO: 1803351 - DNA, 15 bp, Homo sapiens
gttgatgtaataaag

SEQ ID NO: 1803352 - DNA, 15 bp, Homo sapiens
ttgatgtaataaagg

SEQ ID NO: 1803353 - DNA, 15 bp, Homo sapiens
tgatgtaataaaggg

SEQ ID NO: 1803354 - DNA, 15 bp, Homo sapiens
gatgtaataaagggg

SEQ ID NO: 1803355 - DNA, 15 bp, Homo sapiens
atgtaataaaggggg

SEQ ID NO: 1803356 - DNA, 15 bp, Homo sapiens
tgtaataaagggggg

SEQ ID NO: 1803357 - DNA, 15 bp, Homo sapiens
gtaataaaggggggt

SEQ ID NO: 1803358 - DNA, 15 bp, Homo sapiens
taataaaggggggtt

SEQ ID NO: 1803359 - DNA, 15 bp, Homo sapiens
aataaaggggggttg

SEQ ID NO: 1803360 - DNA, 15 bp, Homo sapiens
ataaaggggggttgc

SEQ ID NO: 1803361 - DNA, 15 bp, Homo sapiens
taaaggggggttgca

SEQ ID NO: 1803362 - DNA, 15 bp, Homo sapiens
aaaggggggttgcat

SEQ ID NO: 1803363 - DNA, 15 bp, Homo sapiens
aaggggggttgcata

SEQ ID NO: 1803364 - DNA, 15 bp, Homo sapiens
aggggggttgcataa

SEQ ID NO: 1803365 - DNA, 15 bp, Homo sapiens
ggggggttgcataat

SEQ ID NO: 1803366 - DNA, 15 bp, Homo sapiens
gggggttgcataata

SEQ ID NO: 1803367 - DNA, 15 bp, Homo sapiens
ggggttgcataataa

SEQ ID NO: 1803368 - DNA, 15 bp, Homo sapiens
gggttgcataataag

SEQ ID NO: 1803369 - DNA, 15 bp, Homo sapiens
ggttgcataataaga

SEQ ID NO: 1803370 - DNA, 15 bp, Homo sapiens
gttgcataataagat

SEQ ID NO: 1803371 - DNA, 15 bp, Homo sapiens
ttgcataataagata

SEQ ID NO: 1803372 - DNA, 15 bp, Homo sapiens
tgcataataagatag

SEQ ID NO: 1803373 - DNA, 15 bp, Homo sapiens
gcataataagatagt

SEQ ID NO: 1803374 - DNA, 15 bp, Homo sapiens
cataataagatagtt

SEQ ID NO: 1803375 - DNA, 15 bp, Homo sapiens
ataataagatagtta

SEQ ID NO: 1803376 - DNA, 15 bp, Homo sapiens
taataagatagttaa

SEQ ID NO: 1803377 - DNA, 15 bp, Homo sapiens
aataagatagttaag

SEQ ID NO: 1803378 - DNA, 15 bp, Homo sapiens
ataagatagttaaga

SEQ ID NO: 1803379 - DNA, 15 bp, Homo sapiens
taagatagttaagat

SEQ ID NO: 1803380 - DNA, 15 bp, Homo sapiens
aagatagttaagatt

SEQ ID NO: 1803381 - DNA, 15 bp, Homo sapiens
agatagttaagatta

SEQ ID NO: 1803382 - DNA, 15 bp, Homo sapiens
gatagttaagattat

SEQ ID NO: 1803383 - DNA, 15 bp, Homo sapiens
atagttaagattata

SEQ ID NO: 1803384 - DNA, 15 bp, Homo sapiens
tagttaagattatat

SEQ ID NO: 1803385 - DNA, 15 bp, Homo sapiens
agttaagattatata

SEQ ID NO: 1803386 - DNA, 15 bp, Homo sapiens
gttaagattatatag

SEQ ID NO: 1803387 - DNA, 15 bp, Homo sapiens
ttaagattatatagt

SEQ ID NO: 1803388 - DNA, 15 bp, Homo sapiens
taagattatatagtt

SEQ ID NO: 1803389 - DNA, 15 bp, Homo sapiens
aagattatatagttt

SEQ ID NO: 1803390 - DNA, 15 bp, Homo sapiens
agattatatagtttg

SEQ ID NO: 1803391 - DNA, 15 bp, Homo sapiens
gattatatagtttgt

SEQ ID NO: 1803392 - DNA, 15 bp, Homo sapiens
attatatagtttgta

SEQ ID NO: 1803393 - DNA, 15 bp, Homo sapiens
ttatatagtttgtag

SEQ ID NO: 1803394 - DNA, 15 bp, Homo sapiens
tatatagtttgtagt

SEQ ID NO: 1803395 - DNA, 15 bp, Homo sapiens
atatagtttgtagtt

SEQ ID NO: 1803396 - DNA, 15 bp, Homo sapiens
tatagtttgtagttg

SEQ ID NO: 1803397 - DNA, 15 bp, Homo sapiens
atagtttgtagttgc

SEQ ID NO: 1803398 - DNA, 15 bp, Homo sapiens
tagtttgtagttgca

SEQ ID NO: 1803399 - DNA, 15 bp, Homo sapiens
agtttgtagttgcat

SEQ ID NO: 1803400 - DNA, 15 bp, Homo sapiens
gtttgtagttgcatc

SEQ ID NO: 1803401 - DNA, 15 bp, Homo sapiens
tttgtagttgcatct

SEQ ID NO: 1803402 - DNA, 15 bp, Homo sapiens
ttgtagttgcatctt

SEQ ID NO: 1803403 - DNA, 15 bp, Homo sapiens
tgtagttgcatcttt

SEQ ID NO: 1803404 - DNA, 15 bp, Homo sapiens
gtagttgcatctttt

SEQ ID NO: 1803405 - DNA, 15 bp, Homo sapiens
agttgcatcttttca

SEQ ID NO: 1803406 - DNA, 15 bp, Homo sapiens
gttgcatcttttcat

SEQ ID NO: 1803407 - DNA, 15 bp, Homo sapiens
ttgcatcttttcatt

SEQ ID NO: 1803408 - DNA, 15 bp, Homo sapiens
tgcatcttttcatta

SEQ ID NO: 1803409 - DNA, 15 bp, Homo sapiens
gcatcttttcattat

SEQ ID NO: 1803410 - DNA, 15 bp, Homo sapiens
catcttttcattatt

SEQ ID NO: 1803411 - DNA, 15 bp, Homo sapiens
atcttttcattattc

SEQ ID NO: 1803412 - DNA, 15 bp, Homo sapiens
tcttttcattattct

SEQ ID NO: 1803413 - DNA, 15 bp, Homo sapiens
cttttcattattctt

SEQ ID NO: 1803414 - DNA, 15 bp, Homo sapiens
ttttcattattcttg

SEQ ID NO: 1803415 - DNA, 15 bp, Homo sapiens
tttcattattcttgg

SEQ ID NO: 1803416 - DNA, 15 bp, Homo sapiens
ttcattattcttggt

SEQ ID NO: 1803417 - DNA, 15 bp, Homo sapiens
tcattattcttggtt

SEQ ID NO: 1803418 - DNA, 15 bp, Homo sapiens
cattattcttggtta

SEQ ID NO: 1803419 - DNA, 15 bp, Homo sapiens
attattcttggttaa

SEQ ID NO: 1803420 - DNA, 15 bp, Homo sapiens
ttattcttggttaag

SEQ ID NO: 1803421 - DNA, 15 bp, Homo sapiens
tattcttggttaaga

SEQ ID NO: 1803422 - DNA, 15 bp, Homo sapiens
attcttggttaagaa

SEQ ID NO: 1803423 - DNA, 15 bp, Homo sapiens
ttcttggttaagaat

SEQ ID NO: 1803424 - DNA, 15 bp, Homo sapiens
tcttggttaagaatc

SEQ ID NO: 1803425 - DNA, 15 bp, Homo sapiens
cttggttaagaatcc

SEQ ID NO: 1803426 - DNA, 15 bp, Homo sapiens
ttggttaagaatcca

SEQ ID NO: 1803427 - DNA, 15 bp, Homo sapiens
tggttaagaatccag

SEQ ID NO: 1803428 - DNA, 15 bp, Homo sapiens
ggttaagaatccagc

SEQ ID NO: 1803429 - DNA, 15 bp, Homo sapiens
gttaagaatccagcc

SEQ ID NO: 1803430 - DNA, 15 bp, Homo sapiens
ttaagaatccagcct

SEQ ID NO: 1803431 - DNA, 15 bp, Homo sapiens
taagaatccagcctc

SEQ ID NO: 1803432 - DNA, 15 bp, Homo sapiens
aagaatccagcctct

SEQ ID NO: 1803433 - DNA, 15 bp, Homo sapiens
agaatccagcctcta

SEQ ID NO: 1803434 - DNA, 15 bp, Homo sapiens
gaatccagcctctaa

SEQ ID NO: 1803435 - DNA, 15 bp, Homo sapiens
aatccagcctctaaa

SEQ ID NO: 1803436 - DNA, 15 bp, Homo sapiens
atccagcctctaaat

SEQ ID NO: 1803437 - DNA, 15 bp, Homo sapiens
tccagcctctaaata

SEQ ID NO: 1803438 - DNA, 15 bp, Homo sapiens
ccagcctctaaataa

SEQ ID NO: 1803439 - DNA, 15 bp, Homo sapiens
cagcctctaaataaa

SEQ ID NO: 1803440 - DNA, 15 bp, Homo sapiens
agcctctaaataaaa

SEQ ID NO: 1803441 - DNA, 15 bp, Homo sapiens
gcctctaaataaaac

SEQ ID NO: 1803442 - DNA, 15 bp, Homo sapiens
cctctaaataaaact

SEQ ID NO: 1803443 - DNA, 15 bp, Homo sapiens
ctctaaataaaactc

SEQ ID NO: 1803444 - DNA, 15 bp, Homo sapiens
tctaaataaaactct

SEQ ID NO: 1803445 - DNA, 15 bp, Homo sapiens
ctaaataaaactctc

SEQ ID NO: 1803446 - DNA, 15 bp, Homo sapiens
taaataaaactctcc

SEQ ID NO: 1803447 - DNA, 15 bp, Homo sapiens
aaataaaactctcca

SEQ ID NO: 1803448 - DNA, 15 bp, Homo sapiens
aataaaactctccat

SEQ ID NO: 1803449 - DNA, 15 bp, Homo sapiens
ataaaactctccatg

SEQ ID NO: 1803450 - DNA, 15 bp, Homo sapiens
taaaactctccatgt

SEQ ID NO: 1803451 - DNA, 15 bp, Homo sapiens
aaaactctccatgtt

SEQ ID NO: 1803452 - DNA, 15 bp, Homo sapiens
aaactctccatgtta

SEQ ID NO: 1803453 - DNA, 15 bp, Homo sapiens
aactctccatgttaa

SEQ ID NO: 1803454 - DNA, 15 bp, Homo sapiens
actctccatgttaag

SEQ ID NO: 1803455 - DNA, 15 bp, Homo sapiens
ctctccatgttaagg

SEQ ID NO: 1803456 - DNA, 15 bp, Homo sapiens
tctccatgttaaggt

SEQ ID NO: 1803457 - DNA, 15 bp, Homo sapiens
ctccatgttaaggtc

SEQ ID NO: 1803458 - DNA, 15 bp, Homo sapiens
tccatgttaaggtcc

SEQ ID NO: 1803459 - DNA, 15 bp, Homo sapiens
ccatgttaaggtcca

SEQ ID NO: 1803460 - DNA, 15 bp, Homo sapiens
catgttaaggtccag

SEQ ID NO: 1803461 - DNA, 15 bp, Homo sapiens
atgttaaggtccaga

SEQ ID NO: 1803462 - DNA, 15 bp, Homo sapiens
tgttaaggtccagaa

SEQ ID NO: 1803463 - DNA, 15 bp, Homo sapiens
gttaaggtccagaat

SEQ ID NO: 1803464 - DNA, 15 bp, Homo sapiens
ttaaggtccagaatg

SEQ ID NO: 1803465 - DNA, 15 bp, Homo sapiens
taaggtccagaatga

SEQ ID NO: 1803466 - DNA, 15 bp, Homo sapiens
aaggtccagaatgac

SEQ ID NO: 1803467 - DNA, 15 bp, Homo sapiens
aggtccagaatgact

SEQ ID NO: 1803468 - DNA, 15 bp, Homo sapiens
ggtccagaatgactg

SEQ ID NO: 1803469 - DNA, 15 bp, Homo sapiens
gtccagaatgactgg

SEQ ID NO: 1803470 - DNA, 15 bp, Homo sapiens
tccagaatgactggc

SEQ ID NO: 1803471 - DNA, 15 bp, Homo sapiens
ccagaatgactggca

SEQ ID NO: 1803472 - DNA, 15 bp, Homo sapiens
cagaatgactggcaa

SEQ ID NO: 1803473 - DNA, 15 bp, Homo sapiens
agaatgactggcaat

SEQ ID NO: 1803474 - DNA, 15 bp, Homo sapiens
gaatgactggcaatt

SEQ ID NO: 1803475 - DNA, 15 bp, Homo sapiens
aatgactggcaattt

SEQ ID NO: 1803476 - DNA, 15 bp, Homo sapiens
atgactggcaattta

SEQ ID NO: 1803477 - DNA, 15 bp, Homo sapiens
tgactggcaatttac

SEQ ID NO: 1803478 - DNA, 15 bp, Homo sapiens
gactggcaatttaca

SEQ ID NO: 1803479 - DNA, 15 bp, Homo sapiens
actggcaatttacat

SEQ ID NO: 1803480 - DNA, 15 bp, Homo sapiens
ctggcaatttacatg

SEQ ID NO: 1803481 - DNA, 15 bp, Homo sapiens
tggcaatttacatga

SEQ ID NO: 1803482 - DNA, 15 bp, Homo sapiens
ggcaatttacatgaa

SEQ ID NO: 1803483 - DNA, 15 bp, Homo sapiens
gcaatttacatgaac

SEQ ID NO: 1803484 - DNA, 15 bp, Homo sapiens
caatttacatgaact

SEQ ID NO: 1803485 - DNA, 15 bp, Homo sapiens
aatttacatgaacta

SEQ ID NO: 1803486 - DNA, 15 bp, Homo sapiens
atttacatgaactat

SEQ ID NO: 1803487 - DNA, 15 bp, Homo sapiens
tttacatgaactata

SEQ ID NO: 1803488 - DNA, 15 bp, Homo sapiens
ttacatgaactataa

SEQ ID NO: 1803489 - DNA, 15 bp, Homo sapiens
tacatgaactataac

SEQ ID NO: 1803490 - DNA, 15 bp, Homo sapiens
acatgaactataacc

SEQ ID NO: 1803491 - DNA, 15 bp, Homo sapiens
catgaactataacct

SEQ ID NO: 1803492 - DNA, 15 bp, Homo sapiens
atgaactataacctg

SEQ ID NO: 1803493 - DNA, 15 bp, Homo sapiens
tgaactataacctga

SEQ ID NO: 1803494 - DNA, 15 bp, Homo sapiens
gaactataacctgaa

SEQ ID NO: 1803495 - DNA, 15 bp, Homo sapiens
aactataacctgaag

SEQ ID NO: 1803496 - DNA, 15 bp, Homo sapiens
actataacctgaaga

SEQ ID NO: 1803497 - DNA, 15 bp, Homo sapiens
ctataacctgaagaa

SEQ ID NO: 1803498 - DNA, 15 bp, Homo sapiens
tataacctgaagaac

SEQ ID NO: 1803499 - DNA, 15 bp, Homo sapiens
ataacctgaagaaca

SEQ ID NO: 1803500 - DNA, 15 bp, Homo sapiens
taacctgaagaacat

SEQ ID NO: 1803501 - DNA, 15 bp, Homo sapiens
aacctgaagaacata

SEQ ID NO: 1803502 - DNA, 15 bp, Homo sapiens
acctgaagaacatac

SEQ ID NO: 1803503 - DNA, 15 bp, Homo sapiens
cctgaagaacatact

SEQ ID NO: 1803504 - DNA, 15 bp, Homo sapiens
ctgaagaacatactt

SEQ ID NO: 1803505 - DNA, 15 bp, Homo sapiens
tgaagaacatactta

SEQ ID NO: 1803506 - DNA, 15 bp, Homo sapiens
gaagaacatacttaa

SEQ ID NO: 1803507 - DNA, 15 bp, Homo sapiens
aagaacatacttaac

SEQ ID NO: 1803508 - DNA, 15 bp, Homo sapiens
agaacatacttaaca

SEQ ID NO: 1803509 - DNA, 15 bp, Homo sapiens
gaacatacttaacat

SEQ ID NO: 1803510 - DNA, 15 bp, Homo sapiens
aacatacttaacatt

SEQ ID NO: 1803511 - DNA, 15 bp, Homo sapiens
acatacttaacattc

SEQ ID NO: 1803512 - DNA, 15 bp, Homo sapiens
catacttaacattct

SEQ ID NO: 1803513 - DNA, 15 bp, Homo sapiens
atacttaacattctt

SEQ ID NO: 1803514 - DNA, 15 bp, Homo sapiens
tacttaacattctta

SEQ ID NO: 1803515 - DNA, 15 bp, Homo sapiens
acttaacattcttaa

SEQ ID NO: 1803516 - DNA, 15 bp, Homo sapiens
cttaacattcttaac

SEQ ID NO: 1803517 - DNA, 15 bp, Homo sapiens
ttaacattcttaacc

SEQ ID NO: 1803518 - DNA, 15 bp, Homo sapiens
taacattcttaacct

SEQ ID NO: 1803519 - DNA, 15 bp, Homo sapiens
aacattcttaacctt

SEQ ID NO: 1803520 - DNA, 15 bp, Homo sapiens
acattcttaaccttt

SEQ ID NO: 1803521 - DNA, 15 bp, Homo sapiens
cattcttaacctttg

SEQ ID NO: 1803522 - DNA, 15 bp, Homo sapiens
attcttaacctttgt

SEQ ID NO: 1803523 - DNA, 15 bp, Homo sapiens
ttcttaacctttgtt

SEQ ID NO: 1803524 - DNA, 15 bp, Homo sapiens
tcttaacctttgttt

SEQ ID NO: 1803525 - DNA, 15 bp, Homo sapiens
cttaacctttgtttt

SEQ ID NO: 1803526 - DNA, 15 bp, Homo sapiens
ttaacctttgttttt

SEQ ID NO: 1803527 - DNA, 15 bp, Homo sapiens
taacctttgtttttt

SEQ ID NO: 1803528 - DNA, 15 bp, Homo sapiens
aacctttgtttttta

SEQ ID NO: 1803529 - DNA, 15 bp, Homo sapiens
acctttgttttttaa

SEQ ID NO: 1803530 - DNA, 15 bp, Homo sapiens
cctttgttttttaaa

SEQ ID NO: 1803531 - DNA, 15 bp, Homo sapiens
ctttgttttttaaaa

SEQ ID NO: 1803532 - DNA, 15 bp, Homo sapiens
tttgttttttaaaat

SEQ ID NO: 1803533 - DNA, 15 bp, Homo sapiens
ttgttttttaaaatg

SEQ ID NO: 1803534 - DNA, 15 bp, Homo sapiens
tgttttttaaaatga

SEQ ID NO: 1803535 - DNA, 15 bp, Homo sapiens
gttttttaaaatgaa

SEQ ID NO: 1803536 - DNA, 15 bp, Homo sapiens
ttttttaaaatgaat

SEQ ID NO: 1803537 - DNA, 15 bp, Homo sapiens
tttttaaaatgaatt

SEQ ID NO: 1803538 - DNA, 15 bp, Homo sapiens
ttttaaaatgaattc

SEQ ID NO: 1803539 - DNA, 15 bp, Homo sapiens
tttaaaatgaattca

SEQ ID NO: 1803540 - DNA, 15 bp, Homo sapiens
ttaaaatgaattcaa

SEQ ID NO: 1803541 - DNA, 15 bp, Homo sapiens
taaaatgaattcaat

SEQ ID NO: 1803542 - DNA, 15 bp, Homo sapiens
aaaatgaattcaatg

SEQ ID NO: 1803543 - DNA, 15 bp, Homo sapiens
aaatgaattcaatgg

SEQ ID NO: 1803544 - DNA, 15 bp, Homo sapiens
aatgaattcaatggc

SEQ ID NO: 1803545 - DNA, 15 bp, Homo sapiens
atgaattcaatggca

SEQ ID NO: 1803546 - DNA, 15 bp, Homo sapiens
tgaattcaatggcat

SEQ ID NO: 1803547 - DNA, 15 bp, Homo sapiens
gaattcaatggcatc

SEQ ID NO: 1803548 - DNA, 15 bp, Homo sapiens
aattcaatggcatct

SEQ ID NO: 1803549 - DNA, 15 bp, Homo sapiens
attcaatggcatctt

SEQ ID NO: 1803550 - DNA, 15 bp, Homo sapiens
ttcaatggcatcttc

SEQ ID NO: 1803551 - DNA, 15 bp, Homo sapiens
tcaatggcatcttca

SEQ ID NO: 1803552 - DNA, 15 bp, Homo sapiens
caatggcatcttcac

SEQ ID NO: 1803553 - DNA, 15 bp, Homo sapiens
aatggcatcttcaca

SEQ ID NO: 1803554 - DNA, 15 bp, Homo sapiens
atggcatcttcacaa

SEQ ID NO: 1803555 - DNA, 15 bp, Homo sapiens
tggcatcttcacaaa

SEQ ID NO: 1803556 - DNA, 15 bp, Homo sapiens
ggcatcttcacaaac

SEQ ID NO: 1803557 - DNA, 15 bp, Homo sapiens
gcatcttcacaaacc

SEQ ID NO: 1803558 - DNA, 15 bp, Homo sapiens
catcttcacaaacct

SEQ ID NO: 1803559 - DNA, 15 bp, Homo sapiens
atcttcacaaacctc

SEQ ID NO: 1803560 - DNA, 15 bp, Homo sapiens
tcttcacaaacctct

SEQ ID NO: 1803561 - DNA, 15 bp, Homo sapiens
cttcacaaacctcta

SEQ ID NO: 1803562 - DNA, 15 bp, Homo sapiens
ttcacaaacctctat

SEQ ID NO: 1803563 - DNA, 15 bp, Homo sapiens
tcacaaacctctatc

SEQ ID NO: 1803564 - DNA, 15 bp, Homo sapiens
cacaaacctctatca

SEQ ID NO: 1803565 - DNA, 15 bp, Homo sapiens
acaaacctctatcag

SEQ ID NO: 1803566 - DNA, 15 bp, Homo sapiens
caaacctctatcagc

SEQ ID NO: 1803567 - DNA, 15 bp, Homo sapiens
aaacctctatcagca

SEQ ID NO: 1803568 - DNA, 15 bp, Homo sapiens
aacctctatcagcag

SEQ ID NO: 1803569 - DNA, 15 bp, Homo sapiens
acctctatcagcaga

SEQ ID NO: 1803570 - DNA, 15 bp, Homo sapiens
cctctatcagcagat

SEQ ID NO: 1803571 - DNA, 15 bp, Homo sapiens
ctctatcagcagatg

SEQ ID NO: 1803572 - DNA, 15 bp, Homo sapiens
tctatcagcagatga

SEQ ID NO: 1803573 - DNA, 15 bp, Homo sapiens
ctatcagcagatgag

SEQ ID NO: 1803574 - DNA, 15 bp, Homo sapiens
tatcagcagatgagg

SEQ ID NO: 1803575 - DNA, 15 bp, Homo sapiens
atcagcagatgaggg

SEQ ID NO: 1803576 - DNA, 15 bp, Homo sapiens
tcagcagatgagggc

SEQ ID NO: 1803577 - DNA, 15 bp, Homo sapiens
cagcagatgagggca

SEQ ID NO: 1803578 - DNA, 15 bp, Homo sapiens
agcagatgagggcac

SEQ ID NO: 1803579 - DNA, 15 bp, Homo sapiens
gcagatgagggcact

SEQ ID NO: 1803580 - DNA, 15 bp, Homo sapiens
cagatgagggcactt

SEQ ID NO: 1803581 - DNA, 15 bp, Homo sapiens
agatgagggcacttc

SEQ ID NO: 1803582 - DNA, 15 bp, Homo sapiens
gatgagggcacttct

SEQ ID NO: 1803583 - DNA, 15 bp, Homo sapiens
atgagggcacttctt

SEQ ID NO: 1803584 - DNA, 15 bp, Homo sapiens
tgagggcacttcttc

SEQ ID NO: 1803585 - DNA, 15 bp, Homo sapiens
gagggcacttcttca

SEQ ID NO: 1803586 - DNA, 15 bp, Homo sapiens
agggcacttcttcat

SEQ ID NO: 1803587 - DNA, 15 bp, Homo sapiens
gggcacttcttcatt

SEQ ID NO: 1803588 - DNA, 15 bp, Homo sapiens
ggcacttcttcattc

SEQ ID NO: 1803589 - DNA, 15 bp, Homo sapiens
gcacttcttcattcc

SEQ ID NO: 1803590 - DNA, 15 bp, Homo sapiens
cacttcttcattcct

SEQ ID NO: 1803591 - DNA, 15 bp, Homo sapiens
acttcttcattccta

SEQ ID NO: 1803592 - DNA, 15 bp, Homo sapiens
cttcttcattcctat

SEQ ID NO: 1803593 - DNA, 15 bp, Homo sapiens
ttcttcattcctata

SEQ ID NO: 1803594 - DNA, 15 bp, Homo sapiens
tcttcattcctataa

SEQ ID NO: 1803595 - DNA, 15 bp, Homo sapiens
cttcattcctataaa

SEQ ID NO: 1803596 - DNA, 15 bp, Homo sapiens
ttcattcctataaaa

SEQ ID NO: 1803597 - DNA, 15 bp, Homo sapiens
tcattcctataaaat

SEQ ID NO: 1803598 - DNA, 15 bp, Homo sapiens
cattcctataaaatc

SEQ ID NO: 1803599 - DNA, 15 bp, Homo sapiens
attcctataaaatct

SEQ ID NO: 1803600 - DNA, 15 bp, Homo sapiens
ttcctataaaatctt

SEQ ID NO: 1803601 - DNA, 15 bp, Homo sapiens
tcctataaaatctta

SEQ ID NO: 1803602 - DNA, 15 bp, Homo sapiens
cctataaaatcttaa

SEQ ID NO: 1803603 - DNA, 15 bp, Homo sapiens
ctataaaatcttaac

SEQ ID NO: 1803604 - DNA, 15 bp, Homo sapiens
tataaaatcttaacc

SEQ ID NO: 1803605 - DNA, 15 bp, Homo sapiens
ataaaatcttaacct

SEQ ID NO: 1803606 - DNA, 15 bp, Homo sapiens
taaaatcttaacctt

SEQ ID NO: 1803607 - DNA, 15 bp, Homo sapiens
aaaatcttaaccttt

SEQ ID NO: 1803608 - DNA, 15 bp, Homo sapiens
aaatcttaacctttc

SEQ ID NO: 1803609 - DNA, 15 bp, Homo sapiens
aatcttaacctttct

SEQ ID NO: 1803610 - DNA, 15 bp, Homo sapiens
atcttaacctttctc

SEQ ID NO: 1803611 - DNA, 15 bp, Homo sapiens
tcttaacctttctct

SEQ ID NO: 1803612 - DNA, 15 bp, Homo sapiens
cttaacctttctctg

SEQ ID NO: 1803613 - DNA, 15 bp, Homo sapiens
ttaacctttctctgt

SEQ ID NO: 1803614 - DNA, 15 bp, Homo sapiens
taacctttctctgtg

SEQ ID NO: 1803615 - DNA, 15 bp, Homo sapiens
aacctttctctgtgt

SEQ ID NO: 1803616 - DNA, 15 bp, Homo sapiens
acctttctctgtgta

SEQ ID NO: 1803617 - DNA, 15 bp, Homo sapiens
cctttctctgtgtaa

SEQ ID NO: 1803618 - DNA, 15 bp, Homo sapiens
ctttctctgtgtaaa

SEQ ID NO: 1803619 - DNA, 15 bp, Homo sapiens
tttctctgtgtaaat

SEQ ID NO: 1803620 - DNA, 15 bp, Homo sapiens
ttctctgtgtaaatt

SEQ ID NO: 1803621 - DNA, 15 bp, Homo sapiens
tctctgtgtaaatta

SEQ ID NO: 1803622 - DNA, 15 bp, Homo sapiens
ctctgtgtaaattag

SEQ ID NO: 1803623 - DNA, 15 bp, Homo sapiens
tctgtgtaaattagt

SEQ ID NO: 1803624 - DNA, 15 bp, Homo sapiens
ctgtgtaaattagtg

SEQ ID NO: 1803625 - DNA, 15 bp, Homo sapiens
tgtgtaaattagtgg

SEQ ID NO: 1803626 - DNA, 15 bp, Homo sapiens
gtgtaaattagtgga

SEQ ID NO: 1803627 - DNA, 15 bp, Homo sapiens
tgtaaattagtggac

SEQ ID NO: 1803628 - DNA, 15 bp, Homo sapiens
gtaaattagtggaca

SEQ ID NO: 1803629 - DNA, 15 bp, Homo sapiens
taaattagtggacaa

SEQ ID NO: 1803630 - DNA, 15 bp, Homo sapiens
aaattagtggacaat

SEQ ID NO: 1803631 - DNA, 15 bp, Homo sapiens
aattagtggacaatt

SEQ ID NO: 1803632 - DNA, 15 bp, Homo sapiens
attagtggacaatta

SEQ ID NO: 1803633 - DNA, 15 bp, Homo sapiens
ttagtggacaattat

SEQ ID NO: 1803634 - DNA, 15 bp, Homo sapiens
tagtggacaattatt

SEQ ID NO: 1803635 - DNA, 15 bp, Homo sapiens
agtggacaattattt

SEQ ID NO: 1803636 - DNA, 15 bp, Homo sapiens
gtggacaattatttt

SEQ ID NO: 1803637 - DNA, 15 bp, Homo sapiens
tggacaattatttta

SEQ ID NO: 1803638 - DNA, 15 bp, Homo sapiens
ggacaattattttag

SEQ ID NO: 1803639 - DNA, 15 bp, Homo sapiens
gacaattattttaga

SEQ ID NO: 1803640 - DNA, 15 bp, Homo sapiens
acaattattttagaa

SEQ ID NO: 1803641 - DNA, 15 bp, Homo sapiens
caattattttagaag

SEQ ID NO: 1803642 - DNA, 15 bp, Homo sapiens
aattattttagaagc

SEQ ID NO: 1803643 - DNA, 15 bp, Homo sapiens
attattttagaagca

SEQ ID NO: 1803644 - DNA, 15 bp, Homo sapiens
ttattttagaagcac

SEQ ID NO: 1803645 - DNA, 15 bp, Homo sapiens
tattttagaagcact

SEQ ID NO: 1803646 - DNA, 15 bp, Homo sapiens
attttagaagcacta

SEQ ID NO: 1803647 - DNA, 15 bp, Homo sapiens
ttttagaagcactaa

SEQ ID NO: 1803648 - DNA, 15 bp, Homo sapiens
tttagaagcactaaa

SEQ ID NO: 1803649 - DNA, 15 bp, Homo sapiens
ttagaagcactaaaa

SEQ ID NO: 1803650 - DNA, 15 bp, Homo sapiens
tagaagcactaaaac

SEQ ID NO: 1803651 - DNA, 15 bp, Homo sapiens
agaagcactaaaaca

SEQ ID NO: 1803652 - DNA, 15 bp, Homo sapiens
gaagcactaaaacat

SEQ ID NO: 1803653 - DNA, 15 bp, Homo sapiens
aagcactaaaacatt

SEQ ID NO: 1803654 - DNA, 15 bp, Homo sapiens
agcactaaaacattg

SEQ ID NO: 1803655 - DNA, 15 bp, Homo sapiens
gcactaaaacattga

SEQ ID NO: 1803656 - DNA, 15 bp, Homo sapiens
cactaaaacattgac

SEQ ID NO: 1803657 - DNA, 15 bp, Homo sapiens
actaaaacattgact

SEQ ID NO: 1803658 - DNA, 15 bp, Homo sapiens
ctaaaacattgactt

SEQ ID NO: 1803659 - DNA, 15 bp, Homo sapiens
taaaacattgacttc

SEQ ID NO: 1803660 - DNA, 15 bp, Homo sapiens
aaaacattgacttcc

SEQ ID NO: 1803661 - DNA, 15 bp, Homo sapiens
aaacattgacttcct

SEQ ID NO: 1803662 - DNA, 15 bp, Homo sapiens
aacattgacttcctt

SEQ ID NO: 1803663 - DNA, 15 bp, Homo sapiens
acattgacttccttg

SEQ ID NO: 1803664 - DNA, 15 bp, Homo sapiens
cattgacttccttgt

SEQ ID NO: 1803665 - DNA, 15 bp, Homo sapiens
attgacttccttgtg

SEQ ID NO: 1803666 - DNA, 15 bp, Homo sapiens
ttgacttccttgtgt

SEQ ID NO: 1803667 - DNA, 15 bp, Homo sapiens
tgacttccttgtgtg

SEQ ID NO: 1803668 - DNA, 15 bp, Homo sapiens
gacttccttgtgtga

SEQ ID NO: 1803669 - DNA, 15 bp, Homo sapiens
acttccttgtgtgag

SEQ ID NO: 1803670 - DNA, 15 bp, Homo sapiens
cttccttgtgtgagc

SEQ ID NO: 1803671 - DNA, 15 bp, Homo sapiens
ttccttgtgtgagca

SEQ ID NO: 1803672 - DNA, 15 bp, Homo sapiens
tccttgtgtgagcaa

SEQ ID NO: 1803673 - DNA, 15 bp, Homo sapiens
ccttgtgtgagcaag

SEQ ID NO: 1803674 - DNA, 15 bp, Homo sapiens
cttgtgtgagcaaga

SEQ ID NO: 1803675 - DNA, 15 bp, Homo sapiens
ttgtgtgagcaagag

SEQ ID NO: 1803676 - DNA, 15 bp, Homo sapiens
tgtgtgagcaagaga

SEQ ID NO: 1803677 - DNA, 15 bp, Homo sapiens
gtgtgagcaagagag

SEQ ID NO: 1803678 - DNA, 15 bp, Homo sapiens
tgtgagcaagagagg

SEQ ID NO: 1803679 - DNA, 15 bp, Homo sapiens
gtgagcaagagagga

SEQ ID NO: 1803680 - DNA, 15 bp, Homo sapiens
tgagcaagagaggaa

SEQ ID NO: 1803681 - DNA, 15 bp, Homo sapiens
gagcaagagaggaaa

SEQ ID NO: 1803682 - DNA, 15 bp, Homo sapiens
agcaagagaggaaac

SEQ ID NO: 1803683 - DNA, 15 bp, Homo sapiens
gcaagagaggaaaca

SEQ ID NO: 1803684 - DNA, 15 bp, Homo sapiens
caagagaggaaacaa

SEQ ID NO: 1803685 - DNA, 15 bp, Homo sapiens
aagagaggaaacaaa

SEQ ID NO: 1803686 - DNA, 15 bp, Homo sapiens
agagaggaaacaaaa

SEQ ID NO: 1803687 - DNA, 15 bp, Homo sapiens
gagaggaaacaaaac

SEQ ID NO: 1803688 - DNA, 15 bp, Homo sapiens
agaggaaacaaaact

SEQ ID NO: 1803689 - DNA, 15 bp, Homo sapiens
gaggaaacaaaactt

SEQ ID NO: 1803690 - DNA, 15 bp, Homo sapiens
aggaaacaaaacttt

SEQ ID NO: 1803691 - DNA, 15 bp, Homo sapiens
ggaaacaaaactttt

SEQ ID NO: 1803692 - DNA, 15 bp, Homo sapiens
gaaacaaaacttttg

SEQ ID NO: 1803693 - DNA, 15 bp, Homo sapiens
aaacaaaacttttgg

SEQ ID NO: 1803694 - DNA, 15 bp, Homo sapiens
aacaaaacttttggg

SEQ ID NO: 1803695 - DNA, 15 bp, Homo sapiens
acaaaacttttggga

SEQ ID NO: 1803696 - DNA, 15 bp, Homo sapiens
caaaacttttgggaa

SEQ ID NO: 1803697 - DNA, 15 bp, Homo sapiens
aaaacttttgggaaa

SEQ ID NO: 1803698 - DNA, 15 bp, Homo sapiens
aaacttttgggaaaa

SEQ ID NO: 1803699 - DNA, 15 bp, Homo sapiens
aacttttgggaaaat

SEQ ID NO: 1803700 - DNA, 15 bp, Homo sapiens
acttttgggaaaatc

SEQ ID NO: 1803701 - DNA, 15 bp, Homo sapiens
cttttgggaaaatct

SEQ ID NO: 1803702 - DNA, 15 bp, Homo sapiens
ttttgggaaaatcta

SEQ ID NO: 1803703 - DNA, 15 bp, Homo sapiens
tttgggaaaatctaa

SEQ ID NO: 1803704 - DNA, 15 bp, Homo sapiens
ttgggaaaatctaag

SEQ ID NO: 1803705 - DNA, 15 bp, Homo sapiens
tgggaaaatctaaga

SEQ ID NO: 1803706 - DNA, 15 bp, Homo sapiens
gggaaaatctaagat

SEQ ID NO: 1803707 - DNA, 15 bp, Homo sapiens
ggaaaatctaagata

SEQ ID NO: 1803708 - DNA, 15 bp, Homo sapiens
gaaaatctaagataa

SEQ ID NO: 1803709 - DNA, 15 bp, Homo sapiens
aaaatctaagataaa

SEQ ID NO: 1803710 - DNA, 15 bp, Homo sapiens
aaatctaagataaac

SEQ ID NO: 1803711 - DNA, 15 bp, Homo sapiens
aatctaagataaact

SEQ ID NO: 1803712 - DNA, 15 bp, Homo sapiens
atctaagataaactt

SEQ ID NO: 1803713 - DNA, 15 bp, Homo sapiens
tctaagataaacttg

SEQ ID NO: 1803714 - DNA, 15 bp, Homo sapiens
ctaagataaacttgt

SEQ ID NO: 1803715 - DNA, 15 bp, Homo sapiens
taagataaacttgtg

SEQ ID NO: 1803716 - DNA, 15 bp, Homo sapiens
aagataaacttgtgc

SEQ ID NO: 1803717 - DNA, 15 bp, Homo sapiens
agataaacttgtgca

SEQ ID NO: 1803718 - DNA, 15 bp, Homo sapiens
gataaacttgtgcaa

SEQ ID NO: 1803719 - DNA, 15 bp, Homo sapiens
ataaacttgtgcaaa

SEQ ID NO: 1803720 - DNA, 15 bp, Homo sapiens
taaacttgtgcaaaa

SEQ ID NO: 1803721 - DNA, 15 bp, Homo sapiens
aaacttgtgcaaaaa

SEQ ID NO: 1803722 - DNA, 15 bp, Homo sapiens
aacttgtgcaaaaaa

SEQ ID NO: 1803723 - DNA, 15 bp, Homo sapiens
acttgtgcaaaaaaa

SEQ ID NO: 1803724 - DNA, 15 bp, Homo sapiens
cttgtgcaaaaaaaa

SEQ ID NO: 1803725 - DNA, 15 bp, Homo sapiens
ttgtgcaaaaaaaag

SEQ ID NO: 1803726 - DNA, 15 bp, Homo sapiens
tgtgcaaaaaaaagg

SEQ ID NO: 1803727 - DNA, 15 bp, Homo sapiens
gtgcaaaaaaaagga

SEQ ID NO: 1803728 - DNA, 15 bp, Homo sapiens
tgcaaaaaaaaggat

SEQ ID NO: 1803729 - DNA, 15 bp, Homo sapiens
gcaaaaaaaaggatc

SEQ ID NO: 1803730 - DNA, 15 bp, Homo sapiens
caaaaaaaaggatcc

SEQ ID NO: 1803731 - DNA, 15 bp, Homo sapiens
aaaaaaaaggatcca

SEQ ID NO: 1803732 - DNA, 15 bp, Homo sapiens
aaaaaaaggatccat

SEQ ID NO: 1803733 - DNA, 15 bp, Homo sapiens
aaaaaaggatccatt

SEQ ID NO: 1803734 - DNA, 15 bp, Homo sapiens
aaaaaggatccatta

SEQ ID NO: 1803735 - DNA, 15 bp, Homo sapiens
aaaaggatccattaa

SEQ ID NO: 1803736 - DNA, 15 bp, Homo sapiens
aaaggatccattaat

SEQ ID NO: 1803737 - DNA, 15 bp, Homo sapiens
aaggatccattaatt

SEQ ID NO: 1803738 - DNA, 15 bp, Homo sapiens
aggatccattaattt

SEQ ID NO: 1803739 - DNA, 15 bp, Homo sapiens
ggatccattaatttc

SEQ ID NO: 1803740 - DNA, 15 bp, Homo sapiens
gatccattaatttct

SEQ ID NO: 1803741 - DNA, 15 bp, Homo sapiens
atccattaatttcta

SEQ ID NO: 1803742 - DNA, 15 bp, Homo sapiens
tccattaatttctaa

SEQ ID NO: 1803743 - DNA, 15 bp, Homo sapiens
ccattaatttctaat

SEQ ID NO: 1803744 - DNA, 15 bp, Homo sapiens
cattaatttctaatg

SEQ ID NO: 1803745 - DNA, 15 bp, Homo sapiens
attaatttctaatgt

SEQ ID NO: 1803746 - DNA, 15 bp, Homo sapiens
ttaatttctaatgta

SEQ ID NO: 1803747 - DNA, 15 bp, Homo sapiens
taatttctaatgtag

SEQ ID NO: 1803748 - DNA, 15 bp, Homo sapiens
aatttctaatgtagt

SEQ ID NO: 1803749 - DNA, 15 bp, Homo sapiens
atttctaatgtagtg

SEQ ID NO: 1803750 - DNA, 15 bp, Homo sapiens
tttctaatgtagtgt

SEQ ID NO: 1803751 - DNA, 15 bp, Homo sapiens
ttctaatgtagtgtc

SEQ ID NO: 1803752 - DNA, 15 bp, Homo sapiens
tctaatgtagtgtcc

SEQ ID NO: 1803753 - DNA, 15 bp, Homo sapiens
ctaatgtagtgtcct

SEQ ID NO: 1803754 - DNA, 15 bp, Homo sapiens
taatgtagtgtcctt

SEQ ID NO: 1803755 - DNA, 15 bp, Homo sapiens
aatgtagtgtcctta

SEQ ID NO: 1803756 - DNA, 15 bp, Homo sapiens
atgtagtgtccttat

SEQ ID NO: 1803757 - DNA, 15 bp, Homo sapiens
tgtagtgtccttatg

SEQ ID NO: 1803758 - DNA, 15 bp, Homo sapiens
gtagtgtccttatga

SEQ ID NO: 1803759 - DNA, 15 bp, Homo sapiens
tagtgtccttatgaa

SEQ ID NO: 1803760 - DNA, 15 bp, Homo sapiens
gtgtccttatgaaaa

SEQ ID NO: 1803761 - DNA, 15 bp, Homo sapiens
tgtccttatgaaaat

SEQ ID NO: 1803762 - DNA, 15 bp, Homo sapiens
gtccttatgaaaatg

SEQ ID NO: 1803763 - DNA, 15 bp, Homo sapiens
tccttatgaaaatgt

SEQ ID NO: 1803764 - DNA, 15 bp, Homo sapiens
ccttatgaaaatgta

SEQ ID NO: 1803765 - DNA, 15 bp, Homo sapiens
cttatgaaaatgtac

SEQ ID NO: 1803766 - DNA, 15 bp, Homo sapiens
ttatgaaaatgtacc

SEQ ID NO: 1803767 - DNA, 15 bp, Homo sapiens
tatgaaaatgtacct

SEQ ID NO: 1803768 - DNA, 15 bp, Homo sapiens
atgaaaatgtacctt

SEQ ID NO: 1803769 - DNA, 15 bp, Homo sapiens
tgaaaatgtaccttt

SEQ ID NO: 1803770 - DNA, 15 bp, Homo sapiens
gaaaatgtacctttt

SEQ ID NO: 1803771 - DNA, 15 bp, Homo sapiens
aaaatgtaccttttc

SEQ ID NO: 1803772 - DNA, 15 bp, Homo sapiens
aaatgtaccttttct

SEQ ID NO: 1803773 - DNA, 15 bp, Homo sapiens
aatgtaccttttctc

SEQ ID NO: 1803774 - DNA, 15 bp, Homo sapiens
atgtaccttttctct

SEQ ID NO: 1803775 - DNA, 15 bp, Homo sapiens
tgtaccttttctctc

SEQ ID NO: 1803776 - DNA, 15 bp, Homo sapiens
gtaccttttctctca

SEQ ID NO: 1803777 - DNA, 15 bp, Homo sapiens
taccttttctctcat

SEQ ID NO: 1803778 - DNA, 15 bp, Homo sapiens
accttttctctcata

SEQ ID NO: 1803779 - DNA, 15 bp, Homo sapiens
ccttttctctcatat

SEQ ID NO: 1803780 - DNA, 15 bp, Homo sapiens
cttttctctcatatc

SEQ ID NO: 1803781 - DNA, 15 bp, Homo sapiens
ttttctctcatatca

SEQ ID NO: 1803782 - DNA, 15 bp, Homo sapiens
tttctctcatatcac

SEQ ID NO: 1803783 - DNA, 15 bp, Homo sapiens
ttctctcatatcact

SEQ ID NO: 1803784 - DNA, 15 bp, Homo sapiens
tctctcatatcacta

SEQ ID NO: 1803785 - DNA, 15 bp, Homo sapiens
ctctcatatcactaa

SEQ ID NO: 1803786 - DNA, 15 bp, Homo sapiens
tctcatatcactaag

SEQ ID NO: 1803787 - DNA, 15 bp, Homo sapiens
ctcatatcactaagg

SEQ ID NO: 1803788 - DNA, 15 bp, Homo sapiens
tcatatcactaaggt

SEQ ID NO: 1803789 - DNA, 15 bp, Homo sapiens
catatcactaaggtt

SEQ ID NO: 1803790 - DNA, 15 bp, Homo sapiens
atatcactaaggttc

SEQ ID NO: 1803791 - DNA, 15 bp, Homo sapiens
tatcactaaggttct

SEQ ID NO: 1803792 - DNA, 15 bp, Homo sapiens
atcactaaggttctt

SEQ ID NO: 1803793 - DNA, 15 bp, Homo sapiens
tcactaaggttcttc

SEQ ID NO: 1803794 - DNA, 15 bp, Homo sapiens
cactaaggttcttca

SEQ ID NO: 1803795 - DNA, 15 bp, Homo sapiens
actaaggttcttcaa

SEQ ID NO: 1803796 - DNA, 15 bp, Homo sapiens
ctaaggttcttcaaa

SEQ ID NO: 1803797 - DNA, 15 bp, Homo sapiens
taaggttcttcaaac

SEQ ID NO: 1803798 - DNA, 15 bp, Homo sapiens
aaggttcttcaaaca

SEQ ID NO: 1803799 - DNA, 15 bp, Homo sapiens
aggttcttcaaacac

SEQ ID NO: 1803800 - DNA, 15 bp, Homo sapiens
ggttcttcaaacact

SEQ ID NO: 1803801 - DNA, 15 bp, Homo sapiens
gttcttcaaacactc

SEQ ID NO: 1803802 - DNA, 15 bp, Homo sapiens
ttcttcaaacactca

SEQ ID NO: 1803803 - DNA, 15 bp, Homo sapiens
tcttcaaacactcat

SEQ ID NO: 1803804 - DNA, 15 bp, Homo sapiens
cttcaaacactcatc

SEQ ID NO: 1803805 - DNA, 15 bp, Homo sapiens
ttcaaacactcatct

SEQ ID NO: 1803806 - DNA, 15 bp, Homo sapiens
tcaaacactcatctg

SEQ ID NO: 1803807 - DNA, 15 bp, Homo sapiens
caaacactcatctgt

SEQ ID NO: 1803808 - DNA, 15 bp, Homo sapiens
aaacactcatctgtt

SEQ ID NO: 1803809 - DNA, 15 bp, Homo sapiens
aacactcatctgtta

SEQ ID NO: 1803810 - DNA, 15 bp, Homo sapiens
acactcatctgttag

SEQ ID NO: 1803811 - DNA, 15 bp, Homo sapiens
cactcatctgttaga

SEQ ID NO: 1803812 - DNA, 15 bp, Homo sapiens
actcatctgttagaa

SEQ ID NO: 1803813 - DNA, 15 bp, Homo sapiens
ctcatctgttagaag

SEQ ID NO: 1803814 - DNA, 15 bp, Homo sapiens
tcatctgttagaagg

SEQ ID NO: 1803815 - DNA, 15 bp, Homo sapiens
catctgttagaagga

SEQ ID NO: 1803816 - DNA, 15 bp, Homo sapiens
atctgttagaaggaa

SEQ ID NO: 1803817 - DNA, 15 bp, Homo sapiens
ctgttagaaggaaat

SEQ ID NO: 1803818 - DNA, 15 bp, Homo sapiens
tgttagaaggaaatt

SEQ ID NO: 1803819 - DNA, 15 bp, Homo sapiens
gttagaaggaaattt

SEQ ID NO: 1803820 - DNA, 15 bp, Homo sapiens
ttagaaggaaatttt

SEQ ID NO: 1803821 - DNA, 15 bp, Homo sapiens
tagaaggaaatttta

SEQ ID NO: 1803822 - DNA, 15 bp, Homo sapiens
agaaggaaattttaa

SEQ ID NO: 1803823 - DNA, 15 bp, Homo sapiens
gaaggaaattttaaa

SEQ ID NO: 1803824 - DNA, 15 bp, Homo sapiens
aaggaaattttaaaa

SEQ ID NO: 1803825 - DNA, 15 bp, Homo sapiens
aggaaattttaaaaa

SEQ ID NO: 1803826 - DNA, 15 bp, Homo sapiens
ggaaattttaaaaag

SEQ ID NO: 1803827 - DNA, 15 bp, Homo sapiens
gaaattttaaaaagg

SEQ ID NO: 1803828 - DNA, 15 bp, Homo sapiens
aaattttaaaaagga

SEQ ID NO: 1803829 - DNA, 15 bp, Homo sapiens
aattttaaaaaggaa

SEQ ID NO: 1803830 - DNA, 15 bp, Homo sapiens
attttaaaaaggaaa

SEQ ID NO: 1803831 - DNA, 15 bp, Homo sapiens
ttttaaaaaggaaat

SEQ ID NO: 1803832 - DNA, 15 bp, Homo sapiens
tttaaaaaggaaatc

SEQ ID NO: 1803833 - DNA, 15 bp, Homo sapiens
taaaaaggaaatctt

SEQ ID NO: 1803834 - DNA, 15 bp, Homo sapiens
aaaaaggaaatcttt

SEQ ID NO: 1803835 - DNA, 15 bp, Homo sapiens
aaaaggaaatctttc

SEQ ID NO: 1803836 - DNA, 15 bp, Homo sapiens
aaaggaaatctttct

SEQ ID NO: 1803837 - DNA, 15 bp, Homo sapiens
aaggaaatctttctc

SEQ ID NO: 1803838 - DNA, 15 bp, Homo sapiens
aggaaatctttctcc

SEQ ID NO: 1803839 - DNA, 15 bp, Homo sapiens
ggaaatctttctcct

SEQ ID NO: 1803840 - DNA, 15 bp, Homo sapiens
gaaatctttctcctt

SEQ ID NO: 1803841 - DNA, 15 bp, Homo sapiens
aaatctttctccttc

SEQ ID NO: 1803842 - DNA, 15 bp, Homo sapiens
aatctttctccttcc

SEQ ID NO: 1803843 - DNA, 15 bp, Homo sapiens
atctttctccttccc

SEQ ID NO: 1803844 - DNA, 15 bp, Homo sapiens
tctttctccttccca

SEQ ID NO: 1803845 - DNA, 15 bp, Homo sapiens
ctttctccttcccat

SEQ ID NO: 1803846 - DNA, 15 bp, Homo sapiens
tttctccttcccata

SEQ ID NO: 1803847 - DNA, 15 bp, Homo sapiens
ttctccttcccatag

SEQ ID NO: 1803848 - DNA, 15 bp, Homo sapiens
tctccttcccatagg

SEQ ID NO: 1803849 - DNA, 15 bp, Homo sapiens
ctccttcccatagga

SEQ ID NO: 1803850 - DNA, 15 bp, Homo sapiens
tccttcccataggag

SEQ ID NO: 1803851 - DNA, 15 bp, Homo sapiens
ccttcccataggagt

SEQ ID NO: 1803852 - DNA, 15 bp, Homo sapiens
cttcccataggagtg

SEQ ID NO: 1803853 - DNA, 15 bp, Homo sapiens
ttcccataggagtgt

SEQ ID NO: 1803854 - DNA, 15 bp, Homo sapiens
tcccataggagtgtc

SEQ ID NO: 1803855 - DNA, 15 bp, Homo sapiens
cccataggagtgtca

SEQ ID NO: 1803856 - DNA, 15 bp, Homo sapiens
ccataggagtgtcaa

SEQ ID NO: 1803857 - DNA, 15 bp, Homo sapiens
cataggagtgtcaat

SEQ ID NO: 1803858 - DNA, 15 bp, Homo sapiens
ataggagtgtcaatg

SEQ ID NO: 1803859 - DNA, 15 bp, Homo sapiens
taggagtgtcaatgg

SEQ ID NO: 1803860 - DNA, 15 bp, Homo sapiens
aggagtgtcaatggc

SEQ ID NO: 1803861 - DNA, 15 bp, Homo sapiens
ggagtgtcaatggca

SEQ ID NO: 1803862 - DNA, 15 bp, Homo sapiens
gagtgtcaatggcaa

SEQ ID NO: 1803863 - DNA, 15 bp, Homo sapiens
agtgtcaatggcaag

SEQ ID NO: 1803864 - DNA, 15 bp, Homo sapiens
gtgtcaatggcaagc

SEQ ID NO: 1803865 - DNA, 15 bp, Homo sapiens
tgtcaatggcaagcc

SEQ ID NO: 1803866 - DNA, 15 bp, Homo sapiens
gtcaatggcaagcct

SEQ ID NO: 1803867 - DNA, 15 bp, Homo sapiens
tcaatggcaagccta

SEQ ID NO: 1803868 - DNA, 15 bp, Homo sapiens
caatggcaagcctat

SEQ ID NO: 1803869 - DNA, 15 bp, Homo sapiens
aatggcaagcctatc

SEQ ID NO: 1803870 - DNA, 15 bp, Homo sapiens
atggcaagcctatcc

SEQ ID NO: 1803871 - DNA, 15 bp, Homo sapiens
tggcaagcctatcct

SEQ ID NO: 1803872 - DNA, 15 bp, Homo sapiens
ggcaagcctatcctc

SEQ ID NO: 1803873 - DNA, 15 bp, Homo sapiens
gcaagcctatcctca

SEQ ID NO: 1803874 - DNA, 15 bp, Homo sapiens
caagcctatcctcaa

SEQ ID NO: 1803875 - DNA, 15 bp, Homo sapiens
aagcctatcctcaaa

SEQ ID NO: 1803876 - DNA, 15 bp, Homo sapiens
agcctatcctcaaag

SEQ ID NO: 1803877 - DNA, 15 bp, Homo sapiens
gcctatcctcaaaga

SEQ ID NO: 1803878 - DNA, 15 bp, Homo sapiens
cctatcctcaaagac

SEQ ID NO: 1803879 - DNA, 15 bp, Homo sapiens
ctatcctcaaagacc

SEQ ID NO: 1803880 - DNA, 15 bp, Homo sapiens
tatcctcaaagacca

SEQ ID NO: 1803881 - DNA, 15 bp, Homo sapiens
atcctcaaagaccag

SEQ ID NO: 1803882 - DNA, 15 bp, Homo sapiens
tcctcaaagaccaga

SEQ ID NO: 1803883 - DNA, 15 bp, Homo sapiens
cctcaaagaccagaa

SEQ ID NO: 1803884 - DNA, 15 bp, Homo sapiens
ctcaaagaccagaaa

SEQ ID NO: 1803885 - DNA, 15 bp, Homo sapiens
tcaaagaccagaaag

SEQ ID NO: 1803886 - DNA, 15 bp, Homo sapiens
caaagaccagaaaga

SEQ ID NO: 1803887 - DNA, 15 bp, Homo sapiens
aaagaccagaaagaa

SEQ ID NO: 1803888 - DNA, 15 bp, Homo sapiens
aagaccagaaagaaa

SEQ ID NO: 1803889 - DNA, 15 bp, Homo sapiens
gaccagaaagaaagc

SEQ ID NO: 1803890 - DNA, 15 bp, Homo sapiens
accagaaagaaagca

SEQ ID NO: 1803891 - DNA, 15 bp, Homo sapiens
ccagaaagaaagcat

SEQ ID NO: 1803892 - DNA, 15 bp, Homo sapiens
cagaaagaaagcatg

SEQ ID NO: 1803893 - DNA, 15 bp, Homo sapiens
agaaagaaagcatgt

SEQ ID NO: 1803894 - DNA, 15 bp, Homo sapiens
gaaagaaagcatgtt

SEQ ID NO: 1803895 - DNA, 15 bp, Homo sapiens
aaagaaagcatgttt

SEQ ID NO: 1803896 - DNA, 15 bp, Homo sapiens
aagaaagcatgtttt

SEQ ID NO: 1803897 - DNA, 15 bp, Homo sapiens
agaaagcatgttttt

SEQ ID NO: 1803898 - DNA, 15 bp, Homo sapiens
gaaagcatgtttttt

SEQ ID NO: 1803899 - DNA, 15 bp, Homo sapiens
aaagcatgttttttc

SEQ ID NO: 1803900 - DNA, 15 bp, Homo sapiens
aagcatgttttttca

SEQ ID NO: 1803901 - DNA, 15 bp, Homo sapiens
agcatgttttttcag

SEQ ID NO: 1803902 - DNA, 15 bp, Homo sapiens
gcatgttttttcaga

SEQ ID NO: 1803903 - DNA, 15 bp, Homo sapiens
tgttttttcagatag

SEQ ID NO: 1803904 - DNA, 15 bp, Homo sapiens
gttttttcagataga

SEQ ID NO: 1803905 - DNA, 15 bp, Homo sapiens
ttttttcagatagat

SEQ ID NO: 1803906 - DNA, 15 bp, Homo sapiens
tttttcagatagatg

SEQ ID NO: 1803907 - DNA, 15 bp, Homo sapiens
ttttcagatagatgt

SEQ ID NO: 1803908 - DNA, 15 bp, Homo sapiens
tttcagatagatgta

SEQ ID NO: 1803909 - DNA, 15 bp, Homo sapiens
ttcagatagatgtac

SEQ ID NO: 1803910 - DNA, 15 bp, Homo sapiens
tcagatagatgtacc

SEQ ID NO: 1803911 - DNA, 15 bp, Homo sapiens
cagatagatgtaccc

SEQ ID NO: 1803912 - DNA, 15 bp, Homo sapiens
agatagatgtaccca

SEQ ID NO: 1803913 - DNA, 15 bp, Homo sapiens
gatagatgtacccac

SEQ ID NO: 1803914 - DNA, 15 bp, Homo sapiens
atagatgtacccaca

SEQ ID NO: 1803915 - DNA, 15 bp, Homo sapiens
tagatgtacccacac

SEQ ID NO: 1803916 - DNA, 15 bp, Homo sapiens
agatgtacccacacc

SEQ ID NO: 1803917 - DNA, 15 bp, Homo sapiens
gatgtacccacaccc

SEQ ID NO: 1803918 - DNA, 15 bp, Homo sapiens
atgtacccacaccca

SEQ ID NO: 1803919 - DNA, 15 bp, Homo sapiens
tgtacccacacccag

SEQ ID NO: 1803920 - DNA, 15 bp, Homo sapiens
gtacccacacccagg

SEQ ID NO: 1803921 - DNA, 15 bp, Homo sapiens
tacccacacccagga

SEQ ID NO: 1803922 - DNA, 15 bp, Homo sapiens
acccacacccaggac

SEQ ID NO: 1803923 - DNA, 15 bp, Homo sapiens
cccacacccaggact

SEQ ID NO: 1803924 - DNA, 15 bp, Homo sapiens
ccacacccaggactc

SEQ ID NO: 1803925 - DNA, 15 bp, Homo sapiens
cacacccaggactca

SEQ ID NO: 1803926 - DNA, 15 bp, Homo sapiens
acacccaggactcat

SEQ ID NO: 1803927 - DNA, 15 bp, Homo sapiens
cacccaggactcatc

SEQ ID NO: 1803928 - DNA, 15 bp, Homo sapiens
acccaggactcatct

SEQ ID NO: 1803929 - DNA, 15 bp, Homo sapiens
cccaggactcatctg

SEQ ID NO: 1803930 - DNA, 15 bp, Homo sapiens
ccaggactcatctgt

SEQ ID NO: 1803931 - DNA, 15 bp, Homo sapiens
caggactcatctgtc

SEQ ID NO: 1803932 - DNA, 15 bp, Homo sapiens
aggactcatctgtca

SEQ ID NO: 1803933 - DNA, 15 bp, Homo sapiens
ggactcatctgtcat

SEQ ID NO: 1803934 - DNA, 15 bp, Homo sapiens
gactcatctgtcatc

SEQ ID NO: 1803935 - DNA, 15 bp, Homo sapiens
actcatctgtcatct

SEQ ID NO: 1803936 - DNA, 15 bp, Homo sapiens
ctcatctgtcatctc

SEQ ID NO: 1803937 - DNA, 15 bp, Homo sapiens
tcatctgtcatctct

SEQ ID NO: 1803938 - DNA, 15 bp, Homo sapiens
catctgtcatctctc

SEQ ID NO: 1803939 - DNA, 15 bp, Homo sapiens
atctgtcatctctca

SEQ ID NO: 1803940 - DNA, 15 bp, Homo sapiens
tctgtcatctctcag

SEQ ID NO: 1803941 - DNA, 15 bp, Homo sapiens
ctgtcatctctcaga

SEQ ID NO: 1803942 - DNA, 15 bp, Homo sapiens
tgtcatctctcagat

SEQ ID NO: 1803943 - DNA, 15 bp, Homo sapiens
gtcatctctcagatc

SEQ ID NO: 1803944 - DNA, 15 bp, Homo sapiens
tcatctctcagatct

SEQ ID NO: 1803945 - DNA, 15 bp, Homo sapiens
catctctcagatcta

SEQ ID NO: 1803946 - DNA, 15 bp, Homo sapiens
atctctcagatctaa

SEQ ID NO: 1803947 - DNA, 15 bp, Homo sapiens
tctctcagatctaaa

SEQ ID NO: 1803948 - DNA, 15 bp, Homo sapiens
ctctcagatctaaaa

SEQ ID NO: 1803949 - DNA, 15 bp, Homo sapiens
tctcagatctaaaac

SEQ ID NO: 1803950 - DNA, 15 bp, Homo sapiens
ctcagatctaaaact

SEQ ID NO: 1803951 - DNA, 15 bp, Homo sapiens
tcagatctaaaacta

SEQ ID NO: 1803952 - DNA, 15 bp, Homo sapiens
cagatctaaaactag

SEQ ID NO: 1803953 - DNA, 15 bp, Homo sapiens
agatctaaaactagc

SEQ ID NO: 1803954 - DNA, 15 bp, Homo sapiens
gatctaaaactagct

SEQ ID NO: 1803955 - DNA, 15 bp, Homo sapiens
atctaaaactagctc

SEQ ID NO: 1803956 - DNA, 15 bp, Homo sapiens
tctaaaactagctct

SEQ ID NO: 1803957 - DNA, 15 bp, Homo sapiens
ctaaaactagctctt

SEQ ID NO: 1803958 - DNA, 15 bp, Homo sapiens
taaaactagctcttc

SEQ ID NO: 1803959 - DNA, 15 bp, Homo sapiens
aaaactagctcttct

SEQ ID NO: 1803960 - DNA, 15 bp, Homo sapiens
aaactagctcttctt

SEQ ID NO: 1803961 - DNA, 15 bp, Homo sapiens
aactagctcttcttt

SEQ ID NO: 1803962 - DNA, 15 bp, Homo sapiens
actagctcttcttta

SEQ ID NO: 1803963 - DNA, 15 bp, Homo sapiens
ctagctcttctttat

SEQ ID NO: 1803964 - DNA, 15 bp, Homo sapiens
tagctcttctttatt

SEQ ID NO: 1803965 - DNA, 15 bp, Homo sapiens
agctcttctttattg

SEQ ID NO: 1803966 - DNA, 15 bp, Homo sapiens
gctcttctttattgt

SEQ ID NO: 1803967 - DNA, 15 bp, Homo sapiens
ctcttctttattgtt

SEQ ID NO: 1803968 - DNA, 15 bp, Homo sapiens
tcttctttattgttt

SEQ ID NO: 1803969 - DNA, 15 bp, Homo sapiens
cttctttattgtttg

SEQ ID NO: 1803970 - DNA, 15 bp, Homo sapiens
ttctttattgtttgg

SEQ ID NO: 1803971 - DNA, 15 bp, Homo sapiens
tctttattgtttggc

SEQ ID NO: 1803972 - DNA, 15 bp, Homo sapiens
ctttattgtttggcg

SEQ ID NO: 1803973 - DNA, 15 bp, Homo sapiens
tttattgtttggcgt

SEQ ID NO: 1803974 - DNA, 15 bp, Homo sapiens
ttattgtttggcgtc

SEQ ID NO: 1803975 - DNA, 15 bp, Homo sapiens
tattgtttggcgtca

SEQ ID NO: 1803976 - DNA, 15 bp, Homo sapiens
attgtttggcgtcag

SEQ ID NO: 1803977 - DNA, 15 bp, Homo sapiens
ttgtttggcgtcaga

SEQ ID NO: 1803978 - DNA, 15 bp, Homo sapiens
tgtttggcgtcagaa

SEQ ID NO: 1803979 - DNA, 15 bp, Homo sapiens
gtttggcgtcagaag

SEQ ID NO: 1803980 - DNA, 15 bp, Homo sapiens
tttggcgtcagaagt

SEQ ID NO: 1803981 - DNA, 15 bp, Homo sapiens
ttggcgtcagaagtt

SEQ ID NO: 1803982 - DNA, 15 bp, Homo sapiens
tggcgtcagaagttt

SEQ ID NO: 1803983 - DNA, 15 bp, Homo sapiens
ggcgtcagaagtttt

SEQ ID NO: 1803984 - DNA, 15 bp, Homo sapiens
gcgtcagaagtttta

SEQ ID NO: 1803985 - DNA, 15 bp, Homo sapiens
cgtcagaagttttaa

SEQ ID NO: 1803986 - DNA, 15 bp, Homo sapiens
gtcagaagttttaag

SEQ ID NO: 1803987 - DNA, 15 bp, Homo sapiens
tcagaagttttaagg

SEQ ID NO: 1803988 - DNA, 15 bp, Homo sapiens
cagaagttttaaggg

SEQ ID NO: 1803989 - DNA, 15 bp, Homo sapiens
agaagttttaagggc

SEQ ID NO: 1803990 - DNA, 15 bp, Homo sapiens
gaagttttaagggct

SEQ ID NO: 1803991 - DNA, 15 bp, Homo sapiens
aagttttaagggcta

SEQ ID NO: 1803992 - DNA, 15 bp, Homo sapiens
agttttaagggctaa

SEQ ID NO: 1803993 - DNA, 15 bp, Homo sapiens
gttttaagggctaaa

SEQ ID NO: 1803994 - DNA, 15 bp, Homo sapiens
ttttaagggctaaac

SEQ ID NO: 1803995 - DNA, 15 bp, Homo sapiens
tttaagggctaaacc

SEQ ID NO: 1803996 - DNA, 15 bp, Homo sapiens
ttaagggctaaacca

SEQ ID NO: 1803997 - DNA, 15 bp, Homo sapiens
taagggctaaaccac

SEQ ID NO: 1803998 - DNA, 15 bp, Homo sapiens
aagggctaaaccact

SEQ ID NO: 1803999 - DNA, 15 bp, Homo sapiens
agggctaaaccacta

SEQ ID NO: 1804000 - DNA, 15 bp, Homo sapiens
gggctaaaccactaa

SEQ ID NO: 1804001 - DNA, 15 bp, Homo sapiens
ggctaaaccactaat

SEQ ID NO: 1804002 - DNA, 15 bp, Homo sapiens
gctaaaccactaatt

SEQ ID NO: 1804003 - DNA, 15 bp, Homo sapiens
ctaaaccactaattc

SEQ ID NO: 1804004 - DNA, 15 bp, Homo sapiens
taaaccactaattct

SEQ ID NO: 1804005 - DNA, 15 bp, Homo sapiens
aaaccactaattctc

SEQ ID NO: 1804006 - DNA, 15 bp, Homo sapiens
aaccactaattctca

SEQ ID NO: 1804007 - DNA, 15 bp, Homo sapiens
accactaattctcat

SEQ ID NO: 1804008 - DNA, 15 bp, Homo sapiens
ccactaattctcatc

SEQ ID NO: 1804009 - DNA, 15 bp, Homo sapiens
cactaattctcatcc

SEQ ID NO: 1804010 - DNA, 15 bp, Homo sapiens
actaattctcatcct

SEQ ID NO: 1804011 - DNA, 15 bp, Homo sapiens
ctaattctcatcctt

SEQ ID NO: 1804012 - DNA, 15 bp, Homo sapiens
taattctcatccttg

SEQ ID NO: 1804013 - DNA, 15 bp, Homo sapiens
aattctcatccttgg

SEQ ID NO: 1804014 - DNA, 15 bp, Homo sapiens
attctcatccttggc

SEQ ID NO: 1804015 - DNA, 15 bp, Homo sapiens
ttctcatccttggct

SEQ ID NO: 1804016 - DNA, 15 bp, Homo sapiens
tctcatccttggctg

SEQ ID NO: 1804017 - DNA, 15 bp, Homo sapiens
ctcatccttggctga

SEQ ID NO: 1804018 - DNA, 15 bp, Homo sapiens
tcatccttggctgaa

SEQ ID NO: 1804019 - DNA, 15 bp, Homo sapiens
catccttggctgaac

SEQ ID NO: 1804020 - DNA, 15 bp, Homo sapiens
atccttggctgaaca

SEQ ID NO: 1804021 - DNA, 15 bp, Homo sapiens
tccttggctgaacat

SEQ ID NO: 1804022 - DNA, 15 bp, Homo sapiens
ccttggctgaacatc

SEQ ID NO: 1804023 - DNA, 15 bp, Homo sapiens
cttggctgaacatca

SEQ ID NO: 1804024 - DNA, 15 bp, Homo sapiens
ttggctgaacatcaa

SEQ ID NO: 1804025 - DNA, 15 bp, Homo sapiens
tggctgaacatcaaa

SEQ ID NO: 1804026 - DNA, 15 bp, Homo sapiens
ggctgaacatcaaat

SEQ ID NO: 1804027 - DNA, 15 bp, Homo sapiens
gctgaacatcaaatt

SEQ ID NO: 1804028 - DNA, 15 bp, Homo sapiens
ctgaacatcaaatta

SEQ ID NO: 1804029 - DNA, 15 bp, Homo sapiens
tgaacatcaaattac

SEQ ID NO: 1804030 - DNA, 15 bp, Homo sapiens
gaacatcaaattact

SEQ ID NO: 1804031 - DNA, 15 bp, Homo sapiens
aacatcaaattactt

SEQ ID NO: 1804032 - DNA, 15 bp, Homo sapiens
acatcaaattacttg

SEQ ID NO: 1804033 - DNA, 15 bp, Homo sapiens
catcaaattacttgt

SEQ ID NO: 1804034 - DNA, 15 bp, Homo sapiens
atcaaattacttgtg

SEQ ID NO: 1804035 - DNA, 15 bp, Homo sapiens
tcaaattacttgtgg

SEQ ID NO: 1804036 - DNA, 15 bp, Homo sapiens
caaattacttgtgga

SEQ ID NO: 1804037 - DNA, 15 bp, Homo sapiens
aaattacttgtggag

SEQ ID NO: 1804038 - DNA, 15 bp, Homo sapiens
aattacttgtggagc

SEQ ID NO: 1804039 - DNA, 15 bp, Homo sapiens
attacttgtggagct

SEQ ID NO: 1804040 - DNA, 15 bp, Homo sapiens
ttacttgtggagctt

SEQ ID NO: 1804041 - DNA, 15 bp, Homo sapiens
tacttgtggagcttt

SEQ ID NO: 1804042 - DNA, 15 bp, Homo sapiens
acttgtggagctttt

SEQ ID NO: 1804043 - DNA, 15 bp, Homo sapiens
cttgtggagctttta

SEQ ID NO: 1804044 - DNA, 15 bp, Homo sapiens
ttgtggagcttttaa

SEQ ID NO: 1804045 - DNA, 15 bp, Homo sapiens
tgtggagcttttaaa

SEQ ID NO: 1804046 - DNA, 15 bp, Homo sapiens
gtggagcttttaaaa

SEQ ID NO: 1804047 - DNA, 15 bp, Homo sapiens
tggagcttttaaaat

SEQ ID NO: 1804048 - DNA, 15 bp, Homo sapiens
ggagcttttaaaatg

SEQ ID NO: 1804049 - DNA, 15 bp, Homo sapiens
gagcttttaaaatgt

SEQ ID NO: 1804050 - DNA, 15 bp, Homo sapiens
agcttttaaaatgta

SEQ ID NO: 1804051 - DNA, 15 bp, Homo sapiens
gcttttaaaatgtac

SEQ ID NO: 1804052 - DNA, 15 bp, Homo sapiens
cttttaaaatgtact

SEQ ID NO: 1804053 - DNA, 15 bp, Homo sapiens
ttttaaaatgtactg

SEQ ID NO: 1804054 - DNA, 15 bp, Homo sapiens
tttaaaatgtactga

SEQ ID NO: 1804055 - DNA, 15 bp, Homo sapiens
ttaaaatgtactgaa

SEQ ID NO: 1804056 - DNA, 15 bp, Homo sapiens
taaaatgtactgaat

SEQ ID NO: 1804057 - DNA, 15 bp, Homo sapiens
aaaatgtactgaatt

SEQ ID NO: 1804058 - DNA, 15 bp, Homo sapiens
aaatgtactgaattt

SEQ ID NO: 1804059 - DNA, 15 bp, Homo sapiens
aatgtactgaatttg

SEQ ID NO: 1804060 - DNA, 15 bp, Homo sapiens
atgtactgaatttgg

SEQ ID NO: 1804061 - DNA, 15 bp, Homo sapiens
tgtactgaatttggg

SEQ ID NO: 1804062 - DNA, 15 bp, Homo sapiens
gtactgaatttgggc

SEQ ID NO: 1804063 - DNA, 15 bp, Homo sapiens
tactgaatttgggca

SEQ ID NO: 1804064 - DNA, 15 bp, Homo sapiens
actgaatttgggcag

SEQ ID NO: 1804065 - DNA, 15 bp, Homo sapiens
ctgaatttgggcagg

SEQ ID NO: 1804066 - DNA, 15 bp, Homo sapiens
tgaatttgggcaggg

SEQ ID NO: 1804067 - DNA, 15 bp, Homo sapiens
gaatttgggcagggc

SEQ ID NO: 1804068 - DNA, 15 bp, Homo sapiens
aatttgggcagggcg

SEQ ID NO: 1804069 - DNA, 15 bp, Homo sapiens
atttgggcagggcgt

SEQ ID NO: 1804070 - DNA, 15 bp, Homo sapiens
tttgggcagggcgtg

SEQ ID NO: 1804071 - DNA, 15 bp, Homo sapiens
ttgggcagggcgtgg

SEQ ID NO: 1804072 - DNA, 15 bp, Homo sapiens
tgggcagggcgtggt

SEQ ID NO: 1804073 - DNA, 15 bp, Homo sapiens
gggcagggcgtggtg

SEQ ID NO: 1804074 - DNA, 15 bp, Homo sapiens
ggcagggcgtggtgg

SEQ ID NO: 1804075 - DNA, 15 bp, Homo sapiens
gcagggcgtggtggc

SEQ ID NO: 1804076 - DNA, 15 bp, Homo sapiens
cagggcgtggtggct

SEQ ID NO: 1804077 - DNA, 15 bp, Homo sapiens
agggcgtggtggctc

SEQ ID NO: 1804078 - DNA, 15 bp, Homo sapiens
cgtggtggctcatga

SEQ ID NO: 1804079 - DNA, 15 bp, Homo sapiens
gtggtggctcatgac

SEQ ID NO: 1804080 - DNA, 15 bp, Homo sapiens
tggtggctcatgact

SEQ ID NO: 1804081 - DNA, 15 bp, Homo sapiens
ggtggctcatgactg

SEQ ID NO: 1804082 - DNA, 15 bp, Homo sapiens
gtggctcatgactgt

SEQ ID NO: 1804083 - DNA, 15 bp, Homo sapiens
ccagcactttgagat

SEQ ID NO: 1804084 - DNA, 15 bp, Homo sapiens
cagcactttgagatg

SEQ ID NO: 1804085 - DNA, 15 bp, Homo sapiens
agcactttgagatgc

SEQ ID NO: 1804086 - DNA, 15 bp, Homo sapiens
gcactttgagatgcc

SEQ ID NO: 1804087 - DNA, 15 bp, Homo sapiens
cactttgagatgcca

SEQ ID NO: 1804088 - DNA, 15 bp, Homo sapiens
actttgagatgccag

SEQ ID NO: 1804089 - DNA, 15 bp, Homo sapiens
ctttgagatgccagg

SEQ ID NO: 1804090 - DNA, 15 bp, Homo sapiens
tttgagatgccaggg

SEQ ID NO: 1804091 - DNA, 15 bp, Homo sapiens
ttgagatgccagggt

SEQ ID NO: 1804092 - DNA, 15 bp, Homo sapiens
tgagatgccagggtg

SEQ ID NO: 1804093 - DNA, 15 bp, Homo sapiens
gagatgccagggtgg

SEQ ID NO: 1804094 - DNA, 15 bp, Homo sapiens
agatgccagggtggg

SEQ ID NO: 1804095 - DNA, 15 bp, Homo sapiens
gatgccagggtgggt

SEQ ID NO: 1804096 - DNA, 15 bp, Homo sapiens
atgccagggtgggtg

SEQ ID NO: 1804097 - DNA, 15 bp, Homo sapiens
tgccagggtgggtgg

SEQ ID NO: 1804098 - DNA, 15 bp, Homo sapiens
gccagggtgggtgga

SEQ ID NO: 1804099 - DNA, 15 bp, Homo sapiens
ccagggtgggtggat

SEQ ID NO: 1804100 - DNA, 15 bp, Homo sapiens
cagggtgggtggatc

SEQ ID NO: 1804101 - DNA, 15 bp, Homo sapiens
tgaccagtatgatga

SEQ ID NO: 1804102 - DNA, 15 bp, Homo sapiens
gaccagtatgatgaa

SEQ ID NO: 1804103 - DNA, 15 bp, Homo sapiens
accagtatgatgaaa

SEQ ID NO: 1804104 - DNA, 15 bp, Homo sapiens
ccagtatgatgaaac

SEQ ID NO: 1804105 - DNA, 15 bp, Homo sapiens
cagtatgatgaaacc

SEQ ID NO: 1804106 - DNA, 15 bp, Homo sapiens
agtatgatgaaaccc

SEQ ID NO: 1804107 - DNA, 15 bp, Homo sapiens
gtatgatgaaaccct

SEQ ID NO: 1804108 - DNA, 15 bp, Homo sapiens
tatgatgaaaccctg

SEQ ID NO: 1804109 - DNA, 15 bp, Homo sapiens
atgatgaaaccctgt

SEQ ID NO: 1804110 - DNA, 15 bp, Homo sapiens
tgatgaaaccctgtc

SEQ ID NO: 1804111 - DNA, 15 bp, Homo sapiens
gatgaaaccctgtca

SEQ ID NO: 1804112 - DNA, 15 bp, Homo sapiens
atgaaaccctgtcac

SEQ ID NO: 1804113 - DNA, 15 bp, Homo sapiens
tgaaaccctgtcact

SEQ ID NO: 1804114 - DNA, 15 bp, Homo sapiens
gaaaccctgtcacta

SEQ ID NO: 1804115 - DNA, 15 bp, Homo sapiens
aaaccctgtcactac

SEQ ID NO: 1804116 - DNA, 15 bp, Homo sapiens
aaccctgtcactact

SEQ ID NO: 1804117 - DNA, 15 bp, Homo sapiens
accctgtcactacta

SEQ ID NO: 1804118 - DNA, 15 bp, Homo sapiens
ccctgtcactactaa

SEQ ID NO: 1804119 - DNA, 15 bp, Homo sapiens
cctgtcactactaaa

SEQ ID NO: 1804120 - DNA, 15 bp, Homo sapiens
ctgtcactactaaag

SEQ ID NO: 1804121 - DNA, 15 bp, Homo sapiens
tgtcactactaaaga

SEQ ID NO: 1804122 - DNA, 15 bp, Homo sapiens
gtcactactaaagat

SEQ ID NO: 1804123 - DNA, 15 bp, Homo sapiens
tcactactaaagata

SEQ ID NO: 1804124 - DNA, 15 bp, Homo sapiens
cactactaaagatac

SEQ ID NO: 1804125 - DNA, 15 bp, Homo sapiens
actactaaagataca

SEQ ID NO: 1804126 - DNA, 15 bp, Homo sapiens
agatacaaaaattat

SEQ ID NO: 1804127 - DNA, 15 bp, Homo sapiens
gatacaaaaattatc

SEQ ID NO: 1804128 - DNA, 15 bp, Homo sapiens
aaaattatctgggca

SEQ ID NO: 1804129 - DNA, 15 bp, Homo sapiens
aaattatctgggcat

SEQ ID NO: 1804130 - DNA, 15 bp, Homo sapiens
aattatctgggcatg

SEQ ID NO: 1804131 - DNA, 15 bp, Homo sapiens
attatctgggcatgg

SEQ ID NO: 1804132 - DNA, 15 bp, Homo sapiens
ttatctgggcatggt

SEQ ID NO: 1804133 - DNA, 15 bp, Homo sapiens
tatctgggcatggtg

SEQ ID NO: 1804134 - DNA, 15 bp, Homo sapiens
atctgggcatggtgg

SEQ ID NO: 1804135 - DNA, 15 bp, Homo sapiens
tctgggcatggtggt

SEQ ID NO: 1804136 - DNA, 15 bp, Homo sapiens
tggtgtgcacctgtg

SEQ ID NO: 1804137 - DNA, 15 bp, Homo sapiens
ggtgtgcacctgtgg

SEQ ID NO: 1804138 - DNA, 15 bp, Homo sapiens
gtgtgcacctgtggt

SEQ ID NO: 1804139 - DNA, 15 bp, Homo sapiens
tgtgcacctgtggtc

SEQ ID NO: 1804140 - DNA, 15 bp, Homo sapiens
gtgcacctgtggtct

SEQ ID NO: 1804141 - DNA, 15 bp, Homo sapiens
tgcacctgtggtctc

SEQ ID NO: 1804142 - DNA, 15 bp, Homo sapiens
gcacctgtggtctca

SEQ ID NO: 1804143 - DNA, 15 bp, Homo sapiens
cacctgtggtctcag

SEQ ID NO: 1804144 - DNA, 15 bp, Homo sapiens
acctgtggtctcagc

SEQ ID NO: 1804145 - DNA, 15 bp, Homo sapiens
gtggtctcagctact

SEQ ID NO: 1804146 - DNA, 15 bp, Homo sapiens
tggtctcagctactt

SEQ ID NO: 1804147 - DNA, 15 bp, Homo sapiens
ggtctcagctactta

SEQ ID NO: 1804148 - DNA, 15 bp, Homo sapiens
gtctcagctacttag

SEQ ID NO: 1804149 - DNA, 15 bp, Homo sapiens
tctcagctacttagg

SEQ ID NO: 1804150 - DNA, 15 bp, Homo sapiens
ctcagctacttagga

SEQ ID NO: 1804151 - DNA, 15 bp, Homo sapiens
tcagctacttaggag

SEQ ID NO: 1804152 - DNA, 15 bp, Homo sapiens
cttaggaggctgaga

SEQ ID NO: 1804153 - DNA, 15 bp, Homo sapiens
ttaggaggctgagac

SEQ ID NO: 1804154 - DNA, 15 bp, Homo sapiens
taggaggctgagaca

SEQ ID NO: 1804155 - DNA, 15 bp, Homo sapiens
gctgagatcgcgcct

SEQ ID NO: 1804156 - DNA, 15 bp, Homo sapiens
ctgagatcgcgcctc

SEQ ID NO: 1804157 - DNA, 15 bp, Homo sapiens
tgagatcgcgcctcc

SEQ ID NO: 1804158 - DNA, 15 bp, Homo sapiens
gagatcgcgcctcca

SEQ ID NO: 1804159 - DNA, 15 bp, Homo sapiens
agatcgcgcctccag

SEQ ID NO: 1804160 - DNA, 15 bp, Homo sapiens
gatcgcgcctccagc

SEQ ID NO: 1804161 - DNA, 15 bp, Homo sapiens
atcgcgcctccagcc

SEQ ID NO: 1804162 - DNA, 15 bp, Homo sapiens
tcgcgcctccagcct

SEQ ID NO: 1804163 - DNA, 15 bp, Homo sapiens
cgcgcctccagcctg

SEQ ID NO: 1804164 - DNA, 15 bp, Homo sapiens
gcgcctccagcctgc

SEQ ID NO: 1804165 - DNA, 15 bp, Homo sapiens
cgcctccagcctgct

SEQ ID NO: 1804166 - DNA, 15 bp, Homo sapiens
gcctccagcctgctg

SEQ ID NO: 1804167 - DNA, 15 bp, Homo sapiens
cctccagcctgctgg

SEQ ID NO: 1804168 - DNA, 15 bp, Homo sapiens
ctccagcctgctggg

SEQ ID NO: 1804169 - DNA, 15 bp, Homo sapiens
tccagcctgctgggc

SEQ ID NO: 1804170 - DNA, 15 bp, Homo sapiens
ccagcctgctgggca

SEQ ID NO: 1804171 - DNA, 15 bp, Homo sapiens
cagcctgctgggcaa

SEQ ID NO: 1804172 - DNA, 15 bp, Homo sapiens
agcctgctgggcaaa

SEQ ID NO: 1804173 - DNA, 15 bp, Homo sapiens
gcctgctgggcaaac

SEQ ID NO: 1804174 - DNA, 15 bp, Homo sapiens
cctgctgggcaaaca

SEQ ID NO: 1804175 - DNA, 15 bp, Homo sapiens
ctgctgggcaaacag

SEQ ID NO: 1804176 - DNA, 15 bp, Homo sapiens
tgctgggcaaacaga

SEQ ID NO: 1804177 - DNA, 15 bp, Homo sapiens
gctgggcaaacagag

SEQ ID NO: 1804178 - DNA, 15 bp, Homo sapiens
ctgggcaaacagagc

SEQ ID NO: 1804179 - DNA, 15 bp, Homo sapiens
tgggcaaacagagca

SEQ ID NO: 1804180 - DNA, 15 bp, Homo sapiens
gggcaaacagagcaa

SEQ ID NO: 1804181 - DNA, 15 bp, Homo sapiens
ggcaaacagagcaag

SEQ ID NO: 1804182 - DNA, 15 bp, Homo sapiens
gcaaacagagcaaga

SEQ ID NO: 1804183 - DNA, 15 bp, Homo sapiens
caaacagagcaagac

SEQ ID NO: 1804184 - DNA, 15 bp, Homo sapiens
aaacagagcaagact

SEQ ID NO: 1804185 - DNA, 15 bp, Homo sapiens
gcaagactctgtctt

SEQ ID NO: 1804186 - DNA, 15 bp, Homo sapiens
caagactctgtctta

SEQ ID NO: 1804187 - DNA, 15 bp, Homo sapiens
aagactctgtcttaa

SEQ ID NO: 1804188 - DNA, 15 bp, Homo sapiens
aggccaggcgcagta

SEQ ID NO: 1804189 - DNA, 15 bp, Homo sapiens
ggccaggcgcagtag

SEQ ID NO: 1804190 - DNA, 15 bp, Homo sapiens
gccaggcgcagtagc

SEQ ID NO: 1804191 - DNA, 15 bp, Homo sapiens
ccaggcgcagtagct

SEQ ID NO: 1804192 - DNA, 15 bp, Homo sapiens
caggcgcagtagctc

SEQ ID NO: 1804193 - DNA, 15 bp, Homo sapiens
aggcgcagtagctca

SEQ ID NO: 1804194 - DNA, 15 bp, Homo sapiens
ggcgcagtagctcac

SEQ ID NO: 1804195 - DNA, 15 bp, Homo sapiens
gcgcagtagctcacg

SEQ ID NO: 1804196 - DNA, 15 bp, Homo sapiens
cgcagtagctcacgc

SEQ ID NO: 1804197 - DNA, 15 bp, Homo sapiens
gcagtagctcacgcc

SEQ ID NO: 1804198 - DNA, 15 bp, Homo sapiens
cagtagctcacgcct

SEQ ID NO: 1804199 - DNA, 15 bp, Homo sapiens
ggccaaggcaggcaa

SEQ ID NO: 1804200 - DNA, 15 bp, Homo sapiens
gccaaggcaggcaaa

SEQ ID NO: 1804201 - DNA, 15 bp, Homo sapiens
ccaaggcaggcaaat

SEQ ID NO: 1804202 - DNA, 15 bp, Homo sapiens
caaggcaggcaaatt

SEQ ID NO: 1804203 - DNA, 15 bp, Homo sapiens
aaggcaggcaaattg

SEQ ID NO: 1804204 - DNA, 15 bp, Homo sapiens
aggcaggcaaattgg

SEQ ID NO: 1804205 - DNA, 15 bp, Homo sapiens
ggcaggcaaattggc

SEQ ID NO: 1804206 - DNA, 15 bp, Homo sapiens
gcaggcaaattggca

SEQ ID NO: 1804207 - DNA, 15 bp, Homo sapiens
caggcaaattggcaa

SEQ ID NO: 1804208 - DNA, 15 bp, Homo sapiens
aggcaaattggcaaa

SEQ ID NO: 1804209 - DNA, 15 bp, Homo sapiens
ggcaaattggcaaat

SEQ ID NO: 1804210 - DNA, 15 bp, Homo sapiens
gcaaattggcaaatc

SEQ ID NO: 1804211 - DNA, 15 bp, Homo sapiens
caaattggcaaatca

SEQ ID NO: 1804212 - DNA, 15 bp, Homo sapiens
aaattggcaaatcat

SEQ ID NO: 1804213 - DNA, 15 bp, Homo sapiens
aattggcaaatcatg

SEQ ID NO: 1804214 - DNA, 15 bp, Homo sapiens
attggcaaatcatga

SEQ ID NO: 1804215 - DNA, 15 bp, Homo sapiens
ttggcaaatcatgag

SEQ ID NO: 1804216 - DNA, 15 bp, Homo sapiens
tggcaaatcatgagg

SEQ ID NO: 1804217 - DNA, 15 bp, Homo sapiens
ggcaaatcatgaggt

SEQ ID NO: 1804218 - DNA, 15 bp, Homo sapiens
gcaaatcatgaggtc

SEQ ID NO: 1804219 - DNA, 15 bp, Homo sapiens
caaatcatgaggtca

SEQ ID NO: 1804220 - DNA, 15 bp, Homo sapiens
aaatcatgaggtcag

SEQ ID NO: 1804221 - DNA, 15 bp, Homo sapiens
aatcatgaggtcagg

SEQ ID NO: 1804222 - DNA, 15 bp, Homo sapiens
gagatcgagaccata

SEQ ID NO: 1804223 - DNA, 15 bp, Homo sapiens
agatcgagaccatac

SEQ ID NO: 1804224 - DNA, 15 bp, Homo sapiens
gatcgagaccatact

SEQ ID NO: 1804225 - DNA, 15 bp, Homo sapiens
atcgagaccatactg

SEQ ID NO: 1804226 - DNA, 15 bp, Homo sapiens
tcgagaccatactgg

SEQ ID NO: 1804227 - DNA, 15 bp, Homo sapiens
cgagaccatactggc

SEQ ID NO: 1804228 - DNA, 15 bp, Homo sapiens
gagaccatactggct

SEQ ID NO: 1804229 - DNA, 15 bp, Homo sapiens
agaccatactggcta

SEQ ID NO: 1804230 - DNA, 15 bp, Homo sapiens
gaccatactggctaa

SEQ ID NO: 1804231 - DNA, 15 bp, Homo sapiens
accatactggctaac

SEQ ID NO: 1804232 - DNA, 15 bp, Homo sapiens
ccatactggctaaca

SEQ ID NO: 1804233 - DNA, 15 bp, Homo sapiens
catactggctaacac

SEQ ID NO: 1804234 - DNA, 15 bp, Homo sapiens
atactggctaacact

SEQ ID NO: 1804235 - DNA, 15 bp, Homo sapiens
tactggctaacactg

SEQ ID NO: 1804236 - DNA, 15 bp, Homo sapiens
actggctaacactgt

SEQ ID NO: 1804237 - DNA, 15 bp, Homo sapiens
ctggctaacactgtg

SEQ ID NO: 1804238 - DNA, 15 bp, Homo sapiens
tggctaacactgtga

SEQ ID NO: 1804239 - DNA, 15 bp, Homo sapiens
ggctaacactgtgaa

SEQ ID NO: 1804240 - DNA, 15 bp, Homo sapiens
gctaacactgtgaaa

SEQ ID NO: 1804241 - DNA, 15 bp, Homo sapiens
ctaacactgtgaaac

SEQ ID NO: 1804242 - DNA, 15 bp, Homo sapiens
taacactgtgaaacc

SEQ ID NO: 1804243 - DNA, 15 bp, Homo sapiens
aacactgtgaaaccc

SEQ ID NO: 1804244 - DNA, 15 bp, Homo sapiens
acactgtgaaacccc

SEQ ID NO: 1804245 - DNA, 15 bp, Homo sapiens
cactgtgaaaccccg

SEQ ID NO: 1804246 - DNA, 15 bp, Homo sapiens
actgtgaaaccccgt

SEQ ID NO: 1804247 - DNA, 15 bp, Homo sapiens
ctgtgaaaccccgtc

SEQ ID NO: 1804248 - DNA, 15 bp, Homo sapiens
tgtgaaaccccgtct

SEQ ID NO: 1804249 - DNA, 15 bp, Homo sapiens
actcgggaggctgac

SEQ ID NO: 1804250 - DNA, 15 bp, Homo sapiens
ctcgggaggctgacg

SEQ ID NO: 1804251 - DNA, 15 bp, Homo sapiens
tcgggaggctgacgc

SEQ ID NO: 1804252 - DNA, 15 bp, Homo sapiens
cgggaggctgacgca

SEQ ID NO: 1804253 - DNA, 15 bp, Homo sapiens
gggaggctgacgcag

SEQ ID NO: 1804254 - DNA, 15 bp, Homo sapiens
ggaggctgacgcagg

SEQ ID NO: 1804255 - DNA, 15 bp, Homo sapiens
gaggctgacgcagga

SEQ ID NO: 1804256 - DNA, 15 bp, Homo sapiens
aggctgacgcaggag

SEQ ID NO: 1804257 - DNA, 15 bp, Homo sapiens
ggctgacgcaggaga

SEQ ID NO: 1804258 - DNA, 15 bp, Homo sapiens
gctgacgcaggagaa

SEQ ID NO: 1804259 - DNA, 15 bp, Homo sapiens
ctgacgcaggagaat

SEQ ID NO: 1804260 - DNA, 15 bp, Homo sapiens
tgacgcaggagaatg

SEQ ID NO: 1804261 - DNA, 15 bp, Homo sapiens
gacgcaggagaatgg

SEQ ID NO: 1804262 - DNA, 15 bp, Homo sapiens
acgcaggagaatggc

SEQ ID NO: 1804263 - DNA, 15 bp, Homo sapiens
cgcaggagaatggcg

SEQ ID NO: 1804264 - DNA, 15 bp, Homo sapiens
aaaaaaaaatccata

SEQ ID NO: 1804265 - DNA, 15 bp, Homo sapiens
aaaaaaaatccatag

SEQ ID NO: 1804266 - DNA, 15 bp, Homo sapiens
aaaaaaatccataga

SEQ ID NO: 1804267 - DNA, 15 bp, Homo sapiens
aaaaaatccatagat

SEQ ID NO: 1804268 - DNA, 15 bp, Homo sapiens
aaaaatccatagatt

SEQ ID NO: 1804269 - DNA, 15 bp, Homo sapiens
aaaatccatagatta

SEQ ID NO: 1804270 - DNA, 15 bp, Homo sapiens
aaatccatagattat

SEQ ID NO: 1804271 - DNA, 15 bp, Homo sapiens
aatccatagattatt

SEQ ID NO: 1804272 - DNA, 15 bp, Homo sapiens
atccatagattattc

SEQ ID NO: 1804273 - DNA, 15 bp, Homo sapiens
tccatagattattct

SEQ ID NO: 1804274 - DNA, 15 bp, Homo sapiens
ccatagattattctg

SEQ ID NO: 1804275 - DNA, 15 bp, Homo sapiens
catagattattctgt

SEQ ID NO: 1804276 - DNA, 15 bp, Homo sapiens
atagattattctgtt

SEQ ID NO: 1804277 - DNA, 15 bp, Homo sapiens
tagattattctgttg

SEQ ID NO: 1804278 - DNA, 15 bp, Homo sapiens
agattattctgttgt

SEQ ID NO: 1804279 - DNA, 15 bp, Homo sapiens
gattattctgttgtg

SEQ ID NO: 1804280 - DNA, 15 bp, Homo sapiens
attattctgttgtgt

SEQ ID NO: 1804281 - DNA, 15 bp, Homo sapiens
ttattctgttgtgtg

SEQ ID NO: 1804282 - DNA, 15 bp, Homo sapiens
tattctgttgtgtgc

SEQ ID NO: 1804283 - DNA, 15 bp, Homo sapiens
attctgttgtgtgca

SEQ ID NO: 1804284 - DNA, 15 bp, Homo sapiens
ttctgttgtgtgcag

SEQ ID NO: 1804285 - DNA, 15 bp, Homo sapiens
tctgttgtgtgcaga

SEQ ID NO: 1804286 - DNA, 15 bp, Homo sapiens
ctgttgtgtgcagag

SEQ ID NO: 1804287 - DNA, 15 bp, Homo sapiens
tgttgtgtgcagaga

SEQ ID NO: 1804288 - DNA, 15 bp, Homo sapiens
gttgtgtgcagagat

SEQ ID NO: 1804289 - DNA, 15 bp, Homo sapiens
ttgtgtgcagagata

SEQ ID NO: 1804290 - DNA, 15 bp, Homo sapiens
tgtgtgcagagataa

SEQ ID NO: 1804291 - DNA, 15 bp, Homo sapiens
gtgtgcagagataag

SEQ ID NO: 1804292 - DNA, 15 bp, Homo sapiens
tgtgcagagataaga

SEQ ID NO: 1804293 - DNA, 15 bp, Homo sapiens
gtgcagagataagaa

SEQ ID NO: 1804294 - DNA, 15 bp, Homo sapiens
tgcagagataagaag

SEQ ID NO: 1804295 - DNA, 15 bp, Homo sapiens
gcagagataagaagc

SEQ ID NO: 1804296 - DNA, 15 bp, Homo sapiens
cagagataagaagca

SEQ ID NO: 1804297 - DNA, 15 bp, Homo sapiens
agagataagaagcat

SEQ ID NO: 1804298 - DNA, 15 bp, Homo sapiens
gagataagaagcatg

SEQ ID NO: 1804299 - DNA, 15 bp, Homo sapiens
agataagaagcatgt

SEQ ID NO: 1804300 - DNA, 15 bp, Homo sapiens
gataagaagcatgta

SEQ ID NO: 1804301 - DNA, 15 bp, Homo sapiens
ataagaagcatgtaa

SEQ ID NO: 1804302 - DNA, 15 bp, Homo sapiens
taagaagcatgtaaa

SEQ ID NO: 1804303 - DNA, 15 bp, Homo sapiens
aagaagcatgtaaac

SEQ ID NO: 1804304 - DNA, 15 bp, Homo sapiens
agaagcatgtaaacc

SEQ ID NO: 1804305 - DNA, 15 bp, Homo sapiens
gaagcatgtaaacct

SEQ ID NO: 1804306 - DNA, 15 bp, Homo sapiens
aagcatgtaaaccta

SEQ ID NO: 1804307 - DNA, 15 bp, Homo sapiens
agcatgtaaacctac

SEQ ID NO: 1804308 - DNA, 15 bp, Homo sapiens
gcatgtaaacctaca

SEQ ID NO: 1804309 - DNA, 15 bp, Homo sapiens
catgtaaacctacac

SEQ ID NO: 1804310 - DNA, 15 bp, Homo sapiens
atgtaaacctacaca

SEQ ID NO: 1804311 - DNA, 15 bp, Homo sapiens
tgtaaacctacacaa

SEQ ID NO: 1804312 - DNA, 15 bp, Homo sapiens
gtaaacctacacaaa

SEQ ID NO: 1804313 - DNA, 15 bp, Homo sapiens
taaacctacacaaaa

SEQ ID NO: 1804314 - DNA, 15 bp, Homo sapiens
aaacctacacaaaac

SEQ ID NO: 1804315 - DNA, 15 bp, Homo sapiens
aacctacacaaaaca

SEQ ID NO: 1804316 - DNA, 15 bp, Homo sapiens
acctacacaaaacaa

SEQ ID NO: 1804317 - DNA, 15 bp, Homo sapiens
cctacacaaaacaaa

SEQ ID NO: 1804318 - DNA, 15 bp, Homo sapiens
ctacacaaaacaaag

SEQ ID NO: 1804319 - DNA, 15 bp, Homo sapiens
tacacaaaacaaagc

SEQ ID NO: 1804320 - DNA, 15 bp, Homo sapiens
acacaaaacaaagct

SEQ ID NO: 1804321 - DNA, 15 bp, Homo sapiens
cacaaaacaaagctt

SEQ ID NO: 1804322 - DNA, 15 bp, Homo sapiens
acaaaacaaagctta

SEQ ID NO: 1804323 - DNA, 15 bp, Homo sapiens
caaaacaaagcttag

SEQ ID NO: 1804324 - DNA, 15 bp, Homo sapiens
aaaacaaagcttagg

SEQ ID NO: 1804325 - DNA, 15 bp, Homo sapiens
aaacaaagcttaggg

SEQ ID NO: 1804326 - DNA, 15 bp, Homo sapiens
aacaaagcttaggga

SEQ ID NO: 1804327 - DNA, 15 bp, Homo sapiens
acaaagcttagggag

SEQ ID NO: 1804328 - DNA, 15 bp, Homo sapiens
caaagcttagggagc

SEQ ID NO: 1804329 - DNA, 15 bp, Homo sapiens
aaagcttagggagca

SEQ ID NO: 1804330 - DNA, 15 bp, Homo sapiens
aagcttagggagcaa

SEQ ID NO: 1804331 - DNA, 15 bp, Homo sapiens
agcttagggagcaaa

SEQ ID NO: 1804332 - DNA, 15 bp, Homo sapiens
gcttagggagcaaaa

SEQ ID NO: 1804333 - DNA, 15 bp, Homo sapiens
cttagggagcaaaac

SEQ ID NO: 1804334 - DNA, 15 bp, Homo sapiens
ttagggagcaaaacg

SEQ ID NO: 1804335 - DNA, 15 bp, Homo sapiens
tagggagcaaaacgg

SEQ ID NO: 1804336 - DNA, 15 bp, Homo sapiens
agggagcaaaacggg

SEQ ID NO: 1804337 - DNA, 15 bp, Homo sapiens
gggagcaaaacgggg

SEQ ID NO: 1804338 - DNA, 15 bp, Homo sapiens
ggagcaaaacggggt

SEQ ID NO: 1804339 - DNA, 15 bp, Homo sapiens
gagcaaaacggggta

SEQ ID NO: 1804340 - DNA, 15 bp, Homo sapiens
agcaaaacggggtaa

SEQ ID NO: 1804341 - DNA, 15 bp, Homo sapiens
gcaaaacggggtaag

SEQ ID NO: 1804342 - DNA, 15 bp, Homo sapiens
caaaacggggtaaga

SEQ ID NO: 1804343 - DNA, 15 bp, Homo sapiens
aaaacggggtaagag

SEQ ID NO: 1804344 - DNA, 15 bp, Homo sapiens
aaacggggtaagagt

SEQ ID NO: 1804345 - DNA, 15 bp, Homo sapiens
aacggggtaagagtc

SEQ ID NO: 1804346 - DNA, 15 bp, Homo sapiens
acggggtaagagtcc

SEQ ID NO: 1804347 - DNA, 15 bp, Homo sapiens
cggggtaagagtcca

SEQ ID NO: 1804348 - DNA, 15 bp, Homo sapiens
ggggtaagagtccag

SEQ ID NO: 1804349 - DNA, 15 bp, Homo sapiens
gggtaagagtccaga

SEQ ID NO: 1804350 - DNA, 15 bp, Homo sapiens
ggtaagagtccagag

SEQ ID NO: 1804351 - DNA, 15 bp, Homo sapiens
gtaagagtccagagt

SEQ ID NO: 1804352 - DNA, 15 bp, Homo sapiens
taagagtccagagta

SEQ ID NO: 1804353 - DNA, 15 bp, Homo sapiens
aagagtccagagtaa

SEQ ID NO: 1804354 - DNA, 15 bp, Homo sapiens
agagtccagagtaac

SEQ ID NO: 1804355 - DNA, 15 bp, Homo sapiens
gagtccagagtaaca

SEQ ID NO: 1804356 - DNA, 15 bp, Homo sapiens
agtccagagtaacaa

SEQ ID NO: 1804357 - DNA, 15 bp, Homo sapiens
gtccagagtaacaat

SEQ ID NO: 1804358 - DNA, 15 bp, Homo sapiens
tccagagtaacaatc

SEQ ID NO: 1804359 - DNA, 15 bp, Homo sapiens
ccagagtaacaatct

SEQ ID NO: 1804360 - DNA, 15 bp, Homo sapiens
cagagtaacaatctg

SEQ ID NO: 1804361 - DNA, 15 bp, Homo sapiens
agagtaacaatctgt

SEQ ID NO: 1804362 - DNA, 15 bp, Homo sapiens
gagtaacaatctgta

SEQ ID NO: 1804363 - DNA, 15 bp, Homo sapiens
agtaacaatctgtac

SEQ ID NO: 1804364 - DNA, 15 bp, Homo sapiens
gtaacaatctgtact

SEQ ID NO: 1804365 - DNA, 15 bp, Homo sapiens
taacaatctgtactc

SEQ ID NO: 1804366 - DNA, 15 bp, Homo sapiens
aacaatctgtactct

SEQ ID NO: 1804367 - DNA, 15 bp, Homo sapiens
acaatctgtactctg

SEQ ID NO: 1804368 - DNA, 15 bp, Homo sapiens
caatctgtactctgg

SEQ ID NO: 1804369 - DNA, 15 bp, Homo sapiens
aatctgtactctggc

SEQ ID NO: 1804370 - DNA, 15 bp, Homo sapiens
atctgtactctggca

SEQ ID NO: 1804371 - DNA, 15 bp, Homo sapiens
tctgtactctggcag

SEQ ID NO: 1804372 - DNA, 15 bp, Homo sapiens
ctgtactctggcagt

SEQ ID NO: 1804373 - DNA, 15 bp, Homo sapiens
tgtactctggcagta

SEQ ID NO: 1804374 - DNA, 15 bp, Homo sapiens
gtactctggcagtat

SEQ ID NO: 1804375 - DNA, 15 bp, Homo sapiens
tactctggcagtatg

SEQ ID NO: 1804376 - DNA, 15 bp, Homo sapiens
actctggcagtatgc

SEQ ID NO: 1804377 - DNA, 15 bp, Homo sapiens
ctctggcagtatgcc

SEQ ID NO: 1804378 - DNA, 15 bp, Homo sapiens
tctggcagtatgcct

SEQ ID NO: 1804379 - DNA, 15 bp, Homo sapiens
ctggcagtatgccta

SEQ ID NO: 1804380 - DNA, 15 bp, Homo sapiens
tggcagtatgcctac

SEQ ID NO: 1804381 - DNA, 15 bp, Homo sapiens
ggcagtatgcctact

SEQ ID NO: 1804382 - DNA, 15 bp, Homo sapiens
gcagtatgcctactg

SEQ ID NO: 1804383 - DNA, 15 bp, Homo sapiens
cagtatgcctactga

SEQ ID NO: 1804384 - DNA, 15 bp, Homo sapiens
agtatgcctactgac

SEQ ID NO: 1804385 - DNA, 15 bp, Homo sapiens
gtatgcctactgacc

SEQ ID NO: 1804386 - DNA, 15 bp, Homo sapiens
tatgcctactgaccc

SEQ ID NO: 1804387 - DNA, 15 bp, Homo sapiens
atgcctactgaccca

SEQ ID NO: 1804388 - DNA, 15 bp, Homo sapiens
tgcctactgacccat

SEQ ID NO: 1804389 - DNA, 15 bp, Homo sapiens
gcctactgacccatg

SEQ ID NO: 1804390 - DNA, 15 bp, Homo sapiens
cctactgacccatgg

SEQ ID NO: 1804391 - DNA, 15 bp, Homo sapiens
ctactgacccatggt

SEQ ID NO: 1804392 - DNA, 15 bp, Homo sapiens
tactgacccatggtg

SEQ ID NO: 1804393 - DNA, 15 bp, Homo sapiens
actgacccatggtgg

SEQ ID NO: 1804394 - DNA, 15 bp, Homo sapiens
ctgacccatggtgga

SEQ ID NO: 1804395 - DNA, 15 bp, Homo sapiens
tgacccatggtggag

SEQ ID NO: 1804396 - DNA, 15 bp, Homo sapiens
gacccatggtggagt

SEQ ID NO: 1804397 - DNA, 15 bp, Homo sapiens
acccatggtggagtg

SEQ ID NO: 1804398 - DNA, 15 bp, Homo sapiens
cccatggtggagtgt

SEQ ID NO: 1804399 - DNA, 15 bp, Homo sapiens
ccatggtggagtgtg

SEQ ID NO: 1804400 - DNA, 15 bp, Homo sapiens
catggtggagtgtgt

SEQ ID NO: 1804401 - DNA, 15 bp, Homo sapiens
atggtggagtgtgta

SEQ ID NO: 1804402 - DNA, 15 bp, Homo sapiens
tggtggagtgtgtaa

SEQ ID NO: 1804403 - DNA, 15 bp, Homo sapiens
ggtggagtgtgtaaa

SEQ ID NO: 1804404 - DNA, 15 bp, Homo sapiens
gtggagtgtgtaaaa

SEQ ID NO: 1804405 - DNA, 15 bp, Homo sapiens
tggagtgtgtaaaag

SEQ ID NO: 1804406 - DNA, 15 bp, Homo sapiens
ggagtgtgtaaaagt

SEQ ID NO: 1804407 - DNA, 15 bp, Homo sapiens
gagtgtgtaaaagta

SEQ ID NO: 1804408 - DNA, 15 bp, Homo sapiens
agtgtgtaaaagtag

SEQ ID NO: 1804409 - DNA, 15 bp, Homo sapiens
gtgtgtaaaagtagt

SEQ ID NO: 1804410 - DNA, 15 bp, Homo sapiens
tgtgtaaaagtagtc

SEQ ID NO: 1804411 - DNA, 15 bp, Homo sapiens
gtgtaaaagtagtcc

SEQ ID NO: 1804412 - DNA, 15 bp, Homo sapiens
tgtaaaagtagtcca

SEQ ID NO: 1804413 - DNA, 15 bp, Homo sapiens
gtaaaagtagtccat

SEQ ID NO: 1804414 - DNA, 15 bp, Homo sapiens
taaaagtagtccatt

SEQ ID NO: 1804415 - DNA, 15 bp, Homo sapiens
aaaagtagtccattt

SEQ ID NO: 1804416 - DNA, 15 bp, Homo sapiens
aaagtagtccatttt

SEQ ID NO: 1804417 - DNA, 15 bp, Homo sapiens
aagtagtccattttt

SEQ ID NO: 1804418 - DNA, 15 bp, Homo sapiens
agtagtccatttttc

SEQ ID NO: 1804419 - DNA, 15 bp, Homo sapiens
gtagtccatttttca

SEQ ID NO: 1804420 - DNA, 15 bp, Homo sapiens
tagtccatttttcat

SEQ ID NO: 1804421 - DNA, 15 bp, Homo sapiens
agtccatttttcatc

SEQ ID NO: 1804422 - DNA, 15 bp, Homo sapiens
gtccatttttcatcc

SEQ ID NO: 1804423 - DNA, 15 bp, Homo sapiens
tccatttttcatccc

SEQ ID NO: 1804424 - DNA, 15 bp, Homo sapiens
ccatttttcatcccc

SEQ ID NO: 1804425 - DNA, 15 bp, Homo sapiens
catttttcatccccc

SEQ ID NO: 1804426 - DNA, 15 bp, Homo sapiens
atttttcatccccca

SEQ ID NO: 1804427 - DNA, 15 bp, Homo sapiens
tttttcatcccccag

SEQ ID NO: 1804428 - DNA, 15 bp, Homo sapiens
ttttcatcccccagt

SEQ ID NO: 1804429 - DNA, 15 bp, Homo sapiens
tttcatcccccagta

SEQ ID NO: 1804430 - DNA, 15 bp, Homo sapiens
ttcatcccccagtaa

SEQ ID NO: 1804431 - DNA, 15 bp, Homo sapiens
tcatcccccagtaaa

SEQ ID NO: 1804432 - DNA, 15 bp, Homo sapiens
catcccccagtaaac

SEQ ID NO: 1804433 - DNA, 15 bp, Homo sapiens
atcccccagtaaact

SEQ ID NO: 1804434 - DNA, 15 bp, Homo sapiens
tcccccagtaaactt

SEQ ID NO: 1804435 - DNA, 15 bp, Homo sapiens
cccccagtaaactta

SEQ ID NO: 1804436 - DNA, 15 bp, Homo sapiens
ccccagtaaacttat

SEQ ID NO: 1804437 - DNA, 15 bp, Homo sapiens
cccagtaaacttatc

SEQ ID NO: 1804438 - DNA, 15 bp, Homo sapiens
ccagtaaacttatct

SEQ ID NO: 1804439 - DNA, 15 bp, Homo sapiens
cagtaaacttatctg

SEQ ID NO: 1804440 - DNA, 15 bp, Homo sapiens
agtaaacttatctgt

SEQ ID NO: 1804441 - DNA, 15 bp, Homo sapiens
gtaaacttatctgtt

SEQ ID NO: 1804442 - DNA, 15 bp, Homo sapiens
taaacttatctgttc

SEQ ID NO: 1804443 - DNA, 15 bp, Homo sapiens
aaacttatctgttcc

SEQ ID NO: 1804444 - DNA, 15 bp, Homo sapiens
aacttatctgttccc

SEQ ID NO: 1804445 - DNA, 15 bp, Homo sapiens
acttatctgttcccc

SEQ ID NO: 1804446 - DNA, 15 bp, Homo sapiens
cttatctgttcccct

SEQ ID NO: 1804447 - DNA, 15 bp, Homo sapiens
ttatctgttcccctt

SEQ ID NO: 1804448 - DNA, 15 bp, Homo sapiens
tatctgttccccttt

SEQ ID NO: 1804449 - DNA, 15 bp, Homo sapiens
atctgttcccctttg

SEQ ID NO: 1804450 - DNA, 15 bp, Homo sapiens
tctgttcccctttga

SEQ ID NO: 1804451 - DNA, 15 bp, Homo sapiens
ctgttcccctttgag

SEQ ID NO: 1804452 - DNA, 15 bp, Homo sapiens
tgttcccctttgagt

SEQ ID NO: 1804453 - DNA, 15 bp, Homo sapiens
gttcccctttgagtg

SEQ ID NO: 1804454 - DNA, 15 bp, Homo sapiens
ttcccctttgagtgt

SEQ ID NO: 1804455 - DNA, 15 bp, Homo sapiens
tcccctttgagtgtt

SEQ ID NO: 1804456 - DNA, 15 bp, Homo sapiens
cccctttgagtgttc

SEQ ID NO: 1804457 - DNA, 15 bp, Homo sapiens
ccctttgagtgttcc

SEQ ID NO: 1804458 - DNA, 15 bp, Homo sapiens
cctttgagtgttcca

SEQ ID NO: 1804459 - DNA, 15 bp, Homo sapiens
ctttgagtgttccaa

SEQ ID NO: 1804460 - DNA, 15 bp, Homo sapiens
tttgagtgttccaat

SEQ ID NO: 1804461 - DNA, 15 bp, Homo sapiens
ttgagtgttccaatt

SEQ ID NO: 1804462 - DNA, 15 bp, Homo sapiens
tgagtgttccaattt

SEQ ID NO: 1804463 - DNA, 15 bp, Homo sapiens
gagtgttccaatttt

SEQ ID NO: 1804464 - DNA, 15 bp, Homo sapiens
agtgttccaattttt

SEQ ID NO: 1804465 - DNA, 15 bp, Homo sapiens
gtgttccaattttta

SEQ ID NO: 1804466 - DNA, 15 bp, Homo sapiens
tgttccaatttttat

SEQ ID NO: 1804467 - DNA, 15 bp, Homo sapiens
gttccaatttttata

SEQ ID NO: 1804468 - DNA, 15 bp, Homo sapiens
ttccaatttttatat

SEQ ID NO: 1804469 - DNA, 15 bp, Homo sapiens
tccaatttttatatg

SEQ ID NO: 1804470 - DNA, 15 bp, Homo sapiens
ccaatttttatatga

SEQ ID NO: 1804471 - DNA, 15 bp, Homo sapiens
caatttttatatgaa

SEQ ID NO: 1804472 - DNA, 15 bp, Homo sapiens
aatttttatatgaag

SEQ ID NO: 1804473 - DNA, 15 bp, Homo sapiens
atttttatatgaagt

SEQ ID NO: 1804474 - DNA, 15 bp, Homo sapiens
tttttatatgaagtg

SEQ ID NO: 1804475 - DNA, 15 bp, Homo sapiens
ttttatatgaagtga

SEQ ID NO: 1804476 - DNA, 15 bp, Homo sapiens
tttatatgaagtgag

SEQ ID NO: 1804477 - DNA, 15 bp, Homo sapiens
ttatatgaagtgagt

SEQ ID NO: 1804478 - DNA, 15 bp, Homo sapiens
tatatgaagtgagtt

SEQ ID NO: 1804479 - DNA, 15 bp, Homo sapiens
atatgaagtgagttc

SEQ ID NO: 1804480 - DNA, 15 bp, Homo sapiens
tatgaagtgagttca

SEQ ID NO: 1804481 - DNA, 15 bp, Homo sapiens
atgaagtgagttcac

SEQ ID NO: 1804482 - DNA, 15 bp, Homo sapiens
tgaagtgagttcaca

SEQ ID NO: 1804483 - DNA, 15 bp, Homo sapiens
gaagtgagttcacaa

SEQ ID NO: 1804484 - DNA, 15 bp, Homo sapiens
aagtgagttcacaaa

SEQ ID NO: 1804485 - DNA, 15 bp, Homo sapiens
agtgagttcacaaaa

SEQ ID NO: 1804486 - DNA, 15 bp, Homo sapiens
gtgagttcacaaaag

SEQ ID NO: 1804487 - DNA, 15 bp, Homo sapiens
tgagttcacaaaaga

SEQ ID NO: 1804488 - DNA, 15 bp, Homo sapiens
gagttcacaaaagaa

SEQ ID NO: 1804489 - DNA, 15 bp, Homo sapiens
agttcacaaaagaaa

SEQ ID NO: 1804490 - DNA, 15 bp, Homo sapiens
gttcacaaaagaaaa

SEQ ID NO: 1804491 - DNA, 15 bp, Homo sapiens
ttcacaaaagaaaaa

SEQ ID NO: 1804492 - DNA, 15 bp, Homo sapiens
tcacaaaagaaaaag

SEQ ID NO: 1804493 - DNA, 15 bp, Homo sapiens
cacaaaagaaaaagg

SEQ ID NO: 1804494 - DNA, 15 bp, Homo sapiens
acaaaagaaaaaggc

SEQ ID NO: 1804495 - DNA, 15 bp, Homo sapiens
caaaagaaaaaggca

SEQ ID NO: 1804496 - DNA, 15 bp, Homo sapiens
aaaagaaaaaggcac

SEQ ID NO: 1804497 - DNA, 15 bp, Homo sapiens
aaagaaaaaggcact

SEQ ID NO: 1804498 - DNA, 15 bp, Homo sapiens
aagaaaaaggcactg

SEQ ID NO: 1804499 - DNA, 15 bp, Homo sapiens
agaaaaaggcactga

SEQ ID NO: 1804500 - DNA, 15 bp, Homo sapiens
gaaaaaggcactgag

SEQ ID NO: 1804501 - DNA, 15 bp, Homo sapiens
aaaaaggcactgagg

SEQ ID NO: 1804502 - DNA, 15 bp, Homo sapiens
aaaaggcactgagga

SEQ ID NO: 1804503 - DNA, 15 bp, Homo sapiens
aaaggcactgaggag

SEQ ID NO: 1804504 - DNA, 15 bp, Homo sapiens
aaggcactgaggagc

SEQ ID NO: 1804505 - DNA, 15 bp, Homo sapiens
aggcactgaggagct

SEQ ID NO: 1804506 - DNA, 15 bp, Homo sapiens
ggcactgaggagctt

SEQ ID NO: 1804507 - DNA, 15 bp, Homo sapiens
gcactgaggagcttc

SEQ ID NO: 1804508 - DNA, 15 bp, Homo sapiens
cactgaggagcttca

SEQ ID NO: 1804509 - DNA, 15 bp, Homo sapiens
actgaggagcttcag

SEQ ID NO: 1804510 - DNA, 15 bp, Homo sapiens
ctgaggagcttcaga

SEQ ID NO: 1804511 - DNA, 15 bp, Homo sapiens
tgaggagcttcagaa

SEQ ID NO: 1804512 - DNA, 15 bp, Homo sapiens
gaggagcttcagaag

SEQ ID NO: 1804513 - DNA, 15 bp, Homo sapiens
aggagcttcagaaga

SEQ ID NO: 1804514 - DNA, 15 bp, Homo sapiens
ggagcttcagaagac

SEQ ID NO: 1804515 - DNA, 15 bp, Homo sapiens
gagcttcagaagacc

SEQ ID NO: 1804516 - DNA, 15 bp, Homo sapiens
agcttcagaagaccc

SEQ ID NO: 1804517 - DNA, 15 bp, Homo sapiens
gcttcagaagaccct

SEQ ID NO: 1804518 - DNA, 15 bp, Homo sapiens
cttcagaagaccctg

SEQ ID NO: 1804519 - DNA, 15 bp, Homo sapiens
ttcagaagaccctgt

SEQ ID NO: 1804520 - DNA, 15 bp, Homo sapiens
tcagaagaccctgtc

SEQ ID NO: 1804521 - DNA, 15 bp, Homo sapiens
cagaagaccctgtca

SEQ ID NO: 1804522 - DNA, 15 bp, Homo sapiens
agaagaccctgtcag

SEQ ID NO: 1804523 - DNA, 15 bp, Homo sapiens
gaagaccctgtcaga

SEQ ID NO: 1804524 - DNA, 15 bp, Homo sapiens
aagaccctgtcagaa

SEQ ID NO: 1804525 - DNA, 15 bp, Homo sapiens
agaccctgtcagaaa

SEQ ID NO: 1804526 - DNA, 15 bp, Homo sapiens
gaccctgtcagaaat

SEQ ID NO: 1804527 - DNA, 15 bp, Homo sapiens
accctgtcagaaata

SEQ ID NO: 1804528 - DNA, 15 bp, Homo sapiens
ccctgtcagaaataa

SEQ ID NO: 1804529 - DNA, 15 bp, Homo sapiens
cctgtcagaaataag

SEQ ID NO: 1804530 - DNA, 15 bp, Homo sapiens
ctgtcagaaataagc

SEQ ID NO: 1804531 - DNA, 15 bp, Homo sapiens
tgtcagaaataagca

SEQ ID NO: 1804532 - DNA, 15 bp, Homo sapiens
gtcagaaataagcaa

SEQ ID NO: 1804533 - DNA, 15 bp, Homo sapiens
tcagaaataagcaag

SEQ ID NO: 1804534 - DNA, 15 bp, Homo sapiens
cagaaataagcaaga

SEQ ID NO: 1804535 - DNA, 15 bp, Homo sapiens
agaaataagcaagaa

SEQ ID NO: 1804536 - DNA, 15 bp, Homo sapiens
gaaataagcaagaaa

SEQ ID NO: 1804537 - DNA, 15 bp, Homo sapiens
aaataagcaagaaaa

SEQ ID NO: 1804538 - DNA, 15 bp, Homo sapiens
aataagcaagaaaaa

SEQ ID NO: 1804539 - DNA, 15 bp, Homo sapiens
ataagcaagaaaaag

SEQ ID NO: 1804540 - DNA, 15 bp, Homo sapiens
taagcaagaaaaagg

SEQ ID NO: 1804541 - DNA, 15 bp, Homo sapiens
aagcaagaaaaagga

SEQ ID NO: 1804542 - DNA, 15 bp, Homo sapiens
agcaagaaaaaggaa

SEQ ID NO: 1804543 - DNA, 15 bp, Homo sapiens
gcaagaaaaaggaag

SEQ ID NO: 1804544 - DNA, 15 bp, Homo sapiens
caagaaaaaggaaga

SEQ ID NO: 1804545 - DNA, 15 bp, Homo sapiens
aagaaaaaggaagac

SEQ ID NO: 1804546 - DNA, 15 bp, Homo sapiens
agaaaaaggaagaca

SEQ ID NO: 1804547 - DNA, 15 bp, Homo sapiens
gaaaaaggaagacac

SEQ ID NO: 1804548 - DNA, 15 bp, Homo sapiens
aaaaaggaagacact

SEQ ID NO: 1804549 - DNA, 15 bp, Homo sapiens
aaaaggaagacactg

SEQ ID NO: 1804550 - DNA, 15 bp, Homo sapiens
aaaggaagacactgt

SEQ ID NO: 1804551 - DNA, 15 bp, Homo sapiens
aaggaagacactgtg

SEQ ID NO: 1804552 - DNA, 15 bp, Homo sapiens
aggaagacactgtga

SEQ ID NO: 1804553 - DNA, 15 bp, Homo sapiens
ggaagacactgtgaa

SEQ ID NO: 1804554 - DNA, 15 bp, Homo sapiens
gaagacactgtgaag

SEQ ID NO: 1804555 - DNA, 15 bp, Homo sapiens
aagacactgtgaagc

SEQ ID NO: 1804556 - DNA, 15 bp, Homo sapiens
agacactgtgaagct

SEQ ID NO: 1804557 - DNA, 15 bp, Homo sapiens
gacactgtgaagcta

SEQ ID NO: 1804558 - DNA, 15 bp, Homo sapiens
acactgtgaagctat

SEQ ID NO: 1804559 - DNA, 15 bp, Homo sapiens
cactgtgaagctata

SEQ ID NO: 1804560 - DNA, 15 bp, Homo sapiens
actgtgaagctataa

SEQ ID NO: 1804561 - DNA, 15 bp, Homo sapiens
ctgtgaagctataaa

SEQ ID NO: 1804562 - DNA, 15 bp, Homo sapiens
tgtgaagctataaaa

SEQ ID NO: 1804563 - DNA, 15 bp, Homo sapiens
gtgaagctataaaag

SEQ ID NO: 1804564 - DNA, 15 bp, Homo sapiens
tgaagctataaaagc

SEQ ID NO: 1804565 - DNA, 15 bp, Homo sapiens
gaagctataaaagct

SEQ ID NO: 1804566 - DNA, 15 bp, Homo sapiens
aagctataaaagctt

SEQ ID NO: 1804567 - DNA, 15 bp, Homo sapiens
agctataaaagcttg

SEQ ID NO: 1804568 - DNA, 15 bp, Homo sapiens
gctataaaagcttgg

SEQ ID NO: 1804569 - DNA, 15 bp, Homo sapiens
ctataaaagcttggt

SEQ ID NO: 1804570 - DNA, 15 bp, Homo sapiens
tataaaagcttggtc

SEQ ID NO: 1804571 - DNA, 15 bp, Homo sapiens
ataaaagcttggtca

SEQ ID NO: 1804572 - DNA, 15 bp, Homo sapiens
taaaagcttggtcag

SEQ ID NO: 1804573 - DNA, 15 bp, Homo sapiens
aaaagcttggtcagc

SEQ ID NO: 1804574 - DNA, 15 bp, Homo sapiens
aaagcttggtcagct

SEQ ID NO: 1804575 - DNA, 15 bp, Homo sapiens
aagcttggtcagcta

SEQ ID NO: 1804576 - DNA, 15 bp, Homo sapiens
agcttggtcagctat

SEQ ID NO: 1804577 - DNA, 15 bp, Homo sapiens
gcttggtcagctata

SEQ ID NO: 1804578 - DNA, 15 bp, Homo sapiens
cttggtcagctatag

SEQ ID NO: 1804579 - DNA, 15 bp, Homo sapiens
ttggtcagctatagc

SEQ ID NO: 1804580 - DNA, 15 bp, Homo sapiens
tggtcagctatagct

SEQ ID NO: 1804581 - DNA, 15 bp, Homo sapiens
ggtcagctatagcta

SEQ ID NO: 1804582 - DNA, 15 bp, Homo sapiens
gtcagctatagctag

SEQ ID NO: 1804583 - DNA, 15 bp, Homo sapiens
tcagctatagctagc

SEQ ID NO: 1804584 - DNA, 15 bp, Homo sapiens
cagctatagctagca

SEQ ID NO: 1804585 - DNA, 15 bp, Homo sapiens
agctatagctagcac

SEQ ID NO: 1804586 - DNA, 15 bp, Homo sapiens
gctatagctagcaca

SEQ ID NO: 1804587 - DNA, 15 bp, Homo sapiens
ctatagctagcacag

SEQ ID NO: 1804588 - DNA, 15 bp, Homo sapiens
tatagctagcacagg

SEQ ID NO: 1804589 - DNA, 15 bp, Homo sapiens
atagctagcacagga

SEQ ID NO: 1804590 - DNA, 15 bp, Homo sapiens
tagctagcacaggaa

SEQ ID NO: 1804591 - DNA, 15 bp, Homo sapiens
agctagcacaggaag

SEQ ID NO: 1804592 - DNA, 15 bp, Homo sapiens
gctagcacaggaagg

SEQ ID NO: 1804593 - DNA, 15 bp, Homo sapiens
ctagcacaggaaggt

SEQ ID NO: 1804594 - DNA, 15 bp, Homo sapiens
tagcacaggaaggtg

SEQ ID NO: 1804595 - DNA, 15 bp, Homo sapiens
agcacaggaaggtgg

SEQ ID NO: 1804596 - DNA, 15 bp, Homo sapiens
gcacaggaaggtggg

SEQ ID NO: 1804597 - DNA, 15 bp, Homo sapiens
cacaggaaggtgggg

SEQ ID NO: 1804598 - DNA, 15 bp, Homo sapiens
acaggaaggtggggg

SEQ ID NO: 1804599 - DNA, 15 bp, Homo sapiens
caggaaggtggggga

SEQ ID NO: 1804600 - DNA, 15 bp, Homo sapiens
aggaaggtgggggag

SEQ ID NO: 1804601 - DNA, 15 bp, Homo sapiens
ggaaggtgggggaga

SEQ ID NO: 1804602 - DNA, 15 bp, Homo sapiens
gaaggtgggggagag

SEQ ID NO: 1804603 - DNA, 15 bp, Homo sapiens
aaggtgggggagaga

SEQ ID NO: 1804604 - DNA, 15 bp, Homo sapiens
aggtgggggagagag

SEQ ID NO: 1804605 - DNA, 15 bp, Homo sapiens
ggtgggggagagaga

SEQ ID NO: 1804606 - DNA, 15 bp, Homo sapiens
gtgggggagagagac

SEQ ID NO: 1804607 - DNA, 15 bp, Homo sapiens
tgggggagagagacc

SEQ ID NO: 1804608 - DNA, 15 bp, Homo sapiens
gggggagagagacca

SEQ ID NO: 1804609 - DNA, 15 bp, Homo sapiens
ggggagagagaccaa

SEQ ID NO: 1804610 - DNA, 15 bp, Homo sapiens
gggagagagaccaaa

SEQ ID NO: 1804611 - DNA, 15 bp, Homo sapiens
ggagagagaccaaag

SEQ ID NO: 1804612 - DNA, 15 bp, Homo sapiens
gagagagaccaaaga

SEQ ID NO: 1804613 - DNA, 15 bp, Homo sapiens
agagagaccaaagaa

SEQ ID NO: 1804614 - DNA, 15 bp, Homo sapiens
gagagaccaaagaaa

SEQ ID NO: 1804615 - DNA, 15 bp, Homo sapiens
agagaccaaagaaac

SEQ ID NO: 1804616 - DNA, 15 bp, Homo sapiens
gagaccaaagaaaca

SEQ ID NO: 1804617 - DNA, 15 bp, Homo sapiens
agaccaaagaaacaa

SEQ ID NO: 1804618 - DNA, 15 bp, Homo sapiens
gaccaaagaaacaaa

SEQ ID NO: 1804619 - DNA, 15 bp, Homo sapiens
caaagaaacaaagac

SEQ ID NO: 1804620 - DNA, 15 bp, Homo sapiens
aaagaaacaaagact

SEQ ID NO: 1804621 - DNA, 15 bp, Homo sapiens
aagaaacaaagactg

SEQ ID NO: 1804622 - DNA, 15 bp, Homo sapiens
agaaacaaagactgt

SEQ ID NO: 1804623 - DNA, 15 bp, Homo sapiens
gaaacaaagactgtg

SEQ ID NO: 1804624 - DNA, 15 bp, Homo sapiens
aaacaaagactgtgg

SEQ ID NO: 1804625 - DNA, 15 bp, Homo sapiens
aacaaagactgtggt

SEQ ID NO: 1804626 - DNA, 15 bp, Homo sapiens
acaaagactgtggtt

SEQ ID NO: 1804627 - DNA, 15 bp, Homo sapiens
caaagactgtggttg

SEQ ID NO: 1804628 - DNA, 15 bp, Homo sapiens
aaagactgtggttgt

SEQ ID NO: 1804629 - DNA, 15 bp, Homo sapiens
aagactgtggttgtc

SEQ ID NO: 1804630 - DNA, 15 bp, Homo sapiens
agactgtggttgtct

SEQ ID NO: 1804631 - DNA, 15 bp, Homo sapiens
gactgtggttgtcta

SEQ ID NO: 1804632 - DNA, 15 bp, Homo sapiens
actgtggttgtctaa

SEQ ID NO: 1804633 - DNA, 15 bp, Homo sapiens
ctgtggttgtctaat

SEQ ID NO: 1804634 - DNA, 15 bp, Homo sapiens
tgtggttgtctaatg

SEQ ID NO: 1804635 - DNA, 15 bp, Homo sapiens
gtggttgtctaatgg

SEQ ID NO: 1804636 - DNA, 15 bp, Homo sapiens
tggttgtctaatggc

SEQ ID NO: 1804637 - DNA, 15 bp, Homo sapiens
ggttgtctaatggcc

SEQ ID NO: 1804638 - DNA, 15 bp, Homo sapiens
gttgtctaatggcca

SEQ ID NO: 1804639 - DNA, 15 bp, Homo sapiens
ttgtctaatggccag

SEQ ID NO: 1804640 - DNA, 15 bp, Homo sapiens
tgtctaatggccaga

SEQ ID NO: 1804641 - DNA, 15 bp, Homo sapiens
gtctaatggccagaa

SEQ ID NO: 1804642 - DNA, 15 bp, Homo sapiens
tctaatggccagaac

SEQ ID NO: 1804643 - DNA, 15 bp, Homo sapiens
ctaatggccagaaca

SEQ ID NO: 1804644 - DNA, 15 bp, Homo sapiens
taatggccagaacag

SEQ ID NO: 1804645 - DNA, 15 bp, Homo sapiens
aatggccagaacaga

SEQ ID NO: 1804646 - DNA, 15 bp, Homo sapiens
atggccagaacagat

SEQ ID NO: 1804647 - DNA, 15 bp, Homo sapiens
tggccagaacagatg

SEQ ID NO: 1804648 - DNA, 15 bp, Homo sapiens
ggccagaacagatgc

SEQ ID NO: 1804649 - DNA, 15 bp, Homo sapiens
gccagaacagatgct

SEQ ID NO: 1804650 - DNA, 15 bp, Homo sapiens
ccagaacagatgcta

SEQ ID NO: 1804651 - DNA, 15 bp, Homo sapiens
cagaacagatgctat

SEQ ID NO: 1804652 - DNA, 15 bp, Homo sapiens
agaacagatgctata

SEQ ID NO: 1804653 - DNA, 15 bp, Homo sapiens
gaacagatgctatag

SEQ ID NO: 1804654 - DNA, 15 bp, Homo sapiens
aacagatgctatagg

SEQ ID NO: 1804655 - DNA, 15 bp, Homo sapiens
acagatgctataggt

SEQ ID NO: 1804656 - DNA, 15 bp, Homo sapiens
cagatgctataggtg

SEQ ID NO: 1804657 - DNA, 15 bp, Homo sapiens
agatgctataggtgc

SEQ ID NO: 1804658 - DNA, 15 bp, Homo sapiens
gatgctataggtgct

SEQ ID NO: 1804659 - DNA, 15 bp, Homo sapiens
atgctataggtgctt

SEQ ID NO: 1804660 - DNA, 15 bp, Homo sapiens
tgctataggtgcttg

SEQ ID NO: 1804661 - DNA, 15 bp, Homo sapiens
gctataggtgcttgc

SEQ ID NO: 1804662 - DNA, 15 bp, Homo sapiens
ctataggtgcttgcc

SEQ ID NO: 1804663 - DNA, 15 bp, Homo sapiens
tataggtgcttgcca

SEQ ID NO: 1804664 - DNA, 15 bp, Homo sapiens
ataggtgcttgccat

SEQ ID NO: 1804665 - DNA, 15 bp, Homo sapiens
taggtgcttgccatg

SEQ ID NO: 1804666 - DNA, 15 bp, Homo sapiens
aggtgcttgccatgt

SEQ ID NO: 1804667 - DNA, 15 bp, Homo sapiens
ggtgcttgccatgtt

SEQ ID NO: 1804668 - DNA, 15 bp, Homo sapiens
gtgcttgccatgttt

SEQ ID NO: 1804669 - DNA, 15 bp, Homo sapiens
tgcttgccatgtttg

SEQ ID NO: 1804670 - DNA, 15 bp, Homo sapiens
gcttgccatgtttga

SEQ ID NO: 1804671 - DNA, 15 bp, Homo sapiens
cttgccatgtttgaa

SEQ ID NO: 1804672 - DNA, 15 bp, Homo sapiens
ttgccatgtttgaat

SEQ ID NO: 1804673 - DNA, 15 bp, Homo sapiens
tgccatgtttgaatg

SEQ ID NO: 1804674 - DNA, 15 bp, Homo sapiens
gccatgtttgaatgt

SEQ ID NO: 1804675 - DNA, 15 bp, Homo sapiens
ccatgtttgaatgtt

SEQ ID NO: 1804676 - DNA, 15 bp, Homo sapiens
catgtttgaatgttt

SEQ ID NO: 1804677 - DNA, 15 bp, Homo sapiens
atgtttgaatgtttt

SEQ ID NO: 1804678 - DNA, 15 bp, Homo sapiens
tgtttgaatgttttt

SEQ ID NO: 1804679 - DNA, 15 bp, Homo sapiens
gtttgaatgtttttt

SEQ ID NO: 1804680 - DNA, 15 bp, Homo sapiens
tttgaatgttttttt

SEQ ID NO: 1804681 - DNA, 15 bp, Homo sapiens
ttgaatgtttttttg

SEQ ID NO: 1804682 - DNA, 15 bp, Homo sapiens
tgaatgtttttttgt

SEQ ID NO: 1804683 - DNA, 15 bp, Homo sapiens
gaatgtttttttgtt

SEQ ID NO: 1804684 - DNA, 15 bp, Homo sapiens
aatgtttttttgttg

SEQ ID NO: 1804685 - DNA, 15 bp, Homo sapiens
atgtttttttgttgg

SEQ ID NO: 1804686 - DNA, 15 bp, Homo sapiens
tgtttttttgttgga

SEQ ID NO: 1804687 - DNA, 15 bp, Homo sapiens
gtttttttgttggat

SEQ ID NO: 1804688 - DNA, 15 bp, Homo sapiens
tttttttgttggata

SEQ ID NO: 1804689 - DNA, 15 bp, Homo sapiens
ttttttgttggataa

SEQ ID NO: 1804690 - DNA, 15 bp, Homo sapiens
tttttgttggataaa

SEQ ID NO: 1804691 - DNA, 15 bp, Homo sapiens
ttttgttggataaaa

SEQ ID NO: 1804692 - DNA, 15 bp, Homo sapiens
tttgttggataaaat

SEQ ID NO: 1804693 - DNA, 15 bp, Homo sapiens
ttgttggataaaata

SEQ ID NO: 1804694 - DNA, 15 bp, Homo sapiens
tgttggataaaatag

SEQ ID NO: 1804695 - DNA, 15 bp, Homo sapiens
gttggataaaatagc

SEQ ID NO: 1804696 - DNA, 15 bp, Homo sapiens
ttggataaaatagca

SEQ ID NO: 1804697 - DNA, 15 bp, Homo sapiens
tggataaaatagcaa

SEQ ID NO: 1804698 - DNA, 15 bp, Homo sapiens
ggataaaatagcaaa

SEQ ID NO: 1804699 - DNA, 15 bp, Homo sapiens
gataaaatagcaaac

SEQ ID NO: 1804700 - DNA, 15 bp, Homo sapiens
ataaaatagcaaact

SEQ ID NO: 1804701 - DNA, 15 bp, Homo sapiens
taaaatagcaaactt

SEQ ID NO: 1804702 - DNA, 15 bp, Homo sapiens
aaaatagcaaactta

SEQ ID NO: 1804703 - DNA, 15 bp, Homo sapiens
aaatagcaaacttat

SEQ ID NO: 1804704 - DNA, 15 bp, Homo sapiens
aatagcaaacttatc

SEQ ID NO: 1804705 - DNA, 15 bp, Homo sapiens
atagcaaacttatca

SEQ ID NO: 1804706 - DNA, 15 bp, Homo sapiens
tagcaaacttatcaa

SEQ ID NO: 1804707 - DNA, 15 bp, Homo sapiens
agcaaacttatcaaa

SEQ ID NO: 1804708 - DNA, 15 bp, Homo sapiens
gcaaacttatcaaaa

SEQ ID NO: 1804709 - DNA, 15 bp, Homo sapiens
caaacttatcaaaaa

SEQ ID NO: 1804710 - DNA, 15 bp, Homo sapiens
aaacttatcaaaaaa

SEQ ID NO: 1804711 - DNA, 15 bp, Homo sapiens
aacttatcaaaaaat

SEQ ID NO: 1804712 - DNA, 15 bp, Homo sapiens
acttatcaaaaaatg

SEQ ID NO: 1804713 - DNA, 15 bp, Homo sapiens
cttatcaaaaaatga

SEQ ID NO: 1804714 - DNA, 15 bp, Homo sapiens
ttatcaaaaaatgaa

SEQ ID NO: 1804715 - DNA, 15 bp, Homo sapiens
tatcaaaaaatgaaa

SEQ ID NO: 1804716 - DNA, 15 bp, Homo sapiens
atcaaaaaatgaaaa

SEQ ID NO: 1804717 - DNA, 15 bp, Homo sapiens
tcaaaaaatgaaaac

SEQ ID NO: 1804718 - DNA, 15 bp, Homo sapiens
caaaaaatgaaaaca

SEQ ID NO: 1804719 - DNA, 15 bp, Homo sapiens
aaaaaatgaaaacaa

SEQ ID NO: 1804720 - DNA, 15 bp, Homo sapiens
aaaaatgaaaacaaa

SEQ ID NO: 1804721 - DNA, 15 bp, Homo sapiens
aaaatgaaaacaaat

SEQ ID NO: 1804722 - DNA, 15 bp, Homo sapiens
aaatgaaaacaaatg

SEQ ID NO: 1804723 - DNA, 15 bp, Homo sapiens
aatgaaaacaaatgg

SEQ ID NO: 1804724 - DNA, 15 bp, Homo sapiens
atgaaaacaaatggt

SEQ ID NO: 1804725 - DNA, 15 bp, Homo sapiens
tgaaaacaaatggta

SEQ ID NO: 1804726 - DNA, 15 bp, Homo sapiens
gaaaacaaatggtat

SEQ ID NO: 1804727 - DNA, 15 bp, Homo sapiens
aaaacaaatggtata

SEQ ID NO: 1804728 - DNA, 15 bp, Homo sapiens
aaacaaatggtataa

SEQ ID NO: 1804729 - DNA, 15 bp, Homo sapiens
aacaaatggtataat

SEQ ID NO: 1804730 - DNA, 15 bp, Homo sapiens
acaaatggtataatg

SEQ ID NO: 1804731 - DNA, 15 bp, Homo sapiens
caaatggtataatgc

SEQ ID NO: 1804732 - DNA, 15 bp, Homo sapiens
aaatggtataatgct

SEQ ID NO: 1804733 - DNA, 15 bp, Homo sapiens
aatggtataatgcta

SEQ ID NO: 1804734 - DNA, 15 bp, Homo sapiens
atggtataatgctac

SEQ ID NO: 1804735 - DNA, 15 bp, Homo sapiens
tggtataatgctact

SEQ ID NO: 1804736 - DNA, 15 bp, Homo sapiens
ggtataatgctactt

SEQ ID NO: 1804737 - DNA, 15 bp, Homo sapiens
gtataatgctacttt

SEQ ID NO: 1804738 - DNA, 15 bp, Homo sapiens
tataatgctactttt

SEQ ID NO: 1804739 - DNA, 15 bp, Homo sapiens
ataatgctactttta

SEQ ID NO: 1804740 - DNA, 15 bp, Homo sapiens
taatgctacttttaa

SEQ ID NO: 1804741 - DNA, 15 bp, Homo sapiens
aatgctacttttaaa

SEQ ID NO: 1804742 - DNA, 15 bp, Homo sapiens
atgctacttttaaaa

SEQ ID NO: 1804743 - DNA, 15 bp, Homo sapiens
tgctacttttaaaat

SEQ ID NO: 1804744 - DNA, 15 bp, Homo sapiens
gctacttttaaaata

SEQ ID NO: 1804745 - DNA, 15 bp, Homo sapiens
ctacttttaaaataa

SEQ ID NO: 1804746 - DNA, 15 bp, Homo sapiens
tacttttaaaataac

SEQ ID NO: 1804747 - DNA, 15 bp, Homo sapiens
acttttaaaataaca

SEQ ID NO: 1804748 - DNA, 15 bp, Homo sapiens
cttttaaaataacaa

SEQ ID NO: 1804749 - DNA, 15 bp, Homo sapiens
ttttaaaataacaac

SEQ ID NO: 1804750 - DNA, 15 bp, Homo sapiens
tttaaaataacaaca

SEQ ID NO: 1804751 - DNA, 15 bp, Homo sapiens
ttaaaataacaacag

SEQ ID NO: 1804752 - DNA, 15 bp, Homo sapiens
taaaataacaacaga

SEQ ID NO: 1804753 - DNA, 15 bp, Homo sapiens
aaaataacaacagaa

SEQ ID NO: 1804754 - DNA, 15 bp, Homo sapiens
aaataacaacagaat

SEQ ID NO: 1804755 - DNA, 15 bp, Homo sapiens
aataacaacagaata

SEQ ID NO: 1804756 - DNA, 15 bp, Homo sapiens
ataacaacagaataa

SEQ ID NO: 1804757 - DNA, 15 bp, Homo sapiens
taacaacagaataaa

SEQ ID NO: 1804758 - DNA, 15 bp, Homo sapiens
aacaacagaataaaa

SEQ ID NO: 1804759 - DNA, 15 bp, Homo sapiens
acaacagaataaaac

SEQ ID NO: 1804760 - DNA, 15 bp, Homo sapiens
caacagaataaaact

SEQ ID NO: 1804761 - DNA, 15 bp, Homo sapiens
aacagaataaaacta

SEQ ID NO: 1804762 - DNA, 15 bp, Homo sapiens
acagaataaaactat

SEQ ID NO: 1804763 - DNA, 15 bp, Homo sapiens
cagaataaaactata

SEQ ID NO: 1804764 - DNA, 15 bp, Homo sapiens
agaataaaactatat

SEQ ID NO: 1804765 - DNA, 15 bp, Homo sapiens
gaataaaactatata

SEQ ID NO: 1804766 - DNA, 15 bp, Homo sapiens
aataaaactatatag

SEQ ID NO: 1804767 - DNA, 15 bp, Homo sapiens
ataaaactatatagt

SEQ ID NO: 1804768 - DNA, 15 bp, Homo sapiens
taaaactatatagtt

SEQ ID NO: 1804769 - DNA, 15 bp, Homo sapiens
aaaactatatagttt

SEQ ID NO: 1804770 - DNA, 15 bp, Homo sapiens
aaactatatagtttt

SEQ ID NO: 1804771 - DNA, 15 bp, Homo sapiens
aactatatagtttta

SEQ ID NO: 1804772 - DNA, 15 bp, Homo sapiens
actatatagttttaa

SEQ ID NO: 1804773 - DNA, 15 bp, Homo sapiens
ctatatagttttaaa

SEQ ID NO: 1804774 - DNA, 15 bp, Homo sapiens
tatatagttttaaaa

SEQ ID NO: 1804775 - DNA, 15 bp, Homo sapiens
atatagttttaaaaa

SEQ ID NO: 1804776 - DNA, 15 bp, Homo sapiens
tatagttttaaaaac

SEQ ID NO: 1804777 - DNA, 15 bp, Homo sapiens
atagttttaaaaaca

SEQ ID NO: 1804778 - DNA, 15 bp, Homo sapiens
tagttttaaaaacag

SEQ ID NO: 1804779 - DNA, 15 bp, Homo sapiens
agttttaaaaacagg

SEQ ID NO: 1804780 - DNA, 15 bp, Homo sapiens
gttttaaaaacagga

SEQ ID NO: 1804781 - DNA, 15 bp, Homo sapiens
ttttaaaaacaggat

SEQ ID NO: 1804782 - DNA, 15 bp, Homo sapiens
tttaaaaacaggatt

SEQ ID NO: 1804783 - DNA, 15 bp, Homo sapiens
ttaaaaacaggattc

SEQ ID NO: 1804784 - DNA, 15 bp, Homo sapiens
taaaaacaggattca

SEQ ID NO: 1804785 - DNA, 15 bp, Homo sapiens
aaaaacaggattcag

SEQ ID NO: 1804786 - DNA, 15 bp, Homo sapiens
aaaacaggattcaga

SEQ ID NO: 1804787 - DNA, 15 bp, Homo sapiens
aaacaggattcagat

SEQ ID NO: 1804788 - DNA, 15 bp, Homo sapiens
aacaggattcagatt

SEQ ID NO: 1804789 - DNA, 15 bp, Homo sapiens
acaggattcagattt

SEQ ID NO: 1804790 - DNA, 15 bp, Homo sapiens
caggattcagattta

SEQ ID NO: 1804791 - DNA, 15 bp, Homo sapiens
aggattcagatttag

SEQ ID NO: 1804792 - DNA, 15 bp, Homo sapiens
ggattcagatttaga

SEQ ID NO: 1804793 - DNA, 15 bp, Homo sapiens
gattcagatttagat

SEQ ID NO: 1804794 - DNA, 15 bp, Homo sapiens
attcagatttagatc

SEQ ID NO: 1804795 - DNA, 15 bp, Homo sapiens
ttcagatttagatct

SEQ ID NO: 1804796 - DNA, 15 bp, Homo sapiens
tcagatttagatcta

SEQ ID NO: 1804797 - DNA, 15 bp, Homo sapiens
cagatttagatctag

SEQ ID NO: 1804798 - DNA, 15 bp, Homo sapiens
agatttagatctaga

SEQ ID NO: 1804799 - DNA, 15 bp, Homo sapiens
gatttagatctagag

SEQ ID NO: 1804800 - DNA, 15 bp, Homo sapiens
atttagatctagaga

SEQ ID NO: 1804801 - DNA, 15 bp, Homo sapiens
tttagatctagagac

SEQ ID NO: 1804802 - DNA, 15 bp, Homo sapiens
ttagatctagagaca

SEQ ID NO: 1804803 - DNA, 15 bp, Homo sapiens
tagatctagagacac

SEQ ID NO: 1804804 - DNA, 15 bp, Homo sapiens
agatctagagacact

SEQ ID NO: 1804805 - DNA, 15 bp, Homo sapiens
gatctagagacactc

SEQ ID NO: 1804806 - DNA, 15 bp, Homo sapiens
atctagagacactca

SEQ ID NO: 1804807 - DNA, 15 bp, Homo sapiens
tctagagacactcag

SEQ ID NO: 1804808 - DNA, 15 bp, Homo sapiens
ctagagacactcaga

SEQ ID NO: 1804809 - DNA, 15 bp, Homo sapiens
tagagacactcagac

SEQ ID NO: 1804810 - DNA, 15 bp, Homo sapiens
agagacactcagact

SEQ ID NO: 1804811 - DNA, 15 bp, Homo sapiens
gagacactcagactc

SEQ ID NO: 1804812 - DNA, 15 bp, Homo sapiens
agacactcagactct

SEQ ID NO: 1804813 - DNA, 15 bp, Homo sapiens
gacactcagactctg

SEQ ID NO: 1804814 - DNA, 15 bp, Homo sapiens
acactcagactctgc

SEQ ID NO: 1804815 - DNA, 15 bp, Homo sapiens
cactcagactctgcc

SEQ ID NO: 1804816 - DNA, 15 bp, Homo sapiens
actcagactctgcct

SEQ ID NO: 1804817 - DNA, 15 bp, Homo sapiens
ctcagactctgcctc

SEQ ID NO: 1804818 - DNA, 15 bp, Homo sapiens
tcagactctgcctct

SEQ ID NO: 1804819 - DNA, 15 bp, Homo sapiens
cagactctgcctcta

SEQ ID NO: 1804820 - DNA, 15 bp, Homo sapiens
agactctgcctctac

SEQ ID NO: 1804821 - DNA, 15 bp, Homo sapiens
gactctgcctctacc

SEQ ID NO: 1804822 - DNA, 15 bp, Homo sapiens
actctgcctctacca

SEQ ID NO: 1804823 - DNA, 15 bp, Homo sapiens
ctctgcctctaccag

SEQ ID NO: 1804824 - DNA, 15 bp, Homo sapiens
tctgcctctaccaga

SEQ ID NO: 1804825 - DNA, 15 bp, Homo sapiens
ctgcctctaccagat

SEQ ID NO: 1804826 - DNA, 15 bp, Homo sapiens
tgcctctaccagata

SEQ ID NO: 1804827 - DNA, 15 bp, Homo sapiens
gcctctaccagataa

SEQ ID NO: 1804828 - DNA, 15 bp, Homo sapiens
cctctaccagataaa

SEQ ID NO: 1804829 - DNA, 15 bp, Homo sapiens
ctctaccagataaag

SEQ ID NO: 1804830 - DNA, 15 bp, Homo sapiens
tctaccagataaagt

SEQ ID NO: 1804831 - DNA, 15 bp, Homo sapiens
ctaccagataaagtc

SEQ ID NO: 1804832 - DNA, 15 bp, Homo sapiens
taccagataaagtct

SEQ ID NO: 1804833 - DNA, 15 bp, Homo sapiens
accagataaagtctg

SEQ ID NO: 1804834 - DNA, 15 bp, Homo sapiens
ccagataaagtctga

SEQ ID NO: 1804835 - DNA, 15 bp, Homo sapiens
cagataaagtctgaa

SEQ ID NO: 1804836 - DNA, 15 bp, Homo sapiens
agataaagtctgaag

SEQ ID NO: 1804837 - DNA, 15 bp, Homo sapiens
gataaagtctgaaga

SEQ ID NO: 1804838 - DNA, 15 bp, Homo sapiens
ataaagtctgaagaa

SEQ ID NO: 1804839 - DNA, 15 bp, Homo sapiens
taaagtctgaagaaa

SEQ ID NO: 1804840 - DNA, 15 bp, Homo sapiens
aaagtctgaagaaaa

SEQ ID NO: 1804841 - DNA, 15 bp, Homo sapiens
aagtctgaagaaaaa

SEQ ID NO: 1804842 - DNA, 15 bp, Homo sapiens
agtctgaagaaaaat

SEQ ID NO: 1804843 - DNA, 15 bp, Homo sapiens
gtctgaagaaaaatg

SEQ ID NO: 1804844 - DNA, 15 bp, Homo sapiens
tctgaagaaaaatgg

SEQ ID NO: 1804845 - DNA, 15 bp, Homo sapiens
ctgaagaaaaatggt

SEQ ID NO: 1804846 - DNA, 15 bp, Homo sapiens
tgaagaaaaatggtt

SEQ ID NO: 1804847 - DNA, 15 bp, Homo sapiens
gaagaaaaatggtta

SEQ ID NO: 1804848 - DNA, 15 bp, Homo sapiens
agaaaaatggttaag

SEQ ID NO: 1804849 - DNA, 15 bp, Homo sapiens
gaaaaatggttaagc

SEQ ID NO: 1804850 - DNA, 15 bp, Homo sapiens
aaaaatggttaagca

SEQ ID NO: 1804851 - DNA, 15 bp, Homo sapiens
aaaatggttaagcaa

SEQ ID NO: 1804852 - DNA, 15 bp, Homo sapiens
aaatggttaagcaat

SEQ ID NO: 1804853 - DNA, 15 bp, Homo sapiens
aatggttaagcaatt

SEQ ID NO: 1804854 - DNA, 15 bp, Homo sapiens
atggttaagcaattt

SEQ ID NO: 1804855 - DNA, 15 bp, Homo sapiens
tggttaagcaatttg

SEQ ID NO: 1804856 - DNA, 15 bp, Homo sapiens
ggttaagcaatttgt

SEQ ID NO: 1804857 - DNA, 15 bp, Homo sapiens
gttaagcaatttgtt

SEQ ID NO: 1804858 - DNA, 15 bp, Homo sapiens
ttaagcaatttgtta

SEQ ID NO: 1804859 - DNA, 15 bp, Homo sapiens
taagcaatttgttaa

SEQ ID NO: 1804860 - DNA, 15 bp, Homo sapiens
aagcaatttgttaaa

SEQ ID NO: 1804861 - DNA, 15 bp, Homo sapiens
agcaatttgttaaag

SEQ ID NO: 1804862 - DNA, 15 bp, Homo sapiens
gcaatttgttaaaga

SEQ ID NO: 1804863 - DNA, 15 bp, Homo sapiens
caatttgttaaagag

SEQ ID NO: 1804864 - DNA, 15 bp, Homo sapiens
aatttgttaaagaga

SEQ ID NO: 1804865 - DNA, 15 bp, Homo sapiens
atttgttaaagagaa

SEQ ID NO: 1804866 - DNA, 15 bp, Homo sapiens
tttgttaaagagaaa

SEQ ID NO: 1804867 - DNA, 15 bp, Homo sapiens
ttgttaaagagaaac

SEQ ID NO: 1804868 - DNA, 15 bp, Homo sapiens
tgttaaagagaaact

SEQ ID NO: 1804869 - DNA, 15 bp, Homo sapiens
gttaaagagaaactc

SEQ ID NO: 1804870 - DNA, 15 bp, Homo sapiens
ttaaagagaaactct

SEQ ID NO: 1804871 - DNA, 15 bp, Homo sapiens
taaagagaaactctg

SEQ ID NO: 1804872 - DNA, 15 bp, Homo sapiens
aaagagaaactctgt

SEQ ID NO: 1804873 - DNA, 15 bp, Homo sapiens
aagagaaactctgtc

SEQ ID NO: 1804874 - DNA, 15 bp, Homo sapiens
agagaaactctgtcc

SEQ ID NO: 1804875 - DNA, 15 bp, Homo sapiens
gagaaactctgtcca

SEQ ID NO: 1804876 - DNA, 15 bp, Homo sapiens
agaaactctgtccat

SEQ ID NO: 1804877 - DNA, 15 bp, Homo sapiens
gaaactctgtccatt

SEQ ID NO: 1804878 - DNA, 15 bp, Homo sapiens
aaactctgtccattt

SEQ ID NO: 1804879 - DNA, 15 bp, Homo sapiens
aactctgtccattta

SEQ ID NO: 1804880 - DNA, 15 bp, Homo sapiens
actctgtccatttag

SEQ ID NO: 1804881 - DNA, 15 bp, Homo sapiens
ctctgtccatttagt

SEQ ID NO: 1804882 - DNA, 15 bp, Homo sapiens
tctgtccatttagtg

SEQ ID NO: 1804883 - DNA, 15 bp, Homo sapiens
ctgtccatttagtgt

SEQ ID NO: 1804884 - DNA, 15 bp, Homo sapiens
tgtccatttagtgtt

SEQ ID NO: 1804885 - DNA, 15 bp, Homo sapiens
gtccatttagtgttg

SEQ ID NO: 1804886 - DNA, 15 bp, Homo sapiens
tccatttagtgttgc

SEQ ID NO: 1804887 - DNA, 15 bp, Homo sapiens
ccatttagtgttgct

SEQ ID NO: 1804888 - DNA, 15 bp, Homo sapiens
catttagtgttgctg

SEQ ID NO: 1804889 - DNA, 15 bp, Homo sapiens
atttagtgttgctgt

SEQ ID NO: 1804890 - DNA, 15 bp, Homo sapiens
tttagtgttgctgta

SEQ ID NO: 1804891 - DNA, 15 bp, Homo sapiens
ttagtgttgctgtaa

SEQ ID NO: 1804892 - DNA, 15 bp, Homo sapiens
tagtgttgctgtaac

SEQ ID NO: 1804893 - DNA, 15 bp, Homo sapiens
agtgttgctgtaaca

SEQ ID NO: 1804894 - DNA, 15 bp, Homo sapiens
gtgttgctgtaacag

SEQ ID NO: 1804895 - DNA, 15 bp, Homo sapiens
tgttgctgtaacaga

SEQ ID NO: 1804896 - DNA, 15 bp, Homo sapiens
gttgctgtaacagaa

SEQ ID NO: 1804897 - DNA, 15 bp, Homo sapiens
ttgctgtaacagaat

SEQ ID NO: 1804898 - DNA, 15 bp, Homo sapiens
tgctgtaacagaata

SEQ ID NO: 1804899 - DNA, 15 bp, Homo sapiens
gctgtaacagaataa

SEQ ID NO: 1804900 - DNA, 15 bp, Homo sapiens
ctgtaacagaataac

SEQ ID NO: 1804901 - DNA, 15 bp, Homo sapiens
tgtaacagaataact

SEQ ID NO: 1804902 - DNA, 15 bp, Homo sapiens
gtaacagaataactg

SEQ ID NO: 1804903 - DNA, 15 bp, Homo sapiens
taacagaataactga

SEQ ID NO: 1804904 - DNA, 15 bp, Homo sapiens
acagaataactgagg

SEQ ID NO: 1804905 - DNA, 15 bp, Homo sapiens
cagaataactgaggc

SEQ ID NO: 1804906 - DNA, 15 bp, Homo sapiens
agaataactgaggct

SEQ ID NO: 1804907 - DNA, 15 bp, Homo sapiens
gaataactgaggctg

SEQ ID NO: 1804908 - DNA, 15 bp, Homo sapiens
aataactgaggctga

SEQ ID NO: 1804909 - DNA, 15 bp, Homo sapiens
ataactgaggctgag

SEQ ID NO: 1804910 - DNA, 15 bp, Homo sapiens
taactgaggctgagt

SEQ ID NO: 1804911 - DNA, 15 bp, Homo sapiens
aactgaggctgagtt

SEQ ID NO: 1804912 - DNA, 15 bp, Homo sapiens
actgaggctgagtta

SEQ ID NO: 1804913 - DNA, 15 bp, Homo sapiens
ctgaggctgagttaa

SEQ ID NO: 1804914 - DNA, 15 bp, Homo sapiens
tgaggctgagttaat

SEQ ID NO: 1804915 - DNA, 15 bp, Homo sapiens
gaggctgagttaatt

SEQ ID NO: 1804916 - DNA, 15 bp, Homo sapiens
aggctgagttaattc

SEQ ID NO: 1804917 - DNA, 15 bp, Homo sapiens
ggctgagttaattca

SEQ ID NO: 1804918 - DNA, 15 bp, Homo sapiens
gctgagttaattcat

SEQ ID NO: 1804919 - DNA, 15 bp, Homo sapiens
ctgagttaattcata

SEQ ID NO: 1804920 - DNA, 15 bp, Homo sapiens
tgagttaattcataa

SEQ ID NO: 1804921 - DNA, 15 bp, Homo sapiens
gagttaattcataaa

SEQ ID NO: 1804922 - DNA, 15 bp, Homo sapiens
agttaattcataaat

SEQ ID NO: 1804923 - DNA, 15 bp, Homo sapiens
gttaattcataaatt

SEQ ID NO: 1804924 - DNA, 15 bp, Homo sapiens
ttaattcataaatta

SEQ ID NO: 1804925 - DNA, 15 bp, Homo sapiens
taattcataaattag

SEQ ID NO: 1804926 - DNA, 15 bp, Homo sapiens
aattcataaattaga

SEQ ID NO: 1804927 - DNA, 15 bp, Homo sapiens
attcataaattagag

SEQ ID NO: 1804928 - DNA, 15 bp, Homo sapiens
ttcataaattagagg

SEQ ID NO: 1804929 - DNA, 15 bp, Homo sapiens
tcataaattagaggg

SEQ ID NO: 1804930 - DNA, 15 bp, Homo sapiens
cataaattagagggg

SEQ ID NO: 1804931 - DNA, 15 bp, Homo sapiens
ataaattagaggggt

SEQ ID NO: 1804932 - DNA, 15 bp, Homo sapiens
taaattagaggggtg

SEQ ID NO: 1804933 - DNA, 15 bp, Homo sapiens
aaattagaggggtgt

SEQ ID NO: 1804934 - DNA, 15 bp, Homo sapiens
aattagaggggtgta

SEQ ID NO: 1804935 - DNA, 15 bp, Homo sapiens
attagaggggtgtat

SEQ ID NO: 1804936 - DNA, 15 bp, Homo sapiens
ttagaggggtgtatt

SEQ ID NO: 1804937 - DNA, 15 bp, Homo sapiens
tagaggggtgtattt

SEQ ID NO: 1804938 - DNA, 15 bp, Homo sapiens
agaggggtgtatttg

SEQ ID NO: 1804939 - DNA, 15 bp, Homo sapiens
gaggggtgtatttgg

SEQ ID NO: 1804940 - DNA, 15 bp, Homo sapiens
aggggtgtatttggc

SEQ ID NO: 1804941 - DNA, 15 bp, Homo sapiens
ggggtgtatttggct

SEQ ID NO: 1804942 - DNA, 15 bp, Homo sapiens
gggtgtatttggctc

SEQ ID NO: 1804943 - DNA, 15 bp, Homo sapiens
ggtgtatttggctca

SEQ ID NO: 1804944 - DNA, 15 bp, Homo sapiens
gtgtatttggctcat

SEQ ID NO: 1804945 - DNA, 15 bp, Homo sapiens
tgtatttggctcatg

SEQ ID NO: 1804946 - DNA, 15 bp, Homo sapiens
gtatttggctcatgg

SEQ ID NO: 1804947 - DNA, 15 bp, Homo sapiens
tatttggctcatggt

SEQ ID NO: 1804948 - DNA, 15 bp, Homo sapiens
atttggctcatggtt

SEQ ID NO: 1804949 - DNA, 15 bp, Homo sapiens
tttggctcatggttc

SEQ ID NO: 1804950 - DNA, 15 bp, Homo sapiens
ttggctcatggttct

SEQ ID NO: 1804951 - DNA, 15 bp, Homo sapiens
tggctcatggttctg

SEQ ID NO: 1804952 - DNA, 15 bp, Homo sapiens
ggctcatggttctgg

SEQ ID NO: 1804953 - DNA, 15 bp, Homo sapiens
gctcatggttctggt

SEQ ID NO: 1804954 - DNA, 15 bp, Homo sapiens
ctcatggttctggtg

SEQ ID NO: 1804955 - DNA, 15 bp, Homo sapiens
tcatggttctggtgg

SEQ ID NO: 1804956 - DNA, 15 bp, Homo sapiens
catggttctggtggc

SEQ ID NO: 1804957 - DNA, 15 bp, Homo sapiens
atggttctggtggct

SEQ ID NO: 1804958 - DNA, 15 bp, Homo sapiens
tggttctggtggctg

SEQ ID NO: 1804959 - DNA, 15 bp, Homo sapiens
ggttctggtggctgg

SEQ ID NO: 1804960 - DNA, 15 bp, Homo sapiens
gttctggtggctgga

SEQ ID NO: 1804961 - DNA, 15 bp, Homo sapiens
ttctggtggctggaa

SEQ ID NO: 1804962 - DNA, 15 bp, Homo sapiens
tctggtggctggaag

SEQ ID NO: 1804963 - DNA, 15 bp, Homo sapiens
ctggtggctggaagc

SEQ ID NO: 1804964 - DNA, 15 bp, Homo sapiens
tggtggctggaagct

SEQ ID NO: 1804965 - DNA, 15 bp, Homo sapiens
ggtggctggaagctt

SEQ ID NO: 1804966 - DNA, 15 bp, Homo sapiens
gtggctggaagcttc

SEQ ID NO: 1804967 - DNA, 15 bp, Homo sapiens
tggctggaagcttca

SEQ ID NO: 1804968 - DNA, 15 bp, Homo sapiens
ggctggaagcttcaa

SEQ ID NO: 1804969 - DNA, 15 bp, Homo sapiens
gctggaagcttcaag

SEQ ID NO: 1804970 - DNA, 15 bp, Homo sapiens
ctggaagcttcaaga

SEQ ID NO: 1804971 - DNA, 15 bp, Homo sapiens
tggaagcttcaagat

SEQ ID NO: 1804972 - DNA, 15 bp, Homo sapiens
ggaagcttcaagatt

SEQ ID NO: 1804973 - DNA, 15 bp, Homo sapiens
gaagcttcaagattg

SEQ ID NO: 1804974 - DNA, 15 bp, Homo sapiens
aagcttcaagattgg

SEQ ID NO: 1804975 - DNA, 15 bp, Homo sapiens
agcttcaagattggg

SEQ ID NO: 1804976 - DNA, 15 bp, Homo sapiens
gcttcaagattgggc

SEQ ID NO: 1804977 - DNA, 15 bp, Homo sapiens
cttcaagattgggca

SEQ ID NO: 1804978 - DNA, 15 bp, Homo sapiens
ttcaagattgggcag

SEQ ID NO: 1804979 - DNA, 15 bp, Homo sapiens
tcaagattgggcaga

SEQ ID NO: 1804980 - DNA, 15 bp, Homo sapiens
caagattgggcagat

SEQ ID NO: 1804981 - DNA, 15 bp, Homo sapiens
aagattgggcagatg

SEQ ID NO: 1804982 - DNA, 15 bp, Homo sapiens
agattgggcagatgc

SEQ ID NO: 1804983 - DNA, 15 bp, Homo sapiens
gattgggcagatgca

SEQ ID NO: 1804984 - DNA, 15 bp, Homo sapiens
attgggcagatgcat

SEQ ID NO: 1804985 - DNA, 15 bp, Homo sapiens
ttgggcagatgcatc

SEQ ID NO: 1804986 - DNA, 15 bp, Homo sapiens
tgggcagatgcatct

SEQ ID NO: 1804987 - DNA, 15 bp, Homo sapiens
gggcagatgcatctg

SEQ ID NO: 1804988 - DNA, 15 bp, Homo sapiens
ggcagatgcatctgc

SEQ ID NO: 1804989 - DNA, 15 bp, Homo sapiens
gcagatgcatctgct

SEQ ID NO: 1804990 - DNA, 15 bp, Homo sapiens
cagatgcatctgctg

SEQ ID NO: 1804991 - DNA, 15 bp, Homo sapiens
agatgcatctgctgg

SEQ ID NO: 1804992 - DNA, 15 bp, Homo sapiens
gatgcatctgctggg

SEQ ID NO: 1804993 - DNA, 15 bp, Homo sapiens
atgcatctgctgggg

SEQ ID NO: 1804994 - DNA, 15 bp, Homo sapiens
tgcatctgctgggga

SEQ ID NO: 1804995 - DNA, 15 bp, Homo sapiens
gcatctgctggggac

SEQ ID NO: 1804996 - DNA, 15 bp, Homo sapiens
catctgctggggacc

SEQ ID NO: 1804997 - DNA, 15 bp, Homo sapiens
atctgctggggacct

SEQ ID NO: 1804998 - DNA, 15 bp, Homo sapiens
tctgctggggacctg

SEQ ID NO: 1804999 - DNA, 15 bp, Homo sapiens
ctgctggggacctgg

SEQ ID NO: 1805000 - DNA, 15 bp, Homo sapiens
tgctggggacctggg

SEQ ID NO: 1805001 - DNA, 15 bp, Homo sapiens
gctggggacctgggg

SEQ ID NO: 1805002 - DNA, 15 bp, Homo sapiens
ctggggacctggggc

SEQ ID NO: 1805003 - DNA, 15 bp, Homo sapiens
tggggacctggggct

SEQ ID NO: 1805004 - DNA, 15 bp, Homo sapiens
ggggacctggggctg

SEQ ID NO: 1805005 - DNA, 15 bp, Homo sapiens
gggacctggggctgc

SEQ ID NO: 1805006 - DNA, 15 bp, Homo sapiens
ggacctggggctgct

SEQ ID NO: 1805007 - DNA, 15 bp, Homo sapiens
gacctggggctgctt

SEQ ID NO: 1805008 - DNA, 15 bp, Homo sapiens
acctggggctgcttc

SEQ ID NO: 1805009 - DNA, 15 bp, Homo sapiens
cctggggctgcttca

SEQ ID NO: 1805010 - DNA, 15 bp, Homo sapiens
ctggggctgcttcaa

SEQ ID NO: 1805011 - DNA, 15 bp, Homo sapiens
tggggctgcttcaag

SEQ ID NO: 1805012 - DNA, 15 bp, Homo sapiens
ggggctgcttcaagt

SEQ ID NO: 1805013 - DNA, 15 bp, Homo sapiens
gggctgcttcaagtc

SEQ ID NO: 1805014 - DNA, 15 bp, Homo sapiens
ggctgcttcaagtca

SEQ ID NO: 1805015 - DNA, 15 bp, Homo sapiens
gctgcttcaagtcat

SEQ ID NO: 1805016 - DNA, 15 bp, Homo sapiens
ctgcttcaagtcatg

SEQ ID NO: 1805017 - DNA, 15 bp, Homo sapiens
tgcttcaagtcatgg

SEQ ID NO: 1805018 - DNA, 15 bp, Homo sapiens
gcttcaagtcatggt

SEQ ID NO: 1805019 - DNA, 15 bp, Homo sapiens
cttcaagtcatggtg

SEQ ID NO: 1805020 - DNA, 15 bp, Homo sapiens
ttcaagtcatggtgg

SEQ ID NO: 1805021 - DNA, 15 bp, Homo sapiens
tcaagtcatggtgga

SEQ ID NO: 1805022 - DNA, 15 bp, Homo sapiens
caagtcatggtggaa

SEQ ID NO: 1805023 - DNA, 15 bp, Homo sapiens
aagtcatggtggaaa

SEQ ID NO: 1805024 - DNA, 15 bp, Homo sapiens
agtcatggtggaaag

SEQ ID NO: 1805025 - DNA, 15 bp, Homo sapiens
gtcatggtggaaagc

SEQ ID NO: 1805026 - DNA, 15 bp, Homo sapiens
tcatggtggaaagcc

SEQ ID NO: 1805027 - DNA, 15 bp, Homo sapiens
catggtggaaagcca

SEQ ID NO: 1805028 - DNA, 15 bp, Homo sapiens
atggtggaaagccaa

SEQ ID NO: 1805029 - DNA, 15 bp, Homo sapiens
tggtggaaagccaaa

SEQ ID NO: 1805030 - DNA, 15 bp, Homo sapiens
ggtggaaagccaaag

SEQ ID NO: 1805031 - DNA, 15 bp, Homo sapiens
gtggaaagccaaagt

SEQ ID NO: 1805032 - DNA, 15 bp, Homo sapiens
tggaaagccaaagtg

SEQ ID NO: 1805033 - DNA, 15 bp, Homo sapiens
ggaaagccaaagtgg

SEQ ID NO: 1805034 - DNA, 15 bp, Homo sapiens
gaaagccaaagtggg

SEQ ID NO: 1805035 - DNA, 15 bp, Homo sapiens
aaagccaaagtgggg

SEQ ID NO: 1805036 - DNA, 15 bp, Homo sapiens
aagccaaagtggggc

SEQ ID NO: 1805037 - DNA, 15 bp, Homo sapiens
agccaaagtggggca

SEQ ID NO: 1805038 - DNA, 15 bp, Homo sapiens
gccaaagtggggcag

SEQ ID NO: 1805039 - DNA, 15 bp, Homo sapiens
ccaaagtggggcaga

SEQ ID NO: 1805040 - DNA, 15 bp, Homo sapiens
caaagtggggcagac

SEQ ID NO: 1805041 - DNA, 15 bp, Homo sapiens
aaagtggggcagacg

SEQ ID NO: 1805042 - DNA, 15 bp, Homo sapiens
aagtggggcagacgt

SEQ ID NO: 1805043 - DNA, 15 bp, Homo sapiens
agtggggcagacgtg

SEQ ID NO: 1805044 - DNA, 15 bp, Homo sapiens
gtggggcagacgtgc

SEQ ID NO: 1805045 - DNA, 15 bp, Homo sapiens
tggggcagacgtgca

SEQ ID NO: 1805046 - DNA, 15 bp, Homo sapiens
ggggcagacgtgcac

SEQ ID NO: 1805047 - DNA, 15 bp, Homo sapiens
gggcagacgtgcaca

SEQ ID NO: 1805048 - DNA, 15 bp, Homo sapiens
ggcagacgtgcacaa

SEQ ID NO: 1805049 - DNA, 15 bp, Homo sapiens
gcagacgtgcacaaa

SEQ ID NO: 1805050 - DNA, 15 bp, Homo sapiens
cagacgtgcacaaag

SEQ ID NO: 1805051 - DNA, 15 bp, Homo sapiens
agacgtgcacaaaga

SEQ ID NO: 1805052 - DNA, 15 bp, Homo sapiens
gacgtgcacaaagag

SEQ ID NO: 1805053 - DNA, 15 bp, Homo sapiens
acgtgcacaaagaga

SEQ ID NO: 1805054 - DNA, 15 bp, Homo sapiens
cgtgcacaaagagat

SEQ ID NO: 1805055 - DNA, 15 bp, Homo sapiens
gtgcacaaagagatc

SEQ ID NO: 1805056 - DNA, 15 bp, Homo sapiens
tgcacaaagagatca

SEQ ID NO: 1805057 - DNA, 15 bp, Homo sapiens
gcacaaagagatcat

SEQ ID NO: 1805058 - DNA, 15 bp, Homo sapiens
cacaaagagatcatg

SEQ ID NO: 1805059 - DNA, 15 bp, Homo sapiens
acaaagagatcatgt

SEQ ID NO: 1805060 - DNA, 15 bp, Homo sapiens
caaagagatcatgtg

SEQ ID NO: 1805061 - DNA, 15 bp, Homo sapiens
aaagagatcatgtgg

SEQ ID NO: 1805062 - DNA, 15 bp, Homo sapiens
aagagatcatgtggt

SEQ ID NO: 1805063 - DNA, 15 bp, Homo sapiens
agagatcatgtggtg

SEQ ID NO: 1805064 - DNA, 15 bp, Homo sapiens
gagatcatgtggtga

SEQ ID NO: 1805065 - DNA, 15 bp, Homo sapiens
agatcatgtggtgag

SEQ ID NO: 1805066 - DNA, 15 bp, Homo sapiens
gatcatgtggtgaga

SEQ ID NO: 1805067 - DNA, 15 bp, Homo sapiens
atcatgtggtgagaa

SEQ ID NO: 1805068 - DNA, 15 bp, Homo sapiens
tcatgtggtgagaaa

SEQ ID NO: 1805069 - DNA, 15 bp, Homo sapiens
catgtggtgagaaac

SEQ ID NO: 1805070 - DNA, 15 bp, Homo sapiens
atgtggtgagaaacc

SEQ ID NO: 1805071 - DNA, 15 bp, Homo sapiens
tgtggtgagaaacca

SEQ ID NO: 1805072 - DNA, 15 bp, Homo sapiens
gtggtgagaaaccaa

SEQ ID NO: 1805073 - DNA, 15 bp, Homo sapiens
tggtgagaaaccaag

SEQ ID NO: 1805074 - DNA, 15 bp, Homo sapiens
ggtgagaaaccaagg

SEQ ID NO: 1805075 - DNA, 15 bp, Homo sapiens
gtgagaaaccaaggt

SEQ ID NO: 1805076 - DNA, 15 bp, Homo sapiens
tgagaaaccaaggtc

SEQ ID NO: 1805077 - DNA, 15 bp, Homo sapiens
gagaaaccaaggtcg

SEQ ID NO: 1805078 - DNA, 15 bp, Homo sapiens
agaaaccaaggtcgc

SEQ ID NO: 1805079 - DNA, 15 bp, Homo sapiens
gaaaccaaggtcgct

SEQ ID NO: 1805080 - DNA, 15 bp, Homo sapiens
aaaccaaggtcgctg

SEQ ID NO: 1805081 - DNA, 15 bp, Homo sapiens
aaccaaggtcgctga

SEQ ID NO: 1805082 - DNA, 15 bp, Homo sapiens
accaaggtcgctgaa

SEQ ID NO: 1805083 - DNA, 15 bp, Homo sapiens
ccaaggtcgctgaaa

SEQ ID NO: 1805084 - DNA, 15 bp, Homo sapiens
caaggtcgctgaaat

SEQ ID NO: 1805085 - DNA, 15 bp, Homo sapiens
aaggtcgctgaaatc

SEQ ID NO: 1805086 - DNA, 15 bp, Homo sapiens
aggtcgctgaaatcc

SEQ ID NO: 1805087 - DNA, 15 bp, Homo sapiens
ggtcgctgaaatccc

SEQ ID NO: 1805088 - DNA, 15 bp, Homo sapiens
gtcgctgaaatccct

SEQ ID NO: 1805089 - DNA, 15 bp, Homo sapiens
tcgctgaaatccctt

SEQ ID NO: 1805090 - DNA, 15 bp, Homo sapiens
cgctgaaatcccttt

SEQ ID NO: 1805091 - DNA, 15 bp, Homo sapiens
gctgaaatccctttg

SEQ ID NO: 1805092 - DNA, 15 bp, Homo sapiens
ctgaaatccctttga

SEQ ID NO: 1805093 - DNA, 15 bp, Homo sapiens
tgaaatccctttgat

SEQ ID NO: 1805094 - DNA, 15 bp, Homo sapiens
gaaatccctttgatt

SEQ ID NO: 1805095 - DNA, 15 bp, Homo sapiens
aaatccctttgattt

SEQ ID NO: 1805096 - DNA, 15 bp, Homo sapiens
aatccctttgatttt

SEQ ID NO: 1805097 - DNA, 15 bp, Homo sapiens
atccctttgattttt

SEQ ID NO: 1805098 - DNA, 15 bp, Homo sapiens
tccctttgatttttt

SEQ ID NO: 1805099 - DNA, 15 bp, Homo sapiens
ccctttgatttttta

SEQ ID NO: 1805100 - DNA, 15 bp, Homo sapiens
cctttgattttttag

SEQ ID NO: 1805101 - DNA, 15 bp, Homo sapiens
ctttgattttttaga

SEQ ID NO: 1805102 - DNA, 15 bp, Homo sapiens
tttgattttttagac

SEQ ID NO: 1805103 - DNA, 15 bp, Homo sapiens
ttgattttttagaca

SEQ ID NO: 1805104 - DNA, 15 bp, Homo sapiens
tgattttttagacag

SEQ ID NO: 1805105 - DNA, 15 bp, Homo sapiens
gattttttagacaga

SEQ ID NO: 1805106 - DNA, 15 bp, Homo sapiens
attttttagacagag

SEQ ID NO: 1805107 - DNA, 15 bp, Homo sapiens
tttagacagagtctc

SEQ ID NO: 1805108 - DNA, 15 bp, Homo sapiens
ttagacagagtctca

SEQ ID NO: 1805109 - DNA, 15 bp, Homo sapiens
tagacagagtctcac

SEQ ID NO: 1805110 - DNA, 15 bp, Homo sapiens
ctcactctgtcacca

SEQ ID NO: 1805111 - DNA, 15 bp, Homo sapiens
tcactctgtcaccag

SEQ ID NO: 1805112 - DNA, 15 bp, Homo sapiens
cactctgtcaccagg

SEQ ID NO: 1805113 - DNA, 15 bp, Homo sapiens
actctgtcaccaggc

SEQ ID NO: 1805114 - DNA, 15 bp, Homo sapiens
tctgtcaccaggcta

SEQ ID NO: 1805115 - DNA, 15 bp, Homo sapiens
ctgtcaccaggctag

SEQ ID NO: 1805116 - DNA, 15 bp, Homo sapiens
tgtcaccaggctaga

SEQ ID NO: 1805117 - DNA, 15 bp, Homo sapiens
gtcaccaggctagag

SEQ ID NO: 1805118 - DNA, 15 bp, Homo sapiens
tcaccaggctagagt

SEQ ID NO: 1805119 - DNA, 15 bp, Homo sapiens
caccaggctagagtg

SEQ ID NO: 1805120 - DNA, 15 bp, Homo sapiens
accaggctagagtgc

SEQ ID NO: 1805121 - DNA, 15 bp, Homo sapiens
gtgcagtggtgccaa

SEQ ID NO: 1805122 - DNA, 15 bp, Homo sapiens
tgcagtggtgccaat

SEQ ID NO: 1805123 - DNA, 15 bp, Homo sapiens
gcagtggtgccaatc

SEQ ID NO: 1805124 - DNA, 15 bp, Homo sapiens
cagtggtgccaatct

SEQ ID NO: 1805125 - DNA, 15 bp, Homo sapiens
agtggtgccaatctc

SEQ ID NO: 1805126 - DNA, 15 bp, Homo sapiens
gtggtgccaatctca

SEQ ID NO: 1805127 - DNA, 15 bp, Homo sapiens
tggtgccaatctcag

SEQ ID NO: 1805128 - DNA, 15 bp, Homo sapiens
ggtgccaatctcagc

SEQ ID NO: 1805129 - DNA, 15 bp, Homo sapiens
gtgccaatctcagct

SEQ ID NO: 1805130 - DNA, 15 bp, Homo sapiens
tgccaatctcagctc

SEQ ID NO: 1805131 - DNA, 15 bp, Homo sapiens
gccaatctcagctca

SEQ ID NO: 1805132 - DNA, 15 bp, Homo sapiens
ccaatctcagctcac

SEQ ID NO: 1805133 - DNA, 15 bp, Homo sapiens
tgcaacctccgcctg

SEQ ID NO: 1805134 - DNA, 15 bp, Homo sapiens
gcaacctccgcctgc

SEQ ID NO: 1805135 - DNA, 15 bp, Homo sapiens
caacctccgcctgcc

SEQ ID NO: 1805136 - DNA, 15 bp, Homo sapiens
ctgccaggttcaagt

SEQ ID NO: 1805137 - DNA, 15 bp, Homo sapiens
tgccaggttcaagtg

SEQ ID NO: 1805138 - DNA, 15 bp, Homo sapiens
gccaggttcaagtga

SEQ ID NO: 1805139 - DNA, 15 bp, Homo sapiens
ttcaagtgattctct

SEQ ID NO: 1805140 - DNA, 15 bp, Homo sapiens
tcaagtgattctctt

SEQ ID NO: 1805141 - DNA, 15 bp, Homo sapiens
caagtgattctcttg

SEQ ID NO: 1805142 - DNA, 15 bp, Homo sapiens
aagtgattctcttgc

SEQ ID NO: 1805143 - DNA, 15 bp, Homo sapiens
agtgattctcttgcc

SEQ ID NO: 1805144 - DNA, 15 bp, Homo sapiens
tgattctcttgcctc

SEQ ID NO: 1805145 - DNA, 15 bp, Homo sapiens
gattctcttgcctca

SEQ ID NO: 1805146 - DNA, 15 bp, Homo sapiens
caggtgcccgccact

SEQ ID NO: 1805147 - DNA, 15 bp, Homo sapiens
aggtgcccgccactt

SEQ ID NO: 1805148 - DNA, 15 bp, Homo sapiens
ggtgcccgccacttc

SEQ ID NO: 1805149 - DNA, 15 bp, Homo sapiens
gtgcccgccacttca

SEQ ID NO: 1805150 - DNA, 15 bp, Homo sapiens
tgcccgccacttcac

SEQ ID NO: 1805151 - DNA, 15 bp, Homo sapiens
gcccgccacttcacc

SEQ ID NO: 1805152 - DNA, 15 bp, Homo sapiens
cccgccacttcacct

SEQ ID NO: 1805153 - DNA, 15 bp, Homo sapiens
ccgccacttcacctg

SEQ ID NO: 1805154 - DNA, 15 bp, Homo sapiens
cgccacttcacctgg

SEQ ID NO: 1805155 - DNA, 15 bp, Homo sapiens
gccacttcacctggc

SEQ ID NO: 1805156 - DNA, 15 bp, Homo sapiens
ccacttcacctggct

SEQ ID NO: 1805157 - DNA, 15 bp, Homo sapiens
cacttcacctggcta

SEQ ID NO: 1805158 - DNA, 15 bp, Homo sapiens
acttcacctggctaa

SEQ ID NO: 1805159 - DNA, 15 bp, Homo sapiens
cttcacctggctaat

SEQ ID NO: 1805160 - DNA, 15 bp, Homo sapiens
ttcacctggctaatt

SEQ ID NO: 1805161 - DNA, 15 bp, Homo sapiens
tcacctggctaattt

SEQ ID NO: 1805162 - DNA, 15 bp, Homo sapiens
atttttaatagagat

SEQ ID NO: 1805163 - DNA, 15 bp, Homo sapiens
tttttaatagagatg

SEQ ID NO: 1805164 - DNA, 15 bp, Homo sapiens
ttttaatagagatgg

SEQ ID NO: 1805165 - DNA, 15 bp, Homo sapiens
tttaatagagatggg

SEQ ID NO: 1805166 - DNA, 15 bp, Homo sapiens
ttaatagagatgggg

SEQ ID NO: 1805167 - DNA, 15 bp, Homo sapiens
taatagagatggggt

SEQ ID NO: 1805168 - DNA, 15 bp, Homo sapiens
aatagagatggggtt

SEQ ID NO: 1805169 - DNA, 15 bp, Homo sapiens
atagagatggggttt

SEQ ID NO: 1805170 - DNA, 15 bp, Homo sapiens
ggccaggctagtctt

SEQ ID NO: 1805171 - DNA, 15 bp, Homo sapiens
gccaggctagtcttg

SEQ ID NO: 1805172 - DNA, 15 bp, Homo sapiens
tagtcttgaactcct

SEQ ID NO: 1805173 - DNA, 15 bp, Homo sapiens
agtcttgaactcctg

SEQ ID NO: 1805174 - DNA, 15 bp, Homo sapiens
gaactcctgacctta

SEQ ID NO: 1805175 - DNA, 15 bp, Homo sapiens
aactcctgaccttat

SEQ ID NO: 1805176 - DNA, 15 bp, Homo sapiens
actcctgaccttatg

SEQ ID NO: 1805177 - DNA, 15 bp, Homo sapiens
ctcctgaccttatga

SEQ ID NO: 1805178 - DNA, 15 bp, Homo sapiens
tcctgaccttatgat

SEQ ID NO: 1805179 - DNA, 15 bp, Homo sapiens
cctgaccttatgatt

SEQ ID NO: 1805180 - DNA, 15 bp, Homo sapiens
ctgaccttatgattc

SEQ ID NO: 1805181 - DNA, 15 bp, Homo sapiens
tgaccttatgattcg

SEQ ID NO: 1805182 - DNA, 15 bp, Homo sapiens
gaccttatgattcgc

SEQ ID NO: 1805183 - DNA, 15 bp, Homo sapiens
accttatgattcgcc

SEQ ID NO: 1805184 - DNA, 15 bp, Homo sapiens
ccttatgattcgccc

SEQ ID NO: 1805185 - DNA, 15 bp, Homo sapiens
cttatgattcgcccg

SEQ ID NO: 1805186 - DNA, 15 bp, Homo sapiens
ttatgattcgcccgc

SEQ ID NO: 1805187 - DNA, 15 bp, Homo sapiens
tatgattcgcccgcc

SEQ ID NO: 1805188 - DNA, 15 bp, Homo sapiens
atgattcgcccgcct

SEQ ID NO: 1805189 - DNA, 15 bp, Homo sapiens
tgattcgcccgcctt

SEQ ID NO: 1805190 - DNA, 15 bp, Homo sapiens
gattcgcccgccttg

SEQ ID NO: 1805191 - DNA, 15 bp, Homo sapiens
attcgcccgccttgg

SEQ ID NO: 1805192 - DNA, 15 bp, Homo sapiens
ttcgcccgccttggc

SEQ ID NO: 1805193 - DNA, 15 bp, Homo sapiens
tcgcccgccttggct

SEQ ID NO: 1805194 - DNA, 15 bp, Homo sapiens
cgcccgccttggctt

SEQ ID NO: 1805195 - DNA, 15 bp, Homo sapiens
gcccgccttggcttc

SEQ ID NO: 1805196 - DNA, 15 bp, Homo sapiens
cccgccttggcttcc

SEQ ID NO: 1805197 - DNA, 15 bp, Homo sapiens
ccgccttggcttccc

SEQ ID NO: 1805198 - DNA, 15 bp, Homo sapiens
cgccttggcttccca

SEQ ID NO: 1805199 - DNA, 15 bp, Homo sapiens
ttcccaaagtgctgc

SEQ ID NO: 1805200 - DNA, 15 bp, Homo sapiens
aaagtgctgcgattg

SEQ ID NO: 1805201 - DNA, 15 bp, Homo sapiens
aagtgctgcgattgc

SEQ ID NO: 1805202 - DNA, 15 bp, Homo sapiens
agtgctgcgattgca

SEQ ID NO: 1805203 - DNA, 15 bp, Homo sapiens
gtgctgcgattgcag

SEQ ID NO: 1805204 - DNA, 15 bp, Homo sapiens
tgctgcgattgcagg

SEQ ID NO: 1805205 - DNA, 15 bp, Homo sapiens
gctgcgattgcaggt

SEQ ID NO: 1805206 - DNA, 15 bp, Homo sapiens
ctgcgattgcaggtg

SEQ ID NO: 1805207 - DNA, 15 bp, Homo sapiens
tgcgattgcaggtgt

SEQ ID NO: 1805208 - DNA, 15 bp, Homo sapiens
gcgattgcaggtgtg

SEQ ID NO: 1805209 - DNA, 15 bp, Homo sapiens
cgattgcaggtgtga

SEQ ID NO: 1805210 - DNA, 15 bp, Homo sapiens
gattgcaggtgtgag

SEQ ID NO: 1805211 - DNA, 15 bp, Homo sapiens
attgcaggtgtgagc

SEQ ID NO: 1805212 - DNA, 15 bp, Homo sapiens
ttgcaggtgtgagcc

SEQ ID NO: 1805213 - DNA, 15 bp, Homo sapiens
tgcaggtgtgagcca

SEQ ID NO: 1805214 - DNA, 15 bp, Homo sapiens
gcaggtgtgagccac

SEQ ID NO: 1805215 - DNA, 15 bp, Homo sapiens
ccaccacacccggcc

SEQ ID NO: 1805216 - DNA, 15 bp, Homo sapiens
caccacacccggcct

SEQ ID NO: 1805217 - DNA, 15 bp, Homo sapiens
accacacccggcctg

SEQ ID NO: 1805218 - DNA, 15 bp, Homo sapiens
ccacacccggcctga

SEQ ID NO: 1805219 - DNA, 15 bp, Homo sapiens
cacacccggcctgaa

SEQ ID NO: 1805220 - DNA, 15 bp, Homo sapiens
acacccggcctgaaa

SEQ ID NO: 1805221 - DNA, 15 bp, Homo sapiens
cacccggcctgaaac

SEQ ID NO: 1805222 - DNA, 15 bp, Homo sapiens
acccggcctgaaacc

SEQ ID NO: 1805223 - DNA, 15 bp, Homo sapiens
cccggcctgaaaccc

SEQ ID NO: 1805224 - DNA, 15 bp, Homo sapiens
ccggcctgaaacccc

SEQ ID NO: 1805225 - DNA, 15 bp, Homo sapiens
cggcctgaaacccct

SEQ ID NO: 1805226 - DNA, 15 bp, Homo sapiens
ggcctgaaacccctt

SEQ ID NO: 1805227 - DNA, 15 bp, Homo sapiens
gcctgaaaccccttt

SEQ ID NO: 1805228 - DNA, 15 bp, Homo sapiens
cctgaaacccctttt

SEQ ID NO: 1805229 - DNA, 15 bp, Homo sapiens
ctgaaacccctttta

SEQ ID NO: 1805230 - DNA, 15 bp, Homo sapiens
tgaaaccccttttat

SEQ ID NO: 1805231 - DNA, 15 bp, Homo sapiens
gaaaccccttttata

SEQ ID NO: 1805232 - DNA, 15 bp, Homo sapiens
aaaccccttttataa

SEQ ID NO: 1805233 - DNA, 15 bp, Homo sapiens
aaccccttttataac

SEQ ID NO: 1805234 - DNA, 15 bp, Homo sapiens
accccttttataaca

SEQ ID NO: 1805235 - DNA, 15 bp, Homo sapiens
ccccttttataacaa

SEQ ID NO: 1805236 - DNA, 15 bp, Homo sapiens
cccttttataacaac

SEQ ID NO: 1805237 - DNA, 15 bp, Homo sapiens
ccttttataacaact

SEQ ID NO: 1805238 - DNA, 15 bp, Homo sapiens
cttttataacaactc

SEQ ID NO: 1805239 - DNA, 15 bp, Homo sapiens
ttttataacaactca

SEQ ID NO: 1805240 - DNA, 15 bp, Homo sapiens
tttataacaactcag

SEQ ID NO: 1805241 - DNA, 15 bp, Homo sapiens
ttataacaactcagt

SEQ ID NO: 1805242 - DNA, 15 bp, Homo sapiens
tataacaactcagtc

SEQ ID NO: 1805243 - DNA, 15 bp, Homo sapiens
ataacaactcagtct

SEQ ID NO: 1805244 - DNA, 15 bp, Homo sapiens
taacaactcagtctt

SEQ ID NO: 1805245 - DNA, 15 bp, Homo sapiens
aacaactcagtcttg

SEQ ID NO: 1805246 - DNA, 15 bp, Homo sapiens
acaactcagtcttgg

SEQ ID NO: 1805247 - DNA, 15 bp, Homo sapiens
caactcagtcttggg

SEQ ID NO: 1805248 - DNA, 15 bp, Homo sapiens
aactcagtcttggga

SEQ ID NO: 1805249 - DNA, 15 bp, Homo sapiens
actcagtcttgggaa

SEQ ID NO: 1805250 - DNA, 15 bp, Homo sapiens
ctcagtcttgggaac

SEQ ID NO: 1805251 - DNA, 15 bp, Homo sapiens
tcagtcttgggaact

SEQ ID NO: 1805252 - DNA, 15 bp, Homo sapiens
cagtcttgggaacta

SEQ ID NO: 1805253 - DNA, 15 bp, Homo sapiens
agtcttgggaactaa

SEQ ID NO: 1805254 - DNA, 15 bp, Homo sapiens
gtcttgggaactaat

SEQ ID NO: 1805255 - DNA, 15 bp, Homo sapiens
tcttgggaactaatt

SEQ ID NO: 1805256 - DNA, 15 bp, Homo sapiens
cttgggaactaattc

SEQ ID NO: 1805257 - DNA, 15 bp, Homo sapiens
ttgggaactaattca

SEQ ID NO: 1805258 - DNA, 15 bp, Homo sapiens
tgggaactaattcag

SEQ ID NO: 1805259 - DNA, 15 bp, Homo sapiens
gggaactaattcagt

SEQ ID NO: 1805260 - DNA, 15 bp, Homo sapiens
ggaactaattcagtc

SEQ ID NO: 1805261 - DNA, 15 bp, Homo sapiens
gaactaattcagtcc

SEQ ID NO: 1805262 - DNA, 15 bp, Homo sapiens
aactaattcagtccc

SEQ ID NO: 1805263 - DNA, 15 bp, Homo sapiens
actaattcagtccca

SEQ ID NO: 1805264 - DNA, 15 bp, Homo sapiens
ctaattcagtcccaa

SEQ ID NO: 1805265 - DNA, 15 bp, Homo sapiens
taattcagtcccaag

SEQ ID NO: 1805266 - DNA, 15 bp, Homo sapiens
aattcagtcccaaga

SEQ ID NO: 1805267 - DNA, 15 bp, Homo sapiens
attcagtcccaagag

SEQ ID NO: 1805268 - DNA, 15 bp, Homo sapiens
ttcagtcccaagaga

SEQ ID NO: 1805269 - DNA, 15 bp, Homo sapiens
tcagtcccaagagaa

SEQ ID NO: 1805270 - DNA, 15 bp, Homo sapiens
cagtcccaagagaac

SEQ ID NO: 1805271 - DNA, 15 bp, Homo sapiens
agtcccaagagaacc

SEQ ID NO: 1805272 - DNA, 15 bp, Homo sapiens
gtcccaagagaacca

SEQ ID NO: 1805273 - DNA, 15 bp, Homo sapiens
tcccaagagaaccag

SEQ ID NO: 1805274 - DNA, 15 bp, Homo sapiens
cccaagagaaccaga

SEQ ID NO: 1805275 - DNA, 15 bp, Homo sapiens
ccaagagaaccagaa

SEQ ID NO: 1805276 - DNA, 15 bp, Homo sapiens
caagagaaccagaac

SEQ ID NO: 1805277 - DNA, 15 bp, Homo sapiens
aagagaaccagaacc

SEQ ID NO: 1805278 - DNA, 15 bp, Homo sapiens
agagaaccagaaccc

SEQ ID NO: 1805279 - DNA, 15 bp, Homo sapiens
gagaaccagaaccca

SEQ ID NO: 1805280 - DNA, 15 bp, Homo sapiens
agaaccagaacccac

SEQ ID NO: 1805281 - DNA, 15 bp, Homo sapiens
gaaccagaacccact

SEQ ID NO: 1805282 - DNA, 15 bp, Homo sapiens
aaccagaacccactc

SEQ ID NO: 1805283 - DNA, 15 bp, Homo sapiens
accagaacccactct

SEQ ID NO: 1805284 - DNA, 15 bp, Homo sapiens
ccagaacccactctt

SEQ ID NO: 1805285 - DNA, 15 bp, Homo sapiens
cagaacccactcttg

SEQ ID NO: 1805286 - DNA, 15 bp, Homo sapiens
agaacccactcttgc

SEQ ID NO: 1805287 - DNA, 15 bp, Homo sapiens
gaacccactcttgct

SEQ ID NO: 1805288 - DNA, 15 bp, Homo sapiens
aacccactcttgctg

SEQ ID NO: 1805289 - DNA, 15 bp, Homo sapiens
acccactcttgctgg

SEQ ID NO: 1805290 - DNA, 15 bp, Homo sapiens
cccactcttgctgga

SEQ ID NO: 1805291 - DNA, 15 bp, Homo sapiens
ccactcttgctggag

SEQ ID NO: 1805292 - DNA, 15 bp, Homo sapiens
cactcttgctggagg

SEQ ID NO: 1805293 - DNA, 15 bp, Homo sapiens
actcttgctggaggg

SEQ ID NO: 1805294 - DNA, 15 bp, Homo sapiens
ctcttgctggagggc

SEQ ID NO: 1805295 - DNA, 15 bp, Homo sapiens
tcttgctggagggca

SEQ ID NO: 1805296 - DNA, 15 bp, Homo sapiens
cttgctggagggcat

SEQ ID NO: 1805297 - DNA, 15 bp, Homo sapiens
ttgctggagggcatt

SEQ ID NO: 1805298 - DNA, 15 bp, Homo sapiens
tgctggagggcatta

SEQ ID NO: 1805299 - DNA, 15 bp, Homo sapiens
gctggagggcattaa

SEQ ID NO: 1805300 - DNA, 15 bp, Homo sapiens
ctggagggcattaat

SEQ ID NO: 1805301 - DNA, 15 bp, Homo sapiens
tggagggcattaatc

SEQ ID NO: 1805302 - DNA, 15 bp, Homo sapiens
ggagggcattaatct

SEQ ID NO: 1805303 - DNA, 15 bp, Homo sapiens
gagggcattaatcta

SEQ ID NO: 1805304 - DNA, 15 bp, Homo sapiens
agggcattaatctat

SEQ ID NO: 1805305 - DNA, 15 bp, Homo sapiens
gggcattaatctatt

SEQ ID NO: 1805306 - DNA, 15 bp, Homo sapiens
ggcattaatctattc

SEQ ID NO: 1805307 - DNA, 15 bp, Homo sapiens
gcattaatctattca

SEQ ID NO: 1805308 - DNA, 15 bp, Homo sapiens
cattaatctattcac

SEQ ID NO: 1805309 - DNA, 15 bp, Homo sapiens
attaatctattcaca

SEQ ID NO: 1805310 - DNA, 15 bp, Homo sapiens
ttaatctattcacaa

SEQ ID NO: 1805311 - DNA, 15 bp, Homo sapiens
taatctattcacaat

SEQ ID NO: 1805312 - DNA, 15 bp, Homo sapiens
aatctattcacaatg

SEQ ID NO: 1805313 - DNA, 15 bp, Homo sapiens
atctattcacaatgg

SEQ ID NO: 1805314 - DNA, 15 bp, Homo sapiens
tctattcacaatgga

SEQ ID NO: 1805315 - DNA, 15 bp, Homo sapiens
ctattcacaatggat

SEQ ID NO: 1805316 - DNA, 15 bp, Homo sapiens
tattcacaatggatc

SEQ ID NO: 1805317 - DNA, 15 bp, Homo sapiens
attcacaatggatct

SEQ ID NO: 1805318 - DNA, 15 bp, Homo sapiens
ttcacaatggatctg

SEQ ID NO: 1805319 - DNA, 15 bp, Homo sapiens
tcacaatggatctgc

SEQ ID NO: 1805320 - DNA, 15 bp, Homo sapiens
cacaatggatctgcc

SEQ ID NO: 1805321 - DNA, 15 bp, Homo sapiens
acaatggatctgccc

SEQ ID NO: 1805322 - DNA, 15 bp, Homo sapiens
caatggatctgcccc

SEQ ID NO: 1805323 - DNA, 15 bp, Homo sapiens
aatggatctgccccc

SEQ ID NO: 1805324 - DNA, 15 bp, Homo sapiens
atggatctgccccca

SEQ ID NO: 1805325 - DNA, 15 bp, Homo sapiens
tggatctgcccccag

SEQ ID NO: 1805326 - DNA, 15 bp, Homo sapiens
ggatctgcccccagg

SEQ ID NO: 1805327 - DNA, 15 bp, Homo sapiens
gatctgcccccagga

SEQ ID NO: 1805328 - DNA, 15 bp, Homo sapiens
atctgcccccaggac

SEQ ID NO: 1805329 - DNA, 15 bp, Homo sapiens
tctgcccccaggacc

SEQ ID NO: 1805330 - DNA, 15 bp, Homo sapiens
ctgcccccaggaccc

SEQ ID NO: 1805331 - DNA, 15 bp, Homo sapiens
tgcccccaggaccca

SEQ ID NO: 1805332 - DNA, 15 bp, Homo sapiens
gcccccaggacccat

SEQ ID NO: 1805333 - DNA, 15 bp, Homo sapiens
cccccaggacccata

SEQ ID NO: 1805334 - DNA, 15 bp, Homo sapiens
ccccaggacccatac

SEQ ID NO: 1805335 - DNA, 15 bp, Homo sapiens
cccaggacccataca

SEQ ID NO: 1805336 - DNA, 15 bp, Homo sapiens
ccaggacccatacac

SEQ ID NO: 1805337 - DNA, 15 bp, Homo sapiens
caggacccatacact

SEQ ID NO: 1805338 - DNA, 15 bp, Homo sapiens
aggacccatacactt

SEQ ID NO: 1805339 - DNA, 15 bp, Homo sapiens
ggacccatacacttc

SEQ ID NO: 1805340 - DNA, 15 bp, Homo sapiens
gacccatacacttcc

SEQ ID NO: 1805341 - DNA, 15 bp, Homo sapiens
acccatacacttccc

SEQ ID NO: 1805342 - DNA, 15 bp, Homo sapiens
cccatacacttccca

SEQ ID NO: 1805343 - DNA, 15 bp, Homo sapiens
ccatacacttcccac

SEQ ID NO: 1805344 - DNA, 15 bp, Homo sapiens
catacacttcccacc

SEQ ID NO: 1805345 - DNA, 15 bp, Homo sapiens
atacacttcccacca

SEQ ID NO: 1805346 - DNA, 15 bp, Homo sapiens
tacacttcccaccag

SEQ ID NO: 1805347 - DNA, 15 bp, Homo sapiens
acacttcccaccagt

SEQ ID NO: 1805348 - DNA, 15 bp, Homo sapiens
cacttcccaccagtc

SEQ ID NO: 1805349 - DNA, 15 bp, Homo sapiens
acttcccaccagtcc

SEQ ID NO: 1805350 - DNA, 15 bp, Homo sapiens
cttcccaccagtccc

SEQ ID NO: 1805351 - DNA, 15 bp, Homo sapiens
ttcccaccagtccct

SEQ ID NO: 1805352 - DNA, 15 bp, Homo sapiens
tcccaccagtcccta

SEQ ID NO: 1805353 - DNA, 15 bp, Homo sapiens
cccaccagtccctaa

SEQ ID NO: 1805354 - DNA, 15 bp, Homo sapiens
ccaccagtccctaag

SEQ ID NO: 1805355 - DNA, 15 bp, Homo sapiens
caccagtccctaagg

SEQ ID NO: 1805356 - DNA, 15 bp, Homo sapiens
accagtccctaaggc

SEQ ID NO: 1805357 - DNA, 15 bp, Homo sapiens
ccagtccctaaggcc

SEQ ID NO: 1805358 - DNA, 15 bp, Homo sapiens
cagtccctaaggcct

SEQ ID NO: 1805359 - DNA, 15 bp, Homo sapiens
agtccctaaggcctc

SEQ ID NO: 1805360 - DNA, 15 bp, Homo sapiens
gtccctaaggcctcc

SEQ ID NO: 1805361 - DNA, 15 bp, Homo sapiens
tccctaaggcctccc

SEQ ID NO: 1805362 - DNA, 15 bp, Homo sapiens
ccctaaggcctccca

SEQ ID NO: 1805363 - DNA, 15 bp, Homo sapiens
ctaaggcctcccaac

SEQ ID NO: 1805364 - DNA, 15 bp, Homo sapiens
taaggcctcccaaca

SEQ ID NO: 1805365 - DNA, 15 bp, Homo sapiens
aaggcctcccaacac

SEQ ID NO: 1805366 - DNA, 15 bp, Homo sapiens
aggcctcccaacacc

SEQ ID NO: 1805367 - DNA, 15 bp, Homo sapiens
ggcctcccaacacca

SEQ ID NO: 1805368 - DNA, 15 bp, Homo sapiens
gcctcccaacaccac

SEQ ID NO: 1805369 - DNA, 15 bp, Homo sapiens
cctcccaacaccacc

SEQ ID NO: 1805370 - DNA, 15 bp, Homo sapiens
ctcccaacaccacca

SEQ ID NO: 1805371 - DNA, 15 bp, Homo sapiens
tcccaacaccaccac

SEQ ID NO: 1805372 - DNA, 15 bp, Homo sapiens
cccaacaccaccaca

SEQ ID NO: 1805373 - DNA, 15 bp, Homo sapiens
ccaacaccaccacag

SEQ ID NO: 1805374 - DNA, 15 bp, Homo sapiens
caacaccaccacagt

SEQ ID NO: 1805375 - DNA, 15 bp, Homo sapiens
aacaccaccacagtg

SEQ ID NO: 1805376 - DNA, 15 bp, Homo sapiens
acaccaccacagtgg

SEQ ID NO: 1805377 - DNA, 15 bp, Homo sapiens
caccaccacagtggg

SEQ ID NO: 1805378 - DNA, 15 bp, Homo sapiens
accaccacagtgggg

SEQ ID NO: 1805379 - DNA, 15 bp, Homo sapiens
ccaccacagtgggga

SEQ ID NO: 1805380 - DNA, 15 bp, Homo sapiens
caccacagtggggat

SEQ ID NO: 1805381 - DNA, 15 bp, Homo sapiens
accacagtggggatc

SEQ ID NO: 1805382 - DNA, 15 bp, Homo sapiens
ccacagtggggatca

SEQ ID NO: 1805383 - DNA, 15 bp, Homo sapiens
cacagtggggatcaa

SEQ ID NO: 1805384 - DNA, 15 bp, Homo sapiens
acagtggggatcaaa

SEQ ID NO: 1805385 - DNA, 15 bp, Homo sapiens
cagtggggatcaaat

SEQ ID NO: 1805386 - DNA, 15 bp, Homo sapiens
agtggggatcaaatt

SEQ ID NO: 1805387 - DNA, 15 bp, Homo sapiens
gtggggatcaaattt

SEQ ID NO: 1805388 - DNA, 15 bp, Homo sapiens
tggggatcaaatttc

SEQ ID NO: 1805389 - DNA, 15 bp, Homo sapiens
ggggatcaaatttca

SEQ ID NO: 1805390 - DNA, 15 bp, Homo sapiens
gggatcaaatttcaa

SEQ ID NO: 1805391 - DNA, 15 bp, Homo sapiens
ggatcaaatttcaat

SEQ ID NO: 1805392 - DNA, 15 bp, Homo sapiens
gatcaaatttcaata

SEQ ID NO: 1805393 - DNA, 15 bp, Homo sapiens
atcaaatttcaatat

SEQ ID NO: 1805394 - DNA, 15 bp, Homo sapiens
tcaaatttcaatatg

SEQ ID NO: 1805395 - DNA, 15 bp, Homo sapiens
caaatttcaatatga

SEQ ID NO: 1805396 - DNA, 15 bp, Homo sapiens
aaatttcaatatgag

SEQ ID NO: 1805397 - DNA, 15 bp, Homo sapiens
aatttcaatatgagt

SEQ ID NO: 1805398 - DNA, 15 bp, Homo sapiens
atttcaatatgagtt

SEQ ID NO: 1805399 - DNA, 15 bp, Homo sapiens
tttcaatatgagttt

SEQ ID NO: 1805400 - DNA, 15 bp, Homo sapiens
ttcaatatgagtttt

SEQ ID NO: 1805401 - DNA, 15 bp, Homo sapiens
tcaatatgagttttg

SEQ ID NO: 1805402 - DNA, 15 bp, Homo sapiens
caatatgagttttgg

SEQ ID NO: 1805403 - DNA, 15 bp, Homo sapiens
aatatgagttttggc

SEQ ID NO: 1805404 - DNA, 15 bp, Homo sapiens
atatgagttttggca

SEQ ID NO: 1805405 - DNA, 15 bp, Homo sapiens
tatgagttttggcaa

SEQ ID NO: 1805406 - DNA, 15 bp, Homo sapiens
atgagttttggcaaa

SEQ ID NO: 1805407 - DNA, 15 bp, Homo sapiens
tgagttttggcaaag

SEQ ID NO: 1805408 - DNA, 15 bp, Homo sapiens
gagttttggcaaagg

SEQ ID NO: 1805409 - DNA, 15 bp, Homo sapiens
agttttggcaaagga

SEQ ID NO: 1805410 - DNA, 15 bp, Homo sapiens
gttttggcaaaggac

SEQ ID NO: 1805411 - DNA, 15 bp, Homo sapiens
ttttggcaaaggaca

SEQ ID NO: 1805412 - DNA, 15 bp, Homo sapiens
tttggcaaaggacaa

SEQ ID NO: 1805413 - DNA, 15 bp, Homo sapiens
ttggcaaaggacaaa

SEQ ID NO: 1805414 - DNA, 15 bp, Homo sapiens
tggcaaaggacaaac

SEQ ID NO: 1805415 - DNA, 15 bp, Homo sapiens
ggcaaaggacaaacc

SEQ ID NO: 1805416 - DNA, 15 bp, Homo sapiens
gcaaaggacaaacca

SEQ ID NO: 1805417 - DNA, 15 bp, Homo sapiens
caaaggacaaaccac

SEQ ID NO: 1805418 - DNA, 15 bp, Homo sapiens
aaaggacaaaccaca

SEQ ID NO: 1805419 - DNA, 15 bp, Homo sapiens
aaggacaaaccacat

SEQ ID NO: 1805420 - DNA, 15 bp, Homo sapiens
aggacaaaccacatc

SEQ ID NO: 1805421 - DNA, 15 bp, Homo sapiens
ggacaaaccacatcc

SEQ ID NO: 1805422 - DNA, 15 bp, Homo sapiens
gacaaaccacatcca

SEQ ID NO: 1805423 - DNA, 15 bp, Homo sapiens
acaaaccacatccaa

SEQ ID NO: 1805424 - DNA, 15 bp, Homo sapiens
caaaccacatccaaa

SEQ ID NO: 1805425 - DNA, 15 bp, Homo sapiens
aaaccacatccaaat

SEQ ID NO: 1805426 - DNA, 15 bp, Homo sapiens
aaccacatccaaatc

SEQ ID NO: 1805427 - DNA, 15 bp, Homo sapiens
accacatccaaatca

SEQ ID NO: 1805428 - DNA, 15 bp, Homo sapiens
ccacatccaaatcat

SEQ ID NO: 1805429 - DNA, 15 bp, Homo sapiens
cacatccaaatcata

SEQ ID NO: 1805430 - DNA, 15 bp, Homo sapiens
acatccaaatcatag

SEQ ID NO: 1805431 - DNA, 15 bp, Homo sapiens
catccaaatcatagc

SEQ ID NO: 1805432 - DNA, 15 bp, Homo sapiens
atccaaatcatagca

SEQ ID NO: 1805433 - DNA, 15 bp, Homo sapiens
tccaaatcatagcag

SEQ ID NO: 1805434 - DNA, 15 bp, Homo sapiens
ccaaatcatagcaga

SEQ ID NO: 1805435 - DNA, 15 bp, Homo sapiens
caaatcatagcagaa

SEQ ID NO: 1805436 - DNA, 15 bp, Homo sapiens
aaatcatagcagaaa

SEQ ID NO: 1805437 - DNA, 15 bp, Homo sapiens
aatcatagcagaaat

SEQ ID NO: 1805438 - DNA, 15 bp, Homo sapiens
atcatagcagaaata

SEQ ID NO: 1805439 - DNA, 15 bp, Homo sapiens
tcatagcagaaataa

SEQ ID NO: 1805440 - DNA, 15 bp, Homo sapiens
catagcagaaataat

SEQ ID NO: 1805441 - DNA, 15 bp, Homo sapiens
atagcagaaataatg

SEQ ID NO: 1805442 - DNA, 15 bp, Homo sapiens
tagcagaaataatgg

SEQ ID NO: 1805443 - DNA, 15 bp, Homo sapiens
agcagaaataatgga

SEQ ID NO: 1805444 - DNA, 15 bp, Homo sapiens
gcagaaataatggat

SEQ ID NO: 1805445 - DNA, 15 bp, Homo sapiens
cagaaataatggatt

SEQ ID NO: 1805446 - DNA, 15 bp, Homo sapiens
agaaataatggattc

SEQ ID NO: 1805447 - DNA, 15 bp, Homo sapiens
gaaataatggattca

SEQ ID NO: 1805448 - DNA, 15 bp, Homo sapiens
aaataatggattcaa

SEQ ID NO: 1805449 - DNA, 15 bp, Homo sapiens
aataatggattcaaa

SEQ ID NO: 1805450 - DNA, 15 bp, Homo sapiens
ataatggattcaaaa

SEQ ID NO: 1805451 - DNA, 15 bp, Homo sapiens
taatggattcaaaat

SEQ ID NO: 1805452 - DNA, 15 bp, Homo sapiens
aatggattcaaaatg

SEQ ID NO: 1805453 - DNA, 15 bp, Homo sapiens
atggattcaaaatgt

SEQ ID NO: 1805454 - DNA, 15 bp, Homo sapiens
tggattcaaaatgtg

SEQ ID NO: 1805455 - DNA, 15 bp, Homo sapiens
ggattcaaaatgtga

SEQ ID NO: 1805456 - DNA, 15 bp, Homo sapiens
gattcaaaatgtgac

SEQ ID NO: 1805457 - DNA, 15 bp, Homo sapiens
attcaaaatgtgacc

SEQ ID NO: 1805458 - DNA, 15 bp, Homo sapiens
ttcaaaatgtgaccc

SEQ ID NO: 1805459 - DNA, 15 bp, Homo sapiens
tcaaaatgtgaccca

SEQ ID NO: 1805460 - DNA, 15 bp, Homo sapiens
caaaatgtgacccaa

SEQ ID NO: 1805461 - DNA, 15 bp, Homo sapiens
aaaatgtgacccaac

SEQ ID NO: 1805462 - DNA, 15 bp, Homo sapiens
aaatgtgacccaacg

SEQ ID NO: 1805463 - DNA, 15 bp, Homo sapiens
aatgtgacccaacga

SEQ ID NO: 1805464 - DNA, 15 bp, Homo sapiens
atgtgacccaacgaa

SEQ ID NO: 1805465 - DNA, 15 bp, Homo sapiens
tgtgacccaacgaag

SEQ ID NO: 1805466 - DNA, 15 bp, Homo sapiens
gtgacccaacgaaga

SEQ ID NO: 1805467 - DNA, 15 bp, Homo sapiens
tgacccaacgaagag

SEQ ID NO: 1805468 - DNA, 15 bp, Homo sapiens
gacccaacgaagaga

SEQ ID NO: 1805469 - DNA, 15 bp, Homo sapiens
acccaacgaagagaa

SEQ ID NO: 1805470 - DNA, 15 bp, Homo sapiens
cccaacgaagagaat

SEQ ID NO: 1805471 - DNA, 15 bp, Homo sapiens
ccaacgaagagaatg

SEQ ID NO: 1805472 - DNA, 15 bp, Homo sapiens
caacgaagagaatga

SEQ ID NO: 1805473 - DNA, 15 bp, Homo sapiens
aacgaagagaatgaa

SEQ ID NO: 1805474 - DNA, 15 bp, Homo sapiens
acgaagagaatgaaa

SEQ ID NO: 1805475 - DNA, 15 bp, Homo sapiens
cgaagagaatgaaaa

SEQ ID NO: 1805476 - DNA, 15 bp, Homo sapiens
gaagagaatgaaaag

SEQ ID NO: 1805477 - DNA, 15 bp, Homo sapiens
aagagaatgaaaaga

SEQ ID NO: 1805478 - DNA, 15 bp, Homo sapiens
agagaatgaaaagac

SEQ ID NO: 1805479 - DNA, 15 bp, Homo sapiens
gagaatgaaaagaca

SEQ ID NO: 1805480 - DNA, 15 bp, Homo sapiens
agaatgaaaagacaa

SEQ ID NO: 1805481 - DNA, 15 bp, Homo sapiens
gaatgaaaagacaag

SEQ ID NO: 1805482 - DNA, 15 bp, Homo sapiens
aatgaaaagacaagc

SEQ ID NO: 1805483 - DNA, 15 bp, Homo sapiens
atgaaaagacaagcc

SEQ ID NO: 1805484 - DNA, 15 bp, Homo sapiens
ttaggtggctgggca

SEQ ID NO: 1805485 - DNA, 15 bp, Homo sapiens
taggtggctgggcag

SEQ ID NO: 1805486 - DNA, 15 bp, Homo sapiens
aggtggctgggcagt

SEQ ID NO: 1805487 - DNA, 15 bp, Homo sapiens
ggtggctgggcagtt

SEQ ID NO: 1805488 - DNA, 15 bp, Homo sapiens
gtggctgggcagttt

SEQ ID NO: 1805489 - DNA, 15 bp, Homo sapiens
tggctgggcagtttg

SEQ ID NO: 1805490 - DNA, 15 bp, Homo sapiens
ggctgggcagtttga

SEQ ID NO: 1805491 - DNA, 15 bp, Homo sapiens
gctgggcagtttgat

SEQ ID NO: 1805492 - DNA, 15 bp, Homo sapiens
ctgggcagtttgatg

SEQ ID NO: 1805493 - DNA, 15 bp, Homo sapiens
tgggcagtttgatgc

SEQ ID NO: 1805494 - DNA, 15 bp, Homo sapiens
gggcagtttgatgcc

SEQ ID NO: 1805495 - DNA, 15 bp, Homo sapiens
ggcagtttgatgcct

SEQ ID NO: 1805496 - DNA, 15 bp, Homo sapiens
gcagtttgatgcctc

SEQ ID NO: 1805497 - DNA, 15 bp, Homo sapiens
cagtttgatgcctca

SEQ ID NO: 1805498 - DNA, 15 bp, Homo sapiens
agtttgatgcctcac

SEQ ID NO: 1805499 - DNA, 15 bp, Homo sapiens
gtttgatgcctcaca

SEQ ID NO: 1805500 - DNA, 15 bp, Homo sapiens
tttgatgcctcacag

SEQ ID NO: 1805501 - DNA, 15 bp, Homo sapiens
ttgatgcctcacaga

SEQ ID NO: 1805502 - DNA, 15 bp, Homo sapiens
tgatgcctcacagat

SEQ ID NO: 1805503 - DNA, 15 bp, Homo sapiens
gatgcctcacagatc

SEQ ID NO: 1805504 - DNA, 15 bp, Homo sapiens
atgcctcacagatct

SEQ ID NO: 1805505 - DNA, 15 bp, Homo sapiens
tgcctcacagatctg

SEQ ID NO: 1805506 - DNA, 15 bp, Homo sapiens
gcctcacagatctgg

SEQ ID NO: 1805507 - DNA, 15 bp, Homo sapiens
cctcacagatctgga

SEQ ID NO: 1805508 - DNA, 15 bp, Homo sapiens
ctcacagatctggac

SEQ ID NO: 1805509 - DNA, 15 bp, Homo sapiens
tcacagatctggaca

SEQ ID NO: 1805510 - DNA, 15 bp, Homo sapiens
cacagatctggacag

SEQ ID NO: 1805511 - DNA, 15 bp, Homo sapiens
acagatctggacagc

SEQ ID NO: 1805512 - DNA, 15 bp, Homo sapiens
cagatctggacagca

SEQ ID NO: 1805513 - DNA, 15 bp, Homo sapiens
agatctggacagcat

SEQ ID NO: 1805514 - DNA, 15 bp, Homo sapiens
gatctggacagcatc

SEQ ID NO: 1805515 - DNA, 15 bp, Homo sapiens
atctggacagcatca

SEQ ID NO: 1805516 - DNA, 15 bp, Homo sapiens
tctggacagcatcag

SEQ ID NO: 1805517 - DNA, 15 bp, Homo sapiens
ctggacagcatcagg

SEQ ID NO: 1805518 - DNA, 15 bp, Homo sapiens
tggacagcatcagga

SEQ ID NO: 1805519 - DNA, 15 bp, Homo sapiens
ggacagcatcaggaa

SEQ ID NO: 1805520 - DNA, 15 bp, Homo sapiens
gacagcatcaggaaa

SEQ ID NO: 1805521 - DNA, 15 bp, Homo sapiens
acagcatcaggaaaa

SEQ ID NO: 1805522 - DNA, 15 bp, Homo sapiens
cagcatcaggaaaat

SEQ ID NO: 1805523 - DNA, 15 bp, Homo sapiens
agcatcaggaaaatt

SEQ ID NO: 1805524 - DNA, 15 bp, Homo sapiens
gcatcaggaaaattg

SEQ ID NO: 1805525 - DNA, 15 bp, Homo sapiens
catcaggaaaattgc

SEQ ID NO: 1805526 - DNA, 15 bp, Homo sapiens
atcaggaaaattgct

SEQ ID NO: 1805527 - DNA, 15 bp, Homo sapiens
tcaggaaaattgcta

SEQ ID NO: 1805528 - DNA, 15 bp, Homo sapiens
caggaaaattgctaa

SEQ ID NO: 1805529 - DNA, 15 bp, Homo sapiens
aggaaaattgctaat

SEQ ID NO: 1805530 - DNA, 15 bp, Homo sapiens
ggaaaattgctaatt

SEQ ID NO: 1805531 - DNA, 15 bp, Homo sapiens
gaaaattgctaatta

SEQ ID NO: 1805532 - DNA, 15 bp, Homo sapiens
aaaattgctaattaa

SEQ ID NO: 1805533 - DNA, 15 bp, Homo sapiens
aaattgctaattaat

SEQ ID NO: 1805534 - DNA, 15 bp, Homo sapiens
aattgctaattaatg

SEQ ID NO: 1805535 - DNA, 15 bp, Homo sapiens
attgctaattaatgg

SEQ ID NO: 1805536 - DNA, 15 bp, Homo sapiens
ttgctaattaatggg

SEQ ID NO: 1805537 - DNA, 15 bp, Homo sapiens
tgctaattaatggga

SEQ ID NO: 1805538 - DNA, 15 bp, Homo sapiens
gctaattaatgggag

SEQ ID NO: 1805539 - DNA, 15 bp, Homo sapiens
ctaattaatgggaga

SEQ ID NO: 1805540 - DNA, 15 bp, Homo sapiens
taattaatgggagaa

SEQ ID NO: 1805541 - DNA, 15 bp, Homo sapiens
aattaatgggagaat

SEQ ID NO: 1805542 - DNA, 15 bp, Homo sapiens
attaatgggagaatg

SEQ ID NO: 1805543 - DNA, 15 bp, Homo sapiens
ttaatgggagaatga

SEQ ID NO: 1805544 - DNA, 15 bp, Homo sapiens
taatgggagaatgaa

SEQ ID NO: 1805545 - DNA, 15 bp, Homo sapiens
aatgggagaatgaaa

SEQ ID NO: 1805546 - DNA, 15 bp, Homo sapiens
atgggagaatgaaag

SEQ ID NO: 1805547 - DNA, 15 bp, Homo sapiens
tgggagaatgaaagg

SEQ ID NO: 1805548 - DNA, 15 bp, Homo sapiens
gggagaatgaaagga

SEQ ID NO: 1805549 - DNA, 15 bp, Homo sapiens
ggagaatgaaaggac

SEQ ID NO: 1805550 - DNA, 15 bp, Homo sapiens
gagaatgaaaggacc

SEQ ID NO: 1805551 - DNA, 15 bp, Homo sapiens
agaatgaaaggaccc

SEQ ID NO: 1805552 - DNA, 15 bp, Homo sapiens
gaatgaaaggaccct

SEQ ID NO: 1805553 - DNA, 15 bp, Homo sapiens
aatgaaaggacccta

SEQ ID NO: 1805554 - DNA, 15 bp, Homo sapiens
atgaaaggaccctaa

SEQ ID NO: 1805555 - DNA, 15 bp, Homo sapiens
tgaaaggaccctaaa

SEQ ID NO: 1805556 - DNA, 15 bp, Homo sapiens
gaaaggaccctaaaa

SEQ ID NO: 1805557 - DNA, 15 bp, Homo sapiens
aaaggaccctaaaaa

SEQ ID NO: 1805558 - DNA, 15 bp, Homo sapiens
aaggaccctaaaaag

SEQ ID NO: 1805559 - DNA, 15 bp, Homo sapiens
aggaccctaaaaagt

SEQ ID NO: 1805560 - DNA, 15 bp, Homo sapiens
ggaccctaaaaagtt

SEQ ID NO: 1805561 - DNA, 15 bp, Homo sapiens
gaccctaaaaagtta

SEQ ID NO: 1805562 - DNA, 15 bp, Homo sapiens
accctaaaaagttat

SEQ ID NO: 1805563 - DNA, 15 bp, Homo sapiens
ccctaaaaagttatc

SEQ ID NO: 1805564 - DNA, 15 bp, Homo sapiens
cctaaaaagttatca

SEQ ID NO: 1805565 - DNA, 15 bp, Homo sapiens
ctaaaaagttatcac

SEQ ID NO: 1805566 - DNA, 15 bp, Homo sapiens
taaaaagttatcact

SEQ ID NO: 1805567 - DNA, 15 bp, Homo sapiens
aaaaagttatcactt

SEQ ID NO: 1805568 - DNA, 15 bp, Homo sapiens
aaaagttatcacttg

SEQ ID NO: 1805569 - DNA, 15 bp, Homo sapiens
aaagttatcacttgg

SEQ ID NO: 1805570 - DNA, 15 bp, Homo sapiens
aagttatcacttgga

SEQ ID NO: 1805571 - DNA, 15 bp, Homo sapiens
agttatcacttggat

SEQ ID NO: 1805572 - DNA, 15 bp, Homo sapiens
gttatcacttggatc

SEQ ID NO: 1805573 - DNA, 15 bp, Homo sapiens
ttatcacttggatcc

SEQ ID NO: 1805574 - DNA, 15 bp, Homo sapiens
tatcacttggatcca

SEQ ID NO: 1805575 - DNA, 15 bp, Homo sapiens
atcacttggatccat

SEQ ID NO: 1805576 - DNA, 15 bp, Homo sapiens
tcacttggatccatg

SEQ ID NO: 1805577 - DNA, 15 bp, Homo sapiens
cacttggatccatgc

SEQ ID NO: 1805578 - DNA, 15 bp, Homo sapiens
acttggatccatgct

SEQ ID NO: 1805579 - DNA, 15 bp, Homo sapiens
cttggatccatgctc

SEQ ID NO: 1805580 - DNA, 15 bp, Homo sapiens
ttggatccatgctcc

SEQ ID NO: 1805581 - DNA, 15 bp, Homo sapiens
tggatccatgctcct

SEQ ID NO: 1805582 - DNA, 15 bp, Homo sapiens
ggatccatgctcctt

SEQ ID NO: 1805583 - DNA, 15 bp, Homo sapiens
gatccatgctccttt

SEQ ID NO: 1805584 - DNA, 15 bp, Homo sapiens
atccatgctccttta

SEQ ID NO: 1805585 - DNA, 15 bp, Homo sapiens
tccatgctcctttac

SEQ ID NO: 1805586 - DNA, 15 bp, Homo sapiens
ccatgctcctttact

SEQ ID NO: 1805587 - DNA, 15 bp, Homo sapiens
catgctcctttactt

SEQ ID NO: 1805588 - DNA, 15 bp, Homo sapiens
atgctcctttacttt

SEQ ID NO: 1805589 - DNA, 15 bp, Homo sapiens
tgctcctttacttta

SEQ ID NO: 1805590 - DNA, 15 bp, Homo sapiens
gctcctttactttat

SEQ ID NO: 1805591 - DNA, 15 bp, Homo sapiens
ctcctttactttatt

SEQ ID NO: 1805592 - DNA, 15 bp, Homo sapiens
tcctttactttattc

SEQ ID NO: 1805593 - DNA, 15 bp, Homo sapiens
cctttactttattct

SEQ ID NO: 1805594 - DNA, 15 bp, Homo sapiens
ctttactttattcta

SEQ ID NO: 1805595 - DNA, 15 bp, Homo sapiens
tttactttattctag

SEQ ID NO: 1805596 - DNA, 15 bp, Homo sapiens
ttactttattctaga

SEQ ID NO: 1805597 - DNA, 15 bp, Homo sapiens
tactttattctagag

SEQ ID NO: 1805598 - DNA, 15 bp, Homo sapiens
actttattctagagt

SEQ ID NO: 1805599 - DNA, 15 bp, Homo sapiens
ctttattctagagtg

SEQ ID NO: 1805600 - DNA, 15 bp, Homo sapiens
tttattctagagtgg

SEQ ID NO: 1805601 - DNA, 15 bp, Homo sapiens
ttattctagagtggg

SEQ ID NO: 1805602 - DNA, 15 bp, Homo sapiens
tattctagagtggga

SEQ ID NO: 1805603 - DNA, 15 bp, Homo sapiens
attctagagtgggat

SEQ ID NO: 1805604 - DNA, 15 bp, Homo sapiens
ttctagagtgggatc

SEQ ID NO: 1805605 - DNA, 15 bp, Homo sapiens
tctagagtgggatct

SEQ ID NO: 1805606 - DNA, 15 bp, Homo sapiens
ctagagtgggatctt

SEQ ID NO: 1805607 - DNA, 15 bp, Homo sapiens
tagagtgggatcttc

SEQ ID NO: 1805608 - DNA, 15 bp, Homo sapiens
agagtgggatcttcc

SEQ ID NO: 1805609 - DNA, 15 bp, Homo sapiens
gagtgggatcttccc

SEQ ID NO: 1805610 - DNA, 15 bp, Homo sapiens
agtgggatcttcccc

SEQ ID NO: 1805611 - DNA, 15 bp, Homo sapiens
gtgggatcttcccct

SEQ ID NO: 1805612 - DNA, 15 bp, Homo sapiens
tgggatcttccccta

SEQ ID NO: 1805613 - DNA, 15 bp, Homo sapiens
gggatcttcccctaa

SEQ ID NO: 1805614 - DNA, 15 bp, Homo sapiens
ggatcttcccctaaa

SEQ ID NO: 1805615 - DNA, 15 bp, Homo sapiens
gatcttcccctaaat

SEQ ID NO: 1805616 - DNA, 15 bp, Homo sapiens
atcttcccctaaata

SEQ ID NO: 1805617 - DNA, 15 bp, Homo sapiens
tcttcccctaaatac

SEQ ID NO: 1805618 - DNA, 15 bp, Homo sapiens
cttcccctaaatact

SEQ ID NO: 1805619 - DNA, 15 bp, Homo sapiens
ttcccctaaatacta

SEQ ID NO: 1805620 - DNA, 15 bp, Homo sapiens
tcccctaaatactaa

SEQ ID NO: 1805621 - DNA, 15 bp, Homo sapiens
cccctaaatactaaa

SEQ ID NO: 1805622 - DNA, 15 bp, Homo sapiens
ccctaaatactaaat

SEQ ID NO: 1805623 - DNA, 15 bp, Homo sapiens
cctaaatactaaatt

SEQ ID NO: 1805624 - DNA, 15 bp, Homo sapiens
ctaaatactaaatta

SEQ ID NO: 1805625 - DNA, 15 bp, Homo sapiens
taaatactaaattaa

SEQ ID NO: 1805626 - DNA, 15 bp, Homo sapiens
aaatactaaattaag

SEQ ID NO: 1805627 - DNA, 15 bp, Homo sapiens
aatactaaattaagg

SEQ ID NO: 1805628 - DNA, 15 bp, Homo sapiens
atactaaattaagga

SEQ ID NO: 1805629 - DNA, 15 bp, Homo sapiens
tactaaattaaggac

SEQ ID NO: 1805630 - DNA, 15 bp, Homo sapiens
actaaattaaggaca

SEQ ID NO: 1805631 - DNA, 15 bp, Homo sapiens
ctaaattaaggacag

SEQ ID NO: 1805632 - DNA, 15 bp, Homo sapiens
taaattaaggacagg

SEQ ID NO: 1805633 - DNA, 15 bp, Homo sapiens
aaattaaggacagga

SEQ ID NO: 1805634 - DNA, 15 bp, Homo sapiens
aattaaggacaggac

SEQ ID NO: 1805635 - DNA, 15 bp, Homo sapiens
attaaggacaggact

SEQ ID NO: 1805636 - DNA, 15 bp, Homo sapiens
ttaaggacaggactt

SEQ ID NO: 1805637 - DNA, 15 bp, Homo sapiens
taaggacaggacttg

SEQ ID NO: 1805638 - DNA, 15 bp, Homo sapiens
aaggacaggacttgg

SEQ ID NO: 1805639 - DNA, 15 bp, Homo sapiens
aggacaggacttgga

SEQ ID NO: 1805640 - DNA, 15 bp, Homo sapiens
ggacaggacttggaa

SEQ ID NO: 1805641 - DNA, 15 bp, Homo sapiens
gacaggacttggaaa

SEQ ID NO: 1805642 - DNA, 15 bp, Homo sapiens
acaggacttggaaag

SEQ ID NO: 1805643 - DNA, 15 bp, Homo sapiens
caggacttggaaaga

SEQ ID NO: 1805644 - DNA, 15 bp, Homo sapiens
aggacttggaaagag

SEQ ID NO: 1805645 - DNA, 15 bp, Homo sapiens
ggacttggaaagagt

SEQ ID NO: 1805646 - DNA, 15 bp, Homo sapiens
gacttggaaagagtt

SEQ ID NO: 1805647 - DNA, 15 bp, Homo sapiens
acttggaaagagttc

SEQ ID NO: 1805648 - DNA, 15 bp, Homo sapiens
cttggaaagagttcc

SEQ ID NO: 1805649 - DNA, 15 bp, Homo sapiens
ttggaaagagttcct

SEQ ID NO: 1805650 - DNA, 15 bp, Homo sapiens
tggaaagagttcctg

SEQ ID NO: 1805651 - DNA, 15 bp, Homo sapiens
ggaaagagttcctgt

SEQ ID NO: 1805652 - DNA, 15 bp, Homo sapiens
gaaagagttcctgtg

SEQ ID NO: 1805653 - DNA, 15 bp, Homo sapiens
aaagagttcctgtga

SEQ ID NO: 1805654 - DNA, 15 bp, Homo sapiens
aagagttcctgtgat

SEQ ID NO: 1805655 - DNA, 15 bp, Homo sapiens
agagttcctgtgatt

SEQ ID NO: 1805656 - DNA, 15 bp, Homo sapiens
gagttcctgtgattc

SEQ ID NO: 1805657 - DNA, 15 bp, Homo sapiens
agttcctgtgattct

SEQ ID NO: 1805658 - DNA, 15 bp, Homo sapiens
gttcctgtgattcta

SEQ ID NO: 1805659 - DNA, 15 bp, Homo sapiens
ttcctgtgattctaa

SEQ ID NO: 1805660 - DNA, 15 bp, Homo sapiens
tcctgtgattctaag

SEQ ID NO: 1805661 - DNA, 15 bp, Homo sapiens
cctgtgattctaaga

SEQ ID NO: 1805662 - DNA, 15 bp, Homo sapiens
ctgtgattctaagaa

SEQ ID NO: 1805663 - DNA, 15 bp, Homo sapiens
tgtgattctaagaat

SEQ ID NO: 1805664 - DNA, 15 bp, Homo sapiens
gtgattctaagaatt

SEQ ID NO: 1805665 - DNA, 15 bp, Homo sapiens
tgattctaagaattc

SEQ ID NO: 1805666 - DNA, 15 bp, Homo sapiens
gattctaagaattca

SEQ ID NO: 1805667 - DNA, 15 bp, Homo sapiens
attctaagaattcaa

SEQ ID NO: 1805668 - DNA, 15 bp, Homo sapiens
ttctaagaattcaat

SEQ ID NO: 1805669 - DNA, 15 bp, Homo sapiens
tctaagaattcaata

SEQ ID NO: 1805670 - DNA, 15 bp, Homo sapiens
ctaagaattcaataa

SEQ ID NO: 1805671 - DNA, 15 bp, Homo sapiens
taagaattcaataaa

SEQ ID NO: 1805672 - DNA, 15 bp, Homo sapiens
aagaattcaataaat

SEQ ID NO: 1805673 - DNA, 15 bp, Homo sapiens
agaattcaataaatt

SEQ ID NO: 1805674 - DNA, 15 bp, Homo sapiens
gaattcaataaattg

SEQ ID NO: 1805675 - DNA, 15 bp, Homo sapiens
aattcaataaattgg

SEQ ID NO: 1805676 - DNA, 15 bp, Homo sapiens
attcaataaattggc

SEQ ID NO: 1805677 - DNA, 15 bp, Homo sapiens
ttcaataaattggca

SEQ ID NO: 1805678 - DNA, 15 bp, Homo sapiens
tcaataaattggcat

SEQ ID NO: 1805679 - DNA, 15 bp, Homo sapiens
caataaattggcata

SEQ ID NO: 1805680 - DNA, 15 bp, Homo sapiens
aataaattggcatag

SEQ ID NO: 1805681 - DNA, 15 bp, Homo sapiens
ataaattggcatagg

SEQ ID NO: 1805682 - DNA, 15 bp, Homo sapiens
taaattggcataggg

SEQ ID NO: 1805683 - DNA, 15 bp, Homo sapiens
aaattggcatagggt

SEQ ID NO: 1805684 - DNA, 15 bp, Homo sapiens
aattggcatagggtg

SEQ ID NO: 1805685 - DNA, 15 bp, Homo sapiens
attggcatagggtgg

SEQ ID NO: 1805686 - DNA, 15 bp, Homo sapiens
ttggcatagggtggt

SEQ ID NO: 1805687 - DNA, 15 bp, Homo sapiens
tggcatagggtggtg

SEQ ID NO: 1805688 - DNA, 15 bp, Homo sapiens
ggcatagggtggtgg

SEQ ID NO: 1805689 - DNA, 15 bp, Homo sapiens
gcatagggtggtggt

SEQ ID NO: 1805690 - DNA, 15 bp, Homo sapiens
catagggtggtggta

SEQ ID NO: 1805691 - DNA, 15 bp, Homo sapiens
atagggtggtggtac

SEQ ID NO: 1805692 - DNA, 15 bp, Homo sapiens
tagggtggtggtact

SEQ ID NO: 1805693 - DNA, 15 bp, Homo sapiens
agggtggtggtactg

SEQ ID NO: 1805694 - DNA, 15 bp, Homo sapiens
gggtggtggtactgg

SEQ ID NO: 1805695 - DNA, 15 bp, Homo sapiens
ggtggtggtactggt

SEQ ID NO: 1805696 - DNA, 15 bp, Homo sapiens
gtggtggtactggtt

SEQ ID NO: 1805697 - DNA, 15 bp, Homo sapiens
tggtggtactggtta

SEQ ID NO: 1805698 - DNA, 15 bp, Homo sapiens
ggtggtactggttat

SEQ ID NO: 1805699 - DNA, 15 bp, Homo sapiens
gtggtactggttata

SEQ ID NO: 1805700 - DNA, 15 bp, Homo sapiens
tggtactggttatag

SEQ ID NO: 1805701 - DNA, 15 bp, Homo sapiens
ggtactggttatagg

SEQ ID NO: 1805702 - DNA, 15 bp, Homo sapiens
gtactggttataggg

SEQ ID NO: 1805703 - DNA, 15 bp, Homo sapiens
tactggttatagggg

SEQ ID NO: 1805704 - DNA, 15 bp, Homo sapiens
actggttatagggga

SEQ ID NO: 1805705 - DNA, 15 bp, Homo sapiens
ctggttataggggaa

SEQ ID NO: 1805706 - DNA, 15 bp, Homo sapiens
tggttataggggaat

SEQ ID NO: 1805707 - DNA, 15 bp, Homo sapiens
ggttataggggaatt

SEQ ID NO: 1805708 - DNA, 15 bp, Homo sapiens
gttataggggaattc

SEQ ID NO: 1805709 - DNA, 15 bp, Homo sapiens
ttataggggaattct

SEQ ID NO: 1805710 - DNA, 15 bp, Homo sapiens
tataggggaattctg

SEQ ID NO: 1805711 - DNA, 15 bp, Homo sapiens
ataggggaattctgt

SEQ ID NO: 1805712 - DNA, 15 bp, Homo sapiens
taggggaattctgtc

SEQ ID NO: 1805713 - DNA, 15 bp, Homo sapiens
aggggaattctgtcc

SEQ ID NO: 1805714 - DNA, 15 bp, Homo sapiens
ggggaattctgtcca

SEQ ID NO: 1805715 - DNA, 15 bp, Homo sapiens
gggaattctgtccat

SEQ ID NO: 1805716 - DNA, 15 bp, Homo sapiens
ggaattctgtccata

SEQ ID NO: 1805717 - DNA, 15 bp, Homo sapiens
gaattctgtccatag

SEQ ID NO: 1805718 - DNA, 15 bp, Homo sapiens
aattctgtccataga

SEQ ID NO: 1805719 - DNA, 15 bp, Homo sapiens
attctgtccatagaa

SEQ ID NO: 1805720 - DNA, 15 bp, Homo sapiens
ttctgtccatagaaa

SEQ ID NO: 1805721 - DNA, 15 bp, Homo sapiens
tctgtccatagaaaa

SEQ ID NO: 1805722 - DNA, 15 bp, Homo sapiens
ctgtccatagaaaac

SEQ ID NO: 1805723 - DNA, 15 bp, Homo sapiens
tgtccatagaaaaca

SEQ ID NO: 1805724 - DNA, 15 bp, Homo sapiens
gtccatagaaaacaa

SEQ ID NO: 1805725 - DNA, 15 bp, Homo sapiens
tccatagaaaacaag

SEQ ID NO: 1805726 - DNA, 15 bp, Homo sapiens
ccatagaaaacaagg

SEQ ID NO: 1805727 - DNA, 15 bp, Homo sapiens
catagaaaacaaggc

SEQ ID NO: 1805728 - DNA, 15 bp, Homo sapiens
atagaaaacaaggcc

SEQ ID NO: 1805729 - DNA, 15 bp, Homo sapiens
tagaaaacaaggccc

SEQ ID NO: 1805730 - DNA, 15 bp, Homo sapiens
agaaaacaaggcccc

SEQ ID NO: 1805731 - DNA, 15 bp, Homo sapiens
gaaaacaaggccccc

SEQ ID NO: 1805732 - DNA, 15 bp, Homo sapiens
aaaacaaggccccca

SEQ ID NO: 1805733 - DNA, 15 bp, Homo sapiens
aaacaaggcccccat

SEQ ID NO: 1805734 - DNA, 15 bp, Homo sapiens
aacaaggcccccatt

SEQ ID NO: 1805735 - DNA, 15 bp, Homo sapiens
acaaggcccccatta

SEQ ID NO: 1805736 - DNA, 15 bp, Homo sapiens
caaggcccccattat

SEQ ID NO: 1805737 - DNA, 15 bp, Homo sapiens
aaggcccccattatt

SEQ ID NO: 1805738 - DNA, 15 bp, Homo sapiens
aggcccccattattt

SEQ ID NO: 1805739 - DNA, 15 bp, Homo sapiens
ggcccccattatttt

SEQ ID NO: 1805740 - DNA, 15 bp, Homo sapiens
gcccccattattttt

SEQ ID NO: 1805741 - DNA, 15 bp, Homo sapiens
cccccattatttttc

SEQ ID NO: 1805742 - DNA, 15 bp, Homo sapiens
ccccattatttttca

SEQ ID NO: 1805743 - DNA, 15 bp, Homo sapiens
cccattatttttcag

SEQ ID NO: 1805744 - DNA, 15 bp, Homo sapiens
ccattatttttcagt

SEQ ID NO: 1805745 - DNA, 15 bp, Homo sapiens
cattatttttcagtt

SEQ ID NO: 1805746 - DNA, 15 bp, Homo sapiens
attatttttcagtta

SEQ ID NO: 1805747 - DNA, 15 bp, Homo sapiens
ttatttttcagttaa

SEQ ID NO: 1805748 - DNA, 15 bp, Homo sapiens
tatttttcagttaaa

SEQ ID NO: 1805749 - DNA, 15 bp, Homo sapiens
atttttcagttaaag

SEQ ID NO: 1805750 - DNA, 15 bp, Homo sapiens
tttttcagttaaaga

SEQ ID NO: 1805751 - DNA, 15 bp, Homo sapiens
ttttcagttaaagaa

SEQ ID NO: 1805752 - DNA, 15 bp, Homo sapiens
tttcagttaaagaat

SEQ ID NO: 1805753 - DNA, 15 bp, Homo sapiens
ttcagttaaagaatt

SEQ ID NO: 1805754 - DNA, 15 bp, Homo sapiens
tcagttaaagaattg

SEQ ID NO: 1805755 - DNA, 15 bp, Homo sapiens
cagttaaagaattgt

SEQ ID NO: 1805756 - DNA, 15 bp, Homo sapiens
agttaaagaattgta

SEQ ID NO: 1805757 - DNA, 15 bp, Homo sapiens
gttaaagaattgtag

SEQ ID NO: 1805758 - DNA, 15 bp, Homo sapiens
ttaaagaattgtagt

SEQ ID NO: 1805759 - DNA, 15 bp, Homo sapiens
taaagaattgtagtc

SEQ ID NO: 1805760 - DNA, 15 bp, Homo sapiens
aaagaattgtagtct

SEQ ID NO: 1805761 - DNA, 15 bp, Homo sapiens
aagaattgtagtcta

SEQ ID NO: 1805762 - DNA, 15 bp, Homo sapiens
agaattgtagtctat

SEQ ID NO: 1805763 - DNA, 15 bp, Homo sapiens
gaattgtagtctatt

SEQ ID NO: 1805764 - DNA, 15 bp, Homo sapiens
aattgtagtctattt

SEQ ID NO: 1805765 - DNA, 15 bp, Homo sapiens
attgtagtctatttt

SEQ ID NO: 1805766 - DNA, 15 bp, Homo sapiens
ttgtagtctattttg

SEQ ID NO: 1805767 - DNA, 15 bp, Homo sapiens
tgtagtctattttga

SEQ ID NO: 1805768 - DNA, 15 bp, Homo sapiens
gtagtctattttgaa

SEQ ID NO: 1805769 - DNA, 15 bp, Homo sapiens
tagtctattttgaat

SEQ ID NO: 1805770 - DNA, 15 bp, Homo sapiens
agtctattttgaatg

SEQ ID NO: 1805771 - DNA, 15 bp, Homo sapiens
gtctattttgaatgc

SEQ ID NO: 1805772 - DNA, 15 bp, Homo sapiens
tctattttgaatgct

SEQ ID NO: 1805773 - DNA, 15 bp, Homo sapiens
ctattttgaatgcta

SEQ ID NO: 1805774 - DNA, 15 bp, Homo sapiens
tattttgaatgctac

SEQ ID NO: 1805775 - DNA, 15 bp, Homo sapiens
attttgaatgctacc

SEQ ID NO: 1805776 - DNA, 15 bp, Homo sapiens
ttttgaatgctacca

SEQ ID NO: 1805777 - DNA, 15 bp, Homo sapiens
tttgaatgctaccac

SEQ ID NO: 1805778 - DNA, 15 bp, Homo sapiens
ttgaatgctaccact

SEQ ID NO: 1805779 - DNA, 15 bp, Homo sapiens
tgaatgctaccactc

SEQ ID NO: 1805780 - DNA, 15 bp, Homo sapiens
gaatgctaccactct

SEQ ID NO: 1805781 - DNA, 15 bp, Homo sapiens
aatgctaccactctg

SEQ ID NO: 1805782 - DNA, 15 bp, Homo sapiens
atgctaccactctgt

SEQ ID NO: 1805783 - DNA, 15 bp, Homo sapiens
tgctaccactctgta

SEQ ID NO: 1805784 - DNA, 15 bp, Homo sapiens
gctaccactctgtat

SEQ ID NO: 1805785 - DNA, 15 bp, Homo sapiens
ctaccactctgtatg

SEQ ID NO: 1805786 - DNA, 15 bp, Homo sapiens
taccactctgtatgg

SEQ ID NO: 1805787 - DNA, 15 bp, Homo sapiens
accactctgtatggc

SEQ ID NO: 1805788 - DNA, 15 bp, Homo sapiens
ccactctgtatggct

SEQ ID NO: 1805789 - DNA, 15 bp, Homo sapiens
cactctgtatggctt

SEQ ID NO: 1805790 - DNA, 15 bp, Homo sapiens
actctgtatggcttc

SEQ ID NO: 1805791 - DNA, 15 bp, Homo sapiens
ctctgtatggcttca

SEQ ID NO: 1805792 - DNA, 15 bp, Homo sapiens
tctgtatggcttcat

SEQ ID NO: 1805793 - DNA, 15 bp, Homo sapiens
ctgtatggcttcatg

SEQ ID NO: 1805794 - DNA, 15 bp, Homo sapiens
tgtatggcttcatgt

SEQ ID NO: 1805795 - DNA, 15 bp, Homo sapiens
gtatggcttcatgtt

SEQ ID NO: 1805796 - DNA, 15 bp, Homo sapiens
tatggcttcatgttc

SEQ ID NO: 1805797 - DNA, 15 bp, Homo sapiens
atggcttcatgttca

SEQ ID NO: 1805798 - DNA, 15 bp, Homo sapiens
tggcttcatgttcaa

SEQ ID NO: 1805799 - DNA, 15 bp, Homo sapiens
ggcttcatgttcaaa

SEQ ID NO: 1805800 - DNA, 15 bp, Homo sapiens
gcttcatgttcaaaa

SEQ ID NO: 1805801 - DNA, 15 bp, Homo sapiens
cttcatgttcaaaat

SEQ ID NO: 1805802 - DNA, 15 bp, Homo sapiens
ttcatgttcaaaatg

SEQ ID NO: 1805803 - DNA, 15 bp, Homo sapiens
tcatgttcaaaatgg

SEQ ID NO: 1805804 - DNA, 15 bp, Homo sapiens
catgttcaaaatggg

SEQ ID NO: 1805805 - DNA, 15 bp, Homo sapiens
atgttcaaaatgggg

SEQ ID NO: 1805806 - DNA, 15 bp, Homo sapiens
tgttcaaaatggggc

SEQ ID NO: 1805807 - DNA, 15 bp, Homo sapiens
gttcaaaatggggcc

SEQ ID NO: 1805808 - DNA, 15 bp, Homo sapiens
ttcaaaatggggccc

SEQ ID NO: 1805809 - DNA, 15 bp, Homo sapiens
tcaaaatggggccct

SEQ ID NO: 1805810 - DNA, 15 bp, Homo sapiens
caaaatggggccctc

SEQ ID NO: 1805811 - DNA, 15 bp, Homo sapiens
aaaatggggccctct

SEQ ID NO: 1805812 - DNA, 15 bp, Homo sapiens
aaatggggccctctg

SEQ ID NO: 1805813 - DNA, 15 bp, Homo sapiens
aatggggccctctgt

SEQ ID NO: 1805814 - DNA, 15 bp, Homo sapiens
atggggccctctgtt

SEQ ID NO: 1805815 - DNA, 15 bp, Homo sapiens
tggggccctctgttc

SEQ ID NO: 1805816 - DNA, 15 bp, Homo sapiens
ggggccctctgttct

SEQ ID NO: 1805817 - DNA, 15 bp, Homo sapiens
gggccctctgttctg

SEQ ID NO: 1805818 - DNA, 15 bp, Homo sapiens
ggccctctgttctgt

SEQ ID NO: 1805819 - DNA, 15 bp, Homo sapiens
gccctctgttctgtc

SEQ ID NO: 1805820 - DNA, 15 bp, Homo sapiens
ccctctgttctgtcc

SEQ ID NO: 1805821 - DNA, 15 bp, Homo sapiens
cctctgttctgtcct

SEQ ID NO: 1805822 - DNA, 15 bp, Homo sapiens
ctctgttctgtcctg

SEQ ID NO: 1805823 - DNA, 15 bp, Homo sapiens
tctgttctgtcctgc

SEQ ID NO: 1805824 - DNA, 15 bp, Homo sapiens
ctgttctgtcctgca

SEQ ID NO: 1805825 - DNA, 15 bp, Homo sapiens
tgttctgtcctgcag

SEQ ID NO: 1805826 - DNA, 15 bp, Homo sapiens
gttctgtcctgcagt

SEQ ID NO: 1805827 - DNA, 15 bp, Homo sapiens
ttctgtcctgcagtc

SEQ ID NO: 1805828 - DNA, 15 bp, Homo sapiens
tctgtcctgcagtcc

SEQ ID NO: 1805829 - DNA, 15 bp, Homo sapiens
ctgtcctgcagtcct

SEQ ID NO: 1805830 - DNA, 15 bp, Homo sapiens
tgtcctgcagtccta

SEQ ID NO: 1805831 - DNA, 15 bp, Homo sapiens
gtcctgcagtcctac

SEQ ID NO: 1805832 - DNA, 15 bp, Homo sapiens
tcctgcagtcctacc

SEQ ID NO: 1805833 - DNA, 15 bp, Homo sapiens
cctgcagtcctacca

SEQ ID NO: 1805834 - DNA, 15 bp, Homo sapiens
ctgcagtcctaccac

SEQ ID NO: 1805835 - DNA, 15 bp, Homo sapiens
tgcagtcctaccaca

SEQ ID NO: 1805836 - DNA, 15 bp, Homo sapiens
gcagtcctaccacat

SEQ ID NO: 1805837 - DNA, 15 bp, Homo sapiens
cagtcctaccacatt

SEQ ID NO: 1805838 - DNA, 15 bp, Homo sapiens
agtcctaccacattc

SEQ ID NO: 1805839 - DNA, 15 bp, Homo sapiens
gtcctaccacattct

SEQ ID NO: 1805840 - DNA, 15 bp, Homo sapiens
tcctaccacattctc

SEQ ID NO: 1805841 - DNA, 15 bp, Homo sapiens
cctaccacattctcc

SEQ ID NO: 1805842 - DNA, 15 bp, Homo sapiens
ctaccacattctcct

SEQ ID NO: 1805843 - DNA, 15 bp, Homo sapiens
taccacattctccta

SEQ ID NO: 1805844 - DNA, 15 bp, Homo sapiens
accacattctcctag

SEQ ID NO: 1805845 - DNA, 15 bp, Homo sapiens
ccacattctcctagt

SEQ ID NO: 1805846 - DNA, 15 bp, Homo sapiens
cacattctcctagtt

SEQ ID NO: 1805847 - DNA, 15 bp, Homo sapiens
acattctcctagttt

SEQ ID NO: 1805848 - DNA, 15 bp, Homo sapiens
cattctcctagtttg

SEQ ID NO: 1805849 - DNA, 15 bp, Homo sapiens
attctcctagtttgc

SEQ ID NO: 1805850 - DNA, 15 bp, Homo sapiens
ttctcctagtttgct

SEQ ID NO: 1805851 - DNA, 15 bp, Homo sapiens
tctcctagtttgctc

SEQ ID NO: 1805852 - DNA, 15 bp, Homo sapiens
ctcctagtttgctca

SEQ ID NO: 1805853 - DNA, 15 bp, Homo sapiens
tcctagtttgctcat

SEQ ID NO: 1805854 - DNA, 15 bp, Homo sapiens
cctagtttgctcatt

SEQ ID NO: 1805855 - DNA, 15 bp, Homo sapiens
ctagtttgctcattc

SEQ ID NO: 1805856 - DNA, 15 bp, Homo sapiens
tagtttgctcattct

SEQ ID NO: 1805857 - DNA, 15 bp, Homo sapiens
agtttgctcattctc

SEQ ID NO: 1805858 - DNA, 15 bp, Homo sapiens
gtttgctcattctcc

SEQ ID NO: 1805859 - DNA, 15 bp, Homo sapiens
tttgctcattctcct

SEQ ID NO: 1805860 - DNA, 15 bp, Homo sapiens
ttgctcattctccta

SEQ ID NO: 1805861 - DNA, 15 bp, Homo sapiens
tgctcattctcctac

SEQ ID NO: 1805862 - DNA, 15 bp, Homo sapiens
gctcattctcctaca

SEQ ID NO: 1805863 - DNA, 15 bp, Homo sapiens
ctcattctcctacag

SEQ ID NO: 1805864 - DNA, 15 bp, Homo sapiens
tcattctcctacagg

SEQ ID NO: 1805865 - DNA, 15 bp, Homo sapiens
cattctcctacagga

SEQ ID NO: 1805866 - DNA, 15 bp, Homo sapiens
attctcctacaggac

SEQ ID NO: 1805867 - DNA, 15 bp, Homo sapiens
ttctcctacaggact

SEQ ID NO: 1805868 - DNA, 15 bp, Homo sapiens
tctcctacaggactc

SEQ ID NO: 1805869 - DNA, 15 bp, Homo sapiens
ctcctacaggactct

SEQ ID NO: 1805870 - DNA, 15 bp, Homo sapiens
tcctacaggactctc

SEQ ID NO: 1805871 - DNA, 15 bp, Homo sapiens
cctacaggactctca

SEQ ID NO: 1805872 - DNA, 15 bp, Homo sapiens
ctacaggactctcat

SEQ ID NO: 1805873 - DNA, 15 bp, Homo sapiens
tacaggactctcata

SEQ ID NO: 1805874 - DNA, 15 bp, Homo sapiens
acaggactctcatac

SEQ ID NO: 1805875 - DNA, 15 bp, Homo sapiens
caggactctcatact

SEQ ID NO: 1805876 - DNA, 15 bp, Homo sapiens
aggactctcatactt

SEQ ID NO: 1805877 - DNA, 15 bp, Homo sapiens
ggactctcatacttc

SEQ ID NO: 1805878 - DNA, 15 bp, Homo sapiens
gactctcatacttct

SEQ ID NO: 1805879 - DNA, 15 bp, Homo sapiens
actctcatacttctc

SEQ ID NO: 1805880 - DNA, 15 bp, Homo sapiens
ctctcatacttctcc

SEQ ID NO: 1805881 - DNA, 15 bp, Homo sapiens
tctcatacttctccc

SEQ ID NO: 1805882 - DNA, 15 bp, Homo sapiens
ctcatacttctcccc

SEQ ID NO: 1805883 - DNA, 15 bp, Homo sapiens
tcatacttctcccca

SEQ ID NO: 1805884 - DNA, 15 bp, Homo sapiens
catacttctccccat

SEQ ID NO: 1805885 - DNA, 15 bp, Homo sapiens
atacttctccccata

SEQ ID NO: 1805886 - DNA, 15 bp, Homo sapiens
tacttctccccataa

SEQ ID NO: 1805887 - DNA, 15 bp, Homo sapiens
acttctccccataag

SEQ ID NO: 1805888 - DNA, 15 bp, Homo sapiens
cttctccccataagc

SEQ ID NO: 1805889 - DNA, 15 bp, Homo sapiens
ttctccccataagcc

SEQ ID NO: 1805890 - DNA, 15 bp, Homo sapiens
tctccccataagcct

SEQ ID NO: 1805891 - DNA, 15 bp, Homo sapiens
ctccccataagcctg

SEQ ID NO: 1805892 - DNA, 15 bp, Homo sapiens
tccccataagcctga

SEQ ID NO: 1805893 - DNA, 15 bp, Homo sapiens
ccccataagcctgac

SEQ ID NO: 1805894 - DNA, 15 bp, Homo sapiens
cccataagcctgaca

SEQ ID NO: 1805895 - DNA, 15 bp, Homo sapiens
ccataagcctgacat

SEQ ID NO: 1805896 - DNA, 15 bp, Homo sapiens
cataagcctgacatc

SEQ ID NO: 1805897 - DNA, 15 bp, Homo sapiens
ataagcctgacatct

SEQ ID NO: 1805898 - DNA, 15 bp, Homo sapiens
taagcctgacatctc

SEQ ID NO: 1805899 - DNA, 15 bp, Homo sapiens
aagcctgacatctcc

SEQ ID NO: 1805900 - DNA, 15 bp, Homo sapiens
agcctgacatctccc

SEQ ID NO: 1805901 - DNA, 15 bp, Homo sapiens
gcctgacatctcccc

SEQ ID NO: 1805902 - DNA, 15 bp, Homo sapiens
cctgacatctcccct

SEQ ID NO: 1805903 - DNA, 15 bp, Homo sapiens
ctgacatctcccctc

SEQ ID NO: 1805904 - DNA, 15 bp, Homo sapiens
tgacatctcccctct

SEQ ID NO: 1805905 - DNA, 15 bp, Homo sapiens
gacatctcccctctc

SEQ ID NO: 1805906 - DNA, 15 bp, Homo sapiens
acatctcccctctca

SEQ ID NO: 1805907 - DNA, 15 bp, Homo sapiens
catctcccctctcat

SEQ ID NO: 1805908 - DNA, 15 bp, Homo sapiens
atctcccctctcatc

SEQ ID NO: 1805909 - DNA, 15 bp, Homo sapiens
tctcccctctcatcc

SEQ ID NO: 1805910 - DNA, 15 bp, Homo sapiens
ctcccctctcatcct

SEQ ID NO: 1805911 - DNA, 15 bp, Homo sapiens
tcccctctcatcctc

SEQ ID NO: 1805912 - DNA, 15 bp, Homo sapiens
cccctctcatcctca

SEQ ID NO: 1805913 - DNA, 15 bp, Homo sapiens
ccctctcatcctcat

SEQ ID NO: 1805914 - DNA, 15 bp, Homo sapiens
cctctcatcctcatc

SEQ ID NO: 1805915 - DNA, 15 bp, Homo sapiens
ctctcatcctcatcc

SEQ ID NO: 1805916 - DNA, 15 bp, Homo sapiens
tctcatcctcatcct

SEQ ID NO: 1805917 - DNA, 15 bp, Homo sapiens
ctcatcctcatcctc

SEQ ID NO: 1805918 - DNA, 15 bp, Homo sapiens
tcatcctcatcctca

SEQ ID NO: 1805919 - DNA, 15 bp, Homo sapiens
catcctcatcctcag

SEQ ID NO: 1805920 - DNA, 15 bp, Homo sapiens
atcctcatcctcagc

SEQ ID NO: 1805921 - DNA, 15 bp, Homo sapiens
tcctcatcctcagct

SEQ ID NO: 1805922 - DNA, 15 bp, Homo sapiens
cctcatcctcagctg

SEQ ID NO: 1805923 - DNA, 15 bp, Homo sapiens
ctcatcctcagctga

SEQ ID NO: 1805924 - DNA, 15 bp, Homo sapiens
tcatcctcagctgac

SEQ ID NO: 1805925 - DNA, 15 bp, Homo sapiens
catcctcagctgaca

SEQ ID NO: 1805926 - DNA, 15 bp, Homo sapiens
atcctcagctgacat

SEQ ID NO: 1805927 - DNA, 15 bp, Homo sapiens
tcctcagctgacatg

SEQ ID NO: 1805928 - DNA, 15 bp, Homo sapiens
cctcagctgacatga

SEQ ID NO: 1805929 - DNA, 15 bp, Homo sapiens
ctcagctgacatgac

SEQ ID NO: 1805930 - DNA, 15 bp, Homo sapiens
tcagctgacatgact

SEQ ID NO: 1805931 - DNA, 15 bp, Homo sapiens
cagctgacatgactt

SEQ ID NO: 1805932 - DNA, 15 bp, Homo sapiens
agctgacatgacttc

SEQ ID NO: 1805933 - DNA, 15 bp, Homo sapiens
gctgacatgacttcc

SEQ ID NO: 1805934 - DNA, 15 bp, Homo sapiens
ctgacatgacttcct

SEQ ID NO: 1805935 - DNA, 15 bp, Homo sapiens
tgacatgacttccta

SEQ ID NO: 1805936 - DNA, 15 bp, Homo sapiens
gacatgacttcctat

SEQ ID NO: 1805937 - DNA, 15 bp, Homo sapiens
acatgacttcctatt

SEQ ID NO: 1805938 - DNA, 15 bp, Homo sapiens
catgacttcctattt

SEQ ID NO: 1805939 - DNA, 15 bp, Homo sapiens
atgacttcctatttc

SEQ ID NO: 1805940 - DNA, 15 bp, Homo sapiens
tgacttcctatttca

SEQ ID NO: 1805941 - DNA, 15 bp, Homo sapiens
gacttcctatttcac

SEQ ID NO: 1805942 - DNA, 15 bp, Homo sapiens
acttcctatttcact

SEQ ID NO: 1805943 - DNA, 15 bp, Homo sapiens
cttcctatttcactg

SEQ ID NO: 1805944 - DNA, 15 bp, Homo sapiens
ttcctatttcactga

SEQ ID NO: 1805945 - DNA, 15 bp, Homo sapiens
tcctatttcactgag

SEQ ID NO: 1805946 - DNA, 15 bp, Homo sapiens
cctatttcactgaga

SEQ ID NO: 1805947 - DNA, 15 bp, Homo sapiens
ctatttcactgagaa

SEQ ID NO: 1805948 - DNA, 15 bp, Homo sapiens
tatttcactgagaac

SEQ ID NO: 1805949 - DNA, 15 bp, Homo sapiens
atttcactgagaacc

SEQ ID NO: 1805950 - DNA, 15 bp, Homo sapiens
tttcactgagaacca

SEQ ID NO: 1805951 - DNA, 15 bp, Homo sapiens
ttcactgagaaccag

SEQ ID NO: 1805952 - DNA, 15 bp, Homo sapiens
tcactgagaaccaga

SEQ ID NO: 1805953 - DNA, 15 bp, Homo sapiens
cactgagaaccagaa

SEQ ID NO: 1805954 - DNA, 15 bp, Homo sapiens
actgagaaccagaat

SEQ ID NO: 1805955 - DNA, 15 bp, Homo sapiens
ctgagaaccagaatc

SEQ ID NO: 1805956 - DNA, 15 bp, Homo sapiens
tgagaaccagaatca

SEQ ID NO: 1805957 - DNA, 15 bp, Homo sapiens
gagaaccagaatcac

SEQ ID NO: 1805958 - DNA, 15 bp, Homo sapiens
agaaccagaatcact

SEQ ID NO: 1805959 - DNA, 15 bp, Homo sapiens
gaaccagaatcactt

SEQ ID NO: 1805960 - DNA, 15 bp, Homo sapiens
aaccagaatcacttg

SEQ ID NO: 1805961 - DNA, 15 bp, Homo sapiens
accagaatcacttga

SEQ ID NO: 1805962 - DNA, 15 bp, Homo sapiens
ccagaatcacttgaa

SEQ ID NO: 1805963 - DNA, 15 bp, Homo sapiens
cagaatcacttgaaa

SEQ ID NO: 1805964 - DNA, 15 bp, Homo sapiens
agaatcacttgaaaa

SEQ ID NO: 1805965 - DNA, 15 bp, Homo sapiens
gaatcacttgaaaag

SEQ ID NO: 1805966 - DNA, 15 bp, Homo sapiens
aatcacttgaaaaga

SEQ ID NO: 1805967 - DNA, 15 bp, Homo sapiens
atcacttgaaaagaa

SEQ ID NO: 1805968 - DNA, 15 bp, Homo sapiens
tcacttgaaaagaac

SEQ ID NO: 1805969 - DNA, 15 bp, Homo sapiens
cacttgaaaagaacc

SEQ ID NO: 1805970 - DNA, 15 bp, Homo sapiens
acttgaaaagaacct

SEQ ID NO: 1805971 - DNA, 15 bp, Homo sapiens
cttgaaaagaacctc

SEQ ID NO: 1805972 - DNA, 15 bp, Homo sapiens
ttgaaaagaacctcc

SEQ ID NO: 1805973 - DNA, 15 bp, Homo sapiens
tgaaaagaacctcca

SEQ ID NO: 1805974 - DNA, 15 bp, Homo sapiens
gaaaagaacctccac

SEQ ID NO: 1805975 - DNA, 15 bp, Homo sapiens
aaaagaacctccaca

SEQ ID NO: 1805976 - DNA, 15 bp, Homo sapiens
aaagaacctccacaa

SEQ ID NO: 1805977 - DNA, 15 bp, Homo sapiens
aagaacctccacaag

SEQ ID NO: 1805978 - DNA, 15 bp, Homo sapiens
agaacctccacaagc

SEQ ID NO: 1805979 - DNA, 15 bp, Homo sapiens
gaacctccacaagct

SEQ ID NO: 1805980 - DNA, 15 bp, Homo sapiens
aacctccacaagctc

SEQ ID NO: 1805981 - DNA, 15 bp, Homo sapiens
acctccacaagctct

SEQ ID NO: 1805982 - DNA, 15 bp, Homo sapiens
cctccacaagctctc

SEQ ID NO: 1805983 - DNA, 15 bp, Homo sapiens
ctccacaagctctcc

SEQ ID NO: 1805984 - DNA, 15 bp, Homo sapiens
tccacaagctctccc

SEQ ID NO: 1805985 - DNA, 15 bp, Homo sapiens
ccacaagctctcccc

SEQ ID NO: 1805986 - DNA, 15 bp, Homo sapiens
cacaagctctcccca

SEQ ID NO: 1805987 - DNA, 15 bp, Homo sapiens
acaagctctccccac

SEQ ID NO: 1805988 - DNA, 15 bp, Homo sapiens
caagctctccccacc

SEQ ID NO: 1805989 - DNA, 15 bp, Homo sapiens
aagctctccccacca

SEQ ID NO: 1805990 - DNA, 15 bp, Homo sapiens
agctctccccaccac

SEQ ID NO: 1805991 - DNA, 15 bp, Homo sapiens
gctctccccaccacg

SEQ ID NO: 1805992 - DNA, 15 bp, Homo sapiens
ctctccccaccacgt

SEQ ID NO: 1805993 - DNA, 15 bp, Homo sapiens
tctccccaccacgtc

SEQ ID NO: 1805994 - DNA, 15 bp, Homo sapiens
ctccccaccacgtct

SEQ ID NO: 1805995 - DNA, 15 bp, Homo sapiens
tccccaccacgtctc

SEQ ID NO: 1805996 - DNA, 15 bp, Homo sapiens
ccccaccacgtctcc

SEQ ID NO: 1805997 - DNA, 15 bp, Homo sapiens
cccaccacgtctcct

SEQ ID NO: 1805998 - DNA, 15 bp, Homo sapiens
ccaccacgtctcctt

SEQ ID NO: 1805999 - DNA, 15 bp, Homo sapiens
caccacgtctccttg

SEQ ID NO: 1806000 - DNA, 15 bp, Homo sapiens
accacgtctccttgc

SEQ ID NO: 1806001 - DNA, 15 bp, Homo sapiens
ccacgtctccttgcc

SEQ ID NO: 1806002 - DNA, 15 bp, Homo sapiens
cacgtctccttgcct

SEQ ID NO: 1806003 - DNA, 15 bp, Homo sapiens
acgtctccttgccta

SEQ ID NO: 1806004 - DNA, 15 bp, Homo sapiens
cgtctccttgcctat

SEQ ID NO: 1806005 - DNA, 15 bp, Homo sapiens
gtctccttgcctatt

SEQ ID NO: 1806006 - DNA, 15 bp, Homo sapiens
tctccttgcctatta

SEQ ID NO: 1806007 - DNA, 15 bp, Homo sapiens
ctccttgcctattac

SEQ ID NO: 1806008 - DNA, 15 bp, Homo sapiens
tccttgcctattaca

SEQ ID NO: 1806009 - DNA, 15 bp, Homo sapiens
ccttgcctattacag

SEQ ID NO: 1806010 - DNA, 15 bp, Homo sapiens
cttgcctattacaga

SEQ ID NO: 1806011 - DNA, 15 bp, Homo sapiens
ttgcctattacagag

SEQ ID NO: 1806012 - DNA, 15 bp, Homo sapiens
tgcctattacagaga

SEQ ID NO: 1806013 - DNA, 15 bp, Homo sapiens
gcctattacagagag

SEQ ID NO: 1806014 - DNA, 15 bp, Homo sapiens
cctattacagagagg

SEQ ID NO: 1806015 - DNA, 15 bp, Homo sapiens
ctattacagagaggc

SEQ ID NO: 1806016 - DNA, 15 bp, Homo sapiens
tattacagagaggcc

SEQ ID NO: 1806017 - DNA, 15 bp, Homo sapiens
attacagagaggcct

SEQ ID NO: 1806018 - DNA, 15 bp, Homo sapiens
ttacagagaggcctg

SEQ ID NO: 1806019 - DNA, 15 bp, Homo sapiens
tacagagaggcctgt

SEQ ID NO: 1806020 - DNA, 15 bp, Homo sapiens
acagagaggcctgtg

SEQ ID NO: 1806021 - DNA, 15 bp, Homo sapiens
cagagaggcctgtgg

SEQ ID NO: 1806022 - DNA, 15 bp, Homo sapiens
agagaggcctgtgga

SEQ ID NO: 1806023 - DNA, 15 bp, Homo sapiens
gagaggcctgtggat

SEQ ID NO: 1806024 - DNA, 15 bp, Homo sapiens
agaggcctgtggatg

SEQ ID NO: 1806025 - DNA, 15 bp, Homo sapiens
gaggcctgtggatgc

SEQ ID NO: 1806026 - DNA, 15 bp, Homo sapiens
aggcctgtggatgca

SEQ ID NO: 1806027 - DNA, 15 bp, Homo sapiens
ggcctgtggatgcaa

SEQ ID NO: 1806028 - DNA, 15 bp, Homo sapiens
gcctgtggatgcaat

SEQ ID NO: 1806029 - DNA, 15 bp, Homo sapiens
cctgtggatgcaatc

SEQ ID NO: 1806030 - DNA, 15 bp, Homo sapiens
ctgtggatgcaatct

SEQ ID NO: 1806031 - DNA, 15 bp, Homo sapiens
tgtggatgcaatctt

SEQ ID NO: 1806032 - DNA, 15 bp, Homo sapiens
gtggatgcaatcttc

SEQ ID NO: 1806033 - DNA, 15 bp, Homo sapiens
tggatgcaatcttct

SEQ ID NO: 1806034 - DNA, 15 bp, Homo sapiens
ggatgcaatcttctc

SEQ ID NO: 1806035 - DNA, 15 bp, Homo sapiens
gatgcaatcttctct

SEQ ID NO: 1806036 - DNA, 15 bp, Homo sapiens
atgcaatcttctctg

SEQ ID NO: 1806037 - DNA, 15 bp, Homo sapiens
tgcaatcttctctgg

SEQ ID NO: 1806038 - DNA, 15 bp, Homo sapiens
gcaatcttctctgga

SEQ ID NO: 1806039 - DNA, 15 bp, Homo sapiens
caatcttctctggat

SEQ ID NO: 1806040 - DNA, 15 bp, Homo sapiens
aatcttctctggatc

SEQ ID NO: 1806041 - DNA, 15 bp, Homo sapiens
atcttctctggatca

SEQ ID NO: 1806042 - DNA, 15 bp, Homo sapiens
tcttctctggatcaa

SEQ ID NO: 1806043 - DNA, 15 bp, Homo sapiens
cttctctggatcaaa

SEQ ID NO: 1806044 - DNA, 15 bp, Homo sapiens
ttctctggatcaaag

SEQ ID NO: 1806045 - DNA, 15 bp, Homo sapiens
tctctggatcaaagg

SEQ ID NO: 1806046 - DNA, 15 bp, Homo sapiens
ctctggatcaaaggt

SEQ ID NO: 1806047 - DNA, 15 bp, Homo sapiens
tctggatcaaaggtc

SEQ ID NO: 1806048 - DNA, 15 bp, Homo sapiens
ctggatcaaaggtcc

SEQ ID NO: 1806049 - DNA, 15 bp, Homo sapiens
tggatcaaaggtcca

SEQ ID NO: 1806050 - DNA, 15 bp, Homo sapiens
ggatcaaaggtccaa

SEQ ID NO: 1806051 - DNA, 15 bp, Homo sapiens
gatcaaaggtccaag

SEQ ID NO: 1806052 - DNA, 15 bp, Homo sapiens
atcaaaggtccaaga

SEQ ID NO: 1806053 - DNA, 15 bp, Homo sapiens
tcaaaggtccaagac

SEQ ID NO: 1806054 - DNA, 15 bp, Homo sapiens
caaaggtccaagacc

SEQ ID NO: 1806055 - DNA, 15 bp, Homo sapiens
aaaggtccaagaccc

SEQ ID NO: 1806056 - DNA, 15 bp, Homo sapiens
aaggtccaagaccct

SEQ ID NO: 1806057 - DNA, 15 bp, Homo sapiens
aggtccaagacccta

SEQ ID NO: 1806058 - DNA, 15 bp, Homo sapiens
ggtccaagaccctat

SEQ ID NO: 1806059 - DNA, 15 bp, Homo sapiens
gtccaagaccctata

SEQ ID NO: 1806060 - DNA, 15 bp, Homo sapiens
tccaagaccctatag

SEQ ID NO: 1806061 - DNA, 15 bp, Homo sapiens
ccaagaccctataga

SEQ ID NO: 1806062 - DNA, 15 bp, Homo sapiens
caagaccctatagaa

SEQ ID NO: 1806063 - DNA, 15 bp, Homo sapiens
aagaccctatagaaa

SEQ ID NO: 1806064 - DNA, 15 bp, Homo sapiens
agaccctatagaaag

SEQ ID NO: 1806065 - DNA, 15 bp, Homo sapiens
gaccctatagaaagc

SEQ ID NO: 1806066 - DNA, 15 bp, Homo sapiens
accctatagaaagca

SEQ ID NO: 1806067 - DNA, 15 bp, Homo sapiens
ccctatagaaagcag

SEQ ID NO: 1806068 - DNA, 15 bp, Homo sapiens
cctatagaaagcaga

SEQ ID NO: 1806069 - DNA, 15 bp, Homo sapiens
ctatagaaagcagag

SEQ ID NO: 1806070 - DNA, 15 bp, Homo sapiens
tatagaaagcagagc

SEQ ID NO: 1806071 - DNA, 15 bp, Homo sapiens
atagaaagcagagcc

SEQ ID NO: 1806072 - DNA, 15 bp, Homo sapiens
tagaaagcagagccc

SEQ ID NO: 1806073 - DNA, 15 bp, Homo sapiens
agaaagcagagccct

SEQ ID NO: 1806074 - DNA, 15 bp, Homo sapiens
gaaagcagagccctt

SEQ ID NO: 1806075 - DNA, 15 bp, Homo sapiens
aaagcagagcccttg

SEQ ID NO: 1806076 - DNA, 15 bp, Homo sapiens
aagcagagcccttgc

SEQ ID NO: 1806077 - DNA, 15 bp, Homo sapiens
agcagagcccttgct

SEQ ID NO: 1806078 - DNA, 15 bp, Homo sapiens
gcagagcccttgctc

SEQ ID NO: 1806079 - DNA, 15 bp, Homo sapiens
cagagcccttgctct

SEQ ID NO: 1806080 - DNA, 15 bp, Homo sapiens
agagcccttgctctg

SEQ ID NO: 1806081 - DNA, 15 bp, Homo sapiens
gagcccttgctctgt

SEQ ID NO: 1806082 - DNA, 15 bp, Homo sapiens
agcccttgctctgtc

SEQ ID NO: 1806083 - DNA, 15 bp, Homo sapiens
gcccttgctctgtca

SEQ ID NO: 1806084 - DNA, 15 bp, Homo sapiens
cccttgctctgtcac

SEQ ID NO: 1806085 - DNA, 15 bp, Homo sapiens
ccttgctctgtcact

SEQ ID NO: 1806086 - DNA, 15 bp, Homo sapiens
cttgctctgtcacta

SEQ ID NO: 1806087 - DNA, 15 bp, Homo sapiens
ttgctctgtcactag

SEQ ID NO: 1806088 - DNA, 15 bp, Homo sapiens
tgctctgtcactaga

SEQ ID NO: 1806089 - DNA, 15 bp, Homo sapiens
gctctgtcactagat

SEQ ID NO: 1806090 - DNA, 15 bp, Homo sapiens
ctctgtcactagatc

SEQ ID NO: 1806091 - DNA, 15 bp, Homo sapiens
tctgtcactagatcc

SEQ ID NO: 1806092 - DNA, 15 bp, Homo sapiens
ctgtcactagatccc

SEQ ID NO: 1806093 - DNA, 15 bp, Homo sapiens
tgtcactagatccca

SEQ ID NO: 1806094 - DNA, 15 bp, Homo sapiens
gtcactagatcccac

SEQ ID NO: 1806095 - DNA, 15 bp, Homo sapiens
tcactagatcccact

SEQ ID NO: 1806096 - DNA, 15 bp, Homo sapiens
cactagatcccactg

SEQ ID NO: 1806097 - DNA, 15 bp, Homo sapiens
actagatcccactgc

SEQ ID NO: 1806098 - DNA, 15 bp, Homo sapiens
ctagatcccactgct

SEQ ID NO: 1806099 - DNA, 15 bp, Homo sapiens
tagatcccactgctc

SEQ ID NO: 1806100 - DNA, 15 bp, Homo sapiens
agatcccactgctcc

SEQ ID NO: 1806101 - DNA, 15 bp, Homo sapiens
gatcccactgctcca

SEQ ID NO: 1806102 - DNA, 15 bp, Homo sapiens
atcccactgctccac

SEQ ID NO: 1806103 - DNA, 15 bp, Homo sapiens
tcccactgctccacc

SEQ ID NO: 1806104 - DNA, 15 bp, Homo sapiens
cccactgctccacct

SEQ ID NO: 1806105 - DNA, 15 bp, Homo sapiens
ccactgctccaccta

SEQ ID NO: 1806106 - DNA, 15 bp, Homo sapiens
cactgctccacctac

SEQ ID NO: 1806107 - DNA, 15 bp, Homo sapiens
actgctccacctact

SEQ ID NO: 1806108 - DNA, 15 bp, Homo sapiens
ctgctccacctacta

SEQ ID NO: 1806109 - DNA, 15 bp, Homo sapiens
tgctccacctactaa

SEQ ID NO: 1806110 - DNA, 15 bp, Homo sapiens
gctccacctactaag

SEQ ID NO: 1806111 - DNA, 15 bp, Homo sapiens
ctccacctactaagg

SEQ ID NO: 1806112 - DNA, 15 bp, Homo sapiens
tccacctactaaggg

SEQ ID NO: 1806113 - DNA, 15 bp, Homo sapiens
ccacctactaagggg

SEQ ID NO: 1806114 - DNA, 15 bp, Homo sapiens
cacctactaaggggc

SEQ ID NO: 1806115 - DNA, 15 bp, Homo sapiens
acctactaaggggcc

SEQ ID NO: 1806116 - DNA, 15 bp, Homo sapiens
cctactaaggggccc

SEQ ID NO: 1806117 - DNA, 15 bp, Homo sapiens
ctactaaggggccct

SEQ ID NO: 1806118 - DNA, 15 bp, Homo sapiens
tactaaggggccctg

SEQ ID NO: 1806119 - DNA, 15 bp, Homo sapiens
actaaggggccctgc

SEQ ID NO: 1806120 - DNA, 15 bp, Homo sapiens
ctaaggggccctgct

SEQ ID NO: 1806121 - DNA, 15 bp, Homo sapiens
taaggggccctgctc

SEQ ID NO: 1806122 - DNA, 15 bp, Homo sapiens
aaggggccctgctct

SEQ ID NO: 1806123 - DNA, 15 bp, Homo sapiens
aggggccctgctcta

SEQ ID NO: 1806124 - DNA, 15 bp, Homo sapiens
ggggccctgctctac

SEQ ID NO: 1806125 - DNA, 15 bp, Homo sapiens
gggccctgctctacc

SEQ ID NO: 1806126 - DNA, 15 bp, Homo sapiens
ggccctgctctacca

SEQ ID NO: 1806127 - DNA, 15 bp, Homo sapiens
gccctgctctaccaa

SEQ ID NO: 1806128 - DNA, 15 bp, Homo sapiens
ccctgctctaccaac

SEQ ID NO: 1806129 - DNA, 15 bp, Homo sapiens
cctgctctaccaact

SEQ ID NO: 1806130 - DNA, 15 bp, Homo sapiens
ctgctctaccaactg

SEQ ID NO: 1806131 - DNA, 15 bp, Homo sapiens
tgctctaccaactgt

SEQ ID NO: 1806132 - DNA, 15 bp, Homo sapiens
gctctaccaactgtc

SEQ ID NO: 1806133 - DNA, 15 bp, Homo sapiens
ctctaccaactgtcc

SEQ ID NO: 1806134 - DNA, 15 bp, Homo sapiens
tctaccaactgtccc

SEQ ID NO: 1806135 - DNA, 15 bp, Homo sapiens
ctaccaactgtcccc

SEQ ID NO: 1806136 - DNA, 15 bp, Homo sapiens
taccaactgtcccct

SEQ ID NO: 1806137 - DNA, 15 bp, Homo sapiens
accaactgtcccctg

SEQ ID NO: 1806138 - DNA, 15 bp, Homo sapiens
ccaactgtcccctgc

SEQ ID NO: 1806139 - DNA, 15 bp, Homo sapiens
caactgtcccctgca

SEQ ID NO: 1806140 - DNA, 15 bp, Homo sapiens
aactgtcccctgcat

SEQ ID NO: 1806141 - DNA, 15 bp, Homo sapiens
actgtcccctgcatc

SEQ ID NO: 1806142 - DNA, 15 bp, Homo sapiens
ctgtcccctgcatca

SEQ ID NO: 1806143 - DNA, 15 bp, Homo sapiens
tgtcccctgcatcac

SEQ ID NO: 1806144 - DNA, 15 bp, Homo sapiens
gtcccctgcatcact

SEQ ID NO: 1806145 - DNA, 15 bp, Homo sapiens
tcccctgcatcactg

SEQ ID NO: 1806146 - DNA, 15 bp, Homo sapiens
cccctgcatcactgg

SEQ ID NO: 1806147 - DNA, 15 bp, Homo sapiens
ccctgcatcactggc

SEQ ID NO: 1806148 - DNA, 15 bp, Homo sapiens
cctgcatcactggct

SEQ ID NO: 1806149 - DNA, 15 bp, Homo sapiens
ctgcatcactggctt

SEQ ID NO: 1806150 - DNA, 15 bp, Homo sapiens
tgcatcactggcttg

SEQ ID NO: 1806151 - DNA, 15 bp, Homo sapiens
gcatcactggcttgt

SEQ ID NO: 1806152 - DNA, 15 bp, Homo sapiens
catcactggcttgtt

SEQ ID NO: 1806153 - DNA, 15 bp, Homo sapiens
atcactggcttgttc

SEQ ID NO: 1806154 - DNA, 15 bp, Homo sapiens
tcactggcttgttcc

SEQ ID NO: 1806155 - DNA, 15 bp, Homo sapiens
cactggcttgttccc

SEQ ID NO: 1806156 - DNA, 15 bp, Homo sapiens
actggcttgttcccc

SEQ ID NO: 1806157 - DNA, 15 bp, Homo sapiens
ctggcttgttcccct

SEQ ID NO: 1806158 - DNA, 15 bp, Homo sapiens
tggcttgttcccctt

SEQ ID NO: 1806159 - DNA, 15 bp, Homo sapiens
ggcttgttccccttc

SEQ ID NO: 1806160 - DNA, 15 bp, Homo sapiens
gcttgttccccttca

SEQ ID NO: 1806161 - DNA, 15 bp, Homo sapiens
cttgttccccttcac

SEQ ID NO: 1806162 - DNA, 15 bp, Homo sapiens
ttgttccccttcact

SEQ ID NO: 1806163 - DNA, 15 bp, Homo sapiens
tgttccccttcactg

SEQ ID NO: 1806164 - DNA, 15 bp, Homo sapiens
gttccccttcactga

SEQ ID NO: 1806165 - DNA, 15 bp, Homo sapiens
ttccccttcactgag

SEQ ID NO: 1806166 - DNA, 15 bp, Homo sapiens
tccccttcactgagt

SEQ ID NO: 1806167 - DNA, 15 bp, Homo sapiens
ccccttcactgagtc

SEQ ID NO: 1806168 - DNA, 15 bp, Homo sapiens
cccttcactgagtca

SEQ ID NO: 1806169 - DNA, 15 bp, Homo sapiens
ccttcactgagtcat

SEQ ID NO: 1806170 - DNA, 15 bp, Homo sapiens
cttcactgagtcatt

SEQ ID NO: 1806171 - DNA, 15 bp, Homo sapiens
ttcactgagtcattt

SEQ ID NO: 1806172 - DNA, 15 bp, Homo sapiens
tcactgagtcatttg

SEQ ID NO: 1806173 - DNA, 15 bp, Homo sapiens
cactgagtcatttgc

SEQ ID NO: 1806174 - DNA, 15 bp, Homo sapiens
actgagtcatttgca

SEQ ID NO: 1806175 - DNA, 15 bp, Homo sapiens
ctgagtcatttgcat

SEQ ID NO: 1806176 - DNA, 15 bp, Homo sapiens
tgagtcatttgcatc

SEQ ID NO: 1806177 - DNA, 15 bp, Homo sapiens
gagtcatttgcatca

SEQ ID NO: 1806178 - DNA, 15 bp, Homo sapiens
agtcatttgcatcat

SEQ ID NO: 1806179 - DNA, 15 bp, Homo sapiens
gtcatttgcatcatt

SEQ ID NO: 1806180 - DNA, 15 bp, Homo sapiens
tcatttgcatcatta

SEQ ID NO: 1806181 - DNA, 15 bp, Homo sapiens
catttgcatcattag

SEQ ID NO: 1806182 - DNA, 15 bp, Homo sapiens
atttgcatcattaga

SEQ ID NO: 1806183 - DNA, 15 bp, Homo sapiens
tttgcatcattagac

SEQ ID NO: 1806184 - DNA, 15 bp, Homo sapiens
ttgcatcattagaca

SEQ ID NO: 1806185 - DNA, 15 bp, Homo sapiens
tgcatcattagacaa

SEQ ID NO: 1806186 - DNA, 15 bp, Homo sapiens
gcatcattagacaag

SEQ ID NO: 1806187 - DNA, 15 bp, Homo sapiens
catcattagacaagc

SEQ ID NO: 1806188 - DNA, 15 bp, Homo sapiens
atcattagacaagct

SEQ ID NO: 1806189 - DNA, 15 bp, Homo sapiens
tcattagacaagctt

SEQ ID NO: 1806190 - DNA, 15 bp, Homo sapiens
cattagacaagcttc

SEQ ID NO: 1806191 - DNA, 15 bp, Homo sapiens
attagacaagcttcc

SEQ ID NO: 1806192 - DNA, 15 bp, Homo sapiens
ttagacaagcttcca

SEQ ID NO: 1806193 - DNA, 15 bp, Homo sapiens
tagacaagcttccat

SEQ ID NO: 1806194 - DNA, 15 bp, Homo sapiens
agacaagcttccatt

SEQ ID NO: 1806195 - DNA, 15 bp, Homo sapiens
gacaagcttccattt

SEQ ID NO: 1806196 - DNA, 15 bp, Homo sapiens
acaagcttccatttc

SEQ ID NO: 1806197 - DNA, 15 bp, Homo sapiens
caagcttccatttcc

SEQ ID NO: 1806198 - DNA, 15 bp, Homo sapiens
aagcttccatttccc

SEQ ID NO: 1806199 - DNA, 15 bp, Homo sapiens
agcttccatttccca

SEQ ID NO: 1806200 - DNA, 15 bp, Homo sapiens
gcttccatttcccac

SEQ ID NO: 1806201 - DNA, 15 bp, Homo sapiens
cttccatttcccaca

SEQ ID NO: 1806202 - DNA, 15 bp, Homo sapiens
ttccatttcccacat

SEQ ID NO: 1806203 - DNA, 15 bp, Homo sapiens
tccatttcccacatc

SEQ ID NO: 1806204 - DNA, 15 bp, Homo sapiens
ccatttcccacatct

SEQ ID NO: 1806205 - DNA, 15 bp, Homo sapiens
catttcccacatctt

SEQ ID NO: 1806206 - DNA, 15 bp, Homo sapiens
atttcccacatctta

SEQ ID NO: 1806207 - DNA, 15 bp, Homo sapiens
tttcccacatcttaa

SEQ ID NO: 1806208 - DNA, 15 bp, Homo sapiens
ttcccacatcttaaa

SEQ ID NO: 1806209 - DNA, 15 bp, Homo sapiens
tcccacatcttaaaa

SEQ ID NO: 1806210 - DNA, 15 bp, Homo sapiens
cccacatcttaaaaa

SEQ ID NO: 1806211 - DNA, 15 bp, Homo sapiens
ccacatcttaaaaaa

SEQ ID NO: 1806212 - DNA, 15 bp, Homo sapiens
cacatcttaaaaaag

SEQ ID NO: 1806213 - DNA, 15 bp, Homo sapiens
acatcttaaaaaagt

SEQ ID NO: 1806214 - DNA, 15 bp, Homo sapiens
catcttaaaaaagta

SEQ ID NO: 1806215 - DNA, 15 bp, Homo sapiens
atcttaaaaaagtaa

SEQ ID NO: 1806216 - DNA, 15 bp, Homo sapiens
tcttaaaaaagtaaa

SEQ ID NO: 1806217 - DNA, 15 bp, Homo sapiens
cttaaaaaagtaaag

SEQ ID NO: 1806218 - DNA, 15 bp, Homo sapiens
ttaaaaaagtaaaga

SEQ ID NO: 1806219 - DNA, 15 bp, Homo sapiens
taaaaaagtaaagat

SEQ ID NO: 1806220 - DNA, 15 bp, Homo sapiens
aaaaaagtaaagatg

SEQ ID NO: 1806221 - DNA, 15 bp, Homo sapiens
aaaaagtaaagatgt

SEQ ID NO: 1806222 - DNA, 15 bp, Homo sapiens
aaaagtaaagatgtt

SEQ ID NO: 1806223 - DNA, 15 bp, Homo sapiens
aaagtaaagatgttt

SEQ ID NO: 1806224 - DNA, 15 bp, Homo sapiens
aagtaaagatgtttt

SEQ ID NO: 1806225 - DNA, 15 bp, Homo sapiens
agtaaagatgtttta

SEQ ID NO: 1806226 - DNA, 15 bp, Homo sapiens
gtaaagatgttttac

SEQ ID NO: 1806227 - DNA, 15 bp, Homo sapiens
taaagatgttttacc

SEQ ID NO: 1806228 - DNA, 15 bp, Homo sapiens
aaagatgttttacct

SEQ ID NO: 1806229 - DNA, 15 bp, Homo sapiens
aagatgttttacctc

SEQ ID NO: 1806230 - DNA, 15 bp, Homo sapiens
agatgttttacctca

SEQ ID NO: 1806231 - DNA, 15 bp, Homo sapiens
gatgttttacctcaa

SEQ ID NO: 1806232 - DNA, 15 bp, Homo sapiens
atgttttacctcaaa

SEQ ID NO: 1806233 - DNA, 15 bp, Homo sapiens
tgttttacctcaaat

SEQ ID NO: 1806234 - DNA, 15 bp, Homo sapiens
gttttacctcaaatg

SEQ ID NO: 1806235 - DNA, 15 bp, Homo sapiens
ttttacctcaaatgc

SEQ ID NO: 1806236 - DNA, 15 bp, Homo sapiens
tttacctcaaatgcc

SEQ ID NO: 1806237 - DNA, 15 bp, Homo sapiens
ttacctcaaatgccc

SEQ ID NO: 1806238 - DNA, 15 bp, Homo sapiens
tacctcaaatgcccc

SEQ ID NO: 1806239 - DNA, 15 bp, Homo sapiens
acctcaaatgcccca

SEQ ID NO: 1806240 - DNA, 15 bp, Homo sapiens
cctcaaatgccccaa

SEQ ID NO: 1806241 - DNA, 15 bp, Homo sapiens
ctcaaatgccccaaa

SEQ ID NO: 1806242 - DNA, 15 bp, Homo sapiens
tcaaatgccccaaag

SEQ ID NO: 1806243 - DNA, 15 bp, Homo sapiens
caaatgccccaaagc

SEQ ID NO: 1806244 - DNA, 15 bp, Homo sapiens
aaatgccccaaagct

SEQ ID NO: 1806245 - DNA, 15 bp, Homo sapiens
aatgccccaaagctc

SEQ ID NO: 1806246 - DNA, 15 bp, Homo sapiens
atgccccaaagctct

SEQ ID NO: 1806247 - DNA, 15 bp, Homo sapiens
tgccccaaagctctt

SEQ ID NO: 1806248 - DNA, 15 bp, Homo sapiens
gccccaaagctcttc

SEQ ID NO: 1806249 - DNA, 15 bp, Homo sapiens
ccccaaagctcttcc

SEQ ID NO: 1806250 - DNA, 15 bp, Homo sapiens
cccaaagctcttcct

SEQ ID NO: 1806251 - DNA, 15 bp, Homo sapiens
ccaaagctcttcctt

SEQ ID NO: 1806252 - DNA, 15 bp, Homo sapiens
caaagctcttccttt

SEQ ID NO: 1806253 - DNA, 15 bp, Homo sapiens
agctcttccttttta

SEQ ID NO: 1806254 - DNA, 15 bp, Homo sapiens
gctcttcctttttat

SEQ ID NO: 1806255 - DNA, 15 bp, Homo sapiens
ctcttcctttttatc

SEQ ID NO: 1806256 - DNA, 15 bp, Homo sapiens
tcttcctttttatct

SEQ ID NO: 1806257 - DNA, 15 bp, Homo sapiens
cttcctttttatctt

SEQ ID NO: 1806258 - DNA, 15 bp, Homo sapiens
ttcctttttatcttt

SEQ ID NO: 1806259 - DNA, 15 bp, Homo sapiens
tcctttttatcttta

SEQ ID NO: 1806260 - DNA, 15 bp, Homo sapiens
cctttttatctttat

SEQ ID NO: 1806261 - DNA, 15 bp, Homo sapiens
ctttttatctttata

SEQ ID NO: 1806262 - DNA, 15 bp, Homo sapiens
tttttatctttataa

SEQ ID NO: 1806263 - DNA, 15 bp, Homo sapiens
ttttatctttataat

SEQ ID NO: 1806264 - DNA, 15 bp, Homo sapiens
tttatctttataata

SEQ ID NO: 1806265 - DNA, 15 bp, Homo sapiens
ttatctttataataa

SEQ ID NO: 1806266 - DNA, 15 bp, Homo sapiens
tatctttataataaa

SEQ ID NO: 1806267 - DNA, 15 bp, Homo sapiens
atctttataataaaa

SEQ ID NO: 1806268 - DNA, 15 bp, Homo sapiens
tctttataataaaat

SEQ ID NO: 1806269 - DNA, 15 bp, Homo sapiens
ctttataataaaatt

SEQ ID NO: 1806270 - DNA, 15 bp, Homo sapiens
tttataataaaatta

SEQ ID NO: 1806271 - DNA, 15 bp, Homo sapiens
ttataataaaattac

SEQ ID NO: 1806272 - DNA, 15 bp, Homo sapiens
tataataaaattacc

SEQ ID NO: 1806273 - DNA, 15 bp, Homo sapiens
ataataaaattacca

SEQ ID NO: 1806274 - DNA, 15 bp, Homo sapiens
taataaaattaccat

SEQ ID NO: 1806275 - DNA, 15 bp, Homo sapiens
aataaaattaccatg

SEQ ID NO: 1806276 - DNA, 15 bp, Homo sapiens
ataaaattaccatga

SEQ ID NO: 1806277 - DNA, 15 bp, Homo sapiens
taaaattaccatgaa

SEQ ID NO: 1806278 - DNA, 15 bp, Homo sapiens
aaaattaccatgaaa

SEQ ID NO: 1806279 - DNA, 15 bp, Homo sapiens
aaattaccatgaaaa

SEQ ID NO: 1806280 - DNA, 15 bp, Homo sapiens
aattaccatgaaaag

SEQ ID NO: 1806281 - DNA, 15 bp, Homo sapiens
attaccatgaaaagc

SEQ ID NO: 1806282 - DNA, 15 bp, Homo sapiens
ttaccatgaaaagct

SEQ ID NO: 1806283 - DNA, 15 bp, Homo sapiens
taccatgaaaagctg

SEQ ID NO: 1806284 - DNA, 15 bp, Homo sapiens
accatgaaaagctgc

SEQ ID NO: 1806285 - DNA, 15 bp, Homo sapiens
ccatgaaaagctgcc

SEQ ID NO: 1806286 - DNA, 15 bp, Homo sapiens
catgaaaagctgcct

SEQ ID NO: 1806287 - DNA, 15 bp, Homo sapiens
atgaaaagctgcctc

SEQ ID NO: 1806288 - DNA, 15 bp, Homo sapiens
tgaaaagctgcctct

SEQ ID NO: 1806289 - DNA, 15 bp, Homo sapiens
gaaaagctgcctcta

SEQ ID NO: 1806290 - DNA, 15 bp, Homo sapiens
aaaagctgcctctat

SEQ ID NO: 1806291 - DNA, 15 bp, Homo sapiens
aaagctgcctctatt

SEQ ID NO: 1806292 - DNA, 15 bp, Homo sapiens
aagctgcctctattc

SEQ ID NO: 1806293 - DNA, 15 bp, Homo sapiens
agctgcctctattcc

SEQ ID NO: 1806294 - DNA, 15 bp, Homo sapiens
gctgcctctattccc

SEQ ID NO: 1806295 - DNA, 15 bp, Homo sapiens
ctgcctctattcccc

SEQ ID NO: 1806296 - DNA, 15 bp, Homo sapiens
tgcctctattcccca

SEQ ID NO: 1806297 - DNA, 15 bp, Homo sapiens
gcctctattccccat

SEQ ID NO: 1806298 - DNA, 15 bp, Homo sapiens
cctctattccccatc

SEQ ID NO: 1806299 - DNA, 15 bp, Homo sapiens
ctctattccccatct

SEQ ID NO: 1806300 - DNA, 15 bp, Homo sapiens
tctattccccatctt

SEQ ID NO: 1806301 - DNA, 15 bp, Homo sapiens
ctattccccatcttc

SEQ ID NO: 1806302 - DNA, 15 bp, Homo sapiens
tattccccatcttca

SEQ ID NO: 1806303 - DNA, 15 bp, Homo sapiens
attccccatcttcag

SEQ ID NO: 1806304 - DNA, 15 bp, Homo sapiens
ttccccatcttcagt

SEQ ID NO: 1806305 - DNA, 15 bp, Homo sapiens
tccccatcttcagtt

SEQ ID NO: 1806306 - DNA, 15 bp, Homo sapiens
ccccatcttcagttc

SEQ ID NO: 1806307 - DNA, 15 bp, Homo sapiens
cccatcttcagttcc

SEQ ID NO: 1806308 - DNA, 15 bp, Homo sapiens
ccatcttcagttcct

SEQ ID NO: 1806309 - DNA, 15 bp, Homo sapiens
catcttcagttcctc

SEQ ID NO: 1806310 - DNA, 15 bp, Homo sapiens
atcttcagttcctct

SEQ ID NO: 1806311 - DNA, 15 bp, Homo sapiens
tcttcagttcctcta

SEQ ID NO: 1806312 - DNA, 15 bp, Homo sapiens
cttcagttcctctac

SEQ ID NO: 1806313 - DNA, 15 bp, Homo sapiens
ttcagttcctctact

SEQ ID NO: 1806314 - DNA, 15 bp, Homo sapiens
tcagttcctctactt

SEQ ID NO: 1806315 - DNA, 15 bp, Homo sapiens
cagttcctctacttc

SEQ ID NO: 1806316 - DNA, 15 bp, Homo sapiens
agttcctctacttcc

SEQ ID NO: 1806317 - DNA, 15 bp, Homo sapiens
gttcctctacttcca

SEQ ID NO: 1806318 - DNA, 15 bp, Homo sapiens
ttcctctacttccac

SEQ ID NO: 1806319 - DNA, 15 bp, Homo sapiens
tcctctacttccacg

SEQ ID NO: 1806320 - DNA, 15 bp, Homo sapiens
cctctacttccacgc

SEQ ID NO: 1806321 - DNA, 15 bp, Homo sapiens
ctctacttccacgct

SEQ ID NO: 1806322 - DNA, 15 bp, Homo sapiens
tctacttccacgctc

SEQ ID NO: 1806323 - DNA, 15 bp, Homo sapiens
ctacttccacgctcc

SEQ ID NO: 1806324 - DNA, 15 bp, Homo sapiens
tacttccacgctccg

SEQ ID NO: 1806325 - DNA, 15 bp, Homo sapiens
acttccacgctccga

SEQ ID NO: 1806326 - DNA, 15 bp, Homo sapiens
cttccacgctccgat

SEQ ID NO: 1806327 - DNA, 15 bp, Homo sapiens
ttccacgctccgatc

SEQ ID NO: 1806328 - DNA, 15 bp, Homo sapiens
tccacgctccgatca

SEQ ID NO: 1806329 - DNA, 15 bp, Homo sapiens
ccacgctccgatcag

SEQ ID NO: 1806330 - DNA, 15 bp, Homo sapiens
cacgctccgatcaga

SEQ ID NO: 1806331 - DNA, 15 bp, Homo sapiens
acgctccgatcagac

SEQ ID NO: 1806332 - DNA, 15 bp, Homo sapiens
cgctccgatcagact

SEQ ID NO: 1806333 - DNA, 15 bp, Homo sapiens
gctccgatcagactt

SEQ ID NO: 1806334 - DNA, 15 bp, Homo sapiens
ctccgatcagacttc

SEQ ID NO: 1806335 - DNA, 15 bp, Homo sapiens
tccgatcagacttcc

SEQ ID NO: 1806336 - DNA, 15 bp, Homo sapiens
ccgatcagacttccc

SEQ ID NO: 1806337 - DNA, 15 bp, Homo sapiens
cgatcagacttcccg

SEQ ID NO: 1806338 - DNA, 15 bp, Homo sapiens
gatcagacttcccgc

SEQ ID NO: 1806339 - DNA, 15 bp, Homo sapiens
atcagacttcccgcc

SEQ ID NO: 1806340 - DNA, 15 bp, Homo sapiens
tcagacttcccgcct

SEQ ID NO: 1806341 - DNA, 15 bp, Homo sapiens
cagacttcccgcctc

SEQ ID NO: 1806342 - DNA, 15 bp, Homo sapiens
agacttcccgcctca

SEQ ID NO: 1806343 - DNA, 15 bp, Homo sapiens
gacttcccgcctcac

SEQ ID NO: 1806344 - DNA, 15 bp, Homo sapiens
acttcccgcctcact

SEQ ID NO: 1806345 - DNA, 15 bp, Homo sapiens
cttcccgcctcactg

SEQ ID NO: 1806346 - DNA, 15 bp, Homo sapiens
ttcccgcctcactgc

SEQ ID NO: 1806347 - DNA, 15 bp, Homo sapiens
tcccgcctcactgcg

SEQ ID NO: 1806348 - DNA, 15 bp, Homo sapiens
cccgcctcactgcgc

SEQ ID NO: 1806349 - DNA, 15 bp, Homo sapiens
ccgcctcactgcgct

SEQ ID NO: 1806350 - DNA, 15 bp, Homo sapiens
cgcctcactgcgcta

SEQ ID NO: 1806351 - DNA, 15 bp, Homo sapiens
gcctcactgcgctaa

SEQ ID NO: 1806352 - DNA, 15 bp, Homo sapiens
cctcactgcgctaaa

SEQ ID NO: 1806353 - DNA, 15 bp, Homo sapiens
ctcactgcgctaaaa

SEQ ID NO: 1806354 - DNA, 15 bp, Homo sapiens
tcactgcgctaaaac

SEQ ID NO: 1806355 - DNA, 15 bp, Homo sapiens
cactgcgctaaaact

SEQ ID NO: 1806356 - DNA, 15 bp, Homo sapiens
actgcgctaaaactg

SEQ ID NO: 1806357 - DNA, 15 bp, Homo sapiens
ctgcgctaaaactgc

SEQ ID NO: 1806358 - DNA, 15 bp, Homo sapiens
tgcgctaaaactgct

SEQ ID NO: 1806359 - DNA, 15 bp, Homo sapiens
gcgctaaaactgctt

SEQ ID NO: 1806360 - DNA, 15 bp, Homo sapiens
cgctaaaactgcttg

SEQ ID NO: 1806361 - DNA, 15 bp, Homo sapiens
gctaaaactgcttgc

SEQ ID NO: 1806362 - DNA, 15 bp, Homo sapiens
ctaaaactgcttgcc

SEQ ID NO: 1806363 - DNA, 15 bp, Homo sapiens
taaaactgcttgcca

SEQ ID NO: 1806364 - DNA, 15 bp, Homo sapiens
aaaactgcttgccaa

SEQ ID NO: 1806365 - DNA, 15 bp, Homo sapiens
aaactgcttgccaag

SEQ ID NO: 1806366 - DNA, 15 bp, Homo sapiens
aactgcttgccaagg

SEQ ID NO: 1806367 - DNA, 15 bp, Homo sapiens
actgcttgccaaggc

SEQ ID NO: 1806368 - DNA, 15 bp, Homo sapiens
ctgcttgccaaggcc

SEQ ID NO: 1806369 - DNA, 15 bp, Homo sapiens
tgcttgccaaggccc

SEQ ID NO: 1806370 - DNA, 15 bp, Homo sapiens
gcttgccaaggcccc

SEQ ID NO: 1806371 - DNA, 15 bp, Homo sapiens
cttgccaaggcccct

SEQ ID NO: 1806372 - DNA, 15 bp, Homo sapiens
ttgccaaggcccctc

SEQ ID NO: 1806373 - DNA, 15 bp, Homo sapiens
tgccaaggcccctcc

SEQ ID NO: 1806374 - DNA, 15 bp, Homo sapiens
gccaaggcccctccg

SEQ ID NO: 1806375 - DNA, 15 bp, Homo sapiens
ccaaggcccctccgg

SEQ ID NO: 1806376 - DNA, 15 bp, Homo sapiens
caaggcccctccggc

SEQ ID NO: 1806377 - DNA, 15 bp, Homo sapiens
aaggcccctccggcg

SEQ ID NO: 1806378 - DNA, 15 bp, Homo sapiens
aggcccctccggcgt

SEQ ID NO: 1806379 - DNA, 15 bp, Homo sapiens
ggcccctccggcgtt

SEQ ID NO: 1806380 - DNA, 15 bp, Homo sapiens
gcccctccggcgttc

SEQ ID NO: 1806381 - DNA, 15 bp, Homo sapiens
cccctccggcgttct

SEQ ID NO: 1806382 - DNA, 15 bp, Homo sapiens
ccctccggcgttctc

SEQ ID NO: 1806383 - DNA, 15 bp, Homo sapiens
cctccggcgttctca

SEQ ID NO: 1806384 - DNA, 15 bp, Homo sapiens
ctccggcgttctcat

SEQ ID NO: 1806385 - DNA, 15 bp, Homo sapiens
tccggcgttctcatc

SEQ ID NO: 1806386 - DNA, 15 bp, Homo sapiens
ccggcgttctcatcg

SEQ ID NO: 1806387 - DNA, 15 bp, Homo sapiens
cggcgttctcatcgc

SEQ ID NO: 1806388 - DNA, 15 bp, Homo sapiens
ggcgttctcatcgcc

SEQ ID NO: 1806389 - DNA, 15 bp, Homo sapiens
gcgttctcatcgcca

SEQ ID NO: 1806390 - DNA, 15 bp, Homo sapiens
cgttctcatcgccaa

SEQ ID NO: 1806391 - DNA, 15 bp, Homo sapiens
gttctcatcgccaaa

SEQ ID NO: 1806392 - DNA, 15 bp, Homo sapiens
ttctcatcgccaaac

SEQ ID NO: 1806393 - DNA, 15 bp, Homo sapiens
tctcatcgccaaacc

SEQ ID NO: 1806394 - DNA, 15 bp, Homo sapiens
ctcatcgccaaaccc

SEQ ID NO: 1806395 - DNA, 15 bp, Homo sapiens
tcatcgccaaaccca

SEQ ID NO: 1806396 - DNA, 15 bp, Homo sapiens
catcgccaaacccac

SEQ ID NO: 1806397 - DNA, 15 bp, Homo sapiens
atcgccaaacccact

SEQ ID NO: 1806398 - DNA, 15 bp, Homo sapiens
tcgccaaacccactc

SEQ ID NO: 1806399 - DNA, 15 bp, Homo sapiens
cgccaaacccactcg

SEQ ID NO: 1806400 - DNA, 15 bp, Homo sapiens
gccaaacccactcgt

SEQ ID NO: 1806401 - DNA, 15 bp, Homo sapiens
ccaaacccactcgtc

SEQ ID NO: 1806402 - DNA, 15 bp, Homo sapiens
caaacccactcgtca

SEQ ID NO: 1806403 - DNA, 15 bp, Homo sapiens
aaacccactcgtcag

SEQ ID NO: 1806404 - DNA, 15 bp, Homo sapiens
aacccactcgtcagt

SEQ ID NO: 1806405 - DNA, 15 bp, Homo sapiens
acccactcgtcagtt

SEQ ID NO: 1806406 - DNA, 15 bp, Homo sapiens
cccactcgtcagttc

SEQ ID NO: 1806407 - DNA, 15 bp, Homo sapiens
ccactcgtcagttct

SEQ ID NO: 1806408 - DNA, 15 bp, Homo sapiens
cactcgtcagttctc

SEQ ID NO: 1806409 - DNA, 15 bp, Homo sapiens
actcgtcagttctca

SEQ ID NO: 1806410 - DNA, 15 bp, Homo sapiens
ctcgtcagttctcag

SEQ ID NO: 1806411 - DNA, 15 bp, Homo sapiens
tcgtcagttctcagt

SEQ ID NO: 1806412 - DNA, 15 bp, Homo sapiens
cgtcagttctcagtc

SEQ ID NO: 1806413 - DNA, 15 bp, Homo sapiens
gtcagttctcagtcc

SEQ ID NO: 1806414 - DNA, 15 bp, Homo sapiens
tcagttctcagtcct

SEQ ID NO: 1806415 - DNA, 15 bp, Homo sapiens
cagttctcagtcctc

SEQ ID NO: 1806416 - DNA, 15 bp, Homo sapiens
agttctcagtcctcg

SEQ ID NO: 1806417 - DNA, 15 bp, Homo sapiens
gttctcagtcctcgt

SEQ ID NO: 1806418 - DNA, 15 bp, Homo sapiens
ttctcagtcctcgtg

SEQ ID NO: 1806419 - DNA, 15 bp, Homo sapiens
tctcagtcctcgtgc

SEQ ID NO: 1806420 - DNA, 15 bp, Homo sapiens
ctcagtcctcgtgca

SEQ ID NO: 1806421 - DNA, 15 bp, Homo sapiens
tcagtcctcgtgcag

SEQ ID NO: 1806422 - DNA, 15 bp, Homo sapiens
cagtcctcgtgcaga

SEQ ID NO: 1806423 - DNA, 15 bp, Homo sapiens
agtcctcgtgcagac

SEQ ID NO: 1806424 - DNA, 15 bp, Homo sapiens
gtcctcgtgcagacg

SEQ ID NO: 1806425 - DNA, 15 bp, Homo sapiens
tcctcgtgcagacgt

SEQ ID NO: 1806426 - DNA, 15 bp, Homo sapiens
cctcgtgcagacgtg

SEQ ID NO: 1806427 - DNA, 15 bp, Homo sapiens
ctcgtgcagacgtgc

SEQ ID NO: 1806428 - DNA, 15 bp, Homo sapiens
tcgtgcagacgtgcc

SEQ ID NO: 1806429 - DNA, 15 bp, Homo sapiens
cgtgcagacgtgcca

SEQ ID NO: 1806430 - DNA, 15 bp, Homo sapiens
gtgcagacgtgccag

SEQ ID NO: 1806431 - DNA, 15 bp, Homo sapiens
tgcagacgtgccagc

SEQ ID NO: 1806432 - DNA, 15 bp, Homo sapiens
gcagacgtgccagca

SEQ ID NO: 1806433 - DNA, 15 bp, Homo sapiens
cagacgtgccagcag

SEQ ID NO: 1806434 - DNA, 15 bp, Homo sapiens
agacgtgccagcagc

SEQ ID NO: 1806435 - DNA, 15 bp, Homo sapiens
gacgtgccagcagca

SEQ ID NO: 1806436 - DNA, 15 bp, Homo sapiens
acgtgccagcagcat

SEQ ID NO: 1806437 - DNA, 15 bp, Homo sapiens
cgtgccagcagcatc

SEQ ID NO: 1806438 - DNA, 15 bp, Homo sapiens
gtgccagcagcatct

SEQ ID NO: 1806439 - DNA, 15 bp, Homo sapiens
tgccagcagcatctg

SEQ ID NO: 1806440 - DNA, 15 bp, Homo sapiens
gccagcagcatctgg

SEQ ID NO: 1806441 - DNA, 15 bp, Homo sapiens
ccagcagcatctggt

SEQ ID NO: 1806442 - DNA, 15 bp, Homo sapiens
cagcagcatctggtg

SEQ ID NO: 1806443 - DNA, 15 bp, Homo sapiens
agcagcatctggtgt

SEQ ID NO: 1806444 - DNA, 15 bp, Homo sapiens
gcagcatctggtgtg

SEQ ID NO: 1806445 - DNA, 15 bp, Homo sapiens
cagcatctggtgtgg

SEQ ID NO: 1806446 - DNA, 15 bp, Homo sapiens
agcatctggtgtggt

SEQ ID NO: 1806447 - DNA, 15 bp, Homo sapiens
gcatctggtgtggtt

SEQ ID NO: 1806448 - DNA, 15 bp, Homo sapiens
catctggtgtggttc

SEQ ID NO: 1806449 - DNA, 15 bp, Homo sapiens
atctggtgtggttcg

SEQ ID NO: 1806450 - DNA, 15 bp, Homo sapiens
tctggtgtggttcgg

SEQ ID NO: 1806451 - DNA, 15 bp, Homo sapiens
ctggtgtggttcgga

SEQ ID NO: 1806452 - DNA, 15 bp, Homo sapiens
tggtgtggttcggac

SEQ ID NO: 1806453 - DNA, 15 bp, Homo sapiens
ggtgtggttcggact

SEQ ID NO: 1806454 - DNA, 15 bp, Homo sapiens
gtgtggttcggactt

SEQ ID NO: 1806455 - DNA, 15 bp, Homo sapiens
tgtggttcggacttc

SEQ ID NO: 1806456 - DNA, 15 bp, Homo sapiens
gtggttcggacttct

SEQ ID NO: 1806457 - DNA, 15 bp, Homo sapiens
tggttcggacttctt

SEQ ID NO: 1806458 - DNA, 15 bp, Homo sapiens
ggttcggacttcttc

SEQ ID NO: 1806459 - DNA, 15 bp, Homo sapiens
gttcggacttcttcc

SEQ ID NO: 1806460 - DNA, 15 bp, Homo sapiens
ttcggacttcttcct

SEQ ID NO: 1806461 - DNA, 15 bp, Homo sapiens
tcggacttcttcctt

SEQ ID NO: 1806462 - DNA, 15 bp, Homo sapiens
cggacttcttccttc

SEQ ID NO: 1806463 - DNA, 15 bp, Homo sapiens
ggacttcttccttcc

SEQ ID NO: 1806464 - DNA, 15 bp, Homo sapiens
gacttcttccttcct

SEQ ID NO: 1806465 - DNA, 15 bp, Homo sapiens
acttcttccttcctg

SEQ ID NO: 1806466 - DNA, 15 bp, Homo sapiens
cttcttccttcctgt

SEQ ID NO: 1806467 - DNA, 15 bp, Homo sapiens
ttcttccttcctgtt

SEQ ID NO: 1806468 - DNA, 15 bp, Homo sapiens
tcttccttcctgttt

SEQ ID NO: 1806469 - DNA, 15 bp, Homo sapiens
cttccttcctgtttc

SEQ ID NO: 1806470 - DNA, 15 bp, Homo sapiens
ttccttcctgtttcg

SEQ ID NO: 1806471 - DNA, 15 bp, Homo sapiens
tccttcctgtttcgc

SEQ ID NO: 1806472 - DNA, 15 bp, Homo sapiens
ccttcctgtttcgct

SEQ ID NO: 1806473 - DNA, 15 bp, Homo sapiens
cttcctgtttcgctt

SEQ ID NO: 1806474 - DNA, 15 bp, Homo sapiens
ttcctgtttcgcttt

SEQ ID NO: 1806475 - DNA, 15 bp, Homo sapiens
tcctgtttcgctttc

SEQ ID NO: 1806476 - DNA, 15 bp, Homo sapiens
cctgtttcgctttct

SEQ ID NO: 1806477 - DNA, 15 bp, Homo sapiens
ctgtttcgctttctt

SEQ ID NO: 1806478 - DNA, 15 bp, Homo sapiens
tgtttcgctttcttt

SEQ ID NO: 1806479 - DNA, 15 bp, Homo sapiens
gtttcgctttctttc

SEQ ID NO: 1806480 - DNA, 15 bp, Homo sapiens
tttcgctttctttcc

SEQ ID NO: 1806481 - DNA, 15 bp, Homo sapiens
ttcgctttctttccc

SEQ ID NO: 1806482 - DNA, 15 bp, Homo sapiens
tcgctttctttccca

SEQ ID NO: 1806483 - DNA, 15 bp, Homo sapiens
cgctttctttcccag

SEQ ID NO: 1806484 - DNA, 15 bp, Homo sapiens
gctttctttcccagc

SEQ ID NO: 1806485 - DNA, 15 bp, Homo sapiens
ctttctttcccagcc

SEQ ID NO: 1806486 - DNA, 15 bp, Homo sapiens
tttctttcccagcct

SEQ ID NO: 1806487 - DNA, 15 bp, Homo sapiens
ttctttcccagcctg

SEQ ID NO: 1806488 - DNA, 15 bp, Homo sapiens
tctttcccagcctgc

SEQ ID NO: 1806489 - DNA, 15 bp, Homo sapiens
ctttcccagcctgca

SEQ ID NO: 1806490 - DNA, 15 bp, Homo sapiens
tttcccagcctgcag

SEQ ID NO: 1806491 - DNA, 15 bp, Homo sapiens
ttcccagcctgcagg

SEQ ID NO: 1806492 - DNA, 15 bp, Homo sapiens
tcccagcctgcagga

SEQ ID NO: 1806493 - DNA, 15 bp, Homo sapiens
cccagcctgcaggaa

SEQ ID NO: 1806494 - DNA, 15 bp, Homo sapiens
ccagcctgcaggaaa

SEQ ID NO: 1806495 - DNA, 15 bp, Homo sapiens
cagcctgcaggaaac

SEQ ID NO: 1806496 - DNA, 15 bp, Homo sapiens
agcctgcaggaaacg

SEQ ID NO: 1806497 - DNA, 15 bp, Homo sapiens
gcctgcaggaaacgg

SEQ ID NO: 1806498 - DNA, 15 bp, Homo sapiens
cctgcaggaaacggt

SEQ ID NO: 1806499 - DNA, 15 bp, Homo sapiens
ctgcaggaaacggtc

SEQ ID NO: 1806500 - DNA, 15 bp, Homo sapiens
tgcaggaaacggtct

SEQ ID NO: 1806501 - DNA, 15 bp, Homo sapiens
gcaggaaacggtctg

SEQ ID NO: 1806502 - DNA, 15 bp, Homo sapiens
caggaaacggtctgc

SEQ ID NO: 1806503 - DNA, 15 bp, Homo sapiens
aggaaacggtctgct

SEQ ID NO: 1806504 - DNA, 15 bp, Homo sapiens
ggaaacggtctgctg

SEQ ID NO: 1806505 - DNA, 15 bp, Homo sapiens
gaaacggtctgctgg

SEQ ID NO: 1806506 - DNA, 15 bp, Homo sapiens
aaacggtctgctggt

SEQ ID NO: 1806507 - DNA, 15 bp, Homo sapiens
aacggtctgctggtt

SEQ ID NO: 1806508 - DNA, 15 bp, Homo sapiens
acggtctgctggttt

SEQ ID NO: 1806509 - DNA, 15 bp, Homo sapiens
cggtctgctggtttc

SEQ ID NO: 1806510 - DNA, 15 bp, Homo sapiens
ggtctgctggtttct

SEQ ID NO: 1806511 - DNA, 15 bp, Homo sapiens
gtctgctggtttctc

SEQ ID NO: 1806512 - DNA, 15 bp, Homo sapiens
tctgctggtttctct

SEQ ID NO: 1806513 - DNA, 15 bp, Homo sapiens
ctgctggtttctctc

SEQ ID NO: 1806514 - DNA, 15 bp, Homo sapiens
tgctggtttctctct

SEQ ID NO: 1806515 - DNA, 15 bp, Homo sapiens
gctggtttctctctt

SEQ ID NO: 1806516 - DNA, 15 bp, Homo sapiens
ctggtttctctcttc

SEQ ID NO: 1806517 - DNA, 15 bp, Homo sapiens
tggtttctctcttcc

SEQ ID NO: 1806518 - DNA, 15 bp, Homo sapiens
ggtttctctcttccg

SEQ ID NO: 1806519 - DNA, 15 bp, Homo sapiens
gtttctctcttccgt

SEQ ID NO: 1806520 - DNA, 15 bp, Homo sapiens
tttctctcttccgtt

SEQ ID NO: 1806521 - DNA, 15 bp, Homo sapiens
ttctctcttccgtta

SEQ ID NO: 1806522 - DNA, 15 bp, Homo sapiens
tctctcttccgttac

SEQ ID NO: 1806523 - DNA, 15 bp, Homo sapiens
ctctcttccgttact

SEQ ID NO: 1806524 - DNA, 15 bp, Homo sapiens
tctcttccgttactg

SEQ ID NO: 1806525 - DNA, 15 bp, Homo sapiens
ctcttccgttactgc

SEQ ID NO: 1806526 - DNA, 15 bp, Homo sapiens
tcttccgttactgct

SEQ ID NO: 1806527 - DNA, 15 bp, Homo sapiens
cttccgttactgctc

SEQ ID NO: 1806528 - DNA, 15 bp, Homo sapiens
ttccgttactgctca

SEQ ID NO: 1806529 - DNA, 15 bp, Homo sapiens
tccgttactgctcac

SEQ ID NO: 1806530 - DNA, 15 bp, Homo sapiens
ccgttactgctcact

SEQ ID NO: 1806531 - DNA, 15 bp, Homo sapiens
cgttactgctcactc

SEQ ID NO: 1806532 - DNA, 15 bp, Homo sapiens
gttactgctcactcc

SEQ ID NO: 1806533 - DNA, 15 bp, Homo sapiens
ttactgctcactcct

SEQ ID NO: 1806534 - DNA, 15 bp, Homo sapiens
tactgctcactcctc

SEQ ID NO: 1806535 - DNA, 15 bp, Homo sapiens
actgctcactcctct

SEQ ID NO: 1806536 - DNA, 15 bp, Homo sapiens
ctgctcactcctctt

SEQ ID NO: 1806537 - DNA, 15 bp, Homo sapiens
tgctcactcctcttc

SEQ ID NO: 1806538 - DNA, 15 bp, Homo sapiens
gctcactcctcttca

SEQ ID NO: 1806539 - DNA, 15 bp, Homo sapiens
ctcactcctcttcag

SEQ ID NO: 1806540 - DNA, 15 bp, Homo sapiens
tcactcctcttcagt

SEQ ID NO: 1806541 - DNA, 15 bp, Homo sapiens
cactcctcttcagtc

SEQ ID NO: 1806542 - DNA, 15 bp, Homo sapiens
actcctcttcagtct

SEQ ID NO: 1806543 - DNA, 15 bp, Homo sapiens
ctcctcttcagtctc

SEQ ID NO: 1806544 - DNA, 15 bp, Homo sapiens
tcctcttcagtctcc

SEQ ID NO: 1806545 - DNA, 15 bp, Homo sapiens
cctcttcagtctcct

SEQ ID NO: 1806546 - DNA, 15 bp, Homo sapiens
ctcttcagtctcctt

SEQ ID NO: 1806547 - DNA, 15 bp, Homo sapiens
tcttcagtctccttt

SEQ ID NO: 1806548 - DNA, 15 bp, Homo sapiens
cttcagtctcctttg

SEQ ID NO: 1806549 - DNA, 15 bp, Homo sapiens
ttcagtctcctttgc

SEQ ID NO: 1806550 - DNA, 15 bp, Homo sapiens
tcagtctcctttgct

SEQ ID NO: 1806551 - DNA, 15 bp, Homo sapiens
cagtctcctttgctg

SEQ ID NO: 1806552 - DNA, 15 bp, Homo sapiens
agtctcctttgctgg

SEQ ID NO: 1806553 - DNA, 15 bp, Homo sapiens
gtctcctttgctggt

SEQ ID NO: 1806554 - DNA, 15 bp, Homo sapiens
tctcctttgctggtg

SEQ ID NO: 1806555 - DNA, 15 bp, Homo sapiens
ctcctttgctggtgt

SEQ ID NO: 1806556 - DNA, 15 bp, Homo sapiens
tcctttgctggtgtc

SEQ ID NO: 1806557 - DNA, 15 bp, Homo sapiens
cctttgctggtgtct

SEQ ID NO: 1806558 - DNA, 15 bp, Homo sapiens
ctttgctggtgtctc

SEQ ID NO: 1806559 - DNA, 15 bp, Homo sapiens
tttgctggtgtctcc

SEQ ID NO: 1806560 - DNA, 15 bp, Homo sapiens
ttgctggtgtctcct

SEQ ID NO: 1806561 - DNA, 15 bp, Homo sapiens
tgctggtgtctcctt

SEQ ID NO: 1806562 - DNA, 15 bp, Homo sapiens
gctggtgtctcctta

SEQ ID NO: 1806563 - DNA, 15 bp, Homo sapiens
ctggtgtctccttat

SEQ ID NO: 1806564 - DNA, 15 bp, Homo sapiens
tggtgtctccttatc

SEQ ID NO: 1806565 - DNA, 15 bp, Homo sapiens
ggtgtctccttatct

SEQ ID NO: 1806566 - DNA, 15 bp, Homo sapiens
gtgtctccttatctc

SEQ ID NO: 1806567 - DNA, 15 bp, Homo sapiens
tgtctccttatctcc

SEQ ID NO: 1806568 - DNA, 15 bp, Homo sapiens
gtctccttatctcct

SEQ ID NO: 1806569 - DNA, 15 bp, Homo sapiens
tctccttatctcctt

SEQ ID NO: 1806570 - DNA, 15 bp, Homo sapiens
ctccttatctcctta

SEQ ID NO: 1806571 - DNA, 15 bp, Homo sapiens
tccttatctccttaa

SEQ ID NO: 1806572 - DNA, 15 bp, Homo sapiens
ccttatctccttaac

SEQ ID NO: 1806573 - DNA, 15 bp, Homo sapiens
cttatctccttaacc

SEQ ID NO: 1806574 - DNA, 15 bp, Homo sapiens
ttatctccttaacct

SEQ ID NO: 1806575 - DNA, 15 bp, Homo sapiens
tatctccttaacctc

SEQ ID NO: 1806576 - DNA, 15 bp, Homo sapiens
atctccttaacctct

SEQ ID NO: 1806577 - DNA, 15 bp, Homo sapiens
tctccttaacctcta

SEQ ID NO: 1806578 - DNA, 15 bp, Homo sapiens
ctccttaacctctaa

SEQ ID NO: 1806579 - DNA, 15 bp, Homo sapiens
tccttaacctctaag

SEQ ID NO: 1806580 - DNA, 15 bp, Homo sapiens
ccttaacctctaagc

SEQ ID NO: 1806581 - DNA, 15 bp, Homo sapiens
cttaacctctaagca

SEQ ID NO: 1806582 - DNA, 15 bp, Homo sapiens
aacctctaagcacag

SEQ ID NO: 1806583 - DNA, 15 bp, Homo sapiens
acctctaagcacaga

SEQ ID NO: 1806584 - DNA, 15 bp, Homo sapiens
cctctaagcacagag

SEQ ID NO: 1806585 - DNA, 15 bp, Homo sapiens
ctctaagcacagagt

SEQ ID NO: 1806586 - DNA, 15 bp, Homo sapiens
tctaagcacagagtg

SEQ ID NO: 1806587 - DNA, 15 bp, Homo sapiens
ctaagcacagagtgc

SEQ ID NO: 1806588 - DNA, 15 bp, Homo sapiens
taagcacagagtgct

SEQ ID NO: 1806589 - DNA, 15 bp, Homo sapiens
aagcacagagtgctc

SEQ ID NO: 1806590 - DNA, 15 bp, Homo sapiens
agcacagagtgctca

SEQ ID NO: 1806591 - DNA, 15 bp, Homo sapiens
gcacagagtgctcag

SEQ ID NO: 1806592 - DNA, 15 bp, Homo sapiens
cacagagtgctcagg

SEQ ID NO: 1806593 - DNA, 15 bp, Homo sapiens
acagagtgctcagga

SEQ ID NO: 1806594 - DNA, 15 bp, Homo sapiens
cagagtgctcaggac

SEQ ID NO: 1806595 - DNA, 15 bp, Homo sapiens
agagtgctcaggact

SEQ ID NO: 1806596 - DNA, 15 bp, Homo sapiens
gagtgctcaggactt

SEQ ID NO: 1806597 - DNA, 15 bp, Homo sapiens
agtgctcaggactta

SEQ ID NO: 1806598 - DNA, 15 bp, Homo sapiens
gtgctcaggacttaa

SEQ ID NO: 1806599 - DNA, 15 bp, Homo sapiens
tgctcaggacttaat

SEQ ID NO: 1806600 - DNA, 15 bp, Homo sapiens
gctcaggacttaatc

SEQ ID NO: 1806601 - DNA, 15 bp, Homo sapiens
ctcaggacttaatct

SEQ ID NO: 1806602 - DNA, 15 bp, Homo sapiens
tcaggacttaatctt

SEQ ID NO: 1806603 - DNA, 15 bp, Homo sapiens
caggacttaatcttc

SEQ ID NO: 1806604 - DNA, 15 bp, Homo sapiens
aggacttaatcttca

SEQ ID NO: 1806605 - DNA, 15 bp, Homo sapiens
ggacttaatcttcaa

SEQ ID NO: 1806606 - DNA, 15 bp, Homo sapiens
gacttaatcttcaaa

SEQ ID NO: 1806607 - DNA, 15 bp, Homo sapiens
acttaatcttcaaac

SEQ ID NO: 1806608 - DNA, 15 bp, Homo sapiens
cttaatcttcaaacc

SEQ ID NO: 1806609 - DNA, 15 bp, Homo sapiens
ttaatcttcaaacct

SEQ ID NO: 1806610 - DNA, 15 bp, Homo sapiens
taatcttcaaacctg

SEQ ID NO: 1806611 - DNA, 15 bp, Homo sapiens
aatcttcaaacctgt

SEQ ID NO: 1806612 - DNA, 15 bp, Homo sapiens
atcttcaaacctgtc

SEQ ID NO: 1806613 - DNA, 15 bp, Homo sapiens
tcttcaaacctgtct

SEQ ID NO: 1806614 - DNA, 15 bp, Homo sapiens
cttcaaacctgtctc

SEQ ID NO: 1806615 - DNA, 15 bp, Homo sapiens
ttcaaacctgtctca

SEQ ID NO: 1806616 - DNA, 15 bp, Homo sapiens
tcaaacctgtctcac

SEQ ID NO: 1806617 - DNA, 15 bp, Homo sapiens
caaacctgtctcacg

SEQ ID NO: 1806618 - DNA, 15 bp, Homo sapiens
aaacctgtctcacgt

SEQ ID NO: 1806619 - DNA, 15 bp, Homo sapiens
aacctgtctcacgtc

SEQ ID NO: 1806620 - DNA, 15 bp, Homo sapiens
acctgtctcacgtca

SEQ ID NO: 1806621 - DNA, 15 bp, Homo sapiens
cctgtctcacgtcac

SEQ ID NO: 1806622 - DNA, 15 bp, Homo sapiens
ctgtctcacgtcact

SEQ ID NO: 1806623 - DNA, 15 bp, Homo sapiens
tgtctcacgtcactg

SEQ ID NO: 1806624 - DNA, 15 bp, Homo sapiens
gtctcacgtcactgc

SEQ ID NO: 1806625 - DNA, 15 bp, Homo sapiens
tctcacgtcactgcc

SEQ ID NO: 1806626 - DNA, 15 bp, Homo sapiens
ctcacgtcactgcct

SEQ ID NO: 1806627 - DNA, 15 bp, Homo sapiens
tcacgtcactgcctc

SEQ ID NO: 1806628 - DNA, 15 bp, Homo sapiens
cacgtcactgcctca

SEQ ID NO: 1806629 - DNA, 15 bp, Homo sapiens
acgtcactgcctcat

SEQ ID NO: 1806630 - DNA, 15 bp, Homo sapiens
cgtcactgcctcata

SEQ ID NO: 1806631 - DNA, 15 bp, Homo sapiens
gtcactgcctcatag

SEQ ID NO: 1806632 - DNA, 15 bp, Homo sapiens
tcactgcctcatagc

SEQ ID NO: 1806633 - DNA, 15 bp, Homo sapiens
cactgcctcatagct

SEQ ID NO: 1806634 - DNA, 15 bp, Homo sapiens
actgcctcatagctt

SEQ ID NO: 1806635 - DNA, 15 bp, Homo sapiens
ctgcctcatagcttt

SEQ ID NO: 1806636 - DNA, 15 bp, Homo sapiens
tgcctcatagctttg

SEQ ID NO: 1806637 - DNA, 15 bp, Homo sapiens
gcctcatagctttga

SEQ ID NO: 1806638 - DNA, 15 bp, Homo sapiens
cctcatagctttgac

SEQ ID NO: 1806639 - DNA, 15 bp, Homo sapiens
ctcatagctttgact

SEQ ID NO: 1806640 - DNA, 15 bp, Homo sapiens
tcatagctttgactt

SEQ ID NO: 1806641 - DNA, 15 bp, Homo sapiens
catagctttgacttc

SEQ ID NO: 1806642 - DNA, 15 bp, Homo sapiens
atagctttgacttca

SEQ ID NO: 1806643 - DNA, 15 bp, Homo sapiens
tagctttgacttcag

SEQ ID NO: 1806644 - DNA, 15 bp, Homo sapiens
agctttgacttcagc

SEQ ID NO: 1806645 - DNA, 15 bp, Homo sapiens
gctttgacttcagca

SEQ ID NO: 1806646 - DNA, 15 bp, Homo sapiens
ctttgacttcagcac

SEQ ID NO: 1806647 - DNA, 15 bp, Homo sapiens
tttgacttcagcaca

SEQ ID NO: 1806648 - DNA, 15 bp, Homo sapiens
ttgacttcagcacat

SEQ ID NO: 1806649 - DNA, 15 bp, Homo sapiens
tgacttcagcacatt

SEQ ID NO: 1806650 - DNA, 15 bp, Homo sapiens
gacttcagcacattt

SEQ ID NO: 1806651 - DNA, 15 bp, Homo sapiens
acttcagcacatttc

SEQ ID NO: 1806652 - DNA, 15 bp, Homo sapiens
cttcagcacatttct

SEQ ID NO: 1806653 - DNA, 15 bp, Homo sapiens
ttcagcacatttctc

SEQ ID NO: 1806654 - DNA, 15 bp, Homo sapiens
tcagcacatttctct

SEQ ID NO: 1806655 - DNA, 15 bp, Homo sapiens
cagcacatttctctc

SEQ ID NO: 1806656 - DNA, 15 bp, Homo sapiens
agcacatttctctct

SEQ ID NO: 1806657 - DNA, 15 bp, Homo sapiens
gcacatttctctctg

SEQ ID NO: 1806658 - DNA, 15 bp, Homo sapiens
cacatttctctctga

SEQ ID NO: 1806659 - DNA, 15 bp, Homo sapiens
acatttctctctgac

SEQ ID NO: 1806660 - DNA, 15 bp, Homo sapiens
catttctctctgact

SEQ ID NO: 1806661 - DNA, 15 bp, Homo sapiens
atttctctctgactt

SEQ ID NO: 1806662 - DNA, 15 bp, Homo sapiens
tttctctctgacttc

SEQ ID NO: 1806663 - DNA, 15 bp, Homo sapiens
ttctctctgacttcc

SEQ ID NO: 1806664 - DNA, 15 bp, Homo sapiens
tctctctgacttcca

SEQ ID NO: 1806665 - DNA, 15 bp, Homo sapiens
ctctctgacttccag

SEQ ID NO: 1806666 - DNA, 15 bp, Homo sapiens
tctctgacttccagg

SEQ ID NO: 1806667 - DNA, 15 bp, Homo sapiens
ctctgacttccaggc

SEQ ID NO: 1806668 - DNA, 15 bp, Homo sapiens
tctgacttccaggct

SEQ ID NO: 1806669 - DNA, 15 bp, Homo sapiens
ctgacttccaggctt

SEQ ID NO: 1806670 - DNA, 15 bp, Homo sapiens
tgacttccaggcttg

SEQ ID NO: 1806671 - DNA, 15 bp, Homo sapiens
gacttccaggcttgc

SEQ ID NO: 1806672 - DNA, 15 bp, Homo sapiens
acttccaggcttgct

SEQ ID NO: 1806673 - DNA, 15 bp, Homo sapiens
cttccaggcttgctt

SEQ ID NO: 1806674 - DNA, 15 bp, Homo sapiens
ttccaggcttgctta

SEQ ID NO: 1806675 - DNA, 15 bp, Homo sapiens
tccaggcttgcttat

SEQ ID NO: 1806676 - DNA, 15 bp, Homo sapiens
ccaggcttgcttatc

SEQ ID NO: 1806677 - DNA, 15 bp, Homo sapiens
caggcttgcttatcc

SEQ ID NO: 1806678 - DNA, 15 bp, Homo sapiens
aggcttgcttatcca

SEQ ID NO: 1806679 - DNA, 15 bp, Homo sapiens
ggcttgcttatccaa

SEQ ID NO: 1806680 - DNA, 15 bp, Homo sapiens
gcttgcttatccaat

SEQ ID NO: 1806681 - DNA, 15 bp, Homo sapiens
cttgcttatccaatt

SEQ ID NO: 1806682 - DNA, 15 bp, Homo sapiens
ttgcttatccaattt

SEQ ID NO: 1806683 - DNA, 15 bp, Homo sapiens
tgcttatccaatttg

SEQ ID NO: 1806684 - DNA, 15 bp, Homo sapiens
gcttatccaatttgc

SEQ ID NO: 1806685 - DNA, 15 bp, Homo sapiens
cttatccaatttgct

SEQ ID NO: 1806686 - DNA, 15 bp, Homo sapiens
ttatccaatttgctt

SEQ ID NO: 1806687 - DNA, 15 bp, Homo sapiens
tatccaatttgctta

SEQ ID NO: 1806688 - DNA, 15 bp, Homo sapiens
atccaatttgcttat

SEQ ID NO: 1806689 - DNA, 15 bp, Homo sapiens
tccaatttgcttatt

SEQ ID NO: 1806690 - DNA, 15 bp, Homo sapiens
ccaatttgcttatta

SEQ ID NO: 1806691 - DNA, 15 bp, Homo sapiens
caatttgcttattag

SEQ ID NO: 1806692 - DNA, 15 bp, Homo sapiens
aatttgcttattaga

SEQ ID NO: 1806693 - DNA, 15 bp, Homo sapiens
atttgcttattagac

SEQ ID NO: 1806694 - DNA, 15 bp, Homo sapiens
tttgcttattagaca

SEQ ID NO: 1806695 - DNA, 15 bp, Homo sapiens
ttgcttattagacat

SEQ ID NO: 1806696 - DNA, 15 bp, Homo sapiens
tgcttattagacatt

SEQ ID NO: 1806697 - DNA, 15 bp, Homo sapiens
gcttattagacattt

SEQ ID NO: 1806698 - DNA, 15 bp, Homo sapiens
cttattagacatttc

SEQ ID NO: 1806699 - DNA, 15 bp, Homo sapiens
ttattagacatttcc

SEQ ID NO: 1806700 - DNA, 15 bp, Homo sapiens
tattagacatttcca

SEQ ID NO: 1806701 - DNA, 15 bp, Homo sapiens
attagacatttccat

SEQ ID NO: 1806702 - DNA, 15 bp, Homo sapiens
ttagacatttccatt

SEQ ID NO: 1806703 - DNA, 15 bp, Homo sapiens
tagacatttccattt

SEQ ID NO: 1806704 - DNA, 15 bp, Homo sapiens
agacatttccatttg

SEQ ID NO: 1806705 - DNA, 15 bp, Homo sapiens
gacatttccatttgg

SEQ ID NO: 1806706 - DNA, 15 bp, Homo sapiens
acatttccatttgga

SEQ ID NO: 1806707 - DNA, 15 bp, Homo sapiens
catttccatttggat

SEQ ID NO: 1806708 - DNA, 15 bp, Homo sapiens
atttccatttggatg

SEQ ID NO: 1806709 - DNA, 15 bp, Homo sapiens
tttccatttggatgt

SEQ ID NO: 1806710 - DNA, 15 bp, Homo sapiens
ttccatttggatgtc

SEQ ID NO: 1806711 - DNA, 15 bp, Homo sapiens
tccatttggatgtct

SEQ ID NO: 1806712 - DNA, 15 bp, Homo sapiens
ccatttggatgtcta

SEQ ID NO: 1806713 - DNA, 15 bp, Homo sapiens
catttggatgtctaa

SEQ ID NO: 1806714 - DNA, 15 bp, Homo sapiens
atttggatgtctaat

SEQ ID NO: 1806715 - DNA, 15 bp, Homo sapiens
tttggatgtctaata

SEQ ID NO: 1806716 - DNA, 15 bp, Homo sapiens
ttggatgtctaatag

SEQ ID NO: 1806717 - DNA, 15 bp, Homo sapiens
tggatgtctaataga

SEQ ID NO: 1806718 - DNA, 15 bp, Homo sapiens
ggatgtctaatagac

SEQ ID NO: 1806719 - DNA, 15 bp, Homo sapiens
gatgtctaatagaca

SEQ ID NO: 1806720 - DNA, 15 bp, Homo sapiens
atgtctaatagacat

SEQ ID NO: 1806721 - DNA, 15 bp, Homo sapiens
tgtctaatagacatc

SEQ ID NO: 1806722 - DNA, 15 bp, Homo sapiens
gtctaatagacatca

SEQ ID NO: 1806723 - DNA, 15 bp, Homo sapiens
tctaatagacatcac

SEQ ID NO: 1806724 - DNA, 15 bp, Homo sapiens
ctaatagacatcaca

SEQ ID NO: 1806725 - DNA, 15 bp, Homo sapiens
taatagacatcacat

SEQ ID NO: 1806726 - DNA, 15 bp, Homo sapiens
aatagacatcacata

SEQ ID NO: 1806727 - DNA, 15 bp, Homo sapiens
atagacatcacatac

SEQ ID NO: 1806728 - DNA, 15 bp, Homo sapiens
tagacatcacatact

SEQ ID NO: 1806729 - DNA, 15 bp, Homo sapiens
agacatcacatactt

SEQ ID NO: 1806730 - DNA, 15 bp, Homo sapiens
gacatcacatacttc

SEQ ID NO: 1806731 - DNA, 15 bp, Homo sapiens
acatcacatacttct

SEQ ID NO: 1806732 - DNA, 15 bp, Homo sapiens
catcacatacttctc

SEQ ID NO: 1806733 - DNA, 15 bp, Homo sapiens
atcacatacttctca

SEQ ID NO: 1806734 - DNA, 15 bp, Homo sapiens
tcacatacttctcat

SEQ ID NO: 1806735 - DNA, 15 bp, Homo sapiens
cacatacttctcata

SEQ ID NO: 1806736 - DNA, 15 bp, Homo sapiens
acatacttctcatat

SEQ ID NO: 1806737 - DNA, 15 bp, Homo sapiens
catacttctcatatt

SEQ ID NO: 1806738 - DNA, 15 bp, Homo sapiens
atacttctcatattc

SEQ ID NO: 1806739 - DNA, 15 bp, Homo sapiens
tacttctcatattca

SEQ ID NO: 1806740 - DNA, 15 bp, Homo sapiens
acttctcatattcaa

SEQ ID NO: 1806741 - DNA, 15 bp, Homo sapiens
cttctcatattcaaa

SEQ ID NO: 1806742 - DNA, 15 bp, Homo sapiens
ttctcatattcaaaa

SEQ ID NO: 1806743 - DNA, 15 bp, Homo sapiens
tctcatattcaaaac

SEQ ID NO: 1806744 - DNA, 15 bp, Homo sapiens
ctcatattcaaaacc

SEQ ID NO: 1806745 - DNA, 15 bp, Homo sapiens
tcatattcaaaacca

SEQ ID NO: 1806746 - DNA, 15 bp, Homo sapiens
catattcaaaaccaa

SEQ ID NO: 1806747 - DNA, 15 bp, Homo sapiens
atattcaaaaccaaa

SEQ ID NO: 1806748 - DNA, 15 bp, Homo sapiens
tattcaaaaccaaat

SEQ ID NO: 1806749 - DNA, 15 bp, Homo sapiens
attcaaaaccaaatt

SEQ ID NO: 1806750 - DNA, 15 bp, Homo sapiens
ttcaaaaccaaattt

SEQ ID NO: 1806751 - DNA, 15 bp, Homo sapiens
tcaaaaccaaatttc

SEQ ID NO: 1806752 - DNA, 15 bp, Homo sapiens
caaaaccaaatttct

SEQ ID NO: 1806753 - DNA, 15 bp, Homo sapiens
aaaaccaaatttctg

SEQ ID NO: 1806754 - DNA, 15 bp, Homo sapiens
aaaccaaatttctga

SEQ ID NO: 1806755 - DNA, 15 bp, Homo sapiens
aaccaaatttctgat

SEQ ID NO: 1806756 - DNA, 15 bp, Homo sapiens
accaaatttctgata

SEQ ID NO: 1806757 - DNA, 15 bp, Homo sapiens
ccaaatttctgatat

SEQ ID NO: 1806758 - DNA, 15 bp, Homo sapiens
caaatttctgatatt

SEQ ID NO: 1806759 - DNA, 15 bp, Homo sapiens
aaatttctgatattt

SEQ ID NO: 1806760 - DNA, 15 bp, Homo sapiens
aatttctgatatttc

SEQ ID NO: 1806761 - DNA, 15 bp, Homo sapiens
atttctgatatttcc

SEQ ID NO: 1806762 - DNA, 15 bp, Homo sapiens
tttctgatatttccc

SEQ ID NO: 1806763 - DNA, 15 bp, Homo sapiens
ttctgatatttcccc

SEQ ID NO: 1806764 - DNA, 15 bp, Homo sapiens
tctgatatttccccc

SEQ ID NO: 1806765 - DNA, 15 bp, Homo sapiens
ctgatatttccccca

SEQ ID NO: 1806766 - DNA, 15 bp, Homo sapiens
tgatatttcccccaa

SEQ ID NO: 1806767 - DNA, 15 bp, Homo sapiens
gatatttcccccaaa

SEQ ID NO: 1806768 - DNA, 15 bp, Homo sapiens
atatttcccccaaaa

SEQ ID NO: 1806769 - DNA, 15 bp, Homo sapiens
tatttcccccaaaat

SEQ ID NO: 1806770 - DNA, 15 bp, Homo sapiens
atttcccccaaaatg

SEQ ID NO: 1806771 - DNA, 15 bp, Homo sapiens
tttcccccaaaatgt

SEQ ID NO: 1806772 - DNA, 15 bp, Homo sapiens
ttcccccaaaatgtt

SEQ ID NO: 1806773 - DNA, 15 bp, Homo sapiens
tcccccaaaatgttg

SEQ ID NO: 1806774 - DNA, 15 bp, Homo sapiens
cccccaaaatgttgc

SEQ ID NO: 1806775 - DNA, 15 bp, Homo sapiens
ccccaaaatgttgct

SEQ ID NO: 1806776 - DNA, 15 bp, Homo sapiens
cccaaaatgttgctc

SEQ ID NO: 1806777 - DNA, 15 bp, Homo sapiens
ccaaaatgttgctcc

SEQ ID NO: 1806778 - DNA, 15 bp, Homo sapiens
caaaatgttgctcct

SEQ ID NO: 1806779 - DNA, 15 bp, Homo sapiens
aaaatgttgctccta

SEQ ID NO: 1806780 - DNA, 15 bp, Homo sapiens
aaatgttgctcctat

SEQ ID NO: 1806781 - DNA, 15 bp, Homo sapiens
aatgttgctcctatc

SEQ ID NO: 1806782 - DNA, 15 bp, Homo sapiens
atgttgctcctatct

SEQ ID NO: 1806783 - DNA, 15 bp, Homo sapiens
tgttgctcctatctt

SEQ ID NO: 1806784 - DNA, 15 bp, Homo sapiens
gttgctcctatcttc

SEQ ID NO: 1806785 - DNA, 15 bp, Homo sapiens
ttgctcctatcttct

SEQ ID NO: 1806786 - DNA, 15 bp, Homo sapiens
tgctcctatcttcta

SEQ ID NO: 1806787 - DNA, 15 bp, Homo sapiens
gctcctatcttctat

SEQ ID NO: 1806788 - DNA, 15 bp, Homo sapiens
ctcctatcttctata

SEQ ID NO: 1806789 - DNA, 15 bp, Homo sapiens
tcctatcttctatat

SEQ ID NO: 1806790 - DNA, 15 bp, Homo sapiens
cctatcttctatatc

SEQ ID NO: 1806791 - DNA, 15 bp, Homo sapiens
ctatcttctatatct

SEQ ID NO: 1806792 - DNA, 15 bp, Homo sapiens
tatcttctatatctc

SEQ ID NO: 1806793 - DNA, 15 bp, Homo sapiens
atcttctatatctca

SEQ ID NO: 1806794 - DNA, 15 bp, Homo sapiens
tcttctatatctcaa

SEQ ID NO: 1806795 - DNA, 15 bp, Homo sapiens
cttctatatctcaat

SEQ ID NO: 1806796 - DNA, 15 bp, Homo sapiens
ttctatatctcaata

SEQ ID NO: 1806797 - DNA, 15 bp, Homo sapiens
tctatatctcaatag

SEQ ID NO: 1806798 - DNA, 15 bp, Homo sapiens
ctatatctcaataga

SEQ ID NO: 1806799 - DNA, 15 bp, Homo sapiens
tatatctcaatagat

SEQ ID NO: 1806800 - DNA, 15 bp, Homo sapiens
atatctcaatagatg

SEQ ID NO: 1806801 - DNA, 15 bp, Homo sapiens
atctcaatagatgcc

SEQ ID NO: 1806802 - DNA, 15 bp, Homo sapiens
tctcaatagatgcca

SEQ ID NO: 1806803 - DNA, 15 bp, Homo sapiens
ctcaatagatgccac

SEQ ID NO: 1806804 - DNA, 15 bp, Homo sapiens
tcaatagatgccact

SEQ ID NO: 1806805 - DNA, 15 bp, Homo sapiens
caatagatgccactt

SEQ ID NO: 1806806 - DNA, 15 bp, Homo sapiens
aatagatgccacttt

SEQ ID NO: 1806807 - DNA, 15 bp, Homo sapiens
atagatgccactttc

SEQ ID NO: 1806808 - DNA, 15 bp, Homo sapiens
tagatgccactttca

SEQ ID NO: 1806809 - DNA, 15 bp, Homo sapiens
agatgccactttcat

SEQ ID NO: 1806810 - DNA, 15 bp, Homo sapiens
gatgccactttcatc

SEQ ID NO: 1806811 - DNA, 15 bp, Homo sapiens
atgccactttcatcc

SEQ ID NO: 1806812 - DNA, 15 bp, Homo sapiens
tgccactttcatcct

SEQ ID NO: 1806813 - DNA, 15 bp, Homo sapiens
gccactttcatcctt

SEQ ID NO: 1806814 - DNA, 15 bp, Homo sapiens
ccactttcatcctta

SEQ ID NO: 1806815 - DNA, 15 bp, Homo sapiens
cactttcatccttac

SEQ ID NO: 1806816 - DNA, 15 bp, Homo sapiens
actttcatccttaca

SEQ ID NO: 1806817 - DNA, 15 bp, Homo sapiens
ctttcatccttacag

SEQ ID NO: 1806818 - DNA, 15 bp, Homo sapiens
tttcatccttacagc

SEQ ID NO: 1806819 - DNA, 15 bp, Homo sapiens
ttcatccttacagct

SEQ ID NO: 1806820 - DNA, 15 bp, Homo sapiens
tcatccttacagctg

SEQ ID NO: 1806821 - DNA, 15 bp, Homo sapiens
catccttacagctgc

SEQ ID NO: 1806822 - DNA, 15 bp, Homo sapiens
atccttacagctgct

SEQ ID NO: 1806823 - DNA, 15 bp, Homo sapiens
tccttacagctgctg

SEQ ID NO: 1806824 - DNA, 15 bp, Homo sapiens
ccttacagctgctga

SEQ ID NO: 1806825 - DNA, 15 bp, Homo sapiens
cttacagctgctgag

SEQ ID NO: 1806826 - DNA, 15 bp, Homo sapiens
ttacagctgctgagg

SEQ ID NO: 1806827 - DNA, 15 bp, Homo sapiens
tacagctgctgaggg

SEQ ID NO: 1806828 - DNA, 15 bp, Homo sapiens
acagctgctgaggga

SEQ ID NO: 1806829 - DNA, 15 bp, Homo sapiens
cagctgctgagggac

SEQ ID NO: 1806830 - DNA, 15 bp, Homo sapiens
agctgctgagggaca

SEQ ID NO: 1806831 - DNA, 15 bp, Homo sapiens
gctgctgagggacag

SEQ ID NO: 1806832 - DNA, 15 bp, Homo sapiens
ctgctgagggacaga

SEQ ID NO: 1806833 - DNA, 15 bp, Homo sapiens
tgctgagggacagaa

SEQ ID NO: 1806834 - DNA, 15 bp, Homo sapiens
gctgagggacagaac

SEQ ID NO: 1806835 - DNA, 15 bp, Homo sapiens
ctgagggacagaacc

SEQ ID NO: 1806836 - DNA, 15 bp, Homo sapiens
tgagggacagaacct

SEQ ID NO: 1806837 - DNA, 15 bp, Homo sapiens
gagggacagaacctc

SEQ ID NO: 1806838 - DNA, 15 bp, Homo sapiens
agggacagaacctcc

SEQ ID NO: 1806839 - DNA, 15 bp, Homo sapiens
gggacagaacctcct

SEQ ID NO: 1806840 - DNA, 15 bp, Homo sapiens
ggacagaacctcctc

SEQ ID NO: 1806841 - DNA, 15 bp, Homo sapiens
cagaacctcctcagt

SEQ ID NO: 1806842 - DNA, 15 bp, Homo sapiens
agaacctcctcagtc

SEQ ID NO: 1806843 - DNA, 15 bp, Homo sapiens
gaacctcctcagtcg

SEQ ID NO: 1806844 - DNA, 15 bp, Homo sapiens
aacctcctcagtcgt

SEQ ID NO: 1806845 - DNA, 15 bp, Homo sapiens
acctcctcagtcgtc

SEQ ID NO: 1806846 - DNA, 15 bp, Homo sapiens
cctcctcagtcgtct

SEQ ID NO: 1806847 - DNA, 15 bp, Homo sapiens
ctcctcagtcgtctt

SEQ ID NO: 1806848 - DNA, 15 bp, Homo sapiens
tcctcagtcgtcttt

SEQ ID NO: 1806849 - DNA, 15 bp, Homo sapiens
cctcagtcgtctttt

SEQ ID NO: 1806850 - DNA, 15 bp, Homo sapiens
ctcagtcgtcttttt

SEQ ID NO: 1806851 - DNA, 15 bp, Homo sapiens
tcagtcgtctttttt

SEQ ID NO: 1806852 - DNA, 15 bp, Homo sapiens
cagtcgtcttttttt

SEQ ID NO: 1806853 - DNA, 15 bp, Homo sapiens
agtcgtctttttttt

SEQ ID NO: 1806854 - DNA, 15 bp, Homo sapiens
gtcgtcttttttttc

SEQ ID NO: 1806855 - DNA, 15 bp, Homo sapiens
tcgtcttttttttcc

SEQ ID NO: 1806856 - DNA, 15 bp, Homo sapiens
cgtcttttttttcct

SEQ ID NO: 1806857 - DNA, 15 bp, Homo sapiens
gtcttttttttcctc

SEQ ID NO: 1806858 - DNA, 15 bp, Homo sapiens
tcttttttttcctca

SEQ ID NO: 1806859 - DNA, 15 bp, Homo sapiens
cttttttttcctcac

SEQ ID NO: 1806860 - DNA, 15 bp, Homo sapiens
ttttttttcctcaca

SEQ ID NO: 1806861 - DNA, 15 bp, Homo sapiens
tttttttcctcacat

SEQ ID NO: 1806862 - DNA, 15 bp, Homo sapiens
ttttttcctcacatc

SEQ ID NO: 1806863 - DNA, 15 bp, Homo sapiens
tttttcctcacatct

SEQ ID NO: 1806864 - DNA, 15 bp, Homo sapiens
ttttcctcacatcta

SEQ ID NO: 1806865 - DNA, 15 bp, Homo sapiens
tttcctcacatctaa

SEQ ID NO: 1806866 - DNA, 15 bp, Homo sapiens
ttcctcacatctaat

SEQ ID NO: 1806867 - DNA, 15 bp, Homo sapiens
tcctcacatctaatc

SEQ ID NO: 1806868 - DNA, 15 bp, Homo sapiens
cctcacatctaatcc

SEQ ID NO: 1806869 - DNA, 15 bp, Homo sapiens
ctcacatctaatcca

SEQ ID NO: 1806870 - DNA, 15 bp, Homo sapiens
tcacatctaatccat

SEQ ID NO: 1806871 - DNA, 15 bp, Homo sapiens
cacatctaatccatc

SEQ ID NO: 1806872 - DNA, 15 bp, Homo sapiens
acatctaatccatcc

SEQ ID NO: 1806873 - DNA, 15 bp, Homo sapiens
catctaatccatccg

SEQ ID NO: 1806874 - DNA, 15 bp, Homo sapiens
atctaatccatccgc

SEQ ID NO: 1806875 - DNA, 15 bp, Homo sapiens
tctaatccatccgca

SEQ ID NO: 1806876 - DNA, 15 bp, Homo sapiens
ctaatccatccgcac

SEQ ID NO: 1806877 - DNA, 15 bp, Homo sapiens
taatccatccgcaca

SEQ ID NO: 1806878 - DNA, 15 bp, Homo sapiens
aatccatccgcacat

SEQ ID NO: 1806879 - DNA, 15 bp, Homo sapiens
atccatccgcacatc

SEQ ID NO: 1806880 - DNA, 15 bp, Homo sapiens
tccatccgcacatcc

SEQ ID NO: 1806881 - DNA, 15 bp, Homo sapiens
ccatccgcacatcct

SEQ ID NO: 1806882 - DNA, 15 bp, Homo sapiens
catccgcacatcctg

SEQ ID NO: 1806883 - DNA, 15 bp, Homo sapiens
atccgcacatcctgt

SEQ ID NO: 1806884 - DNA, 15 bp, Homo sapiens
tccgcacatcctgtt

SEQ ID NO: 1806885 - DNA, 15 bp, Homo sapiens
ccgcacatcctgttg

SEQ ID NO: 1806886 - DNA, 15 bp, Homo sapiens
cgcacatcctgttgg

SEQ ID NO: 1806887 - DNA, 15 bp, Homo sapiens
gcacatcctgttggc

SEQ ID NO: 1806888 - DNA, 15 bp, Homo sapiens
cacatcctgttggct

SEQ ID NO: 1806889 - DNA, 15 bp, Homo sapiens
acatcctgttggctc

SEQ ID NO: 1806890 - DNA, 15 bp, Homo sapiens
catcctgttggctct

SEQ ID NO: 1806891 - DNA, 15 bp, Homo sapiens
atcctgttggctcta

SEQ ID NO: 1806892 - DNA, 15 bp, Homo sapiens
tcctgttggctctac

SEQ ID NO: 1806893 - DNA, 15 bp, Homo sapiens
cctgttggctctact

SEQ ID NO: 1806894 - DNA, 15 bp, Homo sapiens
ctgttggctctactt

SEQ ID NO: 1806895 - DNA, 15 bp, Homo sapiens
tgttggctctacttt

SEQ ID NO: 1806896 - DNA, 15 bp, Homo sapiens
gttggctctactttc

SEQ ID NO: 1806897 - DNA, 15 bp, Homo sapiens
ttggctctactttca

SEQ ID NO: 1806898 - DNA, 15 bp, Homo sapiens
tggctctactttcaa

SEQ ID NO: 1806899 - DNA, 15 bp, Homo sapiens
ggctctactttcaaa

SEQ ID NO: 1806900 - DNA, 15 bp, Homo sapiens
gctctactttcaaaa

SEQ ID NO: 1806901 - DNA, 15 bp, Homo sapiens
ctctactttcaaaat

SEQ ID NO: 1806902 - DNA, 15 bp, Homo sapiens
tctactttcaaaatg

SEQ ID NO: 1806903 - DNA, 15 bp, Homo sapiens
ctactttcaaaatgt

SEQ ID NO: 1806904 - DNA, 15 bp, Homo sapiens
tactttcaaaatgta

SEQ ID NO: 1806905 - DNA, 15 bp, Homo sapiens
actttcaaaatgtat

SEQ ID NO: 1806906 - DNA, 15 bp, Homo sapiens
ctttcaaaatgtatt

SEQ ID NO: 1806907 - DNA, 15 bp, Homo sapiens
tttcaaaatgtattc

SEQ ID NO: 1806908 - DNA, 15 bp, Homo sapiens
ttcaaaatgtattca

SEQ ID NO: 1806909 - DNA, 15 bp, Homo sapiens
tcaaaatgtattcaa

SEQ ID NO: 1806910 - DNA, 15 bp, Homo sapiens
caaaatgtattcaaa

SEQ ID NO: 1806911 - DNA, 15 bp, Homo sapiens
aaaatgtattcaaaa

SEQ ID NO: 1806912 - DNA, 15 bp, Homo sapiens
aaatgtattcaaaat

SEQ ID NO: 1806913 - DNA, 15 bp, Homo sapiens
aatgtattcaaaatc

SEQ ID NO: 1806914 - DNA, 15 bp, Homo sapiens
atgtattcaaaatct

SEQ ID NO: 1806915 - DNA, 15 bp, Homo sapiens
tgtattcaaaatctt

SEQ ID NO: 1806916 - DNA, 15 bp, Homo sapiens
gtattcaaaatctta

SEQ ID NO: 1806917 - DNA, 15 bp, Homo sapiens
tattcaaaatcttaa

SEQ ID NO: 1806918 - DNA, 15 bp, Homo sapiens
attcaaaatcttaac

SEQ ID NO: 1806919 - DNA, 15 bp, Homo sapiens
ttcaaaatcttaacc

SEQ ID NO: 1806920 - DNA, 15 bp, Homo sapiens
tcaaaatcttaacca

SEQ ID NO: 1806921 - DNA, 15 bp, Homo sapiens
caaaatcttaaccac

SEQ ID NO: 1806922 - DNA, 15 bp, Homo sapiens
aaaatcttaaccact

SEQ ID NO: 1806923 - DNA, 15 bp, Homo sapiens
aaatcttaaccactt

SEQ ID NO: 1806924 - DNA, 15 bp, Homo sapiens
aatcttaaccacttt

SEQ ID NO: 1806925 - DNA, 15 bp, Homo sapiens
atcttaaccactttt

SEQ ID NO: 1806926 - DNA, 15 bp, Homo sapiens
tcttaaccacttttt

SEQ ID NO: 1806927 - DNA, 15 bp, Homo sapiens
cttaaccacttttta

SEQ ID NO: 1806928 - DNA, 15 bp, Homo sapiens
ttaaccactttttac

SEQ ID NO: 1806929 - DNA, 15 bp, Homo sapiens
taaccactttttacc

SEQ ID NO: 1806930 - DNA, 15 bp, Homo sapiens
aaccactttttacca

SEQ ID NO: 1806931 - DNA, 15 bp, Homo sapiens
accactttttaccat

SEQ ID NO: 1806932 - DNA, 15 bp, Homo sapiens
ccactttttaccatc

SEQ ID NO: 1806933 - DNA, 15 bp, Homo sapiens
cactttttaccatcc

SEQ ID NO: 1806934 - DNA, 15 bp, Homo sapiens
actttttaccatccc

SEQ ID NO: 1806935 - DNA, 15 bp, Homo sapiens
ctttttaccatcccc

SEQ ID NO: 1806936 - DNA, 15 bp, Homo sapiens
tttttaccatcccca

SEQ ID NO: 1806937 - DNA, 15 bp, Homo sapiens
ttttaccatccccac

SEQ ID NO: 1806938 - DNA, 15 bp, Homo sapiens
tttaccatccccaca

SEQ ID NO: 1806939 - DNA, 15 bp, Homo sapiens
ttaccatccccacag

SEQ ID NO: 1806940 - DNA, 15 bp, Homo sapiens
taccatccccacagg

SEQ ID NO: 1806941 - DNA, 15 bp, Homo sapiens
accatccccacaggt

SEQ ID NO: 1806942 - DNA, 15 bp, Homo sapiens
ccatccccacaggtg

SEQ ID NO: 1806943 - DNA, 15 bp, Homo sapiens
catccccacaggtga

SEQ ID NO: 1806944 - DNA, 15 bp, Homo sapiens
atccccacaggtgat

SEQ ID NO: 1806945 - DNA, 15 bp, Homo sapiens
tccccacaggtgata

SEQ ID NO: 1806946 - DNA, 15 bp, Homo sapiens
ccccacaggtgataa

SEQ ID NO: 1806947 - DNA, 15 bp, Homo sapiens
cccacaggtgataac

SEQ ID NO: 1806948 - DNA, 15 bp, Homo sapiens
ccacaggtgataact

SEQ ID NO: 1806949 - DNA, 15 bp, Homo sapiens
cacaggtgataactt

SEQ ID NO: 1806950 - DNA, 15 bp, Homo sapiens
acaggtgataacttg

SEQ ID NO: 1806951 - DNA, 15 bp, Homo sapiens
caggtgataacttgg

SEQ ID NO: 1806952 - DNA, 15 bp, Homo sapiens
aggtgataacttgga

SEQ ID NO: 1806953 - DNA, 15 bp, Homo sapiens
ggtgataacttggac

SEQ ID NO: 1806954 - DNA, 15 bp, Homo sapiens
gtgataacttggacc

SEQ ID NO: 1806955 - DNA, 15 bp, Homo sapiens
tgataacttggacca

SEQ ID NO: 1806956 - DNA, 15 bp, Homo sapiens
gataacttggaccaa

SEQ ID NO: 1806957 - DNA, 15 bp, Homo sapiens
ataacttggaccaat

SEQ ID NO: 1806958 - DNA, 15 bp, Homo sapiens
taacttggaccaatc

SEQ ID NO: 1806959 - DNA, 15 bp, Homo sapiens
aacttggaccaatcc

SEQ ID NO: 1806960 - DNA, 15 bp, Homo sapiens
acttggaccaatcca

SEQ ID NO: 1806961 - DNA, 15 bp, Homo sapiens
cttggaccaatccac

SEQ ID NO: 1806962 - DNA, 15 bp, Homo sapiens
ttggaccaatccacc

SEQ ID NO: 1806963 - DNA, 15 bp, Homo sapiens
tggaccaatccacca

SEQ ID NO: 1806964 - DNA, 15 bp, Homo sapiens
ggaccaatccaccat

SEQ ID NO: 1806965 - DNA, 15 bp, Homo sapiens
gaccaatccaccatc

SEQ ID NO: 1806966 - DNA, 15 bp, Homo sapiens
accaatccaccatca

SEQ ID NO: 1806967 - DNA, 15 bp, Homo sapiens
ccaatccaccatcat

SEQ ID NO: 1806968 - DNA, 15 bp, Homo sapiens
caatccaccatcatc

SEQ ID NO: 1806969 - DNA, 15 bp, Homo sapiens
aatccaccatcatca

SEQ ID NO: 1806970 - DNA, 15 bp, Homo sapiens
atccaccatcatcac

SEQ ID NO: 1806971 - DNA, 15 bp, Homo sapiens
tccaccatcatcact

SEQ ID NO: 1806972 - DNA, 15 bp, Homo sapiens
ccaccatcatcactt

SEQ ID NO: 1806973 - DNA, 15 bp, Homo sapiens
caccatcatcactta

SEQ ID NO: 1806974 - DNA, 15 bp, Homo sapiens
accatcatcacttac

SEQ ID NO: 1806975 - DNA, 15 bp, Homo sapiens
ccatcatcacttact

SEQ ID NO: 1806976 - DNA, 15 bp, Homo sapiens
catcatcacttactg

SEQ ID NO: 1806977 - DNA, 15 bp, Homo sapiens
atcatcacttactgg

SEQ ID NO: 1806978 - DNA, 15 bp, Homo sapiens
tcatcacttactgga

SEQ ID NO: 1806979 - DNA, 15 bp, Homo sapiens
catcacttactggat

SEQ ID NO: 1806980 - DNA, 15 bp, Homo sapiens
atcacttactggatt

SEQ ID NO: 1806981 - DNA, 15 bp, Homo sapiens
tcacttactggatta

SEQ ID NO: 1806982 - DNA, 15 bp, Homo sapiens
cacttactggattat

SEQ ID NO: 1806983 - DNA, 15 bp, Homo sapiens
acttactggattata

SEQ ID NO: 1806984 - DNA, 15 bp, Homo sapiens
cttactggattatac

SEQ ID NO: 1806985 - DNA, 15 bp, Homo sapiens
ttactggattataca

SEQ ID NO: 1806986 - DNA, 15 bp, Homo sapiens
tactggattatacag

SEQ ID NO: 1806987 - DNA, 15 bp, Homo sapiens
actggattatacagc

SEQ ID NO: 1806988 - DNA, 15 bp, Homo sapiens
ctggattatacagcc

SEQ ID NO: 1806989 - DNA, 15 bp, Homo sapiens
tggattatacagcct

SEQ ID NO: 1806990 - DNA, 15 bp, Homo sapiens
ggattatacagcctc

SEQ ID NO: 1806991 - DNA, 15 bp, Homo sapiens
gattatacagcctcc

SEQ ID NO: 1806992 - DNA, 15 bp, Homo sapiens
attatacagcctcct

SEQ ID NO: 1806993 - DNA, 15 bp, Homo sapiens
ttatacagcctccta

SEQ ID NO: 1806994 - DNA, 15 bp, Homo sapiens
tatacagcctcctaa

SEQ ID NO: 1806995 - DNA, 15 bp, Homo sapiens
atacagcctcctaag

SEQ ID NO: 1806996 - DNA, 15 bp, Homo sapiens
tacagcctcctaagt

SEQ ID NO: 1806997 - DNA, 15 bp, Homo sapiens
acagcctcctaagta

SEQ ID NO: 1806998 - DNA, 15 bp, Homo sapiens
gcctcctaagtaccc

SEQ ID NO: 1806999 - DNA, 15 bp, Homo sapiens
cctcctaagtaccct

SEQ ID NO: 1807000 - DNA, 15 bp, Homo sapiens
ctcctaagtaccctc

SEQ ID NO: 1807001 - DNA, 15 bp, Homo sapiens
tcctaagtaccctcc

SEQ ID NO: 1807002 - DNA, 15 bp, Homo sapiens
cctaagtaccctcct

SEQ ID NO: 1807003 - DNA, 15 bp, Homo sapiens
ctaagtaccctcctt

SEQ ID NO: 1807004 - DNA, 15 bp, Homo sapiens
taagtaccctccttc

SEQ ID NO: 1807005 - DNA, 15 bp, Homo sapiens
aagtaccctccttca

SEQ ID NO: 1807006 - DNA, 15 bp, Homo sapiens
agtaccctccttcac

SEQ ID NO: 1807007 - DNA, 15 bp, Homo sapiens
gtaccctccttcaca

SEQ ID NO: 1807008 - DNA, 15 bp, Homo sapiens
taccctccttcacac

SEQ ID NO: 1807009 - DNA, 15 bp, Homo sapiens
accctccttcacaca

SEQ ID NO: 1807010 - DNA, 15 bp, Homo sapiens
ccctccttcacacac

SEQ ID NO: 1807011 - DNA, 15 bp, Homo sapiens
cctccttcacacaca

SEQ ID NO: 1807012 - DNA, 15 bp, Homo sapiens
ctccttcacacacac

SEQ ID NO: 1807013 - DNA, 15 bp, Homo sapiens
tccttcacacacaca

SEQ ID NO: 1807014 - DNA, 15 bp, Homo sapiens
ccttcacacacacac

SEQ ID NO: 1807015 - DNA, 15 bp, Homo sapiens
cttcacacacacaca

SEQ ID NO: 1807016 - DNA, 15 bp, Homo sapiens
ttcacacacacacac

SEQ ID NO: 1807017 - DNA, 15 bp, Homo sapiens
acacacacacactct

SEQ ID NO: 1807018 - DNA, 15 bp, Homo sapiens
cacacacacactctt

SEQ ID NO: 1807019 - DNA, 15 bp, Homo sapiens
acacacacactcttc

SEQ ID NO: 1807020 - DNA, 15 bp, Homo sapiens
cacacacactcttct

SEQ ID NO: 1807021 - DNA, 15 bp, Homo sapiens
acacacactcttctc

SEQ ID NO: 1807022 - DNA, 15 bp, Homo sapiens
cacacactcttctct

SEQ ID NO: 1807023 - DNA, 15 bp, Homo sapiens
acacactcttctctc

SEQ ID NO: 1807024 - DNA, 15 bp, Homo sapiens
cacactcttctctct

SEQ ID NO: 1807025 - DNA, 15 bp, Homo sapiens
acactcttctctctc

SEQ ID NO: 1807026 - DNA, 15 bp, Homo sapiens
cactcttctctctct

SEQ ID NO: 1807027 - DNA, 15 bp, Homo sapiens
actcttctctctctc

SEQ ID NO: 1807028 - DNA, 15 bp, Homo sapiens
ctcttctctctctca

SEQ ID NO: 1807029 - DNA, 15 bp, Homo sapiens
tcttctctctctcac

SEQ ID NO: 1807030 - DNA, 15 bp, Homo sapiens
cttctctctctcacc

SEQ ID NO: 1807031 - DNA, 15 bp, Homo sapiens
ttctctctctcaccc

SEQ ID NO: 1807032 - DNA, 15 bp, Homo sapiens
tctctctctcaccct

SEQ ID NO: 1807033 - DNA, 15 bp, Homo sapiens
ctctctctcaccctc

SEQ ID NO: 1807034 - DNA, 15 bp, Homo sapiens
tctctctcaccctct

SEQ ID NO: 1807035 - DNA, 15 bp, Homo sapiens
ctctctcaccctctc

SEQ ID NO: 1807036 - DNA, 15 bp, Homo sapiens
tctctcaccctctct

SEQ ID NO: 1807037 - DNA, 15 bp, Homo sapiens
ctctcaccctctctc

SEQ ID NO: 1807038 - DNA, 15 bp, Homo sapiens
tctcaccctctctct

SEQ ID NO: 1807039 - DNA, 15 bp, Homo sapiens
ctcaccctctctctc

SEQ ID NO: 1807040 - DNA, 15 bp, Homo sapiens
tcaccctctctctct

SEQ ID NO: 1807041 - DNA, 15 bp, Homo sapiens
caccctctctctctc

SEQ ID NO: 1807042 - DNA, 15 bp, Homo sapiens
accctctctctctct

SEQ ID NO: 1807043 - DNA, 15 bp, Homo sapiens
ctctctctctctcca

SEQ ID NO: 1807044 - DNA, 15 bp, Homo sapiens
tctctctctctccac

SEQ ID NO: 1807045 - DNA, 15 bp, Homo sapiens
ctctctctctccaca

SEQ ID NO: 1807046 - DNA, 15 bp, Homo sapiens
tctctctctccacac

SEQ ID NO: 1807047 - DNA, 15 bp, Homo sapiens
ctctctctccacaca

SEQ ID NO: 1807048 - DNA, 15 bp, Homo sapiens
tctctctccacacac

SEQ ID NO: 1807049 - DNA, 15 bp, Homo sapiens
ctctctccacacaca

SEQ ID NO: 1807050 - DNA, 15 bp, Homo sapiens
tctctccacacacac

SEQ ID NO: 1807051 - DNA, 15 bp, Homo sapiens
ctctccacacacaca

SEQ ID NO: 1807052 - DNA, 15 bp, Homo sapiens
tctccacacacacac

SEQ ID NO: 1807053 - DNA, 15 bp, Homo sapiens
ctccacacacacaca

SEQ ID NO: 1807054 - DNA, 15 bp, Homo sapiens
tccacacacacacac

SEQ ID NO: 1807055 - DNA, 15 bp, Homo sapiens
cacacacacactctc

SEQ ID NO: 1807056 - DNA, 15 bp, Homo sapiens
acacacacactctct

SEQ ID NO: 1807057 - DNA, 15 bp, Homo sapiens
cacacacactctctc

SEQ ID NO: 1807058 - DNA, 15 bp, Homo sapiens
acacacactctctct

SEQ ID NO: 1807059 - DNA, 15 bp, Homo sapiens
cacacactctctctc

SEQ ID NO: 1807060 - DNA, 15 bp, Homo sapiens
acacactctctctct

SEQ ID NO: 1807061 - DNA, 15 bp, Homo sapiens
cacactctctctctc

SEQ ID NO: 1807062 - DNA, 15 bp, Homo sapiens
acactctctctctct

SEQ ID NO: 1807063 - DNA, 15 bp, Homo sapiens
cactctctctctctc

SEQ ID NO: 1807064 - DNA, 15 bp, Homo sapiens
actctctctctctct

SEQ ID NO: 1807065 - DNA, 15 bp, Homo sapiens
tctctctctctcttc

SEQ ID NO: 1807066 - DNA, 15 bp, Homo sapiens
ctctctctctcttct

SEQ ID NO: 1807067 - DNA, 15 bp, Homo sapiens
tctctctctcttctc

SEQ ID NO: 1807068 - DNA, 15 bp, Homo sapiens
ctctctctcttctct

SEQ ID NO: 1807069 - DNA, 15 bp, Homo sapiens
tctctctcttctctt

SEQ ID NO: 1807070 - DNA, 15 bp, Homo sapiens
ctctctcttctcttc

SEQ ID NO: 1807071 - DNA, 15 bp, Homo sapiens
tctctcttctcttct

SEQ ID NO: 1807072 - DNA, 15 bp, Homo sapiens
ctctcttctcttctc

SEQ ID NO: 1807073 - DNA, 15 bp, Homo sapiens
tctcttctcttctct

SEQ ID NO: 1807074 - DNA, 15 bp, Homo sapiens
ctcttctcttctctc

SEQ ID NO: 1807075 - DNA, 15 bp, Homo sapiens
tcttctcttctctct

SEQ ID NO: 1807076 - DNA, 15 bp, Homo sapiens
cttctcttctctctc

SEQ ID NO: 1807077 - DNA, 15 bp, Homo sapiens
ttctcttctctctct

SEQ ID NO: 1807078 - DNA, 15 bp, Homo sapiens
tctcttctctctctc

SEQ ID NO: 1807079 - DNA, 15 bp, Homo sapiens
ctctctctctcccta

SEQ ID NO: 1807080 - DNA, 15 bp, Homo sapiens
tctctctctccctac

SEQ ID NO: 1807081 - DNA, 15 bp, Homo sapiens
ctctctctccctacc

SEQ ID NO: 1807082 - DNA, 15 bp, Homo sapiens
tctctctccctacct

SEQ ID NO: 1807083 - DNA, 15 bp, Homo sapiens
ctctctccctacctc

SEQ ID NO: 1807084 - DNA, 15 bp, Homo sapiens
tctctccctacctcc

SEQ ID NO: 1807085 - DNA, 15 bp, Homo sapiens
ctctccctacctccc

SEQ ID NO: 1807086 - DNA, 15 bp, Homo sapiens
tctccctacctccct

SEQ ID NO: 1807087 - DNA, 15 bp, Homo sapiens
ctccctacctccctc

SEQ ID NO: 1807088 - DNA, 15 bp, Homo sapiens
tccctacctccctcc

SEQ ID NO: 1807089 - DNA, 15 bp, Homo sapiens
ccctacctccctccc

SEQ ID NO: 1807090 - DNA, 15 bp, Homo sapiens
cctacctccctccct

SEQ ID NO: 1807091 - DNA, 15 bp, Homo sapiens
ctacctccctccctc

SEQ ID NO: 1807092 - DNA, 15 bp, Homo sapiens
tacctccctccctcc

SEQ ID NO: 1807093 - DNA, 15 bp, Homo sapiens
acctccctccctccc

SEQ ID NO: 1807094 - DNA, 15 bp, Homo sapiens
ccctccctccctcct

SEQ ID NO: 1807095 - DNA, 15 bp, Homo sapiens
cctccctccctcctc

SEQ ID NO: 1807096 - DNA, 15 bp, Homo sapiens
ctccctccctcctca

SEQ ID NO: 1807097 - DNA, 15 bp, Homo sapiens
tccctccctcctcaa

SEQ ID NO: 1807098 - DNA, 15 bp, Homo sapiens
ccctccctcctcaac

SEQ ID NO: 1807099 - DNA, 15 bp, Homo sapiens
cctccctcctcaaca

SEQ ID NO: 1807100 - DNA, 15 bp, Homo sapiens
ctccctcctcaacac

SEQ ID NO: 1807101 - DNA, 15 bp, Homo sapiens
tccctcctcaacaca

SEQ ID NO: 1807102 - DNA, 15 bp, Homo sapiens
ccctcctcaacacag

SEQ ID NO: 1807103 - DNA, 15 bp, Homo sapiens
cctcctcaacacagc

SEQ ID NO: 1807104 - DNA, 15 bp, Homo sapiens
ctcctcaacacagca

SEQ ID NO: 1807105 - DNA, 15 bp, Homo sapiens
tcctcaacacagcag

SEQ ID NO: 1807106 - DNA, 15 bp, Homo sapiens
cctcaacacagcagc

SEQ ID NO: 1807107 - DNA, 15 bp, Homo sapiens
ctcaacacagcagcc

SEQ ID NO: 1807108 - DNA, 15 bp, Homo sapiens
tcaacacagcagcca

SEQ ID NO: 1807109 - DNA, 15 bp, Homo sapiens
caacacagcagccag

SEQ ID NO: 1807110 - DNA, 15 bp, Homo sapiens
aacacagcagccagg

SEQ ID NO: 1807111 - DNA, 15 bp, Homo sapiens
acacagcagccagga

SEQ ID NO: 1807112 - DNA, 15 bp, Homo sapiens
cacagcagccaggag

SEQ ID NO: 1807113 - DNA, 15 bp, Homo sapiens
acagcagccaggagg

SEQ ID NO: 1807114 - DNA, 15 bp, Homo sapiens
cagcagccaggaggc

SEQ ID NO: 1807115 - DNA, 15 bp, Homo sapiens
agcagccaggaggca

SEQ ID NO: 1807116 - DNA, 15 bp, Homo sapiens
gcagccaggaggcag

SEQ ID NO: 1807117 - DNA, 15 bp, Homo sapiens
cagccaggaggcagg

SEQ ID NO: 1807118 - DNA, 15 bp, Homo sapiens
agccaggaggcagga

SEQ ID NO: 1807119 - DNA, 15 bp, Homo sapiens
gccaggaggcaggag

SEQ ID NO: 1807120 - DNA, 15 bp, Homo sapiens
ccaggaggcaggagg

SEQ ID NO: 1807121 - DNA, 15 bp, Homo sapiens
caggaggcaggagga

SEQ ID NO: 1807122 - DNA, 15 bp, Homo sapiens
aggaggcaggaggat

SEQ ID NO: 1807123 - DNA, 15 bp, Homo sapiens
ggaggcaggaggatt

SEQ ID NO: 1807124 - DNA, 15 bp, Homo sapiens
gaggcaggaggatta

SEQ ID NO: 1807125 - DNA, 15 bp, Homo sapiens
aggcaggaggattac

SEQ ID NO: 1807126 - DNA, 15 bp, Homo sapiens
ggcaggaggattact

SEQ ID NO: 1807127 - DNA, 15 bp, Homo sapiens
gcaggaggattactt

SEQ ID NO: 1807128 - DNA, 15 bp, Homo sapiens
caggaggattacttc

SEQ ID NO: 1807129 - DNA, 15 bp, Homo sapiens
aggaggattacttca

SEQ ID NO: 1807130 - DNA, 15 bp, Homo sapiens
ggaggattacttcaa

SEQ ID NO: 1807131 - DNA, 15 bp, Homo sapiens
gaggattacttcaaa

SEQ ID NO: 1807132 - DNA, 15 bp, Homo sapiens
aggattacttcaaat

SEQ ID NO: 1807133 - DNA, 15 bp, Homo sapiens
ggattacttcaaatg

SEQ ID NO: 1807134 - DNA, 15 bp, Homo sapiens
gattacttcaaatgc

SEQ ID NO: 1807135 - DNA, 15 bp, Homo sapiens
attacttcaaatgcc

SEQ ID NO: 1807136 - DNA, 15 bp, Homo sapiens
ttacttcaaatgccc

SEQ ID NO: 1807137 - DNA, 15 bp, Homo sapiens
tacttcaaatgccca

SEQ ID NO: 1807138 - DNA, 15 bp, Homo sapiens
acttcaaatgcccat

SEQ ID NO: 1807139 - DNA, 15 bp, Homo sapiens
cttcaaatgcccatc

SEQ ID NO: 1807140 - DNA, 15 bp, Homo sapiens
ttcaaatgcccatca

SEQ ID NO: 1807141 - DNA, 15 bp, Homo sapiens
tcaaatgcccatcat

SEQ ID NO: 1807142 - DNA, 15 bp, Homo sapiens
caaatgcccatcata

SEQ ID NO: 1807143 - DNA, 15 bp, Homo sapiens
aaatgcccatcatat

SEQ ID NO: 1807144 - DNA, 15 bp, Homo sapiens
aatgcccatcatatc

SEQ ID NO: 1807145 - DNA, 15 bp, Homo sapiens
atgcccatcatatct

SEQ ID NO: 1807146 - DNA, 15 bp, Homo sapiens
tgcccatcatatctg

SEQ ID NO: 1807147 - DNA, 15 bp, Homo sapiens
gcccatcatatctgc

SEQ ID NO: 1807148 - DNA, 15 bp, Homo sapiens
cccatcatatctgct

SEQ ID NO: 1807149 - DNA, 15 bp, Homo sapiens
ccatcatatctgctc

SEQ ID NO: 1807150 - DNA, 15 bp, Homo sapiens
catcatatctgctcc

SEQ ID NO: 1807151 - DNA, 15 bp, Homo sapiens
atcatatctgctcct

SEQ ID NO: 1807152 - DNA, 15 bp, Homo sapiens
tcatatctgctcctc

SEQ ID NO: 1807153 - DNA, 15 bp, Homo sapiens
catatctgctcctct

SEQ ID NO: 1807154 - DNA, 15 bp, Homo sapiens
atatctgctcctctc

SEQ ID NO: 1807155 - DNA, 15 bp, Homo sapiens
tatctgctcctctcc

SEQ ID NO: 1807156 - DNA, 15 bp, Homo sapiens
atctgctcctctcca

SEQ ID NO: 1807157 - DNA, 15 bp, Homo sapiens
tctgctcctctccaa

SEQ ID NO: 1807158 - DNA, 15 bp, Homo sapiens
ctgctcctctccaaa

SEQ ID NO: 1807159 - DNA, 15 bp, Homo sapiens
tgctcctctccaaac

SEQ ID NO: 1807160 - DNA, 15 bp, Homo sapiens
gctcctctccaaacc

SEQ ID NO: 1807161 - DNA, 15 bp, Homo sapiens
ctcctctccaaaccc

SEQ ID NO: 1807162 - DNA, 15 bp, Homo sapiens
tcctctccaaaccct

SEQ ID NO: 1807163 - DNA, 15 bp, Homo sapiens
cctctccaaaccctc

SEQ ID NO: 1807164 - DNA, 15 bp, Homo sapiens
ctctccaaaccctct

SEQ ID NO: 1807165 - DNA, 15 bp, Homo sapiens
tctccaaaccctctg

SEQ ID NO: 1807166 - DNA, 15 bp, Homo sapiens
ctccaaaccctctga

SEQ ID NO: 1807167 - DNA, 15 bp, Homo sapiens
tccaaaccctctgat

SEQ ID NO: 1807168 - DNA, 15 bp, Homo sapiens
ccaaaccctctgatg

SEQ ID NO: 1807169 - DNA, 15 bp, Homo sapiens
caaaccctctgatgg

SEQ ID NO: 1807170 - DNA, 15 bp, Homo sapiens
aaaccctctgatggc

SEQ ID NO: 1807171 - DNA, 15 bp, Homo sapiens
aaccctctgatggcc

SEQ ID NO: 1807172 - DNA, 15 bp, Homo sapiens
accctctgatggcca

SEQ ID NO: 1807173 - DNA, 15 bp, Homo sapiens
ccctctgatggccac

SEQ ID NO: 1807174 - DNA, 15 bp, Homo sapiens
cctctgatggccact

SEQ ID NO: 1807175 - DNA, 15 bp, Homo sapiens
ctctgatggccactc

SEQ ID NO: 1807176 - DNA, 15 bp, Homo sapiens
tctgatggccactca

SEQ ID NO: 1807177 - DNA, 15 bp, Homo sapiens
ctgatggccactcac

SEQ ID NO: 1807178 - DNA, 15 bp, Homo sapiens
tgatggccactcacc

SEQ ID NO: 1807179 - DNA, 15 bp, Homo sapiens
gatggccactcacct

SEQ ID NO: 1807180 - DNA, 15 bp, Homo sapiens
atggccactcacctt

SEQ ID NO: 1807181 - DNA, 15 bp, Homo sapiens
tggccactcaccttg

SEQ ID NO: 1807182 - DNA, 15 bp, Homo sapiens
ggccactcaccttgg

SEQ ID NO: 1807183 - DNA, 15 bp, Homo sapiens
gccactcaccttgga

SEQ ID NO: 1807184 - DNA, 15 bp, Homo sapiens
ccactcaccttggaa

SEQ ID NO: 1807185 - DNA, 15 bp, Homo sapiens
cactcaccttggaac

SEQ ID NO: 1807186 - DNA, 15 bp, Homo sapiens
actcaccttggaact

SEQ ID NO: 1807187 - DNA, 15 bp, Homo sapiens
ctcaccttggaactc

SEQ ID NO: 1807188 - DNA, 15 bp, Homo sapiens
tcaccttggaactct

SEQ ID NO: 1807189 - DNA, 15 bp, Homo sapiens
caccttggaactctg

SEQ ID NO: 1807190 - DNA, 15 bp, Homo sapiens
accttggaactctga

SEQ ID NO: 1807191 - DNA, 15 bp, Homo sapiens
ccttggaactctgat

SEQ ID NO: 1807192 - DNA, 15 bp, Homo sapiens
cttggaactctgatt

SEQ ID NO: 1807193 - DNA, 15 bp, Homo sapiens
ttggaactctgattc

SEQ ID NO: 1807194 - DNA, 15 bp, Homo sapiens
tggaactctgattcc

SEQ ID NO: 1807195 - DNA, 15 bp, Homo sapiens
ggaactctgattcct

SEQ ID NO: 1807196 - DNA, 15 bp, Homo sapiens
gaactctgattcctg

SEQ ID NO: 1807197 - DNA, 15 bp, Homo sapiens
aactctgattcctga

SEQ ID NO: 1807198 - DNA, 15 bp, Homo sapiens
actctgattcctgaa

SEQ ID NO: 1807199 - DNA, 15 bp, Homo sapiens
ctctgattcctgaaa

SEQ ID NO: 1807200 - DNA, 15 bp, Homo sapiens
tctgattcctgaaac

SEQ ID NO: 1807201 - DNA, 15 bp, Homo sapiens
ctgattcctgaaact

SEQ ID NO: 1807202 - DNA, 15 bp, Homo sapiens
tgattcctgaaactt

SEQ ID NO: 1807203 - DNA, 15 bp, Homo sapiens
gattcctgaaacttg

SEQ ID NO: 1807204 - DNA, 15 bp, Homo sapiens
attcctgaaacttgc

SEQ ID NO: 1807205 - DNA, 15 bp, Homo sapiens
ttcctgaaacttgcc

SEQ ID NO: 1807206 - DNA, 15 bp, Homo sapiens
tcctgaaacttgcct

SEQ ID NO: 1807207 - DNA, 15 bp, Homo sapiens
cctgaaacttgccta

SEQ ID NO: 1807208 - DNA, 15 bp, Homo sapiens
ctgaaacttgcctat

SEQ ID NO: 1807209 - DNA, 15 bp, Homo sapiens
tgaaacttgcctatg

SEQ ID NO: 1807210 - DNA, 15 bp, Homo sapiens
gaaacttgcctatgg

SEQ ID NO: 1807211 - DNA, 15 bp, Homo sapiens
aaacttgcctatgga

SEQ ID NO: 1807212 - DNA, 15 bp, Homo sapiens
aacttgcctatggac

SEQ ID NO: 1807213 - DNA, 15 bp, Homo sapiens
acttgcctatggact

SEQ ID NO: 1807214 - DNA, 15 bp, Homo sapiens
cttgcctatggactc

SEQ ID NO: 1807215 - DNA, 15 bp, Homo sapiens
ttgcctatggactct

SEQ ID NO: 1807216 - DNA, 15 bp, Homo sapiens
tgcctatggactctg

SEQ ID NO: 1807217 - DNA, 15 bp, Homo sapiens
gcctatggactctgc

SEQ ID NO: 1807218 - DNA, 15 bp, Homo sapiens
cctatggactctgca

SEQ ID NO: 1807219 - DNA, 15 bp, Homo sapiens
ctatggactctgcag

SEQ ID NO: 1807220 - DNA, 15 bp, Homo sapiens
tatggactctgcagg

SEQ ID NO: 1807221 - DNA, 15 bp, Homo sapiens
atggactctgcaggc

SEQ ID NO: 1807222 - DNA, 15 bp, Homo sapiens
tggactctgcaggcc

SEQ ID NO: 1807223 - DNA, 15 bp, Homo sapiens
ggactctgcaggccc

SEQ ID NO: 1807224 - DNA, 15 bp, Homo sapiens
ttggataaacttctt

SEQ ID NO: 1807225 - DNA, 15 bp, Homo sapiens
tggataaacttcttt

SEQ ID NO: 1807226 - DNA, 15 bp, Homo sapiens
ggataaacttctttt

SEQ ID NO: 1807227 - DNA, 15 bp, Homo sapiens
gataaacttcttttt

SEQ ID NO: 1807228 - DNA, 15 bp, Homo sapiens
ataaacttctttttt

SEQ ID NO: 1807229 - DNA, 15 bp, Homo sapiens
taaacttcttttttt

SEQ ID NO: 1807230 - DNA, 15 bp, Homo sapiens
aaacttctttttttt

SEQ ID NO: 1807231 - DNA, 15 bp, Homo sapiens
acttctttttttttt

SEQ ID NO: 1807232 - DNA, 15 bp, Homo sapiens
tcactgcagcctctg

SEQ ID NO: 1807233 - DNA, 15 bp, Homo sapiens
cactgcagcctctgc

SEQ ID NO: 1807234 - DNA, 15 bp, Homo sapiens
actgcagcctctgcc

SEQ ID NO: 1807235 - DNA, 15 bp, Homo sapiens
ctgcagcctctgcct

SEQ ID NO: 1807236 - DNA, 15 bp, Homo sapiens
tcctgggttcaagcc

SEQ ID NO: 1807237 - DNA, 15 bp, Homo sapiens
cctgggttcaagcca

SEQ ID NO: 1807238 - DNA, 15 bp, Homo sapiens
ctgggttcaagccac

SEQ ID NO: 1807239 - DNA, 15 bp, Homo sapiens
tgggttcaagccact

SEQ ID NO: 1807240 - DNA, 15 bp, Homo sapiens
gggttcaagccactc

SEQ ID NO: 1807241 - DNA, 15 bp, Homo sapiens
ggttcaagccactct

SEQ ID NO: 1807242 - DNA, 15 bp, Homo sapiens
gttcaagccactctc

SEQ ID NO: 1807243 - DNA, 15 bp, Homo sapiens
ttcaagccactctcc

SEQ ID NO: 1807244 - DNA, 15 bp, Homo sapiens
tcaagccactctcct

SEQ ID NO: 1807245 - DNA, 15 bp, Homo sapiens
caagccactctcctg

SEQ ID NO: 1807246 - DNA, 15 bp, Homo sapiens
aagccactctcctgc

SEQ ID NO: 1807247 - DNA, 15 bp, Homo sapiens
agccactctcctgcc

SEQ ID NO: 1807248 - DNA, 15 bp, Homo sapiens
gccactctcctgcct

SEQ ID NO: 1807249 - DNA, 15 bp, Homo sapiens
ccactctcctgcctc

SEQ ID NO: 1807250 - DNA, 15 bp, Homo sapiens
cactctcctgcctca

SEQ ID NO: 1807251 - DNA, 15 bp, Homo sapiens
actctcctgcctcaa

SEQ ID NO: 1807252 - DNA, 15 bp, Homo sapiens
ctctcctgcctcaac

SEQ ID NO: 1807253 - DNA, 15 bp, Homo sapiens
cctgcctcaacctct

SEQ ID NO: 1807254 - DNA, 15 bp, Homo sapiens
ctgcctcaacctctc

SEQ ID NO: 1807255 - DNA, 15 bp, Homo sapiens
tgcctcaacctctcg

SEQ ID NO: 1807256 - DNA, 15 bp, Homo sapiens
gcctcaacctctcga

SEQ ID NO: 1807257 - DNA, 15 bp, Homo sapiens
cctcaacctctcgag

SEQ ID NO: 1807258 - DNA, 15 bp, Homo sapiens
ctcaacctctcgagt

SEQ ID NO: 1807259 - DNA, 15 bp, Homo sapiens
tcaacctctcgagta

SEQ ID NO: 1807260 - DNA, 15 bp, Homo sapiens
caacctctcgagtag

SEQ ID NO: 1807261 - DNA, 15 bp, Homo sapiens
aacctctcgagtagc

SEQ ID NO: 1807262 - DNA, 15 bp, Homo sapiens
acctctcgagtagct

SEQ ID NO: 1807263 - DNA, 15 bp, Homo sapiens
tctcgagtagctgga

SEQ ID NO: 1807264 - DNA, 15 bp, Homo sapiens
ctcgagtagctggaa

SEQ ID NO: 1807265 - DNA, 15 bp, Homo sapiens
tcgagtagctggaac

SEQ ID NO: 1807266 - DNA, 15 bp, Homo sapiens
ctggaactacaggca

SEQ ID NO: 1807267 - DNA, 15 bp, Homo sapiens
tggaactacaggcat

SEQ ID NO: 1807268 - DNA, 15 bp, Homo sapiens
ggaactacaggcatg

SEQ ID NO: 1807269 - DNA, 15 bp, Homo sapiens
gaactacaggcatgc

SEQ ID NO: 1807270 - DNA, 15 bp, Homo sapiens
aactacaggcatgca

SEQ ID NO: 1807271 - DNA, 15 bp, Homo sapiens
gcatgcaccaccacg

SEQ ID NO: 1807272 - DNA, 15 bp, Homo sapiens
catgcaccaccacgc

SEQ ID NO: 1807273 - DNA, 15 bp, Homo sapiens
atgcaccaccacgcc

SEQ ID NO: 1807274 - DNA, 15 bp, Homo sapiens
ctggctaattttgtt

SEQ ID NO: 1807275 - DNA, 15 bp, Homo sapiens
tggctaattttgttc

SEQ ID NO: 1807276 - DNA, 15 bp, Homo sapiens
ggctaattttgttcg

SEQ ID NO: 1807277 - DNA, 15 bp, Homo sapiens
gctaattttgttcgt

SEQ ID NO: 1807278 - DNA, 15 bp, Homo sapiens
ctaattttgttcgtt

SEQ ID NO: 1807279 - DNA, 15 bp, Homo sapiens
taattttgttcgttt

SEQ ID NO: 1807280 - DNA, 15 bp, Homo sapiens
aattttgttcgtttg

SEQ ID NO: 1807281 - DNA, 15 bp, Homo sapiens
attttgttcgtttgt

SEQ ID NO: 1807282 - DNA, 15 bp, Homo sapiens
ttttgttcgtttgtt

SEQ ID NO: 1807283 - DNA, 15 bp, Homo sapiens
tttgttcgtttgttt

SEQ ID NO: 1807284 - DNA, 15 bp, Homo sapiens
ttgttcgtttgtttg

SEQ ID NO: 1807285 - DNA, 15 bp, Homo sapiens
tgttcgtttgtttgt

SEQ ID NO: 1807286 - DNA, 15 bp, Homo sapiens
gttcgtttgtttgtt

SEQ ID NO: 1807287 - DNA, 15 bp, Homo sapiens
ttcgtttgtttgttt

SEQ ID NO: 1807288 - DNA, 15 bp, Homo sapiens
tcgtttgtttgtttg

SEQ ID NO: 1807289 - DNA, 15 bp, Homo sapiens
cgtttgtttgtttgt

SEQ ID NO: 1807290 - DNA, 15 bp, Homo sapiens
tgagacggagtttct

SEQ ID NO: 1807291 - DNA, 15 bp, Homo sapiens
gagacggagtttctc

SEQ ID NO: 1807292 - DNA, 15 bp, Homo sapiens
agacggagtttctct

SEQ ID NO: 1807293 - DNA, 15 bp, Homo sapiens
gacggagtttctctc

SEQ ID NO: 1807294 - DNA, 15 bp, Homo sapiens
acggagtttctctct

SEQ ID NO: 1807295 - DNA, 15 bp, Homo sapiens
cggagtttctctcta

SEQ ID NO: 1807296 - DNA, 15 bp, Homo sapiens
ggagtttctctctat

SEQ ID NO: 1807297 - DNA, 15 bp, Homo sapiens
gagtttctctctatc

SEQ ID NO: 1807298 - DNA, 15 bp, Homo sapiens
agtttctctctatcg

SEQ ID NO: 1807299 - DNA, 15 bp, Homo sapiens
gtttctctctatcgc

SEQ ID NO: 1807300 - DNA, 15 bp, Homo sapiens
tttctctctatcgcc

SEQ ID NO: 1807301 - DNA, 15 bp, Homo sapiens
ttctctctatcgccc

SEQ ID NO: 1807302 - DNA, 15 bp, Homo sapiens
tctctctatcgccca

SEQ ID NO: 1807303 - DNA, 15 bp, Homo sapiens
ctctctatcgcccag

SEQ ID NO: 1807304 - DNA, 15 bp, Homo sapiens
tctctatcgcccaga

SEQ ID NO: 1807305 - DNA, 15 bp, Homo sapiens
ctctatcgcccagac

SEQ ID NO: 1807306 - DNA, 15 bp, Homo sapiens
tctatcgcccagact

SEQ ID NO: 1807307 - DNA, 15 bp, Homo sapiens
ctatcgcccagactg

SEQ ID NO: 1807308 - DNA, 15 bp, Homo sapiens
tatcgcccagactgg

SEQ ID NO: 1807309 - DNA, 15 bp, Homo sapiens
atcgcccagactgga

SEQ ID NO: 1807310 - DNA, 15 bp, Homo sapiens
tcgcccagactggag

SEQ ID NO: 1807311 - DNA, 15 bp, Homo sapiens
cgcccagactggagt

SEQ ID NO: 1807312 - DNA, 15 bp, Homo sapiens
atgcgccaccacgca

SEQ ID NO: 1807313 - DNA, 15 bp, Homo sapiens
tgcgccaccacgcac

SEQ ID NO: 1807314 - DNA, 15 bp, Homo sapiens
gcgccaccacgcact

SEQ ID NO: 1807315 - DNA, 15 bp, Homo sapiens
cgccaccacgcactg

SEQ ID NO: 1807316 - DNA, 15 bp, Homo sapiens
gccaccacgcactgc

SEQ ID NO: 1807317 - DNA, 15 bp, Homo sapiens
ccaccacgcactgct

SEQ ID NO: 1807318 - DNA, 15 bp, Homo sapiens
caccacgcactgcta

SEQ ID NO: 1807319 - DNA, 15 bp, Homo sapiens
accacgcactgctaa

SEQ ID NO: 1807320 - DNA, 15 bp, Homo sapiens
ccacgcactgctaat

SEQ ID NO: 1807321 - DNA, 15 bp, Homo sapiens
cacgcactgctaatt

SEQ ID NO: 1807322 - DNA, 15 bp, Homo sapiens
acgcactgctaattt

SEQ ID NO: 1807323 - DNA, 15 bp, Homo sapiens
cgcactgctaatttt

SEQ ID NO: 1807324 - DNA, 15 bp, Homo sapiens
gcactgctaattttt

SEQ ID NO: 1807325 - DNA, 15 bp, Homo sapiens
cactgctaatttttg

SEQ ID NO: 1807326 - DNA, 15 bp, Homo sapiens
actgctaatttttgt

SEQ ID NO: 1807327 - DNA, 15 bp, Homo sapiens
ctgctaatttttgta

SEQ ID NO: 1807328 - DNA, 15 bp, Homo sapiens
tgctaatttttgtat

SEQ ID NO: 1807329 - DNA, 15 bp, Homo sapiens
attttagtagagacc

SEQ ID NO: 1807330 - DNA, 15 bp, Homo sapiens
agagaccgggttttg

SEQ ID NO: 1807331 - DNA, 15 bp, Homo sapiens
gagaccgggttttgc

SEQ ID NO: 1807332 - DNA, 15 bp, Homo sapiens
agaccgggttttgcc

SEQ ID NO: 1807333 - DNA, 15 bp, Homo sapiens
gaccgggttttgcca

SEQ ID NO: 1807334 - DNA, 15 bp, Homo sapiens
accgggttttgccat

SEQ ID NO: 1807335 - DNA, 15 bp, Homo sapiens
ccgggttttgccatg

SEQ ID NO: 1807336 - DNA, 15 bp, Homo sapiens
cgggttttgccatgt

SEQ ID NO: 1807337 - DNA, 15 bp, Homo sapiens
ggcctcccagagtgg

SEQ ID NO: 1807338 - DNA, 15 bp, Homo sapiens
gcctcccagagtggt

SEQ ID NO: 1807339 - DNA, 15 bp, Homo sapiens
cctcccagagtggtg

SEQ ID NO: 1807340 - DNA, 15 bp, Homo sapiens
ctcccagagtggtgt

SEQ ID NO: 1807341 - DNA, 15 bp, Homo sapiens
tcccagagtggtgtg

SEQ ID NO: 1807342 - DNA, 15 bp, Homo sapiens
cccagagtggtgtga

SEQ ID NO: 1807343 - DNA, 15 bp, Homo sapiens
ccagagtggtgtgag

SEQ ID NO: 1807344 - DNA, 15 bp, Homo sapiens
cagagtggtgtgagc

SEQ ID NO: 1807345 - DNA, 15 bp, Homo sapiens
agagtggtgtgagcc

SEQ ID NO: 1807346 - DNA, 15 bp, Homo sapiens
gagtggtgtgagcca

SEQ ID NO: 1807347 - DNA, 15 bp, Homo sapiens
agtggtgtgagccac

SEQ ID NO: 1807348 - DNA, 15 bp, Homo sapiens
gtggtgtgagccact

SEQ ID NO: 1807349 - DNA, 15 bp, Homo sapiens
tggtgtgagccacta

SEQ ID NO: 1807350 - DNA, 15 bp, Homo sapiens
gtgagccactatgcc

SEQ ID NO: 1807351 - DNA, 15 bp, Homo sapiens
tgagccactatgccc

SEQ ID NO: 1807352 - DNA, 15 bp, Homo sapiens
gagccactatgccct

SEQ ID NO: 1807353 - DNA, 15 bp, Homo sapiens
agccactatgccctg

SEQ ID NO: 1807354 - DNA, 15 bp, Homo sapiens
gccactatgccctgc

SEQ ID NO: 1807355 - DNA, 15 bp, Homo sapiens
ccactatgccctgca

SEQ ID NO: 1807356 - DNA, 15 bp, Homo sapiens
cactatgccctgcag

SEQ ID NO: 1807357 - DNA, 15 bp, Homo sapiens
actatgccctgcagc

SEQ ID NO: 1807358 - DNA, 15 bp, Homo sapiens
ctatgccctgcagca

SEQ ID NO: 1807359 - DNA, 15 bp, Homo sapiens
tatgccctgcagcac

SEQ ID NO: 1807360 - DNA, 15 bp, Homo sapiens
atgccctgcagcact

SEQ ID NO: 1807361 - DNA, 15 bp, Homo sapiens
tgccctgcagcactt

SEQ ID NO: 1807362 - DNA, 15 bp, Homo sapiens
gccctgcagcacttg

SEQ ID NO: 1807363 - DNA, 15 bp, Homo sapiens
ccctgcagcacttgt

SEQ ID NO: 1807364 - DNA, 15 bp, Homo sapiens
cctgcagcacttgtc

SEQ ID NO: 1807365 - DNA, 15 bp, Homo sapiens
ctgcagcacttgtca

SEQ ID NO: 1807366 - DNA, 15 bp, Homo sapiens
tgcagcacttgtcaa

SEQ ID NO: 1807367 - DNA, 15 bp, Homo sapiens
gcagcacttgtcaag

SEQ ID NO: 1807368 - DNA, 15 bp, Homo sapiens
cagcacttgtcaagt

SEQ ID NO: 1807369 - DNA, 15 bp, Homo sapiens
agcacttgtcaagtc

SEQ ID NO: 1807370 - DNA, 15 bp, Homo sapiens
gcacttgtcaagtct

SEQ ID NO: 1807371 - DNA, 15 bp, Homo sapiens
cacttgtcaagtctt

SEQ ID NO: 1807372 - DNA, 15 bp, Homo sapiens
acttgtcaagtcttt

SEQ ID NO: 1807373 - DNA, 15 bp, Homo sapiens
cttgtcaagtctttc

SEQ ID NO: 1807374 - DNA, 15 bp, Homo sapiens
ttgtcaagtctttct

SEQ ID NO: 1807375 - DNA, 15 bp, Homo sapiens
tgtcaagtctttctc

SEQ ID NO: 1807376 - DNA, 15 bp, Homo sapiens
gtcaagtctttctca

SEQ ID NO: 1807377 - DNA, 15 bp, Homo sapiens
tcaagtctttctcag

SEQ ID NO: 1807378 - DNA, 15 bp, Homo sapiens
caagtctttctcagc

SEQ ID NO: 1807379 - DNA, 15 bp, Homo sapiens
aagtctttctcagcg

SEQ ID NO: 1807380 - DNA, 15 bp, Homo sapiens
agtctttctcagcgt

SEQ ID NO: 1807381 - DNA, 15 bp, Homo sapiens
gtctttctcagcgtt

SEQ ID NO: 1807382 - DNA, 15 bp, Homo sapiens
tctttctcagcgttc

SEQ ID NO: 1807383 - DNA, 15 bp, Homo sapiens
ctttctcagcgttcc

SEQ ID NO: 1807384 - DNA, 15 bp, Homo sapiens
tttctcagcgttccc

SEQ ID NO: 1807385 - DNA, 15 bp, Homo sapiens
ttctcagcgttcccc

SEQ ID NO: 1807386 - DNA, 15 bp, Homo sapiens
tctcagcgttcccct

SEQ ID NO: 1807387 - DNA, 15 bp, Homo sapiens
ctcagcgttcccctc

SEQ ID NO: 1807388 - DNA, 15 bp, Homo sapiens
tcagcgttcccctcc

SEQ ID NO: 1807389 - DNA, 15 bp, Homo sapiens
cagcgttcccctcct

SEQ ID NO: 1807390 - DNA, 15 bp, Homo sapiens
agcgttcccctcctc

SEQ ID NO: 1807391 - DNA, 15 bp, Homo sapiens
gcgttcccctcctct

SEQ ID NO: 1807392 - DNA, 15 bp, Homo sapiens
cgttcccctcctctc

SEQ ID NO: 1807393 - DNA, 15 bp, Homo sapiens
gttcccctcctctcc

SEQ ID NO: 1807394 - DNA, 15 bp, Homo sapiens
ttcccctcctctcca

SEQ ID NO: 1807395 - DNA, 15 bp, Homo sapiens
cccctcctctccact

SEQ ID NO: 1807396 - DNA, 15 bp, Homo sapiens
ccctcctctccactg

SEQ ID NO: 1807397 - DNA, 15 bp, Homo sapiens
cctcctctccactgc

SEQ ID NO: 1807398 - DNA, 15 bp, Homo sapiens
ctcctctccactgca

SEQ ID NO: 1807399 - DNA, 15 bp, Homo sapiens
tcctctccactgcag

SEQ ID NO: 1807400 - DNA, 15 bp, Homo sapiens
cctctccactgcagc

SEQ ID NO: 1807401 - DNA, 15 bp, Homo sapiens
ctctccactgcagct

SEQ ID NO: 1807402 - DNA, 15 bp, Homo sapiens
tctccactgcagctc

SEQ ID NO: 1807403 - DNA, 15 bp, Homo sapiens
ctccactgcagctcc

SEQ ID NO: 1807404 - DNA, 15 bp, Homo sapiens
tccactgcagctccc

SEQ ID NO: 1807405 - DNA, 15 bp, Homo sapiens
ccactgcagctccca

SEQ ID NO: 1807406 - DNA, 15 bp, Homo sapiens
cactgcagctcccag

SEQ ID NO: 1807407 - DNA, 15 bp, Homo sapiens
actgcagctcccagt

SEQ ID NO: 1807408 - DNA, 15 bp, Homo sapiens
ctgcagctcccagtg

SEQ ID NO: 1807409 - DNA, 15 bp, Homo sapiens
tgcagctcccagtgc

SEQ ID NO: 1807410 - DNA, 15 bp, Homo sapiens
gcagctcccagtgcc

SEQ ID NO: 1807411 - DNA, 15 bp, Homo sapiens
cagctcccagtgccc

SEQ ID NO: 1807412 - DNA, 15 bp, Homo sapiens
agctcccagtgcccc

SEQ ID NO: 1807413 - DNA, 15 bp, Homo sapiens
gctcccagtgcccca

SEQ ID NO: 1807414 - DNA, 15 bp, Homo sapiens
ctcccagtgccccag

SEQ ID NO: 1807415 - DNA, 15 bp, Homo sapiens
tcccagtgccccagt

SEQ ID NO: 1807416 - DNA, 15 bp, Homo sapiens
cccagtgccccagtc

SEQ ID NO: 1807417 - DNA, 15 bp, Homo sapiens
ccagtgccccagtct

SEQ ID NO: 1807418 - DNA, 15 bp, Homo sapiens
cagtgccccagtctg

SEQ ID NO: 1807419 - DNA, 15 bp, Homo sapiens
agtgccccagtctgg

SEQ ID NO: 1807420 - DNA, 15 bp, Homo sapiens
gtgccccagtctggg

SEQ ID NO: 1807421 - DNA, 15 bp, Homo sapiens
tgccccagtctgggc

SEQ ID NO: 1807422 - DNA, 15 bp, Homo sapiens
gccccagtctgggcc

SEQ ID NO: 1807423 - DNA, 15 bp, Homo sapiens
ccccagtctgggcct

SEQ ID NO: 1807424 - DNA, 15 bp, Homo sapiens
cccagtctgggcctc

SEQ ID NO: 1807425 - DNA, 15 bp, Homo sapiens
ccagtctgggcctcg

SEQ ID NO: 1807426 - DNA, 15 bp, Homo sapiens
cagtctgggcctcgt

SEQ ID NO: 1807427 - DNA, 15 bp, Homo sapiens
agtctgggcctcgtc

SEQ ID NO: 1807428 - DNA, 15 bp, Homo sapiens
gtctgggcctcgtct

SEQ ID NO: 1807429 - DNA, 15 bp, Homo sapiens
tctgggcctcgtctt

SEQ ID NO: 1807430 - DNA, 15 bp, Homo sapiens
ctgggcctcgtcttc

SEQ ID NO: 1807431 - DNA, 15 bp, Homo sapiens
tgggcctcgtcttca

SEQ ID NO: 1807432 - DNA, 15 bp, Homo sapiens
gggcctcgtcttcac

SEQ ID NO: 1807433 - DNA, 15 bp, Homo sapiens
ggcctcgtcttcact

SEQ ID NO: 1807434 - DNA, 15 bp, Homo sapiens
gcctcgtcttcactt

SEQ ID NO: 1807435 - DNA, 15 bp, Homo sapiens
cctcgtcttcacttc

SEQ ID NO: 1807436 - DNA, 15 bp, Homo sapiens
ctcgtcttcacttcc

SEQ ID NO: 1807437 - DNA, 15 bp, Homo sapiens
tcgtcttcacttcct

SEQ ID NO: 1807438 - DNA, 15 bp, Homo sapiens
cgtcttcacttcctg

SEQ ID NO: 1807439 - DNA, 15 bp, Homo sapiens
gtcttcacttcctgg

SEQ ID NO: 1807440 - DNA, 15 bp, Homo sapiens
tcttcacttcctggg

SEQ ID NO: 1807441 - DNA, 15 bp, Homo sapiens
cttcacttcctggga

SEQ ID NO: 1807442 - DNA, 15 bp, Homo sapiens
ttcacttcctgggat

SEQ ID NO: 1807443 - DNA, 15 bp, Homo sapiens
tcacttcctgggatc

SEQ ID NO: 1807444 - DNA, 15 bp, Homo sapiens
cacttcctgggatcc

SEQ ID NO: 1807445 - DNA, 15 bp, Homo sapiens
acttcctgggatccc

SEQ ID NO: 1807446 - DNA, 15 bp, Homo sapiens
cttcctgggatccct

SEQ ID NO: 1807447 - DNA, 15 bp, Homo sapiens
ttcctgggatccctg

SEQ ID NO: 1807448 - DNA, 15 bp, Homo sapiens
tcctgggatccctga

SEQ ID NO: 1807449 - DNA, 15 bp, Homo sapiens
cctgggatccctgac

SEQ ID NO: 1807450 - DNA, 15 bp, Homo sapiens
ctgggatccctgaca

SEQ ID NO: 1807451 - DNA, 15 bp, Homo sapiens
tgggatccctgacat

SEQ ID NO: 1807452 - DNA, 15 bp, Homo sapiens
gggatccctgacatt

SEQ ID NO: 1807453 - DNA, 15 bp, Homo sapiens
ggatccctgacattg

SEQ ID NO: 1807454 - DNA, 15 bp, Homo sapiens
gatccctgacattgc

SEQ ID NO: 1807455 - DNA, 15 bp, Homo sapiens
atccctgacattgcc

SEQ ID NO: 1807456 - DNA, 15 bp, Homo sapiens
tccctgacattgcct

SEQ ID NO: 1807457 - DNA, 15 bp, Homo sapiens
ccctgacattgcctg

SEQ ID NO: 1807458 - DNA, 15 bp, Homo sapiens
cctgacattgcctgc

SEQ ID NO: 1807459 - DNA, 15 bp, Homo sapiens
ctgacattgcctgct

SEQ ID NO: 1807460 - DNA, 15 bp, Homo sapiens
tgacattgcctgcta

SEQ ID NO: 1807461 - DNA, 15 bp, Homo sapiens
gacattgcctgctag

SEQ ID NO: 1807462 - DNA, 15 bp, Homo sapiens
acattgcctgctagg

SEQ ID NO: 1807463 - DNA, 15 bp, Homo sapiens
cattgcctgctaggc

SEQ ID NO: 1807464 - DNA, 15 bp, Homo sapiens
attgcctgctaggct

SEQ ID NO: 1807465 - DNA, 15 bp, Homo sapiens
ttgcctgctaggctc

SEQ ID NO: 1807466 - DNA, 15 bp, Homo sapiens
tgcctgctaggctct

SEQ ID NO: 1807467 - DNA, 15 bp, Homo sapiens
gcctgctaggctctc

SEQ ID NO: 1807468 - DNA, 15 bp, Homo sapiens
cctgctaggctctcc

SEQ ID NO: 1807469 - DNA, 15 bp, Homo sapiens
ctgctaggctctccc

SEQ ID NO: 1807470 - DNA, 15 bp, Homo sapiens
tgctaggctctccct

SEQ ID NO: 1807471 - DNA, 15 bp, Homo sapiens
gctaggctctccctg

SEQ ID NO: 1807472 - DNA, 15 bp, Homo sapiens
ctaggctctccctgt

SEQ ID NO: 1807473 - DNA, 15 bp, Homo sapiens
taggctctccctgtc

SEQ ID NO: 1807474 - DNA, 15 bp, Homo sapiens
aggctctccctgtct

SEQ ID NO: 1807475 - DNA, 15 bp, Homo sapiens
ggctctccctgtctc

SEQ ID NO: 1807476 - DNA, 15 bp, Homo sapiens
gctctccctgtctct

SEQ ID NO: 1807477 - DNA, 15 bp, Homo sapiens
ctctccctgtctctg

SEQ ID NO: 1807478 - DNA, 15 bp, Homo sapiens
tctccctgtctctgg

SEQ ID NO: 1807479 - DNA, 15 bp, Homo sapiens
ctccctgtctctggt

SEQ ID NO: 1807480 - DNA, 15 bp, Homo sapiens
tccctgtctctggtc

SEQ ID NO: 1807481 - DNA, 15 bp, Homo sapiens
ccctgtctctggtct

SEQ ID NO: 1807482 - DNA, 15 bp, Homo sapiens
cctgtctctggtctg

SEQ ID NO: 1807483 - DNA, 15 bp, Homo sapiens
ctgtctctggtctgg

SEQ ID NO: 1807484 - DNA, 15 bp, Homo sapiens
tgtctctggtctggc

SEQ ID NO: 1807485 - DNA, 15 bp, Homo sapiens
gtctctggtctggct

SEQ ID NO: 1807486 - DNA, 15 bp, Homo sapiens
tctctggtctggctg

SEQ ID NO: 1807487 - DNA, 15 bp, Homo sapiens
ctctggtctggctgc

SEQ ID NO: 1807488 - DNA, 15 bp, Homo sapiens
tctggtctggctgcc

SEQ ID NO: 1807489 - DNA, 15 bp, Homo sapiens
ctggtctggctgcct

SEQ ID NO: 1807490 - DNA, 15 bp, Homo sapiens
tggtctggctgcctt

SEQ ID NO: 1807491 - DNA, 15 bp, Homo sapiens
ggtctggctgccttc

SEQ ID NO: 1807492 - DNA, 15 bp, Homo sapiens
gtctggctgccttca

SEQ ID NO: 1807493 - DNA, 15 bp, Homo sapiens
tctggctgccttcac

SEQ ID NO: 1807494 - DNA, 15 bp, Homo sapiens
ctggctgccttcact

SEQ ID NO: 1807495 - DNA, 15 bp, Homo sapiens
tggctgccttcactg

SEQ ID NO: 1807496 - DNA, 15 bp, Homo sapiens
ggctgccttcactgt

SEQ ID NO: 1807497 - DNA, 15 bp, Homo sapiens
gctgccttcactgta

SEQ ID NO: 1807498 - DNA, 15 bp, Homo sapiens
ctgccttcactgtaa

SEQ ID NO: 1807499 - DNA, 15 bp, Homo sapiens
tgccttcactgtaac

SEQ ID NO: 1807500 - DNA, 15 bp, Homo sapiens
gccttcactgtaacc

SEQ ID NO: 1807501 - DNA, 15 bp, Homo sapiens
ccttcactgtaacct

SEQ ID NO: 1807502 - DNA, 15 bp, Homo sapiens
cttcactgtaacctc

SEQ ID NO: 1807503 - DNA, 15 bp, Homo sapiens
ttcactgtaacctcc

SEQ ID NO: 1807504 - DNA, 15 bp, Homo sapiens
tcactgtaacctcca

SEQ ID NO: 1807505 - DNA, 15 bp, Homo sapiens
cactgtaacctccac

SEQ ID NO: 1807506 - DNA, 15 bp, Homo sapiens
actgtaacctccacc

SEQ ID NO: 1807507 - DNA, 15 bp, Homo sapiens
ctgtaacctccaccc

SEQ ID NO: 1807508 - DNA, 15 bp, Homo sapiens
tgtaacctccaccca

SEQ ID NO: 1807509 - DNA, 15 bp, Homo sapiens
gtaacctccacccag

SEQ ID NO: 1807510 - DNA, 15 bp, Homo sapiens
taacctccacccagc

SEQ ID NO: 1807511 - DNA, 15 bp, Homo sapiens
aacctccacccagca

SEQ ID NO: 1807512 - DNA, 15 bp, Homo sapiens
acctccacccagcag

SEQ ID NO: 1807513 - DNA, 15 bp, Homo sapiens
cctccacccagcagg

SEQ ID NO: 1807514 - DNA, 15 bp, Homo sapiens
ctccacccagcaggt

SEQ ID NO: 1807515 - DNA, 15 bp, Homo sapiens
tccacccagcaggta

SEQ ID NO: 1807516 - DNA, 15 bp, Homo sapiens
ccacccagcaggtac

SEQ ID NO: 1807517 - DNA, 15 bp, Homo sapiens
cacccagcaggtacc

SEQ ID NO: 1807518 - DNA, 15 bp, Homo sapiens
acccagcaggtacct

SEQ ID NO: 1807519 - DNA, 15 bp, Homo sapiens
cccagcaggtacctc

SEQ ID NO: 1807520 - DNA, 15 bp, Homo sapiens
ccagcaggtacctct

SEQ ID NO: 1807521 - DNA, 15 bp, Homo sapiens
cagcaggtacctctt

SEQ ID NO: 1807522 - DNA, 15 bp, Homo sapiens
agcaggtacctcttc

SEQ ID NO: 1807523 - DNA, 15 bp, Homo sapiens
gcaggtacctcttca

SEQ ID NO: 1807524 - DNA, 15 bp, Homo sapiens
caggtacctcttcag

SEQ ID NO: 1807525 - DNA, 15 bp, Homo sapiens
aggtacctcttcagc

SEQ ID NO: 1807526 - DNA, 15 bp, Homo sapiens
ggtacctcttcagca

SEQ ID NO: 1807527 - DNA, 15 bp, Homo sapiens
gtacctcttcagcac

SEQ ID NO: 1807528 - DNA, 15 bp, Homo sapiens
tacctcttcagcacc

SEQ ID NO: 1807529 - DNA, 15 bp, Homo sapiens
acctcttcagcacct

SEQ ID NO: 1807530 - DNA, 15 bp, Homo sapiens
cctcttcagcacctc

SEQ ID NO: 1807531 - DNA, 15 bp, Homo sapiens
ctcttcagcacctcc

SEQ ID NO: 1807532 - DNA, 15 bp, Homo sapiens
tcttcagcacctccc

SEQ ID NO: 1807533 - DNA, 15 bp, Homo sapiens
cttcagcacctccca

SEQ ID NO: 1807534 - DNA, 15 bp, Homo sapiens
ttcagcacctcccat

SEQ ID NO: 1807535 - DNA, 15 bp, Homo sapiens
tcagcacctcccatg

SEQ ID NO: 1807536 - DNA, 15 bp, Homo sapiens
cagcacctcccatga

SEQ ID NO: 1807537 - DNA, 15 bp, Homo sapiens
agcacctcccatgaa

SEQ ID NO: 1807538 - DNA, 15 bp, Homo sapiens
gcacctcccatgaac

SEQ ID NO: 1807539 - DNA, 15 bp, Homo sapiens
cacctcccatgaacc

SEQ ID NO: 1807540 - DNA, 15 bp, Homo sapiens
acctcccatgaaccc

SEQ ID NO: 1807541 - DNA, 15 bp, Homo sapiens
cctcccatgaaccca

SEQ ID NO: 1807542 - DNA, 15 bp, Homo sapiens
ctcccatgaacccag

SEQ ID NO: 1807543 - DNA, 15 bp, Homo sapiens
tcccatgaacccagc

SEQ ID NO: 1807544 - DNA, 15 bp, Homo sapiens
cccatgaacccagca

SEQ ID NO: 1807545 - DNA, 15 bp, Homo sapiens
ccatgaacccagcag

SEQ ID NO: 1807546 - DNA, 15 bp, Homo sapiens
catgaacccagcaga

SEQ ID NO: 1807547 - DNA, 15 bp, Homo sapiens
atgaacccagcagaa

SEQ ID NO: 1807548 - DNA, 15 bp, Homo sapiens
tgaacccagcagaat

SEQ ID NO: 1807549 - DNA, 15 bp, Homo sapiens
gaacccagcagaata

SEQ ID NO: 1807550 - DNA, 15 bp, Homo sapiens
aacccagcagaatac

SEQ ID NO: 1807551 - DNA, 15 bp, Homo sapiens
acccagcagaatacc

SEQ ID NO: 1807552 - DNA, 15 bp, Homo sapiens
cccagcagaatacca

SEQ ID NO: 1807553 - DNA, 15 bp, Homo sapiens
ccagcagaataccaa

SEQ ID NO: 1807554 - DNA, 15 bp, Homo sapiens
cagcagaataccaag

SEQ ID NO: 1807555 - DNA, 15 bp, Homo sapiens
agcagaataccaagc

SEQ ID NO: 1807556 - DNA, 15 bp, Homo sapiens
gcagaataccaagcc

SEQ ID NO: 1807557 - DNA, 15 bp, Homo sapiens
cagaataccaagccc

SEQ ID NO: 1807558 - DNA, 15 bp, Homo sapiens
agaataccaagccct

SEQ ID NO: 1807559 - DNA, 15 bp, Homo sapiens
gaataccaagccctg

SEQ ID NO: 1807560 - DNA, 15 bp, Homo sapiens
aataccaagccctgg

SEQ ID NO: 1807561 - DNA, 15 bp, Homo sapiens
ataccaagccctggg

SEQ ID NO: 1807562 - DNA, 15 bp, Homo sapiens
taccaagccctgggg

SEQ ID NO: 1807563 - DNA, 15 bp, Homo sapiens
accaagccctgggga

SEQ ID NO: 1807564 - DNA, 15 bp, Homo sapiens
ccaagccctggggat

SEQ ID NO: 1807565 - DNA, 15 bp, Homo sapiens
caagccctggggatg

SEQ ID NO: 1807566 - DNA, 15 bp, Homo sapiens
aagccctggggatgc

SEQ ID NO: 1807567 - DNA, 15 bp, Homo sapiens
agccctggggatgca

SEQ ID NO: 1807568 - DNA, 15 bp, Homo sapiens
gccctggggatgcag

SEQ ID NO: 1807569 - DNA, 15 bp, Homo sapiens
ccctggggatgcagc

SEQ ID NO: 1807570 - DNA, 15 bp, Homo sapiens
cctggggatgcagca

SEQ ID NO: 1807571 - DNA, 15 bp, Homo sapiens
ctggggatgcagcaa

SEQ ID NO: 1807572 - DNA, 15 bp, Homo sapiens
tggggatgcagcaac

SEQ ID NO: 1807573 - DNA, 15 bp, Homo sapiens
ggggatgcagcaacg

SEQ ID NO: 1807574 - DNA, 15 bp, Homo sapiens
gggatgcagcaacga

SEQ ID NO: 1807575 - DNA, 15 bp, Homo sapiens
ggatgcagcaacgaa

SEQ ID NO: 1807576 - DNA, 15 bp, Homo sapiens
gatgcagcaacgaac

SEQ ID NO: 1807577 - DNA, 15 bp, Homo sapiens
atgcagcaacgaaca

SEQ ID NO: 1807578 - DNA, 15 bp, Homo sapiens
tgcagcaacgaacag

SEQ ID NO: 1807579 - DNA, 15 bp, Homo sapiens
gcagcaacgaacagg

SEQ ID NO: 1807580 - DNA, 15 bp, Homo sapiens
cagcaacgaacaggt

SEQ ID NO: 1807581 - DNA, 15 bp, Homo sapiens
agcaacgaacaggta

SEQ ID NO: 1807582 - DNA, 15 bp, Homo sapiens
gcaacgaacaggtag

SEQ ID NO: 1807583 - DNA, 15 bp, Homo sapiens
caacgaacaggtaga

SEQ ID NO: 1807584 - DNA, 15 bp, Homo sapiens
aacgaacaggtagac

SEQ ID NO: 1807585 - DNA, 15 bp, Homo sapiens
acgaacaggtagacg

SEQ ID NO: 1807586 - DNA, 15 bp, Homo sapiens
cgaacaggtagacgc

SEQ ID NO: 1807587 - DNA, 15 bp, Homo sapiens
gaacaggtagacgct

SEQ ID NO: 1807588 - DNA, 15 bp, Homo sapiens
aacaggtagacgctg

SEQ ID NO: 1807589 - DNA, 15 bp, Homo sapiens
acaggtagacgctgc

SEQ ID NO: 1807590 - DNA, 15 bp, Homo sapiens
caggtagacgctgca

SEQ ID NO: 1807591 - DNA, 15 bp, Homo sapiens
aggtagacgctgcac

SEQ ID NO: 1807592 - DNA, 15 bp, Homo sapiens
ggtagacgctgcact

SEQ ID NO: 1807593 - DNA, 15 bp, Homo sapiens
gtagacgctgcactc

SEQ ID NO: 1807594 - DNA, 15 bp, Homo sapiens
tagacgctgcactcc

SEQ ID NO: 1807595 - DNA, 15 bp, Homo sapiens
agacgctgcactcca

SEQ ID NO: 1807596 - DNA, 15 bp, Homo sapiens
gacgctgcactccag

SEQ ID NO: 1807597 - DNA, 15 bp, Homo sapiens
acgctgcactccagc

SEQ ID NO: 1807598 - DNA, 15 bp, Homo sapiens
agagcaagactccgc

SEQ ID NO: 1807599 - DNA, 15 bp, Homo sapiens
gagcaagactccgcc

SEQ ID NO: 1807600 - DNA, 15 bp, Homo sapiens
gcaagactccgcctg

SEQ ID NO: 1807601 - DNA, 15 bp, Homo sapiens
caagactccgcctga

SEQ ID NO: 1807602 - DNA, 15 bp, Homo sapiens
aagactccgcctgaa

SEQ ID NO: 1807603 - DNA, 15 bp, Homo sapiens
agactccgcctgaag

SEQ ID NO: 1807604 - DNA, 15 bp, Homo sapiens
gactccgcctgaaga

SEQ ID NO: 1807605 - DNA, 15 bp, Homo sapiens
actccgcctgaagaa

SEQ ID NO: 1807606 - DNA, 15 bp, Homo sapiens
ctccgcctgaagaaa

SEQ ID NO: 1807607 - DNA, 15 bp, Homo sapiens
tccgcctgaagaaaa

SEQ ID NO: 1807608 - DNA, 15 bp, Homo sapiens
ccgcctgaagaaaaa

SEQ ID NO: 1807609 - DNA, 15 bp, Homo sapiens
cgcctgaagaaaaaa

SEQ ID NO: 1807610 - DNA, 15 bp, Homo sapiens
gcctgaagaaaaaaa

SEQ ID NO: 1807611 - DNA, 15 bp, Homo sapiens
cctgaagaaaaaaaa

SEQ ID NO: 1807612 - DNA, 15 bp, Homo sapiens
ctgaagaaaaaaaaa

SEQ ID NO: 1807613 - DNA, 15 bp, Homo sapiens
tgaagaaaaaaaaaa

SEQ ID NO: 1807614 - DNA, 15 bp, Homo sapiens
gaagaaaaaaaaaag

SEQ ID NO: 1807615 - DNA, 15 bp, Homo sapiens
aagaaaaaaaaaagg

SEQ ID NO: 1807616 - DNA, 15 bp, Homo sapiens
agaaaaaaaaaagga

SEQ ID NO: 1807617 - DNA, 15 bp, Homo sapiens
gaaaaaaaaaaggac

SEQ ID NO: 1807618 - DNA, 15 bp, Homo sapiens
aaaaaaaaaaggacc

SEQ ID NO: 1807619 - DNA, 15 bp, Homo sapiens
aaaaaaaaaggacca

SEQ ID NO: 1807620 - DNA, 15 bp, Homo sapiens
aaaaaaaaggaccag

SEQ ID NO: 1807621 - DNA, 15 bp, Homo sapiens
aaaaaaaggaccagg

SEQ ID NO: 1807622 - DNA, 15 bp, Homo sapiens
aaaaaaggaccaggc

SEQ ID NO: 1807623 - DNA, 15 bp, Homo sapiens
aaaaaggaccaggcc

SEQ ID NO: 1807624 - DNA, 15 bp, Homo sapiens
aaaaggaccaggccg

SEQ ID NO: 1807625 - DNA, 15 bp, Homo sapiens
aaaggaccaggccgg

SEQ ID NO: 1807626 - DNA, 15 bp, Homo sapiens
aaggaccaggccggg

SEQ ID NO: 1807627 - DNA, 15 bp, Homo sapiens
aggaccaggccgggc

SEQ ID NO: 1807628 - DNA, 15 bp, Homo sapiens
ggaccaggccgggcg

SEQ ID NO: 1807629 - DNA, 15 bp, Homo sapiens
gaccaggccgggcgc

SEQ ID NO: 1807630 - DNA, 15 bp, Homo sapiens
accaggccgggcgcg

SEQ ID NO: 1807631 - DNA, 15 bp, Homo sapiens
ccaggccgggcgcgg

SEQ ID NO: 1807632 - DNA, 15 bp, Homo sapiens
caggccgggcgcggt

SEQ ID NO: 1807633 - DNA, 15 bp, Homo sapiens
gaggccgaggtgggt

SEQ ID NO: 1807634 - DNA, 15 bp, Homo sapiens
aggccgaggtgggtg

SEQ ID NO: 1807635 - DNA, 15 bp, Homo sapiens
ggccgaggtgggtgg

SEQ ID NO: 1807636 - DNA, 15 bp, Homo sapiens
aggtgggtggatcat

SEQ ID NO: 1807637 - DNA, 15 bp, Homo sapiens
ggtgggtggatcatg

SEQ ID NO: 1807638 - DNA, 15 bp, Homo sapiens
gtgggtggatcatga

SEQ ID NO: 1807639 - DNA, 15 bp, Homo sapiens
tgggtggatcatgag

SEQ ID NO: 1807640 - DNA, 15 bp, Homo sapiens
aaatggtgaaacccc

SEQ ID NO: 1807641 - DNA, 15 bp, Homo sapiens
aatggtgaaaccccg

SEQ ID NO: 1807642 - DNA, 15 bp, Homo sapiens
accccgtctctactg

SEQ ID NO: 1807643 - DNA, 15 bp, Homo sapiens
ccccgtctctactga

SEQ ID NO: 1807644 - DNA, 15 bp, Homo sapiens
cccgtctctactgaa

SEQ ID NO: 1807645 - DNA, 15 bp, Homo sapiens
ccgtctctactgaaa

SEQ ID NO: 1807646 - DNA, 15 bp, Homo sapiens
cgtctctactgaaaa

SEQ ID NO: 1807647 - DNA, 15 bp, Homo sapiens
gtctctactgaaaaa

SEQ ID NO: 1807648 - DNA, 15 bp, Homo sapiens
aaattagctgggtgc

SEQ ID NO: 1807649 - DNA, 15 bp, Homo sapiens
aattagctgggtgca

SEQ ID NO: 1807650 - DNA, 15 bp, Homo sapiens
attagctgggtgcag

SEQ ID NO: 1807651 - DNA, 15 bp, Homo sapiens
ttagctgggtgcagt

SEQ ID NO: 1807652 - DNA, 15 bp, Homo sapiens
tagctgggtgcagtg

SEQ ID NO: 1807653 - DNA, 15 bp, Homo sapiens
agctgggtgcagtgg

SEQ ID NO: 1807654 - DNA, 15 bp, Homo sapiens
ctgggtgcagtggcg

SEQ ID NO: 1807655 - DNA, 15 bp, Homo sapiens
tgggtgcagtggcgg

SEQ ID NO: 1807656 - DNA, 15 bp, Homo sapiens
gggtgcagtggcggg

SEQ ID NO: 1807657 - DNA, 15 bp, Homo sapiens
gtgcagtggcgggcg

SEQ ID NO: 1807658 - DNA, 15 bp, Homo sapiens
tgcagtggcgggcgc

SEQ ID NO: 1807659 - DNA, 15 bp, Homo sapiens
aggctgaggcaggat

SEQ ID NO: 1807660 - DNA, 15 bp, Homo sapiens
ggctgaggcaggata

SEQ ID NO: 1807661 - DNA, 15 bp, Homo sapiens
gctgaggcaggataa

SEQ ID NO: 1807662 - DNA, 15 bp, Homo sapiens
ctgaggcaggataat

SEQ ID NO: 1807663 - DNA, 15 bp, Homo sapiens
tgaggcaggataatt

SEQ ID NO: 1807664 - DNA, 15 bp, Homo sapiens
gaggcaggataattg

SEQ ID NO: 1807665 - DNA, 15 bp, Homo sapiens
aggcaggataattgc

SEQ ID NO: 1807666 - DNA, 15 bp, Homo sapiens
ggcaggataattgct

SEQ ID NO: 1807667 - DNA, 15 bp, Homo sapiens
gcaggataattgctt

SEQ ID NO: 1807668 - DNA, 15 bp, Homo sapiens
caggataattgcttg

SEQ ID NO: 1807669 - DNA, 15 bp, Homo sapiens
aggataattgcttga

SEQ ID NO: 1807670 - DNA, 15 bp, Homo sapiens
ggataattgcttgac

SEQ ID NO: 1807671 - DNA, 15 bp, Homo sapiens
gataattgcttgacc

SEQ ID NO: 1807672 - DNA, 15 bp, Homo sapiens
ataattgcttgaccc

SEQ ID NO: 1807673 - DNA, 15 bp, Homo sapiens
taattgcttgacccc

SEQ ID NO: 1807674 - DNA, 15 bp, Homo sapiens
aattgcttgacccca

SEQ ID NO: 1807675 - DNA, 15 bp, Homo sapiens
attgcttgaccccag

SEQ ID NO: 1807676 - DNA, 15 bp, Homo sapiens
ttgcttgaccccagg

SEQ ID NO: 1807677 - DNA, 15 bp, Homo sapiens
tgcttgaccccagga

SEQ ID NO: 1807678 - DNA, 15 bp, Homo sapiens
gcttgaccccaggag

SEQ ID NO: 1807679 - DNA, 15 bp, Homo sapiens
cttgaccccaggagg

SEQ ID NO: 1807680 - DNA, 15 bp, Homo sapiens
ttgaccccaggaggc

SEQ ID NO: 1807681 - DNA, 15 bp, Homo sapiens
tgaccccaggaggca

SEQ ID NO: 1807682 - DNA, 15 bp, Homo sapiens
gaccccaggaggcag

SEQ ID NO: 1807683 - DNA, 15 bp, Homo sapiens
accccaggaggcaga

SEQ ID NO: 1807684 - DNA, 15 bp, Homo sapiens
ccccaggaggcagag

SEQ ID NO: 1807685 - DNA, 15 bp, Homo sapiens
agaggttgcagtgaa

SEQ ID NO: 1807686 - DNA, 15 bp, Homo sapiens
agtgaaccgagatca

SEQ ID NO: 1807687 - DNA, 15 bp, Homo sapiens
tgaaccgagatcacg

SEQ ID NO: 1807688 - DNA, 15 bp, Homo sapiens
gaaccgagatcacgc

SEQ ID NO: 1807689 - DNA, 15 bp, Homo sapiens
aaccgagatcacgcc

SEQ ID NO: 1807690 - DNA, 15 bp, Homo sapiens
accgagatcacgcca

SEQ ID NO: 1807691 - DNA, 15 bp, Homo sapiens
agagcaagactctgc

SEQ ID NO: 1807692 - DNA, 15 bp, Homo sapiens
gagcaagactctgcc

SEQ ID NO: 1807693 - DNA, 15 bp, Homo sapiens
agcaagactctgcct

SEQ ID NO: 1807694 - DNA, 15 bp, Homo sapiens
gcaagactctgcctc

SEQ ID NO: 1807695 - DNA, 15 bp, Homo sapiens
caagactctgcctca

SEQ ID NO: 1807696 - DNA, 15 bp, Homo sapiens
aagactctgcctcaa

SEQ ID NO: 1807697 - DNA, 15 bp, Homo sapiens
agactctgcctcaaa

SEQ ID NO: 1807698 - DNA, 15 bp, Homo sapiens
gactctgcctcaaaa

SEQ ID NO: 1807699 - DNA, 15 bp, Homo sapiens
actctgcctcaaaaa

SEQ ID NO: 1807700 - DNA, 15 bp, Homo sapiens
ctctgcctcaaaaaa

SEQ ID NO: 1807701 - DNA, 15 bp, Homo sapiens
tctgcctcaaaaaaa

SEQ ID NO: 1807702 - DNA, 15 bp, Homo sapiens
ctgcctcaaaaaaaa

SEQ ID NO: 1807703 - DNA, 15 bp, Homo sapiens
tgcctcaaaaaaaag

SEQ ID NO: 1807704 - DNA, 15 bp, Homo sapiens
gcctcaaaaaaaaga

SEQ ID NO: 1807705 - DNA, 15 bp, Homo sapiens
cctcaaaaaaaagaa

SEQ ID NO: 1807706 - DNA, 15 bp, Homo sapiens
ctcaaaaaaaagaat

SEQ ID NO: 1807707 - DNA, 15 bp, Homo sapiens
tcaaaaaaaagaata

SEQ ID NO: 1807708 - DNA, 15 bp, Homo sapiens
caaaaaaaagaataa

SEQ ID NO: 1807709 - DNA, 15 bp, Homo sapiens
aaaaagaataaaaat

SEQ ID NO: 1807710 - DNA, 15 bp, Homo sapiens
aaaagaataaaaata

SEQ ID NO: 1807711 - DNA, 15 bp, Homo sapiens
aaagaataaaaataa

SEQ ID NO: 1807712 - DNA, 15 bp, Homo sapiens
aagaataaaaataaa

SEQ ID NO: 1807713 - DNA, 15 bp, Homo sapiens
aataaaaataaaaaa

SEQ ID NO: 1807714 - DNA, 15 bp, Homo sapiens
ataaaaataaaaaaa

SEQ ID NO: 1807715 - DNA, 15 bp, Homo sapiens
taaaaataaaaaaaa

SEQ ID NO: 1807716 - DNA, 15 bp, Homo sapiens
aaaaataaaaaaaag

SEQ ID NO: 1807717 - DNA, 15 bp, Homo sapiens
aaaataaaaaaaagg

SEQ ID NO: 1807718 - DNA, 15 bp, Homo sapiens
aaataaaaaaaagga

SEQ ID NO: 1807719 - DNA, 15 bp, Homo sapiens
aataaaaaaaaggac

SEQ ID NO: 1807720 - DNA, 15 bp, Homo sapiens
ataaaaaaaaggacc

SEQ ID NO: 1807721 - DNA, 15 bp, Homo sapiens
taaaaaaaaggacca

SEQ ID NO: 1807722 - DNA, 15 bp, Homo sapiens
aaaaaaaggaccaga

SEQ ID NO: 1807723 - DNA, 15 bp, Homo sapiens
aaaaaaggaccagat

SEQ ID NO: 1807724 - DNA, 15 bp, Homo sapiens
aaaaaggaccagata

SEQ ID NO: 1807725 - DNA, 15 bp, Homo sapiens
aaaaggaccagatac

SEQ ID NO: 1807726 - DNA, 15 bp, Homo sapiens
aaaggaccagataca

SEQ ID NO: 1807727 - DNA, 15 bp, Homo sapiens
aaggaccagatacag

SEQ ID NO: 1807728 - DNA, 15 bp, Homo sapiens
aggaccagatacaga

SEQ ID NO: 1807729 - DNA, 15 bp, Homo sapiens
ggaccagatacagaa

SEQ ID NO: 1807730 - DNA, 15 bp, Homo sapiens
gaccagatacagaaa

SEQ ID NO: 1807731 - DNA, 15 bp, Homo sapiens
accagatacagaaaa

SEQ ID NO: 1807732 - DNA, 15 bp, Homo sapiens
ccagatacagaaaac

SEQ ID NO: 1807733 - DNA, 15 bp, Homo sapiens
cagatacagaaaaca

SEQ ID NO: 1807734 - DNA, 15 bp, Homo sapiens
agatacagaaaacag

SEQ ID NO: 1807735 - DNA, 15 bp, Homo sapiens
gatacagaaaacaga

SEQ ID NO: 1807736 - DNA, 15 bp, Homo sapiens
atacagaaaacagaa

SEQ ID NO: 1807737 - DNA, 15 bp, Homo sapiens
tacagaaaacagaag

SEQ ID NO: 1807738 - DNA, 15 bp, Homo sapiens
acagaaaacagaagg

SEQ ID NO: 1807739 - DNA, 15 bp, Homo sapiens
cagaaaacagaagga

SEQ ID NO: 1807740 - DNA, 15 bp, Homo sapiens
agaaaacagaaggag

SEQ ID NO: 1807741 - DNA, 15 bp, Homo sapiens
gaaaacagaaggaga

SEQ ID NO: 1807742 - DNA, 15 bp, Homo sapiens
aaaacagaaggagac

SEQ ID NO: 1807743 - DNA, 15 bp, Homo sapiens
aaacagaaggagacg

SEQ ID NO: 1807744 - DNA, 15 bp, Homo sapiens
aacagaaggagacgt

SEQ ID NO: 1807745 - DNA, 15 bp, Homo sapiens
acagaaggagacgta

SEQ ID NO: 1807746 - DNA, 15 bp, Homo sapiens
cagaaggagacgtac

SEQ ID NO: 1807747 - DNA, 15 bp, Homo sapiens
agaaggagacgtact

SEQ ID NO: 1807748 - DNA, 15 bp, Homo sapiens
gaaggagacgtacta

SEQ ID NO: 1807749 - DNA, 15 bp, Homo sapiens
aaggagacgtactat

SEQ ID NO: 1807750 - DNA, 15 bp, Homo sapiens
aggagacgtactatg

SEQ ID NO: 1807751 - DNA, 15 bp, Homo sapiens
ggagacgtactatga

SEQ ID NO: 1807752 - DNA, 15 bp, Homo sapiens
gagacgtactatgaa

SEQ ID NO: 1807753 - DNA, 15 bp, Homo sapiens
agacgtactatgaag

SEQ ID NO: 1807754 - DNA, 15 bp, Homo sapiens
gacgtactatgaagg

SEQ ID NO: 1807755 - DNA, 15 bp, Homo sapiens
acgtactatgaagga

SEQ ID NO: 1807756 - DNA, 15 bp, Homo sapiens
cgtactatgaaggaa

SEQ ID NO: 1807757 - DNA, 15 bp, Homo sapiens
gtactatgaaggaaa

SEQ ID NO: 1807758 - DNA, 15 bp, Homo sapiens
tactatgaaggaaat

SEQ ID NO: 1807759 - DNA, 15 bp, Homo sapiens
actatgaaggaaatt

SEQ ID NO: 1807760 - DNA, 15 bp, Homo sapiens
ctatgaaggaaattg

SEQ ID NO: 1807761 - DNA, 15 bp, Homo sapiens
tatgaaggaaattgg

SEQ ID NO: 1807762 - DNA, 15 bp, Homo sapiens
atgaaggaaattgga

SEQ ID NO: 1807763 - DNA, 15 bp, Homo sapiens
tgaaggaaattggag

SEQ ID NO: 1807764 - DNA, 15 bp, Homo sapiens
gaaggaaattggaga

SEQ ID NO: 1807765 - DNA, 15 bp, Homo sapiens
aaggaaattggagag

SEQ ID NO: 1807766 - DNA, 15 bp, Homo sapiens
aggaaattggagagc

SEQ ID NO: 1807767 - DNA, 15 bp, Homo sapiens
ggaaattggagagct

SEQ ID NO: 1807768 - DNA, 15 bp, Homo sapiens
gaaattggagagctt

SEQ ID NO: 1807769 - DNA, 15 bp, Homo sapiens
aaattggagagcttt

SEQ ID NO: 1807770 - DNA, 15 bp, Homo sapiens
aattggagagctttt

SEQ ID NO: 1807771 - DNA, 15 bp, Homo sapiens
attggagagcttttg

SEQ ID NO: 1807772 - DNA, 15 bp, Homo sapiens
ttggagagcttttgg

SEQ ID NO: 1807773 - DNA, 15 bp, Homo sapiens
tggagagcttttggg

SEQ ID NO: 1807774 - DNA, 15 bp, Homo sapiens
ggagagcttttggga

SEQ ID NO: 1807775 - DNA, 15 bp, Homo sapiens
gagagcttttgggat

SEQ ID NO: 1807776 - DNA, 15 bp, Homo sapiens
agagcttttgggata

SEQ ID NO: 1807777 - DNA, 15 bp, Homo sapiens
gagcttttgggatac

SEQ ID NO: 1807778 - DNA, 15 bp, Homo sapiens
agcttttgggatact

SEQ ID NO: 1807779 - DNA, 15 bp, Homo sapiens
gcttttgggatactg

SEQ ID NO: 1807780 - DNA, 15 bp, Homo sapiens
cttttgggatactga

SEQ ID NO: 1807781 - DNA, 15 bp, Homo sapiens
ttttgggatactgag

SEQ ID NO: 1807782 - DNA, 15 bp, Homo sapiens
tttgggatactgagt

SEQ ID NO: 1807783 - DNA, 15 bp, Homo sapiens
ttgggatactgagta

SEQ ID NO: 1807784 - DNA, 15 bp, Homo sapiens
tgggatactgagtaa

SEQ ID NO: 1807785 - DNA, 15 bp, Homo sapiens
gggatactgagtaac

SEQ ID NO: 1807786 - DNA, 15 bp, Homo sapiens
ggatactgagtaact

SEQ ID NO: 1807787 - DNA, 15 bp, Homo sapiens
gatactgagtaactc

SEQ ID NO: 1807788 - DNA, 15 bp, Homo sapiens
atactgagtaactca

SEQ ID NO: 1807789 - DNA, 15 bp, Homo sapiens
tactgagtaactcag

SEQ ID NO: 1807790 - DNA, 15 bp, Homo sapiens
actgagtaactcagg

SEQ ID NO: 1807791 - DNA, 15 bp, Homo sapiens
ctgagtaactcaggg

SEQ ID NO: 1807792 - DNA, 15 bp, Homo sapiens
tgagtaactcagggt

SEQ ID NO: 1807793 - DNA, 15 bp, Homo sapiens
gagtaactcagggtg

SEQ ID NO: 1807794 - DNA, 15 bp, Homo sapiens
agtaactcagggtgg

SEQ ID NO: 1807795 - DNA, 15 bp, Homo sapiens
gtaactcagggtggc

SEQ ID NO: 1807796 - DNA, 15 bp, Homo sapiens
taactcagggtggcc

SEQ ID NO: 1807797 - DNA, 15 bp, Homo sapiens
aactcagggtggcct

SEQ ID NO: 1807798 - DNA, 15 bp, Homo sapiens
actcagggtggcctt

SEQ ID NO: 1807799 - DNA, 15 bp, Homo sapiens
ctcagggtggccttt

SEQ ID NO: 1807800 - DNA, 15 bp, Homo sapiens
tcagggtggcctttc

SEQ ID NO: 1807801 - DNA, 15 bp, Homo sapiens
cagggtggcctttcc

SEQ ID NO: 1807802 - DNA, 15 bp, Homo sapiens
agggtggcctttccc

SEQ ID NO: 1807803 - DNA, 15 bp, Homo sapiens
gggtggcctttccca

SEQ ID NO: 1807804 - DNA, 15 bp, Homo sapiens
ggtggcctttcccag

SEQ ID NO: 1807805 - DNA, 15 bp, Homo sapiens
gtggcctttcccagg

SEQ ID NO: 1807806 - DNA, 15 bp, Homo sapiens
tggcctttcccaggg

SEQ ID NO: 1807807 - DNA, 15 bp, Homo sapiens
ggcctttcccagggg

SEQ ID NO: 1807808 - DNA, 15 bp, Homo sapiens
gcctttcccagggga

SEQ ID NO: 1807809 - DNA, 15 bp, Homo sapiens
cctttcccaggggac

SEQ ID NO: 1807810 - DNA, 15 bp, Homo sapiens
ctttcccaggggaca

SEQ ID NO: 1807811 - DNA, 15 bp, Homo sapiens
tttcccaggggacat

SEQ ID NO: 1807812 - DNA, 15 bp, Homo sapiens
ttcccaggggacatt

SEQ ID NO: 1807813 - DNA, 15 bp, Homo sapiens
tcccaggggacattt

SEQ ID NO: 1807814 - DNA, 15 bp, Homo sapiens
cccaggggacattta

SEQ ID NO: 1807815 - DNA, 15 bp, Homo sapiens
ccaggggacatttag

SEQ ID NO: 1807816 - DNA, 15 bp, Homo sapiens
caggggacatttagc

SEQ ID NO: 1807817 - DNA, 15 bp, Homo sapiens
aggggacatttagct

SEQ ID NO: 1807818 - DNA, 15 bp, Homo sapiens
ggggacatttagctg

SEQ ID NO: 1807819 - DNA, 15 bp, Homo sapiens
gggacatttagctga

SEQ ID NO: 1807820 - DNA, 15 bp, Homo sapiens
ggacatttagctgag

SEQ ID NO: 1807821 - DNA, 15 bp, Homo sapiens
gacatttagctgaga

SEQ ID NO: 1807822 - DNA, 15 bp, Homo sapiens
acatttagctgagag

SEQ ID NO: 1807823 - DNA, 15 bp, Homo sapiens
catttagctgagaga

SEQ ID NO: 1807824 - DNA, 15 bp, Homo sapiens
atttagctgagagat

SEQ ID NO: 1807825 - DNA, 15 bp, Homo sapiens
tttagctgagagata

SEQ ID NO: 1807826 - DNA, 15 bp, Homo sapiens
ttagctgagagatag

SEQ ID NO: 1807827 - DNA, 15 bp, Homo sapiens
tagctgagagataga

SEQ ID NO: 1807828 - DNA, 15 bp, Homo sapiens
agctgagagatagac

SEQ ID NO: 1807829 - DNA, 15 bp, Homo sapiens
gctgagagatagacg

SEQ ID NO: 1807830 - DNA, 15 bp, Homo sapiens
ctgagagatagacgg

SEQ ID NO: 1807831 - DNA, 15 bp, Homo sapiens
tgagagatagacggt

SEQ ID NO: 1807832 - DNA, 15 bp, Homo sapiens
gagagatagacggta

SEQ ID NO: 1807833 - DNA, 15 bp, Homo sapiens
agagatagacggtat

SEQ ID NO: 1807834 - DNA, 15 bp, Homo sapiens
gagatagacggtatg

SEQ ID NO: 1807835 - DNA, 15 bp, Homo sapiens
agatagacggtatga

SEQ ID NO: 1807836 - DNA, 15 bp, Homo sapiens
gatagacggtatgaa

SEQ ID NO: 1807837 - DNA, 15 bp, Homo sapiens
atagacggtatgaag

SEQ ID NO: 1807838 - DNA, 15 bp, Homo sapiens
tagacggtatgaaga

SEQ ID NO: 1807839 - DNA, 15 bp, Homo sapiens
agacggtatgaagac

SEQ ID NO: 1807840 - DNA, 15 bp, Homo sapiens
gacggtatgaagacc

SEQ ID NO: 1807841 - DNA, 15 bp, Homo sapiens
acggtatgaagacct

SEQ ID NO: 1807842 - DNA, 15 bp, Homo sapiens
cggtatgaagacctg

SEQ ID NO: 1807843 - DNA, 15 bp, Homo sapiens
ggtatgaagacctga

SEQ ID NO: 1807844 - DNA, 15 bp, Homo sapiens
gtatgaagacctgac

SEQ ID NO: 1807845 - DNA, 15 bp, Homo sapiens
tatgaagacctgacc

SEQ ID NO: 1807846 - DNA, 15 bp, Homo sapiens
atgaagacctgaccg

SEQ ID NO: 1807847 - DNA, 15 bp, Homo sapiens
tgaagacctgaccgt

SEQ ID NO: 1807848 - DNA, 15 bp, Homo sapiens
gaagacctgaccgtt

SEQ ID NO: 1807849 - DNA, 15 bp, Homo sapiens
aagacctgaccgttc

SEQ ID NO: 1807850 - DNA, 15 bp, Homo sapiens
agacctgaccgttca

SEQ ID NO: 1807851 - DNA, 15 bp, Homo sapiens
gacctgaccgttcag

SEQ ID NO: 1807852 - DNA, 15 bp, Homo sapiens
acctgaccgttcaga

SEQ ID NO: 1807853 - DNA, 15 bp, Homo sapiens
cctgaccgttcagaa

SEQ ID NO: 1807854 - DNA, 15 bp, Homo sapiens
ctgaccgttcagaaa

SEQ ID NO: 1807855 - DNA, 15 bp, Homo sapiens
tgaccgttcagaaac

SEQ ID NO: 1807856 - DNA, 15 bp, Homo sapiens
gaccgttcagaaaca

SEQ ID NO: 1807857 - DNA, 15 bp, Homo sapiens
accgttcagaaacag

SEQ ID NO: 1807858 - DNA, 15 bp, Homo sapiens
ccgttcagaaacagg

SEQ ID NO: 1807859 - DNA, 15 bp, Homo sapiens
cgttcagaaacaggg

SEQ ID NO: 1807860 - DNA, 15 bp, Homo sapiens
gttcagaaacagggg

SEQ ID NO: 1807861 - DNA, 15 bp, Homo sapiens
ttcagaaacagggga

SEQ ID NO: 1807862 - DNA, 15 bp, Homo sapiens
tcagaaacaggggaa

SEQ ID NO: 1807863 - DNA, 15 bp, Homo sapiens
cagaaacaggggaag

SEQ ID NO: 1807864 - DNA, 15 bp, Homo sapiens
agaaacaggggaaga

SEQ ID NO: 1807865 - DNA, 15 bp, Homo sapiens
gaaacaggggaagag

SEQ ID NO: 1807866 - DNA, 15 bp, Homo sapiens
aaacaggggaagagg

SEQ ID NO: 1807867 - DNA, 15 bp, Homo sapiens
aacaggggaagaggc

SEQ ID NO: 1807868 - DNA, 15 bp, Homo sapiens
acaggggaagaggca

SEQ ID NO: 1807869 - DNA, 15 bp, Homo sapiens
caggggaagaggcag

SEQ ID NO: 1807870 - DNA, 15 bp, Homo sapiens
aggggaagaggcagc

SEQ ID NO: 1807871 - DNA, 15 bp, Homo sapiens
ggggaagaggcagca

SEQ ID NO: 1807872 - DNA, 15 bp, Homo sapiens
gggaagaggcagcag

SEQ ID NO: 1807873 - DNA, 15 bp, Homo sapiens
ggaagaggcagcagc

SEQ ID NO: 1807874 - DNA, 15 bp, Homo sapiens
gaagaggcagcagcc

SEQ ID NO: 1807875 - DNA, 15 bp, Homo sapiens
aagaggcagcagccc

SEQ ID NO: 1807876 - DNA, 15 bp, Homo sapiens
agaggcagcagcccg

SEQ ID NO: 1807877 - DNA, 15 bp, Homo sapiens
gaggcagcagcccgg

SEQ ID NO: 1807878 - DNA, 15 bp, Homo sapiens
aggcagcagcccggg

SEQ ID NO: 1807879 - DNA, 15 bp, Homo sapiens
ggcagcagcccgggc

SEQ ID NO: 1807880 - DNA, 15 bp, Homo sapiens
gcagcagcccgggca

SEQ ID NO: 1807881 - DNA, 15 bp, Homo sapiens
cagcagcccgggcaa

SEQ ID NO: 1807882 - DNA, 15 bp, Homo sapiens
agcagcccgggcaaa

SEQ ID NO: 1807883 - DNA, 15 bp, Homo sapiens
gcagcccgggcaaag

SEQ ID NO: 1807884 - DNA, 15 bp, Homo sapiens
cagcccgggcaaagg

SEQ ID NO: 1807885 - DNA, 15 bp, Homo sapiens
agcccgggcaaaggc

SEQ ID NO: 1807886 - DNA, 15 bp, Homo sapiens
gcccgggcaaaggcc

SEQ ID NO: 1807887 - DNA, 15 bp, Homo sapiens
cccgggcaaaggcct

SEQ ID NO: 1807888 - DNA, 15 bp, Homo sapiens
ccgggcaaaggcctt

SEQ ID NO: 1807889 - DNA, 15 bp, Homo sapiens
cgggcaaaggccttt

SEQ ID NO: 1807890 - DNA, 15 bp, Homo sapiens
gggcaaaggcctttg

SEQ ID NO: 1807891 - DNA, 15 bp, Homo sapiens
ggcaaaggcctttgg

SEQ ID NO: 1807892 - DNA, 15 bp, Homo sapiens
gcaaaggcctttggg

SEQ ID NO: 1807893 - DNA, 15 bp, Homo sapiens
caaaggcctttgggg

SEQ ID NO: 1807894 - DNA, 15 bp, Homo sapiens
aaaggcctttggggc

SEQ ID NO: 1807895 - DNA, 15 bp, Homo sapiens
aaggcctttggggca

SEQ ID NO: 1807896 - DNA, 15 bp, Homo sapiens
aggcctttggggcag

SEQ ID NO: 1807897 - DNA, 15 bp, Homo sapiens
ggcctttggggcagg

SEQ ID NO: 1807898 - DNA, 15 bp, Homo sapiens
gcctttggggcagga

SEQ ID NO: 1807899 - DNA, 15 bp, Homo sapiens
cctttggggcaggaa

SEQ ID NO: 1807900 - DNA, 15 bp, Homo sapiens
ctttggggcaggaaa

SEQ ID NO: 1807901 - DNA, 15 bp, Homo sapiens
tttggggcaggaaag

SEQ ID NO: 1807902 - DNA, 15 bp, Homo sapiens
ttggggcaggaaagg

SEQ ID NO: 1807903 - DNA, 15 bp, Homo sapiens
tggggcaggaaaggg

SEQ ID NO: 1807904 - DNA, 15 bp, Homo sapiens
ggggcaggaaagggc

SEQ ID NO: 1807905 - DNA, 15 bp, Homo sapiens
gggcaggaaagggct

SEQ ID NO: 1807906 - DNA, 15 bp, Homo sapiens
ggcaggaaagggctt

SEQ ID NO: 1807907 - DNA, 15 bp, Homo sapiens
gcaggaaagggcttg

SEQ ID NO: 1807908 - DNA, 15 bp, Homo sapiens
caggaaagggcttgg

SEQ ID NO: 1807909 - DNA, 15 bp, Homo sapiens
aggaaagggcttgga

SEQ ID NO: 1807910 - DNA, 15 bp, Homo sapiens
ggaaagggcttggat

SEQ ID NO: 1807911 - DNA, 15 bp, Homo sapiens
gaaagggcttggatc

SEQ ID NO: 1807912 - DNA, 15 bp, Homo sapiens
aaagggcttggatca

SEQ ID NO: 1807913 - DNA, 15 bp, Homo sapiens
aagggcttggatcac

SEQ ID NO: 1807914 - DNA, 15 bp, Homo sapiens
agggcttggatcact

SEQ ID NO: 1807915 - DNA, 15 bp, Homo sapiens
gggcttggatcactg

SEQ ID NO: 1807916 - DNA, 15 bp, Homo sapiens
ggcttggatcactgg

SEQ ID NO: 1807917 - DNA, 15 bp, Homo sapiens
gcttggatcactgga

SEQ ID NO: 1807918 - DNA, 15 bp, Homo sapiens
cttggatcactggag

SEQ ID NO: 1807919 - DNA, 15 bp, Homo sapiens
ttggatcactggaga

SEQ ID NO: 1807920 - DNA, 15 bp, Homo sapiens
tggatcactggagaa

SEQ ID NO: 1807921 - DNA, 15 bp, Homo sapiens
ggatcactggagaag

SEQ ID NO: 1807922 - DNA, 15 bp, Homo sapiens
gatcactggagaagc

SEQ ID NO: 1807923 - DNA, 15 bp, Homo sapiens
atcactggagaagca

SEQ ID NO: 1807924 - DNA, 15 bp, Homo sapiens
tcactggagaagcag

SEQ ID NO: 1807925 - DNA, 15 bp, Homo sapiens
cactggagaagcaga

SEQ ID NO: 1807926 - DNA, 15 bp, Homo sapiens
actggagaagcagaa

SEQ ID NO: 1807927 - DNA, 15 bp, Homo sapiens
ctggagaagcagaaa

SEQ ID NO: 1807928 - DNA, 15 bp, Homo sapiens
tggagaagcagaaag

SEQ ID NO: 1807929 - DNA, 15 bp, Homo sapiens
ggagaagcagaaaga

SEQ ID NO: 1807930 - DNA, 15 bp, Homo sapiens
gagaagcagaaagat

SEQ ID NO: 1807931 - DNA, 15 bp, Homo sapiens
agaagcagaaagatg

SEQ ID NO: 1807932 - DNA, 15 bp, Homo sapiens
gaagcagaaagatgg

SEQ ID NO: 1807933 - DNA, 15 bp, Homo sapiens
aagcagaaagatggc

SEQ ID NO: 1807934 - DNA, 15 bp, Homo sapiens
agcagaaagatggcc

SEQ ID NO: 1807935 - DNA, 15 bp, Homo sapiens
gcagaaagatggcca

SEQ ID NO: 1807936 - DNA, 15 bp, Homo sapiens
cagaaagatggccag

SEQ ID NO: 1807937 - DNA, 15 bp, Homo sapiens
agaaagatggccagt

SEQ ID NO: 1807938 - DNA, 15 bp, Homo sapiens
gaaagatggccagtg

SEQ ID NO: 1807939 - DNA, 15 bp, Homo sapiens
aaagatggccagtgt

SEQ ID NO: 1807940 - DNA, 15 bp, Homo sapiens
aagatggccagtgtg

SEQ ID NO: 1807941 - DNA, 15 bp, Homo sapiens
agatggccagtgtga

SEQ ID NO: 1807942 - DNA, 15 bp, Homo sapiens
gatggccagtgtgac

SEQ ID NO: 1807943 - DNA, 15 bp, Homo sapiens
atggccagtgtgacc

SEQ ID NO: 1807944 - DNA, 15 bp, Homo sapiens
tggccagtgtgacca

SEQ ID NO: 1807945 - DNA, 15 bp, Homo sapiens
ggccagtgtgaccag

SEQ ID NO: 1807946 - DNA, 15 bp, Homo sapiens
gccagtgtgaccaga

SEQ ID NO: 1807947 - DNA, 15 bp, Homo sapiens
ccagtgtgaccagag

SEQ ID NO: 1807948 - DNA, 15 bp, Homo sapiens
cagtgtgaccagagt

SEQ ID NO: 1807949 - DNA, 15 bp, Homo sapiens
agtgtgaccagagtg

SEQ ID NO: 1807950 - DNA, 15 bp, Homo sapiens
gtgtgaccagagtgt

SEQ ID NO: 1807951 - DNA, 15 bp, Homo sapiens
tgtgaccagagtgtg

SEQ ID NO: 1807952 - DNA, 15 bp, Homo sapiens
gtgaccagagtgtga

SEQ ID NO: 1807953 - DNA, 15 bp, Homo sapiens
tgaccagagtgtgac

SEQ ID NO: 1807954 - DNA, 15 bp, Homo sapiens
gaccagagtgtgaca

SEQ ID NO: 1807955 - DNA, 15 bp, Homo sapiens
accagagtgtgacaa

SEQ ID NO: 1807956 - DNA, 15 bp, Homo sapiens
ccagagtgtgacaaa

SEQ ID NO: 1807957 - DNA, 15 bp, Homo sapiens
cagagtgtgacaaag

SEQ ID NO: 1807958 - DNA, 15 bp, Homo sapiens
agagtgtgacaaagt

SEQ ID NO: 1807959 - DNA, 15 bp, Homo sapiens
gagtgtgacaaagtc

SEQ ID NO: 1807960 - DNA, 15 bp, Homo sapiens
agtgtgacaaagtca

SEQ ID NO: 1807961 - DNA, 15 bp, Homo sapiens
gtgtgacaaagtcag

SEQ ID NO: 1807962 - DNA, 15 bp, Homo sapiens
tgtgacaaagtcaga

SEQ ID NO: 1807963 - DNA, 15 bp, Homo sapiens
gtgacaaagtcagag

SEQ ID NO: 1807964 - DNA, 15 bp, Homo sapiens
tgacaaagtcagaga

SEQ ID NO: 1807965 - DNA, 15 bp, Homo sapiens
gacaaagtcagagaa

SEQ ID NO: 1807966 - DNA, 15 bp, Homo sapiens
acaaagtcagagaaa

SEQ ID NO: 1807967 - DNA, 15 bp, Homo sapiens
caaagtcagagaaaa

SEQ ID NO: 1807968 - DNA, 15 bp, Homo sapiens
aaagtcagagaaaac

SEQ ID NO: 1807969 - DNA, 15 bp, Homo sapiens
aagtcagagaaaacc

SEQ ID NO: 1807970 - DNA, 15 bp, Homo sapiens
agtcagagaaaacca

SEQ ID NO: 1807971 - DNA, 15 bp, Homo sapiens
gtcagagaaaaccag

SEQ ID NO: 1807972 - DNA, 15 bp, Homo sapiens
tcagagaaaaccagg

SEQ ID NO: 1807973 - DNA, 15 bp, Homo sapiens
cagagaaaaccagga

SEQ ID NO: 1807974 - DNA, 15 bp, Homo sapiens
agagaaaaccaggaa

SEQ ID NO: 1807975 - DNA, 15 bp, Homo sapiens
gagaaaaccaggaag

SEQ ID NO: 1807976 - DNA, 15 bp, Homo sapiens
agaaaaccaggaaga

SEQ ID NO: 1807977 - DNA, 15 bp, Homo sapiens
gaaaaccaggaagat

SEQ ID NO: 1807978 - DNA, 15 bp, Homo sapiens
aaaaccaggaagatg

SEQ ID NO: 1807979 - DNA, 15 bp, Homo sapiens
aaaccaggaagatgg

SEQ ID NO: 1807980 - DNA, 15 bp, Homo sapiens
aaccaggaagatgga

SEQ ID NO: 1807981 - DNA, 15 bp, Homo sapiens
accaggaagatggag

SEQ ID NO: 1807982 - DNA, 15 bp, Homo sapiens
ccaggaagatggagc

SEQ ID NO: 1807983 - DNA, 15 bp, Homo sapiens
caggaagatggagct

SEQ ID NO: 1807984 - DNA, 15 bp, Homo sapiens
aggaagatggagctg

SEQ ID NO: 1807985 - DNA, 15 bp, Homo sapiens
ggaagatggagctgg

SEQ ID NO: 1807986 - DNA, 15 bp, Homo sapiens
gaagatggagctgga

SEQ ID NO: 1807987 - DNA, 15 bp, Homo sapiens
aagatggagctggag

SEQ ID NO: 1807988 - DNA, 15 bp, Homo sapiens
agatggagctggaga

SEQ ID NO: 1807989 - DNA, 15 bp, Homo sapiens
gatggagctggagac

SEQ ID NO: 1807990 - DNA, 15 bp, Homo sapiens
atggagctggagaca

SEQ ID NO: 1807991 - DNA, 15 bp, Homo sapiens
tggagctggagacac

SEQ ID NO: 1807992 - DNA, 15 bp, Homo sapiens
ggagctggagacaca

SEQ ID NO: 1807993 - DNA, 15 bp, Homo sapiens
gagctggagacacag

SEQ ID NO: 1807994 - DNA, 15 bp, Homo sapiens
agctggagacacagg

SEQ ID NO: 1807995 - DNA, 15 bp, Homo sapiens
gctggagacacaggc

SEQ ID NO: 1807996 - DNA, 15 bp, Homo sapiens
ctggagacacaggcg

SEQ ID NO: 1807997 - DNA, 15 bp, Homo sapiens
tggagacacaggcgg

SEQ ID NO: 1807998 - DNA, 15 bp, Homo sapiens
ggagacacaggcggg

SEQ ID NO: 1807999 - DNA, 15 bp, Homo sapiens
gagacacaggcgggg

SEQ ID NO: 1808000 - DNA, 15 bp, Homo sapiens
agacacaggcggggc

SEQ ID NO: 1808001 - DNA, 15 bp, Homo sapiens
gacacaggcggggcc

SEQ ID NO: 1808002 - DNA, 15 bp, Homo sapiens
acacaggcggggcca

SEQ ID NO: 1808003 - DNA, 15 bp, Homo sapiens
cacaggcggggccag

SEQ ID NO: 1808004 - DNA, 15 bp, Homo sapiens
acaggcggggccaga

SEQ ID NO: 1808005 - DNA, 15 bp, Homo sapiens
caggcggggccagat

SEQ ID NO: 1808006 - DNA, 15 bp, Homo sapiens
aggcggggccagatc

SEQ ID NO: 1808007 - DNA, 15 bp, Homo sapiens
ggcggggccagatca

SEQ ID NO: 1808008 - DNA, 15 bp, Homo sapiens
gcggggccagatcac

SEQ ID NO: 1808009 - DNA, 15 bp, Homo sapiens
cggggccagatcacg

SEQ ID NO: 1808010 - DNA, 15 bp, Homo sapiens
ggggccagatcacga

SEQ ID NO: 1808011 - DNA, 15 bp, Homo sapiens
gggccagatcacgag

SEQ ID NO: 1808012 - DNA, 15 bp, Homo sapiens
ggccagatcacgagg

SEQ ID NO: 1808013 - DNA, 15 bp, Homo sapiens
gccagatcacgaggg

SEQ ID NO: 1808014 - DNA, 15 bp, Homo sapiens
ccagatcacgagggt

SEQ ID NO: 1808015 - DNA, 15 bp, Homo sapiens
cagatcacgagggtc

SEQ ID NO: 1808016 - DNA, 15 bp, Homo sapiens
agatcacgagggtcc

SEQ ID NO: 1808017 - DNA, 15 bp, Homo sapiens
gatcacgagggtcct

SEQ ID NO: 1808018 - DNA, 15 bp, Homo sapiens
atcacgagggtcctt

SEQ ID NO: 1808019 - DNA, 15 bp, Homo sapiens
tcacgagggtccttg

SEQ ID NO: 1808020 - DNA, 15 bp, Homo sapiens
cacgagggtccttgc

SEQ ID NO: 1808021 - DNA, 15 bp, Homo sapiens
acgagggtccttgca

SEQ ID NO: 1808022 - DNA, 15 bp, Homo sapiens
cgagggtccttgcag

SEQ ID NO: 1808023 - DNA, 15 bp, Homo sapiens
gagggtccttgcaga

SEQ ID NO: 1808024 - DNA, 15 bp, Homo sapiens
agggtccttgcagac

SEQ ID NO: 1808025 - DNA, 15 bp, Homo sapiens
gggtccttgcagacc

SEQ ID NO: 1808026 - DNA, 15 bp, Homo sapiens
ggtccttgcagacca

SEQ ID NO: 1808027 - DNA, 15 bp, Homo sapiens
gtccttgcagaccag

SEQ ID NO: 1808028 - DNA, 15 bp, Homo sapiens
tccttgcagaccaga

SEQ ID NO: 1808029 - DNA, 15 bp, Homo sapiens
ccttgcagaccagag

SEQ ID NO: 1808030 - DNA, 15 bp, Homo sapiens
cttgcagaccagagc

SEQ ID NO: 1808031 - DNA, 15 bp, Homo sapiens
ttgcagaccagagca

SEQ ID NO: 1808032 - DNA, 15 bp, Homo sapiens
tgcagaccagagcaa

SEQ ID NO: 1808033 - DNA, 15 bp, Homo sapiens
gcagaccagagcaag

SEQ ID NO: 1808034 - DNA, 15 bp, Homo sapiens
cagaccagagcaagg

SEQ ID NO: 1808035 - DNA, 15 bp, Homo sapiens
agaccagagcaaggg

SEQ ID NO: 1808036 - DNA, 15 bp, Homo sapiens
gaccagagcaagggt

SEQ ID NO: 1808037 - DNA, 15 bp, Homo sapiens
accagagcaagggtt

SEQ ID NO: 1808038 - DNA, 15 bp, Homo sapiens
ccagagcaagggttt

SEQ ID NO: 1808039 - DNA, 15 bp, Homo sapiens
cagagcaagggtttg

SEQ ID NO: 1808040 - DNA, 15 bp, Homo sapiens
agagcaagggtttgg

SEQ ID NO: 1808041 - DNA, 15 bp, Homo sapiens
gagcaagggtttgga

SEQ ID NO: 1808042 - DNA, 15 bp, Homo sapiens
agcaagggtttggat

SEQ ID NO: 1808043 - DNA, 15 bp, Homo sapiens
gcaagggtttggatt

SEQ ID NO: 1808044 - DNA, 15 bp, Homo sapiens
caagggtttggattt

SEQ ID NO: 1808045 - DNA, 15 bp, Homo sapiens
aagggtttggatttt

SEQ ID NO: 1808046 - DNA, 15 bp, Homo sapiens
agggtttggatttta

SEQ ID NO: 1808047 - DNA, 15 bp, Homo sapiens
gggtttggattttat

SEQ ID NO: 1808048 - DNA, 15 bp, Homo sapiens
ggtttggattttatt

SEQ ID NO: 1808049 - DNA, 15 bp, Homo sapiens
gtttggattttattc

SEQ ID NO: 1808050 - DNA, 15 bp, Homo sapiens
tttggattttattcc

SEQ ID NO: 1808051 - DNA, 15 bp, Homo sapiens
ttggattttattcca

SEQ ID NO: 1808052 - DNA, 15 bp, Homo sapiens
tggattttattccaa

SEQ ID NO: 1808053 - DNA, 15 bp, Homo sapiens
ggattttattccaag

SEQ ID NO: 1808054 - DNA, 15 bp, Homo sapiens
gattttattccaagt

SEQ ID NO: 1808055 - DNA, 15 bp, Homo sapiens
attttattccaagta

SEQ ID NO: 1808056 - DNA, 15 bp, Homo sapiens
ttttattccaagtat

SEQ ID NO: 1808057 - DNA, 15 bp, Homo sapiens
ttattccaagtatga

SEQ ID NO: 1808058 - DNA, 15 bp, Homo sapiens
tattccaagtatgaa

SEQ ID NO: 1808059 - DNA, 15 bp, Homo sapiens
attccaagtatgaag

SEQ ID NO: 1808060 - DNA, 15 bp, Homo sapiens
ttccaagtatgaagg

SEQ ID NO: 1808061 - DNA, 15 bp, Homo sapiens
tccaagtatgaaggg

SEQ ID NO: 1808062 - DNA, 15 bp, Homo sapiens
ccaagtatgaaggga

SEQ ID NO: 1808063 - DNA, 15 bp, Homo sapiens
caagtatgaagggaa

SEQ ID NO: 1808064 - DNA, 15 bp, Homo sapiens
aagtatgaagggaag

SEQ ID NO: 1808065 - DNA, 15 bp, Homo sapiens
agtatgaagggaagc

SEQ ID NO: 1808066 - DNA, 15 bp, Homo sapiens
gtatgaagggaagct

SEQ ID NO: 1808067 - DNA, 15 bp, Homo sapiens
tatgaagggaagctg

SEQ ID NO: 1808068 - DNA, 15 bp, Homo sapiens
atgaagggaagctgc

SEQ ID NO: 1808069 - DNA, 15 bp, Homo sapiens
tgaagggaagctgct

SEQ ID NO: 1808070 - DNA, 15 bp, Homo sapiens
gaagggaagctgctg

SEQ ID NO: 1808071 - DNA, 15 bp, Homo sapiens
aagggaagctgctga

SEQ ID NO: 1808072 - DNA, 15 bp, Homo sapiens
agggaagctgctgaa

SEQ ID NO: 1808073 - DNA, 15 bp, Homo sapiens
gggaagctgctgaag

SEQ ID NO: 1808074 - DNA, 15 bp, Homo sapiens
ggaagctgctgaagt

SEQ ID NO: 1808075 - DNA, 15 bp, Homo sapiens
gaagctgctgaagtg

SEQ ID NO: 1808076 - DNA, 15 bp, Homo sapiens
aagctgctgaagtgt

SEQ ID NO: 1808077 - DNA, 15 bp, Homo sapiens
agctgctgaagtgtg

SEQ ID NO: 1808078 - DNA, 15 bp, Homo sapiens
gctgctgaagtgtgt

SEQ ID NO: 1808079 - DNA, 15 bp, Homo sapiens
ctgctgaagtgtgtt

SEQ ID NO: 1808080 - DNA, 15 bp, Homo sapiens
tgctgaagtgtgttt

SEQ ID NO: 1808081 - DNA, 15 bp, Homo sapiens
gctgaagtgtgtttt

SEQ ID NO: 1808082 - DNA, 15 bp, Homo sapiens
ctgaagtgtgttttc

SEQ ID NO: 1808083 - DNA, 15 bp, Homo sapiens
tgaagtgtgttttcc

SEQ ID NO: 1808084 - DNA, 15 bp, Homo sapiens
gaagtgtgttttcct

SEQ ID NO: 1808085 - DNA, 15 bp, Homo sapiens
aagtgtgttttcctt

SEQ ID NO: 1808086 - DNA, 15 bp, Homo sapiens
agtgtgttttccttt

SEQ ID NO: 1808087 - DNA, 15 bp, Homo sapiens
gtgtgttttccttta

SEQ ID NO: 1808088 - DNA, 15 bp, Homo sapiens
tgtgttttcctttac

SEQ ID NO: 1808089 - DNA, 15 bp, Homo sapiens
gtgttttcctttaca

SEQ ID NO: 1808090 - DNA, 15 bp, Homo sapiens
tgttttcctttacaa

SEQ ID NO: 1808091 - DNA, 15 bp, Homo sapiens
gttttcctttacaat

SEQ ID NO: 1808092 - DNA, 15 bp, Homo sapiens
ttttcctttacaatt

SEQ ID NO: 1808093 - DNA, 15 bp, Homo sapiens
tttcctttacaattt

SEQ ID NO: 1808094 - DNA, 15 bp, Homo sapiens
ttcctttacaatttg

SEQ ID NO: 1808095 - DNA, 15 bp, Homo sapiens
tcctttacaatttgt

SEQ ID NO: 1808096 - DNA, 15 bp, Homo sapiens
cctttacaatttgta

SEQ ID NO: 1808097 - DNA, 15 bp, Homo sapiens
ctttacaatttgtag

SEQ ID NO: 1808098 - DNA, 15 bp, Homo sapiens
tttacaatttgtagt

SEQ ID NO: 1808099 - DNA, 15 bp, Homo sapiens
ttacaatttgtagtt

SEQ ID NO: 1808100 - DNA, 15 bp, Homo sapiens
tacaatttgtagttg

SEQ ID NO: 1808101 - DNA, 15 bp, Homo sapiens
acaatttgtagttga

SEQ ID NO: 1808102 - DNA, 15 bp, Homo sapiens
caatttgtagttgaa

SEQ ID NO: 1808103 - DNA, 15 bp, Homo sapiens
aatttgtagttgaaa

SEQ ID NO: 1808104 - DNA, 15 bp, Homo sapiens
atttgtagttgaaat

SEQ ID NO: 1808105 - DNA, 15 bp, Homo sapiens
tttgtagttgaaata

SEQ ID NO: 1808106 - DNA, 15 bp, Homo sapiens
ttgtagttgaaatat

SEQ ID NO: 1808107 - DNA, 15 bp, Homo sapiens
tgtagttgaaatata

SEQ ID NO: 1808108 - DNA, 15 bp, Homo sapiens
gtagttgaaatataa

SEQ ID NO: 1808109 - DNA, 15 bp, Homo sapiens
tagttgaaatataat

SEQ ID NO: 1808110 - DNA, 15 bp, Homo sapiens
agttgaaatataata

SEQ ID NO: 1808111 - DNA, 15 bp, Homo sapiens
gttgaaatataatat

SEQ ID NO: 1808112 - DNA, 15 bp, Homo sapiens
ttgaaatataatatg

SEQ ID NO: 1808113 - DNA, 15 bp, Homo sapiens
tgaaatataatatgc

SEQ ID NO: 1808114 - DNA, 15 bp, Homo sapiens
gaaatataatatgca

SEQ ID NO: 1808115 - DNA, 15 bp, Homo sapiens
aaatataatatgcaa

SEQ ID NO: 1808116 - DNA, 15 bp, Homo sapiens
aatataatatgcaaa

SEQ ID NO: 1808117 - DNA, 15 bp, Homo sapiens
atataatatgcaaag

SEQ ID NO: 1808118 - DNA, 15 bp, Homo sapiens
tataatatgcaaagt

SEQ ID NO: 1808119 - DNA, 15 bp, Homo sapiens
ataatatgcaaagta

SEQ ID NO: 1808120 - DNA, 15 bp, Homo sapiens
taatatgcaaagtac

SEQ ID NO: 1808121 - DNA, 15 bp, Homo sapiens
aatatgcaaagtaca

SEQ ID NO: 1808122 - DNA, 15 bp, Homo sapiens
atatgcaaagtacac

SEQ ID NO: 1808123 - DNA, 15 bp, Homo sapiens
tatgcaaagtacaca

SEQ ID NO: 1808124 - DNA, 15 bp, Homo sapiens
atgcaaagtacacaa

SEQ ID NO: 1808125 - DNA, 15 bp, Homo sapiens
tgcaaagtacacaag

SEQ ID NO: 1808126 - DNA, 15 bp, Homo sapiens
gcaaagtacacaagt

SEQ ID NO: 1808127 - DNA, 15 bp, Homo sapiens
caaagtacacaagtc

SEQ ID NO: 1808128 - DNA, 15 bp, Homo sapiens
aaagtacacaagtct

SEQ ID NO: 1808129 - DNA, 15 bp, Homo sapiens
aagtacacaagtctt

SEQ ID NO: 1808130 - DNA, 15 bp, Homo sapiens
agtacacaagtctta

SEQ ID NO: 1808131 - DNA, 15 bp, Homo sapiens
gtacacaagtcttaa

SEQ ID NO: 1808132 - DNA, 15 bp, Homo sapiens
tacacaagtcttaac

SEQ ID NO: 1808133 - DNA, 15 bp, Homo sapiens
acacaagtcttaact

SEQ ID NO: 1808134 - DNA, 15 bp, Homo sapiens
cacaagtcttaacta

SEQ ID NO: 1808135 - DNA, 15 bp, Homo sapiens
acaagtcttaactat

SEQ ID NO: 1808136 - DNA, 15 bp, Homo sapiens
caagtcttaactata

SEQ ID NO: 1808137 - DNA, 15 bp, Homo sapiens
aagtcttaactatat

SEQ ID NO: 1808138 - DNA, 15 bp, Homo sapiens
agtcttaactatatg

SEQ ID NO: 1808139 - DNA, 15 bp, Homo sapiens
gtcttaactatatgt

SEQ ID NO: 1808140 - DNA, 15 bp, Homo sapiens
tcttaactatatgta

SEQ ID NO: 1808141 - DNA, 15 bp, Homo sapiens
cttaactatatgtaa

SEQ ID NO: 1808142 - DNA, 15 bp, Homo sapiens
ttaactatatgtaag

SEQ ID NO: 1808143 - DNA, 15 bp, Homo sapiens
taactatatgtaagc

SEQ ID NO: 1808144 - DNA, 15 bp, Homo sapiens
aactatatgtaagct

SEQ ID NO: 1808145 - DNA, 15 bp, Homo sapiens
actatatgtaagctt

SEQ ID NO: 1808146 - DNA, 15 bp, Homo sapiens
ctatatgtaagctta

SEQ ID NO: 1808147 - DNA, 15 bp, Homo sapiens
tatatgtaagcttaa

SEQ ID NO: 1808148 - DNA, 15 bp, Homo sapiens
atatgtaagcttaat

SEQ ID NO: 1808149 - DNA, 15 bp, Homo sapiens
tatgtaagcttaatg

SEQ ID NO: 1808150 - DNA, 15 bp, Homo sapiens
atgtaagcttaatga

SEQ ID NO: 1808151 - DNA, 15 bp, Homo sapiens
tgtaagcttaatgaa

SEQ ID NO: 1808152 - DNA, 15 bp, Homo sapiens
gtaagcttaatgaat

SEQ ID NO: 1808153 - DNA, 15 bp, Homo sapiens
taagcttaatgaatg

SEQ ID NO: 1808154 - DNA, 15 bp, Homo sapiens
aagcttaatgaatgt

SEQ ID NO: 1808155 - DNA, 15 bp, Homo sapiens
agcttaatgaatgtt

SEQ ID NO: 1808156 - DNA, 15 bp, Homo sapiens
gcttaatgaatgttt

SEQ ID NO: 1808157 - DNA, 15 bp, Homo sapiens
cttaatgaatgtttc

SEQ ID NO: 1808158 - DNA, 15 bp, Homo sapiens
ttaatgaatgtttcc

SEQ ID NO: 1808159 - DNA, 15 bp, Homo sapiens
taatgaatgtttcca

SEQ ID NO: 1808160 - DNA, 15 bp, Homo sapiens
aatgaatgtttccat

SEQ ID NO: 1808161 - DNA, 15 bp, Homo sapiens
atgaatgtttccatg

SEQ ID NO: 1808162 - DNA, 15 bp, Homo sapiens
tgaatgtttccatga

SEQ ID NO: 1808163 - DNA, 15 bp, Homo sapiens
gaatgtttccatgaa

SEQ ID NO: 1808164 - DNA, 15 bp, Homo sapiens
aatgtttccatgaac

SEQ ID NO: 1808165 - DNA, 15 bp, Homo sapiens
atgtttccatgaacc

SEQ ID NO: 1808166 - DNA, 15 bp, Homo sapiens
tgtttccatgaacca

SEQ ID NO: 1808167 - DNA, 15 bp, Homo sapiens
gtttccatgaaccaa

SEQ ID NO: 1808168 - DNA, 15 bp, Homo sapiens
tttccatgaaccaaa

SEQ ID NO: 1808169 - DNA, 15 bp, Homo sapiens
ttccatgaaccaaat

SEQ ID NO: 1808170 - DNA, 15 bp, Homo sapiens
tccatgaaccaaata

SEQ ID NO: 1808171 - DNA, 15 bp, Homo sapiens
ccatgaaccaaatac

SEQ ID NO: 1808172 - DNA, 15 bp, Homo sapiens
catgaaccaaatacc

SEQ ID NO: 1808173 - DNA, 15 bp, Homo sapiens
atgaaccaaataccg

SEQ ID NO: 1808174 - DNA, 15 bp, Homo sapiens
tgaaccaaataccgc

SEQ ID NO: 1808175 - DNA, 15 bp, Homo sapiens
gaaccaaataccgct

SEQ ID NO: 1808176 - DNA, 15 bp, Homo sapiens
aaccaaataccgctg

SEQ ID NO: 1808177 - DNA, 15 bp, Homo sapiens
accaaataccgctgt

SEQ ID NO: 1808178 - DNA, 15 bp, Homo sapiens
ccaaataccgctgtg

SEQ ID NO: 1808179 - DNA, 15 bp, Homo sapiens
caaataccgctgtgc

SEQ ID NO: 1808180 - DNA, 15 bp, Homo sapiens
aaataccgctgtgca

SEQ ID NO: 1808181 - DNA, 15 bp, Homo sapiens
aataccgctgtgcaa

SEQ ID NO: 1808182 - DNA, 15 bp, Homo sapiens
ataccgctgtgcaac

SEQ ID NO: 1808183 - DNA, 15 bp, Homo sapiens
taccgctgtgcaacc

SEQ ID NO: 1808184 - DNA, 15 bp, Homo sapiens
accgctgtgcaacca

SEQ ID NO: 1808185 - DNA, 15 bp, Homo sapiens
ccgctgtgcaaccat

SEQ ID NO: 1808186 - DNA, 15 bp, Homo sapiens
cgctgtgcaaccatc

SEQ ID NO: 1808187 - DNA, 15 bp, Homo sapiens
gctgtgcaaccatca

SEQ ID NO: 1808188 - DNA, 15 bp, Homo sapiens
tgcaaccatcaccag

SEQ ID NO: 1808189 - DNA, 15 bp, Homo sapiens
gcaaccatcaccagc

SEQ ID NO: 1808190 - DNA, 15 bp, Homo sapiens
caaccatcaccagct

SEQ ID NO: 1808191 - DNA, 15 bp, Homo sapiens
aaccatcaccagctc

SEQ ID NO: 1808192 - DNA, 15 bp, Homo sapiens
accatcaccagctca

SEQ ID NO: 1808193 - DNA, 15 bp, Homo sapiens
ccatcaccagctcaa

SEQ ID NO: 1808194 - DNA, 15 bp, Homo sapiens
catcaccagctcaag

SEQ ID NO: 1808195 - DNA, 15 bp, Homo sapiens
atcaccagctcaaga

SEQ ID NO: 1808196 - DNA, 15 bp, Homo sapiens
tcaccagctcaagag

SEQ ID NO: 1808197 - DNA, 15 bp, Homo sapiens
caccagctcaagaga

SEQ ID NO: 1808198 - DNA, 15 bp, Homo sapiens
accagctcaagagac

SEQ ID NO: 1808199 - DNA, 15 bp, Homo sapiens
ccagctcaagagacg

SEQ ID NO: 1808200 - DNA, 15 bp, Homo sapiens
cagctcaagagacga

SEQ ID NO: 1808201 - DNA, 15 bp, Homo sapiens
agctcaagagacgaa

SEQ ID NO: 1808202 - DNA, 15 bp, Homo sapiens
gctcaagagacgaac

SEQ ID NO: 1808203 - DNA, 15 bp, Homo sapiens
ctcaagagacgaacc

SEQ ID NO: 1808204 - DNA, 15 bp, Homo sapiens
tcaagagacgaaccc

SEQ ID NO: 1808205 - DNA, 15 bp, Homo sapiens
caagagacgaaccct

SEQ ID NO: 1808206 - DNA, 15 bp, Homo sapiens
aagagacgaaccctt

SEQ ID NO: 1808207 - DNA, 15 bp, Homo sapiens
agagacgaacccttc

SEQ ID NO: 1808208 - DNA, 15 bp, Homo sapiens
gagacgaacccttct

SEQ ID NO: 1808209 - DNA, 15 bp, Homo sapiens
agacgaacccttctc

SEQ ID NO: 1808210 - DNA, 15 bp, Homo sapiens
gacgaacccttctcc

SEQ ID NO: 1808211 - DNA, 15 bp, Homo sapiens
acgaacccttctccc

SEQ ID NO: 1808212 - DNA, 15 bp, Homo sapiens
cgaacccttctccct

SEQ ID NO: 1808213 - DNA, 15 bp, Homo sapiens
gaacccttctccctc

SEQ ID NO: 1808214 - DNA, 15 bp, Homo sapiens
aacccttctccctcc

SEQ ID NO: 1808215 - DNA, 15 bp, Homo sapiens
acccttctccctcct

SEQ ID NO: 1808216 - DNA, 15 bp, Homo sapiens
cccttctccctcctc

SEQ ID NO: 1808217 - DNA, 15 bp, Homo sapiens
ccttctccctcctcc

SEQ ID NO: 1808218 - DNA, 15 bp, Homo sapiens
cttctccctcctcct

SEQ ID NO: 1808219 - DNA, 15 bp, Homo sapiens
ttctccctcctcctg

SEQ ID NO: 1808220 - DNA, 15 bp, Homo sapiens
tctccctcctcctga

SEQ ID NO: 1808221 - DNA, 15 bp, Homo sapiens
ctccctcctcctgac

SEQ ID NO: 1808222 - DNA, 15 bp, Homo sapiens
tccctcctcctgact

SEQ ID NO: 1808223 - DNA, 15 bp, Homo sapiens
ccctcctcctgactg

SEQ ID NO: 1808224 - DNA, 15 bp, Homo sapiens
cctcctcctgactgc

SEQ ID NO: 1808225 - DNA, 15 bp, Homo sapiens
ctcctcctgactgcc

SEQ ID NO: 1808226 - DNA, 15 bp, Homo sapiens
tcctcctgactgcca

SEQ ID NO: 1808227 - DNA, 15 bp, Homo sapiens
cctcctgactgccag

SEQ ID NO: 1808228 - DNA, 15 bp, Homo sapiens
ctcctgactgccagt

SEQ ID NO: 1808229 - DNA, 15 bp, Homo sapiens
tcctgactgccagta

SEQ ID NO: 1808230 - DNA, 15 bp, Homo sapiens
cctgactgccagtaa

SEQ ID NO: 1808231 - DNA, 15 bp, Homo sapiens
ctgactgccagtaac

SEQ ID NO: 1808232 - DNA, 15 bp, Homo sapiens
tgactgccagtaaca

SEQ ID NO: 1808233 - DNA, 15 bp, Homo sapiens
gactgccagtaacat

SEQ ID NO: 1808234 - DNA, 15 bp, Homo sapiens
actgccagtaacata

SEQ ID NO: 1808235 - DNA, 15 bp, Homo sapiens
ctgccagtaacatag

SEQ ID NO: 1808236 - DNA, 15 bp, Homo sapiens
tgccagtaacatagt

SEQ ID NO: 1808237 - DNA, 15 bp, Homo sapiens
gccagtaacatagtg

SEQ ID NO: 1808238 - DNA, 15 bp, Homo sapiens
ccagtaacatagtgg

SEQ ID NO: 1808239 - DNA, 15 bp, Homo sapiens
cagtaacatagtggt

SEQ ID NO: 1808240 - DNA, 15 bp, Homo sapiens
agtaacatagtggtt

SEQ ID NO: 1808241 - DNA, 15 bp, Homo sapiens
gtaacatagtggttc

SEQ ID NO: 1808242 - DNA, 15 bp, Homo sapiens
taacatagtggttca

SEQ ID NO: 1808243 - DNA, 15 bp, Homo sapiens
aacatagtggttcag

SEQ ID NO: 1808244 - DNA, 15 bp, Homo sapiens
acatagtggttcagc

SEQ ID NO: 1808245 - DNA, 15 bp, Homo sapiens
catagtggttcagct

SEQ ID NO: 1808246 - DNA, 15 bp, Homo sapiens
atagtggttcagctc

SEQ ID NO: 1808247 - DNA, 15 bp, Homo sapiens
tagtggttcagctca

SEQ ID NO: 1808248 - DNA, 15 bp, Homo sapiens
agtggttcagctcaa

SEQ ID NO: 1808249 - DNA, 15 bp, Homo sapiens
gtggttcagctcaag

SEQ ID NO: 1808250 - DNA, 15 bp, Homo sapiens
tggttcagctcaaga

SEQ ID NO: 1808251 - DNA, 15 bp, Homo sapiens
ggttcagctcaagaa

SEQ ID NO: 1808252 - DNA, 15 bp, Homo sapiens
gttcagctcaagaaa

SEQ ID NO: 1808253 - DNA, 15 bp, Homo sapiens
ttcagctcaagaaac

SEQ ID NO: 1808254 - DNA, 15 bp, Homo sapiens
tcagctcaagaaaca

SEQ ID NO: 1808255 - DNA, 15 bp, Homo sapiens
cagctcaagaaacag

SEQ ID NO: 1808256 - DNA, 15 bp, Homo sapiens
agctcaagaaacaga

SEQ ID NO: 1808257 - DNA, 15 bp, Homo sapiens
gctcaagaaacagaa

SEQ ID NO: 1808258 - DNA, 15 bp, Homo sapiens
ctcaagaaacagaac

SEQ ID NO: 1808259 - DNA, 15 bp, Homo sapiens
tcaagaaacagaact

SEQ ID NO: 1808260 - DNA, 15 bp, Homo sapiens
caagaaacagaactc

SEQ ID NO: 1808261 - DNA, 15 bp, Homo sapiens
aagaaacagaactct

SEQ ID NO: 1808262 - DNA, 15 bp, Homo sapiens
agaaacagaactctt

SEQ ID NO: 1808263 - DNA, 15 bp, Homo sapiens
gaaacagaactcttc

SEQ ID NO: 1808264 - DNA, 15 bp, Homo sapiens
aaacagaactcttct

SEQ ID NO: 1808265 - DNA, 15 bp, Homo sapiens
aacagaactcttctg

SEQ ID NO: 1808266 - DNA, 15 bp, Homo sapiens
acagaactcttctga

SEQ ID NO: 1808267 - DNA, 15 bp, Homo sapiens
cagaactcttctgac

SEQ ID NO: 1808268 - DNA, 15 bp, Homo sapiens
agaactcttctgact

SEQ ID NO: 1808269 - DNA, 15 bp, Homo sapiens
gaactcttctgactt

SEQ ID NO: 1808270 - DNA, 15 bp, Homo sapiens
aactcttctgacttc

SEQ ID NO: 1808271 - DNA, 15 bp, Homo sapiens
actcttctgacttcc

SEQ ID NO: 1808272 - DNA, 15 bp, Homo sapiens
ctcttctgacttccc

SEQ ID NO: 1808273 - DNA, 15 bp, Homo sapiens
tcttctgacttcccc

SEQ ID NO: 1808274 - DNA, 15 bp, Homo sapiens
cttctgacttcccct

SEQ ID NO: 1808275 - DNA, 15 bp, Homo sapiens
ttctgacttccccta

SEQ ID NO: 1808276 - DNA, 15 bp, Homo sapiens
tctgacttcccctaa

SEQ ID NO: 1808277 - DNA, 15 bp, Homo sapiens
ctgacttcccctaac

SEQ ID NO: 1808278 - DNA, 15 bp, Homo sapiens
tgacttcccctaaca

SEQ ID NO: 1808279 - DNA, 15 bp, Homo sapiens
gacttcccctaacat

SEQ ID NO: 1808280 - DNA, 15 bp, Homo sapiens
acttcccctaacata

SEQ ID NO: 1808281 - DNA, 15 bp, Homo sapiens
cttcccctaacatag

SEQ ID NO: 1808282 - DNA, 15 bp, Homo sapiens
ttcccctaacatagc

SEQ ID NO: 1808283 - DNA, 15 bp, Homo sapiens
tcccctaacatagcg

SEQ ID NO: 1808284 - DNA, 15 bp, Homo sapiens
cccctaacatagcgg

SEQ ID NO: 1808285 - DNA, 15 bp, Homo sapiens
ccctaacatagcggg

SEQ ID NO: 1808286 - DNA, 15 bp, Homo sapiens
cctaacatagcgggt

SEQ ID NO: 1808287 - DNA, 15 bp, Homo sapiens
ctaacatagcgggtt

SEQ ID NO: 1808288 - DNA, 15 bp, Homo sapiens
taacatagcgggttt

SEQ ID NO: 1808289 - DNA, 15 bp, Homo sapiens
aacatagcgggtttt

SEQ ID NO: 1808290 - DNA, 15 bp, Homo sapiens
acatagcgggttttc

SEQ ID NO: 1808291 - DNA, 15 bp, Homo sapiens
catagcgggttttct

SEQ ID NO: 1808292 - DNA, 15 bp, Homo sapiens
atagcgggttttctt

SEQ ID NO: 1808293 - DNA, 15 bp, Homo sapiens
tagcgggttttcttt

SEQ ID NO: 1808294 - DNA, 15 bp, Homo sapiens
agcgggttttctttt

SEQ ID NO: 1808295 - DNA, 15 bp, Homo sapiens
gcgggttttcttttt

SEQ ID NO: 1808296 - DNA, 15 bp, Homo sapiens
cgggttttctttttt

SEQ ID NO: 1808297 - DNA, 15 bp, Homo sapiens
gggttttcttttttg

SEQ ID NO: 1808298 - DNA, 15 bp, Homo sapiens
ggttttcttttttgt

SEQ ID NO: 1808299 - DNA, 15 bp, Homo sapiens
gttttcttttttgtt

SEQ ID NO: 1808300 - DNA, 15 bp, Homo sapiens
ttttgttttttgttg

SEQ ID NO: 1808301 - DNA, 15 bp, Homo sapiens
tttgttttttgttgt

SEQ ID NO: 1808302 - DNA, 15 bp, Homo sapiens
ttgttttttgttgtt

SEQ ID NO: 1808303 - DNA, 15 bp, Homo sapiens
tgttttttgttgttt

SEQ ID NO: 1808304 - DNA, 15 bp, Homo sapiens
gttttttgttgtttt

SEQ ID NO: 1808305 - DNA, 15 bp, Homo sapiens
ttttgttgtttttta

SEQ ID NO: 1808306 - DNA, 15 bp, Homo sapiens
tttgttgttttttaa

SEQ ID NO: 1808307 - DNA, 15 bp, Homo sapiens
ttgttgttttttaag

SEQ ID NO: 1808308 - DNA, 15 bp, Homo sapiens
tgttgttttttaaga

SEQ ID NO: 1808309 - DNA, 15 bp, Homo sapiens
gttgttttttaagag

SEQ ID NO: 1808310 - DNA, 15 bp, Homo sapiens
ttgttttttaagaga

SEQ ID NO: 1808311 - DNA, 15 bp, Homo sapiens
tgttttttaagagac

SEQ ID NO: 1808312 - DNA, 15 bp, Homo sapiens
gttttttaagagaca

SEQ ID NO: 1808313 - DNA, 15 bp, Homo sapiens
ttttttaagagacaa

SEQ ID NO: 1808314 - DNA, 15 bp, Homo sapiens
tttttaagagacaat

SEQ ID NO: 1808315 - DNA, 15 bp, Homo sapiens
ttttaagagacaatg

SEQ ID NO: 1808316 - DNA, 15 bp, Homo sapiens
tttaagagacaatgt

SEQ ID NO: 1808317 - DNA, 15 bp, Homo sapiens
ttaagagacaatgtc

SEQ ID NO: 1808318 - DNA, 15 bp, Homo sapiens
taagagacaatgtct

SEQ ID NO: 1808319 - DNA, 15 bp, Homo sapiens
aagagacaatgtctt

SEQ ID NO: 1808320 - DNA, 15 bp, Homo sapiens
agagacaatgtcttt

SEQ ID NO: 1808321 - DNA, 15 bp, Homo sapiens
gagacaatgtcttta

SEQ ID NO: 1808322 - DNA, 15 bp, Homo sapiens
agacaatgtctttat

SEQ ID NO: 1808323 - DNA, 15 bp, Homo sapiens
gacaatgtctttatt

SEQ ID NO: 1808324 - DNA, 15 bp, Homo sapiens
acaatgtctttatta

SEQ ID NO: 1808325 - DNA, 15 bp, Homo sapiens
caatgtctttattat

SEQ ID NO: 1808326 - DNA, 15 bp, Homo sapiens
aatgtctttattatt

SEQ ID NO: 1808327 - DNA, 15 bp, Homo sapiens
atgtctttattattt

SEQ ID NO: 1808328 - DNA, 15 bp, Homo sapiens
tgtctttattatttt

SEQ ID NO: 1808329 - DNA, 15 bp, Homo sapiens
gtctttattattttt

SEQ ID NO: 1808330 - DNA, 15 bp, Homo sapiens
tctttattattttta

SEQ ID NO: 1808331 - DNA, 15 bp, Homo sapiens
ctttattatttttat

SEQ ID NO: 1808332 - DNA, 15 bp, Homo sapiens
tttattatttttatt

SEQ ID NO: 1808333 - DNA, 15 bp, Homo sapiens
ttattatttttattt

SEQ ID NO: 1808334 - DNA, 15 bp, Homo sapiens
tattatttttatttt

SEQ ID NO: 1808335 - DNA, 15 bp, Homo sapiens
attatttttattttt

SEQ ID NO: 1808336 - DNA, 15 bp, Homo sapiens
ttttattttttttta

SEQ ID NO: 1808337 - DNA, 15 bp, Homo sapiens
tttatttttttttat

SEQ ID NO: 1808338 - DNA, 15 bp, Homo sapiens
ttatttttttttatt

SEQ ID NO: 1808339 - DNA, 15 bp, Homo sapiens
tatttttttttattt

SEQ ID NO: 1808340 - DNA, 15 bp, Homo sapiens
atttttttttatttt

SEQ ID NO: 1808341 - DNA, 15 bp, Homo sapiens
ttttttttatttttg

SEQ ID NO: 1808342 - DNA, 15 bp, Homo sapiens
tttttttatttttga

SEQ ID NO: 1808343 - DNA, 15 bp, Homo sapiens
ttttttatttttgag

SEQ ID NO: 1808344 - DNA, 15 bp, Homo sapiens
tttttatttttgaga

SEQ ID NO: 1808345 - DNA, 15 bp, Homo sapiens
gacggagtcttgctg

SEQ ID NO: 1808346 - DNA, 15 bp, Homo sapiens
acggagtcttgctgt

SEQ ID NO: 1808347 - DNA, 15 bp, Homo sapiens
cggagtcttgctgtc

SEQ ID NO: 1808348 - DNA, 15 bp, Homo sapiens
ggagtcttgctgtcg

SEQ ID NO: 1808349 - DNA, 15 bp, Homo sapiens
gagtcttgctgtcgc

SEQ ID NO: 1808350 - DNA, 15 bp, Homo sapiens
agtcttgctgtcgcc

SEQ ID NO: 1808351 - DNA, 15 bp, Homo sapiens
gtcttgctgtcgccc

SEQ ID NO: 1808352 - DNA, 15 bp, Homo sapiens
tcttgctgtcgccca

SEQ ID NO: 1808353 - DNA, 15 bp, Homo sapiens
cttgctgtcgcccag

SEQ ID NO: 1808354 - DNA, 15 bp, Homo sapiens
ttgctgtcgcccagg

SEQ ID NO: 1808355 - DNA, 15 bp, Homo sapiens
tgctgtcgcccaggc

SEQ ID NO: 1808356 - DNA, 15 bp, Homo sapiens
gctgtcgcccaggct

SEQ ID NO: 1808357 - DNA, 15 bp, Homo sapiens
tcggctcactgcagg

SEQ ID NO: 1808358 - DNA, 15 bp, Homo sapiens
cggctcactgcaggc

SEQ ID NO: 1808359 - DNA, 15 bp, Homo sapiens
ggctcactgcaggct

SEQ ID NO: 1808360 - DNA, 15 bp, Homo sapiens
gctcactgcaggctc

SEQ ID NO: 1808361 - DNA, 15 bp, Homo sapiens
ctcactgcaggctct

SEQ ID NO: 1808362 - DNA, 15 bp, Homo sapiens
tcactgcaggctctg

SEQ ID NO: 1808363 - DNA, 15 bp, Homo sapiens
cactgcaggctctgc

SEQ ID NO: 1808364 - DNA, 15 bp, Homo sapiens
actgcaggctctgcc

SEQ ID NO: 1808365 - DNA, 15 bp, Homo sapiens
ctgcaggctctgccc

SEQ ID NO: 1808366 - DNA, 15 bp, Homo sapiens
tgcaggctctgcccc

SEQ ID NO: 1808367 - DNA, 15 bp, Homo sapiens
gcaggctctgccccc

SEQ ID NO: 1808368 - DNA, 15 bp, Homo sapiens
caggctctgcccccc

SEQ ID NO: 1808369 - DNA, 15 bp, Homo sapiens
aggctctgccccccg

SEQ ID NO: 1808370 - DNA, 15 bp, Homo sapiens
ggctctgccccccgg

SEQ ID NO: 1808371 - DNA, 15 bp, Homo sapiens
gctctgccccccggg

SEQ ID NO: 1808372 - DNA, 15 bp, Homo sapiens
ctctgccccccgggg

SEQ ID NO: 1808373 - DNA, 15 bp, Homo sapiens
tctgccccccggggt

SEQ ID NO: 1808374 - DNA, 15 bp, Homo sapiens
ctgccccccggggtt

SEQ ID NO: 1808375 - DNA, 15 bp, Homo sapiens
tgccccccggggttc

SEQ ID NO: 1808376 - DNA, 15 bp, Homo sapiens
gccccccggggttca

SEQ ID NO: 1808377 - DNA, 15 bp, Homo sapiens
ccccccggggttcat

SEQ ID NO: 1808378 - DNA, 15 bp, Homo sapiens
cccccggggttcatg

SEQ ID NO: 1808379 - DNA, 15 bp, Homo sapiens
ccccggggttcatgc

SEQ ID NO: 1808380 - DNA, 15 bp, Homo sapiens
cccggggttcatgcc

SEQ ID NO: 1808381 - DNA, 15 bp, Homo sapiens
ccggggttcatgcca

SEQ ID NO: 1808382 - DNA, 15 bp, Homo sapiens
cggggttcatgccat

SEQ ID NO: 1808383 - DNA, 15 bp, Homo sapiens
ggggttcatgccatt

SEQ ID NO: 1808384 - DNA, 15 bp, Homo sapiens
tgcctcagcctccct

SEQ ID NO: 1808385 - DNA, 15 bp, Homo sapiens
gcctcagcctcccta

SEQ ID NO: 1808386 - DNA, 15 bp, Homo sapiens
cctcagcctccctag

SEQ ID NO: 1808387 - DNA, 15 bp, Homo sapiens
ctcagcctccctagc

SEQ ID NO: 1808388 - DNA, 15 bp, Homo sapiens
tcagcctccctagca

SEQ ID NO: 1808389 - DNA, 15 bp, Homo sapiens
cagcctccctagcag

SEQ ID NO: 1808390 - DNA, 15 bp, Homo sapiens
agcctccctagcagc

SEQ ID NO: 1808391 - DNA, 15 bp, Homo sapiens
gcctccctagcagct

SEQ ID NO: 1808392 - DNA, 15 bp, Homo sapiens
cctccctagcagctg

SEQ ID NO: 1808393 - DNA, 15 bp, Homo sapiens
ctccctagcagctgg

SEQ ID NO: 1808394 - DNA, 15 bp, Homo sapiens
tccctagcagctggg

SEQ ID NO: 1808395 - DNA, 15 bp, Homo sapiens
ccctagcagctggga

SEQ ID NO: 1808396 - DNA, 15 bp, Homo sapiens
cctagcagctgggac

SEQ ID NO: 1808397 - DNA, 15 bp, Homo sapiens
ctagcagctgggact

SEQ ID NO: 1808398 - DNA, 15 bp, Homo sapiens
aggtgcccgccacct

SEQ ID NO: 1808399 - DNA, 15 bp, Homo sapiens
ggtgcccgccacctc

SEQ ID NO: 1808400 - DNA, 15 bp, Homo sapiens
gtgcccgccacctcg

SEQ ID NO: 1808401 - DNA, 15 bp, Homo sapiens
tgcccgccacctcgc

SEQ ID NO: 1808402 - DNA, 15 bp, Homo sapiens
gcccgccacctcgcc

SEQ ID NO: 1808403 - DNA, 15 bp, Homo sapiens
cccgccacctcgccc

SEQ ID NO: 1808404 - DNA, 15 bp, Homo sapiens
ccgccacctcgcccg

SEQ ID NO: 1808405 - DNA, 15 bp, Homo sapiens
cgccacctcgcccgg

SEQ ID NO: 1808406 - DNA, 15 bp, Homo sapiens
gccacctcgcccggc

SEQ ID NO: 1808407 - DNA, 15 bp, Homo sapiens
ccacctcgcccggct

SEQ ID NO: 1808408 - DNA, 15 bp, Homo sapiens
cacctcgcccggcta

SEQ ID NO: 1808409 - DNA, 15 bp, Homo sapiens
acctcgcccggctat

SEQ ID NO: 1808410 - DNA, 15 bp, Homo sapiens
cctcgcccggctatt

SEQ ID NO: 1808411 - DNA, 15 bp, Homo sapiens
ctcgcccggctattt

SEQ ID NO: 1808412 - DNA, 15 bp, Homo sapiens
tcgcccggctatttt

SEQ ID NO: 1808413 - DNA, 15 bp, Homo sapiens
cgcccggctattttt

SEQ ID NO: 1808414 - DNA, 15 bp, Homo sapiens
ccggctatttttttg

SEQ ID NO: 1808415 - DNA, 15 bp, Homo sapiens
cggctatttttttgt

SEQ ID NO: 1808416 - DNA, 15 bp, Homo sapiens
ggctatttttttgta

SEQ ID NO: 1808417 - DNA, 15 bp, Homo sapiens
gctatttttttgtat

SEQ ID NO: 1808418 - DNA, 15 bp, Homo sapiens
ctatttttttgtatt

SEQ ID NO: 1808419 - DNA, 15 bp, Homo sapiens
tatttttttgtattt

SEQ ID NO: 1808420 - DNA, 15 bp, Homo sapiens
atttttagtggagac

SEQ ID NO: 1808421 - DNA, 15 bp, Homo sapiens
tttttagtggagacg

SEQ ID NO: 1808422 - DNA, 15 bp, Homo sapiens
ttttagtggagacgg

SEQ ID NO: 1808423 - DNA, 15 bp, Homo sapiens
tttagtggagacggg

SEQ ID NO: 1808424 - DNA, 15 bp, Homo sapiens
ttagtggagacgggg

SEQ ID NO: 1808425 - DNA, 15 bp, Homo sapiens
tagtggagacggggt

SEQ ID NO: 1808426 - DNA, 15 bp, Homo sapiens
agtggagacggggtt

SEQ ID NO: 1808427 - DNA, 15 bp, Homo sapiens
gtggagacggggttt

SEQ ID NO: 1808428 - DNA, 15 bp, Homo sapiens
tggagacggggtttc

SEQ ID NO: 1808429 - DNA, 15 bp, Homo sapiens
ggagacggggtttca

SEQ ID NO: 1808430 - DNA, 15 bp, Homo sapiens
cgtgatccgcccacc

SEQ ID NO: 1808431 - DNA, 15 bp, Homo sapiens
tgatccgcccacctc

SEQ ID NO: 1808432 - DNA, 15 bp, Homo sapiens
accgcgcccagccaa

SEQ ID NO: 1808433 - DNA, 15 bp, Homo sapiens
ccgcgcccagccaag

SEQ ID NO: 1808434 - DNA, 15 bp, Homo sapiens
cgcgcccagccaaga

SEQ ID NO: 1808435 - DNA, 15 bp, Homo sapiens
gcgcccagccaagag

SEQ ID NO: 1808436 - DNA, 15 bp, Homo sapiens
cgcccagccaagaga

SEQ ID NO: 1808437 - DNA, 15 bp, Homo sapiens
gcccagccaagagac

SEQ ID NO: 1808438 - DNA, 15 bp, Homo sapiens
cccagccaagagaca

SEQ ID NO: 1808439 - DNA, 15 bp, Homo sapiens
ccagccaagagacac

SEQ ID NO: 1808440 - DNA, 15 bp, Homo sapiens
cagccaagagacacg

SEQ ID NO: 1808441 - DNA, 15 bp, Homo sapiens
agccaagagacacgg

SEQ ID NO: 1808442 - DNA, 15 bp, Homo sapiens
gccaagagacacggt

SEQ ID NO: 1808443 - DNA, 15 bp, Homo sapiens
ccaagagacacggtc

SEQ ID NO: 1808444 - DNA, 15 bp, Homo sapiens
caagagacacggtct

SEQ ID NO: 1808445 - DNA, 15 bp, Homo sapiens
aagagacacggtctt

SEQ ID NO: 1808446 - DNA, 15 bp, Homo sapiens
agagacacggtcttg

SEQ ID NO: 1808447 - DNA, 15 bp, Homo sapiens
gagacacggtcttgc

SEQ ID NO: 1808448 - DNA, 15 bp, Homo sapiens
agacacggtcttgct

SEQ ID NO: 1808449 - DNA, 15 bp, Homo sapiens
gacacggtcttgctc

SEQ ID NO: 1808450 - DNA, 15 bp, Homo sapiens
acacggtcttgctct

SEQ ID NO: 1808451 - DNA, 15 bp, Homo sapiens
cacggtcttgctctg

SEQ ID NO: 1808452 - DNA, 15 bp, Homo sapiens
acggtcttgctctgt

SEQ ID NO: 1808453 - DNA, 15 bp, Homo sapiens
cggtcttgctctgtc

SEQ ID NO: 1808454 - DNA, 15 bp, Homo sapiens
ggtcttgctctgtcg

SEQ ID NO: 1808455 - DNA, 15 bp, Homo sapiens
tcgcccaggctggat

SEQ ID NO: 1808456 - DNA, 15 bp, Homo sapiens
cgcccaggctggatg

SEQ ID NO: 1808457 - DNA, 15 bp, Homo sapiens
gcccaggctggatgg

SEQ ID NO: 1808458 - DNA, 15 bp, Homo sapiens
cccaggctggatgga

SEQ ID NO: 1808459 - DNA, 15 bp, Homo sapiens
ccaggctggatggag

SEQ ID NO: 1808460 - DNA, 15 bp, Homo sapiens
caggctggatggagt

SEQ ID NO: 1808461 - DNA, 15 bp, Homo sapiens
aggctggatggagtg

SEQ ID NO: 1808462 - DNA, 15 bp, Homo sapiens
ggctggatggagtgc

SEQ ID NO: 1808463 - DNA, 15 bp, Homo sapiens
gctggatggagtgcc

SEQ ID NO: 1808464 - DNA, 15 bp, Homo sapiens
ctggatggagtgccg

SEQ ID NO: 1808465 - DNA, 15 bp, Homo sapiens
tggatggagtgccgt

SEQ ID NO: 1808466 - DNA, 15 bp, Homo sapiens
ggatggagtgccgtg

SEQ ID NO: 1808467 - DNA, 15 bp, Homo sapiens
gatggagtgccgtgg

SEQ ID NO: 1808468 - DNA, 15 bp, Homo sapiens
atggagtgccgtggt

SEQ ID NO: 1808469 - DNA, 15 bp, Homo sapiens
tggagtgccgtggtg

SEQ ID NO: 1808470 - DNA, 15 bp, Homo sapiens
ggagtgccgtggtgc

SEQ ID NO: 1808471 - DNA, 15 bp, Homo sapiens
gagtgccgtggtgcg

SEQ ID NO: 1808472 - DNA, 15 bp, Homo sapiens
agtgccgtggtgcga

SEQ ID NO: 1808473 - DNA, 15 bp, Homo sapiens
gtgccgtggtgcgat

SEQ ID NO: 1808474 - DNA, 15 bp, Homo sapiens
tgccgtggtgcgatc

SEQ ID NO: 1808475 - DNA, 15 bp, Homo sapiens
gccgtggtgcgatca

SEQ ID NO: 1808476 - DNA, 15 bp, Homo sapiens
ccgtggtgcgatcac

SEQ ID NO: 1808477 - DNA, 15 bp, Homo sapiens
cgtggtgcgatcaca

SEQ ID NO: 1808478 - DNA, 15 bp, Homo sapiens
gtggtgcgatcacag

SEQ ID NO: 1808479 - DNA, 15 bp, Homo sapiens
tggtgcgatcacagt

SEQ ID NO: 1808480 - DNA, 15 bp, Homo sapiens
ggtgcgatcacagtt

SEQ ID NO: 1808481 - DNA, 15 bp, Homo sapiens
gtgcgatcacagttc

SEQ ID NO: 1808482 - DNA, 15 bp, Homo sapiens
tgcgatcacagttcg

SEQ ID NO: 1808483 - DNA, 15 bp, Homo sapiens
gcgatcacagttcgc

SEQ ID NO: 1808484 - DNA, 15 bp, Homo sapiens
cgatcacagttcgcg

SEQ ID NO: 1808485 - DNA, 15 bp, Homo sapiens
gatcacagttcgcgg

SEQ ID NO: 1808486 - DNA, 15 bp, Homo sapiens
atcacagttcgcggc

SEQ ID NO: 1808487 - DNA, 15 bp, Homo sapiens
tcacagttcgcggca

SEQ ID NO: 1808488 - DNA, 15 bp, Homo sapiens
cacagttcgcggcag

SEQ ID NO: 1808489 - DNA, 15 bp, Homo sapiens
acagttcgcggcagc

SEQ ID NO: 1808490 - DNA, 15 bp, Homo sapiens
cagttcgcggcagcc

SEQ ID NO: 1808491 - DNA, 15 bp, Homo sapiens
agttcgcggcagcct

SEQ ID NO: 1808492 - DNA, 15 bp, Homo sapiens
gttcgcggcagcctt

SEQ ID NO: 1808493 - DNA, 15 bp, Homo sapiens
ttcgcggcagccttg

SEQ ID NO: 1808494 - DNA, 15 bp, Homo sapiens
tcgcggcagccttga

SEQ ID NO: 1808495 - DNA, 15 bp, Homo sapiens
cgcggcagccttgac

SEQ ID NO: 1808496 - DNA, 15 bp, Homo sapiens
gcggcagccttgaca

SEQ ID NO: 1808497 - DNA, 15 bp, Homo sapiens
cggcagccttgacat

SEQ ID NO: 1808498 - DNA, 15 bp, Homo sapiens
ggcagccttgacatc

SEQ ID NO: 1808499 - DNA, 15 bp, Homo sapiens
gcagccttgacatcc

SEQ ID NO: 1808500 - DNA, 15 bp, Homo sapiens
cagccttgacatcct

SEQ ID NO: 1808501 - DNA, 15 bp, Homo sapiens
agccttgacatcctg

SEQ ID NO: 1808502 - DNA, 15 bp, Homo sapiens
gccttgacatcctgg

SEQ ID NO: 1808503 - DNA, 15 bp, Homo sapiens
ccttgacatcctggg

SEQ ID NO: 1808504 - DNA, 15 bp, Homo sapiens
cttgacatcctgggc

SEQ ID NO: 1808505 - DNA, 15 bp, Homo sapiens
ttgacatcctgggct

SEQ ID NO: 1808506 - DNA, 15 bp, Homo sapiens
tgacatcctgggctc

SEQ ID NO: 1808507 - DNA, 15 bp, Homo sapiens
gacatcctgggctca

SEQ ID NO: 1808508 - DNA, 15 bp, Homo sapiens
acatcctgggctcaa

SEQ ID NO: 1808509 - DNA, 15 bp, Homo sapiens
catcctgggctcaag

SEQ ID NO: 1808510 - DNA, 15 bp, Homo sapiens
atcctgggctcaagc

SEQ ID NO: 1808511 - DNA, 15 bp, Homo sapiens
gggctcaagcaacct

SEQ ID NO: 1808512 - DNA, 15 bp, Homo sapiens
ggctcaagcaacctt

SEQ ID NO: 1808513 - DNA, 15 bp, Homo sapiens
gctcaagcaaccttc

SEQ ID NO: 1808514 - DNA, 15 bp, Homo sapiens
ctcaagcaaccttcc

SEQ ID NO: 1808515 - DNA, 15 bp, Homo sapiens
tcaagcaaccttcct

SEQ ID NO: 1808516 - DNA, 15 bp, Homo sapiens
caagcaaccttcctg

SEQ ID NO: 1808517 - DNA, 15 bp, Homo sapiens
aagcaaccttcctgc

SEQ ID NO: 1808518 - DNA, 15 bp, Homo sapiens
agcaaccttcctgcc

SEQ ID NO: 1808519 - DNA, 15 bp, Homo sapiens
gcaaccttcctgcct

SEQ ID NO: 1808520 - DNA, 15 bp, Homo sapiens
caaccttcctgcctt

SEQ ID NO: 1808521 - DNA, 15 bp, Homo sapiens
aaccttcctgccttg

SEQ ID NO: 1808522 - DNA, 15 bp, Homo sapiens
accttcctgccttgg

SEQ ID NO: 1808523 - DNA, 15 bp, Homo sapiens
ccttcctgccttggc

SEQ ID NO: 1808524 - DNA, 15 bp, Homo sapiens
cttcctgccttggcc

SEQ ID NO: 1808525 - DNA, 15 bp, Homo sapiens
ttcctgccttggcct

SEQ ID NO: 1808526 - DNA, 15 bp, Homo sapiens
ttggcctcccaaatg

SEQ ID NO: 1808527 - DNA, 15 bp, Homo sapiens
tggcctcccaaatgt

SEQ ID NO: 1808528 - DNA, 15 bp, Homo sapiens
ggcctcccaaatgtt

SEQ ID NO: 1808529 - DNA, 15 bp, Homo sapiens
gcctcccaaatgttg

SEQ ID NO: 1808530 - DNA, 15 bp, Homo sapiens
cctcccaaatgttgg

SEQ ID NO: 1808531 - DNA, 15 bp, Homo sapiens
ctcccaaatgttggg

SEQ ID NO: 1808532 - DNA, 15 bp, Homo sapiens
tcccaaatgttggga

SEQ ID NO: 1808533 - DNA, 15 bp, Homo sapiens
cccaaatgttgggat

SEQ ID NO: 1808534 - DNA, 15 bp, Homo sapiens
ccaaatgttgggatt

SEQ ID NO: 1808535 - DNA, 15 bp, Homo sapiens
caaatgttgggatta

SEQ ID NO: 1808536 - DNA, 15 bp, Homo sapiens
aaatgttgggattat

SEQ ID NO: 1808537 - DNA, 15 bp, Homo sapiens
aatgttgggattata

SEQ ID NO: 1808538 - DNA, 15 bp, Homo sapiens
atgttgggattatag

SEQ ID NO: 1808539 - DNA, 15 bp, Homo sapiens
tgttgggattatagg

SEQ ID NO: 1808540 - DNA, 15 bp, Homo sapiens
atgagccactgtgct

SEQ ID NO: 1808541 - DNA, 15 bp, Homo sapiens
tgagccactgtgctt

SEQ ID NO: 1808542 - DNA, 15 bp, Homo sapiens
gagccactgtgcttg

SEQ ID NO: 1808543 - DNA, 15 bp, Homo sapiens
agccactgtgcttgg

SEQ ID NO: 1808544 - DNA, 15 bp, Homo sapiens
gccactgtgcttggc

SEQ ID NO: 1808545 - DNA, 15 bp, Homo sapiens
ccactgtgcttggca

SEQ ID NO: 1808546 - DNA, 15 bp, Homo sapiens
cactgtgcttggcat

SEQ ID NO: 1808547 - DNA, 15 bp, Homo sapiens
actgtgcttggcatc

SEQ ID NO: 1808548 - DNA, 15 bp, Homo sapiens
ctgtgcttggcatct

SEQ ID NO: 1808549 - DNA, 15 bp, Homo sapiens
tgtgcttggcatcta

SEQ ID NO: 1808550 - DNA, 15 bp, Homo sapiens
gtgcttggcatctat

SEQ ID NO: 1808551 - DNA, 15 bp, Homo sapiens
tgcttggcatctatt

SEQ ID NO: 1808552 - DNA, 15 bp, Homo sapiens
gcttggcatctattc

SEQ ID NO: 1808553 - DNA, 15 bp, Homo sapiens
cttggcatctattca

SEQ ID NO: 1808554 - DNA, 15 bp, Homo sapiens
ttggcatctattcat

SEQ ID NO: 1808555 - DNA, 15 bp, Homo sapiens
tggcatctattcatc

SEQ ID NO: 1808556 - DNA, 15 bp, Homo sapiens
ggcatctattcatct

SEQ ID NO: 1808557 - DNA, 15 bp, Homo sapiens
gcatctattcatctt

SEQ ID NO: 1808558 - DNA, 15 bp, Homo sapiens
catctattcatcttt

SEQ ID NO: 1808559 - DNA, 15 bp, Homo sapiens
atctattcatcttta

SEQ ID NO: 1808560 - DNA, 15 bp, Homo sapiens
tctattcatctttaa

SEQ ID NO: 1808561 - DNA, 15 bp, Homo sapiens
ctattcatctttaat

SEQ ID NO: 1808562 - DNA, 15 bp, Homo sapiens
tattcatctttaatg

SEQ ID NO: 1808563 - DNA, 15 bp, Homo sapiens
attcatctttaatgt

SEQ ID NO: 1808564 - DNA, 15 bp, Homo sapiens
ttcatctttaatgtc

SEQ ID NO: 1808565 - DNA, 15 bp, Homo sapiens
tcatctttaatgtca

SEQ ID NO: 1808566 - DNA, 15 bp, Homo sapiens
catctttaatgtcaa

SEQ ID NO: 1808567 - DNA, 15 bp, Homo sapiens
atctttaatgtcaag

SEQ ID NO: 1808568 - DNA, 15 bp, Homo sapiens
tctttaatgtcaagc

SEQ ID NO: 1808569 - DNA, 15 bp, Homo sapiens
ctttaatgtcaagca

SEQ ID NO: 1808570 - DNA, 15 bp, Homo sapiens
tttaatgtcaagcag

SEQ ID NO: 1808571 - DNA, 15 bp, Homo sapiens
ttaatgtcaagcagg

SEQ ID NO: 1808572 - DNA, 15 bp, Homo sapiens
taatgtcaagcaggc

SEQ ID NO: 1808573 - DNA, 15 bp, Homo sapiens
aatgtcaagcaggca

SEQ ID NO: 1808574 - DNA, 15 bp, Homo sapiens
atgtcaagcaggcaa

SEQ ID NO: 1808575 - DNA, 15 bp, Homo sapiens
tgtcaagcaggcaat

SEQ ID NO: 1808576 - DNA, 15 bp, Homo sapiens
gtcaagcaggcaatt

SEQ ID NO: 1808577 - DNA, 15 bp, Homo sapiens
tcaagcaggcaattg

SEQ ID NO: 1808578 - DNA, 15 bp, Homo sapiens
caagcaggcaattga

SEQ ID NO: 1808579 - DNA, 15 bp, Homo sapiens
aagcaggcaattgaa

SEQ ID NO: 1808580 - DNA, 15 bp, Homo sapiens
agcaggcaattgaat

SEQ ID NO: 1808581 - DNA, 15 bp, Homo sapiens
gcaggcaattgaata

SEQ ID NO: 1808582 - DNA, 15 bp, Homo sapiens
caggcaattgaatat

SEQ ID NO: 1808583 - DNA, 15 bp, Homo sapiens
aggcaattgaatatt

SEQ ID NO: 1808584 - DNA, 15 bp, Homo sapiens
ggcaattgaatattt

SEQ ID NO: 1808585 - DNA, 15 bp, Homo sapiens
gcaattgaatatttg

SEQ ID NO: 1808586 - DNA, 15 bp, Homo sapiens
caattgaatatttga

SEQ ID NO: 1808587 - DNA, 15 bp, Homo sapiens
aattgaatatttgat

SEQ ID NO: 1808588 - DNA, 15 bp, Homo sapiens
attgaatatttgatc

SEQ ID NO: 1808589 - DNA, 15 bp, Homo sapiens
ttgaatatttgatca

SEQ ID NO: 1808590 - DNA, 15 bp, Homo sapiens
tgaatatttgatcag

SEQ ID NO: 1808591 - DNA, 15 bp, Homo sapiens
gaatatttgatcagg

SEQ ID NO: 1808592 - DNA, 15 bp, Homo sapiens
aatatttgatcaggg

SEQ ID NO: 1808593 - DNA, 15 bp, Homo sapiens
atatttgatcaggga

SEQ ID NO: 1808594 - DNA, 15 bp, Homo sapiens
tatttgatcagggat

SEQ ID NO: 1808595 - DNA, 15 bp, Homo sapiens
atttgatcagggata

SEQ ID NO: 1808596 - DNA, 15 bp, Homo sapiens
tttgatcagggatag

SEQ ID NO: 1808597 - DNA, 15 bp, Homo sapiens
ttgatcagggataga

SEQ ID NO: 1808598 - DNA, 15 bp, Homo sapiens
tgatcagggatagaa

SEQ ID NO: 1808599 - DNA, 15 bp, Homo sapiens
gatcagggatagaat

SEQ ID NO: 1808600 - DNA, 15 bp, Homo sapiens
atcagggatagaatt

SEQ ID NO: 1808601 - DNA, 15 bp, Homo sapiens
tcagggatagaattg

SEQ ID NO: 1808602 - DNA, 15 bp, Homo sapiens
cagggatagaattgt

SEQ ID NO: 1808603 - DNA, 15 bp, Homo sapiens
agggatagaattgtc

SEQ ID NO: 1808604 - DNA, 15 bp, Homo sapiens
gggatagaattgtct

SEQ ID NO: 1808605 - DNA, 15 bp, Homo sapiens
ggatagaattgtcta

SEQ ID NO: 1808606 - DNA, 15 bp, Homo sapiens
gatagaattgtctat

SEQ ID NO: 1808607 - DNA, 15 bp, Homo sapiens
atagaattgtctatt

SEQ ID NO: 1808608 - DNA, 15 bp, Homo sapiens
tagaattgtctattt

SEQ ID NO: 1808609 - DNA, 15 bp, Homo sapiens
agaattgtctatttg

SEQ ID NO: 1808610 - DNA, 15 bp, Homo sapiens
gaattgtctatttgg

SEQ ID NO: 1808611 - DNA, 15 bp, Homo sapiens
aattgtctatttggg

SEQ ID NO: 1808612 - DNA, 15 bp, Homo sapiens
attgtctatttgggg

SEQ ID NO: 1808613 - DNA, 15 bp, Homo sapiens
ttgtctatttggggg

SEQ ID NO: 1808614 - DNA, 15 bp, Homo sapiens
tgtctatttgggggt

SEQ ID NO: 1808615 - DNA, 15 bp, Homo sapiens
gtctatttgggggta

SEQ ID NO: 1808616 - DNA, 15 bp, Homo sapiens
tctatttgggggtat

SEQ ID NO: 1808617 - DNA, 15 bp, Homo sapiens
ctatttgggggtatg

SEQ ID NO: 1808618 - DNA, 15 bp, Homo sapiens
tatttgggggtatgc

SEQ ID NO: 1808619 - DNA, 15 bp, Homo sapiens
atttgggggtatgca

SEQ ID NO: 1808620 - DNA, 15 bp, Homo sapiens
tttgggggtatgcag

SEQ ID NO: 1808621 - DNA, 15 bp, Homo sapiens
ttgggggtatgcaga

SEQ ID NO: 1808622 - DNA, 15 bp, Homo sapiens
tgggggtatgcagat

SEQ ID NO: 1808623 - DNA, 15 bp, Homo sapiens
gggggtatgcagatg

SEQ ID NO: 1808624 - DNA, 15 bp, Homo sapiens
ggggtatgcagatgt

SEQ ID NO: 1808625 - DNA, 15 bp, Homo sapiens
gggtatgcagatgtg

SEQ ID NO: 1808626 - DNA, 15 bp, Homo sapiens
ggtatgcagatgtgc

SEQ ID NO: 1808627 - DNA, 15 bp, Homo sapiens
gtatgcagatgtgct

SEQ ID NO: 1808628 - DNA, 15 bp, Homo sapiens
tatgcagatgtgctt

SEQ ID NO: 1808629 - DNA, 15 bp, Homo sapiens
atgcagatgtgcttc

SEQ ID NO: 1808630 - DNA, 15 bp, Homo sapiens
tgcagatgtgcttca

SEQ ID NO: 1808631 - DNA, 15 bp, Homo sapiens
gcagatgtgcttcat

SEQ ID NO: 1808632 - DNA, 15 bp, Homo sapiens
cagatgtgcttcatg

SEQ ID NO: 1808633 - DNA, 15 bp, Homo sapiens
agatgtgcttcatgt

SEQ ID NO: 1808634 - DNA, 15 bp, Homo sapiens
gatgtgcttcatgtc

SEQ ID NO: 1808635 - DNA, 15 bp, Homo sapiens
atgtgcttcatgtca

SEQ ID NO: 1808636 - DNA, 15 bp, Homo sapiens
tgtgcttcatgtcat

SEQ ID NO: 1808637 - DNA, 15 bp, Homo sapiens
gtgcttcatgtcatg

SEQ ID NO: 1808638 - DNA, 15 bp, Homo sapiens
tgcttcatgtcatgg

SEQ ID NO: 1808639 - DNA, 15 bp, Homo sapiens
gcttcatgtcatgga

SEQ ID NO: 1808640 - DNA, 15 bp, Homo sapiens
cttcatgtcatggaa

SEQ ID NO: 1808641 - DNA, 15 bp, Homo sapiens
ttcatgtcatggaac

SEQ ID NO: 1808642 - DNA, 15 bp, Homo sapiens
tcatgtcatggaact

SEQ ID NO: 1808643 - DNA, 15 bp, Homo sapiens
catgtcatggaactg

SEQ ID NO: 1808644 - DNA, 15 bp, Homo sapiens
atgtcatggaactgg

SEQ ID NO: 1808645 - DNA, 15 bp, Homo sapiens
tgtcatggaactggg

SEQ ID NO: 1808646 - DNA, 15 bp, Homo sapiens
gtcatggaactgggc

SEQ ID NO: 1808647 - DNA, 15 bp, Homo sapiens
tcatggaactgggcc

SEQ ID NO: 1808648 - DNA, 15 bp, Homo sapiens
catggaactgggccg

SEQ ID NO: 1808649 - DNA, 15 bp, Homo sapiens
atggaactgggccgg

SEQ ID NO: 1808650 - DNA, 15 bp, Homo sapiens
tggaactgggccggg

SEQ ID NO: 1808651 - DNA, 15 bp, Homo sapiens
ggaactgggccgggc

SEQ ID NO: 1808652 - DNA, 15 bp, Homo sapiens
gaactgggccgggca

SEQ ID NO: 1808653 - DNA, 15 bp, Homo sapiens
aactgggccgggcac

SEQ ID NO: 1808654 - DNA, 15 bp, Homo sapiens
actgggccgggcacg

SEQ ID NO: 1808655 - DNA, 15 bp, Homo sapiens
ctgggccgggcacgg

SEQ ID NO: 1808656 - DNA, 15 bp, Homo sapiens
ggcaggcggatcata

SEQ ID NO: 1808657 - DNA, 15 bp, Homo sapiens
gcaggcggatcataa

SEQ ID NO: 1808658 - DNA, 15 bp, Homo sapiens
caggcggatcataag

SEQ ID NO: 1808659 - DNA, 15 bp, Homo sapiens
gatcgagaccatccg

SEQ ID NO: 1808660 - DNA, 15 bp, Homo sapiens
atcgagaccatccgg

SEQ ID NO: 1808661 - DNA, 15 bp, Homo sapiens
tcgagaccatccggg

SEQ ID NO: 1808662 - DNA, 15 bp, Homo sapiens
cgagaccatccgggc

SEQ ID NO: 1808663 - DNA, 15 bp, Homo sapiens
gagaccatccgggcc

SEQ ID NO: 1808664 - DNA, 15 bp, Homo sapiens
agaccatccgggcca

SEQ ID NO: 1808665 - DNA, 15 bp, Homo sapiens
gaccatccgggccaa

SEQ ID NO: 1808666 - DNA, 15 bp, Homo sapiens
accatccgggccaac

SEQ ID NO: 1808667 - DNA, 15 bp, Homo sapiens
ccatccgggccaaca

SEQ ID NO: 1808668 - DNA, 15 bp, Homo sapiens
catccgggccaacac

SEQ ID NO: 1808669 - DNA, 15 bp, Homo sapiens
atccgggccaacacg

SEQ ID NO: 1808670 - DNA, 15 bp, Homo sapiens
tccgggccaacacgg

SEQ ID NO: 1808671 - DNA, 15 bp, Homo sapiens
ccgggccaacacggt

SEQ ID NO: 1808672 - DNA, 15 bp, Homo sapiens
cgggccaacacggtg

SEQ ID NO: 1808673 - DNA, 15 bp, Homo sapiens
gggccaacacggtga

SEQ ID NO: 1808674 - DNA, 15 bp, Homo sapiens
tacaaaaattaggca

SEQ ID NO: 1808675 - DNA, 15 bp, Homo sapiens
acaaaaattaggcag

SEQ ID NO: 1808676 - DNA, 15 bp, Homo sapiens
caaaaattaggcagg

SEQ ID NO: 1808677 - DNA, 15 bp, Homo sapiens
aaaaattaggcaggt

SEQ ID NO: 1808678 - DNA, 15 bp, Homo sapiens
aaaattaggcaggtg

SEQ ID NO: 1808679 - DNA, 15 bp, Homo sapiens
aaattaggcaggtgt

SEQ ID NO: 1808680 - DNA, 15 bp, Homo sapiens
aattaggcaggtgtg

SEQ ID NO: 1808681 - DNA, 15 bp, Homo sapiens
attaggcaggtgtgg

SEQ ID NO: 1808682 - DNA, 15 bp, Homo sapiens
ttaggcaggtgtggt

SEQ ID NO: 1808683 - DNA, 15 bp, Homo sapiens
taggcaggtgtggtg

SEQ ID NO: 1808684 - DNA, 15 bp, Homo sapiens
aggcaggtgtggtgg

SEQ ID NO: 1808685 - DNA, 15 bp, Homo sapiens
ggcaggtgtggtggt

SEQ ID NO: 1808686 - DNA, 15 bp, Homo sapiens
gcaggtgtggtggtg

SEQ ID NO: 1808687 - DNA, 15 bp, Homo sapiens
aggtgtggtggtgcc

SEQ ID NO: 1808688 - DNA, 15 bp, Homo sapiens
ggtgtggtggtgcct

SEQ ID NO: 1808689 - DNA, 15 bp, Homo sapiens
gtgtggtggtgcctg

SEQ ID NO: 1808690 - DNA, 15 bp, Homo sapiens
tgtggtggtgcctgc

SEQ ID NO: 1808691 - DNA, 15 bp, Homo sapiens
ggtgcctgcctgtag

SEQ ID NO: 1808692 - DNA, 15 bp, Homo sapiens
gtgcctgcctgtagt

SEQ ID NO: 1808693 - DNA, 15 bp, Homo sapiens
tgcctgcctgtagtc

SEQ ID NO: 1808694 - DNA, 15 bp, Homo sapiens
gcctgcctgtagtcc

SEQ ID NO: 1808695 - DNA, 15 bp, Homo sapiens
cctgcctgtagtccc

SEQ ID NO: 1808696 - DNA, 15 bp, Homo sapiens
ctgcctgtagtccca

SEQ ID NO: 1808697 - DNA, 15 bp, Homo sapiens
tactcagggaggctg

SEQ ID NO: 1808698 - DNA, 15 bp, Homo sapiens
actcagggaggctga

SEQ ID NO: 1808699 - DNA, 15 bp, Homo sapiens
ctcagggaggctgag

SEQ ID NO: 1808700 - DNA, 15 bp, Homo sapiens
tcagggaggctgaga

SEQ ID NO: 1808701 - DNA, 15 bp, Homo sapiens
cagggaggctgagac

SEQ ID NO: 1808702 - DNA, 15 bp, Homo sapiens
agggaggctgagaca

SEQ ID NO: 1808703 - DNA, 15 bp, Homo sapiens
agacaggagaattga

SEQ ID NO: 1808704 - DNA, 15 bp, Homo sapiens
gacaggagaattgat

SEQ ID NO: 1808705 - DNA, 15 bp, Homo sapiens
acaggagaattgatt

SEQ ID NO: 1808706 - DNA, 15 bp, Homo sapiens
caggagaattgattg

SEQ ID NO: 1808707 - DNA, 15 bp, Homo sapiens
aggagaattgattga

SEQ ID NO: 1808708 - DNA, 15 bp, Homo sapiens
ggagaattgattgaa

SEQ ID NO: 1808709 - DNA, 15 bp, Homo sapiens
gagaattgattgaac

SEQ ID NO: 1808710 - DNA, 15 bp, Homo sapiens
agaattgattgaacc

SEQ ID NO: 1808711 - DNA, 15 bp, Homo sapiens
gaattgattgaacct

SEQ ID NO: 1808712 - DNA, 15 bp, Homo sapiens
aattgattgaacctg

SEQ ID NO: 1808713 - DNA, 15 bp, Homo sapiens
attgattgaacctgg

SEQ ID NO: 1808714 - DNA, 15 bp, Homo sapiens
ttgattgaacctggg

SEQ ID NO: 1808715 - DNA, 15 bp, Homo sapiens
tgattgaacctggga

SEQ ID NO: 1808716 - DNA, 15 bp, Homo sapiens
gattgaacctgggag

SEQ ID NO: 1808717 - DNA, 15 bp, Homo sapiens
attgaacctgggagg

SEQ ID NO: 1808718 - DNA, 15 bp, Homo sapiens
gcagaggttgtagtg

SEQ ID NO: 1808719 - DNA, 15 bp, Homo sapiens
cagaggttgtagtga

SEQ ID NO: 1808720 - DNA, 15 bp, Homo sapiens
agaggttgtagtgag

SEQ ID NO: 1808721 - DNA, 15 bp, Homo sapiens
tagtgagccaagatc

SEQ ID NO: 1808722 - DNA, 15 bp, Homo sapiens
cagcctgggcgacat

SEQ ID NO: 1808723 - DNA, 15 bp, Homo sapiens
agcctgggcgacatg

SEQ ID NO: 1808724 - DNA, 15 bp, Homo sapiens
gcctgggcgacatga

SEQ ID NO: 1808725 - DNA, 15 bp, Homo sapiens
cctgggcgacatgag

SEQ ID NO: 1808726 - DNA, 15 bp, Homo sapiens
ctgggcgacatgagc

SEQ ID NO: 1808727 - DNA, 15 bp, Homo sapiens
tgggcgacatgagcg

SEQ ID NO: 1808728 - DNA, 15 bp, Homo sapiens
gggcgacatgagcga

SEQ ID NO: 1808729 - DNA, 15 bp, Homo sapiens
ggcgacatgagcgag

SEQ ID NO: 1808730 - DNA, 15 bp, Homo sapiens
gcgacatgagcgaga

SEQ ID NO: 1808731 - DNA, 15 bp, Homo sapiens
cgacatgagcgagac

SEQ ID NO: 1808732 - DNA, 15 bp, Homo sapiens
gacatgagcgagact

SEQ ID NO: 1808733 - DNA, 15 bp, Homo sapiens
acatgagcgagactc

SEQ ID NO: 1808734 - DNA, 15 bp, Homo sapiens
catgagcgagactcc

SEQ ID NO: 1808735 - DNA, 15 bp, Homo sapiens
atgagcgagactccg

SEQ ID NO: 1808736 - DNA, 15 bp, Homo sapiens
aaaaataaacaaaaa

SEQ ID NO: 1808737 - DNA, 15 bp, Homo sapiens
aaaataaacaaaaaa

SEQ ID NO: 1808738 - DNA, 15 bp, Homo sapiens
aaataaacaaaaaaa

SEQ ID NO: 1808739 - DNA, 15 bp, Homo sapiens
aataaacaaaaaaaa

SEQ ID NO: 1808740 - DNA, 15 bp, Homo sapiens
ataaacaaaaaaaag

SEQ ID NO: 1808741 - DNA, 15 bp, Homo sapiens
aaacaaaaaaaagtc

SEQ ID NO: 1808742 - DNA, 15 bp, Homo sapiens
aacaaaaaaaagtca

SEQ ID NO: 1808743 - DNA, 15 bp, Homo sapiens
acaaaaaaaagtcat

SEQ ID NO: 1808744 - DNA, 15 bp, Homo sapiens
caaaaaaaagtcatg

SEQ ID NO: 1808745 - DNA, 15 bp, Homo sapiens
aaaaaaaagtcatgg

SEQ ID NO: 1808746 - DNA, 15 bp, Homo sapiens
aaaaaaagtcatgga

SEQ ID NO: 1808747 - DNA, 15 bp, Homo sapiens
aaaaaagtcatggaa

SEQ ID NO: 1808748 - DNA, 15 bp, Homo sapiens
aaaaagtcatggaat

SEQ ID NO: 1808749 - DNA, 15 bp, Homo sapiens
aaaagtcatggaatt

SEQ ID NO: 1808750 - DNA, 15 bp, Homo sapiens
aaagtcatggaattg

SEQ ID NO: 1808751 - DNA, 15 bp, Homo sapiens
aagtcatggaattga

SEQ ID NO: 1808752 - DNA, 15 bp, Homo sapiens
agtcatggaattgat

SEQ ID NO: 1808753 - DNA, 15 bp, Homo sapiens
gtcatggaattgatg

SEQ ID NO: 1808754 - DNA, 15 bp, Homo sapiens
tcatggaattgatgg

SEQ ID NO: 1808755 - DNA, 15 bp, Homo sapiens
catggaattgatgga

SEQ ID NO: 1808756 - DNA, 15 bp, Homo sapiens
atggaattgatggaa

SEQ ID NO: 1808757 - DNA, 15 bp, Homo sapiens
tggaattgatggaaa

SEQ ID NO: 1808758 - DNA, 15 bp, Homo sapiens
ggaattgatggaaat

SEQ ID NO: 1808759 - DNA, 15 bp, Homo sapiens
gaattgatggaaatt

SEQ ID NO: 1808760 - DNA, 15 bp, Homo sapiens
aattgatggaaattg

SEQ ID NO: 1808761 - DNA, 15 bp, Homo sapiens
attgatggaaattgc

SEQ ID NO: 1808762 - DNA, 15 bp, Homo sapiens
ttgatggaaattgcc

SEQ ID NO: 1808763 - DNA, 15 bp, Homo sapiens
tgatggaaattgcct

SEQ ID NO: 1808764 - DNA, 15 bp, Homo sapiens
gatggaaattgccta

SEQ ID NO: 1808765 - DNA, 15 bp, Homo sapiens
atggaaattgcctaa

SEQ ID NO: 1808766 - DNA, 15 bp, Homo sapiens
tggaaattgcctaag

SEQ ID NO: 1808767 - DNA, 15 bp, Homo sapiens
ggaaattgcctaagg

SEQ ID NO: 1808768 - DNA, 15 bp, Homo sapiens
gaaattgcctaaggg

SEQ ID NO: 1808769 - DNA, 15 bp, Homo sapiens
aaattgcctaagggg

SEQ ID NO: 1808770 - DNA, 15 bp, Homo sapiens
aattgcctaagggga

SEQ ID NO: 1808771 - DNA, 15 bp, Homo sapiens
attgcctaaggggag

SEQ ID NO: 1808772 - DNA, 15 bp, Homo sapiens
ttgcctaaggggaga

SEQ ID NO: 1808773 - DNA, 15 bp, Homo sapiens
tgcctaaggggagat

SEQ ID NO: 1808774 - DNA, 15 bp, Homo sapiens
gcctaaggggagatg

SEQ ID NO: 1808775 - DNA, 15 bp, Homo sapiens
cctaaggggagatgt

SEQ ID NO: 1808776 - DNA, 15 bp, Homo sapiens
ctaaggggagatgta

SEQ ID NO: 1808777 - DNA, 15 bp, Homo sapiens
taaggggagatgtag

SEQ ID NO: 1808778 - DNA, 15 bp, Homo sapiens
aaggggagatgtaga

SEQ ID NO: 1808779 - DNA, 15 bp, Homo sapiens
aggggagatgtagaa

SEQ ID NO: 1808780 - DNA, 15 bp, Homo sapiens
ggggagatgtagaag

SEQ ID NO: 1808781 - DNA, 15 bp, Homo sapiens
gggagatgtagaaga

SEQ ID NO: 1808782 - DNA, 15 bp, Homo sapiens
ggagatgtagaagaa

SEQ ID NO: 1808783 - DNA, 15 bp, Homo sapiens
gagatgtagaagaaa

SEQ ID NO: 1808784 - DNA, 15 bp, Homo sapiens
agatgtagaagaaaa

SEQ ID NO: 1808785 - DNA, 15 bp, Homo sapiens
gatgtagaagaaaag

SEQ ID NO: 1808786 - DNA, 15 bp, Homo sapiens
atgtagaagaaaagg

SEQ ID NO: 1808787 - DNA, 15 bp, Homo sapiens
tgtagaagaaaaggg

SEQ ID NO: 1808788 - DNA, 15 bp, Homo sapiens
gtagaagaaaagggg

SEQ ID NO: 1808789 - DNA, 15 bp, Homo sapiens
tagaagaaaaggggt

SEQ ID NO: 1808790 - DNA, 15 bp, Homo sapiens
agaagaaaaggggtc

SEQ ID NO: 1808791 - DNA, 15 bp, Homo sapiens
gaagaaaaggggtct

SEQ ID NO: 1808792 - DNA, 15 bp, Homo sapiens
aagaaaaggggtctc

SEQ ID NO: 1808793 - DNA, 15 bp, Homo sapiens
agaaaaggggtctca

SEQ ID NO: 1808794 - DNA, 15 bp, Homo sapiens
gaaaaggggtctcag

SEQ ID NO: 1808795 - DNA, 15 bp, Homo sapiens
aaaaggggtctcagg

SEQ ID NO: 1808796 - DNA, 15 bp, Homo sapiens
aaaggggtctcagga

SEQ ID NO: 1808797 - DNA, 15 bp, Homo sapiens
aaggggtctcaggat

SEQ ID NO: 1808798 - DNA, 15 bp, Homo sapiens
aggggtctcaggatc

SEQ ID NO: 1808799 - DNA, 15 bp, Homo sapiens
ggggtctcaggatca

SEQ ID NO: 1808800 - DNA, 15 bp, Homo sapiens
gggtctcaggatcaa

SEQ ID NO: 1808801 - DNA, 15 bp, Homo sapiens
ggtctcaggatcaag

SEQ ID NO: 1808802 - DNA, 15 bp, Homo sapiens
gtctcaggatcaagc

SEQ ID NO: 1808803 - DNA, 15 bp, Homo sapiens
tctcaggatcaagcc

SEQ ID NO: 1808804 - DNA, 15 bp, Homo sapiens
ctcaggatcaagcca

SEQ ID NO: 1808805 - DNA, 15 bp, Homo sapiens
tcaggatcaagccag

SEQ ID NO: 1808806 - DNA, 15 bp, Homo sapiens
caggatcaagccagc

SEQ ID NO: 1808807 - DNA, 15 bp, Homo sapiens
aggatcaagccagca

SEQ ID NO: 1808808 - DNA, 15 bp, Homo sapiens
ggatcaagccagcag

SEQ ID NO: 1808809 - DNA, 15 bp, Homo sapiens
gatcaagccagcaga

SEQ ID NO: 1808810 - DNA, 15 bp, Homo sapiens
atcaagccagcagag

SEQ ID NO: 1808811 - DNA, 15 bp, Homo sapiens
tcaagccagcagaga

SEQ ID NO: 1808812 - DNA, 15 bp, Homo sapiens
caagccagcagagaa

SEQ ID NO: 1808813 - DNA, 15 bp, Homo sapiens
aagccagcagagaag

SEQ ID NO: 1808814 - DNA, 15 bp, Homo sapiens
agccagcagagaagg

SEQ ID NO: 1808815 - DNA, 15 bp, Homo sapiens
gccagcagagaaggc

SEQ ID NO: 1808816 - DNA, 15 bp, Homo sapiens
ccagcagagaaggca

SEQ ID NO: 1808817 - DNA, 15 bp, Homo sapiens
cagcagagaaggcag

SEQ ID NO: 1808818 - DNA, 15 bp, Homo sapiens
agcagagaaggcaga

SEQ ID NO: 1808819 - DNA, 15 bp, Homo sapiens
gcagagaaggcagaa

SEQ ID NO: 1808820 - DNA, 15 bp, Homo sapiens
cagagaaggcagaaa

SEQ ID NO: 1808821 - DNA, 15 bp, Homo sapiens
agagaaggcagaaaa

SEQ ID NO: 1808822 - DNA, 15 bp, Homo sapiens
gagaaggcagaaaag

SEQ ID NO: 1808823 - DNA, 15 bp, Homo sapiens
agaaggcagaaaagg

SEQ ID NO: 1808824 - DNA, 15 bp, Homo sapiens
gaaggcagaaaaggt

SEQ ID NO: 1808825 - DNA, 15 bp, Homo sapiens
aaggcagaaaaggta

SEQ ID NO: 1808826 - DNA, 15 bp, Homo sapiens
aggcagaaaaggtaa

SEQ ID NO: 1808827 - DNA, 15 bp, Homo sapiens
ggcagaaaaggtaag

SEQ ID NO: 1808828 - DNA, 15 bp, Homo sapiens
gcagaaaaggtaagg

SEQ ID NO: 1808829 - DNA, 15 bp, Homo sapiens
cagaaaaggtaaggt

SEQ ID NO: 1808830 - DNA, 15 bp, Homo sapiens
agaaaaggtaaggtg

SEQ ID NO: 1808831 - DNA, 15 bp, Homo sapiens
gaaaaggtaaggtgt

SEQ ID NO: 1808832 - DNA, 15 bp, Homo sapiens
aaaaggtaaggtgtg

SEQ ID NO: 1808833 - DNA, 15 bp, Homo sapiens
aaaggtaaggtgtgt

SEQ ID NO: 1808834 - DNA, 15 bp, Homo sapiens
aaggtaaggtgtgtg

SEQ ID NO: 1808835 - DNA, 15 bp, Homo sapiens
aggtaaggtgtgtga

SEQ ID NO: 1808836 - DNA, 15 bp, Homo sapiens
ggtaaggtgtgtgag

SEQ ID NO: 1808837 - DNA, 15 bp, Homo sapiens
gtaaggtgtgtgagg

SEQ ID NO: 1808838 - DNA, 15 bp, Homo sapiens
taaggtgtgtgaggt

SEQ ID NO: 1808839 - DNA, 15 bp, Homo sapiens
aaggtgtgtgaggtg

SEQ ID NO: 1808840 - DNA, 15 bp, Homo sapiens
aggtgtgtgaggtgg

SEQ ID NO: 1808841 - DNA, 15 bp, Homo sapiens
ggtgtgtgaggtggc

SEQ ID NO: 1808842 - DNA, 15 bp, Homo sapiens
gtgtgtgaggtggca

SEQ ID NO: 1808843 - DNA, 15 bp, Homo sapiens
tgtgtgaggtggcag

SEQ ID NO: 1808844 - DNA, 15 bp, Homo sapiens
gtgtgaggtggcaga

SEQ ID NO: 1808845 - DNA, 15 bp, Homo sapiens
tgtgaggtggcagaa

SEQ ID NO: 1808846 - DNA, 15 bp, Homo sapiens
gtgaggtggcagaaa

SEQ ID NO: 1808847 - DNA, 15 bp, Homo sapiens
tgaggtggcagaaaa

SEQ ID NO: 1808848 - DNA, 15 bp, Homo sapiens
gaggtggcagaaaaa

SEQ ID NO: 1808849 - DNA, 15 bp, Homo sapiens
aggtggcagaaaaag

SEQ ID NO: 1808850 - DNA, 15 bp, Homo sapiens
ggtggcagaaaaagg

SEQ ID NO: 1808851 - DNA, 15 bp, Homo sapiens
gtggcagaaaaaggg

SEQ ID NO: 1808852 - DNA, 15 bp, Homo sapiens
tggcagaaaaaggga

SEQ ID NO: 1808853 - DNA, 15 bp, Homo sapiens
ggcagaaaaagggaa

SEQ ID NO: 1808854 - DNA, 15 bp, Homo sapiens
gcagaaaaagggaag

SEQ ID NO: 1808855 - DNA, 15 bp, Homo sapiens
cagaaaaagggaaga

SEQ ID NO: 1808856 - DNA, 15 bp, Homo sapiens
agaaaaagggaagag

SEQ ID NO: 1808857 - DNA, 15 bp, Homo sapiens
gaaaaagggaagagt

SEQ ID NO: 1808858 - DNA, 15 bp, Homo sapiens
aaaaagggaagagtg

SEQ ID NO: 1808859 - DNA, 15 bp, Homo sapiens
aaaagggaagagtgt

SEQ ID NO: 1808860 - DNA, 15 bp, Homo sapiens
aaagggaagagtgtg

SEQ ID NO: 1808861 - DNA, 15 bp, Homo sapiens
aagggaagagtgtgg

SEQ ID NO: 1808862 - DNA, 15 bp, Homo sapiens
agggaagagtgtgga

SEQ ID NO: 1808863 - DNA, 15 bp, Homo sapiens
gggaagagtgtggac

SEQ ID NO: 1808864 - DNA, 15 bp, Homo sapiens
ggaagagtgtggaca

SEQ ID NO: 1808865 - DNA, 15 bp, Homo sapiens
gaagagtgtggacag

SEQ ID NO: 1808866 - DNA, 15 bp, Homo sapiens
aagagtgtggacagt

SEQ ID NO: 1808867 - DNA, 15 bp, Homo sapiens
agagtgtggacagtg

SEQ ID NO: 1808868 - DNA, 15 bp, Homo sapiens
gagtgtggacagtga

SEQ ID NO: 1808869 - DNA, 15 bp, Homo sapiens
agtgtggacagtgag

SEQ ID NO: 1808870 - DNA, 15 bp, Homo sapiens
gtgtggacagtgagg

SEQ ID NO: 1808871 - DNA, 15 bp, Homo sapiens
tgtggacagtgaggg

SEQ ID NO: 1808872 - DNA, 15 bp, Homo sapiens
gtggacagtgagggt

SEQ ID NO: 1808873 - DNA, 15 bp, Homo sapiens
tggacagtgagggtt

SEQ ID NO: 1808874 - DNA, 15 bp, Homo sapiens
gacagtgagggtttc

SEQ ID NO: 1808875 - DNA, 15 bp, Homo sapiens
acagtgagggtttca

SEQ ID NO: 1808876 - DNA, 15 bp, Homo sapiens
cagtgagggtttcaa

SEQ ID NO: 1808877 - DNA, 15 bp, Homo sapiens
agtgagggtttcaag

SEQ ID NO: 1808878 - DNA, 15 bp, Homo sapiens
gtgagggtttcaagg

SEQ ID NO: 1808879 - DNA, 15 bp, Homo sapiens
tgagggtttcaagga

SEQ ID NO: 1808880 - DNA, 15 bp, Homo sapiens
gagggtttcaaggag

SEQ ID NO: 1808881 - DNA, 15 bp, Homo sapiens
agggtttcaaggagg

SEQ ID NO: 1808882 - DNA, 15 bp, Homo sapiens
gggtttcaaggagga

SEQ ID NO: 1808883 - DNA, 15 bp, Homo sapiens
ggtttcaaggaggag

SEQ ID NO: 1808884 - DNA, 15 bp, Homo sapiens
gtttcaaggaggagg

SEQ ID NO: 1808885 - DNA, 15 bp, Homo sapiens
ttcaaggaggaggaa

SEQ ID NO: 1808886 - DNA, 15 bp, Homo sapiens
tcaaggaggaggaac

SEQ ID NO: 1808887 - DNA, 15 bp, Homo sapiens
caaggaggaggaact

SEQ ID NO: 1808888 - DNA, 15 bp, Homo sapiens
aaggaggaggaactg

SEQ ID NO: 1808889 - DNA, 15 bp, Homo sapiens
aggaggaggaactgt

SEQ ID NO: 1808890 - DNA, 15 bp, Homo sapiens
ggaggaggaactgtc

SEQ ID NO: 1808891 - DNA, 15 bp, Homo sapiens
gaggaggaactgtct

SEQ ID NO: 1808892 - DNA, 15 bp, Homo sapiens
aggaggaactgtcta

SEQ ID NO: 1808893 - DNA, 15 bp, Homo sapiens
ggaggaactgtctac

SEQ ID NO: 1808894 - DNA, 15 bp, Homo sapiens
gaggaactgtctact

SEQ ID NO: 1808895 - DNA, 15 bp, Homo sapiens
aggaactgtctactg

SEQ ID NO: 1808896 - DNA, 15 bp, Homo sapiens
ggaactgtctactgc

SEQ ID NO: 1808897 - DNA, 15 bp, Homo sapiens
gaactgtctactgcc

SEQ ID NO: 1808898 - DNA, 15 bp, Homo sapiens
aactgtctactgcct

SEQ ID NO: 1808899 - DNA, 15 bp, Homo sapiens
actgtctactgcctc

SEQ ID NO: 1808900 - DNA, 15 bp, Homo sapiens
ctgtctactgcctcc

SEQ ID NO: 1808901 - DNA, 15 bp, Homo sapiens
tgtctactgcctcct

SEQ ID NO: 1808902 - DNA, 15 bp, Homo sapiens
gtctactgcctcctg

SEQ ID NO: 1808903 - DNA, 15 bp, Homo sapiens
tctactgcctcctgc

SEQ ID NO: 1808904 - DNA, 15 bp, Homo sapiens
ctactgcctcctgcc

SEQ ID NO: 1808905 - DNA, 15 bp, Homo sapiens
tactgcctcctgcca

SEQ ID NO: 1808906 - DNA, 15 bp, Homo sapiens
actgcctcctgccaa

SEQ ID NO: 1808907 - DNA, 15 bp, Homo sapiens
ctgcctcctgccaag

SEQ ID NO: 1808908 - DNA, 15 bp, Homo sapiens
tgcctcctgccaagg

SEQ ID NO: 1808909 - DNA, 15 bp, Homo sapiens
gcctcctgccaagga

SEQ ID NO: 1808910 - DNA, 15 bp, Homo sapiens
cctcctgccaaggac

SEQ ID NO: 1808911 - DNA, 15 bp, Homo sapiens
ctcctgccaaggacg

SEQ ID NO: 1808912 - DNA, 15 bp, Homo sapiens
tcctgccaaggacgg

SEQ ID NO: 1808913 - DNA, 15 bp, Homo sapiens
cctgccaaggacgga

SEQ ID NO: 1808914 - DNA, 15 bp, Homo sapiens
ctgccaaggacggag

SEQ ID NO: 1808915 - DNA, 15 bp, Homo sapiens
tgccaaggacggagg

SEQ ID NO: 1808916 - DNA, 15 bp, Homo sapiens
gccaaggacggaggt

SEQ ID NO: 1808917 - DNA, 15 bp, Homo sapiens
ccaaggacggaggtg

SEQ ID NO: 1808918 - DNA, 15 bp, Homo sapiens
caaggacggaggtgt

SEQ ID NO: 1808919 - DNA, 15 bp, Homo sapiens
aaggacggaggtgtc

SEQ ID NO: 1808920 - DNA, 15 bp, Homo sapiens
aggacggaggtgtcc

SEQ ID NO: 1808921 - DNA, 15 bp, Homo sapiens
ggacggaggtgtcca

SEQ ID NO: 1808922 - DNA, 15 bp, Homo sapiens
gacggaggtgtccac

SEQ ID NO: 1808923 - DNA, 15 bp, Homo sapiens
acggaggtgtccact

SEQ ID NO: 1808924 - DNA, 15 bp, Homo sapiens
cggaggtgtccactg

SEQ ID NO: 1808925 - DNA, 15 bp, Homo sapiens
ggaggtgtccactgc

SEQ ID NO: 1808926 - DNA, 15 bp, Homo sapiens
gaggtgtccactgcc

SEQ ID NO: 1808927 - DNA, 15 bp, Homo sapiens
aggtgtccactgcca

SEQ ID NO: 1808928 - DNA, 15 bp, Homo sapiens
ggtgtccactgccag

SEQ ID NO: 1808929 - DNA, 15 bp, Homo sapiens
gtgtccactgccagt

SEQ ID NO: 1808930 - DNA, 15 bp, Homo sapiens
tgtccactgccagtt

SEQ ID NO: 1808931 - DNA, 15 bp, Homo sapiens
gtccactgccagttg

SEQ ID NO: 1808932 - DNA, 15 bp, Homo sapiens
tccactgccagttga

SEQ ID NO: 1808933 - DNA, 15 bp, Homo sapiens
ccactgccagttgac

SEQ ID NO: 1808934 - DNA, 15 bp, Homo sapiens
cactgccagttgaca

SEQ ID NO: 1808935 - DNA, 15 bp, Homo sapiens
actgccagttgacat

SEQ ID NO: 1808936 - DNA, 15 bp, Homo sapiens
ctgccagttgacata

SEQ ID NO: 1808937 - DNA, 15 bp, Homo sapiens
tgccagttgacataa

SEQ ID NO: 1808938 - DNA, 15 bp, Homo sapiens
gccagttgacataag

SEQ ID NO: 1808939 - DNA, 15 bp, Homo sapiens
ccagttgacataagg

SEQ ID NO: 1808940 - DNA, 15 bp, Homo sapiens
cagttgacataaggt

SEQ ID NO: 1808941 - DNA, 15 bp, Homo sapiens
agttgacataaggtc

SEQ ID NO: 1808942 - DNA, 15 bp, Homo sapiens
gttgacataaggtca

SEQ ID NO: 1808943 - DNA, 15 bp, Homo sapiens
ttgacataaggtcac

SEQ ID NO: 1808944 - DNA, 15 bp, Homo sapiens
tgacataaggtcacc

SEQ ID NO: 1808945 - DNA, 15 bp, Homo sapiens
gacataaggtcaccc

SEQ ID NO: 1808946 - DNA, 15 bp, Homo sapiens
acataaggtcaccca

SEQ ID NO: 1808947 - DNA, 15 bp, Homo sapiens
cataaggtcacccat

SEQ ID NO: 1808948 - DNA, 15 bp, Homo sapiens
ataaggtcacccatg

SEQ ID NO: 1808949 - DNA, 15 bp, Homo sapiens
taaggtcacccatga

SEQ ID NO: 1808950 - DNA, 15 bp, Homo sapiens
aaggtcacccatgaa

SEQ ID NO: 1808951 - DNA, 15 bp, Homo sapiens
aggtcacccatgaac

SEQ ID NO: 1808952 - DNA, 15 bp, Homo sapiens
ggtcacccatgaact

SEQ ID NO: 1808953 - DNA, 15 bp, Homo sapiens
gtcacccatgaactt

SEQ ID NO: 1808954 - DNA, 15 bp, Homo sapiens
tcacccatgaacttg

SEQ ID NO: 1808955 - DNA, 15 bp, Homo sapiens
cacccatgaacttgg

SEQ ID NO: 1808956 - DNA, 15 bp, Homo sapiens
acccatgaacttggt

SEQ ID NO: 1808957 - DNA, 15 bp, Homo sapiens
cccatgaacttggtg

SEQ ID NO: 1808958 - DNA, 15 bp, Homo sapiens
ccatgaacttggtga

SEQ ID NO: 1808959 - DNA, 15 bp, Homo sapiens
catgaacttggtgac

SEQ ID NO: 1808960 - DNA, 15 bp, Homo sapiens
atgaacttggtgaca

SEQ ID NO: 1808961 - DNA, 15 bp, Homo sapiens
tgaacttggtgacag

SEQ ID NO: 1808962 - DNA, 15 bp, Homo sapiens
gaacttggtgacagg

SEQ ID NO: 1808963 - DNA, 15 bp, Homo sapiens
aacttggtgacagga

SEQ ID NO: 1808964 - DNA, 15 bp, Homo sapiens
acttggtgacaggaa

SEQ ID NO: 1808965 - DNA, 15 bp, Homo sapiens
cttggtgacaggaat

SEQ ID NO: 1808966 - DNA, 15 bp, Homo sapiens
ttggtgacaggaatt

SEQ ID NO: 1808967 - DNA, 15 bp, Homo sapiens
tggtgacaggaattt

SEQ ID NO: 1808968 - DNA, 15 bp, Homo sapiens
ggtgacaggaatttc

SEQ ID NO: 1808969 - DNA, 15 bp, Homo sapiens
gtgacaggaatttca

SEQ ID NO: 1808970 - DNA, 15 bp, Homo sapiens
tgacaggaatttcag

SEQ ID NO: 1808971 - DNA, 15 bp, Homo sapiens
gacaggaatttcagt

SEQ ID NO: 1808972 - DNA, 15 bp, Homo sapiens
acaggaatttcagtg

SEQ ID NO: 1808973 - DNA, 15 bp, Homo sapiens
caggaatttcagtgg

SEQ ID NO: 1808974 - DNA, 15 bp, Homo sapiens
aggaatttcagtgga

SEQ ID NO: 1808975 - DNA, 15 bp, Homo sapiens
ggaatttcagtggag

SEQ ID NO: 1808976 - DNA, 15 bp, Homo sapiens
gaatttcagtggaga

SEQ ID NO: 1808977 - DNA, 15 bp, Homo sapiens
aatttcagtggagaa

SEQ ID NO: 1808978 - DNA, 15 bp, Homo sapiens
atttcagtggagaag

SEQ ID NO: 1808979 - DNA, 15 bp, Homo sapiens
tttcagtggagaagt

SEQ ID NO: 1808980 - DNA, 15 bp, Homo sapiens
ttcagtggagaagtg

SEQ ID NO: 1808981 - DNA, 15 bp, Homo sapiens
tcagtggagaagtgg

SEQ ID NO: 1808982 - DNA, 15 bp, Homo sapiens
cagtggagaagtggc

SEQ ID NO: 1808983 - DNA, 15 bp, Homo sapiens
agtggagaagtggcc

SEQ ID NO: 1808984 - DNA, 15 bp, Homo sapiens
gtggagaagtggcca

SEQ ID NO: 1808985 - DNA, 15 bp, Homo sapiens
tggagaagtggccac

SEQ ID NO: 1808986 - DNA, 15 bp, Homo sapiens
ggagaagtggccaca

SEQ ID NO: 1808987 - DNA, 15 bp, Homo sapiens
gagaagtggccacag

SEQ ID NO: 1808988 - DNA, 15 bp, Homo sapiens
agaagtggccacaga

SEQ ID NO: 1808989 - DNA, 15 bp, Homo sapiens
gaagtggccacagac

SEQ ID NO: 1808990 - DNA, 15 bp, Homo sapiens
aagtggccacagaca

SEQ ID NO: 1808991 - DNA, 15 bp, Homo sapiens
agtggccacagacac

SEQ ID NO: 1808992 - DNA, 15 bp, Homo sapiens
gtggccacagacaca

SEQ ID NO: 1808993 - DNA, 15 bp, Homo sapiens
tggccacagacacaa

SEQ ID NO: 1808994 - DNA, 15 bp, Homo sapiens
ggccacagacacaag

SEQ ID NO: 1808995 - DNA, 15 bp, Homo sapiens
gccacagacacaagt

SEQ ID NO: 1808996 - DNA, 15 bp, Homo sapiens
ccacagacacaagtc

SEQ ID NO: 1808997 - DNA, 15 bp, Homo sapiens
cacagacacaagtct

SEQ ID NO: 1808998 - DNA, 15 bp, Homo sapiens
acagacacaagtcta

SEQ ID NO: 1808999 - DNA, 15 bp, Homo sapiens
cagacacaagtctag

SEQ ID NO: 1809000 - DNA, 15 bp, Homo sapiens
agacacaagtctaga

SEQ ID NO: 1809001 - DNA, 15 bp, Homo sapiens
gacacaagtctagaa

SEQ ID NO: 1809002 - DNA, 15 bp, Homo sapiens
acacaagtctagaat

SEQ ID NO: 1809003 - DNA, 15 bp, Homo sapiens
cacaagtctagaatt

SEQ ID NO: 1809004 - DNA, 15 bp, Homo sapiens
acaagtctagaattg

SEQ ID NO: 1809005 - DNA, 15 bp, Homo sapiens
caagtctagaattga

SEQ ID NO: 1809006 - DNA, 15 bp, Homo sapiens
aagtctagaattgaa

SEQ ID NO: 1809007 - DNA, 15 bp, Homo sapiens
agtctagaattgaaa

SEQ ID NO: 1809008 - DNA, 15 bp, Homo sapiens
gtctagaattgaaat

SEQ ID NO: 1809009 - DNA, 15 bp, Homo sapiens
tctagaattgaaatg

SEQ ID NO: 1809010 - DNA, 15 bp, Homo sapiens
ctagaattgaaatgg

SEQ ID NO: 1809011 - DNA, 15 bp, Homo sapiens
tagaattgaaatggg

SEQ ID NO: 1809012 - DNA, 15 bp, Homo sapiens
agaattgaaatggga

SEQ ID NO: 1809013 - DNA, 15 bp, Homo sapiens
gaattgaaatgggag

SEQ ID NO: 1809014 - DNA, 15 bp, Homo sapiens
aattgaaatgggagc

SEQ ID NO: 1809015 - DNA, 15 bp, Homo sapiens
attgaaatgggagcc

SEQ ID NO: 1809016 - DNA, 15 bp, Homo sapiens
ttgaaatgggagccg

SEQ ID NO: 1809017 - DNA, 15 bp, Homo sapiens
tgaaatgggagccga

SEQ ID NO: 1809018 - DNA, 15 bp, Homo sapiens
gaaatgggagccgag

SEQ ID NO: 1809019 - DNA, 15 bp, Homo sapiens
aaatgggagccgagg

SEQ ID NO: 1809020 - DNA, 15 bp, Homo sapiens
aatgggagccgaggc

SEQ ID NO: 1809021 - DNA, 15 bp, Homo sapiens
atgggagccgaggca

SEQ ID NO: 1809022 - DNA, 15 bp, Homo sapiens
tgggagccgaggcag

SEQ ID NO: 1809023 - DNA, 15 bp, Homo sapiens
gggagccgaggcagc

SEQ ID NO: 1809024 - DNA, 15 bp, Homo sapiens
ggagccgaggcagcg

SEQ ID NO: 1809025 - DNA, 15 bp, Homo sapiens
gagccgaggcagcgt

SEQ ID NO: 1809026 - DNA, 15 bp, Homo sapiens
agccgaggcagcgta

SEQ ID NO: 1809027 - DNA, 15 bp, Homo sapiens
gccgaggcagcgtag

SEQ ID NO: 1809028 - DNA, 15 bp, Homo sapiens
ccgaggcagcgtaga

SEQ ID NO: 1809029 - DNA, 15 bp, Homo sapiens
cgaggcagcgtagac

SEQ ID NO: 1809030 - DNA, 15 bp, Homo sapiens
gaggcagcgtagaca

SEQ ID NO: 1809031 - DNA, 15 bp, Homo sapiens
aggcagcgtagacaa

SEQ ID NO: 1809032 - DNA, 15 bp, Homo sapiens
ggcagcgtagacaaa

SEQ ID NO: 1809033 - DNA, 15 bp, Homo sapiens
gcagcgtagacaaaa

SEQ ID NO: 1809034 - DNA, 15 bp, Homo sapiens
cagcgtagacaaaag

SEQ ID NO: 1809035 - DNA, 15 bp, Homo sapiens
agcgtagacaaaaga

SEQ ID NO: 1809036 - DNA, 15 bp, Homo sapiens
gcgtagacaaaagag

SEQ ID NO: 1809037 - DNA, 15 bp, Homo sapiens
cgtagacaaaagagg

SEQ ID NO: 1809038 - DNA, 15 bp, Homo sapiens
gtagacaaaagagga

SEQ ID NO: 1809039 - DNA, 15 bp, Homo sapiens
tagacaaaagaggaa

SEQ ID NO: 1809040 - DNA, 15 bp, Homo sapiens
agacaaaagaggaaa

SEQ ID NO: 1809041 - DNA, 15 bp, Homo sapiens
gacaaaagaggaaac

SEQ ID NO: 1809042 - DNA, 15 bp, Homo sapiens
acaaaagaggaaact

SEQ ID NO: 1809043 - DNA, 15 bp, Homo sapiens
caaaagaggaaactg

SEQ ID NO: 1809044 - DNA, 15 bp, Homo sapiens
aaaagaggaaactgc

SEQ ID NO: 1809045 - DNA, 15 bp, Homo sapiens
aaagaggaaactgct

SEQ ID NO: 1809046 - DNA, 15 bp, Homo sapiens
aagaggaaactgctc

SEQ ID NO: 1809047 - DNA, 15 bp, Homo sapiens
agaggaaactgctcc

SEQ ID NO: 1809048 - DNA, 15 bp, Homo sapiens
gaggaaactgctcct

SEQ ID NO: 1809049 - DNA, 15 bp, Homo sapiens
aggaaactgctcctt

SEQ ID NO: 1809050 - DNA, 15 bp, Homo sapiens
ggaaactgctccttc

SEQ ID NO: 1809051 - DNA, 15 bp, Homo sapiens
gaaactgctccttcc

SEQ ID NO: 1809052 - DNA, 15 bp, Homo sapiens
aaactgctccttcca

SEQ ID NO: 1809053 - DNA, 15 bp, Homo sapiens
aactgctccttccag

SEQ ID NO: 1809054 - DNA, 15 bp, Homo sapiens
actgctccttccaga

SEQ ID NO: 1809055 - DNA, 15 bp, Homo sapiens
ctgctccttccagag

SEQ ID NO: 1809056 - DNA, 15 bp, Homo sapiens
tgctccttccagagc

SEQ ID NO: 1809057 - DNA, 15 bp, Homo sapiens
gctccttccagagcg

SEQ ID NO: 1809058 - DNA, 15 bp, Homo sapiens
ctccttccagagcgg

SEQ ID NO: 1809059 - DNA, 15 bp, Homo sapiens
tccttccagagcggc

SEQ ID NO: 1809060 - DNA, 15 bp, Homo sapiens
ccttccagagcggct

SEQ ID NO: 1809061 - DNA, 15 bp, Homo sapiens
cttccagagcggctc

SEQ ID NO: 1809062 - DNA, 15 bp, Homo sapiens
ttccagagcggctct

SEQ ID NO: 1809063 - DNA, 15 bp, Homo sapiens
tccagagcggctctg

SEQ ID NO: 1809064 - DNA, 15 bp, Homo sapiens
ccagagcggctctga

SEQ ID NO: 1809065 - DNA, 15 bp, Homo sapiens
cagagcggctctgag

SEQ ID NO: 1809066 - DNA, 15 bp, Homo sapiens
agagcggctctgagc

SEQ ID NO: 1809067 - DNA, 15 bp, Homo sapiens
gagcggctctgagcg

SEQ ID NO: 1809068 - DNA, 15 bp, Homo sapiens
agcggctctgagcga

SEQ ID NO: 1809069 - DNA, 15 bp, Homo sapiens
gcggctctgagcgag

SEQ ID NO: 1809070 - DNA, 15 bp, Homo sapiens
cggctctgagcgagc

SEQ ID NO: 1809071 - DNA, 15 bp, Homo sapiens
ggctctgagcgagca

SEQ ID NO: 1809072 - DNA, 15 bp, Homo sapiens
gctctgagcgagcac

SEQ ID NO: 1809073 - DNA, 15 bp, Homo sapiens
ctctgagcgagcacc

SEQ ID NO: 1809074 - DNA, 15 bp, Homo sapiens
tctgagcgagcaccg

SEQ ID NO: 1809075 - DNA, 15 bp, Homo sapiens
ctgagcgagcaccga

SEQ ID NO: 1809076 - DNA, 15 bp, Homo sapiens
tgagcgagcaccgag

SEQ ID NO: 1809077 - DNA, 15 bp, Homo sapiens
gagcgagcaccgaga

SEQ ID NO: 1809078 - DNA, 15 bp, Homo sapiens
agcgagcaccgagaa

SEQ ID NO: 1809079 - DNA, 15 bp, Homo sapiens
gcgagcaccgagaaa

SEQ ID NO: 1809080 - DNA, 15 bp, Homo sapiens
cgagcaccgagaaat

SEQ ID NO: 1809081 - DNA, 15 bp, Homo sapiens
gagcaccgagaaatg

SEQ ID NO: 1809082 - DNA, 15 bp, Homo sapiens
agcaccgagaaatgg

SEQ ID NO: 1809083 - DNA, 15 bp, Homo sapiens
gcaccgagaaatggg

SEQ ID NO: 1809084 - DNA, 15 bp, Homo sapiens
caccgagaaatgggc

SEQ ID NO: 1809085 - DNA, 15 bp, Homo sapiens
accgagaaatgggca

SEQ ID NO: 1809086 - DNA, 15 bp, Homo sapiens
ccgagaaatgggcag

SEQ ID NO: 1809087 - DNA, 15 bp, Homo sapiens
cgagaaatgggcagt

SEQ ID NO: 1809088 - DNA, 15 bp, Homo sapiens
gagaaatgggcagtg

SEQ ID NO: 1809089 - DNA, 15 bp, Homo sapiens
agaaatgggcagtgg

SEQ ID NO: 1809090 - DNA, 15 bp, Homo sapiens
gaaatgggcagtggc

SEQ ID NO: 1809091 - DNA, 15 bp, Homo sapiens
aaatgggcagtggct

SEQ ID NO: 1809092 - DNA, 15 bp, Homo sapiens
aatgggcagtggctt

SEQ ID NO: 1809093 - DNA, 15 bp, Homo sapiens
atgggcagtggcttt

SEQ ID NO: 1809094 - DNA, 15 bp, Homo sapiens
tgggcagtggcttta

SEQ ID NO: 1809095 - DNA, 15 bp, Homo sapiens
gggcagtggctttag

SEQ ID NO: 1809096 - DNA, 15 bp, Homo sapiens
ggcagtggctttagg

SEQ ID NO: 1809097 - DNA, 15 bp, Homo sapiens
gcagtggctttaggg

SEQ ID NO: 1809098 - DNA, 15 bp, Homo sapiens
cagtggctttagggg

SEQ ID NO: 1809099 - DNA, 15 bp, Homo sapiens
agtggctttagggga

SEQ ID NO: 1809100 - DNA, 15 bp, Homo sapiens
gtggctttaggggat

SEQ ID NO: 1809101 - DNA, 15 bp, Homo sapiens
tggctttaggggatg

SEQ ID NO: 1809102 - DNA, 15 bp, Homo sapiens
ggctttaggggatgt

SEQ ID NO: 1809103 - DNA, 15 bp, Homo sapiens
gctttaggggatgta

SEQ ID NO: 1809104 - DNA, 15 bp, Homo sapiens
ctttaggggatgtag

SEQ ID NO: 1809105 - DNA, 15 bp, Homo sapiens
tttaggggatgtagc

SEQ ID NO: 1809106 - DNA, 15 bp, Homo sapiens
ttaggggatgtagcg

SEQ ID NO: 1809107 - DNA, 15 bp, Homo sapiens
taggggatgtagcgt

SEQ ID NO: 1809108 - DNA, 15 bp, Homo sapiens
aggggatgtagcgtc

SEQ ID NO: 1809109 - DNA, 15 bp, Homo sapiens
ggggatgtagcgtca

SEQ ID NO: 1809110 - DNA, 15 bp, Homo sapiens
gggatgtagcgtcaa

SEQ ID NO: 1809111 - DNA, 15 bp, Homo sapiens
ggatgtagcgtcaag

SEQ ID NO: 1809112 - DNA, 15 bp, Homo sapiens
gatgtagcgtcaagg

SEQ ID NO: 1809113 - DNA, 15 bp, Homo sapiens
atgtagcgtcaagga

SEQ ID NO: 1809114 - DNA, 15 bp, Homo sapiens
tgtagcgtcaaggaa

SEQ ID NO: 1809115 - DNA, 15 bp, Homo sapiens
gtagcgtcaaggaag

SEQ ID NO: 1809116 - DNA, 15 bp, Homo sapiens
tagcgtcaaggaagt

SEQ ID NO: 1809117 - DNA, 15 bp, Homo sapiens
agcgtcaaggaagtg

SEQ ID NO: 1809118 - DNA, 15 bp, Homo sapiens
gcgtcaaggaagtgt

SEQ ID NO: 1809119 - DNA, 15 bp, Homo sapiens
cgtcaaggaagtgtc

SEQ ID NO: 1809120 - DNA, 15 bp, Homo sapiens
gtcaaggaagtgtct

SEQ ID NO: 1809121 - DNA, 15 bp, Homo sapiens
tcaaggaagtgtctt

SEQ ID NO: 1809122 - DNA, 15 bp, Homo sapiens
caaggaagtgtcttt

SEQ ID NO: 1809123 - DNA, 15 bp, Homo sapiens
aaggaagtgtctttt

SEQ ID NO: 1809124 - DNA, 15 bp, Homo sapiens
aggaagtgtctttta

SEQ ID NO: 1809125 - DNA, 15 bp, Homo sapiens
ggaagtgtcttttaa

SEQ ID NO: 1809126 - DNA, 15 bp, Homo sapiens
gaagtgtcttttaaa

SEQ ID NO: 1809127 - DNA, 15 bp, Homo sapiens
aagtgtcttttaaag

SEQ ID NO: 1809128 - DNA, 15 bp, Homo sapiens
agtgtcttttaaaga

SEQ ID NO: 1809129 - DNA, 15 bp, Homo sapiens
gtgtcttttaaagaa

SEQ ID NO: 1809130 - DNA, 15 bp, Homo sapiens
tgtcttttaaagaag

SEQ ID NO: 1809131 - DNA, 15 bp, Homo sapiens
gtcttttaaagaagt

SEQ ID NO: 1809132 - DNA, 15 bp, Homo sapiens
tcttttaaagaagtc

SEQ ID NO: 1809133 - DNA, 15 bp, Homo sapiens
cttttaaagaagtcg

SEQ ID NO: 1809134 - DNA, 15 bp, Homo sapiens
ttttaaagaagtcgg

SEQ ID NO: 1809135 - DNA, 15 bp, Homo sapiens
tttaaagaagtcggg

SEQ ID NO: 1809136 - DNA, 15 bp, Homo sapiens
ttaaagaagtcgggg

SEQ ID NO: 1809137 - DNA, 15 bp, Homo sapiens
taaagaagtcggggg

SEQ ID NO: 1809138 - DNA, 15 bp, Homo sapiens
aaagaagtcgggggc

SEQ ID NO: 1809139 - DNA, 15 bp, Homo sapiens
aagaagtcgggggcc

SEQ ID NO: 1809140 - DNA, 15 bp, Homo sapiens
agaagtcgggggccg

SEQ ID NO: 1809141 - DNA, 15 bp, Homo sapiens
gaagtcgggggccgg

SEQ ID NO: 1809142 - DNA, 15 bp, Homo sapiens
aagtcgggggccggg

SEQ ID NO: 1809143 - DNA, 15 bp, Homo sapiens
agtcgggggccgggc

SEQ ID NO: 1809144 - DNA, 15 bp, Homo sapiens
gtcgggggccgggca

SEQ ID NO: 1809145 - DNA, 15 bp, Homo sapiens
tcgggggccgggcac

SEQ ID NO: 1809146 - DNA, 15 bp, Homo sapiens
cgggggccgggcacg

SEQ ID NO: 1809147 - DNA, 15 bp, Homo sapiens
gggggccgggcacgg

SEQ ID NO: 1809148 - DNA, 15 bp, Homo sapiens
ggggccgggcacggt

SEQ ID NO: 1809149 - DNA, 15 bp, Homo sapiens
cctgtagtcccagca

SEQ ID NO: 1809150 - DNA, 15 bp, Homo sapiens
ggcaggcagatcact

SEQ ID NO: 1809151 - DNA, 15 bp, Homo sapiens
gcaggcagatcactt

SEQ ID NO: 1809152 - DNA, 15 bp, Homo sapiens
caggcagatcacttg

SEQ ID NO: 1809153 - DNA, 15 bp, Homo sapiens
aggcagatcacttga

SEQ ID NO: 1809154 - DNA, 15 bp, Homo sapiens
gcctggctaacacga

SEQ ID NO: 1809155 - DNA, 15 bp, Homo sapiens
cctggctaacacgat

SEQ ID NO: 1809156 - DNA, 15 bp, Homo sapiens
ctggctaacacgatg

SEQ ID NO: 1809157 - DNA, 15 bp, Homo sapiens
tggctaacacgatga

SEQ ID NO: 1809158 - DNA, 15 bp, Homo sapiens
ggctaacacgatgaa

SEQ ID NO: 1809159 - DNA, 15 bp, Homo sapiens
gctaacacgatgaaa

SEQ ID NO: 1809160 - DNA, 15 bp, Homo sapiens
ctaacacgatgaaac

SEQ ID NO: 1809161 - DNA, 15 bp, Homo sapiens
taacacgatgaaacc

SEQ ID NO: 1809162 - DNA, 15 bp, Homo sapiens
aacacgatgaaaccc

SEQ ID NO: 1809163 - DNA, 15 bp, Homo sapiens
acacgatgaaacccc

SEQ ID NO: 1809164 - DNA, 15 bp, Homo sapiens
cacgatgaaaccccg

SEQ ID NO: 1809165 - DNA, 15 bp, Homo sapiens
acgatgaaaccccgt

SEQ ID NO: 1809166 - DNA, 15 bp, Homo sapiens
cgatgaaaccccgtc

SEQ ID NO: 1809167 - DNA, 15 bp, Homo sapiens
aattagctgggcacg

SEQ ID NO: 1809168 - DNA, 15 bp, Homo sapiens
attagctgggcacgg

SEQ ID NO: 1809169 - DNA, 15 bp, Homo sapiens
ttagctgggcacggt

SEQ ID NO: 1809170 - DNA, 15 bp, Homo sapiens
tagctgggcacggtg

SEQ ID NO: 1809171 - DNA, 15 bp, Homo sapiens
agctgggcacggtgg

SEQ ID NO: 1809172 - DNA, 15 bp, Homo sapiens
gggcacggtggctcg

SEQ ID NO: 1809173 - DNA, 15 bp, Homo sapiens
ggcacggtggctcgt

SEQ ID NO: 1809174 - DNA, 15 bp, Homo sapiens
gcacggtggctcgtg

SEQ ID NO: 1809175 - DNA, 15 bp, Homo sapiens
cacggtggctcgtgc

SEQ ID NO: 1809176 - DNA, 15 bp, Homo sapiens
acggtggctcgtgcc

SEQ ID NO: 1809177 - DNA, 15 bp, Homo sapiens
cggtggctcgtgcct

SEQ ID NO: 1809178 - DNA, 15 bp, Homo sapiens
ggtggctcgtgcctg

SEQ ID NO: 1809179 - DNA, 15 bp, Homo sapiens
gtggctcgtgcctgt

SEQ ID NO: 1809180 - DNA, 15 bp, Homo sapiens
tgggaggcagaggtg

SEQ ID NO: 1809181 - DNA, 15 bp, Homo sapiens
catctctactaaaac

SEQ ID NO: 1809182 - DNA, 15 bp, Homo sapiens
atctctactaaaact

SEQ ID NO: 1809183 - DNA, 15 bp, Homo sapiens
tctctactaaaacta

SEQ ID NO: 1809184 - DNA, 15 bp, Homo sapiens
ctctactaaaactac

SEQ ID NO: 1809185 - DNA, 15 bp, Homo sapiens
ccgggagtggtggca

SEQ ID NO: 1809186 - DNA, 15 bp, Homo sapiens
cgggagtggtggcac

SEQ ID NO: 1809187 - DNA, 15 bp, Homo sapiens
gggagtggtggcacg

SEQ ID NO: 1809188 - DNA, 15 bp, Homo sapiens
ggagtggtggcacgt

SEQ ID NO: 1809189 - DNA, 15 bp, Homo sapiens
gagtggtggcacgtg

SEQ ID NO: 1809190 - DNA, 15 bp, Homo sapiens
agtggtggcacgtgc

SEQ ID NO: 1809191 - DNA, 15 bp, Homo sapiens
gtggtggcacgtgcc

SEQ ID NO: 1809192 - DNA, 15 bp, Homo sapiens
tggtggcacgtgcct

SEQ ID NO: 1809193 - DNA, 15 bp, Homo sapiens
tggcacgtgcctgta

SEQ ID NO: 1809194 - DNA, 15 bp, Homo sapiens
ggcacgtgcctgtaa

SEQ ID NO: 1809195 - DNA, 15 bp, Homo sapiens
gcacgtgcctgtaat

SEQ ID NO: 1809196 - DNA, 15 bp, Homo sapiens
cacgtgcctgtaatc

SEQ ID NO: 1809197 - DNA, 15 bp, Homo sapiens
acgtgcctgtaatcc

SEQ ID NO: 1809198 - DNA, 15 bp, Homo sapiens
cctgtaatcccagcc

SEQ ID NO: 1809199 - DNA, 15 bp, Homo sapiens
ctgtaatcccagcca

SEQ ID NO: 1809200 - DNA, 15 bp, Homo sapiens
tgtaatcccagccag

SEQ ID NO: 1809201 - DNA, 15 bp, Homo sapiens
gtaatcccagccagt

SEQ ID NO: 1809202 - DNA, 15 bp, Homo sapiens
taatcccagccagtc

SEQ ID NO: 1809203 - DNA, 15 bp, Homo sapiens
aatcccagccagtca

SEQ ID NO: 1809204 - DNA, 15 bp, Homo sapiens
atcccagccagtcag

SEQ ID NO: 1809205 - DNA, 15 bp, Homo sapiens
tcccagccagtcagg

SEQ ID NO: 1809206 - DNA, 15 bp, Homo sapiens
cccagccagtcagga

SEQ ID NO: 1809207 - DNA, 15 bp, Homo sapiens
ccagccagtcaggag

SEQ ID NO: 1809208 - DNA, 15 bp, Homo sapiens
cagccagtcaggagg

SEQ ID NO: 1809209 - DNA, 15 bp, Homo sapiens
agccagtcaggaggc

SEQ ID NO: 1809210 - DNA, 15 bp, Homo sapiens
gccagtcaggaggct

SEQ ID NO: 1809211 - DNA, 15 bp, Homo sapiens
ccagtcaggaggctg

SEQ ID NO: 1809212 - DNA, 15 bp, Homo sapiens
cagtcaggaggctga

SEQ ID NO: 1809213 - DNA, 15 bp, Homo sapiens
agtcaggaggctgag

SEQ ID NO: 1809214 - DNA, 15 bp, Homo sapiens
gtcaggaggctgagg

SEQ ID NO: 1809215 - DNA, 15 bp, Homo sapiens
ggagaatcactggaa

SEQ ID NO: 1809216 - DNA, 15 bp, Homo sapiens
gagaatcactggaat

SEQ ID NO: 1809217 - DNA, 15 bp, Homo sapiens
agaatcactggaatc

SEQ ID NO: 1809218 - DNA, 15 bp, Homo sapiens
gaatcactggaatcc

SEQ ID NO: 1809219 - DNA, 15 bp, Homo sapiens
aatcactggaatcct

SEQ ID NO: 1809220 - DNA, 15 bp, Homo sapiens
atcactggaatcctg

SEQ ID NO: 1809221 - DNA, 15 bp, Homo sapiens
tcactggaatcctgg

SEQ ID NO: 1809222 - DNA, 15 bp, Homo sapiens
cactggaatcctgga

SEQ ID NO: 1809223 - DNA, 15 bp, Homo sapiens
actggaatcctggag

SEQ ID NO: 1809224 - DNA, 15 bp, Homo sapiens
ctggaatcctggagg

SEQ ID NO: 1809225 - DNA, 15 bp, Homo sapiens
tggaatcctggaggt

SEQ ID NO: 1809226 - DNA, 15 bp, Homo sapiens
ggaatcctggaggtg

SEQ ID NO: 1809227 - DNA, 15 bp, Homo sapiens
gaatcctggaggtgg

SEQ ID NO: 1809228 - DNA, 15 bp, Homo sapiens
aatcctggaggtgga

SEQ ID NO: 1809229 - DNA, 15 bp, Homo sapiens
atcctggaggtggag

SEQ ID NO: 1809230 - DNA, 15 bp, Homo sapiens
tcctggaggtggagg

SEQ ID NO: 1809231 - DNA, 15 bp, Homo sapiens
cctggaggtggaggt

SEQ ID NO: 1809232 - DNA, 15 bp, Homo sapiens
ctggaggtggaggtg

SEQ ID NO: 1809233 - DNA, 15 bp, Homo sapiens
tggaggtggaggtgg

SEQ ID NO: 1809234 - DNA, 15 bp, Homo sapiens
ggaggtggaggtggc

SEQ ID NO: 1809235 - DNA, 15 bp, Homo sapiens
gaggtggaggtggca

SEQ ID NO: 1809236 - DNA, 15 bp, Homo sapiens
aggtggaggtggcag

SEQ ID NO: 1809237 - DNA, 15 bp, Homo sapiens
ggtggaggtggcagt

SEQ ID NO: 1809238 - DNA, 15 bp, Homo sapiens
gtggaggtggcagtg

SEQ ID NO: 1809239 - DNA, 15 bp, Homo sapiens
tggaggtggcagtga

SEQ ID NO: 1809240 - DNA, 15 bp, Homo sapiens
ggaggtggcagtgag

SEQ ID NO: 1809241 - DNA, 15 bp, Homo sapiens
tgagccgagatggta

SEQ ID NO: 1809242 - DNA, 15 bp, Homo sapiens
gagccgagatggtac

SEQ ID NO: 1809243 - DNA, 15 bp, Homo sapiens
agccgagatggtacc

SEQ ID NO: 1809244 - DNA, 15 bp, Homo sapiens
gccgagatggtacct

SEQ ID NO: 1809245 - DNA, 15 bp, Homo sapiens
ccgagatggtacctc

SEQ ID NO: 1809246 - DNA, 15 bp, Homo sapiens
cgagatggtacctct

SEQ ID NO: 1809247 - DNA, 15 bp, Homo sapiens
gagatggtacctctg

SEQ ID NO: 1809248 - DNA, 15 bp, Homo sapiens
agatggtacctctgt

SEQ ID NO: 1809249 - DNA, 15 bp, Homo sapiens
gatggtacctctgta

SEQ ID NO: 1809250 - DNA, 15 bp, Homo sapiens
atggtacctctgtac

SEQ ID NO: 1809251 - DNA, 15 bp, Homo sapiens
tggtacctctgtact

SEQ ID NO: 1809252 - DNA, 15 bp, Homo sapiens
ggtacctctgtactc

SEQ ID NO: 1809253 - DNA, 15 bp, Homo sapiens
gtacctctgtactcc

SEQ ID NO: 1809254 - DNA, 15 bp, Homo sapiens
tacctctgtactcca

SEQ ID NO: 1809255 - DNA, 15 bp, Homo sapiens
acctctgtactccag

SEQ ID NO: 1809256 - DNA, 15 bp, Homo sapiens
cctctgtactccagc

SEQ ID NO: 1809257 - DNA, 15 bp, Homo sapiens
ctctgtactccagcc

SEQ ID NO: 1809258 - DNA, 15 bp, Homo sapiens
tctgtactccagcct

SEQ ID NO: 1809259 - DNA, 15 bp, Homo sapiens
tactccagcctgggg

SEQ ID NO: 1809260 - DNA, 15 bp, Homo sapiens
agcctgggggacaga

SEQ ID NO: 1809261 - DNA, 15 bp, Homo sapiens
gcctgggggacagag

SEQ ID NO: 1809262 - DNA, 15 bp, Homo sapiens
cctgggggacagagt

SEQ ID NO: 1809263 - DNA, 15 bp, Homo sapiens
ctgggggacagagtg

SEQ ID NO: 1809264 - DNA, 15 bp, Homo sapiens
tgggggacagagtga

SEQ ID NO: 1809265 - DNA, 15 bp, Homo sapiens
gggggacagagtgag

SEQ ID NO: 1809266 - DNA, 15 bp, Homo sapiens
gggacagagtgagac

SEQ ID NO: 1809267 - DNA, 15 bp, Homo sapiens
ggacagagtgagact

SEQ ID NO: 1809268 - DNA, 15 bp, Homo sapiens
tcaaaaaaaaaagaa

SEQ ID NO: 1809269 - DNA, 15 bp, Homo sapiens
caaaaaaaaaagaag

SEQ ID NO: 1809270 - DNA, 15 bp, Homo sapiens
aaaaaaaaagaaggt

SEQ ID NO: 1809271 - DNA, 15 bp, Homo sapiens
aaaaaaaagaaggtg

SEQ ID NO: 1809272 - DNA, 15 bp, Homo sapiens
aaaaaaagaaggtgg

SEQ ID NO: 1809273 - DNA, 15 bp, Homo sapiens
aaaaaagaaggtggg

SEQ ID NO: 1809274 - DNA, 15 bp, Homo sapiens
aaaaagaaggtgggg

SEQ ID NO: 1809275 - DNA, 15 bp, Homo sapiens
aaaagaaggtgggga

SEQ ID NO: 1809276 - DNA, 15 bp, Homo sapiens
aaagaaggtggggaa

SEQ ID NO: 1809277 - DNA, 15 bp, Homo sapiens
aagaaggtggggaag

SEQ ID NO: 1809278 - DNA, 15 bp, Homo sapiens
agaaggtggggaagg

SEQ ID NO: 1809279 - DNA, 15 bp, Homo sapiens
gaaggtggggaagga

SEQ ID NO: 1809280 - DNA, 15 bp, Homo sapiens
aaggtggggaaggat

SEQ ID NO: 1809281 - DNA, 15 bp, Homo sapiens
aggtggggaaggatc

SEQ ID NO: 1809282 - DNA, 15 bp, Homo sapiens
ggtggggaaggatct

SEQ ID NO: 1809283 - DNA, 15 bp, Homo sapiens
gtggggaaggatctt

SEQ ID NO: 1809284 - DNA, 15 bp, Homo sapiens
tggggaaggatcttt

SEQ ID NO: 1809285 - DNA, 15 bp, Homo sapiens
ggggaaggatctttg

SEQ ID NO: 1809286 - DNA, 15 bp, Homo sapiens
gggaaggatctttga

SEQ ID NO: 1809287 - DNA, 15 bp, Homo sapiens
ggaaggatctttgag

SEQ ID NO: 1809288 - DNA, 15 bp, Homo sapiens
gaaggatctttgagg

SEQ ID NO: 1809289 - DNA, 15 bp, Homo sapiens
aaggatctttgaggg

SEQ ID NO: 1809290 - DNA, 15 bp, Homo sapiens
aggatctttgagggc

SEQ ID NO: 1809291 - DNA, 15 bp, Homo sapiens
ggatctttgagggcc

SEQ ID NO: 1809292 - DNA, 15 bp, Homo sapiens
gatctttgagggccg

SEQ ID NO: 1809293 - DNA, 15 bp, Homo sapiens
atctttgagggccgg

SEQ ID NO: 1809294 - DNA, 15 bp, Homo sapiens
tctttgagggccgga

SEQ ID NO: 1809295 - DNA, 15 bp, Homo sapiens
ctttgagggccggac

SEQ ID NO: 1809296 - DNA, 15 bp, Homo sapiens
tttgagggccggaca

SEQ ID NO: 1809297 - DNA, 15 bp, Homo sapiens
ttgagggccggacac

SEQ ID NO: 1809298 - DNA, 15 bp, Homo sapiens
tgagggccggacacg

SEQ ID NO: 1809299 - DNA, 15 bp, Homo sapiens
gagggccggacacgc

SEQ ID NO: 1809300 - DNA, 15 bp, Homo sapiens
agggccggacacgct

SEQ ID NO: 1809301 - DNA, 15 bp, Homo sapiens
gggccggacacgctg

SEQ ID NO: 1809302 - DNA, 15 bp, Homo sapiens
ggccggacacgctga

SEQ ID NO: 1809303 - DNA, 15 bp, Homo sapiens
gccggacacgctgac

SEQ ID NO: 1809304 - DNA, 15 bp, Homo sapiens
ccggacacgctgacc

SEQ ID NO: 1809305 - DNA, 15 bp, Homo sapiens
cggacacgctgaccc

SEQ ID NO: 1809306 - DNA, 15 bp, Homo sapiens
ggacacgctgaccct

SEQ ID NO: 1809307 - DNA, 15 bp, Homo sapiens
gacacgctgaccctg

SEQ ID NO: 1809308 - DNA, 15 bp, Homo sapiens
acacgctgaccctgc

SEQ ID NO: 1809309 - DNA, 15 bp, Homo sapiens
cacgctgaccctgca

SEQ ID NO: 1809310 - DNA, 15 bp, Homo sapiens
acgctgaccctgcag

SEQ ID NO: 1809311 - DNA, 15 bp, Homo sapiens
cgctgaccctgcagg

SEQ ID NO: 1809312 - DNA, 15 bp, Homo sapiens
gctgaccctgcagga

SEQ ID NO: 1809313 - DNA, 15 bp, Homo sapiens
ctgaccctgcaggag

SEQ ID NO: 1809314 - DNA, 15 bp, Homo sapiens
tgaccctgcaggaga

SEQ ID NO: 1809315 - DNA, 15 bp, Homo sapiens
gaccctgcaggagag

SEQ ID NO: 1809316 - DNA, 15 bp, Homo sapiens
accctgcaggagagg

SEQ ID NO: 1809317 - DNA, 15 bp, Homo sapiens
ccctgcaggagagga

SEQ ID NO: 1809318 - DNA, 15 bp, Homo sapiens
cctgcaggagaggac

SEQ ID NO: 1809319 - DNA, 15 bp, Homo sapiens
ctgcaggagaggaca

SEQ ID NO: 1809320 - DNA, 15 bp, Homo sapiens
tgcaggagaggacac

SEQ ID NO: 1809321 - DNA, 15 bp, Homo sapiens
gcaggagaggacaca

SEQ ID NO: 1809322 - DNA, 15 bp, Homo sapiens
caggagaggacacat

SEQ ID NO: 1809323 - DNA, 15 bp, Homo sapiens
aggagaggacacatt

SEQ ID NO: 1809324 - DNA, 15 bp, Homo sapiens
ggagaggacacattc

SEQ ID NO: 1809325 - DNA, 15 bp, Homo sapiens
gagaggacacattct

SEQ ID NO: 1809326 - DNA, 15 bp, Homo sapiens
agaggacacattctt

SEQ ID NO: 1809327 - DNA, 15 bp, Homo sapiens
gaggacacattcttc

SEQ ID NO: 1809328 - DNA, 15 bp, Homo sapiens
aggacacattcttct

SEQ ID NO: 1809329 - DNA, 15 bp, Homo sapiens
ggacacattcttcta

SEQ ID NO: 1809330 - DNA, 15 bp, Homo sapiens
gacacattcttctaa

SEQ ID NO: 1809331 - DNA, 15 bp, Homo sapiens
acacattcttctaac

SEQ ID NO: 1809332 - DNA, 15 bp, Homo sapiens
cacattcttctaaca

SEQ ID NO: 1809333 - DNA, 15 bp, Homo sapiens
acattcttctaacag

SEQ ID NO: 1809334 - DNA, 15 bp, Homo sapiens
cattcttctaacagg

SEQ ID NO: 1809335 - DNA, 15 bp, Homo sapiens
attcttctaacaggg

SEQ ID NO: 1809336 - DNA, 15 bp, Homo sapiens
ttcttctaacagggg

SEQ ID NO: 1809337 - DNA, 15 bp, Homo sapiens
tcttctaacaggggt

SEQ ID NO: 1809338 - DNA, 15 bp, Homo sapiens
cttctaacaggggtc

SEQ ID NO: 1809339 - DNA, 15 bp, Homo sapiens
ttctaacaggggtcg

SEQ ID NO: 1809340 - DNA, 15 bp, Homo sapiens
tctaacaggggtcgg

SEQ ID NO: 1809341 - DNA, 15 bp, Homo sapiens
ctaacaggggtcgga

SEQ ID NO: 1809342 - DNA, 15 bp, Homo sapiens
taacaggggtcggac

SEQ ID NO: 1809343 - DNA, 15 bp, Homo sapiens
aacaggggtcggaca

SEQ ID NO: 1809344 - DNA, 15 bp, Homo sapiens
acaggggtcggacaa

SEQ ID NO: 1809345 - DNA, 15 bp, Homo sapiens
caggggtcggacaaa

SEQ ID NO: 1809346 - DNA, 15 bp, Homo sapiens
aggggtcggacaaaa

SEQ ID NO: 1809347 - DNA, 15 bp, Homo sapiens
ggggtcggacaaaag

SEQ ID NO: 1809348 - DNA, 15 bp, Homo sapiens
gggtcggacaaaaga

SEQ ID NO: 1809349 - DNA, 15 bp, Homo sapiens
ggtcggacaaaagag

SEQ ID NO: 1809350 - DNA, 15 bp, Homo sapiens
gtcggacaaaagaga

SEQ ID NO: 1809351 - DNA, 15 bp, Homo sapiens
tcggacaaaagagaa

SEQ ID NO: 1809352 - DNA, 15 bp, Homo sapiens
cggacaaaagagaac

SEQ ID NO: 1809353 - DNA, 15 bp, Homo sapiens
ggacaaaagagaact

SEQ ID NO: 1809354 - DNA, 15 bp, Homo sapiens
gacaaaagagaactc

SEQ ID NO: 1809355 - DNA, 15 bp, Homo sapiens
acaaaagagaactct

SEQ ID NO: 1809356 - DNA, 15 bp, Homo sapiens
caaaagagaactctt

SEQ ID NO: 1809357 - DNA, 15 bp, Homo sapiens
aaaagagaactcttc

SEQ ID NO: 1809358 - DNA, 15 bp, Homo sapiens
aaagagaactcttct

SEQ ID NO: 1809359 - DNA, 15 bp, Homo sapiens
aagagaactcttctg

SEQ ID NO: 1809360 - DNA, 15 bp, Homo sapiens
agagaactcttctgt

SEQ ID NO: 1809361 - DNA, 15 bp, Homo sapiens
gagaactcttctgta

SEQ ID NO: 1809362 - DNA, 15 bp, Homo sapiens
agaactcttctgtat

SEQ ID NO: 1809363 - DNA, 15 bp, Homo sapiens
gaactcttctgtata

SEQ ID NO: 1809364 - DNA, 15 bp, Homo sapiens
aactcttctgtataa

SEQ ID NO: 1809365 - DNA, 15 bp, Homo sapiens
actcttctgtataat

SEQ ID NO: 1809366 - DNA, 15 bp, Homo sapiens
ctcttctgtataatt

SEQ ID NO: 1809367 - DNA, 15 bp, Homo sapiens
tcttctgtataattt

SEQ ID NO: 1809368 - DNA, 15 bp, Homo sapiens
cttctgtataattta

SEQ ID NO: 1809369 - DNA, 15 bp, Homo sapiens
ttctgtataatttat

SEQ ID NO: 1809370 - DNA, 15 bp, Homo sapiens
tctgtataatttatg

SEQ ID NO: 1809371 - DNA, 15 bp, Homo sapiens
ctgtataatttatga

SEQ ID NO: 1809372 - DNA, 15 bp, Homo sapiens
tgtataatttatgat

SEQ ID NO: 1809373 - DNA, 15 bp, Homo sapiens
gtataatttatgatt

SEQ ID NO: 1809374 - DNA, 15 bp, Homo sapiens
tataatttatgattt

SEQ ID NO: 1809375 - DNA, 15 bp, Homo sapiens
ataatttatgatttt

SEQ ID NO: 1809376 - DNA, 15 bp, Homo sapiens
taatttatgatttta

SEQ ID NO: 1809377 - DNA, 15 bp, Homo sapiens
aatttatgattttaa

SEQ ID NO: 1809378 - DNA, 15 bp, Homo sapiens
atttatgattttaag

SEQ ID NO: 1809379 - DNA, 15 bp, Homo sapiens
tttatgattttaaga

SEQ ID NO: 1809380 - DNA, 15 bp, Homo sapiens
ttatgattttaagat

SEQ ID NO: 1809381 - DNA, 15 bp, Homo sapiens
tatgattttaagatt

SEQ ID NO: 1809382 - DNA, 15 bp, Homo sapiens
atgattttaagattt

SEQ ID NO: 1809383 - DNA, 15 bp, Homo sapiens
tgattttaagatttt

SEQ ID NO: 1809384 - DNA, 15 bp, Homo sapiens
gattttaagattttt

SEQ ID NO: 1809385 - DNA, 15 bp, Homo sapiens
attttaagattttta

SEQ ID NO: 1809386 - DNA, 15 bp, Homo sapiens
ttttaagatttttat

SEQ ID NO: 1809387 - DNA, 15 bp, Homo sapiens
tttaagatttttatt

SEQ ID NO: 1809388 - DNA, 15 bp, Homo sapiens
ttaagatttttattt

SEQ ID NO: 1809389 - DNA, 15 bp, Homo sapiens
taagatttttattta

SEQ ID NO: 1809390 - DNA, 15 bp, Homo sapiens
gatttttatttatta

SEQ ID NO: 1809391 - DNA, 15 bp, Homo sapiens
atttttatttattat

SEQ ID NO: 1809392 - DNA, 15 bp, Homo sapiens
tttttatttattatt

SEQ ID NO: 1809393 - DNA, 15 bp, Homo sapiens
ttttatttattatta

SEQ ID NO: 1809394 - DNA, 15 bp, Homo sapiens
tatttattattattt

SEQ ID NO: 1809395 - DNA, 15 bp, Homo sapiens
atttattattatttt

SEQ ID NO: 1809396 - DNA, 15 bp, Homo sapiens
tttattattattttt

SEQ ID NO: 1809397 - DNA, 15 bp, Homo sapiens
tattattttttatag

SEQ ID NO: 1809398 - DNA, 15 bp, Homo sapiens
attattttttataga

SEQ ID NO: 1809399 - DNA, 15 bp, Homo sapiens
ttattttttatagag

SEQ ID NO: 1809400 - DNA, 15 bp, Homo sapiens
tattttttatagagg

SEQ ID NO: 1809401 - DNA, 15 bp, Homo sapiens
attttttatagaggc

SEQ ID NO: 1809402 - DNA, 15 bp, Homo sapiens
ttttttatagaggca

SEQ ID NO: 1809403 - DNA, 15 bp, Homo sapiens
tttttatagaggcaa

SEQ ID NO: 1809404 - DNA, 15 bp, Homo sapiens
ttttatagaggcaag

SEQ ID NO: 1809405 - DNA, 15 bp, Homo sapiens
tttatagaggcaagc

SEQ ID NO: 1809406 - DNA, 15 bp, Homo sapiens
ttatagaggcaagca

SEQ ID NO: 1809407 - DNA, 15 bp, Homo sapiens
tatagaggcaagcat

SEQ ID NO: 1809408 - DNA, 15 bp, Homo sapiens
atagaggcaagcatt

SEQ ID NO: 1809409 - DNA, 15 bp, Homo sapiens
tagaggcaagcattt

SEQ ID NO: 1809410 - DNA, 15 bp, Homo sapiens
agaggcaagcatttt

SEQ ID NO: 1809411 - DNA, 15 bp, Homo sapiens
gaggcaagcattttt

SEQ ID NO: 1809412 - DNA, 15 bp, Homo sapiens
aggcaagcatttttc

SEQ ID NO: 1809413 - DNA, 15 bp, Homo sapiens
ggcaagcatttttca

SEQ ID NO: 1809414 - DNA, 15 bp, Homo sapiens
gcaagcatttttcac

SEQ ID NO: 1809415 - DNA, 15 bp, Homo sapiens
caagcatttttcacc

SEQ ID NO: 1809416 - DNA, 15 bp, Homo sapiens
aagcatttttcacca

SEQ ID NO: 1809417 - DNA, 15 bp, Homo sapiens
agcatttttcaccac

SEQ ID NO: 1809418 - DNA, 15 bp, Homo sapiens
gcatttttcaccacg

SEQ ID NO: 1809419 - DNA, 15 bp, Homo sapiens
catttttcaccacgt

SEQ ID NO: 1809420 - DNA, 15 bp, Homo sapiens
atttttcaccacgtc

SEQ ID NO: 1809421 - DNA, 15 bp, Homo sapiens
tttttcaccacgtca

SEQ ID NO: 1809422 - DNA, 15 bp, Homo sapiens
ttttcaccacgtcac

SEQ ID NO: 1809423 - DNA, 15 bp, Homo sapiens
tttcaccacgtcacc

SEQ ID NO: 1809424 - DNA, 15 bp, Homo sapiens
ttcaccacgtcaccc

SEQ ID NO: 1809425 - DNA, 15 bp, Homo sapiens
tcaccacgtcaccca

SEQ ID NO: 1809426 - DNA, 15 bp, Homo sapiens
caccacgtcacccag

SEQ ID NO: 1809427 - DNA, 15 bp, Homo sapiens
accacgtcacccagg

SEQ ID NO: 1809428 - DNA, 15 bp, Homo sapiens
ccacgtcacccaggc

SEQ ID NO: 1809429 - DNA, 15 bp, Homo sapiens
cacgtcacccaggct

SEQ ID NO: 1809430 - DNA, 15 bp, Homo sapiens
acgtcacccaggctg

SEQ ID NO: 1809431 - DNA, 15 bp, Homo sapiens
cgtcacccaggctgg

SEQ ID NO: 1809432 - DNA, 15 bp, Homo sapiens
gtcacccaggctggt

SEQ ID NO: 1809433 - DNA, 15 bp, Homo sapiens
tcacccaggctggtc

SEQ ID NO: 1809434 - DNA, 15 bp, Homo sapiens
cacccaggctggtct

SEQ ID NO: 1809435 - DNA, 15 bp, Homo sapiens
acccaggctggtctc

SEQ ID NO: 1809436 - DNA, 15 bp, Homo sapiens
cctgggctcaagtgt

SEQ ID NO: 1809437 - DNA, 15 bp, Homo sapiens
ctgggctcaagtgtg

SEQ ID NO: 1809438 - DNA, 15 bp, Homo sapiens
tgggctcaagtgtgc

SEQ ID NO: 1809439 - DNA, 15 bp, Homo sapiens
gggctcaagtgtgct

SEQ ID NO: 1809440 - DNA, 15 bp, Homo sapiens
ggctcaagtgtgctg

SEQ ID NO: 1809441 - DNA, 15 bp, Homo sapiens
gctcaagtgtgctgg

SEQ ID NO: 1809442 - DNA, 15 bp, Homo sapiens
ctcaagtgtgctggg

SEQ ID NO: 1809443 - DNA, 15 bp, Homo sapiens
tcaagtgtgctggga

SEQ ID NO: 1809444 - DNA, 15 bp, Homo sapiens
caagtgtgctgggat

SEQ ID NO: 1809445 - DNA, 15 bp, Homo sapiens
aagtgtgctgggatt

SEQ ID NO: 1809446 - DNA, 15 bp, Homo sapiens
agtgtgctgggatta

SEQ ID NO: 1809447 - DNA, 15 bp, Homo sapiens
gtgtgctgggattat

SEQ ID NO: 1809448 - DNA, 15 bp, Homo sapiens
tgtgctgggattata

SEQ ID NO: 1809449 - DNA, 15 bp, Homo sapiens
attatagccatgagt

SEQ ID NO: 1809450 - DNA, 15 bp, Homo sapiens
ttatagccatgagtc

SEQ ID NO: 1809451 - DNA, 15 bp, Homo sapiens
tatagccatgagtca

SEQ ID NO: 1809452 - DNA, 15 bp, Homo sapiens
atagccatgagtcac

SEQ ID NO: 1809453 - DNA, 15 bp, Homo sapiens
tagccatgagtcacc

SEQ ID NO: 1809454 - DNA, 15 bp, Homo sapiens
agccatgagtcacca

SEQ ID NO: 1809455 - DNA, 15 bp, Homo sapiens
gccatgagtcaccac

SEQ ID NO: 1809456 - DNA, 15 bp, Homo sapiens
ccatgagtcaccaca

SEQ ID NO: 1809457 - DNA, 15 bp, Homo sapiens
catgagtcaccacac

SEQ ID NO: 1809458 - DNA, 15 bp, Homo sapiens
atgagtcaccacacc

SEQ ID NO: 1809459 - DNA, 15 bp, Homo sapiens
tgagtcaccacacct

SEQ ID NO: 1809460 - DNA, 15 bp, Homo sapiens
gagtcaccacacctg

SEQ ID NO: 1809461 - DNA, 15 bp, Homo sapiens
agtcaccacacctgg

SEQ ID NO: 1809462 - DNA, 15 bp, Homo sapiens
gtcaccacacctggc

SEQ ID NO: 1809463 - DNA, 15 bp, Homo sapiens
tcaccacacctggcc

SEQ ID NO: 1809464 - DNA, 15 bp, Homo sapiens
ccacacctggcccag

SEQ ID NO: 1809465 - DNA, 15 bp, Homo sapiens
cacacctggcccaga

SEQ ID NO: 1809466 - DNA, 15 bp, Homo sapiens
acacctggcccagaa

SEQ ID NO: 1809467 - DNA, 15 bp, Homo sapiens
cacctggcccagaaa

SEQ ID NO: 1809468 - DNA, 15 bp, Homo sapiens
acctggcccagaaac

SEQ ID NO: 1809469 - DNA, 15 bp, Homo sapiens
cctggcccagaaact

SEQ ID NO: 1809470 - DNA, 15 bp, Homo sapiens
ctggcccagaaactt

SEQ ID NO: 1809471 - DNA, 15 bp, Homo sapiens
tggcccagaaacttt

SEQ ID NO: 1809472 - DNA, 15 bp, Homo sapiens
ggcccagaaacttta

SEQ ID NO: 1809473 - DNA, 15 bp, Homo sapiens
gcccagaaactttac

SEQ ID NO: 1809474 - DNA, 15 bp, Homo sapiens
cccagaaactttact

SEQ ID NO: 1809475 - DNA, 15 bp, Homo sapiens
ccagaaactttacta

SEQ ID NO: 1809476 - DNA, 15 bp, Homo sapiens
cagaaactttactaa

SEQ ID NO: 1809477 - DNA, 15 bp, Homo sapiens
agaaactttactaag

SEQ ID NO: 1809478 - DNA, 15 bp, Homo sapiens
gaaactttactaagg

SEQ ID NO: 1809479 - DNA, 15 bp, Homo sapiens
aaactttactaagga

SEQ ID NO: 1809480 - DNA, 15 bp, Homo sapiens
aactttactaaggac

SEQ ID NO: 1809481 - DNA, 15 bp, Homo sapiens
actttactaaggact

SEQ ID NO: 1809482 - DNA, 15 bp, Homo sapiens
ctttactaaggactt

SEQ ID NO: 1809483 - DNA, 15 bp, Homo sapiens
tttactaaggactta

SEQ ID NO: 1809484 - DNA, 15 bp, Homo sapiens
ttactaaggacttat

SEQ ID NO: 1809485 - DNA, 15 bp, Homo sapiens
tactaaggacttatt

SEQ ID NO: 1809486 - DNA, 15 bp, Homo sapiens
actaaggacttattt

SEQ ID NO: 1809487 - DNA, 15 bp, Homo sapiens
ctaaggacttattta

SEQ ID NO: 1809488 - DNA, 15 bp, Homo sapiens
taaggacttatttaa

SEQ ID NO: 1809489 - DNA, 15 bp, Homo sapiens
aaggacttatttaaa

SEQ ID NO: 1809490 - DNA, 15 bp, Homo sapiens
aggacttatttaaat

SEQ ID NO: 1809491 - DNA, 15 bp, Homo sapiens
ggacttatttaaatg

SEQ ID NO: 1809492 - DNA, 15 bp, Homo sapiens
gacttatttaaatga

SEQ ID NO: 1809493 - DNA, 15 bp, Homo sapiens
acttatttaaatgat

SEQ ID NO: 1809494 - DNA, 15 bp, Homo sapiens
cttatttaaatgatt

SEQ ID NO: 1809495 - DNA, 15 bp, Homo sapiens
ttatttaaatgattt

SEQ ID NO: 1809496 - DNA, 15 bp, Homo sapiens
tatttaaatgatttg

SEQ ID NO: 1809497 - DNA, 15 bp, Homo sapiens
atttaaatgatttgc

SEQ ID NO: 1809498 - DNA, 15 bp, Homo sapiens
tttaaatgatttgct

SEQ ID NO: 1809499 - DNA, 15 bp, Homo sapiens
ttaaatgatttgctt

SEQ ID NO: 1809500 - DNA, 15 bp, Homo sapiens
taaatgatttgctta

SEQ ID NO: 1809501 - DNA, 15 bp, Homo sapiens
aaatgatttgcttat

SEQ ID NO: 1809502 - DNA, 15 bp, Homo sapiens
aatgatttgcttatt

SEQ ID NO: 1809503 - DNA, 15 bp, Homo sapiens
atgatttgcttattt

SEQ ID NO: 1809504 - DNA, 15 bp, Homo sapiens
tgatttgcttatttg

SEQ ID NO: 1809505 - DNA, 15 bp, Homo sapiens
gatttgcttatttgt

SEQ ID NO: 1809506 - DNA, 15 bp, Homo sapiens
atttgcttatttgtg

SEQ ID NO: 1809507 - DNA, 15 bp, Homo sapiens
tttgcttatttgtga

SEQ ID NO: 1809508 - DNA, 15 bp, Homo sapiens
ttgcttatttgtgaa

SEQ ID NO: 1809509 - DNA, 15 bp, Homo sapiens
tgcttatttgtgaat

SEQ ID NO: 1809510 - DNA, 15 bp, Homo sapiens
gcttatttgtgaata

SEQ ID NO: 1809511 - DNA, 15 bp, Homo sapiens
cttatttgtgaatag

SEQ ID NO: 1809512 - DNA, 15 bp, Homo sapiens
ttatttgtgaatagg

SEQ ID NO: 1809513 - DNA, 15 bp, Homo sapiens
tatttgtgaataggt

SEQ ID NO: 1809514 - DNA, 15 bp, Homo sapiens
atttgtgaataggta

SEQ ID NO: 1809515 - DNA, 15 bp, Homo sapiens
tttgtgaataggtat

SEQ ID NO: 1809516 - DNA, 15 bp, Homo sapiens
ttgtgaataggtatt

SEQ ID NO: 1809517 - DNA, 15 bp, Homo sapiens
tgtgaataggtattt

SEQ ID NO: 1809518 - DNA, 15 bp, Homo sapiens
gtgaataggtatttt

SEQ ID NO: 1809519 - DNA, 15 bp, Homo sapiens
tgaataggtattttg

SEQ ID NO: 1809520 - DNA, 15 bp, Homo sapiens
gaataggtattttgt

SEQ ID NO: 1809521 - DNA, 15 bp, Homo sapiens
aataggtattttgtt

SEQ ID NO: 1809522 - DNA, 15 bp, Homo sapiens
ataggtattttgttc

SEQ ID NO: 1809523 - DNA, 15 bp, Homo sapiens
taggtattttgttca

SEQ ID NO: 1809524 - DNA, 15 bp, Homo sapiens
aggtattttgttcac

SEQ ID NO: 1809525 - DNA, 15 bp, Homo sapiens
ggtattttgttcacg

SEQ ID NO: 1809526 - DNA, 15 bp, Homo sapiens
gtattttgttcacgt

SEQ ID NO: 1809527 - DNA, 15 bp, Homo sapiens
tattttgttcacgtg

SEQ ID NO: 1809528 - DNA, 15 bp, Homo sapiens
attttgttcacgtgg

SEQ ID NO: 1809529 - DNA, 15 bp, Homo sapiens
ttttgttcacgtggt

SEQ ID NO: 1809530 - DNA, 15 bp, Homo sapiens
tttgttcacgtggtt

SEQ ID NO: 1809531 - DNA, 15 bp, Homo sapiens
ttgttcacgtggttc

SEQ ID NO: 1809532 - DNA, 15 bp, Homo sapiens
tgttcacgtggttca

SEQ ID NO: 1809533 - DNA, 15 bp, Homo sapiens
gttcacgtggttcac

SEQ ID NO: 1809534 - DNA, 15 bp, Homo sapiens
ttcacgtggttcaca

SEQ ID NO: 1809535 - DNA, 15 bp, Homo sapiens
tcacgtggttcacaa

SEQ ID NO: 1809536 - DNA, 15 bp, Homo sapiens
cacgtggttcacaac

SEQ ID NO: 1809537 - DNA, 15 bp, Homo sapiens
acgtggttcacaact

SEQ ID NO: 1809538 - DNA, 15 bp, Homo sapiens
cgtggttcacaactc

SEQ ID NO: 1809539 - DNA, 15 bp, Homo sapiens
gtggttcacaactca

SEQ ID NO: 1809540 - DNA, 15 bp, Homo sapiens
tggttcacaactcaa

SEQ ID NO: 1809541 - DNA, 15 bp, Homo sapiens
ggttcacaactcaaa

SEQ ID NO: 1809542 - DNA, 15 bp, Homo sapiens
gttcacaactcaaaa

SEQ ID NO: 1809543 - DNA, 15 bp, Homo sapiens
ttcacaactcaaaag

SEQ ID NO: 1809544 - DNA, 15 bp, Homo sapiens
tcacaactcaaaagc

SEQ ID NO: 1809545 - DNA, 15 bp, Homo sapiens
cacaactcaaaagca

SEQ ID NO: 1809546 - DNA, 15 bp, Homo sapiens
acaactcaaaagcaa

SEQ ID NO: 1809547 - DNA, 15 bp, Homo sapiens
caactcaaaagcaac

SEQ ID NO: 1809548 - DNA, 15 bp, Homo sapiens
aactcaaaagcaaca

SEQ ID NO: 1809549 - DNA, 15 bp, Homo sapiens
actcaaaagcaacaa

SEQ ID NO: 1809550 - DNA, 15 bp, Homo sapiens
ctcaaaagcaacaaa

SEQ ID NO: 1809551 - DNA, 15 bp, Homo sapiens
tcaaaagcaacaaaa

SEQ ID NO: 1809552 - DNA, 15 bp, Homo sapiens
caaaagcaacaaaaa

SEQ ID NO: 1809553 - DNA, 15 bp, Homo sapiens
aaaagcaacaaaaag

SEQ ID NO: 1809554 - DNA, 15 bp, Homo sapiens
aaagcaacaaaaagc

SEQ ID NO: 1809555 - DNA, 15 bp, Homo sapiens
aagcaacaaaaagca

SEQ ID NO: 1809556 - DNA, 15 bp, Homo sapiens
agcaacaaaaagcac

SEQ ID NO: 1809557 - DNA, 15 bp, Homo sapiens
gcaacaaaaagcacc

SEQ ID NO: 1809558 - DNA, 15 bp, Homo sapiens
caacaaaaagcaccc

SEQ ID NO: 1809559 - DNA, 15 bp, Homo sapiens
aacaaaaagcaccca

SEQ ID NO: 1809560 - DNA, 15 bp, Homo sapiens
acaaaaagcacccag

SEQ ID NO: 1809561 - DNA, 15 bp, Homo sapiens
caaaaagcacccagt

SEQ ID NO: 1809562 - DNA, 15 bp, Homo sapiens
aaaaagcacccagtg

SEQ ID NO: 1809563 - DNA, 15 bp, Homo sapiens
aaaagcacccagtga

SEQ ID NO: 1809564 - DNA, 15 bp, Homo sapiens
aaagcacccagtgaa

SEQ ID NO: 1809565 - DNA, 15 bp, Homo sapiens
aagcacccagtgaaa

SEQ ID NO: 1809566 - DNA, 15 bp, Homo sapiens
agcacccagtgaaaa

SEQ ID NO: 1809567 - DNA, 15 bp, Homo sapiens
gcacccagtgaaaag

SEQ ID NO: 1809568 - DNA, 15 bp, Homo sapiens
cacccagtgaaaagc

SEQ ID NO: 1809569 - DNA, 15 bp, Homo sapiens
acccagtgaaaagcc

SEQ ID NO: 1809570 - DNA, 15 bp, Homo sapiens
cccagtgaaaagcct

SEQ ID NO: 1809571 - DNA, 15 bp, Homo sapiens
ccagtgaaaagcctt

SEQ ID NO: 1809572 - DNA, 15 bp, Homo sapiens
agtgaaaagccttcc

SEQ ID NO: 1809573 - DNA, 15 bp, Homo sapiens
gtgaaaagccttcct

SEQ ID NO: 1809574 - DNA, 15 bp, Homo sapiens
tgaaaagccttcctc

SEQ ID NO: 1809575 - DNA, 15 bp, Homo sapiens
gaaaagccttcctct

SEQ ID NO: 1809576 - DNA, 15 bp, Homo sapiens
aaaagccttcctctc

SEQ ID NO: 1809577 - DNA, 15 bp, Homo sapiens
aaagccttcctctca

SEQ ID NO: 1809578 - DNA, 15 bp, Homo sapiens
aagccttcctctcat

SEQ ID NO: 1809579 - DNA, 15 bp, Homo sapiens
agccttcctctcatt

SEQ ID NO: 1809580 - DNA, 15 bp, Homo sapiens
gccttcctctcattc

SEQ ID NO: 1809581 - DNA, 15 bp, Homo sapiens
ccttcctctcattct

SEQ ID NO: 1809582 - DNA, 15 bp, Homo sapiens
cttcctctcattctg

SEQ ID NO: 1809583 - DNA, 15 bp, Homo sapiens
ttcctctcattctga

SEQ ID NO: 1809584 - DNA, 15 bp, Homo sapiens
tcctctcattctgat

SEQ ID NO: 1809585 - DNA, 15 bp, Homo sapiens
cctctcattctgatt

SEQ ID NO: 1809586 - DNA, 15 bp, Homo sapiens
ctctcattctgattt

SEQ ID NO: 1809587 - DNA, 15 bp, Homo sapiens
tctcattctgatttc

SEQ ID NO: 1809588 - DNA, 15 bp, Homo sapiens
ctcattctgatttcc

SEQ ID NO: 1809589 - DNA, 15 bp, Homo sapiens
tcattctgatttcca

SEQ ID NO: 1809590 - DNA, 15 bp, Homo sapiens
cattctgatttccag

SEQ ID NO: 1809591 - DNA, 15 bp, Homo sapiens
attctgatttccagt

SEQ ID NO: 1809592 - DNA, 15 bp, Homo sapiens
ttctgatttccagtc

SEQ ID NO: 1809593 - DNA, 15 bp, Homo sapiens
tctgatttccagtca

SEQ ID NO: 1809594 - DNA, 15 bp, Homo sapiens
ctgatttccagtcac

SEQ ID NO: 1809595 - DNA, 15 bp, Homo sapiens
tgatttccagtcact

SEQ ID NO: 1809596 - DNA, 15 bp, Homo sapiens
gatttccagtcactg

SEQ ID NO: 1809597 - DNA, 15 bp, Homo sapiens
atttccagtcactgg

SEQ ID NO: 1809598 - DNA, 15 bp, Homo sapiens
tttccagtcactgga

SEQ ID NO: 1809599 - DNA, 15 bp, Homo sapiens
ttccagtcactggat

SEQ ID NO: 1809600 - DNA, 15 bp, Homo sapiens
tccagtcactggatt

SEQ ID NO: 1809601 - DNA, 15 bp, Homo sapiens
ccagtcactggattc

SEQ ID NO: 1809602 - DNA, 15 bp, Homo sapiens
cagtcactggattct

SEQ ID NO: 1809603 - DNA, 15 bp, Homo sapiens
agtcactggattcta

SEQ ID NO: 1809604 - DNA, 15 bp, Homo sapiens
gtcactggattctac

SEQ ID NO: 1809605 - DNA, 15 bp, Homo sapiens
tcactggattctact

SEQ ID NO: 1809606 - DNA, 15 bp, Homo sapiens
cactggattctactc

SEQ ID NO: 1809607 - DNA, 15 bp, Homo sapiens
actggattctactct

SEQ ID NO: 1809608 - DNA, 15 bp, Homo sapiens
ctggattctactctt

SEQ ID NO: 1809609 - DNA, 15 bp, Homo sapiens
tggattctactcttg

SEQ ID NO: 1809610 - DNA, 15 bp, Homo sapiens
ggattctactcttgg

SEQ ID NO: 1809611 - DNA, 15 bp, Homo sapiens
gattctactcttggg

SEQ ID NO: 1809612 - DNA, 15 bp, Homo sapiens
attctactcttggga

SEQ ID NO: 1809613 - DNA, 15 bp, Homo sapiens
ttctactcttgggat

SEQ ID NO: 1809614 - DNA, 15 bp, Homo sapiens
tctactcttgggatg

SEQ ID NO: 1809615 - DNA, 15 bp, Homo sapiens
ctactcttgggatgc

SEQ ID NO: 1809616 - DNA, 15 bp, Homo sapiens
tactcttgggatgca

SEQ ID NO: 1809617 - DNA, 15 bp, Homo sapiens
actcttgggatgcag

SEQ ID NO: 1809618 - DNA, 15 bp, Homo sapiens
ctcttgggatgcagt

SEQ ID NO: 1809619 - DNA, 15 bp, Homo sapiens
tcttgggatgcagtg

SEQ ID NO: 1809620 - DNA, 15 bp, Homo sapiens
cttgggatgcagtgt

SEQ ID NO: 1809621 - DNA, 15 bp, Homo sapiens
ttgggatgcagtgtt

SEQ ID NO: 1809622 - DNA, 15 bp, Homo sapiens
tgggatgcagtgttt

SEQ ID NO: 1809623 - DNA, 15 bp, Homo sapiens
gggatgcagtgtttt

SEQ ID NO: 1809624 - DNA, 15 bp, Homo sapiens
ggatgcagtgttttt

SEQ ID NO: 1809625 - DNA, 15 bp, Homo sapiens
gatgcagtgtttttc

SEQ ID NO: 1809626 - DNA, 15 bp, Homo sapiens
atgcagtgtttttca

SEQ ID NO: 1809627 - DNA, 15 bp, Homo sapiens
tgcagtgtttttcat

SEQ ID NO: 1809628 - DNA, 15 bp, Homo sapiens
gcagtgtttttcatc

SEQ ID NO: 1809629 - DNA, 15 bp, Homo sapiens
cagtgtttttcatct

SEQ ID NO: 1809630 - DNA, 15 bp, Homo sapiens
agtgtttttcatctc

SEQ ID NO: 1809631 - DNA, 15 bp, Homo sapiens
gtgtttttcatctct

SEQ ID NO: 1809632 - DNA, 15 bp, Homo sapiens
tgtttttcatctctt

SEQ ID NO: 1809633 - DNA, 15 bp, Homo sapiens
gtttttcatctcttt

SEQ ID NO: 1809634 - DNA, 15 bp, Homo sapiens
tttttcatctctttt

SEQ ID NO: 1809635 - DNA, 15 bp, Homo sapiens
ttttcatctcttttt

SEQ ID NO: 1809636 - DNA, 15 bp, Homo sapiens
tttcatctctttttt

SEQ ID NO: 1809637 - DNA, 15 bp, Homo sapiens
ttcatctcttttttg

SEQ ID NO: 1809638 - DNA, 15 bp, Homo sapiens
tcatctcttttttgt

SEQ ID NO: 1809639 - DNA, 15 bp, Homo sapiens
catctcttttttgta

SEQ ID NO: 1809640 - DNA, 15 bp, Homo sapiens
atctcttttttgtat

SEQ ID NO: 1809641 - DNA, 15 bp, Homo sapiens
tctcttttttgtatc

SEQ ID NO: 1809642 - DNA, 15 bp, Homo sapiens
ctcttttttgtatcc

SEQ ID NO: 1809643 - DNA, 15 bp, Homo sapiens
tcttttttgtatcct

SEQ ID NO: 1809644 - DNA, 15 bp, Homo sapiens
cttttttgtatcctt

SEQ ID NO: 1809645 - DNA, 15 bp, Homo sapiens
ttttttgtatccttt

SEQ ID NO: 1809646 - DNA, 15 bp, Homo sapiens
tttttgtatcctttt

SEQ ID NO: 1809647 - DNA, 15 bp, Homo sapiens
ttttgtatccttttg

SEQ ID NO: 1809648 - DNA, 15 bp, Homo sapiens
tttgtatccttttgg

SEQ ID NO: 1809649 - DNA, 15 bp, Homo sapiens
ttgtatccttttgga

SEQ ID NO: 1809650 - DNA, 15 bp, Homo sapiens
tgtatccttttggaa

SEQ ID NO: 1809651 - DNA, 15 bp, Homo sapiens
gtatccttttggaaa

SEQ ID NO: 1809652 - DNA, 15 bp, Homo sapiens
tatccttttggaaat

SEQ ID NO: 1809653 - DNA, 15 bp, Homo sapiens
atccttttggaaata

SEQ ID NO: 1809654 - DNA, 15 bp, Homo sapiens
tccttttggaaatag

SEQ ID NO: 1809655 - DNA, 15 bp, Homo sapiens
ccttttggaaatagt

SEQ ID NO: 1809656 - DNA, 15 bp, Homo sapiens
cttttggaaatagta

SEQ ID NO: 1809657 - DNA, 15 bp, Homo sapiens
ttttggaaatagtat

SEQ ID NO: 1809658 - DNA, 15 bp, Homo sapiens
tttggaaatagtatt

SEQ ID NO: 1809659 - DNA, 15 bp, Homo sapiens
ttggaaatagtattc

SEQ ID NO: 1809660 - DNA, 15 bp, Homo sapiens
tggaaatagtattct

SEQ ID NO: 1809661 - DNA, 15 bp, Homo sapiens
ggaaatagtattctg

SEQ ID NO: 1809662 - DNA, 15 bp, Homo sapiens
gaaatagtattctgc

SEQ ID NO: 1809663 - DNA, 15 bp, Homo sapiens
aaatagtattctgct

SEQ ID NO: 1809664 - DNA, 15 bp, Homo sapiens
aatagtattctgctt

SEQ ID NO: 1809665 - DNA, 15 bp, Homo sapiens
atagtattctgcttt

SEQ ID NO: 1809666 - DNA, 15 bp, Homo sapiens
tagtattctgcttta

SEQ ID NO: 1809667 - DNA, 15 bp, Homo sapiens
agtattctgctttaa

SEQ ID NO: 1809668 - DNA, 15 bp, Homo sapiens
gtattctgctttaaa

SEQ ID NO: 1809669 - DNA, 15 bp, Homo sapiens
tattctgctttaaaa

SEQ ID NO: 1809670 - DNA, 15 bp, Homo sapiens
attctgctttaaaaa

SEQ ID NO: 1809671 - DNA, 15 bp, Homo sapiens
ttctgctttaaaaag

SEQ ID NO: 1809672 - DNA, 15 bp, Homo sapiens
tctgctttaaaaagc

SEQ ID NO: 1809673 - DNA, 15 bp, Homo sapiens
ctgctttaaaaagca

SEQ ID NO: 1809674 - DNA, 15 bp, Homo sapiens
tgctttaaaaagcaa

SEQ ID NO: 1809675 - DNA, 15 bp, Homo sapiens
gctttaaaaagcaaa

SEQ ID NO: 1809676 - DNA, 15 bp, Homo sapiens
ctttaaaaagcaaat

SEQ ID NO: 1809677 - DNA, 15 bp, Homo sapiens
tttaaaaagcaaata

SEQ ID NO: 1809678 - DNA, 15 bp, Homo sapiens
ttaaaaagcaaatac

SEQ ID NO: 1809679 - DNA, 15 bp, Homo sapiens
taaaaagcaaataca

SEQ ID NO: 1809680 - DNA, 15 bp, Homo sapiens
aaaaagcaaatacag

SEQ ID NO: 1809681 - DNA, 15 bp, Homo sapiens
aaaagcaaatacagg

SEQ ID NO: 1809682 - DNA, 15 bp, Homo sapiens
aaagcaaatacaggc

SEQ ID NO: 1809683 - DNA, 15 bp, Homo sapiens
aagcaaatacaggcc

SEQ ID NO: 1809684 - DNA, 15 bp, Homo sapiens
agcaaatacaggcca

SEQ ID NO: 1809685 - DNA, 15 bp, Homo sapiens
gcaaatacaggccag

SEQ ID NO: 1809686 - DNA, 15 bp, Homo sapiens
caaatacaggccagg

SEQ ID NO: 1809687 - DNA, 15 bp, Homo sapiens
aaatacaggccaggt

SEQ ID NO: 1809688 - DNA, 15 bp, Homo sapiens
aatacaggccaggta

SEQ ID NO: 1809689 - DNA, 15 bp, Homo sapiens
atacaggccaggtat

SEQ ID NO: 1809690 - DNA, 15 bp, Homo sapiens
tacaggccaggtatg

SEQ ID NO: 1809691 - DNA, 15 bp, Homo sapiens
acaggccaggtatgg

SEQ ID NO: 1809692 - DNA, 15 bp, Homo sapiens
caggccaggtatggt

SEQ ID NO: 1809693 - DNA, 15 bp, Homo sapiens
aggccaggtatggtg

SEQ ID NO: 1809694 - DNA, 15 bp, Homo sapiens
ggccaggtatggtgg

SEQ ID NO: 1809695 - DNA, 15 bp, Homo sapiens
gccaggtatggtggc

SEQ ID NO: 1809696 - DNA, 15 bp, Homo sapiens
ccaggtatggtggct

SEQ ID NO: 1809697 - DNA, 15 bp, Homo sapiens
caggtatggtggctc

SEQ ID NO: 1809698 - DNA, 15 bp, Homo sapiens
aggtatggtggctca

SEQ ID NO: 1809699 - DNA, 15 bp, Homo sapiens
ggtatggtggctcac

SEQ ID NO: 1809700 - DNA, 15 bp, Homo sapiens
gtatggtggctcact

SEQ ID NO: 1809701 - DNA, 15 bp, Homo sapiens
tatggtggctcactc

SEQ ID NO: 1809702 - DNA, 15 bp, Homo sapiens
atggtggctcactcc

SEQ ID NO: 1809703 - DNA, 15 bp, Homo sapiens
tggtggctcactcct

SEQ ID NO: 1809704 - DNA, 15 bp, Homo sapiens
ggccgaggcaggtga

SEQ ID NO: 1809705 - DNA, 15 bp, Homo sapiens
gccgaggcaggtgat

SEQ ID NO: 1809706 - DNA, 15 bp, Homo sapiens
ccgaggcaggtgatc

SEQ ID NO: 1809707 - DNA, 15 bp, Homo sapiens
cgaggcaggtgatca

SEQ ID NO: 1809708 - DNA, 15 bp, Homo sapiens
gaggcaggtgatcac

SEQ ID NO: 1809709 - DNA, 15 bp, Homo sapiens
aggcaggtgatcacc

SEQ ID NO: 1809710 - DNA, 15 bp, Homo sapiens
ggcaggtgatcacct

SEQ ID NO: 1809711 - DNA, 15 bp, Homo sapiens
gcaggtgatcaccta

SEQ ID NO: 1809712 - DNA, 15 bp, Homo sapiens
caggtgatcacctaa

SEQ ID NO: 1809713 - DNA, 15 bp, Homo sapiens
aggtgatcacctaag

SEQ ID NO: 1809714 - DNA, 15 bp, Homo sapiens
ggtgatcacctaagg

SEQ ID NO: 1809715 - DNA, 15 bp, Homo sapiens
gtgatcacctaaggt

SEQ ID NO: 1809716 - DNA, 15 bp, Homo sapiens
tgatcacctaaggtc

SEQ ID NO: 1809717 - DNA, 15 bp, Homo sapiens
tgaaaccctgtctgt

SEQ ID NO: 1809718 - DNA, 15 bp, Homo sapiens
gaaaccctgtctgta

SEQ ID NO: 1809719 - DNA, 15 bp, Homo sapiens
aaaccctgtctgtac

SEQ ID NO: 1809720 - DNA, 15 bp, Homo sapiens
aaccctgtctgtacc

SEQ ID NO: 1809721 - DNA, 15 bp, Homo sapiens
accctgtctgtacca

SEQ ID NO: 1809722 - DNA, 15 bp, Homo sapiens
ccctgtctgtaccaa

SEQ ID NO: 1809723 - DNA, 15 bp, Homo sapiens
cctgtctgtaccaaa

SEQ ID NO: 1809724 - DNA, 15 bp, Homo sapiens
tgtctgtaccaaaac

SEQ ID NO: 1809725 - DNA, 15 bp, Homo sapiens
gtctgtaccaaaaca

SEQ ID NO: 1809726 - DNA, 15 bp, Homo sapiens
tctgtaccaaaacac

SEQ ID NO: 1809727 - DNA, 15 bp, Homo sapiens
ctgtaccaaaacaca

SEQ ID NO: 1809728 - DNA, 15 bp, Homo sapiens
tgtaccaaaacacaa

SEQ ID NO: 1809729 - DNA, 15 bp, Homo sapiens
gtaccaaaacacaaa

SEQ ID NO: 1809730 - DNA, 15 bp, Homo sapiens
taccaaaacacaaaa

SEQ ID NO: 1809731 - DNA, 15 bp, Homo sapiens
accaaaacacaaaaa

SEQ ID NO: 1809732 - DNA, 15 bp, Homo sapiens
ccaaaacacaaaaac

SEQ ID NO: 1809733 - DNA, 15 bp, Homo sapiens
caaaacacaaaaaca

SEQ ID NO: 1809734 - DNA, 15 bp, Homo sapiens
aaaacacaaaaacaa

SEQ ID NO: 1809735 - DNA, 15 bp, Homo sapiens
cacaaaaacaaaaac

SEQ ID NO: 1809736 - DNA, 15 bp, Homo sapiens
aacaaaaacaaaaat

SEQ ID NO: 1809737 - DNA, 15 bp, Homo sapiens
acaaaaacaaaaatt

SEQ ID NO: 1809738 - DNA, 15 bp, Homo sapiens
caaaaacaaaaatta

SEQ ID NO: 1809739 - DNA, 15 bp, Homo sapiens
aaaaacaaaaattag

SEQ ID NO: 1809740 - DNA, 15 bp, Homo sapiens
aaaacaaaaattagc

SEQ ID NO: 1809741 - DNA, 15 bp, Homo sapiens
aaacaaaaattagcc

SEQ ID NO: 1809742 - DNA, 15 bp, Homo sapiens
aacaaaaattagccg

SEQ ID NO: 1809743 - DNA, 15 bp, Homo sapiens
cgggcgtggtggcgt

SEQ ID NO: 1809744 - DNA, 15 bp, Homo sapiens
gggcgtggtggcgtg

SEQ ID NO: 1809745 - DNA, 15 bp, Homo sapiens
ggcgtggtggcgtgc

SEQ ID NO: 1809746 - DNA, 15 bp, Homo sapiens
gcgtggtggcgtgct

SEQ ID NO: 1809747 - DNA, 15 bp, Homo sapiens
cgtggtggcgtgctc

SEQ ID NO: 1809748 - DNA, 15 bp, Homo sapiens
gtggtggcgtgctcc

SEQ ID NO: 1809749 - DNA, 15 bp, Homo sapiens
tggtggcgtgctcct

SEQ ID NO: 1809750 - DNA, 15 bp, Homo sapiens
ggtggcgtgctcctg

SEQ ID NO: 1809751 - DNA, 15 bp, Homo sapiens
gtggcgtgctcctgt

SEQ ID NO: 1809752 - DNA, 15 bp, Homo sapiens
tggcgtgctcctgta

SEQ ID NO: 1809753 - DNA, 15 bp, Homo sapiens
ggcgtgctcctgtaa

SEQ ID NO: 1809754 - DNA, 15 bp, Homo sapiens
gcgtgctcctgtaat

SEQ ID NO: 1809755 - DNA, 15 bp, Homo sapiens
cgtgctcctgtaatc

SEQ ID NO: 1809756 - DNA, 15 bp, Homo sapiens
gtgctcctgtaatcc

SEQ ID NO: 1809757 - DNA, 15 bp, Homo sapiens
tgctcctgtaatccc

SEQ ID NO: 1809758 - DNA, 15 bp, Homo sapiens
ggccacagagcaagg

SEQ ID NO: 1809759 - DNA, 15 bp, Homo sapiens
gccacagagcaaggt

SEQ ID NO: 1809760 - DNA, 15 bp, Homo sapiens
ccacagagcaaggtt

SEQ ID NO: 1809761 - DNA, 15 bp, Homo sapiens
cacagagcaaggttc

SEQ ID NO: 1809762 - DNA, 15 bp, Homo sapiens
acagagcaaggttcc

SEQ ID NO: 1809763 - DNA, 15 bp, Homo sapiens
cagagcaaggttcca

SEQ ID NO: 1809764 - DNA, 15 bp, Homo sapiens
agagcaaggttccat

SEQ ID NO: 1809765 - DNA, 15 bp, Homo sapiens
gagcaaggttccatc

SEQ ID NO: 1809766 - DNA, 15 bp, Homo sapiens
agcaaggttccatct

SEQ ID NO: 1809767 - DNA, 15 bp, Homo sapiens
gcaaggttccatctc

SEQ ID NO: 1809768 - DNA, 15 bp, Homo sapiens
caaggttccatctca

SEQ ID NO: 1809769 - DNA, 15 bp, Homo sapiens
aaggttccatctcaa

SEQ ID NO: 1809770 - DNA, 15 bp, Homo sapiens
aggttccatctcaaa

SEQ ID NO: 1809771 - DNA, 15 bp, Homo sapiens
ggttccatctcaaac

SEQ ID NO: 1809772 - DNA, 15 bp, Homo sapiens
gttccatctcaaaca

SEQ ID NO: 1809773 - DNA, 15 bp, Homo sapiens
ttccatctcaaacaa

SEQ ID NO: 1809774 - DNA, 15 bp, Homo sapiens
tccatctcaaacaaa

SEQ ID NO: 1809775 - DNA, 15 bp, Homo sapiens
ccatctcaaacaaaa

SEQ ID NO: 1809776 - DNA, 15 bp, Homo sapiens
catctcaaacaaaac

SEQ ID NO: 1809777 - DNA, 15 bp, Homo sapiens
atctcaaacaaaaca

SEQ ID NO: 1809778 - DNA, 15 bp, Homo sapiens
tctcaaacaaaacaa

SEQ ID NO: 1809779 - DNA, 15 bp, Homo sapiens
ctcaaacaaaacaaa

SEQ ID NO: 1809780 - DNA, 15 bp, Homo sapiens
tcaaacaaaacaaaa

SEQ ID NO: 1809781 - DNA, 15 bp, Homo sapiens
caaaacaaaacaaac

SEQ ID NO: 1809782 - DNA, 15 bp, Homo sapiens
acaaacaaaaaaaca

SEQ ID NO: 1809783 - DNA, 15 bp, Homo sapiens
caaacaaaaaaacaa

SEQ ID NO: 1809784 - DNA, 15 bp, Homo sapiens
aaacaaaaaaacaaa

SEQ ID NO: 1809785 - DNA, 15 bp, Homo sapiens
aacaaaaaaacaaaa

SEQ ID NO: 1809786 - DNA, 15 bp, Homo sapiens
acaaaaaaacaaaac

SEQ ID NO: 1809787 - DNA, 15 bp, Homo sapiens
caaaaaaacaaaaca

SEQ ID NO: 1809788 - DNA, 15 bp, Homo sapiens
aaacaaaacaaaagc

SEQ ID NO: 1809789 - DNA, 15 bp, Homo sapiens
aacaaaacaaaagct

SEQ ID NO: 1809790 - DNA, 15 bp, Homo sapiens
acaaaacaaaagcta

SEQ ID NO: 1809791 - DNA, 15 bp, Homo sapiens
caaaacaaaagctaa

SEQ ID NO: 1809792 - DNA, 15 bp, Homo sapiens
aaaacaaaagctaat

SEQ ID NO: 1809793 - DNA, 15 bp, Homo sapiens
aaacaaaagctaata

SEQ ID NO: 1809794 - DNA, 15 bp, Homo sapiens
aacaaaagctaatac

SEQ ID NO: 1809795 - DNA, 15 bp, Homo sapiens
acaaaagctaataca

SEQ ID NO: 1809796 - DNA, 15 bp, Homo sapiens
caaaagctaatacaa

SEQ ID NO: 1809797 - DNA, 15 bp, Homo sapiens
aaaagctaatacaaa

SEQ ID NO: 1809798 - DNA, 15 bp, Homo sapiens
aaagctaatacaaac

SEQ ID NO: 1809799 - DNA, 15 bp, Homo sapiens
aagctaatacaaaca

SEQ ID NO: 1809800 - DNA, 15 bp, Homo sapiens
agctaatacaaacac

SEQ ID NO: 1809801 - DNA, 15 bp, Homo sapiens
gctaatacaaacaca

SEQ ID NO: 1809802 - DNA, 15 bp, Homo sapiens
ctaatacaaacacat

SEQ ID NO: 1809803 - DNA, 15 bp, Homo sapiens
taatacaaacacata

SEQ ID NO: 1809804 - DNA, 15 bp, Homo sapiens
aatacaaacacatat

SEQ ID NO: 1809805 - DNA, 15 bp, Homo sapiens
atacaaacacatata

SEQ ID NO: 1809806 - DNA, 15 bp, Homo sapiens
tacaaacacatatac

SEQ ID NO: 1809807 - DNA, 15 bp, Homo sapiens
acaaacacatataca

SEQ ID NO: 1809808 - DNA, 15 bp, Homo sapiens
caaacacatatacaa

SEQ ID NO: 1809809 - DNA, 15 bp, Homo sapiens
aaacacatatacaat

SEQ ID NO: 1809810 - DNA, 15 bp, Homo sapiens
aacacatatacaata

SEQ ID NO: 1809811 - DNA, 15 bp, Homo sapiens
acacatatacaatag

SEQ ID NO: 1809812 - DNA, 15 bp, Homo sapiens
cacatatacaataga

SEQ ID NO: 1809813 - DNA, 15 bp, Homo sapiens
acatatacaatagac

SEQ ID NO: 1809814 - DNA, 15 bp, Homo sapiens
catatacaatagaca

SEQ ID NO: 1809815 - DNA, 15 bp, Homo sapiens
atatacaatagacaa

SEQ ID NO: 1809816 - DNA, 15 bp, Homo sapiens
tatacaatagacaaa

SEQ ID NO: 1809817 - DNA, 15 bp, Homo sapiens
atacaatagacaaaa

SEQ ID NO: 1809818 - DNA, 15 bp, Homo sapiens
tacaatagacaaaac

SEQ ID NO: 1809819 - DNA, 15 bp, Homo sapiens
acaatagacaaaact

SEQ ID NO: 1809820 - DNA, 15 bp, Homo sapiens
caatagacaaaactg

SEQ ID NO: 1809821 - DNA, 15 bp, Homo sapiens
aatagacaaaactgt

SEQ ID NO: 1809822 - DNA, 15 bp, Homo sapiens
atagacaaaactgta

SEQ ID NO: 1809823 - DNA, 15 bp, Homo sapiens
tagacaaaactgtaa

SEQ ID NO: 1809824 - DNA, 15 bp, Homo sapiens
agacaaaactgtaaa

SEQ ID NO: 1809825 - DNA, 15 bp, Homo sapiens
gacaaaactgtaaat

SEQ ID NO: 1809826 - DNA, 15 bp, Homo sapiens
acaaaactgtaaata

SEQ ID NO: 1809827 - DNA, 15 bp, Homo sapiens
caaaactgtaaatat

SEQ ID NO: 1809828 - DNA, 15 bp, Homo sapiens
aaaactgtaaatatt

SEQ ID NO: 1809829 - DNA, 15 bp, Homo sapiens
aaactgtaaatattt

SEQ ID NO: 1809830 - DNA, 15 bp, Homo sapiens
aactgtaaatatttt

SEQ ID NO: 1809831 - DNA, 15 bp, Homo sapiens
actgtaaatatttta

SEQ ID NO: 1809832 - DNA, 15 bp, Homo sapiens
ctgtaaatattttat

SEQ ID NO: 1809833 - DNA, 15 bp, Homo sapiens
tgtaaatattttatt

SEQ ID NO: 1809834 - DNA, 15 bp, Homo sapiens
gtaaatattttatta

SEQ ID NO: 1809835 - DNA, 15 bp, Homo sapiens
taaatattttattat

SEQ ID NO: 1809836 - DNA, 15 bp, Homo sapiens
aatattttattattt

SEQ ID NO: 1809837 - DNA, 15 bp, Homo sapiens
atattttattatttt

SEQ ID NO: 1809838 - DNA, 15 bp, Homo sapiens
tattttattattttt

SEQ ID NO: 1809839 - DNA, 15 bp, Homo sapiens
attttattattttta

SEQ ID NO: 1809840 - DNA, 15 bp, Homo sapiens
ttttattatttttat

SEQ ID NO: 1809841 - DNA, 15 bp, Homo sapiens
tttttatttttttta

SEQ ID NO: 1809842 - DNA, 15 bp, Homo sapiens
ttttattttttttag

SEQ ID NO: 1809843 - DNA, 15 bp, Homo sapiens
tttattttttttagt

SEQ ID NO: 1809844 - DNA, 15 bp, Homo sapiens
ttattttttttagta

SEQ ID NO: 1809845 - DNA, 15 bp, Homo sapiens
tattttttttagtag

SEQ ID NO: 1809846 - DNA, 15 bp, Homo sapiens
attttttttagtaga

SEQ ID NO: 1809847 - DNA, 15 bp, Homo sapiens
catgttggccaggat

SEQ ID NO: 1809848 - DNA, 15 bp, Homo sapiens
atgttggccaggatg

SEQ ID NO: 1809849 - DNA, 15 bp, Homo sapiens
tgttggccaggatgg

SEQ ID NO: 1809850 - DNA, 15 bp, Homo sapiens
cctcagcctcccgat

SEQ ID NO: 1809851 - DNA, 15 bp, Homo sapiens
ctcagcctcccgata

SEQ ID NO: 1809852 - DNA, 15 bp, Homo sapiens
tcagcctcccgatag

SEQ ID NO: 1809853 - DNA, 15 bp, Homo sapiens
cagcctcccgatagt

SEQ ID NO: 1809854 - DNA, 15 bp, Homo sapiens
agcctcccgatagtt

SEQ ID NO: 1809855 - DNA, 15 bp, Homo sapiens
gcctcccgatagtta

SEQ ID NO: 1809856 - DNA, 15 bp, Homo sapiens
cctcccgatagttag

SEQ ID NO: 1809857 - DNA, 15 bp, Homo sapiens
ctcccgatagttagg

SEQ ID NO: 1809858 - DNA, 15 bp, Homo sapiens
tcccgatagttagga

SEQ ID NO: 1809859 - DNA, 15 bp, Homo sapiens
cccgatagttaggat

SEQ ID NO: 1809860 - DNA, 15 bp, Homo sapiens
ccgatagttaggatt

SEQ ID NO: 1809861 - DNA, 15 bp, Homo sapiens
cgatagttaggatta

SEQ ID NO: 1809862 - DNA, 15 bp, Homo sapiens
gatagttaggattac

SEQ ID NO: 1809863 - DNA, 15 bp, Homo sapiens
atagttaggattaca

SEQ ID NO: 1809864 - DNA, 15 bp, Homo sapiens
tagttaggattacag

SEQ ID NO: 1809865 - DNA, 15 bp, Homo sapiens
agttaggattacagg

SEQ ID NO: 1809866 - DNA, 15 bp, Homo sapiens
gttaggattacaggc

SEQ ID NO: 1809867 - DNA, 15 bp, Homo sapiens
ttaggattacaggca

SEQ ID NO: 1809868 - DNA, 15 bp, Homo sapiens
ccaccacacccggcc

SEQ ID NO: 1809869 - DNA, 15 bp, Homo sapiens
caccacacccggcct

SEQ ID NO: 1809870 - DNA, 15 bp, Homo sapiens
accacacccggccta

SEQ ID NO: 1809871 - DNA, 15 bp, Homo sapiens
ccacacccggcctaa

SEQ ID NO: 1809872 - DNA, 15 bp, Homo sapiens
cacacccggcctaaa

SEQ ID NO: 1809873 - DNA, 15 bp, Homo sapiens
acacccggcctaaaa

SEQ ID NO: 1809874 - DNA, 15 bp, Homo sapiens
cacccggcctaaaat

SEQ ID NO: 1809875 - DNA, 15 bp, Homo sapiens
acccggcctaaaatt

SEQ ID NO: 1809876 - DNA, 15 bp, Homo sapiens
cccggcctaaaattg

SEQ ID NO: 1809877 - DNA, 15 bp, Homo sapiens
ccggcctaaaattgt

SEQ ID NO: 1809878 - DNA, 15 bp, Homo sapiens
cggcctaaaattgta

SEQ ID NO: 1809879 - DNA, 15 bp, Homo sapiens
ggcctaaaattgtaa

SEQ ID NO: 1809880 - DNA, 15 bp, Homo sapiens
gcctaaaattgtaaa

SEQ ID NO: 1809881 - DNA, 15 bp, Homo sapiens
cctaaaattgtaaac

SEQ ID NO: 1809882 - DNA, 15 bp, Homo sapiens
ctaaaattgtaaacg

SEQ ID NO: 1809883 - DNA, 15 bp, Homo sapiens
taaaattgtaaacgt

SEQ ID NO: 1809884 - DNA, 15 bp, Homo sapiens
aaaattgtaaacgtt

SEQ ID NO: 1809885 - DNA, 15 bp, Homo sapiens
aaattgtaaacgttt

SEQ ID NO: 1809886 - DNA, 15 bp, Homo sapiens
aattgtaaacgtttt

SEQ ID NO: 1809887 - DNA, 15 bp, Homo sapiens
attgtaaacgtttta

SEQ ID NO: 1809888 - DNA, 15 bp, Homo sapiens
ttgtaaacgttttag

SEQ ID NO: 1809889 - DNA, 15 bp, Homo sapiens
tgtaaacgttttaga

SEQ ID NO: 1809890 - DNA, 15 bp, Homo sapiens
gtaaacgttttagaa

SEQ ID NO: 1809891 - DNA, 15 bp, Homo sapiens
taaacgttttagaag

SEQ ID NO: 1809892 - DNA, 15 bp, Homo sapiens
aaacgttttagaaga

SEQ ID NO: 1809893 - DNA, 15 bp, Homo sapiens
aacgttttagaagaa

SEQ ID NO: 1809894 - DNA, 15 bp, Homo sapiens
acgttttagaagaaa

SEQ ID NO: 1809895 - DNA, 15 bp, Homo sapiens
cgttttagaagaaag

SEQ ID NO: 1809896 - DNA, 15 bp, Homo sapiens
gttttagaagaaagt

SEQ ID NO: 1809897 - DNA, 15 bp, Homo sapiens
ttttagaagaaagta

SEQ ID NO: 1809898 - DNA, 15 bp, Homo sapiens
tttagaagaaagtat

SEQ ID NO: 1809899 - DNA, 15 bp, Homo sapiens
ttagaagaaagtata

SEQ ID NO: 1809900 - DNA, 15 bp, Homo sapiens
tagaagaaagtatag

SEQ ID NO: 1809901 - DNA, 15 bp, Homo sapiens
agaagaaagtataga

SEQ ID NO: 1809902 - DNA, 15 bp, Homo sapiens
gaagaaagtatagat

SEQ ID NO: 1809903 - DNA, 15 bp, Homo sapiens
aagaaagtatagatg

SEQ ID NO: 1809904 - DNA, 15 bp, Homo sapiens
agaaagtatagatga

SEQ ID NO: 1809905 - DNA, 15 bp, Homo sapiens
gaaagtatagatgaa

SEQ ID NO: 1809906 - DNA, 15 bp, Homo sapiens
agctattggttcagg

SEQ ID NO: 1809907 - DNA, 15 bp, Homo sapiens
gctattggttcaggg

SEQ ID NO: 1809908 - DNA, 15 bp, Homo sapiens
ctattggttcagggg

SEQ ID NO: 1809909 - DNA, 15 bp, Homo sapiens
tattggttcaggggc

SEQ ID NO: 1809910 - DNA, 15 bp, Homo sapiens
attggttcaggggcc

SEQ ID NO: 1809911 - DNA, 15 bp, Homo sapiens
ttggttcaggggcca

SEQ ID NO: 1809912 - DNA, 15 bp, Homo sapiens
tggttcaggggccag

SEQ ID NO: 1809913 - DNA, 15 bp, Homo sapiens
ggttcaggggccagg

SEQ ID NO: 1809914 - DNA, 15 bp, Homo sapiens
gttcaggggccaggt

SEQ ID NO: 1809915 - DNA, 15 bp, Homo sapiens
ttcaggggccaggtg

SEQ ID NO: 1809916 - DNA, 15 bp, Homo sapiens
tcaggggccaggtgt

SEQ ID NO: 1809917 - DNA, 15 bp, Homo sapiens
caggggccaggtgta

SEQ ID NO: 1809918 - DNA, 15 bp, Homo sapiens
aggggccaggtgtaa

SEQ ID NO: 1809919 - DNA, 15 bp, Homo sapiens
ggggccaggtgtaat

SEQ ID NO: 1809920 - DNA, 15 bp, Homo sapiens
gggccaggtgtaatg

SEQ ID NO: 1809921 - DNA, 15 bp, Homo sapiens
ggccaggtgtaatgg

SEQ ID NO: 1809922 - DNA, 15 bp, Homo sapiens
gccaggtgtaatggc

SEQ ID NO: 1809923 - DNA, 15 bp, Homo sapiens
ccaggtgtaatggct

SEQ ID NO: 1809924 - DNA, 15 bp, Homo sapiens
caggtgtaatggctc

SEQ ID NO: 1809925 - DNA, 15 bp, Homo sapiens
aggtgtaatggctca

SEQ ID NO: 1809926 - DNA, 15 bp, Homo sapiens
ggtgtaatggctcac

SEQ ID NO: 1809927 - DNA, 15 bp, Homo sapiens
gtgtaatggctcaca

SEQ ID NO: 1809928 - DNA, 15 bp, Homo sapiens
tgtaatggctcacac

SEQ ID NO: 1809929 - DNA, 15 bp, Homo sapiens
gtaatggctcacacc

SEQ ID NO: 1809930 - DNA, 15 bp, Homo sapiens
taatggctcacacct

SEQ ID NO: 1809931 - DNA, 15 bp, Homo sapiens
ccctagcactttggg

SEQ ID NO: 1809932 - DNA, 15 bp, Homo sapiens
ctgaagcaggtggat

SEQ ID NO: 1809933 - DNA, 15 bp, Homo sapiens
tgaagcaggtggata

SEQ ID NO: 1809934 - DNA, 15 bp, Homo sapiens
gaagcaggtggatag

SEQ ID NO: 1809935 - DNA, 15 bp, Homo sapiens
aagcaggtggatagc

SEQ ID NO: 1809936 - DNA, 15 bp, Homo sapiens
agcaggtggatagcc

SEQ ID NO: 1809937 - DNA, 15 bp, Homo sapiens
gcaggtggatagcct

SEQ ID NO: 1809938 - DNA, 15 bp, Homo sapiens
caggtggatagcctg

SEQ ID NO: 1809939 - DNA, 15 bp, Homo sapiens
aggtggatagcctga

SEQ ID NO: 1809940 - DNA, 15 bp, Homo sapiens
ggtggatagcctgag

SEQ ID NO: 1809941 - DNA, 15 bp, Homo sapiens
gtggatagcctgagg

SEQ ID NO: 1809942 - DNA, 15 bp, Homo sapiens
tggatagcctgaggt

SEQ ID NO: 1809943 - DNA, 15 bp, Homo sapiens
agtttgagacaagcc

SEQ ID NO: 1809944 - DNA, 15 bp, Homo sapiens
gtttgagacaagcct

SEQ ID NO: 1809945 - DNA, 15 bp, Homo sapiens
tttgagacaagcctg

SEQ ID NO: 1809946 - DNA, 15 bp, Homo sapiens
ttgagacaagcctga

SEQ ID NO: 1809947 - DNA, 15 bp, Homo sapiens
tgagacaagcctgat

SEQ ID NO: 1809948 - DNA, 15 bp, Homo sapiens
gagacaagcctgatg

SEQ ID NO: 1809949 - DNA, 15 bp, Homo sapiens
agacaagcctgatga

SEQ ID NO: 1809950 - DNA, 15 bp, Homo sapiens
gacaagcctgatgaa

SEQ ID NO: 1809951 - DNA, 15 bp, Homo sapiens
acaagcctgatgaac

SEQ ID NO: 1809952 - DNA, 15 bp, Homo sapiens
caagcctgatgaacg

SEQ ID NO: 1809953 - DNA, 15 bp, Homo sapiens
aagcctgatgaacgt

SEQ ID NO: 1809954 - DNA, 15 bp, Homo sapiens
agcctgatgaacgtg

SEQ ID NO: 1809955 - DNA, 15 bp, Homo sapiens
gcctgatgaacgtgg

SEQ ID NO: 1809956 - DNA, 15 bp, Homo sapiens
cctgatgaacgtggt

SEQ ID NO: 1809957 - DNA, 15 bp, Homo sapiens
ctgatgaacgtggtg

SEQ ID NO: 1809958 - DNA, 15 bp, Homo sapiens
tgatgaacgtggtga

SEQ ID NO: 1809959 - DNA, 15 bp, Homo sapiens
gatgaacgtggtgaa

SEQ ID NO: 1809960 - DNA, 15 bp, Homo sapiens
atgaacgtggtgaaa

SEQ ID NO: 1809961 - DNA, 15 bp, Homo sapiens
tgaacgtggtgaaac

SEQ ID NO: 1809962 - DNA, 15 bp, Homo sapiens
gaacgtggtgaaacc

SEQ ID NO: 1809963 - DNA, 15 bp, Homo sapiens
ggtgaaaccccatcg

SEQ ID NO: 1809964 - DNA, 15 bp, Homo sapiens
gtgaaaccccatcgc

SEQ ID NO: 1809965 - DNA, 15 bp, Homo sapiens
tgaaaccccatcgct

SEQ ID NO: 1809966 - DNA, 15 bp, Homo sapiens
gaaaccccatcgcta

SEQ ID NO: 1809967 - DNA, 15 bp, Homo sapiens
aaaccccatcgctat

SEQ ID NO: 1809968 - DNA, 15 bp, Homo sapiens
aaccccatcgctatt

SEQ ID NO: 1809969 - DNA, 15 bp, Homo sapiens
accccatcgctatta

SEQ ID NO: 1809970 - DNA, 15 bp, Homo sapiens
ccccatcgctattaa

SEQ ID NO: 1809971 - DNA, 15 bp, Homo sapiens
cccatcgctattaaa

SEQ ID NO: 1809972 - DNA, 15 bp, Homo sapiens
ccatcgctattaaaa

SEQ ID NO: 1809973 - DNA, 15 bp, Homo sapiens
catcgctattaaaat

SEQ ID NO: 1809974 - DNA, 15 bp, Homo sapiens
atcgctattaaaata

SEQ ID NO: 1809975 - DNA, 15 bp, Homo sapiens
tcgctattaaaatac

SEQ ID NO: 1809976 - DNA, 15 bp, Homo sapiens
cgctattaaaataca

SEQ ID NO: 1809977 - DNA, 15 bp, Homo sapiens
gctattaaaatacaa

SEQ ID NO: 1809978 - DNA, 15 bp, Homo sapiens
ctattaaaatacaaa

SEQ ID NO: 1809979 - DNA, 15 bp, Homo sapiens
tattaaaatacaaaa

SEQ ID NO: 1809980 - DNA, 15 bp, Homo sapiens
attaaaatacaaaaa

SEQ ID NO: 1809981 - DNA, 15 bp, Homo sapiens
ttaaaatacaaaaaa

SEQ ID NO: 1809982 - DNA, 15 bp, Homo sapiens
taaaatacaaaaaat

SEQ ID NO: 1809983 - DNA, 15 bp, Homo sapiens
gcatggtggcaggtg

SEQ ID NO: 1809984 - DNA, 15 bp, Homo sapiens
catggtggcaggtgc

SEQ ID NO: 1809985 - DNA, 15 bp, Homo sapiens
atggtggcaggtgcc

SEQ ID NO: 1809986 - DNA, 15 bp, Homo sapiens
caggtgcctgtaatt

SEQ ID NO: 1809987 - DNA, 15 bp, Homo sapiens
aggtgcctgtaattc

SEQ ID NO: 1809988 - DNA, 15 bp, Homo sapiens
ggtgcctgtaattcc

SEQ ID NO: 1809989 - DNA, 15 bp, Homo sapiens
gtgcctgtaattcca

SEQ ID NO: 1809990 - DNA, 15 bp, Homo sapiens
gaggctgaggcggga

SEQ ID NO: 1809991 - DNA, 15 bp, Homo sapiens
aggctgaggcgggag

SEQ ID NO: 1809992 - DNA, 15 bp, Homo sapiens
aggcgggagaatcgc

SEQ ID NO: 1809993 - DNA, 15 bp, Homo sapiens
ggcgggagaatcgct

SEQ ID NO: 1809994 - DNA, 15 bp, Homo sapiens
gcgggagaatcgctt

SEQ ID NO: 1809995 - DNA, 15 bp, Homo sapiens
tgagccaagatcgct

SEQ ID NO: 1809996 - DNA, 15 bp, Homo sapiens
gagccaagatcgctc

SEQ ID NO: 1809997 - DNA, 15 bp, Homo sapiens
agccaagatcgctcc

SEQ ID NO: 1809998 - DNA, 15 bp, Homo sapiens
gccaagatcgctcca

SEQ ID NO: 1809999 - DNA, 15 bp, Homo sapiens
ccaagatcgctccac

SEQ ID NO: 1810000 - DNA, 15 bp, Homo sapiens
caagatcgctccact

SEQ ID NO: 1810001 - DNA, 15 bp, Homo sapiens
aagatcgctccactg

SEQ ID NO: 1810002 - DNA, 15 bp, Homo sapiens
agatcgctccactgt

SEQ ID NO: 1810003 - DNA, 15 bp, Homo sapiens
gatcgctccactgta

SEQ ID NO: 1810004 - DNA, 15 bp, Homo sapiens
atcgctccactgtac

SEQ ID NO: 1810005 - DNA, 15 bp, Homo sapiens
tcgctccactgtact

SEQ ID NO: 1810006 - DNA, 15 bp, Homo sapiens
cgctccactgtactc

SEQ ID NO: 1810007 - DNA, 15 bp, Homo sapiens
gctccactgtactcc

SEQ ID NO: 1810008 - DNA, 15 bp, Homo sapiens
ctccactgtactcca

SEQ ID NO: 1810009 - DNA, 15 bp, Homo sapiens
tccactgtactccag

SEQ ID NO: 1810010 - DNA, 15 bp, Homo sapiens
ctgggcgacagagcc

SEQ ID NO: 1810011 - DNA, 15 bp, Homo sapiens
tgggcgacagagcca

SEQ ID NO: 1810012 - DNA, 15 bp, Homo sapiens
gggcgacagagccag

SEQ ID NO: 1810013 - DNA, 15 bp, Homo sapiens
ggcgacagagccaga

SEQ ID NO: 1810014 - DNA, 15 bp, Homo sapiens
gcgacagagccagac

SEQ ID NO: 1810015 - DNA, 15 bp, Homo sapiens
cgacagagccagact

SEQ ID NO: 1810016 - DNA, 15 bp, Homo sapiens
gagccagactctgtt

SEQ ID NO: 1810017 - DNA, 15 bp, Homo sapiens
agccagactctgttt

SEQ ID NO: 1810018 - DNA, 15 bp, Homo sapiens
gccagactctgtttc

SEQ ID NO: 1810019 - DNA, 15 bp, Homo sapiens
ccagactctgtttca

SEQ ID NO: 1810020 - DNA, 15 bp, Homo sapiens
cagactctgtttcaa

SEQ ID NO: 1810021 - DNA, 15 bp, Homo sapiens
agactctgtttcaaa

SEQ ID NO: 1810022 - DNA, 15 bp, Homo sapiens
gactctgtttcaaaa

SEQ ID NO: 1810023 - DNA, 15 bp, Homo sapiens
actctgtttcaaaaa

SEQ ID NO: 1810024 - DNA, 15 bp, Homo sapiens
ctctgtttcaaaaaa

SEQ ID NO: 1810025 - DNA, 15 bp, Homo sapiens
tctgtttcaaaaaat

SEQ ID NO: 1810026 - DNA, 15 bp, Homo sapiens
ctgtttcaaaaaata

SEQ ID NO: 1810027 - DNA, 15 bp, Homo sapiens
tgtttcaaaaaataa

SEQ ID NO: 1810028 - DNA, 15 bp, Homo sapiens
gtttcaaaaaataaa

SEQ ID NO: 1810029 - DNA, 15 bp, Homo sapiens
tttcaaaaaataaaa

SEQ ID NO: 1810030 - DNA, 15 bp, Homo sapiens
ttcaaaaaataaaat

SEQ ID NO: 1810031 - DNA, 15 bp, Homo sapiens
tcaaaaaataaaata

SEQ ID NO: 1810032 - DNA, 15 bp, Homo sapiens
caaaaaataaaatat

SEQ ID NO: 1810033 - DNA, 15 bp, Homo sapiens
aaaaaataaaatata

SEQ ID NO: 1810034 - DNA, 15 bp, Homo sapiens
aaaaataaaatataa

SEQ ID NO: 1810035 - DNA, 15 bp, Homo sapiens
aaaataaaatataaa

SEQ ID NO: 1810036 - DNA, 15 bp, Homo sapiens
aaataaaatataaat

SEQ ID NO: 1810037 - DNA, 15 bp, Homo sapiens
aataaaatataaata

SEQ ID NO: 1810038 - DNA, 15 bp, Homo sapiens
ataaaatataaataa

SEQ ID NO: 1810039 - DNA, 15 bp, Homo sapiens
taaaatataaataaa

SEQ ID NO: 1810040 - DNA, 15 bp, Homo sapiens
aaaatataaataaat

SEQ ID NO: 1810041 - DNA, 15 bp, Homo sapiens
aaatataaataaata

SEQ ID NO: 1810042 - DNA, 15 bp, Homo sapiens
aatataaataaataa

SEQ ID NO: 1810043 - DNA, 15 bp, Homo sapiens
taaataaataaaagc

SEQ ID NO: 1810044 - DNA, 15 bp, Homo sapiens
aaataaataaaagct

SEQ ID NO: 1810045 - DNA, 15 bp, Homo sapiens
aataaataaaagctt

SEQ ID NO: 1810046 - DNA, 15 bp, Homo sapiens
ataaataaaagcttt

SEQ ID NO: 1810047 - DNA, 15 bp, Homo sapiens
taaataaaagcttta

SEQ ID NO: 1810048 - DNA, 15 bp, Homo sapiens
aaataaaagctttag

SEQ ID NO: 1810049 - DNA, 15 bp, Homo sapiens
aataaaagctttagg

SEQ ID NO: 1810050 - DNA, 15 bp, Homo sapiens
ataaaagctttaggc

SEQ ID NO: 1810051 - DNA, 15 bp, Homo sapiens
taaaagctttaggct

SEQ ID NO: 1810052 - DNA, 15 bp, Homo sapiens
aaaagctttaggctt

SEQ ID NO: 1810053 - DNA, 15 bp, Homo sapiens
aaagctttaggctta

SEQ ID NO: 1810054 - DNA, 15 bp, Homo sapiens
aagctttaggcttaa

SEQ ID NO: 1810055 - DNA, 15 bp, Homo sapiens
agctttaggcttaaa

SEQ ID NO: 1810056 - DNA, 15 bp, Homo sapiens
gctttaggcttaaag

SEQ ID NO: 1810057 - DNA, 15 bp, Homo sapiens
ctttaggcttaaagg

SEQ ID NO: 1810058 - DNA, 15 bp, Homo sapiens
tttaggcttaaagga

SEQ ID NO: 1810059 - DNA, 15 bp, Homo sapiens
ttaggcttaaaggag

SEQ ID NO: 1810060 - DNA, 15 bp, Homo sapiens
taggcttaaaggagg

SEQ ID NO: 1810061 - DNA, 15 bp, Homo sapiens
aggcttaaaggaggg

SEQ ID NO: 1810062 - DNA, 15 bp, Homo sapiens
ggcttaaaggagggt

SEQ ID NO: 1810063 - DNA, 15 bp, Homo sapiens
gcttaaaggagggtc

SEQ ID NO: 1810064 - DNA, 15 bp, Homo sapiens
cttaaaggagggtcc

SEQ ID NO: 1810065 - DNA, 15 bp, Homo sapiens
ttaaaggagggtccc

SEQ ID NO: 1810066 - DNA, 15 bp, Homo sapiens
taaaggagggtcccc

SEQ ID NO: 1810067 - DNA, 15 bp, Homo sapiens
aaaggagggtcccct

SEQ ID NO: 1810068 - DNA, 15 bp, Homo sapiens
aaggagggtcccctg

SEQ ID NO: 1810069 - DNA, 15 bp, Homo sapiens
aggagggtcccctga

SEQ ID NO: 1810070 - DNA, 15 bp, Homo sapiens
ggagggtcccctgac

SEQ ID NO: 1810071 - DNA, 15 bp, Homo sapiens
gagggtcccctgacg

SEQ ID NO: 1810072 - DNA, 15 bp, Homo sapiens
agggtcccctgacgc

SEQ ID NO: 1810073 - DNA, 15 bp, Homo sapiens
gggtcccctgacgca

SEQ ID NO: 1810074 - DNA, 15 bp, Homo sapiens
ggtcccctgacgcag

SEQ ID NO: 1810075 - DNA, 15 bp, Homo sapiens
gtcccctgacgcaga

SEQ ID NO: 1810076 - DNA, 15 bp, Homo sapiens
tcccctgacgcagac

SEQ ID NO: 1810077 - DNA, 15 bp, Homo sapiens
cccctgacgcagaca

SEQ ID NO: 1810078 - DNA, 15 bp, Homo sapiens
ccctgacgcagacag

SEQ ID NO: 1810079 - DNA, 15 bp, Homo sapiens
cctgacgcagacagt

SEQ ID NO: 1810080 - DNA, 15 bp, Homo sapiens
ctgacgcagacagtg

SEQ ID NO: 1810081 - DNA, 15 bp, Homo sapiens
tgacgcagacagtgg

SEQ ID NO: 1810082 - DNA, 15 bp, Homo sapiens
gacgcagacagtgga

SEQ ID NO: 1810083 - DNA, 15 bp, Homo sapiens
acgcagacagtggaa

SEQ ID NO: 1810084 - DNA, 15 bp, Homo sapiens
cgcagacagtggaac

SEQ ID NO: 1810085 - DNA, 15 bp, Homo sapiens
gcagacagtggaaca

SEQ ID NO: 1810086 - DNA, 15 bp, Homo sapiens
cagacagtggaacaa

SEQ ID NO: 1810087 - DNA, 15 bp, Homo sapiens
agacagtggaacaaa

SEQ ID NO: 1810088 - DNA, 15 bp, Homo sapiens
gacagtggaacaaaa

SEQ ID NO: 1810089 - DNA, 15 bp, Homo sapiens
acagtggaacaaaag

SEQ ID NO: 1810090 - DNA, 15 bp, Homo sapiens
cagtggaacaaaagc

SEQ ID NO: 1810091 - DNA, 15 bp, Homo sapiens
agtggaacaaaagca

SEQ ID NO: 1810092 - DNA, 15 bp, Homo sapiens
gtggaacaaaagcac

SEQ ID NO: 1810093 - DNA, 15 bp, Homo sapiens
tggaacaaaagcaca

SEQ ID NO: 1810094 - DNA, 15 bp, Homo sapiens
ggaacaaaagcacaa

SEQ ID NO: 1810095 - DNA, 15 bp, Homo sapiens
gaacaaaagcacaag

SEQ ID NO: 1810096 - DNA, 15 bp, Homo sapiens
aacaaaagcacaagc

SEQ ID NO: 1810097 - DNA, 15 bp, Homo sapiens
acaaaagcacaagct

SEQ ID NO: 1810098 - DNA, 15 bp, Homo sapiens
caaaagcacaagctt

SEQ ID NO: 1810099 - DNA, 15 bp, Homo sapiens
aaaagcacaagctta

SEQ ID NO: 1810100 - DNA, 15 bp, Homo sapiens
aaagcacaagcttat

SEQ ID NO: 1810101 - DNA, 15 bp, Homo sapiens
aagcacaagcttatg

SEQ ID NO: 1810102 - DNA, 15 bp, Homo sapiens
agcacaagcttatgg

SEQ ID NO: 1810103 - DNA, 15 bp, Homo sapiens
gcacaagcttatggt

SEQ ID NO: 1810104 - DNA, 15 bp, Homo sapiens
cacaagcttatggta

SEQ ID NO: 1810105 - DNA, 15 bp, Homo sapiens
acaagcttatggtat

SEQ ID NO: 1810106 - DNA, 15 bp, Homo sapiens
caagcttatggtatg

SEQ ID NO: 1810107 - DNA, 15 bp, Homo sapiens
aagcttatggtatga

SEQ ID NO: 1810108 - DNA, 15 bp, Homo sapiens
agcttatggtatgac

SEQ ID NO: 1810109 - DNA, 15 bp, Homo sapiens
gcttatggtatgact

SEQ ID NO: 1810110 - DNA, 15 bp, Homo sapiens
cttatggtatgactg

SEQ ID NO: 1810111 - DNA, 15 bp, Homo sapiens
ttatggtatgactgt

SEQ ID NO: 1810112 - DNA, 15 bp, Homo sapiens
tatggtatgactgtg

SEQ ID NO: 1810113 - DNA, 15 bp, Homo sapiens
atggtatgactgtgg

SEQ ID NO: 1810114 - DNA, 15 bp, Homo sapiens
tggtatgactgtggg

SEQ ID NO: 1810115 - DNA, 15 bp, Homo sapiens
ggtatgactgtgggc

SEQ ID NO: 1810116 - DNA, 15 bp, Homo sapiens
gtatgactgtgggcc

SEQ ID NO: 1810117 - DNA, 15 bp, Homo sapiens
tatgactgtgggccc

SEQ ID NO: 1810118 - DNA, 15 bp, Homo sapiens
atgactgtgggccct

SEQ ID NO: 1810119 - DNA, 15 bp, Homo sapiens
tgactgtgggccctg

SEQ ID NO: 1810120 - DNA, 15 bp, Homo sapiens
gactgtgggccctga

SEQ ID NO: 1810121 - DNA, 15 bp, Homo sapiens
actgtgggccctgag

SEQ ID NO: 1810122 - DNA, 15 bp, Homo sapiens
ctgtgggccctgagg

SEQ ID NO: 1810123 - DNA, 15 bp, Homo sapiens
tgtgggccctgaggc

SEQ ID NO: 1810124 - DNA, 15 bp, Homo sapiens
gtgggccctgaggca

SEQ ID NO: 1810125 - DNA, 15 bp, Homo sapiens
tgggccctgaggcag

SEQ ID NO: 1810126 - DNA, 15 bp, Homo sapiens
gggccctgaggcagg

SEQ ID NO: 1810127 - DNA, 15 bp, Homo sapiens
ggccctgaggcaggg

SEQ ID NO: 1810128 - DNA, 15 bp, Homo sapiens
gccctgaggcagggg

SEQ ID NO: 1810129 - DNA, 15 bp, Homo sapiens
ccctgaggcaggggg

SEQ ID NO: 1810130 - DNA, 15 bp, Homo sapiens
cctgaggcaggggga

SEQ ID NO: 1810131 - DNA, 15 bp, Homo sapiens
ctgaggcagggggag

SEQ ID NO: 1810132 - DNA, 15 bp, Homo sapiens
tgaggcagggggagg

SEQ ID NO: 1810133 - DNA, 15 bp, Homo sapiens
gaggcagggggaggg

SEQ ID NO: 1810134 - DNA, 15 bp, Homo sapiens
aggcagggggagggg

SEQ ID NO: 1810135 - DNA, 15 bp, Homo sapiens
ggcagggggaggggc

SEQ ID NO: 1810136 - DNA, 15 bp, Homo sapiens
gcagggggaggggcg

SEQ ID NO: 1810137 - DNA, 15 bp, Homo sapiens
cagggggaggggcgg

SEQ ID NO: 1810138 - DNA, 15 bp, Homo sapiens
agggggaggggcggg

SEQ ID NO: 1810139 - DNA, 15 bp, Homo sapiens
gggggaggggcggga

SEQ ID NO: 1810140 - DNA, 15 bp, Homo sapiens
ggggaggggcgggag

SEQ ID NO: 1810141 - DNA, 15 bp, Homo sapiens
gggaggggcgggaga

SEQ ID NO: 1810142 - DNA, 15 bp, Homo sapiens
ggaggggcgggagaa

SEQ ID NO: 1810143 - DNA, 15 bp, Homo sapiens
gaggggcgggagaac

SEQ ID NO: 1810144 - DNA, 15 bp, Homo sapiens
aggggcgggagaacc

SEQ ID NO: 1810145 - DNA, 15 bp, Homo sapiens
ggggcgggagaacct

SEQ ID NO: 1810146 - DNA, 15 bp, Homo sapiens
gggcgggagaacctt

SEQ ID NO: 1810147 - DNA, 15 bp, Homo sapiens
ggcgggagaaccttg

SEQ ID NO: 1810148 - DNA, 15 bp, Homo sapiens
gcgggagaaccttgc

SEQ ID NO: 1810149 - DNA, 15 bp, Homo sapiens
cgggagaaccttgct

SEQ ID NO: 1810150 - DNA, 15 bp, Homo sapiens
gggagaaccttgctg

SEQ ID NO: 1810151 - DNA, 15 bp, Homo sapiens
ggagaaccttgctgg

SEQ ID NO: 1810152 - DNA, 15 bp, Homo sapiens
gagaaccttgctggg

SEQ ID NO: 1810153 - DNA, 15 bp, Homo sapiens
agaaccttgctggga

SEQ ID NO: 1810154 - DNA, 15 bp, Homo sapiens
gaaccttgctgggag

SEQ ID NO: 1810155 - DNA, 15 bp, Homo sapiens
aaccttgctgggagg

SEQ ID NO: 1810156 - DNA, 15 bp, Homo sapiens
accttgctgggaggg

SEQ ID NO: 1810157 - DNA, 15 bp, Homo sapiens
ccttgctgggaggga

SEQ ID NO: 1810158 - DNA, 15 bp, Homo sapiens
cttgctgggagggat

SEQ ID NO: 1810159 - DNA, 15 bp, Homo sapiens
ttgctgggagggatg

SEQ ID NO: 1810160 - DNA, 15 bp, Homo sapiens
tgctgggagggatgg

SEQ ID NO: 1810161 - DNA, 15 bp, Homo sapiens
gctgggagggatggg

SEQ ID NO: 1810162 - DNA, 15 bp, Homo sapiens
ctgggagggatgggc

SEQ ID NO: 1810163 - DNA, 15 bp, Homo sapiens
tgggagggatgggcc

SEQ ID NO: 1810164 - DNA, 15 bp, Homo sapiens
gggagggatgggcca

SEQ ID NO: 1810165 - DNA, 15 bp, Homo sapiens
ggagggatgggccat

SEQ ID NO: 1810166 - DNA, 15 bp, Homo sapiens
gagggatgggccatc

SEQ ID NO: 1810167 - DNA, 15 bp, Homo sapiens
agggatgggccatca

SEQ ID NO: 1810168 - DNA, 15 bp, Homo sapiens
gggatgggccatcaa

SEQ ID NO: 1810169 - DNA, 15 bp, Homo sapiens
ggatgggccatcaag

SEQ ID NO: 1810170 - DNA, 15 bp, Homo sapiens
gatgggccatcaagc

SEQ ID NO: 1810171 - DNA, 15 bp, Homo sapiens
atgggccatcaagct

SEQ ID NO: 1810172 - DNA, 15 bp, Homo sapiens
tgggccatcaagctg

SEQ ID NO: 1810173 - DNA, 15 bp, Homo sapiens
gggccatcaagctga

SEQ ID NO: 1810174 - DNA, 15 bp, Homo sapiens
ggccatcaagctgag

SEQ ID NO: 1810175 - DNA, 15 bp, Homo sapiens
gccatcaagctgagg

SEQ ID NO: 1810176 - DNA, 15 bp, Homo sapiens
ccatcaagctgaggg

SEQ ID NO: 1810177 - DNA, 15 bp, Homo sapiens
catcaagctgagggt

SEQ ID NO: 1810178 - DNA, 15 bp, Homo sapiens
atcaagctgagggtc

SEQ ID NO: 1810179 - DNA, 15 bp, Homo sapiens
tcaagctgagggtcc

SEQ ID NO: 1810180 - DNA, 15 bp, Homo sapiens
caagctgagggtcca

SEQ ID NO: 1810181 - DNA, 15 bp, Homo sapiens
aagctgagggtccac

SEQ ID NO: 1810182 - DNA, 15 bp, Homo sapiens
agctgagggtccact

SEQ ID NO: 1810183 - DNA, 15 bp, Homo sapiens
gctgagggtccactt

SEQ ID NO: 1810184 - DNA, 15 bp, Homo sapiens
ctgagggtccacttc

SEQ ID NO: 1810185 - DNA, 15 bp, Homo sapiens
tgagggtccacttct

SEQ ID NO: 1810186 - DNA, 15 bp, Homo sapiens
gagggtccacttctg

SEQ ID NO: 1810187 - DNA, 15 bp, Homo sapiens
agggtccacttctgg

SEQ ID NO: 1810188 - DNA, 15 bp, Homo sapiens
gggtccacttctggg

SEQ ID NO: 1810189 - DNA, 15 bp, Homo sapiens
ggtccacttctgggg

SEQ ID NO: 1810190 - DNA, 15 bp, Homo sapiens
gtccacttctggggg

SEQ ID NO: 1810191 - DNA, 15 bp, Homo sapiens
tccacttctgggggc

SEQ ID NO: 1810192 - DNA, 15 bp, Homo sapiens
ccacttctgggggcc

SEQ ID NO: 1810193 - DNA, 15 bp, Homo sapiens
cacttctgggggcct

SEQ ID NO: 1810194 - DNA, 15 bp, Homo sapiens
acttctgggggcctg

SEQ ID NO: 1810195 - DNA, 15 bp, Homo sapiens
cttctgggggcctgg

SEQ ID NO: 1810196 - DNA, 15 bp, Homo sapiens
ttctgggggcctgga

SEQ ID NO: 1810197 - DNA, 15 bp, Homo sapiens
tctgggggcctggag

SEQ ID NO: 1810198 - DNA, 15 bp, Homo sapiens
ctgggggcctggagg

SEQ ID NO: 1810199 - DNA, 15 bp, Homo sapiens
tgggggcctggaggg

SEQ ID NO: 1810200 - DNA, 15 bp, Homo sapiens
gggggcctggagggg

SEQ ID NO: 1810201 - DNA, 15 bp, Homo sapiens
ggggcctggaggggt

SEQ ID NO: 1810202 - DNA, 15 bp, Homo sapiens
gggcctggaggggtg

SEQ ID NO: 1810203 - DNA, 15 bp, Homo sapiens
ggcctggaggggtga

SEQ ID NO: 1810204 - DNA, 15 bp, Homo sapiens
gcctggaggggtgag

SEQ ID NO: 1810205 - DNA, 15 bp, Homo sapiens
ggaggggtgaggggt

SEQ ID NO: 1810206 - DNA, 15 bp, Homo sapiens
gaggggtgaggggtg

SEQ ID NO: 1810207 - DNA, 15 bp, Homo sapiens
aggggtgaggggtgg

SEQ ID NO: 1810208 - DNA, 15 bp, Homo sapiens
ggggtgaggggtggt

SEQ ID NO: 1810209 - DNA, 15 bp, Homo sapiens
gggtgaggggtggtc

SEQ ID NO: 1810210 - DNA, 15 bp, Homo sapiens
ggtgaggggtggtcg

SEQ ID NO: 1810211 - DNA, 15 bp, Homo sapiens
gtgaggggtggtcgc

SEQ ID NO: 1810212 - DNA, 15 bp, Homo sapiens
tgaggggtggtcgct

SEQ ID NO: 1810213 - DNA, 15 bp, Homo sapiens
gaggggtggtcgctg

SEQ ID NO: 1810214 - DNA, 15 bp, Homo sapiens
aggggtggtcgctgc

SEQ ID NO: 1810215 - DNA, 15 bp, Homo sapiens
ggggtggtcgctgca

SEQ ID NO: 1810216 - DNA, 15 bp, Homo sapiens
gggtggtcgctgcag

SEQ ID NO: 1810217 - DNA, 15 bp, Homo sapiens
ggtggtcgctgcagg

SEQ ID NO: 1810218 - DNA, 15 bp, Homo sapiens
gtggtcgctgcaggg

SEQ ID NO: 1810219 - DNA, 15 bp, Homo sapiens
tggtcgctgcagggg

SEQ ID NO: 1810220 - DNA, 15 bp, Homo sapiens
ggtcgctgcaggggg

SEQ ID NO: 1810221 - DNA, 15 bp, Homo sapiens
gtcgctgcagggggt

SEQ ID NO: 1810222 - DNA, 15 bp, Homo sapiens
tcgctgcagggggtg

SEQ ID NO: 1810223 - DNA, 15 bp, Homo sapiens
cgctgcagggggtgg

SEQ ID NO: 1810224 - DNA, 15 bp, Homo sapiens
gctgcagggggtggg

SEQ ID NO: 1810225 - DNA, 15 bp, Homo sapiens
ctgcagggggtgggg

SEQ ID NO: 1810226 - DNA, 15 bp, Homo sapiens
tgcagggggtggggg

SEQ ID NO: 1810227 - DNA, 15 bp, Homo sapiens
agggggtgggggaaa

SEQ ID NO: 1810228 - DNA, 15 bp, Homo sapiens
gggggtgggggaaag

SEQ ID NO: 1810229 - DNA, 15 bp, Homo sapiens
ggggtgggggaaagt

SEQ ID NO: 1810230 - DNA, 15 bp, Homo sapiens
gggtgggggaaagtg

SEQ ID NO: 1810231 - DNA, 15 bp, Homo sapiens
ggtgggggaaagtga

SEQ ID NO: 1810232 - DNA, 15 bp, Homo sapiens
gtgggggaaagtgac

SEQ ID NO: 1810233 - DNA, 15 bp, Homo sapiens
tgggggaaagtgact

SEQ ID NO: 1810234 - DNA, 15 bp, Homo sapiens
gggggaaagtgacta

SEQ ID NO: 1810235 - DNA, 15 bp, Homo sapiens
ggggaaagtgactag

SEQ ID NO: 1810236 - DNA, 15 bp, Homo sapiens
gggaaagtgactagc

SEQ ID NO: 1810237 - DNA, 15 bp, Homo sapiens
ggaaagtgactagcc

SEQ ID NO: 1810238 - DNA, 15 bp, Homo sapiens
gaaagtgactagccc

SEQ ID NO: 1810239 - DNA, 15 bp, Homo sapiens
aaagtgactagccct

SEQ ID NO: 1810240 - DNA, 15 bp, Homo sapiens
aagtgactagccctg

SEQ ID NO: 1810241 - DNA, 15 bp, Homo sapiens
agtgactagccctgc

SEQ ID NO: 1810242 - DNA, 15 bp, Homo sapiens
gtgactagccctgcc

SEQ ID NO: 1810243 - DNA, 15 bp, Homo sapiens
tgactagccctgccc

SEQ ID NO: 1810244 - DNA, 15 bp, Homo sapiens
gactagccctgccca

SEQ ID NO: 1810245 - DNA, 15 bp, Homo sapiens
actagccctgcccaa

SEQ ID NO: 1810246 - DNA, 15 bp, Homo sapiens
ctagccctgcccaac

SEQ ID NO: 1810247 - DNA, 15 bp, Homo sapiens
tagccctgcccaacc

SEQ ID NO: 1810248 - DNA, 15 bp, Homo sapiens
agccctgcccaaccc

SEQ ID NO: 1810249 - DNA, 15 bp, Homo sapiens
gccctgcccaacccc

SEQ ID NO: 1810250 - DNA, 15 bp, Homo sapiens
ccctgcccaacccct

SEQ ID NO: 1810251 - DNA, 15 bp, Homo sapiens
cctgcccaacccctg

SEQ ID NO: 1810252 - DNA, 15 bp, Homo sapiens
ctgcccaacccctgg

SEQ ID NO: 1810253 - DNA, 15 bp, Homo sapiens
tgcccaacccctggg

SEQ ID NO: 1810254 - DNA, 15 bp, Homo sapiens
gcccaacccctgggt

SEQ ID NO: 1810255 - DNA, 15 bp, Homo sapiens
cccaacccctgggtc

SEQ ID NO: 1810256 - DNA, 15 bp, Homo sapiens
ccaacccctgggtcc

SEQ ID NO: 1810257 - DNA, 15 bp, Homo sapiens
caacccctgggtcct

SEQ ID NO: 1810258 - DNA, 15 bp, Homo sapiens
aacccctgggtcctg

SEQ ID NO: 1810259 - DNA, 15 bp, Homo sapiens
acccctgggtcctgg

SEQ ID NO: 1810260 - DNA, 15 bp, Homo sapiens
cccctgggtcctggc

SEQ ID NO: 1810261 - DNA, 15 bp, Homo sapiens
ccctgggtcctggct

SEQ ID NO: 1810262 - DNA, 15 bp, Homo sapiens
cctgggtcctggctg

SEQ ID NO: 1810263 - DNA, 15 bp, Homo sapiens
ctgggtcctggctgg

SEQ ID NO: 1810264 - DNA, 15 bp, Homo sapiens
tgggtcctggctggg

SEQ ID NO: 1810265 - DNA, 15 bp, Homo sapiens
gggtcctggctgggg

SEQ ID NO: 1810266 - DNA, 15 bp, Homo sapiens
ggtcctggctggggt

SEQ ID NO: 1810267 - DNA, 15 bp, Homo sapiens
gtcctggctggggtg

SEQ ID NO: 1810268 - DNA, 15 bp, Homo sapiens
tcctggctggggtgg

SEQ ID NO: 1810269 - DNA, 15 bp, Homo sapiens
cctggctggggtggc

SEQ ID NO: 1810270 - DNA, 15 bp, Homo sapiens
ctggctggggtggcc

SEQ ID NO: 1810271 - DNA, 15 bp, Homo sapiens
tggctggggtggcca

SEQ ID NO: 1810272 - DNA, 15 bp, Homo sapiens
ggctggggtggccag

SEQ ID NO: 1810273 - DNA, 15 bp, Homo sapiens
gctggggtggccagg

SEQ ID NO: 1810274 - DNA, 15 bp, Homo sapiens
ctggggtggccagga

SEQ ID NO: 1810275 - DNA, 15 bp, Homo sapiens
tggggtggccaggaa

SEQ ID NO: 1810276 - DNA, 15 bp, Homo sapiens
ggggtggccaggaag

SEQ ID NO: 1810277 - DNA, 15 bp, Homo sapiens
gggtggccaggaagg

SEQ ID NO: 1810278 - DNA, 15 bp, Homo sapiens
ggtggccaggaaggg

SEQ ID NO: 1810279 - DNA, 15 bp, Homo sapiens
gtggccaggaagggg

SEQ ID NO: 1810280 - DNA, 15 bp, Homo sapiens
tggccaggaaggggt

SEQ ID NO: 1810281 - DNA, 15 bp, Homo sapiens
ggccaggaaggggta

SEQ ID NO: 1810282 - DNA, 15 bp, Homo sapiens
gccaggaaggggtag

SEQ ID NO: 1810283 - DNA, 15 bp, Homo sapiens
ccaggaaggggtagc

SEQ ID NO: 1810284 - DNA, 15 bp, Homo sapiens
caggaaggggtagcg

SEQ ID NO: 1810285 - DNA, 15 bp, Homo sapiens
aggaaggggtagcgg

SEQ ID NO: 1810286 - DNA, 15 bp, Homo sapiens
ggaaggggtagcggg

SEQ ID NO: 1810287 - DNA, 15 bp, Homo sapiens
gaaggggtagcgggg

SEQ ID NO: 1810288 - DNA, 15 bp, Homo sapiens
aaggggtagcggggc

SEQ ID NO: 1810289 - DNA, 15 bp, Homo sapiens
aggggtagcggggca

SEQ ID NO: 1810290 - DNA, 15 bp, Homo sapiens
ggggtagcggggcag

SEQ ID NO: 1810291 - DNA, 15 bp, Homo sapiens
gggtagcggggcagt

SEQ ID NO: 1810292 - DNA, 15 bp, Homo sapiens
ggtagcggggcagtg

SEQ ID NO: 1810293 - DNA, 15 bp, Homo sapiens
gtagcggggcagtgc

SEQ ID NO: 1810294 - DNA, 15 bp, Homo sapiens
tagcggggcagtgca

SEQ ID NO: 1810295 - DNA, 15 bp, Homo sapiens
agcggggcagtgcag

SEQ ID NO: 1810296 - DNA, 15 bp, Homo sapiens
gcggggcagtgcagt

SEQ ID NO: 1810297 - DNA, 15 bp, Homo sapiens
cggggcagtgcagtg

SEQ ID NO: 1810298 - DNA, 15 bp, Homo sapiens
ggggcagtgcagtgt

SEQ ID NO: 1810299 - DNA, 15 bp, Homo sapiens
gggcagtgcagtgtc

SEQ ID NO: 1810300 - DNA, 15 bp, Homo sapiens
ggcagtgcagtgtcg

SEQ ID NO: 1810301 - DNA, 15 bp, Homo sapiens
gcagtgcagtgtcgg

SEQ ID NO: 1810302 - DNA, 15 bp, Homo sapiens
cagtgcagtgtcggg

SEQ ID NO: 1810303 - DNA, 15 bp, Homo sapiens
agtgcagtgtcgggg

SEQ ID NO: 1810304 - DNA, 15 bp, Homo sapiens
gtgcagtgtcggggg

SEQ ID NO: 1810305 - DNA, 15 bp, Homo sapiens
tgcagtgtcggggga

SEQ ID NO: 1810306 - DNA, 15 bp, Homo sapiens
gcagtgtcgggggag

SEQ ID NO: 1810307 - DNA, 15 bp, Homo sapiens
cagtgtcgggggaga

SEQ ID NO: 1810308 - DNA, 15 bp, Homo sapiens
agtgtcgggggagag

SEQ ID NO: 1810309 - DNA, 15 bp, Homo sapiens
gtgtcgggggagagc

SEQ ID NO: 1810310 - DNA, 15 bp, Homo sapiens
tgtcgggggagagcg

SEQ ID NO: 1810311 - DNA, 15 bp, Homo sapiens
gtcgggggagagcgg

SEQ ID NO: 1810312 - DNA, 15 bp, Homo sapiens
tcgggggagagcggc

SEQ ID NO: 1810313 - DNA, 15 bp, Homo sapiens
cgggggagagcggct

SEQ ID NO: 1810314 - DNA, 15 bp, Homo sapiens
gggggagagcggctt

SEQ ID NO: 1810315 - DNA, 15 bp, Homo sapiens
ggggagagcggcttg

SEQ ID NO: 1810316 - DNA, 15 bp, Homo sapiens
gggagagcggcttgc

SEQ ID NO: 1810317 - DNA, 15 bp, Homo sapiens
ggagagcggcttgct

SEQ ID NO: 1810318 - DNA, 15 bp, Homo sapiens
gagagcggcttgctg

SEQ ID NO: 1810319 - DNA, 15 bp, Homo sapiens
agagcggcttgctgc

SEQ ID NO: 1810320 - DNA, 15 bp, Homo sapiens
gagcggcttgctgcc

SEQ ID NO: 1810321 - DNA, 15 bp, Homo sapiens
agcggcttgctgcct

SEQ ID NO: 1810322 - DNA, 15 bp, Homo sapiens
gcggcttgctgcctc

SEQ ID NO: 1810323 - DNA, 15 bp, Homo sapiens
cggcttgctgcctcg

SEQ ID NO: 1810324 - DNA, 15 bp, Homo sapiens
ggcttgctgcctcgt

SEQ ID NO: 1810325 - DNA, 15 bp, Homo sapiens
gcttgctgcctcgtt

SEQ ID NO: 1810326 - DNA, 15 bp, Homo sapiens
cttgctgcctcgttc

SEQ ID NO: 1810327 - DNA, 15 bp, Homo sapiens
ttgctgcctcgttct

SEQ ID NO: 1810328 - DNA, 15 bp, Homo sapiens
tgctgcctcgttctt

SEQ ID NO: 1810329 - DNA, 15 bp, Homo sapiens
gctgcctcgttcttt

SEQ ID NO: 1810330 - DNA, 15 bp, Homo sapiens
ctgcctcgttctttt

SEQ ID NO: 1810331 - DNA, 15 bp, Homo sapiens
tgcctcgttcttttc

SEQ ID NO: 1810332 - DNA, 15 bp, Homo sapiens
gcctcgttcttttct

SEQ ID NO: 1810333 - DNA, 15 bp, Homo sapiens
cctcgttcttttctt

SEQ ID NO: 1810334 - DNA, 15 bp, Homo sapiens
ctcgttcttttcttg

SEQ ID NO: 1810335 - DNA, 15 bp, Homo sapiens
tcgttcttttcttgc

SEQ ID NO: 1810336 - DNA, 15 bp, Homo sapiens
cgttcttttcttgca

SEQ ID NO: 1810337 - DNA, 15 bp, Homo sapiens
gttcttttcttgcag

SEQ ID NO: 1810338 - DNA, 15 bp, Homo sapiens
ttcttttcttgcagg

SEQ ID NO: 1810339 - DNA, 15 bp, Homo sapiens
tcttttcttgcaggc

SEQ ID NO: 1810340 - DNA, 15 bp, Homo sapiens
cttttcttgcaggcc

SEQ ID NO: 1810341 - DNA, 15 bp, Homo sapiens
ttttcttgcaggccc

SEQ ID NO: 1810342 - DNA, 15 bp, Homo sapiens
tttcttgcaggcccc

SEQ ID NO: 1810343 - DNA, 15 bp, Homo sapiens
ttcttgcaggcccca

SEQ ID NO: 1810344 - DNA, 15 bp, Homo sapiens
tcttgcaggccccag

SEQ ID NO: 1810345 - DNA, 15 bp, Homo sapiens
cttgcaggccccagg

SEQ ID NO: 1810346 - DNA, 15 bp, Homo sapiens
ttgcaggccccagga

SEQ ID NO: 1810347 - DNA, 15 bp, Homo sapiens
tgcaggccccaggat

SEQ ID NO: 1810348 - DNA, 15 bp, Homo sapiens
gcaggccccaggatg

SEQ ID NO: 1810349 - DNA, 15 bp, Homo sapiens
caggccccaggatgc

SEQ ID NO: 1810350 - DNA, 15 bp, Homo sapiens
aggccccaggatgca

SEQ ID NO: 1810351 - DNA, 15 bp, Homo sapiens
ggccccaggatgcag

SEQ ID NO: 1810352 - DNA, 15 bp, Homo sapiens
gccccaggatgcagg

SEQ ID NO: 1810353 - DNA, 15 bp, Homo sapiens
ccccaggatgcaggc

SEQ ID NO: 1810354 - DNA, 15 bp, Homo sapiens
cccaggatgcaggcc

SEQ ID NO: 1810355 - DNA, 15 bp, Homo sapiens
ccaggatgcaggccc

SEQ ID NO: 1810356 - DNA, 15 bp, Homo sapiens
caggatgcaggccct

SEQ ID NO: 1810357 - DNA, 15 bp, Homo sapiens
aggatgcaggccctg

SEQ ID NO: 1810358 - DNA, 15 bp, Homo sapiens
ggatgcaggccctgg

SEQ ID NO: 1810359 - DNA, 15 bp, Homo sapiens
gatgcaggccctggt

SEQ ID NO: 1810360 - DNA, 15 bp, Homo sapiens
atgcaggccctggtg

SEQ ID NO: 1810361 - DNA, 15 bp, Homo sapiens
gcaggccctggtgct

SEQ ID NO: 1810362 - DNA, 15 bp, Homo sapiens
caggccctggtgcta

SEQ ID NO: 1810363 - DNA, 15 bp, Homo sapiens
aggccctggtgctac

SEQ ID NO: 1810364 - DNA, 15 bp, Homo sapiens
ggccctggtgctact

SEQ ID NO: 1810365 - DNA, 15 bp, Homo sapiens
gccctggtgctactc

SEQ ID NO: 1810366 - DNA, 15 bp, Homo sapiens
ccctggtgctactcc

SEQ ID NO: 1810367 - DNA, 15 bp, Homo sapiens
cctggtgctactcct

SEQ ID NO: 1810368 - DNA, 15 bp, Homo sapiens
ctggtgctactcctc

SEQ ID NO: 1810369 - DNA, 15 bp, Homo sapiens
tggtgctactcctct

SEQ ID NO: 1810370 - DNA, 15 bp, Homo sapiens
ggtgctactcctctg

SEQ ID NO: 1810371 - DNA, 15 bp, Homo sapiens
gtgctactcctctgc

SEQ ID NO: 1810372 - DNA, 15 bp, Homo sapiens
tgctactcctctgca

SEQ ID NO: 1810373 - DNA, 15 bp, Homo sapiens
gctactcctctgcat

SEQ ID NO: 1810374 - DNA, 15 bp, Homo sapiens
ctactcctctgcatt

SEQ ID NO: 1810375 - DNA, 15 bp, Homo sapiens
tactcctctgcattg

SEQ ID NO: 1810376 - DNA, 15 bp, Homo sapiens
actcctctgcattgg

SEQ ID NO: 1810377 - DNA, 15 bp, Homo sapiens
ctcctctgcattgga

SEQ ID NO: 1810378 - DNA, 15 bp, Homo sapiens
tcctctgcattggag

SEQ ID NO: 1810379 - DNA, 15 bp, Homo sapiens
cctctgcattggagc

SEQ ID NO: 1810380 - DNA, 15 bp, Homo sapiens
ctctgcattggagcc

SEQ ID NO: 1810381 - DNA, 15 bp, Homo sapiens
tctgcattggagccc

SEQ ID NO: 1810382 - DNA, 15 bp, Homo sapiens
ctgcattggagccct

SEQ ID NO: 1810383 - DNA, 15 bp, Homo sapiens
tgcattggagccctc

SEQ ID NO: 1810384 - DNA, 15 bp, Homo sapiens
gcattggagccctcc

SEQ ID NO: 1810385 - DNA, 15 bp, Homo sapiens
cattggagccctcct

SEQ ID NO: 1810386 - DNA, 15 bp, Homo sapiens
attggagccctcctc

SEQ ID NO: 1810387 - DNA, 15 bp, Homo sapiens
ttggagccctcctcg

SEQ ID NO: 1810388 - DNA, 15 bp, Homo sapiens
tggagccctcctcgg

SEQ ID NO: 1810389 - DNA, 15 bp, Homo sapiens
ggagccctcctcggg

SEQ ID NO: 1810390 - DNA, 15 bp, Homo sapiens
gagccctcctcgggc

SEQ ID NO: 1810391 - DNA, 15 bp, Homo sapiens
agccctcctcgggca

SEQ ID NO: 1810392 - DNA, 15 bp, Homo sapiens
gccctcctcgggcac

SEQ ID NO: 1810393 - DNA, 15 bp, Homo sapiens
ccctcctcgggcaca

SEQ ID NO: 1810394 - DNA, 15 bp, Homo sapiens
cctcctcgggcacag

SEQ ID NO: 1810395 - DNA, 15 bp, Homo sapiens
ctcctcgggcacagc

SEQ ID NO: 1810396 - DNA, 15 bp, Homo sapiens
tcctcgggcacagca

SEQ ID NO: 1810397 - DNA, 15 bp, Homo sapiens
cctcgggcacagcag

SEQ ID NO: 1810398 - DNA, 15 bp, Homo sapiens
ctcgggcacagcagc

SEQ ID NO: 1810399 - DNA, 15 bp, Homo sapiens
tcgggcacagcagct

SEQ ID NO: 1810400 - DNA, 15 bp, Homo sapiens
cgggcacagcagctg

SEQ ID NO: 1810401 - DNA, 15 bp, Homo sapiens
gggcacagcagctgc

SEQ ID NO: 1810402 - DNA, 15 bp, Homo sapiens
ggcacagcagctgcc

SEQ ID NO: 1810403 - DNA, 15 bp, Homo sapiens
gcacagcagctgcca

SEQ ID NO: 1810404 - DNA, 15 bp, Homo sapiens
cacagcagctgccag

SEQ ID NO: 1810405 - DNA, 15 bp, Homo sapiens
acagcagctgccaga

SEQ ID NO: 1810406 - DNA, 15 bp, Homo sapiens
cagcagctgccagaa

SEQ ID NO: 1810407 - DNA, 15 bp, Homo sapiens
agcagctgccagaac

SEQ ID NO: 1810408 - DNA, 15 bp, Homo sapiens
gcagctgccagaacc

SEQ ID NO: 1810409 - DNA, 15 bp, Homo sapiens
cagctgccagaaccc

SEQ ID NO: 1810410 - DNA, 15 bp, Homo sapiens
agctgccagaaccct

SEQ ID NO: 1810411 - DNA, 15 bp, Homo sapiens
gctgccagaaccctg

SEQ ID NO: 1810412 - DNA, 15 bp, Homo sapiens
ctgccagaaccctgc

SEQ ID NO: 1810413 - DNA, 15 bp, Homo sapiens
tgccagaaccctgcc

SEQ ID NO: 1810414 - DNA, 15 bp, Homo sapiens
gccagaaccctgcca

SEQ ID NO: 1810415 - DNA, 15 bp, Homo sapiens
ccagaaccctgccag

SEQ ID NO: 1810416 - DNA, 15 bp, Homo sapiens
cagaaccctgccagc

SEQ ID NO: 1810417 - DNA, 15 bp, Homo sapiens
agaaccctgccagcc

SEQ ID NO: 1810418 - DNA, 15 bp, Homo sapiens
gaaccctgccagccc

SEQ ID NO: 1810419 - DNA, 15 bp, Homo sapiens
aaccctgccagcccc

SEQ ID NO: 1810420 - DNA, 15 bp, Homo sapiens
accctgccagccccc

SEQ ID NO: 1810421 - DNA, 15 bp, Homo sapiens
ccctgccagcccccc

SEQ ID NO: 1810422 - DNA, 15 bp, Homo sapiens
cctgccagccccccg

SEQ ID NO: 1810423 - DNA, 15 bp, Homo sapiens
ctgccagccccccgg

SEQ ID NO: 1810424 - DNA, 15 bp, Homo sapiens
tgccagccccccgga

SEQ ID NO: 1810425 - DNA, 15 bp, Homo sapiens
gccagccccccggag

SEQ ID NO: 1810426 - DNA, 15 bp, Homo sapiens
ccagccccccggagg

SEQ ID NO: 1810427 - DNA, 15 bp, Homo sapiens
cagccccccggagga

SEQ ID NO: 1810428 - DNA, 15 bp, Homo sapiens
agccccccggaggag

SEQ ID NO: 1810429 - DNA, 15 bp, Homo sapiens
gccccccggaggagg

SEQ ID NO: 1810430 - DNA, 15 bp, Homo sapiens
ccccccggaggaggt

SEQ ID NO: 1810431 - DNA, 15 bp, Homo sapiens
cccccggaggaggtc

SEQ ID NO: 1810432 - DNA, 15 bp, Homo sapiens
ccccggaggaggtca

SEQ ID NO: 1810433 - DNA, 15 bp, Homo sapiens
cccggaggaggtcag

SEQ ID NO: 1810434 - DNA, 15 bp, Homo sapiens
ccggaggaggtcagt

SEQ ID NO: 1810435 - DNA, 15 bp, Homo sapiens
cggaggaggtcagta

SEQ ID NO: 1810436 - DNA, 15 bp, Homo sapiens
ggaggaggtcagtag

SEQ ID NO: 1810437 - DNA, 15 bp, Homo sapiens
gaggaggtcagtagg

SEQ ID NO: 1810438 - DNA, 15 bp, Homo sapiens
aggaggtcagtaggc

SEQ ID NO: 1810439 - DNA, 15 bp, Homo sapiens
ggaggtcagtaggca

SEQ ID NO: 1810440 - DNA, 15 bp, Homo sapiens
gaggtcagtaggcag

SEQ ID NO: 1810441 - DNA, 15 bp, Homo sapiens
aggtcagtaggcagg

SEQ ID NO: 1810442 - DNA, 15 bp, Homo sapiens
ggtcagtaggcaggc

SEQ ID NO: 1810443 - DNA, 15 bp, Homo sapiens
gtcagtaggcaggcg

SEQ ID NO: 1810444 - DNA, 15 bp, Homo sapiens
tcagtaggcaggcgg

SEQ ID NO: 1810445 - DNA, 15 bp, Homo sapiens
cagtaggcaggcggg

SEQ ID NO: 1810446 - DNA, 15 bp, Homo sapiens
agtaggcaggcgggg

SEQ ID NO: 1810447 - DNA, 15 bp, Homo sapiens
gtaggcaggcgggga

SEQ ID NO: 1810448 - DNA, 15 bp, Homo sapiens
taggcaggcggggag

SEQ ID NO: 1810449 - DNA, 15 bp, Homo sapiens
aggcaggcggggagg

SEQ ID NO: 1810450 - DNA, 15 bp, Homo sapiens
ggcaggcggggaggg

SEQ ID NO: 1810451 - DNA, 15 bp, Homo sapiens
gcaggcggggagggc

SEQ ID NO: 1810452 - DNA, 15 bp, Homo sapiens
caggcggggagggcg

SEQ ID NO: 1810453 - DNA, 15 bp, Homo sapiens
aggcggggagggcgt

SEQ ID NO: 1810454 - DNA, 15 bp, Homo sapiens
ggcggggagggcgtg

SEQ ID NO: 1810455 - DNA, 15 bp, Homo sapiens
gcggggagggcgtgg

SEQ ID NO: 1810456 - DNA, 15 bp, Homo sapiens
cggggagggcgtggt

SEQ ID NO: 1810457 - DNA, 15 bp, Homo sapiens
ggggagggcgtggtc

SEQ ID NO: 1810458 - DNA, 15 bp, Homo sapiens
gggagggcgtggtca

SEQ ID NO: 1810459 - DNA, 15 bp, Homo sapiens
ggagggcgtggtcag

SEQ ID NO: 1810460 - DNA, 15 bp, Homo sapiens
gagggcgtggtcagc

SEQ ID NO: 1810461 - DNA, 15 bp, Homo sapiens
agggcgtggtcagca

SEQ ID NO: 1810462 - DNA, 15 bp, Homo sapiens
gggcgtggtcagcat

SEQ ID NO: 1810463 - DNA, 15 bp, Homo sapiens
ggcgtggtcagcatt

SEQ ID NO: 1810464 - DNA, 15 bp, Homo sapiens
gcgtggtcagcattc

SEQ ID NO: 1810465 - DNA, 15 bp, Homo sapiens
cgtggtcagcattcc

SEQ ID NO: 1810466 - DNA, 15 bp, Homo sapiens
gtggtcagcattccc

SEQ ID NO: 1810467 - DNA, 15 bp, Homo sapiens
tggtcagcattcccc

SEQ ID NO: 1810468 - DNA, 15 bp, Homo sapiens
ggtcagcattccccg

SEQ ID NO: 1810469 - DNA, 15 bp, Homo sapiens
gtcagcattccccgc

SEQ ID NO: 1810470 - DNA, 15 bp, Homo sapiens
tcagcattccccgcc

SEQ ID NO: 1810471 - DNA, 15 bp, Homo sapiens
cagcattccccgccc

SEQ ID NO: 1810472 - DNA, 15 bp, Homo sapiens
agcattccccgcccc

SEQ ID NO: 1810473 - DNA, 15 bp, Homo sapiens
gcattccccgcccct

SEQ ID NO: 1810474 - DNA, 15 bp, Homo sapiens
cattccccgcccctc

SEQ ID NO: 1810475 - DNA, 15 bp, Homo sapiens
attccccgcccctcc

SEQ ID NO: 1810476 - DNA, 15 bp, Homo sapiens
ttccccgcccctcct

SEQ ID NO: 1810477 - DNA, 15 bp, Homo sapiens
tccccgcccctcctt

SEQ ID NO: 1810478 - DNA, 15 bp, Homo sapiens
ccccgcccctccttg

SEQ ID NO: 1810479 - DNA, 15 bp, Homo sapiens
cccgcccctccttgg

SEQ ID NO: 1810480 - DNA, 15 bp, Homo sapiens
ccgcccctccttggc

SEQ ID NO: 1810481 - DNA, 15 bp, Homo sapiens
cgcccctccttggca

SEQ ID NO: 1810482 - DNA, 15 bp, Homo sapiens
gcccctccttggcag

SEQ ID NO: 1810483 - DNA, 15 bp, Homo sapiens
cccctccttggcagg

SEQ ID NO: 1810484 - DNA, 15 bp, Homo sapiens
ccctccttggcaggc

SEQ ID NO: 1810485 - DNA, 15 bp, Homo sapiens
cctccttggcaggca

SEQ ID NO: 1810486 - DNA, 15 bp, Homo sapiens
ctccttggcaggcag

SEQ ID NO: 1810487 - DNA, 15 bp, Homo sapiens
tccttggcaggcagc

SEQ ID NO: 1810488 - DNA, 15 bp, Homo sapiens
ccttggcaggcagca

SEQ ID NO: 1810489 - DNA, 15 bp, Homo sapiens
cttggcaggcagcac

SEQ ID NO: 1810490 - DNA, 15 bp, Homo sapiens
ttggcaggcagcacg

SEQ ID NO: 1810491 - DNA, 15 bp, Homo sapiens
tggcaggcagcacgg

SEQ ID NO: 1810492 - DNA, 15 bp, Homo sapiens
ggcaggcagcacggg

SEQ ID NO: 1810493 - DNA, 15 bp, Homo sapiens
gcaggcagcacggga

SEQ ID NO: 1810494 - DNA, 15 bp, Homo sapiens
caggcagcacgggaa

SEQ ID NO: 1810495 - DNA, 15 bp, Homo sapiens
aggcagcacgggaaa

SEQ ID NO: 1810496 - DNA, 15 bp, Homo sapiens
ggcagcacgggaaac

SEQ ID NO: 1810497 - DNA, 15 bp, Homo sapiens
gcagcacgggaaaca

SEQ ID NO: 1810498 - DNA, 15 bp, Homo sapiens
cagcacgggaaacag

SEQ ID NO: 1810499 - DNA, 15 bp, Homo sapiens
agcacgggaaacagg

SEQ ID NO: 1810500 - DNA, 15 bp, Homo sapiens
gcacgggaaacagga

SEQ ID NO: 1810501 - DNA, 15 bp, Homo sapiens
cacgggaaacaggac

SEQ ID NO: 1810502 - DNA, 15 bp, Homo sapiens
acgggaaacaggaca

SEQ ID NO: 1810503 - DNA, 15 bp, Homo sapiens
cgggaaacaggacag

SEQ ID NO: 1810504 - DNA, 15 bp, Homo sapiens
gggaaacaggacagg

SEQ ID NO: 1810505 - DNA, 15 bp, Homo sapiens
ggaaacaggacaggg

SEQ ID NO: 1810506 - DNA, 15 bp, Homo sapiens
gaaacaggacaggga

SEQ ID NO: 1810507 - DNA, 15 bp, Homo sapiens
aaacaggacagggaa

SEQ ID NO: 1810508 - DNA, 15 bp, Homo sapiens
aacaggacagggaac

SEQ ID NO: 1810509 - DNA, 15 bp, Homo sapiens
acaggacagggaacc

SEQ ID NO: 1810510 - DNA, 15 bp, Homo sapiens
caggacagggaaccc

SEQ ID NO: 1810511 - DNA, 15 bp, Homo sapiens
aggacagggaacccg

SEQ ID NO: 1810512 - DNA, 15 bp, Homo sapiens
ggacagggaacccgg

SEQ ID NO: 1810513 - DNA, 15 bp, Homo sapiens
gacagggaacccgga

SEQ ID NO: 1810514 - DNA, 15 bp, Homo sapiens
acagggaacccggac

SEQ ID NO: 1810515 - DNA, 15 bp, Homo sapiens
cagggaacccggacc

SEQ ID NO: 1810516 - DNA, 15 bp, Homo sapiens
agggaacccggaccc

SEQ ID NO: 1810517 - DNA, 15 bp, Homo sapiens
gggaacccggaccca

SEQ ID NO: 1810518 - DNA, 15 bp, Homo sapiens
ggaacccggacccag

SEQ ID NO: 1810519 - DNA, 15 bp, Homo sapiens
gaacccggacccagg

SEQ ID NO: 1810520 - DNA, 15 bp, Homo sapiens
aacccggacccaggt

SEQ ID NO: 1810521 - DNA, 15 bp, Homo sapiens
acccggacccaggtt

SEQ ID NO: 1810522 - DNA, 15 bp, Homo sapiens
cccggacccaggttc

SEQ ID NO: 1810523 - DNA, 15 bp, Homo sapiens
ccggacccaggttcc

SEQ ID NO: 1810524 - DNA, 15 bp, Homo sapiens
cggacccaggttcca

SEQ ID NO: 1810525 - DNA, 15 bp, Homo sapiens
ggacccaggttccag

SEQ ID NO: 1810526 - DNA, 15 bp, Homo sapiens
gacccaggttccagg

SEQ ID NO: 1810527 - DNA, 15 bp, Homo sapiens
acccaggttccaggc

SEQ ID NO: 1810528 - DNA, 15 bp, Homo sapiens
cccaggttccaggcc

SEQ ID NO: 1810529 - DNA, 15 bp, Homo sapiens
ccaggttccaggcca

SEQ ID NO: 1810530 - DNA, 15 bp, Homo sapiens
caggttccaggccag

SEQ ID NO: 1810531 - DNA, 15 bp, Homo sapiens
aggttccaggccagg

SEQ ID NO: 1810532 - DNA, 15 bp, Homo sapiens
ggttccaggccaggc

SEQ ID NO: 1810533 - DNA, 15 bp, Homo sapiens
gttccaggccaggct

SEQ ID NO: 1810534 - DNA, 15 bp, Homo sapiens
ttccaggccaggctt

SEQ ID NO: 1810535 - DNA, 15 bp, Homo sapiens
tccaggccaggcttg

SEQ ID NO: 1810536 - DNA, 15 bp, Homo sapiens
ccaggccaggcttgg

SEQ ID NO: 1810537 - DNA, 15 bp, Homo sapiens
caggccaggcttggg

SEQ ID NO: 1810538 - DNA, 15 bp, Homo sapiens
aggccaggcttgggc

SEQ ID NO: 1810539 - DNA, 15 bp, Homo sapiens
ggccaggcttgggcc

SEQ ID NO: 1810540 - DNA, 15 bp, Homo sapiens
gccaggcttgggcct

SEQ ID NO: 1810541 - DNA, 15 bp, Homo sapiens
ccaggcttgggcctt

SEQ ID NO: 1810542 - DNA, 15 bp, Homo sapiens
caggcttgggccttt

SEQ ID NO: 1810543 - DNA, 15 bp, Homo sapiens
aggcttgggccttta

SEQ ID NO: 1810544 - DNA, 15 bp, Homo sapiens
ggcttgggcctttat

SEQ ID NO: 1810545 - DNA, 15 bp, Homo sapiens
gcttgggcctttatt

SEQ ID NO: 1810546 - DNA, 15 bp, Homo sapiens
cttgggcctttattt

SEQ ID NO: 1810547 - DNA, 15 bp, Homo sapiens
ttgggcctttatttc

SEQ ID NO: 1810548 - DNA, 15 bp, Homo sapiens
tgggcctttatttct

SEQ ID NO: 1810549 - DNA, 15 bp, Homo sapiens
gggcctttatttctc

SEQ ID NO: 1810550 - DNA, 15 bp, Homo sapiens
ggcctttatttctct

SEQ ID NO: 1810551 - DNA, 15 bp, Homo sapiens
gcctttatttctcta

SEQ ID NO: 1810552 - DNA, 15 bp, Homo sapiens
cctttatttctctag

SEQ ID NO: 1810553 - DNA, 15 bp, Homo sapiens
ctttatttctctagg

SEQ ID NO: 1810554 - DNA, 15 bp, Homo sapiens
tttatttctctaggg

SEQ ID NO: 1810555 - DNA, 15 bp, Homo sapiens
ttatttctctagggc

SEQ ID NO: 1810556 - DNA, 15 bp, Homo sapiens
tatttctctagggct

SEQ ID NO: 1810557 - DNA, 15 bp, Homo sapiens
atttctctagggctg

SEQ ID NO: 1810558 - DNA, 15 bp, Homo sapiens
tttctctagggctgg

SEQ ID NO: 1810559 - DNA, 15 bp, Homo sapiens
ttctctagggctgga

SEQ ID NO: 1810560 - DNA, 15 bp, Homo sapiens
tctctagggctggag

SEQ ID NO: 1810561 - DNA, 15 bp, Homo sapiens
ctctagggctggagt

SEQ ID NO: 1810562 - DNA, 15 bp, Homo sapiens
tctagggctggagtt

SEQ ID NO: 1810563 - DNA, 15 bp, Homo sapiens
ctagggctggagttt

SEQ ID NO: 1810564 - DNA, 15 bp, Homo sapiens
tagggctggagtttc

SEQ ID NO: 1810565 - DNA, 15 bp, Homo sapiens
agggctggagtttct

SEQ ID NO: 1810566 - DNA, 15 bp, Homo sapiens
gggctggagtttctc

SEQ ID NO: 1810567 - DNA, 15 bp, Homo sapiens
ggctggagtttctcc

SEQ ID NO: 1810568 - DNA, 15 bp, Homo sapiens
gctggagtttctcca

SEQ ID NO: 1810569 - DNA, 15 bp, Homo sapiens
ctggagtttctccag

SEQ ID NO: 1810570 - DNA, 15 bp, Homo sapiens
tggagtttctccagc

SEQ ID NO: 1810571 - DNA, 15 bp, Homo sapiens
ggagtttctccagca

SEQ ID NO: 1810572 - DNA, 15 bp, Homo sapiens
gagtttctccagcag

SEQ ID NO: 1810573 - DNA, 15 bp, Homo sapiens
agtttctccagcagc

SEQ ID NO: 1810574 - DNA, 15 bp, Homo sapiens
gtttctccagcagca

SEQ ID NO: 1810575 - DNA, 15 bp, Homo sapiens
tttctccagcagcaa

SEQ ID NO: 1810576 - DNA, 15 bp, Homo sapiens
ttctccagcagcaaa

SEQ ID NO: 1810577 - DNA, 15 bp, Homo sapiens
tctccagcagcaaaa

SEQ ID NO: 1810578 - DNA, 15 bp, Homo sapiens
ctccagcagcaaaac

SEQ ID NO: 1810579 - DNA, 15 bp, Homo sapiens
tccagcagcaaaaca

SEQ ID NO: 1810580 - DNA, 15 bp, Homo sapiens
ccagcagcaaaacag

SEQ ID NO: 1810581 - DNA, 15 bp, Homo sapiens
cagcagcaaaacaga

SEQ ID NO: 1810582 - DNA, 15 bp, Homo sapiens
agcagcaaaacagag

SEQ ID NO: 1810583 - DNA, 15 bp, Homo sapiens
gcagcaaaacagaga

SEQ ID NO: 1810584 - DNA, 15 bp, Homo sapiens
cagcaaaacagagag

SEQ ID NO: 1810585 - DNA, 15 bp, Homo sapiens
agcaaaacagagaga

SEQ ID NO: 1810586 - DNA, 15 bp, Homo sapiens
gcaaaacagagagaa

SEQ ID NO: 1810587 - DNA, 15 bp, Homo sapiens
caaaacagagagaaa

SEQ ID NO: 1810588 - DNA, 15 bp, Homo sapiens
aaaacagagagaaaa

SEQ ID NO: 1810589 - DNA, 15 bp, Homo sapiens
aaacagagagaaaat

SEQ ID NO: 1810590 - DNA, 15 bp, Homo sapiens
aacagagagaaaatg

SEQ ID NO: 1810591 - DNA, 15 bp, Homo sapiens
acagagagaaaatgt

SEQ ID NO: 1810592 - DNA, 15 bp, Homo sapiens
cagagagaaaatgtc

SEQ ID NO: 1810593 - DNA, 15 bp, Homo sapiens
agagagaaaatgtct

SEQ ID NO: 1810594 - DNA, 15 bp, Homo sapiens
gagagaaaatgtctt

SEQ ID NO: 1810595 - DNA, 15 bp, Homo sapiens
agagaaaatgtcttg

SEQ ID NO: 1810596 - DNA, 15 bp, Homo sapiens
gagaaaatgtcttgc

SEQ ID NO: 1810597 - DNA, 15 bp, Homo sapiens
agaaaatgtcttgcc

SEQ ID NO: 1810598 - DNA, 15 bp, Homo sapiens
gaaaatgtcttgcct

SEQ ID NO: 1810599 - DNA, 15 bp, Homo sapiens
aaaatgtcttgcctt

SEQ ID NO: 1810600 - DNA, 15 bp, Homo sapiens
aaatgtcttgccttg

SEQ ID NO: 1810601 - DNA, 15 bp, Homo sapiens
aatgtcttgccttgc

SEQ ID NO: 1810602 - DNA, 15 bp, Homo sapiens
atgtcttgccttgcc

SEQ ID NO: 1810603 - DNA, 15 bp, Homo sapiens
tgtcttgccttgcct

SEQ ID NO: 1810604 - DNA, 15 bp, Homo sapiens
gtcttgccttgcctt

SEQ ID NO: 1810605 - DNA, 15 bp, Homo sapiens
tcttgccttgccttt

SEQ ID NO: 1810606 - DNA, 15 bp, Homo sapiens
cttgccttgcctttc

SEQ ID NO: 1810607 - DNA, 15 bp, Homo sapiens
ttgccttgcctttca

SEQ ID NO: 1810608 - DNA, 15 bp, Homo sapiens
tgccttgcctttcag

SEQ ID NO: 1810609 - DNA, 15 bp, Homo sapiens
gccttgcctttcagg

SEQ ID NO: 1810610 - DNA, 15 bp, Homo sapiens
ccttgcctttcaggg

SEQ ID NO: 1810611 - DNA, 15 bp, Homo sapiens
cttgcctttcagggg

SEQ ID NO: 1810612 - DNA, 15 bp, Homo sapiens
ttgcctttcagggga

SEQ ID NO: 1810613 - DNA, 15 bp, Homo sapiens
tgcctttcaggggat

SEQ ID NO: 1810614 - DNA, 15 bp, Homo sapiens
gcctttcaggggatg

SEQ ID NO: 1810615 - DNA, 15 bp, Homo sapiens
cctttcaggggatgg

SEQ ID NO: 1810616 - DNA, 15 bp, Homo sapiens
ctttcaggggatgga

SEQ ID NO: 1810617 - DNA, 15 bp, Homo sapiens
tttcaggggatggag

SEQ ID NO: 1810618 - DNA, 15 bp, Homo sapiens
ttcaggggatggagt

SEQ ID NO: 1810619 - DNA, 15 bp, Homo sapiens
tcaggggatggagta

SEQ ID NO: 1810620 - DNA, 15 bp, Homo sapiens
caggggatggagtag

SEQ ID NO: 1810621 - DNA, 15 bp, Homo sapiens
aggggatggagtagg

SEQ ID NO: 1810622 - DNA, 15 bp, Homo sapiens
ggggatggagtaggg

SEQ ID NO: 1810623 - DNA, 15 bp, Homo sapiens
gggatggagtaggga

SEQ ID NO: 1810624 - DNA, 15 bp, Homo sapiens
ggatggagtagggac

SEQ ID NO: 1810625 - DNA, 15 bp, Homo sapiens
gatggagtagggaca

SEQ ID NO: 1810626 - DNA, 15 bp, Homo sapiens
atggagtagggacat

SEQ ID NO: 1810627 - DNA, 15 bp, Homo sapiens
tggagtagggacatg

SEQ ID NO: 1810628 - DNA, 15 bp, Homo sapiens
ggagtagggacatga

SEQ ID NO: 1810629 - DNA, 15 bp, Homo sapiens
gagtagggacatgaa

SEQ ID NO: 1810630 - DNA, 15 bp, Homo sapiens
agtagggacatgaat

SEQ ID NO: 1810631 - DNA, 15 bp, Homo sapiens
gtagggacatgaata

SEQ ID NO: 1810632 - DNA, 15 bp, Homo sapiens
tagggacatgaataa

SEQ ID NO: 1810633 - DNA, 15 bp, Homo sapiens
agggacatgaataag

SEQ ID NO: 1810634 - DNA, 15 bp, Homo sapiens
gggacatgaataaga

SEQ ID NO: 1810635 - DNA, 15 bp, Homo sapiens
ggacatgaataagat

SEQ ID NO: 1810636 - DNA, 15 bp, Homo sapiens
gacatgaataagatc

SEQ ID NO: 1810637 - DNA, 15 bp, Homo sapiens
acatgaataagatcc

SEQ ID NO: 1810638 - DNA, 15 bp, Homo sapiens
catgaataagatccc

SEQ ID NO: 1810639 - DNA, 15 bp, Homo sapiens
atgaataagatccca

SEQ ID NO: 1810640 - DNA, 15 bp, Homo sapiens
tgaataagatcccaa

SEQ ID NO: 1810641 - DNA, 15 bp, Homo sapiens
gaataagatcccaaa

SEQ ID NO: 1810642 - DNA, 15 bp, Homo sapiens
aataagatcccaaaa

SEQ ID NO: 1810643 - DNA, 15 bp, Homo sapiens
ataagatcccaaaag

SEQ ID NO: 1810644 - DNA, 15 bp, Homo sapiens
taagatcccaaaaga

SEQ ID NO: 1810645 - DNA, 15 bp, Homo sapiens
aagatcccaaaagag

SEQ ID NO: 1810646 - DNA, 15 bp, Homo sapiens
agatcccaaaagagt

SEQ ID NO: 1810647 - DNA, 15 bp, Homo sapiens
gatcccaaaagagta

SEQ ID NO: 1810648 - DNA, 15 bp, Homo sapiens
atcccaaaagagtaa

SEQ ID NO: 1810649 - DNA, 15 bp, Homo sapiens
tcccaaaagagtaaa

SEQ ID NO: 1810650 - DNA, 15 bp, Homo sapiens
cccaaaagagtaaaa

SEQ ID NO: 1810651 - DNA, 15 bp, Homo sapiens
ccaaaagagtaaaaa

SEQ ID NO: 1810652 - DNA, 15 bp, Homo sapiens
caaaagagtaaaaat

SEQ ID NO: 1810653 - DNA, 15 bp, Homo sapiens
aaaagagtaaaaatc

SEQ ID NO: 1810654 - DNA, 15 bp, Homo sapiens
aaagagtaaaaatct

SEQ ID NO: 1810655 - DNA, 15 bp, Homo sapiens
aagagtaaaaatctg

SEQ ID NO: 1810656 - DNA, 15 bp, Homo sapiens
agagtaaaaatctga

SEQ ID NO: 1810657 - DNA, 15 bp, Homo sapiens
gagtaaaaatctgaa

SEQ ID NO: 1810658 - DNA, 15 bp, Homo sapiens
agtaaaaatctgaag

SEQ ID NO: 1810659 - DNA, 15 bp, Homo sapiens
gtaaaaatctgaagc

SEQ ID NO: 1810660 - DNA, 15 bp, Homo sapiens
taaaaatctgaagca

SEQ ID NO: 1810661 - DNA, 15 bp, Homo sapiens
aaaaatctgaagcac

SEQ ID NO: 1810662 - DNA, 15 bp, Homo sapiens
aaaatctgaagcact

SEQ ID NO: 1810663 - DNA, 15 bp, Homo sapiens
aaatctgaagcactt

SEQ ID NO: 1810664 - DNA, 15 bp, Homo sapiens
aatctgaagcacttt

SEQ ID NO: 1810665 - DNA, 15 bp, Homo sapiens
atctgaagcactttt

SEQ ID NO: 1810666 - DNA, 15 bp, Homo sapiens
tctgaagcactttta

SEQ ID NO: 1810667 - DNA, 15 bp, Homo sapiens
aagcacttttaacaa

SEQ ID NO: 1810668 - DNA, 15 bp, Homo sapiens
agcacttttaacaag

SEQ ID NO: 1810669 - DNA, 15 bp, Homo sapiens
gcacttttaacaagt

SEQ ID NO: 1810670 - DNA, 15 bp, Homo sapiens
cacttttaacaagtc

SEQ ID NO: 1810671 - DNA, 15 bp, Homo sapiens
acttttaacaagtcc

SEQ ID NO: 1810672 - DNA, 15 bp, Homo sapiens
cttttaacaagtcca

SEQ ID NO: 1810673 - DNA, 15 bp, Homo sapiens
ttttaacaagtccag

SEQ ID NO: 1810674 - DNA, 15 bp, Homo sapiens
tttaacaagtccagg

SEQ ID NO: 1810675 - DNA, 15 bp, Homo sapiens
ttaacaagtccaggg

SEQ ID NO: 1810676 - DNA, 15 bp, Homo sapiens
taacaagtccagggc

SEQ ID NO: 1810677 - DNA, 15 bp, Homo sapiens
aacaagtccagggca

SEQ ID NO: 1810678 - DNA, 15 bp, Homo sapiens
acaagtccagggcaa

SEQ ID NO: 1810679 - DNA, 15 bp, Homo sapiens
caagtccagggcaat

SEQ ID NO: 1810680 - DNA, 15 bp, Homo sapiens
aagtccagggcaatt

SEQ ID NO: 1810681 - DNA, 15 bp, Homo sapiens
agtccagggcaattc

SEQ ID NO: 1810682 - DNA, 15 bp, Homo sapiens
gtccagggcaattct

SEQ ID NO: 1810683 - DNA, 15 bp, Homo sapiens
tccagggcaattctc

SEQ ID NO: 1810684 - DNA, 15 bp, Homo sapiens
ccagggcaattctcc

SEQ ID NO: 1810685 - DNA, 15 bp, Homo sapiens
cagggcaattctcct

SEQ ID NO: 1810686 - DNA, 15 bp, Homo sapiens
agggcaattctcctg

SEQ ID NO: 1810687 - DNA, 15 bp, Homo sapiens
gggcaattctcctgc

SEQ ID NO: 1810688 - DNA, 15 bp, Homo sapiens
ggcaattctcctgcc

SEQ ID NO: 1810689 - DNA, 15 bp, Homo sapiens
ctcagcttcccaagc

SEQ ID NO: 1810690 - DNA, 15 bp, Homo sapiens
tcagcttcccaagca

SEQ ID NO: 1810691 - DNA, 15 bp, Homo sapiens
cagcttcccaagcag

SEQ ID NO: 1810692 - DNA, 15 bp, Homo sapiens
agcttcccaagcagc

SEQ ID NO: 1810693 - DNA, 15 bp, Homo sapiens
gcttcccaagcagct

SEQ ID NO: 1810694 - DNA, 15 bp, Homo sapiens
cttcccaagcagctg

SEQ ID NO: 1810695 - DNA, 15 bp, Homo sapiens
ttcccaagcagctgg

SEQ ID NO: 1810696 - DNA, 15 bp, Homo sapiens
caccaagcccggctc

SEQ ID NO: 1810697 - DNA, 15 bp, Homo sapiens
accaagcccggctca

SEQ ID NO: 1810698 - DNA, 15 bp, Homo sapiens
ccaagcccggctcat

SEQ ID NO: 1810699 - DNA, 15 bp, Homo sapiens
caagcccggctcatt

SEQ ID NO: 1810700 - DNA, 15 bp, Homo sapiens
aagcccggctcattt

SEQ ID NO: 1810701 - DNA, 15 bp, Homo sapiens
agcccggctcatttt

SEQ ID NO: 1810702 - DNA, 15 bp, Homo sapiens
gcccggctcattttg

SEQ ID NO: 1810703 - DNA, 15 bp, Homo sapiens
cccggctcattttgt

SEQ ID NO: 1810704 - DNA, 15 bp, Homo sapiens
ccggctcattttgta

SEQ ID NO: 1810705 - DNA, 15 bp, Homo sapiens
cggctcattttgtat

SEQ ID NO: 1810706 - DNA, 15 bp, Homo sapiens
ggctcattttgtatt

SEQ ID NO: 1810707 - DNA, 15 bp, Homo sapiens
gctcattttgtattt

SEQ ID NO: 1810708 - DNA, 15 bp, Homo sapiens
ctcattttgtatttt

SEQ ID NO: 1810709 - DNA, 15 bp, Homo sapiens
tcattttgtattttt

SEQ ID NO: 1810710 - DNA, 15 bp, Homo sapiens
cattttgtattttta

SEQ ID NO: 1810711 - DNA, 15 bp, Homo sapiens
aactcccgacctcaa

SEQ ID NO: 1810712 - DNA, 15 bp, Homo sapiens
actcccgacctcaag

SEQ ID NO: 1810713 - DNA, 15 bp, Homo sapiens
ctcccgacctcaagt

SEQ ID NO: 1810714 - DNA, 15 bp, Homo sapiens
tcccgacctcaagtg

SEQ ID NO: 1810715 - DNA, 15 bp, Homo sapiens
cccgacctcaagtga

SEQ ID NO: 1810716 - DNA, 15 bp, Homo sapiens
ccgacctcaagtgat

SEQ ID NO: 1810717 - DNA, 15 bp, Homo sapiens
cgacctcaagtgatt

SEQ ID NO: 1810718 - DNA, 15 bp, Homo sapiens
acctcaagtgattct

SEQ ID NO: 1810719 - DNA, 15 bp, Homo sapiens
cctcaagtgattctc

SEQ ID NO: 1810720 - DNA, 15 bp, Homo sapiens
ctcaagtgattctcc

SEQ ID NO: 1810721 - DNA, 15 bp, Homo sapiens
caaagtgccgggatg

SEQ ID NO: 1810722 - DNA, 15 bp, Homo sapiens
aaagtgccgggatga

SEQ ID NO: 1810723 - DNA, 15 bp, Homo sapiens
aagtgccgggatgac

SEQ ID NO: 1810724 - DNA, 15 bp, Homo sapiens
agtgccgggatgaca

SEQ ID NO: 1810725 - DNA, 15 bp, Homo sapiens
gtgccgggatgacag

SEQ ID NO: 1810726 - DNA, 15 bp, Homo sapiens
tgccgggatgacagg

SEQ ID NO: 1810727 - DNA, 15 bp, Homo sapiens
gccgggatgacaggt

SEQ ID NO: 1810728 - DNA, 15 bp, Homo sapiens
ccgggatgacaggtg

SEQ ID NO: 1810729 - DNA, 15 bp, Homo sapiens
cgggatgacaggtgt

SEQ ID NO: 1810730 - DNA, 15 bp, Homo sapiens
gggatgacaggtgtg

SEQ ID NO: 1810731 - DNA, 15 bp, Homo sapiens
ggatgacaggtgtga

SEQ ID NO: 1810732 - DNA, 15 bp, Homo sapiens
gatgacaggtgtgag

SEQ ID NO: 1810733 - DNA, 15 bp, Homo sapiens
atgacaggtgtgagc

SEQ ID NO: 1810734 - DNA, 15 bp, Homo sapiens
tgacaggtgtgagcc

SEQ ID NO: 1810735 - DNA, 15 bp, Homo sapiens
gacaggtgtgagcca

SEQ ID NO: 1810736 - DNA, 15 bp, Homo sapiens
caccgcacctggcca

SEQ ID NO: 1810737 - DNA, 15 bp, Homo sapiens
accgcacctggccag

SEQ ID NO: 1810738 - DNA, 15 bp, Homo sapiens
ccgcacctggccagg

SEQ ID NO: 1810739 - DNA, 15 bp, Homo sapiens
cgcacctggccagga

SEQ ID NO: 1810740 - DNA, 15 bp, Homo sapiens
gcacctggccaggat

SEQ ID NO: 1810741 - DNA, 15 bp, Homo sapiens
cacctggccaggatc

SEQ ID NO: 1810742 - DNA, 15 bp, Homo sapiens
acctggccaggatct

SEQ ID NO: 1810743 - DNA, 15 bp, Homo sapiens
cctggccaggatctt

SEQ ID NO: 1810744 - DNA, 15 bp, Homo sapiens
ctggccaggatcttt

SEQ ID NO: 1810745 - DNA, 15 bp, Homo sapiens
tggccaggatctttt

SEQ ID NO: 1810746 - DNA, 15 bp, Homo sapiens
ggccaggatcttttc

SEQ ID NO: 1810747 - DNA, 15 bp, Homo sapiens
gccaggatcttttct

SEQ ID NO: 1810748 - DNA, 15 bp, Homo sapiens
ccaggatcttttctc

SEQ ID NO: 1810749 - DNA, 15 bp, Homo sapiens
caggatcttttctca

SEQ ID NO: 1810750 - DNA, 15 bp, Homo sapiens
aggatcttttctcat

SEQ ID NO: 1810751 - DNA, 15 bp, Homo sapiens
ggatcttttctcatt

SEQ ID NO: 1810752 - DNA, 15 bp, Homo sapiens
gatcttttctcatta

SEQ ID NO: 1810753 - DNA, 15 bp, Homo sapiens
atcttttctcattac

SEQ ID NO: 1810754 - DNA, 15 bp, Homo sapiens
tcttttctcattacc

SEQ ID NO: 1810755 - DNA, 15 bp, Homo sapiens
cttttctcattacct

SEQ ID NO: 1810756 - DNA, 15 bp, Homo sapiens
ttttctcattacctt

SEQ ID NO: 1810757 - DNA, 15 bp, Homo sapiens
tttctcattaccttg

SEQ ID NO: 1810758 - DNA, 15 bp, Homo sapiens
ttctcattaccttgt

SEQ ID NO: 1810759 - DNA, 15 bp, Homo sapiens
tctcattaccttgtc

SEQ ID NO: 1810760 - DNA, 15 bp, Homo sapiens
ctcattaccttgtct

SEQ ID NO: 1810761 - DNA, 15 bp, Homo sapiens
tcattaccttgtctt

SEQ ID NO: 1810762 - DNA, 15 bp, Homo sapiens
cattaccttgtcttc

SEQ ID NO: 1810763 - DNA, 15 bp, Homo sapiens
attaccttgtcttcc

SEQ ID NO: 1810764 - DNA, 15 bp, Homo sapiens
ttaccttgtcttcct

SEQ ID NO: 1810765 - DNA, 15 bp, Homo sapiens
taccttgtcttccta

SEQ ID NO: 1810766 - DNA, 15 bp, Homo sapiens
accttgtcttcctag

SEQ ID NO: 1810767 - DNA, 15 bp, Homo sapiens
ccttgtcttcctagt

SEQ ID NO: 1810768 - DNA, 15 bp, Homo sapiens
cttgtcttcctagtg

SEQ ID NO: 1810769 - DNA, 15 bp, Homo sapiens
ttgtcttcctagtgg

SEQ ID NO: 1810770 - DNA, 15 bp, Homo sapiens
tgtcttcctagtggg

SEQ ID NO: 1810771 - DNA, 15 bp, Homo sapiens
gtcttcctagtgggg

SEQ ID NO: 1810772 - DNA, 15 bp, Homo sapiens
tcttcctagtggggg

SEQ ID NO: 1810773 - DNA, 15 bp, Homo sapiens
cttcctagtgggggc

SEQ ID NO: 1810774 - DNA, 15 bp, Homo sapiens
ttcctagtgggggct

SEQ ID NO: 1810775 - DNA, 15 bp, Homo sapiens
tcctagtgggggctc

SEQ ID NO: 1810776 - DNA, 15 bp, Homo sapiens
cctagtgggggctcc

SEQ ID NO: 1810777 - DNA, 15 bp, Homo sapiens
ctagtgggggctcca

SEQ ID NO: 1810778 - DNA, 15 bp, Homo sapiens
tagtgggggctccac

SEQ ID NO: 1810779 - DNA, 15 bp, Homo sapiens
agtgggggctccact

SEQ ID NO: 1810780 - DNA, 15 bp, Homo sapiens
gtgggggctccactg

SEQ ID NO: 1810781 - DNA, 15 bp, Homo sapiens
tgggggctccactga

SEQ ID NO: 1810782 - DNA, 15 bp, Homo sapiens
gggggctccactgag

SEQ ID NO: 1810783 - DNA, 15 bp, Homo sapiens
ggggctccactgagc

SEQ ID NO: 1810784 - DNA, 15 bp, Homo sapiens
gggctccactgagca

SEQ ID NO: 1810785 - DNA, 15 bp, Homo sapiens
ggctccactgagcag

SEQ ID NO: 1810786 - DNA, 15 bp, Homo sapiens
gctccactgagcagg

SEQ ID NO: 1810787 - DNA, 15 bp, Homo sapiens
ctccactgagcaggt

SEQ ID NO: 1810788 - DNA, 15 bp, Homo sapiens
tccactgagcaggtc

SEQ ID NO: 1810789 - DNA, 15 bp, Homo sapiens
ccactgagcaggtca

SEQ ID NO: 1810790 - DNA, 15 bp, Homo sapiens
cactgagcaggtcat

SEQ ID NO: 1810791 - DNA, 15 bp, Homo sapiens
actgagcaggtcatg

SEQ ID NO: 1810792 - DNA, 15 bp, Homo sapiens
ctgagcaggtcatgt

SEQ ID NO: 1810793 - DNA, 15 bp, Homo sapiens
tgagcaggtcatgtt

SEQ ID NO: 1810794 - DNA, 15 bp, Homo sapiens
gagcaggtcatgttc

SEQ ID NO: 1810795 - DNA, 15 bp, Homo sapiens
agcaggtcatgttcc

SEQ ID NO: 1810796 - DNA, 15 bp, Homo sapiens
gcaggtcatgttccc

SEQ ID NO: 1810797 - DNA, 15 bp, Homo sapiens
caggtcatgttcccg

SEQ ID NO: 1810798 - DNA, 15 bp, Homo sapiens
aggtcatgttcccgg

SEQ ID NO: 1810799 - DNA, 15 bp, Homo sapiens
ggtcatgttcccgga

SEQ ID NO: 1810800 - DNA, 15 bp, Homo sapiens
gtcatgttcccggac

SEQ ID NO: 1810801 - DNA, 15 bp, Homo sapiens
tcatgttcccggaca

SEQ ID NO: 1810802 - DNA, 15 bp, Homo sapiens
catgttcccggacat

SEQ ID NO: 1810803 - DNA, 15 bp, Homo sapiens
atgttcccggacatt

SEQ ID NO: 1810804 - DNA, 15 bp, Homo sapiens
tgttcccggacattt

SEQ ID NO: 1810805 - DNA, 15 bp, Homo sapiens
gttcccggacatttg

SEQ ID NO: 1810806 - DNA, 15 bp, Homo sapiens
ttcccggacatttgt

SEQ ID NO: 1810807 - DNA, 15 bp, Homo sapiens
tcccggacatttgtt

SEQ ID NO: 1810808 - DNA, 15 bp, Homo sapiens
cccggacatttgttc

SEQ ID NO: 1810809 - DNA, 15 bp, Homo sapiens
ccggacatttgttcg

SEQ ID NO: 1810810 - DNA, 15 bp, Homo sapiens
cggacatttgttcgg

SEQ ID NO: 1810811 - DNA, 15 bp, Homo sapiens
ggacatttgttcgga

SEQ ID NO: 1810812 - DNA, 15 bp, Homo sapiens
gacatttgttcggat

SEQ ID NO: 1810813 - DNA, 15 bp, Homo sapiens
acatttgttcggata

SEQ ID NO: 1810814 - DNA, 15 bp, Homo sapiens
catttgttcggatac

SEQ ID NO: 1810815 - DNA, 15 bp, Homo sapiens
atttgttcggatact

SEQ ID NO: 1810816 - DNA, 15 bp, Homo sapiens
tttgttcggatactg

SEQ ID NO: 1810817 - DNA, 15 bp, Homo sapiens
ttgttcggatactga

SEQ ID NO: 1810818 - DNA, 15 bp, Homo sapiens
tgttcggatactgac

SEQ ID NO: 1810819 - DNA, 15 bp, Homo sapiens
gttcggatactgacc

SEQ ID NO: 1810820 - DNA, 15 bp, Homo sapiens
ttcggatactgacca

SEQ ID NO: 1810821 - DNA, 15 bp, Homo sapiens
tcggatactgaccag

SEQ ID NO: 1810822 - DNA, 15 bp, Homo sapiens
cggatactgaccagg

SEQ ID NO: 1810823 - DNA, 15 bp, Homo sapiens
ggatactgaccaggc

SEQ ID NO: 1810824 - DNA, 15 bp, Homo sapiens
gatactgaccaggct

SEQ ID NO: 1810825 - DNA, 15 bp, Homo sapiens
atactgaccaggctg

SEQ ID NO: 1810826 - DNA, 15 bp, Homo sapiens
tactgaccaggctgt

SEQ ID NO: 1810827 - DNA, 15 bp, Homo sapiens
actgaccaggctgtg

SEQ ID NO: 1810828 - DNA, 15 bp, Homo sapiens
ctgaccaggctgtgg

SEQ ID NO: 1810829 - DNA, 15 bp, Homo sapiens
tgaccaggctgtggc

SEQ ID NO: 1810830 - DNA, 15 bp, Homo sapiens
gaccaggctgtggca

SEQ ID NO: 1810831 - DNA, 15 bp, Homo sapiens
accaggctgtggcag

SEQ ID NO: 1810832 - DNA, 15 bp, Homo sapiens
ccaggctgtggcagg

SEQ ID NO: 1810833 - DNA, 15 bp, Homo sapiens
caggctgtggcaggg

SEQ ID NO: 1810834 - DNA, 15 bp, Homo sapiens
aggctgtggcaggga

SEQ ID NO: 1810835 - DNA, 15 bp, Homo sapiens
ggctgtggcagggag

SEQ ID NO: 1810836 - DNA, 15 bp, Homo sapiens
gctgtggcagggagt

SEQ ID NO: 1810837 - DNA, 15 bp, Homo sapiens
ctgtggcagggagtg

SEQ ID NO: 1810838 - DNA, 15 bp, Homo sapiens
tgtggcagggagtga

SEQ ID NO: 1810839 - DNA, 15 bp, Homo sapiens
gtggcagggagtgag

SEQ ID NO: 1810840 - DNA, 15 bp, Homo sapiens
tggcagggagtgagg

SEQ ID NO: 1810841 - DNA, 15 bp, Homo sapiens
ggcagggagtgaggg

SEQ ID NO: 1810842 - DNA, 15 bp, Homo sapiens
gcagggagtgagggt

SEQ ID NO: 1810843 - DNA, 15 bp, Homo sapiens
cagggagtgagggta

SEQ ID NO: 1810844 - DNA, 15 bp, Homo sapiens
agggagtgagggtat

SEQ ID NO: 1810845 - DNA, 15 bp, Homo sapiens
gggagtgagggtatg

SEQ ID NO: 1810846 - DNA, 15 bp, Homo sapiens
ggagtgagggtatgg

SEQ ID NO: 1810847 - DNA, 15 bp, Homo sapiens
gagtgagggtatgga

SEQ ID NO: 1810848 - DNA, 15 bp, Homo sapiens
agtgagggtatggag

SEQ ID NO: 1810849 - DNA, 15 bp, Homo sapiens
gtgagggtatggagt

SEQ ID NO: 1810850 - DNA, 15 bp, Homo sapiens
tgagggtatggagtg

SEQ ID NO: 1810851 - DNA, 15 bp, Homo sapiens
gagggtatggagtga

SEQ ID NO: 1810852 - DNA, 15 bp, Homo sapiens
agggtatggagtgac

SEQ ID NO: 1810853 - DNA, 15 bp, Homo sapiens
gggtatggagtgacc

SEQ ID NO: 1810854 - DNA, 15 bp, Homo sapiens
ggtatggagtgacct

SEQ ID NO: 1810855 - DNA, 15 bp, Homo sapiens
gtatggagtgacctc

SEQ ID NO: 1810856 - DNA, 15 bp, Homo sapiens
tatggagtgacctct

SEQ ID NO: 1810857 - DNA, 15 bp, Homo sapiens
atggagtgacctctc

SEQ ID NO: 1810858 - DNA, 15 bp, Homo sapiens
tggagtgacctctct

SEQ ID NO: 1810859 - DNA, 15 bp, Homo sapiens
ggagtgacctctctc

SEQ ID NO: 1810860 - DNA, 15 bp, Homo sapiens
gagtgacctctctcc

SEQ ID NO: 1810861 - DNA, 15 bp, Homo sapiens
agtgacctctctcct

SEQ ID NO: 1810862 - DNA, 15 bp, Homo sapiens
gtgacctctctcctg

SEQ ID NO: 1810863 - DNA, 15 bp, Homo sapiens
tgacctctctcctgc

SEQ ID NO: 1810864 - DNA, 15 bp, Homo sapiens
gacctctctcctgcc

SEQ ID NO: 1810865 - DNA, 15 bp, Homo sapiens
acctctctcctgccc

SEQ ID NO: 1810866 - DNA, 15 bp, Homo sapiens
cctctctcctgccca

SEQ ID NO: 1810867 - DNA, 15 bp, Homo sapiens
ctctctcctgcccag

SEQ ID NO: 1810868 - DNA, 15 bp, Homo sapiens
tctctcctgcccaga

SEQ ID NO: 1810869 - DNA, 15 bp, Homo sapiens
ctctcctgcccagaa

SEQ ID NO: 1810870 - DNA, 15 bp, Homo sapiens
tctcctgcccagaaa

SEQ ID NO: 1810871 - DNA, 15 bp, Homo sapiens
ctcctgcccagaaag

SEQ ID NO: 1810872 - DNA, 15 bp, Homo sapiens
tcctgcccagaaagg

SEQ ID NO: 1810873 - DNA, 15 bp, Homo sapiens
cctgcccagaaaggg

SEQ ID NO: 1810874 - DNA, 15 bp, Homo sapiens
ctgcccagaaagggc

SEQ ID NO: 1810875 - DNA, 15 bp, Homo sapiens
tgcccagaaagggcg

SEQ ID NO: 1810876 - DNA, 15 bp, Homo sapiens
gcccagaaagggcgc

SEQ ID NO: 1810877 - DNA, 15 bp, Homo sapiens
cccagaaagggcgca

SEQ ID NO: 1810878 - DNA, 15 bp, Homo sapiens
ccagaaagggcgcag

SEQ ID NO: 1810879 - DNA, 15 bp, Homo sapiens
cagaaagggcgcagc

SEQ ID NO: 1810880 - DNA, 15 bp, Homo sapiens
agaaagggcgcagct

SEQ ID NO: 1810881 - DNA, 15 bp, Homo sapiens
gaaagggcgcagctg

SEQ ID NO: 1810882 - DNA, 15 bp, Homo sapiens
aaagggcgcagctgg

SEQ ID NO: 1810883 - DNA, 15 bp, Homo sapiens
aagggcgcagctggg

SEQ ID NO: 1810884 - DNA, 15 bp, Homo sapiens
agggcgcagctgggt

SEQ ID NO: 1810885 - DNA, 15 bp, Homo sapiens
gggcgcagctgggtt

SEQ ID NO: 1810886 - DNA, 15 bp, Homo sapiens
ggcgcagctgggttc

SEQ ID NO: 1810887 - DNA, 15 bp, Homo sapiens
gcgcagctgggttcc

SEQ ID NO: 1810888 - DNA, 15 bp, Homo sapiens
cgcagctgggttccc

SEQ ID NO: 1810889 - DNA, 15 bp, Homo sapiens
gcagctgggttccca

SEQ ID NO: 1810890 - DNA, 15 bp, Homo sapiens
cagctgggttcccaa

SEQ ID NO: 1810891 - DNA, 15 bp, Homo sapiens
agctgggttcccaag

SEQ ID NO: 1810892 - DNA, 15 bp, Homo sapiens
gctgggttcccaagg

SEQ ID NO: 1810893 - DNA, 15 bp, Homo sapiens
ctgggttcccaaggc

SEQ ID NO: 1810894 - DNA, 15 bp, Homo sapiens
tgggttcccaaggca

SEQ ID NO: 1810895 - DNA, 15 bp, Homo sapiens
gggttcccaaggcag

SEQ ID NO: 1810896 - DNA, 15 bp, Homo sapiens
ggttcccaaggcaga

SEQ ID NO: 1810897 - DNA, 15 bp, Homo sapiens
gttcccaaggcagat

SEQ ID NO: 1810898 - DNA, 15 bp, Homo sapiens
ttcccaaggcagata

SEQ ID NO: 1810899 - DNA, 15 bp, Homo sapiens
tcccaaggcagatac

SEQ ID NO: 1810900 - DNA, 15 bp, Homo sapiens
cccaaggcagataca

SEQ ID NO: 1810901 - DNA, 15 bp, Homo sapiens
ccaaggcagatacag

SEQ ID NO: 1810902 - DNA, 15 bp, Homo sapiens
caaggcagatacagg

SEQ ID NO: 1810903 - DNA, 15 bp, Homo sapiens
aaggcagatacaggc

SEQ ID NO: 1810904 - DNA, 15 bp, Homo sapiens
aggcagatacaggca

SEQ ID NO: 1810905 - DNA, 15 bp, Homo sapiens
ggcagatacaggcac

SEQ ID NO: 1810906 - DNA, 15 bp, Homo sapiens
gcagatacaggcaca

SEQ ID NO: 1810907 - DNA, 15 bp, Homo sapiens
cagatacaggcacat

SEQ ID NO: 1810908 - DNA, 15 bp, Homo sapiens
agatacaggcacatg

SEQ ID NO: 1810909 - DNA, 15 bp, Homo sapiens
gatacaggcacatgg

SEQ ID NO: 1810910 - DNA, 15 bp, Homo sapiens
atacaggcacatgga

SEQ ID NO: 1810911 - DNA, 15 bp, Homo sapiens
tacaggcacatggag

SEQ ID NO: 1810912 - DNA, 15 bp, Homo sapiens
acaggcacatggagg

SEQ ID NO: 1810913 - DNA, 15 bp, Homo sapiens
caggcacatggaggg

SEQ ID NO: 1810914 - DNA, 15 bp, Homo sapiens
aggcacatggaggga

SEQ ID NO: 1810915 - DNA, 15 bp, Homo sapiens
ggcacatggagggaa

SEQ ID NO: 1810916 - DNA, 15 bp, Homo sapiens
gcacatggagggaag

SEQ ID NO: 1810917 - DNA, 15 bp, Homo sapiens
cacatggagggaagc

SEQ ID NO: 1810918 - DNA, 15 bp, Homo sapiens
acatggagggaagcc

SEQ ID NO: 1810919 - DNA, 15 bp, Homo sapiens
catggagggaagcct

SEQ ID NO: 1810920 - DNA, 15 bp, Homo sapiens
atggagggaagcctg

SEQ ID NO: 1810921 - DNA, 15 bp, Homo sapiens
tggagggaagcctgg

SEQ ID NO: 1810922 - DNA, 15 bp, Homo sapiens
ggagggaagcctggg

SEQ ID NO: 1810923 - DNA, 15 bp, Homo sapiens
gagggaagcctgggc

SEQ ID NO: 1810924 - DNA, 15 bp, Homo sapiens
agggaagcctgggcc

SEQ ID NO: 1810925 - DNA, 15 bp, Homo sapiens
gggaagcctgggcca

SEQ ID NO: 1810926 - DNA, 15 bp, Homo sapiens
ggaagcctgggccat

SEQ ID NO: 1810927 - DNA, 15 bp, Homo sapiens
gaagcctgggccata

SEQ ID NO: 1810928 - DNA, 15 bp, Homo sapiens
aagcctgggccatat

SEQ ID NO: 1810929 - DNA, 15 bp, Homo sapiens
agcctgggccatatg

SEQ ID NO: 1810930 - DNA, 15 bp, Homo sapiens
gcctgggccatatga

SEQ ID NO: 1810931 - DNA, 15 bp, Homo sapiens
cctgggccatatgag

SEQ ID NO: 1810932 - DNA, 15 bp, Homo sapiens
ctgggccatatgagt

SEQ ID NO: 1810933 - DNA, 15 bp, Homo sapiens
tgggccatatgagtg

SEQ ID NO: 1810934 - DNA, 15 bp, Homo sapiens
gggccatatgagtgt

SEQ ID NO: 1810935 - DNA, 15 bp, Homo sapiens
ggccatatgagtgtt

SEQ ID NO: 1810936 - DNA, 15 bp, Homo sapiens
gccatatgagtgtta

SEQ ID NO: 1810937 - DNA, 15 bp, Homo sapiens
ccatatgagtgttat

SEQ ID NO: 1810938 - DNA, 15 bp, Homo sapiens
catatgagtgttatg

SEQ ID NO: 1810939 - DNA, 15 bp, Homo sapiens
atatgagtgttatgg

SEQ ID NO: 1810940 - DNA, 15 bp, Homo sapiens
tatgagtgttatggg

SEQ ID NO: 1810941 - DNA, 15 bp, Homo sapiens
atgagtgttatgggg

SEQ ID NO: 1810942 - DNA, 15 bp, Homo sapiens
tgagtgttatggggt

SEQ ID NO: 1810943 - DNA, 15 bp, Homo sapiens
gagtgttatggggtg

SEQ ID NO: 1810944 - DNA, 15 bp, Homo sapiens
agtgttatggggtga

SEQ ID NO: 1810945 - DNA, 15 bp, Homo sapiens
gtgttatggggtgag

SEQ ID NO: 1810946 - DNA, 15 bp, Homo sapiens
tgttatggggtgagt

SEQ ID NO: 1810947 - DNA, 15 bp, Homo sapiens
gttatggggtgagtg

SEQ ID NO: 1810948 - DNA, 15 bp, Homo sapiens
ttatggggtgagtgt

SEQ ID NO: 1810949 - DNA, 15 bp, Homo sapiens
tatggggtgagtgtt

SEQ ID NO: 1810950 - DNA, 15 bp, Homo sapiens
atggggtgagtgttg

SEQ ID NO: 1810951 - DNA, 15 bp, Homo sapiens
tggggtgagtgttgg

SEQ ID NO: 1810952 - DNA, 15 bp, Homo sapiens
ggggtgagtgttggc

SEQ ID NO: 1810953 - DNA, 15 bp, Homo sapiens
gggtgagtgttggcg

SEQ ID NO: 1810954 - DNA, 15 bp, Homo sapiens
ggtgagtgttggcgg

SEQ ID NO: 1810955 - DNA, 15 bp, Homo sapiens
gtgagtgttggcgga

SEQ ID NO: 1810956 - DNA, 15 bp, Homo sapiens
tgagtgttggcggag

SEQ ID NO: 1810957 - DNA, 15 bp, Homo sapiens
gagtgttggcggagg

SEQ ID NO: 1810958 - DNA, 15 bp, Homo sapiens
agtgttggcggaggc

SEQ ID NO: 1810959 - DNA, 15 bp, Homo sapiens
gtgttggcggaggcc

SEQ ID NO: 1810960 - DNA, 15 bp, Homo sapiens
tgttggcggaggccc

SEQ ID NO: 1810961 - DNA, 15 bp, Homo sapiens
gttggcggaggccca

SEQ ID NO: 1810962 - DNA, 15 bp, Homo sapiens
ttggcggaggcccac

SEQ ID NO: 1810963 - DNA, 15 bp, Homo sapiens
tggcggaggcccacc

SEQ ID NO: 1810964 - DNA, 15 bp, Homo sapiens
ggcggaggcccaccc

SEQ ID NO: 1810965 - DNA, 15 bp, Homo sapiens
gcggaggcccaccct

SEQ ID NO: 1810966 - DNA, 15 bp, Homo sapiens
cggaggcccaccctt

SEQ ID NO: 1810967 - DNA, 15 bp, Homo sapiens
ggaggcccacccttg

SEQ ID NO: 1810968 - DNA, 15 bp, Homo sapiens
gaggcccacccttga

SEQ ID NO: 1810969 - DNA, 15 bp, Homo sapiens
aggcccacccttgag

SEQ ID NO: 1810970 - DNA, 15 bp, Homo sapiens
ggcccacccttgagg

SEQ ID NO: 1810971 - DNA, 15 bp, Homo sapiens
gcccacccttgaggg

SEQ ID NO: 1810972 - DNA, 15 bp, Homo sapiens
cccacccttgaggga

SEQ ID NO: 1810973 - DNA, 15 bp, Homo sapiens
ccacccttgagggac

SEQ ID NO: 1810974 - DNA, 15 bp, Homo sapiens
cacccttgagggaca

SEQ ID NO: 1810975 - DNA, 15 bp, Homo sapiens
acccttgagggacaa

SEQ ID NO: 1810976 - DNA, 15 bp, Homo sapiens
cccttgagggacaag

SEQ ID NO: 1810977 - DNA, 15 bp, Homo sapiens
ccttgagggacaaga

SEQ ID NO: 1810978 - DNA, 15 bp, Homo sapiens
cttgagggacaagag

SEQ ID NO: 1810979 - DNA, 15 bp, Homo sapiens
ttgagggacaagagc

SEQ ID NO: 1810980 - DNA, 15 bp, Homo sapiens
tgagggacaagagca

SEQ ID NO: 1810981 - DNA, 15 bp, Homo sapiens
gagggacaagagcag

SEQ ID NO: 1810982 - DNA, 15 bp, Homo sapiens
agggacaagagcagc

SEQ ID NO: 1810983 - DNA, 15 bp, Homo sapiens
gggacaagagcagct

SEQ ID NO: 1810984 - DNA, 15 bp, Homo sapiens
ggacaagagcagctg

SEQ ID NO: 1810985 - DNA, 15 bp, Homo sapiens
gacaagagcagctgg

SEQ ID NO: 1810986 - DNA, 15 bp, Homo sapiens
acaagagcagctggg

SEQ ID NO: 1810987 - DNA, 15 bp, Homo sapiens
caagagcagctgggc

SEQ ID NO: 1810988 - DNA, 15 bp, Homo sapiens
aagagcagctgggca

SEQ ID NO: 1810989 - DNA, 15 bp, Homo sapiens
agagcagctgggcat

SEQ ID NO: 1810990 - DNA, 15 bp, Homo sapiens
gagcagctgggcatc

SEQ ID NO: 1810991 - DNA, 15 bp, Homo sapiens
agcagctgggcatct

SEQ ID NO: 1810992 - DNA, 15 bp, Homo sapiens
gcagctgggcatctt

SEQ ID NO: 1810993 - DNA, 15 bp, Homo sapiens
cagctgggcatcttg

SEQ ID NO: 1810994 - DNA, 15 bp, Homo sapiens
agctgggcatcttgg

SEQ ID NO: 1810995 - DNA, 15 bp, Homo sapiens
gctgggcatcttggc

SEQ ID NO: 1810996 - DNA, 15 bp, Homo sapiens
ctgggcatcttggcg

SEQ ID NO: 1810997 - DNA, 15 bp, Homo sapiens
tgggcatcttggcga

SEQ ID NO: 1810998 - DNA, 15 bp, Homo sapiens
gggcatcttggcgag

SEQ ID NO: 1810999 - DNA, 15 bp, Homo sapiens
ggcatcttggcgaga

SEQ ID NO: 1811000 - DNA, 15 bp, Homo sapiens
gcatcttggcgagag

SEQ ID NO: 1811001 - DNA, 15 bp, Homo sapiens
catcttggcgagagc

SEQ ID NO: 1811002 - DNA, 15 bp, Homo sapiens
atcttggcgagagcc

SEQ ID NO: 1811003 - DNA, 15 bp, Homo sapiens
tcttggcgagagccc

SEQ ID NO: 1811004 - DNA, 15 bp, Homo sapiens
cttggcgagagccct

SEQ ID NO: 1811005 - DNA, 15 bp, Homo sapiens
ttggcgagagccctg

SEQ ID NO: 1811006 - DNA, 15 bp, Homo sapiens
tggcgagagccctgg

SEQ ID NO: 1811007 - DNA, 15 bp, Homo sapiens
ggcgagagccctgga

SEQ ID NO: 1811008 - DNA, 15 bp, Homo sapiens
gcgagagccctggac

SEQ ID NO: 1811009 - DNA, 15 bp, Homo sapiens
cgagagccctggact

SEQ ID NO: 1811010 - DNA, 15 bp, Homo sapiens
gagagccctggactt

SEQ ID NO: 1811011 - DNA, 15 bp, Homo sapiens
agagccctggacttt

SEQ ID NO: 1811012 - DNA, 15 bp, Homo sapiens
gagccctggactttc

SEQ ID NO: 1811013 - DNA, 15 bp, Homo sapiens
agccctggactttcg

SEQ ID NO: 1811014 - DNA, 15 bp, Homo sapiens
gccctggactttcgt

SEQ ID NO: 1811015 - DNA, 15 bp, Homo sapiens
ccctggactttcgtg

SEQ ID NO: 1811016 - DNA, 15 bp, Homo sapiens
cctggactttcgtga

SEQ ID NO: 1811017 - DNA, 15 bp, Homo sapiens
ctggactttcgtgag

SEQ ID NO: 1811018 - DNA, 15 bp, Homo sapiens
tggactttcgtgagg

SEQ ID NO: 1811019 - DNA, 15 bp, Homo sapiens
ggactttcgtgaggt

SEQ ID NO: 1811020 - DNA, 15 bp, Homo sapiens
gactttcgtgaggtc

SEQ ID NO: 1811021 - DNA, 15 bp, Homo sapiens
actttcgtgaggtca

SEQ ID NO: 1811022 - DNA, 15 bp, Homo sapiens
ctttcgtgaggtcag

SEQ ID NO: 1811023 - DNA, 15 bp, Homo sapiens
tttcgtgaggtcaga

SEQ ID NO: 1811024 - DNA, 15 bp, Homo sapiens
ttcgtgaggtcagag

SEQ ID NO: 1811025 - DNA, 15 bp, Homo sapiens
tcgtgaggtcagagt

SEQ ID NO: 1811026 - DNA, 15 bp, Homo sapiens
cgtgaggtcagagta

SEQ ID NO: 1811027 - DNA, 15 bp, Homo sapiens
gtgaggtcagagtat

SEQ ID NO: 1811028 - DNA, 15 bp, Homo sapiens
tgaggtcagagtatg

SEQ ID NO: 1811029 - DNA, 15 bp, Homo sapiens
gaggtcagagtatga

SEQ ID NO: 1811030 - DNA, 15 bp, Homo sapiens
aggtcagagtatgaa

SEQ ID NO: 1811031 - DNA, 15 bp, Homo sapiens
ggtcagagtatgaat

SEQ ID NO: 1811032 - DNA, 15 bp, Homo sapiens
gtcagagtatgaatt

SEQ ID NO: 1811033 - DNA, 15 bp, Homo sapiens
tcagagtatgaattc

SEQ ID NO: 1811034 - DNA, 15 bp, Homo sapiens
cagagtatgaattct

SEQ ID NO: 1811035 - DNA, 15 bp, Homo sapiens
agagtatgaattctg

SEQ ID NO: 1811036 - DNA, 15 bp, Homo sapiens
gagtatgaattctgc

SEQ ID NO: 1811037 - DNA, 15 bp, Homo sapiens
agtatgaattctgcg

SEQ ID NO: 1811038 - DNA, 15 bp, Homo sapiens
gtatgaattctgcgt

SEQ ID NO: 1811039 - DNA, 15 bp, Homo sapiens
tatgaattctgcgtc

SEQ ID NO: 1811040 - DNA, 15 bp, Homo sapiens
atgaattctgcgtct

SEQ ID NO: 1811041 - DNA, 15 bp, Homo sapiens
tgaattctgcgtctc

SEQ ID NO: 1811042 - DNA, 15 bp, Homo sapiens
gaattctgcgtctcc

SEQ ID NO: 1811043 - DNA, 15 bp, Homo sapiens
aattctgcgtctccc

SEQ ID NO: 1811044 - DNA, 15 bp, Homo sapiens
attctgcgtctccct

SEQ ID NO: 1811045 - DNA, 15 bp, Homo sapiens
ttctgcgtctccctc

SEQ ID NO: 1811046 - DNA, 15 bp, Homo sapiens
tctgcgtctccctct

SEQ ID NO: 1811047 - DNA, 15 bp, Homo sapiens
ctgcgtctccctctt

SEQ ID NO: 1811048 - DNA, 15 bp, Homo sapiens
tgcgtctccctcttc

SEQ ID NO: 1811049 - DNA, 15 bp, Homo sapiens
gcgtctccctcttcc

SEQ ID NO: 1811050 - DNA, 15 bp, Homo sapiens
cgtctccctcttcct

SEQ ID NO: 1811051 - DNA, 15 bp, Homo sapiens
gtctccctcttccta

SEQ ID NO: 1811052 - DNA, 15 bp, Homo sapiens
tctccctcttcctag

SEQ ID NO: 1811053 - DNA, 15 bp, Homo sapiens
ctccctcttcctagc

SEQ ID NO: 1811054 - DNA, 15 bp, Homo sapiens
tccctcttcctagct

SEQ ID NO: 1811055 - DNA, 15 bp, Homo sapiens
ccctcttcctagctt

SEQ ID NO: 1811056 - DNA, 15 bp, Homo sapiens
cctcttcctagcttt

SEQ ID NO: 1811057 - DNA, 15 bp, Homo sapiens
ctcttcctagctttg

SEQ ID NO: 1811058 - DNA, 15 bp, Homo sapiens
tcttcctagctttgt

SEQ ID NO: 1811059 - DNA, 15 bp, Homo sapiens
cttcctagctttgtg

SEQ ID NO: 1811060 - DNA, 15 bp, Homo sapiens
ttcctagctttgtga

SEQ ID NO: 1811061 - DNA, 15 bp, Homo sapiens
tcctagctttgtgac

SEQ ID NO: 1811062 - DNA, 15 bp, Homo sapiens
cctagctttgtgacc

SEQ ID NO: 1811063 - DNA, 15 bp, Homo sapiens
ctagctttgtgaccc

SEQ ID NO: 1811064 - DNA, 15 bp, Homo sapiens
tagctttgtgaccct

SEQ ID NO: 1811065 - DNA, 15 bp, Homo sapiens
agctttgtgacccta

SEQ ID NO: 1811066 - DNA, 15 bp, Homo sapiens
gctttgtgaccctag

SEQ ID NO: 1811067 - DNA, 15 bp, Homo sapiens
ctttgtgaccctaga

SEQ ID NO: 1811068 - DNA, 15 bp, Homo sapiens
tttgtgaccctagac

SEQ ID NO: 1811069 - DNA, 15 bp, Homo sapiens
ttgtgaccctagaca

SEQ ID NO: 1811070 - DNA, 15 bp, Homo sapiens
tgtgaccctagacaa

SEQ ID NO: 1811071 - DNA, 15 bp, Homo sapiens
gtgaccctagacaac

SEQ ID NO: 1811072 - DNA, 15 bp, Homo sapiens
tgaccctagacaacc

SEQ ID NO: 1811073 - DNA, 15 bp, Homo sapiens
gaccctagacaaccc

SEQ ID NO: 1811074 - DNA, 15 bp, Homo sapiens
accctagacaaccct

SEQ ID NO: 1811075 - DNA, 15 bp, Homo sapiens
ccctagacaaccctt

SEQ ID NO: 1811076 - DNA, 15 bp, Homo sapiens
cctagacaaccctta

SEQ ID NO: 1811077 - DNA, 15 bp, Homo sapiens
ctagacaacccttac

SEQ ID NO: 1811078 - DNA, 15 bp, Homo sapiens
tagacaacccttacc

SEQ ID NO: 1811079 - DNA, 15 bp, Homo sapiens
agacaacccttacct

SEQ ID NO: 1811080 - DNA, 15 bp, Homo sapiens
gacaacccttacctc

SEQ ID NO: 1811081 - DNA, 15 bp, Homo sapiens
acaacccttacctca

SEQ ID NO: 1811082 - DNA, 15 bp, Homo sapiens
caacccttacctcag

SEQ ID NO: 1811083 - DNA, 15 bp, Homo sapiens
aacccttacctcagt

SEQ ID NO: 1811084 - DNA, 15 bp, Homo sapiens
acccttacctcagtc

SEQ ID NO: 1811085 - DNA, 15 bp, Homo sapiens
cccttacctcagtct

SEQ ID NO: 1811086 - DNA, 15 bp, Homo sapiens
ccttacctcagtctt

SEQ ID NO: 1811087 - DNA, 15 bp, Homo sapiens
cttacctcagtcttt

SEQ ID NO: 1811088 - DNA, 15 bp, Homo sapiens
ttacctcagtctttg

SEQ ID NO: 1811089 - DNA, 15 bp, Homo sapiens
tacctcagtctttgc

SEQ ID NO: 1811090 - DNA, 15 bp, Homo sapiens
acctcagtctttgct

SEQ ID NO: 1811091 - DNA, 15 bp, Homo sapiens
cctcagtctttgctt

SEQ ID NO: 1811092 - DNA, 15 bp, Homo sapiens
ctcagtctttgcttc

SEQ ID NO: 1811093 - DNA, 15 bp, Homo sapiens
tcagtctttgcttcc

SEQ ID NO: 1811094 - DNA, 15 bp, Homo sapiens
cagtctttgcttcct

SEQ ID NO: 1811095 - DNA, 15 bp, Homo sapiens
agtctttgcttcctt

SEQ ID NO: 1811096 - DNA, 15 bp, Homo sapiens
gtctttgcttccttg

SEQ ID NO: 1811097 - DNA, 15 bp, Homo sapiens
tctttgcttccttgc

SEQ ID NO: 1811098 - DNA, 15 bp, Homo sapiens
ctttgcttccttgcc

SEQ ID NO: 1811099 - DNA, 15 bp, Homo sapiens
tttgcttccttgcct

SEQ ID NO: 1811100 - DNA, 15 bp, Homo sapiens
ttgcttccttgccta

SEQ ID NO: 1811101 - DNA, 15 bp, Homo sapiens
tgcttccttgcctat

SEQ ID NO: 1811102 - DNA, 15 bp, Homo sapiens
gcttccttgcctatg

SEQ ID NO: 1811103 - DNA, 15 bp, Homo sapiens
cttccttgcctatga

SEQ ID NO: 1811104 - DNA, 15 bp, Homo sapiens
ttccttgcctatgaa

SEQ ID NO: 1811105 - DNA, 15 bp, Homo sapiens
tccttgcctatgaaa

SEQ ID NO: 1811106 - DNA, 15 bp, Homo sapiens
ccttgcctatgaaat

SEQ ID NO: 1811107 - DNA, 15 bp, Homo sapiens
cttgcctatgaaatg

SEQ ID NO: 1811108 - DNA, 15 bp, Homo sapiens
ttgcctatgaaatgg

SEQ ID NO: 1811109 - DNA, 15 bp, Homo sapiens
tgcctatgaaatggg

SEQ ID NO: 1811110 - DNA, 15 bp, Homo sapiens
gcctatgaaatggga

SEQ ID NO: 1811111 - DNA, 15 bp, Homo sapiens
cctatgaaatgggat

SEQ ID NO: 1811112 - DNA, 15 bp, Homo sapiens
ctatgaaatgggata

SEQ ID NO: 1811113 - DNA, 15 bp, Homo sapiens
tatgaaatgggataa

SEQ ID NO: 1811114 - DNA, 15 bp, Homo sapiens
atgaaatgggataaa

SEQ ID NO: 1811115 - DNA, 15 bp, Homo sapiens
tgaaatgggataaaa

SEQ ID NO: 1811116 - DNA, 15 bp, Homo sapiens
gaaatgggataaaaa

SEQ ID NO: 1811117 - DNA, 15 bp, Homo sapiens
aaatgggataaaaac

SEQ ID NO: 1811118 - DNA, 15 bp, Homo sapiens
aatgggataaaaaca

SEQ ID NO: 1811119 - DNA, 15 bp, Homo sapiens
atgggataaaaacac

SEQ ID NO: 1811120 - DNA, 15 bp, Homo sapiens
tgggataaaaacacc

SEQ ID NO: 1811121 - DNA, 15 bp, Homo sapiens
gggataaaaacaccc

SEQ ID NO: 1811122 - DNA, 15 bp, Homo sapiens
ggataaaaacaccca

SEQ ID NO: 1811123 - DNA, 15 bp, Homo sapiens
gataaaaacacccat

SEQ ID NO: 1811124 - DNA, 15 bp, Homo sapiens
ataaaaacacccatt

SEQ ID NO: 1811125 - DNA, 15 bp, Homo sapiens
taaaaacacccattc

SEQ ID NO: 1811126 - DNA, 15 bp, Homo sapiens
aaaaacacccattct

SEQ ID NO: 1811127 - DNA, 15 bp, Homo sapiens
aaaacacccattcta

SEQ ID NO: 1811128 - DNA, 15 bp, Homo sapiens
aaacacccattctac

SEQ ID NO: 1811129 - DNA, 15 bp, Homo sapiens
aacacccattctaca

SEQ ID NO: 1811130 - DNA, 15 bp, Homo sapiens
acacccattctacag

SEQ ID NO: 1811131 - DNA, 15 bp, Homo sapiens
cacccattctacagg

SEQ ID NO: 1811132 - DNA, 15 bp, Homo sapiens
acccattctacaggg

SEQ ID NO: 1811133 - DNA, 15 bp, Homo sapiens
cccattctacagggc

SEQ ID NO: 1811134 - DNA, 15 bp, Homo sapiens
ccattctacagggcc

SEQ ID NO: 1811135 - DNA, 15 bp, Homo sapiens
cattctacagggcca

SEQ ID NO: 1811136 - DNA, 15 bp, Homo sapiens
attctacagggccat

SEQ ID NO: 1811137 - DNA, 15 bp, Homo sapiens
ttctacagggccatg

SEQ ID NO: 1811138 - DNA, 15 bp, Homo sapiens
tctacagggccatgt

SEQ ID NO: 1811139 - DNA, 15 bp, Homo sapiens
ctacagggccatgtg

SEQ ID NO: 1811140 - DNA, 15 bp, Homo sapiens
tacagggccatgtgg

SEQ ID NO: 1811141 - DNA, 15 bp, Homo sapiens
acagggccatgtggc

SEQ ID NO: 1811142 - DNA, 15 bp, Homo sapiens
cagggccatgtggcc

SEQ ID NO: 1811143 - DNA, 15 bp, Homo sapiens
agggccatgtggcca

SEQ ID NO: 1811144 - DNA, 15 bp, Homo sapiens
gggccatgtggccac

SEQ ID NO: 1811145 - DNA, 15 bp, Homo sapiens
ggccatgtggccact

SEQ ID NO: 1811146 - DNA, 15 bp, Homo sapiens
gccatgtggccactc

SEQ ID NO: 1811147 - DNA, 15 bp, Homo sapiens
ccatgtggccactca

SEQ ID NO: 1811148 - DNA, 15 bp, Homo sapiens
catgtggccactcat

SEQ ID NO: 1811149 - DNA, 15 bp, Homo sapiens
atgtggccactcatt

SEQ ID NO: 1811150 - DNA, 15 bp, Homo sapiens
tgtggccactcattt

SEQ ID NO: 1811151 - DNA, 15 bp, Homo sapiens
gtggccactcattta

SEQ ID NO: 1811152 - DNA, 15 bp, Homo sapiens
tggccactcatttat

SEQ ID NO: 1811153 - DNA, 15 bp, Homo sapiens
ggccactcatttatt

SEQ ID NO: 1811154 - DNA, 15 bp, Homo sapiens
gccactcatttattt

SEQ ID NO: 1811155 - DNA, 15 bp, Homo sapiens
ccactcatttatttc

SEQ ID NO: 1811156 - DNA, 15 bp, Homo sapiens
cactcatttatttct

SEQ ID NO: 1811157 - DNA, 15 bp, Homo sapiens
actcatttatttctc

SEQ ID NO: 1811158 - DNA, 15 bp, Homo sapiens
ctcatttatttctca

SEQ ID NO: 1811159 - DNA, 15 bp, Homo sapiens
tcatttatttctcat

SEQ ID NO: 1811160 - DNA, 15 bp, Homo sapiens
catttatttctcatc

SEQ ID NO: 1811161 - DNA, 15 bp, Homo sapiens
atttatttctcatct

SEQ ID NO: 1811162 - DNA, 15 bp, Homo sapiens
tttatttctcatcta

SEQ ID NO: 1811163 - DNA, 15 bp, Homo sapiens
ttatttctcatctac

SEQ ID NO: 1811164 - DNA, 15 bp, Homo sapiens
tatttctcatctacc

SEQ ID NO: 1811165 - DNA, 15 bp, Homo sapiens
atttctcatctacca

SEQ ID NO: 1811166 - DNA, 15 bp, Homo sapiens
tttctcatctaccaa

SEQ ID NO: 1811167 - DNA, 15 bp, Homo sapiens
ttctcatctaccaaa

SEQ ID NO: 1811168 - DNA, 15 bp, Homo sapiens
tctcatctaccaaac

SEQ ID NO: 1811169 - DNA, 15 bp, Homo sapiens
ctcatctaccaaaca

SEQ ID NO: 1811170 - DNA, 15 bp, Homo sapiens
tcatctaccaaacac

SEQ ID NO: 1811171 - DNA, 15 bp, Homo sapiens
catctaccaaacacc

SEQ ID NO: 1811172 - DNA, 15 bp, Homo sapiens
atctaccaaacacct

SEQ ID NO: 1811173 - DNA, 15 bp, Homo sapiens
tctaccaaacaccta

SEQ ID NO: 1811174 - DNA, 15 bp, Homo sapiens
ctaccaaacacctac

SEQ ID NO: 1811175 - DNA, 15 bp, Homo sapiens
taccaaacacctact

SEQ ID NO: 1811176 - DNA, 15 bp, Homo sapiens
accaaacacctactc

SEQ ID NO: 1811177 - DNA, 15 bp, Homo sapiens
ccaaacacctactcg

SEQ ID NO: 1811178 - DNA, 15 bp, Homo sapiens
caaacacctactcga

SEQ ID NO: 1811179 - DNA, 15 bp, Homo sapiens
aaacacctactcgac

SEQ ID NO: 1811180 - DNA, 15 bp, Homo sapiens
aacacctactcgaca

SEQ ID NO: 1811181 - DNA, 15 bp, Homo sapiens
acacctactcgacag

SEQ ID NO: 1811182 - DNA, 15 bp, Homo sapiens
cacctactcgacagg

SEQ ID NO: 1811183 - DNA, 15 bp, Homo sapiens
acctactcgacaggg

SEQ ID NO: 1811184 - DNA, 15 bp, Homo sapiens
cctactcgacagggg

SEQ ID NO: 1811185 - DNA, 15 bp, Homo sapiens
ctactcgacaggggc

SEQ ID NO: 1811186 - DNA, 15 bp, Homo sapiens
tactcgacaggggct

SEQ ID NO: 1811187 - DNA, 15 bp, Homo sapiens
actcgacaggggctg

SEQ ID NO: 1811188 - DNA, 15 bp, Homo sapiens
ctcgacaggggctgg

SEQ ID NO: 1811189 - DNA, 15 bp, Homo sapiens
tcgacaggggctggc

SEQ ID NO: 1811190 - DNA, 15 bp, Homo sapiens
cgacaggggctggca

SEQ ID NO: 1811191 - DNA, 15 bp, Homo sapiens
gacaggggctggcaa

SEQ ID NO: 1811192 - DNA, 15 bp, Homo sapiens
acaggggctggcaat

SEQ ID NO: 1811193 - DNA, 15 bp, Homo sapiens
caggggctggcaatg

SEQ ID NO: 1811194 - DNA, 15 bp, Homo sapiens
aggggctggcaatgg

SEQ ID NO: 1811195 - DNA, 15 bp, Homo sapiens
ggggctggcaatggg

SEQ ID NO: 1811196 - DNA, 15 bp, Homo sapiens
gggctggcaatgggc

SEQ ID NO: 1811197 - DNA, 15 bp, Homo sapiens
ggctggcaatgggcg

SEQ ID NO: 1811198 - DNA, 15 bp, Homo sapiens
gctggcaatgggcgg

SEQ ID NO: 1811199 - DNA, 15 bp, Homo sapiens
ctggcaatgggcgga

SEQ ID NO: 1811200 - DNA, 15 bp, Homo sapiens
tggcaatgggcggaa

SEQ ID NO: 1811201 - DNA, 15 bp, Homo sapiens
ggcaatgggcggaaa

SEQ ID NO: 1811202 - DNA, 15 bp, Homo sapiens
gcaatgggcggaaat

SEQ ID NO: 1811203 - DNA, 15 bp, Homo sapiens
caatgggcggaaata

SEQ ID NO: 1811204 - DNA, 15 bp, Homo sapiens
aatgggcggaaataa

SEQ ID NO: 1811205 - DNA, 15 bp, Homo sapiens
atgggcggaaataaa

SEQ ID NO: 1811206 - DNA, 15 bp, Homo sapiens
tgggcggaaataaaa

SEQ ID NO: 1811207 - DNA, 15 bp, Homo sapiens
gggcggaaataaaaa

SEQ ID NO: 1811208 - DNA, 15 bp, Homo sapiens
ggcggaaataaaaac

SEQ ID NO: 1811209 - DNA, 15 bp, Homo sapiens
gcggaaataaaaact

SEQ ID NO: 1811210 - DNA, 15 bp, Homo sapiens
cggaaataaaaactc

SEQ ID NO: 1811211 - DNA, 15 bp, Homo sapiens
ggaaataaaaactca

SEQ ID NO: 1811212 - DNA, 15 bp, Homo sapiens
gaaataaaaactcag

SEQ ID NO: 1811213 - DNA, 15 bp, Homo sapiens
aaataaaaactcagt

SEQ ID NO: 1811214 - DNA, 15 bp, Homo sapiens
aataaaaactcagtt

SEQ ID NO: 1811215 - DNA, 15 bp, Homo sapiens
ataaaaactcagttc

SEQ ID NO: 1811216 - DNA, 15 bp, Homo sapiens
taaaaactcagttct

SEQ ID NO: 1811217 - DNA, 15 bp, Homo sapiens
aaaaactcagttctg

SEQ ID NO: 1811218 - DNA, 15 bp, Homo sapiens
aaaactcagttctgc

SEQ ID NO: 1811219 - DNA, 15 bp, Homo sapiens
aaactcagttctgcc

SEQ ID NO: 1811220 - DNA, 15 bp, Homo sapiens
aactcagttctgccg

SEQ ID NO: 1811221 - DNA, 15 bp, Homo sapiens
actcagttctgccgg

SEQ ID NO: 1811222 - DNA, 15 bp, Homo sapiens
ctcagttctgccggg

SEQ ID NO: 1811223 - DNA, 15 bp, Homo sapiens
tcagttctgccgggt

SEQ ID NO: 1811224 - DNA, 15 bp, Homo sapiens
cagttctgccgggtg

SEQ ID NO: 1811225 - DNA, 15 bp, Homo sapiens
agttctgccgggtgc

SEQ ID NO: 1811226 - DNA, 15 bp, Homo sapiens
gttctgccgggtgcg

SEQ ID NO: 1811227 - DNA, 15 bp, Homo sapiens
ttctgccgggtgcgg

SEQ ID NO: 1811228 - DNA, 15 bp, Homo sapiens
tctgccgggtgcggt

SEQ ID NO: 1811229 - DNA, 15 bp, Homo sapiens
ctgccgggtgcggtg

SEQ ID NO: 1811230 - DNA, 15 bp, Homo sapiens
tgccgggtgcggtgg

SEQ ID NO: 1811231 - DNA, 15 bp, Homo sapiens
gtaatcccagcagtg

SEQ ID NO: 1811232 - DNA, 15 bp, Homo sapiens
taatcccagcagtgt

SEQ ID NO: 1811233 - DNA, 15 bp, Homo sapiens
aatcccagcagtgtg

SEQ ID NO: 1811234 - DNA, 15 bp, Homo sapiens
atcccagcagtgtgg

SEQ ID NO: 1811235 - DNA, 15 bp, Homo sapiens
tcccagcagtgtggg

SEQ ID NO: 1811236 - DNA, 15 bp, Homo sapiens
cccagcagtgtggga

SEQ ID NO: 1811237 - DNA, 15 bp, Homo sapiens
ccagcagtgtgggag

SEQ ID NO: 1811238 - DNA, 15 bp, Homo sapiens
cagcagtgtgggagg

SEQ ID NO: 1811239 - DNA, 15 bp, Homo sapiens
agcagtgtgggaggc

SEQ ID NO: 1811240 - DNA, 15 bp, Homo sapiens
gcagtgtgggaggcg

SEQ ID NO: 1811241 - DNA, 15 bp, Homo sapiens
cagtgtgggaggcgg

SEQ ID NO: 1811242 - DNA, 15 bp, Homo sapiens
agtgtgggaggcgga

SEQ ID NO: 1811243 - DNA, 15 bp, Homo sapiens
gtgtgggaggcggag

SEQ ID NO: 1811244 - DNA, 15 bp, Homo sapiens
tgtgggaggcggagc

SEQ ID NO: 1811245 - DNA, 15 bp, Homo sapiens
gtgggaggcggagca

SEQ ID NO: 1811246 - DNA, 15 bp, Homo sapiens
tgggaggcggagcag

SEQ ID NO: 1811247 - DNA, 15 bp, Homo sapiens
gggaggcggagcagg

SEQ ID NO: 1811248 - DNA, 15 bp, Homo sapiens
ggaggcggagcagga

SEQ ID NO: 1811249 - DNA, 15 bp, Homo sapiens
gaggcggagcaggat

SEQ ID NO: 1811250 - DNA, 15 bp, Homo sapiens
aggcggagcaggatg

SEQ ID NO: 1811251 - DNA, 15 bp, Homo sapiens
ggcggagcaggatga

SEQ ID NO: 1811252 - DNA, 15 bp, Homo sapiens
gcggagcaggatgat

SEQ ID NO: 1811253 - DNA, 15 bp, Homo sapiens
cggagcaggatgatc

SEQ ID NO: 1811254 - DNA, 15 bp, Homo sapiens
ggagcaggatgatcc

SEQ ID NO: 1811255 - DNA, 15 bp, Homo sapiens
gagcaggatgatccc

SEQ ID NO: 1811256 - DNA, 15 bp, Homo sapiens
agcaggatgatccct

SEQ ID NO: 1811257 - DNA, 15 bp, Homo sapiens
gcaggatgatccctt

SEQ ID NO: 1811258 - DNA, 15 bp, Homo sapiens
caggatgatcccttg

SEQ ID NO: 1811259 - DNA, 15 bp, Homo sapiens
aggatgatcccttga

SEQ ID NO: 1811260 - DNA, 15 bp, Homo sapiens
ggatgatcccttgaa

SEQ ID NO: 1811261 - DNA, 15 bp, Homo sapiens
gatgatcccttgaat

SEQ ID NO: 1811262 - DNA, 15 bp, Homo sapiens
atgatcccttgaatc

SEQ ID NO: 1811263 - DNA, 15 bp, Homo sapiens
tgatcccttgaatcc

SEQ ID NO: 1811264 - DNA, 15 bp, Homo sapiens
gatcccttgaatcca

SEQ ID NO: 1811265 - DNA, 15 bp, Homo sapiens
atcccttgaatccag

SEQ ID NO: 1811266 - DNA, 15 bp, Homo sapiens
tcccttgaatccagg

SEQ ID NO: 1811267 - DNA, 15 bp, Homo sapiens
cccttgaatccagga

SEQ ID NO: 1811268 - DNA, 15 bp, Homo sapiens
ccttgaatccaggag

SEQ ID NO: 1811269 - DNA, 15 bp, Homo sapiens
cttgaatccaggagt

SEQ ID NO: 1811270 - DNA, 15 bp, Homo sapiens
ttgaatccaggagtt

SEQ ID NO: 1811271 - DNA, 15 bp, Homo sapiens
tgaatccaggagttt

SEQ ID NO: 1811272 - DNA, 15 bp, Homo sapiens
gaatccaggagtttg

SEQ ID NO: 1811273 - DNA, 15 bp, Homo sapiens
aatccaggagtttga

SEQ ID NO: 1811274 - DNA, 15 bp, Homo sapiens
atccaggagtttgag

SEQ ID NO: 1811275 - DNA, 15 bp, Homo sapiens
agtttgagaccagca

SEQ ID NO: 1811276 - DNA, 15 bp, Homo sapiens
gtttgagaccagcat

SEQ ID NO: 1811277 - DNA, 15 bp, Homo sapiens
tttgagaccagcata

SEQ ID NO: 1811278 - DNA, 15 bp, Homo sapiens
ttgagaccagcatag

SEQ ID NO: 1811279 - DNA, 15 bp, Homo sapiens
tgagaccagcatagg

SEQ ID NO: 1811280 - DNA, 15 bp, Homo sapiens
gagaccagcataggc

SEQ ID NO: 1811281 - DNA, 15 bp, Homo sapiens
agaccagcataggca

SEQ ID NO: 1811282 - DNA, 15 bp, Homo sapiens
gaccagcataggcaa

SEQ ID NO: 1811283 - DNA, 15 bp, Homo sapiens
accagcataggcaac

SEQ ID NO: 1811284 - DNA, 15 bp, Homo sapiens
ccagcataggcaaca

SEQ ID NO: 1811285 - DNA, 15 bp, Homo sapiens
cagcataggcaacat

SEQ ID NO: 1811286 - DNA, 15 bp, Homo sapiens
agcataggcaacata

SEQ ID NO: 1811287 - DNA, 15 bp, Homo sapiens
gcataggcaacatag

SEQ ID NO: 1811288 - DNA, 15 bp, Homo sapiens
cataggcaacatagt

SEQ ID NO: 1811289 - DNA, 15 bp, Homo sapiens
ataggcaacatagtg

SEQ ID NO: 1811290 - DNA, 15 bp, Homo sapiens
taggcaacatagtga

SEQ ID NO: 1811291 - DNA, 15 bp, Homo sapiens
catagtgagacccct

SEQ ID NO: 1811292 - DNA, 15 bp, Homo sapiens
atagtgagacccctg

SEQ ID NO: 1811293 - DNA, 15 bp, Homo sapiens
tagtgagacccctgt

SEQ ID NO: 1811294 - DNA, 15 bp, Homo sapiens
agtgagacccctgtc

SEQ ID NO: 1811295 - DNA, 15 bp, Homo sapiens
gtgagacccctgtct

SEQ ID NO: 1811296 - DNA, 15 bp, Homo sapiens
tgagacccctgtctc

SEQ ID NO: 1811297 - DNA, 15 bp, Homo sapiens
gagacccctgtctct

SEQ ID NO: 1811298 - DNA, 15 bp, Homo sapiens
agacccctgtctcta

SEQ ID NO: 1811299 - DNA, 15 bp, Homo sapiens
gacccctgtctctac

SEQ ID NO: 1811300 - DNA, 15 bp, Homo sapiens
acccctgtctctaca

SEQ ID NO: 1811301 - DNA, 15 bp, Homo sapiens
cccctgtctctacaa

SEQ ID NO: 1811302 - DNA, 15 bp, Homo sapiens
gtctctacaaaaaag

SEQ ID NO: 1811303 - DNA, 15 bp, Homo sapiens
tctctacaaaaaagc

SEQ ID NO: 1811304 - DNA, 15 bp, Homo sapiens
ctctacaaaaaagca

SEQ ID NO: 1811305 - DNA, 15 bp, Homo sapiens
tctacaaaaaagcaa

SEQ ID NO: 1811306 - DNA, 15 bp, Homo sapiens
ctacaaaaaagcaaa

SEQ ID NO: 1811307 - DNA, 15 bp, Homo sapiens
tacaaaaaagcaaaa

SEQ ID NO: 1811308 - DNA, 15 bp, Homo sapiens
acaaaaaagcaaaaa

SEQ ID NO: 1811309 - DNA, 15 bp, Homo sapiens
caaaaaagcaaaaat

SEQ ID NO: 1811310 - DNA, 15 bp, Homo sapiens
aaaaaagcaaaaatt

SEQ ID NO: 1811311 - DNA, 15 bp, Homo sapiens
aaaaagcaaaaatta

SEQ ID NO: 1811312 - DNA, 15 bp, Homo sapiens
aaaagcaaaaattac

SEQ ID NO: 1811313 - DNA, 15 bp, Homo sapiens
aaagcaaaaattacc

SEQ ID NO: 1811314 - DNA, 15 bp, Homo sapiens
aagcaaaaattacca

SEQ ID NO: 1811315 - DNA, 15 bp, Homo sapiens
agcaaaaattaccag

SEQ ID NO: 1811316 - DNA, 15 bp, Homo sapiens
gcaaaaattaccagg

SEQ ID NO: 1811317 - DNA, 15 bp, Homo sapiens
caaaaattaccaggc

SEQ ID NO: 1811318 - DNA, 15 bp, Homo sapiens
aaaaattaccaggcg

SEQ ID NO: 1811319 - DNA, 15 bp, Homo sapiens
aaaattaccaggcgt

SEQ ID NO: 1811320 - DNA, 15 bp, Homo sapiens
aaattaccaggcgtg

SEQ ID NO: 1811321 - DNA, 15 bp, Homo sapiens
aattaccaggcgtgg

SEQ ID NO: 1811322 - DNA, 15 bp, Homo sapiens
attaccaggcgtggt

SEQ ID NO: 1811323 - DNA, 15 bp, Homo sapiens
ttaccaggcgtggtg

SEQ ID NO: 1811324 - DNA, 15 bp, Homo sapiens
taccaggcgtggtgg

SEQ ID NO: 1811325 - DNA, 15 bp, Homo sapiens
caggcgtggtggcaa

SEQ ID NO: 1811326 - DNA, 15 bp, Homo sapiens
aggcgtggtggcaag

SEQ ID NO: 1811327 - DNA, 15 bp, Homo sapiens
ggcgtggtggcaagt

SEQ ID NO: 1811328 - DNA, 15 bp, Homo sapiens
gcgtggtggcaagtg

SEQ ID NO: 1811329 - DNA, 15 bp, Homo sapiens
cgtggtggcaagtgc

SEQ ID NO: 1811330 - DNA, 15 bp, Homo sapiens
gtggtggcaagtgct

SEQ ID NO: 1811331 - DNA, 15 bp, Homo sapiens
tggtggcaagtgctt

SEQ ID NO: 1811332 - DNA, 15 bp, Homo sapiens
ggtggcaagtgcttg

SEQ ID NO: 1811333 - DNA, 15 bp, Homo sapiens
gtggcaagtgcttgt

SEQ ID NO: 1811334 - DNA, 15 bp, Homo sapiens
tggcaagtgcttgtg

SEQ ID NO: 1811335 - DNA, 15 bp, Homo sapiens
ggcaagtgcttgtgg

SEQ ID NO: 1811336 - DNA, 15 bp, Homo sapiens
gcaagtgcttgtggt

SEQ ID NO: 1811337 - DNA, 15 bp, Homo sapiens
caagtgcttgtggta

SEQ ID NO: 1811338 - DNA, 15 bp, Homo sapiens
aagtgcttgtggtac

SEQ ID NO: 1811339 - DNA, 15 bp, Homo sapiens
agtgcttgtggtact

SEQ ID NO: 1811340 - DNA, 15 bp, Homo sapiens
gtgcttgtggtacta

SEQ ID NO: 1811341 - DNA, 15 bp, Homo sapiens
tgcttgtggtactac

SEQ ID NO: 1811342 - DNA, 15 bp, Homo sapiens
gcttgtggtactacc

SEQ ID NO: 1811343 - DNA, 15 bp, Homo sapiens
cttgtggtactacct

SEQ ID NO: 1811344 - DNA, 15 bp, Homo sapiens
ttgtggtactaccta

SEQ ID NO: 1811345 - DNA, 15 bp, Homo sapiens
tgtggtactacctac

SEQ ID NO: 1811346 - DNA, 15 bp, Homo sapiens
gtggtactacctact

SEQ ID NO: 1811347 - DNA, 15 bp, Homo sapiens
tggtactacctactt

SEQ ID NO: 1811348 - DNA, 15 bp, Homo sapiens
ggtactacctacttg

SEQ ID NO: 1811349 - DNA, 15 bp, Homo sapiens
gtactacctacttgg

SEQ ID NO: 1811350 - DNA, 15 bp, Homo sapiens
tactacctacttggg

SEQ ID NO: 1811351 - DNA, 15 bp, Homo sapiens
actacctacttggga

SEQ ID NO: 1811352 - DNA, 15 bp, Homo sapiens
ctacctacttgggaa

SEQ ID NO: 1811353 - DNA, 15 bp, Homo sapiens
tacctacttgggaag

SEQ ID NO: 1811354 - DNA, 15 bp, Homo sapiens
acctacttgggaagc

SEQ ID NO: 1811355 - DNA, 15 bp, Homo sapiens
cctacttgggaagct

SEQ ID NO: 1811356 - DNA, 15 bp, Homo sapiens
ctacttgggaagctg

SEQ ID NO: 1811357 - DNA, 15 bp, Homo sapiens
tacttgggaagctga

SEQ ID NO: 1811358 - DNA, 15 bp, Homo sapiens
acttgggaagctgag

SEQ ID NO: 1811359 - DNA, 15 bp, Homo sapiens
cttgagcccaggaga

SEQ ID NO: 1811360 - DNA, 15 bp, Homo sapiens
ttgagcccaggagat

SEQ ID NO: 1811361 - DNA, 15 bp, Homo sapiens
tgagcccaggagatt

SEQ ID NO: 1811362 - DNA, 15 bp, Homo sapiens
gagcccaggagatta

SEQ ID NO: 1811363 - DNA, 15 bp, Homo sapiens
agcccaggagattaa

SEQ ID NO: 1811364 - DNA, 15 bp, Homo sapiens
gcccaggagattaag

SEQ ID NO: 1811365 - DNA, 15 bp, Homo sapiens
cccaggagattaaga

SEQ ID NO: 1811366 - DNA, 15 bp, Homo sapiens
ccaggagattaagac

SEQ ID NO: 1811367 - DNA, 15 bp, Homo sapiens
caggagattaagact

SEQ ID NO: 1811368 - DNA, 15 bp, Homo sapiens
aggagattaagactg

SEQ ID NO: 1811369 - DNA, 15 bp, Homo sapiens
ggagattaagactgc

SEQ ID NO: 1811370 - DNA, 15 bp, Homo sapiens
gagattaagactgca

SEQ ID NO: 1811371 - DNA, 15 bp, Homo sapiens
agattaagactgcag

SEQ ID NO: 1811372 - DNA, 15 bp, Homo sapiens
gattaagactgcagt

SEQ ID NO: 1811373 - DNA, 15 bp, Homo sapiens
attaagactgcagtg

SEQ ID NO: 1811374 - DNA, 15 bp, Homo sapiens
ttaagactgcagtga

SEQ ID NO: 1811375 - DNA, 15 bp, Homo sapiens
taagactgcagtgag

SEQ ID NO: 1811376 - DNA, 15 bp, Homo sapiens
aagactgcagtgagg

SEQ ID NO: 1811377 - DNA, 15 bp, Homo sapiens
agactgcagtgaggg

SEQ ID NO: 1811378 - DNA, 15 bp, Homo sapiens
gactgcagtgagggg

SEQ ID NO: 1811379 - DNA, 15 bp, Homo sapiens
actgcagtgaggggc

SEQ ID NO: 1811380 - DNA, 15 bp, Homo sapiens
ctgcagtgaggggcc

SEQ ID NO: 1811381 - DNA, 15 bp, Homo sapiens
tgcagtgaggggccg

SEQ ID NO: 1811382 - DNA, 15 bp, Homo sapiens
gcagtgaggggccgg

SEQ ID NO: 1811383 - DNA, 15 bp, Homo sapiens
cagtgaggggccggg

SEQ ID NO: 1811384 - DNA, 15 bp, Homo sapiens
agtgaggggccgggc

SEQ ID NO: 1811385 - DNA, 15 bp, Homo sapiens
gtgaggggccgggcg

SEQ ID NO: 1811386 - DNA, 15 bp, Homo sapiens
tgaggggccgggcgc

SEQ ID NO: 1811387 - DNA, 15 bp, Homo sapiens
gaggggccgggcgcg

SEQ ID NO: 1811388 - DNA, 15 bp, Homo sapiens
aggggccgggcgcgg

SEQ ID NO: 1811389 - DNA, 15 bp, Homo sapiens
ggggccgggcgcggt

SEQ ID NO: 1811390 - DNA, 15 bp, Homo sapiens
ttgggaggcggaggt

SEQ ID NO: 1811391 - DNA, 15 bp, Homo sapiens
tgggaggcggaggtg

SEQ ID NO: 1811392 - DNA, 15 bp, Homo sapiens
gggaggcggaggtgg

SEQ ID NO: 1811393 - DNA, 15 bp, Homo sapiens
ggaggcggaggtggg

SEQ ID NO: 1811394 - DNA, 15 bp, Homo sapiens
gaggcggaggtgggt

SEQ ID NO: 1811395 - DNA, 15 bp, Homo sapiens
aggcggaggtgggtg

SEQ ID NO: 1811396 - DNA, 15 bp, Homo sapiens
ggcggaggtgggtgg

SEQ ID NO: 1811397 - DNA, 15 bp, Homo sapiens
gcggaggtgggtgga

SEQ ID NO: 1811398 - DNA, 15 bp, Homo sapiens
cggaggtgggtggat

SEQ ID NO: 1811399 - DNA, 15 bp, Homo sapiens
ggaggtgggtggatc

SEQ ID NO: 1811400 - DNA, 15 bp, Homo sapiens
ggtgggtggatcacg

SEQ ID NO: 1811401 - DNA, 15 bp, Homo sapiens
gtgggtggatcacga

SEQ ID NO: 1811402 - DNA, 15 bp, Homo sapiens
tgggtggatcacgag

SEQ ID NO: 1811403 - DNA, 15 bp, Homo sapiens
gctgggtgtggtggg

SEQ ID NO: 1811404 - DNA, 15 bp, Homo sapiens
ctgggtgtggtgggg

SEQ ID NO: 1811405 - DNA, 15 bp, Homo sapiens
tgggtgtggtggggg

SEQ ID NO: 1811406 - DNA, 15 bp, Homo sapiens
gggtgtggtgggggg

SEQ ID NO: 1811407 - DNA, 15 bp, Homo sapiens
ggtgtggtggggggc

SEQ ID NO: 1811408 - DNA, 15 bp, Homo sapiens
gtgtggtggggggcg

SEQ ID NO: 1811409 - DNA, 15 bp, Homo sapiens
tgtggtggggggcgc

SEQ ID NO: 1811410 - DNA, 15 bp, Homo sapiens
gtggtggggggcgcc

SEQ ID NO: 1811411 - DNA, 15 bp, Homo sapiens
tggtggggggcgcct

SEQ ID NO: 1811412 - DNA, 15 bp, Homo sapiens
ggtggggggcgcctg

SEQ ID NO: 1811413 - DNA, 15 bp, Homo sapiens
gtggggggcgcctgt

SEQ ID NO: 1811414 - DNA, 15 bp, Homo sapiens
tggggggcgcctgta

SEQ ID NO: 1811415 - DNA, 15 bp, Homo sapiens
ggggggcgcctgtag

SEQ ID NO: 1811416 - DNA, 15 bp, Homo sapiens
gggggcgcctgtagt

SEQ ID NO: 1811417 - DNA, 15 bp, Homo sapiens
ggggcgcctgtagtc

SEQ ID NO: 1811418 - DNA, 15 bp, Homo sapiens
tgcagtgagctgagc

SEQ ID NO: 1811419 - DNA, 15 bp, Homo sapiens
gcagtgagctgagct

SEQ ID NO: 1811420 - DNA, 15 bp, Homo sapiens
cagtgagctgagctc

SEQ ID NO: 1811421 - DNA, 15 bp, Homo sapiens
agtgagctgagctcg

SEQ ID NO: 1811422 - DNA, 15 bp, Homo sapiens
gtgagctgagctcgc

SEQ ID NO: 1811423 - DNA, 15 bp, Homo sapiens
tgagctgagctcgca

SEQ ID NO: 1811424 - DNA, 15 bp, Homo sapiens
gagctgagctcgcac

SEQ ID NO: 1811425 - DNA, 15 bp, Homo sapiens
agctgagctcgcacc

SEQ ID NO: 1811426 - DNA, 15 bp, Homo sapiens
gctgagctcgcacca

SEQ ID NO: 1811427 - DNA, 15 bp, Homo sapiens
ctgagctcgcaccac

SEQ ID NO: 1811428 - DNA, 15 bp, Homo sapiens
tgagctcgcaccact

SEQ ID NO: 1811429 - DNA, 15 bp, Homo sapiens
gagctcgcaccactg

SEQ ID NO: 1811430 - DNA, 15 bp, Homo sapiens
agctcgcaccactgc

SEQ ID NO: 1811431 - DNA, 15 bp, Homo sapiens
gctcgcaccactgca

SEQ ID NO: 1811432 - DNA, 15 bp, Homo sapiens
ctcgcaccactgcac

SEQ ID NO: 1811433 - DNA, 15 bp, Homo sapiens
aacctctgcctccct

SEQ ID NO: 1811434 - DNA, 15 bp, Homo sapiens
acctctgcctccctg

SEQ ID NO: 1811435 - DNA, 15 bp, Homo sapiens
cctctgcctccctgg

SEQ ID NO: 1811436 - DNA, 15 bp, Homo sapiens
ctctgcctccctggt

SEQ ID NO: 1811437 - DNA, 15 bp, Homo sapiens
tgcctccctggttca

SEQ ID NO: 1811438 - DNA, 15 bp, Homo sapiens
gcctccctggttcaa

SEQ ID NO: 1811439 - DNA, 15 bp, Homo sapiens
cctccctggttcaag

SEQ ID NO: 1811440 - DNA, 15 bp, Homo sapiens
ctccctggttcaagg

SEQ ID NO: 1811441 - DNA, 15 bp, Homo sapiens
tccctggttcaagga

SEQ ID NO: 1811442 - DNA, 15 bp, Homo sapiens
ccctggttcaaggaa

SEQ ID NO: 1811443 - DNA, 15 bp, Homo sapiens
cctggttcaaggaat

SEQ ID NO: 1811444 - DNA, 15 bp, Homo sapiens
ctggttcaaggaatt

SEQ ID NO: 1811445 - DNA, 15 bp, Homo sapiens
tggttcaaggaattc

SEQ ID NO: 1811446 - DNA, 15 bp, Homo sapiens
ttcaaggaattctcc

SEQ ID NO: 1811447 - DNA, 15 bp, Homo sapiens
tcaaggaattctcct

SEQ ID NO: 1811448 - DNA, 15 bp, Homo sapiens
caaggaattctcctg

SEQ ID NO: 1811449 - DNA, 15 bp, Homo sapiens
aaggaattctcctgc

SEQ ID NO: 1811450 - DNA, 15 bp, Homo sapiens
aggaattctcctgcc

SEQ ID NO: 1811451 - DNA, 15 bp, Homo sapiens
ggaattctcctgcct

SEQ ID NO: 1811452 - DNA, 15 bp, Homo sapiens
gaattctcctgcctc

SEQ ID NO: 1811453 - DNA, 15 bp, Homo sapiens
acaggcacctgccat

SEQ ID NO: 1811454 - DNA, 15 bp, Homo sapiens
caggcacctgccatc

SEQ ID NO: 1811455 - DNA, 15 bp, Homo sapiens
aggcacctgccatca

SEQ ID NO: 1811456 - DNA, 15 bp, Homo sapiens
ggcacctgccatcat

SEQ ID NO: 1811457 - DNA, 15 bp, Homo sapiens
gcacctgccatcatg

SEQ ID NO: 1811458 - DNA, 15 bp, Homo sapiens
cacctgccatcatgc

SEQ ID NO: 1811459 - DNA, 15 bp, Homo sapiens
acctgccatcatgcc

SEQ ID NO: 1811460 - DNA, 15 bp, Homo sapiens
cctgccatcatgccc

SEQ ID NO: 1811461 - DNA, 15 bp, Homo sapiens
ctgccatcatgccca

SEQ ID NO: 1811462 - DNA, 15 bp, Homo sapiens
tgccatcatgcccag

SEQ ID NO: 1811463 - DNA, 15 bp, Homo sapiens
gccatcatgcccagc

SEQ ID NO: 1811464 - DNA, 15 bp, Homo sapiens
ccatcatgcccagct

SEQ ID NO: 1811465 - DNA, 15 bp, Homo sapiens
catcatgcccagcta

SEQ ID NO: 1811466 - DNA, 15 bp, Homo sapiens
atcatgcccagctaa

SEQ ID NO: 1811467 - DNA, 15 bp, Homo sapiens
tcatgcccagctaat

SEQ ID NO: 1811468 - DNA, 15 bp, Homo sapiens
ttcaccatgttgcct

SEQ ID NO: 1811469 - DNA, 15 bp, Homo sapiens
tcaccatgttgccta

SEQ ID NO: 1811470 - DNA, 15 bp, Homo sapiens
caccatgttgcctag

SEQ ID NO: 1811471 - DNA, 15 bp, Homo sapiens
accatgttgcctagg

SEQ ID NO: 1811472 - DNA, 15 bp, Homo sapiens
ccatgttgcctaggc

SEQ ID NO: 1811473 - DNA, 15 bp, Homo sapiens
catgttgcctaggct

SEQ ID NO: 1811474 - DNA, 15 bp, Homo sapiens
gcctaggctggtctc

SEQ ID NO: 1811475 - DNA, 15 bp, Homo sapiens
cctaggctggtctca

SEQ ID NO: 1811476 - DNA, 15 bp, Homo sapiens
ctaggctggtctcaa

SEQ ID NO: 1811477 - DNA, 15 bp, Homo sapiens
taggctggtctcaaa

SEQ ID NO: 1811478 - DNA, 15 bp, Homo sapiens
tggtctcaaactccc

SEQ ID NO: 1811479 - DNA, 15 bp, Homo sapiens
ggtctcaaactcccg

SEQ ID NO: 1811480 - DNA, 15 bp, Homo sapiens
gtctcaaactcccgg

SEQ ID NO: 1811481 - DNA, 15 bp, Homo sapiens
tctcaaactcccggg

SEQ ID NO: 1811482 - DNA, 15 bp, Homo sapiens
ctcaaactcccgggc

SEQ ID NO: 1811483 - DNA, 15 bp, Homo sapiens
tcaaactcccgggct

SEQ ID NO: 1811484 - DNA, 15 bp, Homo sapiens
caaactcccgggctc

SEQ ID NO: 1811485 - DNA, 15 bp, Homo sapiens
aaactcccgggctca

SEQ ID NO: 1811486 - DNA, 15 bp, Homo sapiens
aactcccgggctcaa

SEQ ID NO: 1811487 - DNA, 15 bp, Homo sapiens
actcccgggctcaag

SEQ ID NO: 1811488 - DNA, 15 bp, Homo sapiens
ctcccgggctcaagc

SEQ ID NO: 1811489 - DNA, 15 bp, Homo sapiens
tcccgggctcaagcg

SEQ ID NO: 1811490 - DNA, 15 bp, Homo sapiens
cccgggctcaagcga

SEQ ID NO: 1811491 - DNA, 15 bp, Homo sapiens
ccgggctcaagcgat

SEQ ID NO: 1811492 - DNA, 15 bp, Homo sapiens
cgggctcaagcgatc

SEQ ID NO: 1811493 - DNA, 15 bp, Homo sapiens
ggctcaagcgatcca

SEQ ID NO: 1811494 - DNA, 15 bp, Homo sapiens
gctcaagcgatccac

SEQ ID NO: 1811495 - DNA, 15 bp, Homo sapiens
ctcaagcgatccacc

SEQ ID NO: 1811496 - DNA, 15 bp, Homo sapiens
tcaagcgatccaccc

SEQ ID NO: 1811497 - DNA, 15 bp, Homo sapiens
caagcgatccacccg

SEQ ID NO: 1811498 - DNA, 15 bp, Homo sapiens
aagcgatccacccgc

SEQ ID NO: 1811499 - DNA, 15 bp, Homo sapiens
agcgatccacccgcc

SEQ ID NO: 1811500 - DNA, 15 bp, Homo sapiens
gcgatccacccgcct

SEQ ID NO: 1811501 - DNA, 15 bp, Homo sapiens
cgatccacccgcctt

SEQ ID NO: 1811502 - DNA, 15 bp, Homo sapiens
cgcgcctggccagaa

SEQ ID NO: 1811503 - DNA, 15 bp, Homo sapiens
gcgcctggccagaat

SEQ ID NO: 1811504 - DNA, 15 bp, Homo sapiens
cgcctggccagaata

SEQ ID NO: 1811505 - DNA, 15 bp, Homo sapiens
gcctggccagaataa

SEQ ID NO: 1811506 - DNA, 15 bp, Homo sapiens
cctggccagaataat

SEQ ID NO: 1811507 - DNA, 15 bp, Homo sapiens
ctggccagaataatc

SEQ ID NO: 1811508 - DNA, 15 bp, Homo sapiens
tggccagaataatct

SEQ ID NO: 1811509 - DNA, 15 bp, Homo sapiens
ggccagaataatctt

SEQ ID NO: 1811510 - DNA, 15 bp, Homo sapiens
gccagaataatctta

SEQ ID NO: 1811511 - DNA, 15 bp, Homo sapiens
ccagaataatcttaa

SEQ ID NO: 1811512 - DNA, 15 bp, Homo sapiens
cagaataatcttaag

SEQ ID NO: 1811513 - DNA, 15 bp, Homo sapiens
agaataatcttaagg

SEQ ID NO: 1811514 - DNA, 15 bp, Homo sapiens
gaataatcttaaggg

SEQ ID NO: 1811515 - DNA, 15 bp, Homo sapiens
aataatcttaagggc

SEQ ID NO: 1811516 - DNA, 15 bp, Homo sapiens
ataatcttaagggct

SEQ ID NO: 1811517 - DNA, 15 bp, Homo sapiens
taatcttaagggcta

SEQ ID NO: 1811518 - DNA, 15 bp, Homo sapiens
aatcttaagggctat

SEQ ID NO: 1811519 - DNA, 15 bp, Homo sapiens
atcttaagggctatg

SEQ ID NO: 1811520 - DNA, 15 bp, Homo sapiens
tcttaagggctatga

SEQ ID NO: 1811521 - DNA, 15 bp, Homo sapiens
cttaagggctatgat

SEQ ID NO: 1811522 - DNA, 15 bp, Homo sapiens
ttaagggctatgatg

SEQ ID NO: 1811523 - DNA, 15 bp, Homo sapiens
taagggctatgatgg

SEQ ID NO: 1811524 - DNA, 15 bp, Homo sapiens
aagggctatgatggg

SEQ ID NO: 1811525 - DNA, 15 bp, Homo sapiens
agggctatgatggga

SEQ ID NO: 1811526 - DNA, 15 bp, Homo sapiens
gggctatgatgggag

SEQ ID NO: 1811527 - DNA, 15 bp, Homo sapiens
ggctatgatgggaga

SEQ ID NO: 1811528 - DNA, 15 bp, Homo sapiens
gctatgatgggagaa

SEQ ID NO: 1811529 - DNA, 15 bp, Homo sapiens
ctatgatgggagaag

SEQ ID NO: 1811530 - DNA, 15 bp, Homo sapiens
tatgatgggagaagt

SEQ ID NO: 1811531 - DNA, 15 bp, Homo sapiens
atgatgggagaagta

SEQ ID NO: 1811532 - DNA, 15 bp, Homo sapiens
tgatgggagaagtac

SEQ ID NO: 1811533 - DNA, 15 bp, Homo sapiens
gatgggagaagtaca

SEQ ID NO: 1811534 - DNA, 15 bp, Homo sapiens
atgggagaagtacag

SEQ ID NO: 1811535 - DNA, 15 bp, Homo sapiens
tgggagaagtacagg

SEQ ID NO: 1811536 - DNA, 15 bp, Homo sapiens
gggagaagtacaggg

SEQ ID NO: 1811537 - DNA, 15 bp, Homo sapiens
ggagaagtacaggga

SEQ ID NO: 1811538 - DNA, 15 bp, Homo sapiens
gagaagtacagggac

SEQ ID NO: 1811539 - DNA, 15 bp, Homo sapiens
agaagtacagggact

SEQ ID NO: 1811540 - DNA, 15 bp, Homo sapiens
gaagtacagggactg

SEQ ID NO: 1811541 - DNA, 15 bp, Homo sapiens
aagtacagggactgg

SEQ ID NO: 1811542 - DNA, 15 bp, Homo sapiens
agtacagggactggt

SEQ ID NO: 1811543 - DNA, 15 bp, Homo sapiens
gtacagggactggta

SEQ ID NO: 1811544 - DNA, 15 bp, Homo sapiens
tacagggactggtac

SEQ ID NO: 1811545 - DNA, 15 bp, Homo sapiens
acagggactggtacc

SEQ ID NO: 1811546 - DNA, 15 bp, Homo sapiens
cagggactggtacct

SEQ ID NO: 1811547 - DNA, 15 bp, Homo sapiens
agggactggtacctc

SEQ ID NO: 1811548 - DNA, 15 bp, Homo sapiens
gggactggtacctct

SEQ ID NO: 1811549 - DNA, 15 bp, Homo sapiens
ggactggtacctctc

SEQ ID NO: 1811550 - DNA, 15 bp, Homo sapiens
gactggtacctctca

SEQ ID NO: 1811551 - DNA, 15 bp, Homo sapiens
actggtacctctcac

SEQ ID NO: 1811552 - DNA, 15 bp, Homo sapiens
ctggtacctctcact

SEQ ID NO: 1811553 - DNA, 15 bp, Homo sapiens
tggtacctctcactc

SEQ ID NO: 1811554 - DNA, 15 bp, Homo sapiens
ggtacctctcactcc

SEQ ID NO: 1811555 - DNA, 15 bp, Homo sapiens
gtacctctcactccc

SEQ ID NO: 1811556 - DNA, 15 bp, Homo sapiens
tacctctcactccct

SEQ ID NO: 1811557 - DNA, 15 bp, Homo sapiens
acctctcactccctc

SEQ ID NO: 1811558 - DNA, 15 bp, Homo sapiens
cctctcactccctca

SEQ ID NO: 1811559 - DNA, 15 bp, Homo sapiens
ctctcactccctcac

SEQ ID NO: 1811560 - DNA, 15 bp, Homo sapiens
tctcactccctcact

SEQ ID NO: 1811561 - DNA, 15 bp, Homo sapiens
ctcactccctcactc

SEQ ID NO: 1811562 - DNA, 15 bp, Homo sapiens
tcactccctcactcc

SEQ ID NO: 1811563 - DNA, 15 bp, Homo sapiens
cactccctcactccc

SEQ ID NO: 1811564 - DNA, 15 bp, Homo sapiens
actccctcactccca

SEQ ID NO: 1811565 - DNA, 15 bp, Homo sapiens
ctccctcactcccac

SEQ ID NO: 1811566 - DNA, 15 bp, Homo sapiens
tccctcactcccacc

SEQ ID NO: 1811567 - DNA, 15 bp, Homo sapiens
ccctcactcccacct

SEQ ID NO: 1811568 - DNA, 15 bp, Homo sapiens
tcactcccaccttcc

SEQ ID NO: 1811569 - DNA, 15 bp, Homo sapiens
cactcccaccttcca

SEQ ID NO: 1811570 - DNA, 15 bp, Homo sapiens
actcccaccttccag

SEQ ID NO: 1811571 - DNA, 15 bp, Homo sapiens
ctcccaccttccagg

SEQ ID NO: 1811572 - DNA, 15 bp, Homo sapiens
tcccaccttccaggc

SEQ ID NO: 1811573 - DNA, 15 bp, Homo sapiens
cccaccttccaggcc

SEQ ID NO: 1811574 - DNA, 15 bp, Homo sapiens
ccaccttccaggcct

SEQ ID NO: 1811575 - DNA, 15 bp, Homo sapiens
caccttccaggcctg

SEQ ID NO: 1811576 - DNA, 15 bp, Homo sapiens
accttccaggcctga

SEQ ID NO: 1811577 - DNA, 15 bp, Homo sapiens
ccttccaggcctgat

SEQ ID NO: 1811578 - DNA, 15 bp, Homo sapiens
cttccaggcctgatg

SEQ ID NO: 1811579 - DNA, 15 bp, Homo sapiens
ttccaggcctgatgc

SEQ ID NO: 1811580 - DNA, 15 bp, Homo sapiens
tccaggcctgatgcc

SEQ ID NO: 1811581 - DNA, 15 bp, Homo sapiens
ccaggcctgatgcct

SEQ ID NO: 1811582 - DNA, 15 bp, Homo sapiens
caggcctgatgcctt

SEQ ID NO: 1811583 - DNA, 15 bp, Homo sapiens
aggcctgatgccttt

SEQ ID NO: 1811584 - DNA, 15 bp, Homo sapiens
ggcctgatgccttta

SEQ ID NO: 1811585 - DNA, 15 bp, Homo sapiens
gcctgatgcctttaa

SEQ ID NO: 1811586 - DNA, 15 bp, Homo sapiens
cctgatgcctttaac

SEQ ID NO: 1811587 - DNA, 15 bp, Homo sapiens
ctgatgcctttaacc

SEQ ID NO: 1811588 - DNA, 15 bp, Homo sapiens
tgatgcctttaacct

SEQ ID NO: 1811589 - DNA, 15 bp, Homo sapiens
gatgcctttaaccta

SEQ ID NO: 1811590 - DNA, 15 bp, Homo sapiens
atgcctttaacctac

SEQ ID NO: 1811591 - DNA, 15 bp, Homo sapiens
tgcctttaacctact

SEQ ID NO: 1811592 - DNA, 15 bp, Homo sapiens
gcctttaacctactt

SEQ ID NO: 1811593 - DNA, 15 bp, Homo sapiens
cctttaacctacttc

SEQ ID NO: 1811594 - DNA, 15 bp, Homo sapiens
ctttaacctacttca

SEQ ID NO: 1811595 - DNA, 15 bp, Homo sapiens
tttaacctacttcag

SEQ ID NO: 1811596 - DNA, 15 bp, Homo sapiens
ttaacctacttcagg

SEQ ID NO: 1811597 - DNA, 15 bp, Homo sapiens
taacctacttcagga

SEQ ID NO: 1811598 - DNA, 15 bp, Homo sapiens
aacctacttcaggaa

SEQ ID NO: 1811599 - DNA, 15 bp, Homo sapiens
acctacttcaggaaa

SEQ ID NO: 1811600 - DNA, 15 bp, Homo sapiens
cctacttcaggaaaa

SEQ ID NO: 1811601 - DNA, 15 bp, Homo sapiens
ctacttcaggaaaat

SEQ ID NO: 1811602 - DNA, 15 bp, Homo sapiens
tacttcaggaaaatc

SEQ ID NO: 1811603 - DNA, 15 bp, Homo sapiens
acttcaggaaaatct

SEQ ID NO: 1811604 - DNA, 15 bp, Homo sapiens
cttcaggaaaatctc

SEQ ID NO: 1811605 - DNA, 15 bp, Homo sapiens
ttcaggaaaatctct

SEQ ID NO: 1811606 - DNA, 15 bp, Homo sapiens
tcaggaaaatctcta

SEQ ID NO: 1811607 - DNA, 15 bp, Homo sapiens
caggaaaatctctaa

SEQ ID NO: 1811608 - DNA, 15 bp, Homo sapiens
aggaaaatctctaag

SEQ ID NO: 1811609 - DNA, 15 bp, Homo sapiens
ggaaaatctctaagg

SEQ ID NO: 1811610 - DNA, 15 bp, Homo sapiens
gaaaatctctaagga

SEQ ID NO: 1811611 - DNA, 15 bp, Homo sapiens
aaaatctctaaggat

SEQ ID NO: 1811612 - DNA, 15 bp, Homo sapiens
aaatctctaaggatg

SEQ ID NO: 1811613 - DNA, 15 bp, Homo sapiens
aatctctaaggatga

SEQ ID NO: 1811614 - DNA, 15 bp, Homo sapiens
atctctaaggatgaa

SEQ ID NO: 1811615 - DNA, 15 bp, Homo sapiens
tctctaaggatgaaa

SEQ ID NO: 1811616 - DNA, 15 bp, Homo sapiens
ctctaaggatgaaaa

SEQ ID NO: 1811617 - DNA, 15 bp, Homo sapiens
tctaaggatgaaaat

SEQ ID NO: 1811618 - DNA, 15 bp, Homo sapiens
ctaaggatgaaaatt

SEQ ID NO: 1811619 - DNA, 15 bp, Homo sapiens
taaggatgaaaattc

SEQ ID NO: 1811620 - DNA, 15 bp, Homo sapiens
aaggatgaaaattcc

SEQ ID NO: 1811621 - DNA, 15 bp, Homo sapiens
aggatgaaaattcct

SEQ ID NO: 1811622 - DNA, 15 bp, Homo sapiens
ggatgaaaattcctt

SEQ ID NO: 1811623 - DNA, 15 bp, Homo sapiens
gatgaaaattccttg

SEQ ID NO: 1811624 - DNA, 15 bp, Homo sapiens
atgaaaattccttgg

SEQ ID NO: 1811625 - DNA, 15 bp, Homo sapiens
tgaaaattccttggc

SEQ ID NO: 1811626 - DNA, 15 bp, Homo sapiens
gaaaattccttggcc

SEQ ID NO: 1811627 - DNA, 15 bp, Homo sapiens
aaaattccttggcca

SEQ ID NO: 1811628 - DNA, 15 bp, Homo sapiens
aaattccttggccac

SEQ ID NO: 1811629 - DNA, 15 bp, Homo sapiens
aattccttggccacc

SEQ ID NO: 1811630 - DNA, 15 bp, Homo sapiens
attccttggccacct

SEQ ID NO: 1811631 - DNA, 15 bp, Homo sapiens
ttccttggccaccta

SEQ ID NO: 1811632 - DNA, 15 bp, Homo sapiens
tccttggccacctag

SEQ ID NO: 1811633 - DNA, 15 bp, Homo sapiens
ccttggccacctaga

SEQ ID NO: 1811634 - DNA, 15 bp, Homo sapiens
cttggccacctagat

SEQ ID NO: 1811635 - DNA, 15 bp, Homo sapiens
ttggccacctagatt

SEQ ID NO: 1811636 - DNA, 15 bp, Homo sapiens
tggccacctagattg

SEQ ID NO: 1811637 - DNA, 15 bp, Homo sapiens
ggccacctagattgt

SEQ ID NO: 1811638 - DNA, 15 bp, Homo sapiens
gccacctagattgtc

SEQ ID NO: 1811639 - DNA, 15 bp, Homo sapiens
ccacctagattgtct

SEQ ID NO: 1811640 - DNA, 15 bp, Homo sapiens
cacctagattgtctt

SEQ ID NO: 1811641 - DNA, 15 bp, Homo sapiens
acctagattgtcttg

SEQ ID NO: 1811642 - DNA, 15 bp, Homo sapiens
cctagattgtcttga

SEQ ID NO: 1811643 - DNA, 15 bp, Homo sapiens
ctagattgtcttgaa

SEQ ID NO: 1811644 - DNA, 15 bp, Homo sapiens
tagattgtcttgaag

SEQ ID NO: 1811645 - DNA, 15 bp, Homo sapiens
agattgtcttgaaga

SEQ ID NO: 1811646 - DNA, 15 bp, Homo sapiens
gattgtcttgaagat

SEQ ID NO: 1811647 - DNA, 15 bp, Homo sapiens
attgtcttgaagatc

SEQ ID NO: 1811648 - DNA, 15 bp, Homo sapiens
ttgtcttgaagatca

SEQ ID NO: 1811649 - DNA, 15 bp, Homo sapiens
tgtcttgaagatcag

SEQ ID NO: 1811650 - DNA, 15 bp, Homo sapiens
gtcttgaagatcagc

SEQ ID NO: 1811651 - DNA, 15 bp, Homo sapiens
tcttgaagatcagcc

SEQ ID NO: 1811652 - DNA, 15 bp, Homo sapiens
cttgaagatcagcct

SEQ ID NO: 1811653 - DNA, 15 bp, Homo sapiens
ttgaagatcagccta

SEQ ID NO: 1811654 - DNA, 15 bp, Homo sapiens
tgaagatcagcctac

SEQ ID NO: 1811655 - DNA, 15 bp, Homo sapiens
gaagatcagcctact

SEQ ID NO: 1811656 - DNA, 15 bp, Homo sapiens
aagatcagcctactt

SEQ ID NO: 1811657 - DNA, 15 bp, Homo sapiens
agatcagcctacttg

SEQ ID NO: 1811658 - DNA, 15 bp, Homo sapiens
gatcagcctacttgg

SEQ ID NO: 1811659 - DNA, 15 bp, Homo sapiens
atcagcctacttggg

SEQ ID NO: 1811660 - DNA, 15 bp, Homo sapiens
tcagcctacttgggc

SEQ ID NO: 1811661 - DNA, 15 bp, Homo sapiens
cagcctacttgggct

SEQ ID NO: 1811662 - DNA, 15 bp, Homo sapiens
agcctacttgggctc

SEQ ID NO: 1811663 - DNA, 15 bp, Homo sapiens
gcctacttgggctct

SEQ ID NO: 1811664 - DNA, 15 bp, Homo sapiens
cctacttgggctctc

SEQ ID NO: 1811665 - DNA, 15 bp, Homo sapiens
ctacttgggctctca

SEQ ID NO: 1811666 - DNA, 15 bp, Homo sapiens
tacttgggctctcag

SEQ ID NO: 1811667 - DNA, 15 bp, Homo sapiens
acttgggctctcagc

SEQ ID NO: 1811668 - DNA, 15 bp, Homo sapiens
cttgggctctcagca

SEQ ID NO: 1811669 - DNA, 15 bp, Homo sapiens
ttgggctctcagcag

SEQ ID NO: 1811670 - DNA, 15 bp, Homo sapiens
tgggctctcagcaga

SEQ ID NO: 1811671 - DNA, 15 bp, Homo sapiens
gggctctcagcagac

SEQ ID NO: 1811672 - DNA, 15 bp, Homo sapiens
ggctctcagcagaca

SEQ ID NO: 1811673 - DNA, 15 bp, Homo sapiens
gctctcagcagacaa

SEQ ID NO: 1811674 - DNA, 15 bp, Homo sapiens
ctctcagcagacaaa

SEQ ID NO: 1811675 - DNA, 15 bp, Homo sapiens
tctcagcagacaaaa

SEQ ID NO: 1811676 - DNA, 15 bp, Homo sapiens
ctcagcagacaaaaa

SEQ ID NO: 1811677 - DNA, 15 bp, Homo sapiens
tcagcagacaaaaaa

SEQ ID NO: 1811678 - DNA, 15 bp, Homo sapiens
cagcagacaaaaaag

SEQ ID NO: 1811679 - DNA, 15 bp, Homo sapiens
agcagacaaaaaaga

SEQ ID NO: 1811680 - DNA, 15 bp, Homo sapiens
gcagacaaaaaagat

SEQ ID NO: 1811681 - DNA, 15 bp, Homo sapiens
cagacaaaaaagatg

SEQ ID NO: 1811682 - DNA, 15 bp, Homo sapiens
agacaaaaaagatga

SEQ ID NO: 1811683 - DNA, 15 bp, Homo sapiens
gacaaaaaagatgag

SEQ ID NO: 1811684 - DNA, 15 bp, Homo sapiens
acaaaaaagatgagt

SEQ ID NO: 1811685 - DNA, 15 bp, Homo sapiens
caaaaaagatgagta

SEQ ID NO: 1811686 - DNA, 15 bp, Homo sapiens
aaaaaagatgagtat

SEQ ID NO: 1811687 - DNA, 15 bp, Homo sapiens
aaaaagatgagtata

SEQ ID NO: 1811688 - DNA, 15 bp, Homo sapiens
aaaagatgagtatag

SEQ ID NO: 1811689 - DNA, 15 bp, Homo sapiens
aaagatgagtatagt

SEQ ID NO: 1811690 - DNA, 15 bp, Homo sapiens
aagatgagtatagtg

SEQ ID NO: 1811691 - DNA, 15 bp, Homo sapiens
agatgagtatagtgt

SEQ ID NO: 1811692 - DNA, 15 bp, Homo sapiens
gatgagtatagtgtc

SEQ ID NO: 1811693 - DNA, 15 bp, Homo sapiens
atgagtatagtgtct

SEQ ID NO: 1811694 - DNA, 15 bp, Homo sapiens
tgagtatagtgtctg

SEQ ID NO: 1811695 - DNA, 15 bp, Homo sapiens
gagtatagtgtctgt

SEQ ID NO: 1811696 - DNA, 15 bp, Homo sapiens
agtatagtgtctgtg

SEQ ID NO: 1811697 - DNA, 15 bp, Homo sapiens
gtatagtgtctgtgt

SEQ ID NO: 1811698 - DNA, 15 bp, Homo sapiens
tatagtgtctgtgtt

SEQ ID NO: 1811699 - DNA, 15 bp, Homo sapiens
atagtgtctgtgttc

SEQ ID NO: 1811700 - DNA, 15 bp, Homo sapiens
tagtgtctgtgttct

SEQ ID NO: 1811701 - DNA, 15 bp, Homo sapiens
agtgtctgtgttctg

SEQ ID NO: 1811702 - DNA, 15 bp, Homo sapiens
gtgtctgtgttctgg

SEQ ID NO: 1811703 - DNA, 15 bp, Homo sapiens
tgtctgtgttctggg

SEQ ID NO: 1811704 - DNA, 15 bp, Homo sapiens
gtctgtgttctggga

SEQ ID NO: 1811705 - DNA, 15 bp, Homo sapiens
tctgtgttctgggag

SEQ ID NO: 1811706 - DNA, 15 bp, Homo sapiens
ctgtgttctgggagg

SEQ ID NO: 1811707 - DNA, 15 bp, Homo sapiens
tgtgttctgggaggg

SEQ ID NO: 1811708 - DNA, 15 bp, Homo sapiens
gtgttctgggagggg

SEQ ID NO: 1811709 - DNA, 15 bp, Homo sapiens
tgttctgggaggggg

SEQ ID NO: 1811710 - DNA, 15 bp, Homo sapiens
gttctgggagggggc

SEQ ID NO: 1811711 - DNA, 15 bp, Homo sapiens
ttctgggagggggct

SEQ ID NO: 1811712 - DNA, 15 bp, Homo sapiens
tctgggagggggctt

SEQ ID NO: 1811713 - DNA, 15 bp, Homo sapiens
ctgggagggggcttg

SEQ ID NO: 1811714 - DNA, 15 bp, Homo sapiens
tgggagggggcttga

SEQ ID NO: 1811715 - DNA, 15 bp, Homo sapiens
gggagggggcttgat

SEQ ID NO: 1811716 - DNA, 15 bp, Homo sapiens
ggagggggcttgatt

SEQ ID NO: 1811717 - DNA, 15 bp, Homo sapiens
gagggggcttgattt

SEQ ID NO: 1811718 - DNA, 15 bp, Homo sapiens
agggggcttgatttg

SEQ ID NO: 1811719 - DNA, 15 bp, Homo sapiens
gggggcttgatttgg

SEQ ID NO: 1811720 - DNA, 15 bp, Homo sapiens
ggggcttgatttggg

SEQ ID NO: 1811721 - DNA, 15 bp, Homo sapiens
gggcttgatttgggg

SEQ ID NO: 1811722 - DNA, 15 bp, Homo sapiens
ggcttgatttggggc

SEQ ID NO: 1811723 - DNA, 15 bp, Homo sapiens
gcttgatttggggcc

SEQ ID NO: 1811724 - DNA, 15 bp, Homo sapiens
cttgatttggggccc

SEQ ID NO: 1811725 - DNA, 15 bp, Homo sapiens
ttgatttggggccct

SEQ ID NO: 1811726 - DNA, 15 bp, Homo sapiens
tgatttggggccctg

SEQ ID NO: 1811727 - DNA, 15 bp, Homo sapiens
gatttggggccctgg

SEQ ID NO: 1811728 - DNA, 15 bp, Homo sapiens
atttggggccctggt

SEQ ID NO: 1811729 - DNA, 15 bp, Homo sapiens
tttggggccctggtg

SEQ ID NO: 1811730 - DNA, 15 bp, Homo sapiens
ttggggccctggtgt

SEQ ID NO: 1811731 - DNA, 15 bp, Homo sapiens
tggggccctggtgtg

SEQ ID NO: 1811732 - DNA, 15 bp, Homo sapiens
ggggccctggtgtgc

SEQ ID NO: 1811733 - DNA, 15 bp, Homo sapiens
gggccctggtgtgca

SEQ ID NO: 1811734 - DNA, 15 bp, Homo sapiens
ggccctggtgtgcag

SEQ ID NO: 1811735 - DNA, 15 bp, Homo sapiens
gccctggtgtgcagt

SEQ ID NO: 1811736 - DNA, 15 bp, Homo sapiens
ccctggtgtgcagtt

SEQ ID NO: 1811737 - DNA, 15 bp, Homo sapiens
cctggtgtgcagtta

SEQ ID NO: 1811738 - DNA, 15 bp, Homo sapiens
ctggtgtgcagttat

SEQ ID NO: 1811739 - DNA, 15 bp, Homo sapiens
tggtgtgcagttatc

SEQ ID NO: 1811740 - DNA, 15 bp, Homo sapiens
ggtgtgcagttatca

SEQ ID NO: 1811741 - DNA, 15 bp, Homo sapiens
gtgtgcagttatcaa

SEQ ID NO: 1811742 - DNA, 15 bp, Homo sapiens
tgtgcagttatcaac

SEQ ID NO: 1811743 - DNA, 15 bp, Homo sapiens
gtgcagttatcaacg

SEQ ID NO: 1811744 - DNA, 15 bp, Homo sapiens
tgcagttatcaacgt

SEQ ID NO: 1811745 - DNA, 15 bp, Homo sapiens
gcagttatcaacgtc

SEQ ID NO: 1811746 - DNA, 15 bp, Homo sapiens
cagttatcaacgtcc

SEQ ID NO: 1811747 - DNA, 15 bp, Homo sapiens
agttatcaacgtcca

SEQ ID NO: 1811748 - DNA, 15 bp, Homo sapiens
gttatcaacgtccac

SEQ ID NO: 1811749 - DNA, 15 bp, Homo sapiens
ttatcaacgtccaca

SEQ ID NO: 1811750 - DNA, 15 bp, Homo sapiens
tatcaacgtccacat

SEQ ID NO: 1811751 - DNA, 15 bp, Homo sapiens
atcaacgtccacatc

SEQ ID NO: 1811752 - DNA, 15 bp, Homo sapiens
tcaacgtccacatcc

SEQ ID NO: 1811753 - DNA, 15 bp, Homo sapiens
caacgtccacatcct

SEQ ID NO: 1811754 - DNA, 15 bp, Homo sapiens
aacgtccacatcctt

SEQ ID NO: 1811755 - DNA, 15 bp, Homo sapiens
acgtccacatccttg

SEQ ID NO: 1811756 - DNA, 15 bp, Homo sapiens
cgtccacatccttgt

SEQ ID NO: 1811757 - DNA, 15 bp, Homo sapiens
gtccacatccttgtc

SEQ ID NO: 1811758 - DNA, 15 bp, Homo sapiens
tccacatccttgtct

SEQ ID NO: 1811759 - DNA, 15 bp, Homo sapiens
ccacatccttgtctc

SEQ ID NO: 1811760 - DNA, 15 bp, Homo sapiens
cacatccttgtctct

SEQ ID NO: 1811761 - DNA, 15 bp, Homo sapiens
acatccttgtctctg

SEQ ID NO: 1811762 - DNA, 15 bp, Homo sapiens
catccttgtctctgg

SEQ ID NO: 1811763 - DNA, 15 bp, Homo sapiens
atccttgtctctggc

SEQ ID NO: 1811764 - DNA, 15 bp, Homo sapiens
tccttgtctctggca

SEQ ID NO: 1811765 - DNA, 15 bp, Homo sapiens
ccttgtctctggcag

SEQ ID NO: 1811766 - DNA, 15 bp, Homo sapiens
cttgtctctggcagg

SEQ ID NO: 1811767 - DNA, 15 bp, Homo sapiens
ttgtctctggcagga

SEQ ID NO: 1811768 - DNA, 15 bp, Homo sapiens
gtctctggcaggagc

SEQ ID NO: 1811769 - DNA, 15 bp, Homo sapiens
tctctggcaggagcg

SEQ ID NO: 1811770 - DNA, 15 bp, Homo sapiens
ctctggcaggagcgg

SEQ ID NO: 1811771 - DNA, 15 bp, Homo sapiens
tctggcaggagcgga

SEQ ID NO: 1811772 - DNA, 15 bp, Homo sapiens
ctggcaggagcggag

SEQ ID NO: 1811773 - DNA, 15 bp, Homo sapiens
tggcaggagcggagc

SEQ ID NO: 1811774 - DNA, 15 bp, Homo sapiens
ggcaggagcggagca

SEQ ID NO: 1811775 - DNA, 15 bp, Homo sapiens
gcaggagcggagcag

SEQ ID NO: 1811776 - DNA, 15 bp, Homo sapiens
caggagcggagcagc

SEQ ID NO: 1811777 - DNA, 15 bp, Homo sapiens
aggagcggagcagcg

SEQ ID NO: 1811778 - DNA, 15 bp, Homo sapiens
ggagcggagcagcga

SEQ ID NO: 1811779 - DNA, 15 bp, Homo sapiens
gagcggagcagcgaa

SEQ ID NO: 1811780 - DNA, 15 bp, Homo sapiens
agcggagcagcgaac

SEQ ID NO: 1811781 - DNA, 15 bp, Homo sapiens
gcggagcagcgaaca

SEQ ID NO: 1811782 - DNA, 15 bp, Homo sapiens
cggagcagcgaacag

SEQ ID NO: 1811783 - DNA, 15 bp, Homo sapiens
ggagcagcgaacaga

SEQ ID NO: 1811784 - DNA, 15 bp, Homo sapiens
gagcagcgaacagaa

SEQ ID NO: 1811785 - DNA, 15 bp, Homo sapiens
agcagcgaacagaat

SEQ ID NO: 1811786 - DNA, 15 bp, Homo sapiens
gcagcgaacagaatc

SEQ ID NO: 1811787 - DNA, 15 bp, Homo sapiens
cagcgaacagaatcc

SEQ ID NO: 1811788 - DNA, 15 bp, Homo sapiens
agcgaacagaatcca

SEQ ID NO: 1811789 - DNA, 15 bp, Homo sapiens
gcgaacagaatccat

SEQ ID NO: 1811790 - DNA, 15 bp, Homo sapiens
cgaacagaatccatc

SEQ ID NO: 1811791 - DNA, 15 bp, Homo sapiens
gaacagaatccatca

SEQ ID NO: 1811792 - DNA, 15 bp, Homo sapiens
aacagaatccatcat

SEQ ID NO: 1811793 - DNA, 15 bp, Homo sapiens
acagaatccatcatt

SEQ ID NO: 1811794 - DNA, 15 bp, Homo sapiens
cagaatccatcattc

SEQ ID NO: 1811795 - DNA, 15 bp, Homo sapiens
agaatccatcattca

SEQ ID NO: 1811796 - DNA, 15 bp, Homo sapiens
gaatccatcattcac

SEQ ID NO: 1811797 - DNA, 15 bp, Homo sapiens
aatccatcattcacc

SEQ ID NO: 1811798 - DNA, 15 bp, Homo sapiens
atccatcattcaccg

SEQ ID NO: 1811799 - DNA, 15 bp, Homo sapiens
tccatcattcaccgg

SEQ ID NO: 1811800 - DNA, 15 bp, Homo sapiens
ccatcattcaccggg

SEQ ID NO: 1811801 - DNA, 15 bp, Homo sapiens
catcattcaccgggc

SEQ ID NO: 1811802 - DNA, 15 bp, Homo sapiens
atcattcaccgggct

SEQ ID NO: 1811803 - DNA, 15 bp, Homo sapiens
tcattcaccgggctc

SEQ ID NO: 1811804 - DNA, 15 bp, Homo sapiens
cattcaccgggctct

SEQ ID NO: 1811805 - DNA, 15 bp, Homo sapiens
attcaccgggctctc

SEQ ID NO: 1811806 - DNA, 15 bp, Homo sapiens
ttcaccgggctctct

SEQ ID NO: 1811807 - DNA, 15 bp, Homo sapiens
tcaccgggctctcta

SEQ ID NO: 1811808 - DNA, 15 bp, Homo sapiens
caccgggctctctac

SEQ ID NO: 1811809 - DNA, 15 bp, Homo sapiens
accgggctctctact

SEQ ID NO: 1811810 - DNA, 15 bp, Homo sapiens
ccgggctctctacta

SEQ ID NO: 1811811 - DNA, 15 bp, Homo sapiens
cgggctctctactat

SEQ ID NO: 1811812 - DNA, 15 bp, Homo sapiens
gggctctctactatg

SEQ ID NO: 1811813 - DNA, 15 bp, Homo sapiens
ggctctctactatga

SEQ ID NO: 1811814 - DNA, 15 bp, Homo sapiens
gctctctactatgac

SEQ ID NO: 1811815 - DNA, 15 bp, Homo sapiens
ctctctactatgact

SEQ ID NO: 1811816 - DNA, 15 bp, Homo sapiens
tctctactatgactt

SEQ ID NO: 1811817 - DNA, 15 bp, Homo sapiens
ctctactatgacttg

SEQ ID NO: 1811818 - DNA, 15 bp, Homo sapiens
tctactatgacttga

SEQ ID NO: 1811819 - DNA, 15 bp, Homo sapiens
ctactatgacttgat

SEQ ID NO: 1811820 - DNA, 15 bp, Homo sapiens
tactatgacttgatc

SEQ ID NO: 1811821 - DNA, 15 bp, Homo sapiens
actatgacttgatca

SEQ ID NO: 1811822 - DNA, 15 bp, Homo sapiens
ctatgacttgatcag

SEQ ID NO: 1811823 - DNA, 15 bp, Homo sapiens
tatgacttgatcagc

SEQ ID NO: 1811824 - DNA, 15 bp, Homo sapiens
atgacttgatcagca

SEQ ID NO: 1811825 - DNA, 15 bp, Homo sapiens
tgacttgatcagcag

SEQ ID NO: 1811826 - DNA, 15 bp, Homo sapiens
gacttgatcagcagc

SEQ ID NO: 1811827 - DNA, 15 bp, Homo sapiens
acttgatcagcagcc

SEQ ID NO: 1811828 - DNA, 15 bp, Homo sapiens
cttgatcagcagccc

SEQ ID NO: 1811829 - DNA, 15 bp, Homo sapiens
ttgatcagcagccca

SEQ ID NO: 1811830 - DNA, 15 bp, Homo sapiens
tgatcagcagcccag

SEQ ID NO: 1811831 - DNA, 15 bp, Homo sapiens
gatcagcagcccaga

SEQ ID NO: 1811832 - DNA, 15 bp, Homo sapiens
atcagcagcccagac

SEQ ID NO: 1811833 - DNA, 15 bp, Homo sapiens
tcagcagcccagaca

SEQ ID NO: 1811834 - DNA, 15 bp, Homo sapiens
cagcagcccagacat

SEQ ID NO: 1811835 - DNA, 15 bp, Homo sapiens
agcagcccagacatc

SEQ ID NO: 1811836 - DNA, 15 bp, Homo sapiens
gcagcccagacatcc

SEQ ID NO: 1811837 - DNA, 15 bp, Homo sapiens
cagcccagacatcca

SEQ ID NO: 1811838 - DNA, 15 bp, Homo sapiens
agcccagacatccat

SEQ ID NO: 1811839 - DNA, 15 bp, Homo sapiens
gcccagacatccatg

SEQ ID NO: 1811840 - DNA, 15 bp, Homo sapiens
cccagacatccatgg

SEQ ID NO: 1811841 - DNA, 15 bp, Homo sapiens
ccagacatccatggt

SEQ ID NO: 1811842 - DNA, 15 bp, Homo sapiens
cagacatccatggta

SEQ ID NO: 1811843 - DNA, 15 bp, Homo sapiens
agacatccatggtac

SEQ ID NO: 1811844 - DNA, 15 bp, Homo sapiens
gacatccatggtacc

SEQ ID NO: 1811845 - DNA, 15 bp, Homo sapiens
catccatggtaccta

SEQ ID NO: 1811846 - DNA, 15 bp, Homo sapiens
atccatggtacctat

SEQ ID NO: 1811847 - DNA, 15 bp, Homo sapiens
tccatggtacctata

SEQ ID NO: 1811848 - DNA, 15 bp, Homo sapiens
ccatggtacctataa

SEQ ID NO: 1811849 - DNA, 15 bp, Homo sapiens
catggtacctataag

SEQ ID NO: 1811850 - DNA, 15 bp, Homo sapiens
atggtacctataagg

SEQ ID NO: 1811851 - DNA, 15 bp, Homo sapiens
tggtacctataagga

SEQ ID NO: 1811852 - DNA, 15 bp, Homo sapiens
ggtacctataaggag

SEQ ID NO: 1811853 - DNA, 15 bp, Homo sapiens
gtacctataaggagc

SEQ ID NO: 1811854 - DNA, 15 bp, Homo sapiens
acctataaggagctc

SEQ ID NO: 1811855 - DNA, 15 bp, Homo sapiens
cctataaggagctcc

SEQ ID NO: 1811856 - DNA, 15 bp, Homo sapiens
ctataaggagctcct

SEQ ID NO: 1811857 - DNA, 15 bp, Homo sapiens
tataaggagctcctt

SEQ ID NO: 1811858 - DNA, 15 bp, Homo sapiens
ataaggagctccttg

SEQ ID NO: 1811859 - DNA, 15 bp, Homo sapiens
taaggagctccttga

SEQ ID NO: 1811860 - DNA, 15 bp, Homo sapiens
aaggagctccttgac

SEQ ID NO: 1811861 - DNA, 15 bp, Homo sapiens
aggagctccttgaca

SEQ ID NO: 1811862 - DNA, 15 bp, Homo sapiens
ggagctccttgacac

SEQ ID NO: 1811863 - DNA, 15 bp, Homo sapiens
gagctccttgacacg

SEQ ID NO: 1811864 - DNA, 15 bp, Homo sapiens
gctccttgacacggt

SEQ ID NO: 1811865 - DNA, 15 bp, Homo sapiens
ctccttgacacggtc

SEQ ID NO: 1811866 - DNA, 15 bp, Homo sapiens
tccttgacacggtca

SEQ ID NO: 1811867 - DNA, 15 bp, Homo sapiens
ccttgacacggtcac

SEQ ID NO: 1811868 - DNA, 15 bp, Homo sapiens
cttgacacggtcact

SEQ ID NO: 1811869 - DNA, 15 bp, Homo sapiens
ttgacacggtcactg

SEQ ID NO: 1811870 - DNA, 15 bp, Homo sapiens
tgacacggtcactgc

SEQ ID NO: 1811871 - DNA, 15 bp, Homo sapiens
gacacggtcactgcc

SEQ ID NO: 1811872 - DNA, 15 bp, Homo sapiens
acacggtcactgccc

SEQ ID NO: 1811873 - DNA, 15 bp, Homo sapiens
cacggtcactgcccc

SEQ ID NO: 1811874 - DNA, 15 bp, Homo sapiens
acggtcactgccccc

SEQ ID NO: 1811875 - DNA, 15 bp, Homo sapiens
cggtcactgcccccc

SEQ ID NO: 1811876 - DNA, 15 bp, Homo sapiens
ggtcactgcccccca

SEQ ID NO: 1811877 - DNA, 15 bp, Homo sapiens
caccgcgctcggccc

SEQ ID NO: 1811878 - DNA, 15 bp, Homo sapiens
accgcgctcggcccg

SEQ ID NO: 1811879 - DNA, 15 bp, Homo sapiens
ccgcgctcggcccgt

SEQ ID NO: 1811880 - DNA, 15 bp, Homo sapiens
cgcgctcggcccgtt

SEQ ID NO: 1811881 - DNA, 15 bp, Homo sapiens
gcgctcggcccgttt

SEQ ID NO: 1811882 - DNA, 15 bp, Homo sapiens
cgctcggcccgtttc

SEQ ID NO: 1811883 - DNA, 15 bp, Homo sapiens
gctcggcccgtttct

SEQ ID NO: 1811884 - DNA, 15 bp, Homo sapiens
ctcggcccgtttcta

SEQ ID NO: 1811885 - DNA, 15 bp, Homo sapiens
tcggcccgtttctaa

SEQ ID NO: 1811886 - DNA, 15 bp, Homo sapiens
cggcccgtttctaaa

SEQ ID NO: 1811887 - DNA, 15 bp, Homo sapiens
ggcccgtttctaaac

SEQ ID NO: 1811888 - DNA, 15 bp, Homo sapiens
gcccgtttctaaaca

SEQ ID NO: 1811889 - DNA, 15 bp, Homo sapiens
cccgtttctaaacaa

SEQ ID NO: 1811890 - DNA, 15 bp, Homo sapiens
ccgtttctaaacaat

SEQ ID NO: 1811891 - DNA, 15 bp, Homo sapiens
cgtttctaaacaata

SEQ ID NO: 1811892 - DNA, 15 bp, Homo sapiens
gtttctaaacaatag

SEQ ID NO: 1811893 - DNA, 15 bp, Homo sapiens
tttctaaacaataga

SEQ ID NO: 1811894 - DNA, 15 bp, Homo sapiens
ttctaaacaatagat

SEQ ID NO: 1811895 - DNA, 15 bp, Homo sapiens
tctaaacaatagatc

SEQ ID NO: 1811896 - DNA, 15 bp, Homo sapiens
ctaaacaatagatca

SEQ ID NO: 1811897 - DNA, 15 bp, Homo sapiens
taaacaatagatcat

SEQ ID NO: 1811898 - DNA, 15 bp, Homo sapiens
aaacaatagatcatg

SEQ ID NO: 1811899 - DNA, 15 bp, Homo sapiens
aacaatagatcatgt

SEQ ID NO: 1811900 - DNA, 15 bp, Homo sapiens
acaatagatcatgtg

SEQ ID NO: 1811901 - DNA, 15 bp, Homo sapiens
caatagatcatgtgt

SEQ ID NO: 1811902 - DNA, 15 bp, Homo sapiens
aatagatcatgtgtg

SEQ ID NO: 1811903 - DNA, 15 bp, Homo sapiens
atagatcatgtgtgc

SEQ ID NO: 1811904 - DNA, 15 bp, Homo sapiens
tagatcatgtgtgcc

SEQ ID NO: 1811905 - DNA, 15 bp, Homo sapiens
agatcatgtgtgccc

SEQ ID NO: 1811906 - DNA, 15 bp, Homo sapiens
gatcatgtgtgccca

SEQ ID NO: 1811907 - DNA, 15 bp, Homo sapiens
atcatgtgtgcccag

SEQ ID NO: 1811908 - DNA, 15 bp, Homo sapiens
tcatgtgtgcccagg

SEQ ID NO: 1811909 - DNA, 15 bp, Homo sapiens
catgtgtgcccaggc

SEQ ID NO: 1811910 - DNA, 15 bp, Homo sapiens
atgtgtgcccaggcc

SEQ ID NO: 1811911 - DNA, 15 bp, Homo sapiens
tgtgtgcccaggcct

SEQ ID NO: 1811912 - DNA, 15 bp, Homo sapiens
gtgtgcccaggcctg

SEQ ID NO: 1811913 - DNA, 15 bp, Homo sapiens
tgtgcccaggcctgg

SEQ ID NO: 1811914 - DNA, 15 bp, Homo sapiens
gtgcccaggcctggc

SEQ ID NO: 1811915 - DNA, 15 bp, Homo sapiens
tgcccaggcctggcc

SEQ ID NO: 1811916 - DNA, 15 bp, Homo sapiens
gcccaggcctggcct

SEQ ID NO: 1811917 - DNA, 15 bp, Homo sapiens
cccaggcctggcctg

SEQ ID NO: 1811918 - DNA, 15 bp, Homo sapiens
ccaggcctggcctgg

SEQ ID NO: 1811919 - DNA, 15 bp, Homo sapiens
caggcctggcctggc

SEQ ID NO: 1811920 - DNA, 15 bp, Homo sapiens
aggcctggcctggca

SEQ ID NO: 1811921 - DNA, 15 bp, Homo sapiens
ggcctggcctggcac

SEQ ID NO: 1811922 - DNA, 15 bp, Homo sapiens
gcctggcctggcact

SEQ ID NO: 1811923 - DNA, 15 bp, Homo sapiens
cctggcctggcactg

SEQ ID NO: 1811924 - DNA, 15 bp, Homo sapiens
ctggcctggcactgg

SEQ ID NO: 1811925 - DNA, 15 bp, Homo sapiens
tggcctggcactggt

SEQ ID NO: 1811926 - DNA, 15 bp, Homo sapiens
ggcctggcactggtg

SEQ ID NO: 1811927 - DNA, 15 bp, Homo sapiens
gcctggcactggtgt

SEQ ID NO: 1811928 - DNA, 15 bp, Homo sapiens
cctggcactggtgtg

SEQ ID NO: 1811929 - DNA, 15 bp, Homo sapiens
ctggcactggtgtgg

SEQ ID NO: 1811930 - DNA, 15 bp, Homo sapiens
tggcactggtgtgga

SEQ ID NO: 1811931 - DNA, 15 bp, Homo sapiens
ggcactggtgtggag

SEQ ID NO: 1811932 - DNA, 15 bp, Homo sapiens
gcactggtgtggagg

SEQ ID NO: 1811933 - DNA, 15 bp, Homo sapiens
cactggtgtggagga

SEQ ID NO: 1811934 - DNA, 15 bp, Homo sapiens
actggtgtggaggaa

SEQ ID NO: 1811935 - DNA, 15 bp, Homo sapiens
ctggtgtggaggaag

SEQ ID NO: 1811936 - DNA, 15 bp, Homo sapiens
tggtgtggaggaagg

SEQ ID NO: 1811937 - DNA, 15 bp, Homo sapiens
gtgtggaggaagggc

SEQ ID NO: 1811938 - DNA, 15 bp, Homo sapiens
tgtggaggaagggcc

SEQ ID NO: 1811939 - DNA, 15 bp, Homo sapiens
gtggaggaagggccc

SEQ ID NO: 1811940 - DNA, 15 bp, Homo sapiens
tggaggaagggcccg

SEQ ID NO: 1811941 - DNA, 15 bp, Homo sapiens
ggaggaagggcccgt

SEQ ID NO: 1811942 - DNA, 15 bp, Homo sapiens
gaggaagggcccgtg

SEQ ID NO: 1811943 - DNA, 15 bp, Homo sapiens
aggaagggcccgtga

SEQ ID NO: 1811944 - DNA, 15 bp, Homo sapiens
ggaagggcccgtgag

SEQ ID NO: 1811945 - DNA, 15 bp, Homo sapiens
gaagggcccgtgagc

SEQ ID NO: 1811946 - DNA, 15 bp, Homo sapiens
aagggcccgtgagcc

SEQ ID NO: 1811947 - DNA, 15 bp, Homo sapiens
agggcccgtgagccc

SEQ ID NO: 1811948 - DNA, 15 bp, Homo sapiens
gggcccgtgagccca

SEQ ID NO: 1811949 - DNA, 15 bp, Homo sapiens
ggcccgtgagcccaa

SEQ ID NO: 1811950 - DNA, 15 bp, Homo sapiens
gcccgtgagcccaaa

SEQ ID NO: 1811951 - DNA, 15 bp, Homo sapiens
cccgtgagcccaaag

SEQ ID NO: 1811952 - DNA, 15 bp, Homo sapiens
ccgtgagcccaaaga

SEQ ID NO: 1811953 - DNA, 15 bp, Homo sapiens
cgtgagcccaaagag

SEQ ID NO: 1811954 - DNA, 15 bp, Homo sapiens
gtgagcccaaagagg

SEQ ID NO: 1811955 - DNA, 15 bp, Homo sapiens
tgagcccaaagaggc

SEQ ID NO: 1811956 - DNA, 15 bp, Homo sapiens
gagcccaaagaggct

SEQ ID NO: 1811957 - DNA, 15 bp, Homo sapiens
agcccaaagaggctc

SEQ ID NO: 1811958 - DNA, 15 bp, Homo sapiens
gcccaaagaggctca

SEQ ID NO: 1811959 - DNA, 15 bp, Homo sapiens
cccaaagaggctcag

SEQ ID NO: 1811960 - DNA, 15 bp, Homo sapiens
ccaaagaggctcaga

SEQ ID NO: 1811961 - DNA, 15 bp, Homo sapiens
caaagaggctcagaa

SEQ ID NO: 1811962 - DNA, 15 bp, Homo sapiens
aaagaggctcagaaa

SEQ ID NO: 1811963 - DNA, 15 bp, Homo sapiens
aagaggctcagaaag

SEQ ID NO: 1811964 - DNA, 15 bp, Homo sapiens
agaggctcagaaaga

SEQ ID NO: 1811965 - DNA, 15 bp, Homo sapiens
gaggctcagaaagag

SEQ ID NO: 1811966 - DNA, 15 bp, Homo sapiens
aggctcagaaagagg

SEQ ID NO: 1811967 - DNA, 15 bp, Homo sapiens
ggctcagaaagagga

SEQ ID NO: 1811968 - DNA, 15 bp, Homo sapiens
gctcagaaagaggaa

SEQ ID NO: 1811969 - DNA, 15 bp, Homo sapiens
ctcagaaagaggaag

SEQ ID NO: 1811970 - DNA, 15 bp, Homo sapiens
tcagaaagaggaagt

SEQ ID NO: 1811971 - DNA, 15 bp, Homo sapiens
cagaaagaggaagtg

SEQ ID NO: 1811972 - DNA, 15 bp, Homo sapiens
agaaagaggaagtgg

SEQ ID NO: 1811973 - DNA, 15 bp, Homo sapiens
gaaagaggaagtggg

SEQ ID NO: 1811974 - DNA, 15 bp, Homo sapiens
aaagaggaagtgggc

SEQ ID NO: 1811975 - DNA, 15 bp, Homo sapiens
aagaggaagtgggct

SEQ ID NO: 1811976 - DNA, 15 bp, Homo sapiens
agaggaagtgggctg

SEQ ID NO: 1811977 - DNA, 15 bp, Homo sapiens
gaggaagtgggctgc

SEQ ID NO: 1811978 - DNA, 15 bp, Homo sapiens
aggaagtgggctgca

SEQ ID NO: 1811979 - DNA, 15 bp, Homo sapiens
ggaagtgggctgcag

SEQ ID NO: 1811980 - DNA, 15 bp, Homo sapiens
gaagtgggctgcagg

SEQ ID NO: 1811981 - DNA, 15 bp, Homo sapiens
aagtgggctgcagga

SEQ ID NO: 1811982 - DNA, 15 bp, Homo sapiens
agtgggctgcaggag

SEQ ID NO: 1811983 - DNA, 15 bp, Homo sapiens
gtgggctgcaggaga

SEQ ID NO: 1811984 - DNA, 15 bp, Homo sapiens
tgggctgcaggagac

SEQ ID NO: 1811985 - DNA, 15 bp, Homo sapiens
gggctgcaggagacg

SEQ ID NO: 1811986 - DNA, 15 bp, Homo sapiens
ggctgcaggagacgg

SEQ ID NO: 1811987 - DNA, 15 bp, Homo sapiens
gctgcaggagacggt

SEQ ID NO: 1811988 - DNA, 15 bp, Homo sapiens
ctgcaggagacggtg

SEQ ID NO: 1811989 - DNA, 15 bp, Homo sapiens
tgcaggagacggtgg

SEQ ID NO: 1811990 - DNA, 15 bp, Homo sapiens
gcaggagacggtggg

SEQ ID NO: 1811991 - DNA, 15 bp, Homo sapiens
caggagacggtggga

SEQ ID NO: 1811992 - DNA, 15 bp, Homo sapiens
aggagacggtgggag

SEQ ID NO: 1811993 - DNA, 15 bp, Homo sapiens
ggagacggtgggagg

SEQ ID NO: 1811994 - DNA, 15 bp, Homo sapiens
gagacggtgggaggg

SEQ ID NO: 1811995 - DNA, 15 bp, Homo sapiens
agacggtgggagggg

SEQ ID NO: 1811996 - DNA, 15 bp, Homo sapiens
gacggtgggaggggc

SEQ ID NO: 1811997 - DNA, 15 bp, Homo sapiens
acggtgggaggggca

SEQ ID NO: 1811998 - DNA, 15 bp, Homo sapiens
cggtgggaggggcag

SEQ ID NO: 1811999 - DNA, 15 bp, Homo sapiens
ggtgggaggggcagg

SEQ ID NO: 1812000 - DNA, 15 bp, Homo sapiens
gtgggaggggcaggg

SEQ ID NO: 1812001 - DNA, 15 bp, Homo sapiens
tgggaggggcaggga

SEQ ID NO: 1812002 - DNA, 15 bp, Homo sapiens
gggaggggcagggag

SEQ ID NO: 1812003 - DNA, 15 bp, Homo sapiens
ggaggggcagggagg

SEQ ID NO: 1812004 - DNA, 15 bp, Homo sapiens
gaggggcagggaggg

SEQ ID NO: 1812005 - DNA, 15 bp, Homo sapiens
aggggcagggagggc

SEQ ID NO: 1812006 - DNA, 15 bp, Homo sapiens
ggggcagggagggca

SEQ ID NO: 1812007 - DNA, 15 bp, Homo sapiens
gggcagggagggcag

SEQ ID NO: 1812008 - DNA, 15 bp, Homo sapiens
ggcagggagggcagt

SEQ ID NO: 1812009 - DNA, 15 bp, Homo sapiens
gcagggagggcagtg

SEQ ID NO: 1812010 - DNA, 15 bp, Homo sapiens
cagggagggcagtgg

SEQ ID NO: 1812011 - DNA, 15 bp, Homo sapiens
agggagggcagtggc

SEQ ID NO: 1812012 - DNA, 15 bp, Homo sapiens
gggagggcagtggcg

SEQ ID NO: 1812013 - DNA, 15 bp, Homo sapiens
ggagggcagtggcgc

SEQ ID NO: 1812014 - DNA, 15 bp, Homo sapiens
gagggcagtggcgcg

SEQ ID NO: 1812015 - DNA, 15 bp, Homo sapiens
agggcagtggcgcga

SEQ ID NO: 1812016 - DNA, 15 bp, Homo sapiens
gggcagtggcgcgat

SEQ ID NO: 1812017 - DNA, 15 bp, Homo sapiens
ggcagtggcgcgatg

SEQ ID NO: 1812018 - DNA, 15 bp, Homo sapiens
gcagtggcgcgatgt

SEQ ID NO: 1812019 - DNA, 15 bp, Homo sapiens
cagtggcgcgatgtg

SEQ ID NO: 1812020 - DNA, 15 bp, Homo sapiens
agtggcgcgatgtgg

SEQ ID NO: 1812021 - DNA, 15 bp, Homo sapiens
gtggcgcgatgtggg

SEQ ID NO: 1812022 - DNA, 15 bp, Homo sapiens
tggcgcgatgtgggg

SEQ ID NO: 1812023 - DNA, 15 bp, Homo sapiens
ggcgcgatgtgggga

SEQ ID NO: 1812024 - DNA, 15 bp, Homo sapiens
gcgcgatgtggggaa

SEQ ID NO: 1812025 - DNA, 15 bp, Homo sapiens
cgcgatgtggggaaa

SEQ ID NO: 1812026 - DNA, 15 bp, Homo sapiens
gcgatgtggggaaat

SEQ ID NO: 1812027 - DNA, 15 bp, Homo sapiens
cgatgtggggaaatc

SEQ ID NO: 1812028 - DNA, 15 bp, Homo sapiens
gatgtggggaaatct

SEQ ID NO: 1812029 - DNA, 15 bp, Homo sapiens
atgtggggaaatctg

SEQ ID NO: 1812030 - DNA, 15 bp, Homo sapiens
tgtggggaaatctgc

SEQ ID NO: 1812031 - DNA, 15 bp, Homo sapiens
gtggggaaatctgct

SEQ ID NO: 1812032 - DNA, 15 bp, Homo sapiens
tggggaaatctgctg

SEQ ID NO: 1812033 - DNA, 15 bp, Homo sapiens
ggggaaatctgctgc

SEQ ID NO: 1812034 - DNA, 15 bp, Homo sapiens
gggaaatctgctgcc

SEQ ID NO: 1812035 - DNA, 15 bp, Homo sapiens
ggaaatctgctgccc

SEQ ID NO: 1812036 - DNA, 15 bp, Homo sapiens
gaaatctgctgcccc

SEQ ID NO: 1812037 - DNA, 15 bp, Homo sapiens
aaatctgctgccccc

SEQ ID NO: 1812038 - DNA, 15 bp, Homo sapiens
aatctgctgcccccc

SEQ ID NO: 1812039 - DNA, 15 bp, Homo sapiens
atctgctgcccccct

SEQ ID NO: 1812040 - DNA, 15 bp, Homo sapiens
tctgctgcccccctg

SEQ ID NO: 1812041 - DNA, 15 bp, Homo sapiens
ctgctgcccccctgg

SEQ ID NO: 1812042 - DNA, 15 bp, Homo sapiens
tgctgcccccctggc

SEQ ID NO: 1812043 - DNA, 15 bp, Homo sapiens
gctgcccccctggcc

SEQ ID NO: 1812044 - DNA, 15 bp, Homo sapiens
ctgcccccctggcca

SEQ ID NO: 1812045 - DNA, 15 bp, Homo sapiens
tgcccccctggccag

SEQ ID NO: 1812046 - DNA, 15 bp, Homo sapiens
gcccccctggccagt

SEQ ID NO: 1812047 - DNA, 15 bp, Homo sapiens
cccccctggccagtg

SEQ ID NO: 1812048 - DNA, 15 bp, Homo sapiens
ccccctggccagtgc

SEQ ID NO: 1812049 - DNA, 15 bp, Homo sapiens
cccctggccagtgcc

SEQ ID NO: 1812050 - DNA, 15 bp, Homo sapiens
ccctggccagtgcct

SEQ ID NO: 1812051 - DNA, 15 bp, Homo sapiens
cctggccagtgcctg

SEQ ID NO: 1812052 - DNA, 15 bp, Homo sapiens
ctggccagtgcctgg

SEQ ID NO: 1812053 - DNA, 15 bp, Homo sapiens
tggccagtgcctggg

SEQ ID NO: 1812054 - DNA, 15 bp, Homo sapiens
ggccagtgcctgggg

SEQ ID NO: 1812055 - DNA, 15 bp, Homo sapiens
gccagtgcctgggga

SEQ ID NO: 1812056 - DNA, 15 bp, Homo sapiens
ccagtgcctggggat

SEQ ID NO: 1812057 - DNA, 15 bp, Homo sapiens
cagtgcctggggatg

SEQ ID NO: 1812058 - DNA, 15 bp, Homo sapiens
agtgcctggggatgc

SEQ ID NO: 1812059 - DNA, 15 bp, Homo sapiens
gtgcctggggatgcc

SEQ ID NO: 1812060 - DNA, 15 bp, Homo sapiens
tgcctggggatgcca

SEQ ID NO: 1812061 - DNA, 15 bp, Homo sapiens
gcctggggatgccag

SEQ ID NO: 1812062 - DNA, 15 bp, Homo sapiens
cctggggatgccagc

SEQ ID NO: 1812063 - DNA, 15 bp, Homo sapiens
ctggggatgccagca

SEQ ID NO: 1812064 - DNA, 15 bp, Homo sapiens
tggggatgccagcag

SEQ ID NO: 1812065 - DNA, 15 bp, Homo sapiens
ggggatgccagcaga

SEQ ID NO: 1812066 - DNA, 15 bp, Homo sapiens
gggatgccagcagaa

SEQ ID NO: 1812067 - DNA, 15 bp, Homo sapiens
ggatgccagcagaag

SEQ ID NO: 1812068 - DNA, 15 bp, Homo sapiens
gatgccagcagaagt

SEQ ID NO: 1812069 - DNA, 15 bp, Homo sapiens
atgccagcagaagtc

SEQ ID NO: 1812070 - DNA, 15 bp, Homo sapiens
tgccagcagaagtcc

SEQ ID NO: 1812071 - DNA, 15 bp, Homo sapiens
gccagcagaagtcct

SEQ ID NO: 1812072 - DNA, 15 bp, Homo sapiens
ccagcagaagtcctg

SEQ ID NO: 1812073 - DNA, 15 bp, Homo sapiens
cagcagaagtcctgg

SEQ ID NO: 1812074 - DNA, 15 bp, Homo sapiens
agcagaagtcctggc

SEQ ID NO: 1812075 - DNA, 15 bp, Homo sapiens
gcagaagtcctggca

SEQ ID NO: 1812076 - DNA, 15 bp, Homo sapiens
cagaagtcctggcaa

SEQ ID NO: 1812077 - DNA, 15 bp, Homo sapiens
agaagtcctggcaag

SEQ ID NO: 1812078 - DNA, 15 bp, Homo sapiens
gaagtcctggcaagt

SEQ ID NO: 1812079 - DNA, 15 bp, Homo sapiens
aagtcctggcaagtc

SEQ ID NO: 1812080 - DNA, 15 bp, Homo sapiens
agtcctggcaagtca

SEQ ID NO: 1812081 - DNA, 15 bp, Homo sapiens
gtcctggcaagtcac

SEQ ID NO: 1812082 - DNA, 15 bp, Homo sapiens
tcctggcaagtcaca

SEQ ID NO: 1812083 - DNA, 15 bp, Homo sapiens
cctggcaagtcacag

SEQ ID NO: 1812084 - DNA, 15 bp, Homo sapiens
ctggcaagtcacagg

SEQ ID NO: 1812085 - DNA, 15 bp, Homo sapiens
tggcaagtcacagga

SEQ ID NO: 1812086 - DNA, 15 bp, Homo sapiens
ggcaagtcacaggaa

SEQ ID NO: 1812087 - DNA, 15 bp, Homo sapiens
gcaagtcacaggaag

SEQ ID NO: 1812088 - DNA, 15 bp, Homo sapiens
caagtcacaggaaga

SEQ ID NO: 1812089 - DNA, 15 bp, Homo sapiens
aagtcacaggaagat

SEQ ID NO: 1812090 - DNA, 15 bp, Homo sapiens
agtcacaggaagatg

SEQ ID NO: 1812091 - DNA, 15 bp, Homo sapiens
gtcacaggaagatgc

SEQ ID NO: 1812092 - DNA, 15 bp, Homo sapiens
tcacaggaagatgct

SEQ ID NO: 1812093 - DNA, 15 bp, Homo sapiens
cacaggaagatgctg

SEQ ID NO: 1812094 - DNA, 15 bp, Homo sapiens
acaggaagatgctgg

SEQ ID NO: 1812095 - DNA, 15 bp, Homo sapiens
caggaagatgctggc

SEQ ID NO: 1812096 - DNA, 15 bp, Homo sapiens
aggaagatgctggct

SEQ ID NO: 1812097 - DNA, 15 bp, Homo sapiens
ggaagatgctggctg

SEQ ID NO: 1812098 - DNA, 15 bp, Homo sapiens
gaagatgctggctgg

SEQ ID NO: 1812099 - DNA, 15 bp, Homo sapiens
aagatgctggctggg

SEQ ID NO: 1812100 - DNA, 15 bp, Homo sapiens
agatgctggctggga

SEQ ID NO: 1812101 - DNA, 15 bp, Homo sapiens
gatgctggctgggaa

SEQ ID NO: 1812102 - DNA, 15 bp, Homo sapiens
atgctggctgggaag

SEQ ID NO: 1812103 - DNA, 15 bp, Homo sapiens
tgctggctgggaagt

SEQ ID NO: 1812104 - DNA, 15 bp, Homo sapiens
gctggctgggaagtc

SEQ ID NO: 1812105 - DNA, 15 bp, Homo sapiens
ctggctgggaagtca

SEQ ID NO: 1812106 - DNA, 15 bp, Homo sapiens
tggctgggaagtcag

SEQ ID NO: 1812107 - DNA, 15 bp, Homo sapiens
ggctgggaagtcagg

SEQ ID NO: 1812108 - DNA, 15 bp, Homo sapiens
gctgggaagtcaggg

SEQ ID NO: 1812109 - DNA, 15 bp, Homo sapiens
ctgggaagtcagggc

SEQ ID NO: 1812110 - DNA, 15 bp, Homo sapiens
tgggaagtcagggcc

SEQ ID NO: 1812111 - DNA, 15 bp, Homo sapiens
gggaagtcagggcct

SEQ ID NO: 1812112 - DNA, 15 bp, Homo sapiens
ggaagtcagggcctg

SEQ ID NO: 1812113 - DNA, 15 bp, Homo sapiens
gaagtcagggcctgc

SEQ ID NO: 1812114 - DNA, 15 bp, Homo sapiens
aagtcagggcctgct

SEQ ID NO: 1812115 - DNA, 15 bp, Homo sapiens
agtcagggcctgctg

SEQ ID NO: 1812116 - DNA, 15 bp, Homo sapiens
gtcagggcctgctga

SEQ ID NO: 1812117 - DNA, 15 bp, Homo sapiens
tcagggcctgctgag

SEQ ID NO: 1812118 - DNA, 15 bp, Homo sapiens
cagggcctgctgagc

SEQ ID NO: 1812119 - DNA, 15 bp, Homo sapiens
agggcctgctgagcg

SEQ ID NO: 1812120 - DNA, 15 bp, Homo sapiens
gggcctgctgagcgc

SEQ ID NO: 1812121 - DNA, 15 bp, Homo sapiens
ggcctgctgagcgct

SEQ ID NO: 1812122 - DNA, 15 bp, Homo sapiens
gcctgctgagcgcta

SEQ ID NO: 1812123 - DNA, 15 bp, Homo sapiens
cctgctgagcgctaa

SEQ ID NO: 1812124 - DNA, 15 bp, Homo sapiens
ctgctgagcgctaaa

SEQ ID NO: 1812125 - DNA, 15 bp, Homo sapiens
tgctgagcgctaaac

SEQ ID NO: 1812126 - DNA, 15 bp, Homo sapiens
gctgagcgctaaacc

SEQ ID NO: 1812127 - DNA, 15 bp, Homo sapiens
ctgagcgctaaacca

SEQ ID NO: 1812128 - DNA, 15 bp, Homo sapiens
tgagcgctaaaccag

SEQ ID NO: 1812129 - DNA, 15 bp, Homo sapiens
gagcgctaaaccaga

SEQ ID NO: 1812130 - DNA, 15 bp, Homo sapiens
agcgctaaaccagaa

SEQ ID NO: 1812131 - DNA, 15 bp, Homo sapiens
gcgctaaaccagaac

SEQ ID NO: 1812132 - DNA, 15 bp, Homo sapiens
cgctaaaccagaacc

SEQ ID NO: 1812133 - DNA, 15 bp, Homo sapiens
gctaaaccagaaccc

SEQ ID NO: 1812134 - DNA, 15 bp, Homo sapiens
ctaaaccagaacccg

SEQ ID NO: 1812135 - DNA, 15 bp, Homo sapiens
taaaccagaacccga

SEQ ID NO: 1812136 - DNA, 15 bp, Homo sapiens
aaaccagaacccgag

SEQ ID NO: 1812137 - DNA, 15 bp, Homo sapiens
aaccagaacccgagc

SEQ ID NO: 1812138 - DNA, 15 bp, Homo sapiens
accagaacccgagcc

SEQ ID NO: 1812139 - DNA, 15 bp, Homo sapiens
ccagaacccgagcct

SEQ ID NO: 1812140 - DNA, 15 bp, Homo sapiens
cagaacccgagcctg

SEQ ID NO: 1812141 - DNA, 15 bp, Homo sapiens
agaacccgagcctgg

SEQ ID NO: 1812142 - DNA, 15 bp, Homo sapiens
gaacccgagcctggc

SEQ ID NO: 1812143 - DNA, 15 bp, Homo sapiens
aacccgagcctggca

SEQ ID NO: 1812144 - DNA, 15 bp, Homo sapiens
acccgagcctggcag

SEQ ID NO: 1812145 - DNA, 15 bp, Homo sapiens
cccgagcctggcagg

SEQ ID NO: 1812146 - DNA, 15 bp, Homo sapiens
ccgagcctggcaggc

SEQ ID NO: 1812147 - DNA, 15 bp, Homo sapiens
cgagcctggcaggct

SEQ ID NO: 1812148 - DNA, 15 bp, Homo sapiens
gagcctggcaggctc

SEQ ID NO: 1812149 - DNA, 15 bp, Homo sapiens
agcctggcaggctct

SEQ ID NO: 1812150 - DNA, 15 bp, Homo sapiens
gcctggcaggctctc

SEQ ID NO: 1812151 - DNA, 15 bp, Homo sapiens
cctggcaggctctca

SEQ ID NO: 1812152 - DNA, 15 bp, Homo sapiens
ctggcaggctctcaa

SEQ ID NO: 1812153 - DNA, 15 bp, Homo sapiens
tggcaggctctcaaa

SEQ ID NO: 1812154 - DNA, 15 bp, Homo sapiens
ggcaggctctcaaag

SEQ ID NO: 1812155 - DNA, 15 bp, Homo sapiens
gcaggctctcaaaga

SEQ ID NO: 1812156 - DNA, 15 bp, Homo sapiens
caggctctcaaagac

SEQ ID NO: 1812157 - DNA, 15 bp, Homo sapiens
aggctctcaaagacg

SEQ ID NO: 1812158 - DNA, 15 bp, Homo sapiens
ggctctcaaagacgg

SEQ ID NO: 1812159 - DNA, 15 bp, Homo sapiens
gctctcaaagacggg

SEQ ID NO: 1812160 - DNA, 15 bp, Homo sapiens
ctctcaaagacggga

SEQ ID NO: 1812161 - DNA, 15 bp, Homo sapiens
tctcaaagacgggat

SEQ ID NO: 1812162 - DNA, 15 bp, Homo sapiens
ctcaaagacgggatg

SEQ ID NO: 1812163 - DNA, 15 bp, Homo sapiens
tcaaagacgggatgc

SEQ ID NO: 1812164 - DNA, 15 bp, Homo sapiens
caaagacgggatgct

SEQ ID NO: 1812165 - DNA, 15 bp, Homo sapiens
aaagacgggatgctt

SEQ ID NO: 1812166 - DNA, 15 bp, Homo sapiens
aagacgggatgcttg

SEQ ID NO: 1812167 - DNA, 15 bp, Homo sapiens
agacgggatgcttgt

SEQ ID NO: 1812168 - DNA, 15 bp, Homo sapiens
gacgggatgcttgtc

SEQ ID NO: 1812169 - DNA, 15 bp, Homo sapiens
acgggatgcttgtcg

SEQ ID NO: 1812170 - DNA, 15 bp, Homo sapiens
cgggatgcttgtcgt

SEQ ID NO: 1812171 - DNA, 15 bp, Homo sapiens
gggatgcttgtcgtc

SEQ ID NO: 1812172 - DNA, 15 bp, Homo sapiens
ggatgcttgtcgtcg

SEQ ID NO: 1812173 - DNA, 15 bp, Homo sapiens
gatgcttgtcgtcga

SEQ ID NO: 1812174 - DNA, 15 bp, Homo sapiens
atgcttgtcgtcgag

SEQ ID NO: 1812175 - DNA, 15 bp, Homo sapiens
tgcttgtcgtcgagt

SEQ ID NO: 1812176 - DNA, 15 bp, Homo sapiens
gcttgtcgtcgagtc

SEQ ID NO: 1812177 - DNA, 15 bp, Homo sapiens
cttgtcgtcgagtct

SEQ ID NO: 1812178 - DNA, 15 bp, Homo sapiens
ttgtcgtcgagtctc

SEQ ID NO: 1812179 - DNA, 15 bp, Homo sapiens
tgtcgtcgagtctca

SEQ ID NO: 1812180 - DNA, 15 bp, Homo sapiens
gtcgtcgagtctcat

SEQ ID NO: 1812181 - DNA, 15 bp, Homo sapiens
tcgtcgagtctcata

SEQ ID NO: 1812182 - DNA, 15 bp, Homo sapiens
cgtcgagtctcatac

SEQ ID NO: 1812183 - DNA, 15 bp, Homo sapiens
gtcgagtctcatacg

SEQ ID NO: 1812184 - DNA, 15 bp, Homo sapiens
tcgagtctcatacgc

SEQ ID NO: 1812185 - DNA, 15 bp, Homo sapiens
cgagtctcatacgct

SEQ ID NO: 1812186 - DNA, 15 bp, Homo sapiens
gagtctcatacgcta

SEQ ID NO: 1812187 - DNA, 15 bp, Homo sapiens
agtctcatacgctaa

SEQ ID NO: 1812188 - DNA, 15 bp, Homo sapiens
gtctcatacgctaac

SEQ ID NO: 1812189 - DNA, 15 bp, Homo sapiens
tctcatacgctaacc

SEQ ID NO: 1812190 - DNA, 15 bp, Homo sapiens
ctcatacgctaacct

SEQ ID NO: 1812191 - DNA, 15 bp, Homo sapiens
tcatacgctaacctc

SEQ ID NO: 1812192 - DNA, 15 bp, Homo sapiens
catacgctaacctct

SEQ ID NO: 1812193 - DNA, 15 bp, Homo sapiens
atacgctaacctctg

SEQ ID NO: 1812194 - DNA, 15 bp, Homo sapiens
tacgctaacctctgc

SEQ ID NO: 1812195 - DNA, 15 bp, Homo sapiens
acgctaacctctgct

SEQ ID NO: 1812196 - DNA, 15 bp, Homo sapiens
cgctaacctctgctc

SEQ ID NO: 1812197 - DNA, 15 bp, Homo sapiens
gctaacctctgctcc

SEQ ID NO: 1812198 - DNA, 15 bp, Homo sapiens
ctaacctctgctccg

SEQ ID NO: 1812199 - DNA, 15 bp, Homo sapiens
taacctctgctccgc

SEQ ID NO: 1812200 - DNA, 15 bp, Homo sapiens
aacctctgctccgcc

SEQ ID NO: 1812201 - DNA, 15 bp, Homo sapiens
acctctgctccgcct

SEQ ID NO: 1812202 - DNA, 15 bp, Homo sapiens
cctctgctccgcctc

SEQ ID NO: 1812203 - DNA, 15 bp, Homo sapiens
ctctgctccgcctct

SEQ ID NO: 1812204 - DNA, 15 bp, Homo sapiens
tctgctccgcctctt

SEQ ID NO: 1812205 - DNA, 15 bp, Homo sapiens
ctgctccgcctcttc

SEQ ID NO: 1812206 - DNA, 15 bp, Homo sapiens
tgctccgcctcttct

SEQ ID NO: 1812207 - DNA, 15 bp, Homo sapiens
gctccgcctcttctc

SEQ ID NO: 1812208 - DNA, 15 bp, Homo sapiens
ctccgcctcttctca

SEQ ID NO: 1812209 - DNA, 15 bp, Homo sapiens
tccgcctcttctcag

SEQ ID NO: 1812210 - DNA, 15 bp, Homo sapiens
ccgcctcttctcaga

SEQ ID NO: 1812211 - DNA, 15 bp, Homo sapiens
cgcctcttctcagag

SEQ ID NO: 1812212 - DNA, 15 bp, Homo sapiens
gcctcttctcagagc

SEQ ID NO: 1812213 - DNA, 15 bp, Homo sapiens
cctcttctcagagct

SEQ ID NO: 1812214 - DNA, 15 bp, Homo sapiens
ctcttctcagagctg

SEQ ID NO: 1812215 - DNA, 15 bp, Homo sapiens
tcttctcagagctgc

SEQ ID NO: 1812216 - DNA, 15 bp, Homo sapiens
cttctcagagctgcg

SEQ ID NO: 1812217 - DNA, 15 bp, Homo sapiens
ttctcagagctgcgc

SEQ ID NO: 1812218 - DNA, 15 bp, Homo sapiens
tctcagagctgcgca

SEQ ID NO: 1812219 - DNA, 15 bp, Homo sapiens
ctcagagctgcgcat

SEQ ID NO: 1812220 - DNA, 15 bp, Homo sapiens
tcagagctgcgcata

SEQ ID NO: 1812221 - DNA, 15 bp, Homo sapiens
cagagctgcgcataa

SEQ ID NO: 1812222 - DNA, 15 bp, Homo sapiens
agagctgcgcataaa

SEQ ID NO: 1812223 - DNA, 15 bp, Homo sapiens
gagctgcgcataaaa

SEQ ID NO: 1812224 - DNA, 15 bp, Homo sapiens
agctgcgcataaaat

SEQ ID NO: 1812225 - DNA, 15 bp, Homo sapiens
gctgcgcataaaatc

SEQ ID NO: 1812226 - DNA, 15 bp, Homo sapiens
ctgcgcataaaatcc

SEQ ID NO: 1812227 - DNA, 15 bp, Homo sapiens
tgcgcataaaatcca

SEQ ID NO: 1812228 - DNA, 15 bp, Homo sapiens
gcgcataaaatccag

SEQ ID NO: 1812229 - DNA, 15 bp, Homo sapiens
cgcataaaatccagc

SEQ ID NO: 1812230 - DNA, 15 bp, Homo sapiens
gcataaaatccagct

SEQ ID NO: 1812231 - DNA, 15 bp, Homo sapiens
cataaaatccagctt

SEQ ID NO: 1812232 - DNA, 15 bp, Homo sapiens
ataaaatccagcttt

SEQ ID NO: 1812233 - DNA, 15 bp, Homo sapiens
taaaatccagctttg

SEQ ID NO: 1812234 - DNA, 15 bp, Homo sapiens
aaaatccagctttgt

SEQ ID NO: 1812235 - DNA, 15 bp, Homo sapiens
aaatccagctttgtg

SEQ ID NO: 1812236 - DNA, 15 bp, Homo sapiens
aatccagctttgtgg

SEQ ID NO: 1812237 - DNA, 15 bp, Homo sapiens
atccagctttgtggc

SEQ ID NO: 1812238 - DNA, 15 bp, Homo sapiens
tccagctttgtggca

SEQ ID NO: 1812239 - DNA, 15 bp, Homo sapiens
ccagctttgtggcac

SEQ ID NO: 1812240 - DNA, 15 bp, Homo sapiens
cagctttgtggcacc

SEQ ID NO: 1812241 - DNA, 15 bp, Homo sapiens
agctttgtggcacct

SEQ ID NO: 1812242 - DNA, 15 bp, Homo sapiens
gctttgtggcacctc

SEQ ID NO: 1812243 - DNA, 15 bp, Homo sapiens
ctttgtggcacctct

SEQ ID NO: 1812244 - DNA, 15 bp, Homo sapiens
tttgtggcacctctg

SEQ ID NO: 1812245 - DNA, 15 bp, Homo sapiens
ttgtggcacctctgg

SEQ ID NO: 1812246 - DNA, 15 bp, Homo sapiens
tgtggcacctctgga

SEQ ID NO: 1812247 - DNA, 15 bp, Homo sapiens
gtggcacctctggaa

SEQ ID NO: 1812248 - DNA, 15 bp, Homo sapiens
tggcacctctggaaa

SEQ ID NO: 1812249 - DNA, 15 bp, Homo sapiens
ggcacctctggaaaa

SEQ ID NO: 1812250 - DNA, 15 bp, Homo sapiens
gcacctctggaaaag

SEQ ID NO: 1812251 - DNA, 15 bp, Homo sapiens
cacctctggaaaagt

SEQ ID NO: 1812252 - DNA, 15 bp, Homo sapiens
acctctggaaaagtc

SEQ ID NO: 1812253 - DNA, 15 bp, Homo sapiens
cctctggaaaagtca

SEQ ID NO: 1812254 - DNA, 15 bp, Homo sapiens
ctctggaaaagtcat

SEQ ID NO: 1812255 - DNA, 15 bp, Homo sapiens
tctggaaaagtcata

SEQ ID NO: 1812256 - DNA, 15 bp, Homo sapiens
ctggaaaagtcatat

SEQ ID NO: 1812257 - DNA, 15 bp, Homo sapiens
tggaaaagtcatatg

SEQ ID NO: 1812258 - DNA, 15 bp, Homo sapiens
ggaaaagtcatatgg

SEQ ID NO: 1812259 - DNA, 15 bp, Homo sapiens
gaaaagtcatatggg

SEQ ID NO: 1812260 - DNA, 15 bp, Homo sapiens
aaaagtcatatggga

SEQ ID NO: 1812261 - DNA, 15 bp, Homo sapiens
aaagtcatatgggac

SEQ ID NO: 1812262 - DNA, 15 bp, Homo sapiens
aagtcatatgggacc

SEQ ID NO: 1812263 - DNA, 15 bp, Homo sapiens
agtcatatgggacca

SEQ ID NO: 1812264 - DNA, 15 bp, Homo sapiens
gtcatatgggaccag

SEQ ID NO: 1812265 - DNA, 15 bp, Homo sapiens
tcatatgggaccagg

SEQ ID NO: 1812266 - DNA, 15 bp, Homo sapiens
catatgggaccaggc

SEQ ID NO: 1812267 - DNA, 15 bp, Homo sapiens
atatgggaccaggcc

SEQ ID NO: 1812268 - DNA, 15 bp, Homo sapiens
tatgggaccaggccc

SEQ ID NO: 1812269 - DNA, 15 bp, Homo sapiens
atgggaccaggccca

SEQ ID NO: 1812270 - DNA, 15 bp, Homo sapiens
tgggaccaggcccag

SEQ ID NO: 1812271 - DNA, 15 bp, Homo sapiens
gggaccaggcccaga

SEQ ID NO: 1812272 - DNA, 15 bp, Homo sapiens
ggaccaggcccagag

SEQ ID NO: 1812273 - DNA, 15 bp, Homo sapiens
gaccaggcccagagt

SEQ ID NO: 1812274 - DNA, 15 bp, Homo sapiens
accaggcccagagtc

SEQ ID NO: 1812275 - DNA, 15 bp, Homo sapiens
ccaggcccagagtcc

SEQ ID NO: 1812276 - DNA, 15 bp, Homo sapiens
caggcccagagtcct

SEQ ID NO: 1812277 - DNA, 15 bp, Homo sapiens
ggcccagagtcctga

SEQ ID NO: 1812278 - DNA, 15 bp, Homo sapiens
gcccagagtcctgac

SEQ ID NO: 1812279 - DNA, 15 bp, Homo sapiens
cccagagtcctgacg

SEQ ID NO: 1812280 - DNA, 15 bp, Homo sapiens
ccagagtcctgacgg

SEQ ID NO: 1812281 - DNA, 15 bp, Homo sapiens
cagagtcctgacggg

SEQ ID NO: 1812282 - DNA, 15 bp, Homo sapiens
agagtcctgacgggc

SEQ ID NO: 1812283 - DNA, 15 bp, Homo sapiens
gagtcctgacgggca

SEQ ID NO: 1812284 - DNA, 15 bp, Homo sapiens
agtcctgacgggcaa

SEQ ID NO: 1812285 - DNA, 15 bp, Homo sapiens
gtcctgacgggcaac

SEQ ID NO: 1812286 - DNA, 15 bp, Homo sapiens
tcctgacgggcaacc

SEQ ID NO: 1812287 - DNA, 15 bp, Homo sapiens
cctgacgggcaaccc

SEQ ID NO: 1812288 - DNA, 15 bp, Homo sapiens
ctgacgggcaaccct

SEQ ID NO: 1812289 - DNA, 15 bp, Homo sapiens
tgacgggcaaccctc

SEQ ID NO: 1812290 - DNA, 15 bp, Homo sapiens
gacgggcaaccctcg

SEQ ID NO: 1812291 - DNA, 15 bp, Homo sapiens
acgggcaaccctcgc

SEQ ID NO: 1812292 - DNA, 15 bp, Homo sapiens
cgggcaaccctcgct

SEQ ID NO: 1812293 - DNA, 15 bp, Homo sapiens
gggcaaccctcgctt

SEQ ID NO: 1812294 - DNA, 15 bp, Homo sapiens
ggcaaccctcgcttg

SEQ ID NO: 1812295 - DNA, 15 bp, Homo sapiens
gcaaccctcgcttgg

SEQ ID NO: 1812296 - DNA, 15 bp, Homo sapiens
caaccctcgcttgga

SEQ ID NO: 1812297 - DNA, 15 bp, Homo sapiens
aaccctcgcttggac

SEQ ID NO: 1812298 - DNA, 15 bp, Homo sapiens
accctcgcttggacc

SEQ ID NO: 1812299 - DNA, 15 bp, Homo sapiens
aggtccacaaaggaa

SEQ ID NO: 1812300 - DNA, 15 bp, Homo sapiens
ggtccacaaaggaaa

SEQ ID NO: 1812301 - DNA, 15 bp, Homo sapiens
gtccacaaaggaaat

SEQ ID NO: 1812302 - DNA, 15 bp, Homo sapiens
tccacaaaggaaatt

SEQ ID NO: 1812303 - DNA, 15 bp, Homo sapiens
ccacaaaggaaattc

SEQ ID NO: 1812304 - DNA, 15 bp, Homo sapiens
cacaaaggaaattcc

SEQ ID NO: 1812305 - DNA, 15 bp, Homo sapiens
acaaaggaaattccc

SEQ ID NO: 1812306 - DNA, 15 bp, Homo sapiens
caaaggaaattcccg

SEQ ID NO: 1812307 - DNA, 15 bp, Homo sapiens
aaaggaaattcccga

SEQ ID NO: 1812308 - DNA, 15 bp, Homo sapiens
aaggaaattcccgat

SEQ ID NO: 1812309 - DNA, 15 bp, Homo sapiens
aggaaattcccgatg

SEQ ID NO: 1812310 - DNA, 15 bp, Homo sapiens
ggaaattcccgatga

SEQ ID NO: 1812311 - DNA, 15 bp, Homo sapiens
gaaattcccgatgag

SEQ ID NO: 1812312 - DNA, 15 bp, Homo sapiens
aaattcccgatgaga

SEQ ID NO: 1812313 - DNA, 15 bp, Homo sapiens
aattcccgatgagat

SEQ ID NO: 1812314 - DNA, 15 bp, Homo sapiens
attcccgatgagatc

SEQ ID NO: 1812315 - DNA, 15 bp, Homo sapiens
ttcccgatgagatca

SEQ ID NO: 1812316 - DNA, 15 bp, Homo sapiens
tcccgatgagatcag

SEQ ID NO: 1812317 - DNA, 15 bp, Homo sapiens
cccgatgagatcagc

SEQ ID NO: 1812318 - DNA, 15 bp, Homo sapiens
ccgatgagatcagca

SEQ ID NO: 1812319 - DNA, 15 bp, Homo sapiens
cgatgagatcagcat

SEQ ID NO: 1812320 - DNA, 15 bp, Homo sapiens
gatgagatcagcatt

SEQ ID NO: 1812321 - DNA, 15 bp, Homo sapiens
atgagatcagcattc

SEQ ID NO: 1812322 - DNA, 15 bp, Homo sapiens
tgagatcagcattct

SEQ ID NO: 1812323 - DNA, 15 bp, Homo sapiens
gagatcagcattctc

SEQ ID NO: 1812324 - DNA, 15 bp, Homo sapiens
agatcagcattctcc

SEQ ID NO: 1812325 - DNA, 15 bp, Homo sapiens
gatcagcattctcct

SEQ ID NO: 1812326 - DNA, 15 bp, Homo sapiens
atcagcattctcctt

SEQ ID NO: 1812327 - DNA, 15 bp, Homo sapiens
tcagcattctccttc

SEQ ID NO: 1812328 - DNA, 15 bp, Homo sapiens
cagcattctccttct

SEQ ID NO: 1812329 - DNA, 15 bp, Homo sapiens
agcattctccttctc

SEQ ID NO: 1812330 - DNA, 15 bp, Homo sapiens
gcattctccttctcg

SEQ ID NO: 1812331 - DNA, 15 bp, Homo sapiens
cattctccttctcgg

SEQ ID NO: 1812332 - DNA, 15 bp, Homo sapiens
attctccttctcggt

SEQ ID NO: 1812333 - DNA, 15 bp, Homo sapiens
ttctccttctcggtg

SEQ ID NO: 1812334 - DNA, 15 bp, Homo sapiens
tctccttctcggtgt

SEQ ID NO: 1812335 - DNA, 15 bp, Homo sapiens
ctccttctcggtgtg

SEQ ID NO: 1812336 - DNA, 15 bp, Homo sapiens
tccttctcggtgtgg

SEQ ID NO: 1812337 - DNA, 15 bp, Homo sapiens
ccttctcggtgtggc

SEQ ID NO: 1812338 - DNA, 15 bp, Homo sapiens
cttctcggtgtggcg

SEQ ID NO: 1812339 - DNA, 15 bp, Homo sapiens
ttctcggtgtggcgc

SEQ ID NO: 1812340 - DNA, 15 bp, Homo sapiens
tctcggtgtggcgca

SEQ ID NO: 1812341 - DNA, 15 bp, Homo sapiens
ctcggtgtggcgcac

SEQ ID NO: 1812342 - DNA, 15 bp, Homo sapiens
tcggtgtggcgcact

SEQ ID NO: 1812343 - DNA, 15 bp, Homo sapiens
cggtgtggcgcactt

SEQ ID NO: 1812344 - DNA, 15 bp, Homo sapiens
ggtgtggcgcacttc

SEQ ID NO: 1812345 - DNA, 15 bp, Homo sapiens
gtgtggcgcacttca

SEQ ID NO: 1812346 - DNA, 15 bp, Homo sapiens
tgtggcgcacttcaa

SEQ ID NO: 1812347 - DNA, 15 bp, Homo sapiens
gtggcgcacttcaag

SEQ ID NO: 1812348 - DNA, 15 bp, Homo sapiens
tggcgcacttcaagg

SEQ ID NO: 1812349 - DNA, 15 bp, Homo sapiens
ggcgcacttcaaggg

SEQ ID NO: 1812350 - DNA, 15 bp, Homo sapiens
gcgcacttcaagggt

SEQ ID NO: 1812351 - DNA, 15 bp, Homo sapiens
cgcacttcaagggtg

SEQ ID NO: 1812352 - DNA, 15 bp, Homo sapiens
gcacttcaagggtga

SEQ ID NO: 1812353 - DNA, 15 bp, Homo sapiens
cacttcaagggtgag

SEQ ID NO: 1812354 - DNA, 15 bp, Homo sapiens
acttcaagggtgagc

SEQ ID NO: 1812355 - DNA, 15 bp, Homo sapiens
cttcaagggtgagcg

SEQ ID NO: 1812356 - DNA, 15 bp, Homo sapiens
ttcaagggtgagcgc

SEQ ID NO: 1812357 - DNA, 15 bp, Homo sapiens
tcaagggtgagcgcg

SEQ ID NO: 1812358 - DNA, 15 bp, Homo sapiens
caagggtgagcgcgt

SEQ ID NO: 1812359 - DNA, 15 bp, Homo sapiens
aagggtgagcgcgtc

SEQ ID NO: 1812360 - DNA, 15 bp, Homo sapiens
agggtgagcgcgtct

SEQ ID NO: 1812361 - DNA, 15 bp, Homo sapiens
gggtgagcgcgtctc

SEQ ID NO: 1812362 - DNA, 15 bp, Homo sapiens
ggtgagcgcgtctcc

SEQ ID NO: 1812363 - DNA, 15 bp, Homo sapiens
gtgagcgcgtctcca

SEQ ID NO: 1812364 - DNA, 15 bp, Homo sapiens
tgagcgcgtctccaa

SEQ ID NO: 1812365 - DNA, 15 bp, Homo sapiens
gagcgcgtctccaat

SEQ ID NO: 1812366 - DNA, 15 bp, Homo sapiens
agcgcgtctccaatt

SEQ ID NO: 1812367 - DNA, 15 bp, Homo sapiens
gcgcgtctccaattc

SEQ ID NO: 1812368 - DNA, 15 bp, Homo sapiens
cgcgtctccaattct

SEQ ID NO: 1812369 - DNA, 15 bp, Homo sapiens
gcgtctccaattctt

SEQ ID NO: 1812370 - DNA, 15 bp, Homo sapiens
cgtctccaattcttt

SEQ ID NO: 1812371 - DNA, 15 bp, Homo sapiens
gtctccaattctttt

SEQ ID NO: 1812372 - DNA, 15 bp, Homo sapiens
tctccaattcttttt

SEQ ID NO: 1812373 - DNA, 15 bp, Homo sapiens
ctccaattctttttc

SEQ ID NO: 1812374 - DNA, 15 bp, Homo sapiens
tccaattctttttca

SEQ ID NO: 1812375 - DNA, 15 bp, Homo sapiens
ccaattctttttcat

SEQ ID NO: 1812376 - DNA, 15 bp, Homo sapiens
caattctttttcatt

SEQ ID NO: 1812377 - DNA, 15 bp, Homo sapiens
aattctttttcattt

SEQ ID NO: 1812378 - DNA, 15 bp, Homo sapiens
attctttttcattta

SEQ ID NO: 1812379 - DNA, 15 bp, Homo sapiens
ttctttttcatttat

SEQ ID NO: 1812380 - DNA, 15 bp, Homo sapiens
tctttttcatttatt

SEQ ID NO: 1812381 - DNA, 15 bp, Homo sapiens
ctttttcatttattt

SEQ ID NO: 1812382 - DNA, 15 bp, Homo sapiens
tttttcatttatttt

SEQ ID NO: 1812383 - DNA, 15 bp, Homo sapiens
ttttcatttatttta

SEQ ID NO: 1812384 - DNA, 15 bp, Homo sapiens
tttcatttattttac

SEQ ID NO: 1812385 - DNA, 15 bp, Homo sapiens
ttcatttattttact

SEQ ID NO: 1812386 - DNA, 15 bp, Homo sapiens
tcatttattttactg

SEQ ID NO: 1812387 - DNA, 15 bp, Homo sapiens
catttattttactgt

SEQ ID NO: 1812388 - DNA, 15 bp, Homo sapiens
atttattttactgta

SEQ ID NO: 1812389 - DNA, 15 bp, Homo sapiens
tttattttactgtat

SEQ ID NO: 1812390 - DNA, 15 bp, Homo sapiens
ttattttactgtatt

SEQ ID NO: 1812391 - DNA, 15 bp, Homo sapiens
tattttactgtattt

SEQ ID NO: 1812392 - DNA, 15 bp, Homo sapiens
attttactgtatttt

SEQ ID NO: 1812393 - DNA, 15 bp, Homo sapiens
ttttactgtatttta

SEQ ID NO: 1812394 - DNA, 15 bp, Homo sapiens
tttactgtattttaa

SEQ ID NO: 1812395 - DNA, 15 bp, Homo sapiens
ttactgtattttaac

SEQ ID NO: 1812396 - DNA, 15 bp, Homo sapiens
tactgtattttaact

SEQ ID NO: 1812397 - DNA, 15 bp, Homo sapiens
actgtattttaacta

SEQ ID NO: 1812398 - DNA, 15 bp, Homo sapiens
ctgtattttaactaa

SEQ ID NO: 1812399 - DNA, 15 bp, Homo sapiens
tgtattttaactaat

SEQ ID NO: 1812400 - DNA, 15 bp, Homo sapiens
gtattttaactaatt

SEQ ID NO: 1812401 - DNA, 15 bp, Homo sapiens
tattttaactaatta

SEQ ID NO: 1812402 - DNA, 15 bp, Homo sapiens
attttaactaattaa

SEQ ID NO: 1812403 - DNA, 15 bp, Homo sapiens
ttttaactaattaat

SEQ ID NO: 1812404 - DNA, 15 bp, Homo sapiens
tttaactaattaatt

SEQ ID NO: 1812405 - DNA, 15 bp, Homo sapiens
ttaactaattaatta

SEQ ID NO: 1812406 - DNA, 15 bp, Homo sapiens
taactaattaattaa

SEQ ID NO: 1812407 - DNA, 15 bp, Homo sapiens
aactaattaattaat

SEQ ID NO: 1812408 - DNA, 15 bp, Homo sapiens
actaattaattaatt

SEQ ID NO: 1812409 - DNA, 15 bp, Homo sapiens
ctaattaattaattc

SEQ ID NO: 1812410 - DNA, 15 bp, Homo sapiens
taattaattaattcg

SEQ ID NO: 1812411 - DNA, 15 bp, Homo sapiens
aattaattaattcga

SEQ ID NO: 1812412 - DNA, 15 bp, Homo sapiens
attaattaattcgat

SEQ ID NO: 1812413 - DNA, 15 bp, Homo sapiens
ttaattaattcgatg

SEQ ID NO: 1812414 - DNA, 15 bp, Homo sapiens
taattaattcgatgg

SEQ ID NO: 1812415 - DNA, 15 bp, Homo sapiens
aattaattcgatgga

SEQ ID NO: 1812416 - DNA, 15 bp, Homo sapiens
attaattcgatggag

SEQ ID NO: 1812417 - DNA, 15 bp, Homo sapiens
ttaattcgatggagt

SEQ ID NO: 1812418 - DNA, 15 bp, Homo sapiens
taattcgatggagtc

SEQ ID NO: 1812419 - DNA, 15 bp, Homo sapiens
aattcgatggagtct

SEQ ID NO: 1812420 - DNA, 15 bp, Homo sapiens
attcgatggagtctt

SEQ ID NO: 1812421 - DNA, 15 bp, Homo sapiens
ttcgatggagtctta

SEQ ID NO: 1812422 - DNA, 15 bp, Homo sapiens
tcgatggagtcttac

SEQ ID NO: 1812423 - DNA, 15 bp, Homo sapiens
cgatggagtcttact

SEQ ID NO: 1812424 - DNA, 15 bp, Homo sapiens
gatggagtcttactc

SEQ ID NO: 1812425 - DNA, 15 bp, Homo sapiens
atggagtcttactct

SEQ ID NO: 1812426 - DNA, 15 bp, Homo sapiens
tggagtcttactctg

SEQ ID NO: 1812427 - DNA, 15 bp, Homo sapiens
ggagtcttactctgt

SEQ ID NO: 1812428 - DNA, 15 bp, Homo sapiens
gagtcttactctgta

SEQ ID NO: 1812429 - DNA, 15 bp, Homo sapiens
agtcttactctgtag

SEQ ID NO: 1812430 - DNA, 15 bp, Homo sapiens
gtcttactctgtagt

SEQ ID NO: 1812431 - DNA, 15 bp, Homo sapiens
tcttactctgtagtc

SEQ ID NO: 1812432 - DNA, 15 bp, Homo sapiens
cttactctgtagtcc

SEQ ID NO: 1812433 - DNA, 15 bp, Homo sapiens
ttactctgtagtcct

SEQ ID NO: 1812434 - DNA, 15 bp, Homo sapiens
tactctgtagtccta

SEQ ID NO: 1812435 - DNA, 15 bp, Homo sapiens
actctgtagtcctaa

SEQ ID NO: 1812436 - DNA, 15 bp, Homo sapiens
ctctgtagtcctaac

SEQ ID NO: 1812437 - DNA, 15 bp, Homo sapiens
tctgtagtcctaact

SEQ ID NO: 1812438 - DNA, 15 bp, Homo sapiens
ctgtagtcctaactg

SEQ ID NO: 1812439 - DNA, 15 bp, Homo sapiens
tgtagtcctaactgg

SEQ ID NO: 1812440 - DNA, 15 bp, Homo sapiens
gtagtcctaactgga

SEQ ID NO: 1812441 - DNA, 15 bp, Homo sapiens
tagtcctaactggag

SEQ ID NO: 1812442 - DNA, 15 bp, Homo sapiens
agtcctaactggagt

SEQ ID NO: 1812443 - DNA, 15 bp, Homo sapiens
gtcctaactggagtg

SEQ ID NO: 1812444 - DNA, 15 bp, Homo sapiens
tcctaactggagtgc

SEQ ID NO: 1812445 - DNA, 15 bp, Homo sapiens
cctaactggagtgca

SEQ ID NO: 1812446 - DNA, 15 bp, Homo sapiens
ctaactggagtgcag

SEQ ID NO: 1812447 - DNA, 15 bp, Homo sapiens
taactggagtgcagt

SEQ ID NO: 1812448 - DNA, 15 bp, Homo sapiens
gcgatctcagctcaa

SEQ ID NO: 1812449 - DNA, 15 bp, Homo sapiens
cgatctcagctcaat

SEQ ID NO: 1812450 - DNA, 15 bp, Homo sapiens
gatctcagctcaatg

SEQ ID NO: 1812451 - DNA, 15 bp, Homo sapiens
atctcagctcaatgc

SEQ ID NO: 1812452 - DNA, 15 bp, Homo sapiens
tctcagctcaatgca

SEQ ID NO: 1812453 - DNA, 15 bp, Homo sapiens
ctcagctcaatgcaa

SEQ ID NO: 1812454 - DNA, 15 bp, Homo sapiens
tcagctcaatgcaac

SEQ ID NO: 1812455 - DNA, 15 bp, Homo sapiens
cagctcaatgcaacc

SEQ ID NO: 1812456 - DNA, 15 bp, Homo sapiens
agctcaatgcaacct

SEQ ID NO: 1812457 - DNA, 15 bp, Homo sapiens
gctcaatgcaacctc

SEQ ID NO: 1812458 - DNA, 15 bp, Homo sapiens
ctcaatgcaacctcc

SEQ ID NO: 1812459 - DNA, 15 bp, Homo sapiens
tcaatgcaacctccg

SEQ ID NO: 1812460 - DNA, 15 bp, Homo sapiens
caatgcaacctccgc

SEQ ID NO: 1812461 - DNA, 15 bp, Homo sapiens
aatgcaacctccgcc

SEQ ID NO: 1812462 - DNA, 15 bp, Homo sapiens
atgcaacctccgcct

SEQ ID NO: 1812463 - DNA, 15 bp, Homo sapiens
gctgggattacaggg

SEQ ID NO: 1812464 - DNA, 15 bp, Homo sapiens
ctgggattacaggga

SEQ ID NO: 1812465 - DNA, 15 bp, Homo sapiens
gggattacagggatg

SEQ ID NO: 1812466 - DNA, 15 bp, Homo sapiens
ggattacagggatgt

SEQ ID NO: 1812467 - DNA, 15 bp, Homo sapiens
gattacagggatgta

SEQ ID NO: 1812468 - DNA, 15 bp, Homo sapiens
attacagggatgtac

SEQ ID NO: 1812469 - DNA, 15 bp, Homo sapiens
ttacagggatgtacc

SEQ ID NO: 1812470 - DNA, 15 bp, Homo sapiens
tacagggatgtacca

SEQ ID NO: 1812471 - DNA, 15 bp, Homo sapiens
acagggatgtaccac

SEQ ID NO: 1812472 - DNA, 15 bp, Homo sapiens
cagggatgtaccacc

SEQ ID NO: 1812473 - DNA, 15 bp, Homo sapiens
agggatgtaccacca

SEQ ID NO: 1812474 - DNA, 15 bp, Homo sapiens
gggatgtaccaccac

SEQ ID NO: 1812475 - DNA, 15 bp, Homo sapiens
ggatgtaccaccact

SEQ ID NO: 1812476 - DNA, 15 bp, Homo sapiens
gatgtaccaccactc

SEQ ID NO: 1812477 - DNA, 15 bp, Homo sapiens
atgtaccaccactcc

SEQ ID NO: 1812478 - DNA, 15 bp, Homo sapiens
tgtaccaccactccc

SEQ ID NO: 1812479 - DNA, 15 bp, Homo sapiens
gtaccaccactcccg

SEQ ID NO: 1812480 - DNA, 15 bp, Homo sapiens
taccaccactcccgg

SEQ ID NO: 1812481 - DNA, 15 bp, Homo sapiens
accaccactcccggc

SEQ ID NO: 1812482 - DNA, 15 bp, Homo sapiens
ccaccactcccggct

SEQ ID NO: 1812483 - DNA, 15 bp, Homo sapiens
caccactcccggcta

SEQ ID NO: 1812484 - DNA, 15 bp, Homo sapiens
accactcccggctaa

SEQ ID NO: 1812485 - DNA, 15 bp, Homo sapiens
ccactcccggctaat

SEQ ID NO: 1812486 - DNA, 15 bp, Homo sapiens
cactcccggctaatt

SEQ ID NO: 1812487 - DNA, 15 bp, Homo sapiens
actcccggctaattt

SEQ ID NO: 1812488 - DNA, 15 bp, Homo sapiens
ctcccggctaatttt

SEQ ID NO: 1812489 - DNA, 15 bp, Homo sapiens
tcccggctaattttt

SEQ ID NO: 1812490 - DNA, 15 bp, Homo sapiens
aattttttgtattta

SEQ ID NO: 1812491 - DNA, 15 bp, Homo sapiens
attttttgtatttaa

SEQ ID NO: 1812492 - DNA, 15 bp, Homo sapiens
ttttttgtatttaat

SEQ ID NO: 1812493 - DNA, 15 bp, Homo sapiens
tttttgtatttaata

SEQ ID NO: 1812494 - DNA, 15 bp, Homo sapiens
ttttgtatttaatag

SEQ ID NO: 1812495 - DNA, 15 bp, Homo sapiens
tttgtatttaataga

SEQ ID NO: 1812496 - DNA, 15 bp, Homo sapiens
ttgtatttaatagac

SEQ ID NO: 1812497 - DNA, 15 bp, Homo sapiens
tgtatttaatagaca

SEQ ID NO: 1812498 - DNA, 15 bp, Homo sapiens
gtatttaatagacat

SEQ ID NO: 1812499 - DNA, 15 bp, Homo sapiens
tatttaatagacatg

SEQ ID NO: 1812500 - DNA, 15 bp, Homo sapiens
atttaatagacatgg

SEQ ID NO: 1812501 - DNA, 15 bp, Homo sapiens
tttaatagacatggg

SEQ ID NO: 1812502 - DNA, 15 bp, Homo sapiens
ttaatagacatgggg

SEQ ID NO: 1812503 - DNA, 15 bp, Homo sapiens
taatagacatggggt

SEQ ID NO: 1812504 - DNA, 15 bp, Homo sapiens
aatagacatggggtt

SEQ ID NO: 1812505 - DNA, 15 bp, Homo sapiens
atagacatggggttt

SEQ ID NO: 1812506 - DNA, 15 bp, Homo sapiens
tagacatggggtttc

SEQ ID NO: 1812507 - DNA, 15 bp, Homo sapiens
agacatggggtttca

SEQ ID NO: 1812508 - DNA, 15 bp, Homo sapiens
gacatggggtttcac

SEQ ID NO: 1812509 - DNA, 15 bp, Homo sapiens
acatggggtttcacc

SEQ ID NO: 1812510 - DNA, 15 bp, Homo sapiens
catggggtttcacca

SEQ ID NO: 1812511 - DNA, 15 bp, Homo sapiens
cctgagctcaggtgg

SEQ ID NO: 1812512 - DNA, 15 bp, Homo sapiens
ctgagctcaggtggt

SEQ ID NO: 1812513 - DNA, 15 bp, Homo sapiens
tgagctcaggtggtc

SEQ ID NO: 1812514 - DNA, 15 bp, Homo sapiens
gagctcaggtggtct

SEQ ID NO: 1812515 - DNA, 15 bp, Homo sapiens
agctcaggtggtctg

SEQ ID NO: 1812516 - DNA, 15 bp, Homo sapiens
gctcaggtggtctgc

SEQ ID NO: 1812517 - DNA, 15 bp, Homo sapiens
ctcaggtggtctgcc

SEQ ID NO: 1812518 - DNA, 15 bp, Homo sapiens
tcaggtggtctgccc

SEQ ID NO: 1812519 - DNA, 15 bp, Homo sapiens
caggtggtctgcccg

SEQ ID NO: 1812520 - DNA, 15 bp, Homo sapiens
aggtggtctgcccgc

SEQ ID NO: 1812521 - DNA, 15 bp, Homo sapiens
ggtggtctgcccgcc

SEQ ID NO: 1812522 - DNA, 15 bp, Homo sapiens
gtggtctgcccgcct

SEQ ID NO: 1812523 - DNA, 15 bp, Homo sapiens
tggtctgcccgcctc

SEQ ID NO: 1812524 - DNA, 15 bp, Homo sapiens
ggtctgcccgcctca

SEQ ID NO: 1812525 - DNA, 15 bp, Homo sapiens
gtctgcccgcctcag

SEQ ID NO: 1812526 - DNA, 15 bp, Homo sapiens
tctgcccgcctcagc

SEQ ID NO: 1812527 - DNA, 15 bp, Homo sapiens
ctgcccgcctcagcc

SEQ ID NO: 1812528 - DNA, 15 bp, Homo sapiens
tgcccgcctcagcct

SEQ ID NO: 1812529 - DNA, 15 bp, Homo sapiens
gtgctaggattacaa

SEQ ID NO: 1812530 - DNA, 15 bp, Homo sapiens
tgctaggattacaag

SEQ ID NO: 1812531 - DNA, 15 bp, Homo sapiens
gctaggattacaagc

SEQ ID NO: 1812532 - DNA, 15 bp, Homo sapiens
ctaggattacaagct

SEQ ID NO: 1812533 - DNA, 15 bp, Homo sapiens
taggattacaagctt

SEQ ID NO: 1812534 - DNA, 15 bp, Homo sapiens
aggattacaagcttg

SEQ ID NO: 1812535 - DNA, 15 bp, Homo sapiens
ggattacaagcttga

SEQ ID NO: 1812536 - DNA, 15 bp, Homo sapiens
gattacaagcttgag

SEQ ID NO: 1812537 - DNA, 15 bp, Homo sapiens
attacaagcttgagc

SEQ ID NO: 1812538 - DNA, 15 bp, Homo sapiens
ttacaagcttgagcc

SEQ ID NO: 1812539 - DNA, 15 bp, Homo sapiens
tacaagcttgagcca

SEQ ID NO: 1812540 - DNA, 15 bp, Homo sapiens
acaagcttgagccac

SEQ ID NO: 1812541 - DNA, 15 bp, Homo sapiens
caagcttgagccacc

SEQ ID NO: 1812542 - DNA, 15 bp, Homo sapiens
aagcttgagccacca

SEQ ID NO: 1812543 - DNA, 15 bp, Homo sapiens
agcttgagccaccac

SEQ ID NO: 1812544 - DNA, 15 bp, Homo sapiens
gcttgagccaccacg

SEQ ID NO: 1812545 - DNA, 15 bp, Homo sapiens
cttgagccaccacgc

SEQ ID NO: 1812546 - DNA, 15 bp, Homo sapiens
caccacgcccagccc

SEQ ID NO: 1812547 - DNA, 15 bp, Homo sapiens
accacgcccagccct

SEQ ID NO: 1812548 - DNA, 15 bp, Homo sapiens
ccacgcccagccctt

SEQ ID NO: 1812549 - DNA, 15 bp, Homo sapiens
cacgcccagcccttt

SEQ ID NO: 1812550 - DNA, 15 bp, Homo sapiens
acgcccagccctttt

SEQ ID NO: 1812551 - DNA, 15 bp, Homo sapiens
cgcccagcccttttt

SEQ ID NO: 1812552 - DNA, 15 bp, Homo sapiens
gcccagcccttttta

SEQ ID NO: 1812553 - DNA, 15 bp, Homo sapiens
cccagccctttttat

SEQ ID NO: 1812554 - DNA, 15 bp, Homo sapiens
ccagccctttttatt

SEQ ID NO: 1812555 - DNA, 15 bp, Homo sapiens
cagccctttttattt

SEQ ID NO: 1812556 - DNA, 15 bp, Homo sapiens
agccctttttatttt

SEQ ID NO: 1812557 - DNA, 15 bp, Homo sapiens
gccctttttattttt

SEQ ID NO: 1812558 - DNA, 15 bp, Homo sapiens
ccctttttattttta

SEQ ID NO: 1812559 - DNA, 15 bp, Homo sapiens
cctttttatttttaa

SEQ ID NO: 1812560 - DNA, 15 bp, Homo sapiens
ctttttatttttaaa

SEQ ID NO: 1812561 - DNA, 15 bp, Homo sapiens
tttttatttttaaat

SEQ ID NO: 1812562 - DNA, 15 bp, Homo sapiens
tttatttttaaatta

SEQ ID NO: 1812563 - DNA, 15 bp, Homo sapiens
ttatttttaaattaa

SEQ ID NO: 1812564 - DNA, 15 bp, Homo sapiens
tatttttaaattaag

SEQ ID NO: 1812565 - DNA, 15 bp, Homo sapiens
atttttaaattaaga

SEQ ID NO: 1812566 - DNA, 15 bp, Homo sapiens
tttttaaattaagag

SEQ ID NO: 1812567 - DNA, 15 bp, Homo sapiens
ttttaaattaagaga

SEQ ID NO: 1812568 - DNA, 15 bp, Homo sapiens
tttaaattaagagac

SEQ ID NO: 1812569 - DNA, 15 bp, Homo sapiens
ttaaattaagagaca

SEQ ID NO: 1812570 - DNA, 15 bp, Homo sapiens
taaattaagagacaa

SEQ ID NO: 1812571 - DNA, 15 bp, Homo sapiens
aaattaagagacaag

SEQ ID NO: 1812572 - DNA, 15 bp, Homo sapiens
aattaagagacaagg

SEQ ID NO: 1812573 - DNA, 15 bp, Homo sapiens
attaagagacaaggt

SEQ ID NO: 1812574 - DNA, 15 bp, Homo sapiens
ttaagagacaaggtg

SEQ ID NO: 1812575 - DNA, 15 bp, Homo sapiens
taagagacaaggtgt

SEQ ID NO: 1812576 - DNA, 15 bp, Homo sapiens
aagagacaaggtgtt

SEQ ID NO: 1812577 - DNA, 15 bp, Homo sapiens
agagacaaggtgttg

SEQ ID NO: 1812578 - DNA, 15 bp, Homo sapiens
gagacaaggtgttgc

SEQ ID NO: 1812579 - DNA, 15 bp, Homo sapiens
agacaaggtgttgcc

SEQ ID NO: 1812580 - DNA, 15 bp, Homo sapiens
gacaaggtgttgcca

SEQ ID NO: 1812581 - DNA, 15 bp, Homo sapiens
acaaggtgttgccat

SEQ ID NO: 1812582 - DNA, 15 bp, Homo sapiens
caaggtgttgccatg

SEQ ID NO: 1812583 - DNA, 15 bp, Homo sapiens
aaggtgttgccatga

SEQ ID NO: 1812584 - DNA, 15 bp, Homo sapiens
aggtgttgccatgat

SEQ ID NO: 1812585 - DNA, 15 bp, Homo sapiens
ggtgttgccatgatg

SEQ ID NO: 1812586 - DNA, 15 bp, Homo sapiens
gtgttgccatgatgc

SEQ ID NO: 1812587 - DNA, 15 bp, Homo sapiens
tgttgccatgatgcc

SEQ ID NO: 1812588 - DNA, 15 bp, Homo sapiens
gttgccatgatgccc

SEQ ID NO: 1812589 - DNA, 15 bp, Homo sapiens
ttgccatgatgccca

SEQ ID NO: 1812590 - DNA, 15 bp, Homo sapiens
tgccatgatgcccag

SEQ ID NO: 1812591 - DNA, 15 bp, Homo sapiens
gccatgatgcccagg

SEQ ID NO: 1812592 - DNA, 15 bp, Homo sapiens
ccatgatgcccaggc

SEQ ID NO: 1812593 - DNA, 15 bp, Homo sapiens
catgatgcccaggct

SEQ ID NO: 1812594 - DNA, 15 bp, Homo sapiens
atgatgcccaggctg

SEQ ID NO: 1812595 - DNA, 15 bp, Homo sapiens
tgatgcccaggctgg

SEQ ID NO: 1812596 - DNA, 15 bp, Homo sapiens
gatgcccaggctggt

SEQ ID NO: 1812597 - DNA, 15 bp, Homo sapiens
ctgggctcaagtaat

SEQ ID NO: 1812598 - DNA, 15 bp, Homo sapiens
tgggctcaagtaatc

SEQ ID NO: 1812599 - DNA, 15 bp, Homo sapiens
gggctcaagtaatcc

SEQ ID NO: 1812600 - DNA, 15 bp, Homo sapiens
ggctcaagtaatcct

SEQ ID NO: 1812601 - DNA, 15 bp, Homo sapiens
gctcaagtaatcctc

SEQ ID NO: 1812602 - DNA, 15 bp, Homo sapiens
caagtaatcctccca

SEQ ID NO: 1812603 - DNA, 15 bp, Homo sapiens
aagtaatcctcccac

SEQ ID NO: 1812604 - DNA, 15 bp, Homo sapiens
agtaatcctcccacc

SEQ ID NO: 1812605 - DNA, 15 bp, Homo sapiens
gtaatcctcccacct

SEQ ID NO: 1812606 - DNA, 15 bp, Homo sapiens
taatcctcccacctt

SEQ ID NO: 1812607 - DNA, 15 bp, Homo sapiens
aatcctcccaccttg

SEQ ID NO: 1812608 - DNA, 15 bp, Homo sapiens
accgcgcccggccct

SEQ ID NO: 1812609 - DNA, 15 bp, Homo sapiens
ccgcgcccggccctt

SEQ ID NO: 1812610 - DNA, 15 bp, Homo sapiens
cgcgcccggcccttt

SEQ ID NO: 1812611 - DNA, 15 bp, Homo sapiens
gcgcccggccctttt

SEQ ID NO: 1812612 - DNA, 15 bp, Homo sapiens
cgcccggccctttta

SEQ ID NO: 1812613 - DNA, 15 bp, Homo sapiens
gcccggcccttttac

SEQ ID NO: 1812614 - DNA, 15 bp, Homo sapiens
cccggcccttttaca

SEQ ID NO: 1812615 - DNA, 15 bp, Homo sapiens
ccggcccttttacat

SEQ ID NO: 1812616 - DNA, 15 bp, Homo sapiens
cggcccttttacatt

SEQ ID NO: 1812617 - DNA, 15 bp, Homo sapiens
ggcccttttacattt

SEQ ID NO: 1812618 - DNA, 15 bp, Homo sapiens
gcccttttacattta

SEQ ID NO: 1812619 - DNA, 15 bp, Homo sapiens
cccttttacatttat

SEQ ID NO: 1812620 - DNA, 15 bp, Homo sapiens
ccttttacatttatt

SEQ ID NO: 1812621 - DNA, 15 bp, Homo sapiens
cttttacatttattt

SEQ ID NO: 1812622 - DNA, 15 bp, Homo sapiens
ttttacatttattta

SEQ ID NO: 1812623 - DNA, 15 bp, Homo sapiens
tttacatttatttat

SEQ ID NO: 1812624 - DNA, 15 bp, Homo sapiens
ttacatttatttatt

SEQ ID NO: 1812625 - DNA, 15 bp, Homo sapiens
tacatttatttattt

SEQ ID NO: 1812626 - DNA, 15 bp, Homo sapiens
acatttatttattta

SEQ ID NO: 1812627 - DNA, 15 bp, Homo sapiens
catttatttatttat

SEQ ID NO: 1812628 - DNA, 15 bp, Homo sapiens
attttttgagacaga

SEQ ID NO: 1812629 - DNA, 15 bp, Homo sapiens
agtggcgcgatctcg

SEQ ID NO: 1812630 - DNA, 15 bp, Homo sapiens
gtggcgcgatctcgg

SEQ ID NO: 1812631 - DNA, 15 bp, Homo sapiens
caagctctgccttcc

SEQ ID NO: 1812632 - DNA, 15 bp, Homo sapiens
aagctctgccttcca

SEQ ID NO: 1812633 - DNA, 15 bp, Homo sapiens
agctctgccttccag

SEQ ID NO: 1812634 - DNA, 15 bp, Homo sapiens
gctctgccttccagg

SEQ ID NO: 1812635 - DNA, 15 bp, Homo sapiens
gccttccaggttcac

SEQ ID NO: 1812636 - DNA, 15 bp, Homo sapiens
ccttccaggttcaca

SEQ ID NO: 1812637 - DNA, 15 bp, Homo sapiens
cttccaggttcacac

SEQ ID NO: 1812638 - DNA, 15 bp, Homo sapiens
ttccaggttcacacc

SEQ ID NO: 1812639 - DNA, 15 bp, Homo sapiens
tccaggttcacacca

SEQ ID NO: 1812640 - DNA, 15 bp, Homo sapiens
ccaggttcacaccat

SEQ ID NO: 1812641 - DNA, 15 bp, Homo sapiens
caggttcacaccatt

SEQ ID NO: 1812642 - DNA, 15 bp, Homo sapiens
aggttcacaccattc

SEQ ID NO: 1812643 - DNA, 15 bp, Homo sapiens
cattctcctgcctcg

SEQ ID NO: 1812644 - DNA, 15 bp, Homo sapiens
attctcctgcctcga

SEQ ID NO: 1812645 - DNA, 15 bp, Homo sapiens
ttctcctgcctcgac

SEQ ID NO: 1812646 - DNA, 15 bp, Homo sapiens
tctcctgcctcgacc

SEQ ID NO: 1812647 - DNA, 15 bp, Homo sapiens
ctcctgcctcgacct

SEQ ID NO: 1812648 - DNA, 15 bp, Homo sapiens
tcctgcctcgacctc

SEQ ID NO: 1812649 - DNA, 15 bp, Homo sapiens
cctgcctcgacctcc

SEQ ID NO: 1812650 - DNA, 15 bp, Homo sapiens
cctcgacctcccgag

SEQ ID NO: 1812651 - DNA, 15 bp, Homo sapiens
ctcgacctcccgagt

SEQ ID NO: 1812652 - DNA, 15 bp, Homo sapiens
tcgacctcccgagta

SEQ ID NO: 1812653 - DNA, 15 bp, Homo sapiens
cgacctcccgagtag

SEQ ID NO: 1812654 - DNA, 15 bp, Homo sapiens
gacctcccgagtagc

SEQ ID NO: 1812655 - DNA, 15 bp, Homo sapiens
caggcgcccgccact

SEQ ID NO: 1812656 - DNA, 15 bp, Homo sapiens
aggcgcccgccactg

SEQ ID NO: 1812657 - DNA, 15 bp, Homo sapiens
ggcgcccgccactgc

SEQ ID NO: 1812658 - DNA, 15 bp, Homo sapiens
gcgcccgccactgcg

SEQ ID NO: 1812659 - DNA, 15 bp, Homo sapiens
cgcccgccactgcgc

SEQ ID NO: 1812660 - DNA, 15 bp, Homo sapiens
gcccgccactgcgcc

SEQ ID NO: 1812661 - DNA, 15 bp, Homo sapiens
cccgccactgcgccc

SEQ ID NO: 1812662 - DNA, 15 bp, Homo sapiens
ccgccactgcgccct

SEQ ID NO: 1812663 - DNA, 15 bp, Homo sapiens
cgccactgcgcccta

SEQ ID NO: 1812664 - DNA, 15 bp, Homo sapiens
gccactgcgccctac

SEQ ID NO: 1812665 - DNA, 15 bp, Homo sapiens
ccactgcgccctact

SEQ ID NO: 1812666 - DNA, 15 bp, Homo sapiens
cactgcgccctacta

SEQ ID NO: 1812667 - DNA, 15 bp, Homo sapiens
actgcgccctactaa

SEQ ID NO: 1812668 - DNA, 15 bp, Homo sapiens
ctgcgccctactaat

SEQ ID NO: 1812669 - DNA, 15 bp, Homo sapiens
tgcgccctactaatt

SEQ ID NO: 1812670 - DNA, 15 bp, Homo sapiens
gcgccctactaattt

SEQ ID NO: 1812671 - DNA, 15 bp, Homo sapiens
cgccctactaatttt

SEQ ID NO: 1812672 - DNA, 15 bp, Homo sapiens
gccctactaattttt

SEQ ID NO: 1812673 - DNA, 15 bp, Homo sapiens
ccctactaatttttt

SEQ ID NO: 1812674 - DNA, 15 bp, Homo sapiens
cctactaattttttg

SEQ ID NO: 1812675 - DNA, 15 bp, Homo sapiens
ctactaattttttgt

SEQ ID NO: 1812676 - DNA, 15 bp, Homo sapiens
tactaattttttgta

SEQ ID NO: 1812677 - DNA, 15 bp, Homo sapiens
ggggtttcaccgtgg

SEQ ID NO: 1812678 - DNA, 15 bp, Homo sapiens
gggtttcaccgtggt

SEQ ID NO: 1812679 - DNA, 15 bp, Homo sapiens
ggtttcaccgtggtc

SEQ ID NO: 1812680 - DNA, 15 bp, Homo sapiens
ctgcgcccggccctt

SEQ ID NO: 1812681 - DNA, 15 bp, Homo sapiens
tgcgcccggcccttt

SEQ ID NO: 1812682 - DNA, 15 bp, Homo sapiens
ttttacatttatttt

SEQ ID NO: 1812683 - DNA, 15 bp, Homo sapiens
tttacatttattttt

SEQ ID NO: 1812684 - DNA, 15 bp, Homo sapiens
ttacatttattttta

SEQ ID NO: 1812685 - DNA, 15 bp, Homo sapiens
tacatttatttttaa

SEQ ID NO: 1812686 - DNA, 15 bp, Homo sapiens
acatttatttttaaa

SEQ ID NO: 1812687 - DNA, 15 bp, Homo sapiens
catttatttttaaat

SEQ ID NO: 1812688 - DNA, 15 bp, Homo sapiens
atttatttttaaatt

SEQ ID NO: 1812689 - DNA, 15 bp, Homo sapiens
taaattaagagacag

SEQ ID NO: 1812690 - DNA, 15 bp, Homo sapiens
aaattaagagacagg

SEQ ID NO: 1812691 - DNA, 15 bp, Homo sapiens
aattaagagacaggg

SEQ ID NO: 1812692 - DNA, 15 bp, Homo sapiens
attaagagacagggt

SEQ ID NO: 1812693 - DNA, 15 bp, Homo sapiens
ttaagagacagggtg

SEQ ID NO: 1812694 - DNA, 15 bp, Homo sapiens
taagagacagggtgt

SEQ ID NO: 1812695 - DNA, 15 bp, Homo sapiens
aagagacagggtgtc

SEQ ID NO: 1812696 - DNA, 15 bp, Homo sapiens
agagacagggtgtca

SEQ ID NO: 1812697 - DNA, 15 bp, Homo sapiens
gagacagggtgtcac

SEQ ID NO: 1812698 - DNA, 15 bp, Homo sapiens
agacagggtgtcact

SEQ ID NO: 1812699 - DNA, 15 bp, Homo sapiens
gacagggtgtcacta

SEQ ID NO: 1812700 - DNA, 15 bp, Homo sapiens
acagggtgtcactat

SEQ ID NO: 1812701 - DNA, 15 bp, Homo sapiens
cagggtgtcactatg

SEQ ID NO: 1812702 - DNA, 15 bp, Homo sapiens
agggtgtcactatga

SEQ ID NO: 1812703 - DNA, 15 bp, Homo sapiens
gggtgtcactatgat

SEQ ID NO: 1812704 - DNA, 15 bp, Homo sapiens
ggtgtcactatgatg

SEQ ID NO: 1812705 - DNA, 15 bp, Homo sapiens
gtgtcactatgatgc

SEQ ID NO: 1812706 - DNA, 15 bp, Homo sapiens
tgtcactatgatgcc

SEQ ID NO: 1812707 - DNA, 15 bp, Homo sapiens
gtcactatgatgccg

SEQ ID NO: 1812708 - DNA, 15 bp, Homo sapiens
tcactatgatgccga

SEQ ID NO: 1812709 - DNA, 15 bp, Homo sapiens
cactatgatgccgag

SEQ ID NO: 1812710 - DNA, 15 bp, Homo sapiens
actatgatgccgagg

SEQ ID NO: 1812711 - DNA, 15 bp, Homo sapiens
ctatgatgccgaggc

SEQ ID NO: 1812712 - DNA, 15 bp, Homo sapiens
tatgatgccgaggct

SEQ ID NO: 1812713 - DNA, 15 bp, Homo sapiens
atgatgccgaggctg

SEQ ID NO: 1812714 - DNA, 15 bp, Homo sapiens
tgatgccgaggctgg

SEQ ID NO: 1812715 - DNA, 15 bp, Homo sapiens
gatgccgaggctggt

SEQ ID NO: 1812716 - DNA, 15 bp, Homo sapiens
atgccgaggctggtc

SEQ ID NO: 1812717 - DNA, 15 bp, Homo sapiens
tgccgaggctggtct

SEQ ID NO: 1812718 - DNA, 15 bp, Homo sapiens
gccgaggctggtctc

SEQ ID NO: 1812719 - DNA, 15 bp, Homo sapiens
ccgaggctggtctcg

SEQ ID NO: 1812720 - DNA, 15 bp, Homo sapiens
cgaggctggtctcga

SEQ ID NO: 1812721 - DNA, 15 bp, Homo sapiens
gaggctggtctcgaa

SEQ ID NO: 1812722 - DNA, 15 bp, Homo sapiens
cgaactcctgagctg

SEQ ID NO: 1812723 - DNA, 15 bp, Homo sapiens
gaactcctgagctga

SEQ ID NO: 1812724 - DNA, 15 bp, Homo sapiens
aactcctgagctgaa

SEQ ID NO: 1812725 - DNA, 15 bp, Homo sapiens
actcctgagctgaag

SEQ ID NO: 1812726 - DNA, 15 bp, Homo sapiens
ctcctgagctgaagt

SEQ ID NO: 1812727 - DNA, 15 bp, Homo sapiens
tcctgagctgaagtg

SEQ ID NO: 1812728 - DNA, 15 bp, Homo sapiens
cctgagctgaagtga

SEQ ID NO: 1812729 - DNA, 15 bp, Homo sapiens
ctgagctgaagtgat

SEQ ID NO: 1812730 - DNA, 15 bp, Homo sapiens
tgagctgaagtgatc

SEQ ID NO: 1812731 - DNA, 15 bp, Homo sapiens
gagctgaagtgatcc

SEQ ID NO: 1812732 - DNA, 15 bp, Homo sapiens
agctgaagtgatcct

SEQ ID NO: 1812733 - DNA, 15 bp, Homo sapiens
gctgaagtgatcctc

SEQ ID NO: 1812734 - DNA, 15 bp, Homo sapiens
ctgaagtgatcctcc

SEQ ID NO: 1812735 - DNA, 15 bp, Homo sapiens
tgaagtgatcctccc

SEQ ID NO: 1812736 - DNA, 15 bp, Homo sapiens
gaagtgatcctccca

SEQ ID NO: 1812737 - DNA, 15 bp, Homo sapiens
gatcctcccacctcg

SEQ ID NO: 1812738 - DNA, 15 bp, Homo sapiens
atcctcccacctcgg

SEQ ID NO: 1812739 - DNA, 15 bp, Homo sapiens
tcctcccacctcggc

SEQ ID NO: 1812740 - DNA, 15 bp, Homo sapiens
cctcccacctcggcc

SEQ ID NO: 1812741 - DNA, 15 bp, Homo sapiens
ctcccacctcggcct

SEQ ID NO: 1812742 - DNA, 15 bp, Homo sapiens
tcccacctcggcctc

SEQ ID NO: 1812743 - DNA, 15 bp, Homo sapiens
ctcggcctcccaaaa

SEQ ID NO: 1812744 - DNA, 15 bp, Homo sapiens
tcggcctcccaaaat

SEQ ID NO: 1812745 - DNA, 15 bp, Homo sapiens
cggcctcccaaaatg

SEQ ID NO: 1812746 - DNA, 15 bp, Homo sapiens
aatgctgggattacc

SEQ ID NO: 1812747 - DNA, 15 bp, Homo sapiens
atgctgggattacca

SEQ ID NO: 1812748 - DNA, 15 bp, Homo sapiens
tgctgggattaccat

SEQ ID NO: 1812749 - DNA, 15 bp, Homo sapiens
gctgggattaccatg

SEQ ID NO: 1812750 - DNA, 15 bp, Homo sapiens
ctgggattaccatgt

SEQ ID NO: 1812751 - DNA, 15 bp, Homo sapiens
tgggattaccatgtc

SEQ ID NO: 1812752 - DNA, 15 bp, Homo sapiens
gggattaccatgtcc

SEQ ID NO: 1812753 - DNA, 15 bp, Homo sapiens
ggattaccatgtcca

SEQ ID NO: 1812754 - DNA, 15 bp, Homo sapiens
gattaccatgtccaa

SEQ ID NO: 1812755 - DNA, 15 bp, Homo sapiens
attaccatgtccaac

SEQ ID NO: 1812756 - DNA, 15 bp, Homo sapiens
ttaccatgtccaact

SEQ ID NO: 1812757 - DNA, 15 bp, Homo sapiens
taccatgtccaactt

SEQ ID NO: 1812758 - DNA, 15 bp, Homo sapiens
accatgtccaacttt

SEQ ID NO: 1812759 - DNA, 15 bp, Homo sapiens
ccatgtccaactttc

SEQ ID NO: 1812760 - DNA, 15 bp, Homo sapiens
catgtccaactttcc

SEQ ID NO: 1812761 - DNA, 15 bp, Homo sapiens
atgtccaactttcca

SEQ ID NO: 1812762 - DNA, 15 bp, Homo sapiens
tgtccaactttccac

SEQ ID NO: 1812763 - DNA, 15 bp, Homo sapiens
gtccaactttccact

SEQ ID NO: 1812764 - DNA, 15 bp, Homo sapiens
tccaactttccactt

SEQ ID NO: 1812765 - DNA, 15 bp, Homo sapiens
ccaactttccacttc

SEQ ID NO: 1812766 - DNA, 15 bp, Homo sapiens
caactttccacttct

SEQ ID NO: 1812767 - DNA, 15 bp, Homo sapiens
aactttccacttctt

SEQ ID NO: 1812768 - DNA, 15 bp, Homo sapiens
actttccacttcttg

SEQ ID NO: 1812769 - DNA, 15 bp, Homo sapiens
ctttccacttcttgt

SEQ ID NO: 1812770 - DNA, 15 bp, Homo sapiens
tttccacttcttgtt

SEQ ID NO: 1812771 - DNA, 15 bp, Homo sapiens
ttccacttcttgttt

SEQ ID NO: 1812772 - DNA, 15 bp, Homo sapiens
tccacttcttgtttg

SEQ ID NO: 1812773 - DNA, 15 bp, Homo sapiens
ccacttcttgtttga

SEQ ID NO: 1812774 - DNA, 15 bp, Homo sapiens
cacttcttgtttgac

SEQ ID NO: 1812775 - DNA, 15 bp, Homo sapiens
acttcttgtttgacc

SEQ ID NO: 1812776 - DNA, 15 bp, Homo sapiens
cttcttgtttgacca

SEQ ID NO: 1812777 - DNA, 15 bp, Homo sapiens
ttcttgtttgaccaa

SEQ ID NO: 1812778 - DNA, 15 bp, Homo sapiens
tcttgtttgaccaag

SEQ ID NO: 1812779 - DNA, 15 bp, Homo sapiens
cttgtttgaccaagg

SEQ ID NO: 1812780 - DNA, 15 bp, Homo sapiens
ttgtttgaccaagga

SEQ ID NO: 1812781 - DNA, 15 bp, Homo sapiens
tgtttgaccaaggat

SEQ ID NO: 1812782 - DNA, 15 bp, Homo sapiens
gtttgaccaaggatg

SEQ ID NO: 1812783 - DNA, 15 bp, Homo sapiens
tttgaccaaggatgg

SEQ ID NO: 1812784 - DNA, 15 bp, Homo sapiens
ttgaccaaggatgga

SEQ ID NO: 1812785 - DNA, 15 bp, Homo sapiens
tgaccaaggatggat

SEQ ID NO: 1812786 - DNA, 15 bp, Homo sapiens
gaccaaggatggatg

SEQ ID NO: 1812787 - DNA, 15 bp, Homo sapiens
accaaggatggatgg

SEQ ID NO: 1812788 - DNA, 15 bp, Homo sapiens
ccaaggatggatggc

SEQ ID NO: 1812789 - DNA, 15 bp, Homo sapiens
caaggatggatggca

SEQ ID NO: 1812790 - DNA, 15 bp, Homo sapiens
aaggatggatggcag

SEQ ID NO: 1812791 - DNA, 15 bp, Homo sapiens
aggatggatggcaga

SEQ ID NO: 1812792 - DNA, 15 bp, Homo sapiens
ggatggatggcagac

SEQ ID NO: 1812793 - DNA, 15 bp, Homo sapiens
gatggatggcagaca

SEQ ID NO: 1812794 - DNA, 15 bp, Homo sapiens
atggatggcagacat

SEQ ID NO: 1812795 - DNA, 15 bp, Homo sapiens
tggatggcagacatc

SEQ ID NO: 1812796 - DNA, 15 bp, Homo sapiens
ggatggcagacatca

SEQ ID NO: 1812797 - DNA, 15 bp, Homo sapiens
gatggcagacatcag

SEQ ID NO: 1812798 - DNA, 15 bp, Homo sapiens
atggcagacatcaga

SEQ ID NO: 1812799 - DNA, 15 bp, Homo sapiens
tggcagacatcagaa

SEQ ID NO: 1812800 - DNA, 15 bp, Homo sapiens
ggcagacatcagaag

SEQ ID NO: 1812801 - DNA, 15 bp, Homo sapiens
gcagacatcagaagg

SEQ ID NO: 1812802 - DNA, 15 bp, Homo sapiens
cagacatcagaaggg

SEQ ID NO: 1812803 - DNA, 15 bp, Homo sapiens
agacatcagaagggg

SEQ ID NO: 1812804 - DNA, 15 bp, Homo sapiens
gacatcagaaggggc

SEQ ID NO: 1812805 - DNA, 15 bp, Homo sapiens
acatcagaaggggct

SEQ ID NO: 1812806 - DNA, 15 bp, Homo sapiens
catcagaaggggctt

SEQ ID NO: 1812807 - DNA, 15 bp, Homo sapiens
atcagaaggggcttg

SEQ ID NO: 1812808 - DNA, 15 bp, Homo sapiens
tcagaaggggcttgg

SEQ ID NO: 1812809 - DNA, 15 bp, Homo sapiens
cagaaggggcttgga

SEQ ID NO: 1812810 - DNA, 15 bp, Homo sapiens
agaaggggcttggaa

SEQ ID NO: 1812811 - DNA, 15 bp, Homo sapiens
gaaggggcttggaaa

SEQ ID NO: 1812812 - DNA, 15 bp, Homo sapiens
aaggggcttggaaag

SEQ ID NO: 1812813 - DNA, 15 bp, Homo sapiens
aggggcttggaaagg

SEQ ID NO: 1812814 - DNA, 15 bp, Homo sapiens
ggggcttggaaaggg

SEQ ID NO: 1812815 - DNA, 15 bp, Homo sapiens
gggcttggaaaggga

SEQ ID NO: 1812816 - DNA, 15 bp, Homo sapiens
ggcttggaaagggag

SEQ ID NO: 1812817 - DNA, 15 bp, Homo sapiens
gcttggaaagggagg

SEQ ID NO: 1812818 - DNA, 15 bp, Homo sapiens
cttggaaagggaggt

SEQ ID NO: 1812819 - DNA, 15 bp, Homo sapiens
ttggaaagggaggtg

SEQ ID NO: 1812820 - DNA, 15 bp, Homo sapiens
tggaaagggaggtgt

SEQ ID NO: 1812821 - DNA, 15 bp, Homo sapiens
ggaaagggaggtgtc

SEQ ID NO: 1812822 - DNA, 15 bp, Homo sapiens
gaaagggaggtgtca

SEQ ID NO: 1812823 - DNA, 15 bp, Homo sapiens
aaagggaggtgtcaa

SEQ ID NO: 1812824 - DNA, 15 bp, Homo sapiens
aagggaggtgtcaaa

SEQ ID NO: 1812825 - DNA, 15 bp, Homo sapiens
agggaggtgtcaaag

SEQ ID NO: 1812826 - DNA, 15 bp, Homo sapiens
gggaggtgtcaaaga

SEQ ID NO: 1812827 - DNA, 15 bp, Homo sapiens
ggaggtgtcaaagac

SEQ ID NO: 1812828 - DNA, 15 bp, Homo sapiens
gaggtgtcaaagacc

SEQ ID NO: 1812829 - DNA, 15 bp, Homo sapiens
aggtgtcaaagacct

SEQ ID NO: 1812830 - DNA, 15 bp, Homo sapiens
ggtgtcaaagacctt

SEQ ID NO: 1812831 - DNA, 15 bp, Homo sapiens
gtgtcaaagaccttg

SEQ ID NO: 1812832 - DNA, 15 bp, Homo sapiens
tgtcaaagaccttgc

SEQ ID NO: 1812833 - DNA, 15 bp, Homo sapiens
gtcaaagaccttgcc

SEQ ID NO: 1812834 - DNA, 15 bp, Homo sapiens
tcaaagaccttgccc

SEQ ID NO: 1812835 - DNA, 15 bp, Homo sapiens
caaagaccttgccca

SEQ ID NO: 1812836 - DNA, 15 bp, Homo sapiens
aaagaccttgcccag

SEQ ID NO: 1812837 - DNA, 15 bp, Homo sapiens
aagaccttgcccagc

SEQ ID NO: 1812838 - DNA, 15 bp, Homo sapiens
agaccttgcccagca

SEQ ID NO: 1812839 - DNA, 15 bp, Homo sapiens
gaccttgcccagcat

SEQ ID NO: 1812840 - DNA, 15 bp, Homo sapiens
accttgcccagcatg

SEQ ID NO: 1812841 - DNA, 15 bp, Homo sapiens
ccttgcccagcatgg

SEQ ID NO: 1812842 - DNA, 15 bp, Homo sapiens
cttgcccagcatgga

SEQ ID NO: 1812843 - DNA, 15 bp, Homo sapiens
ttgcccagcatggag

SEQ ID NO: 1812844 - DNA, 15 bp, Homo sapiens
tgcccagcatggagt

SEQ ID NO: 1812845 - DNA, 15 bp, Homo sapiens
gcccagcatggagtc

SEQ ID NO: 1812846 - DNA, 15 bp, Homo sapiens
cccagcatggagtct

SEQ ID NO: 1812847 - DNA, 15 bp, Homo sapiens
ccagcatggagtctg

SEQ ID NO: 1812848 - DNA, 15 bp, Homo sapiens
cagcatggagtctgg

SEQ ID NO: 1812849 - DNA, 15 bp, Homo sapiens
agcatggagtctggg

SEQ ID NO: 1812850 - DNA, 15 bp, Homo sapiens
gcatggagtctgggt

SEQ ID NO: 1812851 - DNA, 15 bp, Homo sapiens
catggagtctgggtc

SEQ ID NO: 1812852 - DNA, 15 bp, Homo sapiens
atggagtctgggtca

SEQ ID NO: 1812853 - DNA, 15 bp, Homo sapiens
tggagtctgggtcac

SEQ ID NO: 1812854 - DNA, 15 bp, Homo sapiens
ggagtctgggtcaca

SEQ ID NO: 1812855 - DNA, 15 bp, Homo sapiens
gagtctgggtcacag

SEQ ID NO: 1812856 - DNA, 15 bp, Homo sapiens
agtctgggtcacagc

SEQ ID NO: 1812857 - DNA, 15 bp, Homo sapiens
gtctgggtcacagct

SEQ ID NO: 1812858 - DNA, 15 bp, Homo sapiens
tctgggtcacagctg

SEQ ID NO: 1812859 - DNA, 15 bp, Homo sapiens
ctgggtcacagctgg

SEQ ID NO: 1812860 - DNA, 15 bp, Homo sapiens
tgggtcacagctggg

SEQ ID NO: 1812861 - DNA, 15 bp, Homo sapiens
gggtcacagctgggg

SEQ ID NO: 1812862 - DNA, 15 bp, Homo sapiens
ggtcacagctggggg

SEQ ID NO: 1812863 - DNA, 15 bp, Homo sapiens
gtcacagctggggga

SEQ ID NO: 1812864 - DNA, 15 bp, Homo sapiens
tcacagctgggggag

SEQ ID NO: 1812865 - DNA, 15 bp, Homo sapiens
cacagctgggggagg

SEQ ID NO: 1812866 - DNA, 15 bp, Homo sapiens
acagctgggggagga

SEQ ID NO: 1812867 - DNA, 15 bp, Homo sapiens
cagctgggggaggat

SEQ ID NO: 1812868 - DNA, 15 bp, Homo sapiens
agctgggggaggatc

SEQ ID NO: 1812869 - DNA, 15 bp, Homo sapiens
gctgggggaggatct

SEQ ID NO: 1812870 - DNA, 15 bp, Homo sapiens
ctgggggaggatctg

SEQ ID NO: 1812871 - DNA, 15 bp, Homo sapiens
tgggggaggatctgg

SEQ ID NO: 1812872 - DNA, 15 bp, Homo sapiens
gggggaggatctggg

SEQ ID NO: 1812873 - DNA, 15 bp, Homo sapiens
ggggaggatctggga

SEQ ID NO: 1812874 - DNA, 15 bp, Homo sapiens
gggaggatctgggaa

SEQ ID NO: 1812875 - DNA, 15 bp, Homo sapiens
ggaggatctgggaac

SEQ ID NO: 1812876 - DNA, 15 bp, Homo sapiens
gaggatctgggaact

SEQ ID NO: 1812877 - DNA, 15 bp, Homo sapiens
aggatctgggaactg

SEQ ID NO: 1812878 - DNA, 15 bp, Homo sapiens
ggatctgggaactgt

SEQ ID NO: 1812879 - DNA, 15 bp, Homo sapiens
gatctgggaactgtg

SEQ ID NO: 1812880 - DNA, 15 bp, Homo sapiens
atctgggaactgtgc

SEQ ID NO: 1812881 - DNA, 15 bp, Homo sapiens
tctgggaactgtgct

SEQ ID NO: 1812882 - DNA, 15 bp, Homo sapiens
ctgggaactgtgctt

SEQ ID NO: 1812883 - DNA, 15 bp, Homo sapiens
tgggaactgtgcttg

SEQ ID NO: 1812884 - DNA, 15 bp, Homo sapiens
gggaactgtgcttgc

SEQ ID NO: 1812885 - DNA, 15 bp, Homo sapiens
ggaactgtgcttgcc

SEQ ID NO: 1812886 - DNA, 15 bp, Homo sapiens
gaactgtgcttgcct

SEQ ID NO: 1812887 - DNA, 15 bp, Homo sapiens
aactgtgcttgcctg

SEQ ID NO: 1812888 - DNA, 15 bp, Homo sapiens
actgtgcttgcctga

SEQ ID NO: 1812889 - DNA, 15 bp, Homo sapiens
ctgtgcttgcctgaa

SEQ ID NO: 1812890 - DNA, 15 bp, Homo sapiens
tgtgcttgcctgaag

SEQ ID NO: 1812891 - DNA, 15 bp, Homo sapiens
gtgcttgcctgaagc

SEQ ID NO: 1812892 - DNA, 15 bp, Homo sapiens
tgcttgcctgaagct

SEQ ID NO: 1812893 - DNA, 15 bp, Homo sapiens
gcttgcctgaagctt

SEQ ID NO: 1812894 - DNA, 15 bp, Homo sapiens
cttgcctgaagctta

SEQ ID NO: 1812895 - DNA, 15 bp, Homo sapiens
ttgcctgaagcttac

SEQ ID NO: 1812896 - DNA, 15 bp, Homo sapiens
tgcctgaagcttacc

SEQ ID NO: 1812897 - DNA, 15 bp, Homo sapiens
gcctgaagcttacct

SEQ ID NO: 1812898 - DNA, 15 bp, Homo sapiens
cctgaagcttacctg

SEQ ID NO: 1812899 - DNA, 15 bp, Homo sapiens
ctgaagcttacctgc

SEQ ID NO: 1812900 - DNA, 15 bp, Homo sapiens
tgaagcttacctgct

SEQ ID NO: 1812901 - DNA, 15 bp, Homo sapiens
gaagcttacctgctt

SEQ ID NO: 1812902 - DNA, 15 bp, Homo sapiens
aagcttacctgcttg

SEQ ID NO: 1812903 - DNA, 15 bp, Homo sapiens
agcttacctgcttgt

SEQ ID NO: 1812904 - DNA, 15 bp, Homo sapiens
gcttacctgcttgtc

SEQ ID NO: 1812905 - DNA, 15 bp, Homo sapiens
cttacctgcttgtca

SEQ ID NO: 1812906 - DNA, 15 bp, Homo sapiens
ttacctgcttgtcat

SEQ ID NO: 1812907 - DNA, 15 bp, Homo sapiens
tacctgcttgtcatc

SEQ ID NO: 1812908 - DNA, 15 bp, Homo sapiens
acctgcttgtcatca

SEQ ID NO: 1812909 - DNA, 15 bp, Homo sapiens
cctgcttgtcatcaa

SEQ ID NO: 1812910 - DNA, 15 bp, Homo sapiens
ctgcttgtcatcaaa

SEQ ID NO: 1812911 - DNA, 15 bp, Homo sapiens
tgcttgtcatcaaat

SEQ ID NO: 1812912 - DNA, 15 bp, Homo sapiens
gcttgtcatcaaatc

SEQ ID NO: 1812913 - DNA, 15 bp, Homo sapiens
cttgtcatcaaatcc

SEQ ID NO: 1812914 - DNA, 15 bp, Homo sapiens
ttgtcatcaaatcca

SEQ ID NO: 1812915 - DNA, 15 bp, Homo sapiens
tgtcatcaaatccaa

SEQ ID NO: 1812916 - DNA, 15 bp, Homo sapiens
gtcatcaaatccaag

SEQ ID NO: 1812917 - DNA, 15 bp, Homo sapiens
tcatcaaatccaagg

SEQ ID NO: 1812918 - DNA, 15 bp, Homo sapiens
catcaaatccaaggc

SEQ ID NO: 1812919 - DNA, 15 bp, Homo sapiens
atcaaatccaaggca

SEQ ID NO: 1812920 - DNA, 15 bp, Homo sapiens
tcaaatccaaggcaa

SEQ ID NO: 1812921 - DNA, 15 bp, Homo sapiens
caaatccaaggcaag

SEQ ID NO: 1812922 - DNA, 15 bp, Homo sapiens
aaatccaaggcaagg

SEQ ID NO: 1812923 - DNA, 15 bp, Homo sapiens
aatccaaggcaaggc

SEQ ID NO: 1812924 - DNA, 15 bp, Homo sapiens
atccaaggcaaggcg

SEQ ID NO: 1812925 - DNA, 15 bp, Homo sapiens
tccaaggcaaggcgt

SEQ ID NO: 1812926 - DNA, 15 bp, Homo sapiens
ccaaggcaaggcgtg

SEQ ID NO: 1812927 - DNA, 15 bp, Homo sapiens
caaggcaaggcgtga

SEQ ID NO: 1812928 - DNA, 15 bp, Homo sapiens
aaggcaaggcgtgaa

SEQ ID NO: 1812929 - DNA, 15 bp, Homo sapiens
aggcaaggcgtgaat

SEQ ID NO: 1812930 - DNA, 15 bp, Homo sapiens
ggcaaggcgtgaatg

SEQ ID NO: 1812931 - DNA, 15 bp, Homo sapiens
gcaaggcgtgaatgt

SEQ ID NO: 1812932 - DNA, 15 bp, Homo sapiens
caaggcgtgaatgtc

SEQ ID NO: 1812933 - DNA, 15 bp, Homo sapiens
aaggcgtgaatgtct

SEQ ID NO: 1812934 - DNA, 15 bp, Homo sapiens
aggcgtgaatgtcta

SEQ ID NO: 1812935 - DNA, 15 bp, Homo sapiens
ggcgtgaatgtctat

SEQ ID NO: 1812936 - DNA, 15 bp, Homo sapiens
gcgtgaatgtctata

SEQ ID NO: 1812937 - DNA, 15 bp, Homo sapiens
cgtgaatgtctatag

SEQ ID NO: 1812938 - DNA, 15 bp, Homo sapiens
gtgaatgtctataga

SEQ ID NO: 1812939 - DNA, 15 bp, Homo sapiens
tgaatgtctatagag

SEQ ID NO: 1812940 - DNA, 15 bp, Homo sapiens
gaatgtctatagagt

SEQ ID NO: 1812941 - DNA, 15 bp, Homo sapiens
aatgtctatagagtg

SEQ ID NO: 1812942 - DNA, 15 bp, Homo sapiens
atgtctatagagtga

SEQ ID NO: 1812943 - DNA, 15 bp, Homo sapiens
tgtctatagagtgag

SEQ ID NO: 1812944 - DNA, 15 bp, Homo sapiens
gtctatagagtgaga

SEQ ID NO: 1812945 - DNA, 15 bp, Homo sapiens
tctatagagtgagag

SEQ ID NO: 1812946 - DNA, 15 bp, Homo sapiens
ctatagagtgagaga

SEQ ID NO: 1812947 - DNA, 15 bp, Homo sapiens
tatagagtgagagac

SEQ ID NO: 1812948 - DNA, 15 bp, Homo sapiens
atagagtgagagact

SEQ ID NO: 1812949 - DNA, 15 bp, Homo sapiens
tagagtgagagactt

SEQ ID NO: 1812950 - DNA, 15 bp, Homo sapiens
agagtgagagacttg

SEQ ID NO: 1812951 - DNA, 15 bp, Homo sapiens
gagtgagagacttgt

SEQ ID NO: 1812952 - DNA, 15 bp, Homo sapiens
agtgagagacttgtg

SEQ ID NO: 1812953 - DNA, 15 bp, Homo sapiens
gtgagagacttgtgg

SEQ ID NO: 1812954 - DNA, 15 bp, Homo sapiens
tgagagacttgtgga

SEQ ID NO: 1812955 - DNA, 15 bp, Homo sapiens
gagagacttgtggag

SEQ ID NO: 1812956 - DNA, 15 bp, Homo sapiens
agagacttgtggaga

SEQ ID NO: 1812957 - DNA, 15 bp, Homo sapiens
gagacttgtggagac

SEQ ID NO: 1812958 - DNA, 15 bp, Homo sapiens
agacttgtggagaca

SEQ ID NO: 1812959 - DNA, 15 bp, Homo sapiens
gacttgtggagacag

SEQ ID NO: 1812960 - DNA, 15 bp, Homo sapiens
acttgtggagacaga

SEQ ID NO: 1812961 - DNA, 15 bp, Homo sapiens
cttgtggagacagaa

SEQ ID NO: 1812962 - DNA, 15 bp, Homo sapiens
ttgtggagacagaag

SEQ ID NO: 1812963 - DNA, 15 bp, Homo sapiens
tgtggagacagaaga

SEQ ID NO: 1812964 - DNA, 15 bp, Homo sapiens
gtggagacagaagag

SEQ ID NO: 1812965 - DNA, 15 bp, Homo sapiens
tggagacagaagagc

SEQ ID NO: 1812966 - DNA, 15 bp, Homo sapiens
ggagacagaagagca

SEQ ID NO: 1812967 - DNA, 15 bp, Homo sapiens
gagacagaagagcag

SEQ ID NO: 1812968 - DNA, 15 bp, Homo sapiens
agacagaagagcaga

SEQ ID NO: 1812969 - DNA, 15 bp, Homo sapiens
gacagaagagcagag

SEQ ID NO: 1812970 - DNA, 15 bp, Homo sapiens
acagaagagcagaga

SEQ ID NO: 1812971 - DNA, 15 bp, Homo sapiens
cagaagagcagagag

SEQ ID NO: 1812972 - DNA, 15 bp, Homo sapiens
agaagagcagagagg

SEQ ID NO: 1812973 - DNA, 15 bp, Homo sapiens
gaagagcagagaggg

SEQ ID NO: 1812974 - DNA, 15 bp, Homo sapiens
aagagcagagaggga

SEQ ID NO: 1812975 - DNA, 15 bp, Homo sapiens
agagcagagagggag

SEQ ID NO: 1812976 - DNA, 15 bp, Homo sapiens
gagcagagagggagg

SEQ ID NO: 1812977 - DNA, 15 bp, Homo sapiens
agcagagagggagga

SEQ ID NO: 1812978 - DNA, 15 bp, Homo sapiens
gcagagagggaggaa

SEQ ID NO: 1812979 - DNA, 15 bp, Homo sapiens
cagagagggaggaag

SEQ ID NO: 1812980 - DNA, 15 bp, Homo sapiens
agagagggaggaaga

SEQ ID NO: 1812981 - DNA, 15 bp, Homo sapiens
gagagggaggaagaa

SEQ ID NO: 1812982 - DNA, 15 bp, Homo sapiens
agagggaggaagaat

SEQ ID NO: 1812983 - DNA, 15 bp, Homo sapiens
gagggaggaagaatg

SEQ ID NO: 1812984 - DNA, 15 bp, Homo sapiens
agggaggaagaatga

SEQ ID NO: 1812985 - DNA, 15 bp, Homo sapiens
gggaggaagaatgaa

SEQ ID NO: 1812986 - DNA, 15 bp, Homo sapiens
ggaggaagaatgaac

SEQ ID NO: 1812987 - DNA, 15 bp, Homo sapiens
gaggaagaatgaaca

SEQ ID NO: 1812988 - DNA, 15 bp, Homo sapiens
aggaagaatgaacac

SEQ ID NO: 1812989 - DNA, 15 bp, Homo sapiens
ggaagaatgaacact

SEQ ID NO: 1812990 - DNA, 15 bp, Homo sapiens
gaagaatgaacactg

SEQ ID NO: 1812991 - DNA, 15 bp, Homo sapiens
aagaatgaacactgg

SEQ ID NO: 1812992 - DNA, 15 bp, Homo sapiens
agaatgaacactggg

SEQ ID NO: 1812993 - DNA, 15 bp, Homo sapiens
gaatgaacactgggt

SEQ ID NO: 1812994 - DNA, 15 bp, Homo sapiens
aatgaacactgggtc

SEQ ID NO: 1812995 - DNA, 15 bp, Homo sapiens
atgaacactgggtct

SEQ ID NO: 1812996 - DNA, 15 bp, Homo sapiens
tgaacactgggtctg

SEQ ID NO: 1812997 - DNA, 15 bp, Homo sapiens
gaacactgggtctgt

SEQ ID NO: 1812998 - DNA, 15 bp, Homo sapiens
aacactgggtctgtt

SEQ ID NO: 1812999 - DNA, 15 bp, Homo sapiens
acactgggtctgttt

SEQ ID NO: 1813000 - DNA, 15 bp, Homo sapiens
cactgggtctgtttg

SEQ ID NO: 1813001 - DNA, 15 bp, Homo sapiens
actgggtctgtttgg

SEQ ID NO: 1813002 - DNA, 15 bp, Homo sapiens
ctgggtctgtttggg

SEQ ID NO: 1813003 - DNA, 15 bp, Homo sapiens
tgggtctgtttgggg

SEQ ID NO: 1813004 - DNA, 15 bp, Homo sapiens
gggtctgtttggggc

SEQ ID NO: 1813005 - DNA, 15 bp, Homo sapiens
ggtctgtttggggct

SEQ ID NO: 1813006 - DNA, 15 bp, Homo sapiens
gtctgtttggggctt

SEQ ID NO: 1813007 - DNA, 15 bp, Homo sapiens
tctgtttggggcttt

SEQ ID NO: 1813008 - DNA, 15 bp, Homo sapiens
ctgtttggggctttc

SEQ ID NO: 1813009 - DNA, 15 bp, Homo sapiens
tgtttggggctttcc

SEQ ID NO: 1813010 - DNA, 15 bp, Homo sapiens
gtttggggctttccc

SEQ ID NO: 1813011 - DNA, 15 bp, Homo sapiens
tttggggctttccca

SEQ ID NO: 1813012 - DNA, 15 bp, Homo sapiens
ttggggctttcccag

SEQ ID NO: 1813013 - DNA, 15 bp, Homo sapiens
tggggctttcccagc

SEQ ID NO: 1813014 - DNA, 15 bp, Homo sapiens
ggggctttcccagct

SEQ ID NO: 1813015 - DNA, 15 bp, Homo sapiens
gggctttcccagctt

SEQ ID NO: 1813016 - DNA, 15 bp, Homo sapiens
ggctttcccagcttt

SEQ ID NO: 1813017 - DNA, 15 bp, Homo sapiens
gctttcccagctttt

SEQ ID NO: 1813018 - DNA, 15 bp, Homo sapiens
ctttcccagcttttg

SEQ ID NO: 1813019 - DNA, 15 bp, Homo sapiens
tttcccagcttttga

SEQ ID NO: 1813020 - DNA, 15 bp, Homo sapiens
ttcccagcttttgag

SEQ ID NO: 1813021 - DNA, 15 bp, Homo sapiens
tcccagcttttgagt

SEQ ID NO: 1813022 - DNA, 15 bp, Homo sapiens
cccagcttttgagtc

SEQ ID NO: 1813023 - DNA, 15 bp, Homo sapiens
ccagcttttgagtca

SEQ ID NO: 1813024 - DNA, 15 bp, Homo sapiens
cagcttttgagtcag

SEQ ID NO: 1813025 - DNA, 15 bp, Homo sapiens
agcttttgagtcaga

SEQ ID NO: 1813026 - DNA, 15 bp, Homo sapiens
cttttgagtcagaca

SEQ ID NO: 1813027 - DNA, 15 bp, Homo sapiens
ttttgagtcagacaa

SEQ ID NO: 1813028 - DNA, 15 bp, Homo sapiens
tttgagtcagacaag

SEQ ID NO: 1813029 - DNA, 15 bp, Homo sapiens
ttgagtcagacaaga

SEQ ID NO: 1813030 - DNA, 15 bp, Homo sapiens
tgagtcagacaagat

SEQ ID NO: 1813031 - DNA, 15 bp, Homo sapiens
gagtcagacaagatt

SEQ ID NO: 1813032 - DNA, 15 bp, Homo sapiens
agtcagacaagattt

SEQ ID NO: 1813033 - DNA, 15 bp, Homo sapiens
gtcagacaagattta

SEQ ID NO: 1813034 - DNA, 15 bp, Homo sapiens
tcagacaagatttat

SEQ ID NO: 1813035 - DNA, 15 bp, Homo sapiens
cagacaagatttatt

SEQ ID NO: 1813036 - DNA, 15 bp, Homo sapiens
agacaagatttattt

SEQ ID NO: 1813037 - DNA, 15 bp, Homo sapiens
gacaagatttattta

SEQ ID NO: 1813038 - DNA, 15 bp, Homo sapiens
acaagatttatttat

SEQ ID NO: 1813039 - DNA, 15 bp, Homo sapiens
caagatttatttatt

SEQ ID NO: 1813040 - DNA, 15 bp, Homo sapiens
aagatttatttattt

SEQ ID NO: 1813041 - DNA, 15 bp, Homo sapiens
agatttatttattta

SEQ ID NO: 1813042 - DNA, 15 bp, Homo sapiens
gatttatttatttat

SEQ ID NO: 1813043 - DNA, 15 bp, Homo sapiens
tatttatttatttaa

SEQ ID NO: 1813044 - DNA, 15 bp, Homo sapiens
atttatttatttaag

SEQ ID NO: 1813045 - DNA, 15 bp, Homo sapiens
tttatttatttaaga

SEQ ID NO: 1813046 - DNA, 15 bp, Homo sapiens
ttatttatttaagat

SEQ ID NO: 1813047 - DNA, 15 bp, Homo sapiens
tatttatttaagatg

SEQ ID NO: 1813048 - DNA, 15 bp, Homo sapiens
atttatttaagatgg

SEQ ID NO: 1813049 - DNA, 15 bp, Homo sapiens
tttatttaagatgga

SEQ ID NO: 1813050 - DNA, 15 bp, Homo sapiens
ttatttaagatggag

SEQ ID NO: 1813051 - DNA, 15 bp, Homo sapiens
tatttaagatggagt

SEQ ID NO: 1813052 - DNA, 15 bp, Homo sapiens
atttaagatggagtc

SEQ ID NO: 1813053 - DNA, 15 bp, Homo sapiens
tttaagatggagtct

SEQ ID NO: 1813054 - DNA, 15 bp, Homo sapiens
ttaagatggagtctc

SEQ ID NO: 1813055 - DNA, 15 bp, Homo sapiens
taagatggagtctca

SEQ ID NO: 1813056 - DNA, 15 bp, Homo sapiens
aagatggagtctcat

SEQ ID NO: 1813057 - DNA, 15 bp, Homo sapiens
agatggagtctcatt

SEQ ID NO: 1813058 - DNA, 15 bp, Homo sapiens
gatggagtctcattc

SEQ ID NO: 1813059 - DNA, 15 bp, Homo sapiens
atggagtctcattct

SEQ ID NO: 1813060 - DNA, 15 bp, Homo sapiens
tggagtctcattctg

SEQ ID NO: 1813061 - DNA, 15 bp, Homo sapiens
gagtctcattctgtt

SEQ ID NO: 1813062 - DNA, 15 bp, Homo sapiens
agtctcattctgttg

SEQ ID NO: 1813063 - DNA, 15 bp, Homo sapiens
cattctgttgcccag

SEQ ID NO: 1813064 - DNA, 15 bp, Homo sapiens
attctgttgcccagg

SEQ ID NO: 1813065 - DNA, 15 bp, Homo sapiens
catcttggctcacta

SEQ ID NO: 1813066 - DNA, 15 bp, Homo sapiens
atcttggctcactac

SEQ ID NO: 1813067 - DNA, 15 bp, Homo sapiens
cttggctcactacag

SEQ ID NO: 1813068 - DNA, 15 bp, Homo sapiens
ttggctcactacagc

SEQ ID NO: 1813069 - DNA, 15 bp, Homo sapiens
tggctcactacagcc

SEQ ID NO: 1813070 - DNA, 15 bp, Homo sapiens
tcactacagcctccc

SEQ ID NO: 1813071 - DNA, 15 bp, Homo sapiens
cactacagcctcccc

SEQ ID NO: 1813072 - DNA, 15 bp, Homo sapiens
actacagcctcccca

SEQ ID NO: 1813073 - DNA, 15 bp, Homo sapiens
ctacagcctccccac

SEQ ID NO: 1813074 - DNA, 15 bp, Homo sapiens
tacagcctccccacc

SEQ ID NO: 1813075 - DNA, 15 bp, Homo sapiens
acagcctccccacct

SEQ ID NO: 1813076 - DNA, 15 bp, Homo sapiens
cagcctccccacctc

SEQ ID NO: 1813077 - DNA, 15 bp, Homo sapiens
agcctccccacctcc

SEQ ID NO: 1813078 - DNA, 15 bp, Homo sapiens
gcctccccacctccc

SEQ ID NO: 1813079 - DNA, 15 bp, Homo sapiens
cctccccacctccca

SEQ ID NO: 1813080 - DNA, 15 bp, Homo sapiens
ctccccacctcccag

SEQ ID NO: 1813081 - DNA, 15 bp, Homo sapiens
tccccacctcccagg

SEQ ID NO: 1813082 - DNA, 15 bp, Homo sapiens
ccccacctcccaggt

SEQ ID NO: 1813083 - DNA, 15 bp, Homo sapiens
cccacctcccaggtt

SEQ ID NO: 1813084 - DNA, 15 bp, Homo sapiens
cccaggttcaagtgc

SEQ ID NO: 1813085 - DNA, 15 bp, Homo sapiens
ccaggttcaagtgct

SEQ ID NO: 1813086 - DNA, 15 bp, Homo sapiens
caggttcaagtgctt

SEQ ID NO: 1813087 - DNA, 15 bp, Homo sapiens
aggttcaagtgcttc

SEQ ID NO: 1813088 - DNA, 15 bp, Homo sapiens
ggttcaagtgcttct

SEQ ID NO: 1813089 - DNA, 15 bp, Homo sapiens
gttcaagtgcttctc

SEQ ID NO: 1813090 - DNA, 15 bp, Homo sapiens
ttcaagtgcttctcc

SEQ ID NO: 1813091 - DNA, 15 bp, Homo sapiens
tcaagtgcttctcct

SEQ ID NO: 1813092 - DNA, 15 bp, Homo sapiens
caagtgcttctcctg

SEQ ID NO: 1813093 - DNA, 15 bp, Homo sapiens
aagtgcttctcctgc

SEQ ID NO: 1813094 - DNA, 15 bp, Homo sapiens
agtgcttctcctgcc

SEQ ID NO: 1813095 - DNA, 15 bp, Homo sapiens
gtgcttctcctgcct

SEQ ID NO: 1813096 - DNA, 15 bp, Homo sapiens
tgcttctcctgcctc

SEQ ID NO: 1813097 - DNA, 15 bp, Homo sapiens
gcttctcctgcctca

SEQ ID NO: 1813098 - DNA, 15 bp, Homo sapiens
agcctcccgagtagt

SEQ ID NO: 1813099 - DNA, 15 bp, Homo sapiens
gcctcccgagtagtt

SEQ ID NO: 1813100 - DNA, 15 bp, Homo sapiens
cctcccgagtagttg

SEQ ID NO: 1813101 - DNA, 15 bp, Homo sapiens
ctcccgagtagttgg

SEQ ID NO: 1813102 - DNA, 15 bp, Homo sapiens
tcccgagtagttggg

SEQ ID NO: 1813103 - DNA, 15 bp, Homo sapiens
cccgagtagttggga

SEQ ID NO: 1813104 - DNA, 15 bp, Homo sapiens
ccgagtagttgggat

SEQ ID NO: 1813105 - DNA, 15 bp, Homo sapiens
cgagtagttgggatt

SEQ ID NO: 1813106 - DNA, 15 bp, Homo sapiens
gagtagttgggatta

SEQ ID NO: 1813107 - DNA, 15 bp, Homo sapiens
gcgcccgccaccaca

SEQ ID NO: 1813108 - DNA, 15 bp, Homo sapiens
cgcccgccaccacac

SEQ ID NO: 1813109 - DNA, 15 bp, Homo sapiens
cccgccaccacaccc

SEQ ID NO: 1813110 - DNA, 15 bp, Homo sapiens
ccgccaccacaccca

SEQ ID NO: 1813111 - DNA, 15 bp, Homo sapiens
attttcagtagagat

SEQ ID NO: 1813112 - DNA, 15 bp, Homo sapiens
ttttcagtagagatg

SEQ ID NO: 1813113 - DNA, 15 bp, Homo sapiens
tttcagtagagatgg

SEQ ID NO: 1813114 - DNA, 15 bp, Homo sapiens
ttcagtagagatggg

SEQ ID NO: 1813115 - DNA, 15 bp, Homo sapiens
tcagtagagatgggg

SEQ ID NO: 1813116 - DNA, 15 bp, Homo sapiens
cagtagagatggggt

SEQ ID NO: 1813117 - DNA, 15 bp, Homo sapiens
ggggtttcgccatgc

SEQ ID NO: 1813118 - DNA, 15 bp, Homo sapiens
gggtttcgccatgct

SEQ ID NO: 1813119 - DNA, 15 bp, Homo sapiens
ggtttcgccatgctg

SEQ ID NO: 1813120 - DNA, 15 bp, Homo sapiens
gtttcgccatgctgg

SEQ ID NO: 1813121 - DNA, 15 bp, Homo sapiens
tttcgccatgctggc

SEQ ID NO: 1813122 - DNA, 15 bp, Homo sapiens
ttcgccatgctggcc

SEQ ID NO: 1813123 - DNA, 15 bp, Homo sapiens
tcgccatgctggcca

SEQ ID NO: 1813124 - DNA, 15 bp, Homo sapiens
cgccatgctggccag

SEQ ID NO: 1813125 - DNA, 15 bp, Homo sapiens
tgctggccaggctgt

SEQ ID NO: 1813126 - DNA, 15 bp, Homo sapiens
gctggccaggctgtt

SEQ ID NO: 1813127 - DNA, 15 bp, Homo sapiens
ctggccaggctgttc

SEQ ID NO: 1813128 - DNA, 15 bp, Homo sapiens
tggccaggctgttct

SEQ ID NO: 1813129 - DNA, 15 bp, Homo sapiens
ggccaggctgttctc

SEQ ID NO: 1813130 - DNA, 15 bp, Homo sapiens
gccaggctgttctcg

SEQ ID NO: 1813131 - DNA, 15 bp, Homo sapiens
ccaggctgttctcga

SEQ ID NO: 1813132 - DNA, 15 bp, Homo sapiens
caggctgttctcgaa

SEQ ID NO: 1813133 - DNA, 15 bp, Homo sapiens
aggctgttctcgaaa

SEQ ID NO: 1813134 - DNA, 15 bp, Homo sapiens
ggctgttctcgaaaa

SEQ ID NO: 1813135 - DNA, 15 bp, Homo sapiens
gctgttctcgaaaac

SEQ ID NO: 1813136 - DNA, 15 bp, Homo sapiens
ctgttctcgaaaact

SEQ ID NO: 1813137 - DNA, 15 bp, Homo sapiens
tgttctcgaaaactc

SEQ ID NO: 1813138 - DNA, 15 bp, Homo sapiens
gttctcgaaaactcc

SEQ ID NO: 1813139 - DNA, 15 bp, Homo sapiens
ttctcgaaaactcct

SEQ ID NO: 1813140 - DNA, 15 bp, Homo sapiens
tctcgaaaactcctg

SEQ ID NO: 1813141 - DNA, 15 bp, Homo sapiens
ctcgaaaactcctga

SEQ ID NO: 1813142 - DNA, 15 bp, Homo sapiens
tcgaaaactcctgac

SEQ ID NO: 1813143 - DNA, 15 bp, Homo sapiens
cgaaaactcctgacc

SEQ ID NO: 1813144 - DNA, 15 bp, Homo sapiens
gaaaactcctgacct

SEQ ID NO: 1813145 - DNA, 15 bp, Homo sapiens
aaaactcctgacctc

SEQ ID NO: 1813146 - DNA, 15 bp, Homo sapiens
actcctgacctcaga

SEQ ID NO: 1813147 - DNA, 15 bp, Homo sapiens
ctcctgacctcagat

SEQ ID NO: 1813148 - DNA, 15 bp, Homo sapiens
tcctgacctcagatg

SEQ ID NO: 1813149 - DNA, 15 bp, Homo sapiens
cctgacctcagatga

SEQ ID NO: 1813150 - DNA, 15 bp, Homo sapiens
ctgacctcagatgat

SEQ ID NO: 1813151 - DNA, 15 bp, Homo sapiens
tgacctcagatgatc

SEQ ID NO: 1813152 - DNA, 15 bp, Homo sapiens
gacctcagatgatcc

SEQ ID NO: 1813153 - DNA, 15 bp, Homo sapiens
acctcagatgatcca

SEQ ID NO: 1813154 - DNA, 15 bp, Homo sapiens
cctcagatgatccac

SEQ ID NO: 1813155 - DNA, 15 bp, Homo sapiens
ctcagatgatccacc

SEQ ID NO: 1813156 - DNA, 15 bp, Homo sapiens
tcagatgatccaccc

SEQ ID NO: 1813157 - DNA, 15 bp, Homo sapiens
cagatgatccacccg

SEQ ID NO: 1813158 - DNA, 15 bp, Homo sapiens
agatgatccacccgc

SEQ ID NO: 1813159 - DNA, 15 bp, Homo sapiens
gatgatccacccgcc

SEQ ID NO: 1813160 - DNA, 15 bp, Homo sapiens
gcctcggcctcccac

SEQ ID NO: 1813161 - DNA, 15 bp, Homo sapiens
cctcggcctcccaca

SEQ ID NO: 1813162 - DNA, 15 bp, Homo sapiens
ctcggcctcccacag

SEQ ID NO: 1813163 - DNA, 15 bp, Homo sapiens
tcggcctcccacagt

SEQ ID NO: 1813164 - DNA, 15 bp, Homo sapiens
cggcctcccacagtg

SEQ ID NO: 1813165 - DNA, 15 bp, Homo sapiens
ggcctcccacagtgc

SEQ ID NO: 1813166 - DNA, 15 bp, Homo sapiens
gtgagccactgcgct

SEQ ID NO: 1813167 - DNA, 15 bp, Homo sapiens
tgagccactgcgctg

SEQ ID NO: 1813168 - DNA, 15 bp, Homo sapiens
gagccactgcgctgg

SEQ ID NO: 1813169 - DNA, 15 bp, Homo sapiens
agccactgcgctggc

SEQ ID NO: 1813170 - DNA, 15 bp, Homo sapiens
gccactgcgctggcc

SEQ ID NO: 1813171 - DNA, 15 bp, Homo sapiens
ccactgcgctggcca

SEQ ID NO: 1813172 - DNA, 15 bp, Homo sapiens
cactgcgctggccaa

SEQ ID NO: 1813173 - DNA, 15 bp, Homo sapiens
actgcgctggccaaa

SEQ ID NO: 1813174 - DNA, 15 bp, Homo sapiens
ctgcgctggccaaat

SEQ ID NO: 1813175 - DNA, 15 bp, Homo sapiens
tgcgctggccaaatc

SEQ ID NO: 1813176 - DNA, 15 bp, Homo sapiens
gcgctggccaaatca

SEQ ID NO: 1813177 - DNA, 15 bp, Homo sapiens
cgctggccaaatcag

SEQ ID NO: 1813178 - DNA, 15 bp, Homo sapiens
gctggccaaatcaga

SEQ ID NO: 1813179 - DNA, 15 bp, Homo sapiens
ctggccaaatcagac

SEQ ID NO: 1813180 - DNA, 15 bp, Homo sapiens
tggccaaatcagaca

SEQ ID NO: 1813181 - DNA, 15 bp, Homo sapiens
ggccaaatcagacaa

SEQ ID NO: 1813182 - DNA, 15 bp, Homo sapiens
gccaaatcagacaag

SEQ ID NO: 1813183 - DNA, 15 bp, Homo sapiens
ccaaatcagacaagg

SEQ ID NO: 1813184 - DNA, 15 bp, Homo sapiens
caaatcagacaaggt

SEQ ID NO: 1813185 - DNA, 15 bp, Homo sapiens
aaatcagacaaggtt

SEQ ID NO: 1813186 - DNA, 15 bp, Homo sapiens
aatcagacaaggttt

SEQ ID NO: 1813187 - DNA, 15 bp, Homo sapiens
atcagacaaggttta

SEQ ID NO: 1813188 - DNA, 15 bp, Homo sapiens
tcagacaaggtttaa

SEQ ID NO: 1813189 - DNA, 15 bp, Homo sapiens
cagacaaggtttaaa

SEQ ID NO: 1813190 - DNA, 15 bp, Homo sapiens
agacaaggtttaaat

SEQ ID NO: 1813191 - DNA, 15 bp, Homo sapiens
gacaaggtttaaatc

SEQ ID NO: 1813192 - DNA, 15 bp, Homo sapiens
acaaggtttaaatcc

SEQ ID NO: 1813193 - DNA, 15 bp, Homo sapiens
caaggtttaaatccc

SEQ ID NO: 1813194 - DNA, 15 bp, Homo sapiens
aaggtttaaatccca

SEQ ID NO: 1813195 - DNA, 15 bp, Homo sapiens
aggtttaaatcccag

SEQ ID NO: 1813196 - DNA, 15 bp, Homo sapiens
ggtttaaatcccagc

SEQ ID NO: 1813197 - DNA, 15 bp, Homo sapiens
gtttaaatcccagct

SEQ ID NO: 1813198 - DNA, 15 bp, Homo sapiens
tttaaatcccagctc

SEQ ID NO: 1813199 - DNA, 15 bp, Homo sapiens
ttaaatcccagctct

SEQ ID NO: 1813200 - DNA, 15 bp, Homo sapiens
aaatcccagctctgc

SEQ ID NO: 1813201 - DNA, 15 bp, Homo sapiens
aatcccagctctgcc

SEQ ID NO: 1813202 - DNA, 15 bp, Homo sapiens
atcccagctctgcct

SEQ ID NO: 1813203 - DNA, 15 bp, Homo sapiens
tcccagctctgcctg

SEQ ID NO: 1813204 - DNA, 15 bp, Homo sapiens
cccagctctgcctgt

SEQ ID NO: 1813205 - DNA, 15 bp, Homo sapiens
ccagctctgcctgta

SEQ ID NO: 1813206 - DNA, 15 bp, Homo sapiens
cagctctgcctgtac

SEQ ID NO: 1813207 - DNA, 15 bp, Homo sapiens
agctctgcctgtact

SEQ ID NO: 1813208 - DNA, 15 bp, Homo sapiens
gctctgcctgtacta

SEQ ID NO: 1813209 - DNA, 15 bp, Homo sapiens
ctctgcctgtactag

SEQ ID NO: 1813210 - DNA, 15 bp, Homo sapiens
tctgcctgtactagc

SEQ ID NO: 1813211 - DNA, 15 bp, Homo sapiens
ctgcctgtactagct

SEQ ID NO: 1813212 - DNA, 15 bp, Homo sapiens
tgcctgtactagctg

SEQ ID NO: 1813213 - DNA, 15 bp, Homo sapiens
gcctgtactagctga

SEQ ID NO: 1813214 - DNA, 15 bp, Homo sapiens
cctgtactagctgag

SEQ ID NO: 1813215 - DNA, 15 bp, Homo sapiens
ctgtactagctgagg

SEQ ID NO: 1813216 - DNA, 15 bp, Homo sapiens
tgtactagctgagga

SEQ ID NO: 1813217 - DNA, 15 bp, Homo sapiens
gtactagctgaggaa

SEQ ID NO: 1813218 - DNA, 15 bp, Homo sapiens
tactagctgaggaac

SEQ ID NO: 1813219 - DNA, 15 bp, Homo sapiens
actagctgaggaact

SEQ ID NO: 1813220 - DNA, 15 bp, Homo sapiens
ctagctgaggaactc

SEQ ID NO: 1813221 - DNA, 15 bp, Homo sapiens
tagctgaggaactct

SEQ ID NO: 1813222 - DNA, 15 bp, Homo sapiens
agctgaggaactctg

SEQ ID NO: 1813223 - DNA, 15 bp, Homo sapiens
gctgaggaactctgc

SEQ ID NO: 1813224 - DNA, 15 bp, Homo sapiens
ctgaggaactctgca

SEQ ID NO: 1813225 - DNA, 15 bp, Homo sapiens
tgaggaactctgcac

SEQ ID NO: 1813226 - DNA, 15 bp, Homo sapiens
gaggaactctgcaca

SEQ ID NO: 1813227 - DNA, 15 bp, Homo sapiens
aggaactctgcacac

SEQ ID NO: 1813228 - DNA, 15 bp, Homo sapiens
ggaactctgcacaca

SEQ ID NO: 1813229 - DNA, 15 bp, Homo sapiens
gaactctgcacacat

SEQ ID NO: 1813230 - DNA, 15 bp, Homo sapiens
aactctgcacacatt

SEQ ID NO: 1813231 - DNA, 15 bp, Homo sapiens
actctgcacacattt

SEQ ID NO: 1813232 - DNA, 15 bp, Homo sapiens
ctctgcacacatttc

SEQ ID NO: 1813233 - DNA, 15 bp, Homo sapiens
tctgcacacatttca

SEQ ID NO: 1813234 - DNA, 15 bp, Homo sapiens
ctgcacacatttcat

SEQ ID NO: 1813235 - DNA, 15 bp, Homo sapiens
tgcacacatttcata

SEQ ID NO: 1813236 - DNA, 15 bp, Homo sapiens
gcacacatttcataa

SEQ ID NO: 1813237 - DNA, 15 bp, Homo sapiens
cacacatttcataac

SEQ ID NO: 1813238 - DNA, 15 bp, Homo sapiens
acacatttcataacc

SEQ ID NO: 1813239 - DNA, 15 bp, Homo sapiens
cacatttcataacct

SEQ ID NO: 1813240 - DNA, 15 bp, Homo sapiens
acatttcataacctt

SEQ ID NO: 1813241 - DNA, 15 bp, Homo sapiens
catttcataaccttt

SEQ ID NO: 1813242 - DNA, 15 bp, Homo sapiens
atttcataacctttc

SEQ ID NO: 1813243 - DNA, 15 bp, Homo sapiens
tttcataacctttct

SEQ ID NO: 1813244 - DNA, 15 bp, Homo sapiens
ttcataacctttctg

SEQ ID NO: 1813245 - DNA, 15 bp, Homo sapiens
tcataacctttctgg

SEQ ID NO: 1813246 - DNA, 15 bp, Homo sapiens
cataacctttctggg

SEQ ID NO: 1813247 - DNA, 15 bp, Homo sapiens
ataacctttctgggc

SEQ ID NO: 1813248 - DNA, 15 bp, Homo sapiens
taacctttctgggcc

SEQ ID NO: 1813249 - DNA, 15 bp, Homo sapiens
aacctttctgggcct

SEQ ID NO: 1813250 - DNA, 15 bp, Homo sapiens
acctttctgggccta

SEQ ID NO: 1813251 - DNA, 15 bp, Homo sapiens
cctttctgggcctac

SEQ ID NO: 1813252 - DNA, 15 bp, Homo sapiens
ctttctgggcctacg

SEQ ID NO: 1813253 - DNA, 15 bp, Homo sapiens
tttctgggcctacgt

SEQ ID NO: 1813254 - DNA, 15 bp, Homo sapiens
ttctgggcctacgtt

SEQ ID NO: 1813255 - DNA, 15 bp, Homo sapiens
tctgggcctacgttc

SEQ ID NO: 1813256 - DNA, 15 bp, Homo sapiens
ctgggcctacgttct

SEQ ID NO: 1813257 - DNA, 15 bp, Homo sapiens
tgggcctacgttctc

SEQ ID NO: 1813258 - DNA, 15 bp, Homo sapiens
gggcctacgttctca

SEQ ID NO: 1813259 - DNA, 15 bp, Homo sapiens
ggcctacgttctcac

SEQ ID NO: 1813260 - DNA, 15 bp, Homo sapiens
gcctacgttctcacc

SEQ ID NO: 1813261 - DNA, 15 bp, Homo sapiens
cctacgttctcacct

SEQ ID NO: 1813262 - DNA, 15 bp, Homo sapiens
ctacgttctcacctt

SEQ ID NO: 1813263 - DNA, 15 bp, Homo sapiens
tacgttctcaccttt

SEQ ID NO: 1813264 - DNA, 15 bp, Homo sapiens
acgttctcaccttta

SEQ ID NO: 1813265 - DNA, 15 bp, Homo sapiens
cgttctcacctttaa

SEQ ID NO: 1813266 - DNA, 15 bp, Homo sapiens
gttctcacctttaac

SEQ ID NO: 1813267 - DNA, 15 bp, Homo sapiens
ttctcacctttaacg

SEQ ID NO: 1813268 - DNA, 15 bp, Homo sapiens
tctcacctttaacgt

SEQ ID NO: 1813269 - DNA, 15 bp, Homo sapiens
ctcacctttaacgtg

SEQ ID NO: 1813270 - DNA, 15 bp, Homo sapiens
tcacctttaacgtga

SEQ ID NO: 1813271 - DNA, 15 bp, Homo sapiens
cacctttaacgtgag

SEQ ID NO: 1813272 - DNA, 15 bp, Homo sapiens
acctttaacgtgagg

SEQ ID NO: 1813273 - DNA, 15 bp, Homo sapiens
cctttaacgtgagga

SEQ ID NO: 1813274 - DNA, 15 bp, Homo sapiens
ctttaacgtgaggat

SEQ ID NO: 1813275 - DNA, 15 bp, Homo sapiens
tttaacgtgaggata

SEQ ID NO: 1813276 - DNA, 15 bp, Homo sapiens
ttaacgtgaggataa

SEQ ID NO: 1813277 - DNA, 15 bp, Homo sapiens
taacgtgaggataat

SEQ ID NO: 1813278 - DNA, 15 bp, Homo sapiens
aacgtgaggataata

SEQ ID NO: 1813279 - DNA, 15 bp, Homo sapiens
acgtgaggataatat

SEQ ID NO: 1813280 - DNA, 15 bp, Homo sapiens
cgtgaggataatata

SEQ ID NO: 1813281 - DNA, 15 bp, Homo sapiens
gtgaggataatatat

SEQ ID NO: 1813282 - DNA, 15 bp, Homo sapiens
tgaggataatatatc

SEQ ID NO: 1813283 - DNA, 15 bp, Homo sapiens
gaggataatatatct

SEQ ID NO: 1813284 - DNA, 15 bp, Homo sapiens
aggataatatatcta

SEQ ID NO: 1813285 - DNA, 15 bp, Homo sapiens
ggataatatatctac

SEQ ID NO: 1813286 - DNA, 15 bp, Homo sapiens
gataatatatctact

SEQ ID NO: 1813287 - DNA, 15 bp, Homo sapiens
ataatatatctactt

SEQ ID NO: 1813288 - DNA, 15 bp, Homo sapiens
taatatatctacttc

SEQ ID NO: 1813289 - DNA, 15 bp, Homo sapiens
aatatatctacttca

SEQ ID NO: 1813290 - DNA, 15 bp, Homo sapiens
atatatctacttcat

SEQ ID NO: 1813291 - DNA, 15 bp, Homo sapiens
tatatctacttcata

SEQ ID NO: 1813292 - DNA, 15 bp, Homo sapiens
atatctacttcatag

SEQ ID NO: 1813293 - DNA, 15 bp, Homo sapiens
tatctacttcataga

SEQ ID NO: 1813294 - DNA, 15 bp, Homo sapiens
atctacttcatagac

SEQ ID NO: 1813295 - DNA, 15 bp, Homo sapiens
tctacttcatagaca

SEQ ID NO: 1813296 - DNA, 15 bp, Homo sapiens
ctacttcatagacac

SEQ ID NO: 1813297 - DNA, 15 bp, Homo sapiens
tacttcatagacacc

SEQ ID NO: 1813298 - DNA, 15 bp, Homo sapiens
acttcatagacacct

SEQ ID NO: 1813299 - DNA, 15 bp, Homo sapiens
cttcatagacacctt

SEQ ID NO: 1813300 - DNA, 15 bp, Homo sapiens
ttcatagacaccttt

SEQ ID NO: 1813301 - DNA, 15 bp, Homo sapiens
tcatagacacctttt

SEQ ID NO: 1813302 - DNA, 15 bp, Homo sapiens
catagacaccttttt

SEQ ID NO: 1813303 - DNA, 15 bp, Homo sapiens
atagacaccttttta

SEQ ID NO: 1813304 - DNA, 15 bp, Homo sapiens
tagacacctttttat

SEQ ID NO: 1813305 - DNA, 15 bp, Homo sapiens
agacacctttttatg

SEQ ID NO: 1813306 - DNA, 15 bp, Homo sapiens
gacacctttttatgt

SEQ ID NO: 1813307 - DNA, 15 bp, Homo sapiens
acacctttttatgtt

SEQ ID NO: 1813308 - DNA, 15 bp, Homo sapiens
cacctttttatgttg

SEQ ID NO: 1813309 - DNA, 15 bp, Homo sapiens
acctttttatgttgt

SEQ ID NO: 1813310 - DNA, 15 bp, Homo sapiens
cctttttatgttgtc

SEQ ID NO: 1813311 - DNA, 15 bp, Homo sapiens
ctttttatgttgtct

SEQ ID NO: 1813312 - DNA, 15 bp, Homo sapiens
tttttatgttgtctc

SEQ ID NO: 1813313 - DNA, 15 bp, Homo sapiens
ttttatgttgtctcc

SEQ ID NO: 1813314 - DNA, 15 bp, Homo sapiens
tttatgttgtctcca

SEQ ID NO: 1813315 - DNA, 15 bp, Homo sapiens
ttatgttgtctccaa

SEQ ID NO: 1813316 - DNA, 15 bp, Homo sapiens
tatgttgtctccaag

SEQ ID NO: 1813317 - DNA, 15 bp, Homo sapiens
atgttgtctccaagt

SEQ ID NO: 1813318 - DNA, 15 bp, Homo sapiens
tgttgtctccaagtt

SEQ ID NO: 1813319 - DNA, 15 bp, Homo sapiens
gttgtctccaagttt

SEQ ID NO: 1813320 - DNA, 15 bp, Homo sapiens
ttgtctccaagtttt

SEQ ID NO: 1813321 - DNA, 15 bp, Homo sapiens
tgtctccaagttttc

SEQ ID NO: 1813322 - DNA, 15 bp, Homo sapiens
gtctccaagttttct

SEQ ID NO: 1813323 - DNA, 15 bp, Homo sapiens
tctccaagttttcta

SEQ ID NO: 1813324 - DNA, 15 bp, Homo sapiens
ctccaagttttctaa

SEQ ID NO: 1813325 - DNA, 15 bp, Homo sapiens
tccaagttttctaac

SEQ ID NO: 1813326 - DNA, 15 bp, Homo sapiens
ccaagttttctaaca

SEQ ID NO: 1813327 - DNA, 15 bp, Homo sapiens
caagttttctaacag

SEQ ID NO: 1813328 - DNA, 15 bp, Homo sapiens
aagttttctaacagc

SEQ ID NO: 1813329 - DNA, 15 bp, Homo sapiens
agttttctaacagct

SEQ ID NO: 1813330 - DNA, 15 bp, Homo sapiens
gttttctaacagctc

SEQ ID NO: 1813331 - DNA, 15 bp, Homo sapiens
ttttctaacagctct

SEQ ID NO: 1813332 - DNA, 15 bp, Homo sapiens
tttctaacagctcta

SEQ ID NO: 1813333 - DNA, 15 bp, Homo sapiens
ttctaacagctctag

SEQ ID NO: 1813334 - DNA, 15 bp, Homo sapiens
tctaacagctctagt

SEQ ID NO: 1813335 - DNA, 15 bp, Homo sapiens
ctaacagctctagtt

SEQ ID NO: 1813336 - DNA, 15 bp, Homo sapiens
taacagctctagttc

SEQ ID NO: 1813337 - DNA, 15 bp, Homo sapiens
aacagctctagttct

SEQ ID NO: 1813338 - DNA, 15 bp, Homo sapiens
acagctctagttctg

SEQ ID NO: 1813339 - DNA, 15 bp, Homo sapiens
cagctctagttctgt

SEQ ID NO: 1813340 - DNA, 15 bp, Homo sapiens
agctctagttctgta

SEQ ID NO: 1813341 - DNA, 15 bp, Homo sapiens
gctctagttctgtac

SEQ ID NO: 1813342 - DNA, 15 bp, Homo sapiens
ctctagttctgtacc

SEQ ID NO: 1813343 - DNA, 15 bp, Homo sapiens
tctagttctgtaccc

SEQ ID NO: 1813344 - DNA, 15 bp, Homo sapiens
ctagttctgtaccca

SEQ ID NO: 1813345 - DNA, 15 bp, Homo sapiens
tagttctgtacccaa

SEQ ID NO: 1813346 - DNA, 15 bp, Homo sapiens
agttctgtacccaag

SEQ ID NO: 1813347 - DNA, 15 bp, Homo sapiens
gttctgtacccaaga

SEQ ID NO: 1813348 - DNA, 15 bp, Homo sapiens
ttctgtacccaagac

SEQ ID NO: 1813349 - DNA, 15 bp, Homo sapiens
tctgtacccaagaca

SEQ ID NO: 1813350 - DNA, 15 bp, Homo sapiens
ctgtacccaagacat

SEQ ID NO: 1813351 - DNA, 15 bp, Homo sapiens
tgtacccaagacatg

SEQ ID NO: 1813352 - DNA, 15 bp, Homo sapiens
gtacccaagacatgg

SEQ ID NO: 1813353 - DNA, 15 bp, Homo sapiens
tacccaagacatggc

SEQ ID NO: 1813354 - DNA, 15 bp, Homo sapiens
acccaagacatggca

SEQ ID NO: 1813355 - DNA, 15 bp, Homo sapiens
cccaagacatggcag

SEQ ID NO: 1813356 - DNA, 15 bp, Homo sapiens
ccaagacatggcagg

SEQ ID NO: 1813357 - DNA, 15 bp, Homo sapiens
caagacatggcaggt

SEQ ID NO: 1813358 - DNA, 15 bp, Homo sapiens
aagacatggcaggtg

SEQ ID NO: 1813359 - DNA, 15 bp, Homo sapiens
agacatggcaggtgg

SEQ ID NO: 1813360 - DNA, 15 bp, Homo sapiens
gacatggcaggtggc

SEQ ID NO: 1813361 - DNA, 15 bp, Homo sapiens
acatggcaggtggcc

SEQ ID NO: 1813362 - DNA, 15 bp, Homo sapiens
catggcaggtggcca

SEQ ID NO: 1813363 - DNA, 15 bp, Homo sapiens
atggcaggtggccaa

SEQ ID NO: 1813364 - DNA, 15 bp, Homo sapiens
tggcaggtggccaac

SEQ ID NO: 1813365 - DNA, 15 bp, Homo sapiens
ggcaggtggccaacg

SEQ ID NO: 1813366 - DNA, 15 bp, Homo sapiens
gcaggtggccaacga

SEQ ID NO: 1813367 - DNA, 15 bp, Homo sapiens
caggtggccaacgac

SEQ ID NO: 1813368 - DNA, 15 bp, Homo sapiens
aggtggccaacgaca

SEQ ID NO: 1813369 - DNA, 15 bp, Homo sapiens
ggtggccaacgacat

SEQ ID NO: 1813370 - DNA, 15 bp, Homo sapiens
gtggccaacgacatc

SEQ ID NO: 1813371 - DNA, 15 bp, Homo sapiens
tggccaacgacatcc

SEQ ID NO: 1813372 - DNA, 15 bp, Homo sapiens
ggccaacgacatcct

SEQ ID NO: 1813373 - DNA, 15 bp, Homo sapiens
gccaacgacatcctt

SEQ ID NO: 1813374 - DNA, 15 bp, Homo sapiens
ccaacgacatccttc

SEQ ID NO: 1813375 - DNA, 15 bp, Homo sapiens
caacgacatccttct

SEQ ID NO: 1813376 - DNA, 15 bp, Homo sapiens
aacgacatccttcta

SEQ ID NO: 1813377 - DNA, 15 bp, Homo sapiens
acgacatccttctag

SEQ ID NO: 1813378 - DNA, 15 bp, Homo sapiens
cgacatccttctagg

SEQ ID NO: 1813379 - DNA, 15 bp, Homo sapiens
gacatccttctaggc

SEQ ID NO: 1813380 - DNA, 15 bp, Homo sapiens
acatccttctaggct

SEQ ID NO: 1813381 - DNA, 15 bp, Homo sapiens
catccttctaggctg

SEQ ID NO: 1813382 - DNA, 15 bp, Homo sapiens
atccttctaggctgt

SEQ ID NO: 1813383 - DNA, 15 bp, Homo sapiens
tccttctaggctgtg

SEQ ID NO: 1813384 - DNA, 15 bp, Homo sapiens
ccttctaggctgtgg

SEQ ID NO: 1813385 - DNA, 15 bp, Homo sapiens
cttctaggctgtggt

SEQ ID NO: 1813386 - DNA, 15 bp, Homo sapiens
ttctaggctgtggtg

SEQ ID NO: 1813387 - DNA, 15 bp, Homo sapiens
tctaggctgtggtga

SEQ ID NO: 1813388 - DNA, 15 bp, Homo sapiens
ctaggctgtggtgat

SEQ ID NO: 1813389 - DNA, 15 bp, Homo sapiens
taggctgtggtgatg

SEQ ID NO: 1813390 - DNA, 15 bp, Homo sapiens
aggctgtggtgatgt

SEQ ID NO: 1813391 - DNA, 15 bp, Homo sapiens
ggctgtggtgatgtg

SEQ ID NO: 1813392 - DNA, 15 bp, Homo sapiens
gctgtggtgatgtgt

SEQ ID NO: 1813393 - DNA, 15 bp, Homo sapiens
ctgtggtgatgtgtt

SEQ ID NO: 1813394 - DNA, 15 bp, Homo sapiens
tgtggtgatgtgttt

SEQ ID NO: 1813395 - DNA, 15 bp, Homo sapiens
gtggtgatgtgtttg

SEQ ID NO: 1813396 - DNA, 15 bp, Homo sapiens
tggtgatgtgtttgg

SEQ ID NO: 1813397 - DNA, 15 bp, Homo sapiens
ggtgatgtgtttgga

SEQ ID NO: 1813398 - DNA, 15 bp, Homo sapiens
gtgatgtgtttggag

SEQ ID NO: 1813399 - DNA, 15 bp, Homo sapiens
tgatgtgtttggagc

SEQ ID NO: 1813400 - DNA, 15 bp, Homo sapiens
gatgtgtttggagct

SEQ ID NO: 1813401 - DNA, 15 bp, Homo sapiens
atgtgtttggagctt

SEQ ID NO: 1813402 - DNA, 15 bp, Homo sapiens
tgtgtttggagcttg

SEQ ID NO: 1813403 - DNA, 15 bp, Homo sapiens
gtgtttggagcttgt

SEQ ID NO: 1813404 - DNA, 15 bp, Homo sapiens
tgtttggagcttgtt

SEQ ID NO: 1813405 - DNA, 15 bp, Homo sapiens
gtttggagcttgttc

SEQ ID NO: 1813406 - DNA, 15 bp, Homo sapiens
tttggagcttgttcc

SEQ ID NO: 1813407 - DNA, 15 bp, Homo sapiens
ttggagcttgttcca

SEQ ID NO: 1813408 - DNA, 15 bp, Homo sapiens
tggagcttgttccac

SEQ ID NO: 1813409 - DNA, 15 bp, Homo sapiens
ggagcttgttccacg

SEQ ID NO: 1813410 - DNA, 15 bp, Homo sapiens
gagcttgttccacgg

SEQ ID NO: 1813411 - DNA, 15 bp, Homo sapiens
agcttgttccacggg

SEQ ID NO: 1813412 - DNA, 15 bp, Homo sapiens
gcttgttccacgggt

SEQ ID NO: 1813413 - DNA, 15 bp, Homo sapiens
cttgttccacgggtc

SEQ ID NO: 1813414 - DNA, 15 bp, Homo sapiens
ttgttccacgggtct

SEQ ID NO: 1813415 - DNA, 15 bp, Homo sapiens
tgttccacgggtctt

SEQ ID NO: 1813416 - DNA, 15 bp, Homo sapiens
gttccacgggtcttg

SEQ ID NO: 1813417 - DNA, 15 bp, Homo sapiens
ttccacgggtcttgt

SEQ ID NO: 1813418 - DNA, 15 bp, Homo sapiens
tccacgggtcttgtg

SEQ ID NO: 1813419 - DNA, 15 bp, Homo sapiens
ccacgggtcttgtgt

SEQ ID NO: 1813420 - DNA, 15 bp, Homo sapiens
cacgggtcttgtgtg

SEQ ID NO: 1813421 - DNA, 15 bp, Homo sapiens
acgggtcttgtgtgg

SEQ ID NO: 1813422 - DNA, 15 bp, Homo sapiens
cgggtcttgtgtggg

SEQ ID NO: 1813423 - DNA, 15 bp, Homo sapiens
gggtcttgtgtgggg

SEQ ID NO: 1813424 - DNA, 15 bp, Homo sapiens
ggtcttgtgtggggc

SEQ ID NO: 1813425 - DNA, 15 bp, Homo sapiens
gtcttgtgtggggcc

SEQ ID NO: 1813426 - DNA, 15 bp, Homo sapiens
tcttgtgtggggcca

SEQ ID NO: 1813427 - DNA, 15 bp, Homo sapiens
cttgtgtggggccag

SEQ ID NO: 1813428 - DNA, 15 bp, Homo sapiens
ttgtgtggggccagc

SEQ ID NO: 1813429 - DNA, 15 bp, Homo sapiens
tgtgtggggccagcc

SEQ ID NO: 1813430 - DNA, 15 bp, Homo sapiens
gtgtggggccagccc

SEQ ID NO: 1813431 - DNA, 15 bp, Homo sapiens
tgtggggccagccct

SEQ ID NO: 1813432 - DNA, 15 bp, Homo sapiens
gtggggccagccctg

SEQ ID NO: 1813433 - DNA, 15 bp, Homo sapiens
tggggccagccctgt

SEQ ID NO: 1813434 - DNA, 15 bp, Homo sapiens
ggggccagccctgtt

SEQ ID NO: 1813435 - DNA, 15 bp, Homo sapiens
gggccagccctgttc

SEQ ID NO: 1813436 - DNA, 15 bp, Homo sapiens
ggccagccctgttca

SEQ ID NO: 1813437 - DNA, 15 bp, Homo sapiens
gccagccctgttcag

SEQ ID NO: 1813438 - DNA, 15 bp, Homo sapiens
ccagccctgttcaga

SEQ ID NO: 1813439 - DNA, 15 bp, Homo sapiens
cagccctgttcagat

SEQ ID NO: 1813440 - DNA, 15 bp, Homo sapiens
agccctgttcagata

SEQ ID NO: 1813441 - DNA, 15 bp, Homo sapiens
gccctgttcagataa

SEQ ID NO: 1813442 - DNA, 15 bp, Homo sapiens
ccctgttcagataag

SEQ ID NO: 1813443 - DNA, 15 bp, Homo sapiens
cctgttcagataagg

SEQ ID NO: 1813444 - DNA, 15 bp, Homo sapiens
ctgttcagataaggc

SEQ ID NO: 1813445 - DNA, 15 bp, Homo sapiens
tgttcagataaggcc

SEQ ID NO: 1813446 - DNA, 15 bp, Homo sapiens
gttcagataaggcct

SEQ ID NO: 1813447 - DNA, 15 bp, Homo sapiens
ttcagataaggcctt

SEQ ID NO: 1813448 - DNA, 15 bp, Homo sapiens
tcagataaggccttg

SEQ ID NO: 1813449 - DNA, 15 bp, Homo sapiens
cagataaggccttgt

SEQ ID NO: 1813450 - DNA, 15 bp, Homo sapiens
agataaggccttgtg

SEQ ID NO: 1813451 - DNA, 15 bp, Homo sapiens
gataaggccttgtgg

SEQ ID NO: 1813452 - DNA, 15 bp, Homo sapiens
ataaggccttgtggg

SEQ ID NO: 1813453 - DNA, 15 bp, Homo sapiens
taaggccttgtgggg

SEQ ID NO: 1813454 - DNA, 15 bp, Homo sapiens
aaggccttgtggggt

SEQ ID NO: 1813455 - DNA, 15 bp, Homo sapiens
aggccttgtggggtg

SEQ ID NO: 1813456 - DNA, 15 bp, Homo sapiens
ggccttgtggggtgg

SEQ ID NO: 1813457 - DNA, 15 bp, Homo sapiens
gccttgtggggtggc

SEQ ID NO: 1813458 - DNA, 15 bp, Homo sapiens
ccttgtggggtggcc

SEQ ID NO: 1813459 - DNA, 15 bp, Homo sapiens
cttgtggggtggcct

SEQ ID NO: 1813460 - DNA, 15 bp, Homo sapiens
ttgtggggtggcctg

SEQ ID NO: 1813461 - DNA, 15 bp, Homo sapiens
tgtggggtggcctgg

SEQ ID NO: 1813462 - DNA, 15 bp, Homo sapiens
gtggggtggcctggg

SEQ ID NO: 1813463 - DNA, 15 bp, Homo sapiens
tggggtggcctgggg

SEQ ID NO: 1813464 - DNA, 15 bp, Homo sapiens
ggggtggcctggggt

SEQ ID NO: 1813465 - DNA, 15 bp, Homo sapiens
gggtggcctggggta

SEQ ID NO: 1813466 - DNA, 15 bp, Homo sapiens
ggtggcctggggtag

SEQ ID NO: 1813467 - DNA, 15 bp, Homo sapiens
gtggcctggggtagg

SEQ ID NO: 1813468 - DNA, 15 bp, Homo sapiens
tggcctggggtaggg

SEQ ID NO: 1813469 - DNA, 15 bp, Homo sapiens
ggcctggggtagggg

SEQ ID NO: 1813470 - DNA, 15 bp, Homo sapiens
gcctggggtaggggg

SEQ ID NO: 1813471 - DNA, 15 bp, Homo sapiens
cctggggtaggggga

SEQ ID NO: 1813472 - DNA, 15 bp, Homo sapiens
ctggggtagggggag

SEQ ID NO: 1813473 - DNA, 15 bp, Homo sapiens
tggggtagggggagg

SEQ ID NO: 1813474 - DNA, 15 bp, Homo sapiens
ggggtagggggaggg

SEQ ID NO: 1813475 - DNA, 15 bp, Homo sapiens
gggtagggggagggg

SEQ ID NO: 1813476 - DNA, 15 bp, Homo sapiens
ggtagggggaggggt

SEQ ID NO: 1813477 - DNA, 15 bp, Homo sapiens
gtagggggaggggtt

SEQ ID NO: 1813478 - DNA, 15 bp, Homo sapiens
tagggggaggggttg

SEQ ID NO: 1813479 - DNA, 15 bp, Homo sapiens
agggggaggggttgg

SEQ ID NO: 1813480 - DNA, 15 bp, Homo sapiens
gggggaggggttggg

SEQ ID NO: 1813481 - DNA, 15 bp, Homo sapiens
ggggaggggttgggc

SEQ ID NO: 1813482 - DNA, 15 bp, Homo sapiens
gggaggggttgggca

SEQ ID NO: 1813483 - DNA, 15 bp, Homo sapiens
ggaggggttgggcaa

SEQ ID NO: 1813484 - DNA, 15 bp, Homo sapiens
gaggggttgggcaaa

SEQ ID NO: 1813485 - DNA, 15 bp, Homo sapiens
aggggttgggcaaac

SEQ ID NO: 1813486 - DNA, 15 bp, Homo sapiens
ggggttgggcaaact

SEQ ID NO: 1813487 - DNA, 15 bp, Homo sapiens
gggttgggcaaactc

SEQ ID NO: 1813488 - DNA, 15 bp, Homo sapiens
ggttgggcaaactct

SEQ ID NO: 1813489 - DNA, 15 bp, Homo sapiens
gttgggcaaactctc

SEQ ID NO: 1813490 - DNA, 15 bp, Homo sapiens
ttgggcaaactctcc

SEQ ID NO: 1813491 - DNA, 15 bp, Homo sapiens
tgggcaaactctccc

SEQ ID NO: 1813492 - DNA, 15 bp, Homo sapiens
gggcaaactctccct

SEQ ID NO: 1813493 - DNA, 15 bp, Homo sapiens
ggcaaactctccctt

SEQ ID NO: 1813494 - DNA, 15 bp, Homo sapiens
gcaaactctccctta

SEQ ID NO: 1813495 - DNA, 15 bp, Homo sapiens
caaactctcccttaa

SEQ ID NO: 1813496 - DNA, 15 bp, Homo sapiens
aaactctcccttaaa

SEQ ID NO: 1813497 - DNA, 15 bp, Homo sapiens
aactctcccttaaaa

SEQ ID NO: 1813498 - DNA, 15 bp, Homo sapiens
actctcccttaaaac

SEQ ID NO: 1813499 - DNA, 15 bp, Homo sapiens
ctctcccttaaaacg

SEQ ID NO: 1813500 - DNA, 15 bp, Homo sapiens
tctcccttaaaacgc

SEQ ID NO: 1813501 - DNA, 15 bp, Homo sapiens
ctcccttaaaacgct

SEQ ID NO: 1813502 - DNA, 15 bp, Homo sapiens
tcccttaaaacgctt

SEQ ID NO: 1813503 - DNA, 15 bp, Homo sapiens
cccttaaaacgcttt

SEQ ID NO: 1813504 - DNA, 15 bp, Homo sapiens
ccttaaaacgctttg

SEQ ID NO: 1813505 - DNA, 15 bp, Homo sapiens
cttaaaacgctttgt

SEQ ID NO: 1813506 - DNA, 15 bp, Homo sapiens
ttaaaacgctttgta

SEQ ID NO: 1813507 - DNA, 15 bp, Homo sapiens
taaaacgctttgtaa

SEQ ID NO: 1813508 - DNA, 15 bp, Homo sapiens
aaaacgctttgtaac

SEQ ID NO: 1813509 - DNA, 15 bp, Homo sapiens
aaacgctttgtaacc

SEQ ID NO: 1813510 - DNA, 15 bp, Homo sapiens
aacgctttgtaacca

SEQ ID NO: 1813511 - DNA, 15 bp, Homo sapiens
acgctttgtaaccat

SEQ ID NO: 1813512 - DNA, 15 bp, Homo sapiens
cgctttgtaaccatc

SEQ ID NO: 1813513 - DNA, 15 bp, Homo sapiens
gctttgtaaccatct

SEQ ID NO: 1813514 - DNA, 15 bp, Homo sapiens
ctttgtaaccatctg

SEQ ID NO: 1813515 - DNA, 15 bp, Homo sapiens
tttgtaaccatctga

SEQ ID NO: 1813516 - DNA, 15 bp, Homo sapiens
ttgtaaccatctgag

SEQ ID NO: 1813517 - DNA, 15 bp, Homo sapiens
tgtaaccatctgagg

SEQ ID NO: 1813518 - DNA, 15 bp, Homo sapiens
gtaaccatctgaggc

SEQ ID NO: 1813519 - DNA, 15 bp, Homo sapiens
taaccatctgaggca

SEQ ID NO: 1813520 - DNA, 15 bp, Homo sapiens
aaccatctgaggcac

SEQ ID NO: 1813521 - DNA, 15 bp, Homo sapiens
accatctgaggcacc

SEQ ID NO: 1813522 - DNA, 15 bp, Homo sapiens
ccatctgaggcacca

SEQ ID NO: 1813523 - DNA, 15 bp, Homo sapiens
catctgaggcaccag

SEQ ID NO: 1813524 - DNA, 15 bp, Homo sapiens
atctgaggcaccagc

SEQ ID NO: 1813525 - DNA, 15 bp, Homo sapiens
tctgaggcaccagca

SEQ ID NO: 1813526 - DNA, 15 bp, Homo sapiens
ctgaggcaccagcaa

SEQ ID NO: 1813527 - DNA, 15 bp, Homo sapiens
tgaggcaccagcaag

SEQ ID NO: 1813528 - DNA, 15 bp, Homo sapiens
gaggcaccagcaaga

SEQ ID NO: 1813529 - DNA, 15 bp, Homo sapiens
aggcaccagcaagag

SEQ ID NO: 1813530 - DNA, 15 bp, Homo sapiens
ggcaccagcaagagc

SEQ ID NO: 1813531 - DNA, 15 bp, Homo sapiens
gcaccagcaagagcg

SEQ ID NO: 1813532 - DNA, 15 bp, Homo sapiens
caccagcaagagcgg

SEQ ID NO: 1813533 - DNA, 15 bp, Homo sapiens
accagcaagagcggc

SEQ ID NO: 1813534 - DNA, 15 bp, Homo sapiens
ccagcaagagcggcc

SEQ ID NO: 1813535 - DNA, 15 bp, Homo sapiens
cagcaagagcggccc

SEQ ID NO: 1813536 - DNA, 15 bp, Homo sapiens
agcaagagcggcccc

SEQ ID NO: 1813537 - DNA, 15 bp, Homo sapiens
gcaagagcggccccc

SEQ ID NO: 1813538 - DNA, 15 bp, Homo sapiens
caagagcggcccccg

SEQ ID NO: 1813539 - DNA, 15 bp, Homo sapiens
aagagcggcccccga

SEQ ID NO: 1813540 - DNA, 15 bp, Homo sapiens
agagcggcccccgag

SEQ ID NO: 1813541 - DNA, 15 bp, Homo sapiens
gagcggcccccgagc

SEQ ID NO: 1813542 - DNA, 15 bp, Homo sapiens
agcggcccccgagcc

SEQ ID NO: 1813543 - DNA, 15 bp, Homo sapiens
gcggcccccgagcct

SEQ ID NO: 1813544 - DNA, 15 bp, Homo sapiens
cggcccccgagcctg

SEQ ID NO: 1813545 - DNA, 15 bp, Homo sapiens
ggcccccgagcctgg

SEQ ID NO: 1813546 - DNA, 15 bp, Homo sapiens
gcccccgagcctgga

SEQ ID NO: 1813547 - DNA, 15 bp, Homo sapiens
cccccgagcctggac

SEQ ID NO: 1813548 - DNA, 15 bp, Homo sapiens
ccccgagcctggaca

SEQ ID NO: 1813549 - DNA, 15 bp, Homo sapiens
cccgagcctggacaa

SEQ ID NO: 1813550 - DNA, 15 bp, Homo sapiens
ccgagcctggacaaa

SEQ ID NO: 1813551 - DNA, 15 bp, Homo sapiens
cgagcctggacaaaa

SEQ ID NO: 1813552 - DNA, 15 bp, Homo sapiens
gagcctggacaaaat

SEQ ID NO: 1813553 - DNA, 15 bp, Homo sapiens
agcctggacaaaatc

SEQ ID NO: 1813554 - DNA, 15 bp, Homo sapiens
gcctggacaaaatcc

SEQ ID NO: 1813555 - DNA, 15 bp, Homo sapiens
cctggacaaaatcca

SEQ ID NO: 1813556 - DNA, 15 bp, Homo sapiens
ctggacaaaatccaa

SEQ ID NO: 1813557 - DNA, 15 bp, Homo sapiens
tggacaaaatccaaa

SEQ ID NO: 1813558 - DNA, 15 bp, Homo sapiens
ggacaaaatccaaac

SEQ ID NO: 1813559 - DNA, 15 bp, Homo sapiens
gacaaaatccaaacg

SEQ ID NO: 1813560 - DNA, 15 bp, Homo sapiens
acaaaatccaaacgg

SEQ ID NO: 1813561 - DNA, 15 bp, Homo sapiens
caaaatccaaacggc

SEQ ID NO: 1813562 - DNA, 15 bp, Homo sapiens
aaaatccaaacggct

SEQ ID NO: 1813563 - DNA, 15 bp, Homo sapiens
aaatccaaacggctt

SEQ ID NO: 1813564 - DNA, 15 bp, Homo sapiens
aatccaaacggcttc

SEQ ID NO: 1813565 - DNA, 15 bp, Homo sapiens
atccaaacggcttcc

SEQ ID NO: 1813566 - DNA, 15 bp, Homo sapiens
tccaaacggcttcct

SEQ ID NO: 1813567 - DNA, 15 bp, Homo sapiens
ccaaacggcttccta

SEQ ID NO: 1813568 - DNA, 15 bp, Homo sapiens
caaacggcttcctac

SEQ ID NO: 1813569 - DNA, 15 bp, Homo sapiens
aaacggcttcctact

SEQ ID NO: 1813570 - DNA, 15 bp, Homo sapiens
aacggcttcctactt

SEQ ID NO: 1813571 - DNA, 15 bp, Homo sapiens
acggcttcctacttc

SEQ ID NO: 1813572 - DNA, 15 bp, Homo sapiens
cggcttcctacttca

SEQ ID NO: 1813573 - DNA, 15 bp, Homo sapiens
ggcttcctacttcaa

SEQ ID NO: 1813574 - DNA, 15 bp, Homo sapiens
gcttcctacttcaag

SEQ ID NO: 1813575 - DNA, 15 bp, Homo sapiens
cttcctacttcaagc

SEQ ID NO: 1813576 - DNA, 15 bp, Homo sapiens
ttcctacttcaagca

SEQ ID NO: 1813577 - DNA, 15 bp, Homo sapiens
tcctacttcaagcac

SEQ ID NO: 1813578 - DNA, 15 bp, Homo sapiens
cctacttcaagcact

SEQ ID NO: 1813579 - DNA, 15 bp, Homo sapiens
ctacttcaagcactg

SEQ ID NO: 1813580 - DNA, 15 bp, Homo sapiens
tacttcaagcactga

SEQ ID NO: 1813581 - DNA, 15 bp, Homo sapiens
acttcaagcactgat

SEQ ID NO: 1813582 - DNA, 15 bp, Homo sapiens
cttcaagcactgatg

SEQ ID NO: 1813583 - DNA, 15 bp, Homo sapiens
ttcaagcactgatgt

SEQ ID NO: 1813584 - DNA, 15 bp, Homo sapiens
tcaagcactgatgtc

SEQ ID NO: 1813585 - DNA, 15 bp, Homo sapiens
caagcactgatgtct

SEQ ID NO: 1813586 - DNA, 15 bp, Homo sapiens
aagcactgatgtcta

SEQ ID NO: 1813587 - DNA, 15 bp, Homo sapiens
agcactgatgtctag

SEQ ID NO: 1813588 - DNA, 15 bp, Homo sapiens
gcactgatgtctagt

SEQ ID NO: 1813589 - DNA, 15 bp, Homo sapiens
cactgatgtctagtg

SEQ ID NO: 1813590 - DNA, 15 bp, Homo sapiens
actgatgtctagtga

SEQ ID NO: 1813591 - DNA, 15 bp, Homo sapiens
ctgatgtctagtgag

SEQ ID NO: 1813592 - DNA, 15 bp, Homo sapiens
tgatgtctagtgagt

SEQ ID NO: 1813593 - DNA, 15 bp, Homo sapiens
gatgtctagtgagtg

SEQ ID NO: 1813594 - DNA, 15 bp, Homo sapiens
atgtctagtgagtga

SEQ ID NO: 1813595 - DNA, 15 bp, Homo sapiens
tgtctagtgagtgaa

SEQ ID NO: 1813596 - DNA, 15 bp, Homo sapiens
gtctagtgagtgaag

SEQ ID NO: 1813597 - DNA, 15 bp, Homo sapiens
tctagtgagtgaagg

SEQ ID NO: 1813598 - DNA, 15 bp, Homo sapiens
ctagtgagtgaagga

SEQ ID NO: 1813599 - DNA, 15 bp, Homo sapiens
tagtgagtgaaggaa

SEQ ID NO: 1813600 - DNA, 15 bp, Homo sapiens
agtgagtgaaggaac

SEQ ID NO: 1813601 - DNA, 15 bp, Homo sapiens
gtgagtgaaggaaca

SEQ ID NO: 1813602 - DNA, 15 bp, Homo sapiens
tgagtgaaggaacag

SEQ ID NO: 1813603 - DNA, 15 bp, Homo sapiens
gagtgaaggaacagc

SEQ ID NO: 1813604 - DNA, 15 bp, Homo sapiens
agtgaaggaacagct

SEQ ID NO: 1813605 - DNA, 15 bp, Homo sapiens
gtgaaggaacagctc

SEQ ID NO: 1813606 - DNA, 15 bp, Homo sapiens
tgaaggaacagctct

SEQ ID NO: 1813607 - DNA, 15 bp, Homo sapiens
gaaggaacagctctg

SEQ ID NO: 1813608 - DNA, 15 bp, Homo sapiens
aaggaacagctctgg

SEQ ID NO: 1813609 - DNA, 15 bp, Homo sapiens
aggaacagctctggg

SEQ ID NO: 1813610 - DNA, 15 bp, Homo sapiens
ggaacagctctgggt

SEQ ID NO: 1813611 - DNA, 15 bp, Homo sapiens
gaacagctctgggtc

SEQ ID NO: 1813612 - DNA, 15 bp, Homo sapiens
aacagctctgggtcc

SEQ ID NO: 1813613 - DNA, 15 bp, Homo sapiens
acagctctgggtcca

SEQ ID NO: 1813614 - DNA, 15 bp, Homo sapiens
cagctctgggtccag

SEQ ID NO: 1813615 - DNA, 15 bp, Homo sapiens
agctctgggtccagg

SEQ ID NO: 1813616 - DNA, 15 bp, Homo sapiens
gctctgggtccagga

SEQ ID NO: 1813617 - DNA, 15 bp, Homo sapiens
ctctgggtccaggat

SEQ ID NO: 1813618 - DNA, 15 bp, Homo sapiens
tctgggtccaggata

SEQ ID NO: 1813619 - DNA, 15 bp, Homo sapiens
ctgggtccaggatat

SEQ ID NO: 1813620 - DNA, 15 bp, Homo sapiens
tgggtccaggatatt

SEQ ID NO: 1813621 - DNA, 15 bp, Homo sapiens
gggtccaggatatta

SEQ ID NO: 1813622 - DNA, 15 bp, Homo sapiens
ggtccaggatattat

SEQ ID NO: 1813623 - DNA, 15 bp, Homo sapiens
gtccaggatattata

SEQ ID NO: 1813624 - DNA, 15 bp, Homo sapiens
tccaggatattatag

SEQ ID NO: 1813625 - DNA, 15 bp, Homo sapiens
ccaggatattatagg

SEQ ID NO: 1813626 - DNA, 15 bp, Homo sapiens
caggatattataggt

SEQ ID NO: 1813627 - DNA, 15 bp, Homo sapiens
aggatattataggtc

SEQ ID NO: 1813628 - DNA, 15 bp, Homo sapiens
ggatattataggtca

SEQ ID NO: 1813629 - DNA, 15 bp, Homo sapiens
gatattataggtcac

SEQ ID NO: 1813630 - DNA, 15 bp, Homo sapiens
atattataggtcaca

SEQ ID NO: 1813631 - DNA, 15 bp, Homo sapiens
tattataggtcacat

SEQ ID NO: 1813632 - DNA, 15 bp, Homo sapiens
attataggtcacatt

SEQ ID NO: 1813633 - DNA, 15 bp, Homo sapiens
ttataggtcacatta

SEQ ID NO: 1813634 - DNA, 15 bp, Homo sapiens
tataggtcacattaa

SEQ ID NO: 1813635 - DNA, 15 bp, Homo sapiens
ataggtcacattaaa

SEQ ID NO: 1813636 - DNA, 15 bp, Homo sapiens
taggtcacattaaac

SEQ ID NO: 1813637 - DNA, 15 bp, Homo sapiens
aggtcacattaaact

SEQ ID NO: 1813638 - DNA, 15 bp, Homo sapiens
ggtcacattaaacta

SEQ ID NO: 1813639 - DNA, 15 bp, Homo sapiens
gtcacattaaactaa

SEQ ID NO: 1813640 - DNA, 15 bp, Homo sapiens
tcacattaaactaaa

SEQ ID NO: 1813641 - DNA, 15 bp, Homo sapiens
cacattaaactaaag

SEQ ID NO: 1813642 - DNA, 15 bp, Homo sapiens
acattaaactaaagg

SEQ ID NO: 1813643 - DNA, 15 bp, Homo sapiens
cattaaactaaaggg

SEQ ID NO: 1813644 - DNA, 15 bp, Homo sapiens
attaaactaaagggg

SEQ ID NO: 1813645 - DNA, 15 bp, Homo sapiens
ttaaactaaaggggc

SEQ ID NO: 1813646 - DNA, 15 bp, Homo sapiens
taaactaaaggggct

SEQ ID NO: 1813647 - DNA, 15 bp, Homo sapiens
aaactaaaggggctt

SEQ ID NO: 1813648 - DNA, 15 bp, Homo sapiens
aactaaaggggcttg

SEQ ID NO: 1813649 - DNA, 15 bp, Homo sapiens
actaaaggggcttgg

SEQ ID NO: 1813650 - DNA, 15 bp, Homo sapiens
ctaaaggggcttggc

SEQ ID NO: 1813651 - DNA, 15 bp, Homo sapiens
taaaggggcttggcc

SEQ ID NO: 1813652 - DNA, 15 bp, Homo sapiens
aaaggggcttggcca

SEQ ID NO: 1813653 - DNA, 15 bp, Homo sapiens
aaggggcttggccat

SEQ ID NO: 1813654 - DNA, 15 bp, Homo sapiens
aggggcttggccatc

SEQ ID NO: 1813655 - DNA, 15 bp, Homo sapiens
ggggcttggccatca

SEQ ID NO: 1813656 - DNA, 15 bp, Homo sapiens
gggcttggccatcag

SEQ ID NO: 1813657 - DNA, 15 bp, Homo sapiens
ggcttggccatcagc

SEQ ID NO: 1813658 - DNA, 15 bp, Homo sapiens
gcttggccatcagct

SEQ ID NO: 1813659 - DNA, 15 bp, Homo sapiens
cttggccatcagctg

SEQ ID NO: 1813660 - DNA, 15 bp, Homo sapiens
ttggccatcagctgg

SEQ ID NO: 1813661 - DNA, 15 bp, Homo sapiens
tggccatcagctggc

SEQ ID NO: 1813662 - DNA, 15 bp, Homo sapiens
ggccatcagctggct

SEQ ID NO: 1813663 - DNA, 15 bp, Homo sapiens
gccatcagctggctt

SEQ ID NO: 1813664 - DNA, 15 bp, Homo sapiens
ccatcagctggcttc

SEQ ID NO: 1813665 - DNA, 15 bp, Homo sapiens
catcagctggcttcc

SEQ ID NO: 1813666 - DNA, 15 bp, Homo sapiens
atcagctggcttcca

SEQ ID NO: 1813667 - DNA, 15 bp, Homo sapiens
tcagctggcttccag

SEQ ID NO: 1813668 - DNA, 15 bp, Homo sapiens
cagctggcttccaga

SEQ ID NO: 1813669 - DNA, 15 bp, Homo sapiens
agctggcttccagag

SEQ ID NO: 1813670 - DNA, 15 bp, Homo sapiens
gctggcttccagagc

SEQ ID NO: 1813671 - DNA, 15 bp, Homo sapiens
ctggcttccagagcg

SEQ ID NO: 1813672 - DNA, 15 bp, Homo sapiens
tggcttccagagcgt

SEQ ID NO: 1813673 - DNA, 15 bp, Homo sapiens
ggcttccagagcgtc

SEQ ID NO: 1813674 - DNA, 15 bp, Homo sapiens
gcttccagagcgtca

SEQ ID NO: 1813675 - DNA, 15 bp, Homo sapiens
cttccagagcgtcag

SEQ ID NO: 1813676 - DNA, 15 bp, Homo sapiens
ttccagagcgtcagc

SEQ ID NO: 1813677 - DNA, 15 bp, Homo sapiens
tccagagcgtcagcc

SEQ ID NO: 1813678 - DNA, 15 bp, Homo sapiens
ccagagcgtcagcca

SEQ ID NO: 1813679 - DNA, 15 bp, Homo sapiens
cagagcgtcagccag

SEQ ID NO: 1813680 - DNA, 15 bp, Homo sapiens
agagcgtcagccagt

SEQ ID NO: 1813681 - DNA, 15 bp, Homo sapiens
gagcgtcagccagtt

SEQ ID NO: 1813682 - DNA, 15 bp, Homo sapiens
agcgtcagccagtta

SEQ ID NO: 1813683 - DNA, 15 bp, Homo sapiens
gcgtcagccagttac

SEQ ID NO: 1813684 - DNA, 15 bp, Homo sapiens
cgtcagccagttact

SEQ ID NO: 1813685 - DNA, 15 bp, Homo sapiens
gtcagccagttactt

SEQ ID NO: 1813686 - DNA, 15 bp, Homo sapiens
tcagccagttacttc

SEQ ID NO: 1813687 - DNA, 15 bp, Homo sapiens
cagccagttacttca

SEQ ID NO: 1813688 - DNA, 15 bp, Homo sapiens
agccagttacttcac

SEQ ID NO: 1813689 - DNA, 15 bp, Homo sapiens
gccagttacttcacc

SEQ ID NO: 1813690 - DNA, 15 bp, Homo sapiens
ccagttacttcacct

SEQ ID NO: 1813691 - DNA, 15 bp, Homo sapiens
cagttacttcacctc

SEQ ID NO: 1813692 - DNA, 15 bp, Homo sapiens
agttacttcacctct

SEQ ID NO: 1813693 - DNA, 15 bp, Homo sapiens
gttacttcacctctt

SEQ ID NO: 1813694 - DNA, 15 bp, Homo sapiens
ttacttcacctcttt

SEQ ID NO: 1813695 - DNA, 15 bp, Homo sapiens
tacttcacctctttg

SEQ ID NO: 1813696 - DNA, 15 bp, Homo sapiens
acttcacctctttgg

SEQ ID NO: 1813697 - DNA, 15 bp, Homo sapiens
cttcacctctttggc

SEQ ID NO: 1813698 - DNA, 15 bp, Homo sapiens
ttcacctctttggct

SEQ ID NO: 1813699 - DNA, 15 bp, Homo sapiens
tcacctctttggctt

SEQ ID NO: 1813700 - DNA, 15 bp, Homo sapiens
cacctctttggcttt

SEQ ID NO: 1813701 - DNA, 15 bp, Homo sapiens
acctctttggctttg

SEQ ID NO: 1813702 - DNA, 15 bp, Homo sapiens
cctctttggctttgg

SEQ ID NO: 1813703 - DNA, 15 bp, Homo sapiens
ctctttggctttggc

SEQ ID NO: 1813704 - DNA, 15 bp, Homo sapiens
tctttggctttggcc

SEQ ID NO: 1813705 - DNA, 15 bp, Homo sapiens
ctttggctttggcct

SEQ ID NO: 1813706 - DNA, 15 bp, Homo sapiens
tttggctttggcctg

SEQ ID NO: 1813707 - DNA, 15 bp, Homo sapiens
ttggctttggcctgt

SEQ ID NO: 1813708 - DNA, 15 bp, Homo sapiens
tggctttggcctgtt

SEQ ID NO: 1813709 - DNA, 15 bp, Homo sapiens
ggctttggcctgttt

SEQ ID NO: 1813710 - DNA, 15 bp, Homo sapiens
gctttggcctgtttt

SEQ ID NO: 1813711 - DNA, 15 bp, Homo sapiens
ctttggcctgttttc

SEQ ID NO: 1813712 - DNA, 15 bp, Homo sapiens
tttggcctgttttca

SEQ ID NO: 1813713 - DNA, 15 bp, Homo sapiens
ttggcctgttttcag

SEQ ID NO: 1813714 - DNA, 15 bp, Homo sapiens
tggcctgttttcagc

SEQ ID NO: 1813715 - DNA, 15 bp, Homo sapiens
ggcctgttttcagct

SEQ ID NO: 1813716 - DNA, 15 bp, Homo sapiens
gcctgttttcagcta

SEQ ID NO: 1813717 - DNA, 15 bp, Homo sapiens
cctgttttcagctac

SEQ ID NO: 1813718 - DNA, 15 bp, Homo sapiens
ctgttttcagctaca

SEQ ID NO: 1813719 - DNA, 15 bp, Homo sapiens
tgttttcagctacaa

SEQ ID NO: 1813720 - DNA, 15 bp, Homo sapiens
gttttcagctacaag

SEQ ID NO: 1813721 - DNA, 15 bp, Homo sapiens
ttttcagctacaaga

SEQ ID NO: 1813722 - DNA, 15 bp, Homo sapiens
tttcagctacaagag

SEQ ID NO: 1813723 - DNA, 15 bp, Homo sapiens
ttcagctacaagagg

SEQ ID NO: 1813724 - DNA, 15 bp, Homo sapiens
tcagctacaagagga

SEQ ID NO: 1813725 - DNA, 15 bp, Homo sapiens
cagctacaagaggac

SEQ ID NO: 1813726 - DNA, 15 bp, Homo sapiens
agctacaagaggact

SEQ ID NO: 1813727 - DNA, 15 bp, Homo sapiens
gctacaagaggactt

SEQ ID NO: 1813728 - DNA, 15 bp, Homo sapiens
ctacaagaggactta

SEQ ID NO: 1813729 - DNA, 15 bp, Homo sapiens
tacaagaggacttaa

SEQ ID NO: 1813730 - DNA, 15 bp, Homo sapiens
acaagaggacttaat

SEQ ID NO: 1813731 - DNA, 15 bp, Homo sapiens
caagaggacttaatc

SEQ ID NO: 1813732 - DNA, 15 bp, Homo sapiens
aagaggacttaatcc

SEQ ID NO: 1813733 - DNA, 15 bp, Homo sapiens
agaggacttaatcca

SEQ ID NO: 1813734 - DNA, 15 bp, Homo sapiens
gaggacttaatccag

SEQ ID NO: 1813735 - DNA, 15 bp, Homo sapiens
aggacttaatccaga

SEQ ID NO: 1813736 - DNA, 15 bp, Homo sapiens
ggacttaatccagag

SEQ ID NO: 1813737 - DNA, 15 bp, Homo sapiens
gacttaatccagagg

SEQ ID NO: 1813738 - DNA, 15 bp, Homo sapiens
acttaatccagagga

SEQ ID NO: 1813739 - DNA, 15 bp, Homo sapiens
cttaatccagaggac

SEQ ID NO: 1813740 - DNA, 15 bp, Homo sapiens
ttaatccagaggacc

SEQ ID NO: 1813741 - DNA, 15 bp, Homo sapiens
taatccagaggacct

SEQ ID NO: 1813742 - DNA, 15 bp, Homo sapiens
aatccagaggacctc

SEQ ID NO: 1813743 - DNA, 15 bp, Homo sapiens
atccagaggacctca

SEQ ID NO: 1813744 - DNA, 15 bp, Homo sapiens
tccagaggacctcag

SEQ ID NO: 1813745 - DNA, 15 bp, Homo sapiens
ccagaggacctcaga

SEQ ID NO: 1813746 - DNA, 15 bp, Homo sapiens
cagaggacctcagag

SEQ ID NO: 1813747 - DNA, 15 bp, Homo sapiens
agaggacctcagagg

SEQ ID NO: 1813748 - DNA, 15 bp, Homo sapiens
gaggacctcagaggt

SEQ ID NO: 1813749 - DNA, 15 bp, Homo sapiens
aggacctcagaggtc

SEQ ID NO: 1813750 - DNA, 15 bp, Homo sapiens
ggacctcagaggtcc

SEQ ID NO: 1813751 - DNA, 15 bp, Homo sapiens
gacctcagaggtcct

SEQ ID NO: 1813752 - DNA, 15 bp, Homo sapiens
acctcagaggtcctt

SEQ ID NO: 1813753 - DNA, 15 bp, Homo sapiens
cctcagaggtccttc

SEQ ID NO: 1813754 - DNA, 15 bp, Homo sapiens
ctcagaggtccttcc

SEQ ID NO: 1813755 - DNA, 15 bp, Homo sapiens
tcagaggtccttccc

SEQ ID NO: 1813756 - DNA, 15 bp, Homo sapiens
cagaggtccttccca

SEQ ID NO: 1813757 - DNA, 15 bp, Homo sapiens
agaggtccttcccag

SEQ ID NO: 1813758 - DNA, 15 bp, Homo sapiens
gaggtccttcccagc

SEQ ID NO: 1813759 - DNA, 15 bp, Homo sapiens
aggtccttcccagct

SEQ ID NO: 1813760 - DNA, 15 bp, Homo sapiens
ggtccttcccagctc

SEQ ID NO: 1813761 - DNA, 15 bp, Homo sapiens
gtccttcccagctca

SEQ ID NO: 1813762 - DNA, 15 bp, Homo sapiens
tccttcccagctcag

SEQ ID NO: 1813763 - DNA, 15 bp, Homo sapiens
ccttcccagctcaga

SEQ ID NO: 1813764 - DNA, 15 bp, Homo sapiens
cttcccagctcagac

SEQ ID NO: 1813765 - DNA, 15 bp, Homo sapiens
ttcccagctcagacc

SEQ ID NO: 1813766 - DNA, 15 bp, Homo sapiens
tcccagctcagacct

SEQ ID NO: 1813767 - DNA, 15 bp, Homo sapiens
cccagctcagacctt

SEQ ID NO: 1813768 - DNA, 15 bp, Homo sapiens
ccagctcagaccttc

SEQ ID NO: 1813769 - DNA, 15 bp, Homo sapiens
cagctcagaccttct

SEQ ID NO: 1813770 - DNA, 15 bp, Homo sapiens
agctcagaccttctt

SEQ ID NO: 1813771 - DNA, 15 bp, Homo sapiens
gctcagaccttcttt

SEQ ID NO: 1813772 - DNA, 15 bp, Homo sapiens
ctcagaccttctttg

SEQ ID NO: 1813773 - DNA, 15 bp, Homo sapiens
tcagaccttctttga

SEQ ID NO: 1813774 - DNA, 15 bp, Homo sapiens
cagaccttctttgac

SEQ ID NO: 1813775 - DNA, 15 bp, Homo sapiens
agaccttctttgact

SEQ ID NO: 1813776 - DNA, 15 bp, Homo sapiens
gaccttctttgactg

SEQ ID NO: 1813777 - DNA, 15 bp, Homo sapiens
accttctttgactgt

SEQ ID NO: 1813778 - DNA, 15 bp, Homo sapiens
ccttctttgactgtc

SEQ ID NO: 1813779 - DNA, 15 bp, Homo sapiens
cttctttgactgtct

SEQ ID NO: 1813780 - DNA, 15 bp, Homo sapiens
ttctttgactgtctc

SEQ ID NO: 1813781 - DNA, 15 bp, Homo sapiens
tctttgactgtctcc

SEQ ID NO: 1813782 - DNA, 15 bp, Homo sapiens
ctttgactgtctccc

SEQ ID NO: 1813783 - DNA, 15 bp, Homo sapiens
tttgactgtctccca

SEQ ID NO: 1813784 - DNA, 15 bp, Homo sapiens
ttgactgtctcccag

SEQ ID NO: 1813785 - DNA, 15 bp, Homo sapiens
tgactgtctcccaga

SEQ ID NO: 1813786 - DNA, 15 bp, Homo sapiens
gactgtctcccagag

SEQ ID NO: 1813787 - DNA, 15 bp, Homo sapiens
actgtctcccagaga

SEQ ID NO: 1813788 - DNA, 15 bp, Homo sapiens
ctgtctcccagagac

SEQ ID NO: 1813789 - DNA, 15 bp, Homo sapiens
tgtctcccagagaca

SEQ ID NO: 1813790 - DNA, 15 bp, Homo sapiens
gtctcccagagacac

SEQ ID NO: 1813791 - DNA, 15 bp, Homo sapiens
tctcccagagacact

SEQ ID NO: 1813792 - DNA, 15 bp, Homo sapiens
ctcccagagacactg

SEQ ID NO: 1813793 - DNA, 15 bp, Homo sapiens
tcccagagacactgc

SEQ ID NO: 1813794 - DNA, 15 bp, Homo sapiens
cccagagacactgct

SEQ ID NO: 1813795 - DNA, 15 bp, Homo sapiens
ccagagacactgctg

SEQ ID NO: 1813796 - DNA, 15 bp, Homo sapiens
cagagacactgctgt

SEQ ID NO: 1813797 - DNA, 15 bp, Homo sapiens
agagacactgctgta

SEQ ID NO: 1813798 - DNA, 15 bp, Homo sapiens
gagacactgctgtag

SEQ ID NO: 1813799 - DNA, 15 bp, Homo sapiens
agacactgctgtagg

SEQ ID NO: 1813800 - DNA, 15 bp, Homo sapiens
gacactgctgtagga

SEQ ID NO: 1813801 - DNA, 15 bp, Homo sapiens
acactgctgtaggag

SEQ ID NO: 1813802 - DNA, 15 bp, Homo sapiens
cactgctgtaggagt

SEQ ID NO: 1813803 - DNA, 15 bp, Homo sapiens
actgctgtaggagtg

SEQ ID NO: 1813804 - DNA, 15 bp, Homo sapiens
ctgctgtaggagtgc

SEQ ID NO: 1813805 - DNA, 15 bp, Homo sapiens
tgctgtaggagtgca

SEQ ID NO: 1813806 - DNA, 15 bp, Homo sapiens
gctgtaggagtgcac

SEQ ID NO: 1813807 - DNA, 15 bp, Homo sapiens
ctgtaggagtgcaca

SEQ ID NO: 1813808 - DNA, 15 bp, Homo sapiens
tgtaggagtgcacac

SEQ ID NO: 1813809 - DNA, 15 bp, Homo sapiens
gtaggagtgcacacc

SEQ ID NO: 1813810 - DNA, 15 bp, Homo sapiens
taggagtgcacacca

SEQ ID NO: 1813811 - DNA, 15 bp, Homo sapiens
aggagtgcacaccag

SEQ ID NO: 1813812 - DNA, 15 bp, Homo sapiens
ggagtgcacaccagt

SEQ ID NO: 1813813 - DNA, 15 bp, Homo sapiens
gagtgcacaccagtt

SEQ ID NO: 1813814 - DNA, 15 bp, Homo sapiens
agtgcacaccagttt

SEQ ID NO: 1813815 - DNA, 15 bp, Homo sapiens
gtgcacaccagttta

SEQ ID NO: 1813816 - DNA, 15 bp, Homo sapiens
tgcacaccagtttac

SEQ ID NO: 1813817 - DNA, 15 bp, Homo sapiens
gcacaccagtttact

SEQ ID NO: 1813818 - DNA, 15 bp, Homo sapiens
cacaccagtttactt

SEQ ID NO: 1813819 - DNA, 15 bp, Homo sapiens
acaccagtttacttt

SEQ ID NO: 1813820 - DNA, 15 bp, Homo sapiens
caccagtttactttt

SEQ ID NO: 1813821 - DNA, 15 bp, Homo sapiens
accagtttacttttc

SEQ ID NO: 1813822 - DNA, 15 bp, Homo sapiens
ccagtttacttttct

SEQ ID NO: 1813823 - DNA, 15 bp, Homo sapiens
cagtttacttttctt

SEQ ID NO: 1813824 - DNA, 15 bp, Homo sapiens
agtttacttttcttt

SEQ ID NO: 1813825 - DNA, 15 bp, Homo sapiens
gtttacttttctttc

SEQ ID NO: 1813826 - DNA, 15 bp, Homo sapiens
tttacttttctttct

SEQ ID NO: 1813827 - DNA, 15 bp, Homo sapiens
ttacttttctttctt

SEQ ID NO: 1813828 - DNA, 15 bp, Homo sapiens
tacttttctttcttt

SEQ ID NO: 1813829 - DNA, 15 bp, Homo sapiens
acttttctttctttt

SEQ ID NO: 1813830 - DNA, 15 bp, Homo sapiens
cttttctttcttttg

SEQ ID NO: 1813831 - DNA, 15 bp, Homo sapiens
ttttctttcttttgt

SEQ ID NO: 1813832 - DNA, 15 bp, Homo sapiens
tttctttcttttgtt

SEQ ID NO: 1813833 - DNA, 15 bp, Homo sapiens
ttctttcttttgttt

SEQ ID NO: 1813834 - DNA, 15 bp, Homo sapiens
tctttcttttgtttt

SEQ ID NO: 1813835 - DNA, 15 bp, Homo sapiens
ctttcttttgttttt

SEQ ID NO: 1813836 - DNA, 15 bp, Homo sapiens
tttcttttgtttttg

SEQ ID NO: 1813837 - DNA, 15 bp, Homo sapiens
ttcttttgtttttga

SEQ ID NO: 1813838 - DNA, 15 bp, Homo sapiens
tcttttgtttttgag

SEQ ID NO: 1813839 - DNA, 15 bp, Homo sapiens
cttttgtttttgaga

SEQ ID NO: 1813840 - DNA, 15 bp, Homo sapiens
ggagtttcgctcttt

SEQ ID NO: 1813841 - DNA, 15 bp, Homo sapiens
tcgctctttttgcct

SEQ ID NO: 1813842 - DNA, 15 bp, Homo sapiens
cgctctttttgccta

SEQ ID NO: 1813843 - DNA, 15 bp, Homo sapiens
gctctttttgcctag

SEQ ID NO: 1813844 - DNA, 15 bp, Homo sapiens
ctctttttgcctagg

SEQ ID NO: 1813845 - DNA, 15 bp, Homo sapiens
tctttttgcctaggc

SEQ ID NO: 1813846 - DNA, 15 bp, Homo sapiens
ctttttgcctaggct

SEQ ID NO: 1813847 - DNA, 15 bp, Homo sapiens
tttttgcctaggctg

SEQ ID NO: 1813848 - DNA, 15 bp, Homo sapiens
ttttgcctaggctgg

SEQ ID NO: 1813849 - DNA, 15 bp, Homo sapiens
tttgcctaggctgga

SEQ ID NO: 1813850 - DNA, 15 bp, Homo sapiens
ctaggctggagtgct

SEQ ID NO: 1813851 - DNA, 15 bp, Homo sapiens
taggctggagtgctg

SEQ ID NO: 1813852 - DNA, 15 bp, Homo sapiens
aggctggagtgctgt

SEQ ID NO: 1813853 - DNA, 15 bp, Homo sapiens
ggctggagtgctgtg

SEQ ID NO: 1813854 - DNA, 15 bp, Homo sapiens
tggagtgctgtggtg

SEQ ID NO: 1813855 - DNA, 15 bp, Homo sapiens
ggagtgctgtggtgt

SEQ ID NO: 1813856 - DNA, 15 bp, Homo sapiens
gagtgctgtggtgtg

SEQ ID NO: 1813857 - DNA, 15 bp, Homo sapiens
agtgctgtggtgtga

SEQ ID NO: 1813858 - DNA, 15 bp, Homo sapiens
gtgctgtggtgtgat

SEQ ID NO: 1813859 - DNA, 15 bp, Homo sapiens
tgctgtggtgtgatc

SEQ ID NO: 1813860 - DNA, 15 bp, Homo sapiens
gctgtggtgtgatct

SEQ ID NO: 1813861 - DNA, 15 bp, Homo sapiens
ctgtggtgtgatctc

SEQ ID NO: 1813862 - DNA, 15 bp, Homo sapiens
tgtggtgtgatctca

SEQ ID NO: 1813863 - DNA, 15 bp, Homo sapiens
cactgcaacctctgg

SEQ ID NO: 1813864 - DNA, 15 bp, Homo sapiens
actgcaacctctggc

SEQ ID NO: 1813865 - DNA, 15 bp, Homo sapiens
ctgcaacctctggct

SEQ ID NO: 1813866 - DNA, 15 bp, Homo sapiens
tgcaacctctggctc

SEQ ID NO: 1813867 - DNA, 15 bp, Homo sapiens
gcaacctctggctcc

SEQ ID NO: 1813868 - DNA, 15 bp, Homo sapiens
caacctctggctccc

SEQ ID NO: 1813869 - DNA, 15 bp, Homo sapiens
aacctctggctccca

SEQ ID NO: 1813870 - DNA, 15 bp, Homo sapiens
acctctggctcccag

SEQ ID NO: 1813871 - DNA, 15 bp, Homo sapiens
cctctggctcccagg

SEQ ID NO: 1813872 - DNA, 15 bp, Homo sapiens
ctctggctcccaggt

SEQ ID NO: 1813873 - DNA, 15 bp, Homo sapiens
tctggctcccaggtt

SEQ ID NO: 1813874 - DNA, 15 bp, Homo sapiens
ctggctcccaggttc

SEQ ID NO: 1813875 - DNA, 15 bp, Homo sapiens
tggctcccaggttca

SEQ ID NO: 1813876 - DNA, 15 bp, Homo sapiens
ggctcccaggttcaa

SEQ ID NO: 1813877 - DNA, 15 bp, Homo sapiens
aagtgattctcctgt

SEQ ID NO: 1813878 - DNA, 15 bp, Homo sapiens
agtgattctcctgtc

SEQ ID NO: 1813879 - DNA, 15 bp, Homo sapiens
gtgattctcctgtct

SEQ ID NO: 1813880 - DNA, 15 bp, Homo sapiens
tgattctcctgtctc

SEQ ID NO: 1813881 - DNA, 15 bp, Homo sapiens
gattctcctgtctct

SEQ ID NO: 1813882 - DNA, 15 bp, Homo sapiens
ctgtctctgcctccc

SEQ ID NO: 1813883 - DNA, 15 bp, Homo sapiens
tgtctctgcctcccg

SEQ ID NO: 1813884 - DNA, 15 bp, Homo sapiens
gtctctgcctcccga

SEQ ID NO: 1813885 - DNA, 15 bp, Homo sapiens
tctctgcctcccgag

SEQ ID NO: 1813886 - DNA, 15 bp, Homo sapiens
ctctgcctcccgagt

SEQ ID NO: 1813887 - DNA, 15 bp, Homo sapiens
tctgcctcccgagta

SEQ ID NO: 1813888 - DNA, 15 bp, Homo sapiens
ctgcctcccgagtag

SEQ ID NO: 1813889 - DNA, 15 bp, Homo sapiens
tgcctcccgagtagc

SEQ ID NO: 1813890 - DNA, 15 bp, Homo sapiens
agctgggattacaga

SEQ ID NO: 1813891 - DNA, 15 bp, Homo sapiens
ctgggattacagaca

SEQ ID NO: 1813892 - DNA, 15 bp, Homo sapiens
tgggattacagacac

SEQ ID NO: 1813893 - DNA, 15 bp, Homo sapiens
gggattacagacacc

SEQ ID NO: 1813894 - DNA, 15 bp, Homo sapiens
ggattacagacaccc

SEQ ID NO: 1813895 - DNA, 15 bp, Homo sapiens
gattacagacaccca

SEQ ID NO: 1813896 - DNA, 15 bp, Homo sapiens
attacagacacccac

SEQ ID NO: 1813897 - DNA, 15 bp, Homo sapiens
ttacagacacccacc

SEQ ID NO: 1813898 - DNA, 15 bp, Homo sapiens
tacagacacccacca

SEQ ID NO: 1813899 - DNA, 15 bp, Homo sapiens
acagacacccaccac

SEQ ID NO: 1813900 - DNA, 15 bp, Homo sapiens
cagacacccaccact

SEQ ID NO: 1813901 - DNA, 15 bp, Homo sapiens
agacacccaccactg

SEQ ID NO: 1813902 - DNA, 15 bp, Homo sapiens
gacacccaccactgc

SEQ ID NO: 1813903 - DNA, 15 bp, Homo sapiens
acacccaccactgca

SEQ ID NO: 1813904 - DNA, 15 bp, Homo sapiens
cacccaccactgcac

SEQ ID NO: 1813905 - DNA, 15 bp, Homo sapiens
acccaccactgcacc

SEQ ID NO: 1813906 - DNA, 15 bp, Homo sapiens
cccaccactgcaccc

SEQ ID NO: 1813907 - DNA, 15 bp, Homo sapiens
ccaccactgcacccg

SEQ ID NO: 1813908 - DNA, 15 bp, Homo sapiens
caccactgcacccgg

SEQ ID NO: 1813909 - DNA, 15 bp, Homo sapiens
accactgcacccggc

SEQ ID NO: 1813910 - DNA, 15 bp, Homo sapiens
ccactgcacccggct

SEQ ID NO: 1813911 - DNA, 15 bp, Homo sapiens
cactgcacccggcta

SEQ ID NO: 1813912 - DNA, 15 bp, Homo sapiens
actgcacccggctag

SEQ ID NO: 1813913 - DNA, 15 bp, Homo sapiens
ctgcacccggctagt

SEQ ID NO: 1813914 - DNA, 15 bp, Homo sapiens
tgcacccggctagtt

SEQ ID NO: 1813915 - DNA, 15 bp, Homo sapiens
gcacccggctagttt

SEQ ID NO: 1813916 - DNA, 15 bp, Homo sapiens
cacccggctagtttt

SEQ ID NO: 1813917 - DNA, 15 bp, Homo sapiens
acccggctagttttt

SEQ ID NO: 1813918 - DNA, 15 bp, Homo sapiens
agtttttgtattttc

SEQ ID NO: 1813919 - DNA, 15 bp, Homo sapiens
gtttttgtattttca

SEQ ID NO: 1813920 - DNA, 15 bp, Homo sapiens
cctcagatgatccat

SEQ ID NO: 1813921 - DNA, 15 bp, Homo sapiens
ctcagatgatccatc

SEQ ID NO: 1813922 - DNA, 15 bp, Homo sapiens
tcagatgatccatcc

SEQ ID NO: 1813923 - DNA, 15 bp, Homo sapiens
cagatgatccatccg

SEQ ID NO: 1813924 - DNA, 15 bp, Homo sapiens
agatgatccatccgc

SEQ ID NO: 1813925 - DNA, 15 bp, Homo sapiens
gatgatccatccgcc

SEQ ID NO: 1813926 - DNA, 15 bp, Homo sapiens
atgatccatccgcct

SEQ ID NO: 1813927 - DNA, 15 bp, Homo sapiens
tgatccatccgcctt

SEQ ID NO: 1813928 - DNA, 15 bp, Homo sapiens
gatccatccgccttg

SEQ ID NO: 1813929 - DNA, 15 bp, Homo sapiens
atccatccgccttgg

SEQ ID NO: 1813930 - DNA, 15 bp, Homo sapiens
tccatccgccttggc

SEQ ID NO: 1813931 - DNA, 15 bp, Homo sapiens
ccatccgccttggcc

SEQ ID NO: 1813932 - DNA, 15 bp, Homo sapiens
catccgccttggcct

SEQ ID NO: 1813933 - DNA, 15 bp, Homo sapiens
atccgccttggcctc

SEQ ID NO: 1813934 - DNA, 15 bp, Homo sapiens
tccgccttggcctcc

SEQ ID NO: 1813935 - DNA, 15 bp, Homo sapiens
tgctgagattacaga

SEQ ID NO: 1813936 - DNA, 15 bp, Homo sapiens
gctgagattacagat

SEQ ID NO: 1813937 - DNA, 15 bp, Homo sapiens
ctgagattacagatg

SEQ ID NO: 1813938 - DNA, 15 bp, Homo sapiens
tgagattacagatgt

SEQ ID NO: 1813939 - DNA, 15 bp, Homo sapiens
gagattacagatgtg

SEQ ID NO: 1813940 - DNA, 15 bp, Homo sapiens
agattacagatgtga

SEQ ID NO: 1813941 - DNA, 15 bp, Homo sapiens
attacagatgtgagg

SEQ ID NO: 1813942 - DNA, 15 bp, Homo sapiens
ttacagatgtgaggc

SEQ ID NO: 1813943 - DNA, 15 bp, Homo sapiens
tacagatgtgaggca

SEQ ID NO: 1813944 - DNA, 15 bp, Homo sapiens
acagatgtgaggcac

SEQ ID NO: 1813945 - DNA, 15 bp, Homo sapiens
cagatgtgaggcacc

SEQ ID NO: 1813946 - DNA, 15 bp, Homo sapiens
agatgtgaggcacca

SEQ ID NO: 1813947 - DNA, 15 bp, Homo sapiens
gatgtgaggcaccac

SEQ ID NO: 1813948 - DNA, 15 bp, Homo sapiens
atgtgaggcaccaca

SEQ ID NO: 1813949 - DNA, 15 bp, Homo sapiens
tgtgaggcaccacac

SEQ ID NO: 1813950 - DNA, 15 bp, Homo sapiens
gtgaggcaccacacc

SEQ ID NO: 1813951 - DNA, 15 bp, Homo sapiens
tgaggcaccacaccc

SEQ ID NO: 1813952 - DNA, 15 bp, Homo sapiens
gaggcaccacacccg

SEQ ID NO: 1813953 - DNA, 15 bp, Homo sapiens
aggcaccacacccgg

SEQ ID NO: 1813954 - DNA, 15 bp, Homo sapiens
ggcaccacacccggc

SEQ ID NO: 1813955 - DNA, 15 bp, Homo sapiens
gcaccacacccggcc

SEQ ID NO: 1813956 - DNA, 15 bp, Homo sapiens
accacacccggccat

SEQ ID NO: 1813957 - DNA, 15 bp, Homo sapiens
ccacacccggccatt

SEQ ID NO: 1813958 - DNA, 15 bp, Homo sapiens
cacacccggccattt

SEQ ID NO: 1813959 - DNA, 15 bp, Homo sapiens
acacccggccatttt

SEQ ID NO: 1813960 - DNA, 15 bp, Homo sapiens
cacccggccattttt

SEQ ID NO: 1813961 - DNA, 15 bp, Homo sapiens
acccggccatttttg

SEQ ID NO: 1813962 - DNA, 15 bp, Homo sapiens
cccggccatttttgt

SEQ ID NO: 1813963 - DNA, 15 bp, Homo sapiens
ccggccatttttgta

SEQ ID NO: 1813964 - DNA, 15 bp, Homo sapiens
cggccatttttgtat

SEQ ID NO: 1813965 - DNA, 15 bp, Homo sapiens
ggccatttttgtatt

SEQ ID NO: 1813966 - DNA, 15 bp, Homo sapiens
gccatttttgtattt

SEQ ID NO: 1813967 - DNA, 15 bp, Homo sapiens
tgccatgttggccac

SEQ ID NO: 1813968 - DNA, 15 bp, Homo sapiens
gccatgttggccacg

SEQ ID NO: 1813969 - DNA, 15 bp, Homo sapiens
ccatgttggccacgc

SEQ ID NO: 1813970 - DNA, 15 bp, Homo sapiens
catgttggccacgct

SEQ ID NO: 1813971 - DNA, 15 bp, Homo sapiens
atgttggccacgctg

SEQ ID NO: 1813972 - DNA, 15 bp, Homo sapiens
tgttggccacgctgg

SEQ ID NO: 1813973 - DNA, 15 bp, Homo sapiens
gttggccacgctggt

SEQ ID NO: 1813974 - DNA, 15 bp, Homo sapiens
ttggccacgctggtc

SEQ ID NO: 1813975 - DNA, 15 bp, Homo sapiens
tggccacgctggtct

SEQ ID NO: 1813976 - DNA, 15 bp, Homo sapiens
ggccacgctggtctc

SEQ ID NO: 1813977 - DNA, 15 bp, Homo sapiens
gccacgctggtctca

SEQ ID NO: 1813978 - DNA, 15 bp, Homo sapiens
ccacgctggtctcaa

SEQ ID NO: 1813979 - DNA, 15 bp, Homo sapiens
cacgctggtctcaaa

SEQ ID NO: 1813980 - DNA, 15 bp, Homo sapiens
acgctggtctcaaac

SEQ ID NO: 1813981 - DNA, 15 bp, Homo sapiens
cgctggtctcaaact

SEQ ID NO: 1813982 - DNA, 15 bp, Homo sapiens
ccaccttggcctcct

SEQ ID NO: 1813983 - DNA, 15 bp, Homo sapiens
caccttggcctcctg

SEQ ID NO: 1813984 - DNA, 15 bp, Homo sapiens
accttggcctcctga

SEQ ID NO: 1813985 - DNA, 15 bp, Homo sapiens
ccttggcctcctgaa

SEQ ID NO: 1813986 - DNA, 15 bp, Homo sapiens
cttggcctcctgaag

SEQ ID NO: 1813987 - DNA, 15 bp, Homo sapiens
ttggcctcctgaagg

SEQ ID NO: 1813988 - DNA, 15 bp, Homo sapiens
tggcctcctgaaggg

SEQ ID NO: 1813989 - DNA, 15 bp, Homo sapiens
ggcctcctgaagggc

SEQ ID NO: 1813990 - DNA, 15 bp, Homo sapiens
gcctcctgaagggct

SEQ ID NO: 1813991 - DNA, 15 bp, Homo sapiens
cctcctgaagggctg

SEQ ID NO: 1813992 - DNA, 15 bp, Homo sapiens
ctcctgaagggctgg

SEQ ID NO: 1813993 - DNA, 15 bp, Homo sapiens
tcctgaagggctggg

SEQ ID NO: 1813994 - DNA, 15 bp, Homo sapiens
cctgaagggctggga

SEQ ID NO: 1813995 - DNA, 15 bp, Homo sapiens
ctgaagggctgggac

SEQ ID NO: 1813996 - DNA, 15 bp, Homo sapiens
tgaagggctgggact

SEQ ID NO: 1813997 - DNA, 15 bp, Homo sapiens
gaagggctgggacta

SEQ ID NO: 1813998 - DNA, 15 bp, Homo sapiens
aagggctgggactac

SEQ ID NO: 1813999 - DNA, 15 bp, Homo sapiens
agggctgggactaca

SEQ ID NO: 1814000 - DNA, 15 bp, Homo sapiens
gggctgggactacag

SEQ ID NO: 1814001 - DNA, 15 bp, Homo sapiens
ggctgggactacagg

SEQ ID NO: 1814002 - DNA, 15 bp, Homo sapiens
actacaggcgtgagt

SEQ ID NO: 1814003 - DNA, 15 bp, Homo sapiens
ctacaggcgtgagtc

SEQ ID NO: 1814004 - DNA, 15 bp, Homo sapiens
tacaggcgtgagtca

SEQ ID NO: 1814005 - DNA, 15 bp, Homo sapiens
acaggcgtgagtcac

SEQ ID NO: 1814006 - DNA, 15 bp, Homo sapiens
caggcgtgagtcacc

SEQ ID NO: 1814007 - DNA, 15 bp, Homo sapiens
aggcgtgagtcaccg

SEQ ID NO: 1814008 - DNA, 15 bp, Homo sapiens
ggcgtgagtcaccgt

SEQ ID NO: 1814009 - DNA, 15 bp, Homo sapiens
gcgtgagtcaccgtg

SEQ ID NO: 1814010 - DNA, 15 bp, Homo sapiens
cgtgagtcaccgtgc

SEQ ID NO: 1814011 - DNA, 15 bp, Homo sapiens
gtgagtcaccgtgcc

SEQ ID NO: 1814012 - DNA, 15 bp, Homo sapiens
tgagtcaccgtgccc

SEQ ID NO: 1814013 - DNA, 15 bp, Homo sapiens
gagtcaccgtgcccg

SEQ ID NO: 1814014 - DNA, 15 bp, Homo sapiens
agtcaccgtgcccgg

SEQ ID NO: 1814015 - DNA, 15 bp, Homo sapiens
gtcaccgtgcccggc

SEQ ID NO: 1814016 - DNA, 15 bp, Homo sapiens
tcaccgtgcccggcc

SEQ ID NO: 1814017 - DNA, 15 bp, Homo sapiens
accgtgcccggccat

SEQ ID NO: 1814018 - DNA, 15 bp, Homo sapiens
ccgtgcccggccatt

SEQ ID NO: 1814019 - DNA, 15 bp, Homo sapiens
cgtgcccggccattt

SEQ ID NO: 1814020 - DNA, 15 bp, Homo sapiens
gtgcccggccatttt

SEQ ID NO: 1814021 - DNA, 15 bp, Homo sapiens
tgcccggccattttt

SEQ ID NO: 1814022 - DNA, 15 bp, Homo sapiens
gcccggccatttttg

SEQ ID NO: 1814023 - DNA, 15 bp, Homo sapiens
ttgtatttttaggac

SEQ ID NO: 1814024 - DNA, 15 bp, Homo sapiens
tgtatttttaggaca

SEQ ID NO: 1814025 - DNA, 15 bp, Homo sapiens
gtatttttaggacag

SEQ ID NO: 1814026 - DNA, 15 bp, Homo sapiens
tatttttaggacagc

SEQ ID NO: 1814027 - DNA, 15 bp, Homo sapiens
atttttaggacagcg

SEQ ID NO: 1814028 - DNA, 15 bp, Homo sapiens
tttttaggacagcgt

SEQ ID NO: 1814029 - DNA, 15 bp, Homo sapiens
ttttaggacagcgtt

SEQ ID NO: 1814030 - DNA, 15 bp, Homo sapiens
tttaggacagcgttt

SEQ ID NO: 1814031 - DNA, 15 bp, Homo sapiens
ttaggacagcgtttt

SEQ ID NO: 1814032 - DNA, 15 bp, Homo sapiens
taggacagcgttttt

SEQ ID NO: 1814033 - DNA, 15 bp, Homo sapiens
aggacagcgtttttt

SEQ ID NO: 1814034 - DNA, 15 bp, Homo sapiens
ggacagcgttttttc

SEQ ID NO: 1814035 - DNA, 15 bp, Homo sapiens
gacagcgttttttca

SEQ ID NO: 1814036 - DNA, 15 bp, Homo sapiens
acagcgttttttcat

SEQ ID NO: 1814037 - DNA, 15 bp, Homo sapiens
cagcgttttttcatg

SEQ ID NO: 1814038 - DNA, 15 bp, Homo sapiens
agcgttttttcatgt

SEQ ID NO: 1814039 - DNA, 15 bp, Homo sapiens
gcgttttttcatgtt

SEQ ID NO: 1814040 - DNA, 15 bp, Homo sapiens
cgttttttcatgttg

SEQ ID NO: 1814041 - DNA, 15 bp, Homo sapiens
gttttttcatgttgg

SEQ ID NO: 1814042 - DNA, 15 bp, Homo sapiens
ttttttcatgttggc

SEQ ID NO: 1814043 - DNA, 15 bp, Homo sapiens
tttttcatgttggcc

SEQ ID NO: 1814044 - DNA, 15 bp, Homo sapiens
ttttcatgttggcca

SEQ ID NO: 1814045 - DNA, 15 bp, Homo sapiens
tttcatgttggccag

SEQ ID NO: 1814046 - DNA, 15 bp, Homo sapiens
ttcatgttggccagg

SEQ ID NO: 1814047 - DNA, 15 bp, Homo sapiens
gtgatccacccaccc

SEQ ID NO: 1814048 - DNA, 15 bp, Homo sapiens
tgatccacccacccc

SEQ ID NO: 1814049 - DNA, 15 bp, Homo sapiens
gatccacccaccccg

SEQ ID NO: 1814050 - DNA, 15 bp, Homo sapiens
atccacccaccccgg

SEQ ID NO: 1814051 - DNA, 15 bp, Homo sapiens
tccacccaccccggc

SEQ ID NO: 1814052 - DNA, 15 bp, Homo sapiens
ccacccaccccggcc

SEQ ID NO: 1814053 - DNA, 15 bp, Homo sapiens
cacccaccccggcct

SEQ ID NO: 1814054 - DNA, 15 bp, Homo sapiens
acccaccccggcctc

SEQ ID NO: 1814055 - DNA, 15 bp, Homo sapiens
cccaccccggcctcc

SEQ ID NO: 1814056 - DNA, 15 bp, Homo sapiens
ccaccccggcctccc

SEQ ID NO: 1814057 - DNA, 15 bp, Homo sapiens
caccccggcctccca

SEQ ID NO: 1814058 - DNA, 15 bp, Homo sapiens
accccggcctcccaa

SEQ ID NO: 1814059 - DNA, 15 bp, Homo sapiens
ccccggcctcccaat

SEQ ID NO: 1814060 - DNA, 15 bp, Homo sapiens
cccggcctcccaata

SEQ ID NO: 1814061 - DNA, 15 bp, Homo sapiens
ccggcctcccaatat

SEQ ID NO: 1814062 - DNA, 15 bp, Homo sapiens
cggcctcccaatatg

SEQ ID NO: 1814063 - DNA, 15 bp, Homo sapiens
ggcctcccaatatgc

SEQ ID NO: 1814064 - DNA, 15 bp, Homo sapiens
aatatgctgggattc

SEQ ID NO: 1814065 - DNA, 15 bp, Homo sapiens
atatgctgggattcc

SEQ ID NO: 1814066 - DNA, 15 bp, Homo sapiens
tatgctgggattcca

SEQ ID NO: 1814067 - DNA, 15 bp, Homo sapiens
atgctgggattccag

SEQ ID NO: 1814068 - DNA, 15 bp, Homo sapiens
gctgggattccaggt

SEQ ID NO: 1814069 - DNA, 15 bp, Homo sapiens
ctgggattccaggtg

SEQ ID NO: 1814070 - DNA, 15 bp, Homo sapiens
tgggattccaggtgt

SEQ ID NO: 1814071 - DNA, 15 bp, Homo sapiens
gggattccaggtgtg

SEQ ID NO: 1814072 - DNA, 15 bp, Homo sapiens
ggattccaggtgtga

SEQ ID NO: 1814073 - DNA, 15 bp, Homo sapiens
gattccaggtgtgag

SEQ ID NO: 1814074 - DNA, 15 bp, Homo sapiens
attccaggtgtgagt

SEQ ID NO: 1814075 - DNA, 15 bp, Homo sapiens
ttccaggtgtgagtt

SEQ ID NO: 1814076 - DNA, 15 bp, Homo sapiens
tccaggtgtgagtta

SEQ ID NO: 1814077 - DNA, 15 bp, Homo sapiens
ccaggtgtgagttac

SEQ ID NO: 1814078 - DNA, 15 bp, Homo sapiens
caggtgtgagttacc

SEQ ID NO: 1814079 - DNA, 15 bp, Homo sapiens
aggtgtgagttacca

SEQ ID NO: 1814080 - DNA, 15 bp, Homo sapiens
ggtgtgagttaccat

SEQ ID NO: 1814081 - DNA, 15 bp, Homo sapiens
gtgtgagttaccatg

SEQ ID NO: 1814082 - DNA, 15 bp, Homo sapiens
tgtgagttaccatgc

SEQ ID NO: 1814083 - DNA, 15 bp, Homo sapiens
gtgagttaccatgcc

SEQ ID NO: 1814084 - DNA, 15 bp, Homo sapiens
tgagttaccatgccc

SEQ ID NO: 1814085 - DNA, 15 bp, Homo sapiens
gagttaccatgcccg

SEQ ID NO: 1814086 - DNA, 15 bp, Homo sapiens
agttaccatgcccgg

SEQ ID NO: 1814087 - DNA, 15 bp, Homo sapiens
gttaccatgcccggc

SEQ ID NO: 1814088 - DNA, 15 bp, Homo sapiens
ttaccatgcccggct

SEQ ID NO: 1814089 - DNA, 15 bp, Homo sapiens
taccatgcccggcta

SEQ ID NO: 1814090 - DNA, 15 bp, Homo sapiens
accatgcccggctac

SEQ ID NO: 1814091 - DNA, 15 bp, Homo sapiens
ccatgcccggctacc

SEQ ID NO: 1814092 - DNA, 15 bp, Homo sapiens
catgcccggctacca

SEQ ID NO: 1814093 - DNA, 15 bp, Homo sapiens
atgcccggctaccac

SEQ ID NO: 1814094 - DNA, 15 bp, Homo sapiens
tgcccggctaccact

SEQ ID NO: 1814095 - DNA, 15 bp, Homo sapiens
gcccggctaccactt

SEQ ID NO: 1814096 - DNA, 15 bp, Homo sapiens
cccggctaccacttt

SEQ ID NO: 1814097 - DNA, 15 bp, Homo sapiens
ccggctaccacttta

SEQ ID NO: 1814098 - DNA, 15 bp, Homo sapiens
cggctaccactttac

SEQ ID NO: 1814099 - DNA, 15 bp, Homo sapiens
ggctaccactttact

SEQ ID NO: 1814100 - DNA, 15 bp, Homo sapiens
gctaccactttactt

SEQ ID NO: 1814101 - DNA, 15 bp, Homo sapiens
ctaccactttacttt

SEQ ID NO: 1814102 - DNA, 15 bp, Homo sapiens
taccactttactttt

SEQ ID NO: 1814103 - DNA, 15 bp, Homo sapiens
accactttacttttc

SEQ ID NO: 1814104 - DNA, 15 bp, Homo sapiens
ctttacttttcctgc

SEQ ID NO: 1814105 - DNA, 15 bp, Homo sapiens
tttacttttcctgca

SEQ ID NO: 1814106 - DNA, 15 bp, Homo sapiens
ttacttttcctgcag

SEQ ID NO: 1814107 - DNA, 15 bp, Homo sapiens
tacttttcctgcagg

SEQ ID NO: 1814108 - DNA, 15 bp, Homo sapiens
acttttcctgcaggc

SEQ ID NO: 1814109 - DNA, 15 bp, Homo sapiens
cttttcctgcaggct

SEQ ID NO: 1814110 - DNA, 15 bp, Homo sapiens
ttttcctgcaggcta

SEQ ID NO: 1814111 - DNA, 15 bp, Homo sapiens
tttcctgcaggctat

SEQ ID NO: 1814112 - DNA, 15 bp, Homo sapiens
ttcctgcaggctatc

SEQ ID NO: 1814113 - DNA, 15 bp, Homo sapiens
tcctgcaggctatca

SEQ ID NO: 1814114 - DNA, 15 bp, Homo sapiens
cctgcaggctatcac

SEQ ID NO: 1814115 - DNA, 15 bp, Homo sapiens
ctgcaggctatcaca

SEQ ID NO: 1814116 - DNA, 15 bp, Homo sapiens
tgcaggctatcacag

SEQ ID NO: 1814117 - DNA, 15 bp, Homo sapiens
gcaggctatcacaga

SEQ ID NO: 1814118 - DNA, 15 bp, Homo sapiens
caggctatcacagaa

SEQ ID NO: 1814119 - DNA, 15 bp, Homo sapiens
aggctatcacagaac

SEQ ID NO: 1814120 - DNA, 15 bp, Homo sapiens
ggctatcacagaacg

SEQ ID NO: 1814121 - DNA, 15 bp, Homo sapiens
gctatcacagaacgt

SEQ ID NO: 1814122 - DNA, 15 bp, Homo sapiens
ctatcacagaacgtg

SEQ ID NO: 1814123 - DNA, 15 bp, Homo sapiens
tatcacagaacgtgt

SEQ ID NO: 1814124 - DNA, 15 bp, Homo sapiens
atcacagaacgtgta

SEQ ID NO: 1814125 - DNA, 15 bp, Homo sapiens
tcacagaacgtgtac

SEQ ID NO: 1814126 - DNA, 15 bp, Homo sapiens
cacagaacgtgtaca

SEQ ID NO: 1814127 - DNA, 15 bp, Homo sapiens
acagaacgtgtacaa

SEQ ID NO: 1814128 - DNA, 15 bp, Homo sapiens
cagaacgtgtacaat

SEQ ID NO: 1814129 - DNA, 15 bp, Homo sapiens
agaacgtgtacaatc

SEQ ID NO: 1814130 - DNA, 15 bp, Homo sapiens
gaacgtgtacaatct

SEQ ID NO: 1814131 - DNA, 15 bp, Homo sapiens
aacgtgtacaatcta

SEQ ID NO: 1814132 - DNA, 15 bp, Homo sapiens
acgtgtacaatctag

SEQ ID NO: 1814133 - DNA, 15 bp, Homo sapiens
cgtgtacaatctaga

SEQ ID NO: 1814134 - DNA, 15 bp, Homo sapiens
gtgtacaatctagac

SEQ ID NO: 1814135 - DNA, 15 bp, Homo sapiens
tgtacaatctagact

SEQ ID NO: 1814136 - DNA, 15 bp, Homo sapiens
gtacaatctagactc

SEQ ID NO: 1814137 - DNA, 15 bp, Homo sapiens
tacaatctagactct

SEQ ID NO: 1814138 - DNA, 15 bp, Homo sapiens
acaatctagactcta

SEQ ID NO: 1814139 - DNA, 15 bp, Homo sapiens
caatctagactctaa

SEQ ID NO: 1814140 - DNA, 15 bp, Homo sapiens
aatctagactctaat

SEQ ID NO: 1814141 - DNA, 15 bp, Homo sapiens
atctagactctaatc

SEQ ID NO: 1814142 - DNA, 15 bp, Homo sapiens
tctagactctaatca

SEQ ID NO: 1814143 - DNA, 15 bp, Homo sapiens
ctagactctaatcaa

SEQ ID NO: 1814144 - DNA, 15 bp, Homo sapiens
tagactctaatcaac

SEQ ID NO: 1814145 - DNA, 15 bp, Homo sapiens
agactctaatcaacc

SEQ ID NO: 1814146 - DNA, 15 bp, Homo sapiens
gactctaatcaacca

SEQ ID NO: 1814147 - DNA, 15 bp, Homo sapiens
actctaatcaaccaa

SEQ ID NO: 1814148 - DNA, 15 bp, Homo sapiens
ctctaatcaaccaaa

SEQ ID NO: 1814149 - DNA, 15 bp, Homo sapiens
tctaatcaaccaaat

SEQ ID NO: 1814150 - DNA, 15 bp, Homo sapiens
ctaatcaaccaaatc

SEQ ID NO: 1814151 - DNA, 15 bp, Homo sapiens
taatcaaccaaatca

SEQ ID NO: 1814152 - DNA, 15 bp, Homo sapiens
aatcaaccaaatcaa

SEQ ID NO: 1814153 - DNA, 15 bp, Homo sapiens
atcaaccaaatcaac

SEQ ID NO: 1814154 - DNA, 15 bp, Homo sapiens
tcaaccaaatcaacg

SEQ ID NO: 1814155 - DNA, 15 bp, Homo sapiens
caaccaaatcaacgt

SEQ ID NO: 1814156 - DNA, 15 bp, Homo sapiens
aaccaaatcaacgtc

SEQ ID NO: 1814157 - DNA, 15 bp, Homo sapiens
accaaatcaacgtct

SEQ ID NO: 1814158 - DNA, 15 bp, Homo sapiens
ccaaatcaacgtctt

SEQ ID NO: 1814159 - DNA, 15 bp, Homo sapiens
caaatcaacgtcttg

SEQ ID NO: 1814160 - DNA, 15 bp, Homo sapiens
aaatcaacgtcttgc

SEQ ID NO: 1814161 - DNA, 15 bp, Homo sapiens
aatcaacgtcttgcc

SEQ ID NO: 1814162 - DNA, 15 bp, Homo sapiens
atcaacgtcttgcca

SEQ ID NO: 1814163 - DNA, 15 bp, Homo sapiens
tcaacgtcttgccat

SEQ ID NO: 1814164 - DNA, 15 bp, Homo sapiens
caacgtcttgccatc

SEQ ID NO: 1814165 - DNA, 15 bp, Homo sapiens
aacgtcttgccatcg

SEQ ID NO: 1814166 - DNA, 15 bp, Homo sapiens
acgtcttgccatcgg

SEQ ID NO: 1814167 - DNA, 15 bp, Homo sapiens
cgtcttgccatcgga

SEQ ID NO: 1814168 - DNA, 15 bp, Homo sapiens
gtcttgccatcggag

SEQ ID NO: 1814169 - DNA, 15 bp, Homo sapiens
tcttgccatcggagt

SEQ ID NO: 1814170 - DNA, 15 bp, Homo sapiens
cttgccatcggagtt

SEQ ID NO: 1814171 - DNA, 15 bp, Homo sapiens
ttgccatcggagttt

SEQ ID NO: 1814172 - DNA, 15 bp, Homo sapiens
tgccatcggagtttg

SEQ ID NO: 1814173 - DNA, 15 bp, Homo sapiens
gccatcggagtttgc

SEQ ID NO: 1814174 - DNA, 15 bp, Homo sapiens
ccatcggagtttgct

SEQ ID NO: 1814175 - DNA, 15 bp, Homo sapiens
catcggagtttgctg

SEQ ID NO: 1814176 - DNA, 15 bp, Homo sapiens
atcggagtttgctgg

SEQ ID NO: 1814177 - DNA, 15 bp, Homo sapiens
tcggagtttgctggt

SEQ ID NO: 1814178 - DNA, 15 bp, Homo sapiens
cggagtttgctggtg

SEQ ID NO: 1814179 - DNA, 15 bp, Homo sapiens
ggagtttgctggtga

SEQ ID NO: 1814180 - DNA, 15 bp, Homo sapiens
gagtttgctggtgaa

SEQ ID NO: 1814181 - DNA, 15 bp, Homo sapiens
agtttgctggtgaag

SEQ ID NO: 1814182 - DNA, 15 bp, Homo sapiens
gtttgctggtgaagg

SEQ ID NO: 1814183 - DNA, 15 bp, Homo sapiens
tttgctggtgaaggg

SEQ ID NO: 1814184 - DNA, 15 bp, Homo sapiens
ttgctggtgaagggc

SEQ ID NO: 1814185 - DNA, 15 bp, Homo sapiens
tgctggtgaagggca

SEQ ID NO: 1814186 - DNA, 15 bp, Homo sapiens
gctggtgaagggcac

SEQ ID NO: 1814187 - DNA, 15 bp, Homo sapiens
ctggtgaagggcact

SEQ ID NO: 1814188 - DNA, 15 bp, Homo sapiens
tggtgaagggcactt

SEQ ID NO: 1814189 - DNA, 15 bp, Homo sapiens
ggtgaagggcacttg

SEQ ID NO: 1814190 - DNA, 15 bp, Homo sapiens
gtgaagggcacttgg

SEQ ID NO: 1814191 - DNA, 15 bp, Homo sapiens
tgaagggcacttggg

SEQ ID NO: 1814192 - DNA, 15 bp, Homo sapiens
gaagggcacttgggg

SEQ ID NO: 1814193 - DNA, 15 bp, Homo sapiens
aagggcacttggggt

SEQ ID NO: 1814194 - DNA, 15 bp, Homo sapiens
agggcacttggggtc

SEQ ID NO: 1814195 - DNA, 15 bp, Homo sapiens
gggcacttggggtcc

SEQ ID NO: 1814196 - DNA, 15 bp, Homo sapiens
ggcacttggggtcct

SEQ ID NO: 1814197 - DNA, 15 bp, Homo sapiens
gcacttggggtcctg

SEQ ID NO: 1814198 - DNA, 15 bp, Homo sapiens
cacttggggtcctgg

SEQ ID NO: 1814199 - DNA, 15 bp, Homo sapiens
acttggggtcctgga

SEQ ID NO: 1814200 - DNA, 15 bp, Homo sapiens
cttggggtcctggaa

SEQ ID NO: 1814201 - DNA, 15 bp, Homo sapiens
ttggggtcctggaaa

SEQ ID NO: 1814202 - DNA, 15 bp, Homo sapiens
tggggtcctggaaat

SEQ ID NO: 1814203 - DNA, 15 bp, Homo sapiens
ggggtcctggaaata

SEQ ID NO: 1814204 - DNA, 15 bp, Homo sapiens
gggtcctggaaataa

SEQ ID NO: 1814205 - DNA, 15 bp, Homo sapiens
ggtcctggaaataac

SEQ ID NO: 1814206 - DNA, 15 bp, Homo sapiens
gtcctggaaataact

SEQ ID NO: 1814207 - DNA, 15 bp, Homo sapiens
tcctggaaataactg

SEQ ID NO: 1814208 - DNA, 15 bp, Homo sapiens
cctggaaataactgt

SEQ ID NO: 1814209 - DNA, 15 bp, Homo sapiens
ctggaaataactgta

SEQ ID NO: 1814210 - DNA, 15 bp, Homo sapiens
tggaaataactgtag

SEQ ID NO: 1814211 - DNA, 15 bp, Homo sapiens
ggaaataactgtagg

SEQ ID NO: 1814212 - DNA, 15 bp, Homo sapiens
gaaataactgtaggc

SEQ ID NO: 1814213 - DNA, 15 bp, Homo sapiens
aaataactgtaggct

SEQ ID NO: 1814214 - DNA, 15 bp, Homo sapiens
aataactgtaggctc

SEQ ID NO: 1814215 - DNA, 15 bp, Homo sapiens
ataactgtaggctcc

SEQ ID NO: 1814216 - DNA, 15 bp, Homo sapiens
taactgtaggctcca

SEQ ID NO: 1814217 - DNA, 15 bp, Homo sapiens
aactgtaggctccaa

SEQ ID NO: 1814218 - DNA, 15 bp, Homo sapiens
actgtaggctccaag

SEQ ID NO: 1814219 - DNA, 15 bp, Homo sapiens
ctgtaggctccaagc

SEQ ID NO: 1814220 - DNA, 15 bp, Homo sapiens
tgtaggctccaagcc

SEQ ID NO: 1814221 - DNA, 15 bp, Homo sapiens
gtaggctccaagcca

SEQ ID NO: 1814222 - DNA, 15 bp, Homo sapiens
taggctccaagccac

SEQ ID NO: 1814223 - DNA, 15 bp, Homo sapiens
aggctccaagccaca

SEQ ID NO: 1814224 - DNA, 15 bp, Homo sapiens
ggctccaagccacac

SEQ ID NO: 1814225 - DNA, 15 bp, Homo sapiens
gctccaagccacaca

SEQ ID NO: 1814226 - DNA, 15 bp, Homo sapiens
ctccaagccacacac

SEQ ID NO: 1814227 - DNA, 15 bp, Homo sapiens
tccaagccacacaca

SEQ ID NO: 1814228 - DNA, 15 bp, Homo sapiens
ccaagccacacacac

SEQ ID NO: 1814229 - DNA, 15 bp, Homo sapiens
caagccacacacact

SEQ ID NO: 1814230 - DNA, 15 bp, Homo sapiens
aagccacacacactg

SEQ ID NO: 1814231 - DNA, 15 bp, Homo sapiens
agccacacacactga

SEQ ID NO: 1814232 - DNA, 15 bp, Homo sapiens
gccacacacactgag

SEQ ID NO: 1814233 - DNA, 15 bp, Homo sapiens
ccacacacactgaga

SEQ ID NO: 1814234 - DNA, 15 bp, Homo sapiens
cacacacactgagat

SEQ ID NO: 1814235 - DNA, 15 bp, Homo sapiens
acacacactgagata

SEQ ID NO: 1814236 - DNA, 15 bp, Homo sapiens
cacacactgagatag

SEQ ID NO: 1814237 - DNA, 15 bp, Homo sapiens
acacactgagatagg

SEQ ID NO: 1814238 - DNA, 15 bp, Homo sapiens
cacactgagataggc

SEQ ID NO: 1814239 - DNA, 15 bp, Homo sapiens
acactgagataggcc

SEQ ID NO: 1814240 - DNA, 15 bp, Homo sapiens
cactgagataggcct

SEQ ID NO: 1814241 - DNA, 15 bp, Homo sapiens
actgagataggccta

SEQ ID NO: 1814242 - DNA, 15 bp, Homo sapiens
ctgagataggcctat

SEQ ID NO: 1814243 - DNA, 15 bp, Homo sapiens
tgagataggcctatt

SEQ ID NO: 1814244 - DNA, 15 bp, Homo sapiens
gagataggcctattc

SEQ ID NO: 1814245 - DNA, 15 bp, Homo sapiens
agataggcctattcc

SEQ ID NO: 1814246 - DNA, 15 bp, Homo sapiens
gataggcctattccc

SEQ ID NO: 1814247 - DNA, 15 bp, Homo sapiens
ataggcctattccct

SEQ ID NO: 1814248 - DNA, 15 bp, Homo sapiens
taggcctattccctg

SEQ ID NO: 1814249 - DNA, 15 bp, Homo sapiens
aggcctattccctga

SEQ ID NO: 1814250 - DNA, 15 bp, Homo sapiens
ggcctattccctgag

SEQ ID NO: 1814251 - DNA, 15 bp, Homo sapiens
gcctattccctgagg

SEQ ID NO: 1814252 - DNA, 15 bp, Homo sapiens
cctattccctgaggc

SEQ ID NO: 1814253 - DNA, 15 bp, Homo sapiens
ctattccctgaggcc

SEQ ID NO: 1814254 - DNA, 15 bp, Homo sapiens
tattccctgaggcct

SEQ ID NO: 1814255 - DNA, 15 bp, Homo sapiens
attccctgaggcctc

SEQ ID NO: 1814256 - DNA, 15 bp, Homo sapiens
ttccctgaggcctca

SEQ ID NO: 1814257 - DNA, 15 bp, Homo sapiens
tccctgaggcctcag

SEQ ID NO: 1814258 - DNA, 15 bp, Homo sapiens
ccctgaggcctcaga

SEQ ID NO: 1814259 - DNA, 15 bp, Homo sapiens
cctgaggcctcagag

SEQ ID NO: 1814260 - DNA, 15 bp, Homo sapiens
ctgaggcctcagagc

SEQ ID NO: 1814261 - DNA, 15 bp, Homo sapiens
tgaggcctcagagcc

SEQ ID NO: 1814262 - DNA, 15 bp, Homo sapiens
gaggcctcagagccc

SEQ ID NO: 1814263 - DNA, 15 bp, Homo sapiens
aggcctcagagcccc

SEQ ID NO: 1814264 - DNA, 15 bp, Homo sapiens
ggcctcagagcccct

SEQ ID NO: 1814265 - DNA, 15 bp, Homo sapiens
gcctcagagcccctg

SEQ ID NO: 1814266 - DNA, 15 bp, Homo sapiens
cctcagagcccctga

SEQ ID NO: 1814267 - DNA, 15 bp, Homo sapiens
ctcagagcccctgac

SEQ ID NO: 1814268 - DNA, 15 bp, Homo sapiens
tcagagcccctgaca

SEQ ID NO: 1814269 - DNA, 15 bp, Homo sapiens
cagagcccctgacag

SEQ ID NO: 1814270 - DNA, 15 bp, Homo sapiens
agagcccctgacagc

SEQ ID NO: 1814271 - DNA, 15 bp, Homo sapiens
gagcccctgacagct

SEQ ID NO: 1814272 - DNA, 15 bp, Homo sapiens
agcccctgacagcta

SEQ ID NO: 1814273 - DNA, 15 bp, Homo sapiens
gcccctgacagctaa

SEQ ID NO: 1814274 - DNA, 15 bp, Homo sapiens
cccctgacagctaag

SEQ ID NO: 1814275 - DNA, 15 bp, Homo sapiens
ccctgacagctaagc

SEQ ID NO: 1814276 - DNA, 15 bp, Homo sapiens
cctgacagctaagct

SEQ ID NO: 1814277 - DNA, 15 bp, Homo sapiens
ctgacagctaagctc

SEQ ID NO: 1814278 - DNA, 15 bp, Homo sapiens
tgacagctaagctcc

SEQ ID NO: 1814279 - DNA, 15 bp, Homo sapiens
gacagctaagctccc

SEQ ID NO: 1814280 - DNA, 15 bp, Homo sapiens
acagctaagctccct

SEQ ID NO: 1814281 - DNA, 15 bp, Homo sapiens
cagctaagctccctt

SEQ ID NO: 1814282 - DNA, 15 bp, Homo sapiens
agctaagctcccttg

SEQ ID NO: 1814283 - DNA, 15 bp, Homo sapiens
gctaagctcccttga

SEQ ID NO: 1814284 - DNA, 15 bp, Homo sapiens
ctaagctcccttgag

SEQ ID NO: 1814285 - DNA, 15 bp, Homo sapiens
taagctcccttgagt

SEQ ID NO: 1814286 - DNA, 15 bp, Homo sapiens
aagctcccttgagtg

SEQ ID NO: 1814287 - DNA, 15 bp, Homo sapiens
agctcccttgagtgg

SEQ ID NO: 1814288 - DNA, 15 bp, Homo sapiens
gctcccttgagtggg

SEQ ID NO: 1814289 - DNA, 15 bp, Homo sapiens
ctcccttgagtgggg

SEQ ID NO: 1814290 - DNA, 15 bp, Homo sapiens
tcccttgagtggggc

SEQ ID NO: 1814291 - DNA, 15 bp, Homo sapiens
cccttgagtggggca

SEQ ID NO: 1814292 - DNA, 15 bp, Homo sapiens
ccttgagtggggcaa

SEQ ID NO: 1814293 - DNA, 15 bp, Homo sapiens
cttgagtggggcaat

SEQ ID NO: 1814294 - DNA, 15 bp, Homo sapiens
ttgagtggggcaatt

SEQ ID NO: 1814295 - DNA, 15 bp, Homo sapiens
tgagtggggcaattt

SEQ ID NO: 1814296 - DNA, 15 bp, Homo sapiens
gagtggggcaatttt

SEQ ID NO: 1814297 - DNA, 15 bp, Homo sapiens
agtggggcaattttc

SEQ ID NO: 1814298 - DNA, 15 bp, Homo sapiens
gtggggcaattttca

SEQ ID NO: 1814299 - DNA, 15 bp, Homo sapiens
tggggcaattttcaa

SEQ ID NO: 1814300 - DNA, 15 bp, Homo sapiens
ggggcaattttcaac

SEQ ID NO: 1814301 - DNA, 15 bp, Homo sapiens
gggcaattttcaaca

SEQ ID NO: 1814302 - DNA, 15 bp, Homo sapiens
ggcaattttcaacaa

SEQ ID NO: 1814303 - DNA, 15 bp, Homo sapiens
gcaattttcaacaac

SEQ ID NO: 1814304 - DNA, 15 bp, Homo sapiens
caattttcaacaacg

SEQ ID NO: 1814305 - DNA, 15 bp, Homo sapiens
aattttcaacaacgt

SEQ ID NO: 1814306 - DNA, 15 bp, Homo sapiens
attttcaacaacgtg

SEQ ID NO: 1814307 - DNA, 15 bp, Homo sapiens
ttttcaacaacgtgc

SEQ ID NO: 1814308 - DNA, 15 bp, Homo sapiens
tttcaacaacgtgct

SEQ ID NO: 1814309 - DNA, 15 bp, Homo sapiens
ttcaacaacgtgctc

SEQ ID NO: 1814310 - DNA, 15 bp, Homo sapiens
tcaacaacgtgctct

SEQ ID NO: 1814311 - DNA, 15 bp, Homo sapiens
caacaacgtgctctg

SEQ ID NO: 1814312 - DNA, 15 bp, Homo sapiens
aacaacgtgctctgg

SEQ ID NO: 1814313 - DNA, 15 bp, Homo sapiens
acaacgtgctctggg

SEQ ID NO: 1814314 - DNA, 15 bp, Homo sapiens
caacgtgctctgggg

SEQ ID NO: 1814315 - DNA, 15 bp, Homo sapiens
aacgtgctctgggga

SEQ ID NO: 1814316 - DNA, 15 bp, Homo sapiens
acgtgctctggggac

SEQ ID NO: 1814317 - DNA, 15 bp, Homo sapiens
cgtgctctggggaca

SEQ ID NO: 1814318 - DNA, 15 bp, Homo sapiens
gtgctctggggacac

SEQ ID NO: 1814319 - DNA, 15 bp, Homo sapiens
tgctctggggacaca

SEQ ID NO: 1814320 - DNA, 15 bp, Homo sapiens
gctctggggacacag

SEQ ID NO: 1814321 - DNA, 15 bp, Homo sapiens
ctctggggacacagc

SEQ ID NO: 1814322 - DNA, 15 bp, Homo sapiens
tctggggacacagca

SEQ ID NO: 1814323 - DNA, 15 bp, Homo sapiens
ctggggacacagcat

SEQ ID NO: 1814324 - DNA, 15 bp, Homo sapiens
tggggacacagcatg

SEQ ID NO: 1814325 - DNA, 15 bp, Homo sapiens
ggggacacagcatgg

SEQ ID NO: 1814326 - DNA, 15 bp, Homo sapiens
gggacacagcatggc

SEQ ID NO: 1814327 - DNA, 15 bp, Homo sapiens
ggacacagcatggcg

SEQ ID NO: 1814328 - DNA, 15 bp, Homo sapiens
gacacagcatggcgc

SEQ ID NO: 1814329 - DNA, 15 bp, Homo sapiens
acacagcatggcgcc

SEQ ID NO: 1814330 - DNA, 15 bp, Homo sapiens
cacagcatggcgcca

SEQ ID NO: 1814331 - DNA, 15 bp, Homo sapiens
acagcatggcgccac

SEQ ID NO: 1814332 - DNA, 15 bp, Homo sapiens
cagcatggcgccact

SEQ ID NO: 1814333 - DNA, 15 bp, Homo sapiens
agcatggcgccactg

SEQ ID NO: 1814334 - DNA, 15 bp, Homo sapiens
gcatggcgccactgt

SEQ ID NO: 1814335 - DNA, 15 bp, Homo sapiens
catggcgccactgtc

SEQ ID NO: 1814336 - DNA, 15 bp, Homo sapiens
atggcgccactgtct

SEQ ID NO: 1814337 - DNA, 15 bp, Homo sapiens
tggcgccactgtctt

SEQ ID NO: 1814338 - DNA, 15 bp, Homo sapiens
ggcgccactgtcttt

SEQ ID NO: 1814339 - DNA, 15 bp, Homo sapiens
gcgccactgtctttc

SEQ ID NO: 1814340 - DNA, 15 bp, Homo sapiens
cgccactgtctttct

SEQ ID NO: 1814341 - DNA, 15 bp, Homo sapiens
gccactgtctttctg

SEQ ID NO: 1814342 - DNA, 15 bp, Homo sapiens
ccactgtctttctgg

SEQ ID NO: 1814343 - DNA, 15 bp, Homo sapiens
cactgtctttctggt

SEQ ID NO: 1814344 - DNA, 15 bp, Homo sapiens
actgtctttctggtc

SEQ ID NO: 1814345 - DNA, 15 bp, Homo sapiens
ctgtctttctggtct

SEQ ID NO: 1814346 - DNA, 15 bp, Homo sapiens
tgtctttctggtctc

SEQ ID NO: 1814347 - DNA, 15 bp, Homo sapiens
gtctttctggtctcc

SEQ ID NO: 1814348 - DNA, 15 bp, Homo sapiens
tctttctggtctcct

SEQ ID NO: 1814349 - DNA, 15 bp, Homo sapiens
tttctggtctcctgg

SEQ ID NO: 1814350 - DNA, 15 bp, Homo sapiens
ttctggtctcctggg

SEQ ID NO: 1814351 - DNA, 15 bp, Homo sapiens
tctggtctcctgggg

SEQ ID NO: 1814352 - DNA, 15 bp, Homo sapiens
ctggtctcctggggc

SEQ ID NO: 1814353 - DNA, 15 bp, Homo sapiens
tggtctcctggggct

SEQ ID NO: 1814354 - DNA, 15 bp, Homo sapiens
ggtctcctggggctc

SEQ ID NO: 1814355 - DNA, 15 bp, Homo sapiens
gtctcctggggctca

SEQ ID NO: 1814356 - DNA, 15 bp, Homo sapiens
tctcctggggctcag

SEQ ID NO: 1814357 - DNA, 15 bp, Homo sapiens
ctcctggggctcaga

SEQ ID NO: 1814358 - DNA, 15 bp, Homo sapiens
tcctggggctcagac

SEQ ID NO: 1814359 - DNA, 15 bp, Homo sapiens
cctggggctcagact

SEQ ID NO: 1814360 - DNA, 15 bp, Homo sapiens
ctggggctcagacta

SEQ ID NO: 1814361 - DNA, 15 bp, Homo sapiens
tggggctcagactat

SEQ ID NO: 1814362 - DNA, 15 bp, Homo sapiens
ggggctcagactatg

SEQ ID NO: 1814363 - DNA, 15 bp, Homo sapiens
gggctcagactatgt

SEQ ID NO: 1814364 - DNA, 15 bp, Homo sapiens
ggctcagactatgtc

SEQ ID NO: 1814365 - DNA, 15 bp, Homo sapiens
gctcagactatgtca

SEQ ID NO: 1814366 - DNA, 15 bp, Homo sapiens
ctcagactatgtcat

SEQ ID NO: 1814367 - DNA, 15 bp, Homo sapiens
tcagactatgtcata

SEQ ID NO: 1814368 - DNA, 15 bp, Homo sapiens
cagactatgtcatac

SEQ ID NO: 1814369 - DNA, 15 bp, Homo sapiens
agactatgtcataca

SEQ ID NO: 1814370 - DNA, 15 bp, Homo sapiens
gactatgtcatacac

SEQ ID NO: 1814371 - DNA, 15 bp, Homo sapiens
actatgtcatacact

SEQ ID NO: 1814372 - DNA, 15 bp, Homo sapiens
ctatgtcatacactt

SEQ ID NO: 1814373 - DNA, 15 bp, Homo sapiens
tatgtcatacacttc

SEQ ID NO: 1814374 - DNA, 15 bp, Homo sapiens
atgtcatacacttct

SEQ ID NO: 1814375 - DNA, 15 bp, Homo sapiens
tgtcatacacttctt

SEQ ID NO: 1814376 - DNA, 15 bp, Homo sapiens
gtcatacacttcttt

SEQ ID NO: 1814377 - DNA, 15 bp, Homo sapiens
tcatacacttctttc

SEQ ID NO: 1814378 - DNA, 15 bp, Homo sapiens
catacacttctttcc

SEQ ID NO: 1814379 - DNA, 15 bp, Homo sapiens
atacacttctttcca

SEQ ID NO: 1814380 - DNA, 15 bp, Homo sapiens
tacacttctttccag

SEQ ID NO: 1814381 - DNA, 15 bp, Homo sapiens
acacttctttccagg

SEQ ID NO: 1814382 - DNA, 15 bp, Homo sapiens
cacttctttccaggg

SEQ ID NO: 1814383 - DNA, 15 bp, Homo sapiens
acttctttccagggc

SEQ ID NO: 1814384 - DNA, 15 bp, Homo sapiens
cttctttccagggca

SEQ ID NO: 1814385 - DNA, 15 bp, Homo sapiens
ttctttccagggcag

SEQ ID NO: 1814386 - DNA, 15 bp, Homo sapiens
tctttccagggcagt

SEQ ID NO: 1814387 - DNA, 15 bp, Homo sapiens
ctttccagggcagtg

SEQ ID NO: 1814388 - DNA, 15 bp, Homo sapiens
tttccagggcagtgg

SEQ ID NO: 1814389 - DNA, 15 bp, Homo sapiens
ttccagggcagtggg

SEQ ID NO: 1814390 - DNA, 15 bp, Homo sapiens
tccagggcagtgggt

SEQ ID NO: 1814391 - DNA, 15 bp, Homo sapiens
ccagggcagtgggta

SEQ ID NO: 1814392 - DNA, 15 bp, Homo sapiens
cagggcagtgggtaa

SEQ ID NO: 1814393 - DNA, 15 bp, Homo sapiens
agggcagtgggtaac

SEQ ID NO: 1814394 - DNA, 15 bp, Homo sapiens
gggcagtgggtaaca

SEQ ID NO: 1814395 - DNA, 15 bp, Homo sapiens
ggcagtgggtaacaa

SEQ ID NO: 1814396 - DNA, 15 bp, Homo sapiens
gcagtgggtaacaaa

SEQ ID NO: 1814397 - DNA, 15 bp, Homo sapiens
cagtgggtaacaaag

SEQ ID NO: 1814398 - DNA, 15 bp, Homo sapiens
agtgggtaacaaagt

SEQ ID NO: 1814399 - DNA, 15 bp, Homo sapiens
gtgggtaacaaagtt

SEQ ID NO: 1814400 - DNA, 15 bp, Homo sapiens
tgggtaacaaagttt

SEQ ID NO: 1814401 - DNA, 15 bp, Homo sapiens
gggtaacaaagtttg

SEQ ID NO: 1814402 - DNA, 15 bp, Homo sapiens
ggtaacaaagtttga

SEQ ID NO: 1814403 - DNA, 15 bp, Homo sapiens
gtaacaaagtttgac

SEQ ID NO: 1814404 - DNA, 15 bp, Homo sapiens
taacaaagtttgact

SEQ ID NO: 1814405 - DNA, 15 bp, Homo sapiens
aacaaagtttgactc

SEQ ID NO: 1814406 - DNA, 15 bp, Homo sapiens
acaaagtttgactcc

SEQ ID NO: 1814407 - DNA, 15 bp, Homo sapiens
caaagtttgactcca

SEQ ID NO: 1814408 - DNA, 15 bp, Homo sapiens
aaagtttgactccag

SEQ ID NO: 1814409 - DNA, 15 bp, Homo sapiens
aagtttgactccaga

SEQ ID NO: 1814410 - DNA, 15 bp, Homo sapiens
agtttgactccagaa

SEQ ID NO: 1814411 - DNA, 15 bp, Homo sapiens
gtttgactccagaaa

SEQ ID NO: 1814412 - DNA, 15 bp, Homo sapiens
tttgactccagaaag

SEQ ID NO: 1814413 - DNA, 15 bp, Homo sapiens
ttgactccagaaaga

SEQ ID NO: 1814414 - DNA, 15 bp, Homo sapiens
tgactccagaaagac

SEQ ID NO: 1814415 - DNA, 15 bp, Homo sapiens
gactccagaaagact

SEQ ID NO: 1814416 - DNA, 15 bp, Homo sapiens
actccagaaagactt

SEQ ID NO: 1814417 - DNA, 15 bp, Homo sapiens
ctccagaaagacttc

SEQ ID NO: 1814418 - DNA, 15 bp, Homo sapiens
tccagaaagacttcc

SEQ ID NO: 1814419 - DNA, 15 bp, Homo sapiens
ccagaaagacttccc

SEQ ID NO: 1814420 - DNA, 15 bp, Homo sapiens
cagaaagacttccct

SEQ ID NO: 1814421 - DNA, 15 bp, Homo sapiens
agaaagacttccctc

SEQ ID NO: 1814422 - DNA, 15 bp, Homo sapiens
gaaagacttccctcg

SEQ ID NO: 1814423 - DNA, 15 bp, Homo sapiens
aaagacttccctcga

SEQ ID NO: 1814424 - DNA, 15 bp, Homo sapiens
aagacttccctcgag

SEQ ID NO: 1814425 - DNA, 15 bp, Homo sapiens
agacttccctcgagg

SEQ ID NO: 1814426 - DNA, 15 bp, Homo sapiens
gacttccctcgagga

SEQ ID NO: 1814427 - DNA, 15 bp, Homo sapiens
acttccctcgaggat

SEQ ID NO: 1814428 - DNA, 15 bp, Homo sapiens
cttccctcgaggatt

SEQ ID NO: 1814429 - DNA, 15 bp, Homo sapiens
ttccctcgaggattt

SEQ ID NO: 1814430 - DNA, 15 bp, Homo sapiens
tccctcgaggatttc

SEQ ID NO: 1814431 - DNA, 15 bp, Homo sapiens
ccctcgaggatttct

SEQ ID NO: 1814432 - DNA, 15 bp, Homo sapiens
cctcgaggatttcta

SEQ ID NO: 1814433 - DNA, 15 bp, Homo sapiens
ctcgaggatttctac

SEQ ID NO: 1814434 - DNA, 15 bp, Homo sapiens
tcgaggatttctact

SEQ ID NO: 1814435 - DNA, 15 bp, Homo sapiens
cgaggatttctactt

SEQ ID NO: 1814436 - DNA, 15 bp, Homo sapiens
gaggatttctacttg

SEQ ID NO: 1814437 - DNA, 15 bp, Homo sapiens
aggatttctacttgg

SEQ ID NO: 1814438 - DNA, 15 bp, Homo sapiens
ggatttctacttgga

SEQ ID NO: 1814439 - DNA, 15 bp, Homo sapiens
gatttctacttggat

SEQ ID NO: 1814440 - DNA, 15 bp, Homo sapiens
atttctacttggatg

SEQ ID NO: 1814441 - DNA, 15 bp, Homo sapiens
tttctacttggatga

SEQ ID NO: 1814442 - DNA, 15 bp, Homo sapiens
ttctacttggatgaa

SEQ ID NO: 1814443 - DNA, 15 bp, Homo sapiens
tctacttggatgaag

SEQ ID NO: 1814444 - DNA, 15 bp, Homo sapiens
ctacttggatgaaga

SEQ ID NO: 1814445 - DNA, 15 bp, Homo sapiens
tacttggatgaagag

SEQ ID NO: 1814446 - DNA, 15 bp, Homo sapiens
acttggatgaagaga

SEQ ID NO: 1814447 - DNA, 15 bp, Homo sapiens
cttggatgaagagag

SEQ ID NO: 1814448 - DNA, 15 bp, Homo sapiens
ttggatgaagagagg

SEQ ID NO: 1814449 - DNA, 15 bp, Homo sapiens
tggatgaagagagga

SEQ ID NO: 1814450 - DNA, 15 bp, Homo sapiens
ggaccctaaggctgt

SEQ ID NO: 1814451 - DNA, 15 bp, Homo sapiens
gaccctaaggctgtt

SEQ ID NO: 1814452 - DNA, 15 bp, Homo sapiens
accctaaggctgttt

SEQ ID NO: 1814453 - DNA, 15 bp, Homo sapiens
ccctaaggctgtttt

SEQ ID NO: 1814454 - DNA, 15 bp, Homo sapiens
cctaaggctgtttta

SEQ ID NO: 1814455 - DNA, 15 bp, Homo sapiens
ctaaggctgttttac

SEQ ID NO: 1814456 - DNA, 15 bp, Homo sapiens
taaggctgttttacg

SEQ ID NO: 1814457 - DNA, 15 bp, Homo sapiens
aaggctgttttacgc

SEQ ID NO: 1814458 - DNA, 15 bp, Homo sapiens
aggctgttttacgct

SEQ ID NO: 1814459 - DNA, 15 bp, Homo sapiens
ggctgttttacgcta

SEQ ID NO: 1814460 - DNA, 15 bp, Homo sapiens
gctgttttacgctat

SEQ ID NO: 1814461 - DNA, 15 bp, Homo sapiens
ctgttttacgctatg

SEQ ID NO: 1814462 - DNA, 15 bp, Homo sapiens
tgttttacgctatgg

SEQ ID NO: 1814463 - DNA, 15 bp, Homo sapiens
gttttacgctatggc

SEQ ID NO: 1814464 - DNA, 15 bp, Homo sapiens
ttttacgctatggct

SEQ ID NO: 1814465 - DNA, 15 bp, Homo sapiens
tttacgctatggctt

SEQ ID NO: 1814466 - DNA, 15 bp, Homo sapiens
ttacgctatggcttg

SEQ ID NO: 1814467 - DNA, 15 bp, Homo sapiens
tacgctatggcttgg

SEQ ID NO: 1814468 - DNA, 15 bp, Homo sapiens
acgctatggcttgga

SEQ ID NO: 1814469 - DNA, 15 bp, Homo sapiens
cgctatggcttggat

SEQ ID NO: 1814470 - DNA, 15 bp, Homo sapiens
gctatggcttggatt

SEQ ID NO: 1814471 - DNA, 15 bp, Homo sapiens
ctatggcttggattc

SEQ ID NO: 1814472 - DNA, 15 bp, Homo sapiens
tatggcttggattca

SEQ ID NO: 1814473 - DNA, 15 bp, Homo sapiens
atggcttggattcag

SEQ ID NO: 1814474 - DNA, 15 bp, Homo sapiens
tggcttggattcaga

SEQ ID NO: 1814475 - DNA, 15 bp, Homo sapiens
ggcttggattcagat

SEQ ID NO: 1814476 - DNA, 15 bp, Homo sapiens
gcttggattcagatc

SEQ ID NO: 1814477 - DNA, 15 bp, Homo sapiens
cttggattcagatct

SEQ ID NO: 1814478 - DNA, 15 bp, Homo sapiens
ttggattcagatctc

SEQ ID NO: 1814479 - DNA, 15 bp, Homo sapiens
tggattcagatctca

SEQ ID NO: 1814480 - DNA, 15 bp, Homo sapiens
ggattcagatctcag

SEQ ID NO: 1814481 - DNA, 15 bp, Homo sapiens
gattcagatctcagc

SEQ ID NO: 1814482 - DNA, 15 bp, Homo sapiens
attcagatctcagct

SEQ ID NO: 1814483 - DNA, 15 bp, Homo sapiens
ttcagatctcagctg

SEQ ID NO: 1814484 - DNA, 15 bp, Homo sapiens
tcagatctcagctgc

SEQ ID NO: 1814485 - DNA, 15 bp, Homo sapiens
cagatctcagctgca

SEQ ID NO: 1814486 - DNA, 15 bp, Homo sapiens
agatctcagctgcaa

SEQ ID NO: 1814487 - DNA, 15 bp, Homo sapiens
gatctcagctgcaag

SEQ ID NO: 1814488 - DNA, 15 bp, Homo sapiens
atctcagctgcaagg

SEQ ID NO: 1814489 - DNA, 15 bp, Homo sapiens
tctcagctgcaaggt

SEQ ID NO: 1814490 - DNA, 15 bp, Homo sapiens
ctcagctgcaaggtc

SEQ ID NO: 1814491 - DNA, 15 bp, Homo sapiens
tcagctgcaaggtct

SEQ ID NO: 1814492 - DNA, 15 bp, Homo sapiens
cagctgcaaggtctg

SEQ ID NO: 1814493 - DNA, 15 bp, Homo sapiens
agctgcaaggtctgt

SEQ ID NO: 1814494 - DNA, 15 bp, Homo sapiens
gctgcaaggtctgta

SEQ ID NO: 1814495 - DNA, 15 bp, Homo sapiens
ctgcaaggtctgtag

SEQ ID NO: 1814496 - DNA, 15 bp, Homo sapiens
tgcaaggtctgtagg

SEQ ID NO: 1814497 - DNA, 15 bp, Homo sapiens
gcaaggtctgtaggg

SEQ ID NO: 1814498 - DNA, 15 bp, Homo sapiens
caaggtctgtaggga

SEQ ID NO: 1814499 - DNA, 15 bp, Homo sapiens
aaggtctgtagggat

SEQ ID NO: 1814500 - DNA, 15 bp, Homo sapiens
aggtctgtagggata

SEQ ID NO: 1814501 - DNA, 15 bp, Homo sapiens
ggtctgtagggatag

SEQ ID NO: 1814502 - DNA, 15 bp, Homo sapiens
gtctgtagggatagg

SEQ ID NO: 1814503 - DNA, 15 bp, Homo sapiens
tctgtagggataggg

SEQ ID NO: 1814504 - DNA, 15 bp, Homo sapiens
ctgtagggatagggg

SEQ ID NO: 1814505 - DNA, 15 bp, Homo sapiens
tgtagggataggggc

SEQ ID NO: 1814506 - DNA, 15 bp, Homo sapiens
gtagggataggggca

SEQ ID NO: 1814507 - DNA, 15 bp, Homo sapiens
tagggataggggcag

SEQ ID NO: 1814508 - DNA, 15 bp, Homo sapiens
agggataggggcagg

SEQ ID NO: 1814509 - DNA, 15 bp, Homo sapiens
gggataggggcaggg

SEQ ID NO: 1814510 - DNA, 15 bp, Homo sapiens
ggataggggcagggt

SEQ ID NO: 1814511 - DNA, 15 bp, Homo sapiens
gataggggcagggtg

SEQ ID NO: 1814512 - DNA, 15 bp, Homo sapiens
ataggggcagggtgg

SEQ ID NO: 1814513 - DNA, 15 bp, Homo sapiens
taggggcagggtggg

SEQ ID NO: 1814514 - DNA, 15 bp, Homo sapiens
aggggcagggtgggg

SEQ ID NO: 1814515 - DNA, 15 bp, Homo sapiens
ggggcagggtggggg

SEQ ID NO: 1814516 - DNA, 15 bp, Homo sapiens
gggcagggtgggggg

SEQ ID NO: 1814517 - DNA, 15 bp, Homo sapiens
ggcagggtggggggt

SEQ ID NO: 1814518 - DNA, 15 bp, Homo sapiens
gcagggtggggggtg

SEQ ID NO: 1814519 - DNA, 15 bp, Homo sapiens
cagggtggggggtgg

SEQ ID NO: 1814520 - DNA, 15 bp, Homo sapiens
agggtggggggtgga

SEQ ID NO: 1814521 - DNA, 15 bp, Homo sapiens
gggtggggggtggat

SEQ ID NO: 1814522 - DNA, 15 bp, Homo sapiens
ggtggggggtggatg

SEQ ID NO: 1814523 - DNA, 15 bp, Homo sapiens
gtggggggtggatgg

SEQ ID NO: 1814524 - DNA, 15 bp, Homo sapiens
tggggggtggatgga

SEQ ID NO: 1814525 - DNA, 15 bp, Homo sapiens
ggggggtggatggag

SEQ ID NO: 1814526 - DNA, 15 bp, Homo sapiens
gggggtggatggagg

SEQ ID NO: 1814527 - DNA, 15 bp, Homo sapiens
ggggtggatggaggg

SEQ ID NO: 1814528 - DNA, 15 bp, Homo sapiens
gggtggatggaggga

SEQ ID NO: 1814529 - DNA, 15 bp, Homo sapiens
ggtggatggagggag

SEQ ID NO: 1814530 - DNA, 15 bp, Homo sapiens
gtggatggagggaga

SEQ ID NO: 1814531 - DNA, 15 bp, Homo sapiens
tggatggagggagag

SEQ ID NO: 1814532 - DNA, 15 bp, Homo sapiens
ggatggagggagagg

SEQ ID NO: 1814533 - DNA, 15 bp, Homo sapiens
gatggagggagagga

SEQ ID NO: 1814534 - DNA, 15 bp, Homo sapiens
atggagggagaggat

SEQ ID NO: 1814535 - DNA, 15 bp, Homo sapiens
tggagggagaggata

SEQ ID NO: 1814536 - DNA, 15 bp, Homo sapiens
ggagggagaggatag

SEQ ID NO: 1814537 - DNA, 15 bp, Homo sapiens
gagggagaggataga

SEQ ID NO: 1814538 - DNA, 15 bp, Homo sapiens
agggagaggatagag

SEQ ID NO: 1814539 - DNA, 15 bp, Homo sapiens
gggagaggatagaga

SEQ ID NO: 1814540 - DNA, 15 bp, Homo sapiens
ggagaggatagagaa

SEQ ID NO: 1814541 - DNA, 15 bp, Homo sapiens
gagaggatagagaag

SEQ ID NO: 1814542 - DNA, 15 bp, Homo sapiens
agaggatagagaagc

SEQ ID NO: 1814543 - DNA, 15 bp, Homo sapiens
gaggatagagaagca

SEQ ID NO: 1814544 - DNA, 15 bp, Homo sapiens
aggatagagaagcaa

SEQ ID NO: 1814545 - DNA, 15 bp, Homo sapiens
ggatagagaagcaaa

SEQ ID NO: 1814546 - DNA, 15 bp, Homo sapiens
gatagagaagcaaaa

SEQ ID NO: 1814547 - DNA, 15 bp, Homo sapiens
atagagaagcaaaac

SEQ ID NO: 1814548 - DNA, 15 bp, Homo sapiens
tagagaagcaaaaca

SEQ ID NO: 1814549 - DNA, 15 bp, Homo sapiens
agagaagcaaaacag

SEQ ID NO: 1814550 - DNA, 15 bp, Homo sapiens
gagaagcaaaacagg

SEQ ID NO: 1814551 - DNA, 15 bp, Homo sapiens
agaagcaaaacaggg

SEQ ID NO: 1814552 - DNA, 15 bp, Homo sapiens
gaagcaaaacagggt

SEQ ID NO: 1814553 - DNA, 15 bp, Homo sapiens
aagcaaaacagggta

SEQ ID NO: 1814554 - DNA, 15 bp, Homo sapiens
agcaaaacagggtag

SEQ ID NO: 1814555 - DNA, 15 bp, Homo sapiens
gcaaaacagggtagt

SEQ ID NO: 1814556 - DNA, 15 bp, Homo sapiens
caaaacagggtagtg

SEQ ID NO: 1814557 - DNA, 15 bp, Homo sapiens
aaaacagggtagtgg

SEQ ID NO: 1814558 - DNA, 15 bp, Homo sapiens
aaacagggtagtggg

SEQ ID NO: 1814559 - DNA, 15 bp, Homo sapiens
aacagggtagtggga

SEQ ID NO: 1814560 - DNA, 15 bp, Homo sapiens
acagggtagtgggaa

SEQ ID NO: 1814561 - DNA, 15 bp, Homo sapiens
cagggtagtgggaat

SEQ ID NO: 1814562 - DNA, 15 bp, Homo sapiens
agggtagtgggaata

SEQ ID NO: 1814563 - DNA, 15 bp, Homo sapiens
gggtagtgggaataa

SEQ ID NO: 1814564 - DNA, 15 bp, Homo sapiens
ggtagtgggaataaa

SEQ ID NO: 1814565 - DNA, 15 bp, Homo sapiens
gtagtgggaataaaa

SEQ ID NO: 1814566 - DNA, 15 bp, Homo sapiens
tagtgggaataaaat

SEQ ID NO: 1814567 - DNA, 15 bp, Homo sapiens
agtgggaataaaatg

SEQ ID NO: 1814568 - DNA, 15 bp, Homo sapiens
gtgggaataaaatga

SEQ ID NO: 1814569 - DNA, 15 bp, Homo sapiens
tgggaataaaatgac

SEQ ID NO: 1814570 - DNA, 15 bp, Homo sapiens
gggaataaaatgacc

SEQ ID NO: 1814571 - DNA, 15 bp, Homo sapiens
ggaataaaatgacct

SEQ ID NO: 1814572 - DNA, 15 bp, Homo sapiens
gaataaaatgacctt

SEQ ID NO: 1814573 - DNA, 15 bp, Homo sapiens
aataaaatgaccttt

SEQ ID NO: 1814574 - DNA, 15 bp, Homo sapiens
ataaaatgacctttg

SEQ ID NO: 1814575 - DNA, 15 bp, Homo sapiens
taaaatgacctttga

SEQ ID NO: 1814576 - DNA, 15 bp, Homo sapiens
aaaatgacctttgag

SEQ ID NO: 1814577 - DNA, 15 bp, Homo sapiens
aaatgacctttgaga

SEQ ID NO: 1814578 - DNA, 15 bp, Homo sapiens
aatgacctttgagat

SEQ ID NO: 1814579 - DNA, 15 bp, Homo sapiens
atgacctttgagatc

SEQ ID NO: 1814580 - DNA, 15 bp, Homo sapiens
tgacctttgagatcc

SEQ ID NO: 1814581 - DNA, 15 bp, Homo sapiens
gacctttgagatccg

SEQ ID NO: 1814582 - DNA, 15 bp, Homo sapiens
acctttgagatccga

SEQ ID NO: 1814583 - DNA, 15 bp, Homo sapiens
cctttgagatccgac

SEQ ID NO: 1814584 - DNA, 15 bp, Homo sapiens
ctttgagatccgaca

SEQ ID NO: 1814585 - DNA, 15 bp, Homo sapiens
tttgagatccgacag

SEQ ID NO: 1814586 - DNA, 15 bp, Homo sapiens
ttgagatccgacagc

SEQ ID NO: 1814587 - DNA, 15 bp, Homo sapiens
tgagatccgacagct

SEQ ID NO: 1814588 - DNA, 15 bp, Homo sapiens
gagatccgacagctg

SEQ ID NO: 1814589 - DNA, 15 bp, Homo sapiens
agatccgacagctgt

SEQ ID NO: 1814590 - DNA, 15 bp, Homo sapiens
gatccgacagctgtc

SEQ ID NO: 1814591 - DNA, 15 bp, Homo sapiens
atccgacagctgtct

SEQ ID NO: 1814592 - DNA, 15 bp, Homo sapiens
tccgacagctgtcta

SEQ ID NO: 1814593 - DNA, 15 bp, Homo sapiens
ccgacagctgtctac

SEQ ID NO: 1814594 - DNA, 15 bp, Homo sapiens
cgacagctgtctaca

SEQ ID NO: 1814595 - DNA, 15 bp, Homo sapiens
gacagctgtctacat

SEQ ID NO: 1814596 - DNA, 15 bp, Homo sapiens
acagctgtctacatg

SEQ ID NO: 1814597 - DNA, 15 bp, Homo sapiens
cagctgtctacatgt

SEQ ID NO: 1814598 - DNA, 15 bp, Homo sapiens
agctgtctacatgtc

SEQ ID NO: 1814599 - DNA, 15 bp, Homo sapiens
gctgtctacatgtcg

SEQ ID NO: 1814600 - DNA, 15 bp, Homo sapiens
ctgtctacatgtcgc

SEQ ID NO: 1814601 - DNA, 15 bp, Homo sapiens
tgtctacatgtcgcc

SEQ ID NO: 1814602 - DNA, 15 bp, Homo sapiens
gtctacatgtcgcct

SEQ ID NO: 1814603 - DNA, 15 bp, Homo sapiens
tctacatgtcgcctg

SEQ ID NO: 1814604 - DNA, 15 bp, Homo sapiens
ctacatgtcgcctgc

SEQ ID NO: 1814605 - DNA, 15 bp, Homo sapiens
tacatgtcgcctgct

SEQ ID NO: 1814606 - DNA, 15 bp, Homo sapiens
acatgtcgcctgctg

SEQ ID NO: 1814607 - DNA, 15 bp, Homo sapiens
catgtcgcctgctgt

SEQ ID NO: 1814608 - DNA, 15 bp, Homo sapiens
atgtcgcctgctgtg

SEQ ID NO: 1814609 - DNA, 15 bp, Homo sapiens
tgtcgcctgctgtgt

SEQ ID NO: 1814610 - DNA, 15 bp, Homo sapiens
gtcgcctgctgtgtg

SEQ ID NO: 1814611 - DNA, 15 bp, Homo sapiens
tcgcctgctgtgtga

SEQ ID NO: 1814612 - DNA, 15 bp, Homo sapiens
cgcctgctgtgtgac

SEQ ID NO: 1814613 - DNA, 15 bp, Homo sapiens
gcctgctgtgtgact

SEQ ID NO: 1814614 - DNA, 15 bp, Homo sapiens
cctgctgtgtgactt

SEQ ID NO: 1814615 - DNA, 15 bp, Homo sapiens
ctgctgtgtgacttt

SEQ ID NO: 1814616 - DNA, 15 bp, Homo sapiens
tgctgtgtgactttg

SEQ ID NO: 1814617 - DNA, 15 bp, Homo sapiens
gctgtgtgactttga

SEQ ID NO: 1814618 - DNA, 15 bp, Homo sapiens
ctgtgtgactttgag

SEQ ID NO: 1814619 - DNA, 15 bp, Homo sapiens
tgtgtgactttgagc

SEQ ID NO: 1814620 - DNA, 15 bp, Homo sapiens
gtgtgactttgagca

SEQ ID NO: 1814621 - DNA, 15 bp, Homo sapiens
tgtgactttgagcag

SEQ ID NO: 1814622 - DNA, 15 bp, Homo sapiens
gtgactttgagcagg

SEQ ID NO: 1814623 - DNA, 15 bp, Homo sapiens
tgactttgagcaggt

SEQ ID NO: 1814624 - DNA, 15 bp, Homo sapiens
gactttgagcaggtt

SEQ ID NO: 1814625 - DNA, 15 bp, Homo sapiens
actttgagcaggtta

SEQ ID NO: 1814626 - DNA, 15 bp, Homo sapiens
ctttgagcaggttaa

SEQ ID NO: 1814627 - DNA, 15 bp, Homo sapiens
tttgagcaggttaat

SEQ ID NO: 1814628 - DNA, 15 bp, Homo sapiens
ttgagcaggttaata

SEQ ID NO: 1814629 - DNA, 15 bp, Homo sapiens
tgagcaggttaataa

SEQ ID NO: 1814630 - DNA, 15 bp, Homo sapiens
gagcaggttaataac

SEQ ID NO: 1814631 - DNA, 15 bp, Homo sapiens
agcaggttaataaca

SEQ ID NO: 1814632 - DNA, 15 bp, Homo sapiens
gcaggttaataacat

SEQ ID NO: 1814633 - DNA, 15 bp, Homo sapiens
caggttaataacatg

SEQ ID NO: 1814634 - DNA, 15 bp, Homo sapiens
aggttaataacatgt

SEQ ID NO: 1814635 - DNA, 15 bp, Homo sapiens
ggttaataacatgtc

SEQ ID NO: 1814636 - DNA, 15 bp, Homo sapiens
gttaataacatgtct

SEQ ID NO: 1814637 - DNA, 15 bp, Homo sapiens
ttaataacatgtctg

SEQ ID NO: 1814638 - DNA, 15 bp, Homo sapiens
taataacatgtctga

SEQ ID NO: 1814639 - DNA, 15 bp, Homo sapiens
aataacatgtctgag

SEQ ID NO: 1814640 - DNA, 15 bp, Homo sapiens
ataacatgtctgagc

SEQ ID NO: 1814641 - DNA, 15 bp, Homo sapiens
taacatgtctgagct

SEQ ID NO: 1814642 - DNA, 15 bp, Homo sapiens
aacatgtctgagctt

SEQ ID NO: 1814643 - DNA, 15 bp, Homo sapiens
acatgtctgagcttt

SEQ ID NO: 1814644 - DNA, 15 bp, Homo sapiens
catgtctgagctttc

SEQ ID NO: 1814645 - DNA, 15 bp, Homo sapiens
atgtctgagctttcc

SEQ ID NO: 1814646 - DNA, 15 bp, Homo sapiens
tgtctgagctttcct

SEQ ID NO: 1814647 - DNA, 15 bp, Homo sapiens
gtctgagctttcctc

SEQ ID NO: 1814648 - DNA, 15 bp, Homo sapiens
tctgagctttcctcc

SEQ ID NO: 1814649 - DNA, 15 bp, Homo sapiens
ctgagctttcctcct

SEQ ID NO: 1814650 - DNA, 15 bp, Homo sapiens
tgagctttcctcctc

SEQ ID NO: 1814651 - DNA, 15 bp, Homo sapiens
gagctttcctcctct

SEQ ID NO: 1814652 - DNA, 15 bp, Homo sapiens
agctttcctcctctt

SEQ ID NO: 1814653 - DNA, 15 bp, Homo sapiens
gctttcctcctctta

SEQ ID NO: 1814654 - DNA, 15 bp, Homo sapiens
ctttcctcctcttaa

SEQ ID NO: 1814655 - DNA, 15 bp, Homo sapiens
tttcctcctcttaag

SEQ ID NO: 1814656 - DNA, 15 bp, Homo sapiens
ttcctcctcttaaga

SEQ ID NO: 1814657 - DNA, 15 bp, Homo sapiens
tcctcctcttaagat

SEQ ID NO: 1814658 - DNA, 15 bp, Homo sapiens
cctcctcttaagatg

SEQ ID NO: 1814659 - DNA, 15 bp, Homo sapiens
ctcctcttaagatgg

SEQ ID NO: 1814660 - DNA, 15 bp, Homo sapiens
tcctcttaagatggg

SEQ ID NO: 1814661 - DNA, 15 bp, Homo sapiens
cctcttaagatgggg

SEQ ID NO: 1814662 - DNA, 15 bp, Homo sapiens
ctcttaagatggggc

SEQ ID NO: 1814663 - DNA, 15 bp, Homo sapiens
tcttaagatggggca

SEQ ID NO: 1814664 - DNA, 15 bp, Homo sapiens
cttaagatggggcag

SEQ ID NO: 1814665 - DNA, 15 bp, Homo sapiens
ttaagatggggcagg

SEQ ID NO: 1814666 - DNA, 15 bp, Homo sapiens
taagatggggcaggg

SEQ ID NO: 1814667 - DNA, 15 bp, Homo sapiens
aagatggggcagggg

SEQ ID NO: 1814668 - DNA, 15 bp, Homo sapiens
agatggggcagggga

SEQ ID NO: 1814669 - DNA, 15 bp, Homo sapiens
gatggggcaggggat

SEQ ID NO: 1814670 - DNA, 15 bp, Homo sapiens
atggggcaggggatc

SEQ ID NO: 1814671 - DNA, 15 bp, Homo sapiens
tggggcaggggatcg

SEQ ID NO: 1814672 - DNA, 15 bp, Homo sapiens
ggggcaggggatcgt

SEQ ID NO: 1814673 - DNA, 15 bp, Homo sapiens
gggcaggggatcgtt

SEQ ID NO: 1814674 - DNA, 15 bp, Homo sapiens
ggcaggggatcgtta

SEQ ID NO: 1814675 - DNA, 15 bp, Homo sapiens
gcaggggatcgttac

SEQ ID NO: 1814676 - DNA, 15 bp, Homo sapiens
caggggatcgttacc

SEQ ID NO: 1814677 - DNA, 15 bp, Homo sapiens
aggggatcgttacca

SEQ ID NO: 1814678 - DNA, 15 bp, Homo sapiens
ggggatcgttaccaa

SEQ ID NO: 1814679 - DNA, 15 bp, Homo sapiens
gggatcgttaccaac

SEQ ID NO: 1814680 - DNA, 15 bp, Homo sapiens
ggatcgttaccaaca

SEQ ID NO: 1814681 - DNA, 15 bp, Homo sapiens
gatcgttaccaacac

SEQ ID NO: 1814682 - DNA, 15 bp, Homo sapiens
atcgttaccaacact

SEQ ID NO: 1814683 - DNA, 15 bp, Homo sapiens
tcgttaccaacactt

SEQ ID NO: 1814684 - DNA, 15 bp, Homo sapiens
cgttaccaacactta

SEQ ID NO: 1814685 - DNA, 15 bp, Homo sapiens
gttaccaacacttac

SEQ ID NO: 1814686 - DNA, 15 bp, Homo sapiens
ttaccaacacttacc

SEQ ID NO: 1814687 - DNA, 15 bp, Homo sapiens
taccaacacttaccc

SEQ ID NO: 1814688 - DNA, 15 bp, Homo sapiens
accaacacttaccct

SEQ ID NO: 1814689 - DNA, 15 bp, Homo sapiens
ccaacacttaccctc

SEQ ID NO: 1814690 - DNA, 15 bp, Homo sapiens
caacacttaccctcc

SEQ ID NO: 1814691 - DNA, 15 bp, Homo sapiens
aacacttaccctccc

SEQ ID NO: 1814692 - DNA, 15 bp, Homo sapiens
acacttaccctccca

SEQ ID NO: 1814693 - DNA, 15 bp, Homo sapiens
cacttaccctcccag

SEQ ID NO: 1814694 - DNA, 15 bp, Homo sapiens
acttaccctcccagg

SEQ ID NO: 1814695 - DNA, 15 bp, Homo sapiens
cttaccctcccaggg

SEQ ID NO: 1814696 - DNA, 15 bp, Homo sapiens
ttaccctcccagggt

SEQ ID NO: 1814697 - DNA, 15 bp, Homo sapiens
taccctcccagggtt

SEQ ID NO: 1814698 - DNA, 15 bp, Homo sapiens
accctcccagggttt

SEQ ID NO: 1814699 - DNA, 15 bp, Homo sapiens
ccctcccagggtttg

SEQ ID NO: 1814700 - DNA, 15 bp, Homo sapiens
cctcccagggtttgt

SEQ ID NO: 1814701 - DNA, 15 bp, Homo sapiens
ctcccagggtttgtt

SEQ ID NO: 1814702 - DNA, 15 bp, Homo sapiens
tcccagggtttgttg

SEQ ID NO: 1814703 - DNA, 15 bp, Homo sapiens
cccagggtttgttgt

SEQ ID NO: 1814704 - DNA, 15 bp, Homo sapiens
ccagggtttgttgta

SEQ ID NO: 1814705 - DNA, 15 bp, Homo sapiens
cagggtttgttgtaa

SEQ ID NO: 1814706 - DNA, 15 bp, Homo sapiens
agggtttgttgtaag

SEQ ID NO: 1814707 - DNA, 15 bp, Homo sapiens
gggtttgttgtaagg

SEQ ID NO: 1814708 - DNA, 15 bp, Homo sapiens
ggtttgttgtaagga

SEQ ID NO: 1814709 - DNA, 15 bp, Homo sapiens
gtttgttgtaaggac

SEQ ID NO: 1814710 - DNA, 15 bp, Homo sapiens
tttgttgtaaggacg

SEQ ID NO: 1814711 - DNA, 15 bp, Homo sapiens
ttgttgtaaggacga

SEQ ID NO: 1814712 - DNA, 15 bp, Homo sapiens
tgttgtaaggacgaa

SEQ ID NO: 1814713 - DNA, 15 bp, Homo sapiens
gttgtaaggacgaat

SEQ ID NO: 1814714 - DNA, 15 bp, Homo sapiens
ttgtaaggacgaata

SEQ ID NO: 1814715 - DNA, 15 bp, Homo sapiens
tgtaaggacgaataa

SEQ ID NO: 1814716 - DNA, 15 bp, Homo sapiens
gtaaggacgaataag

SEQ ID NO: 1814717 - DNA, 15 bp, Homo sapiens
taaggacgaataagg

SEQ ID NO: 1814718 - DNA, 15 bp, Homo sapiens
aaggacgaataaggt

SEQ ID NO: 1814719 - DNA, 15 bp, Homo sapiens
aggacgaataaggta

SEQ ID NO: 1814720 - DNA, 15 bp, Homo sapiens
ggacgaataaggtaa

SEQ ID NO: 1814721 - DNA, 15 bp, Homo sapiens
gacgaataaggtaat

SEQ ID NO: 1814722 - DNA, 15 bp, Homo sapiens
acgaataaggtaata

SEQ ID NO: 1814723 - DNA, 15 bp, Homo sapiens
cgaataaggtaatag

SEQ ID NO: 1814724 - DNA, 15 bp, Homo sapiens
gaataaggtaatagg

SEQ ID NO: 1814725 - DNA, 15 bp, Homo sapiens
aataaggtaatagga

SEQ ID NO: 1814726 - DNA, 15 bp, Homo sapiens
ataaggtaataggaa

SEQ ID NO: 1814727 - DNA, 15 bp, Homo sapiens
taaggtaataggaaa

SEQ ID NO: 1814728 - DNA, 15 bp, Homo sapiens
aaggtaataggaaat

SEQ ID NO: 1814729 - DNA, 15 bp, Homo sapiens
aggtaataggaaatg

SEQ ID NO: 1814730 - DNA, 15 bp, Homo sapiens
ggtaataggaaatgg

SEQ ID NO: 1814731 - DNA, 15 bp, Homo sapiens
gtaataggaaatggg

SEQ ID NO: 1814732 - DNA, 15 bp, Homo sapiens
taataggaaatgggc

SEQ ID NO: 1814733 - DNA, 15 bp, Homo sapiens
aataggaaatgggcc

SEQ ID NO: 1814734 - DNA, 15 bp, Homo sapiens
ataggaaatgggccc

SEQ ID NO: 1814735 - DNA, 15 bp, Homo sapiens
taggaaatgggccct

SEQ ID NO: 1814736 - DNA, 15 bp, Homo sapiens
aggaaatgggccctc

SEQ ID NO: 1814737 - DNA, 15 bp, Homo sapiens
ggaaatgggccctca

SEQ ID NO: 1814738 - DNA, 15 bp, Homo sapiens
gaaatgggccctcag

SEQ ID NO: 1814739 - DNA, 15 bp, Homo sapiens
aaatgggccctcaga

SEQ ID NO: 1814740 - DNA, 15 bp, Homo sapiens
aatgggccctcagac

SEQ ID NO: 1814741 - DNA, 15 bp, Homo sapiens
atgggccctcagact

SEQ ID NO: 1814742 - DNA, 15 bp, Homo sapiens
tgggccctcagactg

SEQ ID NO: 1814743 - DNA, 15 bp, Homo sapiens
gggccctcagactgg

SEQ ID NO: 1814744 - DNA, 15 bp, Homo sapiens
ggccctcagactggg

SEQ ID NO: 1814745 - DNA, 15 bp, Homo sapiens
gccctcagactgggc

SEQ ID NO: 1814746 - DNA, 15 bp, Homo sapiens
ccctcagactgggca

SEQ ID NO: 1814747 - DNA, 15 bp, Homo sapiens
cctcagactgggcac

SEQ ID NO: 1814748 - DNA, 15 bp, Homo sapiens
ctcagactgggcacc

SEQ ID NO: 1814749 - DNA, 15 bp, Homo sapiens
tcagactgggcaccc

SEQ ID NO: 1814750 - DNA, 15 bp, Homo sapiens
cagactgggcaccca

SEQ ID NO: 1814751 - DNA, 15 bp, Homo sapiens
agactgggcacccac

SEQ ID NO: 1814752 - DNA, 15 bp, Homo sapiens
gactgggcacccaca

SEQ ID NO: 1814753 - DNA, 15 bp, Homo sapiens
actgggcacccacat

SEQ ID NO: 1814754 - DNA, 15 bp, Homo sapiens
ctgggcacccacatg

SEQ ID NO: 1814755 - DNA, 15 bp, Homo sapiens
tgggcacccacatgt

SEQ ID NO: 1814756 - DNA, 15 bp, Homo sapiens
gggcacccacatgtt

SEQ ID NO: 1814757 - DNA, 15 bp, Homo sapiens
ggcacccacatgttt

SEQ ID NO: 1814758 - DNA, 15 bp, Homo sapiens
gcacccacatgtttg

SEQ ID NO: 1814759 - DNA, 15 bp, Homo sapiens
cacccacatgtttgt

SEQ ID NO: 1814760 - DNA, 15 bp, Homo sapiens
acccacatgtttgtt

SEQ ID NO: 1814761 - DNA, 15 bp, Homo sapiens
cccacatgtttgttc

SEQ ID NO: 1814762 - DNA, 15 bp, Homo sapiens
ccacatgtttgttct

SEQ ID NO: 1814763 - DNA, 15 bp, Homo sapiens
cacatgtttgttctc

SEQ ID NO: 1814764 - DNA, 15 bp, Homo sapiens
acatgtttgttctct

SEQ ID NO: 1814765 - DNA, 15 bp, Homo sapiens
catgtttgttctctt

SEQ ID NO: 1814766 - DNA, 15 bp, Homo sapiens
atgtttgttctcttg

SEQ ID NO: 1814767 - DNA, 15 bp, Homo sapiens
tgtttgttctcttga

SEQ ID NO: 1814768 - DNA, 15 bp, Homo sapiens
gtttgttctcttgag

SEQ ID NO: 1814769 - DNA, 15 bp, Homo sapiens
tttgttctcttgaga

SEQ ID NO: 1814770 - DNA, 15 bp, Homo sapiens
ttgttctcttgagac

SEQ ID NO: 1814771 - DNA, 15 bp, Homo sapiens
tgttctcttgagact

SEQ ID NO: 1814772 - DNA, 15 bp, Homo sapiens
gttctcttgagactc

SEQ ID NO: 1814773 - DNA, 15 bp, Homo sapiens
ttctcttgagactcc

SEQ ID NO: 1814774 - DNA, 15 bp, Homo sapiens
tctcttgagactcct

SEQ ID NO: 1814775 - DNA, 15 bp, Homo sapiens
ctcttgagactccta

SEQ ID NO: 1814776 - DNA, 15 bp, Homo sapiens
tcttgagactcctat

SEQ ID NO: 1814777 - DNA, 15 bp, Homo sapiens
cttgagactcctatt

SEQ ID NO: 1814778 - DNA, 15 bp, Homo sapiens
ttgagactcctattt

SEQ ID NO: 1814779 - DNA, 15 bp, Homo sapiens
tgagactcctatttc

SEQ ID NO: 1814780 - DNA, 15 bp, Homo sapiens
gagactcctatttct

SEQ ID NO: 1814781 - DNA, 15 bp, Homo sapiens
agactcctatttcta

SEQ ID NO: 1814782 - DNA, 15 bp, Homo sapiens
gactcctatttctag

SEQ ID NO: 1814783 - DNA, 15 bp, Homo sapiens
actcctatttctaga

SEQ ID NO: 1814784 - DNA, 15 bp, Homo sapiens
ctcctatttctagaa

SEQ ID NO: 1814785 - DNA, 15 bp, Homo sapiens
tcctatttctagaat

SEQ ID NO: 1814786 - DNA, 15 bp, Homo sapiens
cctatttctagaatt

SEQ ID NO: 1814787 - DNA, 15 bp, Homo sapiens
ctatttctagaattt

SEQ ID NO: 1814788 - DNA, 15 bp, Homo sapiens
tatttctagaattta

SEQ ID NO: 1814789 - DNA, 15 bp, Homo sapiens
atttctagaatttaa

SEQ ID NO: 1814790 - DNA, 15 bp, Homo sapiens
tttctagaatttaaa

SEQ ID NO: 1814791 - DNA, 15 bp, Homo sapiens
ttctagaatttaaag

SEQ ID NO: 1814792 - DNA, 15 bp, Homo sapiens
tctagaatttaaagc

SEQ ID NO: 1814793 - DNA, 15 bp, Homo sapiens
ctagaatttaaagcc

SEQ ID NO: 1814794 - DNA, 15 bp, Homo sapiens
tagaatttaaagcca

SEQ ID NO: 1814795 - DNA, 15 bp, Homo sapiens
agaatttaaagccaa

SEQ ID NO: 1814796 - DNA, 15 bp, Homo sapiens
gaatttaaagccaaa

SEQ ID NO: 1814797 - DNA, 15 bp, Homo sapiens
aatttaaagccaaac

SEQ ID NO: 1814798 - DNA, 15 bp, Homo sapiens
atttaaagccaaact

SEQ ID NO: 1814799 - DNA, 15 bp, Homo sapiens
tttaaagccaaactt

SEQ ID NO: 1814800 - DNA, 15 bp, Homo sapiens
ttaaagccaaacttt

SEQ ID NO: 1814801 - DNA, 15 bp, Homo sapiens
taaagccaaactttg

SEQ ID NO: 1814802 - DNA, 15 bp, Homo sapiens
aaagccaaactttga

SEQ ID NO: 1814803 - DNA, 15 bp, Homo sapiens
aagccaaactttgaa

SEQ ID NO: 1814804 - DNA, 15 bp, Homo sapiens
agccaaactttgaaa

SEQ ID NO: 1814805 - DNA, 15 bp, Homo sapiens
gccaaactttgaaaa

SEQ ID NO: 1814806 - DNA, 15 bp, Homo sapiens
ccaaactttgaaaaa

SEQ ID NO: 1814807 - DNA, 15 bp, Homo sapiens
caaactttgaaaaat

SEQ ID NO: 1814808 - DNA, 15 bp, Homo sapiens
aaactttgaaaaata

SEQ ID NO: 1814809 - DNA, 15 bp, Homo sapiens
aactttgaaaaataa

SEQ ID NO: 1814810 - DNA, 15 bp, Homo sapiens
actttgaaaaataat

SEQ ID NO: 1814811 - DNA, 15 bp, Homo sapiens
ctttgaaaaataatg

SEQ ID NO: 1814812 - DNA, 15 bp, Homo sapiens
tttgaaaaataatga

SEQ ID NO: 1814813 - DNA, 15 bp, Homo sapiens
ttgaaaaataatgac

SEQ ID NO: 1814814 - DNA, 15 bp, Homo sapiens
tgaaaaataatgaca

SEQ ID NO: 1814815 - DNA, 15 bp, Homo sapiens
gaaaaataatgacaa

SEQ ID NO: 1814816 - DNA, 15 bp, Homo sapiens
aaaaataatgacaaa

SEQ ID NO: 1814817 - DNA, 15 bp, Homo sapiens
aaaataatgacaaac

SEQ ID NO: 1814818 - DNA, 15 bp, Homo sapiens
aaataatgacaaact

SEQ ID NO: 1814819 - DNA, 15 bp, Homo sapiens
aataatgacaaactc

SEQ ID NO: 1814820 - DNA, 15 bp, Homo sapiens
ataatgacaaactcc

SEQ ID NO: 1814821 - DNA, 15 bp, Homo sapiens
taatgacaaactcca

SEQ ID NO: 1814822 - DNA, 15 bp, Homo sapiens
aatgacaaactccaa

SEQ ID NO: 1814823 - DNA, 15 bp, Homo sapiens
atgacaaactccaaa

SEQ ID NO: 1814824 - DNA, 15 bp, Homo sapiens
tgacaaactccaaat

SEQ ID NO: 1814825 - DNA, 15 bp, Homo sapiens
gacaaactccaaatc

SEQ ID NO: 1814826 - DNA, 15 bp, Homo sapiens
acaaactccaaatcg

SEQ ID NO: 1814827 - DNA, 15 bp, Homo sapiens
caaactccaaatcgt

SEQ ID NO: 1814828 - DNA, 15 bp, Homo sapiens
aaactccaaatcgtt

SEQ ID NO: 1814829 - DNA, 15 bp, Homo sapiens
aactccaaatcgttg

SEQ ID NO: 1814830 - DNA, 15 bp, Homo sapiens
actccaaatcgttgg

SEQ ID NO: 1814831 - DNA, 15 bp, Homo sapiens
ctccaaatcgttggc

SEQ ID NO: 1814832 - DNA, 15 bp, Homo sapiens
tccaaatcgttggca

SEQ ID NO: 1814833 - DNA, 15 bp, Homo sapiens
ccaaatcgttggcat

SEQ ID NO: 1814834 - DNA, 15 bp, Homo sapiens
caaatcgttggcatc

SEQ ID NO: 1814835 - DNA, 15 bp, Homo sapiens
aaatcgttggcatct

SEQ ID NO: 1814836 - DNA, 15 bp, Homo sapiens
aatcgttggcatctt

SEQ ID NO: 1814837 - DNA, 15 bp, Homo sapiens
atcgttggcatcttt

SEQ ID NO: 1814838 - DNA, 15 bp, Homo sapiens
tcgttggcatctttt

SEQ ID NO: 1814839 - DNA, 15 bp, Homo sapiens
cgttggcatcttttt

SEQ ID NO: 1814840 - DNA, 15 bp, Homo sapiens
gttggcatctttttt

SEQ ID NO: 1814841 - DNA, 15 bp, Homo sapiens
ttggcatcttttttt

SEQ ID NO: 1814842 - DNA, 15 bp, Homo sapiens
tggcatctttttttt

SEQ ID NO: 1814843 - DNA, 15 bp, Homo sapiens
ggcatcttttttttt

SEQ ID NO: 1814844 - DNA, 15 bp, Homo sapiens
gcatctttttttttt

SEQ ID NO: 1814845 - DNA, 15 bp, Homo sapiens
tttgagacagtctcg

SEQ ID NO: 1814846 - DNA, 15 bp, Homo sapiens
ttgagacagtctcgc

SEQ ID NO: 1814847 - DNA, 15 bp, Homo sapiens
tgagacagtctcgct

SEQ ID NO: 1814848 - DNA, 15 bp, Homo sapiens
gagacagtctcgctc

SEQ ID NO: 1814849 - DNA, 15 bp, Homo sapiens
gtctcgctctgtcgg

SEQ ID NO: 1814850 - DNA, 15 bp, Homo sapiens
tctcgctctgtcggc

SEQ ID NO: 1814851 - DNA, 15 bp, Homo sapiens
ctcgctctgtcggcc

SEQ ID NO: 1814852 - DNA, 15 bp, Homo sapiens
tcgctctgtcggcca

SEQ ID NO: 1814853 - DNA, 15 bp, Homo sapiens
cgctctgtcggccag

SEQ ID NO: 1814854 - DNA, 15 bp, Homo sapiens
gctctgtcggccagg

SEQ ID NO: 1814855 - DNA, 15 bp, Homo sapiens
ctctgtcggccaggc

SEQ ID NO: 1814856 - DNA, 15 bp, Homo sapiens
tctgtcggccaggct

SEQ ID NO: 1814857 - DNA, 15 bp, Homo sapiens
ctgtcggccaggctg

SEQ ID NO: 1814858 - DNA, 15 bp, Homo sapiens
gtcggccaggctgga

SEQ ID NO: 1814859 - DNA, 15 bp, Homo sapiens
tcggccaggctggag

SEQ ID NO: 1814860 - DNA, 15 bp, Homo sapiens
cggccaggctggagt

SEQ ID NO: 1814861 - DNA, 15 bp, Homo sapiens
ggccaggctggagtg

SEQ ID NO: 1814862 - DNA, 15 bp, Homo sapiens
cgatctcggctcacc

SEQ ID NO: 1814863 - DNA, 15 bp, Homo sapiens
tcaccacaacctccg

SEQ ID NO: 1814864 - DNA, 15 bp, Homo sapiens
caccacaacctccgc

SEQ ID NO: 1814865 - DNA, 15 bp, Homo sapiens
accacaacctccgcc

SEQ ID NO: 1814866 - DNA, 15 bp, Homo sapiens
ccacaacctccgccc

SEQ ID NO: 1814867 - DNA, 15 bp, Homo sapiens
cacaacctccgcccc

SEQ ID NO: 1814868 - DNA, 15 bp, Homo sapiens
acaacctccgccccg

SEQ ID NO: 1814869 - DNA, 15 bp, Homo sapiens
caacctccgccccgc

SEQ ID NO: 1814870 - DNA, 15 bp, Homo sapiens
aacctccgccccgct

SEQ ID NO: 1814871 - DNA, 15 bp, Homo sapiens
acctccgccccgctg

SEQ ID NO: 1814872 - DNA, 15 bp, Homo sapiens
cctccgccccgctgg

SEQ ID NO: 1814873 - DNA, 15 bp, Homo sapiens
ctccgccccgctggg

SEQ ID NO: 1814874 - DNA, 15 bp, Homo sapiens
tccgccccgctgggt

SEQ ID NO: 1814875 - DNA, 15 bp, Homo sapiens
ccgccccgctgggtt

SEQ ID NO: 1814876 - DNA, 15 bp, Homo sapiens
cgccccgctgggtta

SEQ ID NO: 1814877 - DNA, 15 bp, Homo sapiens
gccccgctgggttaa

SEQ ID NO: 1814878 - DNA, 15 bp, Homo sapiens
ccccgctgggttaaa

SEQ ID NO: 1814879 - DNA, 15 bp, Homo sapiens
cccgctgggttaaag

SEQ ID NO: 1814880 - DNA, 15 bp, Homo sapiens
ccgctgggttaaagc

SEQ ID NO: 1814881 - DNA, 15 bp, Homo sapiens
cgctgggttaaagcg

SEQ ID NO: 1814882 - DNA, 15 bp, Homo sapiens
gctgggttaaagcga

SEQ ID NO: 1814883 - DNA, 15 bp, Homo sapiens
ctgggttaaagcgat

SEQ ID NO: 1814884 - DNA, 15 bp, Homo sapiens
tgggttaaagcgatt

SEQ ID NO: 1814885 - DNA, 15 bp, Homo sapiens
gggttaaagcgattc

SEQ ID NO: 1814886 - DNA, 15 bp, Homo sapiens
ggttaaagcgattct

SEQ ID NO: 1814887 - DNA, 15 bp, Homo sapiens
gttaaagcgattctc

SEQ ID NO: 1814888 - DNA, 15 bp, Homo sapiens
ttaaagcgattctct

SEQ ID NO: 1814889 - DNA, 15 bp, Homo sapiens
taaagcgattctctt

SEQ ID NO: 1814890 - DNA, 15 bp, Homo sapiens
aaagcgattctcttg

SEQ ID NO: 1814891 - DNA, 15 bp, Homo sapiens
agcgattctcttgcc

SEQ ID NO: 1814892 - DNA, 15 bp, Homo sapiens
gcgattctcttgcct

SEQ ID NO: 1814893 - DNA, 15 bp, Homo sapiens
cgattctcttgcctc

SEQ ID NO: 1814894 - DNA, 15 bp, Homo sapiens
gattctcttgcctca

SEQ ID NO: 1814895 - DNA, 15 bp, Homo sapiens
ggcgtgtgccaccat

SEQ ID NO: 1814896 - DNA, 15 bp, Homo sapiens
gcgtgtgccaccatg

SEQ ID NO: 1814897 - DNA, 15 bp, Homo sapiens
cgtgtgccaccatgc

SEQ ID NO: 1814898 - DNA, 15 bp, Homo sapiens
gcctggctaatttta

SEQ ID NO: 1814899 - DNA, 15 bp, Homo sapiens
cctggctaattttat

SEQ ID NO: 1814900 - DNA, 15 bp, Homo sapiens
ctggctaattttata

SEQ ID NO: 1814901 - DNA, 15 bp, Homo sapiens
tggctaattttatac

SEQ ID NO: 1814902 - DNA, 15 bp, Homo sapiens
ggctaattttataca

SEQ ID NO: 1814903 - DNA, 15 bp, Homo sapiens
gctaattttatacag

SEQ ID NO: 1814904 - DNA, 15 bp, Homo sapiens
ctaattttatacaga

SEQ ID NO: 1814905 - DNA, 15 bp, Homo sapiens
taattttatacagac

SEQ ID NO: 1814906 - DNA, 15 bp, Homo sapiens
aattttatacagacg

SEQ ID NO: 1814907 - DNA, 15 bp, Homo sapiens
attttatacagacgg

SEQ ID NO: 1814908 - DNA, 15 bp, Homo sapiens
ttttatacagacggg

SEQ ID NO: 1814909 - DNA, 15 bp, Homo sapiens
tttatacagacgggg

SEQ ID NO: 1814910 - DNA, 15 bp, Homo sapiens
ttatacagacggggt

SEQ ID NO: 1814911 - DNA, 15 bp, Homo sapiens
tatacagacggggtt

SEQ ID NO: 1814912 - DNA, 15 bp, Homo sapiens
atacagacggggttt

SEQ ID NO: 1814913 - DNA, 15 bp, Homo sapiens
ggtctcaaactccca

SEQ ID NO: 1814914 - DNA, 15 bp, Homo sapiens
gtctcaaactcccaa

SEQ ID NO: 1814915 - DNA, 15 bp, Homo sapiens
tctcaaactcccaaa

SEQ ID NO: 1814916 - DNA, 15 bp, Homo sapiens
ctcaaactcccaaac

SEQ ID NO: 1814917 - DNA, 15 bp, Homo sapiens
tcaaactcccaaact

SEQ ID NO: 1814918 - DNA, 15 bp, Homo sapiens
caaactcccaaactc

SEQ ID NO: 1814919 - DNA, 15 bp, Homo sapiens
aaactcccaaactca

SEQ ID NO: 1814920 - DNA, 15 bp, Homo sapiens
aactcccaaactcag

SEQ ID NO: 1814921 - DNA, 15 bp, Homo sapiens
actcccaaactcagg

SEQ ID NO: 1814922 - DNA, 15 bp, Homo sapiens
ctcccaaactcaggt

SEQ ID NO: 1814923 - DNA, 15 bp, Homo sapiens
tcccaaactcaggtg

SEQ ID NO: 1814924 - DNA, 15 bp, Homo sapiens
cccaaactcaggtga

SEQ ID NO: 1814925 - DNA, 15 bp, Homo sapiens
ccaaactcaggtgat

SEQ ID NO: 1814926 - DNA, 15 bp, Homo sapiens
caaactcaggtgatc

SEQ ID NO: 1814927 - DNA, 15 bp, Homo sapiens
aaactcaggtgatcc

SEQ ID NO: 1814928 - DNA, 15 bp, Homo sapiens
aactcaggtgatccg

SEQ ID NO: 1814929 - DNA, 15 bp, Homo sapiens
actcaggtgatccgc

SEQ ID NO: 1814930 - DNA, 15 bp, Homo sapiens
tccgcctgcctcggt

SEQ ID NO: 1814931 - DNA, 15 bp, Homo sapiens
ccgcctgcctcggtc

SEQ ID NO: 1814932 - DNA, 15 bp, Homo sapiens
cgcctgcctcggtct

SEQ ID NO: 1814933 - DNA, 15 bp, Homo sapiens
gcctgcctcggtctc

SEQ ID NO: 1814934 - DNA, 15 bp, Homo sapiens
ctcggtctcccaaaa

SEQ ID NO: 1814935 - DNA, 15 bp, Homo sapiens
tcggtctcccaaaac

SEQ ID NO: 1814936 - DNA, 15 bp, Homo sapiens
cggtctcccaaaaca

SEQ ID NO: 1814937 - DNA, 15 bp, Homo sapiens
ggtctcccaaaacac

SEQ ID NO: 1814938 - DNA, 15 bp, Homo sapiens
gtctcccaaaacaca

SEQ ID NO: 1814939 - DNA, 15 bp, Homo sapiens
tctcccaaaacacag

SEQ ID NO: 1814940 - DNA, 15 bp, Homo sapiens
ctcccaaaacacagg

SEQ ID NO: 1814941 - DNA, 15 bp, Homo sapiens
tcccaaaacacaggg

SEQ ID NO: 1814942 - DNA, 15 bp, Homo sapiens
cccaaaacacaggga

SEQ ID NO: 1814943 - DNA, 15 bp, Homo sapiens
ccaaaacacagggat

SEQ ID NO: 1814944 - DNA, 15 bp, Homo sapiens
caaaacacagggatt

SEQ ID NO: 1814945 - DNA, 15 bp, Homo sapiens
aaaacacagggattc

SEQ ID NO: 1814946 - DNA, 15 bp, Homo sapiens
aaacacagggattcc

SEQ ID NO: 1814947 - DNA, 15 bp, Homo sapiens
aacacagggattcca

SEQ ID NO: 1814948 - DNA, 15 bp, Homo sapiens
acacagggattccag

SEQ ID NO: 1814949 - DNA, 15 bp, Homo sapiens
cacagggattccagg

SEQ ID NO: 1814950 - DNA, 15 bp, Homo sapiens
acagggattccaggc

SEQ ID NO: 1814951 - DNA, 15 bp, Homo sapiens
cagggattccaggca

SEQ ID NO: 1814952 - DNA, 15 bp, Homo sapiens
agggattccaggcat

SEQ ID NO: 1814953 - DNA, 15 bp, Homo sapiens
atgagccaccacgct

SEQ ID NO: 1814954 - DNA, 15 bp, Homo sapiens
accacgcttggccaa

SEQ ID NO: 1814955 - DNA, 15 bp, Homo sapiens
ccacgcttggccaat

SEQ ID NO: 1814956 - DNA, 15 bp, Homo sapiens
cacgcttggccaatc

SEQ ID NO: 1814957 - DNA, 15 bp, Homo sapiens
acgcttggccaatcg

SEQ ID NO: 1814958 - DNA, 15 bp, Homo sapiens
cgcttggccaatcgt

SEQ ID NO: 1814959 - DNA, 15 bp, Homo sapiens
gcttggccaatcgtt

SEQ ID NO: 1814960 - DNA, 15 bp, Homo sapiens
cttggccaatcgttg

SEQ ID NO: 1814961 - DNA, 15 bp, Homo sapiens
ttggccaatcgttgg

SEQ ID NO: 1814962 - DNA, 15 bp, Homo sapiens
tggccaatcgttggc

SEQ ID NO: 1814963 - DNA, 15 bp, Homo sapiens
ggccaatcgttggca

SEQ ID NO: 1814964 - DNA, 15 bp, Homo sapiens
gccaatcgttggcat

SEQ ID NO: 1814965 - DNA, 15 bp, Homo sapiens
ccaatcgttggcatt

SEQ ID NO: 1814966 - DNA, 15 bp, Homo sapiens
caatcgttggcattc

SEQ ID NO: 1814967 - DNA, 15 bp, Homo sapiens
aatcgttggcattct

SEQ ID NO: 1814968 - DNA, 15 bp, Homo sapiens
atcgttggcattcta

SEQ ID NO: 1814969 - DNA, 15 bp, Homo sapiens
tcgttggcattctaa

SEQ ID NO: 1814970 - DNA, 15 bp, Homo sapiens
cgttggcattctaag

SEQ ID NO: 1814971 - DNA, 15 bp, Homo sapiens
gttggcattctaagg

SEQ ID NO: 1814972 - DNA, 15 bp, Homo sapiens
ttggcattctaaggc

SEQ ID NO: 1814973 - DNA, 15 bp, Homo sapiens
tggcattctaaggct

SEQ ID NO: 1814974 - DNA, 15 bp, Homo sapiens
ggcattctaaggctt

SEQ ID NO: 1814975 - DNA, 15 bp, Homo sapiens
gcattctaaggcttt

SEQ ID NO: 1814976 - DNA, 15 bp, Homo sapiens
cattctaaggctttc

SEQ ID NO: 1814977 - DNA, 15 bp, Homo sapiens
attctaaggctttca

SEQ ID NO: 1814978 - DNA, 15 bp, Homo sapiens
ttctaaggctttcag

SEQ ID NO: 1814979 - DNA, 15 bp, Homo sapiens
tctaaggctttcagt

SEQ ID NO: 1814980 - DNA, 15 bp, Homo sapiens
ctaaggctttcagtg

SEQ ID NO: 1814981 - DNA, 15 bp, Homo sapiens
taaggctttcagtgt

SEQ ID NO: 1814982 - DNA, 15 bp, Homo sapiens
aaggctttcagtgta

SEQ ID NO: 1814983 - DNA, 15 bp, Homo sapiens
aggctttcagtgtac

SEQ ID NO: 1814984 - DNA, 15 bp, Homo sapiens
ggctttcagtgtacc

SEQ ID NO: 1814985 - DNA, 15 bp, Homo sapiens
gctttcagtgtacct

SEQ ID NO: 1814986 - DNA, 15 bp, Homo sapiens
ctttcagtgtacctg

SEQ ID NO: 1814987 - DNA, 15 bp, Homo sapiens
tttcagtgtacctga

SEQ ID NO: 1814988 - DNA, 15 bp, Homo sapiens
ttcagtgtacctgac

SEQ ID NO: 1814989 - DNA, 15 bp, Homo sapiens
tcagtgtacctgact

SEQ ID NO: 1814990 - DNA, 15 bp, Homo sapiens
cagtgtacctgactt

SEQ ID NO: 1814991 - DNA, 15 bp, Homo sapiens
agtgtacctgacttc

SEQ ID NO: 1814992 - DNA, 15 bp, Homo sapiens
gtgtacctgacttct

SEQ ID NO: 1814993 - DNA, 15 bp, Homo sapiens
tgtacctgacttctt

SEQ ID NO: 1814994 - DNA, 15 bp, Homo sapiens
gtacctgacttcttt

SEQ ID NO: 1814995 - DNA, 15 bp, Homo sapiens
tacctgacttctttt

SEQ ID NO: 1814996 - DNA, 15 bp, Homo sapiens
acctgacttctttta

SEQ ID NO: 1814997 - DNA, 15 bp, Homo sapiens
cctgacttcttttag

SEQ ID NO: 1814998 - DNA, 15 bp, Homo sapiens
ctgacttcttttagt

SEQ ID NO: 1814999 - DNA, 15 bp, Homo sapiens
tgacttcttttagtt

SEQ ID NO: 1815000 - DNA, 15 bp, Homo sapiens
gacttcttttagttc

SEQ ID NO: 1815001 - DNA, 15 bp, Homo sapiens
acttcttttagttct

SEQ ID NO: 1815002 - DNA, 15 bp, Homo sapiens
cttcttttagttcta

SEQ ID NO: 1815003 - DNA, 15 bp, Homo sapiens
ttcttttagttctaa

SEQ ID NO: 1815004 - DNA, 15 bp, Homo sapiens
tcttttagttctaag

SEQ ID NO: 1815005 - DNA, 15 bp, Homo sapiens
cttttagttctaagt

SEQ ID NO: 1815006 - DNA, 15 bp, Homo sapiens
ttttagttctaagtc

SEQ ID NO: 1815007 - DNA, 15 bp, Homo sapiens
tttagttctaagtct

SEQ ID NO: 1815008 - DNA, 15 bp, Homo sapiens
ttagttctaagtctg

SEQ ID NO: 1815009 - DNA, 15 bp, Homo sapiens
tagttctaagtctgt

SEQ ID NO: 1815010 - DNA, 15 bp, Homo sapiens
agttctaagtctgta

SEQ ID NO: 1815011 - DNA, 15 bp, Homo sapiens
gttctaagtctgtaa

SEQ ID NO: 1815012 - DNA, 15 bp, Homo sapiens
ttctaagtctgtaac

SEQ ID NO: 1815013 - DNA, 15 bp, Homo sapiens
tctaagtctgtaact

SEQ ID NO: 1815014 - DNA, 15 bp, Homo sapiens
ctaagtctgtaactg

SEQ ID NO: 1815015 - DNA, 15 bp, Homo sapiens
taagtctgtaactgt

SEQ ID NO: 1815016 - DNA, 15 bp, Homo sapiens
aagtctgtaactgtt

SEQ ID NO: 1815017 - DNA, 15 bp, Homo sapiens
agtctgtaactgtta

SEQ ID NO: 1815018 - DNA, 15 bp, Homo sapiens
gtctgtaactgttaa

SEQ ID NO: 1815019 - DNA, 15 bp, Homo sapiens
tctgtaactgttaac

SEQ ID NO: 1815020 - DNA, 15 bp, Homo sapiens
ctgtaactgttaacc

SEQ ID NO: 1815021 - DNA, 15 bp, Homo sapiens
tgtaactgttaacct

SEQ ID NO: 1815022 - DNA, 15 bp, Homo sapiens
gtaactgttaacctt

SEQ ID NO: 1815023 - DNA, 15 bp, Homo sapiens
taactgttaaccttt

SEQ ID NO: 1815024 - DNA, 15 bp, Homo sapiens
aactgttaacctttc

SEQ ID NO: 1815025 - DNA, 15 bp, Homo sapiens
actgttaacctttct

SEQ ID NO: 1815026 - DNA, 15 bp, Homo sapiens
ctgttaacctttctt

SEQ ID NO: 1815027 - DNA, 15 bp, Homo sapiens
tgttaacctttcttg

SEQ ID NO: 1815028 - DNA, 15 bp, Homo sapiens
gttaacctttcttgg

SEQ ID NO: 1815029 - DNA, 15 bp, Homo sapiens
ttaacctttcttggg

SEQ ID NO: 1815030 - DNA, 15 bp, Homo sapiens
taacctttcttgggc

SEQ ID NO: 1815031 - DNA, 15 bp, Homo sapiens
aacctttcttgggcc

SEQ ID NO: 1815032 - DNA, 15 bp, Homo sapiens
acctttcttgggcca

SEQ ID NO: 1815033 - DNA, 15 bp, Homo sapiens
cctttcttgggccac

SEQ ID NO: 1815034 - DNA, 15 bp, Homo sapiens
ctttcttgggccacg

SEQ ID NO: 1815035 - DNA, 15 bp, Homo sapiens
tttcttgggccacgg

SEQ ID NO: 1815036 - DNA, 15 bp, Homo sapiens
ttcttgggccacggc

SEQ ID NO: 1815037 - DNA, 15 bp, Homo sapiens
tcttgggccacggct

SEQ ID NO: 1815038 - DNA, 15 bp, Homo sapiens
cttgggccacggcta

SEQ ID NO: 1815039 - DNA, 15 bp, Homo sapiens
ttgggccacggctat

SEQ ID NO: 1815040 - DNA, 15 bp, Homo sapiens
tgggccacggctatc

SEQ ID NO: 1815041 - DNA, 15 bp, Homo sapiens
gggccacggctatca

SEQ ID NO: 1815042 - DNA, 15 bp, Homo sapiens
ggccacggctatcac

SEQ ID NO: 1815043 - DNA, 15 bp, Homo sapiens
gccacggctatcaca

SEQ ID NO: 1815044 - DNA, 15 bp, Homo sapiens
ccacggctatcacac

SEQ ID NO: 1815045 - DNA, 15 bp, Homo sapiens
cacggctatcacacg

SEQ ID NO: 1815046 - DNA, 15 bp, Homo sapiens
acggctatcacacgg

SEQ ID NO: 1815047 - DNA, 15 bp, Homo sapiens
cggctatcacacgga

SEQ ID NO: 1815048 - DNA, 15 bp, Homo sapiens
ggctatcacacggat

SEQ ID NO: 1815049 - DNA, 15 bp, Homo sapiens
gctatcacacggatc

SEQ ID NO: 1815050 - DNA, 15 bp, Homo sapiens
ctatcacacggatct

SEQ ID NO: 1815051 - DNA, 15 bp, Homo sapiens
tatcacacggatctc

SEQ ID NO: 1815052 - DNA, 15 bp, Homo sapiens
atcacacggatctct

SEQ ID NO: 1815053 - DNA, 15 bp, Homo sapiens
tcacacggatctctc

SEQ ID NO: 1815054 - DNA, 15 bp, Homo sapiens
cacacggatctctct

SEQ ID NO: 1815055 - DNA, 15 bp, Homo sapiens
acacggatctctctg

SEQ ID NO: 1815056 - DNA, 15 bp, Homo sapiens
cacggatctctctgg

SEQ ID NO: 1815057 - DNA, 15 bp, Homo sapiens
acggatctctctggg

SEQ ID NO: 1815058 - DNA, 15 bp, Homo sapiens
cggatctctctggga

SEQ ID NO: 1815059 - DNA, 15 bp, Homo sapiens
ggatctctctgggaa

SEQ ID NO: 1815060 - DNA, 15 bp, Homo sapiens
gatctctctgggaat

SEQ ID NO: 1815061 - DNA, 15 bp, Homo sapiens
atctctctgggaatc

SEQ ID NO: 1815062 - DNA, 15 bp, Homo sapiens
tctctctgggaatct

SEQ ID NO: 1815063 - DNA, 15 bp, Homo sapiens
ctctctgggaatctg

SEQ ID NO: 1815064 - DNA, 15 bp, Homo sapiens
tctctgggaatctga

SEQ ID NO: 1815065 - DNA, 15 bp, Homo sapiens
ctctgggaatctgac

SEQ ID NO: 1815066 - DNA, 15 bp, Homo sapiens
tctgggaatctgacg

SEQ ID NO: 1815067 - DNA, 15 bp, Homo sapiens
ctgggaatctgacga

SEQ ID NO: 1815068 - DNA, 15 bp, Homo sapiens
tgggaatctgacgac

SEQ ID NO: 1815069 - DNA, 15 bp, Homo sapiens
gggaatctgacgaca

SEQ ID NO: 1815070 - DNA, 15 bp, Homo sapiens
ggaatctgacgacag

SEQ ID NO: 1815071 - DNA, 15 bp, Homo sapiens
gaatctgacgacagt

SEQ ID NO: 1815072 - DNA, 15 bp, Homo sapiens
aatctgacgacagtg

SEQ ID NO: 1815073 - DNA, 15 bp, Homo sapiens
atctgacgacagtgc

SEQ ID NO: 1815074 - DNA, 15 bp, Homo sapiens
tctgacgacagtgcc

SEQ ID NO: 1815075 - DNA, 15 bp, Homo sapiens
ctgacgacagtgcct

SEQ ID NO: 1815076 - DNA, 15 bp, Homo sapiens
tgacgacagtgcctc

SEQ ID NO: 1815077 - DNA, 15 bp, Homo sapiens
gacgacagtgcctca

SEQ ID NO: 1815078 - DNA, 15 bp, Homo sapiens
acgacagtgcctcaa

SEQ ID NO: 1815079 - DNA, 15 bp, Homo sapiens
cgacagtgcctcaaa

SEQ ID NO: 1815080 - DNA, 15 bp, Homo sapiens
gacagtgcctcaaac

SEQ ID NO: 1815081 - DNA, 15 bp, Homo sapiens
acagtgcctcaaacc

SEQ ID NO: 1815082 - DNA, 15 bp, Homo sapiens
cagtgcctcaaaccc

SEQ ID NO: 1815083 - DNA, 15 bp, Homo sapiens
agtgcctcaaacccg

SEQ ID NO: 1815084 - DNA, 15 bp, Homo sapiens
gtgcctcaaacccga

SEQ ID NO: 1815085 - DNA, 15 bp, Homo sapiens
tgcctcaaacccgag

SEQ ID NO: 1815086 - DNA, 15 bp, Homo sapiens
gcctcaaacccgagg

SEQ ID NO: 1815087 - DNA, 15 bp, Homo sapiens
cctcaaacccgaggg

SEQ ID NO: 1815088 - DNA, 15 bp, Homo sapiens
ctcaaacccgaggga

SEQ ID NO: 1815089 - DNA, 15 bp, Homo sapiens
tcaaacccgagggag

SEQ ID NO: 1815090 - DNA, 15 bp, Homo sapiens
caaacccgagggagc

SEQ ID NO: 1815091 - DNA, 15 bp, Homo sapiens
aaacccgagggagca

SEQ ID NO: 1815092 - DNA, 15 bp, Homo sapiens
aacccgagggagcac

SEQ ID NO: 1815093 - DNA, 15 bp, Homo sapiens
acccgagggagcacc

SEQ ID NO: 1815094 - DNA, 15 bp, Homo sapiens
cccgagggagcaccg

SEQ ID NO: 1815095 - DNA, 15 bp, Homo sapiens
ccgagggagcaccgc

SEQ ID NO: 1815096 - DNA, 15 bp, Homo sapiens
cgagggagcaccgcc

SEQ ID NO: 1815097 - DNA, 15 bp, Homo sapiens
gagggagcaccgcca

SEQ ID NO: 1815098 - DNA, 15 bp, Homo sapiens
agggagcaccgccag

SEQ ID NO: 1815099 - DNA, 15 bp, Homo sapiens
gggagcaccgccagg

SEQ ID NO: 1815100 - DNA, 15 bp, Homo sapiens
ggagcaccgccaggt

SEQ ID NO: 1815101 - DNA, 15 bp, Homo sapiens
gagcaccgccaggtg

SEQ ID NO: 1815102 - DNA, 15 bp, Homo sapiens
agcaccgccaggtgt

SEQ ID NO: 1815103 - DNA, 15 bp, Homo sapiens
gcaccgccaggtgtg

SEQ ID NO: 1815104 - DNA, 15 bp, Homo sapiens
caccgccaggtgtgc

SEQ ID NO: 1815105 - DNA, 15 bp, Homo sapiens
accgccaggtgtgca

SEQ ID NO: 1815106 - DNA, 15 bp, Homo sapiens
ccgccaggtgtgcac

SEQ ID NO: 1815107 - DNA, 15 bp, Homo sapiens
cgccaggtgtgcaca

SEQ ID NO: 1815108 - DNA, 15 bp, Homo sapiens
gccaggtgtgcacac

SEQ ID NO: 1815109 - DNA, 15 bp, Homo sapiens
ccaggtgtgcacaca

SEQ ID NO: 1815110 - DNA, 15 bp, Homo sapiens
caggtgtgcacacac

SEQ ID NO: 1815111 - DNA, 15 bp, Homo sapiens
aggtgtgcacacacg

SEQ ID NO: 1815112 - DNA, 15 bp, Homo sapiens
ggtgtgcacacacgt

SEQ ID NO: 1815113 - DNA, 15 bp, Homo sapiens
gtgtgcacacacgtt

SEQ ID NO: 1815114 - DNA, 15 bp, Homo sapiens
tgtgcacacacgttt

SEQ ID NO: 1815115 - DNA, 15 bp, Homo sapiens
gtgcacacacgtttc

SEQ ID NO: 1815116 - DNA, 15 bp, Homo sapiens
tgcacacacgtttct

SEQ ID NO: 1815117 - DNA, 15 bp, Homo sapiens
gcacacacgtttctg

SEQ ID NO: 1815118 - DNA, 15 bp, Homo sapiens
cacacacgtttctgt

SEQ ID NO: 1815119 - DNA, 15 bp, Homo sapiens
acacacgtttctgtc

SEQ ID NO: 1815120 - DNA, 15 bp, Homo sapiens
cacacgtttctgtca

SEQ ID NO: 1815121 - DNA, 15 bp, Homo sapiens
acacgtttctgtcaa

SEQ ID NO: 1815122 - DNA, 15 bp, Homo sapiens
cacgtttctgtcaac

SEQ ID NO: 1815123 - DNA, 15 bp, Homo sapiens
acgtttctgtcaacg

SEQ ID NO: 1815124 - DNA, 15 bp, Homo sapiens
cgtttctgtcaacga

SEQ ID NO: 1815125 - DNA, 15 bp, Homo sapiens
gtttctgtcaacgat

SEQ ID NO: 1815126 - DNA, 15 bp, Homo sapiens
tttctgtcaacgatt

SEQ ID NO: 1815127 - DNA, 15 bp, Homo sapiens
ttctgtcaacgattt

SEQ ID NO: 1815128 - DNA, 15 bp, Homo sapiens
tctgtcaacgatttc

SEQ ID NO: 1815129 - DNA, 15 bp, Homo sapiens
ctgtcaacgatttcg

SEQ ID NO: 1815130 - DNA, 15 bp, Homo sapiens
tgtcaacgatttcgg

SEQ ID NO: 1815131 - DNA, 15 bp, Homo sapiens
gtcaacgatttcgga

SEQ ID NO: 1815132 - DNA, 15 bp, Homo sapiens
tcaacgatttcggag

SEQ ID NO: 1815133 - DNA, 15 bp, Homo sapiens
caacgatttcggaga

SEQ ID NO: 1815134 - DNA, 15 bp, Homo sapiens
aacgatttcggagac

SEQ ID NO: 1815135 - DNA, 15 bp, Homo sapiens
acgatttcggagact

SEQ ID NO: 1815136 - DNA, 15 bp, Homo sapiens
cgatttcggagactc

SEQ ID NO: 1815137 - DNA, 15 bp, Homo sapiens
gatttcggagactct

SEQ ID NO: 1815138 - DNA, 15 bp, Homo sapiens
atttcggagactctt

SEQ ID NO: 1815139 - DNA, 15 bp, Homo sapiens
tttcggagactcttg

SEQ ID NO: 1815140 - DNA, 15 bp, Homo sapiens
ttcggagactcttgg

SEQ ID NO: 1815141 - DNA, 15 bp, Homo sapiens
tcggagactcttggg

SEQ ID NO: 1815142 - DNA, 15 bp, Homo sapiens
cggagactcttggga

SEQ ID NO: 1815143 - DNA, 15 bp, Homo sapiens
ggagactcttgggat

SEQ ID NO: 1815144 - DNA, 15 bp, Homo sapiens
gagactcttgggatc

SEQ ID NO: 1815145 - DNA, 15 bp, Homo sapiens
agactcttgggatcc

SEQ ID NO: 1815146 - DNA, 15 bp, Homo sapiens
gactcttgggatccc

SEQ ID NO: 1815147 - DNA, 15 bp, Homo sapiens
actcttgggatccct

SEQ ID NO: 1815148 - DNA, 15 bp, Homo sapiens
ctcttgggatccctg

SEQ ID NO: 1815149 - DNA, 15 bp, Homo sapiens
tcttgggatccctga

SEQ ID NO: 1815150 - DNA, 15 bp, Homo sapiens
cttgggatccctgac

SEQ ID NO: 1815151 - DNA, 15 bp, Homo sapiens
ttgggatccctgaca

SEQ ID NO: 1815152 - DNA, 15 bp, Homo sapiens
tgggatccctgacac

SEQ ID NO: 1815153 - DNA, 15 bp, Homo sapiens
gggatccctgacacc

SEQ ID NO: 1815154 - DNA, 15 bp, Homo sapiens
ggatccctgacacca

SEQ ID NO: 1815155 - DNA, 15 bp, Homo sapiens
gatccctgacaccat

SEQ ID NO: 1815156 - DNA, 15 bp, Homo sapiens
tccctgacaccatct

SEQ ID NO: 1815157 - DNA, 15 bp, Homo sapiens
ccctgacaccatctg

SEQ ID NO: 1815158 - DNA, 15 bp, Homo sapiens
cctgacaccatctgt

SEQ ID NO: 1815159 - DNA, 15 bp, Homo sapiens
ctgacaccatctgtt

SEQ ID NO: 1815160 - DNA, 15 bp, Homo sapiens
tgacaccatctgttc

SEQ ID NO: 1815161 - DNA, 15 bp, Homo sapiens
gacaccatctgttcc

SEQ ID NO: 1815162 - DNA, 15 bp, Homo sapiens
acaccatctgttcca

SEQ ID NO: 1815163 - DNA, 15 bp, Homo sapiens
caccatctgttccat

SEQ ID NO: 1815164 - DNA, 15 bp, Homo sapiens
accatctgttccatg

SEQ ID NO: 1815165 - DNA, 15 bp, Homo sapiens
ccatctgttccatgg

SEQ ID NO: 1815166 - DNA, 15 bp, Homo sapiens
catctgttccatgga

SEQ ID NO: 1815167 - DNA, 15 bp, Homo sapiens
atctgttccatggac

SEQ ID NO: 1815168 - DNA, 15 bp, Homo sapiens
tctgttccatggacc

SEQ ID NO: 1815169 - DNA, 15 bp, Homo sapiens
ctgttccatggacct

SEQ ID NO: 1815170 - DNA, 15 bp, Homo sapiens
tgttccatggacctt

SEQ ID NO: 1815171 - DNA, 15 bp, Homo sapiens
gttccatggacctta

SEQ ID NO: 1815172 - DNA, 15 bp, Homo sapiens
ttccatggaccttag

SEQ ID NO: 1815173 - DNA, 15 bp, Homo sapiens
tccatggaccttagg

SEQ ID NO: 1815174 - DNA, 15 bp, Homo sapiens
ccatggaccttaggt

SEQ ID NO: 1815175 - DNA, 15 bp, Homo sapiens
catggaccttaggtt

SEQ ID NO: 1815176 - DNA, 15 bp, Homo sapiens
atggaccttaggtta

SEQ ID NO: 1815177 - DNA, 15 bp, Homo sapiens
tggaccttaggttaa

SEQ ID NO: 1815178 - DNA, 15 bp, Homo sapiens
ggaccttaggttaag

SEQ ID NO: 1815179 - DNA, 15 bp, Homo sapiens
gaccttaggttaaga

SEQ ID NO: 1815180 - DNA, 15 bp, Homo sapiens
accttaggttaagag

SEQ ID NO: 1815181 - DNA, 15 bp, Homo sapiens
ccttaggttaagagc

SEQ ID NO: 1815182 - DNA, 15 bp, Homo sapiens
cttaggttaagagcc

SEQ ID NO: 1815183 - DNA, 15 bp, Homo sapiens
ttaggttaagagcct

SEQ ID NO: 1815184 - DNA, 15 bp, Homo sapiens
taggttaagagcctc

SEQ ID NO: 1815185 - DNA, 15 bp, Homo sapiens
aggttaagagcctct

SEQ ID NO: 1815186 - DNA, 15 bp, Homo sapiens
ggttaagagcctctg

SEQ ID NO: 1815187 - DNA, 15 bp, Homo sapiens
gttaagagcctctgt

SEQ ID NO: 1815188 - DNA, 15 bp, Homo sapiens
ttaagagcctctgtt

SEQ ID NO: 1815189 - DNA, 15 bp, Homo sapiens
taagagcctctgttc

SEQ ID NO: 1815190 - DNA, 15 bp, Homo sapiens
aagagcctctgttca

SEQ ID NO: 1815191 - DNA, 15 bp, Homo sapiens
agagcctctgttcaa

SEQ ID NO: 1815192 - DNA, 15 bp, Homo sapiens
gagcctctgttcaaa

SEQ ID NO: 1815193 - DNA, 15 bp, Homo sapiens
agcctctgttcaaag

SEQ ID NO: 1815194 - DNA, 15 bp, Homo sapiens
gcctctgttcaaagg

SEQ ID NO: 1815195 - DNA, 15 bp, Homo sapiens
cctctgttcaaagga

SEQ ID NO: 1815196 - DNA, 15 bp, Homo sapiens
ctctgttcaaaggag

SEQ ID NO: 1815197 - DNA, 15 bp, Homo sapiens
tctgttcaaaggagg

SEQ ID NO: 1815198 - DNA, 15 bp, Homo sapiens
ctgttcaaaggaggc

SEQ ID NO: 1815199 - DNA, 15 bp, Homo sapiens
tgttcaaaggaggct

SEQ ID NO: 1815200 - DNA, 15 bp, Homo sapiens
gttcaaaggaggctt

SEQ ID NO: 1815201 - DNA, 15 bp, Homo sapiens
ttcaaaggaggcttt

SEQ ID NO: 1815202 - DNA, 15 bp, Homo sapiens
tcaaaggaggctttt

SEQ ID NO: 1815203 - DNA, 15 bp, Homo sapiens
caaaggaggcttttg

SEQ ID NO: 1815204 - DNA, 15 bp, Homo sapiens
aaaggaggcttttgc

SEQ ID NO: 1815205 - DNA, 15 bp, Homo sapiens
aaggaggcttttgct

SEQ ID NO: 1815206 - DNA, 15 bp, Homo sapiens
aggaggcttttgctc

SEQ ID NO: 1815207 - DNA, 15 bp, Homo sapiens
ggaggcttttgctct

SEQ ID NO: 1815208 - DNA, 15 bp, Homo sapiens
gaggcttttgctctt

SEQ ID NO: 1815209 - DNA, 15 bp, Homo sapiens
aggcttttgctcttg

SEQ ID NO: 1815210 - DNA, 15 bp, Homo sapiens
ggcttttgctcttgg

SEQ ID NO: 1815211 - DNA, 15 bp, Homo sapiens
gcttttgctcttggt

SEQ ID NO: 1815212 - DNA, 15 bp, Homo sapiens
cttttgctcttggtg

SEQ ID NO: 1815213 - DNA, 15 bp, Homo sapiens
ttttgctcttggtgg

SEQ ID NO: 1815214 - DNA, 15 bp, Homo sapiens
tttgctcttggtggg

SEQ ID NO: 1815215 - DNA, 15 bp, Homo sapiens
ttgctcttggtgggt

SEQ ID NO: 1815216 - DNA, 15 bp, Homo sapiens
tgctcttggtgggtg

SEQ ID NO: 1815217 - DNA, 15 bp, Homo sapiens
gctcttggtgggtgg

SEQ ID NO: 1815218 - DNA, 15 bp, Homo sapiens
ctcttggtgggtgga

SEQ ID NO: 1815219 - DNA, 15 bp, Homo sapiens
tcttggtgggtggat

SEQ ID NO: 1815220 - DNA, 15 bp, Homo sapiens
cttggtgggtggatg

SEQ ID NO: 1815221 - DNA, 15 bp, Homo sapiens
ttggtgggtggatgg

SEQ ID NO: 1815222 - DNA, 15 bp, Homo sapiens
tggtgggtggatggg

SEQ ID NO: 1815223 - DNA, 15 bp, Homo sapiens
ggtgggtggatgggg

SEQ ID NO: 1815224 - DNA, 15 bp, Homo sapiens
gtgggtggatggggt

SEQ ID NO: 1815225 - DNA, 15 bp, Homo sapiens
tgggtggatggggtg

SEQ ID NO: 1815226 - DNA, 15 bp, Homo sapiens
gggtggatggggtga

SEQ ID NO: 1815227 - DNA, 15 bp, Homo sapiens
ggtggatggggtgaa

SEQ ID NO: 1815228 - DNA, 15 bp, Homo sapiens
gtggatggggtgaag

SEQ ID NO: 1815229 - DNA, 15 bp, Homo sapiens
tggatggggtgaagt

SEQ ID NO: 1815230 - DNA, 15 bp, Homo sapiens
ggatggggtgaagtc

SEQ ID NO: 1815231 - DNA, 15 bp, Homo sapiens
gatggggtgaagtct

SEQ ID NO: 1815232 - DNA, 15 bp, Homo sapiens
atggggtgaagtctc

SEQ ID NO: 1815233 - DNA, 15 bp, Homo sapiens
tggggtgaagtctcc

SEQ ID NO: 1815234 - DNA, 15 bp, Homo sapiens
ggggtgaagtctcca

SEQ ID NO: 1815235 - DNA, 15 bp, Homo sapiens
gggtgaagtctccaa

SEQ ID NO: 1815236 - DNA, 15 bp, Homo sapiens
ggtgaagtctccaag

SEQ ID NO: 1815237 - DNA, 15 bp, Homo sapiens
gtgaagtctccaagc

SEQ ID NO: 1815238 - DNA, 15 bp, Homo sapiens
tgaagtctccaagcc

SEQ ID NO: 1815239 - DNA, 15 bp, Homo sapiens
gaagtctccaagccc

SEQ ID NO: 1815240 - DNA, 15 bp, Homo sapiens
aagtctccaagccct

SEQ ID NO: 1815241 - DNA, 15 bp, Homo sapiens
agtctccaagccctc

SEQ ID NO: 1815242 - DNA, 15 bp, Homo sapiens
gtctccaagccctct

SEQ ID NO: 1815243 - DNA, 15 bp, Homo sapiens
tctccaagccctctt

SEQ ID NO: 1815244 - DNA, 15 bp, Homo sapiens
ctccaagccctctta

SEQ ID NO: 1815245 - DNA, 15 bp, Homo sapiens
tccaagccctcttac

SEQ ID NO: 1815246 - DNA, 15 bp, Homo sapiens
ccaagccctcttacg

SEQ ID NO: 1815247 - DNA, 15 bp, Homo sapiens
caagccctcttacgg

SEQ ID NO: 1815248 - DNA, 15 bp, Homo sapiens
aagccctcttacggc

SEQ ID NO: 1815249 - DNA, 15 bp, Homo sapiens
agccctcttacggcc

SEQ ID NO: 1815250 - DNA, 15 bp, Homo sapiens
gccctcttacggccc

SEQ ID NO: 1815251 - DNA, 15 bp, Homo sapiens
ccctcttacggcccc

SEQ ID NO: 1815252 - DNA, 15 bp, Homo sapiens
cctcttacggcccct

SEQ ID NO: 1815253 - DNA, 15 bp, Homo sapiens
ctcttacggcccctt

SEQ ID NO: 1815254 - DNA, 15 bp, Homo sapiens
tcttacggccccttc

SEQ ID NO: 1815255 - DNA, 15 bp, Homo sapiens
cttacggccccttcg

SEQ ID NO: 1815256 - DNA, 15 bp, Homo sapiens
ttacggccccttcgg

SEQ ID NO: 1815257 - DNA, 15 bp, Homo sapiens
tacggccccttcggt

SEQ ID NO: 1815258 - DNA, 15 bp, Homo sapiens
acggccccttcggta

SEQ ID NO: 1815259 - DNA, 15 bp, Homo sapiens
cggccccttcggtat

SEQ ID NO: 1815260 - DNA, 15 bp, Homo sapiens
ggccccttcggtatt

SEQ ID NO: 1815261 - DNA, 15 bp, Homo sapiens
gccccttcggtattc

SEQ ID NO: 1815262 - DNA, 15 bp, Homo sapiens
ccccttcggtattcc

SEQ ID NO: 1815263 - DNA, 15 bp, Homo sapiens
cccttcggtattcct

SEQ ID NO: 1815264 - DNA, 15 bp, Homo sapiens
ccttcggtattccta

SEQ ID NO: 1815265 - DNA, 15 bp, Homo sapiens
cttcggtattcctat

SEQ ID NO: 1815266 - DNA, 15 bp, Homo sapiens
ttcggtattcctatc

SEQ ID NO: 1815267 - DNA, 15 bp, Homo sapiens
tcggtattcctatcc

SEQ ID NO: 1815268 - DNA, 15 bp, Homo sapiens
cggtattcctatccc

SEQ ID NO: 1815269 - DNA, 15 bp, Homo sapiens
ggtattcctatcccc

SEQ ID NO: 1815270 - DNA, 15 bp, Homo sapiens
gtattcctatccccg

SEQ ID NO: 1815271 - DNA, 15 bp, Homo sapiens
tattcctatccccgg

SEQ ID NO: 1815272 - DNA, 15 bp, Homo sapiens
attcctatccccggt

SEQ ID NO: 1815273 - DNA, 15 bp, Homo sapiens
ttcctatccccggtt

SEQ ID NO: 1815274 - DNA, 15 bp, Homo sapiens
tcctatccccggttc

SEQ ID NO: 1815275 - DNA, 15 bp, Homo sapiens
cctatccccggttct

SEQ ID NO: 1815276 - DNA, 15 bp, Homo sapiens
ctatccccggttctc

SEQ ID NO: 1815277 - DNA, 15 bp, Homo sapiens
tatccccggttctcc

SEQ ID NO: 1815278 - DNA, 15 bp, Homo sapiens
atccccggttctccc

SEQ ID NO: 1815279 - DNA, 15 bp, Homo sapiens
tccccggttctccct

SEQ ID NO: 1815280 - DNA, 15 bp, Homo sapiens
ccccggttctccctg

SEQ ID NO: 1815281 - DNA, 15 bp, Homo sapiens
cccggttctccctgt

SEQ ID NO: 1815282 - DNA, 15 bp, Homo sapiens
ccggttctccctgtc

SEQ ID NO: 1815283 - DNA, 15 bp, Homo sapiens
cggttctccctgtct

SEQ ID NO: 1815284 - DNA, 15 bp, Homo sapiens
ggttctccctgtctt

SEQ ID NO: 1815285 - DNA, 15 bp, Homo sapiens
gttctccctgtctta

SEQ ID NO: 1815286 - DNA, 15 bp, Homo sapiens
ttctccctgtcttag

SEQ ID NO: 1815287 - DNA, 15 bp, Homo sapiens
tctccctgtcttagt

SEQ ID NO: 1815288 - DNA, 15 bp, Homo sapiens
ctccctgtcttagtc

SEQ ID NO: 1815289 - DNA, 15 bp, Homo sapiens
tccctgtcttagtcc

SEQ ID NO: 1815290 - DNA, 15 bp, Homo sapiens
ccctgtcttagtcca

SEQ ID NO: 1815291 - DNA, 15 bp, Homo sapiens
cctgtcttagtccag

SEQ ID NO: 1815292 - DNA, 15 bp, Homo sapiens
ctgtcttagtccagt

SEQ ID NO: 1815293 - DNA, 15 bp, Homo sapiens
tgtcttagtccagtg

SEQ ID NO: 1815294 - DNA, 15 bp, Homo sapiens
gtcttagtccagtgc

SEQ ID NO: 1815295 - DNA, 15 bp, Homo sapiens
tcttagtccagtgct

SEQ ID NO: 1815296 - DNA, 15 bp, Homo sapiens
cttagtccagtgctc

SEQ ID NO: 1815297 - DNA, 15 bp, Homo sapiens
ttagtccagtgctct

SEQ ID NO: 1815298 - DNA, 15 bp, Homo sapiens
tagtccagtgctctc

SEQ ID NO: 1815299 - DNA, 15 bp, Homo sapiens
agtccagtgctctct

SEQ ID NO: 1815300 - DNA, 15 bp, Homo sapiens
gtccagtgctctcta

SEQ ID NO: 1815301 - DNA, 15 bp, Homo sapiens
tccagtgctctctat

SEQ ID NO: 1815302 - DNA, 15 bp, Homo sapiens
ccagtgctctctatt

SEQ ID NO: 1815303 - DNA, 15 bp, Homo sapiens
cagtgctctctattt

SEQ ID NO: 1815304 - DNA, 15 bp, Homo sapiens
agtgctctctattta

SEQ ID NO: 1815305 - DNA, 15 bp, Homo sapiens
gtgctctctatttaa

SEQ ID NO: 1815306 - DNA, 15 bp, Homo sapiens
tgctctctatttaac

SEQ ID NO: 1815307 - DNA, 15 bp, Homo sapiens
gctctctatttaaca

SEQ ID NO: 1815308 - DNA, 15 bp, Homo sapiens
ctctctatttaacaa

SEQ ID NO: 1815309 - DNA, 15 bp, Homo sapiens
tctctatttaacaaa

SEQ ID NO: 1815310 - DNA, 15 bp, Homo sapiens
ctctatttaacaaat

SEQ ID NO: 1815311 - DNA, 15 bp, Homo sapiens
tctatttaacaaatg

SEQ ID NO: 1815312 - DNA, 15 bp, Homo sapiens
ctatttaacaaatga

SEQ ID NO: 1815313 - DNA, 15 bp, Homo sapiens
tatttaacaaatgag

SEQ ID NO: 1815314 - DNA, 15 bp, Homo sapiens
atttaacaaatgagc

SEQ ID NO: 1815315 - DNA, 15 bp, Homo sapiens
tttaacaaatgagca

SEQ ID NO: 1815316 - DNA, 15 bp, Homo sapiens
ttaacaaatgagcag

SEQ ID NO: 1815317 - DNA, 15 bp, Homo sapiens
taacaaatgagcagt

SEQ ID NO: 1815318 - DNA, 15 bp, Homo sapiens
aacaaatgagcagta

SEQ ID NO: 1815319 - DNA, 15 bp, Homo sapiens
acaaatgagcagtaa

SEQ ID NO: 1815320 - DNA, 15 bp, Homo sapiens
caaatgagcagtaaa

SEQ ID NO: 1815321 - DNA, 15 bp, Homo sapiens
aaatgagcagtaaat

SEQ ID NO: 1815322 - DNA, 15 bp, Homo sapiens
aatgagcagtaaatg

SEQ ID NO: 1815323 - DNA, 15 bp, Homo sapiens
atgagcagtaaatgt

SEQ ID NO: 1815324 - DNA, 15 bp, Homo sapiens
tgagcagtaaatgtt

SEQ ID NO: 1815325 - DNA, 15 bp, Homo sapiens
gagcagtaaatgttg

SEQ ID NO: 1815326 - DNA, 15 bp, Homo sapiens
agcagtaaatgttgg

SEQ ID NO: 1815327 - DNA, 15 bp, Homo sapiens
gcagtaaatgttggc

SEQ ID NO: 1815328 - DNA, 15 bp, Homo sapiens
cagtaaatgttggcc

SEQ ID NO: 1815329 - DNA, 15 bp, Homo sapiens
agtaaatgttggccg

SEQ ID NO: 1815330 - DNA, 15 bp, Homo sapiens
gtaaatgttggccga

SEQ ID NO: 1815331 - DNA, 15 bp, Homo sapiens
taaatgttggccgat

SEQ ID NO: 1815332 - DNA, 15 bp, Homo sapiens
aaatgttggccgatg

SEQ ID NO: 1815333 - DNA, 15 bp, Homo sapiens
aatgttggccgatgg

SEQ ID NO: 1815334 - DNA, 15 bp, Homo sapiens
atgttggccgatgga

SEQ ID NO: 1815335 - DNA, 15 bp, Homo sapiens
tgttggccgatggac

SEQ ID NO: 1815336 - DNA, 15 bp, Homo sapiens
gttggccgatggact

SEQ ID NO: 1815337 - DNA, 15 bp, Homo sapiens
ttggccgatggactt

SEQ ID NO: 1815338 - DNA, 15 bp, Homo sapiens
tggccgatggacttt

SEQ ID NO: 1815339 - DNA, 15 bp, Homo sapiens
ggccgatggactttg

SEQ ID NO: 1815340 - DNA, 15 bp, Homo sapiens
gccgatggactttgg

SEQ ID NO: 1815341 - DNA, 15 bp, Homo sapiens
ccgatggactttggg

SEQ ID NO: 1815342 - DNA, 15 bp, Homo sapiens
cgatggactttggga

SEQ ID NO: 1815343 - DNA, 15 bp, Homo sapiens
gatggactttgggag

SEQ ID NO: 1815344 - DNA, 15 bp, Homo sapiens
atggactttgggaga

SEQ ID NO: 1815345 - DNA, 15 bp, Homo sapiens
tggactttgggagaa

SEQ ID NO: 1815346 - DNA, 15 bp, Homo sapiens
ggactttgggagaaa

SEQ ID NO: 1815347 - DNA, 15 bp, Homo sapiens
gactttgggagaaaa

SEQ ID NO: 1815348 - DNA, 15 bp, Homo sapiens
actttgggagaaaat

SEQ ID NO: 1815349 - DNA, 15 bp, Homo sapiens
ctttgggagaaaata

SEQ ID NO: 1815350 - DNA, 15 bp, Homo sapiens
tttgggagaaaataa

SEQ ID NO: 1815351 - DNA, 15 bp, Homo sapiens
ttgggagaaaataaa

SEQ ID NO: 1815352 - DNA, 15 bp, Homo sapiens
tgggagaaaataaag

SEQ ID NO: 1815353 - DNA, 15 bp, Homo sapiens
gggagaaaataaaga

SEQ ID NO: 1815354 - DNA, 15 bp, Homo sapiens
ggagaaaataaagac

SEQ ID NO: 1815355 - DNA, 15 bp, Homo sapiens
gagaaaataaagacc

SEQ ID NO: 1815356 - DNA, 15 bp, Homo sapiens
agaaaataaagacct

SEQ ID NO: 1815357 - DNA, 15 bp, Homo sapiens
gaaaataaagacctg

SEQ ID NO: 1815358 - DNA, 15 bp, Homo sapiens
aaaataaagacctga

SEQ ID NO: 1815359 - DNA, 15 bp, Homo sapiens
aaataaagacctgaa

SEQ ID NO: 1815360 - DNA, 15 bp, Homo sapiens
aataaagacctgaaa

SEQ ID NO: 1815361 - DNA, 15 bp, Homo sapiens
ataaagacctgaaat

SEQ ID NO: 1815362 - DNA, 15 bp, Homo sapiens
taaagacctgaaatt

SEQ ID NO: 1815363 - DNA, 15 bp, Homo sapiens
aaagacctgaaattc

SEQ ID NO: 1815364 - DNA, 15 bp, Homo sapiens
aagacctgaaattca

SEQ ID NO: 1815365 - DNA, 15 bp, Homo sapiens
agacctgaaattcaa

SEQ ID NO: 1815366 - DNA, 15 bp, Homo sapiens
gacctgaaattcaat

SEQ ID NO: 1815367 - DNA, 15 bp, Homo sapiens
acctgaaattcaatt

SEQ ID NO: 1815368 - DNA, 15 bp, Homo sapiens
cctgaaattcaattc

SEQ ID NO: 1815369 - DNA, 15 bp, Homo sapiens
ctgaaattcaattct

SEQ ID NO: 1815370 - DNA, 15 bp, Homo sapiens
tgaaattcaattcta

SEQ ID NO: 1815371 - DNA, 15 bp, Homo sapiens
gaaattcaattctag

SEQ ID NO: 1815372 - DNA, 15 bp, Homo sapiens
aaattcaattctagc

SEQ ID NO: 1815373 - DNA, 15 bp, Homo sapiens
aattcaattctagct

SEQ ID NO: 1815374 - DNA, 15 bp, Homo sapiens
attcaattctagctc

SEQ ID NO: 1815375 - DNA, 15 bp, Homo sapiens
ttcaattctagctcc

SEQ ID NO: 1815376 - DNA, 15 bp, Homo sapiens
tcaattctagctcct

SEQ ID NO: 1815377 - DNA, 15 bp, Homo sapiens
caattctagctcctt

SEQ ID NO: 1815378 - DNA, 15 bp, Homo sapiens
aattctagctcctta

SEQ ID NO: 1815379 - DNA, 15 bp, Homo sapiens
attctagctccttaa

SEQ ID NO: 1815380 - DNA, 15 bp, Homo sapiens
ttctagctccttaaa

SEQ ID NO: 1815381 - DNA, 15 bp, Homo sapiens
tctagctccttaaac

SEQ ID NO: 1815382 - DNA, 15 bp, Homo sapiens
ctagctccttaaacc

SEQ ID NO: 1815383 - DNA, 15 bp, Homo sapiens
tagctccttaaacca

SEQ ID NO: 1815384 - DNA, 15 bp, Homo sapiens
agctccttaaaccac

SEQ ID NO: 1815385 - DNA, 15 bp, Homo sapiens
gctccttaaaccaca

SEQ ID NO: 1815386 - DNA, 15 bp, Homo sapiens
ctccttaaaccacag

SEQ ID NO: 1815387 - DNA, 15 bp, Homo sapiens
tccttaaaccacagg

SEQ ID NO: 1815388 - DNA, 15 bp, Homo sapiens
ccttaaaccacagga

SEQ ID NO: 1815389 - DNA, 15 bp, Homo sapiens
cttaaaccacaggag

SEQ ID NO: 1815390 - DNA, 15 bp, Homo sapiens
ttaaaccacaggaga

SEQ ID NO: 1815391 - DNA, 15 bp, Homo sapiens
taaaccacaggagaa

SEQ ID NO: 1815392 - DNA, 15 bp, Homo sapiens
aaaccacaggagaac

SEQ ID NO: 1815393 - DNA, 15 bp, Homo sapiens
aaccacaggagaaca

SEQ ID NO: 1815394 - DNA, 15 bp, Homo sapiens
accacaggagaacat

SEQ ID NO: 1815395 - DNA, 15 bp, Homo sapiens
ccacaggagaacatt

SEQ ID NO: 1815396 - DNA, 15 bp, Homo sapiens
cacaggagaacattc

SEQ ID NO: 1815397 - DNA, 15 bp, Homo sapiens
acaggagaacattct

SEQ ID NO: 1815398 - DNA, 15 bp, Homo sapiens
caggagaacattctt

SEQ ID NO: 1815399 - DNA, 15 bp, Homo sapiens
aggagaacattcttt

SEQ ID NO: 1815400 - DNA, 15 bp, Homo sapiens
ggagaacattctttc

SEQ ID NO: 1815401 - DNA, 15 bp, Homo sapiens
gagaacattctttca

SEQ ID NO: 1815402 - DNA, 15 bp, Homo sapiens
agaacattctttcag

SEQ ID NO: 1815403 - DNA, 15 bp, Homo sapiens
gaacattctttcagc

SEQ ID NO: 1815404 - DNA, 15 bp, Homo sapiens
aacattctttcagca

SEQ ID NO: 1815405 - DNA, 15 bp, Homo sapiens
acattctttcagcag

SEQ ID NO: 1815406 - DNA, 15 bp, Homo sapiens
cattctttcagcaga

SEQ ID NO: 1815407 - DNA, 15 bp, Homo sapiens
attctttcagcagac

SEQ ID NO: 1815408 - DNA, 15 bp, Homo sapiens
ttctttcagcagaca

SEQ ID NO: 1815409 - DNA, 15 bp, Homo sapiens
tctttcagcagacaa

SEQ ID NO: 1815410 - DNA, 15 bp, Homo sapiens
ctttcagcagacaac

SEQ ID NO: 1815411 - DNA, 15 bp, Homo sapiens
tttcagcagacaact

SEQ ID NO: 1815412 - DNA, 15 bp, Homo sapiens
ttcagcagacaactt

SEQ ID NO: 1815413 - DNA, 15 bp, Homo sapiens
tcagcagacaacttc

SEQ ID NO: 1815414 - DNA, 15 bp, Homo sapiens
cagcagacaacttca

SEQ ID NO: 1815415 - DNA, 15 bp, Homo sapiens
agcagacaacttcag

SEQ ID NO: 1815416 - DNA, 15 bp, Homo sapiens
gcagacaacttcagt

SEQ ID NO: 1815417 - DNA, 15 bp, Homo sapiens
cagacaacttcagtt

SEQ ID NO: 1815418 - DNA, 15 bp, Homo sapiens
agacaacttcagttg

SEQ ID NO: 1815419 - DNA, 15 bp, Homo sapiens
gacaacttcagttgg

SEQ ID NO: 1815420 - DNA, 15 bp, Homo sapiens
acaacttcagttggt

SEQ ID NO: 1815421 - DNA, 15 bp, Homo sapiens
caacttcagttggta

SEQ ID NO: 1815422 - DNA, 15 bp, Homo sapiens
aacttcagttggtat

SEQ ID NO: 1815423 - DNA, 15 bp, Homo sapiens
acttcagttggtatt

SEQ ID NO: 1815424 - DNA, 15 bp, Homo sapiens
cttcagttggtatta

SEQ ID NO: 1815425 - DNA, 15 bp, Homo sapiens
ttcagttggtattag

SEQ ID NO: 1815426 - DNA, 15 bp, Homo sapiens
tcagttggtattagg

SEQ ID NO: 1815427 - DNA, 15 bp, Homo sapiens
cagttggtattaggc

SEQ ID NO: 1815428 - DNA, 15 bp, Homo sapiens
agttggtattaggcc

SEQ ID NO: 1815429 - DNA, 15 bp, Homo sapiens
gttggtattaggcca

SEQ ID NO: 1815430 - DNA, 15 bp, Homo sapiens
ttggtattaggccaa

SEQ ID NO: 1815431 - DNA, 15 bp, Homo sapiens
tggtattaggccaag

SEQ ID NO: 1815432 - DNA, 15 bp, Homo sapiens
ggtattaggccaagg

SEQ ID NO: 1815433 - DNA, 15 bp, Homo sapiens
gtattaggccaaggt

SEQ ID NO: 1815434 - DNA, 15 bp, Homo sapiens
tattaggccaaggta

SEQ ID NO: 1815435 - DNA, 15 bp, Homo sapiens
attaggccaaggtaa

SEQ ID NO: 1815436 - DNA, 15 bp, Homo sapiens
ttaggccaaggtaag

SEQ ID NO: 1815437 - DNA, 15 bp, Homo sapiens
taggccaaggtaaga

SEQ ID NO: 1815438 - DNA, 15 bp, Homo sapiens
aggccaaggtaagaa

SEQ ID NO: 1815439 - DNA, 15 bp, Homo sapiens
ggccaaggtaagaaa

SEQ ID NO: 1815440 - DNA, 15 bp, Homo sapiens
gccaaggtaagaaag

SEQ ID NO: 1815441 - DNA, 15 bp, Homo sapiens
ccaaggtaagaaagg

SEQ ID NO: 1815442 - DNA, 15 bp, Homo sapiens
caaggtaagaaaggc

SEQ ID NO: 1815443 - DNA, 15 bp, Homo sapiens
aaggtaagaaaggcc

SEQ ID NO: 1815444 - DNA, 15 bp, Homo sapiens
aggtaagaaaggcca

SEQ ID NO: 1815445 - DNA, 15 bp, Homo sapiens
ggtaagaaaggccaa

SEQ ID NO: 1815446 - DNA, 15 bp, Homo sapiens
gtaagaaaggccaac

SEQ ID NO: 1815447 - DNA, 15 bp, Homo sapiens
taagaaaggccaaca

SEQ ID NO: 1815448 - DNA, 15 bp, Homo sapiens
aagaaaggccaacag

SEQ ID NO: 1815449 - DNA, 15 bp, Homo sapiens
agaaaggccaacagc

SEQ ID NO: 1815450 - DNA, 15 bp, Homo sapiens
gaaaggccaacagca

SEQ ID NO: 1815451 - DNA, 15 bp, Homo sapiens
aaaggccaacagcat

SEQ ID NO: 1815452 - DNA, 15 bp, Homo sapiens
aaggccaacagcatc

SEQ ID NO: 1815453 - DNA, 15 bp, Homo sapiens
aggccaacagcatcc

SEQ ID NO: 1815454 - DNA, 15 bp, Homo sapiens
ggccaacagcatcct

SEQ ID NO: 1815455 - DNA, 15 bp, Homo sapiens
gccaacagcatcctt

SEQ ID NO: 1815456 - DNA, 15 bp, Homo sapiens
ccaacagcatccttt

SEQ ID NO: 1815457 - DNA, 15 bp, Homo sapiens
caacagcatcctttc

SEQ ID NO: 1815458 - DNA, 15 bp, Homo sapiens
aacagcatcctttct

SEQ ID NO: 1815459 - DNA, 15 bp, Homo sapiens
acagcatcctttctg

SEQ ID NO: 1815460 - DNA, 15 bp, Homo sapiens
cagcatcctttctga

SEQ ID NO: 1815461 - DNA, 15 bp, Homo sapiens
agcatcctttctgaa

SEQ ID NO: 1815462 - DNA, 15 bp, Homo sapiens
gcatcctttctgaag

SEQ ID NO: 1815463 - DNA, 15 bp, Homo sapiens
catcctttctgaaga

SEQ ID NO: 1815464 - DNA, 15 bp, Homo sapiens
atcctttctgaagaa

SEQ ID NO: 1815465 - DNA, 15 bp, Homo sapiens
tcctttctgaagaaa

SEQ ID NO: 1815466 - DNA, 15 bp, Homo sapiens
cctttctgaagaaac

SEQ ID NO: 1815467 - DNA, 15 bp, Homo sapiens
ctttctgaagaaacc

SEQ ID NO: 1815468 - DNA, 15 bp, Homo sapiens
tttctgaagaaacct

SEQ ID NO: 1815469 - DNA, 15 bp, Homo sapiens
ttctgaagaaacctc

SEQ ID NO: 1815470 - DNA, 15 bp, Homo sapiens
tctgaagaaacctca

SEQ ID NO: 1815471 - DNA, 15 bp, Homo sapiens
ctgaagaaacctcag

SEQ ID NO: 1815472 - DNA, 15 bp, Homo sapiens
tgaagaaacctcagg

SEQ ID NO: 1815473 - DNA, 15 bp, Homo sapiens
gaagaaacctcagga

SEQ ID NO: 1815474 - DNA, 15 bp, Homo sapiens
aagaaacctcaggag

SEQ ID NO: 1815475 - DNA, 15 bp, Homo sapiens
agaaacctcaggaga

SEQ ID NO: 1815476 - DNA, 15 bp, Homo sapiens
gaaacctcaggagat

SEQ ID NO: 1815477 - DNA, 15 bp, Homo sapiens
aaacctcaggagatg

SEQ ID NO: 1815478 - DNA, 15 bp, Homo sapiens
aacctcaggagatgg

SEQ ID NO: 1815479 - DNA, 15 bp, Homo sapiens
acctcaggagatggc

SEQ ID NO: 1815480 - DNA, 15 bp, Homo sapiens
cctcaggagatggct

SEQ ID NO: 1815481 - DNA, 15 bp, Homo sapiens
ctcaggagatggctc

SEQ ID NO: 1815482 - DNA, 15 bp, Homo sapiens
tcaggagatggctca

SEQ ID NO: 1815483 - DNA, 15 bp, Homo sapiens
caggagatggctcac

SEQ ID NO: 1815484 - DNA, 15 bp, Homo sapiens
aggagatggctcact

SEQ ID NO: 1815485 - DNA, 15 bp, Homo sapiens
ggagatggctcactg

SEQ ID NO: 1815486 - DNA, 15 bp, Homo sapiens
gagatggctcactgc

SEQ ID NO: 1815487 - DNA, 15 bp, Homo sapiens
agatggctcactgcc

SEQ ID NO: 1815488 - DNA, 15 bp, Homo sapiens
gatggctcactgcca

SEQ ID NO: 1815489 - DNA, 15 bp, Homo sapiens
atggctcactgccag

SEQ ID NO: 1815490 - DNA, 15 bp, Homo sapiens
tggctcactgccaga

SEQ ID NO: 1815491 - DNA, 15 bp, Homo sapiens
ggctcactgccagaa

SEQ ID NO: 1815492 - DNA, 15 bp, Homo sapiens
gctcactgccagaaa

SEQ ID NO: 1815493 - DNA, 15 bp, Homo sapiens
ctcactgccagaaag

SEQ ID NO: 1815494 - DNA, 15 bp, Homo sapiens
tcactgccagaaagc

SEQ ID NO: 1815495 - DNA, 15 bp, Homo sapiens
cactgccagaaagct

SEQ ID NO: 1815496 - DNA, 15 bp, Homo sapiens
actgccagaaagcta

SEQ ID NO: 1815497 - DNA, 15 bp, Homo sapiens
ctgccagaaagctat

SEQ ID NO: 1815498 - DNA, 15 bp, Homo sapiens
tgccagaaagctata

SEQ ID NO: 1815499 - DNA, 15 bp, Homo sapiens
gccagaaagctataa

SEQ ID NO: 1815500 - DNA, 15 bp, Homo sapiens
ccagaaagctataac

SEQ ID NO: 1815501 - DNA, 15 bp, Homo sapiens
cagaaagctataacc

SEQ ID NO: 1815502 - DNA, 15 bp, Homo sapiens
agaaagctataacct

SEQ ID NO: 1815503 - DNA, 15 bp, Homo sapiens
gaaagctataacctg

SEQ ID NO: 1815504 - DNA, 15 bp, Homo sapiens
aaagctataacctgg

SEQ ID NO: 1815505 - DNA, 15 bp, Homo sapiens
aagctataacctgga

SEQ ID NO: 1815506 - DNA, 15 bp, Homo sapiens
agctataacctggaa

SEQ ID NO: 1815507 - DNA, 15 bp, Homo sapiens
gctataacctggaag

SEQ ID NO: 1815508 - DNA, 15 bp, Homo sapiens
ctataacctggaagg

SEQ ID NO: 1815509 - DNA, 15 bp, Homo sapiens
tataacctggaaggg

SEQ ID NO: 1815510 - DNA, 15 bp, Homo sapiens
ataacctggaagggg

SEQ ID NO: 1815511 - DNA, 15 bp, Homo sapiens
taacctggaagggga

SEQ ID NO: 1815512 - DNA, 15 bp, Homo sapiens
aacctggaaggggaa

SEQ ID NO: 1815513 - DNA, 15 bp, Homo sapiens
acctggaaggggaat

SEQ ID NO: 1815514 - DNA, 15 bp, Homo sapiens
cctggaaggggaatt

SEQ ID NO: 1815515 - DNA, 15 bp, Homo sapiens
ctggaaggggaattg

SEQ ID NO: 1815516 - DNA, 15 bp, Homo sapiens
tggaaggggaattgt

SEQ ID NO: 1815517 - DNA, 15 bp, Homo sapiens
ggaaggggaattgtt

SEQ ID NO: 1815518 - DNA, 15 bp, Homo sapiens
gaaggggaattgtta

SEQ ID NO: 1815519 - DNA, 15 bp, Homo sapiens
aaggggaattgttaa

SEQ ID NO: 1815520 - DNA, 15 bp, Homo sapiens
aggggaattgttaaa

SEQ ID NO: 1815521 - DNA, 15 bp, Homo sapiens
ggggaattgttaaat

SEQ ID NO: 1815522 - DNA, 15 bp, Homo sapiens
gggaattgttaaata

SEQ ID NO: 1815523 - DNA, 15 bp, Homo sapiens
ggaattgttaaatag

SEQ ID NO: 1815524 - DNA, 15 bp, Homo sapiens
gaattgttaaataga

SEQ ID NO: 1815525 - DNA, 15 bp, Homo sapiens
aattgttaaatagat

SEQ ID NO: 1815526 - DNA, 15 bp, Homo sapiens
attgttaaatagatg

SEQ ID NO: 1815527 - DNA, 15 bp, Homo sapiens
ttgttaaatagatga

SEQ ID NO: 1815528 - DNA, 15 bp, Homo sapiens
tgttaaatagatgag

SEQ ID NO: 1815529 - DNA, 15 bp, Homo sapiens
gttaaatagatgagg

SEQ ID NO: 1815530 - DNA, 15 bp, Homo sapiens
ttaaatagatgaggg

SEQ ID NO: 1815531 - DNA, 15 bp, Homo sapiens
taaatagatgagggg

SEQ ID NO: 1815532 - DNA, 15 bp, Homo sapiens
aaatagatgaggggc

SEQ ID NO: 1815533 - DNA, 15 bp, Homo sapiens
aatagatgaggggct

SEQ ID NO: 1815534 - DNA, 15 bp, Homo sapiens
atagatgaggggctg

SEQ ID NO: 1815535 - DNA, 15 bp, Homo sapiens
tagatgaggggctgg

SEQ ID NO: 1815536 - DNA, 15 bp, Homo sapiens
agatgaggggctgga

SEQ ID NO: 1815537 - DNA, 15 bp, Homo sapiens
gatgaggggctggat

SEQ ID NO: 1815538 - DNA, 15 bp, Homo sapiens
atgaggggctggatg

SEQ ID NO: 1815539 - DNA, 15 bp, Homo sapiens
tgaggggctggatga

SEQ ID NO: 1815540 - DNA, 15 bp, Homo sapiens
gaggggctggatgaa

SEQ ID NO: 1815541 - DNA, 15 bp, Homo sapiens
aggggctggatgaag

SEQ ID NO: 1815542 - DNA, 15 bp, Homo sapiens
ggggctggatgaagg

SEQ ID NO: 1815543 - DNA, 15 bp, Homo sapiens
gggctggatgaagga

SEQ ID NO: 1815544 - DNA, 15 bp, Homo sapiens
ggctggatgaaggac

SEQ ID NO: 1815545 - DNA, 15 bp, Homo sapiens
gctggatgaaggacg

SEQ ID NO: 1815546 - DNA, 15 bp, Homo sapiens
ctggatgaaggacga

SEQ ID NO: 1815547 - DNA, 15 bp, Homo sapiens
tggatgaaggacgag

SEQ ID NO: 1815548 - DNA, 15 bp, Homo sapiens
ggatgaaggacgaga

SEQ ID NO: 1815549 - DNA, 15 bp, Homo sapiens
gatgaaggacgagac

SEQ ID NO: 1815550 - DNA, 15 bp, Homo sapiens
atgaaggacgagacc

SEQ ID NO: 1815551 - DNA, 15 bp, Homo sapiens
tgaaggacgagacca

SEQ ID NO: 1815552 - DNA, 15 bp, Homo sapiens
gaaggacgagaccag

SEQ ID NO: 1815553 - DNA, 15 bp, Homo sapiens
aaggacgagaccagg

SEQ ID NO: 1815554 - DNA, 15 bp, Homo sapiens
aggacgagaccaggg

SEQ ID NO: 1815555 - DNA, 15 bp, Homo sapiens
ggacgagaccagggc

SEQ ID NO: 1815556 - DNA, 15 bp, Homo sapiens
gacgagaccagggcc

SEQ ID NO: 1815557 - DNA, 15 bp, Homo sapiens
acgagaccagggccc

SEQ ID NO: 1815558 - DNA, 15 bp, Homo sapiens
cgagaccagggcccc

SEQ ID NO: 1815559 - DNA, 15 bp, Homo sapiens
gagaccagggccccg

SEQ ID NO: 1815560 - DNA, 15 bp, Homo sapiens
agaccagggccccgt

SEQ ID NO: 1815561 - DNA, 15 bp, Homo sapiens
gaccagggccccgtc

SEQ ID NO: 1815562 - DNA, 15 bp, Homo sapiens
accagggccccgtca

SEQ ID NO: 1815563 - DNA, 15 bp, Homo sapiens
ccagggccccgtcac

SEQ ID NO: 1815564 - DNA, 15 bp, Homo sapiens
cagggccccgtcacg

SEQ ID NO: 1815565 - DNA, 15 bp, Homo sapiens
agggccccgtcacgg

SEQ ID NO: 1815566 - DNA, 15 bp, Homo sapiens
gggccccgtcacggg

SEQ ID NO: 1815567 - DNA, 15 bp, Homo sapiens
ggccccgtcacggga

SEQ ID NO: 1815568 - DNA, 15 bp, Homo sapiens
gccccgtcacgggag

SEQ ID NO: 1815569 - DNA, 15 bp, Homo sapiens
ccccgtcacgggaga

SEQ ID NO: 1815570 - DNA, 15 bp, Homo sapiens
cccgtcacgggagag

SEQ ID NO: 1815571 - DNA, 15 bp, Homo sapiens
ccgtcacgggagagg

SEQ ID NO: 1815572 - DNA, 15 bp, Homo sapiens
cgtcacgggagaggg

SEQ ID NO: 1815573 - DNA, 15 bp, Homo sapiens
gtcacgggagaggga

SEQ ID NO: 1815574 - DNA, 15 bp, Homo sapiens
tcacgggagagggaa

SEQ ID NO: 1815575 - DNA, 15 bp, Homo sapiens
cacgggagagggaag

SEQ ID NO: 1815576 - DNA, 15 bp, Homo sapiens
acgggagagggaagg

SEQ ID NO: 1815577 - DNA, 15 bp, Homo sapiens
cgggagagggaaggc

SEQ ID NO: 1815578 - DNA, 15 bp, Homo sapiens
gggagagggaaggca

SEQ ID NO: 1815579 - DNA, 15 bp, Homo sapiens
ggagagggaaggcag

SEQ ID NO: 1815580 - DNA, 15 bp, Homo sapiens
gagagggaaggcagc

SEQ ID NO: 1815581 - DNA, 15 bp, Homo sapiens
agagggaaggcagct

SEQ ID NO: 1815582 - DNA, 15 bp, Homo sapiens
gagggaaggcagctc

SEQ ID NO: 1815583 - DNA, 15 bp, Homo sapiens
agggaaggcagctcc

SEQ ID NO: 1815584 - DNA, 15 bp, Homo sapiens
gggaaggcagctcct

SEQ ID NO: 1815585 - DNA, 15 bp, Homo sapiens
ggaaggcagctcctg

SEQ ID NO: 1815586 - DNA, 15 bp, Homo sapiens
gaaggcagctcctgg

SEQ ID NO: 1815587 - DNA, 15 bp, Homo sapiens
aaggcagctcctggc

SEQ ID NO: 1815588 - DNA, 15 bp, Homo sapiens
aggcagctcctggct

SEQ ID NO: 1815589 - DNA, 15 bp, Homo sapiens
ggcagctcctggctg

SEQ ID NO: 1815590 - DNA, 15 bp, Homo sapiens
gcagctcctggctgt

SEQ ID NO: 1815591 - DNA, 15 bp, Homo sapiens
cagctcctggctgtg

SEQ ID NO: 1815592 - DNA, 15 bp, Homo sapiens
agctcctggctgtgt

SEQ ID NO: 1815593 - DNA, 15 bp, Homo sapiens
gctcctggctgtgtc

SEQ ID NO: 1815594 - DNA, 15 bp, Homo sapiens
ctcctggctgtgtct

SEQ ID NO: 1815595 - DNA, 15 bp, Homo sapiens
tcctggctgtgtctg

SEQ ID NO: 1815596 - DNA, 15 bp, Homo sapiens
cctggctgtgtctgt

SEQ ID NO: 1815597 - DNA, 15 bp, Homo sapiens
ctggctgtgtctgtc

SEQ ID NO: 1815598 - DNA, 15 bp, Homo sapiens
tggctgtgtctgtcc

SEQ ID NO: 1815599 - DNA, 15 bp, Homo sapiens
ggctgtgtctgtccc

SEQ ID NO: 1815600 - DNA, 15 bp, Homo sapiens
gctgtgtctgtcccc

SEQ ID NO: 1815601 - DNA, 15 bp, Homo sapiens
ctgtgtctgtccccg

SEQ ID NO: 1815602 - DNA, 15 bp, Homo sapiens
tgtgtctgtccccgg

SEQ ID NO: 1815603 - DNA, 15 bp, Homo sapiens
gtgtctgtccccggc

SEQ ID NO: 1815604 - DNA, 15 bp, Homo sapiens
tgtctgtccccggct

SEQ ID NO: 1815605 - DNA, 15 bp, Homo sapiens
gtctgtccccggctt

SEQ ID NO: 1815606 - DNA, 15 bp, Homo sapiens
tctgtccccggcttt

SEQ ID NO: 1815607 - DNA, 15 bp, Homo sapiens
ctgtccccggctttt

SEQ ID NO: 1815608 - DNA, 15 bp, Homo sapiens
tgtccccggcttttg

SEQ ID NO: 1815609 - DNA, 15 bp, Homo sapiens
gtccccggcttttgg

SEQ ID NO: 1815610 - DNA, 15 bp, Homo sapiens
tccccggcttttggg

SEQ ID NO: 1815611 - DNA, 15 bp, Homo sapiens
ccccggcttttgggc

SEQ ID NO: 1815612 - DNA, 15 bp, Homo sapiens
cccggcttttgggct

SEQ ID NO: 1815613 - DNA, 15 bp, Homo sapiens
ccggcttttgggctc

SEQ ID NO: 1815614 - DNA, 15 bp, Homo sapiens
cggcttttgggctct

SEQ ID NO: 1815615 - DNA, 15 bp, Homo sapiens
ggcttttgggctctg

SEQ ID NO: 1815616 - DNA, 15 bp, Homo sapiens
gcttttgggctctga

SEQ ID NO: 1815617 - DNA, 15 bp, Homo sapiens
cttttgggctctgaa

SEQ ID NO: 1815618 - DNA, 15 bp, Homo sapiens
ttttgggctctgaag

SEQ ID NO: 1815619 - DNA, 15 bp, Homo sapiens
tttgggctctgaagg

SEQ ID NO: 1815620 - DNA, 15 bp, Homo sapiens
ttgggctctgaagga

SEQ ID NO: 1815621 - DNA, 15 bp, Homo sapiens
tgggctctgaaggac

SEQ ID NO: 1815622 - DNA, 15 bp, Homo sapiens
gggctctgaaggact

SEQ ID NO: 1815623 - DNA, 15 bp, Homo sapiens
ggctctgaaggacta

SEQ ID NO: 1815624 - DNA, 15 bp, Homo sapiens
gctctgaaggactaa

SEQ ID NO: 1815625 - DNA, 15 bp, Homo sapiens
ctctgaaggactaac

SEQ ID NO: 1815626 - DNA, 15 bp, Homo sapiens
tctgaaggactaacc

SEQ ID NO: 1815627 - DNA, 15 bp, Homo sapiens
ctgaaggactaacca

SEQ ID NO: 1815628 - DNA, 15 bp, Homo sapiens
tgaaggactaaccac

SEQ ID NO: 1815629 - DNA, 15 bp, Homo sapiens
gaaggactaaccaca

SEQ ID NO: 1815630 - DNA, 15 bp, Homo sapiens
aaggactaaccacat

SEQ ID NO: 1815631 - DNA, 15 bp, Homo sapiens
aggactaaccacatg

SEQ ID NO: 1815632 - DNA, 15 bp, Homo sapiens
ggactaaccacatgc

SEQ ID NO: 1815633 - DNA, 15 bp, Homo sapiens
gactaaccacatgct

SEQ ID NO: 1815634 - DNA, 15 bp, Homo sapiens
actaaccacatgctt

SEQ ID NO: 1815635 - DNA, 15 bp, Homo sapiens
ctaaccacatgcttt

SEQ ID NO: 1815636 - DNA, 15 bp, Homo sapiens
taaccacatgctttc

SEQ ID NO: 1815637 - DNA, 15 bp, Homo sapiens
aaccacatgctttct

SEQ ID NO: 1815638 - DNA, 15 bp, Homo sapiens
accacatgctttctc

SEQ ID NO: 1815639 - DNA, 15 bp, Homo sapiens
ccacatgctttctca

SEQ ID NO: 1815640 - DNA, 15 bp, Homo sapiens
cacatgctttctcac

SEQ ID NO: 1815641 - DNA, 15 bp, Homo sapiens
acatgctttctcact

SEQ ID NO: 1815642 - DNA, 15 bp, Homo sapiens
catgctttctcactt

SEQ ID NO: 1815643 - DNA, 15 bp, Homo sapiens
atgctttctcacttg

SEQ ID NO: 1815644 - DNA, 15 bp, Homo sapiens
tgctttctcacttgt

SEQ ID NO: 1815645 - DNA, 15 bp, Homo sapiens
gctttctcacttgtc

SEQ ID NO: 1815646 - DNA, 15 bp, Homo sapiens
ctttctcacttgtct

SEQ ID NO: 1815647 - DNA, 15 bp, Homo sapiens
tttctcacttgtctc

SEQ ID NO: 1815648 - DNA, 15 bp, Homo sapiens
ttctcacttgtctca

SEQ ID NO: 1815649 - DNA, 15 bp, Homo sapiens
tctcacttgtctcag

SEQ ID NO: 1815650 - DNA, 15 bp, Homo sapiens
ctcacttgtctcaga

SEQ ID NO: 1815651 - DNA, 15 bp, Homo sapiens
tcacttgtctcagat

SEQ ID NO: 1815652 - DNA, 15 bp, Homo sapiens
cacttgtctcagatt

SEQ ID NO: 1815653 - DNA, 15 bp, Homo sapiens
acttgtctcagattg

SEQ ID NO: 1815654 - DNA, 15 bp, Homo sapiens
cttgtctcagattgc

SEQ ID NO: 1815655 - DNA, 15 bp, Homo sapiens
ttgtctcagattgcc

SEQ ID NO: 1815656 - DNA, 15 bp, Homo sapiens
tgtctcagattgccc

SEQ ID NO: 1815657 - DNA, 15 bp, Homo sapiens
gtctcagattgccca

SEQ ID NO: 1815658 - DNA, 15 bp, Homo sapiens
tctcagattgcccag

SEQ ID NO: 1815659 - DNA, 15 bp, Homo sapiens
ctcagattgcccagc

SEQ ID NO: 1815660 - DNA, 15 bp, Homo sapiens
tcagattgcccagct

SEQ ID NO: 1815661 - DNA, 15 bp, Homo sapiens
cagattgcccagctg

SEQ ID NO: 1815662 - DNA, 15 bp, Homo sapiens
agattgcccagctgc

SEQ ID NO: 1815663 - DNA, 15 bp, Homo sapiens
gattgcccagctgcc

SEQ ID NO: 1815664 - DNA, 15 bp, Homo sapiens
attgcccagctgccc

SEQ ID NO: 1815665 - DNA, 15 bp, Homo sapiens
ttgcccagctgccct

SEQ ID NO: 1815666 - DNA, 15 bp, Homo sapiens
tgcccagctgccctt

SEQ ID NO: 1815667 - DNA, 15 bp, Homo sapiens
gcccagctgcccttg

SEQ ID NO: 1815668 - DNA, 15 bp, Homo sapiens
cccagctgcccttga

SEQ ID NO: 1815669 - DNA, 15 bp, Homo sapiens
ccagctgcccttgac

SEQ ID NO: 1815670 - DNA, 15 bp, Homo sapiens
cagctgcccttgacc

SEQ ID NO: 1815671 - DNA, 15 bp, Homo sapiens
agctgcccttgaccg

SEQ ID NO: 1815672 - DNA, 15 bp, Homo sapiens
gctgcccttgaccgg

SEQ ID NO: 1815673 - DNA, 15 bp, Homo sapiens
ctgcccttgaccgga

SEQ ID NO: 1815674 - DNA, 15 bp, Homo sapiens
tgcccttgaccggaa

SEQ ID NO: 1815675 - DNA, 15 bp, Homo sapiens
gcccttgaccggaag

SEQ ID NO: 1815676 - DNA, 15 bp, Homo sapiens
cccttgaccggaagc

SEQ ID NO: 1815677 - DNA, 15 bp, Homo sapiens
ccttgaccggaagca

SEQ ID NO: 1815678 - DNA, 15 bp, Homo sapiens
cttgaccggaagcat

SEQ ID NO: 1815679 - DNA, 15 bp, Homo sapiens
ttgaccggaagcatg

SEQ ID NO: 1815680 - DNA, 15 bp, Homo sapiens
tgaccggaagcatga

SEQ ID NO: 1815681 - DNA, 15 bp, Homo sapiens
gaccggaagcatgag

SEQ ID NO: 1815682 - DNA, 15 bp, Homo sapiens
accggaagcatgagt

SEQ ID NO: 1815683 - DNA, 15 bp, Homo sapiens
ccggaagcatgagta

SEQ ID NO: 1815684 - DNA, 15 bp, Homo sapiens
cggaagcatgagtat

SEQ ID NO: 1815685 - DNA, 15 bp, Homo sapiens
ggaagcatgagtatc

SEQ ID NO: 1815686 - DNA, 15 bp, Homo sapiens
gaagcatgagtatca

SEQ ID NO: 1815687 - DNA, 15 bp, Homo sapiens
aagcatgagtatcat

SEQ ID NO: 1815688 - DNA, 15 bp, Homo sapiens
agcatgagtatcatc

SEQ ID NO: 1815689 - DNA, 15 bp, Homo sapiens
gcatgagtatcatct

SEQ ID NO: 1815690 - DNA, 15 bp, Homo sapiens
catgagtatcatctt

SEQ ID NO: 1815691 - DNA, 15 bp, Homo sapiens
atgagtatcatcttc

SEQ ID NO: 1815692 - DNA, 15 bp, Homo sapiens
tgagtatcatcttct

SEQ ID NO: 1815693 - DNA, 15 bp, Homo sapiens
gagtatcatcttctt

SEQ ID NO: 1815694 - DNA, 15 bp, Homo sapiens
agtatcatcttcttc

SEQ ID NO: 1815695 - DNA, 15 bp, Homo sapiens
gtatcatcttcttcc

SEQ ID NO: 1815696 - DNA, 15 bp, Homo sapiens
tatcatcttcttcct

SEQ ID NO: 1815697 - DNA, 15 bp, Homo sapiens
atcatcttcttcctg

SEQ ID NO: 1815698 - DNA, 15 bp, Homo sapiens
tcatcttcttcctgc

SEQ ID NO: 1815699 - DNA, 15 bp, Homo sapiens
catcttcttcctgcc

SEQ ID NO: 1815700 - DNA, 15 bp, Homo sapiens
atcttcttcctgccc

SEQ ID NO: 1815701 - DNA, 15 bp, Homo sapiens
tcttcttcctgcccc

SEQ ID NO: 1815702 - DNA, 15 bp, Homo sapiens
cttcttcctgcccct

SEQ ID NO: 1815703 - DNA, 15 bp, Homo sapiens
ttcttcctgcccctg

SEQ ID NO: 1815704 - DNA, 15 bp, Homo sapiens
tcttcctgcccctga

SEQ ID NO: 1815705 - DNA, 15 bp, Homo sapiens
cttcctgcccctgaa

SEQ ID NO: 1815706 - DNA, 15 bp, Homo sapiens
ttcctgcccctgaaa

SEQ ID NO: 1815707 - DNA, 15 bp, Homo sapiens
tcctgcccctgaaag

SEQ ID NO: 1815708 - DNA, 15 bp, Homo sapiens
cctgcccctgaaagt

SEQ ID NO: 1815709 - DNA, 15 bp, Homo sapiens
ctgcccctgaaagtg

SEQ ID NO: 1815710 - DNA, 15 bp, Homo sapiens
tgcccctgaaagtga

SEQ ID NO: 1815711 - DNA, 15 bp, Homo sapiens
gcccctgaaagtgac

SEQ ID NO: 1815712 - DNA, 15 bp, Homo sapiens
cccctgaaagtgacc

SEQ ID NO: 1815713 - DNA, 15 bp, Homo sapiens
ccctgaaagtgaccc

SEQ ID NO: 1815714 - DNA, 15 bp, Homo sapiens
cctgaaagtgaccca

SEQ ID NO: 1815715 - DNA, 15 bp, Homo sapiens
ctgaaagtgacccag

SEQ ID NO: 1815716 - DNA, 15 bp, Homo sapiens
tgaaagtgacccaga

SEQ ID NO: 1815717 - DNA, 15 bp, Homo sapiens
gaaagtgacccagaa

SEQ ID NO: 1815718 - DNA, 15 bp, Homo sapiens
aagtgacccagaatt

SEQ ID NO: 1815719 - DNA, 15 bp, Homo sapiens
agtgacccagaattt

SEQ ID NO: 1815720 - DNA, 15 bp, Homo sapiens
gtgacccagaatttg

SEQ ID NO: 1815721 - DNA, 15 bp, Homo sapiens
tgacccagaatttga

SEQ ID NO: 1815722 - DNA, 15 bp, Homo sapiens
gacccagaatttgac

SEQ ID NO: 1815723 - DNA, 15 bp, Homo sapiens
acccagaatttgacc

SEQ ID NO: 1815724 - DNA, 15 bp, Homo sapiens
cccagaatttgacct

SEQ ID NO: 1815725 - DNA, 15 bp, Homo sapiens
ccagaatttgacctt

SEQ ID NO: 1815726 - DNA, 15 bp, Homo sapiens
cagaatttgaccttg

SEQ ID NO: 1815727 - DNA, 15 bp, Homo sapiens
agaatttgaccttga

SEQ ID NO: 1815728 - DNA, 15 bp, Homo sapiens
gaatttgaccttgat

SEQ ID NO: 1815729 - DNA, 15 bp, Homo sapiens
atttgaccttgatag

SEQ ID NO: 1815730 - DNA, 15 bp, Homo sapiens
tttgaccttgataga

SEQ ID NO: 1815731 - DNA, 15 bp, Homo sapiens
ttgaccttgatagag

SEQ ID NO: 1815732 - DNA, 15 bp, Homo sapiens
tgaccttgatagagg

SEQ ID NO: 1815733 - DNA, 15 bp, Homo sapiens
gaccttgatagagga

SEQ ID NO: 1815734 - DNA, 15 bp, Homo sapiens
accttgatagaggag

SEQ ID NO: 1815735 - DNA, 15 bp, Homo sapiens
ccttgatagaggaga

SEQ ID NO: 1815736 - DNA, 15 bp, Homo sapiens
cttgatagaggagag

SEQ ID NO: 1815737 - DNA, 15 bp, Homo sapiens
ttgatagaggagagc

SEQ ID NO: 1815738 - DNA, 15 bp, Homo sapiens
tgatagaggagagcc

SEQ ID NO: 1815739 - DNA, 15 bp, Homo sapiens
gatagaggagagcct

SEQ ID NO: 1815740 - DNA, 15 bp, Homo sapiens
atagaggagagcctc

SEQ ID NO: 1815741 - DNA, 15 bp, Homo sapiens
tagaggagagcctca

SEQ ID NO: 1815742 - DNA, 15 bp, Homo sapiens
agaggagagcctcac

SEQ ID NO: 1815743 - DNA, 15 bp, Homo sapiens
gaggagagcctcacc

SEQ ID NO: 1815744 - DNA, 15 bp, Homo sapiens
aggagagcctcacct

SEQ ID NO: 1815745 - DNA, 15 bp, Homo sapiens
ggagagcctcacctc

SEQ ID NO: 1815746 - DNA, 15 bp, Homo sapiens
gagagcctcacctcc

SEQ ID NO: 1815747 - DNA, 15 bp, Homo sapiens
agagcctcacctccg

SEQ ID NO: 1815748 - DNA, 15 bp, Homo sapiens
gagcctcacctccga

SEQ ID NO: 1815749 - DNA, 15 bp, Homo sapiens
agcctcacctccgag

SEQ ID NO: 1815750 - DNA, 15 bp, Homo sapiens
gcctcacctccgagt

SEQ ID NO: 1815751 - DNA, 15 bp, Homo sapiens
cctcacctccgagtt

SEQ ID NO: 1815752 - DNA, 15 bp, Homo sapiens
ctcacctccgagttc

SEQ ID NO: 1815753 - DNA, 15 bp, Homo sapiens
tcacctccgagttca

SEQ ID NO: 1815754 - DNA, 15 bp, Homo sapiens
cacctccgagttcat

SEQ ID NO: 1815755 - DNA, 15 bp, Homo sapiens
acctccgagttcatt

SEQ ID NO: 1815756 - DNA, 15 bp, Homo sapiens
cctccgagttcattc

SEQ ID NO: 1815757 - DNA, 15 bp, Homo sapiens
ctccgagttcattca

SEQ ID NO: 1815758 - DNA, 15 bp, Homo sapiens
tccgagttcattcat

SEQ ID NO: 1815759 - DNA, 15 bp, Homo sapiens
ccgagttcattcatg

SEQ ID NO: 1815760 - DNA, 15 bp, Homo sapiens
cgagttcattcatga

SEQ ID NO: 1815761 - DNA, 15 bp, Homo sapiens
gagttcattcatgac

SEQ ID NO: 1815762 - DNA, 15 bp, Homo sapiens
agttcattcatgaca

SEQ ID NO: 1815763 - DNA, 15 bp, Homo sapiens
gttcattcatgacat

SEQ ID NO: 1815764 - DNA, 15 bp, Homo sapiens
ttcattcatgacata

SEQ ID NO: 1815765 - DNA, 15 bp, Homo sapiens
tcattcatgacatag

SEQ ID NO: 1815766 - DNA, 15 bp, Homo sapiens
cattcatgacataga

SEQ ID NO: 1815767 - DNA, 15 bp, Homo sapiens
attcatgacatagac

SEQ ID NO: 1815768 - DNA, 15 bp, Homo sapiens
ttcatgacatagacc

SEQ ID NO: 1815769 - DNA, 15 bp, Homo sapiens
tcatgacatagaccg

SEQ ID NO: 1815770 - DNA, 15 bp, Homo sapiens
catgacatagaccga

SEQ ID NO: 1815771 - DNA, 15 bp, Homo sapiens
atgacatagaccgag

SEQ ID NO: 1815772 - DNA, 15 bp, Homo sapiens
tgacatagaccgaga

SEQ ID NO: 1815773 - DNA, 15 bp, Homo sapiens
gacatagaccgagaa

SEQ ID NO: 1815774 - DNA, 15 bp, Homo sapiens
acatagaccgagaac

SEQ ID NO: 1815775 - DNA, 15 bp, Homo sapiens
catagaccgagaact

SEQ ID NO: 1815776 - DNA, 15 bp, Homo sapiens
atagaccgagaactg

SEQ ID NO: 1815777 - DNA, 15 bp, Homo sapiens
tagaccgagaactga

SEQ ID NO: 1815778 - DNA, 15 bp, Homo sapiens
agaccgagaactgaa

SEQ ID NO: 1815779 - DNA, 15 bp, Homo sapiens
gaccgagaactgaag

SEQ ID NO: 1815780 - DNA, 15 bp, Homo sapiens
accgagaactgaaga

SEQ ID NO: 1815781 - DNA, 15 bp, Homo sapiens
ccgagaactgaagac

SEQ ID NO: 1815782 - DNA, 15 bp, Homo sapiens
cgagaactgaagacc

SEQ ID NO: 1815783 - DNA, 15 bp, Homo sapiens
gagaactgaagaccg

SEQ ID NO: 1815784 - DNA, 15 bp, Homo sapiens
agaactgaagaccgt

SEQ ID NO: 1815785 - DNA, 15 bp, Homo sapiens
gaactgaagaccgtg

SEQ ID NO: 1815786 - DNA, 15 bp, Homo sapiens
aactgaagaccgtgc

SEQ ID NO: 1815787 - DNA, 15 bp, Homo sapiens
actgaagaccgtgca

SEQ ID NO: 1815788 - DNA, 15 bp, Homo sapiens
ctgaagaccgtgcag

SEQ ID NO: 1815789 - DNA, 15 bp, Homo sapiens
tgaagaccgtgcagg

SEQ ID NO: 1815790 - DNA, 15 bp, Homo sapiens
gaagaccgtgcaggc

SEQ ID NO: 1815791 - DNA, 15 bp, Homo sapiens
aagaccgtgcaggcg

SEQ ID NO: 1815792 - DNA, 15 bp, Homo sapiens
agaccgtgcaggcgg

SEQ ID NO: 1815793 - DNA, 15 bp, Homo sapiens
gaccgtgcaggcggt

SEQ ID NO: 1815794 - DNA, 15 bp, Homo sapiens
accgtgcaggcggtc

SEQ ID NO: 1815795 - DNA, 15 bp, Homo sapiens
ccgtgcaggcggtcc

SEQ ID NO: 1815796 - DNA, 15 bp, Homo sapiens
cgtgcaggcggtcct

SEQ ID NO: 1815797 - DNA, 15 bp, Homo sapiens
gtgcaggcggtcctc

SEQ ID NO: 1815798 - DNA, 15 bp, Homo sapiens
tgcaggcggtcctca

SEQ ID NO: 1815799 - DNA, 15 bp, Homo sapiens
gcaggcggtcctcac

SEQ ID NO: 1815800 - DNA, 15 bp, Homo sapiens
caggcggtcctcact

SEQ ID NO: 1815801 - DNA, 15 bp, Homo sapiens
aggcggtcctcactg

SEQ ID NO: 1815802 - DNA, 15 bp, Homo sapiens
ggcggtcctcactgt

SEQ ID NO: 1815803 - DNA, 15 bp, Homo sapiens
gcggtcctcactgtc

SEQ ID NO: 1815804 - DNA, 15 bp, Homo sapiens
cggtcctcactgtcc

SEQ ID NO: 1815805 - DNA, 15 bp, Homo sapiens
ggtcctcactgtccc

SEQ ID NO: 1815806 - DNA, 15 bp, Homo sapiens
gtcctcactgtcccc

SEQ ID NO: 1815807 - DNA, 15 bp, Homo sapiens
tcctcactgtcccca

SEQ ID NO: 1815808 - DNA, 15 bp, Homo sapiens
cctcactgtccccaa

SEQ ID NO: 1815809 - DNA, 15 bp, Homo sapiens
ctcactgtccccaag

SEQ ID NO: 1815810 - DNA, 15 bp, Homo sapiens
tcactgtccccaagc

SEQ ID NO: 1815811 - DNA, 15 bp, Homo sapiens
cactgtccccaagct

SEQ ID NO: 1815812 - DNA, 15 bp, Homo sapiens
actgtccccaagctg

SEQ ID NO: 1815813 - DNA, 15 bp, Homo sapiens
ctgtccccaagctga

SEQ ID NO: 1815814 - DNA, 15 bp, Homo sapiens
tgtccccaagctgaa

SEQ ID NO: 1815815 - DNA, 15 bp, Homo sapiens
gtccccaagctgaag

SEQ ID NO: 1815816 - DNA, 15 bp, Homo sapiens
tccccaagctgaagc

SEQ ID NO: 1815817 - DNA, 15 bp, Homo sapiens
ccccaagctgaagct

SEQ ID NO: 1815818 - DNA, 15 bp, Homo sapiens
cccaagctgaagctg

SEQ ID NO: 1815819 - DNA, 15 bp, Homo sapiens
ccaagctgaagctga

SEQ ID NO: 1815820 - DNA, 15 bp, Homo sapiens
caagctgaagctgag

SEQ ID NO: 1815821 - DNA, 15 bp, Homo sapiens
aagctgaagctgagt

SEQ ID NO: 1815822 - DNA, 15 bp, Homo sapiens
agctgaagctgagtt

SEQ ID NO: 1815823 - DNA, 15 bp, Homo sapiens
gctgaagctgagtta

SEQ ID NO: 1815824 - DNA, 15 bp, Homo sapiens
ctgaagctgagttat

SEQ ID NO: 1815825 - DNA, 15 bp, Homo sapiens
tgaagctgagttatg

SEQ ID NO: 1815826 - DNA, 15 bp, Homo sapiens
gaagctgagttatga

SEQ ID NO: 1815827 - DNA, 15 bp, Homo sapiens
aagctgagttatgaa

SEQ ID NO: 1815828 - DNA, 15 bp, Homo sapiens
agctgagttatgaag

SEQ ID NO: 1815829 - DNA, 15 bp, Homo sapiens
gctgagttatgaagg

SEQ ID NO: 1815830 - DNA, 15 bp, Homo sapiens
ctgagttatgaaggc

SEQ ID NO: 1815831 - DNA, 15 bp, Homo sapiens
tgagttatgaaggcg

SEQ ID NO: 1815832 - DNA, 15 bp, Homo sapiens
gagttatgaaggcga

SEQ ID NO: 1815833 - DNA, 15 bp, Homo sapiens
agttatgaaggcgaa

SEQ ID NO: 1815834 - DNA, 15 bp, Homo sapiens
gttatgaaggcgaag

SEQ ID NO: 1815835 - DNA, 15 bp, Homo sapiens
ttatgaaggcgaagt

SEQ ID NO: 1815836 - DNA, 15 bp, Homo sapiens
tatgaaggcgaagtc

SEQ ID NO: 1815837 - DNA, 15 bp, Homo sapiens
atgaaggcgaagtca

SEQ ID NO: 1815838 - DNA, 15 bp, Homo sapiens
tgaaggcgaagtcac

SEQ ID NO: 1815839 - DNA, 15 bp, Homo sapiens
gaaggcgaagtcacc

SEQ ID NO: 1815840 - DNA, 15 bp, Homo sapiens
aaggcgaagtcacca

SEQ ID NO: 1815841 - DNA, 15 bp, Homo sapiens
aggcgaagtcaccaa

SEQ ID NO: 1815842 - DNA, 15 bp, Homo sapiens
ggcgaagtcaccaag

SEQ ID NO: 1815843 - DNA, 15 bp, Homo sapiens
gcgaagtcaccaagt

SEQ ID NO: 1815844 - DNA, 15 bp, Homo sapiens
cgaagtcaccaagtc

SEQ ID NO: 1815845 - DNA, 15 bp, Homo sapiens
gaagtcaccaagtcc

SEQ ID NO: 1815846 - DNA, 15 bp, Homo sapiens
aagtcaccaagtccc

SEQ ID NO: 1815847 - DNA, 15 bp, Homo sapiens
agtcaccaagtccct

SEQ ID NO: 1815848 - DNA, 15 bp, Homo sapiens
gtcaccaagtccctg

SEQ ID NO: 1815849 - DNA, 15 bp, Homo sapiens
tcaccaagtccctgc

SEQ ID NO: 1815850 - DNA, 15 bp, Homo sapiens
caccaagtccctgca

SEQ ID NO: 1815851 - DNA, 15 bp, Homo sapiens
accaagtccctgcag

SEQ ID NO: 1815852 - DNA, 15 bp, Homo sapiens
ccaagtccctgcagg

SEQ ID NO: 1815853 - DNA, 15 bp, Homo sapiens
caagtccctgcagga

SEQ ID NO: 1815854 - DNA, 15 bp, Homo sapiens
aagtccctgcaggag

SEQ ID NO: 1815855 - DNA, 15 bp, Homo sapiens
agtccctgcaggaga

SEQ ID NO: 1815856 - DNA, 15 bp, Homo sapiens
gtccctgcaggagat

SEQ ID NO: 1815857 - DNA, 15 bp, Homo sapiens
tccctgcaggagatg

SEQ ID NO: 1815858 - DNA, 15 bp, Homo sapiens
ccctgcaggagatga

SEQ ID NO: 1815859 - DNA, 15 bp, Homo sapiens
cctgcaggagatgag

SEQ ID NO: 1815860 - DNA, 15 bp, Homo sapiens
ctgcaggagatgagt

SEQ ID NO: 1815861 - DNA, 15 bp, Homo sapiens
tgcaggagatgagta

SEQ ID NO: 1815862 - DNA, 15 bp, Homo sapiens
gcaggagatgagtat

SEQ ID NO: 1815863 - DNA, 15 bp, Homo sapiens
caggagatgagtatg

SEQ ID NO: 1815864 - DNA, 15 bp, Homo sapiens
aggagatgagtatgt

SEQ ID NO: 1815865 - DNA, 15 bp, Homo sapiens
ggagatgagtatgtc

SEQ ID NO: 1815866 - DNA, 15 bp, Homo sapiens
gagatgagtatgtct

SEQ ID NO: 1815867 - DNA, 15 bp, Homo sapiens
agatgagtatgtctg

SEQ ID NO: 1815868 - DNA, 15 bp, Homo sapiens
gatgagtatgtctga

SEQ ID NO: 1815869 - DNA, 15 bp, Homo sapiens
atgagtatgtctgaa

SEQ ID NO: 1815870 - DNA, 15 bp, Homo sapiens
tgagtatgtctgaag

SEQ ID NO: 1815871 - DNA, 15 bp, Homo sapiens
gagtatgtctgaaga

SEQ ID NO: 1815872 - DNA, 15 bp, Homo sapiens
agtatgtctgaagac

SEQ ID NO: 1815873 - DNA, 15 bp, Homo sapiens
gtatgtctgaagacc

SEQ ID NO: 1815874 - DNA, 15 bp, Homo sapiens
tatgtctgaagaccc

SEQ ID NO: 1815875 - DNA, 15 bp, Homo sapiens
atgtctgaagaccct

SEQ ID NO: 1815876 - DNA, 15 bp, Homo sapiens
tgtctgaagaccctt

SEQ ID NO: 1815877 - DNA, 15 bp, Homo sapiens
gtctgaagacccttt

SEQ ID NO: 1815878 - DNA, 15 bp, Homo sapiens
tctgaagaccctttc

SEQ ID NO: 1815879 - DNA, 15 bp, Homo sapiens
ctgaagaccctttcg

SEQ ID NO: 1815880 - DNA, 15 bp, Homo sapiens
tgaagaccctttcgc

SEQ ID NO: 1815881 - DNA, 15 bp, Homo sapiens
gaagaccctttcgct

SEQ ID NO: 1815882 - DNA, 15 bp, Homo sapiens
aagaccctttcgctc

SEQ ID NO: 1815883 - DNA, 15 bp, Homo sapiens
agaccctttcgctct

SEQ ID NO: 1815884 - DNA, 15 bp, Homo sapiens
gaccctttcgctctt

SEQ ID NO: 1815885 - DNA, 15 bp, Homo sapiens
accctttcgctcttg

SEQ ID NO: 1815886 - DNA, 15 bp, Homo sapiens
ccctttcgctcttgg

SEQ ID NO: 1815887 - DNA, 15 bp, Homo sapiens
cctttcgctcttggt

SEQ ID NO: 1815888 - DNA, 15 bp, Homo sapiens
ctttcgctcttggtg

SEQ ID NO: 1815889 - DNA, 15 bp, Homo sapiens
tttcgctcttggtgg

SEQ ID NO: 1815890 - DNA, 15 bp, Homo sapiens
ttcgctcttggtggg

SEQ ID NO: 1815891 - DNA, 15 bp, Homo sapiens
tcgctcttggtgggt

SEQ ID NO: 1815892 - DNA, 15 bp, Homo sapiens
cgctcttggtgggtg

SEQ ID NO: 1815893 - DNA, 15 bp, Homo sapiens
gggtggatggggtgg

SEQ ID NO: 1815894 - DNA, 15 bp, Homo sapiens
ggtggatggggtggg

SEQ ID NO: 1815895 - DNA, 15 bp, Homo sapiens
gtggatggggtgggg

SEQ ID NO: 1815896 - DNA, 15 bp, Homo sapiens
tggatggggtggggc

SEQ ID NO: 1815897 - DNA, 15 bp, Homo sapiens
ggatggggtggggca

SEQ ID NO: 1815898 - DNA, 15 bp, Homo sapiens
gatggggtggggcag

SEQ ID NO: 1815899 - DNA, 15 bp, Homo sapiens
atggggtggggcagg

SEQ ID NO: 1815900 - DNA, 15 bp, Homo sapiens
tggggtggggcaggg

SEQ ID NO: 1815901 - DNA, 15 bp, Homo sapiens
ggggtggggcagggt

SEQ ID NO: 1815902 - DNA, 15 bp, Homo sapiens
gggtggggcagggtc

SEQ ID NO: 1815903 - DNA, 15 bp, Homo sapiens
ggtggggcagggtct

SEQ ID NO: 1815904 - DNA, 15 bp, Homo sapiens
gtggggcagggtctt

SEQ ID NO: 1815905 - DNA, 15 bp, Homo sapiens
tggggcagggtcttt

SEQ ID NO: 1815906 - DNA, 15 bp, Homo sapiens
ggggcagggtctttg

SEQ ID NO: 1815907 - DNA, 15 bp, Homo sapiens
gggcagggtctttgg

SEQ ID NO: 1815908 - DNA, 15 bp, Homo sapiens
ggcagggtctttggg

SEQ ID NO: 1815909 - DNA, 15 bp, Homo sapiens
gcagggtctttgggc

SEQ ID NO: 1815910 - DNA, 15 bp, Homo sapiens
cagggtctttgggcc

SEQ ID NO: 1815911 - DNA, 15 bp, Homo sapiens
agggtctttgggcct

SEQ ID NO: 1815912 - DNA, 15 bp, Homo sapiens
gggtctttgggcctt

SEQ ID NO: 1815913 - DNA, 15 bp, Homo sapiens
ggtctttgggccttc

SEQ ID NO: 1815914 - DNA, 15 bp, Homo sapiens
gtctttgggccttcc

SEQ ID NO: 1815915 - DNA, 15 bp, Homo sapiens
tctttgggccttcca

SEQ ID NO: 1815916 - DNA, 15 bp, Homo sapiens
ctttgggccttccac

SEQ ID NO: 1815917 - DNA, 15 bp, Homo sapiens
tttgggccttccact

SEQ ID NO: 1815918 - DNA, 15 bp, Homo sapiens
ttgggccttccactg

SEQ ID NO: 1815919 - DNA, 15 bp, Homo sapiens
tgggccttccactgt

SEQ ID NO: 1815920 - DNA, 15 bp, Homo sapiens
gggccttccactgtg

SEQ ID NO: 1815921 - DNA, 15 bp, Homo sapiens
ggccttccactgtgc

SEQ ID NO: 1815922 - DNA, 15 bp, Homo sapiens
gccttccactgtgct

SEQ ID NO: 1815923 - DNA, 15 bp, Homo sapiens
ccttccactgtgcta

SEQ ID NO: 1815924 - DNA, 15 bp, Homo sapiens
cttccactgtgctaa

SEQ ID NO: 1815925 - DNA, 15 bp, Homo sapiens
ttccactgtgctaag

SEQ ID NO: 1815926 - DNA, 15 bp, Homo sapiens
tccactgtgctaagc

SEQ ID NO: 1815927 - DNA, 15 bp, Homo sapiens
ccactgtgctaagca

SEQ ID NO: 1815928 - DNA, 15 bp, Homo sapiens
cactgtgctaagcag

SEQ ID NO: 1815929 - DNA, 15 bp, Homo sapiens
actgtgctaagcaga

SEQ ID NO: 1815930 - DNA, 15 bp, Homo sapiens
ctgtgctaagcagaa

SEQ ID NO: 1815931 - DNA, 15 bp, Homo sapiens
tgtgctaagcagaac

SEQ ID NO: 1815932 - DNA, 15 bp, Homo sapiens
gtgctaagcagaacg

SEQ ID NO: 1815933 - DNA, 15 bp, Homo sapiens
tgctaagcagaacgc

SEQ ID NO: 1815934 - DNA, 15 bp, Homo sapiens
gctaagcagaacgca

SEQ ID NO: 1815935 - DNA, 15 bp, Homo sapiens
ctaagcagaacgcaa

SEQ ID NO: 1815936 - DNA, 15 bp, Homo sapiens
taagcagaacgcaag

SEQ ID NO: 1815937 - DNA, 15 bp, Homo sapiens
aagcagaacgcaagg

SEQ ID NO: 1815938 - DNA, 15 bp, Homo sapiens
agcagaacgcaaggg

SEQ ID NO: 1815939 - DNA, 15 bp, Homo sapiens
gcagaacgcaagggc

SEQ ID NO: 1815940 - DNA, 15 bp, Homo sapiens
cagaacgcaagggct

SEQ ID NO: 1815941 - DNA, 15 bp, Homo sapiens
agaacgcaagggctc

SEQ ID NO: 1815942 - DNA, 15 bp, Homo sapiens
gaacgcaagggctcc

SEQ ID NO: 1815943 - DNA, 15 bp, Homo sapiens
aacgcaagggctcca

SEQ ID NO: 1815944 - DNA, 15 bp, Homo sapiens
acgcaagggctccac

SEQ ID NO: 1815945 - DNA, 15 bp, Homo sapiens
cgcaagggctccaca

SEQ ID NO: 1815946 - DNA, 15 bp, Homo sapiens
gcaagggctccacag

SEQ ID NO: 1815947 - DNA, 15 bp, Homo sapiens
caagggctccacagg

SEQ ID NO: 1815948 - DNA, 15 bp, Homo sapiens
aagggctccacaggc

SEQ ID NO: 1815949 - DNA, 15 bp, Homo sapiens
agggctccacaggct

SEQ ID NO: 1815950 - DNA, 15 bp, Homo sapiens
gggctccacaggctt

SEQ ID NO: 1815951 - DNA, 15 bp, Homo sapiens
ggctccacaggcttg

SEQ ID NO: 1815952 - DNA, 15 bp, Homo sapiens
gctccacaggcttgt

SEQ ID NO: 1815953 - DNA, 15 bp, Homo sapiens
ctccacaggcttgta

SEQ ID NO: 1815954 - DNA, 15 bp, Homo sapiens
tccacaggcttgtag

SEQ ID NO: 1815955 - DNA, 15 bp, Homo sapiens
ccacaggcttgtagg

SEQ ID NO: 1815956 - DNA, 15 bp, Homo sapiens
cacaggcttgtaggg

SEQ ID NO: 1815957 - DNA, 15 bp, Homo sapiens
acaggcttgtagggg

SEQ ID NO: 1815958 - DNA, 15 bp, Homo sapiens
caggcttgtaggggg

SEQ ID NO: 1815959 - DNA, 15 bp, Homo sapiens
aggcttgtagggggg

SEQ ID NO: 1815960 - DNA, 15 bp, Homo sapiens
ggcttgtaggggggc

SEQ ID NO: 1815961 - DNA, 15 bp, Homo sapiens
gcttgtaggggggcc

SEQ ID NO: 1815962 - DNA, 15 bp, Homo sapiens
cttgtaggggggccg

SEQ ID NO: 1815963 - DNA, 15 bp, Homo sapiens
ttgtaggggggccgt

SEQ ID NO: 1815964 - DNA, 15 bp, Homo sapiens
tgtaggggggccgtg

SEQ ID NO: 1815965 - DNA, 15 bp, Homo sapiens
gtaggggggccgtgg

SEQ ID NO: 1815966 - DNA, 15 bp, Homo sapiens
taggggggccgtgga

SEQ ID NO: 1815967 - DNA, 15 bp, Homo sapiens
aggggggccgtggat

SEQ ID NO: 1815968 - DNA, 15 bp, Homo sapiens
ggggggccgtggatg

SEQ ID NO: 1815969 - DNA, 15 bp, Homo sapiens
gggggccgtggatga

SEQ ID NO: 1815970 - DNA, 15 bp, Homo sapiens
ggggccgtggatgag

SEQ ID NO: 1815971 - DNA, 15 bp, Homo sapiens
gggccgtggatgagt

SEQ ID NO: 1815972 - DNA, 15 bp, Homo sapiens
ggccgtggatgagtc

SEQ ID NO: 1815973 - DNA, 15 bp, Homo sapiens
gccgtggatgagtcc

SEQ ID NO: 1815974 - DNA, 15 bp, Homo sapiens
ccgtggatgagtcct

SEQ ID NO: 1815975 - DNA, 15 bp, Homo sapiens
cgtggatgagtcctt

SEQ ID NO: 1815976 - DNA, 15 bp, Homo sapiens
gtggatgagtcctta

SEQ ID NO: 1815977 - DNA, 15 bp, Homo sapiens
tggatgagtccttaa

SEQ ID NO: 1815978 - DNA, 15 bp, Homo sapiens
ggatgagtccttaat

SEQ ID NO: 1815979 - DNA, 15 bp, Homo sapiens
gatgagtccttaatc

SEQ ID NO: 1815980 - DNA, 15 bp, Homo sapiens
atgagtccttaatcc

SEQ ID NO: 1815981 - DNA, 15 bp, Homo sapiens
tgagtccttaatcct

SEQ ID NO: 1815982 - DNA, 15 bp, Homo sapiens
gagtccttaatcctc

SEQ ID NO: 1815983 - DNA, 15 bp, Homo sapiens
agtccttaatcctca

SEQ ID NO: 1815984 - DNA, 15 bp, Homo sapiens
gtccttaatcctcat

SEQ ID NO: 1815985 - DNA, 15 bp, Homo sapiens
tccttaatcctcatc

SEQ ID NO: 1815986 - DNA, 15 bp, Homo sapiens
ccttaatcctcatcg

SEQ ID NO: 1815987 - DNA, 15 bp, Homo sapiens
cttaatcctcatcgt

SEQ ID NO: 1815988 - DNA, 15 bp, Homo sapiens
ttaatcctcatcgtg

SEQ ID NO: 1815989 - DNA, 15 bp, Homo sapiens
taatcctcatcgtgc

SEQ ID NO: 1815990 - DNA, 15 bp, Homo sapiens
aatcctcatcgtgcc

SEQ ID NO: 1815991 - DNA, 15 bp, Homo sapiens
atcctcatcgtgcca

SEQ ID NO: 1815992 - DNA, 15 bp, Homo sapiens
tcctcatcgtgccag

SEQ ID NO: 1815993 - DNA, 15 bp, Homo sapiens
cctcatcgtgccaga

SEQ ID NO: 1815994 - DNA, 15 bp, Homo sapiens
ctcatcgtgccagaa

SEQ ID NO: 1815995 - DNA, 15 bp, Homo sapiens
tcatcgtgccagaag

SEQ ID NO: 1815996 - DNA, 15 bp, Homo sapiens
catcgtgccagaagg

SEQ ID NO: 1815997 - DNA, 15 bp, Homo sapiens
atcgtgccagaaggg

SEQ ID NO: 1815998 - DNA, 15 bp, Homo sapiens
tcgtgccagaaggga

SEQ ID NO: 1815999 - DNA, 15 bp, Homo sapiens
cgtgccagaagggaa

SEQ ID NO: 1816000 - DNA, 15 bp, Homo sapiens
gtgccagaagggaag

SEQ ID NO: 1816001 - DNA, 15 bp, Homo sapiens
tgccagaagggaagg

SEQ ID NO: 1816002 - DNA, 15 bp, Homo sapiens
gccagaagggaaggc

SEQ ID NO: 1816003 - DNA, 15 bp, Homo sapiens
ccagaagggaaggct

SEQ ID NO: 1816004 - DNA, 15 bp, Homo sapiens
cagaagggaaggctg

SEQ ID NO: 1816005 - DNA, 15 bp, Homo sapiens
agaagggaaggctga

SEQ ID NO: 1816006 - DNA, 15 bp, Homo sapiens
gaagggaaggctgaa

SEQ ID NO: 1816007 - DNA, 15 bp, Homo sapiens
aagggaaggctgaac

SEQ ID NO: 1816008 - DNA, 15 bp, Homo sapiens
agggaaggctgaact

SEQ ID NO: 1816009 - DNA, 15 bp, Homo sapiens
gggaaggctgaactg

SEQ ID NO: 1816010 - DNA, 15 bp, Homo sapiens
ggaaggctgaactgc

SEQ ID NO: 1816011 - DNA, 15 bp, Homo sapiens
gaaggctgaactgcc

SEQ ID NO: 1816012 - DNA, 15 bp, Homo sapiens
aaggctgaactgcct

SEQ ID NO: 1816013 - DNA, 15 bp, Homo sapiens
aggctgaactgcctt

SEQ ID NO: 1816014 - DNA, 15 bp, Homo sapiens
ggctgaactgccttc

SEQ ID NO: 1816015 - DNA, 15 bp, Homo sapiens
gctgaactgccttct

SEQ ID NO: 1816016 - DNA, 15 bp, Homo sapiens
ctgaactgccttctc

SEQ ID NO: 1816017 - DNA, 15 bp, Homo sapiens
tgaactgccttctct

SEQ ID NO: 1816018 - DNA, 15 bp, Homo sapiens
gaactgccttctctc

SEQ ID NO: 1816019 - DNA, 15 bp, Homo sapiens
aactgccttctctca

SEQ ID NO: 1816020 - DNA, 15 bp, Homo sapiens
actgccttctctcat

SEQ ID NO: 1816021 - DNA, 15 bp, Homo sapiens
ctgccttctctcatc

SEQ ID NO: 1816022 - DNA, 15 bp, Homo sapiens
tgccttctctcatca

SEQ ID NO: 1816023 - DNA, 15 bp, Homo sapiens
gccttctctcatcag

SEQ ID NO: 1816024 - DNA, 15 bp, Homo sapiens
ccttctctcatcaga

SEQ ID NO: 1816025 - DNA, 15 bp, Homo sapiens
cttctctcatcagac

SEQ ID NO: 1816026 - DNA, 15 bp, Homo sapiens
ttctctcatcagact

SEQ ID NO: 1816027 - DNA, 15 bp, Homo sapiens
tctctcatcagactc

SEQ ID NO: 1816028 - DNA, 15 bp, Homo sapiens
ctctcatcagactca

SEQ ID NO: 1816029 - DNA, 15 bp, Homo sapiens
tctcatcagactcat

SEQ ID NO: 1816030 - DNA, 15 bp, Homo sapiens
ctcatcagactcatt

SEQ ID NO: 1816031 - DNA, 15 bp, Homo sapiens
tcatcagactcattc

SEQ ID NO: 1816032 - DNA, 15 bp, Homo sapiens
catcagactcattcc

SEQ ID NO: 1816033 - DNA, 15 bp, Homo sapiens
atcagactcattcct

SEQ ID NO: 1816034 - DNA, 15 bp, Homo sapiens
tcagactcattcctc

SEQ ID NO: 1816035 - DNA, 15 bp, Homo sapiens
cagactcattcctca

SEQ ID NO: 1816036 - DNA, 15 bp, Homo sapiens
agactcattcctcag

SEQ ID NO: 1816037 - DNA, 15 bp, Homo sapiens
gactcattcctcagc

SEQ ID NO: 1816038 - DNA, 15 bp, Homo sapiens
actcattcctcagcc

SEQ ID NO: 1816039 - DNA, 15 bp, Homo sapiens
ctcattcctcagcct

SEQ ID NO: 1816040 - DNA, 15 bp, Homo sapiens
tcattcctcagcctc

SEQ ID NO: 1816041 - DNA, 15 bp, Homo sapiens
cattcctcagcctca

SEQ ID NO: 1816042 - DNA, 15 bp, Homo sapiens
attcctcagcctcac

SEQ ID NO: 1816043 - DNA, 15 bp, Homo sapiens
ttcctcagcctcacg

SEQ ID NO: 1816044 - DNA, 15 bp, Homo sapiens
tcctcagcctcacga

SEQ ID NO: 1816045 - DNA, 15 bp, Homo sapiens
agcctcacgagcaga

SEQ ID NO: 1816046 - DNA, 15 bp, Homo sapiens
gcctcacgagcagac

SEQ ID NO: 1816047 - DNA, 15 bp, Homo sapiens
cctcacgagcagacc

SEQ ID NO: 1816048 - DNA, 15 bp, Homo sapiens
ctcacgagcagacct

SEQ ID NO: 1816049 - DNA, 15 bp, Homo sapiens
tcacgagcagacctc

SEQ ID NO: 1816050 - DNA, 15 bp, Homo sapiens
cacgagcagacctcc

SEQ ID NO: 1816051 - DNA, 15 bp, Homo sapiens
acgagcagacctccc

SEQ ID NO: 1816052 - DNA, 15 bp, Homo sapiens
cgagcagacctccct

SEQ ID NO: 1816053 - DNA, 15 bp, Homo sapiens
gagcagacctccctg

SEQ ID NO: 1816054 - DNA, 15 bp, Homo sapiens
agcagacctccctga

SEQ ID NO: 1816055 - DNA, 15 bp, Homo sapiens
gcagacctccctgac

SEQ ID NO: 1816056 - DNA, 15 bp, Homo sapiens
cagacctccctgaca

SEQ ID NO: 1816057 - DNA, 15 bp, Homo sapiens
agacctccctgacag

SEQ ID NO: 1816058 - DNA, 15 bp, Homo sapiens
gacctccctgacagg

SEQ ID NO: 1816059 - DNA, 15 bp, Homo sapiens
acctccctgacaggc

SEQ ID NO: 1816060 - DNA, 15 bp, Homo sapiens
cctccctgacaggcg

SEQ ID NO: 1816061 - DNA, 15 bp, Homo sapiens
ctccctgacaggcgc

SEQ ID NO: 1816062 - DNA, 15 bp, Homo sapiens
tccctgacaggcgct

SEQ ID NO: 1816063 - DNA, 15 bp, Homo sapiens
ccctgacaggcgctc

SEQ ID NO: 1816064 - DNA, 15 bp, Homo sapiens
cctgacaggcgctca

SEQ ID NO: 1816065 - DNA, 15 bp, Homo sapiens
ctgacaggcgctcac

SEQ ID NO: 1816066 - DNA, 15 bp, Homo sapiens
tgacaggcgctcaca

SEQ ID NO: 1816067 - DNA, 15 bp, Homo sapiens
gacaggcgctcacaa

SEQ ID NO: 1816068 - DNA, 15 bp, Homo sapiens
acaggcgctcacaac

SEQ ID NO: 1816069 - DNA, 15 bp, Homo sapiens
caggcgctcacaaca

SEQ ID NO: 1816070 - DNA, 15 bp, Homo sapiens
aggcgctcacaacac

SEQ ID NO: 1816071 - DNA, 15 bp, Homo sapiens
ggcgctcacaacact

SEQ ID NO: 1816072 - DNA, 15 bp, Homo sapiens
gcgctcacaacactg

SEQ ID NO: 1816073 - DNA, 15 bp, Homo sapiens
cgctcacaacactgc

SEQ ID NO: 1816074 - DNA, 15 bp, Homo sapiens
gctcacaacactgcc

SEQ ID NO: 1816075 - DNA, 15 bp, Homo sapiens
ctcacaacactgcct

SEQ ID NO: 1816076 - DNA, 15 bp, Homo sapiens
tcacaacactgcctc

SEQ ID NO: 1816077 - DNA, 15 bp, Homo sapiens
cacaacactgcctct

SEQ ID NO: 1816078 - DNA, 15 bp, Homo sapiens
acaacactgcctctc

SEQ ID NO: 1816079 - DNA, 15 bp, Homo sapiens
caacactgcctctca

SEQ ID NO: 1816080 - DNA, 15 bp, Homo sapiens
aacactgcctctcaa

SEQ ID NO: 1816081 - DNA, 15 bp, Homo sapiens
acactgcctctcaag

SEQ ID NO: 1816082 - DNA, 15 bp, Homo sapiens
cactgcctctcaaga

SEQ ID NO: 1816083 - DNA, 15 bp, Homo sapiens
actgcctctcaagac

SEQ ID NO: 1816084 - DNA, 15 bp, Homo sapiens
ctgcctctcaagacg

SEQ ID NO: 1816085 - DNA, 15 bp, Homo sapiens
tgcctctcaagacga

SEQ ID NO: 1816086 - DNA, 15 bp, Homo sapiens
gcctctcaagacgag

SEQ ID NO: 1816087 - DNA, 15 bp, Homo sapiens
cctctcaagacgagt

SEQ ID NO: 1816088 - DNA, 15 bp, Homo sapiens
ctctcaagacgagtc

SEQ ID NO: 1816089 - DNA, 15 bp, Homo sapiens
tctcaagacgagtct

SEQ ID NO: 1816090 - DNA, 15 bp, Homo sapiens
ctcaagacgagtctg

SEQ ID NO: 1816091 - DNA, 15 bp, Homo sapiens
tcaagacgagtctgt

SEQ ID NO: 1816092 - DNA, 15 bp, Homo sapiens
caagacgagtctgtc

SEQ ID NO: 1816093 - DNA, 15 bp, Homo sapiens
aagacgagtctgtct

SEQ ID NO: 1816094 - DNA, 15 bp, Homo sapiens
agacgagtctgtctg

SEQ ID NO: 1816095 - DNA, 15 bp, Homo sapiens
gacgagtctgtctga

SEQ ID NO: 1816096 - DNA, 15 bp, Homo sapiens
acgagtctgtctgac

SEQ ID NO: 1816097 - DNA, 15 bp, Homo sapiens
cgagtctgtctgacc

SEQ ID NO: 1816098 - DNA, 15 bp, Homo sapiens
gagtctgtctgacct

SEQ ID NO: 1816099 - DNA, 15 bp, Homo sapiens
agtctgtctgacctg

SEQ ID NO: 1816100 - DNA, 15 bp, Homo sapiens
gtctgtctgacctgt

SEQ ID NO: 1816101 - DNA, 15 bp, Homo sapiens
tctgtctgacctgtt

SEQ ID NO: 1816102 - DNA, 15 bp, Homo sapiens
ctgtctgacctgttt

SEQ ID NO: 1816103 - DNA, 15 bp, Homo sapiens
tgtctgacctgtttt

SEQ ID NO: 1816104 - DNA, 15 bp, Homo sapiens
gtctgacctgttttc

SEQ ID NO: 1816105 - DNA, 15 bp, Homo sapiens
tctgacctgttttct

SEQ ID NO: 1816106 - DNA, 15 bp, Homo sapiens
ctgacctgttttctc

SEQ ID NO: 1816107 - DNA, 15 bp, Homo sapiens
tgacctgttttctca

SEQ ID NO: 1816108 - DNA, 15 bp, Homo sapiens
gacctgttttctcat

SEQ ID NO: 1816109 - DNA, 15 bp, Homo sapiens
acctgttttctcatc

SEQ ID NO: 1816110 - DNA, 15 bp, Homo sapiens
cctgttttctcatct

SEQ ID NO: 1816111 - DNA, 15 bp, Homo sapiens
ctgttttctcatctt

SEQ ID NO: 1816112 - DNA, 15 bp, Homo sapiens
tgttttctcatcttg

SEQ ID NO: 1816113 - DNA, 15 bp, Homo sapiens
gttttctcatcttga

SEQ ID NO: 1816114 - DNA, 15 bp, Homo sapiens
ttttctcatcttgac

SEQ ID NO: 1816115 - DNA, 15 bp, Homo sapiens
tttctcatcttgacc

SEQ ID NO: 1816116 - DNA, 15 bp, Homo sapiens
ttctcatcttgacct

SEQ ID NO: 1816117 - DNA, 15 bp, Homo sapiens
tctcatcttgaccta

SEQ ID NO: 1816118 - DNA, 15 bp, Homo sapiens
ctcatcttgacctaa

SEQ ID NO: 1816119 - DNA, 15 bp, Homo sapiens
tcatcttgacctaac

SEQ ID NO: 1816120 - DNA, 15 bp, Homo sapiens
catcttgacctaact

SEQ ID NO: 1816121 - DNA, 15 bp, Homo sapiens
atcttgacctaactt

SEQ ID NO: 1816122 - DNA, 15 bp, Homo sapiens
tcttgacctaacttg

SEQ ID NO: 1816123 - DNA, 15 bp, Homo sapiens
cttgacctaacttgc

SEQ ID NO: 1816124 - DNA, 15 bp, Homo sapiens
ttgacctaacttgct

SEQ ID NO: 1816125 - DNA, 15 bp, Homo sapiens
tgacctaacttgcta

SEQ ID NO: 1816126 - DNA, 15 bp, Homo sapiens
gacctaacttgctaa

SEQ ID NO: 1816127 - DNA, 15 bp, Homo sapiens
acctaacttgctaaa

SEQ ID NO: 1816128 - DNA, 15 bp, Homo sapiens
cctaacttgctaaat

SEQ ID NO: 1816129 - DNA, 15 bp, Homo sapiens
ctaacttgctaaatg

SEQ ID NO: 1816130 - DNA, 15 bp, Homo sapiens
taacttgctaaatgc

SEQ ID NO: 1816131 - DNA, 15 bp, Homo sapiens
aacttgctaaatgct

SEQ ID NO: 1816132 - DNA, 15 bp, Homo sapiens
acttgctaaatgctc

SEQ ID NO: 1816133 - DNA, 15 bp, Homo sapiens
cttgctaaatgctcc

SEQ ID NO: 1816134 - DNA, 15 bp, Homo sapiens
ttgctaaatgctcct

SEQ ID NO: 1816135 - DNA, 15 bp, Homo sapiens
tgctaaatgctcctg

SEQ ID NO: 1816136 - DNA, 15 bp, Homo sapiens
gctaaatgctcctgg

SEQ ID NO: 1816137 - DNA, 15 bp, Homo sapiens
ctaaatgctcctggg

SEQ ID NO: 1816138 - DNA, 15 bp, Homo sapiens
taaatgctcctgggc

SEQ ID NO: 1816139 - DNA, 15 bp, Homo sapiens
aaatgctcctgggca

SEQ ID NO: 1816140 - DNA, 15 bp, Homo sapiens
aatgctcctgggcaa

SEQ ID NO: 1816141 - DNA, 15 bp, Homo sapiens
atgctcctgggcaag

SEQ ID NO: 1816142 - DNA, 15 bp, Homo sapiens
tgctcctgggcaagt

SEQ ID NO: 1816143 - DNA, 15 bp, Homo sapiens
gctcctgggcaagtc

SEQ ID NO: 1816144 - DNA, 15 bp, Homo sapiens
ctcctgggcaagtca

SEQ ID NO: 1816145 - DNA, 15 bp, Homo sapiens
tcctgggcaagtcac

SEQ ID NO: 1816146 - DNA, 15 bp, Homo sapiens
cctgggcaagtcact

SEQ ID NO: 1816147 - DNA, 15 bp, Homo sapiens
ctgggcaagtcactc

SEQ ID NO: 1816148 - DNA, 15 bp, Homo sapiens
tgggcaagtcactcc

SEQ ID NO: 1816149 - DNA, 15 bp, Homo sapiens
gggcaagtcactcca

SEQ ID NO: 1816150 - DNA, 15 bp, Homo sapiens
ggcaagtcactccac

SEQ ID NO: 1816151 - DNA, 15 bp, Homo sapiens
gcaagtcactccacc

SEQ ID NO: 1816152 - DNA, 15 bp, Homo sapiens
caagtcactccaccc

SEQ ID NO: 1816153 - DNA, 15 bp, Homo sapiens
aagtcactccaccct

SEQ ID NO: 1816154 - DNA, 15 bp, Homo sapiens
agtcactccaccctc

SEQ ID NO: 1816155 - DNA, 15 bp, Homo sapiens
gtcactccaccctcg

SEQ ID NO: 1816156 - DNA, 15 bp, Homo sapiens
tcactccaccctcgg

SEQ ID NO: 1816157 - DNA, 15 bp, Homo sapiens
cactccaccctcggt

SEQ ID NO: 1816158 - DNA, 15 bp, Homo sapiens
actccaccctcggtc

SEQ ID NO: 1816159 - DNA, 15 bp, Homo sapiens
ctccaccctcggtca

SEQ ID NO: 1816160 - DNA, 15 bp, Homo sapiens
tccaccctcggtcag

SEQ ID NO: 1816161 - DNA, 15 bp, Homo sapiens
ccaccctcggtcagc

SEQ ID NO: 1816162 - DNA, 15 bp, Homo sapiens
caccctcggtcagct

SEQ ID NO: 1816163 - DNA, 15 bp, Homo sapiens
accctcggtcagctc

SEQ ID NO: 1816164 - DNA, 15 bp, Homo sapiens
ccctcggtcagctca

SEQ ID NO: 1816165 - DNA, 15 bp, Homo sapiens
cctcggtcagctcag

SEQ ID NO: 1816166 - DNA, 15 bp, Homo sapiens
ctcggtcagctcaga

SEQ ID NO: 1816167 - DNA, 15 bp, Homo sapiens
tcggtcagctcagac

SEQ ID NO: 1816168 - DNA, 15 bp, Homo sapiens
cggtcagctcagacc

SEQ ID NO: 1816169 - DNA, 15 bp, Homo sapiens
ggtcagctcagacct

SEQ ID NO: 1816170 - DNA, 15 bp, Homo sapiens
gtcagctcagacctc

SEQ ID NO: 1816171 - DNA, 15 bp, Homo sapiens
tcagctcagacctct

SEQ ID NO: 1816172 - DNA, 15 bp, Homo sapiens
cagctcagacctctt

SEQ ID NO: 1816173 - DNA, 15 bp, Homo sapiens
agctcagacctcttc

SEQ ID NO: 1816174 - DNA, 15 bp, Homo sapiens
gctcagacctcttca

SEQ ID NO: 1816175 - DNA, 15 bp, Homo sapiens
ctcagacctcttcag

SEQ ID NO: 1816176 - DNA, 15 bp, Homo sapiens
tcagacctcttcagg

SEQ ID NO: 1816177 - DNA, 15 bp, Homo sapiens
cagacctcttcaggc

SEQ ID NO: 1816178 - DNA, 15 bp, Homo sapiens
agacctcttcaggcc

SEQ ID NO: 1816179 - DNA, 15 bp, Homo sapiens
gacctcttcaggcct

SEQ ID NO: 1816180 - DNA, 15 bp, Homo sapiens
acctcttcaggcctc

SEQ ID NO: 1816181 - DNA, 15 bp, Homo sapiens
cctcttcaggcctca

SEQ ID NO: 1816182 - DNA, 15 bp, Homo sapiens
ctcttcaggcctcag

SEQ ID NO: 1816183 - DNA, 15 bp, Homo sapiens
tcttcaggcctcaga

SEQ ID NO: 1816184 - DNA, 15 bp, Homo sapiens
cttcaggcctcagag

SEQ ID NO: 1816185 - DNA, 15 bp, Homo sapiens
ttcaggcctcagaga

SEQ ID NO: 1816186 - DNA, 15 bp, Homo sapiens
tcaggcctcagagaa

SEQ ID NO: 1816187 - DNA, 15 bp, Homo sapiens
caggcctcagagaaa

SEQ ID NO: 1816188 - DNA, 15 bp, Homo sapiens
aggcctcagagaaag

SEQ ID NO: 1816189 - DNA, 15 bp, Homo sapiens
ggcctcagagaaagt

SEQ ID NO: 1816190 - DNA, 15 bp, Homo sapiens
gcctcagagaaagtc

SEQ ID NO: 1816191 - DNA, 15 bp, Homo sapiens
cctcagagaaagtca

SEQ ID NO: 1816192 - DNA, 15 bp, Homo sapiens
ctcagagaaagtcaa

SEQ ID NO: 1816193 - DNA, 15 bp, Homo sapiens
tcagagaaagtcaac

SEQ ID NO: 1816194 - DNA, 15 bp, Homo sapiens
cagagaaagtcaaca

SEQ ID NO: 1816195 - DNA, 15 bp, Homo sapiens
agagaaagtcaacag

SEQ ID NO: 1816196 - DNA, 15 bp, Homo sapiens
gagaaagtcaacagt

SEQ ID NO: 1816197 - DNA, 15 bp, Homo sapiens
agaaagtcaacagtg

SEQ ID NO: 1816198 - DNA, 15 bp, Homo sapiens
gaaagtcaacagtgc

SEQ ID NO: 1816199 - DNA, 15 bp, Homo sapiens
aaagtcaacagtgct

SEQ ID NO: 1816200 - DNA, 15 bp, Homo sapiens
aagtcaacagtgctg

SEQ ID NO: 1816201 - DNA, 15 bp, Homo sapiens
agtcaacagtgctgc

SEQ ID NO: 1816202 - DNA, 15 bp, Homo sapiens
gtcaacagtgctgcg

SEQ ID NO: 1816203 - DNA, 15 bp, Homo sapiens
tcaacagtgctgcgc

SEQ ID NO: 1816204 - DNA, 15 bp, Homo sapiens
caacagtgctgcgcc

SEQ ID NO: 1816205 - DNA, 15 bp, Homo sapiens
aacagtgctgcgcca

SEQ ID NO: 1816206 - DNA, 15 bp, Homo sapiens
acagtgctgcgccat

SEQ ID NO: 1816207 - DNA, 15 bp, Homo sapiens
cagtgctgcgccatc

SEQ ID NO: 1816208 - DNA, 15 bp, Homo sapiens
agtgctgcgccatcc

SEQ ID NO: 1816209 - DNA, 15 bp, Homo sapiens
gtgctgcgccatccc

SEQ ID NO: 1816210 - DNA, 15 bp, Homo sapiens
tgctgcgccatccca

SEQ ID NO: 1816211 - DNA, 15 bp, Homo sapiens
gctgcgccatcccag

SEQ ID NO: 1816212 - DNA, 15 bp, Homo sapiens
ctgcgccatcccagc

SEQ ID NO: 1816213 - DNA, 15 bp, Homo sapiens
tgcgccatcccagct

SEQ ID NO: 1816214 - DNA, 15 bp, Homo sapiens
gcgccatcccagctt

SEQ ID NO: 1816215 - DNA, 15 bp, Homo sapiens
cgccatcccagcttg

SEQ ID NO: 1816216 - DNA, 15 bp, Homo sapiens
gccatcccagcttgc

SEQ ID NO: 1816217 - DNA, 15 bp, Homo sapiens
ccatcccagcttgct

SEQ ID NO: 1816218 - DNA, 15 bp, Homo sapiens
catcccagcttgctt

SEQ ID NO: 1816219 - DNA, 15 bp, Homo sapiens
atcccagcttgcttg

SEQ ID NO: 1816220 - DNA, 15 bp, Homo sapiens
tcccagcttgcttgc

SEQ ID NO: 1816221 - DNA, 15 bp, Homo sapiens
cccagcttgcttgca

SEQ ID NO: 1816222 - DNA, 15 bp, Homo sapiens
ccagcttgcttgcaa

SEQ ID NO: 1816223 - DNA, 15 bp, Homo sapiens
cagcttgcttgcaaa

SEQ ID NO: 1816224 - DNA, 15 bp, Homo sapiens
agcttgcttgcaaag

SEQ ID NO: 1816225 - DNA, 15 bp, Homo sapiens
gcttgcttgcaaagg

SEQ ID NO: 1816226 - DNA, 15 bp, Homo sapiens
cttgcttgcaaaggg

SEQ ID NO: 1816227 - DNA, 15 bp, Homo sapiens
ttgcttgcaaaggga

SEQ ID NO: 1816228 - DNA, 15 bp, Homo sapiens
tgcttgcaaagggat

SEQ ID NO: 1816229 - DNA, 15 bp, Homo sapiens
gcttgcaaagggatc

SEQ ID NO: 1816230 - DNA, 15 bp, Homo sapiens
cttgcaaagggatcc

SEQ ID NO: 1816231 - DNA, 15 bp, Homo sapiens
ttgcaaagggatccc

SEQ ID NO: 1816232 - DNA, 15 bp, Homo sapiens
tgcaaagggatccct

SEQ ID NO: 1816233 - DNA, 15 bp, Homo sapiens
gcaaagggatccctt

SEQ ID NO: 1816234 - DNA, 15 bp, Homo sapiens
caaagggatcccttg

SEQ ID NO: 1816235 - DNA, 15 bp, Homo sapiens
aaagggatcccttgg

SEQ ID NO: 1816236 - DNA, 15 bp, Homo sapiens
aagggatcccttggt

SEQ ID NO: 1816237 - DNA, 15 bp, Homo sapiens
agggatcccttggtt

SEQ ID NO: 1816238 - DNA, 15 bp, Homo sapiens
gggatcccttggttg

SEQ ID NO: 1816239 - DNA, 15 bp, Homo sapiens
ggatcccttggttgg

SEQ ID NO: 1816240 - DNA, 15 bp, Homo sapiens
atcccttggttgggg

SEQ ID NO: 1816241 - DNA, 15 bp, Homo sapiens
tcccttggttggggt

SEQ ID NO: 1816242 - DNA, 15 bp, Homo sapiens
cccttggttggggtg

SEQ ID NO: 1816243 - DNA, 15 bp, Homo sapiens
ccttggttggggtgt

SEQ ID NO: 1816244 - DNA, 15 bp, Homo sapiens
cttggttggggtgtt

SEQ ID NO: 1816245 - DNA, 15 bp, Homo sapiens
ttggttggggtgttg

SEQ ID NO: 1816246 - DNA, 15 bp, Homo sapiens
tggttggggtgttgg

SEQ ID NO: 1816247 - DNA, 15 bp, Homo sapiens
ggttggggtgttggg

SEQ ID NO: 1816248 - DNA, 15 bp, Homo sapiens
gttggggtgttgggg

SEQ ID NO: 1816249 - DNA, 15 bp, Homo sapiens
ttggggtgttgggga

SEQ ID NO: 1816250 - DNA, 15 bp, Homo sapiens
tggggtgttggggaa

SEQ ID NO: 1816251 - DNA, 15 bp, Homo sapiens
ggggtgttggggaag

SEQ ID NO: 1816252 - DNA, 15 bp, Homo sapiens
gggtgttggggaagg

SEQ ID NO: 1816253 - DNA, 15 bp, Homo sapiens
ggtgttggggaaggc

SEQ ID NO: 1816254 - DNA, 15 bp, Homo sapiens
gtgttggggaaggca

SEQ ID NO: 1816255 - DNA, 15 bp, Homo sapiens
tgttggggaaggcag

SEQ ID NO: 1816256 - DNA, 15 bp, Homo sapiens
tccttgtttgattca

SEQ ID NO: 1816257 - DNA, 15 bp, Homo sapiens
ccttgtttgattcac

SEQ ID NO: 1816258 - DNA, 15 bp, Homo sapiens
cttgtttgattcacc

SEQ ID NO: 1816259 - DNA, 15 bp, Homo sapiens
ttgtttgattcacca

SEQ ID NO: 1816260 - DNA, 15 bp, Homo sapiens
tgtttgattcaccag

SEQ ID NO: 1816261 - DNA, 15 bp, Homo sapiens
gtttgattcaccaga

SEQ ID NO: 1816262 - DNA, 15 bp, Homo sapiens
tttgattcaccagac

SEQ ID NO: 1816263 - DNA, 15 bp, Homo sapiens
ttgattcaccagact

SEQ ID NO: 1816264 - DNA, 15 bp, Homo sapiens
tgattcaccagactt

SEQ ID NO: 1816265 - DNA, 15 bp, Homo sapiens
gattcaccagacttt

SEQ ID NO: 1816266 - DNA, 15 bp, Homo sapiens
attcaccagacttta

SEQ ID NO: 1816267 - DNA, 15 bp, Homo sapiens
ttcaccagactttag

SEQ ID NO: 1816268 - DNA, 15 bp, Homo sapiens
tcaccagactttagc

SEQ ID NO: 1816269 - DNA, 15 bp, Homo sapiens
caccagactttagca

SEQ ID NO: 1816270 - DNA, 15 bp, Homo sapiens
accagactttagcaa

SEQ ID NO: 1816271 - DNA, 15 bp, Homo sapiens
ccagactttagcaag

SEQ ID NO: 1816272 - DNA, 15 bp, Homo sapiens
cagactttagcaaga

SEQ ID NO: 1816273 - DNA, 15 bp, Homo sapiens
agactttagcaagat

SEQ ID NO: 1816274 - DNA, 15 bp, Homo sapiens
gactttagcaagatc

SEQ ID NO: 1816275 - DNA, 15 bp, Homo sapiens
actttagcaagatca

SEQ ID NO: 1816276 - DNA, 15 bp, Homo sapiens
ctttagcaagatcac

SEQ ID NO: 1816277 - DNA, 15 bp, Homo sapiens
tttagcaagatcaca

SEQ ID NO: 1816278 - DNA, 15 bp, Homo sapiens
ttagcaagatcacag

SEQ ID NO: 1816279 - DNA, 15 bp, Homo sapiens
tagcaagatcacagg

SEQ ID NO: 1816280 - DNA, 15 bp, Homo sapiens
agcaagatcacaggc

SEQ ID NO: 1816281 - DNA, 15 bp, Homo sapiens
gcaagatcacaggca

SEQ ID NO: 1816282 - DNA, 15 bp, Homo sapiens
caagatcacaggcaa

SEQ ID NO: 1816283 - DNA, 15 bp, Homo sapiens
aagatcacaggcaaa

SEQ ID NO: 1816284 - DNA, 15 bp, Homo sapiens
agatcacaggcaaac

SEQ ID NO: 1816285 - DNA, 15 bp, Homo sapiens
gatcacaggcaaacc

SEQ ID NO: 1816286 - DNA, 15 bp, Homo sapiens
atcacaggcaaaccc

SEQ ID NO: 1816287 - DNA, 15 bp, Homo sapiens
tcacaggcaaaccca

SEQ ID NO: 1816288 - DNA, 15 bp, Homo sapiens
cacaggcaaacccat

SEQ ID NO: 1816289 - DNA, 15 bp, Homo sapiens
acaggcaaacccatc

SEQ ID NO: 1816290 - DNA, 15 bp, Homo sapiens
caggcaaacccatca

SEQ ID NO: 1816291 - DNA, 15 bp, Homo sapiens
aggcaaacccatcaa

SEQ ID NO: 1816292 - DNA, 15 bp, Homo sapiens
ggcaaacccatcaag

SEQ ID NO: 1816293 - DNA, 15 bp, Homo sapiens
gcaaacccatcaagc

SEQ ID NO: 1816294 - DNA, 15 bp, Homo sapiens
caaacccatcaagct

SEQ ID NO: 1816295 - DNA, 15 bp, Homo sapiens
aaacccatcaagctg

SEQ ID NO: 1816296 - DNA, 15 bp, Homo sapiens
aacccatcaagctga

SEQ ID NO: 1816297 - DNA, 15 bp, Homo sapiens
acccatcaagctgac

SEQ ID NO: 1816298 - DNA, 15 bp, Homo sapiens
cccatcaagctgact

SEQ ID NO: 1816299 - DNA, 15 bp, Homo sapiens
ccatcaagctgactc

SEQ ID NO: 1816300 - DNA, 15 bp, Homo sapiens
catcaagctgactca

SEQ ID NO: 1816301 - DNA, 15 bp, Homo sapiens
atcaagctgactcag

SEQ ID NO: 1816302 - DNA, 15 bp, Homo sapiens
tcaagctgactcagg

SEQ ID NO: 1816303 - DNA, 15 bp, Homo sapiens
caagctgactcaggt

SEQ ID NO: 1816304 - DNA, 15 bp, Homo sapiens
aagctgactcaggtg

SEQ ID NO: 1816305 - DNA, 15 bp, Homo sapiens
agctgactcaggtgg

SEQ ID NO: 1816306 - DNA, 15 bp, Homo sapiens
gctgactcaggtgga

SEQ ID NO: 1816307 - DNA, 15 bp, Homo sapiens
ctgactcaggtggaa

SEQ ID NO: 1816308 - DNA, 15 bp, Homo sapiens
tgactcaggtggaac

SEQ ID NO: 1816309 - DNA, 15 bp, Homo sapiens
gactcaggtggaaca

SEQ ID NO: 1816310 - DNA, 15 bp, Homo sapiens
actcaggtggaacac

SEQ ID NO: 1816311 - DNA, 15 bp, Homo sapiens
ctcaggtggaacacc

SEQ ID NO: 1816312 - DNA, 15 bp, Homo sapiens
tcaggtggaacaccg

SEQ ID NO: 1816313 - DNA, 15 bp, Homo sapiens
caggtggaacaccgg

SEQ ID NO: 1816314 - DNA, 15 bp, Homo sapiens
aggtggaacaccggg

SEQ ID NO: 1816315 - DNA, 15 bp, Homo sapiens
ggtggaacaccgggc

SEQ ID NO: 1816316 - DNA, 15 bp, Homo sapiens
gtggaacaccgggct

SEQ ID NO: 1816317 - DNA, 15 bp, Homo sapiens
tggaacaccgggctg

SEQ ID NO: 1816318 - DNA, 15 bp, Homo sapiens
ggaacaccgggctgg

SEQ ID NO: 1816319 - DNA, 15 bp, Homo sapiens
gaacaccgggctggc

SEQ ID NO: 1816320 - DNA, 15 bp, Homo sapiens
aacaccgggctggct

SEQ ID NO: 1816321 - DNA, 15 bp, Homo sapiens
acaccgggctggctt

SEQ ID NO: 1816322 - DNA, 15 bp, Homo sapiens
caccgggctggcttt

SEQ ID NO: 1816323 - DNA, 15 bp, Homo sapiens
accgggctggctttg

SEQ ID NO: 1816324 - DNA, 15 bp, Homo sapiens
ccgggctggctttga

SEQ ID NO: 1816325 - DNA, 15 bp, Homo sapiens
cgggctggctttgag

SEQ ID NO: 1816326 - DNA, 15 bp, Homo sapiens
gggctggctttgagt

SEQ ID NO: 1816327 - DNA, 15 bp, Homo sapiens
ggctggctttgagtg

SEQ ID NO: 1816328 - DNA, 15 bp, Homo sapiens
gctggctttgagtgg

SEQ ID NO: 1816329 - DNA, 15 bp, Homo sapiens
ctggctttgagtgga

SEQ ID NO: 1816330 - DNA, 15 bp, Homo sapiens
tggctttgagtggaa

SEQ ID NO: 1816331 - DNA, 15 bp, Homo sapiens
ggctttgagtggaac

SEQ ID NO: 1816332 - DNA, 15 bp, Homo sapiens
gctttgagtggaacg

SEQ ID NO: 1816333 - DNA, 15 bp, Homo sapiens
ctttgagtggaacga

SEQ ID NO: 1816334 - DNA, 15 bp, Homo sapiens
tttgagtggaacgag

SEQ ID NO: 1816335 - DNA, 15 bp, Homo sapiens
ttgagtggaacgagg

SEQ ID NO: 1816336 - DNA, 15 bp, Homo sapiens
tgagtggaacgagga

SEQ ID NO: 1816337 - DNA, 15 bp, Homo sapiens
gagtggaacgaggat

SEQ ID NO: 1816338 - DNA, 15 bp, Homo sapiens
agtggaacgaggatg

SEQ ID NO: 1816339 - DNA, 15 bp, Homo sapiens
gtggaacgaggatgg

SEQ ID NO: 1816340 - DNA, 15 bp, Homo sapiens
tggaacgaggatggg

SEQ ID NO: 1816341 - DNA, 15 bp, Homo sapiens
ggaacgaggatgggg

SEQ ID NO: 1816342 - DNA, 15 bp, Homo sapiens
gaacgaggatggggc

SEQ ID NO: 1816343 - DNA, 15 bp, Homo sapiens
aacgaggatggggcg

SEQ ID NO: 1816344 - DNA, 15 bp, Homo sapiens
acgaggatggggcgg

SEQ ID NO: 1816345 - DNA, 15 bp, Homo sapiens
cgaggatggggcggg

SEQ ID NO: 1816346 - DNA, 15 bp, Homo sapiens
gaggatggggcggga

SEQ ID NO: 1816347 - DNA, 15 bp, Homo sapiens
aggatggggcgggaa

SEQ ID NO: 1816348 - DNA, 15 bp, Homo sapiens
ggatggggcgggaac

SEQ ID NO: 1816349 - DNA, 15 bp, Homo sapiens
gatggggcgggaacc

SEQ ID NO: 1816350 - DNA, 15 bp, Homo sapiens
atggggcgggaacca

SEQ ID NO: 1816351 - DNA, 15 bp, Homo sapiens
tggggcgggaaccac

SEQ ID NO: 1816352 - DNA, 15 bp, Homo sapiens
ggggcgggaaccacc

SEQ ID NO: 1816353 - DNA, 15 bp, Homo sapiens
ggcgggaaccacccc

SEQ ID NO: 1816354 - DNA, 15 bp, Homo sapiens
gcgggaaccaccccc

SEQ ID NO: 1816355 - DNA, 15 bp, Homo sapiens
cgggaaccaccccca

SEQ ID NO: 1816356 - DNA, 15 bp, Homo sapiens
gggaaccacccccag

SEQ ID NO: 1816357 - DNA, 15 bp, Homo sapiens
ggaaccacccccagc

SEQ ID NO: 1816358 - DNA, 15 bp, Homo sapiens
gaaccacccccagcc

SEQ ID NO: 1816359 - DNA, 15 bp, Homo sapiens
aaccacccccagccc

SEQ ID NO: 1816360 - DNA, 15 bp, Homo sapiens
accacccccagccca

SEQ ID NO: 1816361 - DNA, 15 bp, Homo sapiens
ccacccccagcccag

SEQ ID NO: 1816362 - DNA, 15 bp, Homo sapiens
cacccccagcccagg

SEQ ID NO: 1816363 - DNA, 15 bp, Homo sapiens
acccccagcccaggg

SEQ ID NO: 1816364 - DNA, 15 bp, Homo sapiens
cccccagcccagggc

SEQ ID NO: 1816365 - DNA, 15 bp, Homo sapiens
ccccagcccagggct

SEQ ID NO: 1816366 - DNA, 15 bp, Homo sapiens
cccagcccagggctg

SEQ ID NO: 1816367 - DNA, 15 bp, Homo sapiens
ccagcccagggctgc

SEQ ID NO: 1816368 - DNA, 15 bp, Homo sapiens
cagcccagggctgca

SEQ ID NO: 1816369 - DNA, 15 bp, Homo sapiens
agcccagggctgcag

SEQ ID NO: 1816370 - DNA, 15 bp, Homo sapiens
gcccagggctgcagc

SEQ ID NO: 1816371 - DNA, 15 bp, Homo sapiens
cccagggctgcagcc

SEQ ID NO: 1816372 - DNA, 15 bp, Homo sapiens
cagggctgcagcctg

SEQ ID NO: 1816373 - DNA, 15 bp, Homo sapiens
agggctgcagcctgc

SEQ ID NO: 1816374 - DNA, 15 bp, Homo sapiens
gggctgcagcctgcc

SEQ ID NO: 1816375 - DNA, 15 bp, Homo sapiens
ggctgcagcctgccc

SEQ ID NO: 1816376 - DNA, 15 bp, Homo sapiens
gctgcagcctgccca

SEQ ID NO: 1816377 - DNA, 15 bp, Homo sapiens
ctgcagcctgcccac

SEQ ID NO: 1816378 - DNA, 15 bp, Homo sapiens
tgcagcctgcccacc

SEQ ID NO: 1816379 - DNA, 15 bp, Homo sapiens
gcagcctgcccacct

SEQ ID NO: 1816380 - DNA, 15 bp, Homo sapiens
cagcctgcccacctc

SEQ ID NO: 1816381 - DNA, 15 bp, Homo sapiens
agcctgcccacctca

SEQ ID NO: 1816382 - DNA, 15 bp, Homo sapiens
gcctgcccacctcac

SEQ ID NO: 1816383 - DNA, 15 bp, Homo sapiens
cctgcccacctcacc

SEQ ID NO: 1816384 - DNA, 15 bp, Homo sapiens
ctgcccacctcacct

SEQ ID NO: 1816385 - DNA, 15 bp, Homo sapiens
tgcccacctcacctt

SEQ ID NO: 1816386 - DNA, 15 bp, Homo sapiens
gcccacctcaccttc

SEQ ID NO: 1816387 - DNA, 15 bp, Homo sapiens
cccacctcaccttcc

SEQ ID NO: 1816388 - DNA, 15 bp, Homo sapiens
ccacctcaccttccc

SEQ ID NO: 1816389 - DNA, 15 bp, Homo sapiens
cacctcaccttcccg

SEQ ID NO: 1816390 - DNA, 15 bp, Homo sapiens
acctcaccttcccgc

SEQ ID NO: 1816391 - DNA, 15 bp, Homo sapiens
cctcaccttcccgct

SEQ ID NO: 1816392 - DNA, 15 bp, Homo sapiens
ctcaccttcccgctg

SEQ ID NO: 1816393 - DNA, 15 bp, Homo sapiens
tcaccttcccgctgg

SEQ ID NO: 1816394 - DNA, 15 bp, Homo sapiens
caccttcccgctgga

SEQ ID NO: 1816395 - DNA, 15 bp, Homo sapiens
accttcccgctggac

SEQ ID NO: 1816396 - DNA, 15 bp, Homo sapiens
ccttcccgctggact

SEQ ID NO: 1816397 - DNA, 15 bp, Homo sapiens
cttcccgctggacta

SEQ ID NO: 1816398 - DNA, 15 bp, Homo sapiens
ttcccgctggactat

SEQ ID NO: 1816399 - DNA, 15 bp, Homo sapiens
tcccgctggactatc

SEQ ID NO: 1816400 - DNA, 15 bp, Homo sapiens
cccgctggactatca

SEQ ID NO: 1816401 - DNA, 15 bp, Homo sapiens
ccgctggactatcac

SEQ ID NO: 1816402 - DNA, 15 bp, Homo sapiens
cgctggactatcacc

SEQ ID NO: 1816403 - DNA, 15 bp, Homo sapiens
gctggactatcacct

SEQ ID NO: 1816404 - DNA, 15 bp, Homo sapiens
ctggactatcacctt

SEQ ID NO: 1816405 - DNA, 15 bp, Homo sapiens
tggactatcacctta

SEQ ID NO: 1816406 - DNA, 15 bp, Homo sapiens
ggactatcaccttaa

SEQ ID NO: 1816407 - DNA, 15 bp, Homo sapiens
gactatcaccttaac

SEQ ID NO: 1816408 - DNA, 15 bp, Homo sapiens
actatcaccttaacc

SEQ ID NO: 1816409 - DNA, 15 bp, Homo sapiens
ctatcaccttaacca

SEQ ID NO: 1816410 - DNA, 15 bp, Homo sapiens
tatcaccttaaccag

SEQ ID NO: 1816411 - DNA, 15 bp, Homo sapiens
atcaccttaaccagc

SEQ ID NO: 1816412 - DNA, 15 bp, Homo sapiens
tcaccttaaccagcc

SEQ ID NO: 1816413 - DNA, 15 bp, Homo sapiens
caccttaaccagcct

SEQ ID NO: 1816414 - DNA, 15 bp, Homo sapiens
accttaaccagcctt

SEQ ID NO: 1816415 - DNA, 15 bp, Homo sapiens
ccttaaccagccttt

SEQ ID NO: 1816416 - DNA, 15 bp, Homo sapiens
cttaaccagcctttc

SEQ ID NO: 1816417 - DNA, 15 bp, Homo sapiens
ttaaccagcctttca

SEQ ID NO: 1816418 - DNA, 15 bp, Homo sapiens
taaccagcctttcat

SEQ ID NO: 1816419 - DNA, 15 bp, Homo sapiens
aaccagcctttcatc

SEQ ID NO: 1816420 - DNA, 15 bp, Homo sapiens
accagcctttcatct

SEQ ID NO: 1816421 - DNA, 15 bp, Homo sapiens
ccagcctttcatctt

SEQ ID NO: 1816422 - DNA, 15 bp, Homo sapiens
cagcctttcatcttc

SEQ ID NO: 1816423 - DNA, 15 bp, Homo sapiens
agcctttcatcttcg

SEQ ID NO: 1816424 - DNA, 15 bp, Homo sapiens
gcctttcatcttcgt

SEQ ID NO: 1816425 - DNA, 15 bp, Homo sapiens
cctttcatcttcgta

SEQ ID NO: 1816426 - DNA, 15 bp, Homo sapiens
ctttcatcttcgtac

SEQ ID NO: 1816427 - DNA, 15 bp, Homo sapiens
tttcatcttcgtact

SEQ ID NO: 1816428 - DNA, 15 bp, Homo sapiens
ttcatcttcgtactg

SEQ ID NO: 1816429 - DNA, 15 bp, Homo sapiens
tcatcttcgtactga

SEQ ID NO: 1816430 - DNA, 15 bp, Homo sapiens
catcttcgtactgag

SEQ ID NO: 1816431 - DNA, 15 bp, Homo sapiens
atcttcgtactgagg

SEQ ID NO: 1816432 - DNA, 15 bp, Homo sapiens
tcttcgtactgaggg

SEQ ID NO: 1816433 - DNA, 15 bp, Homo sapiens
cttcgtactgaggga

SEQ ID NO: 1816434 - DNA, 15 bp, Homo sapiens
ttcgtactgagggac

SEQ ID NO: 1816435 - DNA, 15 bp, Homo sapiens
tcgtactgagggaca

SEQ ID NO: 1816436 - DNA, 15 bp, Homo sapiens
cgtactgagggacac

SEQ ID NO: 1816437 - DNA, 15 bp, Homo sapiens
gtactgagggacaca

SEQ ID NO: 1816438 - DNA, 15 bp, Homo sapiens
tactgagggacacag

SEQ ID NO: 1816439 - DNA, 15 bp, Homo sapiens
actgagggacacaga

SEQ ID NO: 1816440 - DNA, 15 bp, Homo sapiens
ctgagggacacagac

SEQ ID NO: 1816441 - DNA, 15 bp, Homo sapiens
tgagggacacagaca

SEQ ID NO: 1816442 - DNA, 15 bp, Homo sapiens
gagggacacagacac

SEQ ID NO: 1816443 - DNA, 15 bp, Homo sapiens
agggacacagacaca

SEQ ID NO: 1816444 - DNA, 15 bp, Homo sapiens
gggacacagacacag

SEQ ID NO: 1816445 - DNA, 15 bp, Homo sapiens
ggacacagacacagg

SEQ ID NO: 1816446 - DNA, 15 bp, Homo sapiens
gacacagacacaggg

SEQ ID NO: 1816447 - DNA, 15 bp, Homo sapiens
acacagacacagggg

SEQ ID NO: 1816448 - DNA, 15 bp, Homo sapiens
cacagacacaggggc

SEQ ID NO: 1816449 - DNA, 15 bp, Homo sapiens
acagacacaggggcc

SEQ ID NO: 1816450 - DNA, 15 bp, Homo sapiens
cagacacaggggccc

SEQ ID NO: 1816451 - DNA, 15 bp, Homo sapiens
agacacaggggccct

SEQ ID NO: 1816452 - DNA, 15 bp, Homo sapiens
gacacaggggccctt

SEQ ID NO: 1816453 - DNA, 15 bp, Homo sapiens
acacaggggcccttc

SEQ ID NO: 1816454 - DNA, 15 bp, Homo sapiens
cacaggggcccttct

SEQ ID NO: 1816455 - DNA, 15 bp, Homo sapiens
acaggggcccttctc

SEQ ID NO: 1816456 - DNA, 15 bp, Homo sapiens
caggggcccttctct

SEQ ID NO: 1816457 - DNA, 15 bp, Homo sapiens
aggggcccttctctt

SEQ ID NO: 1816458 - DNA, 15 bp, Homo sapiens
ggggcccttctcttc

SEQ ID NO: 1816459 - DNA, 15 bp, Homo sapiens
gggcccttctcttca

SEQ ID NO: 1816460 - DNA, 15 bp, Homo sapiens
ggcccttctcttcat

SEQ ID NO: 1816461 - DNA, 15 bp, Homo sapiens
gcccttctcttcatt

SEQ ID NO: 1816462 - DNA, 15 bp, Homo sapiens
cccttctcttcattg

SEQ ID NO: 1816463 - DNA, 15 bp, Homo sapiens
ccttctcttcattgg

SEQ ID NO: 1816464 - DNA, 15 bp, Homo sapiens
cttctcttcattggc

SEQ ID NO: 1816465 - DNA, 15 bp, Homo sapiens
ttctcttcattggca

SEQ ID NO: 1816466 - DNA, 15 bp, Homo sapiens
tctcttcattggcaa

SEQ ID NO: 1816467 - DNA, 15 bp, Homo sapiens
ctcttcattggcaag

SEQ ID NO: 1816468 - DNA, 15 bp, Homo sapiens
tcttcattggcaaga

SEQ ID NO: 1816469 - DNA, 15 bp, Homo sapiens
cttcattggcaagat

SEQ ID NO: 1816470 - DNA, 15 bp, Homo sapiens
ttcattggcaagatt

SEQ ID NO: 1816471 - DNA, 15 bp, Homo sapiens
tcattggcaagattc

SEQ ID NO: 1816472 - DNA, 15 bp, Homo sapiens
cattggcaagattct

SEQ ID NO: 1816473 - DNA, 15 bp, Homo sapiens
attggcaagattctg

SEQ ID NO: 1816474 - DNA, 15 bp, Homo sapiens
ttggcaagattctgg

SEQ ID NO: 1816475 - DNA, 15 bp, Homo sapiens
tggcaagattctgga

SEQ ID NO: 1816476 - DNA, 15 bp, Homo sapiens
ggcaagattctggac

SEQ ID NO: 1816477 - DNA, 15 bp, Homo sapiens
gcaagattctggacc

SEQ ID NO: 1816478 - DNA, 15 bp, Homo sapiens
caagattctggaccc

SEQ ID NO: 1816479 - DNA, 15 bp, Homo sapiens
aagattctggacccc

SEQ ID NO: 1816480 - DNA, 15 bp, Homo sapiens
agattctggacccca

SEQ ID NO: 1816481 - DNA, 15 bp, Homo sapiens
gattctggaccccag

SEQ ID NO: 1816482 - DNA, 15 bp, Homo sapiens
attctggaccccagg

SEQ ID NO: 1816483 - DNA, 15 bp, Homo sapiens
ttctggaccccaggg

SEQ ID NO: 1816484 - DNA, 15 bp, Homo sapiens
tctggaccccagggg

SEQ ID NO: 1816485 - DNA, 15 bp, Homo sapiens
ctggaccccaggggc

SEQ ID NO: 1816486 - DNA, 15 bp, Homo sapiens
tggaccccaggggcc

SEQ ID NO: 1816487 - DNA, 15 bp, Homo sapiens
ggaccccaggggccc

SEQ ID NO: 1816488 - DNA, 15 bp, Homo sapiens
gaccccaggggcccc

SEQ ID NO: 1816489 - DNA, 15 bp, Homo sapiens
accccaggggcccct

SEQ ID NO: 1816490 - DNA, 15 bp, Homo sapiens
ccccaggggccccta

SEQ ID NO: 1816491 - DNA, 15 bp, Homo sapiens
cccaggggcccctaa

SEQ ID NO: 1816492 - DNA, 15 bp, Homo sapiens
ccaggggcccctaat

SEQ ID NO: 1816493 - DNA, 15 bp, Homo sapiens
caggggcccctaata

SEQ ID NO: 1816494 - DNA, 15 bp, Homo sapiens
aggggcccctaatat

SEQ ID NO: 1816495 - DNA, 15 bp, Homo sapiens
ggggcccctaatatc

SEQ ID NO: 1816496 - DNA, 15 bp, Homo sapiens
gggcccctaatatcc

SEQ ID NO: 1816497 - DNA, 15 bp, Homo sapiens
ggcccctaatatccc

SEQ ID NO: 1816498 - DNA, 15 bp, Homo sapiens
gcccctaatatccca

SEQ ID NO: 1816499 - DNA, 15 bp, Homo sapiens
ccctaatatcccagt

SEQ ID NO: 1816500 - DNA, 15 bp, Homo sapiens
cctaatatcccagtt

SEQ ID NO: 1816501 - DNA, 15 bp, Homo sapiens
ctaatatcccagttt

SEQ ID NO: 1816502 - DNA, 15 bp, Homo sapiens
taatatcccagttta

SEQ ID NO: 1816503 - DNA, 15 bp, Homo sapiens
aatatcccagtttaa

SEQ ID NO: 1816504 - DNA, 15 bp, Homo sapiens
atatcccagtttaat

SEQ ID NO: 1816505 - DNA, 15 bp, Homo sapiens
tatcccagtttaata

SEQ ID NO: 1816506 - DNA, 15 bp, Homo sapiens
atcccagtttaatat

SEQ ID NO: 1816507 - DNA, 15 bp, Homo sapiens
tcccagtttaatatt

SEQ ID NO: 1816508 - DNA, 15 bp, Homo sapiens
cccagtttaatattc

SEQ ID NO: 1816509 - DNA, 15 bp, Homo sapiens
ccagtttaatattcc

SEQ ID NO: 1816510 - DNA, 15 bp, Homo sapiens
cagtttaatattcca

SEQ ID NO: 1816511 - DNA, 15 bp, Homo sapiens
agtttaatattccaa

SEQ ID NO: 1816512 - DNA, 15 bp, Homo sapiens
gtttaatattccaat

SEQ ID NO: 1816513 - DNA, 15 bp, Homo sapiens
tttaatattccaata

SEQ ID NO: 1816514 - DNA, 15 bp, Homo sapiens
ttaatattccaatac

SEQ ID NO: 1816515 - DNA, 15 bp, Homo sapiens
taatattccaatacc

SEQ ID NO: 1816516 - DNA, 15 bp, Homo sapiens
aatattccaataccc

SEQ ID NO: 1816517 - DNA, 15 bp, Homo sapiens
atattccaataccct

SEQ ID NO: 1816518 - DNA, 15 bp, Homo sapiens
tattccaatacccta

SEQ ID NO: 1816519 - DNA, 15 bp, Homo sapiens
attccaataccctag

SEQ ID NO: 1816520 - DNA, 15 bp, Homo sapiens
ttccaataccctaga

SEQ ID NO: 1816521 - DNA, 15 bp, Homo sapiens
tccaataccctagaa

SEQ ID NO: 1816522 - DNA, 15 bp, Homo sapiens
ccaataccctagaag

SEQ ID NO: 1816523 - DNA, 15 bp, Homo sapiens
caataccctagaaga

SEQ ID NO: 1816524 - DNA, 15 bp, Homo sapiens
aataccctagaagaa

SEQ ID NO: 1816525 - DNA, 15 bp, Homo sapiens
ataccctagaagaaa

SEQ ID NO: 1816526 - DNA, 15 bp, Homo sapiens
taccctagaagaaaa

SEQ ID NO: 1816527 - DNA, 15 bp, Homo sapiens
accctagaagaaaac

SEQ ID NO: 1816528 - DNA, 15 bp, Homo sapiens
ccctagaagaaaacc

SEQ ID NO: 1816529 - DNA, 15 bp, Homo sapiens
cctagaagaaaaccc

SEQ ID NO: 1816530 - DNA, 15 bp, Homo sapiens
ctagaagaaaacccg

SEQ ID NO: 1816531 - DNA, 15 bp, Homo sapiens
tagaagaaaacccga

SEQ ID NO: 1816532 - DNA, 15 bp, Homo sapiens
agaagaaaacccgag

SEQ ID NO: 1816533 - DNA, 15 bp, Homo sapiens
gaagaaaacccgagg

SEQ ID NO: 1816534 - DNA, 15 bp, Homo sapiens
aagaaaacccgaggg

SEQ ID NO: 1816535 - DNA, 15 bp, Homo sapiens
agaaaacccgaggga

SEQ ID NO: 1816536 - DNA, 15 bp, Homo sapiens
gaaaacccgagggac

SEQ ID NO: 1816537 - DNA, 15 bp, Homo sapiens
aaaacccgagggaca

SEQ ID NO: 1816538 - DNA, 15 bp, Homo sapiens
aaacccgagggacag

SEQ ID NO: 1816539 - DNA, 15 bp, Homo sapiens
aacccgagggacagc

SEQ ID NO: 1816540 - DNA, 15 bp, Homo sapiens
acccgagggacagca

SEQ ID NO: 1816541 - DNA, 15 bp, Homo sapiens
cccgagggacagcag

SEQ ID NO: 1816542 - DNA, 15 bp, Homo sapiens
ccgagggacagcaga

SEQ ID NO: 1816543 - DNA, 15 bp, Homo sapiens
cgagggacagcagat

SEQ ID NO: 1816544 - DNA, 15 bp, Homo sapiens
gagggacagcagatt

SEQ ID NO: 1816545 - DNA, 15 bp, Homo sapiens
agggacagcagattc

SEQ ID NO: 1816546 - DNA, 15 bp, Homo sapiens
gggacagcagattcc

SEQ ID NO: 1816547 - DNA, 15 bp, Homo sapiens
ggacagcagattcca

SEQ ID NO: 1816548 - DNA, 15 bp, Homo sapiens
gacagcagattccac

SEQ ID NO: 1816549 - DNA, 15 bp, Homo sapiens
acagcagattccaca

SEQ ID NO: 1816550 - DNA, 15 bp, Homo sapiens
cagcagattccacag

SEQ ID NO: 1816551 - DNA, 15 bp, Homo sapiens
agcagattccacagg

SEQ ID NO: 1816552 - DNA, 15 bp, Homo sapiens
gcagattccacagga

SEQ ID NO: 1816553 - DNA, 15 bp, Homo sapiens
cagattccacaggac

SEQ ID NO: 1816554 - DNA, 15 bp, Homo sapiens
agattccacaggaca

SEQ ID NO: 1816555 - DNA, 15 bp, Homo sapiens
gattccacaggacac

SEQ ID NO: 1816556 - DNA, 15 bp, Homo sapiens
attccacaggacacg

SEQ ID NO: 1816557 - DNA, 15 bp, Homo sapiens
ttccacaggacacga

SEQ ID NO: 1816558 - DNA, 15 bp, Homo sapiens
tccacaggacacgaa

SEQ ID NO: 1816559 - DNA, 15 bp, Homo sapiens
ccacaggacacgaag

SEQ ID NO: 1816560 - DNA, 15 bp, Homo sapiens
cacaggacacgaagg

SEQ ID NO: 1816561 - DNA, 15 bp, Homo sapiens
acaggacacgaaggc

SEQ ID NO: 1816562 - DNA, 15 bp, Homo sapiens
caggacacgaaggct

SEQ ID NO: 1816563 - DNA, 15 bp, Homo sapiens
aggacacgaaggctg

SEQ ID NO: 1816564 - DNA, 15 bp, Homo sapiens
ggacacgaaggctgc

SEQ ID NO: 1816565 - DNA, 15 bp, Homo sapiens
gacacgaaggctgcc

SEQ ID NO: 1816566 - DNA, 15 bp, Homo sapiens
acacgaaggctgccc

SEQ ID NO: 1816567 - DNA, 15 bp, Homo sapiens
cacgaaggctgcccc

SEQ ID NO: 1816568 - DNA, 15 bp, Homo sapiens
acgaaggctgcccct

SEQ ID NO: 1816569 - DNA, 15 bp, Homo sapiens
cgaaggctgcccctg

SEQ ID NO: 1816570 - DNA, 15 bp, Homo sapiens
gaaggctgcccctgt

SEQ ID NO: 1816571 - DNA, 15 bp, Homo sapiens
aaggctgcccctgta

SEQ ID NO: 1816572 - DNA, 15 bp, Homo sapiens
aggctgcccctgtaa

SEQ ID NO: 1816573 - DNA, 15 bp, Homo sapiens
ggctgcccctgtaag

SEQ ID NO: 1816574 - DNA, 15 bp, Homo sapiens
gctgcccctgtaagg

SEQ ID NO: 1816575 - DNA, 15 bp, Homo sapiens
ctgcccctgtaaggt

SEQ ID NO: 1816576 - DNA, 15 bp, Homo sapiens
tgcccctgtaaggtt

SEQ ID NO: 1816577 - DNA, 15 bp, Homo sapiens
gcccctgtaaggttt

SEQ ID NO: 1816578 - DNA, 15 bp, Homo sapiens
cccctgtaaggtttc

SEQ ID NO: 1816579 - DNA, 15 bp, Homo sapiens
ccctgtaaggtttca

SEQ ID NO: 1816580 - DNA, 15 bp, Homo sapiens
cctgtaaggtttcaa

SEQ ID NO: 1816581 - DNA, 15 bp, Homo sapiens
ctgtaaggtttcaat

SEQ ID NO: 1816582 - DNA, 15 bp, Homo sapiens
tgtaaggtttcaatg

SEQ ID NO: 1816583 - DNA, 15 bp, Homo sapiens
gtaaggtttcaatgc

SEQ ID NO: 1816584 - DNA, 15 bp, Homo sapiens
taaggtttcaatgca

SEQ ID NO: 1816585 - DNA, 15 bp, Homo sapiens
aaggtttcaatgcat

SEQ ID NO: 1816586 - DNA, 15 bp, Homo sapiens
aggtttcaatgcata

SEQ ID NO: 1816587 - DNA, 15 bp, Homo sapiens
ggtttcaatgcatac

SEQ ID NO: 1816588 - DNA, 15 bp, Homo sapiens
gtttcaatgcataca

SEQ ID NO: 1816589 - DNA, 15 bp, Homo sapiens
tttcaatgcatacaa

SEQ ID NO: 1816590 - DNA, 15 bp, Homo sapiens
ttcaatgcatacaat

SEQ ID NO: 1816591 - DNA, 15 bp, Homo sapiens
tcaatgcatacaata

SEQ ID NO: 1816592 - DNA, 15 bp, Homo sapiens
caatgcatacaataa

SEQ ID NO: 1816593 - DNA, 15 bp, Homo sapiens
aatgcatacaataaa

SEQ ID NO: 1816594 - DNA, 15 bp, Homo sapiens
atgcatacaataaaa

SEQ ID NO: 1816595 - DNA, 15 bp, Homo sapiens
tgcatacaataaaag

SEQ ID NO: 1816596 - DNA, 15 bp, Homo sapiens
gcatacaataaaaga

SEQ ID NO: 1816597 - DNA, 15 bp, Homo sapiens
catacaataaaagag

SEQ ID NO: 1816598 - DNA, 15 bp, Homo sapiens
atacaataaaagagc

SEQ ID NO: 1816599 - DNA, 15 bp, Homo sapiens
tacaataaaagagct

SEQ ID NO: 1816600 - DNA, 15 bp, Homo sapiens
acaataaaagagctt

SEQ ID NO: 1816601 - DNA, 15 bp, Homo sapiens
caataaaagagcttt

SEQ ID NO: 1816602 - DNA, 15 bp, Homo sapiens
aataaaagagcttta

SEQ ID NO: 1816603 - DNA, 15 bp, Homo sapiens
ataaaagagctttat

SEQ ID NO: 1816604 - DNA, 15 bp, Homo sapiens
taaaagagctttatc

SEQ ID NO: 1816605 - DNA, 15 bp, Homo sapiens
aaaagagctttatcc

SEQ ID NO: 1816606 - DNA, 15 bp, Homo sapiens
aaagagctttatccc

SEQ ID NO: 1816607 - DNA, 15 bp, Homo sapiens
aagagctttatccct

SEQ ID NO: 1816608 - DNA, 15 bp, Homo sapiens
agagctttatcccta

SEQ ID NO: 1816609 - DNA, 15 bp, Homo sapiens
gagctttatccctaa

SEQ ID NO: 1816610 - DNA, 15 bp, Homo sapiens
agctttatccctaac

SEQ ID NO: 1816611 - DNA, 15 bp, Homo sapiens
gctttatccctaact

SEQ ID NO: 1816612 - DNA, 15 bp, Homo sapiens
ctttatccctaactt

SEQ ID NO: 1816613 - DNA, 15 bp, Homo sapiens
tttatccctaacttc

SEQ ID NO: 1816614 - DNA, 15 bp, Homo sapiens
ttatccctaacttct

SEQ ID NO: 1816615 - DNA, 15 bp, Homo sapiens
tatccctaacttctg

SEQ ID NO: 1816616 - DNA, 15 bp, Homo sapiens
atccctaacttctgt

SEQ ID NO: 1816617 - DNA, 15 bp, Homo sapiens
tccctaacttctgtt

SEQ ID NO: 1816618 - DNA, 15 bp, Homo sapiens
ccctaacttctgtta

SEQ ID NO: 1816619 - DNA, 15 bp, Homo sapiens
cctaacttctgttac

SEQ ID NO: 1816620 - DNA, 15 bp, Homo sapiens
ctaacttctgttact

SEQ ID NO: 1816621 - DNA, 15 bp, Homo sapiens
taacttctgttactt

SEQ ID NO: 1816622 - DNA, 15 bp, Homo sapiens
aacttctgttacttc

SEQ ID NO: 1816623 - DNA, 15 bp, Homo sapiens
acttctgttacttcg

SEQ ID NO: 1816624 - DNA, 15 bp, Homo sapiens
cttctgttacttcgt

SEQ ID NO: 1816625 - DNA, 15 bp, Homo sapiens
ttctgttacttcgtt

SEQ ID NO: 1816626 - DNA, 15 bp, Homo sapiens
tctgttacttcgttc

SEQ ID NO: 1816627 - DNA, 15 bp, Homo sapiens
ctgttacttcgttcc

SEQ ID NO: 1816628 - DNA, 15 bp, Homo sapiens
tgttacttcgttcct

SEQ ID NO: 1816629 - DNA, 15 bp, Homo sapiens
gttacttcgttcctc

SEQ ID NO: 1816630 - DNA, 15 bp, Homo sapiens
ttacttcgttcctcc

SEQ ID NO: 1816631 - DNA, 15 bp, Homo sapiens
tacttcgttcctcct

SEQ ID NO: 1816632 - DNA, 15 bp, Homo sapiens
acttcgttcctcctc

SEQ ID NO: 1816633 - DNA, 15 bp, Homo sapiens
cttcgttcctcctcc

SEQ ID NO: 1816634 - DNA, 15 bp, Homo sapiens
ttcgttcctcctcct

SEQ ID NO: 1816635 - DNA, 15 bp, Homo sapiens
tcgttcctcctccta

SEQ ID NO: 1816636 - DNA, 15 bp, Homo sapiens
cgttcctcctcctat

SEQ ID NO: 1816637 - DNA, 15 bp, Homo sapiens
gttcctcctcctatt

SEQ ID NO: 1816638 - DNA, 15 bp, Homo sapiens
ttcctcctcctattt

SEQ ID NO: 1816639 - DNA, 15 bp, Homo sapiens
tcctcctcctatttt

SEQ ID NO: 1816640 - DNA, 15 bp, Homo sapiens
cctcctcctattttg

SEQ ID NO: 1816641 - DNA, 15 bp, Homo sapiens
ctcctcctattttga

SEQ ID NO: 1816642 - DNA, 15 bp, Homo sapiens
tcctcctattttgag

SEQ ID NO: 1816643 - DNA, 15 bp, Homo sapiens
cctcctattttgagc

SEQ ID NO: 1816644 - DNA, 15 bp, Homo sapiens
ctcctattttgagct

SEQ ID NO: 1816645 - DNA, 15 bp, Homo sapiens
tcctattttgagcta

SEQ ID NO: 1816646 - DNA, 15 bp, Homo sapiens
cctattttgagctat

SEQ ID NO: 1816647 - DNA, 15 bp, Homo sapiens
ctattttgagctatg

SEQ ID NO: 1816648 - DNA, 15 bp, Homo sapiens
tattttgagctatgc

SEQ ID NO: 1816649 - DNA, 15 bp, Homo sapiens
attttgagctatgcg

SEQ ID NO: 1816650 - DNA, 15 bp, Homo sapiens
ttttgagctatgcga

SEQ ID NO: 1816651 - DNA, 15 bp, Homo sapiens
tttgagctatgcgaa

SEQ ID NO: 1816652 - DNA, 15 bp, Homo sapiens
ttgagctatgcgaaa

SEQ ID NO: 1816653 - DNA, 15 bp, Homo sapiens
tgagctatgcgaaat

SEQ ID NO: 1816654 - DNA, 15 bp, Homo sapiens
gagctatgcgaaata

SEQ ID NO: 1816655 - DNA, 15 bp, Homo sapiens
agctatgcgaaatat

SEQ ID NO: 1816656 - DNA, 15 bp, Homo sapiens
gctatgcgaaatatc

SEQ ID NO: 1816657 - DNA, 15 bp, Homo sapiens
ctatgcgaaatatca

SEQ ID NO: 1816658 - DNA, 15 bp, Homo sapiens
tatgcgaaatatcat

SEQ ID NO: 1816659 - DNA, 15 bp, Homo sapiens
atgcgaaatatcata

SEQ ID NO: 1816660 - DNA, 15 bp, Homo sapiens
tgcgaaatatcatat

SEQ ID NO: 1816661 - DNA, 15 bp, Homo sapiens
gcgaaatatcatatg

SEQ ID NO: 1816662 - DNA, 15 bp, Homo sapiens
cgaaatatcatatga

SEQ ID NO: 1816663 - DNA, 15 bp, Homo sapiens
gaaatatcatatgaa

SEQ ID NO: 1816664 - DNA, 15 bp, Homo sapiens
aaatatcatatgaag

SEQ ID NO: 1816665 - DNA, 15 bp, Homo sapiens
aatatcatatgaaga

SEQ ID NO: 1816666 - DNA, 15 bp, Homo sapiens
atatcatatgaagag

SEQ ID NO: 1816667 - DNA, 15 bp, Homo sapiens
tatcatatgaagaga

SEQ ID NO: 1816668 - DNA, 15 bp, Homo sapiens
atcatatgaagagaa

SEQ ID NO: 1816669 - DNA, 15 bp, Homo sapiens
tcatatgaagagaaa

SEQ ID NO: 1816670 - DNA, 15 bp, Homo sapiens
catatgaagagaaac

SEQ ID NO: 1816671 - DNA, 15 bp, Homo sapiens
atatgaagagaaaca

SEQ ID NO: 1816672 - DNA, 15 bp, Homo sapiens
tatgaagagaaacag

SEQ ID NO: 1816673 - DNA, 15 bp, Homo sapiens
atgaagagaaacagc

SEQ ID NO: 1816674 - DNA, 15 bp, Homo sapiens
tgaagagaaacagct

SEQ ID NO: 1816675 - DNA, 15 bp, Homo sapiens
gaagagaaacagctc

SEQ ID NO: 1816676 - DNA, 15 bp, Homo sapiens
aagagaaacagctct

SEQ ID NO: 1816677 - DNA, 15 bp, Homo sapiens
agagaaacagctctt

SEQ ID NO: 1816678 - DNA, 15 bp, Homo sapiens
gagaaacagctcttg

SEQ ID NO: 1816679 - DNA, 15 bp, Homo sapiens
agaaacagctcttga

SEQ ID NO: 1816680 - DNA, 15 bp, Homo sapiens
gaaacagctcttgag

SEQ ID NO: 1816681 - DNA, 15 bp, Homo sapiens
aaacagctcttgagg

SEQ ID NO: 1816682 - DNA, 15 bp, Homo sapiens
aacagctcttgagga

SEQ ID NO: 1816683 - DNA, 15 bp, Homo sapiens
acagctcttgaggaa

SEQ ID NO: 1816684 - DNA, 15 bp, Homo sapiens
cagctcttgaggaat

SEQ ID NO: 1816685 - DNA, 15 bp, Homo sapiens
agctcttgaggaatt

SEQ ID NO: 1816686 - DNA, 15 bp, Homo sapiens
gctcttgaggaattt

SEQ ID NO: 1816687 - DNA, 15 bp, Homo sapiens
ctcttgaggaatttg

SEQ ID NO: 1816688 - DNA, 15 bp, Homo sapiens
tcttgaggaatttgg

SEQ ID NO: 1816689 - DNA, 15 bp, Homo sapiens
cttgaggaatttggt

SEQ ID NO: 1816690 - DNA, 15 bp, Homo sapiens
ttgaggaatttggtg

SEQ ID NO: 1816691 - DNA, 15 bp, Homo sapiens
tgaggaatttggtgg

SEQ ID NO: 1816692 - DNA, 15 bp, Homo sapiens
gaggaatttggtggt

SEQ ID NO: 1816693 - DNA, 15 bp, Homo sapiens
aggaatttggtggtc

SEQ ID NO: 1816694 - DNA, 15 bp, Homo sapiens
ggaatttggtggtcc

SEQ ID NO: 1816695 - DNA, 15 bp, Homo sapiens
gaatttggtggtcct

SEQ ID NO: 1816696 - DNA, 15 bp, Homo sapiens
aatttggtggtcctc

SEQ ID NO: 1816697 - DNA, 15 bp, Homo sapiens
atttggtggtcctct

SEQ ID NO: 1816698 - DNA, 15 bp, Homo sapiens
tttggtggtcctcta

SEQ ID NO: 1816699 - DNA, 15 bp, Homo sapiens
ttggtggtcctctac

SEQ ID NO: 1816700 - DNA, 15 bp, Homo sapiens
tggtggtcctctact

SEQ ID NO: 1816701 - DNA, 15 bp, Homo sapiens
ggtggtcctctactt

SEQ ID NO: 1816702 - DNA, 15 bp, Homo sapiens
gtggtcctctacttc

SEQ ID NO: 1816703 - DNA, 15 bp, Homo sapiens
tggtcctctacttct

SEQ ID NO: 1816704 - DNA, 15 bp, Homo sapiens
ggtcctctacttcta

SEQ ID NO: 1816705 - DNA, 15 bp, Homo sapiens
gtcctctacttctag

SEQ ID NO: 1816706 - DNA, 15 bp, Homo sapiens
tcctctacttctagc

SEQ ID NO: 1816707 - DNA, 15 bp, Homo sapiens
cctctacttctagcc

SEQ ID NO: 1816708 - DNA, 15 bp, Homo sapiens
ctctacttctagcct

SEQ ID NO: 1816709 - DNA, 15 bp, Homo sapiens
tctacttctagcctg

SEQ ID NO: 1816710 - DNA, 15 bp, Homo sapiens
ctacttctagcctgg

SEQ ID NO: 1816711 - DNA, 15 bp, Homo sapiens
tacttctagcctggt

SEQ ID NO: 1816712 - DNA, 15 bp, Homo sapiens
acttctagcctggtt

SEQ ID NO: 1816713 - DNA, 15 bp, Homo sapiens
cttctagcctggttt

SEQ ID NO: 1816714 - DNA, 15 bp, Homo sapiens
ttctagcctggtttt

SEQ ID NO: 1816715 - DNA, 15 bp, Homo sapiens
tctagcctggtttta

SEQ ID NO: 1816716 - DNA, 15 bp, Homo sapiens
ctagcctggttttat

SEQ ID NO: 1816717 - DNA, 15 bp, Homo sapiens
tagcctggttttatc

SEQ ID NO: 1816718 - DNA, 15 bp, Homo sapiens
agcctggttttatct

SEQ ID NO: 1816719 - DNA, 15 bp, Homo sapiens
gcctggttttatcta

SEQ ID NO: 1816720 - DNA, 15 bp, Homo sapiens
cctggttttatctaa

SEQ ID NO: 1816721 - DNA, 15 bp, Homo sapiens
ctggttttatctaaa

SEQ ID NO: 1816722 - DNA, 15 bp, Homo sapiens
tggttttatctaaac

SEQ ID NO: 1816723 - DNA, 15 bp, Homo sapiens
ggttttatctaaaca

SEQ ID NO: 1816724 - DNA, 15 bp, Homo sapiens
gttttatctaaacac

SEQ ID NO: 1816725 - DNA, 15 bp, Homo sapiens
ttttatctaaacact

SEQ ID NO: 1816726 - DNA, 15 bp, Homo sapiens
tttatctaaacactg

SEQ ID NO: 1816727 - DNA, 15 bp, Homo sapiens
ttatctaaacactgc

SEQ ID NO: 1816728 - DNA, 15 bp, Homo sapiens
tatctaaacactgca

SEQ ID NO: 1816729 - DNA, 15 bp, Homo sapiens
atctaaacactgcag

SEQ ID NO: 1816730 - DNA, 15 bp, Homo sapiens
tctaaacactgcagg

SEQ ID NO: 1816731 - DNA, 15 bp, Homo sapiens
ctaaacactgcagga

SEQ ID NO: 1816732 - DNA, 15 bp, Homo sapiens
taaacactgcaggaa

SEQ ID NO: 1816733 - DNA, 15 bp, Homo sapiens
aaacactgcaggaag

SEQ ID NO: 1816734 - DNA, 15 bp, Homo sapiens
aacactgcaggaagt

SEQ ID NO: 1816735 - DNA, 15 bp, Homo sapiens
acactgcaggaagtc

SEQ ID NO: 1816736 - DNA, 15 bp, Homo sapiens
cactgcaggaagtca

SEQ ID NO: 1816737 - DNA, 15 bp, Homo sapiens
actgcaggaagtcac

SEQ ID NO: 1816738 - DNA, 15 bp, Homo sapiens
ctgcaggaagtcacc

SEQ ID NO: 1816739 - DNA, 15 bp, Homo sapiens
tgcaggaagtcaccg

SEQ ID NO: 1816740 - DNA, 15 bp, Homo sapiens
gcaggaagtcaccgt

SEQ ID NO: 1816741 - DNA, 15 bp, Homo sapiens
caggaagtcaccgtt

SEQ ID NO: 1816742 - DNA, 15 bp, Homo sapiens
aggaagtcaccgttc

SEQ ID NO: 1816743 - DNA, 15 bp, Homo sapiens
ggaagtcaccgttca

SEQ ID NO: 1816744 - DNA, 15 bp, Homo sapiens
gaagtcaccgttcat

SEQ ID NO: 1816745 - DNA, 15 bp, Homo sapiens
aagtcaccgttcata

SEQ ID NO: 1816746 - DNA, 15 bp, Homo sapiens
agtcaccgttcataa

SEQ ID NO: 1816747 - DNA, 15 bp, Homo sapiens
gtcaccgttcataag

SEQ ID NO: 1816748 - DNA, 15 bp, Homo sapiens
tcaccgttcataaga

SEQ ID NO: 1816749 - DNA, 15 bp, Homo sapiens
caccgttcataagaa

SEQ ID NO: 1816750 - DNA, 15 bp, Homo sapiens
accgttcataagaac

SEQ ID NO: 1816751 - DNA, 15 bp, Homo sapiens
ccgttcataagaact

SEQ ID NO: 1816752 - DNA, 15 bp, Homo sapiens
cgttcataagaactc

SEQ ID NO: 1816753 - DNA, 15 bp, Homo sapiens
gttcataagaactct

SEQ ID NO: 1816754 - DNA, 15 bp, Homo sapiens
ttcataagaactctt

SEQ ID NO: 1816755 - DNA, 15 bp, Homo sapiens
tcataagaactctta

SEQ ID NO: 1816756 - DNA, 15 bp, Homo sapiens
cataagaactcttag

SEQ ID NO: 1816757 - DNA, 15 bp, Homo sapiens
ataagaactcttagt

SEQ ID NO: 1816758 - DNA, 15 bp, Homo sapiens
taagaactcttagtt

SEQ ID NO: 1816759 - DNA, 15 bp, Homo sapiens
aagaactcttagtta

SEQ ID NO: 1816760 - DNA, 15 bp, Homo sapiens
agaactcttagttac

SEQ ID NO: 1816761 - DNA, 15 bp, Homo sapiens
gaactcttagttacc

SEQ ID NO: 1816762 - DNA, 15 bp, Homo sapiens
aactcttagttacct

SEQ ID NO: 1816763 - DNA, 15 bp, Homo sapiens
actcttagttacctg

SEQ ID NO: 1816764 - DNA, 15 bp, Homo sapiens
ctcttagttacctgt

SEQ ID NO: 1816765 - DNA, 15 bp, Homo sapiens
tcttagttacctgtg

SEQ ID NO: 1816766 - DNA, 15 bp, Homo sapiens
cttagttacctgtgt

SEQ ID NO: 1816767 - DNA, 15 bp, Homo sapiens
ttagttacctgtgtt

SEQ ID NO: 1816768 - DNA, 15 bp, Homo sapiens
tagttacctgtgttg

SEQ ID NO: 1816769 - DNA, 15 bp, Homo sapiens
agttacctgtgttgg

SEQ ID NO: 1816770 - DNA, 15 bp, Homo sapiens
gttacctgtgttgga

SEQ ID NO: 1816771 - DNA, 15 bp, Homo sapiens
ttacctgtgttggat

SEQ ID NO: 1816772 - DNA, 15 bp, Homo sapiens
tacctgtgttggata

SEQ ID NO: 1816773 - DNA, 15 bp, Homo sapiens
acctgtgttggataa

SEQ ID NO: 1816774 - DNA, 15 bp, Homo sapiens
cctgtgttggataag

SEQ ID NO: 1816775 - DNA, 15 bp, Homo sapiens
ctgtgttggataagg

SEQ ID NO: 1816776 - DNA, 15 bp, Homo sapiens
tgtgttggataaggc

SEQ ID NO: 1816777 - DNA, 15 bp, Homo sapiens
gtgttggataaggca

SEQ ID NO: 1816778 - DNA, 15 bp, Homo sapiens
tgttggataaggcac

SEQ ID NO: 1816779 - DNA, 15 bp, Homo sapiens
gttggataaggcacg

SEQ ID NO: 1816780 - DNA, 15 bp, Homo sapiens
ttggataaggcacgg

SEQ ID NO: 1816781 - DNA, 15 bp, Homo sapiens
tggataaggcacgga

SEQ ID NO: 1816782 - DNA, 15 bp, Homo sapiens
ggataaggcacggac

SEQ ID NO: 1816783 - DNA, 15 bp, Homo sapiens
gataaggcacggaca

SEQ ID NO: 1816784 - DNA, 15 bp, Homo sapiens
ataaggcacggacag

SEQ ID NO: 1816785 - DNA, 15 bp, Homo sapiens
taaggcacggacagc

SEQ ID NO: 1816786 - DNA, 15 bp, Homo sapiens
aaggcacggacagct

SEQ ID NO: 1816787 - DNA, 15 bp, Homo sapiens
aggcacggacagctt

SEQ ID NO: 1816788 - DNA, 15 bp, Homo sapiens
ggcacggacagcttc

SEQ ID NO: 1816789 - DNA, 15 bp, Homo sapiens
gcacggacagcttct

SEQ ID NO: 1816790 - DNA, 15 bp, Homo sapiens
cacggacagcttctc

SEQ ID NO: 1816791 - DNA, 15 bp, Homo sapiens
acggacagcttctct

SEQ ID NO: 1816792 - DNA, 15 bp, Homo sapiens
cggacagcttctctg

SEQ ID NO: 1816793 - DNA, 15 bp, Homo sapiens
ggacagcttctctgc

SEQ ID NO: 1816794 - DNA, 15 bp, Homo sapiens
gacagcttctctgct

SEQ ID NO: 1816795 - DNA, 15 bp, Homo sapiens
acagcttctctgctc

SEQ ID NO: 1816796 - DNA, 15 bp, Homo sapiens
cagcttctctgctct

SEQ ID NO: 1816797 - DNA, 15 bp, Homo sapiens
agcttctctgctctg

SEQ ID NO: 1816798 - DNA, 15 bp, Homo sapiens
gcttctctgctctgg

SEQ ID NO: 1816799 - DNA, 15 bp, Homo sapiens
cttctctgctctggg

SEQ ID NO: 1816800 - DNA, 15 bp, Homo sapiens
ttctctgctctgggg

SEQ ID NO: 1816801 - DNA, 15 bp, Homo sapiens
tctctgctctggggg

SEQ ID NO: 1816802 - DNA, 15 bp, Homo sapiens
ctctgctctgggggt

SEQ ID NO: 1816803 - DNA, 15 bp, Homo sapiens
tctgctctgggggta

SEQ ID NO: 1816804 - DNA, 15 bp, Homo sapiens
ctgctctgggggtat

SEQ ID NO: 1816805 - DNA, 15 bp, Homo sapiens
tgctctgggggtatt

SEQ ID NO: 1816806 - DNA, 15 bp, Homo sapiens
gctctgggggtattt

SEQ ID NO: 1816807 - DNA, 15 bp, Homo sapiens
ctctgggggtatttc

SEQ ID NO: 1816808 - DNA, 15 bp, Homo sapiens
tctgggggtatttct

SEQ ID NO: 1816809 - DNA, 15 bp, Homo sapiens
ctgggggtatttctg

SEQ ID NO: 1816810 - DNA, 15 bp, Homo sapiens
tgggggtatttctgt

SEQ ID NO: 1816811 - DNA, 15 bp, Homo sapiens
gggggtatttctgta

SEQ ID NO: 1816812 - DNA, 15 bp, Homo sapiens
ggggtatttctgtac

SEQ ID NO: 1816813 - DNA, 15 bp, Homo sapiens
gggtatttctgtact

SEQ ID NO: 1816814 - DNA, 15 bp, Homo sapiens
ggtatttctgtacta

SEQ ID NO: 1816815 - DNA, 15 bp, Homo sapiens
gtatttctgtactag

SEQ ID NO: 1816816 - DNA, 15 bp, Homo sapiens
tatttctgtactagg

SEQ ID NO: 1816817 - DNA, 15 bp, Homo sapiens
atttctgtactagga

SEQ ID NO: 1816818 - DNA, 15 bp, Homo sapiens
tttctgtactaggat

SEQ ID NO: 1816819 - DNA, 15 bp, Homo sapiens
ttctgtactaggatc

SEQ ID NO: 1816820 - DNA, 15 bp, Homo sapiens
tctgtactaggatca

SEQ ID NO: 1816821 - DNA, 15 bp, Homo sapiens
ctgtactaggatcag

SEQ ID NO: 1816822 - DNA, 15 bp, Homo sapiens
tgtactaggatcagt

SEQ ID NO: 1816823 - DNA, 15 bp, Homo sapiens
gtactaggatcagtg

SEQ ID NO: 1816824 - DNA, 15 bp, Homo sapiens
tactaggatcagtga

SEQ ID NO: 1816825 - DNA, 15 bp, Homo sapiens
actaggatcagtgat

SEQ ID NO: 1816826 - DNA, 15 bp, Homo sapiens
ctaggatcagtgatc

SEQ ID NO: 1816827 - DNA, 15 bp, Homo sapiens
taggatcagtgatcc

SEQ ID NO: 1816828 - DNA, 15 bp, Homo sapiens
aggatcagtgatcct

SEQ ID NO: 1816829 - DNA, 15 bp, Homo sapiens
ggatcagtgatcctc

SEQ ID NO: 1816830 - DNA, 15 bp, Homo sapiens
gatcagtgatcctcc

SEQ ID NO: 1816831 - DNA, 15 bp, Homo sapiens
atcagtgatcctccc

SEQ ID NO: 1816832 - DNA, 15 bp, Homo sapiens
tcagtgatcctcccg

SEQ ID NO: 1816833 - DNA, 15 bp, Homo sapiens
cagtgatcctcccgg

SEQ ID NO: 1816834 - DNA, 15 bp, Homo sapiens
agtgatcctcccggg

SEQ ID NO: 1816835 - DNA, 15 bp, Homo sapiens
gtgatcctcccggga

SEQ ID NO: 1816836 - DNA, 15 bp, Homo sapiens
tgatcctcccgggag

SEQ ID NO: 1816837 - DNA, 15 bp, Homo sapiens
gatcctcccgggagg

SEQ ID NO: 1816838 - DNA, 15 bp, Homo sapiens
atcctcccgggaggc

SEQ ID NO: 1816839 - DNA, 15 bp, Homo sapiens
tcctcccgggaggcc

SEQ ID NO: 1816840 - DNA, 15 bp, Homo sapiens
cctcccgggaggcca

SEQ ID NO: 1816841 - DNA, 15 bp, Homo sapiens
ctcccgggaggccat

SEQ ID NO: 1816842 - DNA, 15 bp, Homo sapiens
tcccgggaggccatt

SEQ ID NO: 1816843 - DNA, 15 bp, Homo sapiens
cccgggaggccattt

SEQ ID NO: 1816844 - DNA, 15 bp, Homo sapiens
ccgggaggccatttc

SEQ ID NO: 1816845 - DNA, 15 bp, Homo sapiens
cgggaggccatttcc

SEQ ID NO: 1816846 - DNA, 15 bp, Homo sapiens
gggaggccatttcct

SEQ ID NO: 1816847 - DNA, 15 bp, Homo sapiens
ggaggccatttcctg

SEQ ID NO: 1816848 - DNA, 15 bp, Homo sapiens
gaggccatttcctgc

SEQ ID NO: 1816849 - DNA, 15 bp, Homo sapiens
aggccatttcctgcc

SEQ ID NO: 1816850 - DNA, 15 bp, Homo sapiens
ggccatttcctgccc

SEQ ID NO: 1816851 - DNA, 15 bp, Homo sapiens
gccatttcctgcccc

SEQ ID NO: 1816852 - DNA, 15 bp, Homo sapiens
ccatttcctgccccc

SEQ ID NO: 1816853 - DNA, 15 bp, Homo sapiens
catttcctgccccca

SEQ ID NO: 1816854 - DNA, 15 bp, Homo sapiens
atttcctgcccccat

SEQ ID NO: 1816855 - DNA, 15 bp, Homo sapiens
tttcctgcccccata

SEQ ID NO: 1816856 - DNA, 15 bp, Homo sapiens
ttcctgcccccataa

SEQ ID NO: 1816857 - DNA, 15 bp, Homo sapiens
tcctgcccccataat

SEQ ID NO: 1816858 - DNA, 15 bp, Homo sapiens
cctgcccccataatc

SEQ ID NO: 1816859 - DNA, 15 bp, Homo sapiens
ctgcccccataatca

SEQ ID NO: 1816860 - DNA, 15 bp, Homo sapiens
tgcccccataatcag

SEQ ID NO: 1816861 - DNA, 15 bp, Homo sapiens
gcccccataatcagg

SEQ ID NO: 1816862 - DNA, 15 bp, Homo sapiens
cccccataatcaggg

SEQ ID NO: 1816863 - DNA, 15 bp, Homo sapiens
ccccataatcaggga

SEQ ID NO: 1816864 - DNA, 15 bp, Homo sapiens
cccataatcagggaa

SEQ ID NO: 1816865 - DNA, 15 bp, Homo sapiens
ccataatcagggaag

SEQ ID NO: 1816866 - DNA, 15 bp, Homo sapiens
cataatcagggaagc

SEQ ID NO: 1816867 - DNA, 15 bp, Homo sapiens
ataatcagggaagcc

SEQ ID NO: 1816868 - DNA, 15 bp, Homo sapiens
taatcagggaagcct

SEQ ID NO: 1816869 - DNA, 15 bp, Homo sapiens
aatcagggaagcctg

SEQ ID NO: 1816870 - DNA, 15 bp, Homo sapiens
atcagggaagcctgc

SEQ ID NO: 1816871 - DNA, 15 bp, Homo sapiens
tcagggaagcctgct

SEQ ID NO: 1816872 - DNA, 15 bp, Homo sapiens
cagggaagcctgctc

SEQ ID NO: 1816873 - DNA, 15 bp, Homo sapiens
agggaagcctgctcg

SEQ ID NO: 1816874 - DNA, 15 bp, Homo sapiens
gggaagcctgctcgt

SEQ ID NO: 1816875 - DNA, 15 bp, Homo sapiens
ggaagcctgctcgta

SEQ ID NO: 1816876 - DNA, 15 bp, Homo sapiens
gaagcctgctcgtaa

SEQ ID NO: 1816877 - DNA, 15 bp, Homo sapiens
aagcctgctcgtaaa

SEQ ID NO: 1816878 - DNA, 15 bp, Homo sapiens
agcctgctcgtaaac

SEQ ID NO: 1816879 - DNA, 15 bp, Homo sapiens
gcctgctcgtaaaca

SEQ ID NO: 1816880 - DNA, 15 bp, Homo sapiens
cctgctcgtaaacaa

SEQ ID NO: 1816881 - DNA, 15 bp, Homo sapiens
ctgctcgtaaacaac

SEQ ID NO: 1816882 - DNA, 15 bp, Homo sapiens
tgctcgtaaacaaca

SEQ ID NO: 1816883 - DNA, 15 bp, Homo sapiens
gctcgtaaacaacac

SEQ ID NO: 1816884 - DNA, 15 bp, Homo sapiens
ctcgtaaacaacaca

SEQ ID NO: 1816885 - DNA, 15 bp, Homo sapiens
tcgtaaacaacacat

SEQ ID NO: 1816886 - DNA, 15 bp, Homo sapiens
cgtaaacaacacatg

SEQ ID NO: 1816887 - DNA, 15 bp, Homo sapiens
gtaaacaacacatgg

SEQ ID NO: 1816888 - DNA, 15 bp, Homo sapiens
taaacaacacatgga

SEQ ID NO: 1816889 - DNA, 15 bp, Homo sapiens
aaacaacacatggac

SEQ ID NO: 1816890 - DNA, 15 bp, Homo sapiens
aacaacacatggaca

SEQ ID NO: 1816891 - DNA, 15 bp, Homo sapiens
acaacacatggacag

SEQ ID NO: 1816892 - DNA, 15 bp, Homo sapiens
caacacatggacaga

SEQ ID NO: 1816893 - DNA, 15 bp, Homo sapiens
aacacatggacagat

SEQ ID NO: 1816894 - DNA, 15 bp, Homo sapiens
acacatggacagata

SEQ ID NO: 1816895 - DNA, 15 bp, Homo sapiens
cacatggacagatag

SEQ ID NO: 1816896 - DNA, 15 bp, Homo sapiens
acatggacagatagg

SEQ ID NO: 1816897 - DNA, 15 bp, Homo sapiens
catggacagatagga

SEQ ID NO: 1816898 - DNA, 15 bp, Homo sapiens
atggacagataggag

SEQ ID NO: 1816899 - DNA, 15 bp, Homo sapiens
tggacagataggaga

SEQ ID NO: 1816900 - DNA, 15 bp, Homo sapiens
ggacagataggagag

SEQ ID NO: 1816901 - DNA, 15 bp, Homo sapiens
gacagataggagagg

SEQ ID NO: 1816902 - DNA, 15 bp, Homo sapiens
acagataggagaggc

SEQ ID NO: 1816903 - DNA, 15 bp, Homo sapiens
cagataggagaggcc

SEQ ID NO: 1816904 - DNA, 15 bp, Homo sapiens
agataggagaggcca

SEQ ID NO: 1816905 - DNA, 15 bp, Homo sapiens
gataggagaggccat

SEQ ID NO: 1816906 - DNA, 15 bp, Homo sapiens
ataggagaggccatt

SEQ ID NO: 1816907 - DNA, 15 bp, Homo sapiens
taggagaggccattt

SEQ ID NO: 1816908 - DNA, 15 bp, Homo sapiens
aggagaggccatttg

SEQ ID NO: 1816909 - DNA, 15 bp, Homo sapiens
ggagaggccatttgt

SEQ ID NO: 1816910 - DNA, 15 bp, Homo sapiens
gagaggccatttgta

SEQ ID NO: 1816911 - DNA, 15 bp, Homo sapiens
agaggccatttgtaa

SEQ ID NO: 1816912 - DNA, 15 bp, Homo sapiens
gaggccatttgtaac

SEQ ID NO: 1816913 - DNA, 15 bp, Homo sapiens
aggccatttgtaact

SEQ ID NO: 1816914 - DNA, 15 bp, Homo sapiens
ggccatttgtaactt

SEQ ID NO: 1816915 - DNA, 15 bp, Homo sapiens
gccatttgtaactta

SEQ ID NO: 1816916 - DNA, 15 bp, Homo sapiens
ccatttgtaacttaa

SEQ ID NO: 1816917 - DNA, 15 bp, Homo sapiens
catttgtaacttaag

SEQ ID NO: 1816918 - DNA, 15 bp, Homo sapiens
atttgtaacttaagg

SEQ ID NO: 1816919 - DNA, 15 bp, Homo sapiens
tttgtaacttaagga

SEQ ID NO: 1816920 - DNA, 15 bp, Homo sapiens
ttgtaacttaaggaa

SEQ ID NO: 1816921 - DNA, 15 bp, Homo sapiens
tgtaacttaaggaaa

SEQ ID NO: 1816922 - DNA, 15 bp, Homo sapiens
gtaacttaaggaaat

SEQ ID NO: 1816923 - DNA, 15 bp, Homo sapiens
taacttaaggaaatg

SEQ ID NO: 1816924 - DNA, 15 bp, Homo sapiens
aacttaaggaaatgg

SEQ ID NO: 1816925 - DNA, 15 bp, Homo sapiens
acttaaggaaatgga

SEQ ID NO: 1816926 - DNA, 15 bp, Homo sapiens
cttaaggaaatggac

SEQ ID NO: 1816927 - DNA, 15 bp, Homo sapiens
ttaaggaaatggacc

SEQ ID NO: 1816928 - DNA, 15 bp, Homo sapiens
taaggaaatggaccc

SEQ ID NO: 1816929 - DNA, 15 bp, Homo sapiens
aaggaaatggacccg

SEQ ID NO: 1816930 - DNA, 15 bp, Homo sapiens
aggaaatggacccga

SEQ ID NO: 1816931 - DNA, 15 bp, Homo sapiens
ggaaatggacccgat

SEQ ID NO: 1816932 - DNA, 15 bp, Homo sapiens
gaaatggacccgata

SEQ ID NO: 1816933 - DNA, 15 bp, Homo sapiens
aaatggacccgatac

SEQ ID NO: 1816934 - DNA, 15 bp, Homo sapiens
aatggacccgatacg

SEQ ID NO: 1816935 - DNA, 15 bp, Homo sapiens
atggacccgatacgt

SEQ ID NO: 1816936 - DNA, 15 bp, Homo sapiens
tggacccgatacgta

SEQ ID NO: 1816937 - DNA, 15 bp, Homo sapiens
ggacccgatacgtaa

SEQ ID NO: 1816938 - DNA, 15 bp, Homo sapiens
gacccgatacgtaaa

SEQ ID NO: 1816939 - DNA, 15 bp, Homo sapiens
acccgatacgtaaag

SEQ ID NO: 1816940 - DNA, 15 bp, Homo sapiens
cccgatacgtaaaga

SEQ ID NO: 1816941 - DNA, 15 bp, Homo sapiens
ccgatacgtaaagat

SEQ ID NO: 1816942 - DNA, 15 bp, Homo sapiens
cgatacgtaaagatt

SEQ ID NO: 1816943 - DNA, 15 bp, Homo sapiens
gatacgtaaagattc

SEQ ID NO: 1816944 - DNA, 15 bp, Homo sapiens
atacgtaaagattct

SEQ ID NO: 1816945 - DNA, 15 bp, Homo sapiens
tacgtaaagattctg

SEQ ID NO: 1816946 - DNA, 15 bp, Homo sapiens
acgtaaagattctga

SEQ ID NO: 1816947 - DNA, 15 bp, Homo sapiens
cgtaaagattctgaa

SEQ ID NO: 1816948 - DNA, 15 bp, Homo sapiens
gtaaagattctgaac

SEQ ID NO: 1816949 - DNA, 15 bp, Homo sapiens
taaagattctgaaca

SEQ ID NO: 1816950 - DNA, 15 bp, Homo sapiens
aaagattctgaacat

SEQ ID NO: 1816951 - DNA, 15 bp, Homo sapiens
aagattctgaacata

SEQ ID NO: 1816952 - DNA, 15 bp, Homo sapiens
agattctgaacatat

SEQ ID NO: 1816953 - DNA, 15 bp, Homo sapiens
gattctgaacatatt

SEQ ID NO: 1816954 - DNA, 15 bp, Homo sapiens
attctgaacatattc

SEQ ID NO: 1816955 - DNA, 15 bp, Homo sapiens
ttctgaacatattct

SEQ ID NO: 1816956 - DNA, 15 bp, Homo sapiens
tctgaacatattctt

SEQ ID NO: 1816957 - DNA, 15 bp, Homo sapiens
ctgaacatattcttt

SEQ ID NO: 1816958 - DNA, 15 bp, Homo sapiens
tgaacatattctttg

SEQ ID NO: 1816959 - DNA, 15 bp, Homo sapiens
gaacatattctttgt

SEQ ID NO: 1816960 - DNA, 15 bp, Homo sapiens
aacatattctttgta

SEQ ID NO: 1816961 - DNA, 15 bp, Homo sapiens
acatattctttgtaa

SEQ ID NO: 1816962 - DNA, 15 bp, Homo sapiens
catattctttgtaag

SEQ ID NO: 1816963 - DNA, 15 bp, Homo sapiens
atattctttgtaagg

SEQ ID NO: 1816964 - DNA, 15 bp, Homo sapiens
tattctttgtaagga

SEQ ID NO: 1816965 - DNA, 15 bp, Homo sapiens
attctttgtaaggag

SEQ ID NO: 1816966 - DNA, 15 bp, Homo sapiens
ttctttgtaaggagg

SEQ ID NO: 1816967 - DNA, 15 bp, Homo sapiens
tctttgtaaggaggt

SEQ ID NO: 1816968 - DNA, 15 bp, Homo sapiens
ctttgtaaggaggta

SEQ ID NO: 1816969 - DNA, 15 bp, Homo sapiens
tttgtaaggaggtat

SEQ ID NO: 1816970 - DNA, 15 bp, Homo sapiens
ttgtaaggaggtatg

SEQ ID NO: 1816971 - DNA, 15 bp, Homo sapiens
tgtaaggaggtatgc

SEQ ID NO: 1816972 - DNA, 15 bp, Homo sapiens
gtaaggaggtatgcc

SEQ ID NO: 1816973 - DNA, 15 bp, Homo sapiens
taaggaggtatgcct

SEQ ID NO: 1816974 - DNA, 15 bp, Homo sapiens
aaggaggtatgccta

SEQ ID NO: 1816975 - DNA, 15 bp, Homo sapiens
aggaggtatgcctat

SEQ ID NO: 1816976 - DNA, 15 bp, Homo sapiens
ggaggtatgcctatt

SEQ ID NO: 1816977 - DNA, 15 bp, Homo sapiens
gaggtatgcctattt

SEQ ID NO: 1816978 - DNA, 15 bp, Homo sapiens
aggtatgcctatttt

SEQ ID NO: 1816979 - DNA, 15 bp, Homo sapiens
ggtatgcctatttta

SEQ ID NO: 1816980 - DNA, 15 bp, Homo sapiens
gtatgcctattttat

SEQ ID NO: 1816981 - DNA, 15 bp, Homo sapiens
tatgcctattttata

SEQ ID NO: 1816982 - DNA, 15 bp, Homo sapiens
atgcctattttataa

SEQ ID NO: 1816983 - DNA, 15 bp, Homo sapiens
tgcctattttataaa

SEQ ID NO: 1816984 - DNA, 15 bp, Homo sapiens
gcctattttataaag

SEQ ID NO: 1816985 - DNA, 15 bp, Homo sapiens
cctattttataaagt

SEQ ID NO: 1816986 - DNA, 15 bp, Homo sapiens
ctattttataaagta

SEQ ID NO: 1816987 - DNA, 15 bp, Homo sapiens
tattttataaagtac

SEQ ID NO: 1816988 - DNA, 15 bp, Homo sapiens
attttataaagtaca

SEQ ID NO: 1816989 - DNA, 15 bp, Homo sapiens
ttttataaagtacag

SEQ ID NO: 1816990 - DNA, 15 bp, Homo sapiens
tttataaagtacagc

SEQ ID NO: 1816991 - DNA, 15 bp, Homo sapiens
ttataaagtacagcc

SEQ ID NO: 1816992 - DNA, 15 bp, Homo sapiens
tataaagtacagccg

SEQ ID NO: 1816993 - DNA, 15 bp, Homo sapiens
ataaagtacagccgg

SEQ ID NO: 1816994 - DNA, 15 bp, Homo sapiens
taaagtacagccggg

SEQ ID NO: 1816995 - DNA, 15 bp, Homo sapiens
aaagtacagccgggt

SEQ ID NO: 1816996 - DNA, 15 bp, Homo sapiens
aagtacagccgggtg

SEQ ID NO: 1816997 - DNA, 15 bp, Homo sapiens
agtacagccgggtgt

SEQ ID NO: 1816998 - DNA, 15 bp, Homo sapiens
gtacagccgggtgtg

SEQ ID NO: 1816999 - DNA, 15 bp, Homo sapiens
tacagccgggtgtgg

SEQ ID NO: 1817000 - DNA, 15 bp, Homo sapiens
acagccgggtgtggt

SEQ ID NO: 1817001 - DNA, 15 bp, Homo sapiens
cagccgggtgtggtg

SEQ ID NO: 1817002 - DNA, 15 bp, Homo sapiens
ccgggtgtggtggct

SEQ ID NO: 1817003 - DNA, 15 bp, Homo sapiens
cgggtgtggtggctc

SEQ ID NO: 1817004 - DNA, 15 bp, Homo sapiens
tgtggtggctcatgg

SEQ ID NO: 1817005 - DNA, 15 bp, Homo sapiens
gtggtggctcatggc

SEQ ID NO: 1817006 - DNA, 15 bp, Homo sapiens
tggtggctcatggct

SEQ ID NO: 1817007 - DNA, 15 bp, Homo sapiens
ggtggctcatggcta

SEQ ID NO: 1817008 - DNA, 15 bp, Homo sapiens
gtggctcatggctat

SEQ ID NO: 1817009 - DNA, 15 bp, Homo sapiens
tggctcatggctata

SEQ ID NO: 1817010 - DNA, 15 bp, Homo sapiens
ggctcatggctataa

SEQ ID NO: 1817011 - DNA, 15 bp, Homo sapiens
gctcatggctataat

SEQ ID NO: 1817012 - DNA, 15 bp, Homo sapiens
ctcatggctataatc

SEQ ID NO: 1817013 - DNA, 15 bp, Homo sapiens
tcatggctataatcc

SEQ ID NO: 1817014 - DNA, 15 bp, Homo sapiens
catggctataatccc

SEQ ID NO: 1817015 - DNA, 15 bp, Homo sapiens
atggctataatccca

SEQ ID NO: 1817016 - DNA, 15 bp, Homo sapiens
tggctataatcccag

SEQ ID NO: 1817017 - DNA, 15 bp, Homo sapiens
ggctataatcccagc

SEQ ID NO: 1817018 - DNA, 15 bp, Homo sapiens
gctataatcccagca

SEQ ID NO: 1817019 - DNA, 15 bp, Homo sapiens
gcggatcacctgaga

SEQ ID NO: 1817020 - DNA, 15 bp, Homo sapiens
cggatcacctgagat

SEQ ID NO: 1817021 - DNA, 15 bp, Homo sapiens
tgagatcaggagttt

SEQ ID NO: 1817022 - DNA, 15 bp, Homo sapiens
gagatcaggagtttg

SEQ ID NO: 1817023 - DNA, 15 bp, Homo sapiens
agatcaggagtttga

SEQ ID NO: 1817024 - DNA, 15 bp, Homo sapiens
gatcaggagtttgag

SEQ ID NO: 1817025 - DNA, 15 bp, Homo sapiens
atcaggagtttgaga

SEQ ID NO: 1817026 - DNA, 15 bp, Homo sapiens
agcctgaccaacacg

SEQ ID NO: 1817027 - DNA, 15 bp, Homo sapiens
gcctgaccaacacgg

SEQ ID NO: 1817028 - DNA, 15 bp, Homo sapiens
cctgaccaacacgga

SEQ ID NO: 1817029 - DNA, 15 bp, Homo sapiens
ctgaccaacacggag

SEQ ID NO: 1817030 - DNA, 15 bp, Homo sapiens
tgaccaacacggaga

SEQ ID NO: 1817031 - DNA, 15 bp, Homo sapiens
gaccaacacggagaa

SEQ ID NO: 1817032 - DNA, 15 bp, Homo sapiens
accaacacggagaaa

SEQ ID NO: 1817033 - DNA, 15 bp, Homo sapiens
ccaacacggagaaac

SEQ ID NO: 1817034 - DNA, 15 bp, Homo sapiens
caacacggagaaacc

SEQ ID NO: 1817035 - DNA, 15 bp, Homo sapiens
aacacggagaaaccc

SEQ ID NO: 1817036 - DNA, 15 bp, Homo sapiens
acacggagaaacccc

SEQ ID NO: 1817037 - DNA, 15 bp, Homo sapiens
cacggagaaaccccg

SEQ ID NO: 1817038 - DNA, 15 bp, Homo sapiens
acggagaaaccccgt

SEQ ID NO: 1817039 - DNA, 15 bp, Homo sapiens
cggagaaaccccgtc

SEQ ID NO: 1817040 - DNA, 15 bp, Homo sapiens
cgtctgtactaaaaa

SEQ ID NO: 1817041 - DNA, 15 bp, Homo sapiens
gtctgtactaaaaat

SEQ ID NO: 1817042 - DNA, 15 bp, Homo sapiens
aatacaaaattagca

SEQ ID NO: 1817043 - DNA, 15 bp, Homo sapiens
atacaaaattagcag

SEQ ID NO: 1817044 - DNA, 15 bp, Homo sapiens
tacaaaattagcagg

SEQ ID NO: 1817045 - DNA, 15 bp, Homo sapiens
acaaaattagcaggg

SEQ ID NO: 1817046 - DNA, 15 bp, Homo sapiens
caaaattagcagggt

SEQ ID NO: 1817047 - DNA, 15 bp, Homo sapiens
aaaattagcagggtg

SEQ ID NO: 1817048 - DNA, 15 bp, Homo sapiens
aaattagcagggtgt

SEQ ID NO: 1817049 - DNA, 15 bp, Homo sapiens
aattagcagggtgtg

SEQ ID NO: 1817050 - DNA, 15 bp, Homo sapiens
attagcagggtgtgg

SEQ ID NO: 1817051 - DNA, 15 bp, Homo sapiens
ttagcagggtgtggt

SEQ ID NO: 1817052 - DNA, 15 bp, Homo sapiens
tagcagggtgtggtg

SEQ ID NO: 1817053 - DNA, 15 bp, Homo sapiens
agcagggtgtggtgg

SEQ ID NO: 1817054 - DNA, 15 bp, Homo sapiens
gcagggtgtggtggt

SEQ ID NO: 1817055 - DNA, 15 bp, Homo sapiens
cagggtgtggtggta

SEQ ID NO: 1817056 - DNA, 15 bp, Homo sapiens
agggtgtggtggtac

SEQ ID NO: 1817057 - DNA, 15 bp, Homo sapiens
gggtgtggtggtaca

SEQ ID NO: 1817058 - DNA, 15 bp, Homo sapiens
ggtgtggtggtacat

SEQ ID NO: 1817059 - DNA, 15 bp, Homo sapiens
gtgtggtggtacatg

SEQ ID NO: 1817060 - DNA, 15 bp, Homo sapiens
tgtggtggtacatgc

SEQ ID NO: 1817061 - DNA, 15 bp, Homo sapiens
gtggtggtacatgcc

SEQ ID NO: 1817062 - DNA, 15 bp, Homo sapiens
tggtggtacatgcct

SEQ ID NO: 1817063 - DNA, 15 bp, Homo sapiens
ggtggtacatgcctg

SEQ ID NO: 1817064 - DNA, 15 bp, Homo sapiens
gtggtacatgcctgt

SEQ ID NO: 1817065 - DNA, 15 bp, Homo sapiens
tggtacatgcctgta

SEQ ID NO: 1817066 - DNA, 15 bp, Homo sapiens
ggtacatgcctgtaa

SEQ ID NO: 1817067 - DNA, 15 bp, Homo sapiens
gtacatgcctgtaat

SEQ ID NO: 1817068 - DNA, 15 bp, Homo sapiens
tacatgcctgtaatc

SEQ ID NO: 1817069 - DNA, 15 bp, Homo sapiens
gccattgcactccaa

SEQ ID NO: 1817070 - DNA, 15 bp, Homo sapiens
ccattgcactccaat

SEQ ID NO: 1817071 - DNA, 15 bp, Homo sapiens
cattgcactccaatc

SEQ ID NO: 1817072 - DNA, 15 bp, Homo sapiens
attgcactccaatct

SEQ ID NO: 1817073 - DNA, 15 bp, Homo sapiens
ttgcactccaatcta

SEQ ID NO: 1817074 - DNA, 15 bp, Homo sapiens
tgcactccaatctag

SEQ ID NO: 1817075 - DNA, 15 bp, Homo sapiens
gcactccaatctagg

SEQ ID NO: 1817076 - DNA, 15 bp, Homo sapiens
cactccaatctaggc

SEQ ID NO: 1817077 - DNA, 15 bp, Homo sapiens
actccaatctaggca

SEQ ID NO: 1817078 - DNA, 15 bp, Homo sapiens
ctccaatctaggcaa

SEQ ID NO: 1817079 - DNA, 15 bp, Homo sapiens
tccaatctaggcaat

SEQ ID NO: 1817080 - DNA, 15 bp, Homo sapiens
ccaatctaggcaata

SEQ ID NO: 1817081 - DNA, 15 bp, Homo sapiens
caatctaggcaataa

SEQ ID NO: 1817082 - DNA, 15 bp, Homo sapiens
aatctaggcaataag

SEQ ID NO: 1817083 - DNA, 15 bp, Homo sapiens
atctaggcaataaga

SEQ ID NO: 1817084 - DNA, 15 bp, Homo sapiens
tctaggcaataagag

SEQ ID NO: 1817085 - DNA, 15 bp, Homo sapiens
ctaggcaataagagc

SEQ ID NO: 1817086 - DNA, 15 bp, Homo sapiens
taggcaataagagca

SEQ ID NO: 1817087 - DNA, 15 bp, Homo sapiens
aggcaataagagcaa

SEQ ID NO: 1817088 - DNA, 15 bp, Homo sapiens
ggcaataagagcaaa

SEQ ID NO: 1817089 - DNA, 15 bp, Homo sapiens
gcaataagagcaaaa

SEQ ID NO: 1817090 - DNA, 15 bp, Homo sapiens
caataagagcaaaac

SEQ ID NO: 1817091 - DNA, 15 bp, Homo sapiens
aataagagcaaaact

SEQ ID NO: 1817092 - DNA, 15 bp, Homo sapiens
ataagagcaaaactc

SEQ ID NO: 1817093 - DNA, 15 bp, Homo sapiens
taagagcaaaactcc

SEQ ID NO: 1817094 - DNA, 15 bp, Homo sapiens
aactccgtctcaaac

SEQ ID NO: 1817095 - DNA, 15 bp, Homo sapiens
actccgtctcaaaca

SEQ ID NO: 1817096 - DNA, 15 bp, Homo sapiens
ctccgtctcaaacaa

SEQ ID NO: 1817097 - DNA, 15 bp, Homo sapiens
tccgtctcaaacaac

SEQ ID NO: 1817098 - DNA, 15 bp, Homo sapiens
ccgtctcaaacaaca

SEQ ID NO: 1817099 - DNA, 15 bp, Homo sapiens
cgtctcaaacaacaa

SEQ ID NO: 1817100 - DNA, 15 bp, Homo sapiens
gtctcaaacaacaaa

SEQ ID NO: 1817101 - DNA, 15 bp, Homo sapiens
tctcaaacaacaaaa

SEQ ID NO: 1817102 - DNA, 15 bp, Homo sapiens
ctcaaacaacaaaaa

SEQ ID NO: 1817103 - DNA, 15 bp, Homo sapiens
tcaaacaacaaaaaa

SEQ ID NO: 1817104 - DNA, 15 bp, Homo sapiens
aaacaacaaaaaacc

SEQ ID NO: 1817105 - DNA, 15 bp, Homo sapiens
aacaacaaaaaacca

SEQ ID NO: 1817106 - DNA, 15 bp, Homo sapiens
acaacaaaaaaccaa

SEQ ID NO: 1817107 - DNA, 15 bp, Homo sapiens
caacaaaaaaccaaa

SEQ ID NO: 1817108 - DNA, 15 bp, Homo sapiens
aacaaaaaaccaaag

SEQ ID NO: 1817109 - DNA, 15 bp, Homo sapiens
acaaaaaaccaaagt

SEQ ID NO: 1817110 - DNA, 15 bp, Homo sapiens
caaaaaaccaaagta

SEQ ID NO: 1817111 - DNA, 15 bp, Homo sapiens
aaaaaccaaagtata

SEQ ID NO: 1817112 - DNA, 15 bp, Homo sapiens
aaaaccaaagtataa

SEQ ID NO: 1817113 - DNA, 15 bp, Homo sapiens
aaaccaaagtataac

SEQ ID NO: 1817114 - DNA, 15 bp, Homo sapiens
aaccaaagtataact

SEQ ID NO: 1817115 - DNA, 15 bp, Homo sapiens
accaaagtataactg

SEQ ID NO: 1817116 - DNA, 15 bp, Homo sapiens
ccaaagtataactgg

SEQ ID NO: 1817117 - DNA, 15 bp, Homo sapiens
caaagtataactggg

SEQ ID NO: 1817118 - DNA, 15 bp, Homo sapiens
aaagtataactgggc

SEQ ID NO: 1817119 - DNA, 15 bp, Homo sapiens
aagtataactgggct

SEQ ID NO: 1817120 - DNA, 15 bp, Homo sapiens
agtataactgggctt

SEQ ID NO: 1817121 - DNA, 15 bp, Homo sapiens
gtataactgggcttt

SEQ ID NO: 1817122 - DNA, 15 bp, Homo sapiens
tataactgggctttt

SEQ ID NO: 1817123 - DNA, 15 bp, Homo sapiens
ataactgggcttttt

SEQ ID NO: 1817124 - DNA, 15 bp, Homo sapiens
taactgggctttttg

SEQ ID NO: 1817125 - DNA, 15 bp, Homo sapiens
aactgggctttttga

SEQ ID NO: 1817126 - DNA, 15 bp, Homo sapiens
actgggctttttgaa

SEQ ID NO: 1817127 - DNA, 15 bp, Homo sapiens
ctgggctttttgaag

SEQ ID NO: 1817128 - DNA, 15 bp, Homo sapiens
tgggctttttgaaga

SEQ ID NO: 1817129 - DNA, 15 bp, Homo sapiens
gggctttttgaagaa

SEQ ID NO: 1817130 - DNA, 15 bp, Homo sapiens
ggctttttgaagaac

SEQ ID NO: 1817131 - DNA, 15 bp, Homo sapiens
gctttttgaagaaca

SEQ ID NO: 1817132 - DNA, 15 bp, Homo sapiens
ctttttgaagaacat

SEQ ID NO: 1817133 - DNA, 15 bp, Homo sapiens
tttttgaagaacatg

SEQ ID NO: 1817134 - DNA, 15 bp, Homo sapiens
ttttgaagaacatga

SEQ ID NO: 1817135 - DNA, 15 bp, Homo sapiens
tttgaagaacatgaa

SEQ ID NO: 1817136 - DNA, 15 bp, Homo sapiens
ttgaagaacatgaaa

SEQ ID NO: 1817137 - DNA, 15 bp, Homo sapiens
tgaagaacatgaaac

SEQ ID NO: 1817138 - DNA, 15 bp, Homo sapiens
gaagaacatgaaaca

SEQ ID NO: 1817139 - DNA, 15 bp, Homo sapiens
aagaacatgaaacat

SEQ ID NO: 1817140 - DNA, 15 bp, Homo sapiens
agaacatgaaacatg

SEQ ID NO: 1817141 - DNA, 15 bp, Homo sapiens
gaacatgaaacatgc

SEQ ID NO: 1817142 - DNA, 15 bp, Homo sapiens
aacatgaaacatgcc

SEQ ID NO: 1817143 - DNA, 15 bp, Homo sapiens
acatgaaacatgccc

SEQ ID NO: 1817144 - DNA, 15 bp, Homo sapiens
catgaaacatgccca

SEQ ID NO: 1817145 - DNA, 15 bp, Homo sapiens
atgaaacatgcccag

SEQ ID NO: 1817146 - DNA, 15 bp, Homo sapiens
tgaaacatgcccagt

SEQ ID NO: 1817147 - DNA, 15 bp, Homo sapiens
gaaacatgcccagtg

SEQ ID NO: 1817148 - DNA, 15 bp, Homo sapiens
aaacatgcccagtgt

SEQ ID NO: 1817149 - DNA, 15 bp, Homo sapiens
aacatgcccagtgtc

SEQ ID NO: 1817150 - DNA, 15 bp, Homo sapiens
acatgcccagtgtct

SEQ ID NO: 1817151 - DNA, 15 bp, Homo sapiens
catgcccagtgtctg

SEQ ID NO: 1817152 - DNA, 15 bp, Homo sapiens
atgcccagtgtctga

SEQ ID NO: 1817153 - DNA, 15 bp, Homo sapiens
tgcccagtgtctgaa

SEQ ID NO: 1817154 - DNA, 15 bp, Homo sapiens
gcccagtgtctgaag

SEQ ID NO: 1817155 - DNA, 15 bp, Homo sapiens
cccagtgtctgaagt

SEQ ID NO: 1817156 - DNA, 15 bp, Homo sapiens
ccagtgtctgaagta

SEQ ID NO: 1817157 - DNA, 15 bp, Homo sapiens
cagtgtctgaagtag

SEQ ID NO: 1817158 - DNA, 15 bp, Homo sapiens
agtgtctgaagtaga

SEQ ID NO: 1817159 - DNA, 15 bp, Homo sapiens
gtgtctgaagtagaa

SEQ ID NO: 1817160 - DNA, 15 bp, Homo sapiens
tgtctgaagtagaat

SEQ ID NO: 1817161 - DNA, 15 bp, Homo sapiens
gtctgaagtagaata

SEQ ID NO: 1817162 - DNA, 15 bp, Homo sapiens
tctgaagtagaataa

SEQ ID NO: 1817163 - DNA, 15 bp, Homo sapiens
ctgaagtagaataac

SEQ ID NO: 1817164 - DNA, 15 bp, Homo sapiens
tgaagtagaataact

SEQ ID NO: 1817165 - DNA, 15 bp, Homo sapiens
gaagtagaataacta

SEQ ID NO: 1817166 - DNA, 15 bp, Homo sapiens
aagtagaataactac

SEQ ID NO: 1817167 - DNA, 15 bp, Homo sapiens
agtagaataactacc

SEQ ID NO: 1817168 - DNA, 15 bp, Homo sapiens
gtagaataactaccg

SEQ ID NO: 1817169 - DNA, 15 bp, Homo sapiens
tagaataactaccga

SEQ ID NO: 1817170 - DNA, 15 bp, Homo sapiens
agaataactaccgaa

SEQ ID NO: 1817171 - DNA, 15 bp, Homo sapiens
gaataactaccgaac

SEQ ID NO: 1817172 - DNA, 15 bp, Homo sapiens
aataactaccgaact

SEQ ID NO: 1817173 - DNA, 15 bp, Homo sapiens
ataactaccgaactg

SEQ ID NO: 1817174 - DNA, 15 bp, Homo sapiens
taactaccgaactgt

SEQ ID NO: 1817175 - DNA, 15 bp, Homo sapiens
aactaccgaactgtc

SEQ ID NO: 1817176 - DNA, 15 bp, Homo sapiens
actaccgaactgtcc

SEQ ID NO: 1817177 - DNA, 15 bp, Homo sapiens
ctaccgaactgtccg

SEQ ID NO: 1817178 - DNA, 15 bp, Homo sapiens
taccgaactgtccgt

SEQ ID NO: 1817179 - DNA, 15 bp, Homo sapiens
accgaactgtccgta

SEQ ID NO: 1817180 - DNA, 15 bp, Homo sapiens
ccgaactgtccgtag

SEQ ID NO: 1817181 - DNA, 15 bp, Homo sapiens
cgaactgtccgtagg

SEQ ID NO: 1817182 - DNA, 15 bp, Homo sapiens
gaactgtccgtagga

SEQ ID NO: 1817183 - DNA, 15 bp, Homo sapiens
aactgtccgtaggac

SEQ ID NO: 1817184 - DNA, 15 bp, Homo sapiens
actgtccgtaggact

SEQ ID NO: 1817185 - DNA, 15 bp, Homo sapiens
ctgtccgtaggacta

SEQ ID NO: 1817186 - DNA, 15 bp, Homo sapiens
tgtccgtaggactaa

SEQ ID NO: 1817187 - DNA, 15 bp, Homo sapiens
gtccgtaggactaaa

SEQ ID NO: 1817188 - DNA, 15 bp, Homo sapiens
tccgtaggactaaac

SEQ ID NO: 1817189 - DNA, 15 bp, Homo sapiens
ccgtaggactaaact

SEQ ID NO: 1817190 - DNA, 15 bp, Homo sapiens
cgtaggactaaactt

SEQ ID NO: 1817191 - DNA, 15 bp, Homo sapiens
gtaggactaaacttt

SEQ ID NO: 1817192 - DNA, 15 bp, Homo sapiens
taggactaaactttt

SEQ ID NO: 1817193 - DNA, 15 bp, Homo sapiens
aggactaaacttttt

SEQ ID NO: 1817194 - DNA, 15 bp, Homo sapiens
ggactaaactttttc

SEQ ID NO: 1817195 - DNA, 15 bp, Homo sapiens
gactaaactttttct

SEQ ID NO: 1817196 - DNA, 15 bp, Homo sapiens
actaaactttttctt

SEQ ID NO: 1817197 - DNA, 15 bp, Homo sapiens
ctaaactttttcttg

SEQ ID NO: 1817198 - DNA, 15 bp, Homo sapiens
taaactttttcttga

SEQ ID NO: 1817199 - DNA, 15 bp, Homo sapiens
aaactttttcttgaa

SEQ ID NO: 1817200 - DNA, 15 bp, Homo sapiens
aactttttcttgaaa

SEQ ID NO: 1817201 - DNA, 15 bp, Homo sapiens
actttttcttgaaaa

SEQ ID NO: 1817202 - DNA, 15 bp, Homo sapiens
ctttttcttgaaaaa

SEQ ID NO: 1817203 - DNA, 15 bp, Homo sapiens
tttttcttgaaaaag

SEQ ID NO: 1817204 - DNA, 15 bp, Homo sapiens
ttttcttgaaaaagc

SEQ ID NO: 1817205 - DNA, 15 bp, Homo sapiens
tttcttgaaaaagct

SEQ ID NO: 1817206 - DNA, 15 bp, Homo sapiens
ttcttgaaaaagctc

SEQ ID NO: 1817207 - DNA, 15 bp, Homo sapiens
tcttgaaaaagctct

SEQ ID NO: 1817208 - DNA, 15 bp, Homo sapiens
cttgaaaaagctcta

SEQ ID NO: 1817209 - DNA, 15 bp, Homo sapiens
ttgaaaaagctctac

SEQ ID NO: 1817210 - DNA, 15 bp, Homo sapiens
tgaaaaagctctacc

SEQ ID NO: 1817211 - DNA, 15 bp, Homo sapiens
gaaaaagctctacca

SEQ ID NO: 1817212 - DNA, 15 bp, Homo sapiens
aaaaagctctaccaa

SEQ ID NO: 1817213 - DNA, 15 bp, Homo sapiens
aaaagctctaccaaa

SEQ ID NO: 1817214 - DNA, 15 bp, Homo sapiens
aaagctctaccaaaa

SEQ ID NO: 1817215 - DNA, 15 bp, Homo sapiens
aagctctaccaaaaa

SEQ ID NO: 1817216 - DNA, 15 bp, Homo sapiens
agctctaccaaaaaa

SEQ ID NO: 1817217 - DNA, 15 bp, Homo sapiens
gctctaccaaaaaaa

SEQ ID NO: 1817218 - DNA, 15 bp, Homo sapiens
ctctaccaaaaaaag

SEQ ID NO: 1817219 - DNA, 15 bp, Homo sapiens
tctaccaaaaaaagt

SEQ ID NO: 1817220 - DNA, 15 bp, Homo sapiens
ctaccaaaaaaagtc

SEQ ID NO: 1817221 - DNA, 15 bp, Homo sapiens
taccaaaaaaagtca

SEQ ID NO: 1817222 - DNA, 15 bp, Homo sapiens
accaaaaaaagtcac

SEQ ID NO: 1817223 - DNA, 15 bp, Homo sapiens
ccaaaaaaagtcacc

SEQ ID NO: 1817224 - DNA, 15 bp, Homo sapiens
caaaaaaagtcaccg

SEQ ID NO: 1817225 - DNA, 15 bp, Homo sapiens
aaaaaaagtcaccgg

SEQ ID NO: 1817226 - DNA, 15 bp, Homo sapiens
aaaaaagtcaccggc

SEQ ID NO: 1817227 - DNA, 15 bp, Homo sapiens
aaaaagtcaccggcc

SEQ ID NO: 1817228 - DNA, 15 bp, Homo sapiens
aaaagtcaccggcca

SEQ ID NO: 1817229 - DNA, 15 bp, Homo sapiens
aaagtcaccggccac

SEQ ID NO: 1817230 - DNA, 15 bp, Homo sapiens
aagtcaccggccact

SEQ ID NO: 1817231 - DNA, 15 bp, Homo sapiens
agtcaccggccactc

SEQ ID NO: 1817232 - DNA, 15 bp, Homo sapiens
gtcaccggccactcc

SEQ ID NO: 1817233 - DNA, 15 bp, Homo sapiens
tcaccggccactccc

SEQ ID NO: 1817234 - DNA, 15 bp, Homo sapiens
caccggccactccct

SEQ ID NO: 1817235 - DNA, 15 bp, Homo sapiens
accggccactccctt

SEQ ID NO: 1817236 - DNA, 15 bp, Homo sapiens
ccggccactcccttg

SEQ ID NO: 1817237 - DNA, 15 bp, Homo sapiens
cggccactcccttgt

SEQ ID NO: 1817238 - DNA, 15 bp, Homo sapiens
ggccactcccttgtc

SEQ ID NO: 1817239 - DNA, 15 bp, Homo sapiens
gccactcccttgtca

SEQ ID NO: 1817240 - DNA, 15 bp, Homo sapiens
ccactcccttgtcac

SEQ ID NO: 1817241 - DNA, 15 bp, Homo sapiens
cactcccttgtcaca

SEQ ID NO: 1817242 - DNA, 15 bp, Homo sapiens
actcccttgtcacag

SEQ ID NO: 1817243 - DNA, 15 bp, Homo sapiens
ctcccttgtcacagt

SEQ ID NO: 1817244 - DNA, 15 bp, Homo sapiens
tcccttgtcacagtt

SEQ ID NO: 1817245 - DNA, 15 bp, Homo sapiens
cccttgtcacagtta

SEQ ID NO: 1817246 - DNA, 15 bp, Homo sapiens
ccttgtcacagttat

SEQ ID NO: 1817247 - DNA, 15 bp, Homo sapiens
cttgtcacagttatt

SEQ ID NO: 1817248 - DNA, 15 bp, Homo sapiens
ttgtcacagttatta

SEQ ID NO: 1817249 - DNA, 15 bp, Homo sapiens
tgtcacagttattag

SEQ ID NO: 1817250 - DNA, 15 bp, Homo sapiens
gtcacagttattaga

SEQ ID NO: 1817251 - DNA, 15 bp, Homo sapiens
tcacagttattagac

SEQ ID NO: 1817252 - DNA, 15 bp, Homo sapiens
cacagttattagaca

SEQ ID NO: 1817253 - DNA, 15 bp, Homo sapiens
acagttattagacag

SEQ ID NO: 1817254 - DNA, 15 bp, Homo sapiens
cagttattagacagg

SEQ ID NO: 1817255 - DNA, 15 bp, Homo sapiens
agttattagacagga

SEQ ID NO: 1817256 - DNA, 15 bp, Homo sapiens
gttattagacaggag

SEQ ID NO: 1817257 - DNA, 15 bp, Homo sapiens
ttattagacaggagg

SEQ ID NO: 1817258 - DNA, 15 bp, Homo sapiens
tattagacaggagga

SEQ ID NO: 1817259 - DNA, 15 bp, Homo sapiens
attagacaggaggag

SEQ ID NO: 1817260 - DNA, 15 bp, Homo sapiens
ttagacaggaggaga

SEQ ID NO: 1817261 - DNA, 15 bp, Homo sapiens
tagacaggaggagaa

SEQ ID NO: 1817262 - DNA, 15 bp, Homo sapiens
agacaggaggagaaa

SEQ ID NO: 1817263 - DNA, 15 bp, Homo sapiens
gacaggaggagaaat

SEQ ID NO: 1817264 - DNA, 15 bp, Homo sapiens
acaggaggagaaatg

SEQ ID NO: 1817265 - DNA, 15 bp, Homo sapiens
caggaggagaaatga

SEQ ID NO: 1817266 - DNA, 15 bp, Homo sapiens
aggaggagaaatgat

SEQ ID NO: 1817267 - DNA, 15 bp, Homo sapiens
ggaggagaaatgata

SEQ ID NO: 1817268 - DNA, 15 bp, Homo sapiens
gaggagaaatgataa

SEQ ID NO: 1817269 - DNA, 15 bp, Homo sapiens
aggagaaatgataat

SEQ ID NO: 1817270 - DNA, 15 bp, Homo sapiens
ggagaaatgataatt

SEQ ID NO: 1817271 - DNA, 15 bp, Homo sapiens
gagaaatgataattc

SEQ ID NO: 1817272 - DNA, 15 bp, Homo sapiens
agaaatgataattct

SEQ ID NO: 1817273 - DNA, 15 bp, Homo sapiens
gaaatgataattcta

SEQ ID NO: 1817274 - DNA, 15 bp, Homo sapiens
aaatgataattctac

SEQ ID NO: 1817275 - DNA, 15 bp, Homo sapiens
aatgataattctact

SEQ ID NO: 1817276 - DNA, 15 bp, Homo sapiens
atgataattctactg

SEQ ID NO: 1817277 - DNA, 15 bp, Homo sapiens
tgataattctactgc

SEQ ID NO: 1817278 - DNA, 15 bp, Homo sapiens
gataattctactgcc

SEQ ID NO: 1817279 - DNA, 15 bp, Homo sapiens
ataattctactgccc

SEQ ID NO: 1817280 - DNA, 15 bp, Homo sapiens
taattctactgccct

SEQ ID NO: 1817281 - DNA, 15 bp, Homo sapiens
aattctactgccctt

SEQ ID NO: 1817282 - DNA, 15 bp, Homo sapiens
attctactgcccttc

SEQ ID NO: 1817283 - DNA, 15 bp, Homo sapiens
ttctactgcccttca

SEQ ID NO: 1817284 - DNA, 15 bp, Homo sapiens
tctactgcccttcat

SEQ ID NO: 1817285 - DNA, 15 bp, Homo sapiens
ctactgcccttcatt

SEQ ID NO: 1817286 - DNA, 15 bp, Homo sapiens
tactgcccttcattc

SEQ ID NO: 1817287 - DNA, 15 bp, Homo sapiens
actgcccttcattct

SEQ ID NO: 1817288 - DNA, 15 bp, Homo sapiens
ctgcccttcattcta

SEQ ID NO: 1817289 - DNA, 15 bp, Homo sapiens
tgcccttcattctac

SEQ ID NO: 1817290 - DNA, 15 bp, Homo sapiens
gcccttcattctaca

SEQ ID NO: 1817291 - DNA, 15 bp, Homo sapiens
cccttcattctacaa

SEQ ID NO: 1817292 - DNA, 15 bp, Homo sapiens
ccttcattctacaaa

SEQ ID NO: 1817293 - DNA, 15 bp, Homo sapiens
cttcattctacaaat

SEQ ID NO: 1817294 - DNA, 15 bp, Homo sapiens
ttcattctacaaatg

SEQ ID NO: 1817295 - DNA, 15 bp, Homo sapiens
tcattctacaaatgt

SEQ ID NO: 1817296 - DNA, 15 bp, Homo sapiens
cattctacaaatgtt

SEQ ID NO: 1817297 - DNA, 15 bp, Homo sapiens
attctacaaatgttt

SEQ ID NO: 1817298 - DNA, 15 bp, Homo sapiens
ttctacaaatgtttg

SEQ ID NO: 1817299 - DNA, 15 bp, Homo sapiens
tctacaaatgtttga

SEQ ID NO: 1817300 - DNA, 15 bp, Homo sapiens
ctacaaatgtttgag

SEQ ID NO: 1817301 - DNA, 15 bp, Homo sapiens
tacaaatgtttgagt

SEQ ID NO: 1817302 - DNA, 15 bp, Homo sapiens
acaaatgtttgagtg

SEQ ID NO: 1817303 - DNA, 15 bp, Homo sapiens
caaatgtttgagtgc

SEQ ID NO: 1817304 - DNA, 15 bp, Homo sapiens
aaatgtttgagtgct

SEQ ID NO: 1817305 - DNA, 15 bp, Homo sapiens
aatgtttgagtgcta

SEQ ID NO: 1817306 - DNA, 15 bp, Homo sapiens
atgtttgagtgctaa

SEQ ID NO: 1817307 - DNA, 15 bp, Homo sapiens
tgtttgagtgctaac

SEQ ID NO: 1817308 - DNA, 15 bp, Homo sapiens
gtttgagtgctaact

SEQ ID NO: 1817309 - DNA, 15 bp, Homo sapiens
tttgagtgctaactg

SEQ ID NO: 1817310 - DNA, 15 bp, Homo sapiens
ttgagtgctaactgt

SEQ ID NO: 1817311 - DNA, 15 bp, Homo sapiens
tgagtgctaactgta

SEQ ID NO: 1817312 - DNA, 15 bp, Homo sapiens
gagtgctaactgtat

SEQ ID NO: 1817313 - DNA, 15 bp, Homo sapiens
agtgctaactgtatt

SEQ ID NO: 1817314 - DNA, 15 bp, Homo sapiens
gtgctaactgtattc

SEQ ID NO: 1817315 - DNA, 15 bp, Homo sapiens
tgctaactgtattcc

SEQ ID NO: 1817316 - DNA, 15 bp, Homo sapiens
gctaactgtattcca

SEQ ID NO: 1817317 - DNA, 15 bp, Homo sapiens
ctaactgtattccag

SEQ ID NO: 1817318 - DNA, 15 bp, Homo sapiens
taactgtattccaga

SEQ ID NO: 1817319 - DNA, 15 bp, Homo sapiens
aactgtattccagat

SEQ ID NO: 1817320 - DNA, 15 bp, Homo sapiens
actgtattccagatt

SEQ ID NO: 1817321 - DNA, 15 bp, Homo sapiens
ctgtattccagattc

SEQ ID NO: 1817322 - DNA, 15 bp, Homo sapiens
tgtattccagattct

SEQ ID NO: 1817323 - DNA, 15 bp, Homo sapiens
gtattccagattctc

SEQ ID NO: 1817324 - DNA, 15 bp, Homo sapiens
tattccagattctca

SEQ ID NO: 1817325 - DNA, 15 bp, Homo sapiens
attccagattctcaa

SEQ ID NO: 1817326 - DNA, 15 bp, Homo sapiens
ttccagattctcaaa

SEQ ID NO: 1817327 - DNA, 15 bp, Homo sapiens
tccagattctcaaaa

SEQ ID NO: 1817328 - DNA, 15 bp, Homo sapiens
ccagattctcaaaaa

SEQ ID NO: 1817329 - DNA, 15 bp, Homo sapiens
cagattctcaaaaag

SEQ ID NO: 1817330 - DNA, 15 bp, Homo sapiens
agattctcaaaaagc

SEQ ID NO: 1817331 - DNA, 15 bp, Homo sapiens
gattctcaaaaagct

SEQ ID NO: 1817332 - DNA, 15 bp, Homo sapiens
attctcaaaaagcta

SEQ ID NO: 1817333 - DNA, 15 bp, Homo sapiens
ttctcaaaaagctat

SEQ ID NO: 1817334 - DNA, 15 bp, Homo sapiens
tctcaaaaagctatt

SEQ ID NO: 1817335 - DNA, 15 bp, Homo sapiens
ctcaaaaagctattg

SEQ ID NO: 1817336 - DNA, 15 bp, Homo sapiens
tcaaaaagctattgc

SEQ ID NO: 1817337 - DNA, 15 bp, Homo sapiens
caaaaagctattgcc

SEQ ID NO: 1817338 - DNA, 15 bp, Homo sapiens
aaaaagctattgcca

SEQ ID NO: 1817339 - DNA, 15 bp, Homo sapiens
aaaagctattgccag

SEQ ID NO: 1817340 - DNA, 15 bp, Homo sapiens
aaagctattgccagg

SEQ ID NO: 1817341 - DNA, 15 bp, Homo sapiens
aagctattgccaggt

SEQ ID NO: 1817342 - DNA, 15 bp, Homo sapiens
agctattgccaggta

SEQ ID NO: 1817343 - DNA, 15 bp, Homo sapiens
gctattgccaggtat

SEQ ID NO: 1817344 - DNA, 15 bp, Homo sapiens
ctattgccaggtatc

SEQ ID NO: 1817345 - DNA, 15 bp, Homo sapiens
tattgccaggtatct

SEQ ID NO: 1817346 - DNA, 15 bp, Homo sapiens
attgccaggtatctc

SEQ ID NO: 1817347 - DNA, 15 bp, Homo sapiens
ttgccaggtatctct

SEQ ID NO: 1817348 - DNA, 15 bp, Homo sapiens
tgccaggtatctctg

SEQ ID NO: 1817349 - DNA, 15 bp, Homo sapiens
gccaggtatctctgg

SEQ ID NO: 1817350 - DNA, 15 bp, Homo sapiens
ccaggtatctctggg

SEQ ID NO: 1817351 - DNA, 15 bp, Homo sapiens
caggtatctctgggg

SEQ ID NO: 1817352 - DNA, 15 bp, Homo sapiens
aggtatctctggggc

SEQ ID NO: 1817353 - DNA, 15 bp, Homo sapiens
ggtatctctggggct

SEQ ID NO: 1817354 - DNA, 15 bp, Homo sapiens
gtatctctggggcta

SEQ ID NO: 1817355 - DNA, 15 bp, Homo sapiens
tatctctggggctac

SEQ ID NO: 1817356 - DNA, 15 bp, Homo sapiens
atctctggggctact

SEQ ID NO: 1817357 - DNA, 15 bp, Homo sapiens
tctctggggctactg

SEQ ID NO: 1817358 - DNA, 15 bp, Homo sapiens
ctctggggctactga

SEQ ID NO: 1817359 - DNA, 15 bp, Homo sapiens
tctggggctactgat

SEQ ID NO: 1817360 - DNA, 15 bp, Homo sapiens
ctggggctactgatt

SEQ ID NO: 1817361 - DNA, 15 bp, Homo sapiens
tggggctactgattt

SEQ ID NO: 1817362 - DNA, 15 bp, Homo sapiens
ggggctactgatttc

SEQ ID NO: 1817363 - DNA, 15 bp, Homo sapiens
gggctactgatttcc

SEQ ID NO: 1817364 - DNA, 15 bp, Homo sapiens
ggctactgatttcct

SEQ ID NO: 1817365 - DNA, 15 bp, Homo sapiens
gctactgatttcctg

SEQ ID NO: 1817366 - DNA, 15 bp, Homo sapiens
ctactgatttcctga

SEQ ID NO: 1817367 - DNA, 15 bp, Homo sapiens
tactgatttcctgat

SEQ ID NO: 1817368 - DNA, 15 bp, Homo sapiens
actgatttcctgatc

SEQ ID NO: 1817369 - DNA, 15 bp, Homo sapiens
ctgatttcctgatca

SEQ ID NO: 1817370 - DNA, 15 bp, Homo sapiens
tgatttcctgatcat

SEQ ID NO: 1817371 - DNA, 15 bp, Homo sapiens
gatttcctgatcata

SEQ ID NO: 1817372 - DNA, 15 bp, Homo sapiens
atttcctgatcataa

SEQ ID NO: 1817373 - DNA, 15 bp, Homo sapiens
tttcctgatcataat

SEQ ID NO: 1817374 - DNA, 15 bp, Homo sapiens
ttcctgatcataatg

SEQ ID NO: 1817375 - DNA, 15 bp, Homo sapiens
tcctgatcataatgc

SEQ ID NO: 1817376 - DNA, 15 bp, Homo sapiens
cctgatcataatgca

SEQ ID NO: 1817377 - DNA, 15 bp, Homo sapiens
ctgatcataatgcaa

SEQ ID NO: 1817378 - DNA, 15 bp, Homo sapiens
tgatcataatgcaat

SEQ ID NO: 1817379 - DNA, 15 bp, Homo sapiens
gatcataatgcaatg

SEQ ID NO: 1817380 - DNA, 15 bp, Homo sapiens
atcataatgcaatgg

SEQ ID NO: 1817381 - DNA, 15 bp, Homo sapiens
tcataatgcaatggc

SEQ ID NO: 1817382 - DNA, 15 bp, Homo sapiens
cataatgcaatggca

SEQ ID NO: 1817383 - DNA, 15 bp, Homo sapiens
ataatgcaatggcaa

SEQ ID NO: 1817384 - DNA, 15 bp, Homo sapiens
taatgcaatggcaac

SEQ ID NO: 1817385 - DNA, 15 bp, Homo sapiens
aatgcaatggcaacc

SEQ ID NO: 1817386 - DNA, 15 bp, Homo sapiens
atgcaatggcaacca

SEQ ID NO: 1817387 - DNA, 15 bp, Homo sapiens
tgcaatggcaaccaa

SEQ ID NO: 1817388 - DNA, 15 bp, Homo sapiens
gcaatggcaaccaac

SEQ ID NO: 1817389 - DNA, 15 bp, Homo sapiens
caatggcaaccaacg

SEQ ID NO: 1817390 - DNA, 15 bp, Homo sapiens
aatggcaaccaacgg

SEQ ID NO: 1817391 - DNA, 15 bp, Homo sapiens
atggcaaccaacggg

SEQ ID NO: 1817392 - DNA, 15 bp, Homo sapiens
tggcaaccaacgggc

SEQ ID NO: 1817393 - DNA, 15 bp, Homo sapiens
ggcaaccaacgggca

SEQ ID NO: 1817394 - DNA, 15 bp, Homo sapiens
gcaaccaacgggcac

SEQ ID NO: 1817395 - DNA, 15 bp, Homo sapiens
caaccaacgggcact

SEQ ID NO: 1817396 - DNA, 15 bp, Homo sapiens
aaccaacgggcactt

SEQ ID NO: 1817397 - DNA, 15 bp, Homo sapiens
accaacgggcacttg

SEQ ID NO: 1817398 - DNA, 15 bp, Homo sapiens
ccaacgggcacttgg

SEQ ID NO: 1817399 - DNA, 15 bp, Homo sapiens
caacgggcacttggg

SEQ ID NO: 1817400 - DNA, 15 bp, Homo sapiens
aacgggcacttgggc

SEQ ID NO: 1817401 - DNA, 15 bp, Homo sapiens
acgggcacttgggca

SEQ ID NO: 1817402 - DNA, 15 bp, Homo sapiens
cgggcacttgggcat

SEQ ID NO: 1817403 - DNA, 15 bp, Homo sapiens
gggcacttgggcatg

SEQ ID NO: 1817404 - DNA, 15 bp, Homo sapiens
ggcacttgggcatgg

SEQ ID NO: 1817405 - DNA, 15 bp, Homo sapiens
gcacttgggcatggt

SEQ ID NO: 1817406 - DNA, 15 bp, Homo sapiens
cacttgggcatggtg

SEQ ID NO: 1817407 - DNA, 15 bp, Homo sapiens
acttgggcatggtga

SEQ ID NO: 1817408 - DNA, 15 bp, Homo sapiens
cttgggcatggtgag

SEQ ID NO: 1817409 - DNA, 15 bp, Homo sapiens
ttgggcatggtgagg

SEQ ID NO: 1817410 - DNA, 15 bp, Homo sapiens
tgggcatggtgaggg

SEQ ID NO: 1817411 - DNA, 15 bp, Homo sapiens
gggcatggtgagggt

SEQ ID NO: 1817412 - DNA, 15 bp, Homo sapiens
ggcatggtgagggtg

SEQ ID NO: 1817413 - DNA, 15 bp, Homo sapiens
gcatggtgagggtgg

SEQ ID NO: 1817414 - DNA, 15 bp, Homo sapiens
catggtgagggtggg

SEQ ID NO: 1817415 - DNA, 15 bp, Homo sapiens
atggtgagggtgggc

SEQ ID NO: 1817416 - DNA, 15 bp, Homo sapiens
tggtgagggtgggca

SEQ ID NO: 1817417 - DNA, 15 bp, Homo sapiens
ggtgagggtgggcaa

SEQ ID NO: 1817418 - DNA, 15 bp, Homo sapiens
gtgagggtgggcaag

SEQ ID NO: 1817419 - DNA, 15 bp, Homo sapiens
tgagggtgggcaagc

SEQ ID NO: 1817420 - DNA, 15 bp, Homo sapiens
gagggtgggcaagct

SEQ ID NO: 1817421 - DNA, 15 bp, Homo sapiens
agggtgggcaagctt

SEQ ID NO: 1817422 - DNA, 15 bp, Homo sapiens
gggtgggcaagcttt

SEQ ID NO: 1817423 - DNA, 15 bp, Homo sapiens
ggtgggcaagctttc

SEQ ID NO: 1817424 - DNA, 15 bp, Homo sapiens
gtgggcaagctttca

SEQ ID NO: 1817425 - DNA, 15 bp, Homo sapiens
tgggcaagctttcaa

SEQ ID NO: 1817426 - DNA, 15 bp, Homo sapiens
gggcaagctttcaaa

SEQ ID NO: 1817427 - DNA, 15 bp, Homo sapiens
ggcaagctttcaaaa

SEQ ID NO: 1817428 - DNA, 15 bp, Homo sapiens
gcaagctttcaaaag

SEQ ID NO: 1817429 - DNA, 15 bp, Homo sapiens
caagctttcaaaagc

SEQ ID NO: 1817430 - DNA, 15 bp, Homo sapiens
aagctttcaaaagca

SEQ ID NO: 1817431 - DNA, 15 bp, Homo sapiens
agctttcaaaagcag

SEQ ID NO: 1817432 - DNA, 15 bp, Homo sapiens
gctttcaaaagcagc

SEQ ID NO: 1817433 - DNA, 15 bp, Homo sapiens
ctttcaaaagcagcg

SEQ ID NO: 1817434 - DNA, 15 bp, Homo sapiens
tttcaaaagcagcgt

SEQ ID NO: 1817435 - DNA, 15 bp, Homo sapiens
ttcaaaagcagcgtg

SEQ ID NO: 1817436 - DNA, 15 bp, Homo sapiens
tcaaaagcagcgtgg

SEQ ID NO: 1817437 - DNA, 15 bp, Homo sapiens
caaaagcagcgtgga

SEQ ID NO: 1817438 - DNA, 15 bp, Homo sapiens
aaaagcagcgtggat

SEQ ID NO: 1817439 - DNA, 15 bp, Homo sapiens
aaagcagcgtggatc

SEQ ID NO: 1817440 - DNA, 15 bp, Homo sapiens
aagcagcgtggatct

SEQ ID NO: 1817441 - DNA, 15 bp, Homo sapiens
agcagcgtggatctg

SEQ ID NO: 1817442 - DNA, 15 bp, Homo sapiens
gcagcgtggatctgg

SEQ ID NO: 1817443 - DNA, 15 bp, Homo sapiens
cagcgtggatctggc

SEQ ID NO: 1817444 - DNA, 15 bp, Homo sapiens
agcgtggatctggca

SEQ ID NO: 1817445 - DNA, 15 bp, Homo sapiens
gcgtggatctggcat

SEQ ID NO: 1817446 - DNA, 15 bp, Homo sapiens
cgtggatctggcatt

SEQ ID NO: 1817447 - DNA, 15 bp, Homo sapiens
gtggatctggcattc

SEQ ID NO: 1817448 - DNA, 15 bp, Homo sapiens
tggatctggcattct

SEQ ID NO: 1817449 - DNA, 15 bp, Homo sapiens
ggatctggcattctt

SEQ ID NO: 1817450 - DNA, 15 bp, Homo sapiens
gatctggcattcttt

SEQ ID NO: 1817451 - DNA, 15 bp, Homo sapiens
atctggcattctttt

SEQ ID NO: 1817452 - DNA, 15 bp, Homo sapiens
tctggcattcttttc

SEQ ID NO: 1817453 - DNA, 15 bp, Homo sapiens
ctggcattcttttcc

SEQ ID NO: 1817454 - DNA, 15 bp, Homo sapiens
tggcattcttttcca

SEQ ID NO: 1817455 - DNA, 15 bp, Homo sapiens
ggcattcttttccac

SEQ ID NO: 1817456 - DNA, 15 bp, Homo sapiens
gcattcttttccacg

SEQ ID NO: 1817457 - DNA, 15 bp, Homo sapiens
cattcttttccacga

SEQ ID NO: 1817458 - DNA, 15 bp, Homo sapiens
attcttttccacgaa

SEQ ID NO: 1817459 - DNA, 15 bp, Homo sapiens
ttcttttccacgaat

SEQ ID NO: 1817460 - DNA, 15 bp, Homo sapiens
tcttttccacgaatg

SEQ ID NO: 1817461 - DNA, 15 bp, Homo sapiens
cttttccacgaatgc

SEQ ID NO: 1817462 - DNA, 15 bp, Homo sapiens
ttttccacgaatgca

SEQ ID NO: 1817463 - DNA, 15 bp, Homo sapiens
tttccacgaatgcac

SEQ ID NO: 1817464 - DNA, 15 bp, Homo sapiens
ttccacgaatgcacc

SEQ ID NO: 1817465 - DNA, 15 bp, Homo sapiens
tccacgaatgcacct

SEQ ID NO: 1817466 - DNA, 15 bp, Homo sapiens
ccacgaatgcacctc

SEQ ID NO: 1817467 - DNA, 15 bp, Homo sapiens
cacgaatgcacctca

SEQ ID NO: 1817468 - DNA, 15 bp, Homo sapiens
acgaatgcacctcaa

SEQ ID NO: 1817469 - DNA, 15 bp, Homo sapiens
cgaatgcacctcaac

SEQ ID NO: 1817470 - DNA, 15 bp, Homo sapiens
gaatgcacctcaact

SEQ ID NO: 1817471 - DNA, 15 bp, Homo sapiens
aatgcacctcaacta

SEQ ID NO: 1817472 - DNA, 15 bp, Homo sapiens
atgcacctcaactac

SEQ ID NO: 1817473 - DNA, 15 bp, Homo sapiens
tgcacctcaactact

SEQ ID NO: 1817474 - DNA, 15 bp, Homo sapiens
gcacctcaactactt

SEQ ID NO: 1817475 - DNA, 15 bp, Homo sapiens
cacctcaactacttg

SEQ ID NO: 1817476 - DNA, 15 bp, Homo sapiens
acctcaactacttgg

SEQ ID NO: 1817477 - DNA, 15 bp, Homo sapiens
cctcaactacttggc

SEQ ID NO: 1817478 - DNA, 15 bp, Homo sapiens
ctcaactacttggca

SEQ ID NO: 1817479 - DNA, 15 bp, Homo sapiens
tcaactacttggcac

SEQ ID NO: 1817480 - DNA, 15 bp, Homo sapiens
caactacttggcacc

SEQ ID NO: 1817481 - DNA, 15 bp, Homo sapiens
aactacttggcacca

SEQ ID NO: 1817482 - DNA, 15 bp, Homo sapiens
actacttggcaccag

SEQ ID NO: 1817483 - DNA, 15 bp, Homo sapiens
ctacttggcaccagt

SEQ ID NO: 1817484 - DNA, 15 bp, Homo sapiens
tacttggcaccagtg

SEQ ID NO: 1817485 - DNA, 15 bp, Homo sapiens
acttggcaccagtgg

SEQ ID NO: 1817486 - DNA, 15 bp, Homo sapiens
cttggcaccagtggt

SEQ ID NO: 1817487 - DNA, 15 bp, Homo sapiens
ttggcaccagtggta

SEQ ID NO: 1817488 - DNA, 15 bp, Homo sapiens
tggcaccagtggtaa

SEQ ID NO: 1817489 - DNA, 15 bp, Homo sapiens
ggcaccagtggtaac

SEQ ID NO: 1817490 - DNA, 15 bp, Homo sapiens
gcaccagtggtaaca

SEQ ID NO: 1817491 - DNA, 15 bp, Homo sapiens
caccagtggtaacac

SEQ ID NO: 1817492 - DNA, 15 bp, Homo sapiens
accagtggtaacaca

SEQ ID NO: 1817493 - DNA, 15 bp, Homo sapiens
ccagtggtaacacag

SEQ ID NO: 1817494 - DNA, 15 bp, Homo sapiens
cagtggtaacacagc

SEQ ID NO: 1817495 - DNA, 15 bp, Homo sapiens
agtggtaacacagca

SEQ ID NO: 1817496 - DNA, 15 bp, Homo sapiens
gtggtaacacagcaa

SEQ ID NO: 1817497 - DNA, 15 bp, Homo sapiens
tggtaacacagcaac

SEQ ID NO: 1817498 - DNA, 15 bp, Homo sapiens
ggtaacacagcaacc

SEQ ID NO: 1817499 - DNA, 15 bp, Homo sapiens
gtaacacagcaacca

SEQ ID NO: 1817500 - DNA, 15 bp, Homo sapiens
taacacagcaaccag

SEQ ID NO: 1817501 - DNA, 15 bp, Homo sapiens
aacacagcaaccagg

SEQ ID NO: 1817502 - DNA, 15 bp, Homo sapiens
acacagcaaccaggg

SEQ ID NO: 1817503 - DNA, 15 bp, Homo sapiens
cacagcaaccagggt

SEQ ID NO: 1817504 - DNA, 15 bp, Homo sapiens
cagcaaccagggttc

SEQ ID NO: 1817505 - DNA, 15 bp, Homo sapiens
agcaaccagggttcc

SEQ ID NO: 1817506 - DNA, 15 bp, Homo sapiens
gcaaccagggttccg

SEQ ID NO: 1817507 - DNA, 15 bp, Homo sapiens
caaccagggttccga

SEQ ID NO: 1817508 - DNA, 15 bp, Homo sapiens
aaccagggttccgac

SEQ ID NO: 1817509 - DNA, 15 bp, Homo sapiens
accagggttccgacc

SEQ ID NO: 1817510 - DNA, 15 bp, Homo sapiens
ccagggttccgacct

SEQ ID NO: 1817511 - DNA, 15 bp, Homo sapiens
cagggttccgaccta

SEQ ID NO: 1817512 - DNA, 15 bp, Homo sapiens
agggttccgacctag

SEQ ID NO: 1817513 - DNA, 15 bp, Homo sapiens
gggttccgacctaga

SEQ ID NO: 1817514 - DNA, 15 bp, Homo sapiens
ggttccgacctagag

SEQ ID NO: 1817515 - DNA, 15 bp, Homo sapiens
gttccgacctagaga

SEQ ID NO: 1817516 - DNA, 15 bp, Homo sapiens
ttccgacctagagaa

SEQ ID NO: 1817517 - DNA, 15 bp, Homo sapiens
tccgacctagagaat

SEQ ID NO: 1817518 - DNA, 15 bp, Homo sapiens
ccgacctagagaatc

SEQ ID NO: 1817519 - DNA, 15 bp, Homo sapiens
cgacctagagaatcc

SEQ ID NO: 1817520 - DNA, 15 bp, Homo sapiens
gacctagagaatccc

SEQ ID NO: 1817521 - DNA, 15 bp, Homo sapiens
acctagagaatcccg

SEQ ID NO: 1817522 - DNA, 15 bp, Homo sapiens
cctagagaatcccgt

SEQ ID NO: 1817523 - DNA, 15 bp, Homo sapiens
ctagagaatcccgta

SEQ ID NO: 1817524 - DNA, 15 bp, Homo sapiens
tagagaatcccgtaa

SEQ ID NO: 1817525 - DNA, 15 bp, Homo sapiens
agagaatcccgtaac

SEQ ID NO: 1817526 - DNA, 15 bp, Homo sapiens
gagaatcccgtaacc

SEQ ID NO: 1817527 - DNA, 15 bp, Homo sapiens
agaatcccgtaacct

SEQ ID NO: 1817528 - DNA, 15 bp, Homo sapiens
gaatcccgtaacctt

SEQ ID NO: 1817529 - DNA, 15 bp, Homo sapiens
aatcccgtaaccttc

SEQ ID NO: 1817530 - DNA, 15 bp, Homo sapiens
atcccgtaaccttct

SEQ ID NO: 1817531 - DNA, 15 bp, Homo sapiens
tcccgtaaccttctg

SEQ ID NO: 1817532 - DNA, 15 bp, Homo sapiens
cccgtaaccttctga

SEQ ID NO: 1817533 - DNA, 15 bp, Homo sapiens
ccgtaaccttctgac

SEQ ID NO: 1817534 - DNA, 15 bp, Homo sapiens
cgtaaccttctgact

SEQ ID NO: 1817535 - DNA, 15 bp, Homo sapiens
gtaaccttctgactg

SEQ ID NO: 1817536 - DNA, 15 bp, Homo sapiens
taaccttctgactgg

SEQ ID NO: 1817537 - DNA, 15 bp, Homo sapiens
aaccttctgactgga

SEQ ID NO: 1817538 - DNA, 15 bp, Homo sapiens
accttctgactggaa

SEQ ID NO: 1817539 - DNA, 15 bp, Homo sapiens
ccttctgactggaac

SEQ ID NO: 1817540 - DNA, 15 bp, Homo sapiens
cttctgactggaacg

SEQ ID NO: 1817541 - DNA, 15 bp, Homo sapiens
ttctgactggaacgg

SEQ ID NO: 1817542 - DNA, 15 bp, Homo sapiens
tctgactggaacggg

SEQ ID NO: 1817543 - DNA, 15 bp, Homo sapiens
ctgactggaacgggg

SEQ ID NO: 1817544 - DNA, 15 bp, Homo sapiens
tgactggaacggggt

SEQ ID NO: 1817545 - DNA, 15 bp, Homo sapiens
gactggaacggggtc

SEQ ID NO: 1817546 - DNA, 15 bp, Homo sapiens
actggaacggggtct

SEQ ID NO: 1817547 - DNA, 15 bp, Homo sapiens
ctggaacggggtctg

SEQ ID NO: 1817548 - DNA, 15 bp, Homo sapiens
tggaacggggtctgg

SEQ ID NO: 1817549 - DNA, 15 bp, Homo sapiens
ggaacggggtctggg

SEQ ID NO: 1817550 - DNA, 15 bp, Homo sapiens
gaacggggtctgggc

SEQ ID NO: 1817551 - DNA, 15 bp, Homo sapiens
aacggggtctgggct

SEQ ID NO: 1817552 - DNA, 15 bp, Homo sapiens
acggggtctgggctg

SEQ ID NO: 1817553 - DNA, 15 bp, Homo sapiens
cggggtctgggctgt

SEQ ID NO: 1817554 - DNA, 15 bp, Homo sapiens
ggggtctgggctgtc

SEQ ID NO: 1817555 - DNA, 15 bp, Homo sapiens
gggtctgggctgtcg

SEQ ID NO: 1817556 - DNA, 15 bp, Homo sapiens
ggtctgggctgtcgc

SEQ ID NO: 1817557 - DNA, 15 bp, Homo sapiens
gtctgggctgtcgct

SEQ ID NO: 1817558 - DNA, 15 bp, Homo sapiens
tctgggctgtcgcta

SEQ ID NO: 1817559 - DNA, 15 bp, Homo sapiens
ctgggctgtcgctac

SEQ ID NO: 1817560 - DNA, 15 bp, Homo sapiens
tgggctgtcgctaca

SEQ ID NO: 1817561 - DNA, 15 bp, Homo sapiens
gggctgtcgctacac

SEQ ID NO: 1817562 - DNA, 15 bp, Homo sapiens
ggctgtcgctacaca

SEQ ID NO: 1817563 - DNA, 15 bp, Homo sapiens
gctgtcgctacacat

SEQ ID NO: 1817564 - DNA, 15 bp, Homo sapiens
ctgtcgctacacatc

SEQ ID NO: 1817565 - DNA, 15 bp, Homo sapiens
tgtcgctacacatcc

SEQ ID NO: 1817566 - DNA, 15 bp, Homo sapiens
gtcgctacacatcct

SEQ ID NO: 1817567 - DNA, 15 bp, Homo sapiens
tcgctacacatcctg

SEQ ID NO: 1817568 - DNA, 15 bp, Homo sapiens
cgctacacatcctgg

SEQ ID NO: 1817569 - DNA, 15 bp, Homo sapiens
gctacacatcctggt

SEQ ID NO: 1817570 - DNA, 15 bp, Homo sapiens
ctacacatcctggtg

SEQ ID NO: 1817571 - DNA, 15 bp, Homo sapiens
tacacatcctggtgg

SEQ ID NO: 1817572 - DNA, 15 bp, Homo sapiens
acacatcctggtgga

SEQ ID NO: 1817573 - DNA, 15 bp, Homo sapiens
cacatcctggtggaa

SEQ ID NO: 1817574 - DNA, 15 bp, Homo sapiens
acatcctggtggaag

SEQ ID NO: 1817575 - DNA, 15 bp, Homo sapiens
catcctggtggaagg

SEQ ID NO: 1817576 - DNA, 15 bp, Homo sapiens
atcctggtggaaggc

SEQ ID NO: 1817577 - DNA, 15 bp, Homo sapiens
tcctggtggaaggca

SEQ ID NO: 1817578 - DNA, 15 bp, Homo sapiens
cctggtggaaggcag

SEQ ID NO: 1817579 - DNA, 15 bp, Homo sapiens
ctggtggaaggcagc

SEQ ID NO: 1817580 - DNA, 15 bp, Homo sapiens
tggtggaaggcagct

SEQ ID NO: 1817581 - DNA, 15 bp, Homo sapiens
ggtggaaggcagcta

SEQ ID NO: 1817582 - DNA, 15 bp, Homo sapiens
gtggaaggcagctat

SEQ ID NO: 1817583 - DNA, 15 bp, Homo sapiens
tggaaggcagctatc

SEQ ID NO: 1817584 - DNA, 15 bp, Homo sapiens
ggaaggcagctatca

SEQ ID NO: 1817585 - DNA, 15 bp, Homo sapiens
gaaggcagctatcat

SEQ ID NO: 1817586 - DNA, 15 bp, Homo sapiens
aaggcagctatcatc

SEQ ID NO: 1817587 - DNA, 15 bp, Homo sapiens
aggcagctatcatcc

SEQ ID NO: 1817588 - DNA, 15 bp, Homo sapiens
ggcagctatcatccc

SEQ ID NO: 1817589 - DNA, 15 bp, Homo sapiens
gcagctatcatccct

SEQ ID NO: 1817590 - DNA, 15 bp, Homo sapiens
cagctatcatcccta

SEQ ID NO: 1817591 - DNA, 15 bp, Homo sapiens
agctatcatccctac

SEQ ID NO: 1817592 - DNA, 15 bp, Homo sapiens
gctatcatccctacc

SEQ ID NO: 1817593 - DNA, 15 bp, Homo sapiens
ctatcatccctacct

SEQ ID NO: 1817594 - DNA, 15 bp, Homo sapiens
tatcatccctacctt

SEQ ID NO: 1817595 - DNA, 15 bp, Homo sapiens
atcatccctaccttc

SEQ ID NO: 1817596 - DNA, 15 bp, Homo sapiens
tcatccctaccttct

SEQ ID NO: 1817597 - DNA, 15 bp, Homo sapiens
catccctaccttctg

SEQ ID NO: 1817598 - DNA, 15 bp, Homo sapiens
atccctaccttctgc

SEQ ID NO: 1817599 - DNA, 15 bp, Homo sapiens
tccctaccttctgcc

SEQ ID NO: 1817600 - DNA, 15 bp, Homo sapiens
ccctaccttctgcct

SEQ ID NO: 1817601 - DNA, 15 bp, Homo sapiens
cctaccttctgcctt

SEQ ID NO: 1817602 - DNA, 15 bp, Homo sapiens
ctaccttctgccttc

SEQ ID NO: 1817603 - DNA, 15 bp, Homo sapiens
taccttctgccttct

SEQ ID NO: 1817604 - DNA, 15 bp, Homo sapiens
accttctgccttctg

SEQ ID NO: 1817605 - DNA, 15 bp, Homo sapiens
ccttctgccttctgt

SEQ ID NO: 1817606 - DNA, 15 bp, Homo sapiens
cttctgccttctgtc

SEQ ID NO: 1817607 - DNA, 15 bp, Homo sapiens
ttctgccttctgtct

SEQ ID NO: 1817608 - DNA, 15 bp, Homo sapiens
tctgccttctgtctc

SEQ ID NO: 1817609 - DNA, 15 bp, Homo sapiens
ctgccttctgtctct

SEQ ID NO: 1817610 - DNA, 15 bp, Homo sapiens
tgccttctgtctctt

SEQ ID NO: 1817611 - DNA, 15 bp, Homo sapiens
gccttctgtctctta

SEQ ID NO: 1817612 - DNA, 15 bp, Homo sapiens
ccttctgtctcttaa

SEQ ID NO: 1817613 - DNA, 15 bp, Homo sapiens
cttctgtctcttaaa

SEQ ID NO: 1817614 - DNA, 15 bp, Homo sapiens
ttctgtctcttaaat

SEQ ID NO: 1817615 - DNA, 15 bp, Homo sapiens
tctgtctcttaaatc

SEQ ID NO: 1817616 - DNA, 15 bp, Homo sapiens
ctgtctcttaaatct

SEQ ID NO: 1817617 - DNA, 15 bp, Homo sapiens
tgtctcttaaatctg

SEQ ID NO: 1817618 - DNA, 15 bp, Homo sapiens
gtctcttaaatctga

SEQ ID NO: 1817619 - DNA, 15 bp, Homo sapiens
tctcttaaatctgaa

SEQ ID NO: 1817620 - DNA, 15 bp, Homo sapiens
ctcttaaatctgaac

SEQ ID NO: 1817621 - DNA, 15 bp, Homo sapiens
tcttaaatctgaacc

SEQ ID NO: 1817622 - DNA, 15 bp, Homo sapiens
cttaaatctgaacca

SEQ ID NO: 1817623 - DNA, 15 bp, Homo sapiens
ttaaatctgaaccac

SEQ ID NO: 1817624 - DNA, 15 bp, Homo sapiens
taaatctgaaccaca

SEQ ID NO: 1817625 - DNA, 15 bp, Homo sapiens
aaatctgaaccacaa

SEQ ID NO: 1817626 - DNA, 15 bp, Homo sapiens
aatctgaaccacaaa

SEQ ID NO: 1817627 - DNA, 15 bp, Homo sapiens
atctgaaccacaaac

SEQ ID NO: 1817628 - DNA, 15 bp, Homo sapiens
tctgaaccacaaaca

SEQ ID NO: 1817629 - DNA, 15 bp, Homo sapiens
ctgaaccacaaacag

SEQ ID NO: 1817630 - DNA, 15 bp, Homo sapiens
tgaaccacaaacagc

SEQ ID NO: 1817631 - DNA, 15 bp, Homo sapiens
gaaccacaaacagca

SEQ ID NO: 1817632 - DNA, 15 bp, Homo sapiens
aaccacaaacagcaa

SEQ ID NO: 1817633 - DNA, 15 bp, Homo sapiens
accacaaacagcaac

SEQ ID NO: 1817634 - DNA, 15 bp, Homo sapiens
ccacaaacagcaacg

SEQ ID NO: 1817635 - DNA, 15 bp, Homo sapiens
cacaaacagcaacgt

SEQ ID NO: 1817636 - DNA, 15 bp, Homo sapiens
acaaacagcaacgtc

SEQ ID NO: 1817637 - DNA, 15 bp, Homo sapiens
caaacagcaacgtcc

SEQ ID NO: 1817638 - DNA, 15 bp, Homo sapiens
aaacagcaacgtcca

SEQ ID NO: 1817639 - DNA, 15 bp, Homo sapiens
aacagcaacgtccat

SEQ ID NO: 1817640 - DNA, 15 bp, Homo sapiens
acagcaacgtccata

SEQ ID NO: 1817641 - DNA, 15 bp, Homo sapiens
cagcaacgtccatac

SEQ ID NO: 1817642 - DNA, 15 bp, Homo sapiens
agcaacgtccatacc

SEQ ID NO: 1817643 - DNA, 15 bp, Homo sapiens
gcaacgtccataccc

SEQ ID NO: 1817644 - DNA, 15 bp, Homo sapiens
caacgtccataccct

SEQ ID NO: 1817645 - DNA, 15 bp, Homo sapiens
aacgtccataccctc

SEQ ID NO: 1817646 - DNA, 15 bp, Homo sapiens
acgtccataccctca

SEQ ID NO: 1817647 - DNA, 15 bp, Homo sapiens
cgtccataccctcag

SEQ ID NO: 1817648 - DNA, 15 bp, Homo sapiens
gtccataccctcagc

SEQ ID NO: 1817649 - DNA, 15 bp, Homo sapiens
tccataccctcagca

SEQ ID NO: 1817650 - DNA, 15 bp, Homo sapiens
ccataccctcagcat

SEQ ID NO: 1817651 - DNA, 15 bp, Homo sapiens
cataccctcagcatt

SEQ ID NO: 1817652 - DNA, 15 bp, Homo sapiens
ataccctcagcattg

SEQ ID NO: 1817653 - DNA, 15 bp, Homo sapiens
taccctcagcattgt

SEQ ID NO: 1817654 - DNA, 15 bp, Homo sapiens
accctcagcattgtt

SEQ ID NO: 1817655 - DNA, 15 bp, Homo sapiens
ccctcagcattgtta

SEQ ID NO: 1817656 - DNA, 15 bp, Homo sapiens
cctcagcattgttag

SEQ ID NO: 1817657 - DNA, 15 bp, Homo sapiens
ctcagcattgttaga

SEQ ID NO: 1817658 - DNA, 15 bp, Homo sapiens
tcagcattgttagaa

SEQ ID NO: 1817659 - DNA, 15 bp, Homo sapiens
cagcattgttagaat

SEQ ID NO: 1817660 - DNA, 15 bp, Homo sapiens
agcattgttagaatc

SEQ ID NO: 1817661 - DNA, 15 bp, Homo sapiens
gcattgttagaatcc

SEQ ID NO: 1817662 - DNA, 15 bp, Homo sapiens
cattgttagaatccc

SEQ ID NO: 1817663 - DNA, 15 bp, Homo sapiens
attgttagaatcccc

SEQ ID NO: 1817664 - DNA, 15 bp, Homo sapiens
ttgttagaatcccct

SEQ ID NO: 1817665 - DNA, 15 bp, Homo sapiens
tgttagaatcccctg

SEQ ID NO: 1817666 - DNA, 15 bp, Homo sapiens
gttagaatcccctgc

SEQ ID NO: 1817667 - DNA, 15 bp, Homo sapiens
ttagaatcccctgca

SEQ ID NO: 1817668 - DNA, 15 bp, Homo sapiens
tagaatcccctgcag

SEQ ID NO: 1817669 - DNA, 15 bp, Homo sapiens
agaatcccctgcagc

SEQ ID NO: 1817670 - DNA, 15 bp, Homo sapiens
gaatcccctgcagcc

SEQ ID NO: 1817671 - DNA, 15 bp, Homo sapiens
aatcccctgcagcct

SEQ ID NO: 1817672 - DNA, 15 bp, Homo sapiens
atcccctgcagcctc

SEQ ID NO: 1817673 - DNA, 15 bp, Homo sapiens
tcccctgcagcctcc

SEQ ID NO: 1817674 - DNA, 15 bp, Homo sapiens
cccctgcagcctcca

SEQ ID NO: 1817675 - DNA, 15 bp, Homo sapiens
ccctgcagcctccag

SEQ ID NO: 1817676 - DNA, 15 bp, Homo sapiens
cctgcagcctccagt

SEQ ID NO: 1817677 - DNA, 15 bp, Homo sapiens
ctgcagcctccagtt

SEQ ID NO: 1817678 - DNA, 15 bp, Homo sapiens
tgcagcctccagttc

SEQ ID NO: 1817679 - DNA, 15 bp, Homo sapiens
gcagcctccagttct

SEQ ID NO: 1817680 - DNA, 15 bp, Homo sapiens
cagcctccagttctc

SEQ ID NO: 1817681 - DNA, 15 bp, Homo sapiens
agcctccagttctca

SEQ ID NO: 1817682 - DNA, 15 bp, Homo sapiens
gcctccagttctcat

SEQ ID NO: 1817683 - DNA, 15 bp, Homo sapiens
cctccagttctcata

SEQ ID NO: 1817684 - DNA, 15 bp, Homo sapiens
ctccagttctcatac

SEQ ID NO: 1817685 - DNA, 15 bp, Homo sapiens
tccagttctcatact

SEQ ID NO: 1817686 - DNA, 15 bp, Homo sapiens
ccagttctcatactg

SEQ ID NO: 1817687 - DNA, 15 bp, Homo sapiens
cagttctcatactgt

SEQ ID NO: 1817688 - DNA, 15 bp, Homo sapiens
agttctcatactgtc

SEQ ID NO: 1817689 - DNA, 15 bp, Homo sapiens
gttctcatactgtct

SEQ ID NO: 1817690 - DNA, 15 bp, Homo sapiens
ttctcatactgtctg

SEQ ID NO: 1817691 - DNA, 15 bp, Homo sapiens
tctcatactgtctgt

SEQ ID NO: 1817692 - DNA, 15 bp, Homo sapiens
ctcatactgtctgta

SEQ ID NO: 1817693 - DNA, 15 bp, Homo sapiens
tcatactgtctgtat

SEQ ID NO: 1817694 - DNA, 15 bp, Homo sapiens
catactgtctgtatt

SEQ ID NO: 1817695 - DNA, 15 bp, Homo sapiens
atactgtctgtattc

SEQ ID NO: 1817696 - DNA, 15 bp, Homo sapiens
tactgtctgtattct

SEQ ID NO: 1817697 - DNA, 15 bp, Homo sapiens
actgtctgtattcta

SEQ ID NO: 1817698 - DNA, 15 bp, Homo sapiens
ctgtctgtattctac

SEQ ID NO: 1817699 - DNA, 15 bp, Homo sapiens
tgtctgtattctact

SEQ ID NO: 1817700 - DNA, 15 bp, Homo sapiens
ggatgcttagcagca

SEQ ID NO: 1817701 - DNA, 15 bp, Homo sapiens
gatgcttagcagcac

SEQ ID NO: 1817702 - DNA, 15 bp, Homo sapiens
atgcttagcagcacc

SEQ ID NO: 1817703 - DNA, 15 bp, Homo sapiens
tgcttagcagcacct

SEQ ID NO: 1817704 - DNA, 15 bp, Homo sapiens
gcttagcagcacctc

SEQ ID NO: 1817705 - DNA, 15 bp, Homo sapiens
cttagcagcacctct

SEQ ID NO: 1817706 - DNA, 15 bp, Homo sapiens
ttagcagcacctctg

SEQ ID NO: 1817707 - DNA, 15 bp, Homo sapiens
tagcagcacctctgg

SEQ ID NO: 1817708 - DNA, 15 bp, Homo sapiens
agcagcacctctggc

SEQ ID NO: 1817709 - DNA, 15 bp, Homo sapiens
gcagcacctctggcc

SEQ ID NO: 1817710 - DNA, 15 bp, Homo sapiens
cagcacctctggcct

SEQ ID NO: 1817711 - DNA, 15 bp, Homo sapiens
agcacctctggcctc

SEQ ID NO: 1817712 - DNA, 15 bp, Homo sapiens
gcacctctggcctct

SEQ ID NO: 1817713 - DNA, 15 bp, Homo sapiens
cacctctggcctctt

SEQ ID NO: 1817714 - DNA, 15 bp, Homo sapiens
acctctggcctcttt

SEQ ID NO: 1817715 - DNA, 15 bp, Homo sapiens
cctctggcctctttc

SEQ ID NO: 1817716 - DNA, 15 bp, Homo sapiens
ctctggcctctttcg

SEQ ID NO: 1817717 - DNA, 15 bp, Homo sapiens
tctggcctctttcga

SEQ ID NO: 1817718 - DNA, 15 bp, Homo sapiens
ctggcctctttcgaa

SEQ ID NO: 1817719 - DNA, 15 bp, Homo sapiens
tggcctctttcgaat

SEQ ID NO: 1817720 - DNA, 15 bp, Homo sapiens
ggcctctttcgaata

SEQ ID NO: 1817721 - DNA, 15 bp, Homo sapiens
gcctctttcgaatag

SEQ ID NO: 1817722 - DNA, 15 bp, Homo sapiens
cctctttcgaataga

SEQ ID NO: 1817723 - DNA, 15 bp, Homo sapiens
ctctttcgaatagat

SEQ ID NO: 1817724 - DNA, 15 bp, Homo sapiens
tctttcgaatagatg

SEQ ID NO: 1817725 - DNA, 15 bp, Homo sapiens
ctttcgaatagatgc

SEQ ID NO: 1817726 - DNA, 15 bp, Homo sapiens
tttcgaatagatgcc

SEQ ID NO: 1817727 - DNA, 15 bp, Homo sapiens
ttcgaatagatgcca

SEQ ID NO: 1817728 - DNA, 15 bp, Homo sapiens
tcgaatagatgccag

SEQ ID NO: 1817729 - DNA, 15 bp, Homo sapiens
cgaatagatgccagc

SEQ ID NO: 1817730 - DNA, 15 bp, Homo sapiens
gaatagatgccagca

SEQ ID NO: 1817731 - DNA, 15 bp, Homo sapiens
aatagatgccagcag

SEQ ID NO: 1817732 - DNA, 15 bp, Homo sapiens
atagatgccagcagc

SEQ ID NO: 1817733 - DNA, 15 bp, Homo sapiens
tagatgccagcagca

SEQ ID NO: 1817734 - DNA, 15 bp, Homo sapiens
agatgccagcagcac

SEQ ID NO: 1817735 - DNA, 15 bp, Homo sapiens
gatgccagcagcacc

SEQ ID NO: 1817736 - DNA, 15 bp, Homo sapiens
atgccagcagcaccc

SEQ ID NO: 1817737 - DNA, 15 bp, Homo sapiens
tgccagcagcacccc

SEQ ID NO: 1817738 - DNA, 15 bp, Homo sapiens
gccagcagcaccccc

SEQ ID NO: 1817739 - DNA, 15 bp, Homo sapiens
ccagcagcacccccc

SEQ ID NO: 1817740 - DNA, 15 bp, Homo sapiens
cagcagcacccccct

SEQ ID NO: 1817741 - DNA, 15 bp, Homo sapiens
agcagcacccccctt

SEQ ID NO: 1817742 - DNA, 15 bp, Homo sapiens
gcagcaccccccttc

SEQ ID NO: 1817743 - DNA, 15 bp, Homo sapiens
cagcaccccccttcc

SEQ ID NO: 1817744 - DNA, 15 bp, Homo sapiens
agcaccccccttcca

SEQ ID NO: 1817745 - DNA, 15 bp, Homo sapiens
gcaccccccttccaa

SEQ ID NO: 1817746 - DNA, 15 bp, Homo sapiens
caccccccttccaag

SEQ ID NO: 1817747 - DNA, 15 bp, Homo sapiens
accccccttccaagt

SEQ ID NO: 1817748 - DNA, 15 bp, Homo sapiens
ccccccttccaagtc

SEQ ID NO: 1817749 - DNA, 15 bp, Homo sapiens
cccccttccaagtca

SEQ ID NO: 1817750 - DNA, 15 bp, Homo sapiens
ccccttccaagtcat

SEQ ID NO: 1817751 - DNA, 15 bp, Homo sapiens
cccttccaagtcatg

SEQ ID NO: 1817752 - DNA, 15 bp, Homo sapiens
ccttccaagtcatga

SEQ ID NO: 1817753 - DNA, 15 bp, Homo sapiens
cttccaagtcatgac

SEQ ID NO: 1817754 - DNA, 15 bp, Homo sapiens
ttccaagtcatgaca

SEQ ID NO: 1817755 - DNA, 15 bp, Homo sapiens
tccaagtcatgacaa

SEQ ID NO: 1817756 - DNA, 15 bp, Homo sapiens
ccaagtcatgacaat

SEQ ID NO: 1817757 - DNA, 15 bp, Homo sapiens
caagtcatgacaatc

SEQ ID NO: 1817758 - DNA, 15 bp, Homo sapiens
aagtcatgacaatcc

SEQ ID NO: 1817759 - DNA, 15 bp, Homo sapiens
agtcatgacaatcca

SEQ ID NO: 1817760 - DNA, 15 bp, Homo sapiens
gtcatgacaatccaa

SEQ ID NO: 1817761 - DNA, 15 bp, Homo sapiens
tcatgacaatccaaa

SEQ ID NO: 1817762 - DNA, 15 bp, Homo sapiens
catgacaatccaaaa

SEQ ID NO: 1817763 - DNA, 15 bp, Homo sapiens
atgacaatccaaaat

SEQ ID NO: 1817764 - DNA, 15 bp, Homo sapiens
tgacaatccaaaatg

SEQ ID NO: 1817765 - DNA, 15 bp, Homo sapiens
gacaatccaaaatgt

SEQ ID NO: 1817766 - DNA, 15 bp, Homo sapiens
acaatccaaaatgtc

SEQ ID NO: 1817767 - DNA, 15 bp, Homo sapiens
caatccaaaatgtct

SEQ ID NO: 1817768 - DNA, 15 bp, Homo sapiens
aatccaaaatgtctc

SEQ ID NO: 1817769 - DNA, 15 bp, Homo sapiens
atccaaaatgtctcc

SEQ ID NO: 1817770 - DNA, 15 bp, Homo sapiens
tccaaaatgtctcca

SEQ ID NO: 1817771 - DNA, 15 bp, Homo sapiens
ccaaaatgtctccag

SEQ ID NO: 1817772 - DNA, 15 bp, Homo sapiens
caaaatgtctccaga

SEQ ID NO: 1817773 - DNA, 15 bp, Homo sapiens
aaaatgtctccagag

SEQ ID NO: 1817774 - DNA, 15 bp, Homo sapiens
aaatgtctccagaga

SEQ ID NO: 1817775 - DNA, 15 bp, Homo sapiens
aatgtctccagagat

SEQ ID NO: 1817776 - DNA, 15 bp, Homo sapiens
atgtctccagagatc

SEQ ID NO: 1817777 - DNA, 15 bp, Homo sapiens
tgtctccagagatcg

SEQ ID NO: 1817778 - DNA, 15 bp, Homo sapiens
gtctccagagatcgc

SEQ ID NO: 1817779 - DNA, 15 bp, Homo sapiens
tctccagagatcgct

SEQ ID NO: 1817780 - DNA, 15 bp, Homo sapiens
ctccagagatcgctt

SEQ ID NO: 1817781 - DNA, 15 bp, Homo sapiens
tccagagatcgcttg

SEQ ID NO: 1817782 - DNA, 15 bp, Homo sapiens
ccagagatcgcttga

SEQ ID NO: 1817783 - DNA, 15 bp, Homo sapiens
cagagatcgcttgag

SEQ ID NO: 1817784 - DNA, 15 bp, Homo sapiens
agagatcgcttgagc

SEQ ID NO: 1817785 - DNA, 15 bp, Homo sapiens
gagatcgcttgagcc

SEQ ID NO: 1817786 - DNA, 15 bp, Homo sapiens
gagcccaggagttgc

SEQ ID NO: 1817787 - DNA, 15 bp, Homo sapiens
agcccaggagttgca

SEQ ID NO: 1817788 - DNA, 15 bp, Homo sapiens
gcccaggagttgcag

SEQ ID NO: 1817789 - DNA, 15 bp, Homo sapiens
cccaggagttgcagg

SEQ ID NO: 1817790 - DNA, 15 bp, Homo sapiens
ccaggagttgcagga

SEQ ID NO: 1817791 - DNA, 15 bp, Homo sapiens
caggagttgcaggaa

SEQ ID NO: 1817792 - DNA, 15 bp, Homo sapiens
aggagttgcaggaag

SEQ ID NO: 1817793 - DNA, 15 bp, Homo sapiens
ggagttgcaggaagc

SEQ ID NO: 1817794 - DNA, 15 bp, Homo sapiens
gagttgcaggaagca

SEQ ID NO: 1817795 - DNA, 15 bp, Homo sapiens
agttgcaggaagcag

SEQ ID NO: 1817796 - DNA, 15 bp, Homo sapiens
gttgcaggaagcagt

SEQ ID NO: 1817797 - DNA, 15 bp, Homo sapiens
ttgcaggaagcagtg

SEQ ID NO: 1817798 - DNA, 15 bp, Homo sapiens
tgcaggaagcagtga

SEQ ID NO: 1817799 - DNA, 15 bp, Homo sapiens
gcaggaagcagtgag

SEQ ID NO: 1817800 - DNA, 15 bp, Homo sapiens
caggaagcagtgagc

SEQ ID NO: 1817801 - DNA, 15 bp, Homo sapiens
aggaagcagtgagct

SEQ ID NO: 1817802 - DNA, 15 bp, Homo sapiens
ggaagcagtgagctg

SEQ ID NO: 1817803 - DNA, 15 bp, Homo sapiens
gaagcagtgagctgt

SEQ ID NO: 1817804 - DNA, 15 bp, Homo sapiens
aagcagtgagctgtg

SEQ ID NO: 1817805 - DNA, 15 bp, Homo sapiens
agcagtgagctgtga

SEQ ID NO: 1817806 - DNA, 15 bp, Homo sapiens
gcagtgagctgtgac

SEQ ID NO: 1817807 - DNA, 15 bp, Homo sapiens
cagtgagctgtgacc

SEQ ID NO: 1817808 - DNA, 15 bp, Homo sapiens
agtgagctgtgaccg

SEQ ID NO: 1817809 - DNA, 15 bp, Homo sapiens
gtgagctgtgaccga

SEQ ID NO: 1817810 - DNA, 15 bp, Homo sapiens
tgagctgtgaccgag

SEQ ID NO: 1817811 - DNA, 15 bp, Homo sapiens
gagctgtgaccgagc

SEQ ID NO: 1817812 - DNA, 15 bp, Homo sapiens
agctgtgaccgagcc

SEQ ID NO: 1817813 - DNA, 15 bp, Homo sapiens
gctgtgaccgagcca

SEQ ID NO: 1817814 - DNA, 15 bp, Homo sapiens
ctgtgaccgagccac

SEQ ID NO: 1817815 - DNA, 15 bp, Homo sapiens
tgtgaccgagccact

SEQ ID NO: 1817816 - DNA, 15 bp, Homo sapiens
gtgaccgagccactg

SEQ ID NO: 1817817 - DNA, 15 bp, Homo sapiens
tgaccgagccactgt

SEQ ID NO: 1817818 - DNA, 15 bp, Homo sapiens
gaccgagccactgta

SEQ ID NO: 1817819 - DNA, 15 bp, Homo sapiens
accgagccactgtac

SEQ ID NO: 1817820 - DNA, 15 bp, Homo sapiens
ccgagccactgtact

SEQ ID NO: 1817821 - DNA, 15 bp, Homo sapiens
cgagccactgtactc

SEQ ID NO: 1817822 - DNA, 15 bp, Homo sapiens
gagccactgtactcc

SEQ ID NO: 1817823 - DNA, 15 bp, Homo sapiens
agccactgtactcca

SEQ ID NO: 1817824 - DNA, 15 bp, Homo sapiens
cagcctgggcaagac

SEQ ID NO: 1817825 - DNA, 15 bp, Homo sapiens
gcctgggcaagacag

SEQ ID NO: 1817826 - DNA, 15 bp, Homo sapiens
cctgggcaagacagc

SEQ ID NO: 1817827 - DNA, 15 bp, Homo sapiens
ctgggcaagacagca

SEQ ID NO: 1817828 - DNA, 15 bp, Homo sapiens
tgggcaagacagcaa

SEQ ID NO: 1817829 - DNA, 15 bp, Homo sapiens
gggcaagacagcaag

SEQ ID NO: 1817830 - DNA, 15 bp, Homo sapiens
ggcaagacagcaaga

SEQ ID NO: 1817831 - DNA, 15 bp, Homo sapiens
gcaagacagcaagac

SEQ ID NO: 1817832 - DNA, 15 bp, Homo sapiens
caagacagcaagacc

SEQ ID NO: 1817833 - DNA, 15 bp, Homo sapiens
aagacagcaagaccc

SEQ ID NO: 1817834 - DNA, 15 bp, Homo sapiens
agacagcaagacccc

SEQ ID NO: 1817835 - DNA, 15 bp, Homo sapiens
gacagcaagacccct

SEQ ID NO: 1817836 - DNA, 15 bp, Homo sapiens
acagcaagacccctt

SEQ ID NO: 1817837 - DNA, 15 bp, Homo sapiens
cagcaagaccccttc

SEQ ID NO: 1817838 - DNA, 15 bp, Homo sapiens
agcaagaccccttct

SEQ ID NO: 1817839 - DNA, 15 bp, Homo sapiens
gcaagaccccttctc

SEQ ID NO: 1817840 - DNA, 15 bp, Homo sapiens
caagaccccttctca

SEQ ID NO: 1817841 - DNA, 15 bp, Homo sapiens
aagaccccttctcaa

SEQ ID NO: 1817842 - DNA, 15 bp, Homo sapiens
agaccccttctcaaa

SEQ ID NO: 1817843 - DNA, 15 bp, Homo sapiens
gaccccttctcaaaa

SEQ ID NO: 1817844 - DNA, 15 bp, Homo sapiens
accccttctcaaaaa

SEQ ID NO: 1817845 - DNA, 15 bp, Homo sapiens
ttctcaaaaaaaaaa

SEQ ID NO: 1817846 - DNA, 15 bp, Homo sapiens
aaaaaaaaaaagtct

SEQ ID NO: 1817847 - DNA, 15 bp, Homo sapiens
aaaaaaaaagtctcc

SEQ ID NO: 1817848 - DNA, 15 bp, Homo sapiens
aaaaaaaagtctcca

SEQ ID NO: 1817849 - DNA, 15 bp, Homo sapiens
aaaaaaagtctccag

SEQ ID NO: 1817850 - DNA, 15 bp, Homo sapiens
aaaaaagtctccagg

SEQ ID NO: 1817851 - DNA, 15 bp, Homo sapiens
aaaaagtctccaggc

SEQ ID NO: 1817852 - DNA, 15 bp, Homo sapiens
aaaagtctccaggca

SEQ ID NO: 1817853 - DNA, 15 bp, Homo sapiens
aaagtctccaggcaa

SEQ ID NO: 1817854 - DNA, 15 bp, Homo sapiens
aagtctccaggcaat

SEQ ID NO: 1817855 - DNA, 15 bp, Homo sapiens
agtctccaggcaatg

SEQ ID NO: 1817856 - DNA, 15 bp, Homo sapiens
gtctccaggcaatgc

SEQ ID NO: 1817857 - DNA, 15 bp, Homo sapiens
tctccaggcaatgcc

SEQ ID NO: 1817858 - DNA, 15 bp, Homo sapiens
ctccaggcaatgcca

SEQ ID NO: 1817859 - DNA, 15 bp, Homo sapiens
tccaggcaatgccac

SEQ ID NO: 1817860 - DNA, 15 bp, Homo sapiens
ccaggcaatgccaca

SEQ ID NO: 1817861 - DNA, 15 bp, Homo sapiens
caggcaatgccacat

SEQ ID NO: 1817862 - DNA, 15 bp, Homo sapiens
aggcaatgccacatg

SEQ ID NO: 1817863 - DNA, 15 bp, Homo sapiens
ggcaatgccacatgt

SEQ ID NO: 1817864 - DNA, 15 bp, Homo sapiens
gcaatgccacatgtt

SEQ ID NO: 1817865 - DNA, 15 bp, Homo sapiens
caatgccacatgttg

SEQ ID NO: 1817866 - DNA, 15 bp, Homo sapiens
aatgccacatgttgt

SEQ ID NO: 1817867 - DNA, 15 bp, Homo sapiens
atgccacatgttgtc

SEQ ID NO: 1817868 - DNA, 15 bp, Homo sapiens
tgccacatgttgtct

SEQ ID NO: 1817869 - DNA, 15 bp, Homo sapiens
gccacatgttgtctg

SEQ ID NO: 1817870 - DNA, 15 bp, Homo sapiens
ccacatgttgtctgg

SEQ ID NO: 1817871 - DNA, 15 bp, Homo sapiens
cacatgttgtctggg

SEQ ID NO: 1817872 - DNA, 15 bp, Homo sapiens
acatgttgtctgggg

SEQ ID NO: 1817873 - DNA, 15 bp, Homo sapiens
catgttgtctggggg

SEQ ID NO: 1817874 - DNA, 15 bp, Homo sapiens
atgttgtctgggggt

SEQ ID NO: 1817875 - DNA, 15 bp, Homo sapiens
tgttgtctgggggta

SEQ ID NO: 1817876 - DNA, 15 bp, Homo sapiens
gttgtctgggggtaa

SEQ ID NO: 1817877 - DNA, 15 bp, Homo sapiens
ttgtctgggggtaaa

SEQ ID NO: 1817878 - DNA, 15 bp, Homo sapiens
tgtctgggggtaaaa

SEQ ID NO: 1817879 - DNA, 15 bp, Homo sapiens
gtctgggggtaaaat

SEQ ID NO: 1817880 - DNA, 15 bp, Homo sapiens
tctgggggtaaaatc

SEQ ID NO: 1817881 - DNA, 15 bp, Homo sapiens
ctgggggtaaaatca

SEQ ID NO: 1817882 - DNA, 15 bp, Homo sapiens
tgggggtaaaatcag

SEQ ID NO: 1817883 - DNA, 15 bp, Homo sapiens
gggggtaaaatcagc

SEQ ID NO: 1817884 - DNA, 15 bp, Homo sapiens
ggggtaaaatcagcc

SEQ ID NO: 1817885 - DNA, 15 bp, Homo sapiens
gggtaaaatcagccc

SEQ ID NO: 1817886 - DNA, 15 bp, Homo sapiens
ggtaaaatcagccct

SEQ ID NO: 1817887 - DNA, 15 bp, Homo sapiens
gtaaaatcagccctg

SEQ ID NO: 1817888 - DNA, 15 bp, Homo sapiens
taaaatcagccctgg

SEQ ID NO: 1817889 - DNA, 15 bp, Homo sapiens
aaaatcagccctggt

SEQ ID NO: 1817890 - DNA, 15 bp, Homo sapiens
aaatcagccctggtt

SEQ ID NO: 1817891 - DNA, 15 bp, Homo sapiens
aatcagccctggttc

SEQ ID NO: 1817892 - DNA, 15 bp, Homo sapiens
atcagccctggttca

SEQ ID NO: 1817893 - DNA, 15 bp, Homo sapiens
tcagccctggttcaa

SEQ ID NO: 1817894 - DNA, 15 bp, Homo sapiens
cagccctggttcaag

SEQ ID NO: 1817895 - DNA, 15 bp, Homo sapiens
agccctggttcaagc

SEQ ID NO: 1817896 - DNA, 15 bp, Homo sapiens
gccctggttcaagca

SEQ ID NO: 1817897 - DNA, 15 bp, Homo sapiens
ccctggttcaagcaa

SEQ ID NO: 1817898 - DNA, 15 bp, Homo sapiens
cctggttcaagcaaa

SEQ ID NO: 1817899 - DNA, 15 bp, Homo sapiens
ctggttcaagcaaac

SEQ ID NO: 1817900 - DNA, 15 bp, Homo sapiens
tggttcaagcaaacg

SEQ ID NO: 1817901 - DNA, 15 bp, Homo sapiens
ggttcaagcaaacgc

SEQ ID NO: 1817902 - DNA, 15 bp, Homo sapiens
gttcaagcaaacgct

SEQ ID NO: 1817903 - DNA, 15 bp, Homo sapiens
ttcaagcaaacgctt

SEQ ID NO: 1817904 - DNA, 15 bp, Homo sapiens
tcaagcaaacgcttt

SEQ ID NO: 1817905 - DNA, 15 bp, Homo sapiens
caagcaaacgcttta

SEQ ID NO: 1817906 - DNA, 15 bp, Homo sapiens
aagcaaacgctttaa

SEQ ID NO: 1817907 - DNA, 15 bp, Homo sapiens
agcaaacgctttaaa

SEQ ID NO: 1817908 - DNA, 15 bp, Homo sapiens
gcaaacgctttaaaa

SEQ ID NO: 1817909 - DNA, 15 bp, Homo sapiens
caaacgctttaaaag

SEQ ID NO: 1817910 - DNA, 15 bp, Homo sapiens
aaacgctttaaaagg

SEQ ID NO: 1817911 - DNA, 15 bp, Homo sapiens
aacgctttaaaagga

SEQ ID NO: 1817912 - DNA, 15 bp, Homo sapiens
acgctttaaaaggaa

SEQ ID NO: 1817913 - DNA, 15 bp, Homo sapiens
cgctttaaaaggaag

SEQ ID NO: 1817914 - DNA, 15 bp, Homo sapiens
gctttaaaaggaaga

SEQ ID NO: 1817915 - DNA, 15 bp, Homo sapiens
ctttaaaaggaagag

SEQ ID NO: 1817916 - DNA, 15 bp, Homo sapiens
tttaaaaggaagagg

SEQ ID NO: 1817917 - DNA, 15 bp, Homo sapiens
ttaaaaggaagagga

SEQ ID NO: 1817918 - DNA, 15 bp, Homo sapiens
taaaaggaagaggat

SEQ ID NO: 1817919 - DNA, 15 bp, Homo sapiens
aaaaggaagaggatg

SEQ ID NO: 1817920 - DNA, 15 bp, Homo sapiens
aaaggaagaggatgc

SEQ ID NO: 1817921 - DNA, 15 bp, Homo sapiens
aaggaagaggatgca

SEQ ID NO: 1817922 - DNA, 15 bp, Homo sapiens
aggaagaggatgcag

SEQ ID NO: 1817923 - DNA, 15 bp, Homo sapiens
ggaagaggatgcaga

SEQ ID NO: 1817924 - DNA, 15 bp, Homo sapiens
gaagaggatgcagag

SEQ ID NO: 1817925 - DNA, 15 bp, Homo sapiens
aagaggatgcagagt

SEQ ID NO: 1817926 - DNA, 15 bp, Homo sapiens
agaggatgcagagta

SEQ ID NO: 1817927 - DNA, 15 bp, Homo sapiens
gaggatgcagagtag

SEQ ID NO: 1817928 - DNA, 15 bp, Homo sapiens
aggatgcagagtagg

SEQ ID NO: 1817929 - DNA, 15 bp, Homo sapiens
ggatgcagagtaggg

SEQ ID NO: 1817930 - DNA, 15 bp, Homo sapiens
gatgcagagtaggga

SEQ ID NO: 1817931 - DNA, 15 bp, Homo sapiens
atgcagagtagggag

SEQ ID NO: 1817932 - DNA, 15 bp, Homo sapiens
tgcagagtagggaga

SEQ ID NO: 1817933 - DNA, 15 bp, Homo sapiens
gcagagtagggagaa

SEQ ID NO: 1817934 - DNA, 15 bp, Homo sapiens
cagagtagggagaag

SEQ ID NO: 1817935 - DNA, 15 bp, Homo sapiens
agagtagggagaagg

SEQ ID NO: 1817936 - DNA, 15 bp, Homo sapiens
gagtagggagaaggc

SEQ ID NO: 1817937 - DNA, 15 bp, Homo sapiens
agtagggagaaggca

SEQ ID NO: 1817938 - DNA, 15 bp, Homo sapiens
gtagggagaaggcag

SEQ ID NO: 1817939 - DNA, 15 bp, Homo sapiens
tagggagaaggcaga

SEQ ID NO: 1817940 - DNA, 15 bp, Homo sapiens
agggagaaggcagag

SEQ ID NO: 1817941 - DNA, 15 bp, Homo sapiens
gggagaaggcagaga

SEQ ID NO: 1817942 - DNA, 15 bp, Homo sapiens
ggagaaggcagagag

SEQ ID NO: 1817943 - DNA, 15 bp, Homo sapiens
gagaaggcagagagc

SEQ ID NO: 1817944 - DNA, 15 bp, Homo sapiens
agaaggcagagagcc

SEQ ID NO: 1817945 - DNA, 15 bp, Homo sapiens
gaaggcagagagcct

SEQ ID NO: 1817946 - DNA, 15 bp, Homo sapiens
aaggcagagagcctg

SEQ ID NO: 1817947 - DNA, 15 bp, Homo sapiens
aggcagagagcctgg

SEQ ID NO: 1817948 - DNA, 15 bp, Homo sapiens
ggcagagagcctgga

SEQ ID NO: 1817949 - DNA, 15 bp, Homo sapiens
gcagagagcctggag

SEQ ID NO: 1817950 - DNA, 15 bp, Homo sapiens
cagagagcctggagc

SEQ ID NO: 1817951 - DNA, 15 bp, Homo sapiens
agagagcctggagct

SEQ ID NO: 1817952 - DNA, 15 bp, Homo sapiens
gagagcctggagctg

SEQ ID NO: 1817953 - DNA, 15 bp, Homo sapiens
agagcctggagctga

SEQ ID NO: 1817954 - DNA, 15 bp, Homo sapiens
gagcctggagctgag

SEQ ID NO: 1817955 - DNA, 15 bp, Homo sapiens
agcctggagctgaga

SEQ ID NO: 1817956 - DNA, 15 bp, Homo sapiens
gcctggagctgagag

SEQ ID NO: 1817957 - DNA, 15 bp, Homo sapiens
cctggagctgagagt

SEQ ID NO: 1817958 - DNA, 15 bp, Homo sapiens
ctggagctgagagtg

SEQ ID NO: 1817959 - DNA, 15 bp, Homo sapiens
tggagctgagagtgc

SEQ ID NO: 1817960 - DNA, 15 bp, Homo sapiens
ggagctgagagtgct

SEQ ID NO: 1817961 - DNA, 15 bp, Homo sapiens
gagctgagagtgctg

SEQ ID NO: 1817962 - DNA, 15 bp, Homo sapiens
agctgagagtgctgg

SEQ ID NO: 1817963 - DNA, 15 bp, Homo sapiens
gctgagagtgctggg

SEQ ID NO: 1817964 - DNA, 15 bp, Homo sapiens
ctgagagtgctggga

SEQ ID NO: 1817965 - DNA, 15 bp, Homo sapiens
tgagagtgctgggaa

SEQ ID NO: 1817966 - DNA, 15 bp, Homo sapiens
gagagtgctgggaat

SEQ ID NO: 1817967 - DNA, 15 bp, Homo sapiens
agagtgctgggaatg

SEQ ID NO: 1817968 - DNA, 15 bp, Homo sapiens
gagtgctgggaatga

SEQ ID NO: 1817969 - DNA, 15 bp, Homo sapiens
agtgctgggaatgag

SEQ ID NO: 1817970 - DNA, 15 bp, Homo sapiens
gtgctgggaatgaga

SEQ ID NO: 1817971 - DNA, 15 bp, Homo sapiens
tgctgggaatgagac

SEQ ID NO: 1817972 - DNA, 15 bp, Homo sapiens
gctgggaatgagaca

SEQ ID NO: 1817973 - DNA, 15 bp, Homo sapiens
ctgggaatgagacag

SEQ ID NO: 1817974 - DNA, 15 bp, Homo sapiens
tgggaatgagacagc

SEQ ID NO: 1817975 - DNA, 15 bp, Homo sapiens
gggaatgagacagcc

SEQ ID NO: 1817976 - DNA, 15 bp, Homo sapiens
ggaatgagacagcca

SEQ ID NO: 1817977 - DNA, 15 bp, Homo sapiens
gaatgagacagccaa

SEQ ID NO: 1817978 - DNA, 15 bp, Homo sapiens
aatgagacagccaaa

SEQ ID NO: 1817979 - DNA, 15 bp, Homo sapiens
atgagacagccaaag

SEQ ID NO: 1817980 - DNA, 15 bp, Homo sapiens
tgagacagccaaagg

SEQ ID NO: 1817981 - DNA, 15 bp, Homo sapiens
gagacagccaaaggg

SEQ ID NO: 1817982 - DNA, 15 bp, Homo sapiens
agacagccaaagggg

SEQ ID NO: 1817983 - DNA, 15 bp, Homo sapiens
gacagccaaaggggc

SEQ ID NO: 1817984 - DNA, 15 bp, Homo sapiens
acagccaaaggggct

SEQ ID NO: 1817985 - DNA, 15 bp, Homo sapiens
cagccaaaggggctg

SEQ ID NO: 1817986 - DNA, 15 bp, Homo sapiens
agccaaaggggctgt

SEQ ID NO: 1817987 - DNA, 15 bp, Homo sapiens
gccaaaggggctgtg

SEQ ID NO: 1817988 - DNA, 15 bp, Homo sapiens
ccaaaggggctgtga

SEQ ID NO: 1817989 - DNA, 15 bp, Homo sapiens
caaaggggctgtgac

SEQ ID NO: 1817990 - DNA, 15 bp, Homo sapiens
aaaggggctgtgacg

SEQ ID NO: 1817991 - DNA, 15 bp, Homo sapiens
aaggggctgtgacga

SEQ ID NO: 1817992 - DNA, 15 bp, Homo sapiens
aggggctgtgacgaa

SEQ ID NO: 1817993 - DNA, 15 bp, Homo sapiens
ggggctgtgacgaac

SEQ ID NO: 1817994 - DNA, 15 bp, Homo sapiens
gggctgtgacgaacc

SEQ ID NO: 1817995 - DNA, 15 bp, Homo sapiens
ggctgtgacgaacca

SEQ ID NO: 1817996 - DNA, 15 bp, Homo sapiens
gctgtgacgaaccag

SEQ ID NO: 1817997 - DNA, 15 bp, Homo sapiens
ctgtgacgaaccaga

SEQ ID NO: 1817998 - DNA, 15 bp, Homo sapiens
tgtgacgaaccagag

SEQ ID NO: 1817999 - DNA, 15 bp, Homo sapiens
gtgacgaaccagaga

SEQ ID NO: 1818000 - DNA, 15 bp, Homo sapiens
tgacgaaccagagaa

SEQ ID NO: 1818001 - DNA, 15 bp, Homo sapiens
gacgaaccagagaac

SEQ ID NO: 1818002 - DNA, 15 bp, Homo sapiens
acgaaccagagaaca

SEQ ID NO: 1818003 - DNA, 15 bp, Homo sapiens
cgaaccagagaacaa

SEQ ID NO: 1818004 - DNA, 15 bp, Homo sapiens
gaaccagagaacaac

SEQ ID NO: 1818005 - DNA, 15 bp, Homo sapiens
aaccagagaacaacc

SEQ ID NO: 1818006 - DNA, 15 bp, Homo sapiens
accagagaacaacca

SEQ ID NO: 1818007 - DNA, 15 bp, Homo sapiens
ccagagaacaaccag

SEQ ID NO: 1818008 - DNA, 15 bp, Homo sapiens
cagagaacaaccaga

SEQ ID NO: 1818009 - DNA, 15 bp, Homo sapiens
agagaacaaccagaa

SEQ ID NO: 1818010 - DNA, 15 bp, Homo sapiens
gagaacaaccagaag

SEQ ID NO: 1818011 - DNA, 15 bp, Homo sapiens
agaacaaccagaagg

SEQ ID NO: 1818012 - DNA, 15 bp, Homo sapiens
gaacaaccagaagga

SEQ ID NO: 1818013 - DNA, 15 bp, Homo sapiens
aacaaccagaaggag

SEQ ID NO: 1818014 - DNA, 15 bp, Homo sapiens
acaaccagaaggaga

SEQ ID NO: 1818015 - DNA, 15 bp, Homo sapiens
caaccagaaggagag

SEQ ID NO: 1818016 - DNA, 15 bp, Homo sapiens
aaccagaaggagagc

SEQ ID NO: 1818017 - DNA, 15 bp, Homo sapiens
accagaaggagagct

SEQ ID NO: 1818018 - DNA, 15 bp, Homo sapiens
ccagaaggagagcta

SEQ ID NO: 1818019 - DNA, 15 bp, Homo sapiens
cagaaggagagctat

SEQ ID NO: 1818020 - DNA, 15 bp, Homo sapiens
agaaggagagctata

SEQ ID NO: 1818021 - DNA, 15 bp, Homo sapiens
gaaggagagctatac

SEQ ID NO: 1818022 - DNA, 15 bp, Homo sapiens
aaggagagctatact

SEQ ID NO: 1818023 - DNA, 15 bp, Homo sapiens
aggagagctatactg

SEQ ID NO: 1818024 - DNA, 15 bp, Homo sapiens
ggagagctatactgg

SEQ ID NO: 1818025 - DNA, 15 bp, Homo sapiens
gagagctatactgga

SEQ ID NO: 1818026 - DNA, 15 bp, Homo sapiens
agagctatactggag

SEQ ID NO: 1818027 - DNA, 15 bp, Homo sapiens
gagctatactggagg

SEQ ID NO: 1818028 - DNA, 15 bp, Homo sapiens
agctatactggaggg

SEQ ID NO: 1818029 - DNA, 15 bp, Homo sapiens
gctatactggagggt

SEQ ID NO: 1818030 - DNA, 15 bp, Homo sapiens
ctatactggagggtg

SEQ ID NO: 1818031 - DNA, 15 bp, Homo sapiens
tatactggagggtgg

SEQ ID NO: 1818032 - DNA, 15 bp, Homo sapiens
atactggagggtggg

SEQ ID NO: 1818033 - DNA, 15 bp, Homo sapiens
tactggagggtgggt

SEQ ID NO: 1818034 - DNA, 15 bp, Homo sapiens
actggagggtgggtg

SEQ ID NO: 1818035 - DNA, 15 bp, Homo sapiens
ctggagggtgggtgg

SEQ ID NO: 1818036 - DNA, 15 bp, Homo sapiens
tggagggtgggtggg

SEQ ID NO: 1818037 - DNA, 15 bp, Homo sapiens
ggagggtgggtgggg

SEQ ID NO: 1818038 - DNA, 15 bp, Homo sapiens
gagggtgggtggggc

SEQ ID NO: 1818039 - DNA, 15 bp, Homo sapiens
agggtgggtggggct

SEQ ID NO: 1818040 - DNA, 15 bp, Homo sapiens
gggtgggtggggctg

SEQ ID NO: 1818041 - DNA, 15 bp, Homo sapiens
ggtgggtggggctgc

SEQ ID NO: 1818042 - DNA, 15 bp, Homo sapiens
gtgggtggggctgcc

SEQ ID NO: 1818043 - DNA, 15 bp, Homo sapiens
tgggtggggctgcct

SEQ ID NO: 1818044 - DNA, 15 bp, Homo sapiens
gggtggggctgcctg

SEQ ID NO: 1818045 - DNA, 15 bp, Homo sapiens
ggtggggctgcctgg

SEQ ID NO: 1818046 - DNA, 15 bp, Homo sapiens
gtggggctgcctggc

SEQ ID NO: 1818047 - DNA, 15 bp, Homo sapiens
tggggctgcctggcc

SEQ ID NO: 1818048 - DNA, 15 bp, Homo sapiens
ggggctgcctggcca

SEQ ID NO: 1818049 - DNA, 15 bp, Homo sapiens
gggctgcctggccaa

SEQ ID NO: 1818050 - DNA, 15 bp, Homo sapiens
ggctgcctggccaag

SEQ ID NO: 1818051 - DNA, 15 bp, Homo sapiens
gctgcctggccaagt

SEQ ID NO: 1818052 - DNA, 15 bp, Homo sapiens
ctgcctggccaagtt

SEQ ID NO: 1818053 - DNA, 15 bp, Homo sapiens
tgcctggccaagttc

SEQ ID NO: 1818054 - DNA, 15 bp, Homo sapiens
gcctggccaagttct

SEQ ID NO: 1818055 - DNA, 15 bp, Homo sapiens
cctggccaagttctc

SEQ ID NO: 1818056 - DNA, 15 bp, Homo sapiens
ctggccaagttctct

SEQ ID NO: 1818057 - DNA, 15 bp, Homo sapiens
tggccaagttctctc

SEQ ID NO: 1818058 - DNA, 15 bp, Homo sapiens
ggccaagttctctct

SEQ ID NO: 1818059 - DNA, 15 bp, Homo sapiens
gccaagttctctctg

SEQ ID NO: 1818060 - DNA, 15 bp, Homo sapiens
ccaagttctctctgg

SEQ ID NO: 1818061 - DNA, 15 bp, Homo sapiens
caagttctctctggg

SEQ ID NO: 1818062 - DNA, 15 bp, Homo sapiens
aagttctctctggga

SEQ ID NO: 1818063 - DNA, 15 bp, Homo sapiens
agttctctctgggaa

SEQ ID NO: 1818064 - DNA, 15 bp, Homo sapiens
gttctctctgggaaa

SEQ ID NO: 1818065 - DNA, 15 bp, Homo sapiens
ttctctctgggaaac

SEQ ID NO: 1818066 - DNA, 15 bp, Homo sapiens
tctctctgggaaact

SEQ ID NO: 1818067 - DNA, 15 bp, Homo sapiens
ctctctgggaaactc

SEQ ID NO: 1818068 - DNA, 15 bp, Homo sapiens
tctctgggaaactca

SEQ ID NO: 1818069 - DNA, 15 bp, Homo sapiens
ctctgggaaactcac

SEQ ID NO: 1818070 - DNA, 15 bp, Homo sapiens
tctgggaaactcact

SEQ ID NO: 1818071 - DNA, 15 bp, Homo sapiens
ctgggaaactcactt

SEQ ID NO: 1818072 - DNA, 15 bp, Homo sapiens
tgggaaactcacttg

SEQ ID NO: 1818073 - DNA, 15 bp, Homo sapiens
gggaaactcacttga

SEQ ID NO: 1818074 - DNA, 15 bp, Homo sapiens
ggaaactcacttgag

SEQ ID NO: 1818075 - DNA, 15 bp, Homo sapiens
gaaactcacttgaga

SEQ ID NO: 1818076 - DNA, 15 bp, Homo sapiens
aaactcacttgagat

SEQ ID NO: 1818077 - DNA, 15 bp, Homo sapiens
aactcacttgagatc

SEQ ID NO: 1818078 - DNA, 15 bp, Homo sapiens
actcacttgagatct

SEQ ID NO: 1818079 - DNA, 15 bp, Homo sapiens
ctcacttgagatcta

SEQ ID NO: 1818080 - DNA, 15 bp, Homo sapiens
tcacttgagatctaa

SEQ ID NO: 1818081 - DNA, 15 bp, Homo sapiens
cacttgagatctaaa

SEQ ID NO: 1818082 - DNA, 15 bp, Homo sapiens
acttgagatctaaaa

SEQ ID NO: 1818083 - DNA, 15 bp, Homo sapiens
cttgagatctaaaag

SEQ ID NO: 1818084 - DNA, 15 bp, Homo sapiens
ttgagatctaaaagc

SEQ ID NO: 1818085 - DNA, 15 bp, Homo sapiens
tgagatctaaaagct

SEQ ID NO: 1818086 - DNA, 15 bp, Homo sapiens
gagatctaaaagctt

SEQ ID NO: 1818087 - DNA, 15 bp, Homo sapiens
agatctaaaagcttt

SEQ ID NO: 1818088 - DNA, 15 bp, Homo sapiens
gatctaaaagctttc

SEQ ID NO: 1818089 - DNA, 15 bp, Homo sapiens
atctaaaagctttcc

SEQ ID NO: 1818090 - DNA, 15 bp, Homo sapiens
tctaaaagctttccc

SEQ ID NO: 1818091 - DNA, 15 bp, Homo sapiens
ctaaaagctttcccc

SEQ ID NO: 1818092 - DNA, 15 bp, Homo sapiens
taaaagctttcccca

SEQ ID NO: 1818093 - DNA, 15 bp, Homo sapiens
aaaagctttccccat

SEQ ID NO: 1818094 - DNA, 15 bp, Homo sapiens
aaagctttccccata

SEQ ID NO: 1818095 - DNA, 15 bp, Homo sapiens
aagctttccccatat

SEQ ID NO: 1818096 - DNA, 15 bp, Homo sapiens
agctttccccatatc

SEQ ID NO: 1818097 - DNA, 15 bp, Homo sapiens
gctttccccatatct

SEQ ID NO: 1818098 - DNA, 15 bp, Homo sapiens
ctttccccatatctc

SEQ ID NO: 1818099 - DNA, 15 bp, Homo sapiens
tttccccatatctcc

SEQ ID NO: 1818100 - DNA, 15 bp, Homo sapiens
ttccccatatctccc

SEQ ID NO: 1818101 - DNA, 15 bp, Homo sapiens
tccccatatctccca

SEQ ID NO: 1818102 - DNA, 15 bp, Homo sapiens
ccccatatctcccag

SEQ ID NO: 1818103 - DNA, 15 bp, Homo sapiens
cccatatctcccagg

SEQ ID NO: 1818104 - DNA, 15 bp, Homo sapiens
ccatatctcccagga

SEQ ID NO: 1818105 - DNA, 15 bp, Homo sapiens
catatctcccaggag

SEQ ID NO: 1818106 - DNA, 15 bp, Homo sapiens
atatctcccaggagg

SEQ ID NO: 1818107 - DNA, 15 bp, Homo sapiens
tatctcccaggagga

SEQ ID NO: 1818108 - DNA, 15 bp, Homo sapiens
atctcccaggaggaa

SEQ ID NO: 1818109 - DNA, 15 bp, Homo sapiens
tctcccaggaggaaa

SEQ ID NO: 1818110 - DNA, 15 bp, Homo sapiens
ctcccaggaggaaat

SEQ ID NO: 1818111 - DNA, 15 bp, Homo sapiens
tcccaggaggaaatt

SEQ ID NO: 1818112 - DNA, 15 bp, Homo sapiens
cccaggaggaaattc

SEQ ID NO: 1818113 - DNA, 15 bp, Homo sapiens
ccaggaggaaattct

SEQ ID NO: 1818114 - DNA, 15 bp, Homo sapiens
caggaggaaattctt

SEQ ID NO: 1818115 - DNA, 15 bp, Homo sapiens
aggaggaaattcttt

SEQ ID NO: 1818116 - DNA, 15 bp, Homo sapiens
ggaggaaattctttt

SEQ ID NO: 1818117 - DNA, 15 bp, Homo sapiens
gaggaaattcttttt

SEQ ID NO: 1818118 - DNA, 15 bp, Homo sapiens
aggaaattctttttt

SEQ ID NO: 1818119 - DNA, 15 bp, Homo sapiens
ggaaattcttttttt

SEQ ID NO: 1818120 - DNA, 15 bp, Homo sapiens
tgtcgcccaggctac

SEQ ID NO: 1818121 - DNA, 15 bp, Homo sapiens
gtcgcccaggctaca

SEQ ID NO: 1818122 - DNA, 15 bp, Homo sapiens
tcgcccaggctacag

SEQ ID NO: 1818123 - DNA, 15 bp, Homo sapiens
cgcccaggctacagt

SEQ ID NO: 1818124 - DNA, 15 bp, Homo sapiens
gcccaggctacagtg

SEQ ID NO: 1818125 - DNA, 15 bp, Homo sapiens
cccaggctacagtgc

SEQ ID NO: 1818126 - DNA, 15 bp, Homo sapiens
ccaggctacagtgca

SEQ ID NO: 1818127 - DNA, 15 bp, Homo sapiens
caggctacagtgcag

SEQ ID NO: 1818128 - DNA, 15 bp, Homo sapiens
aggctacagtgcagt

SEQ ID NO: 1818129 - DNA, 15 bp, Homo sapiens
ggctacagtgcagtg

SEQ ID NO: 1818130 - DNA, 15 bp, Homo sapiens
gctacagtgcagtgg

SEQ ID NO: 1818131 - DNA, 15 bp, Homo sapiens
ctacagtgcagtggc

SEQ ID NO: 1818132 - DNA, 15 bp, Homo sapiens
tacagtgcagtggcg

SEQ ID NO: 1818133 - DNA, 15 bp, Homo sapiens
acagtgcagtggcgc

SEQ ID NO: 1818134 - DNA, 15 bp, Homo sapiens
cagtgcagtggcgcg

SEQ ID NO: 1818135 - DNA, 15 bp, Homo sapiens
ctccgcctcccagga

SEQ ID NO: 1818136 - DNA, 15 bp, Homo sapiens
tccgcctcccaggag

SEQ ID NO: 1818137 - DNA, 15 bp, Homo sapiens
ccgcctcccaggagg

SEQ ID NO: 1818138 - DNA, 15 bp, Homo sapiens
cgcctcccaggagga

SEQ ID NO: 1818139 - DNA, 15 bp, Homo sapiens
gcctcccaggaggaa

SEQ ID NO: 1818140 - DNA, 15 bp, Homo sapiens
cctcccaggaggaaa

SEQ ID NO: 1818141 - DNA, 15 bp, Homo sapiens
caggaggaaattcta

SEQ ID NO: 1818142 - DNA, 15 bp, Homo sapiens
aggaggaaattctaa

SEQ ID NO: 1818143 - DNA, 15 bp, Homo sapiens
ggaggaaattctaaa

SEQ ID NO: 1818144 - DNA, 15 bp, Homo sapiens
gaggaaattctaaag

SEQ ID NO: 1818145 - DNA, 15 bp, Homo sapiens
aggaaattctaaagc

SEQ ID NO: 1818146 - DNA, 15 bp, Homo sapiens
ggaaattctaaagcg

SEQ ID NO: 1818147 - DNA, 15 bp, Homo sapiens
gaaattctaaagcgt

SEQ ID NO: 1818148 - DNA, 15 bp, Homo sapiens
aaattctaaagcgtt

SEQ ID NO: 1818149 - DNA, 15 bp, Homo sapiens
aattctaaagcgtta

SEQ ID NO: 1818150 - DNA, 15 bp, Homo sapiens
attctaaagcgttat

SEQ ID NO: 1818151 - DNA, 15 bp, Homo sapiens
ttctaaagcgttatg

SEQ ID NO: 1818152 - DNA, 15 bp, Homo sapiens
tctaaagcgttatgt

SEQ ID NO: 1818153 - DNA, 15 bp, Homo sapiens
ctaaagcgttatgtt

SEQ ID NO: 1818154 - DNA, 15 bp, Homo sapiens
taaagcgttatgttt

SEQ ID NO: 1818155 - DNA, 15 bp, Homo sapiens
aaagcgttatgtttg

SEQ ID NO: 1818156 - DNA, 15 bp, Homo sapiens
aagcgttatgtttgt

SEQ ID NO: 1818157 - DNA, 15 bp, Homo sapiens
agcgttatgtttgtt

SEQ ID NO: 1818158 - DNA, 15 bp, Homo sapiens
gcgttatgtttgtta

SEQ ID NO: 1818159 - DNA, 15 bp, Homo sapiens
cgttatgtttgttag

SEQ ID NO: 1818160 - DNA, 15 bp, Homo sapiens
gttatgtttgttagc

SEQ ID NO: 1818161 - DNA, 15 bp, Homo sapiens
ttatgtttgttagca

SEQ ID NO: 1818162 - DNA, 15 bp, Homo sapiens
tatgtttgttagcaa

SEQ ID NO: 1818163 - DNA, 15 bp, Homo sapiens
atgtttgttagcaaa

SEQ ID NO: 1818164 - DNA, 15 bp, Homo sapiens
tgtttgttagcaaaa

SEQ ID NO: 1818165 - DNA, 15 bp, Homo sapiens
gtttgttagcaaaac

SEQ ID NO: 1818166 - DNA, 15 bp, Homo sapiens
tttgttagcaaaaca

SEQ ID NO: 1818167 - DNA, 15 bp, Homo sapiens
ttgttagcaaaacag

SEQ ID NO: 1818168 - DNA, 15 bp, Homo sapiens
tgttagcaaaacaga

SEQ ID NO: 1818169 - DNA, 15 bp, Homo sapiens
gttagcaaaacagaa

SEQ ID NO: 1818170 - DNA, 15 bp, Homo sapiens
ttagcaaaacagaag

SEQ ID NO: 1818171 - DNA, 15 bp, Homo sapiens
tagcaaaacagaagg

SEQ ID NO: 1818172 - DNA, 15 bp, Homo sapiens
agcaaaacagaaggc

SEQ ID NO: 1818173 - DNA, 15 bp, Homo sapiens
gcaaaacagaaggca

SEQ ID NO: 1818174 - DNA, 15 bp, Homo sapiens
caaaacagaaggcaa

SEQ ID NO: 1818175 - DNA, 15 bp, Homo sapiens
aaaacagaaggcaaa

SEQ ID NO: 1818176 - DNA, 15 bp, Homo sapiens
aaacagaaggcaaag

SEQ ID NO: 1818177 - DNA, 15 bp, Homo sapiens
aacagaaggcaaaga

SEQ ID NO: 1818178 - DNA, 15 bp, Homo sapiens
acagaaggcaaagat

SEQ ID NO: 1818179 - DNA, 15 bp, Homo sapiens
cagaaggcaaagatc

SEQ ID NO: 1818180 - DNA, 15 bp, Homo sapiens
agaaggcaaagatct

SEQ ID NO: 1818181 - DNA, 15 bp, Homo sapiens
gaaggcaaagatctc

SEQ ID NO: 1818182 - DNA, 15 bp, Homo sapiens
aaggcaaagatctct

SEQ ID NO: 1818183 - DNA, 15 bp, Homo sapiens
aggcaaagatctctc

SEQ ID NO: 1818184 - DNA, 15 bp, Homo sapiens
ggcaaagatctctcc

SEQ ID NO: 1818185 - DNA, 15 bp, Homo sapiens
gcaaagatctctcct

SEQ ID NO: 1818186 - DNA, 15 bp, Homo sapiens
caaagatctctccta

SEQ ID NO: 1818187 - DNA, 15 bp, Homo sapiens
aaagatctctcctaa

SEQ ID NO: 1818188 - DNA, 15 bp, Homo sapiens
aagatctctcctaaa

SEQ ID NO: 1818189 - DNA, 15 bp, Homo sapiens
agatctctcctaaag

SEQ ID NO: 1818190 - DNA, 15 bp, Homo sapiens
gatctctcctaaaga

SEQ ID NO: 1818191 - DNA, 15 bp, Homo sapiens
atctctcctaaagag

SEQ ID NO: 1818192 - DNA, 15 bp, Homo sapiens
tctctcctaaagagg

SEQ ID NO: 1818193 - DNA, 15 bp, Homo sapiens
ctctcctaaagagga

SEQ ID NO: 1818194 - DNA, 15 bp, Homo sapiens
tctcctaaagaggaa

SEQ ID NO: 1818195 - DNA, 15 bp, Homo sapiens
ctcctaaagaggaaa

SEQ ID NO: 1818196 - DNA, 15 bp, Homo sapiens
tcctaaagaggaaat

SEQ ID NO: 1818197 - DNA, 15 bp, Homo sapiens
cctaaagaggaaata

SEQ ID NO: 1818198 - DNA, 15 bp, Homo sapiens
ctaaagaggaaataa

SEQ ID NO: 1818199 - DNA, 15 bp, Homo sapiens
taaagaggaaataaa

SEQ ID NO: 1818200 - DNA, 15 bp, Homo sapiens
aaagaggaaataaag

SEQ ID NO: 1818201 - DNA, 15 bp, Homo sapiens
aagaggaaataaaga

SEQ ID NO: 1818202 - DNA, 15 bp, Homo sapiens
agaggaaataaagaa

SEQ ID NO: 1818203 - DNA, 15 bp, Homo sapiens
gaggaaataaagaag

SEQ ID NO: 1818204 - DNA, 15 bp, Homo sapiens
aggaaataaagaagt

SEQ ID NO: 1818205 - DNA, 15 bp, Homo sapiens
ggaaataaagaagtt

SEQ ID NO: 1818206 - DNA, 15 bp, Homo sapiens
gaaataaagaagttt

SEQ ID NO: 1818207 - DNA, 15 bp, Homo sapiens
aaataaagaagtttc

SEQ ID NO: 1818208 - DNA, 15 bp, Homo sapiens
aataaagaagtttca

SEQ ID NO: 1818209 - DNA, 15 bp, Homo sapiens
ataaagaagtttcaa

SEQ ID NO: 1818210 - DNA, 15 bp, Homo sapiens
taaagaagtttcaac

SEQ ID NO: 1818211 - DNA, 15 bp, Homo sapiens
aaagaagtttcaaca

SEQ ID NO: 1818212 - DNA, 15 bp, Homo sapiens
aagaagtttcaacat

SEQ ID NO: 1818213 - DNA, 15 bp, Homo sapiens
agaagtttcaacatg

SEQ ID NO: 1818214 - DNA, 15 bp, Homo sapiens
gaagtttcaacatgc

SEQ ID NO: 1818215 - DNA, 15 bp, Homo sapiens
aagtttcaacatgct

SEQ ID NO: 1818216 - DNA, 15 bp, Homo sapiens
agtttcaacatgctt

SEQ ID NO: 1818217 - DNA, 15 bp, Homo sapiens
gtttcaacatgcttt

SEQ ID NO: 1818218 - DNA, 15 bp, Homo sapiens
tttcaacatgctttt

SEQ ID NO: 1818219 - DNA, 15 bp, Homo sapiens
ttcaacatgctttta

SEQ ID NO: 1818220 - DNA, 15 bp, Homo sapiens
tcaacatgcttttaa

SEQ ID NO: 1818221 - DNA, 15 bp, Homo sapiens
caacatgcttttaaa

SEQ ID NO: 1818222 - DNA, 15 bp, Homo sapiens
aacatgcttttaaaa

SEQ ID NO: 1818223 - DNA, 15 bp, Homo sapiens
acatgcttttaaaaa

SEQ ID NO: 1818224 - DNA, 15 bp, Homo sapiens
catgcttttaaaaac

SEQ ID NO: 1818225 - DNA, 15 bp, Homo sapiens
atgcttttaaaaaca

SEQ ID NO: 1818226 - DNA, 15 bp, Homo sapiens
tgcttttaaaaacac

SEQ ID NO: 1818227 - DNA, 15 bp, Homo sapiens
gcttttaaaaacacc

SEQ ID NO: 1818228 - DNA, 15 bp, Homo sapiens
cttttaaaaacacca

SEQ ID NO: 1818229 - DNA, 15 bp, Homo sapiens
ttttaaaaacaccat

SEQ ID NO: 1818230 - DNA, 15 bp, Homo sapiens
tttaaaaacaccata

SEQ ID NO: 1818231 - DNA, 15 bp, Homo sapiens
ttaaaaacaccatag

SEQ ID NO: 1818232 - DNA, 15 bp, Homo sapiens
taaaaacaccataga

SEQ ID NO: 1818233 - DNA, 15 bp, Homo sapiens
aaaaacaccatagaa

SEQ ID NO: 1818234 - DNA, 15 bp, Homo sapiens
aaaacaccatagaaa

SEQ ID NO: 1818235 - DNA, 15 bp, Homo sapiens
aaacaccatagaaaa

SEQ ID NO: 1818236 - DNA, 15 bp, Homo sapiens
aacaccatagaaaaa

SEQ ID NO: 1818237 - DNA, 15 bp, Homo sapiens
acaccatagaaaaaa

SEQ ID NO: 1818238 - DNA, 15 bp, Homo sapiens
caccatagaaaaaaa

SEQ ID NO: 1818239 - DNA, 15 bp, Homo sapiens
accatagaaaaaaag

SEQ ID NO: 1818240 - DNA, 15 bp, Homo sapiens
ccatagaaaaaaagt

SEQ ID NO: 1818241 - DNA, 15 bp, Homo sapiens
catagaaaaaaagta

SEQ ID NO: 1818242 - DNA, 15 bp, Homo sapiens
atagaaaaaaagtaa

SEQ ID NO: 1818243 - DNA, 15 bp, Homo sapiens
tagaaaaaaagtaat

SEQ ID NO: 1818244 - DNA, 15 bp, Homo sapiens
agaaaaaaagtaata

SEQ ID NO: 1818245 - DNA, 15 bp, Homo sapiens
gaaaaaaagtaatac

SEQ ID NO: 1818246 - DNA, 15 bp, Homo sapiens
aaaaaaagtaatacc

SEQ ID NO: 1818247 - DNA, 15 bp, Homo sapiens
aaaaaagtaataccc

SEQ ID NO: 1818248 - DNA, 15 bp, Homo sapiens
aaaaagtaataccca

SEQ ID NO: 1818249 - DNA, 15 bp, Homo sapiens
aaaagtaatacccag

SEQ ID NO: 1818250 - DNA, 15 bp, Homo sapiens
aaagtaatacccaga

SEQ ID NO: 1818251 - DNA, 15 bp, Homo sapiens
aagtaatacccagaa

SEQ ID NO: 1818252 - DNA, 15 bp, Homo sapiens
agtaatacccagaag

SEQ ID NO: 1818253 - DNA, 15 bp, Homo sapiens
gtaatacccagaaga

SEQ ID NO: 1818254 - DNA, 15 bp, Homo sapiens
taatacccagaagag

SEQ ID NO: 1818255 - DNA, 15 bp, Homo sapiens
aatacccagaagagc

SEQ ID NO: 1818256 - DNA, 15 bp, Homo sapiens
atacccagaagagcc

SEQ ID NO: 1818257 - DNA, 15 bp, Homo sapiens
tacccagaagagcct

SEQ ID NO: 1818258 - DNA, 15 bp, Homo sapiens
acccagaagagccta

SEQ ID NO: 1818259 - DNA, 15 bp, Homo sapiens
cccagaagagcctag

SEQ ID NO: 1818260 - DNA, 15 bp, Homo sapiens
ccagaagagcctagg

SEQ ID NO: 1818261 - DNA, 15 bp, Homo sapiens
cagaagagcctagga

SEQ ID NO: 1818262 - DNA, 15 bp, Homo sapiens
agaagagcctaggaa

SEQ ID NO: 1818263 - DNA, 15 bp, Homo sapiens
gaagagcctaggaaa

SEQ ID NO: 1818264 - DNA, 15 bp, Homo sapiens
aagagcctaggaaag

SEQ ID NO: 1818265 - DNA, 15 bp, Homo sapiens
agagcctaggaaagg

SEQ ID NO: 1818266 - DNA, 15 bp, Homo sapiens
gagcctaggaaagga

SEQ ID NO: 1818267 - DNA, 15 bp, Homo sapiens
agcctaggaaaggaa

SEQ ID NO: 1818268 - DNA, 15 bp, Homo sapiens
gcctaggaaaggaac

SEQ ID NO: 1818269 - DNA, 15 bp, Homo sapiens
cctaggaaaggaaca

SEQ ID NO: 1818270 - DNA, 15 bp, Homo sapiens
ctaggaaaggaacag

SEQ ID NO: 1818271 - DNA, 15 bp, Homo sapiens
taggaaaggaacagt

SEQ ID NO: 1818272 - DNA, 15 bp, Homo sapiens
aggaaaggaacagtg

SEQ ID NO: 1818273 - DNA, 15 bp, Homo sapiens
ggaaaggaacagtgt

SEQ ID NO: 1818274 - DNA, 15 bp, Homo sapiens
gaaaggaacagtgtg

SEQ ID NO: 1818275 - DNA, 15 bp, Homo sapiens
aaaggaacagtgtgt

SEQ ID NO: 1818276 - DNA, 15 bp, Homo sapiens
aaggaacagtgtgtg

SEQ ID NO: 1818277 - DNA, 15 bp, Homo sapiens
aggaacagtgtgtgc

SEQ ID NO: 1818278 - DNA, 15 bp, Homo sapiens
ggaacagtgtgtgcc

SEQ ID NO: 1818279 - DNA, 15 bp, Homo sapiens
gaacagtgtgtgccc

SEQ ID NO: 1818280 - DNA, 15 bp, Homo sapiens
aacagtgtgtgccct

SEQ ID NO: 1818281 - DNA, 15 bp, Homo sapiens
acagtgtgtgccctg

SEQ ID NO: 1818282 - DNA, 15 bp, Homo sapiens
cagtgtgtgccctgt

SEQ ID NO: 1818283 - DNA, 15 bp, Homo sapiens
agtgtgtgccctgtg

SEQ ID NO: 1818284 - DNA, 15 bp, Homo sapiens
gtgtgtgccctgtga

SEQ ID NO: 1818285 - DNA, 15 bp, Homo sapiens
tgtgtgccctgtgaa

SEQ ID NO: 1818286 - DNA, 15 bp, Homo sapiens
gtgtgccctgtgaag

SEQ ID NO: 1818287 - DNA, 15 bp, Homo sapiens
tgtgccctgtgaagt

SEQ ID NO: 1818288 - DNA, 15 bp, Homo sapiens
gtgccctgtgaagtg

SEQ ID NO: 1818289 - DNA, 15 bp, Homo sapiens
tgccctgtgaagtgg

SEQ ID NO: 1818290 - DNA, 15 bp, Homo sapiens
gccctgtgaagtggg

SEQ ID NO: 1818291 - DNA, 15 bp, Homo sapiens
ccctgtgaagtggga

SEQ ID NO: 1818292 - DNA, 15 bp, Homo sapiens
cctgtgaagtgggaa

SEQ ID NO: 1818293 - DNA, 15 bp, Homo sapiens
ctgtgaagtgggaaa

SEQ ID NO: 1818294 - DNA, 15 bp, Homo sapiens
tgtgaagtgggaaag

SEQ ID NO: 1818295 - DNA, 15 bp, Homo sapiens
gtgaagtgggaaagg

SEQ ID NO: 1818296 - DNA, 15 bp, Homo sapiens
tgaagtgggaaaggg

SEQ ID NO: 1818297 - DNA, 15 bp, Homo sapiens
gaagtgggaaaggga

SEQ ID NO: 1818298 - DNA, 15 bp, Homo sapiens
aagtgggaaagggac

SEQ ID NO: 1818299 - DNA, 15 bp, Homo sapiens
agtgggaaagggact

SEQ ID NO: 1818300 - DNA, 15 bp, Homo sapiens
gtgggaaagggactc

SEQ ID NO: 1818301 - DNA, 15 bp, Homo sapiens
tgggaaagggactca

SEQ ID NO: 1818302 - DNA, 15 bp, Homo sapiens
gggaaagggactcac

SEQ ID NO: 1818303 - DNA, 15 bp, Homo sapiens
ggaaagggactcacc

SEQ ID NO: 1818304 - DNA, 15 bp, Homo sapiens
gaaagggactcaccc

SEQ ID NO: 1818305 - DNA, 15 bp, Homo sapiens
aaagggactcacccg

SEQ ID NO: 1818306 - DNA, 15 bp, Homo sapiens
aagggactcacccgt

SEQ ID NO: 1818307 - DNA, 15 bp, Homo sapiens
agggactcacccgtt

SEQ ID NO: 1818308 - DNA, 15 bp, Homo sapiens
gggactcacccgttg

SEQ ID NO: 1818309 - DNA, 15 bp, Homo sapiens
ggactcacccgttga

SEQ ID NO: 1818310 - DNA, 15 bp, Homo sapiens
gactcacccgttgaa

SEQ ID NO: 1818311 - DNA, 15 bp, Homo sapiens
actcacccgttgaaa

SEQ ID NO: 1818312 - DNA, 15 bp, Homo sapiens
ctcacccgttgaaaa

SEQ ID NO: 1818313 - DNA, 15 bp, Homo sapiens
tcacccgttgaaaaa

SEQ ID NO: 1818314 - DNA, 15 bp, Homo sapiens
cacccgttgaaaaag

SEQ ID NO: 1818315 - DNA, 15 bp, Homo sapiens
acccgttgaaaaaga

SEQ ID NO: 1818316 - DNA, 15 bp, Homo sapiens
cccgttgaaaaagat

SEQ ID NO: 1818317 - DNA, 15 bp, Homo sapiens
ccgttgaaaaagatc

SEQ ID NO: 1818318 - DNA, 15 bp, Homo sapiens
cgttgaaaaagatct

SEQ ID NO: 1818319 - DNA, 15 bp, Homo sapiens
gttgaaaaagatctg

SEQ ID NO: 1818320 - DNA, 15 bp, Homo sapiens
ttgaaaaagatctgg

SEQ ID NO: 1818321 - DNA, 15 bp, Homo sapiens
tgaaaaagatctggg

SEQ ID NO: 1818322 - DNA, 15 bp, Homo sapiens
gaaaaagatctgggc

SEQ ID NO: 1818323 - DNA, 15 bp, Homo sapiens
aaaaagatctgggcc

SEQ ID NO: 1818324 - DNA, 15 bp, Homo sapiens
aaaagatctgggcca

SEQ ID NO: 1818325 - DNA, 15 bp, Homo sapiens
aaagatctgggccaa

SEQ ID NO: 1818326 - DNA, 15 bp, Homo sapiens
aagatctgggccaat

SEQ ID NO: 1818327 - DNA, 15 bp, Homo sapiens
agatctgggccaatt

SEQ ID NO: 1818328 - DNA, 15 bp, Homo sapiens
gatctgggccaattt

SEQ ID NO: 1818329 - DNA, 15 bp, Homo sapiens
atctgggccaatttg

SEQ ID NO: 1818330 - DNA, 15 bp, Homo sapiens
tctgggccaatttga

SEQ ID NO: 1818331 - DNA, 15 bp, Homo sapiens
ctgggccaatttgaa

SEQ ID NO: 1818332 - DNA, 15 bp, Homo sapiens
tgggccaatttgaag

SEQ ID NO: 1818333 - DNA, 15 bp, Homo sapiens
gggccaatttgaaga

SEQ ID NO: 1818334 - DNA, 15 bp, Homo sapiens
ggccaatttgaagag

SEQ ID NO: 1818335 - DNA, 15 bp, Homo sapiens
gccaatttgaagagc

SEQ ID NO: 1818336 - DNA, 15 bp, Homo sapiens
ccaatttgaagagct

SEQ ID NO: 1818337 - DNA, 15 bp, Homo sapiens
caatttgaagagctc

SEQ ID NO: 1818338 - DNA, 15 bp, Homo sapiens
aatttgaagagctca

SEQ ID NO: 1818339 - DNA, 15 bp, Homo sapiens
atttgaagagctcat

SEQ ID NO: 1818340 - DNA, 15 bp, Homo sapiens
tttgaagagctcatg

SEQ ID NO: 1818341 - DNA, 15 bp, Homo sapiens
ttgaagagctcatgg

SEQ ID NO: 1818342 - DNA, 15 bp, Homo sapiens
tgaagagctcatggc

SEQ ID NO: 1818343 - DNA, 15 bp, Homo sapiens
gaagagctcatggcc

SEQ ID NO: 1818344 - DNA, 15 bp, Homo sapiens
aagagctcatggccc

SEQ ID NO: 1818345 - DNA, 15 bp, Homo sapiens
agagctcatggccca

SEQ ID NO: 1818346 - DNA, 15 bp, Homo sapiens
gagctcatggcccat

SEQ ID NO: 1818347 - DNA, 15 bp, Homo sapiens
agctcatggcccatt

SEQ ID NO: 1818348 - DNA, 15 bp, Homo sapiens
gctcatggcccattt

SEQ ID NO: 1818349 - DNA, 15 bp, Homo sapiens
ctcatggcccatttc

SEQ ID NO: 1818350 - DNA, 15 bp, Homo sapiens
tcatggcccatttca

SEQ ID NO: 1818351 - DNA, 15 bp, Homo sapiens
catggcccatttcaa

SEQ ID NO: 1818352 - DNA, 15 bp, Homo sapiens
atggcccatttcaac

SEQ ID NO: 1818353 - DNA, 15 bp, Homo sapiens
tggcccatttcaaca

SEQ ID NO: 1818354 - DNA, 15 bp, Homo sapiens
ggcccatttcaacac

SEQ ID NO: 1818355 - DNA, 15 bp, Homo sapiens
gcccatttcaacact

SEQ ID NO: 1818356 - DNA, 15 bp, Homo sapiens
cccatttcaacactg

SEQ ID NO: 1818357 - DNA, 15 bp, Homo sapiens
ccatttcaacactgg

SEQ ID NO: 1818358 - DNA, 15 bp, Homo sapiens
catttcaacactgga

SEQ ID NO: 1818359 - DNA, 15 bp, Homo sapiens
atttcaacactggac

SEQ ID NO: 1818360 - DNA, 15 bp, Homo sapiens
tttcaacactggacg

SEQ ID NO: 1818361 - DNA, 15 bp, Homo sapiens
ttcaacactggacgg

SEQ ID NO: 1818362 - DNA, 15 bp, Homo sapiens
tcaacactggacggc

SEQ ID NO: 1818363 - DNA, 15 bp, Homo sapiens
caacactggacggcc

SEQ ID NO: 1818364 - DNA, 15 bp, Homo sapiens
aacactggacggccc

SEQ ID NO: 1818365 - DNA, 15 bp, Homo sapiens
acactggacggcccg

SEQ ID NO: 1818366 - DNA, 15 bp, Homo sapiens
cactggacggcccgt

SEQ ID NO: 1818367 - DNA, 15 bp, Homo sapiens
actggacggcccgtg

SEQ ID NO: 1818368 - DNA, 15 bp, Homo sapiens
ctggacggcccgtgg

SEQ ID NO: 1818369 - DNA, 15 bp, Homo sapiens
tggacggcccgtggc

SEQ ID NO: 1818370 - DNA, 15 bp, Homo sapiens
ggacggcccgtggcg

SEQ ID NO: 1818371 - DNA, 15 bp, Homo sapiens
gacggcccgtggcga

SEQ ID NO: 1818372 - DNA, 15 bp, Homo sapiens
acggcccgtggcgaa

SEQ ID NO: 1818373 - DNA, 15 bp, Homo sapiens
cggcccgtggcgaac

SEQ ID NO: 1818374 - DNA, 15 bp, Homo sapiens
ggcccgtggcgaacc

SEQ ID NO: 1818375 - DNA, 15 bp, Homo sapiens
gcccgtggcgaacct

SEQ ID NO: 1818376 - DNA, 15 bp, Homo sapiens
cccgtggcgaacctc

SEQ ID NO: 1818377 - DNA, 15 bp, Homo sapiens
ccgtggcgaacctcc

SEQ ID NO: 1818378 - DNA, 15 bp, Homo sapiens
cgtggcgaacctcca

SEQ ID NO: 1818379 - DNA, 15 bp, Homo sapiens
gtggcgaacctccac

SEQ ID NO: 1818380 - DNA, 15 bp, Homo sapiens
tggcgaacctccacc

SEQ ID NO: 1818381 - DNA, 15 bp, Homo sapiens
ggcgaacctccacca

SEQ ID NO: 1818382 - DNA, 15 bp, Homo sapiens
gcgaacctccaccac

SEQ ID NO: 1818383 - DNA, 15 bp, Homo sapiens
cgaacctccaccacg

SEQ ID NO: 1818384 - DNA, 15 bp, Homo sapiens
gaacctccaccacgt

SEQ ID NO: 1818385 - DNA, 15 bp, Homo sapiens
aacctccaccacgta

SEQ ID NO: 1818386 - DNA, 15 bp, Homo sapiens
acctccaccacgtag

SEQ ID NO: 1818387 - DNA, 15 bp, Homo sapiens
cctccaccacgtaga

SEQ ID NO: 1818388 - DNA, 15 bp, Homo sapiens
ctccaccacgtagag

SEQ ID NO: 1818389 - DNA, 15 bp, Homo sapiens
tccaccacgtagaga

SEQ ID NO: 1818390 - DNA, 15 bp, Homo sapiens
ccaccacgtagagac

SEQ ID NO: 1818391 - DNA, 15 bp, Homo sapiens
caccacgtagagact

SEQ ID NO: 1818392 - DNA, 15 bp, Homo sapiens
accacgtagagactc

SEQ ID NO: 1818393 - DNA, 15 bp, Homo sapiens
ccacgtagagactcc

SEQ ID NO: 1818394 - DNA, 15 bp, Homo sapiens
cacgtagagactcct

SEQ ID NO: 1818395 - DNA, 15 bp, Homo sapiens
acgtagagactcctc

SEQ ID NO: 1818396 - DNA, 15 bp, Homo sapiens
cgtagagactcctct

SEQ ID NO: 1818397 - DNA, 15 bp, Homo sapiens
gtagagactcctctg

SEQ ID NO: 1818398 - DNA, 15 bp, Homo sapiens
tagagactcctctgt

SEQ ID NO: 1818399 - DNA, 15 bp, Homo sapiens
agagactcctctgta

SEQ ID NO: 1818400 - DNA, 15 bp, Homo sapiens
gagactcctctgtag

SEQ ID NO: 1818401 - DNA, 15 bp, Homo sapiens
agactcctctgtaga

SEQ ID NO: 1818402 - DNA, 15 bp, Homo sapiens
gactcctctgtagat

SEQ ID NO: 1818403 - DNA, 15 bp, Homo sapiens
actcctctgtagatg

SEQ ID NO: 1818404 - DNA, 15 bp, Homo sapiens
ctcctctgtagatgg

SEQ ID NO: 1818405 - DNA, 15 bp, Homo sapiens
tcctctgtagatggg

SEQ ID NO: 1818406 - DNA, 15 bp, Homo sapiens
cctctgtagatgggt

SEQ ID NO: 1818407 - DNA, 15 bp, Homo sapiens
ctctgtagatgggtg

SEQ ID NO: 1818408 - DNA, 15 bp, Homo sapiens
tctgtagatgggtgg

SEQ ID NO: 1818409 - DNA, 15 bp, Homo sapiens
ctgtagatgggtggc

SEQ ID NO: 1818410 - DNA, 15 bp, Homo sapiens
tgtagatgggtggct

SEQ ID NO: 1818411 - DNA, 15 bp, Homo sapiens
gtagatgggtggctg

SEQ ID NO: 1818412 - DNA, 15 bp, Homo sapiens
tagatgggtggctga

SEQ ID NO: 1818413 - DNA, 15 bp, Homo sapiens
agatgggtggctgac

SEQ ID NO: 1818414 - DNA, 15 bp, Homo sapiens
gatgggtggctgact

SEQ ID NO: 1818415 - DNA, 15 bp, Homo sapiens
atgggtggctgactt

SEQ ID NO: 1818416 - DNA, 15 bp, Homo sapiens
tgggtggctgacttt

SEQ ID NO: 1818417 - DNA, 15 bp, Homo sapiens
gggtggctgactttt

SEQ ID NO: 1818418 - DNA, 15 bp, Homo sapiens
ggtggctgacttttg

SEQ ID NO: 1818419 - DNA, 15 bp, Homo sapiens
gtggctgacttttgc

SEQ ID NO: 1818420 - DNA, 15 bp, Homo sapiens
tggctgacttttgcc

SEQ ID NO: 1818421 - DNA, 15 bp, Homo sapiens
ggctgacttttgcca

SEQ ID NO: 1818422 - DNA, 15 bp, Homo sapiens
gctgacttttgccag

SEQ ID NO: 1818423 - DNA, 15 bp, Homo sapiens
ctgacttttgccagt

SEQ ID NO: 1818424 - DNA, 15 bp, Homo sapiens
tgacttttgccagtc

SEQ ID NO: 1818425 - DNA, 15 bp, Homo sapiens
gacttttgccagtct

SEQ ID NO: 1818426 - DNA, 15 bp, Homo sapiens
acttttgccagtctc

SEQ ID NO: 1818427 - DNA, 15 bp, Homo sapiens
cttttgccagtctcc

SEQ ID NO: 1818428 - DNA, 15 bp, Homo sapiens
ttttgccagtctcct

SEQ ID NO: 1818429 - DNA, 15 bp, Homo sapiens
tttgccagtctcctg

SEQ ID NO: 1818430 - DNA, 15 bp, Homo sapiens
ttgccagtctcctgt

SEQ ID NO: 1818431 - DNA, 15 bp, Homo sapiens
tgccagtctcctgtg

SEQ ID NO: 1818432 - DNA, 15 bp, Homo sapiens
gccagtctcctgtga

SEQ ID NO: 1818433 - DNA, 15 bp, Homo sapiens
ccagtctcctgtgag

SEQ ID NO: 1818434 - DNA, 15 bp, Homo sapiens
cagtctcctgtgaga

SEQ ID NO: 1818435 - DNA, 15 bp, Homo sapiens
agtctcctgtgagaa

SEQ ID NO: 1818436 - DNA, 15 bp, Homo sapiens
gtctcctgtgagaag

SEQ ID NO: 1818437 - DNA, 15 bp, Homo sapiens
tctcctgtgagaaga

SEQ ID NO: 1818438 - DNA, 15 bp, Homo sapiens
ctcctgtgagaagag

SEQ ID NO: 1818439 - DNA, 15 bp, Homo sapiens
tcctgtgagaagaga

SEQ ID NO: 1818440 - DNA, 15 bp, Homo sapiens
cctgtgagaagagaa

SEQ ID NO: 1818441 - DNA, 15 bp, Homo sapiens
ctgtgagaagagaaa

SEQ ID NO: 1818442 - DNA, 15 bp, Homo sapiens
tgtgagaagagaaaa

SEQ ID NO: 1818443 - DNA, 15 bp, Homo sapiens
gtgagaagagaaaaa

SEQ ID NO: 1818444 - DNA, 15 bp, Homo sapiens
tgagaagagaaaaat

SEQ ID NO: 1818445 - DNA, 15 bp, Homo sapiens
gagaagagaaaaatc

SEQ ID NO: 1818446 - DNA, 15 bp, Homo sapiens
agaagagaaaaatct

SEQ ID NO: 1818447 - DNA, 15 bp, Homo sapiens
gaagagaaaaatctt

SEQ ID NO: 1818448 - DNA, 15 bp, Homo sapiens
aagagaaaaatcttg

SEQ ID NO: 1818449 - DNA, 15 bp, Homo sapiens
agagaaaaatcttgt

SEQ ID NO: 1818450 - DNA, 15 bp, Homo sapiens
gagaaaaatcttgtt

SEQ ID NO: 1818451 - DNA, 15 bp, Homo sapiens
agaaaaatcttgttc

SEQ ID NO: 1818452 - DNA, 15 bp, Homo sapiens
gaaaaatcttgttcc

SEQ ID NO: 1818453 - DNA, 15 bp, Homo sapiens
aaaaatcttgttcca

SEQ ID NO: 1818454 - DNA, 15 bp, Homo sapiens
aaaatcttgttccag

SEQ ID NO: 1818455 - DNA, 15 bp, Homo sapiens
aaatcttgttccaga

SEQ ID NO: 1818456 - DNA, 15 bp, Homo sapiens
aatcttgttccagaa

SEQ ID NO: 1818457 - DNA, 15 bp, Homo sapiens
atcttgttccagaaa

SEQ ID NO: 1818458 - DNA, 15 bp, Homo sapiens
tcttgttccagaaaa

SEQ ID NO: 1818459 - DNA, 15 bp, Homo sapiens
cttgttccagaaaag

SEQ ID NO: 1818460 - DNA, 15 bp, Homo sapiens
ttgttccagaaaaga

SEQ ID NO: 1818461 - DNA, 15 bp, Homo sapiens
tgttccagaaaagaa

SEQ ID NO: 1818462 - DNA, 15 bp, Homo sapiens
gttccagaaaagaac

SEQ ID NO: 1818463 - DNA, 15 bp, Homo sapiens
ttccagaaaagaacc

SEQ ID NO: 1818464 - DNA, 15 bp, Homo sapiens
tccagaaaagaacca

SEQ ID NO: 1818465 - DNA, 15 bp, Homo sapiens
ccagaaaagaaccac

SEQ ID NO: 1818466 - DNA, 15 bp, Homo sapiens
cagaaaagaaccact

SEQ ID NO: 1818467 - DNA, 15 bp, Homo sapiens
agaaaagaaccactg

SEQ ID NO: 1818468 - DNA, 15 bp, Homo sapiens
gaaaagaaccactgt

SEQ ID NO: 1818469 - DNA, 15 bp, Homo sapiens
aaaagaaccactgtc

SEQ ID NO: 1818470 - DNA, 15 bp, Homo sapiens
aaagaaccactgtca

SEQ ID NO: 1818471 - DNA, 15 bp, Homo sapiens
aagaaccactgtcaa

SEQ ID NO: 1818472 - DNA, 15 bp, Homo sapiens
agaaccactgtcaac

SEQ ID NO: 1818473 - DNA, 15 bp, Homo sapiens
gaaccactgtcaact

SEQ ID NO: 1818474 - DNA, 15 bp, Homo sapiens
aaccactgtcaactg

SEQ ID NO: 1818475 - DNA, 15 bp, Homo sapiens
accactgtcaactgt

SEQ ID NO: 1818476 - DNA, 15 bp, Homo sapiens
ccactgtcaactgtg

SEQ ID NO: 1818477 - DNA, 15 bp, Homo sapiens
cactgtcaactgtgg

SEQ ID NO: 1818478 - DNA, 15 bp, Homo sapiens
actgtcaactgtgga

SEQ ID NO: 1818479 - DNA, 15 bp, Homo sapiens
ctgtcaactgtggat

SEQ ID NO: 1818480 - DNA, 15 bp, Homo sapiens
tgtcaactgtggatg

SEQ ID NO: 1818481 - DNA, 15 bp, Homo sapiens
gtcaactgtggatgc

SEQ ID NO: 1818482 - DNA, 15 bp, Homo sapiens
tcaactgtggatgca

SEQ ID NO: 1818483 - DNA, 15 bp, Homo sapiens
caactgtggatgcat

SEQ ID NO: 1818484 - DNA, 15 bp, Homo sapiens
aactgtggatgcata

SEQ ID NO: 1818485 - DNA, 15 bp, Homo sapiens
actgtggatgcatat

SEQ ID NO: 1818486 - DNA, 15 bp, Homo sapiens
ctgtggatgcatatt

SEQ ID NO: 1818487 - DNA, 15 bp, Homo sapiens
tgtggatgcatattt

SEQ ID NO: 1818488 - DNA, 15 bp, Homo sapiens
gtggatgcatatttt

SEQ ID NO: 1818489 - DNA, 15 bp, Homo sapiens
tggatgcatattttc

SEQ ID NO: 1818490 - DNA, 15 bp, Homo sapiens
ggatgcatattttca

SEQ ID NO: 1818491 - DNA, 15 bp, Homo sapiens
gatgcatattttcag

SEQ ID NO: 1818492 - DNA, 15 bp, Homo sapiens
atgcatattttcagg

SEQ ID NO: 1818493 - DNA, 15 bp, Homo sapiens
tgcatattttcaggg

SEQ ID NO: 1818494 - DNA, 15 bp, Homo sapiens
gcatattttcagggg

SEQ ID NO: 1818495 - DNA, 15 bp, Homo sapiens
catattttcaggggg

SEQ ID NO: 1818496 - DNA, 15 bp, Homo sapiens
atattttcaggggga

SEQ ID NO: 1818497 - DNA, 15 bp, Homo sapiens
tattttcagggggag

SEQ ID NO: 1818498 - DNA, 15 bp, Homo sapiens
attttcagggggagg

SEQ ID NO: 1818499 - DNA, 15 bp, Homo sapiens
ttttcagggggagga

SEQ ID NO: 1818500 - DNA, 15 bp, Homo sapiens
tttcagggggaggaa

SEQ ID NO: 1818501 - DNA, 15 bp, Homo sapiens
ttcagggggaggaaa

SEQ ID NO: 1818502 - DNA, 15 bp, Homo sapiens
tcagggggaggaaat

SEQ ID NO: 1818503 - DNA, 15 bp, Homo sapiens
cagggggaggaaatg

SEQ ID NO: 1818504 - DNA, 15 bp, Homo sapiens
agggggaggaaatgg

SEQ ID NO: 1818505 - DNA, 15 bp, Homo sapiens
gggggaggaaatgga

SEQ ID NO: 1818506 - DNA, 15 bp, Homo sapiens
ggggaggaaatggaa

SEQ ID NO: 1818507 - DNA, 15 bp, Homo sapiens
gggaggaaatggaac

SEQ ID NO: 1818508 - DNA, 15 bp, Homo sapiens
ggaggaaatggaacg

SEQ ID NO: 1818509 - DNA, 15 bp, Homo sapiens
gaggaaatggaacga

SEQ ID NO: 1818510 - DNA, 15 bp, Homo sapiens
aggaaatggaacgag

SEQ ID NO: 1818511 - DNA, 15 bp, Homo sapiens
ggaaatggaacgaga

SEQ ID NO: 1818512 - DNA, 15 bp, Homo sapiens
gaaatggaacgagag

SEQ ID NO: 1818513 - DNA, 15 bp, Homo sapiens
aaatggaacgagagg

SEQ ID NO: 1818514 - DNA, 15 bp, Homo sapiens
aatggaacgagaggg

SEQ ID NO: 1818515 - DNA, 15 bp, Homo sapiens
atggaacgagagggg

SEQ ID NO: 1818516 - DNA, 15 bp, Homo sapiens
tggaacgagaggggg

SEQ ID NO: 1818517 - DNA, 15 bp, Homo sapiens
ggaacgagaggggga

SEQ ID NO: 1818518 - DNA, 15 bp, Homo sapiens
gaacgagagggggag

SEQ ID NO: 1818519 - DNA, 15 bp, Homo sapiens
aacgagagggggagc

SEQ ID NO: 1818520 - DNA, 15 bp, Homo sapiens
acgagagggggagca

SEQ ID NO: 1818521 - DNA, 15 bp, Homo sapiens
cgagagggggagcac

SEQ ID NO: 1818522 - DNA, 15 bp, Homo sapiens
gagagggggagcacc

SEQ ID NO: 1818523 - DNA, 15 bp, Homo sapiens
agagggggagcaccc

SEQ ID NO: 1818524 - DNA, 15 bp, Homo sapiens
gagggggagcaccct

SEQ ID NO: 1818525 - DNA, 15 bp, Homo sapiens
agggggagcaccctc

SEQ ID NO: 1818526 - DNA, 15 bp, Homo sapiens
gggggagcaccctca

SEQ ID NO: 1818527 - DNA, 15 bp, Homo sapiens
ggggagcaccctcag

SEQ ID NO: 1818528 - DNA, 15 bp, Homo sapiens
gggagcaccctcagt

SEQ ID NO: 1818529 - DNA, 15 bp, Homo sapiens
ggagcaccctcagtt

SEQ ID NO: 1818530 - DNA, 15 bp, Homo sapiens
gagcaccctcagttt

SEQ ID NO: 1818531 - DNA, 15 bp, Homo sapiens
agcaccctcagttta

SEQ ID NO: 1818532 - DNA, 15 bp, Homo sapiens
gcaccctcagtttac

SEQ ID NO: 1818533 - DNA, 15 bp, Homo sapiens
caccctcagtttaca

SEQ ID NO: 1818534 - DNA, 15 bp, Homo sapiens
accctcagtttacag

SEQ ID NO: 1818535 - DNA, 15 bp, Homo sapiens
ccctcagtttacaga

SEQ ID NO: 1818536 - DNA, 15 bp, Homo sapiens
cctcagtttacagag

SEQ ID NO: 1818537 - DNA, 15 bp, Homo sapiens
ctcagtttacagagc

SEQ ID NO: 1818538 - DNA, 15 bp, Homo sapiens
tcagtttacagagcg

SEQ ID NO: 1818539 - DNA, 15 bp, Homo sapiens
cagtttacagagcgg

SEQ ID NO: 1818540 - DNA, 15 bp, Homo sapiens
agtttacagagcggg

SEQ ID NO: 1818541 - DNA, 15 bp, Homo sapiens
gtttacagagcgggg

SEQ ID NO: 1818542 - DNA, 15 bp, Homo sapiens
tttacagagcggggg

SEQ ID NO: 1818543 - DNA, 15 bp, Homo sapiens
ttacagagcgggggg

SEQ ID NO: 1818544 - DNA, 15 bp, Homo sapiens
tacagagcggggggt

SEQ ID NO: 1818545 - DNA, 15 bp, Homo sapiens
acagagcggggggta

SEQ ID NO: 1818546 - DNA, 15 bp, Homo sapiens
cagagcggggggtaa

SEQ ID NO: 1818547 - DNA, 15 bp, Homo sapiens
agagcggggggtaac

SEQ ID NO: 1818548 - DNA, 15 bp, Homo sapiens
gagcggggggtaacc

SEQ ID NO: 1818549 - DNA, 15 bp, Homo sapiens
agcggggggtaacca

SEQ ID NO: 1818550 - DNA, 15 bp, Homo sapiens
gcggggggtaaccag

SEQ ID NO: 1818551 - DNA, 15 bp, Homo sapiens
cggggggtaaccagg

SEQ ID NO: 1818552 - DNA, 15 bp, Homo sapiens
ggggggtaaccaggc

SEQ ID NO: 1818553 - DNA, 15 bp, Homo sapiens
gggggtaaccaggca

SEQ ID NO: 1818554 - DNA, 15 bp, Homo sapiens
ggggtaaccaggcag

SEQ ID NO: 1818555 - DNA, 15 bp, Homo sapiens
gggtaaccaggcaga

SEQ ID NO: 1818556 - DNA, 15 bp, Homo sapiens
ggtaaccaggcagac

SEQ ID NO: 1818557 - DNA, 15 bp, Homo sapiens
gtaaccaggcagaca

SEQ ID NO: 1818558 - DNA, 15 bp, Homo sapiens
taaccaggcagacaa

SEQ ID NO: 1818559 - DNA, 15 bp, Homo sapiens
aaccaggcagacaag

SEQ ID NO: 1818560 - DNA, 15 bp, Homo sapiens
accaggcagacaagg

SEQ ID NO: 1818561 - DNA, 15 bp, Homo sapiens
ccaggcagacaaggc

SEQ ID NO: 1818562 - DNA, 15 bp, Homo sapiens
caggcagacaaggcc

SEQ ID NO: 1818563 - DNA, 15 bp, Homo sapiens
aggcagacaaggccg

SEQ ID NO: 1818564 - DNA, 15 bp, Homo sapiens
ggcagacaaggccgg

SEQ ID NO: 1818565 - DNA, 15 bp, Homo sapiens
gcagacaaggccggg

SEQ ID NO: 1818566 - DNA, 15 bp, Homo sapiens
cagacaaggccgggg

SEQ ID NO: 1818567 - DNA, 15 bp, Homo sapiens
agacaaggccggggc

SEQ ID NO: 1818568 - DNA, 15 bp, Homo sapiens
gacaaggccggggcc

SEQ ID NO: 1818569 - DNA, 15 bp, Homo sapiens
acaaggccggggcca

SEQ ID NO: 1818570 - DNA, 15 bp, Homo sapiens
caaggccggggccac

SEQ ID NO: 1818571 - DNA, 15 bp, Homo sapiens
aaggccggggccacg

SEQ ID NO: 1818572 - DNA, 15 bp, Homo sapiens
aggccggggccacgg

SEQ ID NO: 1818573 - DNA, 15 bp, Homo sapiens
ggccggggccacggc

SEQ ID NO: 1818574 - DNA, 15 bp, Homo sapiens
gccggggccacggcg

SEQ ID NO: 1818575 - DNA, 15 bp, Homo sapiens
ccggggccacggcga

SEQ ID NO: 1818576 - DNA, 15 bp, Homo sapiens
cggggccacggcgaa

SEQ ID NO: 1818577 - DNA, 15 bp, Homo sapiens
ggggccacggcgaag

SEQ ID NO: 1818578 - DNA, 15 bp, Homo sapiens
gggccacggcgaagt

SEQ ID NO: 1818579 - DNA, 15 bp, Homo sapiens
tgacatgagagagac

SEQ ID NO: 1818580 - DNA, 15 bp, Homo sapiens
gacatgagagagact

SEQ ID NO: 1818581 - DNA, 15 bp, Homo sapiens
acatgagagagactc

SEQ ID NO: 1818582 - DNA, 15 bp, Homo sapiens
catgagagagactct

SEQ ID NO: 1818583 - DNA, 15 bp, Homo sapiens
atgagagagactctg

SEQ ID NO: 1818584 - DNA, 15 bp, Homo sapiens
tgagagagactctgt

SEQ ID NO: 1818585 - DNA, 15 bp, Homo sapiens
gagactctgtctcac

SEQ ID NO: 1818586 - DNA, 15 bp, Homo sapiens
agactctgtctcaca

SEQ ID NO: 1818587 - DNA, 15 bp, Homo sapiens
gactctgtctcacaa

SEQ ID NO: 1818588 - DNA, 15 bp, Homo sapiens
actctgtctcacaaa

SEQ ID NO: 1818589 - DNA, 15 bp, Homo sapiens
ctctgtctcacaaaa

SEQ ID NO: 1818590 - DNA, 15 bp, Homo sapiens
tctgtctcacaaaag

SEQ ID NO: 1818591 - DNA, 15 bp, Homo sapiens
ctgtctcacaaaaga

SEQ ID NO: 1818592 - DNA, 15 bp, Homo sapiens
tgtctcacaaaagaa

SEQ ID NO: 1818593 - DNA, 15 bp, Homo sapiens
gtctcacaaaagaaa

SEQ ID NO: 1818594 - DNA, 15 bp, Homo sapiens
tctcacaaaagaaaa

SEQ ID NO: 1818595 - DNA, 15 bp, Homo sapiens
ctcacaaaagaaaaa

SEQ ID NO: 1818596 - DNA, 15 bp, Homo sapiens
tcacaaaagaaaaag

SEQ ID NO: 1818597 - DNA, 15 bp, Homo sapiens
cacaaaagaaaaaga

SEQ ID NO: 1818598 - DNA, 15 bp, Homo sapiens
acaaaagaaaaagaa

SEQ ID NO: 1818599 - DNA, 15 bp, Homo sapiens
caaaagaaaaagaaa

SEQ ID NO: 1818600 - DNA, 15 bp, Homo sapiens
aaaaaaaagaaaacc

SEQ ID NO: 1818601 - DNA, 15 bp, Homo sapiens
aaaaaaagaaaacca

SEQ ID NO: 1818602 - DNA, 15 bp, Homo sapiens
aaaaagaaaaccaat

SEQ ID NO: 1818603 - DNA, 15 bp, Homo sapiens
aaaagaaaaccaata

SEQ ID NO: 1818604 - DNA, 15 bp, Homo sapiens
aaagaaaaccaatag

SEQ ID NO: 1818605 - DNA, 15 bp, Homo sapiens
aagaaaaccaataga

SEQ ID NO: 1818606 - DNA, 15 bp, Homo sapiens
gaaaaccaatagaaa

SEQ ID NO: 1818607 - DNA, 15 bp, Homo sapiens
aaaaccaatagaaag

SEQ ID NO: 1818608 - DNA, 15 bp, Homo sapiens
aaaccaatagaaagg

SEQ ID NO: 1818609 - DNA, 15 bp, Homo sapiens
aaccaatagaaaggc

SEQ ID NO: 1818610 - DNA, 15 bp, Homo sapiens
accaatagaaaggct

SEQ ID NO: 1818611 - DNA, 15 bp, Homo sapiens
ccaatagaaaggctg

SEQ ID NO: 1818612 - DNA, 15 bp, Homo sapiens
caatagaaaggctgg

SEQ ID NO: 1818613 - DNA, 15 bp, Homo sapiens
aatagaaaggctggg

SEQ ID NO: 1818614 - DNA, 15 bp, Homo sapiens
atagaaaggctgggc

SEQ ID NO: 1818615 - DNA, 15 bp, Homo sapiens
tagaaaggctgggcg

SEQ ID NO: 1818616 - DNA, 15 bp, Homo sapiens
agaaaggctgggcgt

SEQ ID NO: 1818617 - DNA, 15 bp, Homo sapiens
gaaaggctgggcgtg

SEQ ID NO: 1818618 - DNA, 15 bp, Homo sapiens
aaaggctgggcgtgg

SEQ ID NO: 1818619 - DNA, 15 bp, Homo sapiens
aaggctgggcgtggt

SEQ ID NO: 1818620 - DNA, 15 bp, Homo sapiens
aggctgggcgtggtg

SEQ ID NO: 1818621 - DNA, 15 bp, Homo sapiens
cctgtaatcccagcg

SEQ ID NO: 1818622 - DNA, 15 bp, Homo sapiens
ctgtaatcccagcgc

SEQ ID NO: 1818623 - DNA, 15 bp, Homo sapiens
tgtaatcccagcgct

SEQ ID NO: 1818624 - DNA, 15 bp, Homo sapiens
gtaatcccagcgctt

SEQ ID NO: 1818625 - DNA, 15 bp, Homo sapiens
taatcccagcgcttt

SEQ ID NO: 1818626 - DNA, 15 bp, Homo sapiens
aatcccagcgctttg

SEQ ID NO: 1818627 - DNA, 15 bp, Homo sapiens
atcccagcgctttgg

SEQ ID NO: 1818628 - DNA, 15 bp, Homo sapiens
tcccagcgctttggg

SEQ ID NO: 1818629 - DNA, 15 bp, Homo sapiens
cccagcgctttgggt

SEQ ID NO: 1818630 - DNA, 15 bp, Homo sapiens
ccagcgctttgggtg

SEQ ID NO: 1818631 - DNA, 15 bp, Homo sapiens
cagcgctttgggtgg

SEQ ID NO: 1818632 - DNA, 15 bp, Homo sapiens
agcgctttgggtggt

SEQ ID NO: 1818633 - DNA, 15 bp, Homo sapiens
gcgctttgggtggtc

SEQ ID NO: 1818634 - DNA, 15 bp, Homo sapiens
cgctttgggtggtcg

SEQ ID NO: 1818635 - DNA, 15 bp, Homo sapiens
gctttgggtggtcga

SEQ ID NO: 1818636 - DNA, 15 bp, Homo sapiens
ctttgggtggtcgag

SEQ ID NO: 1818637 - DNA, 15 bp, Homo sapiens
tttgggtggtcgagg

SEQ ID NO: 1818638 - DNA, 15 bp, Homo sapiens
ttgggtggtcgaggc

SEQ ID NO: 1818639 - DNA, 15 bp, Homo sapiens
tgggtggtcgaggca

SEQ ID NO: 1818640 - DNA, 15 bp, Homo sapiens
gggtggtcgaggcag

SEQ ID NO: 1818641 - DNA, 15 bp, Homo sapiens
ggtggtcgaggcagg

SEQ ID NO: 1818642 - DNA, 15 bp, Homo sapiens
gtggtcgaggcaggt

SEQ ID NO: 1818643 - DNA, 15 bp, Homo sapiens
tggtcgaggcaggta

SEQ ID NO: 1818644 - DNA, 15 bp, Homo sapiens
ggtcgaggcaggtag

SEQ ID NO: 1818645 - DNA, 15 bp, Homo sapiens
gtcgaggcaggtagg

SEQ ID NO: 1818646 - DNA, 15 bp, Homo sapiens
tcgaggcaggtaggt

SEQ ID NO: 1818647 - DNA, 15 bp, Homo sapiens
cgaggcaggtaggtc

SEQ ID NO: 1818648 - DNA, 15 bp, Homo sapiens
gaggcaggtaggtcg

SEQ ID NO: 1818649 - DNA, 15 bp, Homo sapiens
aggcaggtaggtcgc

SEQ ID NO: 1818650 - DNA, 15 bp, Homo sapiens
ggcaggtaggtcgct

SEQ ID NO: 1818651 - DNA, 15 bp, Homo sapiens
gcaggtaggtcgctt

SEQ ID NO: 1818652 - DNA, 15 bp, Homo sapiens
caggtaggtcgcttg

SEQ ID NO: 1818653 - DNA, 15 bp, Homo sapiens
aggtaggtcgcttga

SEQ ID NO: 1818654 - DNA, 15 bp, Homo sapiens
ggtaggtcgcttgag

SEQ ID NO: 1818655 - DNA, 15 bp, Homo sapiens
gtaggtcgcttgagg

SEQ ID NO: 1818656 - DNA, 15 bp, Homo sapiens
taggtcgcttgaggc

SEQ ID NO: 1818657 - DNA, 15 bp, Homo sapiens
aggtcgcttgaggcc

SEQ ID NO: 1818658 - DNA, 15 bp, Homo sapiens
ggtcgcttgaggcca

SEQ ID NO: 1818659 - DNA, 15 bp, Homo sapiens
gtcgcttgaggccag

SEQ ID NO: 1818660 - DNA, 15 bp, Homo sapiens
cttgaggccaggaga

SEQ ID NO: 1818661 - DNA, 15 bp, Homo sapiens
ttgaggccaggagat

SEQ ID NO: 1818662 - DNA, 15 bp, Homo sapiens
tgaggccaggagatc

SEQ ID NO: 1818663 - DNA, 15 bp, Homo sapiens
gaggccaggagatcg

SEQ ID NO: 1818664 - DNA, 15 bp, Homo sapiens
aggccaggagatcga

SEQ ID NO: 1818665 - DNA, 15 bp, Homo sapiens
ggccaggagatcgag

SEQ ID NO: 1818666 - DNA, 15 bp, Homo sapiens
gccaggagatcgaga

SEQ ID NO: 1818667 - DNA, 15 bp, Homo sapiens
ccaggagatcgagac

SEQ ID NO: 1818668 - DNA, 15 bp, Homo sapiens
ggagatcgagaccag

SEQ ID NO: 1818669 - DNA, 15 bp, Homo sapiens
gagatcgagaccagc

SEQ ID NO: 1818670 - DNA, 15 bp, Homo sapiens
agatcgagaccagcc

SEQ ID NO: 1818671 - DNA, 15 bp, Homo sapiens
gatcgagaccagcct

SEQ ID NO: 1818672 - DNA, 15 bp, Homo sapiens
atcgagaccagcctg

SEQ ID NO: 1818673 - DNA, 15 bp, Homo sapiens
gccaacatggagaac

SEQ ID NO: 1818674 - DNA, 15 bp, Homo sapiens
ccaacatggagaaca

SEQ ID NO: 1818675 - DNA, 15 bp, Homo sapiens
caacatggagaacat

SEQ ID NO: 1818676 - DNA, 15 bp, Homo sapiens
aacatggagaacatg

SEQ ID NO: 1818677 - DNA, 15 bp, Homo sapiens
acatggagaacatgg

SEQ ID NO: 1818678 - DNA, 15 bp, Homo sapiens
catggagaacatggc

SEQ ID NO: 1818679 - DNA, 15 bp, Homo sapiens
atggagaacatggcc

SEQ ID NO: 1818680 - DNA, 15 bp, Homo sapiens
tggagaacatggcca

SEQ ID NO: 1818681 - DNA, 15 bp, Homo sapiens
ggagaacatggccaa

SEQ ID NO: 1818682 - DNA, 15 bp, Homo sapiens
gagaacatggccaac

SEQ ID NO: 1818683 - DNA, 15 bp, Homo sapiens
agaacatggccaact

SEQ ID NO: 1818684 - DNA, 15 bp, Homo sapiens
gaacatggccaactc

SEQ ID NO: 1818685 - DNA, 15 bp, Homo sapiens
aacatggccaactcg

SEQ ID NO: 1818686 - DNA, 15 bp, Homo sapiens
acatggccaactcgt

SEQ ID NO: 1818687 - DNA, 15 bp, Homo sapiens
catggccaactcgtc

SEQ ID NO: 1818688 - DNA, 15 bp, Homo sapiens
atggccaactcgtct

SEQ ID NO: 1818689 - DNA, 15 bp, Homo sapiens
tggccaactcgtctc

SEQ ID NO: 1818690 - DNA, 15 bp, Homo sapiens
ggccaactcgtctct

SEQ ID NO: 1818691 - DNA, 15 bp, Homo sapiens
gccaactcgtctcta

SEQ ID NO: 1818692 - DNA, 15 bp, Homo sapiens
ccaactcgtctctac

SEQ ID NO: 1818693 - DNA, 15 bp, Homo sapiens
caactcgtctctact

SEQ ID NO: 1818694 - DNA, 15 bp, Homo sapiens
aactcgtctctacta

SEQ ID NO: 1818695 - DNA, 15 bp, Homo sapiens
actcgtctctactaa

SEQ ID NO: 1818696 - DNA, 15 bp, Homo sapiens
ctaaaaatacaaaga

SEQ ID NO: 1818697 - DNA, 15 bp, Homo sapiens
taaaaatacaaagat

SEQ ID NO: 1818698 - DNA, 15 bp, Homo sapiens
aaaaatacaaagatt

SEQ ID NO: 1818699 - DNA, 15 bp, Homo sapiens
aaaatacaaagatta

SEQ ID NO: 1818700 - DNA, 15 bp, Homo sapiens
aaatacaaagattag

SEQ ID NO: 1818701 - DNA, 15 bp, Homo sapiens
aatacaaagattagc

SEQ ID NO: 1818702 - DNA, 15 bp, Homo sapiens
atacaaagattagct

SEQ ID NO: 1818703 - DNA, 15 bp, Homo sapiens
tacaaagattagctg

SEQ ID NO: 1818704 - DNA, 15 bp, Homo sapiens
acaaagattagctgg

SEQ ID NO: 1818705 - DNA, 15 bp, Homo sapiens
caaagattagctggg

SEQ ID NO: 1818706 - DNA, 15 bp, Homo sapiens
aaagattagctgggc

SEQ ID NO: 1818707 - DNA, 15 bp, Homo sapiens
aagattagctgggca

SEQ ID NO: 1818708 - DNA, 15 bp, Homo sapiens
agattagctgggcat

SEQ ID NO: 1818709 - DNA, 15 bp, Homo sapiens
gattagctgggcatg

SEQ ID NO: 1818710 - DNA, 15 bp, Homo sapiens
ggagaattgcttgag

SEQ ID NO: 1818711 - DNA, 15 bp, Homo sapiens
gagaattgcttgagt

SEQ ID NO: 1818712 - DNA, 15 bp, Homo sapiens
agaattgcttgagtc

SEQ ID NO: 1818713 - DNA, 15 bp, Homo sapiens
gaattgcttgagtct

SEQ ID NO: 1818714 - DNA, 15 bp, Homo sapiens
aattgcttgagtctg

SEQ ID NO: 1818715 - DNA, 15 bp, Homo sapiens
attgcttgagtctgg

SEQ ID NO: 1818716 - DNA, 15 bp, Homo sapiens
ttgcttgagtctggg

SEQ ID NO: 1818717 - DNA, 15 bp, Homo sapiens
tgcttgagtctggga

SEQ ID NO: 1818718 - DNA, 15 bp, Homo sapiens
gcttgagtctgggag

SEQ ID NO: 1818719 - DNA, 15 bp, Homo sapiens
cttgagtctgggagg

SEQ ID NO: 1818720 - DNA, 15 bp, Homo sapiens
ttgagtctgggaggt

SEQ ID NO: 1818721 - DNA, 15 bp, Homo sapiens
tgagtctgggaggtt

SEQ ID NO: 1818722 - DNA, 15 bp, Homo sapiens
gagtctgggaggttg

SEQ ID NO: 1818723 - DNA, 15 bp, Homo sapiens
agtctgggaggttga

SEQ ID NO: 1818724 - DNA, 15 bp, Homo sapiens
gtctgggaggttgag

SEQ ID NO: 1818725 - DNA, 15 bp, Homo sapiens
tctgggaggttgagg

SEQ ID NO: 1818726 - DNA, 15 bp, Homo sapiens
ctgggaggttgaggc

SEQ ID NO: 1818727 - DNA, 15 bp, Homo sapiens
tgggaggttgaggct

SEQ ID NO: 1818728 - DNA, 15 bp, Homo sapiens
gggaggttgaggctg

SEQ ID NO: 1818729 - DNA, 15 bp, Homo sapiens
ggaggttgaggctgt

SEQ ID NO: 1818730 - DNA, 15 bp, Homo sapiens
gaggttgaggctgtg

SEQ ID NO: 1818731 - DNA, 15 bp, Homo sapiens
aggttgaggctgtgg

SEQ ID NO: 1818732 - DNA, 15 bp, Homo sapiens
ggttgaggctgtggt

SEQ ID NO: 1818733 - DNA, 15 bp, Homo sapiens
gttgaggctgtggta

SEQ ID NO: 1818734 - DNA, 15 bp, Homo sapiens
ttgaggctgtggtaa

SEQ ID NO: 1818735 - DNA, 15 bp, Homo sapiens
tgaggctgtggtaag

SEQ ID NO: 1818736 - DNA, 15 bp, Homo sapiens
gaggctgtggtaagc

SEQ ID NO: 1818737 - DNA, 15 bp, Homo sapiens
aggctgtggtaagca

SEQ ID NO: 1818738 - DNA, 15 bp, Homo sapiens
ggctgtggtaagcag

SEQ ID NO: 1818739 - DNA, 15 bp, Homo sapiens
gctgtggtaagcaga

SEQ ID NO: 1818740 - DNA, 15 bp, Homo sapiens
ctgtggtaagcagag

SEQ ID NO: 1818741 - DNA, 15 bp, Homo sapiens
tgtggtaagcagaga

SEQ ID NO: 1818742 - DNA, 15 bp, Homo sapiens
gtggtaagcagagat

SEQ ID NO: 1818743 - DNA, 15 bp, Homo sapiens
tggtaagcagagatc

SEQ ID NO: 1818744 - DNA, 15 bp, Homo sapiens
ggtaagcagagatcg

SEQ ID NO: 1818745 - DNA, 15 bp, Homo sapiens
gtaagcagagatcgt

SEQ ID NO: 1818746 - DNA, 15 bp, Homo sapiens
taagcagagatcgtg

SEQ ID NO: 1818747 - DNA, 15 bp, Homo sapiens
aagcagagatcgtgc

SEQ ID NO: 1818748 - DNA, 15 bp, Homo sapiens
agcagagatcgtgcc

SEQ ID NO: 1818749 - DNA, 15 bp, Homo sapiens
gcagagatcgtgcca

SEQ ID NO: 1818750 - DNA, 15 bp, Homo sapiens
cagagatcgtgccac

SEQ ID NO: 1818751 - DNA, 15 bp, Homo sapiens
agagatcgtgccact

SEQ ID NO: 1818752 - DNA, 15 bp, Homo sapiens
gtgccactgcactca

SEQ ID NO: 1818753 - DNA, 15 bp, Homo sapiens
tgccactgcactcac

SEQ ID NO: 1818754 - DNA, 15 bp, Homo sapiens
gccactgcactcact

SEQ ID NO: 1818755 - DNA, 15 bp, Homo sapiens
ccactgcactcactt

SEQ ID NO: 1818756 - DNA, 15 bp, Homo sapiens
cactgcactcacttc

SEQ ID NO: 1818757 - DNA, 15 bp, Homo sapiens
actgcactcacttca

SEQ ID NO: 1818758 - DNA, 15 bp, Homo sapiens
ctgcactcacttcag

SEQ ID NO: 1818759 - DNA, 15 bp, Homo sapiens
tgcactcacttcagc

SEQ ID NO: 1818760 - DNA, 15 bp, Homo sapiens
gcactcacttcagcc

SEQ ID NO: 1818761 - DNA, 15 bp, Homo sapiens
cactcacttcagcct

SEQ ID NO: 1818762 - DNA, 15 bp, Homo sapiens
actcacttcagcctg

SEQ ID NO: 1818763 - DNA, 15 bp, Homo sapiens
ctcacttcagcctgg

SEQ ID NO: 1818764 - DNA, 15 bp, Homo sapiens
tcacttcagcctgga

SEQ ID NO: 1818765 - DNA, 15 bp, Homo sapiens
cacttcagcctggat

SEQ ID NO: 1818766 - DNA, 15 bp, Homo sapiens
acttcagcctggatg

SEQ ID NO: 1818767 - DNA, 15 bp, Homo sapiens
cttcagcctggatga

SEQ ID NO: 1818768 - DNA, 15 bp, Homo sapiens
ttcagcctggatgac

SEQ ID NO: 1818769 - DNA, 15 bp, Homo sapiens
tcagcctggatgaca

SEQ ID NO: 1818770 - DNA, 15 bp, Homo sapiens
agcctggatgacagg

SEQ ID NO: 1818771 - DNA, 15 bp, Homo sapiens
gcctggatgacaggg

SEQ ID NO: 1818772 - DNA, 15 bp, Homo sapiens
cctggatgacagggc

SEQ ID NO: 1818773 - DNA, 15 bp, Homo sapiens
ctggatgacagggca

SEQ ID NO: 1818774 - DNA, 15 bp, Homo sapiens
tggatgacagggcaa

SEQ ID NO: 1818775 - DNA, 15 bp, Homo sapiens
ggatgacagggcaag

SEQ ID NO: 1818776 - DNA, 15 bp, Homo sapiens
gatgacagggcaaga

SEQ ID NO: 1818777 - DNA, 15 bp, Homo sapiens
atgacagggcaagac

SEQ ID NO: 1818778 - DNA, 15 bp, Homo sapiens
tgacagggcaagacc

SEQ ID NO: 1818779 - DNA, 15 bp, Homo sapiens
acagggcaagacccc

SEQ ID NO: 1818780 - DNA, 15 bp, Homo sapiens
cagggcaagacccca

SEQ ID NO: 1818781 - DNA, 15 bp, Homo sapiens
agggcaagaccccat

SEQ ID NO: 1818782 - DNA, 15 bp, Homo sapiens
gggcaagaccccatc

SEQ ID NO: 1818783 - DNA, 15 bp, Homo sapiens
ggcaagaccccatct

SEQ ID NO: 1818784 - DNA, 15 bp, Homo sapiens
caagaccccatctca

SEQ ID NO: 1818785 - DNA, 15 bp, Homo sapiens
aagaccccatctcaa

SEQ ID NO: 1818786 - DNA, 15 bp, Homo sapiens
aaaaaaaaaaactaa

SEQ ID NO: 1818787 - DNA, 15 bp, Homo sapiens
aaaaaaaaaactaat

SEQ ID NO: 1818788 - DNA, 15 bp, Homo sapiens
aaaaaaaaactaata

SEQ ID NO: 1818789 - DNA, 15 bp, Homo sapiens
aaaaaaaactaatag

SEQ ID NO: 1818790 - DNA, 15 bp, Homo sapiens
aaaaaaactaataga

SEQ ID NO: 1818791 - DNA, 15 bp, Homo sapiens
aaaaaactaatagaa

SEQ ID NO: 1818792 - DNA, 15 bp, Homo sapiens
aaaaactaatagaaa

SEQ ID NO: 1818793 - DNA, 15 bp, Homo sapiens
aaaactaatagaaaa

SEQ ID NO: 1818794 - DNA, 15 bp, Homo sapiens
aaactaatagaaaaa

SEQ ID NO: 1818795 - DNA, 15 bp, Homo sapiens
aactaatagaaaaag

SEQ ID NO: 1818796 - DNA, 15 bp, Homo sapiens
actaatagaaaaagg

SEQ ID NO: 1818797 - DNA, 15 bp, Homo sapiens
ctaatagaaaaaggt

SEQ ID NO: 1818798 - DNA, 15 bp, Homo sapiens
taatagaaaaaggtg

SEQ ID NO: 1818799 - DNA, 15 bp, Homo sapiens
aatagaaaaaggtgc

SEQ ID NO: 1818800 - DNA, 15 bp, Homo sapiens
atagaaaaaggtgct

SEQ ID NO: 1818801 - DNA, 15 bp, Homo sapiens
tagaaaaaggtgcta

SEQ ID NO: 1818802 - DNA, 15 bp, Homo sapiens
agaaaaaggtgctag

SEQ ID NO: 1818803 - DNA, 15 bp, Homo sapiens
gaaaaaggtgctagg

SEQ ID NO: 1818804 - DNA, 15 bp, Homo sapiens
aaaaaggtgctaggt

SEQ ID NO: 1818805 - DNA, 15 bp, Homo sapiens
aaaaggtgctaggtg

SEQ ID NO: 1818806 - DNA, 15 bp, Homo sapiens
aaaggtgctaggtgc

SEQ ID NO: 1818807 - DNA, 15 bp, Homo sapiens
aaggtgctaggtgcg

SEQ ID NO: 1818808 - DNA, 15 bp, Homo sapiens
aggtgctaggtgcga

SEQ ID NO: 1818809 - DNA, 15 bp, Homo sapiens
ggtgctaggtgcgat

SEQ ID NO: 1818810 - DNA, 15 bp, Homo sapiens
gtgctaggtgcgatc

SEQ ID NO: 1818811 - DNA, 15 bp, Homo sapiens
tgctaggtgcgatcg

SEQ ID NO: 1818812 - DNA, 15 bp, Homo sapiens
gctaggtgcgatcgt

SEQ ID NO: 1818813 - DNA, 15 bp, Homo sapiens
ctaggtgcgatcgtc

SEQ ID NO: 1818814 - DNA, 15 bp, Homo sapiens
taggtgcgatcgtcc

SEQ ID NO: 1818815 - DNA, 15 bp, Homo sapiens
aggtgcgatcgtcct

SEQ ID NO: 1818816 - DNA, 15 bp, Homo sapiens
ggtgcgatcgtccta

SEQ ID NO: 1818817 - DNA, 15 bp, Homo sapiens
gtgcgatcgtcctac

SEQ ID NO: 1818818 - DNA, 15 bp, Homo sapiens
tgcgatcgtcctaca

SEQ ID NO: 1818819 - DNA, 15 bp, Homo sapiens
gcgatcgtcctacat

SEQ ID NO: 1818820 - DNA, 15 bp, Homo sapiens
cgatcgtcctacatt

SEQ ID NO: 1818821 - DNA, 15 bp, Homo sapiens
gatcgtcctacattt

SEQ ID NO: 1818822 - DNA, 15 bp, Homo sapiens
atcgtcctacatttg

SEQ ID NO: 1818823 - DNA, 15 bp, Homo sapiens
tcgtcctacatttga

SEQ ID NO: 1818824 - DNA, 15 bp, Homo sapiens
cgtcctacatttgac

SEQ ID NO: 1818825 - DNA, 15 bp, Homo sapiens
gtcctacatttgacc

SEQ ID NO: 1818826 - DNA, 15 bp, Homo sapiens
tcctacatttgacct

SEQ ID NO: 1818827 - DNA, 15 bp, Homo sapiens
cctacatttgacctt

SEQ ID NO: 1818828 - DNA, 15 bp, Homo sapiens
ctacatttgaccttg

SEQ ID NO: 1818829 - DNA, 15 bp, Homo sapiens
tacatttgaccttgg

SEQ ID NO: 1818830 - DNA, 15 bp, Homo sapiens
acatttgaccttggg

SEQ ID NO: 1818831 - DNA, 15 bp, Homo sapiens
catttgaccttgggt

SEQ ID NO: 1818832 - DNA, 15 bp, Homo sapiens
atttgaccttgggtc

SEQ ID NO: 1818833 - DNA, 15 bp, Homo sapiens
tttgaccttgggtct

SEQ ID NO: 1818834 - DNA, 15 bp, Homo sapiens
ttgaccttgggtctc

SEQ ID NO: 1818835 - DNA, 15 bp, Homo sapiens
tgaccttgggtctcc

SEQ ID NO: 1818836 - DNA, 15 bp, Homo sapiens
gaccttgggtctcca

SEQ ID NO: 1818837 - DNA, 15 bp, Homo sapiens
accttgggtctccaa

SEQ ID NO: 1818838 - DNA, 15 bp, Homo sapiens
ccttgggtctccaag

SEQ ID NO: 1818839 - DNA, 15 bp, Homo sapiens
cttgggtctccaagt

SEQ ID NO: 1818840 - DNA, 15 bp, Homo sapiens
ttgggtctccaagtt

SEQ ID NO: 1818841 - DNA, 15 bp, Homo sapiens
tgggtctccaagttt

SEQ ID NO: 1818842 - DNA, 15 bp, Homo sapiens
gggtctccaagttta

SEQ ID NO: 1818843 - DNA, 15 bp, Homo sapiens
ggtctccaagtttag

SEQ ID NO: 1818844 - DNA, 15 bp, Homo sapiens
gtctccaagtttagc

SEQ ID NO: 1818845 - DNA, 15 bp, Homo sapiens
tctccaagtttagct

SEQ ID NO: 1818846 - DNA, 15 bp, Homo sapiens
ctccaagtttagctt

SEQ ID NO: 1818847 - DNA, 15 bp, Homo sapiens
tccaagtttagcttt

SEQ ID NO: 1818848 - DNA, 15 bp, Homo sapiens
ccaagtttagctttc

SEQ ID NO: 1818849 - DNA, 15 bp, Homo sapiens
caagtttagctttct

SEQ ID NO: 1818850 - DNA, 15 bp, Homo sapiens
aagtttagctttcta

SEQ ID NO: 1818851 - DNA, 15 bp, Homo sapiens
agtttagctttctaa

SEQ ID NO: 1818852 - DNA, 15 bp, Homo sapiens
gtttagctttctaac

SEQ ID NO: 1818853 - DNA, 15 bp, Homo sapiens
tttagctttctaaca

SEQ ID NO: 1818854 - DNA, 15 bp, Homo sapiens
ttagctttctaacac

SEQ ID NO: 1818855 - DNA, 15 bp, Homo sapiens
tagctttctaacaca

SEQ ID NO: 1818856 - DNA, 15 bp, Homo sapiens
agctttctaacacaa

SEQ ID NO: 1818857 - DNA, 15 bp, Homo sapiens
gctttctaacacaac

SEQ ID NO: 1818858 - DNA, 15 bp, Homo sapiens
ctttctaacacaacc

SEQ ID NO: 1818859 - DNA, 15 bp, Homo sapiens
tttctaacacaaccg

SEQ ID NO: 1818860 - DNA, 15 bp, Homo sapiens
ttctaacacaaccgg

SEQ ID NO: 1818861 - DNA, 15 bp, Homo sapiens
tctaacacaaccggc

SEQ ID NO: 1818862 - DNA, 15 bp, Homo sapiens
ctaacacaaccggct

SEQ ID NO: 1818863 - DNA, 15 bp, Homo sapiens
taacacaaccggctc

SEQ ID NO: 1818864 - DNA, 15 bp, Homo sapiens
aacacaaccggctct

SEQ ID NO: 1818865 - DNA, 15 bp, Homo sapiens
acacaaccggctctg

SEQ ID NO: 1818866 - DNA, 15 bp, Homo sapiens
cacaaccggctctgc

SEQ ID NO: 1818867 - DNA, 15 bp, Homo sapiens
acaaccggctctgcc

SEQ ID NO: 1818868 - DNA, 15 bp, Homo sapiens
caaccggctctgcct

SEQ ID NO: 1818869 - DNA, 15 bp, Homo sapiens
aaccggctctgcctt

SEQ ID NO: 1818870 - DNA, 15 bp, Homo sapiens
accggctctgccttt

SEQ ID NO: 1818871 - DNA, 15 bp, Homo sapiens
ccggctctgcctttc

SEQ ID NO: 1818872 - DNA, 15 bp, Homo sapiens
cggctctgcctttca

SEQ ID NO: 1818873 - DNA, 15 bp, Homo sapiens
ggctctgcctttcac

SEQ ID NO: 1818874 - DNA, 15 bp, Homo sapiens
gctctgcctttcact

SEQ ID NO: 1818875 - DNA, 15 bp, Homo sapiens
ctctgcctttcactc

SEQ ID NO: 1818876 - DNA, 15 bp, Homo sapiens
tctgcctttcactca

SEQ ID NO: 1818877 - DNA, 15 bp, Homo sapiens
ctgcctttcactcat

SEQ ID NO: 1818878 - DNA, 15 bp, Homo sapiens
tgcctttcactcatg

SEQ ID NO: 1818879 - DNA, 15 bp, Homo sapiens
gcctttcactcatga

SEQ ID NO: 1818880 - DNA, 15 bp, Homo sapiens
cctttcactcatgac

SEQ ID NO: 1818881 - DNA, 15 bp, Homo sapiens
ctttcactcatgact

SEQ ID NO: 1818882 - DNA, 15 bp, Homo sapiens
tttcactcatgactc

SEQ ID NO: 1818883 - DNA, 15 bp, Homo sapiens
ttcactcatgactcc

SEQ ID NO: 1818884 - DNA, 15 bp, Homo sapiens
tcactcatgactccc

SEQ ID NO: 1818885 - DNA, 15 bp, Homo sapiens
cactcatgactcccc

SEQ ID NO: 1818886 - DNA, 15 bp, Homo sapiens
actcatgactcccct

SEQ ID NO: 1818887 - DNA, 15 bp, Homo sapiens
ctcatgactccccta

SEQ ID NO: 1818888 - DNA, 15 bp, Homo sapiens
tcatgactcccctaa

SEQ ID NO: 1818889 - DNA, 15 bp, Homo sapiens
catgactcccctaag

SEQ ID NO: 1818890 - DNA, 15 bp, Homo sapiens
atgactcccctaaga

SEQ ID NO: 1818891 - DNA, 15 bp, Homo sapiens
tgactcccctaagaa

SEQ ID NO: 1818892 - DNA, 15 bp, Homo sapiens
gactcccctaagaag

SEQ ID NO: 1818893 - DNA, 15 bp, Homo sapiens
actcccctaagaaga

SEQ ID NO: 1818894 - DNA, 15 bp, Homo sapiens
ctcccctaagaagaa

SEQ ID NO: 1818895 - DNA, 15 bp, Homo sapiens
tcccctaagaagaat

SEQ ID NO: 1818896 - DNA, 15 bp, Homo sapiens
cccctaagaagaata

SEQ ID NO: 1818897 - DNA, 15 bp, Homo sapiens
ccctaagaagaatac

SEQ ID NO: 1818898 - DNA, 15 bp, Homo sapiens
cctaagaagaatacg

SEQ ID NO: 1818899 - DNA, 15 bp, Homo sapiens
ctaagaagaatacgg

SEQ ID NO: 1818900 - DNA, 15 bp, Homo sapiens
taagaagaatacggc

SEQ ID NO: 1818901 - DNA, 15 bp, Homo sapiens
aagaagaatacggca

SEQ ID NO: 1818902 - DNA, 15 bp, Homo sapiens
agaagaatacggcac

SEQ ID NO: 1818903 - DNA, 15 bp, Homo sapiens
gaagaatacggcact

SEQ ID NO: 1818904 - DNA, 15 bp, Homo sapiens
aagaatacggcactt

SEQ ID NO: 1818905 - DNA, 15 bp, Homo sapiens
agaatacggcacttg

SEQ ID NO: 1818906 - DNA, 15 bp, Homo sapiens
gaatacggcacttgt

SEQ ID NO: 1818907 - DNA, 15 bp, Homo sapiens
aatacggcacttgtg

SEQ ID NO: 1818908 - DNA, 15 bp, Homo sapiens
atacggcacttgtgg

SEQ ID NO: 1818909 - DNA, 15 bp, Homo sapiens
tacggcacttgtggc

SEQ ID NO: 1818910 - DNA, 15 bp, Homo sapiens
acggcacttgtggca

SEQ ID NO: 1818911 - DNA, 15 bp, Homo sapiens
cggcacttgtggcag

SEQ ID NO: 1818912 - DNA, 15 bp, Homo sapiens
ggcacttgtggcaga

SEQ ID NO: 1818913 - DNA, 15 bp, Homo sapiens
gcacttgtggcagag

SEQ ID NO: 1818914 - DNA, 15 bp, Homo sapiens
cacttgtggcagagg

SEQ ID NO: 1818915 - DNA, 15 bp, Homo sapiens
acttgtggcagaggg

SEQ ID NO: 1818916 - DNA, 15 bp, Homo sapiens
cttgtggcagagggg

SEQ ID NO: 1818917 - DNA, 15 bp, Homo sapiens
ttgtggcagagggga

SEQ ID NO: 1818918 - DNA, 15 bp, Homo sapiens
tgtggcagaggggaa

SEQ ID NO: 1818919 - DNA, 15 bp, Homo sapiens
gtggcagaggggaaa

SEQ ID NO: 1818920 - DNA, 15 bp, Homo sapiens
tggcagaggggaaac

SEQ ID NO: 1818921 - DNA, 15 bp, Homo sapiens
ggcagaggggaaacc

SEQ ID NO: 1818922 - DNA, 15 bp, Homo sapiens
gcagaggggaaacct

SEQ ID NO: 1818923 - DNA, 15 bp, Homo sapiens
cagaggggaaacctc

SEQ ID NO: 1818924 - DNA, 15 bp, Homo sapiens
agaggggaaacctcc

SEQ ID NO: 1818925 - DNA, 15 bp, Homo sapiens
gaggggaaacctccg

SEQ ID NO: 1818926 - DNA, 15 bp, Homo sapiens
aggggaaacctccga

SEQ ID NO: 1818927 - DNA, 15 bp, Homo sapiens
ggggaaacctccgag

SEQ ID NO: 1818928 - DNA, 15 bp, Homo sapiens
gggaaacctccgagg

SEQ ID NO: 1818929 - DNA, 15 bp, Homo sapiens
ggaaacctccgaggt

SEQ ID NO: 1818930 - DNA, 15 bp, Homo sapiens
gaaacctccgaggtg

SEQ ID NO: 1818931 - DNA, 15 bp, Homo sapiens
aaacctccgaggtgg

SEQ ID NO: 1818932 - DNA, 15 bp, Homo sapiens
aacctccgaggtgga

SEQ ID NO: 1818933 - DNA, 15 bp, Homo sapiens
acctccgaggtggac

SEQ ID NO: 1818934 - DNA, 15 bp, Homo sapiens
cctccgaggtggaca

SEQ ID NO: 1818935 - DNA, 15 bp, Homo sapiens
ctccgaggtggacat

SEQ ID NO: 1818936 - DNA, 15 bp, Homo sapiens
tccgaggtggacatc

SEQ ID NO: 1818937 - DNA, 15 bp, Homo sapiens
ccgaggtggacatct

SEQ ID NO: 1818938 - DNA, 15 bp, Homo sapiens
cgaggtggacatctg

SEQ ID NO: 1818939 - DNA, 15 bp, Homo sapiens
gaggtggacatctgc

SEQ ID NO: 1818940 - DNA, 15 bp, Homo sapiens
aggtggacatctgct

SEQ ID NO: 1818941 - DNA, 15 bp, Homo sapiens
ggtggacatctgctg

SEQ ID NO: 1818942 - DNA, 15 bp, Homo sapiens
gtggacatctgctgt

SEQ ID NO: 1818943 - DNA, 15 bp, Homo sapiens
tggacatctgctgtg

SEQ ID NO: 1818944 - DNA, 15 bp, Homo sapiens
ggacatctgctgtgt

SEQ ID NO: 1818945 - DNA, 15 bp, Homo sapiens
gacatctgctgtgtt

SEQ ID NO: 1818946 - DNA, 15 bp, Homo sapiens
acatctgctgtgttt

SEQ ID NO: 1818947 - DNA, 15 bp, Homo sapiens
catctgctgtgtttc

SEQ ID NO: 1818948 - DNA, 15 bp, Homo sapiens
atctgctgtgtttca

SEQ ID NO: 1818949 - DNA, 15 bp, Homo sapiens
tctgctgtgtttcaa

SEQ ID NO: 1818950 - DNA, 15 bp, Homo sapiens
ctgctgtgtttcaaa

SEQ ID NO: 1818951 - DNA, 15 bp, Homo sapiens
tgctgtgtttcaaag

SEQ ID NO: 1818952 - DNA, 15 bp, Homo sapiens
gctgtgtttcaaagg

SEQ ID NO: 1818953 - DNA, 15 bp, Homo sapiens
ctgtgtttcaaaggc

SEQ ID NO: 1818954 - DNA, 15 bp, Homo sapiens
tgtgtttcaaaggcc

SEQ ID NO: 1818955 - DNA, 15 bp, Homo sapiens
gtgtttcaaaggccg

SEQ ID NO: 1818956 - DNA, 15 bp, Homo sapiens
tgtttcaaaggccga

SEQ ID NO: 1818957 - DNA, 15 bp, Homo sapiens
gtttcaaaggccgat

SEQ ID NO: 1818958 - DNA, 15 bp, Homo sapiens
tttcaaaggccgata

SEQ ID NO: 1818959 - DNA, 15 bp, Homo sapiens
ttcaaaggccgatat

SEQ ID NO: 1818960 - DNA, 15 bp, Homo sapiens
tcaaaggccgatatc

SEQ ID NO: 1818961 - DNA, 15 bp, Homo sapiens
caaaggccgatatct

SEQ ID NO: 1818962 - DNA, 15 bp, Homo sapiens
aaaggccgatatcta

SEQ ID NO: 1818963 - DNA, 15 bp, Homo sapiens
aaggccgatatctat

SEQ ID NO: 1818964 - DNA, 15 bp, Homo sapiens
aggccgatatctatt

SEQ ID NO: 1818965 - DNA, 15 bp, Homo sapiens
ggccgatatctattt

SEQ ID NO: 1818966 - DNA, 15 bp, Homo sapiens
gccgatatctatttt

SEQ ID NO: 1818967 - DNA, 15 bp, Homo sapiens
ccgatatctattttc

SEQ ID NO: 1818968 - DNA, 15 bp, Homo sapiens
cgatatctattttct

SEQ ID NO: 1818969 - DNA, 15 bp, Homo sapiens
gatatctattttctc

SEQ ID NO: 1818970 - DNA, 15 bp, Homo sapiens
atatctattttctca

SEQ ID NO: 1818971 - DNA, 15 bp, Homo sapiens
tatctattttctcat

SEQ ID NO: 1818972 - DNA, 15 bp, Homo sapiens
atctattttctcatt

SEQ ID NO: 1818973 - DNA, 15 bp, Homo sapiens
tctattttctcattt

SEQ ID NO: 1818974 - DNA, 15 bp, Homo sapiens
ctattttctcatttg

SEQ ID NO: 1818975 - DNA, 15 bp, Homo sapiens
tattttctcatttgg

SEQ ID NO: 1818976 - DNA, 15 bp, Homo sapiens
attttctcatttggc

SEQ ID NO: 1818977 - DNA, 15 bp, Homo sapiens
ttttctcatttggca

SEQ ID NO: 1818978 - DNA, 15 bp, Homo sapiens
tttctcatttggcaa

SEQ ID NO: 1818979 - DNA, 15 bp, Homo sapiens
ttctcatttggcaac

SEQ ID NO: 1818980 - DNA, 15 bp, Homo sapiens
tctcatttggcaaca

SEQ ID NO: 1818981 - DNA, 15 bp, Homo sapiens
ctcatttggcaacag

SEQ ID NO: 1818982 - DNA, 15 bp, Homo sapiens
tcatttggcaacagc

SEQ ID NO: 1818983 - DNA, 15 bp, Homo sapiens
catttggcaacagca

SEQ ID NO: 1818984 - DNA, 15 bp, Homo sapiens
atttggcaacagcaa

SEQ ID NO: 1818985 - DNA, 15 bp, Homo sapiens
tttggcaacagcaac

SEQ ID NO: 1818986 - DNA, 15 bp, Homo sapiens
ttggcaacagcaacc

SEQ ID NO: 1818987 - DNA, 15 bp, Homo sapiens
tggcaacagcaaccc

SEQ ID NO: 1818988 - DNA, 15 bp, Homo sapiens
ggcaacagcaaccca

SEQ ID NO: 1818989 - DNA, 15 bp, Homo sapiens
gcaacagcaacccaa

SEQ ID NO: 1818990 - DNA, 15 bp, Homo sapiens
caacagcaacccaac

SEQ ID NO: 1818991 - DNA, 15 bp, Homo sapiens
aacagcaacccaacc

SEQ ID NO: 1818992 - DNA, 15 bp, Homo sapiens
acagcaacccaaccc

SEQ ID NO: 1818993 - DNA, 15 bp, Homo sapiens
cagcaacccaaccca

SEQ ID NO: 1818994 - DNA, 15 bp, Homo sapiens
agcaacccaacccag

SEQ ID NO: 1818995 - DNA, 15 bp, Homo sapiens
gcaacccaacccagt

SEQ ID NO: 1818996 - DNA, 15 bp, Homo sapiens
caacccaacccagtt

SEQ ID NO: 1818997 - DNA, 15 bp, Homo sapiens
aacccaacccagttt

SEQ ID NO: 1818998 - DNA, 15 bp, Homo sapiens
acccaacccagtttc

SEQ ID NO: 1818999 - DNA, 15 bp, Homo sapiens
cccaacccagtttct

SEQ ID NO: 1819000 - DNA, 15 bp, Homo sapiens
ccaacccagtttctc

SEQ ID NO: 1819001 - DNA, 15 bp, Homo sapiens
caacccagtttctca

SEQ ID NO: 1819002 - DNA, 15 bp, Homo sapiens
aacccagtttctcat

SEQ ID NO: 1819003 - DNA, 15 bp, Homo sapiens
acccagtttctcata

SEQ ID NO: 1819004 - DNA, 15 bp, Homo sapiens
cccagtttctcataa

SEQ ID NO: 1819005 - DNA, 15 bp, Homo sapiens
ccagtttctcataag

SEQ ID NO: 1819006 - DNA, 15 bp, Homo sapiens
cagtttctcataagg

SEQ ID NO: 1819007 - DNA, 15 bp, Homo sapiens
agtttctcataagga

SEQ ID NO: 1819008 - DNA, 15 bp, Homo sapiens
gtttctcataaggat

SEQ ID NO: 1819009 - DNA, 15 bp, Homo sapiens
tttctcataaggatc

SEQ ID NO: 1819010 - DNA, 15 bp, Homo sapiens
ttctcataaggatcc

SEQ ID NO: 1819011 - DNA, 15 bp, Homo sapiens
tctcataaggatccc

SEQ ID NO: 1819012 - DNA, 15 bp, Homo sapiens
ctcataaggatccct

SEQ ID NO: 1819013 - DNA, 15 bp, Homo sapiens
tcataaggatccctc

SEQ ID NO: 1819014 - DNA, 15 bp, Homo sapiens
cataaggatccctct

SEQ ID NO: 1819015 - DNA, 15 bp, Homo sapiens
ataaggatccctctc

SEQ ID NO: 1819016 - DNA, 15 bp, Homo sapiens
taaggatccctctca

SEQ ID NO: 1819017 - DNA, 15 bp, Homo sapiens
aaggatccctctcac

SEQ ID NO: 1819018 - DNA, 15 bp, Homo sapiens
aggatccctctcacc

SEQ ID NO: 1819019 - DNA, 15 bp, Homo sapiens
ggatccctctcaccc

SEQ ID NO: 1819020 - DNA, 15 bp, Homo sapiens
gatccctctcaccct

SEQ ID NO: 1819021 - DNA, 15 bp, Homo sapiens
atccctctcaccctc

SEQ ID NO: 1819022 - DNA, 15 bp, Homo sapiens
tccctctcaccctca

SEQ ID NO: 1819023 - DNA, 15 bp, Homo sapiens
ccctctcaccctcag

SEQ ID NO: 1819024 - DNA, 15 bp, Homo sapiens
cctctcaccctcagt

SEQ ID NO: 1819025 - DNA, 15 bp, Homo sapiens
ctctcaccctcagtc

SEQ ID NO: 1819026 - DNA, 15 bp, Homo sapiens
tctcaccctcagtcc

SEQ ID NO: 1819027 - DNA, 15 bp, Homo sapiens
ctcaccctcagtccc

SEQ ID NO: 1819028 - DNA, 15 bp, Homo sapiens
tcaccctcagtccca

SEQ ID NO: 1819029 - DNA, 15 bp, Homo sapiens
caccctcagtcccat

SEQ ID NO: 1819030 - DNA, 15 bp, Homo sapiens
accctcagtcccatg

SEQ ID NO: 1819031 - DNA, 15 bp, Homo sapiens
ccctcagtcccatgg

SEQ ID NO: 1819032 - DNA, 15 bp, Homo sapiens
cctcagtcccatggc

SEQ ID NO: 1819033 - DNA, 15 bp, Homo sapiens
ctcagtcccatggcc

SEQ ID NO: 1819034 - DNA, 15 bp, Homo sapiens
tcagtcccatggccc

SEQ ID NO: 1819035 - DNA, 15 bp, Homo sapiens
cagtcccatggccct

SEQ ID NO: 1819036 - DNA, 15 bp, Homo sapiens
agtcccatggccctt

SEQ ID NO: 1819037 - DNA, 15 bp, Homo sapiens
gtcccatggcccttg

SEQ ID NO: 1819038 - DNA, 15 bp, Homo sapiens
tcccatggcccttgc

SEQ ID NO: 1819039 - DNA, 15 bp, Homo sapiens
cccatggcccttgcc

SEQ ID NO: 1819040 - DNA, 15 bp, Homo sapiens
ccatggcccttgccc

SEQ ID NO: 1819041 - DNA, 15 bp, Homo sapiens
catggcccttgccct

SEQ ID NO: 1819042 - DNA, 15 bp, Homo sapiens
atggcccttgcccta

SEQ ID NO: 1819043 - DNA, 15 bp, Homo sapiens
tggcccttgccctac

SEQ ID NO: 1819044 - DNA, 15 bp, Homo sapiens
ggcccttgccctaca

SEQ ID NO: 1819045 - DNA, 15 bp, Homo sapiens
gcccttgccctacag

SEQ ID NO: 1819046 - DNA, 15 bp, Homo sapiens
cccttgccctacagc

SEQ ID NO: 1819047 - DNA, 15 bp, Homo sapiens
ccttgccctacagct

SEQ ID NO: 1819048 - DNA, 15 bp, Homo sapiens
cttgccctacagctg

SEQ ID NO: 1819049 - DNA, 15 bp, Homo sapiens
ttgccctacagctga

SEQ ID NO: 1819050 - DNA, 15 bp, Homo sapiens
tgccctacagctgag

SEQ ID NO: 1819051 - DNA, 15 bp, Homo sapiens
gccctacagctgagg

SEQ ID NO: 1819052 - DNA, 15 bp, Homo sapiens
ccctacagctgaggg

SEQ ID NO: 1819053 - DNA, 15 bp, Homo sapiens
cctacagctgagggt

SEQ ID NO: 1819054 - DNA, 15 bp, Homo sapiens
ctacagctgagggtg

SEQ ID NO: 1819055 - DNA, 15 bp, Homo sapiens
tacagctgagggtgt

SEQ ID NO: 1819056 - DNA, 15 bp, Homo sapiens
acagctgagggtgtg

SEQ ID NO: 1819057 - DNA, 15 bp, Homo sapiens
cagctgagggtgtgg

SEQ ID NO: 1819058 - DNA, 15 bp, Homo sapiens
agctgagggtgtggc

SEQ ID NO: 1819059 - DNA, 15 bp, Homo sapiens
gctgagggtgtggca

SEQ ID NO: 1819060 - DNA, 15 bp, Homo sapiens
ctgagggtgtggcat

SEQ ID NO: 1819061 - DNA, 15 bp, Homo sapiens
tgagggtgtggcatg

SEQ ID NO: 1819062 - DNA, 15 bp, Homo sapiens
gagggtgtggcatgt

SEQ ID NO: 1819063 - DNA, 15 bp, Homo sapiens
agggtgtggcatgtg

SEQ ID NO: 1819064 - DNA, 15 bp, Homo sapiens
gggtgtggcatgtgg

SEQ ID NO: 1819065 - DNA, 15 bp, Homo sapiens
ggtgtggcatgtggc

SEQ ID NO: 1819066 - DNA, 15 bp, Homo sapiens
gtgtggcatgtggct

SEQ ID NO: 1819067 - DNA, 15 bp, Homo sapiens
tgtggcatgtggctc

SEQ ID NO: 1819068 - DNA, 15 bp, Homo sapiens
gtggcatgtggctca

SEQ ID NO: 1819069 - DNA, 15 bp, Homo sapiens
tggcatgtggctcac

SEQ ID NO: 1819070 - DNA, 15 bp, Homo sapiens
ggcatgtggctcaca

SEQ ID NO: 1819071 - DNA, 15 bp, Homo sapiens
gcatgtggctcacat

SEQ ID NO: 1819072 - DNA, 15 bp, Homo sapiens
catgtggctcacata

SEQ ID NO: 1819073 - DNA, 15 bp, Homo sapiens
atgtggctcacatat

SEQ ID NO: 1819074 - DNA, 15 bp, Homo sapiens
tgtggctcacatatg

SEQ ID NO: 1819075 - DNA, 15 bp, Homo sapiens
gtggctcacatatgg

SEQ ID NO: 1819076 - DNA, 15 bp, Homo sapiens
tggctcacatatggc

SEQ ID NO: 1819077 - DNA, 15 bp, Homo sapiens
ggctcacatatggct

SEQ ID NO: 1819078 - DNA, 15 bp, Homo sapiens
gctcacatatggctc

SEQ ID NO: 1819079 - DNA, 15 bp, Homo sapiens
ctcacatatggctcc

SEQ ID NO: 1819080 - DNA, 15 bp, Homo sapiens
tcacatatggctcct

SEQ ID NO: 1819081 - DNA, 15 bp, Homo sapiens
cacatatggctcctt

SEQ ID NO: 1819082 - DNA, 15 bp, Homo sapiens
acatatggctccttc

SEQ ID NO: 1819083 - DNA, 15 bp, Homo sapiens
catatggctccttcc

SEQ ID NO: 1819084 - DNA, 15 bp, Homo sapiens
atatggctccttcct

SEQ ID NO: 1819085 - DNA, 15 bp, Homo sapiens
tatggctccttcctc

SEQ ID NO: 1819086 - DNA, 15 bp, Homo sapiens
atggctccttcctct

SEQ ID NO: 1819087 - DNA, 15 bp, Homo sapiens
tggctccttcctctg

SEQ ID NO: 1819088 - DNA, 15 bp, Homo sapiens
ggctccttcctctgg

SEQ ID NO: 1819089 - DNA, 15 bp, Homo sapiens
gctccttcctctggc

SEQ ID NO: 1819090 - DNA, 15 bp, Homo sapiens
ctccttcctctggcc

SEQ ID NO: 1819091 - DNA, 15 bp, Homo sapiens
tccttcctctggccc

SEQ ID NO: 1819092 - DNA, 15 bp, Homo sapiens
ccttcctctggccca

SEQ ID NO: 1819093 - DNA, 15 bp, Homo sapiens
cttcctctggcccaa

SEQ ID NO: 1819094 - DNA, 15 bp, Homo sapiens
ttcctctggcccaaa

SEQ ID NO: 1819095 - DNA, 15 bp, Homo sapiens
tcctctggcccaaat

SEQ ID NO: 1819096 - DNA, 15 bp, Homo sapiens
cctctggcccaaatg

SEQ ID NO: 1819097 - DNA, 15 bp, Homo sapiens
ctctggcccaaatgg

SEQ ID NO: 1819098 - DNA, 15 bp, Homo sapiens
tctggcccaaatggc

SEQ ID NO: 1819099 - DNA, 15 bp, Homo sapiens
ctggcccaaatggct

SEQ ID NO: 1819100 - DNA, 15 bp, Homo sapiens
tggcccaaatggctg

SEQ ID NO: 1819101 - DNA, 15 bp, Homo sapiens
ggcccaaatggctgg

SEQ ID NO: 1819102 - DNA, 15 bp, Homo sapiens
gcccaaatggctgga

SEQ ID NO: 1819103 - DNA, 15 bp, Homo sapiens
cccaaatggctggag

SEQ ID NO: 1819104 - DNA, 15 bp, Homo sapiens
ccaaatggctggagg

SEQ ID NO: 1819105 - DNA, 15 bp, Homo sapiens
caaatggctggagga

SEQ ID NO: 1819106 - DNA, 15 bp, Homo sapiens
aaatggctggaggaa

SEQ ID NO: 1819107 - DNA, 15 bp, Homo sapiens
aatggctggaggaaa

SEQ ID NO: 1819108 - DNA, 15 bp, Homo sapiens
atggctggaggaaaa

SEQ ID NO: 1819109 - DNA, 15 bp, Homo sapiens
tggctggaggaaaac

SEQ ID NO: 1819110 - DNA, 15 bp, Homo sapiens
ggctggaggaaaact

SEQ ID NO: 1819111 - DNA, 15 bp, Homo sapiens
gctggaggaaaacta

SEQ ID NO: 1819112 - DNA, 15 bp, Homo sapiens
ctggaggaaaactat

SEQ ID NO: 1819113 - DNA, 15 bp, Homo sapiens
tggaggaaaactatg

SEQ ID NO: 1819114 - DNA, 15 bp, Homo sapiens
ggaggaaaactatgt

SEQ ID NO: 1819115 - DNA, 15 bp, Homo sapiens
gaggaaaactatgtc

SEQ ID NO: 1819116 - DNA, 15 bp, Homo sapiens
aggaaaactatgtct

SEQ ID NO: 1819117 - DNA, 15 bp, Homo sapiens
ggaaaactatgtcta

SEQ ID NO: 1819118 - DNA, 15 bp, Homo sapiens
gaaaactatgtctaa

SEQ ID NO: 1819119 - DNA, 15 bp, Homo sapiens
aaaactatgtctaat

SEQ ID NO: 1819120 - DNA, 15 bp, Homo sapiens
aaactatgtctaatt

SEQ ID NO: 1819121 - DNA, 15 bp, Homo sapiens
aactatgtctaattt

SEQ ID NO: 1819122 - DNA, 15 bp, Homo sapiens
actatgtctaatttt

SEQ ID NO: 1819123 - DNA, 15 bp, Homo sapiens
ctatgtctaattttc

SEQ ID NO: 1819124 - DNA, 15 bp, Homo sapiens
tatgtctaattttcc

SEQ ID NO: 1819125 - DNA, 15 bp, Homo sapiens
atgtctaattttcct

SEQ ID NO: 1819126 - DNA, 15 bp, Homo sapiens
tgtctaattttcctc

SEQ ID NO: 1819127 - DNA, 15 bp, Homo sapiens
gtctaattttcctcc

SEQ ID NO: 1819128 - DNA, 15 bp, Homo sapiens
tctaattttcctcca

SEQ ID NO: 1819129 - DNA, 15 bp, Homo sapiens
ctaattttcctccag

SEQ ID NO: 1819130 - DNA, 15 bp, Homo sapiens
taattttcctccagc

SEQ ID NO: 1819131 - DNA, 15 bp, Homo sapiens
aattttcctccagcc

SEQ ID NO: 1819132 - DNA, 15 bp, Homo sapiens
attttcctccagcca

SEQ ID NO: 1819133 - DNA, 15 bp, Homo sapiens
ttttcctccagccac

SEQ ID NO: 1819134 - DNA, 15 bp, Homo sapiens
tttcctccagccaca

SEQ ID NO: 1819135 - DNA, 15 bp, Homo sapiens
ttcctccagccacag

SEQ ID NO: 1819136 - DNA, 15 bp, Homo sapiens
tcctccagccacagt

SEQ ID NO: 1819137 - DNA, 15 bp, Homo sapiens
cctccagccacagtt

SEQ ID NO: 1819138 - DNA, 15 bp, Homo sapiens
ctccagccacagttc

SEQ ID NO: 1819139 - DNA, 15 bp, Homo sapiens
tccagccacagttct

SEQ ID NO: 1819140 - DNA, 15 bp, Homo sapiens
ccagccacagttctc

SEQ ID NO: 1819141 - DNA, 15 bp, Homo sapiens
cagccacagttctca

SEQ ID NO: 1819142 - DNA, 15 bp, Homo sapiens
agccacagttctcag

SEQ ID NO: 1819143 - DNA, 15 bp, Homo sapiens
gccacagttctcagg

SEQ ID NO: 1819144 - DNA, 15 bp, Homo sapiens
ccacagttctcaggt

SEQ ID NO: 1819145 - DNA, 15 bp, Homo sapiens
cacagttctcaggtc

SEQ ID NO: 1819146 - DNA, 15 bp, Homo sapiens
acagttctcaggtca

SEQ ID NO: 1819147 - DNA, 15 bp, Homo sapiens
cagttctcaggtcaa

SEQ ID NO: 1819148 - DNA, 15 bp, Homo sapiens
agttctcaggtcaat

SEQ ID NO: 1819149 - DNA, 15 bp, Homo sapiens
gttctcaggtcaatg

SEQ ID NO: 1819150 - DNA, 15 bp, Homo sapiens
ttctcaggtcaatga

SEQ ID NO: 1819151 - DNA, 15 bp, Homo sapiens
tctcaggtcaatgaa

SEQ ID NO: 1819152 - DNA, 15 bp, Homo sapiens
ctcaggtcaatgaaa

SEQ ID NO: 1819153 - DNA, 15 bp, Homo sapiens
tcaggtcaatgaaac

SEQ ID NO: 1819154 - DNA, 15 bp, Homo sapiens
caggtcaatgaaaca

SEQ ID NO: 1819155 - DNA, 15 bp, Homo sapiens
aggtcaatgaaacac

SEQ ID NO: 1819156 - DNA, 15 bp, Homo sapiens
ggtcaatgaaacaca

SEQ ID NO: 1819157 - DNA, 15 bp, Homo sapiens
gtcaatgaaacacag

SEQ ID NO: 1819158 - DNA, 15 bp, Homo sapiens
tcaatgaaacacagt

SEQ ID NO: 1819159 - DNA, 15 bp, Homo sapiens
caatgaaacacagta

SEQ ID NO: 1819160 - DNA, 15 bp, Homo sapiens
aatgaaacacagtaa

SEQ ID NO: 1819161 - DNA, 15 bp, Homo sapiens
atgaaacacagtaac

SEQ ID NO: 1819162 - DNA, 15 bp, Homo sapiens
tgaaacacagtaaca

SEQ ID NO: 1819163 - DNA, 15 bp, Homo sapiens
gaaacacagtaacat

SEQ ID NO: 1819164 - DNA, 15 bp, Homo sapiens
aaacacagtaacatc

SEQ ID NO: 1819165 - DNA, 15 bp, Homo sapiens
aacacagtaacatct

SEQ ID NO: 1819166 - DNA, 15 bp, Homo sapiens
acacagtaacatctc

SEQ ID NO: 1819167 - DNA, 15 bp, Homo sapiens
cacagtaacatctct

SEQ ID NO: 1819168 - DNA, 15 bp, Homo sapiens
acagtaacatctctg

SEQ ID NO: 1819169 - DNA, 15 bp, Homo sapiens
cagtaacatctctgc

SEQ ID NO: 1819170 - DNA, 15 bp, Homo sapiens
agtaacatctctgcc

SEQ ID NO: 1819171 - DNA, 15 bp, Homo sapiens
gtaacatctctgccc

SEQ ID NO: 1819172 - DNA, 15 bp, Homo sapiens
taacatctctgccca

SEQ ID NO: 1819173 - DNA, 15 bp, Homo sapiens
aacatctctgcccag

SEQ ID NO: 1819174 - DNA, 15 bp, Homo sapiens
acatctctgcccagg

SEQ ID NO: 1819175 - DNA, 15 bp, Homo sapiens
catctctgcccaggc

SEQ ID NO: 1819176 - DNA, 15 bp, Homo sapiens
atctctgcccaggct

SEQ ID NO: 1819177 - DNA, 15 bp, Homo sapiens
tctctgcccaggctg

SEQ ID NO: 1819178 - DNA, 15 bp, Homo sapiens
ctctgcccaggctgc

SEQ ID NO: 1819179 - DNA, 15 bp, Homo sapiens
tctgcccaggctgct

SEQ ID NO: 1819180 - DNA, 15 bp, Homo sapiens
ctgcccaggctgctg

SEQ ID NO: 1819181 - DNA, 15 bp, Homo sapiens
tgcccaggctgctgt

SEQ ID NO: 1819182 - DNA, 15 bp, Homo sapiens
gcccaggctgctgtt

SEQ ID NO: 1819183 - DNA, 15 bp, Homo sapiens
cccaggctgctgttt

SEQ ID NO: 1819184 - DNA, 15 bp, Homo sapiens
ccaggctgctgtttg

SEQ ID NO: 1819185 - DNA, 15 bp, Homo sapiens
caggctgctgtttga

SEQ ID NO: 1819186 - DNA, 15 bp, Homo sapiens
aggctgctgtttgag

SEQ ID NO: 1819187 - DNA, 15 bp, Homo sapiens
ggctgctgtttgagt

SEQ ID NO: 1819188 - DNA, 15 bp, Homo sapiens
gctgctgtttgagtg

SEQ ID NO: 1819189 - DNA, 15 bp, Homo sapiens
ctgctgtttgagtgg

SEQ ID NO: 1819190 - DNA, 15 bp, Homo sapiens
tgctgtttgagtggc

SEQ ID NO: 1819191 - DNA, 15 bp, Homo sapiens
gctgtttgagtggca

SEQ ID NO: 1819192 - DNA, 15 bp, Homo sapiens
ctgtttgagtggcat

SEQ ID NO: 1819193 - DNA, 15 bp, Homo sapiens
tgtttgagtggcatg

SEQ ID NO: 1819194 - DNA, 15 bp, Homo sapiens
gtttgagtggcatgt

SEQ ID NO: 1819195 - DNA, 15 bp, Homo sapiens
tttgagtggcatgtg

SEQ ID NO: 1819196 - DNA, 15 bp, Homo sapiens
ttgagtggcatgtgc

SEQ ID NO: 1819197 - DNA, 15 bp, Homo sapiens
tgagtggcatgtgct

SEQ ID NO: 1819198 - DNA, 15 bp, Homo sapiens
gagtggcatgtgctc

SEQ ID NO: 1819199 - DNA, 15 bp, Homo sapiens
agtggcatgtgctct

SEQ ID NO: 1819200 - DNA, 15 bp, Homo sapiens
gtggcatgtgctctt

SEQ ID NO: 1819201 - DNA, 15 bp, Homo sapiens
tggcatgtgctctta

SEQ ID NO: 1819202 - DNA, 15 bp, Homo sapiens
ggcatgtgctcttat

SEQ ID NO: 1819203 - DNA, 15 bp, Homo sapiens
gcatgtgctcttatc

SEQ ID NO: 1819204 - DNA, 15 bp, Homo sapiens
catgtgctcttatcc

SEQ ID NO: 1819205 - DNA, 15 bp, Homo sapiens
atgtgctcttatcct

SEQ ID NO: 1819206 - DNA, 15 bp, Homo sapiens
tgtgctcttatcctc

SEQ ID NO: 1819207 - DNA, 15 bp, Homo sapiens
gtgctcttatcctcc

SEQ ID NO: 1819208 - DNA, 15 bp, Homo sapiens
tgctcttatcctcct

SEQ ID NO: 1819209 - DNA, 15 bp, Homo sapiens
gctcttatcctcctt

SEQ ID NO: 1819210 - DNA, 15 bp, Homo sapiens
ctcttatcctccttg

SEQ ID NO: 1819211 - DNA, 15 bp, Homo sapiens
tcttatcctccttgg

SEQ ID NO: 1819212 - DNA, 15 bp, Homo sapiens
cttatcctccttggc

SEQ ID NO: 1819213 - DNA, 15 bp, Homo sapiens
ttatcctccttggca

SEQ ID NO: 1819214 - DNA, 15 bp, Homo sapiens
tatcctccttggcag

SEQ ID NO: 1819215 - DNA, 15 bp, Homo sapiens
atcctccttggcagg

SEQ ID NO: 1819216 - DNA, 15 bp, Homo sapiens
tcctccttggcagga

SEQ ID NO: 1819217 - DNA, 15 bp, Homo sapiens
cctccttggcaggaa

SEQ ID NO: 1819218 - DNA, 15 bp, Homo sapiens
ctccttggcaggaaa

SEQ ID NO: 1819219 - DNA, 15 bp, Homo sapiens
tccttggcaggaaat

SEQ ID NO: 1819220 - DNA, 15 bp, Homo sapiens
ccttggcaggaaatc

SEQ ID NO: 1819221 - DNA, 15 bp, Homo sapiens
cttggcaggaaatcc

SEQ ID NO: 1819222 - DNA, 15 bp, Homo sapiens
ttggcaggaaatccg

SEQ ID NO: 1819223 - DNA, 15 bp, Homo sapiens
tggcaggaaatccgc

SEQ ID NO: 1819224 - DNA, 15 bp, Homo sapiens
ggcaggaaatccgca

SEQ ID NO: 1819225 - DNA, 15 bp, Homo sapiens
gcaggaaatccgcag

SEQ ID NO: 1819226 - DNA, 15 bp, Homo sapiens
caggaaatccgcagg

SEQ ID NO: 1819227 - DNA, 15 bp, Homo sapiens
aggaaatccgcaggc

SEQ ID NO: 1819228 - DNA, 15 bp, Homo sapiens
ggaaatccgcaggct

SEQ ID NO: 1819229 - DNA, 15 bp, Homo sapiens
gaaatccgcaggctg

SEQ ID NO: 1819230 - DNA, 15 bp, Homo sapiens
aaatccgcaggctgg

SEQ ID NO: 1819231 - DNA, 15 bp, Homo sapiens
aatccgcaggctggg

SEQ ID NO: 1819232 - DNA, 15 bp, Homo sapiens
atccgcaggctgggc

SEQ ID NO: 1819233 - DNA, 15 bp, Homo sapiens
tccgcaggctgggct

SEQ ID NO: 1819234 - DNA, 15 bp, Homo sapiens
ccgcaggctgggctg

SEQ ID NO: 1819235 - DNA, 15 bp, Homo sapiens
cgcaggctgggctgc

SEQ ID NO: 1819236 - DNA, 15 bp, Homo sapiens
gcaggctgggctgct

SEQ ID NO: 1819237 - DNA, 15 bp, Homo sapiens
caggctgggctgctg

SEQ ID NO: 1819238 - DNA, 15 bp, Homo sapiens
aggctgggctgctgg

SEQ ID NO: 1819239 - DNA, 15 bp, Homo sapiens
ggctgggctgctggc

SEQ ID NO: 1819240 - DNA, 15 bp, Homo sapiens
gctgggctgctggca

SEQ ID NO: 1819241 - DNA, 15 bp, Homo sapiens
ctgggctgctggcag

SEQ ID NO: 1819242 - DNA, 15 bp, Homo sapiens
tgggctgctggcagc

SEQ ID NO: 1819243 - DNA, 15 bp, Homo sapiens
gggctgctggcagcc

SEQ ID NO: 1819244 - DNA, 15 bp, Homo sapiens
ggctgctggcagcca

SEQ ID NO: 1819245 - DNA, 15 bp, Homo sapiens
gctgctggcagccat

SEQ ID NO: 1819246 - DNA, 15 bp, Homo sapiens
ctgctggcagccatc

SEQ ID NO: 1819247 - DNA, 15 bp, Homo sapiens
tgctggcagccatcc

SEQ ID NO: 1819248 - DNA, 15 bp, Homo sapiens
gctggcagccatcct

SEQ ID NO: 1819249 - DNA, 15 bp, Homo sapiens
ctggcagccatcctg

SEQ ID NO: 1819250 - DNA, 15 bp, Homo sapiens
tggcagccatcctgc

SEQ ID NO: 1819251 - DNA, 15 bp, Homo sapiens
ggcagccatcctgca

SEQ ID NO: 1819252 - DNA, 15 bp, Homo sapiens
gcagccatcctgcat

SEQ ID NO: 1819253 - DNA, 15 bp, Homo sapiens
cagccatcctgcatc

SEQ ID NO: 1819254 - DNA, 15 bp, Homo sapiens
agccatcctgcatcg

SEQ ID NO: 1819255 - DNA, 15 bp, Homo sapiens
gccatcctgcatcgt

SEQ ID NO: 1819256 - DNA, 15 bp, Homo sapiens
ccatcctgcatcgta

SEQ ID NO: 1819257 - DNA, 15 bp, Homo sapiens
catcctgcatcgtaa

SEQ ID NO: 1819258 - DNA, 15 bp, Homo sapiens
atcctgcatcgtaag

SEQ ID NO: 1819259 - DNA, 15 bp, Homo sapiens
tcctgcatcgtaaga

SEQ ID NO: 1819260 - DNA, 15 bp, Homo sapiens
cctgcatcgtaagag

SEQ ID NO: 1819261 - DNA, 15 bp, Homo sapiens
ctgcatcgtaagagg

SEQ ID NO: 1819262 - DNA, 15 bp, Homo sapiens
tgcatcgtaagaggg

SEQ ID NO: 1819263 - DNA, 15 bp, Homo sapiens
gcatcgtaagaggga

SEQ ID NO: 1819264 - DNA, 15 bp, Homo sapiens
catcgtaagagggaa

SEQ ID NO: 1819265 - DNA, 15 bp, Homo sapiens
atcgtaagagggaag

SEQ ID NO: 1819266 - DNA, 15 bp, Homo sapiens
tcgtaagagggaagt

SEQ ID NO: 1819267 - DNA, 15 bp, Homo sapiens
cgtaagagggaagtc

SEQ ID NO: 1819268 - DNA, 15 bp, Homo sapiens
gtaagagggaagtct

SEQ ID NO: 1819269 - DNA, 15 bp, Homo sapiens
taagagggaagtcta

SEQ ID NO: 1819270 - DNA, 15 bp, Homo sapiens
aagagggaagtctat

SEQ ID NO: 1819271 - DNA, 15 bp, Homo sapiens
agagggaagtctatc

SEQ ID NO: 1819272 - DNA, 15 bp, Homo sapiens
gagggaagtctatct

SEQ ID NO: 1819273 - DNA, 15 bp, Homo sapiens
agggaagtctatctg

SEQ ID NO: 1819274 - DNA, 15 bp, Homo sapiens
gggaagtctatctga

SEQ ID NO: 1819275 - DNA, 15 bp, Homo sapiens
ggaagtctatctgag

SEQ ID NO: 1819276 - DNA, 15 bp, Homo sapiens
gaagtctatctgagg

SEQ ID NO: 1819277 - DNA, 15 bp, Homo sapiens
aagtctatctgagga

SEQ ID NO: 1819278 - DNA, 15 bp, Homo sapiens
agtctatctgaggat

SEQ ID NO: 1819279 - DNA, 15 bp, Homo sapiens
gtctatctgaggatg

SEQ ID NO: 1819280 - DNA, 15 bp, Homo sapiens
tctatctgaggatgg

SEQ ID NO: 1819281 - DNA, 15 bp, Homo sapiens
ctatctgaggatggg

SEQ ID NO: 1819282 - DNA, 15 bp, Homo sapiens
tatctgaggatgggc

SEQ ID NO: 1819283 - DNA, 15 bp, Homo sapiens
atctgaggatgggct

SEQ ID NO: 1819284 - DNA, 15 bp, Homo sapiens
tctgaggatgggcta

SEQ ID NO: 1819285 - DNA, 15 bp, Homo sapiens
ctgaggatgggctaa

SEQ ID NO: 1819286 - DNA, 15 bp, Homo sapiens
tgaggatgggctaac

SEQ ID NO: 1819287 - DNA, 15 bp, Homo sapiens
gaggatgggctaaca

SEQ ID NO: 1819288 - DNA, 15 bp, Homo sapiens
aggatgggctaacac

SEQ ID NO: 1819289 - DNA, 15 bp, Homo sapiens
ggatgggctaacaca

SEQ ID NO: 1819290 - DNA, 15 bp, Homo sapiens
gatgggctaacacag

SEQ ID NO: 1819291 - DNA, 15 bp, Homo sapiens
atgggctaacacaga

SEQ ID NO: 1819292 - DNA, 15 bp, Homo sapiens
tgggctaacacagag

SEQ ID NO: 1819293 - DNA, 15 bp, Homo sapiens
gggctaacacagaga

SEQ ID NO: 1819294 - DNA, 15 bp, Homo sapiens
ggctaacacagagaa

SEQ ID NO: 1819295 - DNA, 15 bp, Homo sapiens
gctaacacagagaaa

SEQ ID NO: 1819296 - DNA, 15 bp, Homo sapiens
ctaacacagagaaaa

SEQ ID NO: 1819297 - DNA, 15 bp, Homo sapiens
taacacagagaaaat

SEQ ID NO: 1819298 - DNA, 15 bp, Homo sapiens
aacacagagaaaatg

SEQ ID NO: 1819299 - DNA, 15 bp, Homo sapiens
acacagagaaaatga

SEQ ID NO: 1819300 - DNA, 15 bp, Homo sapiens
cacagagaaaatgaa

SEQ ID NO: 1819301 - DNA, 15 bp, Homo sapiens
acagagaaaatgaag

SEQ ID NO: 1819302 - DNA, 15 bp, Homo sapiens
cagagaaaatgaagc

SEQ ID NO: 1819303 - DNA, 15 bp, Homo sapiens
agagaaaatgaagct

SEQ ID NO: 1819304 - DNA, 15 bp, Homo sapiens
gagaaaatgaagctg

SEQ ID NO: 1819305 - DNA, 15 bp, Homo sapiens
agaaaatgaagctga

SEQ ID NO: 1819306 - DNA, 15 bp, Homo sapiens
gaaaatgaagctgag

SEQ ID NO: 1819307 - DNA, 15 bp, Homo sapiens
aaaatgaagctgaga

SEQ ID NO: 1819308 - DNA, 15 bp, Homo sapiens
aaatgaagctgagag

SEQ ID NO: 1819309 - DNA, 15 bp, Homo sapiens
aatgaagctgagagg

SEQ ID NO: 1819310 - DNA, 15 bp, Homo sapiens
atgaagctgagaggg

SEQ ID NO: 1819311 - DNA, 15 bp, Homo sapiens
tgaagctgagagggg

SEQ ID NO: 1819312 - DNA, 15 bp, Homo sapiens
gaagctgagaggggt

SEQ ID NO: 1819313 - DNA, 15 bp, Homo sapiens
aagctgagaggggtg

SEQ ID NO: 1819314 - DNA, 15 bp, Homo sapiens
agctgagaggggtgg

SEQ ID NO: 1819315 - DNA, 15 bp, Homo sapiens
gctgagaggggtgga

SEQ ID NO: 1819316 - DNA, 15 bp, Homo sapiens
ctgagaggggtggac

SEQ ID NO: 1819317 - DNA, 15 bp, Homo sapiens
tgagaggggtggaca

SEQ ID NO: 1819318 - DNA, 15 bp, Homo sapiens
gagaggggtggacag

SEQ ID NO: 1819319 - DNA, 15 bp, Homo sapiens
agaggggtggacaga

SEQ ID NO: 1819320 - DNA, 15 bp, Homo sapiens
gaggggtggacagaa

SEQ ID NO: 1819321 - DNA, 15 bp, Homo sapiens
aggggtggacagaaa

SEQ ID NO: 1819322 - DNA, 15 bp, Homo sapiens
ggggtggacagaaag

SEQ ID NO: 1819323 - DNA, 15 bp, Homo sapiens
gggtggacagaaagc

SEQ ID NO: 1819324 - DNA, 15 bp, Homo sapiens
ggtggacagaaagcc

SEQ ID NO: 1819325 - DNA, 15 bp, Homo sapiens
gtggacagaaagccc

SEQ ID NO: 1819326 - DNA, 15 bp, Homo sapiens
tggacagaaagcccc

SEQ ID NO: 1819327 - DNA, 15 bp, Homo sapiens
ggacagaaagcccct

SEQ ID NO: 1819328 - DNA, 15 bp, Homo sapiens
gacagaaagcccctg

SEQ ID NO: 1819329 - DNA, 15 bp, Homo sapiens
acagaaagcccctgg

SEQ ID NO: 1819330 - DNA, 15 bp, Homo sapiens
cagaaagcccctgga

SEQ ID NO: 1819331 - DNA, 15 bp, Homo sapiens
agaaagcccctggat

SEQ ID NO: 1819332 - DNA, 15 bp, Homo sapiens
gaaagcccctggatc

SEQ ID NO: 1819333 - DNA, 15 bp, Homo sapiens
aaagcccctggatca

SEQ ID NO: 1819334 - DNA, 15 bp, Homo sapiens
aagcccctggatcaa

SEQ ID NO: 1819335 - DNA, 15 bp, Homo sapiens
agcccctggatcaag

SEQ ID NO: 1819336 - DNA, 15 bp, Homo sapiens
gcccctggatcaagc

SEQ ID NO: 1819337 - DNA, 15 bp, Homo sapiens
cccctggatcaagct

SEQ ID NO: 1819338 - DNA, 15 bp, Homo sapiens
ccctggatcaagctg

SEQ ID NO: 1819339 - DNA, 15 bp, Homo sapiens
cctggatcaagctgt

SEQ ID NO: 1819340 - DNA, 15 bp, Homo sapiens
ctggatcaagctgta

SEQ ID NO: 1819341 - DNA, 15 bp, Homo sapiens
tggatcaagctgtat

SEQ ID NO: 1819342 - DNA, 15 bp, Homo sapiens
ggatcaagctgtatc

SEQ ID NO: 1819343 - DNA, 15 bp, Homo sapiens
gatcaagctgtatct

SEQ ID NO: 1819344 - DNA, 15 bp, Homo sapiens
atcaagctgtatctt

SEQ ID NO: 1819345 - DNA, 15 bp, Homo sapiens
tcaagctgtatctta

SEQ ID NO: 1819346 - DNA, 15 bp, Homo sapiens
caagctgtatcttaa

SEQ ID NO: 1819347 - DNA, 15 bp, Homo sapiens
aagctgtatcttaag

SEQ ID NO: 1819348 - DNA, 15 bp, Homo sapiens
agctgtatcttaagc

SEQ ID NO: 1819349 - DNA, 15 bp, Homo sapiens
gctgtatcttaagca

SEQ ID NO: 1819350 - DNA, 15 bp, Homo sapiens
ctgtatcttaagcag

SEQ ID NO: 1819351 - DNA, 15 bp, Homo sapiens
tgtatcttaagcagc

SEQ ID NO: 1819352 - DNA, 15 bp, Homo sapiens
gtatcttaagcagcc

SEQ ID NO: 1819353 - DNA, 15 bp, Homo sapiens
tatcttaagcagcct

SEQ ID NO: 1819354 - DNA, 15 bp, Homo sapiens
atcttaagcagcctt

SEQ ID NO: 1819355 - DNA, 15 bp, Homo sapiens
tcttaagcagcctta

SEQ ID NO: 1819356 - DNA, 15 bp, Homo sapiens
cttaagcagccttat

SEQ ID NO: 1819357 - DNA, 15 bp, Homo sapiens
ttaagcagccttatc

SEQ ID NO: 1819358 - DNA, 15 bp, Homo sapiens
taagcagccttatcc

SEQ ID NO: 1819359 - DNA, 15 bp, Homo sapiens
aagcagccttatcct

SEQ ID NO: 1819360 - DNA, 15 bp, Homo sapiens
agcagccttatcctg

SEQ ID NO: 1819361 - DNA, 15 bp, Homo sapiens
gcagccttatcctgg

SEQ ID NO: 1819362 - DNA, 15 bp, Homo sapiens
cagccttatcctgga

SEQ ID NO: 1819363 - DNA, 15 bp, Homo sapiens
agccttatcctggaa

SEQ ID NO: 1819364 - DNA, 15 bp, Homo sapiens
gccttatcctggaat

SEQ ID NO: 1819365 - DNA, 15 bp, Homo sapiens
ccttatcctggaatt

SEQ ID NO: 1819366 - DNA, 15 bp, Homo sapiens
cttatcctggaattt

SEQ ID NO: 1819367 - DNA, 15 bp, Homo sapiens
ttatcctggaatttt

SEQ ID NO: 1819368 - DNA, 15 bp, Homo sapiens
tatcctggaattttt

SEQ ID NO: 1819369 - DNA, 15 bp, Homo sapiens
cctggaatttttctc

SEQ ID NO: 1819370 - DNA, 15 bp, Homo sapiens
ctggaatttttctca

SEQ ID NO: 1819371 - DNA, 15 bp, Homo sapiens
tggaatttttctcat

SEQ ID NO: 1819372 - DNA, 15 bp, Homo sapiens
ggaatttttctcata

SEQ ID NO: 1819373 - DNA, 15 bp, Homo sapiens
gaatttttctcataa

SEQ ID NO: 1819374 - DNA, 15 bp, Homo sapiens
aatttttctcataac

SEQ ID NO: 1819375 - DNA, 15 bp, Homo sapiens
atttttctcataaca

SEQ ID NO: 1819376 - DNA, 15 bp, Homo sapiens
tttttctcataacat

SEQ ID NO: 1819377 - DNA, 15 bp, Homo sapiens
ttttctcataacatt

SEQ ID NO: 1819378 - DNA, 15 bp, Homo sapiens
tttctcataacattt

SEQ ID NO: 1819379 - DNA, 15 bp, Homo sapiens
ttctcataacatttt

SEQ ID NO: 1819380 - DNA, 15 bp, Homo sapiens
tctcataacattttt

SEQ ID NO: 1819381 - DNA, 15 bp, Homo sapiens
ctcataacatttttt

SEQ ID NO: 1819382 - DNA, 15 bp, Homo sapiens
tcataacattttttt

SEQ ID NO: 1819383 - DNA, 15 bp, Homo sapiens
cataacatttttttt

SEQ ID NO: 1819384 - DNA, 15 bp, Homo sapiens
ataacattttttttg

SEQ ID NO: 1819385 - DNA, 15 bp, Homo sapiens
taacattttttttgg

SEQ ID NO: 1819386 - DNA, 15 bp, Homo sapiens
aacattttttttggt

SEQ ID NO: 1819387 - DNA, 15 bp, Homo sapiens
acattttttttggta

SEQ ID NO: 1819388 - DNA, 15 bp, Homo sapiens
cattttttttggtag

SEQ ID NO: 1819389 - DNA, 15 bp, Homo sapiens
attttttttggtaga

SEQ ID NO: 1819390 - DNA, 15 bp, Homo sapiens
ggtagagacagggtc

SEQ ID NO: 1819391 - DNA, 15 bp, Homo sapiens
gacagggtcttgcta

SEQ ID NO: 1819392 - DNA, 15 bp, Homo sapiens
acagggtcttgctat

SEQ ID NO: 1819393 - DNA, 15 bp, Homo sapiens
cagggtcttgctatg

SEQ ID NO: 1819394 - DNA, 15 bp, Homo sapiens
ggctggtcttgaacc

SEQ ID NO: 1819395 - DNA, 15 bp, Homo sapiens
gctggtcttgaaccc

SEQ ID NO: 1819396 - DNA, 15 bp, Homo sapiens
ctggtcttgaacccc

SEQ ID NO: 1819397 - DNA, 15 bp, Homo sapiens
tggtcttgaacccct

SEQ ID NO: 1819398 - DNA, 15 bp, Homo sapiens
ggtcttgaacccctg

SEQ ID NO: 1819399 - DNA, 15 bp, Homo sapiens
gtcttgaacccctgg

SEQ ID NO: 1819400 - DNA, 15 bp, Homo sapiens
tcttgaacccctggc

SEQ ID NO: 1819401 - DNA, 15 bp, Homo sapiens
cttgaacccctggcc

SEQ ID NO: 1819402 - DNA, 15 bp, Homo sapiens
ttgaacccctggcct

SEQ ID NO: 1819403 - DNA, 15 bp, Homo sapiens
tgaacccctggcctc

SEQ ID NO: 1819404 - DNA, 15 bp, Homo sapiens
gaacccctggcctcc

SEQ ID NO: 1819405 - DNA, 15 bp, Homo sapiens
aacccctggcctcca

SEQ ID NO: 1819406 - DNA, 15 bp, Homo sapiens
acccctggcctccaa

SEQ ID NO: 1819407 - DNA, 15 bp, Homo sapiens
cccctggcctccaag

SEQ ID NO: 1819408 - DNA, 15 bp, Homo sapiens
ccctggcctccaagt

SEQ ID NO: 1819409 - DNA, 15 bp, Homo sapiens
cctggcctccaagtg

SEQ ID NO: 1819410 - DNA, 15 bp, Homo sapiens
ctggcctccaagtga

SEQ ID NO: 1819411 - DNA, 15 bp, Homo sapiens
tggcctccaagtgat

SEQ ID NO: 1819412 - DNA, 15 bp, Homo sapiens
ggcctccaagtgatc

SEQ ID NO: 1819413 - DNA, 15 bp, Homo sapiens
gcctccaagtgatct

SEQ ID NO: 1819414 - DNA, 15 bp, Homo sapiens
cctccaagtgatctg

SEQ ID NO: 1819415 - DNA, 15 bp, Homo sapiens
ctccaagtgatctgt

SEQ ID NO: 1819416 - DNA, 15 bp, Homo sapiens
tccaagtgatctgtc

SEQ ID NO: 1819417 - DNA, 15 bp, Homo sapiens
ccaagtgatctgtcc

SEQ ID NO: 1819418 - DNA, 15 bp, Homo sapiens
caagtgatctgtcca

SEQ ID NO: 1819419 - DNA, 15 bp, Homo sapiens
aagtgatctgtccac

SEQ ID NO: 1819420 - DNA, 15 bp, Homo sapiens
agtgatctgtccacc

SEQ ID NO: 1819421 - DNA, 15 bp, Homo sapiens
gtgatctgtccacct

SEQ ID NO: 1819422 - DNA, 15 bp, Homo sapiens
tgatctgtccacctc

SEQ ID NO: 1819423 - DNA, 15 bp, Homo sapiens
gatctgtccacctca

SEQ ID NO: 1819424 - DNA, 15 bp, Homo sapiens
atctgtccacctcag

SEQ ID NO: 1819425 - DNA, 15 bp, Homo sapiens
tctgtccacctcagc

SEQ ID NO: 1819426 - DNA, 15 bp, Homo sapiens
ctgtccacctcagcc

SEQ ID NO: 1819427 - DNA, 15 bp, Homo sapiens
tgtccacctcagcct

SEQ ID NO: 1819428 - DNA, 15 bp, Homo sapiens
gtccacctcagcctc

SEQ ID NO: 1819429 - DNA, 15 bp, Homo sapiens
tccacctcagcctcc

SEQ ID NO: 1819430 - DNA, 15 bp, Homo sapiens
aagtgctgggataat

SEQ ID NO: 1819431 - DNA, 15 bp, Homo sapiens
agtgctgggataata

SEQ ID NO: 1819432 - DNA, 15 bp, Homo sapiens
gtgctgggataatag

SEQ ID NO: 1819433 - DNA, 15 bp, Homo sapiens
tgctgggataatagg

SEQ ID NO: 1819434 - DNA, 15 bp, Homo sapiens
gctgggataataggc

SEQ ID NO: 1819435 - DNA, 15 bp, Homo sapiens
ctgggataataggca

SEQ ID NO: 1819436 - DNA, 15 bp, Homo sapiens
tgggataataggcat

SEQ ID NO: 1819437 - DNA, 15 bp, Homo sapiens
gggataataggcatg

SEQ ID NO: 1819438 - DNA, 15 bp, Homo sapiens
ggataataggcatgt

SEQ ID NO: 1819439 - DNA, 15 bp, Homo sapiens
gataataggcatgtg

SEQ ID NO: 1819440 - DNA, 15 bp, Homo sapiens
ataataggcatgtgt

SEQ ID NO: 1819441 - DNA, 15 bp, Homo sapiens
taataggcatgtgtc

SEQ ID NO: 1819442 - DNA, 15 bp, Homo sapiens
aataggcatgtgtca

SEQ ID NO: 1819443 - DNA, 15 bp, Homo sapiens
ataggcatgtgtcac

SEQ ID NO: 1819444 - DNA, 15 bp, Homo sapiens
taggcatgtgtcact

SEQ ID NO: 1819445 - DNA, 15 bp, Homo sapiens
aggcatgtgtcactg

SEQ ID NO: 1819446 - DNA, 15 bp, Homo sapiens
ggcatgtgtcactgt

SEQ ID NO: 1819447 - DNA, 15 bp, Homo sapiens
gcatgtgtcactgtg

SEQ ID NO: 1819448 - DNA, 15 bp, Homo sapiens
catgtgtcactgtgc

SEQ ID NO: 1819449 - DNA, 15 bp, Homo sapiens
atgtgtcactgtgcc

SEQ ID NO: 1819450 - DNA, 15 bp, Homo sapiens
tgtgtcactgtgccc

SEQ ID NO: 1819451 - DNA, 15 bp, Homo sapiens
gtgtcactgtgccca

SEQ ID NO: 1819452 - DNA, 15 bp, Homo sapiens
tgtcactgtgcccag

SEQ ID NO: 1819453 - DNA, 15 bp, Homo sapiens
gtcactgtgcccagc

SEQ ID NO: 1819454 - DNA, 15 bp, Homo sapiens
tcactgtgcccagcc

SEQ ID NO: 1819455 - DNA, 15 bp, Homo sapiens
actgtgcccagccta

SEQ ID NO: 1819456 - DNA, 15 bp, Homo sapiens
ctgtgcccagcctat

SEQ ID NO: 1819457 - DNA, 15 bp, Homo sapiens
tgtgcccagcctatc

SEQ ID NO: 1819458 - DNA, 15 bp, Homo sapiens
gtgcccagcctatcc

SEQ ID NO: 1819459 - DNA, 15 bp, Homo sapiens
tgcccagcctatcct

SEQ ID NO: 1819460 - DNA, 15 bp, Homo sapiens
gcccagcctatcctg

SEQ ID NO: 1819461 - DNA, 15 bp, Homo sapiens
cccagcctatcctgg

SEQ ID NO: 1819462 - DNA, 15 bp, Homo sapiens
ccagcctatcctggg

SEQ ID NO: 1819463 - DNA, 15 bp, Homo sapiens
cagcctatcctggga

SEQ ID NO: 1819464 - DNA, 15 bp, Homo sapiens
agcctatcctgggac

SEQ ID NO: 1819465 - DNA, 15 bp, Homo sapiens
gcctatcctgggact

SEQ ID NO: 1819466 - DNA, 15 bp, Homo sapiens
cctatcctgggactt

SEQ ID NO: 1819467 - DNA, 15 bp, Homo sapiens
ctatcctgggacttt

SEQ ID NO: 1819468 - DNA, 15 bp, Homo sapiens
tatcctgggactttt

SEQ ID NO: 1819469 - DNA, 15 bp, Homo sapiens
atcctgggacttttc

SEQ ID NO: 1819470 - DNA, 15 bp, Homo sapiens
tcctgggacttttca

SEQ ID NO: 1819471 - DNA, 15 bp, Homo sapiens
cctgggacttttcaa

SEQ ID NO: 1819472 - DNA, 15 bp, Homo sapiens
ctgggacttttcaat

SEQ ID NO: 1819473 - DNA, 15 bp, Homo sapiens
tgggacttttcaatg

SEQ ID NO: 1819474 - DNA, 15 bp, Homo sapiens
gggacttttcaatga

SEQ ID NO: 1819475 - DNA, 15 bp, Homo sapiens
ggacttttcaatgac

SEQ ID NO: 1819476 - DNA, 15 bp, Homo sapiens
gacttttcaatgact

SEQ ID NO: 1819477 - DNA, 15 bp, Homo sapiens
acttttcaatgactg

SEQ ID NO: 1819478 - DNA, 15 bp, Homo sapiens
cttttcaatgactga

SEQ ID NO: 1819479 - DNA, 15 bp, Homo sapiens
ttttcaatgactgac

SEQ ID NO: 1819480 - DNA, 15 bp, Homo sapiens
tttcaatgactgact

SEQ ID NO: 1819481 - DNA, 15 bp, Homo sapiens
ttcaatgactgactt

SEQ ID NO: 1819482 - DNA, 15 bp, Homo sapiens
tcaatgactgacttc

SEQ ID NO: 1819483 - DNA, 15 bp, Homo sapiens
caatgactgacttca

SEQ ID NO: 1819484 - DNA, 15 bp, Homo sapiens
aatgactgacttcag

SEQ ID NO: 1819485 - DNA, 15 bp, Homo sapiens
atgactgacttcagc

SEQ ID NO: 1819486 - DNA, 15 bp, Homo sapiens
tgactgacttcagca

SEQ ID NO: 1819487 - DNA, 15 bp, Homo sapiens
gactgacttcagcaa

SEQ ID NO: 1819488 - DNA, 15 bp, Homo sapiens
actgacttcagcaaa

SEQ ID NO: 1819489 - DNA, 15 bp, Homo sapiens
ctgacttcagcaaat

SEQ ID NO: 1819490 - DNA, 15 bp, Homo sapiens
tgacttcagcaaata

SEQ ID NO: 1819491 - DNA, 15 bp, Homo sapiens
gacttcagcaaataa

SEQ ID NO: 1819492 - DNA, 15 bp, Homo sapiens
acttcagcaaataaa

SEQ ID NO: 1819493 - DNA, 15 bp, Homo sapiens
cttcagcaaataaat

SEQ ID NO: 1819494 - DNA, 15 bp, Homo sapiens
ttcagcaaataaatt

SEQ ID NO: 1819495 - DNA, 15 bp, Homo sapiens
tcagcaaataaattc

SEQ ID NO: 1819496 - DNA, 15 bp, Homo sapiens
cagcaaataaattcc

SEQ ID NO: 1819497 - DNA, 15 bp, Homo sapiens
agcaaataaattccc

SEQ ID NO: 1819498 - DNA, 15 bp, Homo sapiens
gcaaataaattccca

SEQ ID NO: 1819499 - DNA, 15 bp, Homo sapiens
caaataaattcccag

SEQ ID NO: 1819500 - DNA, 15 bp, Homo sapiens
aaataaattcccagt

SEQ ID NO: 1819501 - DNA, 15 bp, Homo sapiens
aataaattcccagtc

SEQ ID NO: 1819502 - DNA, 15 bp, Homo sapiens
ataaattcccagtct

SEQ ID NO: 1819503 - DNA, 15 bp, Homo sapiens
taaattcccagtctc

SEQ ID NO: 1819504 - DNA, 15 bp, Homo sapiens
aaattcccagtctcc

SEQ ID NO: 1819505 - DNA, 15 bp, Homo sapiens
aattcccagtctccc

SEQ ID NO: 1819506 - DNA, 15 bp, Homo sapiens
attcccagtctcccc

SEQ ID NO: 1819507 - DNA, 15 bp, Homo sapiens
ttcccagtctccccc

SEQ ID NO: 1819508 - DNA, 15 bp, Homo sapiens
tcccagtctccccca

SEQ ID NO: 1819509 - DNA, 15 bp, Homo sapiens
cccagtctcccccag

SEQ ID NO: 1819510 - DNA, 15 bp, Homo sapiens
ccagtctcccccaga

SEQ ID NO: 1819511 - DNA, 15 bp, Homo sapiens
cagtctcccccagat

SEQ ID NO: 1819512 - DNA, 15 bp, Homo sapiens
agtctcccccagatc

SEQ ID NO: 1819513 - DNA, 15 bp, Homo sapiens
gtctcccccagatcc

SEQ ID NO: 1819514 - DNA, 15 bp, Homo sapiens
tctcccccagatccc

SEQ ID NO: 1819515 - DNA, 15 bp, Homo sapiens
ctcccccagatccca

SEQ ID NO: 1819516 - DNA, 15 bp, Homo sapiens
tcccccagatcccaa

SEQ ID NO: 1819517 - DNA, 15 bp, Homo sapiens
cccccagatcccaaa

SEQ ID NO: 1819518 - DNA, 15 bp, Homo sapiens
ccccagatcccaaac

SEQ ID NO: 1819519 - DNA, 15 bp, Homo sapiens
cccagatcccaaacc

SEQ ID NO: 1819520 - DNA, 15 bp, Homo sapiens
ccagatcccaaacca

SEQ ID NO: 1819521 - DNA, 15 bp, Homo sapiens
cagatcccaaaccag

SEQ ID NO: 1819522 - DNA, 15 bp, Homo sapiens
agatcccaaaccagt

SEQ ID NO: 1819523 - DNA, 15 bp, Homo sapiens
gatcccaaaccagtt

SEQ ID NO: 1819524 - DNA, 15 bp, Homo sapiens
atcccaaaccagttc

SEQ ID NO: 1819525 - DNA, 15 bp, Homo sapiens
tcccaaaccagttca

SEQ ID NO: 1819526 - DNA, 15 bp, Homo sapiens
cccaaaccagttcag

SEQ ID NO: 1819527 - DNA, 15 bp, Homo sapiens
ccaaaccagttcaga

SEQ ID NO: 1819528 - DNA, 15 bp, Homo sapiens
caaaccagttcagat

SEQ ID NO: 1819529 - DNA, 15 bp, Homo sapiens
aaaccagttcagatg

SEQ ID NO: 1819530 - DNA, 15 bp, Homo sapiens
aaccagttcagatgg

SEQ ID NO: 1819531 - DNA, 15 bp, Homo sapiens
accagttcagatggg

SEQ ID NO: 1819532 - DNA, 15 bp, Homo sapiens
ccagttcagatggga

SEQ ID NO: 1819533 - DNA, 15 bp, Homo sapiens
cagttcagatgggat

SEQ ID NO: 1819534 - DNA, 15 bp, Homo sapiens
agttcagatgggatc

SEQ ID NO: 1819535 - DNA, 15 bp, Homo sapiens
gttcagatgggatct

SEQ ID NO: 1819536 - DNA, 15 bp, Homo sapiens
ttcagatgggatctt

SEQ ID NO: 1819537 - DNA, 15 bp, Homo sapiens
tcagatgggatcttc

SEQ ID NO: 1819538 - DNA, 15 bp, Homo sapiens
cagatgggatcttct

SEQ ID NO: 1819539 - DNA, 15 bp, Homo sapiens
agatgggatcttctg

SEQ ID NO: 1819540 - DNA, 15 bp, Homo sapiens
gatgggatcttctgt

SEQ ID NO: 1819541 - DNA, 15 bp, Homo sapiens
atgggatcttctgtc

SEQ ID NO: 1819542 - DNA, 15 bp, Homo sapiens
tgggatcttctgtcc

SEQ ID NO: 1819543 - DNA, 15 bp, Homo sapiens
gggatcttctgtcct

SEQ ID NO: 1819544 - DNA, 15 bp, Homo sapiens
ggatcttctgtcctt

SEQ ID NO: 1819545 - DNA, 15 bp, Homo sapiens
gatcttctgtccttt

SEQ ID NO: 1819546 - DNA, 15 bp, Homo sapiens
atcttctgtccttta

SEQ ID NO: 1819547 - DNA, 15 bp, Homo sapiens
tcttctgtcctttat

SEQ ID NO: 1819548 - DNA, 15 bp, Homo sapiens
cttctgtcctttata

SEQ ID NO: 1819549 - DNA, 15 bp, Homo sapiens
ttctgtcctttataa

SEQ ID NO: 1819550 - DNA, 15 bp, Homo sapiens
tctgtcctttataaa

SEQ ID NO: 1819551 - DNA, 15 bp, Homo sapiens
ctgtcctttataaag

SEQ ID NO: 1819552 - DNA, 15 bp, Homo sapiens
tgtcctttataaagg

SEQ ID NO: 1819553 - DNA, 15 bp, Homo sapiens
gtcctttataaagga

SEQ ID NO: 1819554 - DNA, 15 bp, Homo sapiens
tcctttataaaggaa

SEQ ID NO: 1819555 - DNA, 15 bp, Homo sapiens
cctttataaaggaaa

SEQ ID NO: 1819556 - DNA, 15 bp, Homo sapiens
ctttataaaggaaac

SEQ ID NO: 1819557 - DNA, 15 bp, Homo sapiens
tttataaaggaaaca

SEQ ID NO: 1819558 - DNA, 15 bp, Homo sapiens
ttataaaggaaacat

SEQ ID NO: 1819559 - DNA, 15 bp, Homo sapiens
tataaaggaaacatt

SEQ ID NO: 1819560 - DNA, 15 bp, Homo sapiens
ataaaggaaacatta

SEQ ID NO: 1819561 - DNA, 15 bp, Homo sapiens
taaaggaaacattac

SEQ ID NO: 1819562 - DNA, 15 bp, Homo sapiens
aaaggaaacattact

SEQ ID NO: 1819563 - DNA, 15 bp, Homo sapiens
aaggaaacattacta

SEQ ID NO: 1819564 - DNA, 15 bp, Homo sapiens
aggaaacattactaa

SEQ ID NO: 1819565 - DNA, 15 bp, Homo sapiens
ggaaacattactaaa

SEQ ID NO: 1819566 - DNA, 15 bp, Homo sapiens
gaaacattactaaat

SEQ ID NO: 1819567 - DNA, 15 bp, Homo sapiens
aaacattactaaatt

SEQ ID NO: 1819568 - DNA, 15 bp, Homo sapiens
aacattactaaattg

SEQ ID NO: 1819569 - DNA, 15 bp, Homo sapiens
acattactaaattga

SEQ ID NO: 1819570 - DNA, 15 bp, Homo sapiens
cattactaaattgaa

SEQ ID NO: 1819571 - DNA, 15 bp, Homo sapiens
attactaaattgaac

SEQ ID NO: 1819572 - DNA, 15 bp, Homo sapiens
ttactaaattgaacc

SEQ ID NO: 1819573 - DNA, 15 bp, Homo sapiens
tactaaattgaacct

SEQ ID NO: 1819574 - DNA, 15 bp, Homo sapiens
actaaattgaacctt

SEQ ID NO: 1819575 - DNA, 15 bp, Homo sapiens
ctaaattgaaccttt

SEQ ID NO: 1819576 - DNA, 15 bp, Homo sapiens
taaattgaacctttc

SEQ ID NO: 1819577 - DNA, 15 bp, Homo sapiens
aaattgaacctttcc

SEQ ID NO: 1819578 - DNA, 15 bp, Homo sapiens
aattgaacctttccc

SEQ ID NO: 1819579 - DNA, 15 bp, Homo sapiens
attgaacctttccct

SEQ ID NO: 1819580 - DNA, 15 bp, Homo sapiens
ttgaacctttccctg

SEQ ID NO: 1819581 - DNA, 15 bp, Homo sapiens
tgaacctttccctgt

SEQ ID NO: 1819582 - DNA, 15 bp, Homo sapiens
gaacctttccctgtg

SEQ ID NO: 1819583 - DNA, 15 bp, Homo sapiens
aacctttccctgtgg

SEQ ID NO: 1819584 - DNA, 15 bp, Homo sapiens
acctttccctgtggt

SEQ ID NO: 1819585 - DNA, 15 bp, Homo sapiens
cctttccctgtggtt

SEQ ID NO: 1819586 - DNA, 15 bp, Homo sapiens
ctttccctgtggttt

SEQ ID NO: 1819587 - DNA, 15 bp, Homo sapiens
tttccctgtggtttc

SEQ ID NO: 1819588 - DNA, 15 bp, Homo sapiens
ttccctgtggtttct

SEQ ID NO: 1819589 - DNA, 15 bp, Homo sapiens
tccctgtggtttctc

SEQ ID NO: 1819590 - DNA, 15 bp, Homo sapiens
ccctgtggtttctct

SEQ ID NO: 1819591 - DNA, 15 bp, Homo sapiens
cctgtggtttctctg

SEQ ID NO: 1819592 - DNA, 15 bp, Homo sapiens
ctgtggtttctctgg

SEQ ID NO: 1819593 - DNA, 15 bp, Homo sapiens
tgtggtttctctgga

SEQ ID NO: 1819594 - DNA, 15 bp, Homo sapiens
gtggtttctctggag

SEQ ID NO: 1819595 - DNA, 15 bp, Homo sapiens
tggtttctctggagg

SEQ ID NO: 1819596 - DNA, 15 bp, Homo sapiens
ggtttctctggaggg

SEQ ID NO: 1819597 - DNA, 15 bp, Homo sapiens
gtttctctggagggg

SEQ ID NO: 1819598 - DNA, 15 bp, Homo sapiens
tttctctggagggga

SEQ ID NO: 1819599 - DNA, 15 bp, Homo sapiens
ttctctggaggggaa

SEQ ID NO: 1819600 - DNA, 15 bp, Homo sapiens
tctctggaggggaac

SEQ ID NO: 1819601 - DNA, 15 bp, Homo sapiens
ctctggaggggaact

SEQ ID NO: 1819602 - DNA, 15 bp, Homo sapiens
tctggaggggaacta

SEQ ID NO: 1819603 - DNA, 15 bp, Homo sapiens
ctggaggggaactag

SEQ ID NO: 1819604 - DNA, 15 bp, Homo sapiens
tggaggggaactagt

SEQ ID NO: 1819605 - DNA, 15 bp, Homo sapiens
ggaggggaactagtg

SEQ ID NO: 1819606 - DNA, 15 bp, Homo sapiens
gaggggaactagtgt

SEQ ID NO: 1819607 - DNA, 15 bp, Homo sapiens
aggggaactagtgta

SEQ ID NO: 1819608 - DNA, 15 bp, Homo sapiens
ggggaactagtgtat

SEQ ID NO: 1819609 - DNA, 15 bp, Homo sapiens
gggaactagtgtatg

SEQ ID NO: 1819610 - DNA, 15 bp, Homo sapiens
ggaactagtgtatgg

SEQ ID NO: 1819611 - DNA, 15 bp, Homo sapiens
gaactagtgtatggg

SEQ ID NO: 1819612 - DNA, 15 bp, Homo sapiens
aactagtgtatgggg

SEQ ID NO: 1819613 - DNA, 15 bp, Homo sapiens
actagtgtatgggga

SEQ ID NO: 1819614 - DNA, 15 bp, Homo sapiens
ctagtgtatggggat

SEQ ID NO: 1819615 - DNA, 15 bp, Homo sapiens
tagtgtatggggatg

SEQ ID NO: 1819616 - DNA, 15 bp, Homo sapiens
agtgtatggggatga

SEQ ID NO: 1819617 - DNA, 15 bp, Homo sapiens
gtgtatggggatgac

SEQ ID NO: 1819618 - DNA, 15 bp, Homo sapiens
tgtatggggatgact

SEQ ID NO: 1819619 - DNA, 15 bp, Homo sapiens
gtatggggatgactg

SEQ ID NO: 1819620 - DNA, 15 bp, Homo sapiens
tatggggatgactgg

SEQ ID NO: 1819621 - DNA, 15 bp, Homo sapiens
atggggatgactggc

SEQ ID NO: 1819622 - DNA, 15 bp, Homo sapiens
tggggatgactggct

SEQ ID NO: 1819623 - DNA, 15 bp, Homo sapiens
ggggatgactggcta

SEQ ID NO: 1819624 - DNA, 15 bp, Homo sapiens
gggatgactggctaa

SEQ ID NO: 1819625 - DNA, 15 bp, Homo sapiens
ggatgactggctaaa

SEQ ID NO: 1819626 - DNA, 15 bp, Homo sapiens
gatgactggctaaaa

SEQ ID NO: 1819627 - DNA, 15 bp, Homo sapiens
atgactggctaaaat

SEQ ID NO: 1819628 - DNA, 15 bp, Homo sapiens
tgactggctaaaatg

SEQ ID NO: 1819629 - DNA, 15 bp, Homo sapiens
gactggctaaaatgg

SEQ ID NO: 1819630 - DNA, 15 bp, Homo sapiens
actggctaaaatgga

SEQ ID NO: 1819631 - DNA, 15 bp, Homo sapiens
ctggctaaaatggag

SEQ ID NO: 1819632 - DNA, 15 bp, Homo sapiens
tggctaaaatggagg

SEQ ID NO: 1819633 - DNA, 15 bp, Homo sapiens
ggctaaaatggaggt

SEQ ID NO: 1819634 - DNA, 15 bp, Homo sapiens
gctaaaatggaggtg

SEQ ID NO: 1819635 - DNA, 15 bp, Homo sapiens
ctaaaatggaggtga

SEQ ID NO: 1819636 - DNA, 15 bp, Homo sapiens
taaaatggaggtgat

SEQ ID NO: 1819637 - DNA, 15 bp, Homo sapiens
aaaatggaggtgata

SEQ ID NO: 1819638 - DNA, 15 bp, Homo sapiens
aaatggaggtgatat

SEQ ID NO: 1819639 - DNA, 15 bp, Homo sapiens
aatggaggtgatatt

SEQ ID NO: 1819640 - DNA, 15 bp, Homo sapiens
atggaggtgatatta

SEQ ID NO: 1819641 - DNA, 15 bp, Homo sapiens
tggaggtgatattac

SEQ ID NO: 1819642 - DNA, 15 bp, Homo sapiens
ggaggtgatattact

SEQ ID NO: 1819643 - DNA, 15 bp, Homo sapiens
gaggtgatattactg

SEQ ID NO: 1819644 - DNA, 15 bp, Homo sapiens
aggtgatattactgg

SEQ ID NO: 1819645 - DNA, 15 bp, Homo sapiens
ggtgatattactggt

SEQ ID NO: 1819646 - DNA, 15 bp, Homo sapiens
gtgatattactggtc

SEQ ID NO: 1819647 - DNA, 15 bp, Homo sapiens
tgatattactggtct

SEQ ID NO: 1819648 - DNA, 15 bp, Homo sapiens
gatattactggtctc

SEQ ID NO: 1819649 - DNA, 15 bp, Homo sapiens
atattactggtctca

SEQ ID NO: 1819650 - DNA, 15 bp, Homo sapiens
tattactggtctcag

SEQ ID NO: 1819651 - DNA, 15 bp, Homo sapiens
attactggtctcagc

SEQ ID NO: 1819652 - DNA, 15 bp, Homo sapiens
ttactggtctcagca

SEQ ID NO: 1819653 - DNA, 15 bp, Homo sapiens
tactggtctcagcac

SEQ ID NO: 1819654 - DNA, 15 bp, Homo sapiens
actggtctcagcact

SEQ ID NO: 1819655 - DNA, 15 bp, Homo sapiens
ctggtctcagcactt

SEQ ID NO: 1819656 - DNA, 15 bp, Homo sapiens
tggtctcagcactta

SEQ ID NO: 1819657 - DNA, 15 bp, Homo sapiens
ggtctcagcacttac

SEQ ID NO: 1819658 - DNA, 15 bp, Homo sapiens
gtctcagcacttaca

SEQ ID NO: 1819659 - DNA, 15 bp, Homo sapiens
tctcagcacttacaa

SEQ ID NO: 1819660 - DNA, 15 bp, Homo sapiens
ctcagcacttacaag

SEQ ID NO: 1819661 - DNA, 15 bp, Homo sapiens
tcagcacttacaagt

SEQ ID NO: 1819662 - DNA, 15 bp, Homo sapiens
cagcacttacaagtc

SEQ ID NO: 1819663 - DNA, 15 bp, Homo sapiens
agcacttacaagtcc

SEQ ID NO: 1819664 - DNA, 15 bp, Homo sapiens
gcacttacaagtccc

SEQ ID NO: 1819665 - DNA, 15 bp, Homo sapiens
cacttacaagtccct

SEQ ID NO: 1819666 - DNA, 15 bp, Homo sapiens
acttacaagtccctg

SEQ ID NO: 1819667 - DNA, 15 bp, Homo sapiens
cttacaagtccctga

SEQ ID NO: 1819668 - DNA, 15 bp, Homo sapiens
ttacaagtccctgat

SEQ ID NO: 1819669 - DNA, 15 bp, Homo sapiens
tacaagtccctgatg

SEQ ID NO: 1819670 - DNA, 15 bp, Homo sapiens
acaagtccctgatgg

SEQ ID NO: 1819671 - DNA, 15 bp, Homo sapiens
caagtccctgatggc

SEQ ID NO: 1819672 - DNA, 15 bp, Homo sapiens
aagtccctgatggct

SEQ ID NO: 1819673 - DNA, 15 bp, Homo sapiens
agtccctgatggctt

SEQ ID NO: 1819674 - DNA, 15 bp, Homo sapiens
gtccctgatggcttc

SEQ ID NO: 1819675 - DNA, 15 bp, Homo sapiens
tccctgatggcttcc

SEQ ID NO: 1819676 - DNA, 15 bp, Homo sapiens
ccctgatggcttcct

SEQ ID NO: 1819677 - DNA, 15 bp, Homo sapiens
cctgatggcttcctc

SEQ ID NO: 1819678 - DNA, 15 bp, Homo sapiens
ctgatggcttcctcc

SEQ ID NO: 1819679 - DNA, 15 bp, Homo sapiens
tgatggcttcctcct

SEQ ID NO: 1819680 - DNA, 15 bp, Homo sapiens
gatggcttcctccta

SEQ ID NO: 1819681 - DNA, 15 bp, Homo sapiens
atggcttcctcctaa

SEQ ID NO: 1819682 - DNA, 15 bp, Homo sapiens
tggcttcctcctaaa

SEQ ID NO: 1819683 - DNA, 15 bp, Homo sapiens
ggcttcctcctaaac

SEQ ID NO: 1819684 - DNA, 15 bp, Homo sapiens
gcttcctcctaaaca

SEQ ID NO: 1819685 - DNA, 15 bp, Homo sapiens
cttcctcctaaacac

SEQ ID NO: 1819686 - DNA, 15 bp, Homo sapiens
ttcctcctaaacact

SEQ ID NO: 1819687 - DNA, 15 bp, Homo sapiens
tcctcctaaacactg

SEQ ID NO: 1819688 - DNA, 15 bp, Homo sapiens
cctcctaaacactga

SEQ ID NO: 1819689 - DNA, 15 bp, Homo sapiens
ctcctaaacactgat

SEQ ID NO: 1819690 - DNA, 15 bp, Homo sapiens
tcctaaacactgatc

SEQ ID NO: 1819691 - DNA, 15 bp, Homo sapiens
cctaaacactgatca

SEQ ID NO: 1819692 - DNA, 15 bp, Homo sapiens
ctaaacactgatcac

SEQ ID NO: 1819693 - DNA, 15 bp, Homo sapiens
taaacactgatcacc

SEQ ID NO: 1819694 - DNA, 15 bp, Homo sapiens
aaacactgatcaccc

SEQ ID NO: 1819695 - DNA, 15 bp, Homo sapiens
aacactgatcaccct

SEQ ID NO: 1819696 - DNA, 15 bp, Homo sapiens
acactgatcaccctt

SEQ ID NO: 1819697 - DNA, 15 bp, Homo sapiens
cactgatcacccttg

SEQ ID NO: 1819698 - DNA, 15 bp, Homo sapiens
actgatcacccttgg

SEQ ID NO: 1819699 - DNA, 15 bp, Homo sapiens
ctgatcacccttggg

SEQ ID NO: 1819700 - DNA, 15 bp, Homo sapiens
tgatcacccttgggg

SEQ ID NO: 1819701 - DNA, 15 bp, Homo sapiens
gatcacccttggggt

SEQ ID NO: 1819702 - DNA, 15 bp, Homo sapiens
atcacccttggggtg

SEQ ID NO: 1819703 - DNA, 15 bp, Homo sapiens
tcacccttggggtgg

SEQ ID NO: 1819704 - DNA, 15 bp, Homo sapiens
cacccttggggtgga

SEQ ID NO: 1819705 - DNA, 15 bp, Homo sapiens
acccttggggtggaa

SEQ ID NO: 1819706 - DNA, 15 bp, Homo sapiens
cccttggggtggaaa

SEQ ID NO: 1819707 - DNA, 15 bp, Homo sapiens
ccttggggtggaaaa

SEQ ID NO: 1819708 - DNA, 15 bp, Homo sapiens
cttggggtggaaaac

SEQ ID NO: 1819709 - DNA, 15 bp, Homo sapiens
ttggggtggaaaact

SEQ ID NO: 1819710 - DNA, 15 bp, Homo sapiens
tggggtggaaaactg

SEQ ID NO: 1819711 - DNA, 15 bp, Homo sapiens
ggggtggaaaactga

SEQ ID NO: 1819712 - DNA, 15 bp, Homo sapiens
gggtggaaaactgac

SEQ ID NO: 1819713 - DNA, 15 bp, Homo sapiens
ggtggaaaactgacc

SEQ ID NO: 1819714 - DNA, 15 bp, Homo sapiens
gtggaaaactgacct

SEQ ID NO: 1819715 - DNA, 15 bp, Homo sapiens
tggaaaactgacctc

SEQ ID NO: 1819716 - DNA, 15 bp, Homo sapiens
ggaaaactgacctcc

SEQ ID NO: 1819717 - DNA, 15 bp, Homo sapiens
gaaaactgacctcca

SEQ ID NO: 1819718 - DNA, 15 bp, Homo sapiens
aaaactgacctccag

SEQ ID NO: 1819719 - DNA, 15 bp, Homo sapiens
aaactgacctccagg

SEQ ID NO: 1819720 - DNA, 15 bp, Homo sapiens
aactgacctccagga

SEQ ID NO: 1819721 - DNA, 15 bp, Homo sapiens
actgacctccaggaa

SEQ ID NO: 1819722 - DNA, 15 bp, Homo sapiens
ctgacctccaggaaa

SEQ ID NO: 1819723 - DNA, 15 bp, Homo sapiens
tgacctccaggaaaa

SEQ ID NO: 1819724 - DNA, 15 bp, Homo sapiens
gacctccaggaaaag

SEQ ID NO: 1819725 - DNA, 15 bp, Homo sapiens
acctccaggaaaagt

SEQ ID NO: 1819726 - DNA, 15 bp, Homo sapiens
cctccaggaaaagtg

SEQ ID NO: 1819727 - DNA, 15 bp, Homo sapiens
ctccaggaaaagtgg

SEQ ID NO: 1819728 - DNA, 15 bp, Homo sapiens
tccaggaaaagtgga

SEQ ID NO: 1819729 - DNA, 15 bp, Homo sapiens
ccaggaaaagtggag

SEQ ID NO: 1819730 - DNA, 15 bp, Homo sapiens
caggaaaagtggagg

SEQ ID NO: 1819731 - DNA, 15 bp, Homo sapiens
aggaaaagtggagga

SEQ ID NO: 1819732 - DNA, 15 bp, Homo sapiens
ggaaaagtggaggag

SEQ ID NO: 1819733 - DNA, 15 bp, Homo sapiens
gaaaagtggaggaga

SEQ ID NO: 1819734 - DNA, 15 bp, Homo sapiens
aaaagtggaggagac

SEQ ID NO: 1819735 - DNA, 15 bp, Homo sapiens
aaagtggaggagaca

SEQ ID NO: 1819736 - DNA, 15 bp, Homo sapiens
aagtggaggagacag

SEQ ID NO: 1819737 - DNA, 15 bp, Homo sapiens
agtggaggagacaga

SEQ ID NO: 1819738 - DNA, 15 bp, Homo sapiens
gtggaggagacagaa

SEQ ID NO: 1819739 - DNA, 15 bp, Homo sapiens
tggaggagacagaag

SEQ ID NO: 1819740 - DNA, 15 bp, Homo sapiens
ggaggagacagaaga

SEQ ID NO: 1819741 - DNA, 15 bp, Homo sapiens
gaggagacagaagag

SEQ ID NO: 1819742 - DNA, 15 bp, Homo sapiens
aggagacagaagaga

SEQ ID NO: 1819743 - DNA, 15 bp, Homo sapiens
ggagacagaagagag

SEQ ID NO: 1819744 - DNA, 15 bp, Homo sapiens
gagacagaagagaga

SEQ ID NO: 1819745 - DNA, 15 bp, Homo sapiens
agacagaagagagaa

SEQ ID NO: 1819746 - DNA, 15 bp, Homo sapiens
gacagaagagagaat

SEQ ID NO: 1819747 - DNA, 15 bp, Homo sapiens
acagaagagagaatt

SEQ ID NO: 1819748 - DNA, 15 bp, Homo sapiens
cagaagagagaatta

SEQ ID NO: 1819749 - DNA, 15 bp, Homo sapiens
agaagagagaattac

SEQ ID NO: 1819750 - DNA, 15 bp, Homo sapiens
gaagagagaattacc

SEQ ID NO: 1819751 - DNA, 15 bp, Homo sapiens
aagagagaattacct

SEQ ID NO: 1819752 - DNA, 15 bp, Homo sapiens
agagagaattacctg

SEQ ID NO: 1819753 - DNA, 15 bp, Homo sapiens
gagagaattacctgc

SEQ ID NO: 1819754 - DNA, 15 bp, Homo sapiens
agagaattacctgca

SEQ ID NO: 1819755 - DNA, 15 bp, Homo sapiens
gagaattacctgcat

SEQ ID NO: 1819756 - DNA, 15 bp, Homo sapiens
agaattacctgcatg

SEQ ID NO: 1819757 - DNA, 15 bp, Homo sapiens
gaattacctgcatgg

SEQ ID NO: 1819758 - DNA, 15 bp, Homo sapiens
aattacctgcatggg

SEQ ID NO: 1819759 - DNA, 15 bp, Homo sapiens
attacctgcatgggc

SEQ ID NO: 1819760 - DNA, 15 bp, Homo sapiens
ttacctgcatgggcg

SEQ ID NO: 1819761 - DNA, 15 bp, Homo sapiens
tacctgcatgggcgc

SEQ ID NO: 1819762 - DNA, 15 bp, Homo sapiens
acctgcatgggcgct

SEQ ID NO: 1819763 - DNA, 15 bp, Homo sapiens
cctgcatgggcgctc

SEQ ID NO: 1819764 - DNA, 15 bp, Homo sapiens
ctgcatgggcgctcc

SEQ ID NO: 1819765 - DNA, 15 bp, Homo sapiens
tgcatgggcgctccg

SEQ ID NO: 1819766 - DNA, 15 bp, Homo sapiens
gcatgggcgctccgc

SEQ ID NO: 1819767 - DNA, 15 bp, Homo sapiens
catgggcgctccgca

SEQ ID NO: 1819768 - DNA, 15 bp, Homo sapiens
atgggcgctccgcaa

SEQ ID NO: 1819769 - DNA, 15 bp, Homo sapiens
tgggcgctccgcaac

SEQ ID NO: 1819770 - DNA, 15 bp, Homo sapiens
gggcgctccgcaact

SEQ ID NO: 1819771 - DNA, 15 bp, Homo sapiens
ggcgctccgcaactg

SEQ ID NO: 1819772 - DNA, 15 bp, Homo sapiens
gcgctccgcaactgt

SEQ ID NO: 1819773 - DNA, 15 bp, Homo sapiens
cgctccgcaactgtt

SEQ ID NO: 1819774 - DNA, 15 bp, Homo sapiens
gctccgcaactgttg

SEQ ID NO: 1819775 - DNA, 15 bp, Homo sapiens
ctccgcaactgttgc

SEQ ID NO: 1819776 - DNA, 15 bp, Homo sapiens
tccgcaactgttgca

SEQ ID NO: 1819777 - DNA, 15 bp, Homo sapiens
ccgcaactgttgcaa

SEQ ID NO: 1819778 - DNA, 15 bp, Homo sapiens
cgcaactgttgcaac

SEQ ID NO: 1819779 - DNA, 15 bp, Homo sapiens
gcaactgttgcaaca

SEQ ID NO: 1819780 - DNA, 15 bp, Homo sapiens
caactgttgcaacag

SEQ ID NO: 1819781 - DNA, 15 bp, Homo sapiens
aactgttgcaacaga

SEQ ID NO: 1819782 - DNA, 15 bp, Homo sapiens
actgttgcaacagaa

SEQ ID NO: 1819783 - DNA, 15 bp, Homo sapiens
ctgttgcaacagaat

SEQ ID NO: 1819784 - DNA, 15 bp, Homo sapiens
tgttgcaacagaatg

SEQ ID NO: 1819785 - DNA, 15 bp, Homo sapiens
gttgcaacagaatgc

SEQ ID NO: 1819786 - DNA, 15 bp, Homo sapiens
ttgcaacagaatgct

SEQ ID NO: 1819787 - DNA, 15 bp, Homo sapiens
tgcaacagaatgctt

SEQ ID NO: 1819788 - DNA, 15 bp, Homo sapiens
gcaacagaatgcttc

SEQ ID NO: 1819789 - DNA, 15 bp, Homo sapiens
caacagaatgcttcc

SEQ ID NO: 1819790 - DNA, 15 bp, Homo sapiens
aacagaatgcttccc

SEQ ID NO: 1819791 - DNA, 15 bp, Homo sapiens
acagaatgcttccca

SEQ ID NO: 1819792 - DNA, 15 bp, Homo sapiens
cagaatgcttcccac

SEQ ID NO: 1819793 - DNA, 15 bp, Homo sapiens
agaatgcttcccacc

SEQ ID NO: 1819794 - DNA, 15 bp, Homo sapiens
gaatgcttcccacct

SEQ ID NO: 1819795 - DNA, 15 bp, Homo sapiens
aatgcttcccacctg

SEQ ID NO: 1819796 - DNA, 15 bp, Homo sapiens
atgcttcccacctgg

SEQ ID NO: 1819797 - DNA, 15 bp, Homo sapiens
tgcttcccacctggg

SEQ ID NO: 1819798 - DNA, 15 bp, Homo sapiens
gcttcccacctgggc

SEQ ID NO: 1819799 - DNA, 15 bp, Homo sapiens
cttcccacctgggcc

SEQ ID NO: 1819800 - DNA, 15 bp, Homo sapiens
ttcccacctgggccc

SEQ ID NO: 1819801 - DNA, 15 bp, Homo sapiens
tcccacctgggccct

SEQ ID NO: 1819802 - DNA, 15 bp, Homo sapiens
cccacctgggccctg

SEQ ID NO: 1819803 - DNA, 15 bp, Homo sapiens
ccacctgggccctgc

SEQ ID NO: 1819804 - DNA, 15 bp, Homo sapiens
cacctgggccctgca

SEQ ID NO: 1819805 - DNA, 15 bp, Homo sapiens
acctgggccctgcag

SEQ ID NO: 1819806 - DNA, 15 bp, Homo sapiens
cctgggccctgcagc

SEQ ID NO: 1819807 - DNA, 15 bp, Homo sapiens
ctgggccctgcagcc

SEQ ID NO: 1819808 - DNA, 15 bp, Homo sapiens
tgggccctgcagcca

SEQ ID NO: 1819809 - DNA, 15 bp, Homo sapiens
gggccctgcagccat

SEQ ID NO: 1819810 - DNA, 15 bp, Homo sapiens
ggccctgcagccatc

SEQ ID NO: 1819811 - DNA, 15 bp, Homo sapiens
gccctgcagccatcc

SEQ ID NO: 1819812 - DNA, 15 bp, Homo sapiens
ccctgcagccatcct

SEQ ID NO: 1819813 - DNA, 15 bp, Homo sapiens
cctgcagccatcctg

SEQ ID NO: 1819814 - DNA, 15 bp, Homo sapiens
ctgcagccatcctgt

SEQ ID NO: 1819815 - DNA, 15 bp, Homo sapiens
tgcagccatcctgtg

SEQ ID NO: 1819816 - DNA, 15 bp, Homo sapiens
gcagccatcctgtgt

SEQ ID NO: 1819817 - DNA, 15 bp, Homo sapiens
cagccatcctgtgtg

SEQ ID NO: 1819818 - DNA, 15 bp, Homo sapiens
agccatcctgtgtgc

SEQ ID NO: 1819819 - DNA, 15 bp, Homo sapiens
gccatcctgtgtgcc

SEQ ID NO: 1819820 - DNA, 15 bp, Homo sapiens
ccatcctgtgtgcct

SEQ ID NO: 1819821 - DNA, 15 bp, Homo sapiens
catcctgtgtgcctc

SEQ ID NO: 1819822 - DNA, 15 bp, Homo sapiens
atcctgtgtgcctca

SEQ ID NO: 1819823 - DNA, 15 bp, Homo sapiens
tcctgtgtgcctcag

SEQ ID NO: 1819824 - DNA, 15 bp, Homo sapiens
cctgtgtgcctcagt

SEQ ID NO: 1819825 - DNA, 15 bp, Homo sapiens
ctgtgtgcctcagtt

SEQ ID NO: 1819826 - DNA, 15 bp, Homo sapiens
tgtgtgcctcagttt

SEQ ID NO: 1819827 - DNA, 15 bp, Homo sapiens
gtgtgcctcagtttg

SEQ ID NO: 1819828 - DNA, 15 bp, Homo sapiens
tgtgcctcagtttga

SEQ ID NO: 1819829 - DNA, 15 bp, Homo sapiens
gtgcctcagtttgac

SEQ ID NO: 1819830 - DNA, 15 bp, Homo sapiens
tgcctcagtttgaca

SEQ ID NO: 1819831 - DNA, 15 bp, Homo sapiens
gcctcagtttgacaa

SEQ ID NO: 1819832 - DNA, 15 bp, Homo sapiens
cctcagtttgacaag

SEQ ID NO: 1819833 - DNA, 15 bp, Homo sapiens
ctcagtttgacaagc

SEQ ID NO: 1819834 - DNA, 15 bp, Homo sapiens
tcagtttgacaagct

SEQ ID NO: 1819835 - DNA, 15 bp, Homo sapiens
cagtttgacaagctg

SEQ ID NO: 1819836 - DNA, 15 bp, Homo sapiens
agtttgacaagctgg

SEQ ID NO: 1819837 - DNA, 15 bp, Homo sapiens
gtttgacaagctgga

SEQ ID NO: 1819838 - DNA, 15 bp, Homo sapiens
tttgacaagctggac

SEQ ID NO: 1819839 - DNA, 15 bp, Homo sapiens
ttgacaagctggaca

SEQ ID NO: 1819840 - DNA, 15 bp, Homo sapiens
tgacaagctggacag

SEQ ID NO: 1819841 - DNA, 15 bp, Homo sapiens
gacaagctggacagg

SEQ ID NO: 1819842 - DNA, 15 bp, Homo sapiens
acaagctggacaggc

SEQ ID NO: 1819843 - DNA, 15 bp, Homo sapiens
caagctggacaggcg

SEQ ID NO: 1819844 - DNA, 15 bp, Homo sapiens
aagctggacaggcgc

SEQ ID NO: 1819845 - DNA, 15 bp, Homo sapiens
agctggacaggcgca

SEQ ID NO: 1819846 - DNA, 15 bp, Homo sapiens
gctggacaggcgcag

SEQ ID NO: 1819847 - DNA, 15 bp, Homo sapiens
ctggacaggcgcagt

SEQ ID NO: 1819848 - DNA, 15 bp, Homo sapiens
tggacaggcgcagtc

SEQ ID NO: 1819849 - DNA, 15 bp, Homo sapiens
ggacaggcgcagtca

SEQ ID NO: 1819850 - DNA, 15 bp, Homo sapiens
gacaggcgcagtcaa

SEQ ID NO: 1819851 - DNA, 15 bp, Homo sapiens
acaggcgcagtcaaa

SEQ ID NO: 1819852 - DNA, 15 bp, Homo sapiens
caggcgcagtcaaag

SEQ ID NO: 1819853 - DNA, 15 bp, Homo sapiens
aggcgcagtcaaaga

SEQ ID NO: 1819854 - DNA, 15 bp, Homo sapiens
ggcgcagtcaaagaa

SEQ ID NO: 1819855 - DNA, 15 bp, Homo sapiens
gcgcagtcaaagaaa

SEQ ID NO: 1819856 - DNA, 15 bp, Homo sapiens
cgcagtcaaagaaat

SEQ ID NO: 1819857 - DNA, 15 bp, Homo sapiens
gcagtcaaagaaata

SEQ ID NO: 1819858 - DNA, 15 bp, Homo sapiens
cagtcaaagaaatac

SEQ ID NO: 1819859 - DNA, 15 bp, Homo sapiens
agtcaaagaaatact

SEQ ID NO: 1819860 - DNA, 15 bp, Homo sapiens
gtcaaagaaatactg

SEQ ID NO: 1819861 - DNA, 15 bp, Homo sapiens
tcaaagaaatactga

SEQ ID NO: 1819862 - DNA, 15 bp, Homo sapiens
caaagaaatactgag

SEQ ID NO: 1819863 - DNA, 15 bp, Homo sapiens
aaagaaatactgaga

SEQ ID NO: 1819864 - DNA, 15 bp, Homo sapiens
aagaaatactgagac

SEQ ID NO: 1819865 - DNA, 15 bp, Homo sapiens
agaaatactgagacc

SEQ ID NO: 1819866 - DNA, 15 bp, Homo sapiens
gaaatactgagacct

SEQ ID NO: 1819867 - DNA, 15 bp, Homo sapiens
aaatactgagacctc

SEQ ID NO: 1819868 - DNA, 15 bp, Homo sapiens
aatactgagacctca

SEQ ID NO: 1819869 - DNA, 15 bp, Homo sapiens
atactgagacctcag

SEQ ID NO: 1819870 - DNA, 15 bp, Homo sapiens
tactgagacctcagc

SEQ ID NO: 1819871 - DNA, 15 bp, Homo sapiens
actgagacctcagct

SEQ ID NO: 1819872 - DNA, 15 bp, Homo sapiens
ctgagacctcagctt

SEQ ID NO: 1819873 - DNA, 15 bp, Homo sapiens
tgagacctcagcttc

SEQ ID NO: 1819874 - DNA, 15 bp, Homo sapiens
gagacctcagcttct

SEQ ID NO: 1819875 - DNA, 15 bp, Homo sapiens
agacctcagcttctg

SEQ ID NO: 1819876 - DNA, 15 bp, Homo sapiens
gacctcagcttctgc

SEQ ID NO: 1819877 - DNA, 15 bp, Homo sapiens
acctcagcttctgct

SEQ ID NO: 1819878 - DNA, 15 bp, Homo sapiens
cctcagcttctgctg

SEQ ID NO: 1819879 - DNA, 15 bp, Homo sapiens
ctcagcttctgctgc

SEQ ID NO: 1819880 - DNA, 15 bp, Homo sapiens
tcagcttctgctgcc

SEQ ID NO: 1819881 - DNA, 15 bp, Homo sapiens
cagcttctgctgcct

SEQ ID NO: 1819882 - DNA, 15 bp, Homo sapiens
agcttctgctgcctt

SEQ ID NO: 1819883 - DNA, 15 bp, Homo sapiens
gcttctgctgccttt

SEQ ID NO: 1819884 - DNA, 15 bp, Homo sapiens
cttctgctgcctttc

SEQ ID NO: 1819885 - DNA, 15 bp, Homo sapiens
ttctgctgcctttcg

SEQ ID NO: 1819886 - DNA, 15 bp, Homo sapiens
tctgctgcctttcgg

SEQ ID NO: 1819887 - DNA, 15 bp, Homo sapiens
ctgctgcctttcggc

SEQ ID NO: 1819888 - DNA, 15 bp, Homo sapiens
tgctgcctttcggca

SEQ ID NO: 1819889 - DNA, 15 bp, Homo sapiens
gctgcctttcggcaa

SEQ ID NO: 1819890 - DNA, 15 bp, Homo sapiens
ctgcctttcggcaac

SEQ ID NO: 1819891 - DNA, 15 bp, Homo sapiens
tgcctttcggcaacc

SEQ ID NO: 1819892 - DNA, 15 bp, Homo sapiens
gcctttcggcaaccc

SEQ ID NO: 1819893 - DNA, 15 bp, Homo sapiens
cctttcggcaacccc

SEQ ID NO: 1819894 - DNA, 15 bp, Homo sapiens
ctttcggcaaccccc

SEQ ID NO: 1819895 - DNA, 15 bp, Homo sapiens
tttcggcaaccccca

SEQ ID NO: 1819896 - DNA, 15 bp, Homo sapiens
ttcggcaacccccat

SEQ ID NO: 1819897 - DNA, 15 bp, Homo sapiens
tcggcaacccccatc

SEQ ID NO: 1819898 - DNA, 15 bp, Homo sapiens
cggcaacccccatcc

SEQ ID NO: 1819899 - DNA, 15 bp, Homo sapiens
ggcaacccccatccg

SEQ ID NO: 1819900 - DNA, 15 bp, Homo sapiens
gcaacccccatccgg

SEQ ID NO: 1819901 - DNA, 15 bp, Homo sapiens
caacccccatccggc

SEQ ID NO: 1819902 - DNA, 15 bp, Homo sapiens
aacccccatccggct

SEQ ID NO: 1819903 - DNA, 15 bp, Homo sapiens
acccccatccggctc

SEQ ID NO: 1819904 - DNA, 15 bp, Homo sapiens
cccccatccggctct

SEQ ID NO: 1819905 - DNA, 15 bp, Homo sapiens
ccccatccggctctt

SEQ ID NO: 1819906 - DNA, 15 bp, Homo sapiens
cccatccggctcttg

SEQ ID NO: 1819907 - DNA, 15 bp, Homo sapiens
ccatccggctcttgt

SEQ ID NO: 1819908 - DNA, 15 bp, Homo sapiens
catccggctcttgtg

SEQ ID NO: 1819909 - DNA, 15 bp, Homo sapiens
atccggctcttgtga

SEQ ID NO: 1819910 - DNA, 15 bp, Homo sapiens
tccggctcttgtgag

SEQ ID NO: 1819911 - DNA, 15 bp, Homo sapiens
ccggctcttgtgagg

SEQ ID NO: 1819912 - DNA, 15 bp, Homo sapiens
cggctcttgtgaggc

SEQ ID NO: 1819913 - DNA, 15 bp, Homo sapiens
ggctcttgtgaggcc

SEQ ID NO: 1819914 - DNA, 15 bp, Homo sapiens
gctcttgtgaggccc

SEQ ID NO: 1819915 - DNA, 15 bp, Homo sapiens
ctcttgtgaggccct

SEQ ID NO: 1819916 - DNA, 15 bp, Homo sapiens
tcttgtgaggccctg

SEQ ID NO: 1819917 - DNA, 15 bp, Homo sapiens
cttgtgaggccctgg

SEQ ID NO: 1819918 - DNA, 15 bp, Homo sapiens
ttgtgaggccctgga

SEQ ID NO: 1819919 - DNA, 15 bp, Homo sapiens
tgtgaggccctggag

SEQ ID NO: 1819920 - DNA, 15 bp, Homo sapiens
gtgaggccctggagg

SEQ ID NO: 1819921 - DNA, 15 bp, Homo sapiens
tgaggccctggaggg

SEQ ID NO: 1819922 - DNA, 15 bp, Homo sapiens
gaggccctggaggga

SEQ ID NO: 1819923 - DNA, 15 bp, Homo sapiens
aggccctggagggag

SEQ ID NO: 1819924 - DNA, 15 bp, Homo sapiens
ggccctggagggaga

SEQ ID NO: 1819925 - DNA, 15 bp, Homo sapiens
gccctggagggagat

SEQ ID NO: 1819926 - DNA, 15 bp, Homo sapiens
ccctggagggagatc

SEQ ID NO: 1819927 - DNA, 15 bp, Homo sapiens
cctggagggagatca

SEQ ID NO: 1819928 - DNA, 15 bp, Homo sapiens
ctggagggagatcac

SEQ ID NO: 1819929 - DNA, 15 bp, Homo sapiens
tggagggagatcacc

SEQ ID NO: 1819930 - DNA, 15 bp, Homo sapiens
ggagggagatcaccg

SEQ ID NO: 1819931 - DNA, 15 bp, Homo sapiens
gagggagatcaccgt

SEQ ID NO: 1819932 - DNA, 15 bp, Homo sapiens
agggagatcaccgtc

SEQ ID NO: 1819933 - DNA, 15 bp, Homo sapiens
gggagatcaccgtca

SEQ ID NO: 1819934 - DNA, 15 bp, Homo sapiens
ggagatcaccgtcag

SEQ ID NO: 1819935 - DNA, 15 bp, Homo sapiens
gagatcaccgtcagc

SEQ ID NO: 1819936 - DNA, 15 bp, Homo sapiens
agatcaccgtcagcc

SEQ ID NO: 1819937 - DNA, 15 bp, Homo sapiens
gatcaccgtcagcca

SEQ ID NO: 1819938 - DNA, 15 bp, Homo sapiens
atcaccgtcagccaa

SEQ ID NO: 1819939 - DNA, 15 bp, Homo sapiens
tcaccgtcagccaat

SEQ ID NO: 1819940 - DNA, 15 bp, Homo sapiens
caccgtcagccaata

SEQ ID NO: 1819941 - DNA, 15 bp, Homo sapiens
accgtcagccaatat

SEQ ID NO: 1819942 - DNA, 15 bp, Homo sapiens
ccgtcagccaatatt

SEQ ID NO: 1819943 - DNA, 15 bp, Homo sapiens
cgtcagccaatattg

SEQ ID NO: 1819944 - DNA, 15 bp, Homo sapiens
gtcagccaatattga

SEQ ID NO: 1819945 - DNA, 15 bp, Homo sapiens
tcagccaatattgaa

SEQ ID NO: 1819946 - DNA, 15 bp, Homo sapiens
cagccaatattgaaa

SEQ ID NO: 1819947 - DNA, 15 bp, Homo sapiens
agccaatattgaaag

SEQ ID NO: 1819948 - DNA, 15 bp, Homo sapiens
gccaatattgaaagc

SEQ ID NO: 1819949 - DNA, 15 bp, Homo sapiens
ccaatattgaaagca

SEQ ID NO: 1819950 - DNA, 15 bp, Homo sapiens
caatattgaaagcaa

SEQ ID NO: 1819951 - DNA, 15 bp, Homo sapiens
aatattgaaagcaag

SEQ ID NO: 1819952 - DNA, 15 bp, Homo sapiens
atattgaaagcaaga

SEQ ID NO: 1819953 - DNA, 15 bp, Homo sapiens
tattgaaagcaagag

SEQ ID NO: 1819954 - DNA, 15 bp, Homo sapiens
attgaaagcaagaga

SEQ ID NO: 1819955 - DNA, 15 bp, Homo sapiens
ttgaaagcaagagag

SEQ ID NO: 1819956 - DNA, 15 bp, Homo sapiens
tgaaagcaagagaga

SEQ ID NO: 1819957 - DNA, 15 bp, Homo sapiens
gaaagcaagagagag

SEQ ID NO: 1819958 - DNA, 15 bp, Homo sapiens
aaagcaagagagagt

SEQ ID NO: 1819959 - DNA, 15 bp, Homo sapiens
aagcaagagagagtc

SEQ ID NO: 1819960 - DNA, 15 bp, Homo sapiens
agcaagagagagtca

SEQ ID NO: 1819961 - DNA, 15 bp, Homo sapiens
gcaagagagagtcaa

SEQ ID NO: 1819962 - DNA, 15 bp, Homo sapiens
caagagagagtcaaa

SEQ ID NO: 1819963 - DNA, 15 bp, Homo sapiens
aagagagagtcaaac

SEQ ID NO: 1819964 - DNA, 15 bp, Homo sapiens
agagagagtcaaaca

SEQ ID NO: 1819965 - DNA, 15 bp, Homo sapiens
gagagagtcaaacac

SEQ ID NO: 1819966 - DNA, 15 bp, Homo sapiens
agagagtcaaacact

SEQ ID NO: 1819967 - DNA, 15 bp, Homo sapiens
gagagtcaaacacta

SEQ ID NO: 1819968 - DNA, 15 bp, Homo sapiens
agagtcaaacactac

SEQ ID NO: 1819969 - DNA, 15 bp, Homo sapiens
gagtcaaacactacg

SEQ ID NO: 1819970 - DNA, 15 bp, Homo sapiens
agtcaaacactacgt

SEQ ID NO: 1819971 - DNA, 15 bp, Homo sapiens
gtcaaacactacgta

SEQ ID NO: 1819972 - DNA, 15 bp, Homo sapiens
tcaaacactacgtaa

SEQ ID NO: 1819973 - DNA, 15 bp, Homo sapiens
caaacactacgtaaa

SEQ ID NO: 1819974 - DNA, 15 bp, Homo sapiens
aaacactacgtaaaa

SEQ ID NO: 1819975 - DNA, 15 bp, Homo sapiens
aacactacgtaaaaa

SEQ ID NO: 1819976 - DNA, 15 bp, Homo sapiens
acactacgtaaaaac

SEQ ID NO: 1819977 - DNA, 15 bp, Homo sapiens
cactacgtaaaaacc

SEQ ID NO: 1819978 - DNA, 15 bp, Homo sapiens
actacgtaaaaacct

SEQ ID NO: 1819979 - DNA, 15 bp, Homo sapiens
ctacgtaaaaacctt

SEQ ID NO: 1819980 - DNA, 15 bp, Homo sapiens
tacgtaaaaaccttc

SEQ ID NO: 1819981 - DNA, 15 bp, Homo sapiens
acgtaaaaaccttca

SEQ ID NO: 1819982 - DNA, 15 bp, Homo sapiens
cgtaaaaaccttcag

SEQ ID NO: 1819983 - DNA, 15 bp, Homo sapiens
gtaaaaaccttcagc

SEQ ID NO: 1819984 - DNA, 15 bp, Homo sapiens
taaaaaccttcagct

SEQ ID NO: 1819985 - DNA, 15 bp, Homo sapiens
aaaaaccttcagctt

SEQ ID NO: 1819986 - DNA, 15 bp, Homo sapiens
aaaaccttcagctta

SEQ ID NO: 1819987 - DNA, 15 bp, Homo sapiens
aaaccttcagcttag

SEQ ID NO: 1819988 - DNA, 15 bp, Homo sapiens
aaccttcagcttagc

SEQ ID NO: 1819989 - DNA, 15 bp, Homo sapiens
accttcagcttagca

SEQ ID NO: 1819990 - DNA, 15 bp, Homo sapiens
ccttcagcttagcag

SEQ ID NO: 1819991 - DNA, 15 bp, Homo sapiens
cttcagcttagcaga

SEQ ID NO: 1819992 - DNA, 15 bp, Homo sapiens
ttcagcttagcagag

SEQ ID NO: 1819993 - DNA, 15 bp, Homo sapiens
tcagcttagcagagg

SEQ ID NO: 1819994 - DNA, 15 bp, Homo sapiens
cagcttagcagaggg

SEQ ID NO: 1819995 - DNA, 15 bp, Homo sapiens
agcttagcagagggt

SEQ ID NO: 1819996 - DNA, 15 bp, Homo sapiens
gcttagcagagggtc

SEQ ID NO: 1819997 - DNA, 15 bp, Homo sapiens
cttagcagagggtct

SEQ ID NO: 1819998 - DNA, 15 bp, Homo sapiens
ttagcagagggtctg

SEQ ID NO: 1819999 - DNA, 15 bp, Homo sapiens
tagcagagggtctgg

SEQ ID NO: 1820000 - DNA, 15 bp, Homo sapiens
agcagagggtctgga

SEQ ID NO: 1820001 - DNA, 15 bp, Homo sapiens
gcagagggtctggac

SEQ ID NO: 1820002 - DNA, 15 bp, Homo sapiens
cagagggtctggaca

SEQ ID NO: 1820003 - DNA, 15 bp, Homo sapiens
agagggtctggacaa

SEQ ID NO: 1820004 - DNA, 15 bp, Homo sapiens
gagggtctggacaat

SEQ ID NO: 1820005 - DNA, 15 bp, Homo sapiens
agggtctggacaatt

SEQ ID NO: 1820006 - DNA, 15 bp, Homo sapiens
gggtctggacaatta

SEQ ID NO: 1820007 - DNA, 15 bp, Homo sapiens
ggtctggacaattac

SEQ ID NO: 1820008 - DNA, 15 bp, Homo sapiens
gtctggacaattacc

SEQ ID NO: 1820009 - DNA, 15 bp, Homo sapiens
tctggacaattacct

SEQ ID NO: 1820010 - DNA, 15 bp, Homo sapiens
ctggacaattaccta

SEQ ID NO: 1820011 - DNA, 15 bp, Homo sapiens
tggacaattacctat

SEQ ID NO: 1820012 - DNA, 15 bp, Homo sapiens
ggacaattacctatc

SEQ ID NO: 1820013 - DNA, 15 bp, Homo sapiens
gacaattacctatca

SEQ ID NO: 1820014 - DNA, 15 bp, Homo sapiens
acaattacctatcat

SEQ ID NO: 1820015 - DNA, 15 bp, Homo sapiens
caattacctatcatg

SEQ ID NO: 1820016 - DNA, 15 bp, Homo sapiens
aattacctatcatgt

SEQ ID NO: 1820017 - DNA, 15 bp, Homo sapiens
attacctatcatgtg

SEQ ID NO: 1820018 - DNA, 15 bp, Homo sapiens
ttacctatcatgtga

SEQ ID NO: 1820019 - DNA, 15 bp, Homo sapiens
tacctatcatgtgac

SEQ ID NO: 1820020 - DNA, 15 bp, Homo sapiens
acctatcatgtgaca

SEQ ID NO: 1820021 - DNA, 15 bp, Homo sapiens
cctatcatgtgacag

SEQ ID NO: 1820022 - DNA, 15 bp, Homo sapiens
ctatcatgtgacagc

SEQ ID NO: 1820023 - DNA, 15 bp, Homo sapiens
tatcatgtgacagct

SEQ ID NO: 1820024 - DNA, 15 bp, Homo sapiens
atcatgtgacagcta

SEQ ID NO: 1820025 - DNA, 15 bp, Homo sapiens
tcatgtgacagctaa

SEQ ID NO: 1820026 - DNA, 15 bp, Homo sapiens
catgtgacagctaac

SEQ ID NO: 1820027 - DNA, 15 bp, Homo sapiens
atgtgacagctaacc

SEQ ID NO: 1820028 - DNA, 15 bp, Homo sapiens
tgtgacagctaacct

SEQ ID NO: 1820029 - DNA, 15 bp, Homo sapiens
gtgacagctaacctt

SEQ ID NO: 1820030 - DNA, 15 bp, Homo sapiens
tgacagctaaccttt

SEQ ID NO: 1820031 - DNA, 15 bp, Homo sapiens
gacagctaaccttta

SEQ ID NO: 1820032 - DNA, 15 bp, Homo sapiens
acagctaacctttac

SEQ ID NO: 1820033 - DNA, 15 bp, Homo sapiens
cagctaacctttacc

SEQ ID NO: 1820034 - DNA, 15 bp, Homo sapiens
agctaacctttaccc

SEQ ID NO: 1820035 - DNA, 15 bp, Homo sapiens
gctaacctttaccca

SEQ ID NO: 1820036 - DNA, 15 bp, Homo sapiens
ctaacctttacccaa

SEQ ID NO: 1820037 - DNA, 15 bp, Homo sapiens
taacctttacccaaa

SEQ ID NO: 1820038 - DNA, 15 bp, Homo sapiens
aacctttacccaaat

SEQ ID NO: 1820039 - DNA, 15 bp, Homo sapiens
acctttacccaaata

SEQ ID NO: 1820040 - DNA, 15 bp, Homo sapiens
cctttacccaaatat

SEQ ID NO: 1820041 - DNA, 15 bp, Homo sapiens
ctttacccaaatatt

SEQ ID NO: 1820042 - DNA, 15 bp, Homo sapiens
tttacccaaatattt

SEQ ID NO: 1820043 - DNA, 15 bp, Homo sapiens
ttacccaaatatttg

SEQ ID NO: 1820044 - DNA, 15 bp, Homo sapiens
tacccaaatatttgt

SEQ ID NO: 1820045 - DNA, 15 bp, Homo sapiens
acccaaatatttgtg

SEQ ID NO: 1820046 - DNA, 15 bp, Homo sapiens
cccaaatatttgtgg

SEQ ID NO: 1820047 - DNA, 15 bp, Homo sapiens
ccaaatatttgtgga

SEQ ID NO: 1820048 - DNA, 15 bp, Homo sapiens
caaatatttgtggaa

SEQ ID NO: 1820049 - DNA, 15 bp, Homo sapiens
aaatatttgtggaac

SEQ ID NO: 1820050 - DNA, 15 bp, Homo sapiens
aatatttgtggaact

SEQ ID NO: 1820051 - DNA, 15 bp, Homo sapiens
atatttgtggaactg

SEQ ID NO: 1820052 - DNA, 15 bp, Homo sapiens
tatttgtggaactgg

SEQ ID NO: 1820053 - DNA, 15 bp, Homo sapiens
atttgtggaactgga

SEQ ID NO: 1820054 - DNA, 15 bp, Homo sapiens
tttgtggaactggat

SEQ ID NO: 1820055 - DNA, 15 bp, Homo sapiens
ttgtggaactggata

SEQ ID NO: 1820056 - DNA, 15 bp, Homo sapiens
tgtggaactggatac

SEQ ID NO: 1820057 - DNA, 15 bp, Homo sapiens
gtggaactggatact

SEQ ID NO: 1820058 - DNA, 15 bp, Homo sapiens
tggaactggatacta

SEQ ID NO: 1820059 - DNA, 15 bp, Homo sapiens
ggaactggatactaa

SEQ ID NO: 1820060 - DNA, 15 bp, Homo sapiens
gaactggatactaaa

SEQ ID NO: 1820061 - DNA, 15 bp, Homo sapiens
aactggatactaaaa

SEQ ID NO: 1820062 - DNA, 15 bp, Homo sapiens
actggatactaaaat

SEQ ID NO: 1820063 - DNA, 15 bp, Homo sapiens
ctggatactaaaata

SEQ ID NO: 1820064 - DNA, 15 bp, Homo sapiens
tggatactaaaataa

SEQ ID NO: 1820065 - DNA, 15 bp, Homo sapiens
ggatactaaaataag

SEQ ID NO: 1820066 - DNA, 15 bp, Homo sapiens
gatactaaaataagc

SEQ ID NO: 1820067 - DNA, 15 bp, Homo sapiens
atactaaaataagct

SEQ ID NO: 1820068 - DNA, 15 bp, Homo sapiens
tactaaaataagctt

SEQ ID NO: 1820069 - DNA, 15 bp, Homo sapiens
actaaaataagcttc

SEQ ID NO: 1820070 - DNA, 15 bp, Homo sapiens
ctaaaataagcttcc

SEQ ID NO: 1820071 - DNA, 15 bp, Homo sapiens
taaaataagcttcca

SEQ ID NO: 1820072 - DNA, 15 bp, Homo sapiens
aaaataagcttccaa

SEQ ID NO: 1820073 - DNA, 15 bp, Homo sapiens
aaataagcttccaag

SEQ ID NO: 1820074 - DNA, 15 bp, Homo sapiens
aataagcttccaagt

SEQ ID NO: 1820075 - DNA, 15 bp, Homo sapiens
ataagcttccaagtt

SEQ ID NO: 1820076 - DNA, 15 bp, Homo sapiens
taagcttccaagttg

SEQ ID NO: 1820077 - DNA, 15 bp, Homo sapiens
aagcttccaagttgc

SEQ ID NO: 1820078 - DNA, 15 bp, Homo sapiens
agcttccaagttgct

SEQ ID NO: 1820079 - DNA, 15 bp, Homo sapiens
gcttccaagttgctg

SEQ ID NO: 1820080 - DNA, 15 bp, Homo sapiens
cttccaagttgctga

SEQ ID NO: 1820081 - DNA, 15 bp, Homo sapiens
ttccaagttgctgag

SEQ ID NO: 1820082 - DNA, 15 bp, Homo sapiens
tccaagttgctgaga

SEQ ID NO: 1820083 - DNA, 15 bp, Homo sapiens
ccaagttgctgagac

SEQ ID NO: 1820084 - DNA, 15 bp, Homo sapiens
caagttgctgagaca

SEQ ID NO: 1820085 - DNA, 15 bp, Homo sapiens
aagttgctgagacag

SEQ ID NO: 1820086 - DNA, 15 bp, Homo sapiens
agttgctgagacagg

SEQ ID NO: 1820087 - DNA, 15 bp, Homo sapiens
gttgctgagacagga

SEQ ID NO: 1820088 - DNA, 15 bp, Homo sapiens
ttgctgagacaggaa

SEQ ID NO: 1820089 - DNA, 15 bp, Homo sapiens
tgctgagacaggaag

SEQ ID NO: 1820090 - DNA, 15 bp, Homo sapiens
gctgagacaggaaga

SEQ ID NO: 1820091 - DNA, 15 bp, Homo sapiens
ctgagacaggaagaa

SEQ ID NO: 1820092 - DNA, 15 bp, Homo sapiens
tgagacaggaagaaa

SEQ ID NO: 1820093 - DNA, 15 bp, Homo sapiens
gagacaggaagaaag

SEQ ID NO: 1820094 - DNA, 15 bp, Homo sapiens
agacaggaagaaaga

SEQ ID NO: 1820095 - DNA, 15 bp, Homo sapiens
gacaggaagaaagag

SEQ ID NO: 1820096 - DNA, 15 bp, Homo sapiens
acaggaagaaagaga

SEQ ID NO: 1820097 - DNA, 15 bp, Homo sapiens
caggaagaaagagaa

SEQ ID NO: 1820098 - DNA, 15 bp, Homo sapiens
aggaagaaagagaag

SEQ ID NO: 1820099 - DNA, 15 bp, Homo sapiens
ggaagaaagagaagc

SEQ ID NO: 1820100 - DNA, 15 bp, Homo sapiens
gaagaaagagaagcc

SEQ ID NO: 1820101 - DNA, 15 bp, Homo sapiens
aagaaagagaagcca

SEQ ID NO: 1820102 - DNA, 15 bp, Homo sapiens
agaaagagaagccaa

SEQ ID NO: 1820103 - DNA, 15 bp, Homo sapiens
gaaagagaagccaag

SEQ ID NO: 1820104 - DNA, 15 bp, Homo sapiens
aaagagaagccaaga

SEQ ID NO: 1820105 - DNA, 15 bp, Homo sapiens
gagaagccaagaagt

SEQ ID NO: 1820106 - DNA, 15 bp, Homo sapiens
agaagccaagaagtt

SEQ ID NO: 1820107 - DNA, 15 bp, Homo sapiens
gaagccaagaagttg

SEQ ID NO: 1820108 - DNA, 15 bp, Homo sapiens
aagccaagaagttgt

SEQ ID NO: 1820109 - DNA, 15 bp, Homo sapiens
agccaagaagttgtt

SEQ ID NO: 1820110 - DNA, 15 bp, Homo sapiens
gccaagaagttgttc

SEQ ID NO: 1820111 - DNA, 15 bp, Homo sapiens
ccaagaagttgttcc

SEQ ID NO: 1820112 - DNA, 15 bp, Homo sapiens
caagaagttgttcct

SEQ ID NO: 1820113 - DNA, 15 bp, Homo sapiens
aagaagttgttccta

SEQ ID NO: 1820114 - DNA, 15 bp, Homo sapiens
agaagttgttcctag

SEQ ID NO: 1820115 - DNA, 15 bp, Homo sapiens
gaagttgttcctagc

SEQ ID NO: 1820116 - DNA, 15 bp, Homo sapiens
aagttgttcctagcc

SEQ ID NO: 1820117 - DNA, 15 bp, Homo sapiens
agttgttcctagccc

SEQ ID NO: 1820118 - DNA, 15 bp, Homo sapiens
gttgttcctagccca

SEQ ID NO: 1820119 - DNA, 15 bp, Homo sapiens
ttgttcctagcccat

SEQ ID NO: 1820120 - DNA, 15 bp, Homo sapiens
tgttcctagcccatt

SEQ ID NO: 1820121 - DNA, 15 bp, Homo sapiens
gttcctagcccattt

SEQ ID NO: 1820122 - DNA, 15 bp, Homo sapiens
ttcctagcccatttt

SEQ ID NO: 1820123 - DNA, 15 bp, Homo sapiens
tcctagcccattttc

SEQ ID NO: 1820124 - DNA, 15 bp, Homo sapiens
cctagcccattttca

SEQ ID NO: 1820125 - DNA, 15 bp, Homo sapiens
ctagcccattttcag

SEQ ID NO: 1820126 - DNA, 15 bp, Homo sapiens
tagcccattttcaga

SEQ ID NO: 1820127 - DNA, 15 bp, Homo sapiens
agcccattttcagaa

SEQ ID NO: 1820128 - DNA, 15 bp, Homo sapiens
gcccattttcagaat

SEQ ID NO: 1820129 - DNA, 15 bp, Homo sapiens
cccattttcagaata

SEQ ID NO: 1820130 - DNA, 15 bp, Homo sapiens
ccattttcagaatag

SEQ ID NO: 1820131 - DNA, 15 bp, Homo sapiens
cattttcagaatagg

SEQ ID NO: 1820132 - DNA, 15 bp, Homo sapiens
attttcagaatagga

SEQ ID NO: 1820133 - DNA, 15 bp, Homo sapiens
ttttcagaataggaa

SEQ ID NO: 1820134 - DNA, 15 bp, Homo sapiens
tttcagaataggaag

SEQ ID NO: 1820135 - DNA, 15 bp, Homo sapiens
ttcagaataggaagt

SEQ ID NO: 1820136 - DNA, 15 bp, Homo sapiens
tcagaataggaagtt

SEQ ID NO: 1820137 - DNA, 15 bp, Homo sapiens
cagaataggaagttt

SEQ ID NO: 1820138 - DNA, 15 bp, Homo sapiens
agaataggaagttta

SEQ ID NO: 1820139 - DNA, 15 bp, Homo sapiens
gaataggaagtttat

SEQ ID NO: 1820140 - DNA, 15 bp, Homo sapiens
aataggaagtttata

SEQ ID NO: 1820141 - DNA, 15 bp, Homo sapiens
ataggaagtttatag

SEQ ID NO: 1820142 - DNA, 15 bp, Homo sapiens
taggaagtttatagt

SEQ ID NO: 1820143 - DNA, 15 bp, Homo sapiens
aggaagtttatagtg

SEQ ID NO: 1820144 - DNA, 15 bp, Homo sapiens
ggaagtttatagtga

SEQ ID NO: 1820145 - DNA, 15 bp, Homo sapiens
gaagtttatagtgat

SEQ ID NO: 1820146 - DNA, 15 bp, Homo sapiens
aagtttatagtgatt

SEQ ID NO: 1820147 - DNA, 15 bp, Homo sapiens
agtttatagtgatta

SEQ ID NO: 1820148 - DNA, 15 bp, Homo sapiens
gtttatagtgattaa

SEQ ID NO: 1820149 - DNA, 15 bp, Homo sapiens
tttatagtgattaaa

SEQ ID NO: 1820150 - DNA, 15 bp, Homo sapiens
ttatagtgattaaac

SEQ ID NO: 1820151 - DNA, 15 bp, Homo sapiens
tatagtgattaaaca

SEQ ID NO: 1820152 - DNA, 15 bp, Homo sapiens
atagtgattaaacag

SEQ ID NO: 1820153 - DNA, 15 bp, Homo sapiens
tagtgattaaacagc

SEQ ID NO: 1820154 - DNA, 15 bp, Homo sapiens
agtgattaaacagcg

SEQ ID NO: 1820155 - DNA, 15 bp, Homo sapiens
gtgattaaacagcga

SEQ ID NO: 1820156 - DNA, 15 bp, Homo sapiens
tgattaaacagcgag

SEQ ID NO: 1820157 - DNA, 15 bp, Homo sapiens
gattaaacagcgaga

SEQ ID NO: 1820158 - DNA, 15 bp, Homo sapiens
attaaacagcgagac

SEQ ID NO: 1820159 - DNA, 15 bp, Homo sapiens
ttaaacagcgagaca

SEQ ID NO: 1820160 - DNA, 15 bp, Homo sapiens
taaacagcgagacat

SEQ ID NO: 1820161 - DNA, 15 bp, Homo sapiens
aaacagcgagacata

SEQ ID NO: 1820162 - DNA, 15 bp, Homo sapiens
aacagcgagacatag

SEQ ID NO: 1820163 - DNA, 15 bp, Homo sapiens
acagcgagacatagt

SEQ ID NO: 1820164 - DNA, 15 bp, Homo sapiens
cagcgagacatagtt

SEQ ID NO: 1820165 - DNA, 15 bp, Homo sapiens
agcgagacatagttt

SEQ ID NO: 1820166 - DNA, 15 bp, Homo sapiens
gcgagacatagttta

SEQ ID NO: 1820167 - DNA, 15 bp, Homo sapiens
cgagacatagtttag

SEQ ID NO: 1820168 - DNA, 15 bp, Homo sapiens
gagacatagtttagc

SEQ ID NO: 1820169 - DNA, 15 bp, Homo sapiens
agacatagtttagcc

SEQ ID NO: 1820170 - DNA, 15 bp, Homo sapiens
gacatagtttagccg

SEQ ID NO: 1820171 - DNA, 15 bp, Homo sapiens
acatagtttagccgc

SEQ ID NO: 1820172 - DNA, 15 bp, Homo sapiens
catagtttagccgca

SEQ ID NO: 1820173 - DNA, 15 bp, Homo sapiens
atagtttagccgcaa

SEQ ID NO: 1820174 - DNA, 15 bp, Homo sapiens
tagtttagccgcaat

SEQ ID NO: 1820175 - DNA, 15 bp, Homo sapiens
agtttagccgcaata

SEQ ID NO: 1820176 - DNA, 15 bp, Homo sapiens
gtttagccgcaatag

SEQ ID NO: 1820177 - DNA, 15 bp, Homo sapiens
tttagccgcaatagg

SEQ ID NO: 1820178 - DNA, 15 bp, Homo sapiens
ttagccgcaataggg

SEQ ID NO: 1820179 - DNA, 15 bp, Homo sapiens
tagccgcaatagggc

SEQ ID NO: 1820180 - DNA, 15 bp, Homo sapiens
agccgcaatagggcc

SEQ ID NO: 1820181 - DNA, 15 bp, Homo sapiens
gccgcaatagggccc

SEQ ID NO: 1820182 - DNA, 15 bp, Homo sapiens
ccgcaatagggccct

SEQ ID NO: 1820183 - DNA, 15 bp, Homo sapiens
cgcaatagggcccta

SEQ ID NO: 1820184 - DNA, 15 bp, Homo sapiens
gcaatagggccctag

SEQ ID NO: 1820185 - DNA, 15 bp, Homo sapiens
caatagggccctagc

SEQ ID NO: 1820186 - DNA, 15 bp, Homo sapiens
aatagggccctagca

SEQ ID NO: 1820187 - DNA, 15 bp, Homo sapiens
atagggccctagcac

SEQ ID NO: 1820188 - DNA, 15 bp, Homo sapiens
tagggccctagcacg

SEQ ID NO: 1820189 - DNA, 15 bp, Homo sapiens
agggccctagcacga

SEQ ID NO: 1820190 - DNA, 15 bp, Homo sapiens
gggccctagcacgaa

SEQ ID NO: 1820191 - DNA, 15 bp, Homo sapiens
ggccctagcacgaag

SEQ ID NO: 1820192 - DNA, 15 bp, Homo sapiens
gccctagcacgaagg

SEQ ID NO: 1820193 - DNA, 15 bp, Homo sapiens
ccctagcacgaaggc

SEQ ID NO: 1820194 - DNA, 15 bp, Homo sapiens
cctagcacgaaggcc

SEQ ID NO: 1820195 - DNA, 15 bp, Homo sapiens
ctagcacgaaggcca

SEQ ID NO: 1820196 - DNA, 15 bp, Homo sapiens
tagcacgaaggccat

SEQ ID NO: 1820197 - DNA, 15 bp, Homo sapiens
agcacgaaggccatt

SEQ ID NO: 1820198 - DNA, 15 bp, Homo sapiens
gcacgaaggccattc

SEQ ID NO: 1820199 - DNA, 15 bp, Homo sapiens
cacgaaggccattcc

SEQ ID NO: 1820200 - DNA, 15 bp, Homo sapiens
acgaaggccattcct

SEQ ID NO: 1820201 - DNA, 15 bp, Homo sapiens
cgaaggccattcctt

SEQ ID NO: 1820202 - DNA, 15 bp, Homo sapiens
gaaggccattccttc

SEQ ID NO: 1820203 - DNA, 15 bp, Homo sapiens
aaggccattccttcc

SEQ ID NO: 1820204 - DNA, 15 bp, Homo sapiens
aggccattccttcca

SEQ ID NO: 1820205 - DNA, 15 bp, Homo sapiens
ggccattccttccat

SEQ ID NO: 1820206 - DNA, 15 bp, Homo sapiens
gccattccttccatc

SEQ ID NO: 1820207 - DNA, 15 bp, Homo sapiens
ccattccttccatcc

SEQ ID NO: 1820208 - DNA, 15 bp, Homo sapiens
cattccttccatcct

SEQ ID NO: 1820209 - DNA, 15 bp, Homo sapiens
attccttccatcctc

SEQ ID NO: 1820210 - DNA, 15 bp, Homo sapiens
ttccttccatcctcc

SEQ ID NO: 1820211 - DNA, 15 bp, Homo sapiens
tccttccatcctccc

SEQ ID NO: 1820212 - DNA, 15 bp, Homo sapiens
ccttccatcctccct

SEQ ID NO: 1820213 - DNA, 15 bp, Homo sapiens
cttccatcctccctt

SEQ ID NO: 1820214 - DNA, 15 bp, Homo sapiens
ttccatcctcccttc

SEQ ID NO: 1820215 - DNA, 15 bp, Homo sapiens
tccatcctcccttcc

SEQ ID NO: 1820216 - DNA, 15 bp, Homo sapiens
ccatcctcccttcct

SEQ ID NO: 1820217 - DNA, 15 bp, Homo sapiens
catcctcccttcctt

SEQ ID NO: 1820218 - DNA, 15 bp, Homo sapiens
atcctcccttccttg

SEQ ID NO: 1820219 - DNA, 15 bp, Homo sapiens
tcctcccttccttgt

SEQ ID NO: 1820220 - DNA, 15 bp, Homo sapiens
cctcccttccttgtt

SEQ ID NO: 1820221 - DNA, 15 bp, Homo sapiens
ctcccttccttgttt

SEQ ID NO: 1820222 - DNA, 15 bp, Homo sapiens
tcccttccttgtttt

SEQ ID NO: 1820223 - DNA, 15 bp, Homo sapiens
cccttccttgttttt

SEQ ID NO: 1820224 - DNA, 15 bp, Homo sapiens
ccttccttgtttttg

SEQ ID NO: 1820225 - DNA, 15 bp, Homo sapiens
cttccttgtttttgg

SEQ ID NO: 1820226 - DNA, 15 bp, Homo sapiens
ttccttgtttttggc

SEQ ID NO: 1820227 - DNA, 15 bp, Homo sapiens
tccttgtttttggcc

SEQ ID NO: 1820228 - DNA, 15 bp, Homo sapiens
ccttgtttttggcct

SEQ ID NO: 1820229 - DNA, 15 bp, Homo sapiens
cttgtttttggccta

SEQ ID NO: 1820230 - DNA, 15 bp, Homo sapiens
ttgtttttggcctaa

SEQ ID NO: 1820231 - DNA, 15 bp, Homo sapiens
tgtttttggcctaag

SEQ ID NO: 1820232 - DNA, 15 bp, Homo sapiens
gtttttggcctaagt

SEQ ID NO: 1820233 - DNA, 15 bp, Homo sapiens
tttttggcctaagtg

SEQ ID NO: 1820234 - DNA, 15 bp, Homo sapiens
ttttggcctaagtgt

SEQ ID NO: 1820235 - DNA, 15 bp, Homo sapiens
tttggcctaagtgtt

SEQ ID NO: 1820236 - DNA, 15 bp, Homo sapiens
ttggcctaagtgttc

SEQ ID NO: 1820237 - DNA, 15 bp, Homo sapiens
tggcctaagtgttca

SEQ ID NO: 1820238 - DNA, 15 bp, Homo sapiens
ggcctaagtgttcac

SEQ ID NO: 1820239 - DNA, 15 bp, Homo sapiens
gcctaagtgttcact

SEQ ID NO: 1820240 - DNA, 15 bp, Homo sapiens
cctaagtgttcactg

SEQ ID NO: 1820241 - DNA, 15 bp, Homo sapiens
ctaagtgttcactgc

SEQ ID NO: 1820242 - DNA, 15 bp, Homo sapiens
taagtgttcactgcc

SEQ ID NO: 1820243 - DNA, 15 bp, Homo sapiens
aagtgttcactgcct

SEQ ID NO: 1820244 - DNA, 15 bp, Homo sapiens
agtgttcactgcctc

SEQ ID NO: 1820245 - DNA, 15 bp, Homo sapiens
gtgttcactgcctct

SEQ ID NO: 1820246 - DNA, 15 bp, Homo sapiens
tgttcactgcctctt

SEQ ID NO: 1820247 - DNA, 15 bp, Homo sapiens
gttcactgcctcttc

SEQ ID NO: 1820248 - DNA, 15 bp, Homo sapiens
ttcactgcctcttcc

SEQ ID NO: 1820249 - DNA, 15 bp, Homo sapiens
tcactgcctcttcca

SEQ ID NO: 1820250 - DNA, 15 bp, Homo sapiens
cactgcctcttccag

SEQ ID NO: 1820251 - DNA, 15 bp, Homo sapiens
actgcctcttccagg

SEQ ID NO: 1820252 - DNA, 15 bp, Homo sapiens
ctgcctcttccagga

SEQ ID NO: 1820253 - DNA, 15 bp, Homo sapiens
tgcctcttccaggaa

SEQ ID NO: 1820254 - DNA, 15 bp, Homo sapiens
gcctcttccaggaag

SEQ ID NO: 1820255 - DNA, 15 bp, Homo sapiens
cctcttccaggaagc

SEQ ID NO: 1820256 - DNA, 15 bp, Homo sapiens
ctcttccaggaagca

SEQ ID NO: 1820257 - DNA, 15 bp, Homo sapiens
tcttccaggaagcag

SEQ ID NO: 1820258 - DNA, 15 bp, Homo sapiens
cttccaggaagcaga

SEQ ID NO: 1820259 - DNA, 15 bp, Homo sapiens
ttccaggaagcagac

SEQ ID NO: 1820260 - DNA, 15 bp, Homo sapiens
tccaggaagcagaca

SEQ ID NO: 1820261 - DNA, 15 bp, Homo sapiens
ccaggaagcagacag

SEQ ID NO: 1820262 - DNA, 15 bp, Homo sapiens
caggaagcagacagt

SEQ ID NO: 1820263 - DNA, 15 bp, Homo sapiens
aggaagcagacagta

SEQ ID NO: 1820264 - DNA, 15 bp, Homo sapiens
ggaagcagacagtag

SEQ ID NO: 1820265 - DNA, 15 bp, Homo sapiens
gaagcagacagtaga

SEQ ID NO: 1820266 - DNA, 15 bp, Homo sapiens
aagcagacagtagac

SEQ ID NO: 1820267 - DNA, 15 bp, Homo sapiens
agcagacagtagaca

SEQ ID NO: 1820268 - DNA, 15 bp, Homo sapiens
gcagacagtagacag

SEQ ID NO: 1820269 - DNA, 15 bp, Homo sapiens
cagacagtagacagg

SEQ ID NO: 1820270 - DNA, 15 bp, Homo sapiens
agacagtagacaggt

SEQ ID NO: 1820271 - DNA, 15 bp, Homo sapiens
gacagtagacaggtg

SEQ ID NO: 1820272 - DNA, 15 bp, Homo sapiens
acagtagacaggtga

SEQ ID NO: 1820273 - DNA, 15 bp, Homo sapiens
cagtagacaggtgaa

SEQ ID NO: 1820274 - DNA, 15 bp, Homo sapiens
agtagacaggtgaag

SEQ ID NO: 1820275 - DNA, 15 bp, Homo sapiens
gtagacaggtgaagt

SEQ ID NO: 1820276 - DNA, 15 bp, Homo sapiens
tagacaggtgaagtc

SEQ ID NO: 1820277 - DNA, 15 bp, Homo sapiens
agacaggtgaagtca

SEQ ID NO: 1820278 - DNA, 15 bp, Homo sapiens
gacaggtgaagtcac

SEQ ID NO: 1820279 - DNA, 15 bp, Homo sapiens
acaggtgaagtcaca

SEQ ID NO: 1820280 - DNA, 15 bp, Homo sapiens
caggtgaagtcacat

SEQ ID NO: 1820281 - DNA, 15 bp, Homo sapiens
aggtgaagtcacatg

SEQ ID NO: 1820282 - DNA, 15 bp, Homo sapiens
ggtgaagtcacatgc

SEQ ID NO: 1820283 - DNA, 15 bp, Homo sapiens
gtgaagtcacatgcc

SEQ ID NO: 1820284 - DNA, 15 bp, Homo sapiens
tgaagtcacatgcct

SEQ ID NO: 1820285 - DNA, 15 bp, Homo sapiens
gaagtcacatgcctg

SEQ ID NO: 1820286 - DNA, 15 bp, Homo sapiens
aagtcacatgcctgg

SEQ ID NO: 1820287 - DNA, 15 bp, Homo sapiens
agtcacatgcctggt

SEQ ID NO: 1820288 - DNA, 15 bp, Homo sapiens
gtcacatgcctggtg

SEQ ID NO: 1820289 - DNA, 15 bp, Homo sapiens
tcacatgcctggtgg

SEQ ID NO: 1820290 - DNA, 15 bp, Homo sapiens
cacatgcctggtggc

SEQ ID NO: 1820291 - DNA, 15 bp, Homo sapiens
acatgcctggtggct

SEQ ID NO: 1820292 - DNA, 15 bp, Homo sapiens
catgcctggtggctt

SEQ ID NO: 1820293 - DNA, 15 bp, Homo sapiens
atgcctggtggcttg

SEQ ID NO: 1820294 - DNA, 15 bp, Homo sapiens
tgcctggtggcttgc

SEQ ID NO: 1820295 - DNA, 15 bp, Homo sapiens
gcctggtggcttgct

SEQ ID NO: 1820296 - DNA, 15 bp, Homo sapiens
cctggtggcttgctg

SEQ ID NO: 1820297 - DNA, 15 bp, Homo sapiens
ctggtggcttgctga

SEQ ID NO: 1820298 - DNA, 15 bp, Homo sapiens
tggtggcttgctgac

SEQ ID NO: 1820299 - DNA, 15 bp, Homo sapiens
ggtggcttgctgact

SEQ ID NO: 1820300 - DNA, 15 bp, Homo sapiens
gtggcttgctgactt

SEQ ID NO: 1820301 - DNA, 15 bp, Homo sapiens
tggcttgctgacttg

SEQ ID NO: 1820302 - DNA, 15 bp, Homo sapiens
ggcttgctgacttgc

SEQ ID NO: 1820303 - DNA, 15 bp, Homo sapiens
gcttgctgacttgcg

SEQ ID NO: 1820304 - DNA, 15 bp, Homo sapiens
cttgctgacttgcgt

SEQ ID NO: 1820305 - DNA, 15 bp, Homo sapiens
ttgctgacttgcgtc

SEQ ID NO: 1820306 - DNA, 15 bp, Homo sapiens
tgctgacttgcgtcc

SEQ ID NO: 1820307 - DNA, 15 bp, Homo sapiens
gctgacttgcgtccc

SEQ ID NO: 1820308 - DNA, 15 bp, Homo sapiens
ctgacttgcgtcccc

SEQ ID NO: 1820309 - DNA, 15 bp, Homo sapiens
tgacttgcgtccccg

SEQ ID NO: 1820310 - DNA, 15 bp, Homo sapiens
gacttgcgtccccgt

SEQ ID NO: 1820311 - DNA, 15 bp, Homo sapiens
acttgcgtccccgtc

SEQ ID NO: 1820312 - DNA, 15 bp, Homo sapiens
cttgcgtccccgtcc

SEQ ID NO: 1820313 - DNA, 15 bp, Homo sapiens
ttgcgtccccgtcct

SEQ ID NO: 1820314 - DNA, 15 bp, Homo sapiens
tgcgtccccgtcctt

SEQ ID NO: 1820315 - DNA, 15 bp, Homo sapiens
gcgtccccgtccttt

SEQ ID NO: 1820316 - DNA, 15 bp, Homo sapiens
cgtccccgtcctttt

SEQ ID NO: 1820317 - DNA, 15 bp, Homo sapiens
gtccccgtccttttc

SEQ ID NO: 1820318 - DNA, 15 bp, Homo sapiens
tccccgtccttttct

SEQ ID NO: 1820319 - DNA, 15 bp, Homo sapiens
ccccgtccttttctg

SEQ ID NO: 1820320 - DNA, 15 bp, Homo sapiens
cccgtccttttctgt

SEQ ID NO: 1820321 - DNA, 15 bp, Homo sapiens
ccgtccttttctgtt

SEQ ID NO: 1820322 - DNA, 15 bp, Homo sapiens
cgtccttttctgttg

SEQ ID NO: 1820323 - DNA, 15 bp, Homo sapiens
gtccttttctgttgg

SEQ ID NO: 1820324 - DNA, 15 bp, Homo sapiens
tccttttctgttgga

SEQ ID NO: 1820325 - DNA, 15 bp, Homo sapiens
ccttttctgttggag

SEQ ID NO: 1820326 - DNA, 15 bp, Homo sapiens
cttttctgttggaga

SEQ ID NO: 1820327 - DNA, 15 bp, Homo sapiens
ttttctgttggagaa

SEQ ID NO: 1820328 - DNA, 15 bp, Homo sapiens
tttctgttggagaag

SEQ ID NO: 1820329 - DNA, 15 bp, Homo sapiens
ttctgttggagaagg

SEQ ID NO: 1820330 - DNA, 15 bp, Homo sapiens
tctgttggagaaggg

SEQ ID NO: 1820331 - DNA, 15 bp, Homo sapiens
ctgttggagaagggc

SEQ ID NO: 1820332 - DNA, 15 bp, Homo sapiens
tgttggagaagggca

SEQ ID NO: 1820333 - DNA, 15 bp, Homo sapiens
gttggagaagggcag

SEQ ID NO: 1820334 - DNA, 15 bp, Homo sapiens
ttggagaagggcagg

SEQ ID NO: 1820335 - DNA, 15 bp, Homo sapiens
tggagaagggcagga

SEQ ID NO: 1820336 - DNA, 15 bp, Homo sapiens
ggagaagggcaggat

SEQ ID NO: 1820337 - DNA, 15 bp, Homo sapiens
gagaagggcaggatg

SEQ ID NO: 1820338 - DNA, 15 bp, Homo sapiens
agaagggcaggatgg

SEQ ID NO: 1820339 - DNA, 15 bp, Homo sapiens
gaagggcaggatggc

SEQ ID NO: 1820340 - DNA, 15 bp, Homo sapiens
aagggcaggatggca

SEQ ID NO: 1820341 - DNA, 15 bp, Homo sapiens
agggcaggatggcag

SEQ ID NO: 1820342 - DNA, 15 bp, Homo sapiens
gggcaggatggcagt

SEQ ID NO: 1820343 - DNA, 15 bp, Homo sapiens
ggcaggatggcagtg

SEQ ID NO: 1820344 - DNA, 15 bp, Homo sapiens
gcaggatggcagtgc

SEQ ID NO: 1820345 - DNA, 15 bp, Homo sapiens
caggatggcagtgcg

SEQ ID NO: 1820346 - DNA, 15 bp, Homo sapiens
aggatggcagtgcgg

SEQ ID NO: 1820347 - DNA, 15 bp, Homo sapiens
ggatggcagtgcgga

SEQ ID NO: 1820348 - DNA, 15 bp, Homo sapiens
gatggcagtgcggag

SEQ ID NO: 1820349 - DNA, 15 bp, Homo sapiens
atggcagtgcggagg

SEQ ID NO: 1820350 - DNA, 15 bp, Homo sapiens
tggcagtgcggaggg

SEQ ID NO: 1820351 - DNA, 15 bp, Homo sapiens
ggcagtgcggaggga

SEQ ID NO: 1820352 - DNA, 15 bp, Homo sapiens
gcagtgcggagggat

SEQ ID NO: 1820353 - DNA, 15 bp, Homo sapiens
cagtgcggagggatg

SEQ ID NO: 1820354 - DNA, 15 bp, Homo sapiens
agtgcggagggatgg

SEQ ID NO: 1820355 - DNA, 15 bp, Homo sapiens
gtgcggagggatggc

SEQ ID NO: 1820356 - DNA, 15 bp, Homo sapiens
tgcggagggatggct

SEQ ID NO: 1820357 - DNA, 15 bp, Homo sapiens
gcggagggatggctc

SEQ ID NO: 1820358 - DNA, 15 bp, Homo sapiens
cggagggatggctca

SEQ ID NO: 1820359 - DNA, 15 bp, Homo sapiens
ggagggatggctcac

SEQ ID NO: 1820360 - DNA, 15 bp, Homo sapiens
gagggatggctcacc

SEQ ID NO: 1820361 - DNA, 15 bp, Homo sapiens
agggatggctcacca

SEQ ID NO: 1820362 - DNA, 15 bp, Homo sapiens
gggatggctcaccat

SEQ ID NO: 1820363 - DNA, 15 bp, Homo sapiens
ggatggctcaccata

SEQ ID NO: 1820364 - DNA, 15 bp, Homo sapiens
gatggctcaccatag

SEQ ID NO: 1820365 - DNA, 15 bp, Homo sapiens
atggctcaccatagc

SEQ ID NO: 1820366 - DNA, 15 bp, Homo sapiens
tggctcaccatagca

SEQ ID NO: 1820367 - DNA, 15 bp, Homo sapiens
ggctcaccatagcag

SEQ ID NO: 1820368 - DNA, 15 bp, Homo sapiens
gctcaccatagcagt

SEQ ID NO: 1820369 - DNA, 15 bp, Homo sapiens
ctcaccatagcagtg

SEQ ID NO: 1820370 - DNA, 15 bp, Homo sapiens
tcaccatagcagtgg

SEQ ID NO: 1820371 - DNA, 15 bp, Homo sapiens
caccatagcagtgga

SEQ ID NO: 1820372 - DNA, 15 bp, Homo sapiens
accatagcagtggag

SEQ ID NO: 1820373 - DNA, 15 bp, Homo sapiens
ccatagcagtggaga

SEQ ID NO: 1820374 - DNA, 15 bp, Homo sapiens
catagcagtggagaa

SEQ ID NO: 1820375 - DNA, 15 bp, Homo sapiens
atagcagtggagaat

SEQ ID NO: 1820376 - DNA, 15 bp, Homo sapiens
tagcagtggagaatc

SEQ ID NO: 1820377 - DNA, 15 bp, Homo sapiens
agcagtggagaatct

SEQ ID NO: 1820378 - DNA, 15 bp, Homo sapiens
gcagtggagaatctc

SEQ ID NO: 1820379 - DNA, 15 bp, Homo sapiens
cagtggagaatctct

SEQ ID NO: 1820380 - DNA, 15 bp, Homo sapiens
agtggagaatctctt

SEQ ID NO: 1820381 - DNA, 15 bp, Homo sapiens
gtggagaatctcttg

SEQ ID NO: 1820382 - DNA, 15 bp, Homo sapiens
tggagaatctcttgc

SEQ ID NO: 1820383 - DNA, 15 bp, Homo sapiens
ggagaatctcttgcc

SEQ ID NO: 1820384 - DNA, 15 bp, Homo sapiens
gagaatctcttgccc

SEQ ID NO: 1820385 - DNA, 15 bp, Homo sapiens
agaatctcttgcccc

SEQ ID NO: 1820386 - DNA, 15 bp, Homo sapiens
gaatctcttgcccct

SEQ ID NO: 1820387 - DNA, 15 bp, Homo sapiens
aatctcttgcccctt

SEQ ID NO: 1820388 - DNA, 15 bp, Homo sapiens
atctcttgccccttt

SEQ ID NO: 1820389 - DNA, 15 bp, Homo sapiens
tctcttgcccctttc

SEQ ID NO: 1820390 - DNA, 15 bp, Homo sapiens
ctcttgcccctttct

SEQ ID NO: 1820391 - DNA, 15 bp, Homo sapiens
tcttgcccctttcta

SEQ ID NO: 1820392 - DNA, 15 bp, Homo sapiens
cttgcccctttctaa

SEQ ID NO: 1820393 - DNA, 15 bp, Homo sapiens
ttgcccctttctaat

SEQ ID NO: 1820394 - DNA, 15 bp, Homo sapiens
tgcccctttctaatc

SEQ ID NO: 1820395 - DNA, 15 bp, Homo sapiens
gcccctttctaatcc

SEQ ID NO: 1820396 - DNA, 15 bp, Homo sapiens
cccctttctaatccg

SEQ ID NO: 1820397 - DNA, 15 bp, Homo sapiens
ccctttctaatccgc

SEQ ID NO: 1820398 - DNA, 15 bp, Homo sapiens
cctttctaatccgct

SEQ ID NO: 1820399 - DNA, 15 bp, Homo sapiens
ctttctaatccgctg

SEQ ID NO: 1820400 - DNA, 15 bp, Homo sapiens
tttctaatccgctgt

SEQ ID NO: 1820401 - DNA, 15 bp, Homo sapiens
ttctaatccgctgtg

SEQ ID NO: 1820402 - DNA, 15 bp, Homo sapiens
tctaatccgctgtga

SEQ ID NO: 1820403 - DNA, 15 bp, Homo sapiens
ctaatccgctgtgac

SEQ ID NO: 1820404 - DNA, 15 bp, Homo sapiens
taatccgctgtgacg

SEQ ID NO: 1820405 - DNA, 15 bp, Homo sapiens
aatccgctgtgacgc

SEQ ID NO: 1820406 - DNA, 15 bp, Homo sapiens
atccgctgtgacgcc

SEQ ID NO: 1820407 - DNA, 15 bp, Homo sapiens
tccgctgtgacgccc

SEQ ID NO: 1820408 - DNA, 15 bp, Homo sapiens
ccgctgtgacgcccg

SEQ ID NO: 1820409 - DNA, 15 bp, Homo sapiens
cgctgtgacgcccgg

SEQ ID NO: 1820410 - DNA, 15 bp, Homo sapiens
gctgtgacgcccgga

SEQ ID NO: 1820411 - DNA, 15 bp, Homo sapiens
ctgtgacgcccggat

SEQ ID NO: 1820412 - DNA, 15 bp, Homo sapiens
tgtgacgcccggatg

SEQ ID NO: 1820413 - DNA, 15 bp, Homo sapiens
gtgacgcccggatgg

SEQ ID NO: 1820414 - DNA, 15 bp, Homo sapiens
tgacgcccggatggt

SEQ ID NO: 1820415 - DNA, 15 bp, Homo sapiens
gacgcccggatggtg

SEQ ID NO: 1820416 - DNA, 15 bp, Homo sapiens
acgcccggatggtgg

SEQ ID NO: 1820417 - DNA, 15 bp, Homo sapiens
cgcccggatggtggc

SEQ ID NO: 1820418 - DNA, 15 bp, Homo sapiens
gcccggatggtggcg

SEQ ID NO: 1820419 - DNA, 15 bp, Homo sapiens
cccggatggtggcga

SEQ ID NO: 1820420 - DNA, 15 bp, Homo sapiens
ccggatggtggcgac

SEQ ID NO: 1820421 - DNA, 15 bp, Homo sapiens
cggatggtggcgaca

SEQ ID NO: 1820422 - DNA, 15 bp, Homo sapiens
ggatggtggcgacag

SEQ ID NO: 1820423 - DNA, 15 bp, Homo sapiens
gatggtggcgacagt

SEQ ID NO: 1820424 - DNA, 15 bp, Homo sapiens
atggtggcgacagtg

SEQ ID NO: 1820425 - DNA, 15 bp, Homo sapiens
tggtggcgacagtgc

SEQ ID NO: 1820426 - DNA, 15 bp, Homo sapiens
ggtggcgacagtgct

SEQ ID NO: 1820427 - DNA, 15 bp, Homo sapiens
gtggcgacagtgcta

SEQ ID NO: 1820428 - DNA, 15 bp, Homo sapiens
tggcgacagtgctaa

SEQ ID NO: 1820429 - DNA, 15 bp, Homo sapiens
ggcgacagtgctaat

SEQ ID NO: 1820430 - DNA, 15 bp, Homo sapiens
gcgacagtgctaatg

SEQ ID NO: 1820431 - DNA, 15 bp, Homo sapiens
cgacagtgctaatga

SEQ ID NO: 1820432 - DNA, 15 bp, Homo sapiens
gacagtgctaatgaa

SEQ ID NO: 1820433 - DNA, 15 bp, Homo sapiens
acagtgctaatgaag

SEQ ID NO: 1820434 - DNA, 15 bp, Homo sapiens
cagtgctaatgaagg

SEQ ID NO: 1820435 - DNA, 15 bp, Homo sapiens
agtgctaatgaagga

SEQ ID NO: 1820436 - DNA, 15 bp, Homo sapiens
gtgctaatgaaggac

SEQ ID NO: 1820437 - DNA, 15 bp, Homo sapiens
tgctaatgaaggaca

SEQ ID NO: 1820438 - DNA, 15 bp, Homo sapiens
gctaatgaaggacac

SEQ ID NO: 1820439 - DNA, 15 bp, Homo sapiens
ctaatgaaggacacg

SEQ ID NO: 1820440 - DNA, 15 bp, Homo sapiens
taatgaaggacacgc

SEQ ID NO: 1820441 - DNA, 15 bp, Homo sapiens
aatgaaggacacgct

SEQ ID NO: 1820442 - DNA, 15 bp, Homo sapiens
atgaaggacacgctg

SEQ ID NO: 1820443 - DNA, 15 bp, Homo sapiens
tgaaggacacgctgg

SEQ ID NO: 1820444 - DNA, 15 bp, Homo sapiens
gaaggacacgctggt

SEQ ID NO: 1820445 - DNA, 15 bp, Homo sapiens
aaggacacgctggtg

SEQ ID NO: 1820446 - DNA, 15 bp, Homo sapiens
aggacacgctggtgt

SEQ ID NO: 1820447 - DNA, 15 bp, Homo sapiens
ggacacgctggtgtt

SEQ ID NO: 1820448 - DNA, 15 bp, Homo sapiens
gacacgctggtgttg

SEQ ID NO: 1820449 - DNA, 15 bp, Homo sapiens
acacgctggtgttgg

SEQ ID NO: 1820450 - DNA, 15 bp, Homo sapiens
cacgctggtgttggg

SEQ ID NO: 1820451 - DNA, 15 bp, Homo sapiens
acgctggtgttgggg

SEQ ID NO: 1820452 - DNA, 15 bp, Homo sapiens
cgctggtgttggggc

SEQ ID NO: 1820453 - DNA, 15 bp, Homo sapiens
gctggtgttggggct

SEQ ID NO: 1820454 - DNA, 15 bp, Homo sapiens
ctggtgttggggcta

SEQ ID NO: 1820455 - DNA, 15 bp, Homo sapiens
tggtgttggggctac

SEQ ID NO: 1820456 - DNA, 15 bp, Homo sapiens
ggtgttggggctaca

SEQ ID NO: 1820457 - DNA, 15 bp, Homo sapiens
gtgttggggctacag

SEQ ID NO: 1820458 - DNA, 15 bp, Homo sapiens
tgttggggctacagg

SEQ ID NO: 1820459 - DNA, 15 bp, Homo sapiens
gttggggctacagga

SEQ ID NO: 1820460 - DNA, 15 bp, Homo sapiens
ttggggctacaggag

SEQ ID NO: 1820461 - DNA, 15 bp, Homo sapiens
tggggctacaggagt

SEQ ID NO: 1820462 - DNA, 15 bp, Homo sapiens
ggggctacaggagtg

SEQ ID NO: 1820463 - DNA, 15 bp, Homo sapiens
gggctacaggagtgg

SEQ ID NO: 1820464 - DNA, 15 bp, Homo sapiens
ggctacaggagtggt

SEQ ID NO: 1820465 - DNA, 15 bp, Homo sapiens
gctacaggagtggtt

SEQ ID NO: 1820466 - DNA, 15 bp, Homo sapiens
ctacaggagtggttc

SEQ ID NO: 1820467 - DNA, 15 bp, Homo sapiens
tacaggagtggttca

SEQ ID NO: 1820468 - DNA, 15 bp, Homo sapiens
acaggagtggttcag

SEQ ID NO: 1820469 - DNA, 15 bp, Homo sapiens
caggagtggttcagg

SEQ ID NO: 1820470 - DNA, 15 bp, Homo sapiens
aggagtggttcagga

SEQ ID NO: 1820471 - DNA, 15 bp, Homo sapiens
ggagtggttcaggag

SEQ ID NO: 1820472 - DNA, 15 bp, Homo sapiens
gagtggttcaggagg

SEQ ID NO: 1820473 - DNA, 15 bp, Homo sapiens
agtggttcaggaggc

SEQ ID NO: 1820474 - DNA, 15 bp, Homo sapiens
gtggttcaggaggct

SEQ ID NO: 1820475 - DNA, 15 bp, Homo sapiens
tggttcaggaggctg

SEQ ID NO: 1820476 - DNA, 15 bp, Homo sapiens
ggttcaggaggctga

SEQ ID NO: 1820477 - DNA, 15 bp, Homo sapiens
gttcaggaggctgat

SEQ ID NO: 1820478 - DNA, 15 bp, Homo sapiens
ttcaggaggctgata

SEQ ID NO: 1820479 - DNA, 15 bp, Homo sapiens
tcaggaggctgataa

SEQ ID NO: 1820480 - DNA, 15 bp, Homo sapiens
caggaggctgataac

SEQ ID NO: 1820481 - DNA, 15 bp, Homo sapiens
aggaggctgataaca

SEQ ID NO: 1820482 - DNA, 15 bp, Homo sapiens
ggaggctgataacag

SEQ ID NO: 1820483 - DNA, 15 bp, Homo sapiens
gaggctgataacagg

SEQ ID NO: 1820484 - DNA, 15 bp, Homo sapiens
aggctgataacaggg

SEQ ID NO: 1820485 - DNA, 15 bp, Homo sapiens
ggctgataacaggga

SEQ ID NO: 1820486 - DNA, 15 bp, Homo sapiens
gctgataacagggaa

SEQ ID NO: 1820487 - DNA, 15 bp, Homo sapiens
ctgataacagggaag

SEQ ID NO: 1820488 - DNA, 15 bp, Homo sapiens
tgataacagggaaga

SEQ ID NO: 1820489 - DNA, 15 bp, Homo sapiens
gataacagggaagat

SEQ ID NO: 1820490 - DNA, 15 bp, Homo sapiens
ataacagggaagatg

SEQ ID NO: 1820491 - DNA, 15 bp, Homo sapiens
taacagggaagatgc

SEQ ID NO: 1820492 - DNA, 15 bp, Homo sapiens
aacagggaagatgcc

SEQ ID NO: 1820493 - DNA, 15 bp, Homo sapiens
acagggaagatgcct

SEQ ID NO: 1820494 - DNA, 15 bp, Homo sapiens
cagggaagatgcctg

SEQ ID NO: 1820495 - DNA, 15 bp, Homo sapiens
agggaagatgcctgt

SEQ ID NO: 1820496 - DNA, 15 bp, Homo sapiens
gggaagatgcctgtg

SEQ ID NO: 1820497 - DNA, 15 bp, Homo sapiens
ggaagatgcctgtgg

SEQ ID NO: 1820498 - DNA, 15 bp, Homo sapiens
gaagatgcctgtggc

SEQ ID NO: 1820499 - DNA, 15 bp, Homo sapiens
aagatgcctgtggca

SEQ ID NO: 1820500 - DNA, 15 bp, Homo sapiens
agatgcctgtggcaa

SEQ ID NO: 1820501 - DNA, 15 bp, Homo sapiens
gatgcctgtggcaag

SEQ ID NO: 1820502 - DNA, 15 bp, Homo sapiens
atgcctgtggcaagg

SEQ ID NO: 1820503 - DNA, 15 bp, Homo sapiens
tgcctgtggcaaggc

SEQ ID NO: 1820504 - DNA, 15 bp, Homo sapiens
gcctgtggcaaggcg

SEQ ID NO: 1820505 - DNA, 15 bp, Homo sapiens
cctgtggcaaggcgc

SEQ ID NO: 1820506 - DNA, 15 bp, Homo sapiens
ctgtggcaaggcgca

SEQ ID NO: 1820507 - DNA, 15 bp, Homo sapiens
tgtggcaaggcgcac

SEQ ID NO: 1820508 - DNA, 15 bp, Homo sapiens
gtggcaaggcgcacc

SEQ ID NO: 1820509 - DNA, 15 bp, Homo sapiens
tggcaaggcgcacct

SEQ ID NO: 1820510 - DNA, 15 bp, Homo sapiens
ggcaaggcgcacctg

SEQ ID NO: 1820511 - DNA, 15 bp, Homo sapiens
gcaaggcgcacctgc

SEQ ID NO: 1820512 - DNA, 15 bp, Homo sapiens
caaggcgcacctgcc

SEQ ID NO: 1820513 - DNA, 15 bp, Homo sapiens
aaggcgcacctgcct

SEQ ID NO: 1820514 - DNA, 15 bp, Homo sapiens
aggcgcacctgcctg

SEQ ID NO: 1820515 - DNA, 15 bp, Homo sapiens
ggcgcacctgcctgc

SEQ ID NO: 1820516 - DNA, 15 bp, Homo sapiens
gcgcacctgcctgct

SEQ ID NO: 1820517 - DNA, 15 bp, Homo sapiens
cgcacctgcctgctg

SEQ ID NO: 1820518 - DNA, 15 bp, Homo sapiens
gcacctgcctgctgt

SEQ ID NO: 1820519 - DNA, 15 bp, Homo sapiens
cacctgcctgctgtc

SEQ ID NO: 1820520 - DNA, 15 bp, Homo sapiens
acctgcctgctgtcg

SEQ ID NO: 1820521 - DNA, 15 bp, Homo sapiens
cctgcctgctgtcgg

SEQ ID NO: 1820522 - DNA, 15 bp, Homo sapiens
ctgcctgctgtcggt

SEQ ID NO: 1820523 - DNA, 15 bp, Homo sapiens
tgcctgctgtcggta

SEQ ID NO: 1820524 - DNA, 15 bp, Homo sapiens
gcctgctgtcggtaa

SEQ ID NO: 1820525 - DNA, 15 bp, Homo sapiens
cctgctgtcggtaac

SEQ ID NO: 1820526 - DNA, 15 bp, Homo sapiens
ctgctgtcggtaacg

SEQ ID NO: 1820527 - DNA, 15 bp, Homo sapiens
tgctgtcggtaacga

SEQ ID NO: 1820528 - DNA, 15 bp, Homo sapiens
gctgtcggtaacgat

SEQ ID NO: 1820529 - DNA, 15 bp, Homo sapiens
ctgtcggtaacgatg

SEQ ID NO: 1820530 - DNA, 15 bp, Homo sapiens
tgtcggtaacgatgc

SEQ ID NO: 1820531 - DNA, 15 bp, Homo sapiens
gtcggtaacgatgct

SEQ ID NO: 1820532 - DNA, 15 bp, Homo sapiens
tcggtaacgatgctc

SEQ ID NO: 1820533 - DNA, 15 bp, Homo sapiens
cggtaacgatgctcc

SEQ ID NO: 1820534 - DNA, 15 bp, Homo sapiens
ggtaacgatgctccc

SEQ ID NO: 1820535 - DNA, 15 bp, Homo sapiens
gtaacgatgctccct

SEQ ID NO: 1820536 - DNA, 15 bp, Homo sapiens
taacgatgctccctt

SEQ ID NO: 1820537 - DNA, 15 bp, Homo sapiens
aacgatgctcccttt

SEQ ID NO: 1820538 - DNA, 15 bp, Homo sapiens
acgatgctcccttta

SEQ ID NO: 1820539 - DNA, 15 bp, Homo sapiens
cgatgctccctttag

SEQ ID NO: 1820540 - DNA, 15 bp, Homo sapiens
gatgctccctttagg

SEQ ID NO: 1820541 - DNA, 15 bp, Homo sapiens
atgctccctttaggt

SEQ ID NO: 1820542 - DNA, 15 bp, Homo sapiens
tgctccctttaggtc

SEQ ID NO: 1820543 - DNA, 15 bp, Homo sapiens
gctccctttaggtcc

SEQ ID NO: 1820544 - DNA, 15 bp, Homo sapiens
ctccctttaggtcct

SEQ ID NO: 1820545 - DNA, 15 bp, Homo sapiens
tccctttaggtcctg

SEQ ID NO: 1820546 - DNA, 15 bp, Homo sapiens
ccctttaggtcctga

SEQ ID NO: 1820547 - DNA, 15 bp, Homo sapiens
cctttaggtcctgaa

SEQ ID NO: 1820548 - DNA, 15 bp, Homo sapiens
ctttaggtcctgaaa

SEQ ID NO: 1820549 - DNA, 15 bp, Homo sapiens
tttaggtcctgaaag

SEQ ID NO: 1820550 - DNA, 15 bp, Homo sapiens
ttaggtcctgaaagg

SEQ ID NO: 1820551 - DNA, 15 bp, Homo sapiens
taggtcctgaaaggg

SEQ ID NO: 1820552 - DNA, 15 bp, Homo sapiens
aggtcctgaaagggc

SEQ ID NO: 1820553 - DNA, 15 bp, Homo sapiens
ggtcctgaaagggca

SEQ ID NO: 1820554 - DNA, 15 bp, Homo sapiens
gtcctgaaagggcaa

SEQ ID NO: 1820555 - DNA, 15 bp, Homo sapiens
tcctgaaagggcaag

SEQ ID NO: 1820556 - DNA, 15 bp, Homo sapiens
cctgaaagggcaaga

SEQ ID NO: 1820557 - DNA, 15 bp, Homo sapiens
ctgaaagggcaagag

SEQ ID NO: 1820558 - DNA, 15 bp, Homo sapiens
tgaaagggcaagagg

SEQ ID NO: 1820559 - DNA, 15 bp, Homo sapiens
gaaagggcaagagga

SEQ ID NO: 1820560 - DNA, 15 bp, Homo sapiens
aaagggcaagaggaa

SEQ ID NO: 1820561 - DNA, 15 bp, Homo sapiens
aagggcaagaggaaa

SEQ ID NO: 1820562 - DNA, 15 bp, Homo sapiens
agggcaagaggaaag

SEQ ID NO: 1820563 - DNA, 15 bp, Homo sapiens
gggcaagaggaaaga

SEQ ID NO: 1820564 - DNA, 15 bp, Homo sapiens
ggcaagaggaaagaa

SEQ ID NO: 1820565 - DNA, 15 bp, Homo sapiens
gcaagaggaaagaag

SEQ ID NO: 1820566 - DNA, 15 bp, Homo sapiens
caagaggaaagaagg

SEQ ID NO: 1820567 - DNA, 15 bp, Homo sapiens
aagaggaaagaagga

SEQ ID NO: 1820568 - DNA, 15 bp, Homo sapiens
agaggaaagaaggaa

SEQ ID NO: 1820569 - DNA, 15 bp, Homo sapiens
gaggaaagaaggaaa

SEQ ID NO: 1820570 - DNA, 15 bp, Homo sapiens
aggaaagaaggaaaa

SEQ ID NO: 1820571 - DNA, 15 bp, Homo sapiens
ggaaagaaggaaaaa

SEQ ID NO: 1820572 - DNA, 15 bp, Homo sapiens
gaaagaaggaaaaag

SEQ ID NO: 1820573 - DNA, 15 bp, Homo sapiens
aaagaaggaaaaagg

SEQ ID NO: 1820574 - DNA, 15 bp, Homo sapiens
aagaaggaaaaaggt

SEQ ID NO: 1820575 - DNA, 15 bp, Homo sapiens
agaaggaaaaaggtg

SEQ ID NO: 1820576 - DNA, 15 bp, Homo sapiens
gaaggaaaaaggtgt

SEQ ID NO: 1820577 - DNA, 15 bp, Homo sapiens
aaggaaaaaggtgtc

SEQ ID NO: 1820578 - DNA, 15 bp, Homo sapiens
aggaaaaaggtgtca

SEQ ID NO: 1820579 - DNA, 15 bp, Homo sapiens
ggaaaaaggtgtcag

SEQ ID NO: 1820580 - DNA, 15 bp, Homo sapiens
gaaaaaggtgtcagc

SEQ ID NO: 1820581 - DNA, 15 bp, Homo sapiens
aaaaaggtgtcagca

SEQ ID NO: 1820582 - DNA, 15 bp, Homo sapiens
aaaaggtgtcagcac

SEQ ID NO: 1820583 - DNA, 15 bp, Homo sapiens
aaaggtgtcagcaca

SEQ ID NO: 1820584 - DNA, 15 bp, Homo sapiens
aaggtgtcagcacat

SEQ ID NO: 1820585 - DNA, 15 bp, Homo sapiens
aggtgtcagcacatg

SEQ ID NO: 1820586 - DNA, 15 bp, Homo sapiens
ggtgtcagcacatga

SEQ ID NO: 1820587 - DNA, 15 bp, Homo sapiens
gtgtcagcacatgag

SEQ ID NO: 1820588 - DNA, 15 bp, Homo sapiens
tgtcagcacatgagc

SEQ ID NO: 1820589 - DNA, 15 bp, Homo sapiens
gtcagcacatgagcc

SEQ ID NO: 1820590 - DNA, 15 bp, Homo sapiens
tcagcacatgagccc

SEQ ID NO: 1820591 - DNA, 15 bp, Homo sapiens
cagcacatgagccct

SEQ ID NO: 1820592 - DNA, 15 bp, Homo sapiens
agcacatgagccctg

SEQ ID NO: 1820593 - DNA, 15 bp, Homo sapiens
gcacatgagccctgg

SEQ ID NO: 1820594 - DNA, 15 bp, Homo sapiens
cacatgagccctggc

SEQ ID NO: 1820595 - DNA, 15 bp, Homo sapiens
acatgagccctggcc

SEQ ID NO: 1820596 - DNA, 15 bp, Homo sapiens
catgagccctggcct

SEQ ID NO: 1820597 - DNA, 15 bp, Homo sapiens
atgagccctggcctt

SEQ ID NO: 1820598 - DNA, 15 bp, Homo sapiens
tgagccctggccttg

SEQ ID NO: 1820599 - DNA, 15 bp, Homo sapiens
gagccctggccttgc

SEQ ID NO: 1820600 - DNA, 15 bp, Homo sapiens
agccctggccttgcc

SEQ ID NO: 1820601 - DNA, 15 bp, Homo sapiens
gccctggccttgccc

SEQ ID NO: 1820602 - DNA, 15 bp, Homo sapiens
ccctggccttgccct

SEQ ID NO: 1820603 - DNA, 15 bp, Homo sapiens
cctggccttgccctc

SEQ ID NO: 1820604 - DNA, 15 bp, Homo sapiens
ctggccttgccctct

SEQ ID NO: 1820605 - DNA, 15 bp, Homo sapiens
tggccttgccctctg

SEQ ID NO: 1820606 - DNA, 15 bp, Homo sapiens
ggccttgccctctgt

SEQ ID NO: 1820607 - DNA, 15 bp, Homo sapiens
gccttgccctctgtt

SEQ ID NO: 1820608 - DNA, 15 bp, Homo sapiens
ccttgccctctgttc

SEQ ID NO: 1820609 - DNA, 15 bp, Homo sapiens
cttgccctctgttcc

SEQ ID NO: 1820610 - DNA, 15 bp, Homo sapiens
ttgccctctgttcct

SEQ ID NO: 1820611 - DNA, 15 bp, Homo sapiens
tgccctctgttcctc

SEQ ID NO: 1820612 - DNA, 15 bp, Homo sapiens
gccctctgttcctca

SEQ ID NO: 1820613 - DNA, 15 bp, Homo sapiens
ccctctgttcctcag

SEQ ID NO: 1820614 - DNA, 15 bp, Homo sapiens
cctctgttcctcaga

SEQ ID NO: 1820615 - DNA, 15 bp, Homo sapiens
ctctgttcctcagaa

SEQ ID NO: 1820616 - DNA, 15 bp, Homo sapiens
tctgttcctcagaag

SEQ ID NO: 1820617 - DNA, 15 bp, Homo sapiens
ctgttcctcagaaga

SEQ ID NO: 1820618 - DNA, 15 bp, Homo sapiens
tgttcctcagaagat

SEQ ID NO: 1820619 - DNA, 15 bp, Homo sapiens
gttcctcagaagatg

SEQ ID NO: 1820620 - DNA, 15 bp, Homo sapiens
ttcctcagaagatga

SEQ ID NO: 1820621 - DNA, 15 bp, Homo sapiens
tcctcagaagatgag

SEQ ID NO: 1820622 - DNA, 15 bp, Homo sapiens
cctcagaagatgagc

SEQ ID NO: 1820623 - DNA, 15 bp, Homo sapiens
ctcagaagatgagct

SEQ ID NO: 1820624 - DNA, 15 bp, Homo sapiens
tcagaagatgagctg

SEQ ID NO: 1820625 - DNA, 15 bp, Homo sapiens
cagaagatgagctgg

SEQ ID NO: 1820626 - DNA, 15 bp, Homo sapiens
agaagatgagctggg

SEQ ID NO: 1820627 - DNA, 15 bp, Homo sapiens
gaagatgagctgggc

SEQ ID NO: 1820628 - DNA, 15 bp, Homo sapiens
aagatgagctgggca

SEQ ID NO: 1820629 - DNA, 15 bp, Homo sapiens
agatgagctgggcag

SEQ ID NO: 1820630 - DNA, 15 bp, Homo sapiens
gatgagctgggcagc

SEQ ID NO: 1820631 - DNA, 15 bp, Homo sapiens
atgagctgggcagct

SEQ ID NO: 1820632 - DNA, 15 bp, Homo sapiens
tgagctgggcagcta

SEQ ID NO: 1820633 - DNA, 15 bp, Homo sapiens
gagctgggcagctag

SEQ ID NO: 1820634 - DNA, 15 bp, Homo sapiens
agctgggcagctagg

SEQ ID NO: 1820635 - DNA, 15 bp, Homo sapiens
gctgggcagctaggc

SEQ ID NO: 1820636 - DNA, 15 bp, Homo sapiens
ctgggcagctaggcc

SEQ ID NO: 1820637 - DNA, 15 bp, Homo sapiens
tgggcagctaggcct

SEQ ID NO: 1820638 - DNA, 15 bp, Homo sapiens
gggcagctaggcctg

SEQ ID NO: 1820639 - DNA, 15 bp, Homo sapiens
ggcagctaggcctgc

SEQ ID NO: 1820640 - DNA, 15 bp, Homo sapiens
gcagctaggcctgca

SEQ ID NO: 1820641 - DNA, 15 bp, Homo sapiens
cagctaggcctgcag

SEQ ID NO: 1820642 - DNA, 15 bp, Homo sapiens
agctaggcctgcagc

SEQ ID NO: 1820643 - DNA, 15 bp, Homo sapiens
gctaggcctgcagcc

SEQ ID NO: 1820644 - DNA, 15 bp, Homo sapiens
ctaggcctgcagccc

SEQ ID NO: 1820645 - DNA, 15 bp, Homo sapiens
taggcctgcagcccg

SEQ ID NO: 1820646 - DNA, 15 bp, Homo sapiens
aggcctgcagcccgt

SEQ ID NO: 1820647 - DNA, 15 bp, Homo sapiens
ggcctgcagcccgtg

SEQ ID NO: 1820648 - DNA, 15 bp, Homo sapiens
gcctgcagcccgtgt

SEQ ID NO: 1820649 - DNA, 15 bp, Homo sapiens
cctgcagcccgtgtg

SEQ ID NO: 1820650 - DNA, 15 bp, Homo sapiens
ctgcagcccgtgtga

SEQ ID NO: 1820651 - DNA, 15 bp, Homo sapiens
tgcagcccgtgtgag

SEQ ID NO: 1820652 - DNA, 15 bp, Homo sapiens
gcagcccgtgtgagt

SEQ ID NO: 1820653 - DNA, 15 bp, Homo sapiens
cagcccgtgtgagtc

SEQ ID NO: 1820654 - DNA, 15 bp, Homo sapiens
agcccgtgtgagtca

SEQ ID NO: 1820655 - DNA, 15 bp, Homo sapiens
gcccgtgtgagtcat

SEQ ID NO: 1820656 - DNA, 15 bp, Homo sapiens
cccgtgtgagtcatg

SEQ ID NO: 1820657 - DNA, 15 bp, Homo sapiens
ccgtgtgagtcatgg

SEQ ID NO: 1820658 - DNA, 15 bp, Homo sapiens
cgtgtgagtcatggc

SEQ ID NO: 1820659 - DNA, 15 bp, Homo sapiens
gtgtgagtcatggct

SEQ ID NO: 1820660 - DNA, 15 bp, Homo sapiens
tgtgagtcatggctc

SEQ ID NO: 1820661 - DNA, 15 bp, Homo sapiens
gtgagtcatggctcc

SEQ ID NO: 1820662 - DNA, 15 bp, Homo sapiens
tgagtcatggctcca

SEQ ID NO: 1820663 - DNA, 15 bp, Homo sapiens
gagtcatggctccac

SEQ ID NO: 1820664 - DNA, 15 bp, Homo sapiens
agtcatggctccaca

SEQ ID NO: 1820665 - DNA, 15 bp, Homo sapiens
gtcatggctccacag

SEQ ID NO: 1820666 - DNA, 15 bp, Homo sapiens
tcatggctccacagc

SEQ ID NO: 1820667 - DNA, 15 bp, Homo sapiens
catggctccacagcc

SEQ ID NO: 1820668 - DNA, 15 bp, Homo sapiens
atggctccacagcca

SEQ ID NO: 1820669 - DNA, 15 bp, Homo sapiens
tggctccacagccag

SEQ ID NO: 1820670 - DNA, 15 bp, Homo sapiens
ggctccacagccaga

SEQ ID NO: 1820671 - DNA, 15 bp, Homo sapiens
gctccacagccagat

SEQ ID NO: 1820672 - DNA, 15 bp, Homo sapiens
ctccacagccagatc

SEQ ID NO: 1820673 - DNA, 15 bp, Homo sapiens
tccacagccagatcc

SEQ ID NO: 1820674 - DNA, 15 bp, Homo sapiens
ccacagccagatcca

SEQ ID NO: 1820675 - DNA, 15 bp, Homo sapiens
cacagccagatccaa

SEQ ID NO: 1820676 - DNA, 15 bp, Homo sapiens
acagccagatccaat

SEQ ID NO: 1820677 - DNA, 15 bp, Homo sapiens
cagccagatccaata

SEQ ID NO: 1820678 - DNA, 15 bp, Homo sapiens
agccagatccaatat

SEQ ID NO: 1820679 - DNA, 15 bp, Homo sapiens
gccagatccaatata

SEQ ID NO: 1820680 - DNA, 15 bp, Homo sapiens
ccagatccaatataa

SEQ ID NO: 1820681 - DNA, 15 bp, Homo sapiens
cagatccaatataaa

SEQ ID NO: 1820682 - DNA, 15 bp, Homo sapiens
agatccaatataaat

SEQ ID NO: 1820683 - DNA, 15 bp, Homo sapiens
gatccaatataaatc

SEQ ID NO: 1820684 - DNA, 15 bp, Homo sapiens
atccaatataaatca

SEQ ID NO: 1820685 - DNA, 15 bp, Homo sapiens
tccaatataaatcag

SEQ ID NO: 1820686 - DNA, 15 bp, Homo sapiens
ccaatataaatcaga

SEQ ID NO: 1820687 - DNA, 15 bp, Homo sapiens
caatataaatcagat

SEQ ID NO: 1820688 - DNA, 15 bp, Homo sapiens
aatataaatcagatg

SEQ ID NO: 1820689 - DNA, 15 bp, Homo sapiens
atataaatcagatgg

SEQ ID NO: 1820690 - DNA, 15 bp, Homo sapiens
tataaatcagatggg

SEQ ID NO: 1820691 - DNA, 15 bp, Homo sapiens
ataaatcagatggga

SEQ ID NO: 1820692 - DNA, 15 bp, Homo sapiens
taaatcagatgggac

SEQ ID NO: 1820693 - DNA, 15 bp, Homo sapiens
aaatcagatgggaca

SEQ ID NO: 1820694 - DNA, 15 bp, Homo sapiens
aatcagatgggacat

SEQ ID NO: 1820695 - DNA, 15 bp, Homo sapiens
atcagatgggacatg

SEQ ID NO: 1820696 - DNA, 15 bp, Homo sapiens
tcagatgggacatga

SEQ ID NO: 1820697 - DNA, 15 bp, Homo sapiens
cagatgggacatgac

SEQ ID NO: 1820698 - DNA, 15 bp, Homo sapiens
agatgggacatgact

SEQ ID NO: 1820699 - DNA, 15 bp, Homo sapiens
gatgggacatgactc

SEQ ID NO: 1820700 - DNA, 15 bp, Homo sapiens
atgggacatgactca

SEQ ID NO: 1820701 - DNA, 15 bp, Homo sapiens
tgggacatgactcac

SEQ ID NO: 1820702 - DNA, 15 bp, Homo sapiens
gggacatgactcacg

SEQ ID NO: 1820703 - DNA, 15 bp, Homo sapiens
ggacatgactcacgg

SEQ ID NO: 1820704 - DNA, 15 bp, Homo sapiens
gacatgactcacggc

SEQ ID NO: 1820705 - DNA, 15 bp, Homo sapiens
acatgactcacggca

SEQ ID NO: 1820706 - DNA, 15 bp, Homo sapiens
catgactcacggcaa

SEQ ID NO: 1820707 - DNA, 15 bp, Homo sapiens
atgactcacggcaag

SEQ ID NO: 1820708 - DNA, 15 bp, Homo sapiens
tgactcacggcaagc

SEQ ID NO: 1820709 - DNA, 15 bp, Homo sapiens
gactcacggcaagct

SEQ ID NO: 1820710 - DNA, 15 bp, Homo sapiens
actcacggcaagctc

SEQ ID NO: 1820711 - DNA, 15 bp, Homo sapiens
ctcacggcaagctcc

SEQ ID NO: 1820712 - DNA, 15 bp, Homo sapiens
tcacggcaagctcca

SEQ ID NO: 1820713 - DNA, 15 bp, Homo sapiens
cacggcaagctccag

SEQ ID NO: 1820714 - DNA, 15 bp, Homo sapiens
acggcaagctccagt

SEQ ID NO: 1820715 - DNA, 15 bp, Homo sapiens
cggcaagctccagtc

SEQ ID NO: 1820716 - DNA, 15 bp, Homo sapiens
ggcaagctccagtcc

SEQ ID NO: 1820717 - DNA, 15 bp, Homo sapiens
gcaagctccagtccc

SEQ ID NO: 1820718 - DNA, 15 bp, Homo sapiens
caagctccagtcccc

SEQ ID NO: 1820719 - DNA, 15 bp, Homo sapiens
aagctccagtcccca

SEQ ID NO: 1820720 - DNA, 15 bp, Homo sapiens
agctccagtccccag

SEQ ID NO: 1820721 - DNA, 15 bp, Homo sapiens
gctccagtccccagg

SEQ ID NO: 1820722 - DNA, 15 bp, Homo sapiens
ctccagtccccagga

SEQ ID NO: 1820723 - DNA, 15 bp, Homo sapiens
tccagtccccaggaa

SEQ ID NO: 1820724 - DNA, 15 bp, Homo sapiens
agtccccaggaagca

SEQ ID NO: 1820725 - DNA, 15 bp, Homo sapiens
gtccccaggaagcaa

SEQ ID NO: 1820726 - DNA, 15 bp, Homo sapiens
tccccaggaagcaaa

SEQ ID NO: 1820727 - DNA, 15 bp, Homo sapiens
ccccaggaagcaaag

SEQ ID NO: 1820728 - DNA, 15 bp, Homo sapiens
cccaggaagcaaagt

SEQ ID NO: 1820729 - DNA, 15 bp, Homo sapiens
ccaggaagcaaagtg

SEQ ID NO: 1820730 - DNA, 15 bp, Homo sapiens
caggaagcaaagtgg

SEQ ID NO: 1820731 - DNA, 15 bp, Homo sapiens
aggaagcaaagtgga

SEQ ID NO: 1820732 - DNA, 15 bp, Homo sapiens
ggaagcaaagtggat

SEQ ID NO: 1820733 - DNA, 15 bp, Homo sapiens
gaagcaaagtggatg

SEQ ID NO: 1820734 - DNA, 15 bp, Homo sapiens
aagcaaagtggatga

SEQ ID NO: 1820735 - DNA, 15 bp, Homo sapiens
agcaaagtggatgaa

SEQ ID NO: 1820736 - DNA, 15 bp, Homo sapiens
gcaaagtggatgaac

SEQ ID NO: 1820737 - DNA, 15 bp, Homo sapiens
caaagtggatgaacg

SEQ ID NO: 1820738 - DNA, 15 bp, Homo sapiens
aaagtggatgaacgc

SEQ ID NO: 1820739 - DNA, 15 bp, Homo sapiens
aagtggatgaacgca

SEQ ID NO: 1820740 - DNA, 15 bp, Homo sapiens
agtggatgaacgcac

SEQ ID NO: 1820741 - DNA, 15 bp, Homo sapiens
gtggatgaacgcaca

SEQ ID NO: 1820742 - DNA, 15 bp, Homo sapiens
tggatgaacgcacac

SEQ ID NO: 1820743 - DNA, 15 bp, Homo sapiens
ggatgaacgcacaca

SEQ ID NO: 1820744 - DNA, 15 bp, Homo sapiens
gatgaacgcacacaa

SEQ ID NO: 1820745 - DNA, 15 bp, Homo sapiens
atgaacgcacacaaa

SEQ ID NO: 1820746 - DNA, 15 bp, Homo sapiens
tgaacgcacacaaag

SEQ ID NO: 1820747 - DNA, 15 bp, Homo sapiens
gaacgcacacaaagt

SEQ ID NO: 1820748 - DNA, 15 bp, Homo sapiens
aacgcacacaaagtc

SEQ ID NO: 1820749 - DNA, 15 bp, Homo sapiens
acgcacacaaagtcc

SEQ ID NO: 1820750 - DNA, 15 bp, Homo sapiens
cgcacacaaagtcca

SEQ ID NO: 1820751 - DNA, 15 bp, Homo sapiens
gcacacaaagtccac

SEQ ID NO: 1820752 - DNA, 15 bp, Homo sapiens
cacacaaagtccact

SEQ ID NO: 1820753 - DNA, 15 bp, Homo sapiens
acacaaagtccactg

SEQ ID NO: 1820754 - DNA, 15 bp, Homo sapiens
cacaaagtccactgg

SEQ ID NO: 1820755 - DNA, 15 bp, Homo sapiens
acaaagtccactgga

SEQ ID NO: 1820756 - DNA, 15 bp, Homo sapiens
caaagtccactggag

SEQ ID NO: 1820757 - DNA, 15 bp, Homo sapiens
aaagtccactggagt

SEQ ID NO: 1820758 - DNA, 15 bp, Homo sapiens
aagtccactggagtc

SEQ ID NO: 1820759 - DNA, 15 bp, Homo sapiens
agtccactggagtcc

SEQ ID NO: 1820760 - DNA, 15 bp, Homo sapiens
gtccactggagtcct

SEQ ID NO: 1820761 - DNA, 15 bp, Homo sapiens
tccactggagtcctg

SEQ ID NO: 1820762 - DNA, 15 bp, Homo sapiens
ccactggagtcctgg

SEQ ID NO: 1820763 - DNA, 15 bp, Homo sapiens
cactggagtcctgga

SEQ ID NO: 1820764 - DNA, 15 bp, Homo sapiens
actggagtcctggaa

SEQ ID NO: 1820765 - DNA, 15 bp, Homo sapiens
ctggagtcctggaac

SEQ ID NO: 1820766 - DNA, 15 bp, Homo sapiens
tggagtcctggaacc

SEQ ID NO: 1820767 - DNA, 15 bp, Homo sapiens
ggagtcctggaacct

SEQ ID NO: 1820768 - DNA, 15 bp, Homo sapiens
gagtcctggaaccta

SEQ ID NO: 1820769 - DNA, 15 bp, Homo sapiens
agtcctggaacctaa

SEQ ID NO: 1820770 - DNA, 15 bp, Homo sapiens
gtcctggaacctaac

SEQ ID NO: 1820771 - DNA, 15 bp, Homo sapiens
tcctggaacctaacg

SEQ ID NO: 1820772 - DNA, 15 bp, Homo sapiens
cctggaacctaacga

SEQ ID NO: 1820773 - DNA, 15 bp, Homo sapiens
ctggaacctaacgac

SEQ ID NO: 1820774 - DNA, 15 bp, Homo sapiens
tggaacctaacgact

SEQ ID NO: 1820775 - DNA, 15 bp, Homo sapiens
ggaacctaacgactg

SEQ ID NO: 1820776 - DNA, 15 bp, Homo sapiens
gaacctaacgactgt

SEQ ID NO: 1820777 - DNA, 15 bp, Homo sapiens
aacctaacgactgtg

SEQ ID NO: 1820778 - DNA, 15 bp, Homo sapiens
acctaacgactgtgt

SEQ ID NO: 1820779 - DNA, 15 bp, Homo sapiens
cctaacgactgtgtc

SEQ ID NO: 1820780 - DNA, 15 bp, Homo sapiens
ctaacgactgtgtct

SEQ ID NO: 1820781 - DNA, 15 bp, Homo sapiens
taacgactgtgtctc

SEQ ID NO: 1820782 - DNA, 15 bp, Homo sapiens
aacgactgtgtctct

SEQ ID NO: 1820783 - DNA, 15 bp, Homo sapiens
acgactgtgtctcta

SEQ ID NO: 1820784 - DNA, 15 bp, Homo sapiens
cgactgtgtctctac

SEQ ID NO: 1820785 - DNA, 15 bp, Homo sapiens
gactgtgtctctaca

SEQ ID NO: 1820786 - DNA, 15 bp, Homo sapiens
actgtgtctctacac

SEQ ID NO: 1820787 - DNA, 15 bp, Homo sapiens
ctgtgtctctacacc

SEQ ID NO: 1820788 - DNA, 15 bp, Homo sapiens
tgtgtctctacacca

SEQ ID NO: 1820789 - DNA, 15 bp, Homo sapiens
gtgtctctacaccac

SEQ ID NO: 1820790 - DNA, 15 bp, Homo sapiens
tgtctctacaccacg

SEQ ID NO: 1820791 - DNA, 15 bp, Homo sapiens
gtctctacaccacga

SEQ ID NO: 1820792 - DNA, 15 bp, Homo sapiens
tctctacaccacgaa

SEQ ID NO: 1820793 - DNA, 15 bp, Homo sapiens
ctctacaccacgaaa

SEQ ID NO: 1820794 - DNA, 15 bp, Homo sapiens
tctacaccacgaaat

SEQ ID NO: 1820795 - DNA, 15 bp, Homo sapiens
ctacaccacgaaata

SEQ ID NO: 1820796 - DNA, 15 bp, Homo sapiens
tacaccacgaaatag

SEQ ID NO: 1820797 - DNA, 15 bp, Homo sapiens
acaccacgaaatagc

SEQ ID NO: 1820798 - DNA, 15 bp, Homo sapiens
caccacgaaatagcc

SEQ ID NO: 1820799 - DNA, 15 bp, Homo sapiens
accacgaaatagcca

SEQ ID NO: 1820800 - DNA, 15 bp, Homo sapiens
ccacgaaatagccaa

SEQ ID NO: 1820801 - DNA, 15 bp, Homo sapiens
cacgaaatagccaaa

SEQ ID NO: 1820802 - DNA, 15 bp, Homo sapiens
acgaaatagccaaag

SEQ ID NO: 1820803 - DNA, 15 bp, Homo sapiens
cgaaatagccaaaga

SEQ ID NO: 1820804 - DNA, 15 bp, Homo sapiens
gaaatagccaaagat

SEQ ID NO: 1820805 - DNA, 15 bp, Homo sapiens
aaatagccaaagata

SEQ ID NO: 1820806 - DNA, 15 bp, Homo sapiens
aatagccaaagataa

SEQ ID NO: 1820807 - DNA, 15 bp, Homo sapiens
atagccaaagataag

SEQ ID NO: 1820808 - DNA, 15 bp, Homo sapiens
tagccaaagataaga

SEQ ID NO: 1820809 - DNA, 15 bp, Homo sapiens
agccaaagataagaa

SEQ ID NO: 1820810 - DNA, 15 bp, Homo sapiens
gccaaagataagaac

SEQ ID NO: 1820811 - DNA, 15 bp, Homo sapiens
ccaaagataagaact

SEQ ID NO: 1820812 - DNA, 15 bp, Homo sapiens
caaagataagaactt

SEQ ID NO: 1820813 - DNA, 15 bp, Homo sapiens
aaagataagaactta

SEQ ID NO: 1820814 - DNA, 15 bp, Homo sapiens
aagataagaacttat

SEQ ID NO: 1820815 - DNA, 15 bp, Homo sapiens
agataagaacttata

SEQ ID NO: 1820816 - DNA, 15 bp, Homo sapiens
gataagaacttataa

SEQ ID NO: 1820817 - DNA, 15 bp, Homo sapiens
ataagaacttataaa

SEQ ID NO: 1820818 - DNA, 15 bp, Homo sapiens
taagaacttataaag

SEQ ID NO: 1820819 - DNA, 15 bp, Homo sapiens
aagaacttataaaga

SEQ ID NO: 1820820 - DNA, 15 bp, Homo sapiens
agaacttataaagaa

SEQ ID NO: 1820821 - DNA, 15 bp, Homo sapiens
gaacttataaagaag

SEQ ID NO: 1820822 - DNA, 15 bp, Homo sapiens
aacttataaagaagt

SEQ ID NO: 1820823 - DNA, 15 bp, Homo sapiens
acttataaagaagta

SEQ ID NO: 1820824 - DNA, 15 bp, Homo sapiens
cttataaagaagtaa

SEQ ID NO: 1820825 - DNA, 15 bp, Homo sapiens
ttataaagaagtaat

SEQ ID NO: 1820826 - DNA, 15 bp, Homo sapiens
tataaagaagtaata

SEQ ID NO: 1820827 - DNA, 15 bp, Homo sapiens
ataaagaagtaataa

SEQ ID NO: 1820828 - DNA, 15 bp, Homo sapiens
taaagaagtaataaa

SEQ ID NO: 1820829 - DNA, 15 bp, Homo sapiens
aaagaagtaataaaa

SEQ ID NO: 1820830 - DNA, 15 bp, Homo sapiens
aagaagtaataaaaa

SEQ ID NO: 1820831 - DNA, 15 bp, Homo sapiens
agaagtaataaaaaa

SEQ ID NO: 1820832 - DNA, 15 bp, Homo sapiens
gaagtaataaaaaag

SEQ ID NO: 1820833 - DNA, 15 bp, Homo sapiens
aagtaataaaaaagg

SEQ ID NO: 1820834 - DNA, 15 bp, Homo sapiens
agtaataaaaaaggg

SEQ ID NO: 1820835 - DNA, 15 bp, Homo sapiens
gtaataaaaaaggga

SEQ ID NO: 1820836 - DNA, 15 bp, Homo sapiens
taataaaaaagggat

SEQ ID NO: 1820837 - DNA, 15 bp, Homo sapiens
aataaaaaagggatg

SEQ ID NO: 1820838 - DNA, 15 bp, Homo sapiens
ataaaaaagggatga

SEQ ID NO: 1820839 - DNA, 15 bp, Homo sapiens
taaaaaagggatgat

SEQ ID NO: 1820840 - DNA, 15 bp, Homo sapiens
aaaaaagggatgata

SEQ ID NO: 1820841 - DNA, 15 bp, Homo sapiens
aaaaagggatgataa

SEQ ID NO: 1820842 - DNA, 15 bp, Homo sapiens
aaaagggatgataag

SEQ ID NO: 1820843 - DNA, 15 bp, Homo sapiens
aaagggatgataagt

SEQ ID NO: 1820844 - DNA, 15 bp, Homo sapiens
aagggatgataagta

SEQ ID NO: 1820845 - DNA, 15 bp, Homo sapiens
agggatgataagtag

SEQ ID NO: 1820846 - DNA, 15 bp, Homo sapiens
gggatgataagtagg

SEQ ID NO: 1820847 - DNA, 15 bp, Homo sapiens
ggatgataagtaggg

SEQ ID NO: 1820848 - DNA, 15 bp, Homo sapiens
gatgataagtaggga

SEQ ID NO: 1820849 - DNA, 15 bp, Homo sapiens
atgataagtagggag

SEQ ID NO: 1820850 - DNA, 15 bp, Homo sapiens
tgataagtagggagc

SEQ ID NO: 1820851 - DNA, 15 bp, Homo sapiens
gataagtagggagcg

SEQ ID NO: 1820852 - DNA, 15 bp, Homo sapiens
ataagtagggagcgt

SEQ ID NO: 1820853 - DNA, 15 bp, Homo sapiens
taagtagggagcgtt

SEQ ID NO: 1820854 - DNA, 15 bp, Homo sapiens
aagtagggagcgttc

SEQ ID NO: 1820855 - DNA, 15 bp, Homo sapiens
agtagggagcgttct

SEQ ID NO: 1820856 - DNA, 15 bp, Homo sapiens
gtagggagcgttcta

SEQ ID NO: 1820857 - DNA, 15 bp, Homo sapiens
tagggagcgttctag

SEQ ID NO: 1820858 - DNA, 15 bp, Homo sapiens
agggagcgttctaga

SEQ ID NO: 1820859 - DNA, 15 bp, Homo sapiens
gggagcgttctagat

SEQ ID NO: 1820860 - DNA, 15 bp, Homo sapiens
ggagcgttctagata

SEQ ID NO: 1820861 - DNA, 15 bp, Homo sapiens
gagcgttctagatag

SEQ ID NO: 1820862 - DNA, 15 bp, Homo sapiens
agcgttctagatagt

SEQ ID NO: 1820863 - DNA, 15 bp, Homo sapiens
gcgttctagatagtt

SEQ ID NO: 1820864 - DNA, 15 bp, Homo sapiens
cgttctagatagttt

SEQ ID NO: 1820865 - DNA, 15 bp, Homo sapiens
gttctagatagtttc

SEQ ID NO: 1820866 - DNA, 15 bp, Homo sapiens
ttctagatagtttca

SEQ ID NO: 1820867 - DNA, 15 bp, Homo sapiens
tctagatagtttcat

SEQ ID NO: 1820868 - DNA, 15 bp, Homo sapiens
ctagatagtttcata

SEQ ID NO: 1820869 - DNA, 15 bp, Homo sapiens
tagatagtttcataa

SEQ ID NO: 1820870 - DNA, 15 bp, Homo sapiens
agatagtttcataat

SEQ ID NO: 1820871 - DNA, 15 bp, Homo sapiens
gatagtttcataatg

SEQ ID NO: 1820872 - DNA, 15 bp, Homo sapiens
atagtttcataatgt

SEQ ID NO: 1820873 - DNA, 15 bp, Homo sapiens
tagtttcataatgtt

SEQ ID NO: 1820874 - DNA, 15 bp, Homo sapiens
agtttcataatgttc

SEQ ID NO: 1820875 - DNA, 15 bp, Homo sapiens
gtttcataatgttct

SEQ ID NO: 1820876 - DNA, 15 bp, Homo sapiens
tttcataatgttctc

SEQ ID NO: 1820877 - DNA, 15 bp, Homo sapiens
ttcataatgttctca

SEQ ID NO: 1820878 - DNA, 15 bp, Homo sapiens
tcataatgttctcac

SEQ ID NO: 1820879 - DNA, 15 bp, Homo sapiens
cataatgttctcaca

SEQ ID NO: 1820880 - DNA, 15 bp, Homo sapiens
ataatgttctcacat

SEQ ID NO: 1820881 - DNA, 15 bp, Homo sapiens
taatgttctcacata

SEQ ID NO: 1820882 - DNA, 15 bp, Homo sapiens
aatgttctcacatag

SEQ ID NO: 1820883 - DNA, 15 bp, Homo sapiens
atgttctcacataga

SEQ ID NO: 1820884 - DNA, 15 bp, Homo sapiens
tgttctcacatagaa

SEQ ID NO: 1820885 - DNA, 15 bp, Homo sapiens
gttctcacatagaaa

SEQ ID NO: 1820886 - DNA, 15 bp, Homo sapiens
ttctcacatagaaac

SEQ ID NO: 1820887 - DNA, 15 bp, Homo sapiens
tctcacatagaaacc

SEQ ID NO: 1820888 - DNA, 15 bp, Homo sapiens
ctcacatagaaacca

SEQ ID NO: 1820889 - DNA, 15 bp, Homo sapiens
tcacatagaaaccag

SEQ ID NO: 1820890 - DNA, 15 bp, Homo sapiens
cacatagaaaccaga

SEQ ID NO: 1820891 - DNA, 15 bp, Homo sapiens
acatagaaaccagag

SEQ ID NO: 1820892 - DNA, 15 bp, Homo sapiens
catagaaaccagagc

SEQ ID NO: 1820893 - DNA, 15 bp, Homo sapiens
atagaaaccagagcc

SEQ ID NO: 1820894 - DNA, 15 bp, Homo sapiens
tagaaaccagagccc

SEQ ID NO: 1820895 - DNA, 15 bp, Homo sapiens
agaaaccagagcccc

SEQ ID NO: 1820896 - DNA, 15 bp, Homo sapiens
gaaaccagagcccct

SEQ ID NO: 1820897 - DNA, 15 bp, Homo sapiens
aaaccagagcccctg

SEQ ID NO: 1820898 - DNA, 15 bp, Homo sapiens
aaccagagcccctgt

SEQ ID NO: 1820899 - DNA, 15 bp, Homo sapiens
accagagcccctgtt

SEQ ID NO: 1820900 - DNA, 15 bp, Homo sapiens
ccagagcccctgttg

SEQ ID NO: 1820901 - DNA, 15 bp, Homo sapiens
cagagcccctgttga

SEQ ID NO: 1820902 - DNA, 15 bp, Homo sapiens
agagcccctgttgag

SEQ ID NO: 1820903 - DNA, 15 bp, Homo sapiens
gagcccctgttgagg

SEQ ID NO: 1820904 - DNA, 15 bp, Homo sapiens
agcccctgttgaggt

SEQ ID NO: 1820905 - DNA, 15 bp, Homo sapiens
gcccctgttgaggtg

SEQ ID NO: 1820906 - DNA, 15 bp, Homo sapiens
cccctgttgaggtga

SEQ ID NO: 1820907 - DNA, 15 bp, Homo sapiens
ccctgttgaggtgac

SEQ ID NO: 1820908 - DNA, 15 bp, Homo sapiens
cctgttgaggtgact

SEQ ID NO: 1820909 - DNA, 15 bp, Homo sapiens
ctgttgaggtgactt

SEQ ID NO: 1820910 - DNA, 15 bp, Homo sapiens
tgttgaggtgacttc

SEQ ID NO: 1820911 - DNA, 15 bp, Homo sapiens
gttgaggtgacttcc

SEQ ID NO: 1820912 - DNA, 15 bp, Homo sapiens
ttgaggtgacttccc

SEQ ID NO: 1820913 - DNA, 15 bp, Homo sapiens
tgaggtgacttccca

SEQ ID NO: 1820914 - DNA, 15 bp, Homo sapiens
gaggtgacttcccaa

SEQ ID NO: 1820915 - DNA, 15 bp, Homo sapiens
aggtgacttcccaaa

SEQ ID NO: 1820916 - DNA, 15 bp, Homo sapiens
gtgacttcccaaaga

SEQ ID NO: 1820917 - DNA, 15 bp, Homo sapiens
tgacttcccaaagac

SEQ ID NO: 1820918 - DNA, 15 bp, Homo sapiens
gacttcccaaagact

SEQ ID NO: 1820919 - DNA, 15 bp, Homo sapiens
acttcccaaagactt

SEQ ID NO: 1820920 - DNA, 15 bp, Homo sapiens
cttcccaaagacttt

SEQ ID NO: 1820921 - DNA, 15 bp, Homo sapiens
ttcccaaagactttt

SEQ ID NO: 1820922 - DNA, 15 bp, Homo sapiens
tcccaaagactttta

SEQ ID NO: 1820923 - DNA, 15 bp, Homo sapiens
cccaaagacttttag

SEQ ID NO: 1820924 - DNA, 15 bp, Homo sapiens
ccaaagacttttaga

SEQ ID NO: 1820925 - DNA, 15 bp, Homo sapiens
caaagacttttagag

SEQ ID NO: 1820926 - DNA, 15 bp, Homo sapiens
aaagacttttagagc

SEQ ID NO: 1820927 - DNA, 15 bp, Homo sapiens
aagacttttagagcc

SEQ ID NO: 1820928 - DNA, 15 bp, Homo sapiens
agacttttagagccc

SEQ ID NO: 1820929 - DNA, 15 bp, Homo sapiens
gacttttagagccca

SEQ ID NO: 1820930 - DNA, 15 bp, Homo sapiens
acttttagagcccaa

SEQ ID NO: 1820931 - DNA, 15 bp, Homo sapiens
cttttagagcccaag

SEQ ID NO: 1820932 - DNA, 15 bp, Homo sapiens
ttttagagcccaagg

SEQ ID NO: 1820933 - DNA, 15 bp, Homo sapiens
tttagagcccaaggg

SEQ ID NO: 1820934 - DNA, 15 bp, Homo sapiens
ttagagcccaagggc

SEQ ID NO: 1820935 - DNA, 15 bp, Homo sapiens
tagagcccaagggct

SEQ ID NO: 1820936 - DNA, 15 bp, Homo sapiens
agagcccaagggctt

SEQ ID NO: 1820937 - DNA, 15 bp, Homo sapiens
gagcccaagggcttt

SEQ ID NO: 1820938 - DNA, 15 bp, Homo sapiens
agcccaagggctttt

SEQ ID NO: 1820939 - DNA, 15 bp, Homo sapiens
gcccaagggcttttg

SEQ ID NO: 1820940 - DNA, 15 bp, Homo sapiens
cccaagggcttttgt

SEQ ID NO: 1820941 - DNA, 15 bp, Homo sapiens
ccaagggcttttgtt

SEQ ID NO: 1820942 - DNA, 15 bp, Homo sapiens
caagggcttttgttt

SEQ ID NO: 1820943 - DNA, 15 bp, Homo sapiens
aagggcttttgttta

SEQ ID NO: 1820944 - DNA, 15 bp, Homo sapiens
agggcttttgtttat

SEQ ID NO: 1820945 - DNA, 15 bp, Homo sapiens
gggcttttgtttatc

SEQ ID NO: 1820946 - DNA, 15 bp, Homo sapiens
ggcttttgtttatct

SEQ ID NO: 1820947 - DNA, 15 bp, Homo sapiens
gcttttgtttatctg

SEQ ID NO: 1820948 - DNA, 15 bp, Homo sapiens
cttttgtttatctgg

SEQ ID NO: 1820949 - DNA, 15 bp, Homo sapiens
ttttgtttatctggt

SEQ ID NO: 1820950 - DNA, 15 bp, Homo sapiens
tttgtttatctggtc

SEQ ID NO: 1820951 - DNA, 15 bp, Homo sapiens
ttgtttatctggtct

SEQ ID NO: 1820952 - DNA, 15 bp, Homo sapiens
tgtttatctggtctt

SEQ ID NO: 1820953 - DNA, 15 bp, Homo sapiens
gtttatctggtcttt

SEQ ID NO: 1820954 - DNA, 15 bp, Homo sapiens
tttatctggtctttg

SEQ ID NO: 1820955 - DNA, 15 bp, Homo sapiens
ttatctggtctttgg

SEQ ID NO: 1820956 - DNA, 15 bp, Homo sapiens
tatctggtctttggt

SEQ ID NO: 1820957 - DNA, 15 bp, Homo sapiens
atctggtctttggtt

SEQ ID NO: 1820958 - DNA, 15 bp, Homo sapiens
tctggtctttggttg

SEQ ID NO: 1820959 - DNA, 15 bp, Homo sapiens
ctggtctttggttgg

SEQ ID NO: 1820960 - DNA, 15 bp, Homo sapiens
tggtctttggttggt

SEQ ID NO: 1820961 - DNA, 15 bp, Homo sapiens
ggtctttggttggtt

SEQ ID NO: 1820962 - DNA, 15 bp, Homo sapiens
gtctttggttggtta

SEQ ID NO: 1820963 - DNA, 15 bp, Homo sapiens
tctttggttggttaa

SEQ ID NO: 1820964 - DNA, 15 bp, Homo sapiens
ctttggttggttaac

SEQ ID NO: 1820965 - DNA, 15 bp, Homo sapiens
tttggttggttaaca

SEQ ID NO: 1820966 - DNA, 15 bp, Homo sapiens
ttggttggttaacag

SEQ ID NO: 1820967 - DNA, 15 bp, Homo sapiens
tggttggttaacaga

SEQ ID NO: 1820968 - DNA, 15 bp, Homo sapiens
ggttggttaacagaa

SEQ ID NO: 1820969 - DNA, 15 bp, Homo sapiens
gttggttaacagaac

SEQ ID NO: 1820970 - DNA, 15 bp, Homo sapiens
ttggttaacagaaca

SEQ ID NO: 1820971 - DNA, 15 bp, Homo sapiens
tggttaacagaacaa

SEQ ID NO: 1820972 - DNA, 15 bp, Homo sapiens
ggttaacagaacaag

SEQ ID NO: 1820973 - DNA, 15 bp, Homo sapiens
gttaacagaacaagc

SEQ ID NO: 1820974 - DNA, 15 bp, Homo sapiens
ttaacagaacaagcg

SEQ ID NO: 1820975 - DNA, 15 bp, Homo sapiens
taacagaacaagcga

SEQ ID NO: 1820976 - DNA, 15 bp, Homo sapiens
aacagaacaagcgac

SEQ ID NO: 1820977 - DNA, 15 bp, Homo sapiens
acagaacaagcgacc

SEQ ID NO: 1820978 - DNA, 15 bp, Homo sapiens
cagaacaagcgacct

SEQ ID NO: 1820979 - DNA, 15 bp, Homo sapiens
agaacaagcgaccta

SEQ ID NO: 1820980 - DNA, 15 bp, Homo sapiens
gaacaagcgacctag

SEQ ID NO: 1820981 - DNA, 15 bp, Homo sapiens
aacaagcgacctagt

SEQ ID NO: 1820982 - DNA, 15 bp, Homo sapiens
acaagcgacctagtt

SEQ ID NO: 1820983 - DNA, 15 bp, Homo sapiens
caagcgacctagtta

SEQ ID NO: 1820984 - DNA, 15 bp, Homo sapiens
aagcgacctagttac

SEQ ID NO: 1820985 - DNA, 15 bp, Homo sapiens
agcgacctagttact

SEQ ID NO: 1820986 - DNA, 15 bp, Homo sapiens
gcgacctagttacta

SEQ ID NO: 1820987 - DNA, 15 bp, Homo sapiens
cgacctagttactac

SEQ ID NO: 1820988 - DNA, 15 bp, Homo sapiens
gacctagttactacc

SEQ ID NO: 1820989 - DNA, 15 bp, Homo sapiens
acctagttactaccc

SEQ ID NO: 1820990 - DNA, 15 bp, Homo sapiens
cctagttactacccc

SEQ ID NO: 1820991 - DNA, 15 bp, Homo sapiens
ctagttactacccca

SEQ ID NO: 1820992 - DNA, 15 bp, Homo sapiens
tagttactaccccaa

SEQ ID NO: 1820993 - DNA, 15 bp, Homo sapiens
agttactaccccaaa

SEQ ID NO: 1820994 - DNA, 15 bp, Homo sapiens
gttactaccccaaac

SEQ ID NO: 1820995 - DNA, 15 bp, Homo sapiens
ttactaccccaaact

SEQ ID NO: 1820996 - DNA, 15 bp, Homo sapiens
tactaccccaaactt

SEQ ID NO: 1820997 - DNA, 15 bp, Homo sapiens
actaccccaaacttt

SEQ ID NO: 1820998 - DNA, 15 bp, Homo sapiens
ctaccccaaacttta

SEQ ID NO: 1820999 - DNA, 15 bp, Homo sapiens
taccccaaactttat

SEQ ID NO: 1821000 - DNA, 15 bp, Homo sapiens
accccaaactttata

SEQ ID NO: 1821001 - DNA, 15 bp, Homo sapiens
ccccaaactttatat

SEQ ID NO: 1821002 - DNA, 15 bp, Homo sapiens
cccaaactttatata

SEQ ID NO: 1821003 - DNA, 15 bp, Homo sapiens
ccaaactttatatat

SEQ ID NO: 1821004 - DNA, 15 bp, Homo sapiens
caaactttatatatt

SEQ ID NO: 1821005 - DNA, 15 bp, Homo sapiens
aaactttatatattt

SEQ ID NO: 1821006 - DNA, 15 bp, Homo sapiens
aactttatatattta

SEQ ID NO: 1821007 - DNA, 15 bp, Homo sapiens
actttatatatttaa

SEQ ID NO: 1821008 - DNA, 15 bp, Homo sapiens
ctttatatatttaag

SEQ ID NO: 1821009 - DNA, 15 bp, Homo sapiens
tttatatatttaagc

SEQ ID NO: 1821010 - DNA, 15 bp, Homo sapiens
ttatatatttaagca

SEQ ID NO: 1821011 - DNA, 15 bp, Homo sapiens
tatatatttaagcag

SEQ ID NO: 1821012 - DNA, 15 bp, Homo sapiens
atatatttaagcagg

SEQ ID NO: 1821013 - DNA, 15 bp, Homo sapiens
tatatttaagcaggc

SEQ ID NO: 1821014 - DNA, 15 bp, Homo sapiens
atatttaagcaggcc

SEQ ID NO: 1821015 - DNA, 15 bp, Homo sapiens
tatttaagcaggcca

SEQ ID NO: 1821016 - DNA, 15 bp, Homo sapiens
atttaagcaggccag

SEQ ID NO: 1821017 - DNA, 15 bp, Homo sapiens
tttaagcaggccagg

SEQ ID NO: 1821018 - DNA, 15 bp, Homo sapiens
ttaagcaggccaggc

SEQ ID NO: 1821019 - DNA, 15 bp, Homo sapiens
taagcaggccaggca

SEQ ID NO: 1821020 - DNA, 15 bp, Homo sapiens
aagcaggccaggcac

SEQ ID NO: 1821021 - DNA, 15 bp, Homo sapiens
agcaggccaggcacc

SEQ ID NO: 1821022 - DNA, 15 bp, Homo sapiens
gcaggccaggcacca

SEQ ID NO: 1821023 - DNA, 15 bp, Homo sapiens
caggccaggcaccag

SEQ ID NO: 1821024 - DNA, 15 bp, Homo sapiens
aggccaggcaccagg

SEQ ID NO: 1821025 - DNA, 15 bp, Homo sapiens
ggccaggcaccaggg

SEQ ID NO: 1821026 - DNA, 15 bp, Homo sapiens
gccaggcaccagggc

SEQ ID NO: 1821027 - DNA, 15 bp, Homo sapiens
ccaggcaccagggct

SEQ ID NO: 1821028 - DNA, 15 bp, Homo sapiens
caggcaccagggctc

SEQ ID NO: 1821029 - DNA, 15 bp, Homo sapiens
aggcaccagggctcc

SEQ ID NO: 1821030 - DNA, 15 bp, Homo sapiens
ggcaccagggctcct

SEQ ID NO: 1821031 - DNA, 15 bp, Homo sapiens
gcaccagggctcctg

SEQ ID NO: 1821032 - DNA, 15 bp, Homo sapiens
caccagggctcctgc

SEQ ID NO: 1821033 - DNA, 15 bp, Homo sapiens
accagggctcctgcc

SEQ ID NO: 1821034 - DNA, 15 bp, Homo sapiens
ccagggctcctgcct

SEQ ID NO: 1821035 - DNA, 15 bp, Homo sapiens
cagggctcctgcctg

SEQ ID NO: 1821036 - DNA, 15 bp, Homo sapiens
agggctcctgcctga

SEQ ID NO: 1821037 - DNA, 15 bp, Homo sapiens
gggctcctgcctgaa

SEQ ID NO: 1821038 - DNA, 15 bp, Homo sapiens
ggctcctgcctgaaa

SEQ ID NO: 1821039 - DNA, 15 bp, Homo sapiens
gctcctgcctgaaat

SEQ ID NO: 1821040 - DNA, 15 bp, Homo sapiens
ctcctgcctgaaatc

SEQ ID NO: 1821041 - DNA, 15 bp, Homo sapiens
tcctgcctgaaatcc

SEQ ID NO: 1821042 - DNA, 15 bp, Homo sapiens
cctgcctgaaatccc

SEQ ID NO: 1821043 - DNA, 15 bp, Homo sapiens
ctgcctgaaatcccg

SEQ ID NO: 1821044 - DNA, 15 bp, Homo sapiens
tgcctgaaatcccga

SEQ ID NO: 1821045 - DNA, 15 bp, Homo sapiens
gcctgaaatcccgag

SEQ ID NO: 1821046 - DNA, 15 bp, Homo sapiens
cctgaaatcccgagg

SEQ ID NO: 1821047 - DNA, 15 bp, Homo sapiens
ctgaaatcccgaggc

SEQ ID NO: 1821048 - DNA, 15 bp, Homo sapiens
tgaaatcccgaggct

SEQ ID NO: 1821049 - DNA, 15 bp, Homo sapiens
gaaatcccgaggctc

SEQ ID NO: 1821050 - DNA, 15 bp, Homo sapiens
aaatcccgaggctca

SEQ ID NO: 1821051 - DNA, 15 bp, Homo sapiens
aatcccgaggctcac

SEQ ID NO: 1821052 - DNA, 15 bp, Homo sapiens
atcccgaggctcacg

SEQ ID NO: 1821053 - DNA, 15 bp, Homo sapiens
tcccgaggctcacgc

SEQ ID NO: 1821054 - DNA, 15 bp, Homo sapiens
cccgaggctcacgca

SEQ ID NO: 1821055 - DNA, 15 bp, Homo sapiens
ccgaggctcacgcag

SEQ ID NO: 1821056 - DNA, 15 bp, Homo sapiens
cgaggctcacgcaga

SEQ ID NO: 1821057 - DNA, 15 bp, Homo sapiens
gaggctcacgcagaa

SEQ ID NO: 1821058 - DNA, 15 bp, Homo sapiens
aggctcacgcagaag

SEQ ID NO: 1821059 - DNA, 15 bp, Homo sapiens
ggctcacgcagaaga

SEQ ID NO: 1821060 - DNA, 15 bp, Homo sapiens
gctcacgcagaagaa

SEQ ID NO: 1821061 - DNA, 15 bp, Homo sapiens
ctcacgcagaagaat

SEQ ID NO: 1821062 - DNA, 15 bp, Homo sapiens
tcacgcagaagaatt

SEQ ID NO: 1821063 - DNA, 15 bp, Homo sapiens
cacgcagaagaattg

SEQ ID NO: 1821064 - DNA, 15 bp, Homo sapiens
acgcagaagaattgc

SEQ ID NO: 1821065 - DNA, 15 bp, Homo sapiens
cgcagaagaattgct

SEQ ID NO: 1821066 - DNA, 15 bp, Homo sapiens
gaagaattgcttgag

SEQ ID NO: 1821067 - DNA, 15 bp, Homo sapiens
aagaattgcttgagc

SEQ ID NO: 1821068 - DNA, 15 bp, Homo sapiens
gaattgcttgagccc

SEQ ID NO: 1821069 - DNA, 15 bp, Homo sapiens
aattgcttgagccca

SEQ ID NO: 1821070 - DNA, 15 bp, Homo sapiens
caggagttcaaggcc

SEQ ID NO: 1821071 - DNA, 15 bp, Homo sapiens
aggagttcaaggcca

SEQ ID NO: 1821072 - DNA, 15 bp, Homo sapiens
ggagttcaaggccag

SEQ ID NO: 1821073 - DNA, 15 bp, Homo sapiens
gagttcaaggccagc

SEQ ID NO: 1821074 - DNA, 15 bp, Homo sapiens
agttcaaggccagcc

SEQ ID NO: 1821075 - DNA, 15 bp, Homo sapiens
gttcaaggccagcct

SEQ ID NO: 1821076 - DNA, 15 bp, Homo sapiens
tcaaggccagcctgg

SEQ ID NO: 1821077 - DNA, 15 bp, Homo sapiens
caaggccagcctgga

SEQ ID NO: 1821078 - DNA, 15 bp, Homo sapiens
aaggccagcctggac

SEQ ID NO: 1821079 - DNA, 15 bp, Homo sapiens
aggccagcctggaca

SEQ ID NO: 1821080 - DNA, 15 bp, Homo sapiens
ggccagcctggacaa

SEQ ID NO: 1821081 - DNA, 15 bp, Homo sapiens
gccagcctggacaac

SEQ ID NO: 1821082 - DNA, 15 bp, Homo sapiens
gcctggacaacacag

SEQ ID NO: 1821083 - DNA, 15 bp, Homo sapiens
cctggacaacacagc

SEQ ID NO: 1821084 - DNA, 15 bp, Homo sapiens
ctggacaacacagct

SEQ ID NO: 1821085 - DNA, 15 bp, Homo sapiens
tggacaacacagcta

SEQ ID NO: 1821086 - DNA, 15 bp, Homo sapiens
ggacaacacagctag

SEQ ID NO: 1821087 - DNA, 15 bp, Homo sapiens
gacaacacagctaga

SEQ ID NO: 1821088 - DNA, 15 bp, Homo sapiens
acaacacagctagat

SEQ ID NO: 1821089 - DNA, 15 bp, Homo sapiens
caacacagctagatt

SEQ ID NO: 1821090 - DNA, 15 bp, Homo sapiens
aacacagctagattt

SEQ ID NO: 1821091 - DNA, 15 bp, Homo sapiens
acacagctagatttg

SEQ ID NO: 1821092 - DNA, 15 bp, Homo sapiens
cacagctagatttgg

SEQ ID NO: 1821093 - DNA, 15 bp, Homo sapiens
acagctagatttggt

SEQ ID NO: 1821094 - DNA, 15 bp, Homo sapiens
cagctagatttggtc

SEQ ID NO: 1821095 - DNA, 15 bp, Homo sapiens
agctagatttggtct

SEQ ID NO: 1821096 - DNA, 15 bp, Homo sapiens
gctagatttggtctc

SEQ ID NO: 1821097 - DNA, 15 bp, Homo sapiens
ctagatttggtctct

SEQ ID NO: 1821098 - DNA, 15 bp, Homo sapiens
tagatttggtctcta

SEQ ID NO: 1821099 - DNA, 15 bp, Homo sapiens
agatttggtctctaa

SEQ ID NO: 1821100 - DNA, 15 bp, Homo sapiens
gatttggtctctaaa

SEQ ID NO: 1821101 - DNA, 15 bp, Homo sapiens
atttggtctctaaaa

SEQ ID NO: 1821102 - DNA, 15 bp, Homo sapiens
tttggtctctaaaaa

SEQ ID NO: 1821103 - DNA, 15 bp, Homo sapiens
ttggtctctaaaaaa

SEQ ID NO: 1821104 - DNA, 15 bp, Homo sapiens
tggtctctaaaaaaa

SEQ ID NO: 1821105 - DNA, 15 bp, Homo sapiens
ggtctctaaaaaaaa

SEQ ID NO: 1821106 - DNA, 15 bp, Homo sapiens
gtctctaaaaaaaaa

SEQ ID NO: 1821107 - DNA, 15 bp, Homo sapiens
tctctaaaaaaaaaa

SEQ ID NO: 1821108 - DNA, 15 bp, Homo sapiens
ctctaaaaaaaaaaa

SEQ ID NO: 1821109 - DNA, 15 bp, Homo sapiens
ctaaaaaaaaaaaat

SEQ ID NO: 1821110 - DNA, 15 bp, Homo sapiens
aaaaaaaaattaaaa

SEQ ID NO: 1821111 - DNA, 15 bp, Homo sapiens
aaaaattaaaatatt

SEQ ID NO: 1821112 - DNA, 15 bp, Homo sapiens
aaaattaaaatatta

SEQ ID NO: 1821113 - DNA, 15 bp, Homo sapiens
aaattaaaatattag

SEQ ID NO: 1821114 - DNA, 15 bp, Homo sapiens
aattaaaatattagc

SEQ ID NO: 1821115 - DNA, 15 bp, Homo sapiens
attaaaatattagcc

SEQ ID NO: 1821116 - DNA, 15 bp, Homo sapiens
ttaaaatattagcca

SEQ ID NO: 1821117 - DNA, 15 bp, Homo sapiens
taaaatattagccag

SEQ ID NO: 1821118 - DNA, 15 bp, Homo sapiens
aaaatattagccagc

SEQ ID NO: 1821119 - DNA, 15 bp, Homo sapiens
aaatattagccagct

SEQ ID NO: 1821120 - DNA, 15 bp, Homo sapiens
aatattagccagctg

SEQ ID NO: 1821121 - DNA, 15 bp, Homo sapiens
atattagccagctgt

SEQ ID NO: 1821122 - DNA, 15 bp, Homo sapiens
tattagccagctgtg

SEQ ID NO: 1821123 - DNA, 15 bp, Homo sapiens
attagccagctgtgg

SEQ ID NO: 1821124 - DNA, 15 bp, Homo sapiens
ttagccagctgtggt

SEQ ID NO: 1821125 - DNA, 15 bp, Homo sapiens
tagccagctgtggtg

SEQ ID NO: 1821126 - DNA, 15 bp, Homo sapiens
agccagctgtggtgg

SEQ ID NO: 1821127 - DNA, 15 bp, Homo sapiens
gccagctgtggtggt

SEQ ID NO: 1821128 - DNA, 15 bp, Homo sapiens
ccagctgtggtggtg

SEQ ID NO: 1821129 - DNA, 15 bp, Homo sapiens
cagctgtggtggtgc

SEQ ID NO: 1821130 - DNA, 15 bp, Homo sapiens
agctgtggtggtgca

SEQ ID NO: 1821131 - DNA, 15 bp, Homo sapiens
gctgtggtggtgcac

SEQ ID NO: 1821132 - DNA, 15 bp, Homo sapiens
ctgtggtggtgcaca

SEQ ID NO: 1821133 - DNA, 15 bp, Homo sapiens
ggtggtgcacacctg

SEQ ID NO: 1821134 - DNA, 15 bp, Homo sapiens
gatcagttgagccct

SEQ ID NO: 1821135 - DNA, 15 bp, Homo sapiens
atcagttgagcccta

SEQ ID NO: 1821136 - DNA, 15 bp, Homo sapiens
tcagttgagccctag

SEQ ID NO: 1821137 - DNA, 15 bp, Homo sapiens
cagttgagccctaga

SEQ ID NO: 1821138 - DNA, 15 bp, Homo sapiens
agttgagccctagag

SEQ ID NO: 1821139 - DNA, 15 bp, Homo sapiens
gttgagccctagaga

SEQ ID NO: 1821140 - DNA, 15 bp, Homo sapiens
ttgagccctagagag

SEQ ID NO: 1821141 - DNA, 15 bp, Homo sapiens
tgagccctagagagc

SEQ ID NO: 1821142 - DNA, 15 bp, Homo sapiens
gagccctagagagcg

SEQ ID NO: 1821143 - DNA, 15 bp, Homo sapiens
agccctagagagcga

SEQ ID NO: 1821144 - DNA, 15 bp, Homo sapiens
gccctagagagcgag

SEQ ID NO: 1821145 - DNA, 15 bp, Homo sapiens
ccctagagagcgagg

SEQ ID NO: 1821146 - DNA, 15 bp, Homo sapiens
cctagagagcgaggc

SEQ ID NO: 1821147 - DNA, 15 bp, Homo sapiens
ctagagagcgaggct

SEQ ID NO: 1821148 - DNA, 15 bp, Homo sapiens
tagagagcgaggctg

SEQ ID NO: 1821149 - DNA, 15 bp, Homo sapiens
agagagcgaggctgc

SEQ ID NO: 1821150 - DNA, 15 bp, Homo sapiens
gagagcgaggctgca

SEQ ID NO: 1821151 - DNA, 15 bp, Homo sapiens
agagcgaggctgcag

SEQ ID NO: 1821152 - DNA, 15 bp, Homo sapiens
gagcgaggctgcagt

SEQ ID NO: 1821153 - DNA, 15 bp, Homo sapiens
agcgaggctgcagtg

SEQ ID NO: 1821154 - DNA, 15 bp, Homo sapiens
gcgaggctgcagtga

SEQ ID NO: 1821155 - DNA, 15 bp, Homo sapiens
gctgcagtgagccag

SEQ ID NO: 1821156 - DNA, 15 bp, Homo sapiens
ctgcagtgagccagg

SEQ ID NO: 1821157 - DNA, 15 bp, Homo sapiens
tgcagtgagccagga

SEQ ID NO: 1821158 - DNA, 15 bp, Homo sapiens
gcagtgagccaggat

SEQ ID NO: 1821159 - DNA, 15 bp, Homo sapiens
cagtgagccaggatt

SEQ ID NO: 1821160 - DNA, 15 bp, Homo sapiens
agtgagccaggattg

SEQ ID NO: 1821161 - DNA, 15 bp, Homo sapiens
gtgagccaggattgc

SEQ ID NO: 1821162 - DNA, 15 bp, Homo sapiens
tgagccaggattgca

SEQ ID NO: 1821163 - DNA, 15 bp, Homo sapiens
gagccaggattgcac

SEQ ID NO: 1821164 - DNA, 15 bp, Homo sapiens
agccaggattgcacc

SEQ ID NO: 1821165 - DNA, 15 bp, Homo sapiens
gccaggattgcacca

SEQ ID NO: 1821166 - DNA, 15 bp, Homo sapiens
ccaggattgcaccac

SEQ ID NO: 1821167 - DNA, 15 bp, Homo sapiens
caggattgcaccact

SEQ ID NO: 1821168 - DNA, 15 bp, Homo sapiens
aggattgcaccactg

SEQ ID NO: 1821169 - DNA, 15 bp, Homo sapiens
ggattgcaccactgc

SEQ ID NO: 1821170 - DNA, 15 bp, Homo sapiens
tgggtgacagagcag

SEQ ID NO: 1821171 - DNA, 15 bp, Homo sapiens
gggtgacagagcagg

SEQ ID NO: 1821172 - DNA, 15 bp, Homo sapiens
ggtgacagagcaggc

SEQ ID NO: 1821173 - DNA, 15 bp, Homo sapiens
gtgacagagcaggcc

SEQ ID NO: 1821174 - DNA, 15 bp, Homo sapiens
tgacagagcaggccc

SEQ ID NO: 1821175 - DNA, 15 bp, Homo sapiens
gacagagcaggccct

SEQ ID NO: 1821176 - DNA, 15 bp, Homo sapiens
acagagcaggccctg

SEQ ID NO: 1821177 - DNA, 15 bp, Homo sapiens
cagagcaggccctgt

SEQ ID NO: 1821178 - DNA, 15 bp, Homo sapiens
agagcaggccctgtc

SEQ ID NO: 1821179 - DNA, 15 bp, Homo sapiens
gagcaggccctgtct

SEQ ID NO: 1821180 - DNA, 15 bp, Homo sapiens
agcaggccctgtctg

SEQ ID NO: 1821181 - DNA, 15 bp, Homo sapiens
gcaggccctgtctga

SEQ ID NO: 1821182 - DNA, 15 bp, Homo sapiens
caggccctgtctgaa

SEQ ID NO: 1821183 - DNA, 15 bp, Homo sapiens
aggccctgtctgaag

SEQ ID NO: 1821184 - DNA, 15 bp, Homo sapiens
ggccctgtctgaaga

SEQ ID NO: 1821185 - DNA, 15 bp, Homo sapiens
gccctgtctgaagaa

SEQ ID NO: 1821186 - DNA, 15 bp, Homo sapiens
ccctgtctgaagaaa

SEQ ID NO: 1821187 - DNA, 15 bp, Homo sapiens
cctgtctgaagaaaa

SEQ ID NO: 1821188 - DNA, 15 bp, Homo sapiens
ctgtctgaagaaaaa

SEQ ID NO: 1821189 - DNA, 15 bp, Homo sapiens
tgtctgaagaaaaat

SEQ ID NO: 1821190 - DNA, 15 bp, Homo sapiens
gtctgaagaaaaata

SEQ ID NO: 1821191 - DNA, 15 bp, Homo sapiens
tctgaagaaaaataa

SEQ ID NO: 1821192 - DNA, 15 bp, Homo sapiens
ctgaagaaaaataaa

SEQ ID NO: 1821193 - DNA, 15 bp, Homo sapiens
tgaagaaaaataaat

SEQ ID NO: 1821194 - DNA, 15 bp, Homo sapiens
gaagaaaaataaata

SEQ ID NO: 1821195 - DNA, 15 bp, Homo sapiens
aagaaaaataaataa

SEQ ID NO: 1821196 - DNA, 15 bp, Homo sapiens
agaaaaataaataaa

SEQ ID NO: 1821197 - DNA, 15 bp, Homo sapiens
gaaaaataaataaaa

SEQ ID NO: 1821198 - DNA, 15 bp, Homo sapiens
aaaaataaataaaaa

SEQ ID NO: 1821199 - DNA, 15 bp, Homo sapiens
aaaataaataaaaat

SEQ ID NO: 1821200 - DNA, 15 bp, Homo sapiens
aaataaataaaaatt

SEQ ID NO: 1821201 - DNA, 15 bp, Homo sapiens
aataaataaaaattt

SEQ ID NO: 1821202 - DNA, 15 bp, Homo sapiens
ataaataaaaattta

SEQ ID NO: 1821203 - DNA, 15 bp, Homo sapiens
taaataaaaatttaa

SEQ ID NO: 1821204 - DNA, 15 bp, Homo sapiens
aaataaaaatttaaa

SEQ ID NO: 1821205 - DNA, 15 bp, Homo sapiens
aataaaaatttaaaa

SEQ ID NO: 1821206 - DNA, 15 bp, Homo sapiens
ataaaaatttaaaaa

SEQ ID NO: 1821207 - DNA, 15 bp, Homo sapiens
taaaaatttaaaaaa

SEQ ID NO: 1821208 - DNA, 15 bp, Homo sapiens
aaaaatttaaaaaaa

SEQ ID NO: 1821209 - DNA, 15 bp, Homo sapiens
aaaatttaaaaaaag

SEQ ID NO: 1821210 - DNA, 15 bp, Homo sapiens
aaatttaaaaaaagt

SEQ ID NO: 1821211 - DNA, 15 bp, Homo sapiens
aatttaaaaaaagtt

SEQ ID NO: 1821212 - DNA, 15 bp, Homo sapiens
atttaaaaaaagttt

SEQ ID NO: 1821213 - DNA, 15 bp, Homo sapiens
tttaaaaaaagtttt

SEQ ID NO: 1821214 - DNA, 15 bp, Homo sapiens
ttaaaaaaagtttta

SEQ ID NO: 1821215 - DNA, 15 bp, Homo sapiens
taaaaaaagttttac

SEQ ID NO: 1821216 - DNA, 15 bp, Homo sapiens
aaaaaaagttttact

SEQ ID NO: 1821217 - DNA, 15 bp, Homo sapiens
aaaaaagttttactc

SEQ ID NO: 1821218 - DNA, 15 bp, Homo sapiens
aaaaagttttactct

SEQ ID NO: 1821219 - DNA, 15 bp, Homo sapiens
aaaagttttactcta

SEQ ID NO: 1821220 - DNA, 15 bp, Homo sapiens
aaagttttactctaa

SEQ ID NO: 1821221 - DNA, 15 bp, Homo sapiens
aagttttactctaat

SEQ ID NO: 1821222 - DNA, 15 bp, Homo sapiens
agttttactctaatt

SEQ ID NO: 1821223 - DNA, 15 bp, Homo sapiens
gttttactctaattg

SEQ ID NO: 1821224 - DNA, 15 bp, Homo sapiens
ttttactctaattgt

SEQ ID NO: 1821225 - DNA, 15 bp, Homo sapiens
tttactctaattgta

SEQ ID NO: 1821226 - DNA, 15 bp, Homo sapiens
ttactctaattgtaa

SEQ ID NO: 1821227 - DNA, 15 bp, Homo sapiens
tactctaattgtaac

SEQ ID NO: 1821228 - DNA, 15 bp, Homo sapiens
actctaattgtaaca

SEQ ID NO: 1821229 - DNA, 15 bp, Homo sapiens
ctctaattgtaacat

SEQ ID NO: 1821230 - DNA, 15 bp, Homo sapiens
tctaattgtaacatt

SEQ ID NO: 1821231 - DNA, 15 bp, Homo sapiens
ctaattgtaacattt

SEQ ID NO: 1821232 - DNA, 15 bp, Homo sapiens
taattgtaacattta

SEQ ID NO: 1821233 - DNA, 15 bp, Homo sapiens
aattgtaacatttat

SEQ ID NO: 1821234 - DNA, 15 bp, Homo sapiens
attgtaacatttatt

SEQ ID NO: 1821235 - DNA, 15 bp, Homo sapiens
ttgtaacatttatta

SEQ ID NO: 1821236 - DNA, 15 bp, Homo sapiens
tgtaacatttattat

SEQ ID NO: 1821237 - DNA, 15 bp, Homo sapiens
gtaacatttattatt

SEQ ID NO: 1821238 - DNA, 15 bp, Homo sapiens
taacatttattattt

SEQ ID NO: 1821239 - DNA, 15 bp, Homo sapiens
aacatttattatttt

SEQ ID NO: 1821240 - DNA, 15 bp, Homo sapiens
acatttattattttt

SEQ ID NO: 1821241 - DNA, 15 bp, Homo sapiens
catttattatttttt

SEQ ID NO: 1821242 - DNA, 15 bp, Homo sapiens
atttattattttttt

SEQ ID NO: 1821243 - DNA, 15 bp, Homo sapiens
ttttttcttttttgg

SEQ ID NO: 1821244 - DNA, 15 bp, Homo sapiens
tttttcttttttggt

SEQ ID NO: 1821245 - DNA, 15 bp, Homo sapiens
ttttcttttttggtc

SEQ ID NO: 1821246 - DNA, 15 bp, Homo sapiens
tttcttttttggtct

SEQ ID NO: 1821247 - DNA, 15 bp, Homo sapiens
ttcttttttggtctt

SEQ ID NO: 1821248 - DNA, 15 bp, Homo sapiens
tcttttttggtcttt

SEQ ID NO: 1821249 - DNA, 15 bp, Homo sapiens
cttttttggtctttt

SEQ ID NO: 1821250 - DNA, 15 bp, Homo sapiens
ttttttggtcttttc

SEQ ID NO: 1821251 - DNA, 15 bp, Homo sapiens
tttttggtcttttca

SEQ ID NO: 1821252 - DNA, 15 bp, Homo sapiens
ttttggtcttttcag

SEQ ID NO: 1821253 - DNA, 15 bp, Homo sapiens
tttggtcttttcagg

SEQ ID NO: 1821254 - DNA, 15 bp, Homo sapiens
ttggtcttttcaggc

SEQ ID NO: 1821255 - DNA, 15 bp, Homo sapiens
tggtcttttcaggcc

SEQ ID NO: 1821256 - DNA, 15 bp, Homo sapiens
ggtcttttcaggccc

SEQ ID NO: 1821257 - DNA, 15 bp, Homo sapiens
gtcttttcaggccca

SEQ ID NO: 1821258 - DNA, 15 bp, Homo sapiens
tcttttcaggcccat

SEQ ID NO: 1821259 - DNA, 15 bp, Homo sapiens
cttttcaggcccata

SEQ ID NO: 1821260 - DNA, 15 bp, Homo sapiens
ttttcaggcccatag

SEQ ID NO: 1821261 - DNA, 15 bp, Homo sapiens
tttcaggcccatagt

SEQ ID NO: 1821262 - DNA, 15 bp, Homo sapiens
ttcaggcccatagtt

SEQ ID NO: 1821263 - DNA, 15 bp, Homo sapiens
tcaggcccatagttt

SEQ ID NO: 1821264 - DNA, 15 bp, Homo sapiens
caggcccatagttta

SEQ ID NO: 1821265 - DNA, 15 bp, Homo sapiens
aggcccatagtttac

SEQ ID NO: 1821266 - DNA, 15 bp, Homo sapiens
ggcccatagtttact

SEQ ID NO: 1821267 - DNA, 15 bp, Homo sapiens
gcccatagtttactt

SEQ ID NO: 1821268 - DNA, 15 bp, Homo sapiens
cccatagtttacttt

SEQ ID NO: 1821269 - DNA, 15 bp, Homo sapiens
ccatagtttacttta

SEQ ID NO: 1821270 - DNA, 15 bp, Homo sapiens
catagtttactttaa

SEQ ID NO: 1821271 - DNA, 15 bp, Homo sapiens
atagtttactttaaa

SEQ ID NO: 1821272 - DNA, 15 bp, Homo sapiens
tagtttactttaaaa

SEQ ID NO: 1821273 - DNA, 15 bp, Homo sapiens
agtttactttaaaat

SEQ ID NO: 1821274 - DNA, 15 bp, Homo sapiens
gtttactttaaaatt

SEQ ID NO: 1821275 - DNA, 15 bp, Homo sapiens
tttactttaaaattt

SEQ ID NO: 1821276 - DNA, 15 bp, Homo sapiens
ttactttaaaatttt

SEQ ID NO: 1821277 - DNA, 15 bp, Homo sapiens
tactttaaaattttg

SEQ ID NO: 1821278 - DNA, 15 bp, Homo sapiens
actttaaaattttgt

SEQ ID NO: 1821279 - DNA, 15 bp, Homo sapiens
ctttaaaattttgtt

SEQ ID NO: 1821280 - DNA, 15 bp, Homo sapiens
ttaaaattttgttca

SEQ ID NO: 1821281 - DNA, 15 bp, Homo sapiens
taaaattttgttcat

SEQ ID NO: 1821282 - DNA, 15 bp, Homo sapiens
aaaattttgttcatt

SEQ ID NO: 1821283 - DNA, 15 bp, Homo sapiens
aaattttgttcattt

SEQ ID NO: 1821284 - DNA, 15 bp, Homo sapiens
aattttgttcatttt

SEQ ID NO: 1821285 - DNA, 15 bp, Homo sapiens
attttgttcattttg

SEQ ID NO: 1821286 - DNA, 15 bp, Homo sapiens
ttttgttcattttgg

SEQ ID NO: 1821287 - DNA, 15 bp, Homo sapiens
tttgttcattttggc

SEQ ID NO: 1821288 - DNA, 15 bp, Homo sapiens
ttgttcattttggcc

SEQ ID NO: 1821289 - DNA, 15 bp, Homo sapiens
tgttcattttggccg

SEQ ID NO: 1821290 - DNA, 15 bp, Homo sapiens
gttcattttggccgg

SEQ ID NO: 1821291 - DNA, 15 bp, Homo sapiens
ttcattttggccggg

SEQ ID NO: 1821292 - DNA, 15 bp, Homo sapiens
tcattttggccgggc

SEQ ID NO: 1821293 - DNA, 15 bp, Homo sapiens
cattttggccgggcg

SEQ ID NO: 1821294 - DNA, 15 bp, Homo sapiens
attttggccgggcgc

SEQ ID NO: 1821295 - DNA, 15 bp, Homo sapiens
ttttggccgggcgcg

SEQ ID NO: 1821296 - DNA, 15 bp, Homo sapiens
tttggccgggcgcgg

SEQ ID NO: 1821297 - DNA, 15 bp, Homo sapiens
ttggccgggcgcggt

SEQ ID NO: 1821298 - DNA, 15 bp, Homo sapiens
ctgtaatcccagtac

SEQ ID NO: 1821299 - DNA, 15 bp, Homo sapiens
tgtaatcccagtact

SEQ ID NO: 1821300 - DNA, 15 bp, Homo sapiens
gtaatcccagtactt

SEQ ID NO: 1821301 - DNA, 15 bp, Homo sapiens
taatcccagtacttt

SEQ ID NO: 1821302 - DNA, 15 bp, Homo sapiens
aatcccagtactttg

SEQ ID NO: 1821303 - DNA, 15 bp, Homo sapiens
atcccagtactttgg

SEQ ID NO: 1821304 - DNA, 15 bp, Homo sapiens
tcccagtactttggg

SEQ ID NO: 1821305 - DNA, 15 bp, Homo sapiens
cccagtactttggga

SEQ ID NO: 1821306 - DNA, 15 bp, Homo sapiens
ccagtactttgggag

SEQ ID NO: 1821307 - DNA, 15 bp, Homo sapiens
cagtactttgggagg

SEQ ID NO: 1821308 - DNA, 15 bp, Homo sapiens
aggccgaggcgggca

SEQ ID NO: 1821309 - DNA, 15 bp, Homo sapiens
ggccgaggcgggcag

SEQ ID NO: 1821310 - DNA, 15 bp, Homo sapiens
gccgaggcgggcaga

SEQ ID NO: 1821311 - DNA, 15 bp, Homo sapiens
ccgaggcgggcagat

SEQ ID NO: 1821312 - DNA, 15 bp, Homo sapiens
cgaggcgggcagatc

SEQ ID NO: 1821313 - DNA, 15 bp, Homo sapiens
tcgagaccatcctga

SEQ ID NO: 1821314 - DNA, 15 bp, Homo sapiens
cgagaccatcctgac

SEQ ID NO: 1821315 - DNA, 15 bp, Homo sapiens
gagaccatcctgact

SEQ ID NO: 1821316 - DNA, 15 bp, Homo sapiens
agaccatcctgacta

SEQ ID NO: 1821317 - DNA, 15 bp, Homo sapiens
gaccatcctgactaa

SEQ ID NO: 1821318 - DNA, 15 bp, Homo sapiens
accatcctgactaac

SEQ ID NO: 1821319 - DNA, 15 bp, Homo sapiens
ccatcctgactaaca

SEQ ID NO: 1821320 - DNA, 15 bp, Homo sapiens
catcctgactaacac

SEQ ID NO: 1821321 - DNA, 15 bp, Homo sapiens
atcctgactaacacg

SEQ ID NO: 1821322 - DNA, 15 bp, Homo sapiens
tcctgactaacacgg

SEQ ID NO: 1821323 - DNA, 15 bp, Homo sapiens
ctaacacggtgaaat

SEQ ID NO: 1821324 - DNA, 15 bp, Homo sapiens
taacacggtgaaatc

SEQ ID NO: 1821325 - DNA, 15 bp, Homo sapiens
acacggtgaaatccc

SEQ ID NO: 1821326 - DNA, 15 bp, Homo sapiens
cacggtgaaatcccg

SEQ ID NO: 1821327 - DNA, 15 bp, Homo sapiens
acggtgaaatcccgt

SEQ ID NO: 1821328 - DNA, 15 bp, Homo sapiens
cggtgaaatcccgtc

SEQ ID NO: 1821329 - DNA, 15 bp, Homo sapiens
taaaaacacaaaaaa

SEQ ID NO: 1821330 - DNA, 15 bp, Homo sapiens
aaaaacacaaaaaat

SEQ ID NO: 1821331 - DNA, 15 bp, Homo sapiens
aaaacacaaaaaatt

SEQ ID NO: 1821332 - DNA, 15 bp, Homo sapiens
aaacacaaaaaatta

SEQ ID NO: 1821333 - DNA, 15 bp, Homo sapiens
aacacaaaaaattag

SEQ ID NO: 1821334 - DNA, 15 bp, Homo sapiens
acacaaaaaattagc

SEQ ID NO: 1821335 - DNA, 15 bp, Homo sapiens
cacaaaaaattagct

SEQ ID NO: 1821336 - DNA, 15 bp, Homo sapiens
ctgggtgtggtggta

SEQ ID NO: 1821337 - DNA, 15 bp, Homo sapiens
tgggtgtggtggtac

SEQ ID NO: 1821338 - DNA, 15 bp, Homo sapiens
gggtgtggtggtacg

SEQ ID NO: 1821339 - DNA, 15 bp, Homo sapiens
ggtgtggtggtacgt

SEQ ID NO: 1821340 - DNA, 15 bp, Homo sapiens
gtgtggtggtacgtg

SEQ ID NO: 1821341 - DNA, 15 bp, Homo sapiens
tgtggtggtacgtgc

SEQ ID NO: 1821342 - DNA, 15 bp, Homo sapiens
gtggtggtacgtgcc

SEQ ID NO: 1821343 - DNA, 15 bp, Homo sapiens
tggtggtacgtgcct

SEQ ID NO: 1821344 - DNA, 15 bp, Homo sapiens
ggtggtacgtgcctg

SEQ ID NO: 1821345 - DNA, 15 bp, Homo sapiens
gtggtacgtgcctgt

SEQ ID NO: 1821346 - DNA, 15 bp, Homo sapiens
tggtacgtgcctgta

SEQ ID NO: 1821347 - DNA, 15 bp, Homo sapiens
ggtacgtgcctgtag

SEQ ID NO: 1821348 - DNA, 15 bp, Homo sapiens
gtacgtgcctgtagt

SEQ ID NO: 1821349 - DNA, 15 bp, Homo sapiens
tacgtgcctgtagtc

SEQ ID NO: 1821350 - DNA, 15 bp, Homo sapiens
acgtgcctgtagtcc

SEQ ID NO: 1821351 - DNA, 15 bp, Homo sapiens
cgtgcctgtagtccc

SEQ ID NO: 1821352 - DNA, 15 bp, Homo sapiens
aatcgcttgaacccc

SEQ ID NO: 1821353 - DNA, 15 bp, Homo sapiens
atcgcttgaacccct

SEQ ID NO: 1821354 - DNA, 15 bp, Homo sapiens
tcgcttgaacccctg

SEQ ID NO: 1821355 - DNA, 15 bp, Homo sapiens
cgcttgaacccctga

SEQ ID NO: 1821356 - DNA, 15 bp, Homo sapiens
gcttgaacccctgag

SEQ ID NO: 1821357 - DNA, 15 bp, Homo sapiens
cttgaacccctgagg

SEQ ID NO: 1821358 - DNA, 15 bp, Homo sapiens
ttgaacccctgagga

SEQ ID NO: 1821359 - DNA, 15 bp, Homo sapiens
tgaacccctgaggac

SEQ ID NO: 1821360 - DNA, 15 bp, Homo sapiens
gaacccctgaggacg

SEQ ID NO: 1821361 - DNA, 15 bp, Homo sapiens
aacccctgaggacgt

SEQ ID NO: 1821362 - DNA, 15 bp, Homo sapiens
acccctgaggacgtt

SEQ ID NO: 1821363 - DNA, 15 bp, Homo sapiens
cccctgaggacgttg

SEQ ID NO: 1821364 - DNA, 15 bp, Homo sapiens
ccctgaggacgttgc

SEQ ID NO: 1821365 - DNA, 15 bp, Homo sapiens
cctgaggacgttgca

SEQ ID NO: 1821366 - DNA, 15 bp, Homo sapiens
ctgaggacgttgcag

SEQ ID NO: 1821367 - DNA, 15 bp, Homo sapiens
tgaggacgttgcagt

SEQ ID NO: 1821368 - DNA, 15 bp, Homo sapiens
gaggacgttgcagtg

SEQ ID NO: 1821369 - DNA, 15 bp, Homo sapiens
aggacgttgcagtga

SEQ ID NO: 1821370 - DNA, 15 bp, Homo sapiens
cgttgcagtgagcca

SEQ ID NO: 1821371 - DNA, 15 bp, Homo sapiens
agccaagatcgtgct

SEQ ID NO: 1821372 - DNA, 15 bp, Homo sapiens
gccaagatcgtgctg

SEQ ID NO: 1821373 - DNA, 15 bp, Homo sapiens
ccaagatcgtgctgc

SEQ ID NO: 1821374 - DNA, 15 bp, Homo sapiens
caagatcgtgctgct

SEQ ID NO: 1821375 - DNA, 15 bp, Homo sapiens
aagatcgtgctgctg

SEQ ID NO: 1821376 - DNA, 15 bp, Homo sapiens
agatcgtgctgctgc

SEQ ID NO: 1821377 - DNA, 15 bp, Homo sapiens
gatcgtgctgctgca

SEQ ID NO: 1821378 - DNA, 15 bp, Homo sapiens
atcgtgctgctgcac

SEQ ID NO: 1821379 - DNA, 15 bp, Homo sapiens
tcgtgctgctgcact

SEQ ID NO: 1821380 - DNA, 15 bp, Homo sapiens
cgtgctgctgcactc

SEQ ID NO: 1821381 - DNA, 15 bp, Homo sapiens
gtgctgctgcactcc

SEQ ID NO: 1821382 - DNA, 15 bp, Homo sapiens
tgctgctgcactcca

SEQ ID NO: 1821383 - DNA, 15 bp, Homo sapiens
gctgctgcactccag

SEQ ID NO: 1821384 - DNA, 15 bp, Homo sapiens
ctgctgcactccagc

SEQ ID NO: 1821385 - DNA, 15 bp, Homo sapiens
tgctgcactccagcc

SEQ ID NO: 1821386 - DNA, 15 bp, Homo sapiens
cactccagcctagac

SEQ ID NO: 1821387 - DNA, 15 bp, Homo sapiens
actccagcctagaca

SEQ ID NO: 1821388 - DNA, 15 bp, Homo sapiens
ctccagcctagacaa

SEQ ID NO: 1821389 - DNA, 15 bp, Homo sapiens
tccagcctagacaac

SEQ ID NO: 1821390 - DNA, 15 bp, Homo sapiens
ccagcctagacaaca

SEQ ID NO: 1821391 - DNA, 15 bp, Homo sapiens
cagcctagacaacaa

SEQ ID NO: 1821392 - DNA, 15 bp, Homo sapiens
agcctagacaacaag

SEQ ID NO: 1821393 - DNA, 15 bp, Homo sapiens
gcctagacaacaaga

SEQ ID NO: 1821394 - DNA, 15 bp, Homo sapiens
cctagacaacaagag

SEQ ID NO: 1821395 - DNA, 15 bp, Homo sapiens
ctagacaacaagagt

SEQ ID NO: 1821396 - DNA, 15 bp, Homo sapiens
tagacaacaagagtg

SEQ ID NO: 1821397 - DNA, 15 bp, Homo sapiens
agacaacaagagtga

SEQ ID NO: 1821398 - DNA, 15 bp, Homo sapiens
gacaacaagagtgag

SEQ ID NO: 1821399 - DNA, 15 bp, Homo sapiens
acaacaagagtgaga

SEQ ID NO: 1821400 - DNA, 15 bp, Homo sapiens
caacaagagtgagac

SEQ ID NO: 1821401 - DNA, 15 bp, Homo sapiens
aacaagagtgagacc

SEQ ID NO: 1821402 - DNA, 15 bp, Homo sapiens
acaagagtgagaccc

SEQ ID NO: 1821403 - DNA, 15 bp, Homo sapiens
caagagtgagacccc

SEQ ID NO: 1821404 - DNA, 15 bp, Homo sapiens
aagagtgagaccccg

SEQ ID NO: 1821405 - DNA, 15 bp, Homo sapiens
agagtgagaccccgc

SEQ ID NO: 1821406 - DNA, 15 bp, Homo sapiens
gagtgagaccccgcc

SEQ ID NO: 1821407 - DNA, 15 bp, Homo sapiens
agtgagaccccgcct

SEQ ID NO: 1821408 - DNA, 15 bp, Homo sapiens
gtgagaccccgcctc

SEQ ID NO: 1821409 - DNA, 15 bp, Homo sapiens
tgagaccccgcctcc

SEQ ID NO: 1821410 - DNA, 15 bp, Homo sapiens
gagaccccgcctcca

SEQ ID NO: 1821411 - DNA, 15 bp, Homo sapiens
agaccccgcctccaa

SEQ ID NO: 1821412 - DNA, 15 bp, Homo sapiens
gaccccgcctccaaa

SEQ ID NO: 1821413 - DNA, 15 bp, Homo sapiens
accccgcctccaaaa

SEQ ID NO: 1821414 - DNA, 15 bp, Homo sapiens
ccccgcctccaaaaa

SEQ ID NO: 1821415 - DNA, 15 bp, Homo sapiens
cccgcctccaaaaaa

SEQ ID NO: 1821416 - DNA, 15 bp, Homo sapiens
ccgcctccaaaaaaa

SEQ ID NO: 1821417 - DNA, 15 bp, Homo sapiens
cgcctccaaaaaaaa

SEQ ID NO: 1821418 - DNA, 15 bp, Homo sapiens
gcctccaaaaaaaaa

SEQ ID NO: 1821419 - DNA, 15 bp, Homo sapiens
ctccaaaaaaaaaaa

SEQ ID NO: 1821420 - DNA, 15 bp, Homo sapiens
tccaaaaaaaaaaaa

SEQ ID NO: 1821421 - DNA, 15 bp, Homo sapiens
aaaaaaaaaaatttg

SEQ ID NO: 1821422 - DNA, 15 bp, Homo sapiens
aaaaaaaaaatttgt

SEQ ID NO: 1821423 - DNA, 15 bp, Homo sapiens
aaaaaaaaatttgtt

SEQ ID NO: 1821424 - DNA, 15 bp, Homo sapiens
aaaaaaaatttgttc

SEQ ID NO: 1821425 - DNA, 15 bp, Homo sapiens
aaaaaaatttgttca

SEQ ID NO: 1821426 - DNA, 15 bp, Homo sapiens
aaaaaatttgttcat

SEQ ID NO: 1821427 - DNA, 15 bp, Homo sapiens
aaaaatttgttcatt

SEQ ID NO: 1821428 - DNA, 15 bp, Homo sapiens
aaaatttgttcattt

SEQ ID NO: 1821429 - DNA, 15 bp, Homo sapiens
aaatttgttcatttc

SEQ ID NO: 1821430 - DNA, 15 bp, Homo sapiens
aatttgttcatttca

SEQ ID NO: 1821431 - DNA, 15 bp, Homo sapiens
atttgttcatttcag

SEQ ID NO: 1821432 - DNA, 15 bp, Homo sapiens
tttgttcatttcaga

SEQ ID NO: 1821433 - DNA, 15 bp, Homo sapiens
ttgttcatttcagaa

SEQ ID NO: 1821434 - DNA, 15 bp, Homo sapiens
tgttcatttcagaaa

SEQ ID NO: 1821435 - DNA, 15 bp, Homo sapiens
gttcatttcagaaaa

SEQ ID NO: 1821436 - DNA, 15 bp, Homo sapiens
ttcatttcagaaaag

SEQ ID NO: 1821437 - DNA, 15 bp, Homo sapiens
tcatttcagaaaaga

SEQ ID NO: 1821438 - DNA, 15 bp, Homo sapiens
catttcagaaaagaa

SEQ ID NO: 1821439 - DNA, 15 bp, Homo sapiens
atttcagaaaagaaa

SEQ ID NO: 1821440 - DNA, 15 bp, Homo sapiens
tttcagaaaagaaag

SEQ ID NO: 1821441 - DNA, 15 bp, Homo sapiens
ttcagaaaagaaagc

SEQ ID NO: 1821442 - DNA, 15 bp, Homo sapiens
tcagaaaagaaagca

SEQ ID NO: 1821443 - DNA, 15 bp, Homo sapiens
cagaaaagaaagcat

SEQ ID NO: 1821444 - DNA, 15 bp, Homo sapiens
agaaaagaaagcatg

SEQ ID NO: 1821445 - DNA, 15 bp, Homo sapiens
gaaaagaaagcatgg

SEQ ID NO: 1821446 - DNA, 15 bp, Homo sapiens
aaaagaaagcatggt

SEQ ID NO: 1821447 - DNA, 15 bp, Homo sapiens
aaagaaagcatggtg

SEQ ID NO: 1821448 - DNA, 15 bp, Homo sapiens
aagaaagcatggtgg

SEQ ID NO: 1821449 - DNA, 15 bp, Homo sapiens
agaaagcatggtgga

SEQ ID NO: 1821450 - DNA, 15 bp, Homo sapiens
gaaagcatggtggat

SEQ ID NO: 1821451 - DNA, 15 bp, Homo sapiens
aaagcatggtggata

SEQ ID NO: 1821452 - DNA, 15 bp, Homo sapiens
aagcatggtggataa

SEQ ID NO: 1821453 - DNA, 15 bp, Homo sapiens
agcatggtggataat

SEQ ID NO: 1821454 - DNA, 15 bp, Homo sapiens
gcatggtggataatt

SEQ ID NO: 1821455 - DNA, 15 bp, Homo sapiens
catggtggataatta

SEQ ID NO: 1821456 - DNA, 15 bp, Homo sapiens
atggtggataattag

SEQ ID NO: 1821457 - DNA, 15 bp, Homo sapiens
tggtggataattagc

SEQ ID NO: 1821458 - DNA, 15 bp, Homo sapiens
ggtggataattagca

SEQ ID NO: 1821459 - DNA, 15 bp, Homo sapiens
gtggataattagcac

SEQ ID NO: 1821460 - DNA, 15 bp, Homo sapiens
tggataattagcact

SEQ ID NO: 1821461 - DNA, 15 bp, Homo sapiens
ggataattagcactt

SEQ ID NO: 1821462 - DNA, 15 bp, Homo sapiens
gataattagcacttt

SEQ ID NO: 1821463 - DNA, 15 bp, Homo sapiens
ataattagcacttta

SEQ ID NO: 1821464 - DNA, 15 bp, Homo sapiens
taattagcactttaa

SEQ ID NO: 1821465 - DNA, 15 bp, Homo sapiens
aattagcactttaaa

SEQ ID NO: 1821466 - DNA, 15 bp, Homo sapiens
attagcactttaaaa

SEQ ID NO: 1821467 - DNA, 15 bp, Homo sapiens
ttagcactttaaaag

SEQ ID NO: 1821468 - DNA, 15 bp, Homo sapiens
tagcactttaaaagt

SEQ ID NO: 1821469 - DNA, 15 bp, Homo sapiens
agcactttaaaagtc

SEQ ID NO: 1821470 - DNA, 15 bp, Homo sapiens
gcactttaaaagtcc

SEQ ID NO: 1821471 - DNA, 15 bp, Homo sapiens
cactttaaaagtcca

SEQ ID NO: 1821472 - DNA, 15 bp, Homo sapiens
actttaaaagtccac

SEQ ID NO: 1821473 - DNA, 15 bp, Homo sapiens
ctttaaaagtccacc

SEQ ID NO: 1821474 - DNA, 15 bp, Homo sapiens
tttaaaagtccacct

SEQ ID NO: 1821475 - DNA, 15 bp, Homo sapiens
ttaaaagtccacctg

SEQ ID NO: 1821476 - DNA, 15 bp, Homo sapiens
taaaagtccacctgt

SEQ ID NO: 1821477 - DNA, 15 bp, Homo sapiens
aaaagtccacctgta

SEQ ID NO: 1821478 - DNA, 15 bp, Homo sapiens
aaagtccacctgtaa

SEQ ID NO: 1821479 - DNA, 15 bp, Homo sapiens
aagtccacctgtaac

SEQ ID NO: 1821480 - DNA, 15 bp, Homo sapiens
agtccacctgtaaca

SEQ ID NO: 1821481 - DNA, 15 bp, Homo sapiens
gtccacctgtaacac

SEQ ID NO: 1821482 - DNA, 15 bp, Homo sapiens
tccacctgtaacact

SEQ ID NO: 1821483 - DNA, 15 bp, Homo sapiens
ccacctgtaacactt

SEQ ID NO: 1821484 - DNA, 15 bp, Homo sapiens
cacctgtaacacttc

SEQ ID NO: 1821485 - DNA, 15 bp, Homo sapiens
acctgtaacacttca

SEQ ID NO: 1821486 - DNA, 15 bp, Homo sapiens
cctgtaacacttcac

SEQ ID NO: 1821487 - DNA, 15 bp, Homo sapiens
ctgtaacacttcact

SEQ ID NO: 1821488 - DNA, 15 bp, Homo sapiens
tgtaacacttcactt

SEQ ID NO: 1821489 - DNA, 15 bp, Homo sapiens
gtaacacttcactta

SEQ ID NO: 1821490 - DNA, 15 bp, Homo sapiens
taacacttcacttag

SEQ ID NO: 1821491 - DNA, 15 bp, Homo sapiens
aacacttcacttagc

SEQ ID NO: 1821492 - DNA, 15 bp, Homo sapiens
acacttcacttagcc

SEQ ID NO: 1821493 - DNA, 15 bp, Homo sapiens
cacttcacttagcca

SEQ ID NO: 1821494 - DNA, 15 bp, Homo sapiens
acttcacttagccag

SEQ ID NO: 1821495 - DNA, 15 bp, Homo sapiens
cttcacttagccaga

SEQ ID NO: 1821496 - DNA, 15 bp, Homo sapiens
ttcacttagccagag

SEQ ID NO: 1821497 - DNA, 15 bp, Homo sapiens
tcacttagccagagg

SEQ ID NO: 1821498 - DNA, 15 bp, Homo sapiens
cacttagccagaggc

SEQ ID NO: 1821499 - DNA, 15 bp, Homo sapiens
acttagccagaggct

SEQ ID NO: 1821500 - DNA, 15 bp, Homo sapiens
cttagccagaggctc

SEQ ID NO: 1821501 - DNA, 15 bp, Homo sapiens
ttagccagaggctct

SEQ ID NO: 1821502 - DNA, 15 bp, Homo sapiens
tagccagaggctcta

SEQ ID NO: 1821503 - DNA, 15 bp, Homo sapiens
agccagaggctctac

SEQ ID NO: 1821504 - DNA, 15 bp, Homo sapiens
gccagaggctctacc

SEQ ID NO: 1821505 - DNA, 15 bp, Homo sapiens
ccagaggctctacct

SEQ ID NO: 1821506 - DNA, 15 bp, Homo sapiens
cagaggctctacctg

SEQ ID NO: 1821507 - DNA, 15 bp, Homo sapiens
agaggctctacctgt

SEQ ID NO: 1821508 - DNA, 15 bp, Homo sapiens
gaggctctacctgtg

SEQ ID NO: 1821509 - DNA, 15 bp, Homo sapiens
aggctctacctgtgc

SEQ ID NO: 1821510 - DNA, 15 bp, Homo sapiens
ggctctacctgtgct

SEQ ID NO: 1821511 - DNA, 15 bp, Homo sapiens
gctctacctgtgctg

SEQ ID NO: 1821512 - DNA, 15 bp, Homo sapiens
ctctacctgtgctgg

SEQ ID NO: 1821513 - DNA, 15 bp, Homo sapiens
tctacctgtgctggc

SEQ ID NO: 1821514 - DNA, 15 bp, Homo sapiens
ctacctgtgctggct

SEQ ID NO: 1821515 - DNA, 15 bp, Homo sapiens
tacctgtgctggctt

SEQ ID NO: 1821516 - DNA, 15 bp, Homo sapiens
acctgtgctggcttt

SEQ ID NO: 1821517 - DNA, 15 bp, Homo sapiens
cctgtgctggctttt

SEQ ID NO: 1821518 - DNA, 15 bp, Homo sapiens
ctgtgctggcttttc

SEQ ID NO: 1821519 - DNA, 15 bp, Homo sapiens
tgtgctggcttttct

SEQ ID NO: 1821520 - DNA, 15 bp, Homo sapiens
gtgctggcttttctc

SEQ ID NO: 1821521 - DNA, 15 bp, Homo sapiens
tgctggcttttctca

SEQ ID NO: 1821522 - DNA, 15 bp, Homo sapiens
gctggcttttctcaa

SEQ ID NO: 1821523 - DNA, 15 bp, Homo sapiens
ctggcttttctcaaa

SEQ ID NO: 1821524 - DNA, 15 bp, Homo sapiens
tggcttttctcaaag

SEQ ID NO: 1821525 - DNA, 15 bp, Homo sapiens
ggcttttctcaaagc

SEQ ID NO: 1821526 - DNA, 15 bp, Homo sapiens
gcttttctcaaagcc

SEQ ID NO: 1821527 - DNA, 15 bp, Homo sapiens
cttttctcaaagcca

SEQ ID NO: 1821528 - DNA, 15 bp, Homo sapiens
ttttctcaaagccat

SEQ ID NO: 1821529 - DNA, 15 bp, Homo sapiens
tttctcaaagccatc

SEQ ID NO: 1821530 - DNA, 15 bp, Homo sapiens
ttctcaaagccatct

SEQ ID NO: 1821531 - DNA, 15 bp, Homo sapiens
tctcaaagccatctg

SEQ ID NO: 1821532 - DNA, 15 bp, Homo sapiens
ctcaaagccatctgt

SEQ ID NO: 1821533 - DNA, 15 bp, Homo sapiens
tcaaagccatctgtc

SEQ ID NO: 1821534 - DNA, 15 bp, Homo sapiens
caaagccatctgtcc

SEQ ID NO: 1821535 - DNA, 15 bp, Homo sapiens
aaagccatctgtcct

SEQ ID NO: 1821536 - DNA, 15 bp, Homo sapiens
aagccatctgtccta

SEQ ID NO: 1821537 - DNA, 15 bp, Homo sapiens
agccatctgtcctag

SEQ ID NO: 1821538 - DNA, 15 bp, Homo sapiens
gccatctgtcctagg

SEQ ID NO: 1821539 - DNA, 15 bp, Homo sapiens
ccatctgtcctagga

SEQ ID NO: 1821540 - DNA, 15 bp, Homo sapiens
catctgtcctaggag

SEQ ID NO: 1821541 - DNA, 15 bp, Homo sapiens
atctgtcctaggagt

SEQ ID NO: 1821542 - DNA, 15 bp, Homo sapiens
tctgtcctaggagta

SEQ ID NO: 1821543 - DNA, 15 bp, Homo sapiens
ctgtcctaggagtat

SEQ ID NO: 1821544 - DNA, 15 bp, Homo sapiens
tgtcctaggagtatg

SEQ ID NO: 1821545 - DNA, 15 bp, Homo sapiens
gtcctaggagtatgt

SEQ ID NO: 1821546 - DNA, 15 bp, Homo sapiens
tcctaggagtatgta

SEQ ID NO: 1821547 - DNA, 15 bp, Homo sapiens
cctaggagtatgtac

SEQ ID NO: 1821548 - DNA, 15 bp, Homo sapiens
ctaggagtatgtaca

SEQ ID NO: 1821549 - DNA, 15 bp, Homo sapiens
taggagtatgtacag

SEQ ID NO: 1821550 - DNA, 15 bp, Homo sapiens
aggagtatgtacagt

SEQ ID NO: 1821551 - DNA, 15 bp, Homo sapiens
ggagtatgtacagta

SEQ ID NO: 1821552 - DNA, 15 bp, Homo sapiens
gagtatgtacagtaa

SEQ ID NO: 1821553 - DNA, 15 bp, Homo sapiens
agtatgtacagtaaa

SEQ ID NO: 1821554 - DNA, 15 bp, Homo sapiens
gtatgtacagtaaag

SEQ ID NO: 1821555 - DNA, 15 bp, Homo sapiens
tatgtacagtaaaga

SEQ ID NO: 1821556 - DNA, 15 bp, Homo sapiens
atgtacagtaaagat

SEQ ID NO: 1821557 - DNA, 15 bp, Homo sapiens
tgtacagtaaagata

SEQ ID NO: 1821558 - DNA, 15 bp, Homo sapiens
gtacagtaaagataa

SEQ ID NO: 1821559 - DNA, 15 bp, Homo sapiens
tacagtaaagataac

SEQ ID NO: 1821560 - DNA, 15 bp, Homo sapiens
acagtaaagataacc

SEQ ID NO: 1821561 - DNA, 15 bp, Homo sapiens
cagtaaagataacct

SEQ ID NO: 1821562 - DNA, 15 bp, Homo sapiens
agtaaagataacctt

SEQ ID NO: 1821563 - DNA, 15 bp, Homo sapiens
gtaaagataaccttg

SEQ ID NO: 1821564 - DNA, 15 bp, Homo sapiens
taaagataaccttgg

SEQ ID NO: 1821565 - DNA, 15 bp, Homo sapiens
aaagataaccttggg

SEQ ID NO: 1821566 - DNA, 15 bp, Homo sapiens
aagataaccttgggc

SEQ ID NO: 1821567 - DNA, 15 bp, Homo sapiens
agataaccttgggca

SEQ ID NO: 1821568 - DNA, 15 bp, Homo sapiens
gataaccttgggcac

SEQ ID NO: 1821569 - DNA, 15 bp, Homo sapiens
ataaccttgggcaca

SEQ ID NO: 1821570 - DNA, 15 bp, Homo sapiens
taaccttgggcacac

SEQ ID NO: 1821571 - DNA, 15 bp, Homo sapiens
aaccttgggcacaca

SEQ ID NO: 1821572 - DNA, 15 bp, Homo sapiens
accttgggcacacag

SEQ ID NO: 1821573 - DNA, 15 bp, Homo sapiens
ccttgggcacacaga

SEQ ID NO: 1821574 - DNA, 15 bp, Homo sapiens
cttgggcacacagaa

SEQ ID NO: 1821575 - DNA, 15 bp, Homo sapiens
ttgggcacacagaaa

SEQ ID NO: 1821576 - DNA, 15 bp, Homo sapiens
tgggcacacagaaac

SEQ ID NO: 1821577 - DNA, 15 bp, Homo sapiens
gggcacacagaaacg

SEQ ID NO: 1821578 - DNA, 15 bp, Homo sapiens
ggcacacagaaacgc

SEQ ID NO: 1821579 - DNA, 15 bp, Homo sapiens
gcacacagaaacgct

SEQ ID NO: 1821580 - DNA, 15 bp, Homo sapiens
cacacagaaacgctt

SEQ ID NO: 1821581 - DNA, 15 bp, Homo sapiens
acacagaaacgctta

SEQ ID NO: 1821582 - DNA, 15 bp, Homo sapiens
cacagaaacgcttaa

SEQ ID NO: 1821583 - DNA, 15 bp, Homo sapiens
acagaaacgcttaaa

SEQ ID NO: 1821584 - DNA, 15 bp, Homo sapiens
cagaaacgcttaaat

SEQ ID NO: 1821585 - DNA, 15 bp, Homo sapiens
agaaacgcttaaatt

SEQ ID NO: 1821586 - DNA, 15 bp, Homo sapiens
gaaacgcttaaatta

SEQ ID NO: 1821587 - DNA, 15 bp, Homo sapiens
aaacgcttaaattat

SEQ ID NO: 1821588 - DNA, 15 bp, Homo sapiens
aacgcttaaattatc

SEQ ID NO: 1821589 - DNA, 15 bp, Homo sapiens
acgcttaaattatct

SEQ ID NO: 1821590 - DNA, 15 bp, Homo sapiens
cgcttaaattatctt

SEQ ID NO: 1821591 - DNA, 15 bp, Homo sapiens
gcttaaattatcttc

SEQ ID NO: 1821592 - DNA, 15 bp, Homo sapiens
cttaaattatcttca

SEQ ID NO: 1821593 - DNA, 15 bp, Homo sapiens
ttaaattatcttcag

SEQ ID NO: 1821594 - DNA, 15 bp, Homo sapiens
taaattatcttcagt

SEQ ID NO: 1821595 - DNA, 15 bp, Homo sapiens
aaattatcttcagta

SEQ ID NO: 1821596 - DNA, 15 bp, Homo sapiens
aattatcttcagtag

SEQ ID NO: 1821597 - DNA, 15 bp, Homo sapiens
attatcttcagtagt

SEQ ID NO: 1821598 - DNA, 15 bp, Homo sapiens
ttatcttcagtagtc

SEQ ID NO: 1821599 - DNA, 15 bp, Homo sapiens
tatcttcagtagtct

SEQ ID NO: 1821600 - DNA, 15 bp, Homo sapiens
atcttcagtagtctc

SEQ ID NO: 1821601 - DNA, 15 bp, Homo sapiens
tcttcagtagtctca

SEQ ID NO: 1821602 - DNA, 15 bp, Homo sapiens
cttcagtagtctcaa

SEQ ID NO: 1821603 - DNA, 15 bp, Homo sapiens
ttcagtagtctcaat

SEQ ID NO: 1821604 - DNA, 15 bp, Homo sapiens
tcagtagtctcaatt

SEQ ID NO: 1821605 - DNA, 15 bp, Homo sapiens
cagtagtctcaattt

SEQ ID NO: 1821606 - DNA, 15 bp, Homo sapiens
agtagtctcaattta

SEQ ID NO: 1821607 - DNA, 15 bp, Homo sapiens
gtagtctcaatttaa

SEQ ID NO: 1821608 - DNA, 15 bp, Homo sapiens
tagtctcaatttaag

SEQ ID NO: 1821609 - DNA, 15 bp, Homo sapiens
agtctcaatttaagc

SEQ ID NO: 1821610 - DNA, 15 bp, Homo sapiens
gtctcaatttaagca

SEQ ID NO: 1821611 - DNA, 15 bp, Homo sapiens
tctcaatttaagcat

SEQ ID NO: 1821612 - DNA, 15 bp, Homo sapiens
ctcaatttaagcatg

SEQ ID NO: 1821613 - DNA, 15 bp, Homo sapiens
tcaatttaagcatga

SEQ ID NO: 1821614 - DNA, 15 bp, Homo sapiens
caatttaagcatgag

SEQ ID NO: 1821615 - DNA, 15 bp, Homo sapiens
aatttaagcatgagg

SEQ ID NO: 1821616 - DNA, 15 bp, Homo sapiens
atttaagcatgaggc

SEQ ID NO: 1821617 - DNA, 15 bp, Homo sapiens
tttaagcatgaggca

SEQ ID NO: 1821618 - DNA, 15 bp, Homo sapiens
ttaagcatgaggcaa

SEQ ID NO: 1821619 - DNA, 15 bp, Homo sapiens
taagcatgaggcaaa

SEQ ID NO: 1821620 - DNA, 15 bp, Homo sapiens
aagcatgaggcaaat

SEQ ID NO: 1821621 - DNA, 15 bp, Homo sapiens
agcatgaggcaaatt

SEQ ID NO: 1821622 - DNA, 15 bp, Homo sapiens
gcatgaggcaaattg

SEQ ID NO: 1821623 - DNA, 15 bp, Homo sapiens
catgaggcaaattgt

SEQ ID NO: 1821624 - DNA, 15 bp, Homo sapiens
atgaggcaaattgtg

SEQ ID NO: 1821625 - DNA, 15 bp, Homo sapiens
tgaggcaaattgtgt

SEQ ID NO: 1821626 - DNA, 15 bp, Homo sapiens
gaggcaaattgtgtt

SEQ ID NO: 1821627 - DNA, 15 bp, Homo sapiens
aggcaaattgtgttt

SEQ ID NO: 1821628 - DNA, 15 bp, Homo sapiens
ggcaaattgtgtttc

SEQ ID NO: 1821629 - DNA, 15 bp, Homo sapiens
gcaaattgtgtttct

SEQ ID NO: 1821630 - DNA, 15 bp, Homo sapiens
caaattgtgtttcta

SEQ ID NO: 1821631 - DNA, 15 bp, Homo sapiens
aaattgtgtttctaa

SEQ ID NO: 1821632 - DNA, 15 bp, Homo sapiens
aattgtgtttctaac

SEQ ID NO: 1821633 - DNA, 15 bp, Homo sapiens
attgtgtttctaaca

SEQ ID NO: 1821634 - DNA, 15 bp, Homo sapiens
ttgtgtttctaacaa

SEQ ID NO: 1821635 - DNA, 15 bp, Homo sapiens
tgtgtttctaacaaa

SEQ ID NO: 1821636 - DNA, 15 bp, Homo sapiens
gtgtttctaacaaaa

SEQ ID NO: 1821637 - DNA, 15 bp, Homo sapiens
tgtttctaacaaaac

SEQ ID NO: 1821638 - DNA, 15 bp, Homo sapiens
gtttctaacaaaaca

SEQ ID NO: 1821639 - DNA, 15 bp, Homo sapiens
tttctaacaaaacag

SEQ ID NO: 1821640 - DNA, 15 bp, Homo sapiens
ttctaacaaaacagg

SEQ ID NO: 1821641 - DNA, 15 bp, Homo sapiens
tctaacaaaacaggt

SEQ ID NO: 1821642 - DNA, 15 bp, Homo sapiens
ctaacaaaacaggtt

SEQ ID NO: 1821643 - DNA, 15 bp, Homo sapiens
taacaaaacaggttg

SEQ ID NO: 1821644 - DNA, 15 bp, Homo sapiens
aacaaaacaggttgg

SEQ ID NO: 1821645 - DNA, 15 bp, Homo sapiens
acaaaacaggttgga

SEQ ID NO: 1821646 - DNA, 15 bp, Homo sapiens
caaaacaggttggaa

SEQ ID NO: 1821647 - DNA, 15 bp, Homo sapiens
aaaacaggttggaag

SEQ ID NO: 1821648 - DNA, 15 bp, Homo sapiens
aaacaggttggaaga

SEQ ID NO: 1821649 - DNA, 15 bp, Homo sapiens
aacaggttggaagat

SEQ ID NO: 1821650 - DNA, 15 bp, Homo sapiens
acaggttggaagata

SEQ ID NO: 1821651 - DNA, 15 bp, Homo sapiens
caggttggaagataa

SEQ ID NO: 1821652 - DNA, 15 bp, Homo sapiens
aggttggaagataaa

SEQ ID NO: 1821653 - DNA, 15 bp, Homo sapiens
ggttggaagataaaa

SEQ ID NO: 1821654 - DNA, 15 bp, Homo sapiens
gttggaagataaaaa

SEQ ID NO: 1821655 - DNA, 15 bp, Homo sapiens
ttggaagataaaaaa

SEQ ID NO: 1821656 - DNA, 15 bp, Homo sapiens
tggaagataaaaaat

SEQ ID NO: 1821657 - DNA, 15 bp, Homo sapiens
ggaagataaaaaata

SEQ ID NO: 1821658 - DNA, 15 bp, Homo sapiens
gaagataaaaaatac

SEQ ID NO: 1821659 - DNA, 15 bp, Homo sapiens
aagataaaaaatacc

SEQ ID NO: 1821660 - DNA, 15 bp, Homo sapiens
agataaaaaatacca

SEQ ID NO: 1821661 - DNA, 15 bp, Homo sapiens
gataaaaaataccag

SEQ ID NO: 1821662 - DNA, 15 bp, Homo sapiens
ataaaaaataccagt

SEQ ID NO: 1821663 - DNA, 15 bp, Homo sapiens
taaaaaataccagta

SEQ ID NO: 1821664 - DNA, 15 bp, Homo sapiens
aaaaaataccagtat

SEQ ID NO: 1821665 - DNA, 15 bp, Homo sapiens
aaaaataccagtatt

SEQ ID NO: 1821666 - DNA, 15 bp, Homo sapiens
aaaataccagtattt

SEQ ID NO: 1821667 - DNA, 15 bp, Homo sapiens
aaataccagtattta

SEQ ID NO: 1821668 - DNA, 15 bp, Homo sapiens
aataccagtatttaa

SEQ ID NO: 1821669 - DNA, 15 bp, Homo sapiens
ataccagtatttaaa

SEQ ID NO: 1821670 - DNA, 15 bp, Homo sapiens
taccagtatttaaaa

SEQ ID NO: 1821671 - DNA, 15 bp, Homo sapiens
accagtatttaaaag

SEQ ID NO: 1821672 - DNA, 15 bp, Homo sapiens
ccagtatttaaaagg

SEQ ID NO: 1821673 - DNA, 15 bp, Homo sapiens
cagtatttaaaagga

SEQ ID NO: 1821674 - DNA, 15 bp, Homo sapiens
agtatttaaaaggaa

SEQ ID NO: 1821675 - DNA, 15 bp, Homo sapiens
gtatttaaaaggaaa

SEQ ID NO: 1821676 - DNA, 15 bp, Homo sapiens
tatttaaaaggaaac

SEQ ID NO: 1821677 - DNA, 15 bp, Homo sapiens
atttaaaaggaaaca

SEQ ID NO: 1821678 - DNA, 15 bp, Homo sapiens
tttaaaaggaaacat

SEQ ID NO: 1821679 - DNA, 15 bp, Homo sapiens
ttaaaaggaaacatt

SEQ ID NO: 1821680 - DNA, 15 bp, Homo sapiens
taaaaggaaacattc

SEQ ID NO: 1821681 - DNA, 15 bp, Homo sapiens
aaaaggaaacattca

SEQ ID NO: 1821682 - DNA, 15 bp, Homo sapiens
aaaggaaacattcag

SEQ ID NO: 1821683 - DNA, 15 bp, Homo sapiens
aaggaaacattcagt

SEQ ID NO: 1821684 - DNA, 15 bp, Homo sapiens
aggaaacattcagtt

SEQ ID NO: 1821685 - DNA, 15 bp, Homo sapiens
ggaaacattcagttt

SEQ ID NO: 1821686 - DNA, 15 bp, Homo sapiens
gaaacattcagtttt

SEQ ID NO: 1821687 - DNA, 15 bp, Homo sapiens
aaacattcagttttc

SEQ ID NO: 1821688 - DNA, 15 bp, Homo sapiens
aacattcagttttct

SEQ ID NO: 1821689 - DNA, 15 bp, Homo sapiens
acattcagttttctg

SEQ ID NO: 1821690 - DNA, 15 bp, Homo sapiens
cattcagttttctgg

SEQ ID NO: 1821691 - DNA, 15 bp, Homo sapiens
attcagttttctgga

SEQ ID NO: 1821692 - DNA, 15 bp, Homo sapiens
ttcagttttctggaa

SEQ ID NO: 1821693 - DNA, 15 bp, Homo sapiens
tcagttttctggaaa

SEQ ID NO: 1821694 - DNA, 15 bp, Homo sapiens
cagttttctggaaaa

SEQ ID NO: 1821695 - DNA, 15 bp, Homo sapiens
agttttctggaaaac

SEQ ID NO: 1821696 - DNA, 15 bp, Homo sapiens
gttttctggaaaact

SEQ ID NO: 1821697 - DNA, 15 bp, Homo sapiens
ttttctggaaaactg

SEQ ID NO: 1821698 - DNA, 15 bp, Homo sapiens
tttctggaaaactgg

SEQ ID NO: 1821699 - DNA, 15 bp, Homo sapiens
ttctggaaaactgga

SEQ ID NO: 1821700 - DNA, 15 bp, Homo sapiens
tctggaaaactggaa

SEQ ID NO: 1821701 - DNA, 15 bp, Homo sapiens
ctggaaaactggaaa

SEQ ID NO: 1821702 - DNA, 15 bp, Homo sapiens
tggaaaactggaaaa

SEQ ID NO: 1821703 - DNA, 15 bp, Homo sapiens
ggaaaactggaaaaa

SEQ ID NO: 1821704 - DNA, 15 bp, Homo sapiens
gaaaactggaaaaaa

SEQ ID NO: 1821705 - DNA, 15 bp, Homo sapiens
aaactggaaaaaaac

SEQ ID NO: 1821706 - DNA, 15 bp, Homo sapiens
aactggaaaaaaacc

SEQ ID NO: 1821707 - DNA, 15 bp, Homo sapiens
actggaaaaaaacca

SEQ ID NO: 1821708 - DNA, 15 bp, Homo sapiens
ctggaaaaaaaccat

SEQ ID NO: 1821709 - DNA, 15 bp, Homo sapiens
tggaaaaaaaccatc

SEQ ID NO: 1821710 - DNA, 15 bp, Homo sapiens
ggaaaaaaaccatca

SEQ ID NO: 1821711 - DNA, 15 bp, Homo sapiens
gaaaaaaaccatcaa

SEQ ID NO: 1821712 - DNA, 15 bp, Homo sapiens
aaaaaaaccatcaaa

SEQ ID NO: 1821713 - DNA, 15 bp, Homo sapiens
aaaaaaccatcaaat

SEQ ID NO: 1821714 - DNA, 15 bp, Homo sapiens
aaaaaccatcaaata

SEQ ID NO: 1821715 - DNA, 15 bp, Homo sapiens
aaaaccatcaaataa

SEQ ID NO: 1821716 - DNA, 15 bp, Homo sapiens
aaaccatcaaataac

SEQ ID NO: 1821717 - DNA, 15 bp, Homo sapiens
aaccatcaaataact

SEQ ID NO: 1821718 - DNA, 15 bp, Homo sapiens
accatcaaataactg

SEQ ID NO: 1821719 - DNA, 15 bp, Homo sapiens
ccatcaaataactgt

SEQ ID NO: 1821720 - DNA, 15 bp, Homo sapiens
catcaaataactgtg

SEQ ID NO: 1821721 - DNA, 15 bp, Homo sapiens
atcaaataactgtga

SEQ ID NO: 1821722 - DNA, 15 bp, Homo sapiens
tcaaataactgtgat

SEQ ID NO: 1821723 - DNA, 15 bp, Homo sapiens
caaataactgtgata

SEQ ID NO: 1821724 - DNA, 15 bp, Homo sapiens
aaataactgtgatat

SEQ ID NO: 1821725 - DNA, 15 bp, Homo sapiens
aataactgtgatatc

SEQ ID NO: 1821726 - DNA, 15 bp, Homo sapiens
ataactgtgatatca

SEQ ID NO: 1821727 - DNA, 15 bp, Homo sapiens
taactgtgatatcac

SEQ ID NO: 1821728 - DNA, 15 bp, Homo sapiens
aactgtgatatcacc

SEQ ID NO: 1821729 - DNA, 15 bp, Homo sapiens
actgtgatatcaccg

SEQ ID NO: 1821730 - DNA, 15 bp, Homo sapiens
ctgtgatatcaccga

SEQ ID NO: 1821731 - DNA, 15 bp, Homo sapiens
tgtgatatcaccgaa

SEQ ID NO: 1821732 - DNA, 15 bp, Homo sapiens
gtgatatcaccgaat

SEQ ID NO: 1821733 - DNA, 15 bp, Homo sapiens
tgatatcaccgaata

SEQ ID NO: 1821734 - DNA, 15 bp, Homo sapiens
gatatcaccgaatat

SEQ ID NO: 1821735 - DNA, 15 bp, Homo sapiens
atatcaccgaatata

SEQ ID NO: 1821736 - DNA, 15 bp, Homo sapiens
tatcaccgaatatat

SEQ ID NO: 1821737 - DNA, 15 bp, Homo sapiens
atcaccgaatatatg

SEQ ID NO: 1821738 - DNA, 15 bp, Homo sapiens
tcaccgaatatatgc

SEQ ID NO: 1821739 - DNA, 15 bp, Homo sapiens
caccgaatatatgcc

SEQ ID NO: 1821740 - DNA, 15 bp, Homo sapiens
accgaatatatgcca

SEQ ID NO: 1821741 - DNA, 15 bp, Homo sapiens
ccgaatatatgccag

SEQ ID NO: 1821742 - DNA, 15 bp, Homo sapiens
cgaatatatgccagg

SEQ ID NO: 1821743 - DNA, 15 bp, Homo sapiens
gaatatatgccagga

SEQ ID NO: 1821744 - DNA, 15 bp, Homo sapiens
aatatatgccaggaa

SEQ ID NO: 1821745 - DNA, 15 bp, Homo sapiens
atatatgccaggaat

SEQ ID NO: 1821746 - DNA, 15 bp, Homo sapiens
tatatgccaggaatc

SEQ ID NO: 1821747 - DNA, 15 bp, Homo sapiens
atatgccaggaatct

SEQ ID NO: 1821748 - DNA, 15 bp, Homo sapiens
tatgccaggaatctc

SEQ ID NO: 1821749 - DNA, 15 bp, Homo sapiens
atgccaggaatctca

SEQ ID NO: 1821750 - DNA, 15 bp, Homo sapiens
tgccaggaatctcaa

SEQ ID NO: 1821751 - DNA, 15 bp, Homo sapiens
gccaggaatctcaaa

SEQ ID NO: 1821752 - DNA, 15 bp, Homo sapiens
ccaggaatctcaaaa

SEQ ID NO: 1821753 - DNA, 15 bp, Homo sapiens
caggaatctcaaaaa

SEQ ID NO: 1821754 - DNA, 15 bp, Homo sapiens
aggaatctcaaaaaa

SEQ ID NO: 1821755 - DNA, 15 bp, Homo sapiens
ggaatctcaaaaaaa

SEQ ID NO: 1821756 - DNA, 15 bp, Homo sapiens
gaatctcaaaaaaac

SEQ ID NO: 1821757 - DNA, 15 bp, Homo sapiens
aatctcaaaaaaacc

SEQ ID NO: 1821758 - DNA, 15 bp, Homo sapiens
tctcaaaaaaaccac

SEQ ID NO: 1821759 - DNA, 15 bp, Homo sapiens
ctcaaaaaaaccact

SEQ ID NO: 1821760 - DNA, 15 bp, Homo sapiens
tcaaaaaaaccactc

SEQ ID NO: 1821761 - DNA, 15 bp, Homo sapiens
caaaaaaaccactca

SEQ ID NO: 1821762 - DNA, 15 bp, Homo sapiens
aaaaaaaccactcac

SEQ ID NO: 1821763 - DNA, 15 bp, Homo sapiens
aaaaaaccactcacc

SEQ ID NO: 1821764 - DNA, 15 bp, Homo sapiens
aaaaaccactcacca

SEQ ID NO: 1821765 - DNA, 15 bp, Homo sapiens
aaaaccactcaccag

SEQ ID NO: 1821766 - DNA, 15 bp, Homo sapiens
aaaccactcaccagg

SEQ ID NO: 1821767 - DNA, 15 bp, Homo sapiens
aaccactcaccaggc

SEQ ID NO: 1821768 - DNA, 15 bp, Homo sapiens
accactcaccaggct

SEQ ID NO: 1821769 - DNA, 15 bp, Homo sapiens
ccactcaccaggctg

SEQ ID NO: 1821770 - DNA, 15 bp, Homo sapiens
cactcaccaggctgg

SEQ ID NO: 1821771 - DNA, 15 bp, Homo sapiens
actcaccaggctggg

SEQ ID NO: 1821772 - DNA, 15 bp, Homo sapiens
ctcaccaggctgggc

SEQ ID NO: 1821773 - DNA, 15 bp, Homo sapiens
tcaccaggctgggca

SEQ ID NO: 1821774 - DNA, 15 bp, Homo sapiens
caccaggctgggcat

SEQ ID NO: 1821775 - DNA, 15 bp, Homo sapiens
accaggctgggcatg

SEQ ID NO: 1821776 - DNA, 15 bp, Homo sapiens
ccaggctgggcatgg

SEQ ID NO: 1821777 - DNA, 15 bp, Homo sapiens
caggctgggcatggt

SEQ ID NO: 1821778 - DNA, 15 bp, Homo sapiens
aggctgggcatggtg

SEQ ID NO: 1821779 - DNA, 15 bp, Homo sapiens
cacctgaggtcagaa

SEQ ID NO: 1821780 - DNA, 15 bp, Homo sapiens
gaggtcagaagttcg

SEQ ID NO: 1821781 - DNA, 15 bp, Homo sapiens
aggtcagaagttcga

SEQ ID NO: 1821782 - DNA, 15 bp, Homo sapiens
ggtcagaagttcgag

SEQ ID NO: 1821783 - DNA, 15 bp, Homo sapiens
gtcagaagttcgaga

SEQ ID NO: 1821784 - DNA, 15 bp, Homo sapiens
tcagaagttcgagag

SEQ ID NO: 1821785 - DNA, 15 bp, Homo sapiens
cagaagttcgagagt

SEQ ID NO: 1821786 - DNA, 15 bp, Homo sapiens
agaagttcgagagta

SEQ ID NO: 1821787 - DNA, 15 bp, Homo sapiens
gaagttcgagagtag

SEQ ID NO: 1821788 - DNA, 15 bp, Homo sapiens
aagttcgagagtagc

SEQ ID NO: 1821789 - DNA, 15 bp, Homo sapiens
agttcgagagtagcc

SEQ ID NO: 1821790 - DNA, 15 bp, Homo sapiens
gttcgagagtagcct

SEQ ID NO: 1821791 - DNA, 15 bp, Homo sapiens
ttcgagagtagcctg

SEQ ID NO: 1821792 - DNA, 15 bp, Homo sapiens
tcgagagtagcctgg

SEQ ID NO: 1821793 - DNA, 15 bp, Homo sapiens
cgagagtagcctggc

SEQ ID NO: 1821794 - DNA, 15 bp, Homo sapiens
gagagtagcctggcc

SEQ ID NO: 1821795 - DNA, 15 bp, Homo sapiens
agagtagcctggcca

SEQ ID NO: 1821796 - DNA, 15 bp, Homo sapiens
gagtagcctggccaa

SEQ ID NO: 1821797 - DNA, 15 bp, Homo sapiens
agtagcctggccaaa

SEQ ID NO: 1821798 - DNA, 15 bp, Homo sapiens
gtagcctggccaaaa

SEQ ID NO: 1821799 - DNA, 15 bp, Homo sapiens
tagcctggccaaaat

SEQ ID NO: 1821800 - DNA, 15 bp, Homo sapiens
cctggccaaaatggc

SEQ ID NO: 1821801 - DNA, 15 bp, Homo sapiens
ctggccaaaatggca

SEQ ID NO: 1821802 - DNA, 15 bp, Homo sapiens
tggccaaaatggcaa

SEQ ID NO: 1821803 - DNA, 15 bp, Homo sapiens
ggccaaaatggcaaa

SEQ ID NO: 1821804 - DNA, 15 bp, Homo sapiens
gccaaaatggcaaaa

SEQ ID NO: 1821805 - DNA, 15 bp, Homo sapiens
ccaaaatggcaaaac

SEQ ID NO: 1821806 - DNA, 15 bp, Homo sapiens
caaaatggcaaaacc

SEQ ID NO: 1821807 - DNA, 15 bp, Homo sapiens
aaaatggcaaaaccc

SEQ ID NO: 1821808 - DNA, 15 bp, Homo sapiens
aaatggcaaaaccct

SEQ ID NO: 1821809 - DNA, 15 bp, Homo sapiens
aatggcaaaaccctg

SEQ ID NO: 1821810 - DNA, 15 bp, Homo sapiens
tgggcatggtggcat

SEQ ID NO: 1821811 - DNA, 15 bp, Homo sapiens
ggcatggtggcatgc

SEQ ID NO: 1821812 - DNA, 15 bp, Homo sapiens
gcatggtggcatgcg

SEQ ID NO: 1821813 - DNA, 15 bp, Homo sapiens
catggtggcatgcgc

SEQ ID NO: 1821814 - DNA, 15 bp, Homo sapiens
atggtggcatgcgcc

SEQ ID NO: 1821815 - DNA, 15 bp, Homo sapiens
gctactcgggaggcg

SEQ ID NO: 1821816 - DNA, 15 bp, Homo sapiens
ctactcgggaggcga

SEQ ID NO: 1821817 - DNA, 15 bp, Homo sapiens
tactcgggaggcgag

SEQ ID NO: 1821818 - DNA, 15 bp, Homo sapiens
actcgggaggcgagg

SEQ ID NO: 1821819 - DNA, 15 bp, Homo sapiens
ctcgggaggcgaggt

SEQ ID NO: 1821820 - DNA, 15 bp, Homo sapiens
tcgggaggcgaggta

SEQ ID NO: 1821821 - DNA, 15 bp, Homo sapiens
cgggaggcgaggtac

SEQ ID NO: 1821822 - DNA, 15 bp, Homo sapiens
gggaggcgaggtacg

SEQ ID NO: 1821823 - DNA, 15 bp, Homo sapiens
ggaggcgaggtacga

SEQ ID NO: 1821824 - DNA, 15 bp, Homo sapiens
gaggcgaggtacgag

SEQ ID NO: 1821825 - DNA, 15 bp, Homo sapiens
aggcgaggtacgaga

SEQ ID NO: 1821826 - DNA, 15 bp, Homo sapiens
ggcgaggtacgagaa

SEQ ID NO: 1821827 - DNA, 15 bp, Homo sapiens
gcgaggtacgagaat

SEQ ID NO: 1821828 - DNA, 15 bp, Homo sapiens
cgaggtacgagaatt

SEQ ID NO: 1821829 - DNA, 15 bp, Homo sapiens
gaggtacgagaattg

SEQ ID NO: 1821830 - DNA, 15 bp, Homo sapiens
aggtacgagaattgc

SEQ ID NO: 1821831 - DNA, 15 bp, Homo sapiens
ggtacgagaattgct

SEQ ID NO: 1821832 - DNA, 15 bp, Homo sapiens
gtacgagaattgctt

SEQ ID NO: 1821833 - DNA, 15 bp, Homo sapiens
tacgagaattgcttg

SEQ ID NO: 1821834 - DNA, 15 bp, Homo sapiens
cgagaattgcttgaa

SEQ ID NO: 1821835 - DNA, 15 bp, Homo sapiens
gaattgcttgaatcc

SEQ ID NO: 1821836 - DNA, 15 bp, Homo sapiens
aattgcttgaatcca

SEQ ID NO: 1821837 - DNA, 15 bp, Homo sapiens
attgcttgaatccag

SEQ ID NO: 1821838 - DNA, 15 bp, Homo sapiens
ttgcttgaatccagg

SEQ ID NO: 1821839 - DNA, 15 bp, Homo sapiens
tgcttgaatccagga

SEQ ID NO: 1821840 - DNA, 15 bp, Homo sapiens
gcttgaatccaggag

SEQ ID NO: 1821841 - DNA, 15 bp, Homo sapiens
cttgaatccaggagg

SEQ ID NO: 1821842 - DNA, 15 bp, Homo sapiens
ttgaatccaggagga

SEQ ID NO: 1821843 - DNA, 15 bp, Homo sapiens
tgaatccaggaggag

SEQ ID NO: 1821844 - DNA, 15 bp, Homo sapiens
gaatccaggaggagg

SEQ ID NO: 1821845 - DNA, 15 bp, Homo sapiens
aatccaggaggagga

SEQ ID NO: 1821846 - DNA, 15 bp, Homo sapiens
atccaggaggaggag

SEQ ID NO: 1821847 - DNA, 15 bp, Homo sapiens
tccaggaggaggagg

SEQ ID NO: 1821848 - DNA, 15 bp, Homo sapiens
agtgagcccagatca

SEQ ID NO: 1821849 - DNA, 15 bp, Homo sapiens
gtgagcccagatcac

SEQ ID NO: 1821850 - DNA, 15 bp, Homo sapiens
tgagcccagatcaca

SEQ ID NO: 1821851 - DNA, 15 bp, Homo sapiens
gagcccagatcacac

SEQ ID NO: 1821852 - DNA, 15 bp, Homo sapiens
agcccagatcacact

SEQ ID NO: 1821853 - DNA, 15 bp, Homo sapiens
gcccagatcacactg

SEQ ID NO: 1821854 - DNA, 15 bp, Homo sapiens
cccagatcacactgc

SEQ ID NO: 1821855 - DNA, 15 bp, Homo sapiens
ccagatcacactgct

SEQ ID NO: 1821856 - DNA, 15 bp, Homo sapiens
cagatcacactgctg

SEQ ID NO: 1821857 - DNA, 15 bp, Homo sapiens
agatcacactgctgc

SEQ ID NO: 1821858 - DNA, 15 bp, Homo sapiens
gatcacactgctgca

SEQ ID NO: 1821859 - DNA, 15 bp, Homo sapiens
atcacactgctgcac

SEQ ID NO: 1821860 - DNA, 15 bp, Homo sapiens
tcacactgctgcact

SEQ ID NO: 1821861 - DNA, 15 bp, Homo sapiens
cacactgctgcactc

SEQ ID NO: 1821862 - DNA, 15 bp, Homo sapiens
acactgctgcactcc

SEQ ID NO: 1821863 - DNA, 15 bp, Homo sapiens
cactgctgcactcca

SEQ ID NO: 1821864 - DNA, 15 bp, Homo sapiens
actgctgcactccag

SEQ ID NO: 1821865 - DNA, 15 bp, Homo sapiens
gggtgacagagcaaa

SEQ ID NO: 1821866 - DNA, 15 bp, Homo sapiens
ggtgacagagcaaaa

SEQ ID NO: 1821867 - DNA, 15 bp, Homo sapiens
gtgacagagcaaaac

SEQ ID NO: 1821868 - DNA, 15 bp, Homo sapiens
tgacagagcaaaact

SEQ ID NO: 1821869 - DNA, 15 bp, Homo sapiens
gacagagcaaaactg

SEQ ID NO: 1821870 - DNA, 15 bp, Homo sapiens
acagagcaaaactgt

SEQ ID NO: 1821871 - DNA, 15 bp, Homo sapiens
cagagcaaaactgtc

SEQ ID NO: 1821872 - DNA, 15 bp, Homo sapiens
agagcaaaactgtct

SEQ ID NO: 1821873 - DNA, 15 bp, Homo sapiens
gagcaaaactgtctc

SEQ ID NO: 1821874 - DNA, 15 bp, Homo sapiens
agcaaaactgtctcg

SEQ ID NO: 1821875 - DNA, 15 bp, Homo sapiens
gcaaaactgtctcgc

SEQ ID NO: 1821876 - DNA, 15 bp, Homo sapiens
caaaactgtctcgca

SEQ ID NO: 1821877 - DNA, 15 bp, Homo sapiens
aaaactgtctcgcaa

SEQ ID NO: 1821878 - DNA, 15 bp, Homo sapiens
aaactgtctcgcaaa

SEQ ID NO: 1821879 - DNA, 15 bp, Homo sapiens
aactgtctcgcaaaa

SEQ ID NO: 1821880 - DNA, 15 bp, Homo sapiens
actgtctcgcaaaac

SEQ ID NO: 1821881 - DNA, 15 bp, Homo sapiens
ctgtctcgcaaaaca

SEQ ID NO: 1821882 - DNA, 15 bp, Homo sapiens
tgtctcgcaaaacaa

SEQ ID NO: 1821883 - DNA, 15 bp, Homo sapiens
gtctcgcaaaacaaa

SEQ ID NO: 1821884 - DNA, 15 bp, Homo sapiens
tctcgcaaaacaaaa

SEQ ID NO: 1821885 - DNA, 15 bp, Homo sapiens
ctcgcaaaacaaaaa

SEQ ID NO: 1821886 - DNA, 15 bp, Homo sapiens
tcgcaaaacaaaaaa

SEQ ID NO: 1821887 - DNA, 15 bp, Homo sapiens
cgcaaaacaaaaaaa

SEQ ID NO: 1821888 - DNA, 15 bp, Homo sapiens
gcaaaacaaaaaaaa

SEQ ID NO: 1821889 - DNA, 15 bp, Homo sapiens
caaaacaaaaaaaac

SEQ ID NO: 1821890 - DNA, 15 bp, Homo sapiens
aaaacaaaaaaaaca

SEQ ID NO: 1821891 - DNA, 15 bp, Homo sapiens
aaacaaaaaaaacaa

SEQ ID NO: 1821892 - DNA, 15 bp, Homo sapiens
aacaaaaaaaacaaa

SEQ ID NO: 1821893 - DNA, 15 bp, Homo sapiens
acaaaaaaaacaaat

SEQ ID NO: 1821894 - DNA, 15 bp, Homo sapiens
caaaaaaaacaaatt

SEQ ID NO: 1821895 - DNA, 15 bp, Homo sapiens
aaaaaaaacaaattc

SEQ ID NO: 1821896 - DNA, 15 bp, Homo sapiens
aaaaaaacaaattca

SEQ ID NO: 1821897 - DNA, 15 bp, Homo sapiens
aaaaaacaaattcac

SEQ ID NO: 1821898 - DNA, 15 bp, Homo sapiens
aaaaacaaattcacc

SEQ ID NO: 1821899 - DNA, 15 bp, Homo sapiens
aaaacaaattcacca

SEQ ID NO: 1821900 - DNA, 15 bp, Homo sapiens
aaacaaattcaccaa

SEQ ID NO: 1821901 - DNA, 15 bp, Homo sapiens
aacaaattcaccaaa

SEQ ID NO: 1821902 - DNA, 15 bp, Homo sapiens
acaaattcaccaaag

SEQ ID NO: 1821903 - DNA, 15 bp, Homo sapiens
caaattcaccaaaga

SEQ ID NO: 1821904 - DNA, 15 bp, Homo sapiens
aaattcaccaaagaa

SEQ ID NO: 1821905 - DNA, 15 bp, Homo sapiens
aattcaccaaagaaa

SEQ ID NO: 1821906 - DNA, 15 bp, Homo sapiens
attcaccaaagaaat

SEQ ID NO: 1821907 - DNA, 15 bp, Homo sapiens
ttcaccaaagaaata

SEQ ID NO: 1821908 - DNA, 15 bp, Homo sapiens
tcaccaaagaaatag

SEQ ID NO: 1821909 - DNA, 15 bp, Homo sapiens
caccaaagaaatagt

SEQ ID NO: 1821910 - DNA, 15 bp, Homo sapiens
accaaagaaatagtc

SEQ ID NO: 1821911 - DNA, 15 bp, Homo sapiens
ccaaagaaatagtct

SEQ ID NO: 1821912 - DNA, 15 bp, Homo sapiens
caaagaaatagtcta

SEQ ID NO: 1821913 - DNA, 15 bp, Homo sapiens
aaagaaatagtctag

SEQ ID NO: 1821914 - DNA, 15 bp, Homo sapiens
aagaaatagtctagg

SEQ ID NO: 1821915 - DNA, 15 bp, Homo sapiens
agaaatagtctaggt

SEQ ID NO: 1821916 - DNA, 15 bp, Homo sapiens
gaaatagtctaggta

SEQ ID NO: 1821917 - DNA, 15 bp, Homo sapiens
aaatagtctaggtac

SEQ ID NO: 1821918 - DNA, 15 bp, Homo sapiens
aatagtctaggtaca

SEQ ID NO: 1821919 - DNA, 15 bp, Homo sapiens
atagtctaggtacaa

SEQ ID NO: 1821920 - DNA, 15 bp, Homo sapiens
tagtctaggtacaaa

SEQ ID NO: 1821921 - DNA, 15 bp, Homo sapiens
agtctaggtacaaat

SEQ ID NO: 1821922 - DNA, 15 bp, Homo sapiens
gtctaggtacaaatg

SEQ ID NO: 1821923 - DNA, 15 bp, Homo sapiens
tctaggtacaaatgt

SEQ ID NO: 1821924 - DNA, 15 bp, Homo sapiens
ctaggtacaaatgta

SEQ ID NO: 1821925 - DNA, 15 bp, Homo sapiens
taggtacaaatgtaa

SEQ ID NO: 1821926 - DNA, 15 bp, Homo sapiens
aggtacaaatgtaat

SEQ ID NO: 1821927 - DNA, 15 bp, Homo sapiens
ggtacaaatgtaatg

SEQ ID NO: 1821928 - DNA, 15 bp, Homo sapiens
gtacaaatgtaatgg

SEQ ID NO: 1821929 - DNA, 15 bp, Homo sapiens
tacaaatgtaatgga

SEQ ID NO: 1821930 - DNA, 15 bp, Homo sapiens
acaaatgtaatggat

SEQ ID NO: 1821931 - DNA, 15 bp, Homo sapiens
caaatgtaatggata

SEQ ID NO: 1821932 - DNA, 15 bp, Homo sapiens
aaatgtaatggataa

SEQ ID NO: 1821933 - DNA, 15 bp, Homo sapiens
aatgtaatggataaa

SEQ ID NO: 1821934 - DNA, 15 bp, Homo sapiens
atgtaatggataaag

SEQ ID NO: 1821935 - DNA, 15 bp, Homo sapiens
tgtaatggataaaga

SEQ ID NO: 1821936 - DNA, 15 bp, Homo sapiens
gtaatggataaagaa

SEQ ID NO: 1821937 - DNA, 15 bp, Homo sapiens
taatggataaagaaa

SEQ ID NO: 1821938 - DNA, 15 bp, Homo sapiens
tggataaagaaaata

SEQ ID NO: 1821939 - DNA, 15 bp, Homo sapiens
ggataaagaaaatat

SEQ ID NO: 1821940 - DNA, 15 bp, Homo sapiens
gataaagaaaatatt

SEQ ID NO: 1821941 - DNA, 15 bp, Homo sapiens
ataaagaaaatatta

SEQ ID NO: 1821942 - DNA, 15 bp, Homo sapiens
taaagaaaatattat

SEQ ID NO: 1821943 - DNA, 15 bp, Homo sapiens
aaagaaaatattatg

SEQ ID NO: 1821944 - DNA, 15 bp, Homo sapiens
aagaaaatattatga

SEQ ID NO: 1821945 - DNA, 15 bp, Homo sapiens
agaaaatattatgaa

SEQ ID NO: 1821946 - DNA, 15 bp, Homo sapiens
gaaaatattatgaac

SEQ ID NO: 1821947 - DNA, 15 bp, Homo sapiens
aaaatattatgaacc

SEQ ID NO: 1821948 - DNA, 15 bp, Homo sapiens
aaatattatgaacca

SEQ ID NO: 1821949 - DNA, 15 bp, Homo sapiens
aatattatgaaccat

SEQ ID NO: 1821950 - DNA, 15 bp, Homo sapiens
atattatgaaccatt

SEQ ID NO: 1821951 - DNA, 15 bp, Homo sapiens
tattatgaaccatta

SEQ ID NO: 1821952 - DNA, 15 bp, Homo sapiens
attatgaaccattat

SEQ ID NO: 1821953 - DNA, 15 bp, Homo sapiens
ttatgaaccattatg

SEQ ID NO: 1821954 - DNA, 15 bp, Homo sapiens
tatgaaccattatgt

SEQ ID NO: 1821955 - DNA, 15 bp, Homo sapiens
atgaaccattatgtg

SEQ ID NO: 1821956 - DNA, 15 bp, Homo sapiens
tgaaccattatgtga

SEQ ID NO: 1821957 - DNA, 15 bp, Homo sapiens
gaaccattatgtgaa

SEQ ID NO: 1821958 - DNA, 15 bp, Homo sapiens
aaccattatgtgaaa

SEQ ID NO: 1821959 - DNA, 15 bp, Homo sapiens
accattatgtgaaaa

SEQ ID NO: 1821960 - DNA, 15 bp, Homo sapiens
ccattatgtgaaaat

SEQ ID NO: 1821961 - DNA, 15 bp, Homo sapiens
cattatgtgaaaatg

SEQ ID NO: 1821962 - DNA, 15 bp, Homo sapiens
attatgtgaaaatgt

SEQ ID NO: 1821963 - DNA, 15 bp, Homo sapiens
ttatgtgaaaatgtt

SEQ ID NO: 1821964 - DNA, 15 bp, Homo sapiens
tatgtgaaaatgttt

SEQ ID NO: 1821965 - DNA, 15 bp, Homo sapiens
atgtgaaaatgtttt

SEQ ID NO: 1821966 - DNA, 15 bp, Homo sapiens
tgtgaaaatgtttta

SEQ ID NO: 1821967 - DNA, 15 bp, Homo sapiens
gtgaaaatgttttat

SEQ ID NO: 1821968 - DNA, 15 bp, Homo sapiens
tgaaaatgttttata

SEQ ID NO: 1821969 - DNA, 15 bp, Homo sapiens
gaaaatgttttatag

SEQ ID NO: 1821970 - DNA, 15 bp, Homo sapiens
aaaatgttttatagg

SEQ ID NO: 1821971 - DNA, 15 bp, Homo sapiens
aaatgttttataggc

SEQ ID NO: 1821972 - DNA, 15 bp, Homo sapiens
aatgttttataggcc

SEQ ID NO: 1821973 - DNA, 15 bp, Homo sapiens
atgttttataggcca

SEQ ID NO: 1821974 - DNA, 15 bp, Homo sapiens
tgttttataggccag

SEQ ID NO: 1821975 - DNA, 15 bp, Homo sapiens
gttttataggccagg

SEQ ID NO: 1821976 - DNA, 15 bp, Homo sapiens
ttttataggccaggt

SEQ ID NO: 1821977 - DNA, 15 bp, Homo sapiens
tttataggccaggtg

SEQ ID NO: 1821978 - DNA, 15 bp, Homo sapiens
ttataggccaggtgc

SEQ ID NO: 1821979 - DNA, 15 bp, Homo sapiens
tataggccaggtgca

SEQ ID NO: 1821980 - DNA, 15 bp, Homo sapiens
ataggccaggtgcag

SEQ ID NO: 1821981 - DNA, 15 bp, Homo sapiens
taggccaggtgcaga

SEQ ID NO: 1821982 - DNA, 15 bp, Homo sapiens
aggccaggtgcagag

SEQ ID NO: 1821983 - DNA, 15 bp, Homo sapiens
ggccaggtgcagagg

SEQ ID NO: 1821984 - DNA, 15 bp, Homo sapiens
gccaggtgcagaggc

SEQ ID NO: 1821985 - DNA, 15 bp, Homo sapiens
ccaggtgcagaggct

SEQ ID NO: 1821986 - DNA, 15 bp, Homo sapiens
caggtgcagaggctc

SEQ ID NO: 1821987 - DNA, 15 bp, Homo sapiens
aggtgcagaggctca

SEQ ID NO: 1821988 - DNA, 15 bp, Homo sapiens
ggtgcagaggctcac

SEQ ID NO: 1821989 - DNA, 15 bp, Homo sapiens
gtgcagaggctcacg

SEQ ID NO: 1821990 - DNA, 15 bp, Homo sapiens
tgcagaggctcacgc

SEQ ID NO: 1821991 - DNA, 15 bp, Homo sapiens
gcagaggctcacgcc

SEQ ID NO: 1821992 - DNA, 15 bp, Homo sapiens
cagaggctcacgcct

SEQ ID NO: 1821993 - DNA, 15 bp, Homo sapiens
agaggctcacgcctg

SEQ ID NO: 1821994 - DNA, 15 bp, Homo sapiens
gaggctcacgcctgt

SEQ ID NO: 1821995 - DNA, 15 bp, Homo sapiens
aggctcacgcctgta

SEQ ID NO: 1821996 - DNA, 15 bp, Homo sapiens
gcgggcagatcactt

SEQ ID NO: 1821997 - DNA, 15 bp, Homo sapiens
aattacccgggcatg

SEQ ID NO: 1821998 - DNA, 15 bp, Homo sapiens
attacccgggcatgg

SEQ ID NO: 1821999 - DNA, 15 bp, Homo sapiens
ttacccgggcatggt

SEQ ID NO: 1822000 - DNA, 15 bp, Homo sapiens
tacccgggcatggtg

SEQ ID NO: 1822001 - DNA, 15 bp, Homo sapiens
acccgggcatggtgg

SEQ ID NO: 1822002 - DNA, 15 bp, Homo sapiens
cccgggcatggtggt

SEQ ID NO: 1822003 - DNA, 15 bp, Homo sapiens
cgggcatggtggtgc

SEQ ID NO: 1822004 - DNA, 15 bp, Homo sapiens
ggcatggtggtgcac

SEQ ID NO: 1822005 - DNA, 15 bp, Homo sapiens
gcatggtggtgcacg

SEQ ID NO: 1822006 - DNA, 15 bp, Homo sapiens
catggtggtgcacgc

SEQ ID NO: 1822007 - DNA, 15 bp, Homo sapiens
atggtggtgcacgcc

SEQ ID NO: 1822008 - DNA, 15 bp, Homo sapiens
tgcacgcctgtagtt

SEQ ID NO: 1822009 - DNA, 15 bp, Homo sapiens
aggtgggagaatcgc

SEQ ID NO: 1822010 - DNA, 15 bp, Homo sapiens
ggtgggagaatcgct

SEQ ID NO: 1822011 - DNA, 15 bp, Homo sapiens
gtgggagaatcgctt

SEQ ID NO: 1822012 - DNA, 15 bp, Homo sapiens
tgggagaatcgcttg

SEQ ID NO: 1822013 - DNA, 15 bp, Homo sapiens
gaatcgcttgaactg

SEQ ID NO: 1822014 - DNA, 15 bp, Homo sapiens
aatcgcttgaactgg

SEQ ID NO: 1822015 - DNA, 15 bp, Homo sapiens
atcgcttgaactggg

SEQ ID NO: 1822016 - DNA, 15 bp, Homo sapiens
tcgcttgaactgggg

SEQ ID NO: 1822017 - DNA, 15 bp, Homo sapiens
cgcttgaactgggga

SEQ ID NO: 1822018 - DNA, 15 bp, Homo sapiens
gcttgaactggggag

SEQ ID NO: 1822019 - DNA, 15 bp, Homo sapiens
cttgaactggggagg

SEQ ID NO: 1822020 - DNA, 15 bp, Homo sapiens
ttgaactggggaggt

SEQ ID NO: 1822021 - DNA, 15 bp, Homo sapiens
tgaactggggaggtg

SEQ ID NO: 1822022 - DNA, 15 bp, Homo sapiens
gaactggggaggtgg

SEQ ID NO: 1822023 - DNA, 15 bp, Homo sapiens
aactggggaggtgga

SEQ ID NO: 1822024 - DNA, 15 bp, Homo sapiens
actggggaggtggag

SEQ ID NO: 1822025 - DNA, 15 bp, Homo sapiens
ctggggaggtggagg

SEQ ID NO: 1822026 - DNA, 15 bp, Homo sapiens
tggggaggtggaggt

SEQ ID NO: 1822027 - DNA, 15 bp, Homo sapiens
ggtggaggttgcagc

SEQ ID NO: 1822028 - DNA, 15 bp, Homo sapiens
gtggaggttgcagca

SEQ ID NO: 1822029 - DNA, 15 bp, Homo sapiens
tggaggttgcagcaa

SEQ ID NO: 1822030 - DNA, 15 bp, Homo sapiens
aggttgcagcaagct

SEQ ID NO: 1822031 - DNA, 15 bp, Homo sapiens
ggttgcagcaagctg

SEQ ID NO: 1822032 - DNA, 15 bp, Homo sapiens
gttgcagcaagctga

SEQ ID NO: 1822033 - DNA, 15 bp, Homo sapiens
ttgcagcaagctgag

SEQ ID NO: 1822034 - DNA, 15 bp, Homo sapiens
tgcagcaagctgaga

SEQ ID NO: 1822035 - DNA, 15 bp, Homo sapiens
gcagcaagctgagat

SEQ ID NO: 1822036 - DNA, 15 bp, Homo sapiens
cagcaagctgagatc

SEQ ID NO: 1822037 - DNA, 15 bp, Homo sapiens
agcaagctgagatcg

SEQ ID NO: 1822038 - DNA, 15 bp, Homo sapiens
gcaagctgagatcga

SEQ ID NO: 1822039 - DNA, 15 bp, Homo sapiens
caagctgagatcgag

SEQ ID NO: 1822040 - DNA, 15 bp, Homo sapiens
aagctgagatcgagc

SEQ ID NO: 1822041 - DNA, 15 bp, Homo sapiens
agctgagatcgagct

SEQ ID NO: 1822042 - DNA, 15 bp, Homo sapiens
gctgagatcgagcta

SEQ ID NO: 1822043 - DNA, 15 bp, Homo sapiens
ctgagatcgagctac

SEQ ID NO: 1822044 - DNA, 15 bp, Homo sapiens
tgagatcgagctact

SEQ ID NO: 1822045 - DNA, 15 bp, Homo sapiens
gagatcgagctactg

SEQ ID NO: 1822046 - DNA, 15 bp, Homo sapiens
agatcgagctactgc

SEQ ID NO: 1822047 - DNA, 15 bp, Homo sapiens
gatcgagctactgca

SEQ ID NO: 1822048 - DNA, 15 bp, Homo sapiens
atcgagctactgcac

SEQ ID NO: 1822049 - DNA, 15 bp, Homo sapiens
tcgagctactgcact

SEQ ID NO: 1822050 - DNA, 15 bp, Homo sapiens
cgagctactgcactc

SEQ ID NO: 1822051 - DNA, 15 bp, Homo sapiens
gagctactgcactcc

SEQ ID NO: 1822052 - DNA, 15 bp, Homo sapiens
agctactgcactcca

SEQ ID NO: 1822053 - DNA, 15 bp, Homo sapiens
gctactgcactccag

SEQ ID NO: 1822054 - DNA, 15 bp, Homo sapiens
tactgcactccagca

SEQ ID NO: 1822055 - DNA, 15 bp, Homo sapiens
gcactccagcatggt

SEQ ID NO: 1822056 - DNA, 15 bp, Homo sapiens
cactccagcatggtg

SEQ ID NO: 1822057 - DNA, 15 bp, Homo sapiens
actccagcatggtga

SEQ ID NO: 1822058 - DNA, 15 bp, Homo sapiens
ctccagcatggtgac

SEQ ID NO: 1822059 - DNA, 15 bp, Homo sapiens
tccagcatggtgaca

SEQ ID NO: 1822060 - DNA, 15 bp, Homo sapiens
ccagcatggtgacag

SEQ ID NO: 1822061 - DNA, 15 bp, Homo sapiens
cagcatggtgacaga

SEQ ID NO: 1822062 - DNA, 15 bp, Homo sapiens
agcatggtgacagag

SEQ ID NO: 1822063 - DNA, 15 bp, Homo sapiens
gcatggtgacagagt

SEQ ID NO: 1822064 - DNA, 15 bp, Homo sapiens
catggtgacagagtg

SEQ ID NO: 1822065 - DNA, 15 bp, Homo sapiens
atggtgacagagtga

SEQ ID NO: 1822066 - DNA, 15 bp, Homo sapiens
gagactctgtctcag

SEQ ID NO: 1822067 - DNA, 15 bp, Homo sapiens
agactctgtctcaga

SEQ ID NO: 1822068 - DNA, 15 bp, Homo sapiens
gactctgtctcagaa

SEQ ID NO: 1822069 - DNA, 15 bp, Homo sapiens
actctgtctcagaaa

SEQ ID NO: 1822070 - DNA, 15 bp, Homo sapiens
ctctgtctcagaaaa

SEQ ID NO: 1822071 - DNA, 15 bp, Homo sapiens
tctgtctcagaaaaa

SEQ ID NO: 1822072 - DNA, 15 bp, Homo sapiens
gtctcagaaaaaaaa

SEQ ID NO: 1822073 - DNA, 15 bp, Homo sapiens
tctcagaaaaaaaaa

SEQ ID NO: 1822074 - DNA, 15 bp, Homo sapiens
ctcagaaaaaaaaaa

SEQ ID NO: 1822075 - DNA, 15 bp, Homo sapiens
tcagaaaaaaaaaaa

SEQ ID NO: 1822076 - DNA, 15 bp, Homo sapiens
aaaaaaaaaagacag

SEQ ID NO: 1822077 - DNA, 15 bp, Homo sapiens
aaaaaaaaagacagg

SEQ ID NO: 1822078 - DNA, 15 bp, Homo sapiens
aaaaaaaagacaggg

SEQ ID NO: 1822079 - DNA, 15 bp, Homo sapiens
aaaaaaagacagggt

SEQ ID NO: 1822080 - DNA, 15 bp, Homo sapiens
aaaaaagacagggta

SEQ ID NO: 1822081 - DNA, 15 bp, Homo sapiens
aaaaagacagggtag

SEQ ID NO: 1822082 - DNA, 15 bp, Homo sapiens
aaaagacagggtagt

SEQ ID NO: 1822083 - DNA, 15 bp, Homo sapiens
aaagacagggtagta

SEQ ID NO: 1822084 - DNA, 15 bp, Homo sapiens
aagacagggtagtac

SEQ ID NO: 1822085 - DNA, 15 bp, Homo sapiens
agacagggtagtact

SEQ ID NO: 1822086 - DNA, 15 bp, Homo sapiens
gacagggtagtactg

SEQ ID NO: 1822087 - DNA, 15 bp, Homo sapiens
acagggtagtactgt

SEQ ID NO: 1822088 - DNA, 15 bp, Homo sapiens
cagggtagtactgtg

SEQ ID NO: 1822089 - DNA, 15 bp, Homo sapiens
agggtagtactgtgt

SEQ ID NO: 1822090 - DNA, 15 bp, Homo sapiens
gggtagtactgtgtt

SEQ ID NO: 1822091 - DNA, 15 bp, Homo sapiens
ggtagtactgtgttg

SEQ ID NO: 1822092 - DNA, 15 bp, Homo sapiens
gtagtactgtgttgg

SEQ ID NO: 1822093 - DNA, 15 bp, Homo sapiens
tagtactgtgttggt

SEQ ID NO: 1822094 - DNA, 15 bp, Homo sapiens
agtactgtgttggtg

SEQ ID NO: 1822095 - DNA, 15 bp, Homo sapiens
gtactgtgttggtga

SEQ ID NO: 1822096 - DNA, 15 bp, Homo sapiens
tactgtgttggtgaa

SEQ ID NO: 1822097 - DNA, 15 bp, Homo sapiens
actgtgttggtgaaa

SEQ ID NO: 1822098 - DNA, 15 bp, Homo sapiens
ctgtgttggtgaaag

SEQ ID NO: 1822099 - DNA, 15 bp, Homo sapiens
tgtgttggtgaaagg

SEQ ID NO: 1822100 - DNA, 15 bp, Homo sapiens
gtgttggtgaaagga

SEQ ID NO: 1822101 - DNA, 15 bp, Homo sapiens
tgttggtgaaaggat

SEQ ID NO: 1822102 - DNA, 15 bp, Homo sapiens
gttggtgaaaggata

SEQ ID NO: 1822103 - DNA, 15 bp, Homo sapiens
ttggtgaaaggatag

SEQ ID NO: 1822104 - DNA, 15 bp, Homo sapiens
tggtgaaaggataga

SEQ ID NO: 1822105 - DNA, 15 bp, Homo sapiens
ggtgaaaggatagac

SEQ ID NO: 1822106 - DNA, 15 bp, Homo sapiens
gtgaaaggatagaca

SEQ ID NO: 1822107 - DNA, 15 bp, Homo sapiens
tgaaaggatagacat

SEQ ID NO: 1822108 - DNA, 15 bp, Homo sapiens
gaaaggatagacatt

SEQ ID NO: 1822109 - DNA, 15 bp, Homo sapiens
aaaggatagacattt

SEQ ID NO: 1822110 - DNA, 15 bp, Homo sapiens
aaggatagacatttg

SEQ ID NO: 1822111 - DNA, 15 bp, Homo sapiens
aggatagacatttgc

SEQ ID NO: 1822112 - DNA, 15 bp, Homo sapiens
ggatagacatttgca

SEQ ID NO: 1822113 - DNA, 15 bp, Homo sapiens
gatagacatttgcat

SEQ ID NO: 1822114 - DNA, 15 bp, Homo sapiens
atagacatttgcatc

SEQ ID NO: 1822115 - DNA, 15 bp, Homo sapiens
tagacatttgcatca

SEQ ID NO: 1822116 - DNA, 15 bp, Homo sapiens
agacatttgcatcaa

SEQ ID NO: 1822117 - DNA, 15 bp, Homo sapiens
gacatttgcatcaat

SEQ ID NO: 1822118 - DNA, 15 bp, Homo sapiens
acatttgcatcaatg

SEQ ID NO: 1822119 - DNA, 15 bp, Homo sapiens
catttgcatcaatgg

SEQ ID NO: 1822120 - DNA, 15 bp, Homo sapiens
atttgcatcaatgga

SEQ ID NO: 1822121 - DNA, 15 bp, Homo sapiens
tttgcatcaatggaa

SEQ ID NO: 1822122 - DNA, 15 bp, Homo sapiens
ttgcatcaatggaac

SEQ ID NO: 1822123 - DNA, 15 bp, Homo sapiens
tgcatcaatggaaca

SEQ ID NO: 1822124 - DNA, 15 bp, Homo sapiens
gcatcaatggaacag

SEQ ID NO: 1822125 - DNA, 15 bp, Homo sapiens
catcaatggaacaga

SEQ ID NO: 1822126 - DNA, 15 bp, Homo sapiens
atcaatggaacagaa

SEQ ID NO: 1822127 - DNA, 15 bp, Homo sapiens
tcaatggaacagaat

SEQ ID NO: 1822128 - DNA, 15 bp, Homo sapiens
caatggaacagaata

SEQ ID NO: 1822129 - DNA, 15 bp, Homo sapiens
aatggaacagaatag

SEQ ID NO: 1822130 - DNA, 15 bp, Homo sapiens
atggaacagaataga

SEQ ID NO: 1822131 - DNA, 15 bp, Homo sapiens
tggaacagaatagag

SEQ ID NO: 1822132 - DNA, 15 bp, Homo sapiens
ggaacagaatagagt

SEQ ID NO: 1822133 - DNA, 15 bp, Homo sapiens
gaacagaatagagtc

SEQ ID NO: 1822134 - DNA, 15 bp, Homo sapiens
aacagaatagagtcc

SEQ ID NO: 1822135 - DNA, 15 bp, Homo sapiens
acagaatagagtcca

SEQ ID NO: 1822136 - DNA, 15 bp, Homo sapiens
cagaatagagtccag

SEQ ID NO: 1822137 - DNA, 15 bp, Homo sapiens
agaatagagtccaga

SEQ ID NO: 1822138 - DNA, 15 bp, Homo sapiens
gaatagagtccagaa

SEQ ID NO: 1822139 - DNA, 15 bp, Homo sapiens
aatagagtccagaag

SEQ ID NO: 1822140 - DNA, 15 bp, Homo sapiens
atagagtccagaagg

SEQ ID NO: 1822141 - DNA, 15 bp, Homo sapiens
tagagtccagaaggg

SEQ ID NO: 1822142 - DNA, 15 bp, Homo sapiens
agagtccagaagggg

SEQ ID NO: 1822143 - DNA, 15 bp, Homo sapiens
gagtccagaagggga

SEQ ID NO: 1822144 - DNA, 15 bp, Homo sapiens
agtccagaaggggac

SEQ ID NO: 1822145 - DNA, 15 bp, Homo sapiens
gtccagaaggggacc

SEQ ID NO: 1822146 - DNA, 15 bp, Homo sapiens
tccagaaggggacct

SEQ ID NO: 1822147 - DNA, 15 bp, Homo sapiens
ccagaaggggaccta

SEQ ID NO: 1822148 - DNA, 15 bp, Homo sapiens
cagaaggggacctac

SEQ ID NO: 1822149 - DNA, 15 bp, Homo sapiens
agaaggggacctacg

SEQ ID NO: 1822150 - DNA, 15 bp, Homo sapiens
gaaggggacctacgg

SEQ ID NO: 1822151 - DNA, 15 bp, Homo sapiens
aaggggacctacgga

SEQ ID NO: 1822152 - DNA, 15 bp, Homo sapiens
aggggacctacggaa

SEQ ID NO: 1822153 - DNA, 15 bp, Homo sapiens
ggggacctacggaag

SEQ ID NO: 1822154 - DNA, 15 bp, Homo sapiens
gggacctacggaagc

SEQ ID NO: 1822155 - DNA, 15 bp, Homo sapiens
ggacctacggaagca

SEQ ID NO: 1822156 - DNA, 15 bp, Homo sapiens
gacctacggaagcat

SEQ ID NO: 1822157 - DNA, 15 bp, Homo sapiens
acctacggaagcatg

SEQ ID NO: 1822158 - DNA, 15 bp, Homo sapiens
cctacggaagcatga

SEQ ID NO: 1822159 - DNA, 15 bp, Homo sapiens
ctacggaagcatgag

SEQ ID NO: 1822160 - DNA, 15 bp, Homo sapiens
tacggaagcatgagc

SEQ ID NO: 1822161 - DNA, 15 bp, Homo sapiens
acggaagcatgagca

SEQ ID NO: 1822162 - DNA, 15 bp, Homo sapiens
cggaagcatgagcaa

SEQ ID NO: 1822163 - DNA, 15 bp, Homo sapiens
ggaagcatgagcaat

SEQ ID NO: 1822164 - DNA, 15 bp, Homo sapiens
gaagcatgagcaatt

SEQ ID NO: 1822165 - DNA, 15 bp, Homo sapiens
aagcatgagcaattg

SEQ ID NO: 1822166 - DNA, 15 bp, Homo sapiens
agcatgagcaattga

SEQ ID NO: 1822167 - DNA, 15 bp, Homo sapiens
gcatgagcaattgat

SEQ ID NO: 1822168 - DNA, 15 bp, Homo sapiens
catgagcaattgatt

SEQ ID NO: 1822169 - DNA, 15 bp, Homo sapiens
atgagcaattgattt

SEQ ID NO: 1822170 - DNA, 15 bp, Homo sapiens
tgagcaattgatttt

SEQ ID NO: 1822171 - DNA, 15 bp, Homo sapiens
gagcaattgattttt

SEQ ID NO: 1822172 - DNA, 15 bp, Homo sapiens
agcaattgatttttt

SEQ ID NO: 1822173 - DNA, 15 bp, Homo sapiens
gcaattgattttttt

SEQ ID NO: 1822174 - DNA, 15 bp, Homo sapiens
caattgatttttttt

SEQ ID NO: 1822175 - DNA, 15 bp, Homo sapiens
aattgattttttttt

SEQ ID NO: 1822176 - DNA, 15 bp, Homo sapiens
attgatttttttttt

SEQ ID NO: 1822177 - DNA, 15 bp, Homo sapiens
ttgattttttttttt

SEQ ID NO: 1822178 - DNA, 15 bp, Homo sapiens
agatggagtctcacg

SEQ ID NO: 1822179 - DNA, 15 bp, Homo sapiens
gatggagtctcacgg

SEQ ID NO: 1822180 - DNA, 15 bp, Homo sapiens
atggagtctcacggt

SEQ ID NO: 1822181 - DNA, 15 bp, Homo sapiens
tggagtctcacggtg

SEQ ID NO: 1822182 - DNA, 15 bp, Homo sapiens
ggagtctcacggtgt

SEQ ID NO: 1822183 - DNA, 15 bp, Homo sapiens
gagtctcacggtgtc

SEQ ID NO: 1822184 - DNA, 15 bp, Homo sapiens
agtctcacggtgtca

SEQ ID NO: 1822185 - DNA, 15 bp, Homo sapiens
gtctcacggtgtcac

SEQ ID NO: 1822186 - DNA, 15 bp, Homo sapiens
tctcacggtgtcacc

SEQ ID NO: 1822187 - DNA, 15 bp, Homo sapiens
ctcacggtgtcaccc

SEQ ID NO: 1822188 - DNA, 15 bp, Homo sapiens
tcacggtgtcaccca

SEQ ID NO: 1822189 - DNA, 15 bp, Homo sapiens
cacggtgtcacccag

SEQ ID NO: 1822190 - DNA, 15 bp, Homo sapiens
acggtgtcacccagg

SEQ ID NO: 1822191 - DNA, 15 bp, Homo sapiens
cggtgtcacccaggc

SEQ ID NO: 1822192 - DNA, 15 bp, Homo sapiens
ggtgtcacccaggct

SEQ ID NO: 1822193 - DNA, 15 bp, Homo sapiens
cactgcaacctcctc

SEQ ID NO: 1822194 - DNA, 15 bp, Homo sapiens
actgcaacctcctcc

SEQ ID NO: 1822195 - DNA, 15 bp, Homo sapiens
ctgcaacctcctcct

SEQ ID NO: 1822196 - DNA, 15 bp, Homo sapiens
tgcaacctcctcctc

SEQ ID NO: 1822197 - DNA, 15 bp, Homo sapiens
acctcctcctcccag

SEQ ID NO: 1822198 - DNA, 15 bp, Homo sapiens
cctcctcctcccagg

SEQ ID NO: 1822199 - DNA, 15 bp, Homo sapiens
ctcctcctcccaggt

SEQ ID NO: 1822200 - DNA, 15 bp, Homo sapiens
tcctcctcccaggtt

SEQ ID NO: 1822201 - DNA, 15 bp, Homo sapiens
cctcctcccaggttc

SEQ ID NO: 1822202 - DNA, 15 bp, Homo sapiens
ctcctcccaggttca

SEQ ID NO: 1822203 - DNA, 15 bp, Homo sapiens
tcctgcctcagactt

SEQ ID NO: 1822204 - DNA, 15 bp, Homo sapiens
cctgcctcagacttc

SEQ ID NO: 1822205 - DNA, 15 bp, Homo sapiens
ctgcctcagacttcc

SEQ ID NO: 1822206 - DNA, 15 bp, Homo sapiens
tgcctcagacttcct

SEQ ID NO: 1822207 - DNA, 15 bp, Homo sapiens
gcctcagacttccta

SEQ ID NO: 1822208 - DNA, 15 bp, Homo sapiens
cctcagacttcctag

SEQ ID NO: 1822209 - DNA, 15 bp, Homo sapiens
ctcagacttcctagt

SEQ ID NO: 1822210 - DNA, 15 bp, Homo sapiens
tcagacttcctagta

SEQ ID NO: 1822211 - DNA, 15 bp, Homo sapiens
cagacttcctagtag

SEQ ID NO: 1822212 - DNA, 15 bp, Homo sapiens
agacttcctagtagc

SEQ ID NO: 1822213 - DNA, 15 bp, Homo sapiens
gacttcctagtagct

SEQ ID NO: 1822214 - DNA, 15 bp, Homo sapiens
acttcctagtagctg

SEQ ID NO: 1822215 - DNA, 15 bp, Homo sapiens
cttcctagtagctgg

SEQ ID NO: 1822216 - DNA, 15 bp, Homo sapiens
ttcctagtagctggg

SEQ ID NO: 1822217 - DNA, 15 bp, Homo sapiens
tcctagtagctggga

SEQ ID NO: 1822218 - DNA, 15 bp, Homo sapiens
cctagtagctgggac

SEQ ID NO: 1822219 - DNA, 15 bp, Homo sapiens
ctagtagctgggact

SEQ ID NO: 1822220 - DNA, 15 bp, Homo sapiens
tagtagctgggacta

SEQ ID NO: 1822221 - DNA, 15 bp, Homo sapiens
tagctgggactacaa

SEQ ID NO: 1822222 - DNA, 15 bp, Homo sapiens
ctgggactacaagtg

SEQ ID NO: 1822223 - DNA, 15 bp, Homo sapiens
tgggactacaagtgc

SEQ ID NO: 1822224 - DNA, 15 bp, Homo sapiens
gggactacaagtgcc

SEQ ID NO: 1822225 - DNA, 15 bp, Homo sapiens
ggactacaagtgcca

SEQ ID NO: 1822226 - DNA, 15 bp, Homo sapiens
gactacaagtgccac

SEQ ID NO: 1822227 - DNA, 15 bp, Homo sapiens
actacaagtgccacc

SEQ ID NO: 1822228 - DNA, 15 bp, Homo sapiens
ctacaagtgccacca

SEQ ID NO: 1822229 - DNA, 15 bp, Homo sapiens
tacaagtgccaccac

SEQ ID NO: 1822230 - DNA, 15 bp, Homo sapiens
acaagtgccaccaca

SEQ ID NO: 1822231 - DNA, 15 bp, Homo sapiens
caagtgccaccacac

SEQ ID NO: 1822232 - DNA, 15 bp, Homo sapiens
aagtgccaccacacc

SEQ ID NO: 1822233 - DNA, 15 bp, Homo sapiens
agtgccaccacaccc

SEQ ID NO: 1822234 - DNA, 15 bp, Homo sapiens
caccatattggccaa

SEQ ID NO: 1822235 - DNA, 15 bp, Homo sapiens
accatattggccaag

SEQ ID NO: 1822236 - DNA, 15 bp, Homo sapiens
ccatattggccaagc

SEQ ID NO: 1822237 - DNA, 15 bp, Homo sapiens
tattggccaagctga

SEQ ID NO: 1822238 - DNA, 15 bp, Homo sapiens
attggccaagctgat

SEQ ID NO: 1822239 - DNA, 15 bp, Homo sapiens
ttggccaagctgatc

SEQ ID NO: 1822240 - DNA, 15 bp, Homo sapiens
tggccaagctgatcc

SEQ ID NO: 1822241 - DNA, 15 bp, Homo sapiens
ggccaagctgatccc

SEQ ID NO: 1822242 - DNA, 15 bp, Homo sapiens
gccaagctgatcccg

SEQ ID NO: 1822243 - DNA, 15 bp, Homo sapiens
ccaagctgatcccga

SEQ ID NO: 1822244 - DNA, 15 bp, Homo sapiens
caagctgatcccgag

SEQ ID NO: 1822245 - DNA, 15 bp, Homo sapiens
aagctgatcccgagc

SEQ ID NO: 1822246 - DNA, 15 bp, Homo sapiens
agctgatcccgagct

SEQ ID NO: 1822247 - DNA, 15 bp, Homo sapiens
gctgatcccgagctc

SEQ ID NO: 1822248 - DNA, 15 bp, Homo sapiens
ctgatcccgagctcc

SEQ ID NO: 1822249 - DNA, 15 bp, Homo sapiens
tgatcccgagctcct

SEQ ID NO: 1822250 - DNA, 15 bp, Homo sapiens
gatcccgagctcctg

SEQ ID NO: 1822251 - DNA, 15 bp, Homo sapiens
atcccgagctcctga

SEQ ID NO: 1822252 - DNA, 15 bp, Homo sapiens
tcccgagctcctgac

SEQ ID NO: 1822253 - DNA, 15 bp, Homo sapiens
cccgagctcctgacc

SEQ ID NO: 1822254 - DNA, 15 bp, Homo sapiens
ccgagctcctgacct

SEQ ID NO: 1822255 - DNA, 15 bp, Homo sapiens
cgagctcctgacctc

SEQ ID NO: 1822256 - DNA, 15 bp, Homo sapiens
gagctcctgacctcg

SEQ ID NO: 1822257 - DNA, 15 bp, Homo sapiens
agctcctgacctcgt

SEQ ID NO: 1822258 - DNA, 15 bp, Homo sapiens
gctcctgacctcgtg

SEQ ID NO: 1822259 - DNA, 15 bp, Homo sapiens
ctcctgacctcgtgt

SEQ ID NO: 1822260 - DNA, 15 bp, Homo sapiens
tcctgacctcgtgtt

SEQ ID NO: 1822261 - DNA, 15 bp, Homo sapiens
cctgacctcgtgttc

SEQ ID NO: 1822262 - DNA, 15 bp, Homo sapiens
ctgacctcgtgttcc

SEQ ID NO: 1822263 - DNA, 15 bp, Homo sapiens
tgacctcgtgttcca

SEQ ID NO: 1822264 - DNA, 15 bp, Homo sapiens
gacctcgtgttccac

SEQ ID NO: 1822265 - DNA, 15 bp, Homo sapiens
acctcgtgttccacc

SEQ ID NO: 1822266 - DNA, 15 bp, Homo sapiens
cctcgtgttccacca

SEQ ID NO: 1822267 - DNA, 15 bp, Homo sapiens
ctcgtgttccaccag

SEQ ID NO: 1822268 - DNA, 15 bp, Homo sapiens
tcgtgttccaccagc

SEQ ID NO: 1822269 - DNA, 15 bp, Homo sapiens
cgtgttccaccagcc

SEQ ID NO: 1822270 - DNA, 15 bp, Homo sapiens
gtgttccaccagcct

SEQ ID NO: 1822271 - DNA, 15 bp, Homo sapiens
tgttccaccagccta

SEQ ID NO: 1822272 - DNA, 15 bp, Homo sapiens
gttccaccagcctag

SEQ ID NO: 1822273 - DNA, 15 bp, Homo sapiens
ttccaccagcctagg

SEQ ID NO: 1822274 - DNA, 15 bp, Homo sapiens
tccaccagcctaggc

SEQ ID NO: 1822275 - DNA, 15 bp, Homo sapiens
ccaccagcctaggcc

SEQ ID NO: 1822276 - DNA, 15 bp, Homo sapiens
caccagcctaggcct

SEQ ID NO: 1822277 - DNA, 15 bp, Homo sapiens
accagcctaggcctc

SEQ ID NO: 1822278 - DNA, 15 bp, Homo sapiens
ccagcctaggcctcc

SEQ ID NO: 1822279 - DNA, 15 bp, Homo sapiens
cagcctaggcctccc

SEQ ID NO: 1822280 - DNA, 15 bp, Homo sapiens
agcctaggcctccca

SEQ ID NO: 1822281 - DNA, 15 bp, Homo sapiens
gcctaggcctcccaa

SEQ ID NO: 1822282 - DNA, 15 bp, Homo sapiens
cctaggcctcccaaa

SEQ ID NO: 1822283 - DNA, 15 bp, Homo sapiens
ctaggcctcccaaag

SEQ ID NO: 1822284 - DNA, 15 bp, Homo sapiens
taggcctcccaaagg

SEQ ID NO: 1822285 - DNA, 15 bp, Homo sapiens
aggcctcccaaaggg

SEQ ID NO: 1822286 - DNA, 15 bp, Homo sapiens
ggcctcccaaagggc

SEQ ID NO: 1822287 - DNA, 15 bp, Homo sapiens
ctcccaaagggctgg

SEQ ID NO: 1822288 - DNA, 15 bp, Homo sapiens
tcccaaagggctggg

SEQ ID NO: 1822289 - DNA, 15 bp, Homo sapiens
gggctgggattacag

SEQ ID NO: 1822290 - DNA, 15 bp, Homo sapiens
ggctgggattacagg

SEQ ID NO: 1822291 - DNA, 15 bp, Homo sapiens
ggcgtgagccacagc

SEQ ID NO: 1822292 - DNA, 15 bp, Homo sapiens
gcgtgagccacagcg

SEQ ID NO: 1822293 - DNA, 15 bp, Homo sapiens
cgtgagccacagcgc

SEQ ID NO: 1822294 - DNA, 15 bp, Homo sapiens
tgagccacagcgccc

SEQ ID NO: 1822295 - DNA, 15 bp, Homo sapiens
gagccacagcgcccg

SEQ ID NO: 1822296 - DNA, 15 bp, Homo sapiens
agccacagcgcccga

SEQ ID NO: 1822297 - DNA, 15 bp, Homo sapiens
gccacagcgcccgac

SEQ ID NO: 1822298 - DNA, 15 bp, Homo sapiens
ccacagcgcccgacc

SEQ ID NO: 1822299 - DNA, 15 bp, Homo sapiens
cacagcgcccgacct

SEQ ID NO: 1822300 - DNA, 15 bp, Homo sapiens
acagcgcccgaccta

SEQ ID NO: 1822301 - DNA, 15 bp, Homo sapiens
cagcgcccgacctaa

SEQ ID NO: 1822302 - DNA, 15 bp, Homo sapiens
agcgcccgacctaaa

SEQ ID NO: 1822303 - DNA, 15 bp, Homo sapiens
gcgcccgacctaaaa

SEQ ID NO: 1822304 - DNA, 15 bp, Homo sapiens
cgcccgacctaaaat

SEQ ID NO: 1822305 - DNA, 15 bp, Homo sapiens
gcccgacctaaaatt

SEQ ID NO: 1822306 - DNA, 15 bp, Homo sapiens
cccgacctaaaatta

SEQ ID NO: 1822307 - DNA, 15 bp, Homo sapiens
ccgacctaaaattac

SEQ ID NO: 1822308 - DNA, 15 bp, Homo sapiens
cgacctaaaattaca

SEQ ID NO: 1822309 - DNA, 15 bp, Homo sapiens
gacctaaaattacaa

SEQ ID NO: 1822310 - DNA, 15 bp, Homo sapiens
acctaaaattacaaa

SEQ ID NO: 1822311 - DNA, 15 bp, Homo sapiens
cctaaaattacaaaa

SEQ ID NO: 1822312 - DNA, 15 bp, Homo sapiens
aattacaaaaattat

SEQ ID NO: 1822313 - DNA, 15 bp, Homo sapiens
attacaaaaattatc

SEQ ID NO: 1822314 - DNA, 15 bp, Homo sapiens
ttacaaaaattatcc

SEQ ID NO: 1822315 - DNA, 15 bp, Homo sapiens
tacaaaaattatcca

SEQ ID NO: 1822316 - DNA, 15 bp, Homo sapiens
acaaaaattatccag

SEQ ID NO: 1822317 - DNA, 15 bp, Homo sapiens
caaaaattatccaga

SEQ ID NO: 1822318 - DNA, 15 bp, Homo sapiens
aaaaattatccagat

SEQ ID NO: 1822319 - DNA, 15 bp, Homo sapiens
aaaattatccagatg

SEQ ID NO: 1822320 - DNA, 15 bp, Homo sapiens
aaattatccagatgt

SEQ ID NO: 1822321 - DNA, 15 bp, Homo sapiens
aattatccagatgtg

SEQ ID NO: 1822322 - DNA, 15 bp, Homo sapiens
attatccagatgtgg

SEQ ID NO: 1822323 - DNA, 15 bp, Homo sapiens
ttatccagatgtggt

SEQ ID NO: 1822324 - DNA, 15 bp, Homo sapiens
tatccagatgtggtg

SEQ ID NO: 1822325 - DNA, 15 bp, Homo sapiens
atccagatgtggtga

SEQ ID NO: 1822326 - DNA, 15 bp, Homo sapiens
tccagatgtggtgat

SEQ ID NO: 1822327 - DNA, 15 bp, Homo sapiens
ccagatgtggtgatg

SEQ ID NO: 1822328 - DNA, 15 bp, Homo sapiens
cagatgtggtgatgg

SEQ ID NO: 1822329 - DNA, 15 bp, Homo sapiens
agatgtggtgatggg

SEQ ID NO: 1822330 - DNA, 15 bp, Homo sapiens
gatgtggtgatgggt

SEQ ID NO: 1822331 - DNA, 15 bp, Homo sapiens
atgtggtgatgggtg

SEQ ID NO: 1822332 - DNA, 15 bp, Homo sapiens
tgtggtgatgggtgc

SEQ ID NO: 1822333 - DNA, 15 bp, Homo sapiens
gtggtgatgggtgcc

SEQ ID NO: 1822334 - DNA, 15 bp, Homo sapiens
tggtgatgggtgcct

SEQ ID NO: 1822335 - DNA, 15 bp, Homo sapiens
ggtgatgggtgcctg

SEQ ID NO: 1822336 - DNA, 15 bp, Homo sapiens
gtgatgggtgcctgt

SEQ ID NO: 1822337 - DNA, 15 bp, Homo sapiens
tgatgggtgcctgta

SEQ ID NO: 1822338 - DNA, 15 bp, Homo sapiens
gatgggtgcctgtac

SEQ ID NO: 1822339 - DNA, 15 bp, Homo sapiens
atgggtgcctgtact

SEQ ID NO: 1822340 - DNA, 15 bp, Homo sapiens
tgggtgcctgtactc

SEQ ID NO: 1822341 - DNA, 15 bp, Homo sapiens
gggtgcctgtactcc

SEQ ID NO: 1822342 - DNA, 15 bp, Homo sapiens
ggtgcctgtactccc

SEQ ID NO: 1822343 - DNA, 15 bp, Homo sapiens
gtgcctgtactccca

SEQ ID NO: 1822344 - DNA, 15 bp, Homo sapiens
tgcctgtactcccag

SEQ ID NO: 1822345 - DNA, 15 bp, Homo sapiens
cctgtactcccagct

SEQ ID NO: 1822346 - DNA, 15 bp, Homo sapiens
ctgtactcccagcta

SEQ ID NO: 1822347 - DNA, 15 bp, Homo sapiens
tgtactcccagctac

SEQ ID NO: 1822348 - DNA, 15 bp, Homo sapiens
gtactcccagctact

SEQ ID NO: 1822349 - DNA, 15 bp, Homo sapiens
tactcccagctactc

SEQ ID NO: 1822350 - DNA, 15 bp, Homo sapiens
actcccagctactcg

SEQ ID NO: 1822351 - DNA, 15 bp, Homo sapiens
ctcccagctactcgg

SEQ ID NO: 1822352 - DNA, 15 bp, Homo sapiens
cccagctactcgggg

SEQ ID NO: 1822353 - DNA, 15 bp, Homo sapiens
ccagctactcggggg

SEQ ID NO: 1822354 - DNA, 15 bp, Homo sapiens
cagctactcgggggg

SEQ ID NO: 1822355 - DNA, 15 bp, Homo sapiens
agctactcggggggc

SEQ ID NO: 1822356 - DNA, 15 bp, Homo sapiens
gctactcggggggct

SEQ ID NO: 1822357 - DNA, 15 bp, Homo sapiens
ctactcggggggctg

SEQ ID NO: 1822358 - DNA, 15 bp, Homo sapiens
tactcggggggctga

SEQ ID NO: 1822359 - DNA, 15 bp, Homo sapiens
actcggggggctgag

SEQ ID NO: 1822360 - DNA, 15 bp, Homo sapiens
ctcggggggctgagg

SEQ ID NO: 1822361 - DNA, 15 bp, Homo sapiens
tcggggggctgaggc

SEQ ID NO: 1822362 - DNA, 15 bp, Homo sapiens
cggggggctgaggca

SEQ ID NO: 1822363 - DNA, 15 bp, Homo sapiens
ggggggctgaggcag

SEQ ID NO: 1822364 - DNA, 15 bp, Homo sapiens
gaatcacttgaacca

SEQ ID NO: 1822365 - DNA, 15 bp, Homo sapiens
aatcacttgaaccag

SEQ ID NO: 1822366 - DNA, 15 bp, Homo sapiens
atcacttgaaccagg

SEQ ID NO: 1822367 - DNA, 15 bp, Homo sapiens
tcacttgaaccaggg

SEQ ID NO: 1822368 - DNA, 15 bp, Homo sapiens
cacttgaaccaggga

SEQ ID NO: 1822369 - DNA, 15 bp, Homo sapiens
acttgaaccagggag

SEQ ID NO: 1822370 - DNA, 15 bp, Homo sapiens
tgcagtgagccaagt

SEQ ID NO: 1822371 - DNA, 15 bp, Homo sapiens
gcagtgagccaagtt

SEQ ID NO: 1822372 - DNA, 15 bp, Homo sapiens
cagtgagccaagttc

SEQ ID NO: 1822373 - DNA, 15 bp, Homo sapiens
agtgagccaagttcg

SEQ ID NO: 1822374 - DNA, 15 bp, Homo sapiens
gtgagccaagttcgc

SEQ ID NO: 1822375 - DNA, 15 bp, Homo sapiens
tgagccaagttcgcg

SEQ ID NO: 1822376 - DNA, 15 bp, Homo sapiens
gagccaagttcgcgc

SEQ ID NO: 1822377 - DNA, 15 bp, Homo sapiens
agccaagttcgcgcc

SEQ ID NO: 1822378 - DNA, 15 bp, Homo sapiens
gccaagttcgcgcca

SEQ ID NO: 1822379 - DNA, 15 bp, Homo sapiens
ccaagttcgcgccac

SEQ ID NO: 1822380 - DNA, 15 bp, Homo sapiens
caagttcgcgccact

SEQ ID NO: 1822381 - DNA, 15 bp, Homo sapiens
aagttcgcgccactg

SEQ ID NO: 1822382 - DNA, 15 bp, Homo sapiens
agttcgcgccactgc

SEQ ID NO: 1822383 - DNA, 15 bp, Homo sapiens
gttcgcgccactgca

SEQ ID NO: 1822384 - DNA, 15 bp, Homo sapiens
ttcgcgccactgcac

SEQ ID NO: 1822385 - DNA, 15 bp, Homo sapiens
gcgccactgcactgc

SEQ ID NO: 1822386 - DNA, 15 bp, Homo sapiens
cgccactgcactgca

SEQ ID NO: 1822387 - DNA, 15 bp, Homo sapiens
gccactgcactgcag

SEQ ID NO: 1822388 - DNA, 15 bp, Homo sapiens
ccactgcactgcagc

SEQ ID NO: 1822389 - DNA, 15 bp, Homo sapiens
cactgcactgcagcc

SEQ ID NO: 1822390 - DNA, 15 bp, Homo sapiens
actgcactgcagcct

SEQ ID NO: 1822391 - DNA, 15 bp, Homo sapiens
ctgcactgcagcctg

SEQ ID NO: 1822392 - DNA, 15 bp, Homo sapiens
tgcactgcagcctgg

SEQ ID NO: 1822393 - DNA, 15 bp, Homo sapiens
gcactgcagcctggg

SEQ ID NO: 1822394 - DNA, 15 bp, Homo sapiens
cactgcagcctgggc

SEQ ID NO: 1822395 - DNA, 15 bp, Homo sapiens
actgcagcctgggct

SEQ ID NO: 1822396 - DNA, 15 bp, Homo sapiens
ctgcagcctgggcta

SEQ ID NO: 1822397 - DNA, 15 bp, Homo sapiens
tgcagcctgggctat

SEQ ID NO: 1822398 - DNA, 15 bp, Homo sapiens
gcagcctgggctatg

SEQ ID NO: 1822399 - DNA, 15 bp, Homo sapiens
cagcctgggctatga

SEQ ID NO: 1822400 - DNA, 15 bp, Homo sapiens
agcctgggctatgaa

SEQ ID NO: 1822401 - DNA, 15 bp, Homo sapiens
gcctgggctatgaag

SEQ ID NO: 1822402 - DNA, 15 bp, Homo sapiens
cctgggctatgaagc

SEQ ID NO: 1822403 - DNA, 15 bp, Homo sapiens
ctgggctatgaagcc

SEQ ID NO: 1822404 - DNA, 15 bp, Homo sapiens
tgggctatgaagcca

SEQ ID NO: 1822405 - DNA, 15 bp, Homo sapiens
gggctatgaagccag

SEQ ID NO: 1822406 - DNA, 15 bp, Homo sapiens
ggctatgaagccaga

SEQ ID NO: 1822407 - DNA, 15 bp, Homo sapiens
gctatgaagccagac

SEQ ID NO: 1822408 - DNA, 15 bp, Homo sapiens
ctatgaagccagact

SEQ ID NO: 1822409 - DNA, 15 bp, Homo sapiens
tatgaagccagactc

SEQ ID NO: 1822410 - DNA, 15 bp, Homo sapiens
atgaagccagactct

SEQ ID NO: 1822411 - DNA, 15 bp, Homo sapiens
tgaagccagactctg

SEQ ID NO: 1822412 - DNA, 15 bp, Homo sapiens
gaagccagactctgt

SEQ ID NO: 1822413 - DNA, 15 bp, Homo sapiens
aagccagactctgtc

SEQ ID NO: 1822414 - DNA, 15 bp, Homo sapiens
ccagactctgtctca

SEQ ID NO: 1822415 - DNA, 15 bp, Homo sapiens
cagactctgtctcaa

SEQ ID NO: 1822416 - DNA, 15 bp, Homo sapiens
gtctcaaaaaaaaga

SEQ ID NO: 1822417 - DNA, 15 bp, Homo sapiens
aaaaagaaaaataaa

SEQ ID NO: 1822418 - DNA, 15 bp, Homo sapiens
aaaagaaaaataaaa

SEQ ID NO: 1822419 - DNA, 15 bp, Homo sapiens
aaagaaaaataaaat

SEQ ID NO: 1822420 - DNA, 15 bp, Homo sapiens
aagaaaaataaaatt

SEQ ID NO: 1822421 - DNA, 15 bp, Homo sapiens
agaaaaataaaattt

SEQ ID NO: 1822422 - DNA, 15 bp, Homo sapiens
gaaaaataaaatttt

SEQ ID NO: 1822423 - DNA, 15 bp, Homo sapiens
aaaaataaaattttc

SEQ ID NO: 1822424 - DNA, 15 bp, Homo sapiens
aaaataaaattttca

SEQ ID NO: 1822425 - DNA, 15 bp, Homo sapiens
aaataaaattttcag

SEQ ID NO: 1822426 - DNA, 15 bp, Homo sapiens
aataaaattttcaga

SEQ ID NO: 1822427 - DNA, 15 bp, Homo sapiens
ataaaattttcagaa

SEQ ID NO: 1822428 - DNA, 15 bp, Homo sapiens
taaaattttcagaag

SEQ ID NO: 1822429 - DNA, 15 bp, Homo sapiens
aaaattttcagaagg

SEQ ID NO: 1822430 - DNA, 15 bp, Homo sapiens
aaattttcagaagga

SEQ ID NO: 1822431 - DNA, 15 bp, Homo sapiens
aattttcagaaggaa

SEQ ID NO: 1822432 - DNA, 15 bp, Homo sapiens
attttcagaaggaaa

SEQ ID NO: 1822433 - DNA, 15 bp, Homo sapiens
ttttcagaaggaaaa

SEQ ID NO: 1822434 - DNA, 15 bp, Homo sapiens
tttcagaaggaaaac

SEQ ID NO: 1822435 - DNA, 15 bp, Homo sapiens
ttcagaaggaaaacc

SEQ ID NO: 1822436 - DNA, 15 bp, Homo sapiens
tcagaaggaaaacca

SEQ ID NO: 1822437 - DNA, 15 bp, Homo sapiens
cagaaggaaaaccaa

SEQ ID NO: 1822438 - DNA, 15 bp, Homo sapiens
agaaggaaaaccaaa

SEQ ID NO: 1822439 - DNA, 15 bp, Homo sapiens
gaaggaaaaccaaag

SEQ ID NO: 1822440 - DNA, 15 bp, Homo sapiens
aaggaaaaccaaaga

SEQ ID NO: 1822441 - DNA, 15 bp, Homo sapiens
aggaaaaccaaagaa

SEQ ID NO: 1822442 - DNA, 15 bp, Homo sapiens
ggaaaaccaaagaaa

SEQ ID NO: 1822443 - DNA, 15 bp, Homo sapiens
gaaaaccaaagaaaa

SEQ ID NO: 1822444 - DNA, 15 bp, Homo sapiens
aaaaccaaagaaaat

SEQ ID NO: 1822445 - DNA, 15 bp, Homo sapiens
aaaccaaagaaaata

SEQ ID NO: 1822446 - DNA, 15 bp, Homo sapiens
aaccaaagaaaatat

SEQ ID NO: 1822447 - DNA, 15 bp, Homo sapiens
accaaagaaaatatt

SEQ ID NO: 1822448 - DNA, 15 bp, Homo sapiens
ccaaagaaaatattt

SEQ ID NO: 1822449 - DNA, 15 bp, Homo sapiens
caaagaaaatatttg

SEQ ID NO: 1822450 - DNA, 15 bp, Homo sapiens
aaagaaaatatttgg

SEQ ID NO: 1822451 - DNA, 15 bp, Homo sapiens
aagaaaatatttgga

SEQ ID NO: 1822452 - DNA, 15 bp, Homo sapiens
agaaaatatttggaa

SEQ ID NO: 1822453 - DNA, 15 bp, Homo sapiens
gaaaatatttggaac

SEQ ID NO: 1822454 - DNA, 15 bp, Homo sapiens
aaaatatttggaacc

SEQ ID NO: 1822455 - DNA, 15 bp, Homo sapiens
aaatatttggaacct

SEQ ID NO: 1822456 - DNA, 15 bp, Homo sapiens
aatatttggaacctt

SEQ ID NO: 1822457 - DNA, 15 bp, Homo sapiens
atatttggaaccttg

SEQ ID NO: 1822458 - DNA, 15 bp, Homo sapiens
tatttggaaccttgg

SEQ ID NO: 1822459 - DNA, 15 bp, Homo sapiens
atttggaaccttggg

SEQ ID NO: 1822460 - DNA, 15 bp, Homo sapiens
tttggaaccttgggt

SEQ ID NO: 1822461 - DNA, 15 bp, Homo sapiens
ttggaaccttgggtt

SEQ ID NO: 1822462 - DNA, 15 bp, Homo sapiens
tggaaccttgggtta

SEQ ID NO: 1822463 - DNA, 15 bp, Homo sapiens
ggaaccttgggttag

SEQ ID NO: 1822464 - DNA, 15 bp, Homo sapiens
gaaccttgggttagg

SEQ ID NO: 1822465 - DNA, 15 bp, Homo sapiens
aaccttgggttaggt

SEQ ID NO: 1822466 - DNA, 15 bp, Homo sapiens
accttgggttaggta

SEQ ID NO: 1822467 - DNA, 15 bp, Homo sapiens
ccttgggttaggtag

SEQ ID NO: 1822468 - DNA, 15 bp, Homo sapiens
cttgggttaggtaga

SEQ ID NO: 1822469 - DNA, 15 bp, Homo sapiens
ttgggttaggtagag

SEQ ID NO: 1822470 - DNA, 15 bp, Homo sapiens
tgggttaggtagagt

SEQ ID NO: 1822471 - DNA, 15 bp, Homo sapiens
gggttaggtagagtt

SEQ ID NO: 1822472 - DNA, 15 bp, Homo sapiens
ggttaggtagagttc

SEQ ID NO: 1822473 - DNA, 15 bp, Homo sapiens
gttaggtagagttct

SEQ ID NO: 1822474 - DNA, 15 bp, Homo sapiens
ttaggtagagttcta

SEQ ID NO: 1822475 - DNA, 15 bp, Homo sapiens
taggtagagttctac

SEQ ID NO: 1822476 - DNA, 15 bp, Homo sapiens
aggtagagttctaca

SEQ ID NO: 1822477 - DNA, 15 bp, Homo sapiens
ggtagagttctacac

SEQ ID NO: 1822478 - DNA, 15 bp, Homo sapiens
gtagagttctacaca

SEQ ID NO: 1822479 - DNA, 15 bp, Homo sapiens
tagagttctacacat

SEQ ID NO: 1822480 - DNA, 15 bp, Homo sapiens
agagttctacacata

SEQ ID NO: 1822481 - DNA, 15 bp, Homo sapiens
gagttctacacataa

SEQ ID NO: 1822482 - DNA, 15 bp, Homo sapiens
agttctacacataat

SEQ ID NO: 1822483 - DNA, 15 bp, Homo sapiens
gttctacacataata

SEQ ID NO: 1822484 - DNA, 15 bp, Homo sapiens
ttctacacataatat

SEQ ID NO: 1822485 - DNA, 15 bp, Homo sapiens
tctacacataatatc

SEQ ID NO: 1822486 - DNA, 15 bp, Homo sapiens
ctacacataatatca

SEQ ID NO: 1822487 - DNA, 15 bp, Homo sapiens
tacacataatatcaa

SEQ ID NO: 1822488 - DNA, 15 bp, Homo sapiens
acacataatatcaac

SEQ ID NO: 1822489 - DNA, 15 bp, Homo sapiens
cacataatatcaaca

SEQ ID NO: 1822490 - DNA, 15 bp, Homo sapiens
acataatatcaacag

SEQ ID NO: 1822491 - DNA, 15 bp, Homo sapiens
cataatatcaacagt

SEQ ID NO: 1822492 - DNA, 15 bp, Homo sapiens
ataatatcaacagta

SEQ ID NO: 1822493 - DNA, 15 bp, Homo sapiens
taatatcaacagtaa

SEQ ID NO: 1822494 - DNA, 15 bp, Homo sapiens
aatatcaacagtaaa

SEQ ID NO: 1822495 - DNA, 15 bp, Homo sapiens
atatcaacagtaaaa

SEQ ID NO: 1822496 - DNA, 15 bp, Homo sapiens
tatcaacagtaaaat

SEQ ID NO: 1822497 - DNA, 15 bp, Homo sapiens
atcaacagtaaaatt

SEQ ID NO: 1822498 - DNA, 15 bp, Homo sapiens
tcaacagtaaaattc

SEQ ID NO: 1822499 - DNA, 15 bp, Homo sapiens
caacagtaaaattca

SEQ ID NO: 1822500 - DNA, 15 bp, Homo sapiens
aacagtaaaattcat

SEQ ID NO: 1822501 - DNA, 15 bp, Homo sapiens
acagtaaaattcata

SEQ ID NO: 1822502 - DNA, 15 bp, Homo sapiens
cagtaaaattcataa

SEQ ID NO: 1822503 - DNA, 15 bp, Homo sapiens
agtaaaattcataaa

SEQ ID NO: 1822504 - DNA, 15 bp, Homo sapiens
gtaaaattcataaaa

SEQ ID NO: 1822505 - DNA, 15 bp, Homo sapiens
taaaattcataaaaa

SEQ ID NO: 1822506 - DNA, 15 bp, Homo sapiens
aaaattcataaaaaa

SEQ ID NO: 1822507 - DNA, 15 bp, Homo sapiens
aaattcataaaaaaa

SEQ ID NO: 1822508 - DNA, 15 bp, Homo sapiens
aattcataaaaaaaa

SEQ ID NO: 1822509 - DNA, 15 bp, Homo sapiens
attcataaaaaaaaa

SEQ ID NO: 1822510 - DNA, 15 bp, Homo sapiens
ttcataaaaaaaaaa

SEQ ID NO: 1822511 - DNA, 15 bp, Homo sapiens
tcataaaaaaaaaat

SEQ ID NO: 1822512 - DNA, 15 bp, Homo sapiens
cataaaaaaaaaata

SEQ ID NO: 1822513 - DNA, 15 bp, Homo sapiens
ataaaaaaaaaataa

SEQ ID NO: 1822514 - DNA, 15 bp, Homo sapiens
taaaaaaaaaataaa

SEQ ID NO: 1822515 - DNA, 15 bp, Homo sapiens
aaaaaaaaataaatg

SEQ ID NO: 1822516 - DNA, 15 bp, Homo sapiens
aaaaaaaataaatgg

SEQ ID NO: 1822517 - DNA, 15 bp, Homo sapiens
aaaaaaataaatggt

SEQ ID NO: 1822518 - DNA, 15 bp, Homo sapiens
aaaaaataaatggta

SEQ ID NO: 1822519 - DNA, 15 bp, Homo sapiens
aaaaataaatggtaa

SEQ ID NO: 1822520 - DNA, 15 bp, Homo sapiens
aaaataaatggtaag

SEQ ID NO: 1822521 - DNA, 15 bp, Homo sapiens
aaataaatggtaagc

SEQ ID NO: 1822522 - DNA, 15 bp, Homo sapiens
aataaatggtaagct

SEQ ID NO: 1822523 - DNA, 15 bp, Homo sapiens
ataaatggtaagctg

SEQ ID NO: 1822524 - DNA, 15 bp, Homo sapiens
taaatggtaagctga

SEQ ID NO: 1822525 - DNA, 15 bp, Homo sapiens
aaatggtaagctgat

SEQ ID NO: 1822526 - DNA, 15 bp, Homo sapiens
aatggtaagctgatc

SEQ ID NO: 1822527 - DNA, 15 bp, Homo sapiens
atggtaagctgatct

SEQ ID NO: 1822528 - DNA, 15 bp, Homo sapiens
tggtaagctgatctt

SEQ ID NO: 1822529 - DNA, 15 bp, Homo sapiens
ggtaagctgatcttc

SEQ ID NO: 1822530 - DNA, 15 bp, Homo sapiens
gtaagctgatcttca

SEQ ID NO: 1822531 - DNA, 15 bp, Homo sapiens
taagctgatcttcac

SEQ ID NO: 1822532 - DNA, 15 bp, Homo sapiens
aagctgatcttcacc

SEQ ID NO: 1822533 - DNA, 15 bp, Homo sapiens
agctgatcttcacca

SEQ ID NO: 1822534 - DNA, 15 bp, Homo sapiens
gctgatcttcaccaa

SEQ ID NO: 1822535 - DNA, 15 bp, Homo sapiens
ctgatcttcaccaat

SEQ ID NO: 1822536 - DNA, 15 bp, Homo sapiens
tgatcttcaccaata

SEQ ID NO: 1822537 - DNA, 15 bp, Homo sapiens
gatcttcaccaatat

SEQ ID NO: 1822538 - DNA, 15 bp, Homo sapiens
atcttcaccaatata

SEQ ID NO: 1822539 - DNA, 15 bp, Homo sapiens
tcttcaccaatataa

SEQ ID NO: 1822540 - DNA, 15 bp, Homo sapiens
cttcaccaatataaa

SEQ ID NO: 1822541 - DNA, 15 bp, Homo sapiens
ttcaccaatataaaa

SEQ ID NO: 1822542 - DNA, 15 bp, Homo sapiens
tcaccaatataaaaa

SEQ ID NO: 1822543 - DNA, 15 bp, Homo sapiens
caccaatataaaaaa

SEQ ID NO: 1822544 - DNA, 15 bp, Homo sapiens
accaatataaaaaac

SEQ ID NO: 1822545 - DNA, 15 bp, Homo sapiens
ccaatataaaaaact

SEQ ID NO: 1822546 - DNA, 15 bp, Homo sapiens
caatataaaaaactt

SEQ ID NO: 1822547 - DNA, 15 bp, Homo sapiens
aatataaaaaacttc

SEQ ID NO: 1822548 - DNA, 15 bp, Homo sapiens
atataaaaaacttct

SEQ ID NO: 1822549 - DNA, 15 bp, Homo sapiens
tataaaaaacttctg

SEQ ID NO: 1822550 - DNA, 15 bp, Homo sapiens
ataaaaaacttctgc

SEQ ID NO: 1822551 - DNA, 15 bp, Homo sapiens
taaaaaacttctgcc

SEQ ID NO: 1822552 - DNA, 15 bp, Homo sapiens
aaaaaacttctgcct

SEQ ID NO: 1822553 - DNA, 15 bp, Homo sapiens
aaaaacttctgcctg

SEQ ID NO: 1822554 - DNA, 15 bp, Homo sapiens
aaaacttctgcctgg

SEQ ID NO: 1822555 - DNA, 15 bp, Homo sapiens
aaacttctgcctggg

SEQ ID NO: 1822556 - DNA, 15 bp, Homo sapiens
aacttctgcctgggc

SEQ ID NO: 1822557 - DNA, 15 bp, Homo sapiens
acttctgcctgggcg

SEQ ID NO: 1822558 - DNA, 15 bp, Homo sapiens
cttctgcctgggcgc

SEQ ID NO: 1822559 - DNA, 15 bp, Homo sapiens
ttctgcctgggcgca

SEQ ID NO: 1822560 - DNA, 15 bp, Homo sapiens
tctgcctgggcgcag

SEQ ID NO: 1822561 - DNA, 15 bp, Homo sapiens
ctgcctgggcgcagt

SEQ ID NO: 1822562 - DNA, 15 bp, Homo sapiens
tgcctgggcgcagtg

SEQ ID NO: 1822563 - DNA, 15 bp, Homo sapiens
gcctgggcgcagtgg

SEQ ID NO: 1822564 - DNA, 15 bp, Homo sapiens
cctgggcgcagtggc

SEQ ID NO: 1822565 - DNA, 15 bp, Homo sapiens
aaggcaggcagatca

SEQ ID NO: 1822566 - DNA, 15 bp, Homo sapiens
cctagccaacatggc

SEQ ID NO: 1822567 - DNA, 15 bp, Homo sapiens
ctagccaacatggcg

SEQ ID NO: 1822568 - DNA, 15 bp, Homo sapiens
tagccaacatggcga

SEQ ID NO: 1822569 - DNA, 15 bp, Homo sapiens
agccaacatggcgaa

SEQ ID NO: 1822570 - DNA, 15 bp, Homo sapiens
ccaacatggcgaaat

SEQ ID NO: 1822571 - DNA, 15 bp, Homo sapiens
caacatggcgaaatt

SEQ ID NO: 1822572 - DNA, 15 bp, Homo sapiens
aacatggcgaaattc

SEQ ID NO: 1822573 - DNA, 15 bp, Homo sapiens
acatggcgaaattcc

SEQ ID NO: 1822574 - DNA, 15 bp, Homo sapiens
catggcgaaattcca

SEQ ID NO: 1822575 - DNA, 15 bp, Homo sapiens
atggcgaaattccat

SEQ ID NO: 1822576 - DNA, 15 bp, Homo sapiens
tggcgaaattccata

SEQ ID NO: 1822577 - DNA, 15 bp, Homo sapiens
ggcgaaattccatat

SEQ ID NO: 1822578 - DNA, 15 bp, Homo sapiens
gcgaaattccatatc

SEQ ID NO: 1822579 - DNA, 15 bp, Homo sapiens
cgaaattccatatct

SEQ ID NO: 1822580 - DNA, 15 bp, Homo sapiens
gaaattccatatcta

SEQ ID NO: 1822581 - DNA, 15 bp, Homo sapiens
aaattccatatctac

SEQ ID NO: 1822582 - DNA, 15 bp, Homo sapiens
aattccatatctact

SEQ ID NO: 1822583 - DNA, 15 bp, Homo sapiens
attccatatctacta

SEQ ID NO: 1822584 - DNA, 15 bp, Homo sapiens
ttccatatctactaa

SEQ ID NO: 1822585 - DNA, 15 bp, Homo sapiens
tccatatctactaaa

SEQ ID NO: 1822586 - DNA, 15 bp, Homo sapiens
ccatatctactaaaa

SEQ ID NO: 1822587 - DNA, 15 bp, Homo sapiens
catatctactaaaac

SEQ ID NO: 1822588 - DNA, 15 bp, Homo sapiens
atatctactaaaacc

SEQ ID NO: 1822589 - DNA, 15 bp, Homo sapiens
tatctactaaaacca

SEQ ID NO: 1822590 - DNA, 15 bp, Homo sapiens
atctactaaaaccac

SEQ ID NO: 1822591 - DNA, 15 bp, Homo sapiens
tctactaaaaccaca

SEQ ID NO: 1822592 - DNA, 15 bp, Homo sapiens
ctactaaaaccacaa

SEQ ID NO: 1822593 - DNA, 15 bp, Homo sapiens
tactaaaaccacaaa

SEQ ID NO: 1822594 - DNA, 15 bp, Homo sapiens
actaaaaccacaaaa

SEQ ID NO: 1822595 - DNA, 15 bp, Homo sapiens
ctaaaaccacaaaaa

SEQ ID NO: 1822596 - DNA, 15 bp, Homo sapiens
taaaaccacaaaaat

SEQ ID NO: 1822597 - DNA, 15 bp, Homo sapiens
aaaaccacaaaaatt

SEQ ID NO: 1822598 - DNA, 15 bp, Homo sapiens
aaaccacaaaaatta

SEQ ID NO: 1822599 - DNA, 15 bp, Homo sapiens
aaccacaaaaattag

SEQ ID NO: 1822600 - DNA, 15 bp, Homo sapiens
accacaaaaattagc

SEQ ID NO: 1822601 - DNA, 15 bp, Homo sapiens
ccacaaaaattagcc

SEQ ID NO: 1822602 - DNA, 15 bp, Homo sapiens
cacaaaaattagcca

SEQ ID NO: 1822603 - DNA, 15 bp, Homo sapiens
gtgtggtggcgggca

SEQ ID NO: 1822604 - DNA, 15 bp, Homo sapiens
tgtggtggcgggcag

SEQ ID NO: 1822605 - DNA, 15 bp, Homo sapiens
gtggtggcgggcagc

SEQ ID NO: 1822606 - DNA, 15 bp, Homo sapiens
tggtggcgggcagct

SEQ ID NO: 1822607 - DNA, 15 bp, Homo sapiens
ggtggcgggcagctg

SEQ ID NO: 1822608 - DNA, 15 bp, Homo sapiens
gtggcgggcagctgt

SEQ ID NO: 1822609 - DNA, 15 bp, Homo sapiens
tggcgggcagctgta

SEQ ID NO: 1822610 - DNA, 15 bp, Homo sapiens
ggcgggcagctgtaa

SEQ ID NO: 1822611 - DNA, 15 bp, Homo sapiens
gcgggcagctgtaat

SEQ ID NO: 1822612 - DNA, 15 bp, Homo sapiens
cgggcagctgtaatc

SEQ ID NO: 1822613 - DNA, 15 bp, Homo sapiens
gggcagctgtaatcc

SEQ ID NO: 1822614 - DNA, 15 bp, Homo sapiens
ggcagctgtaatccc

SEQ ID NO: 1822615 - DNA, 15 bp, Homo sapiens
gcagctgtaatccca

SEQ ID NO: 1822616 - DNA, 15 bp, Homo sapiens
caggaggctgagact

SEQ ID NO: 1822617 - DNA, 15 bp, Homo sapiens
aggaggctgagactg

SEQ ID NO: 1822618 - DNA, 15 bp, Homo sapiens
ggaggctgagactgg

SEQ ID NO: 1822619 - DNA, 15 bp, Homo sapiens
gaggctgagactgga

SEQ ID NO: 1822620 - DNA, 15 bp, Homo sapiens
aggctgagactggag

SEQ ID NO: 1822621 - DNA, 15 bp, Homo sapiens
ggctgagactggaga

SEQ ID NO: 1822622 - DNA, 15 bp, Homo sapiens
gctgagactggagaa

SEQ ID NO: 1822623 - DNA, 15 bp, Homo sapiens
ctgagactggagaat

SEQ ID NO: 1822624 - DNA, 15 bp, Homo sapiens
tgagactggagaatc

SEQ ID NO: 1822625 - DNA, 15 bp, Homo sapiens
gagactggagaatcc

SEQ ID NO: 1822626 - DNA, 15 bp, Homo sapiens
agactggagaatccc

SEQ ID NO: 1822627 - DNA, 15 bp, Homo sapiens
gactggagaatcccc

SEQ ID NO: 1822628 - DNA, 15 bp, Homo sapiens
actggagaatcccct

SEQ ID NO: 1822629 - DNA, 15 bp, Homo sapiens
ctggagaatcccctg

SEQ ID NO: 1822630 - DNA, 15 bp, Homo sapiens
tggagaatcccctga

SEQ ID NO: 1822631 - DNA, 15 bp, Homo sapiens
ggagaatcccctgaa

SEQ ID NO: 1822632 - DNA, 15 bp, Homo sapiens
gagaatcccctgaac

SEQ ID NO: 1822633 - DNA, 15 bp, Homo sapiens
agaatcccctgaacc

SEQ ID NO: 1822634 - DNA, 15 bp, Homo sapiens
gaatcccctgaaccc

SEQ ID NO: 1822635 - DNA, 15 bp, Homo sapiens
aatcccctgaaccca

SEQ ID NO: 1822636 - DNA, 15 bp, Homo sapiens
atcccctgaacccag

SEQ ID NO: 1822637 - DNA, 15 bp, Homo sapiens
tcccctgaacccagg

SEQ ID NO: 1822638 - DNA, 15 bp, Homo sapiens
cccctgaacccagga

SEQ ID NO: 1822639 - DNA, 15 bp, Homo sapiens
ccctgaacccaggag

SEQ ID NO: 1822640 - DNA, 15 bp, Homo sapiens
gcggaggttgcattt

SEQ ID NO: 1822641 - DNA, 15 bp, Homo sapiens
cggaggttgcattta

SEQ ID NO: 1822642 - DNA, 15 bp, Homo sapiens
ggaggttgcatttag

SEQ ID NO: 1822643 - DNA, 15 bp, Homo sapiens
gaggttgcatttagc

SEQ ID NO: 1822644 - DNA, 15 bp, Homo sapiens
aggttgcatttagcc

SEQ ID NO: 1822645 - DNA, 15 bp, Homo sapiens
ggttgcatttagccg

SEQ ID NO: 1822646 - DNA, 15 bp, Homo sapiens
gttgcatttagccga

SEQ ID NO: 1822647 - DNA, 15 bp, Homo sapiens
ttgcatttagccgag

SEQ ID NO: 1822648 - DNA, 15 bp, Homo sapiens
tgcatttagccgaga

SEQ ID NO: 1822649 - DNA, 15 bp, Homo sapiens
gcatttagccgagat

SEQ ID NO: 1822650 - DNA, 15 bp, Homo sapiens
catttagccgagatc

SEQ ID NO: 1822651 - DNA, 15 bp, Homo sapiens
atttagccgagatca

SEQ ID NO: 1822652 - DNA, 15 bp, Homo sapiens
tttagccgagatcac

SEQ ID NO: 1822653 - DNA, 15 bp, Homo sapiens
ttagccgagatcacg

SEQ ID NO: 1822654 - DNA, 15 bp, Homo sapiens
tagccgagatcacgc

SEQ ID NO: 1822655 - DNA, 15 bp, Homo sapiens
cacgccactgcactg

SEQ ID NO: 1822656 - DNA, 15 bp, Homo sapiens
acgccactgcactgc

SEQ ID NO: 1822657 - DNA, 15 bp, Homo sapiens
actgcagcctgggca

SEQ ID NO: 1822658 - DNA, 15 bp, Homo sapiens
ctgcagcctgggcaa

SEQ ID NO: 1822659 - DNA, 15 bp, Homo sapiens
tgcagcctgggcaac

SEQ ID NO: 1822660 - DNA, 15 bp, Homo sapiens
gcaacagagcgagat

SEQ ID NO: 1822661 - DNA, 15 bp, Homo sapiens
caacagagcgagatt

SEQ ID NO: 1822662 - DNA, 15 bp, Homo sapiens
aacagagcgagattc

SEQ ID NO: 1822663 - DNA, 15 bp, Homo sapiens
acagagcgagattct

SEQ ID NO: 1822664 - DNA, 15 bp, Homo sapiens
cagagcgagattctg

SEQ ID NO: 1822665 - DNA, 15 bp, Homo sapiens
agagcgagattctgt

SEQ ID NO: 1822666 - DNA, 15 bp, Homo sapiens
gagcgagattctgtc

SEQ ID NO: 1822667 - DNA, 15 bp, Homo sapiens
agcgagattctgtct

SEQ ID NO: 1822668 - DNA, 15 bp, Homo sapiens
gattctgtctcaaaa

SEQ ID NO: 1822669 - DNA, 15 bp, Homo sapiens
attctgtctcaaaac

SEQ ID NO: 1822670 - DNA, 15 bp, Homo sapiens
ttctgtctcaaaaca

SEQ ID NO: 1822671 - DNA, 15 bp, Homo sapiens
tctgtctcaaaacaa

SEQ ID NO: 1822672 - DNA, 15 bp, Homo sapiens
ctgtctcaaaacaac

SEQ ID NO: 1822673 - DNA, 15 bp, Homo sapiens
tgtctcaaaacaaca

SEQ ID NO: 1822674 - DNA, 15 bp, Homo sapiens
gtctcaaaacaacaa

SEQ ID NO: 1822675 - DNA, 15 bp, Homo sapiens
tctcaaaacaacaac

SEQ ID NO: 1822676 - DNA, 15 bp, Homo sapiens
ctcaaaacaacaaca

SEQ ID NO: 1822677 - DNA, 15 bp, Homo sapiens
tcaaaacaacaacaa

SEQ ID NO: 1822678 - DNA, 15 bp, Homo sapiens
caaaacaacaacaat

SEQ ID NO: 1822679 - DNA, 15 bp, Homo sapiens
aaaacaacaacaata

SEQ ID NO: 1822680 - DNA, 15 bp, Homo sapiens
aaacaacaacaatat

SEQ ID NO: 1822681 - DNA, 15 bp, Homo sapiens
aacaacaacaatata

SEQ ID NO: 1822682 - DNA, 15 bp, Homo sapiens
acaacaacaatatag

SEQ ID NO: 1822683 - DNA, 15 bp, Homo sapiens
caacaacaatataga

SEQ ID NO: 1822684 - DNA, 15 bp, Homo sapiens
aacaacaatatagaa

SEQ ID NO: 1822685 - DNA, 15 bp, Homo sapiens
acaacaatatagaaa

SEQ ID NO: 1822686 - DNA, 15 bp, Homo sapiens
caacaatatagaaaa

SEQ ID NO: 1822687 - DNA, 15 bp, Homo sapiens
aacaatatagaaaac

SEQ ID NO: 1822688 - DNA, 15 bp, Homo sapiens
acaatatagaaaact

SEQ ID NO: 1822689 - DNA, 15 bp, Homo sapiens
caatatagaaaactt

SEQ ID NO: 1822690 - DNA, 15 bp, Homo sapiens
aatatagaaaacttc

SEQ ID NO: 1822691 - DNA, 15 bp, Homo sapiens
atatagaaaacttct

SEQ ID NO: 1822692 - DNA, 15 bp, Homo sapiens
tatagaaaacttctg

SEQ ID NO: 1822693 - DNA, 15 bp, Homo sapiens
atagaaaacttctgc

SEQ ID NO: 1822694 - DNA, 15 bp, Homo sapiens
tagaaaacttctgct

SEQ ID NO: 1822695 - DNA, 15 bp, Homo sapiens
agaaaacttctgctc

SEQ ID NO: 1822696 - DNA, 15 bp, Homo sapiens
gaaaacttctgctct

SEQ ID NO: 1822697 - DNA, 15 bp, Homo sapiens
aaaacttctgctctg

SEQ ID NO: 1822698 - DNA, 15 bp, Homo sapiens
aaacttctgctctgc

SEQ ID NO: 1822699 - DNA, 15 bp, Homo sapiens
aacttctgctctgca

SEQ ID NO: 1822700 - DNA, 15 bp, Homo sapiens
acttctgctctgcaa

SEQ ID NO: 1822701 - DNA, 15 bp, Homo sapiens
cttctgctctgcaaa

SEQ ID NO: 1822702 - DNA, 15 bp, Homo sapiens
ttctgctctgcaaag

SEQ ID NO: 1822703 - DNA, 15 bp, Homo sapiens
tctgctctgcaaaga

SEQ ID NO: 1822704 - DNA, 15 bp, Homo sapiens
tgctctgcaaagaac

SEQ ID NO: 1822705 - DNA, 15 bp, Homo sapiens
gctctgcaaagaaca

SEQ ID NO: 1822706 - DNA, 15 bp, Homo sapiens
ctctgcaaagaacat

SEQ ID NO: 1822707 - DNA, 15 bp, Homo sapiens
tctgcaaagaacatg

SEQ ID NO: 1822708 - DNA, 15 bp, Homo sapiens
ctgcaaagaacatgt

SEQ ID NO: 1822709 - DNA, 15 bp, Homo sapiens
tgcaaagaacatgtt

SEQ ID NO: 1822710 - DNA, 15 bp, Homo sapiens
gcaaagaacatgttt

SEQ ID NO: 1822711 - DNA, 15 bp, Homo sapiens
caaagaacatgttta

SEQ ID NO: 1822712 - DNA, 15 bp, Homo sapiens
aaagaacatgtttaa

SEQ ID NO: 1822713 - DNA, 15 bp, Homo sapiens
aagaacatgtttaag

SEQ ID NO: 1822714 - DNA, 15 bp, Homo sapiens
agaacatgtttaaga

SEQ ID NO: 1822715 - DNA, 15 bp, Homo sapiens
gaacatgtttaagag

SEQ ID NO: 1822716 - DNA, 15 bp, Homo sapiens
aacatgtttaagaga

SEQ ID NO: 1822717 - DNA, 15 bp, Homo sapiens
acatgtttaagagaa

SEQ ID NO: 1822718 - DNA, 15 bp, Homo sapiens
catgtttaagagaat

SEQ ID NO: 1822719 - DNA, 15 bp, Homo sapiens
atgtttaagagaatg

SEQ ID NO: 1822720 - DNA, 15 bp, Homo sapiens
tgtttaagagaatga

SEQ ID NO: 1822721 - DNA, 15 bp, Homo sapiens
gtttaagagaatgaa

SEQ ID NO: 1822722 - DNA, 15 bp, Homo sapiens
tttaagagaatgaaa

SEQ ID NO: 1822723 - DNA, 15 bp, Homo sapiens
ttaagagaatgaaag

SEQ ID NO: 1822724 - DNA, 15 bp, Homo sapiens
taagagaatgaaaga

SEQ ID NO: 1822725 - DNA, 15 bp, Homo sapiens
aagagaatgaaagat

SEQ ID NO: 1822726 - DNA, 15 bp, Homo sapiens
agagaatgaaagata

SEQ ID NO: 1822727 - DNA, 15 bp, Homo sapiens
gagaatgaaagataa

SEQ ID NO: 1822728 - DNA, 15 bp, Homo sapiens
agaatgaaagataag

SEQ ID NO: 1822729 - DNA, 15 bp, Homo sapiens
gaatgaaagataagc

SEQ ID NO: 1822730 - DNA, 15 bp, Homo sapiens
aatgaaagataagct

SEQ ID NO: 1822731 - DNA, 15 bp, Homo sapiens
atgaaagataagctg

SEQ ID NO: 1822732 - DNA, 15 bp, Homo sapiens
tgaaagataagctgc

SEQ ID NO: 1822733 - DNA, 15 bp, Homo sapiens
gaaagataagctgca

SEQ ID NO: 1822734 - DNA, 15 bp, Homo sapiens
aaagataagctgcag

SEQ ID NO: 1822735 - DNA, 15 bp, Homo sapiens
aagataagctgcagt

SEQ ID NO: 1822736 - DNA, 15 bp, Homo sapiens
agataagctgcagtc

SEQ ID NO: 1822737 - DNA, 15 bp, Homo sapiens
gataagctgcagtct

SEQ ID NO: 1822738 - DNA, 15 bp, Homo sapiens
ataagctgcagtctg

SEQ ID NO: 1822739 - DNA, 15 bp, Homo sapiens
taagctgcagtctgg

SEQ ID NO: 1822740 - DNA, 15 bp, Homo sapiens
aagctgcagtctggg

SEQ ID NO: 1822741 - DNA, 15 bp, Homo sapiens
agctgcagtctggga

SEQ ID NO: 1822742 - DNA, 15 bp, Homo sapiens
gctgcagtctgggag

SEQ ID NO: 1822743 - DNA, 15 bp, Homo sapiens
ctgcagtctgggaga

SEQ ID NO: 1822744 - DNA, 15 bp, Homo sapiens
tgcagtctgggagaa

SEQ ID NO: 1822745 - DNA, 15 bp, Homo sapiens
gcagtctgggagaaa

SEQ ID NO: 1822746 - DNA, 15 bp, Homo sapiens
cagtctgggagaaat

SEQ ID NO: 1822747 - DNA, 15 bp, Homo sapiens
agtctgggagaaata

SEQ ID NO: 1822748 - DNA, 15 bp, Homo sapiens
gtctgggagaaatat

SEQ ID NO: 1822749 - DNA, 15 bp, Homo sapiens
tctgggagaaatatt

SEQ ID NO: 1822750 - DNA, 15 bp, Homo sapiens
ctgggagaaatattt

SEQ ID NO: 1822751 - DNA, 15 bp, Homo sapiens
tgggagaaatatttg

SEQ ID NO: 1822752 - DNA, 15 bp, Homo sapiens
gggagaaatatttgc

SEQ ID NO: 1822753 - DNA, 15 bp, Homo sapiens
ggagaaatatttgca

SEQ ID NO: 1822754 - DNA, 15 bp, Homo sapiens
gagaaatatttgcaa

SEQ ID NO: 1822755 - DNA, 15 bp, Homo sapiens
agaaatatttgcaag

SEQ ID NO: 1822756 - DNA, 15 bp, Homo sapiens
gaaatatttgcaagt

SEQ ID NO: 1822757 - DNA, 15 bp, Homo sapiens
aaatatttgcaagtc

SEQ ID NO: 1822758 - DNA, 15 bp, Homo sapiens
aatatttgcaagtca

SEQ ID NO: 1822759 - DNA, 15 bp, Homo sapiens
atatttgcaagtcac

SEQ ID NO: 1822760 - DNA, 15 bp, Homo sapiens
tatttgcaagtcacc

SEQ ID NO: 1822761 - DNA, 15 bp, Homo sapiens
atttgcaagtcacca

SEQ ID NO: 1822762 - DNA, 15 bp, Homo sapiens
tttgcaagtcaccaa

SEQ ID NO: 1822763 - DNA, 15 bp, Homo sapiens
ttgcaagtcaccaat

SEQ ID NO: 1822764 - DNA, 15 bp, Homo sapiens
tgcaagtcaccaatc

SEQ ID NO: 1822765 - DNA, 15 bp, Homo sapiens
gcaagtcaccaatct

SEQ ID NO: 1822766 - DNA, 15 bp, Homo sapiens
caagtcaccaatctg

SEQ ID NO: 1822767 - DNA, 15 bp, Homo sapiens
aagtcaccaatctga

SEQ ID NO: 1822768 - DNA, 15 bp, Homo sapiens
agtcaccaatctgac

SEQ ID NO: 1822769 - DNA, 15 bp, Homo sapiens
gtcaccaatctgaca

SEQ ID NO: 1822770 - DNA, 15 bp, Homo sapiens
tcaccaatctgacaa

SEQ ID NO: 1822771 - DNA, 15 bp, Homo sapiens
caccaatctgacaaa

SEQ ID NO: 1822772 - DNA, 15 bp, Homo sapiens
accaatctgacaaag

SEQ ID NO: 1822773 - DNA, 15 bp, Homo sapiens
ccaatctgacaaagg

SEQ ID NO: 1822774 - DNA, 15 bp, Homo sapiens
caatctgacaaagga

SEQ ID NO: 1822775 - DNA, 15 bp, Homo sapiens
aatctgacaaaggac

SEQ ID NO: 1822776 - DNA, 15 bp, Homo sapiens
atctgacaaaggact

SEQ ID NO: 1822777 - DNA, 15 bp, Homo sapiens
tctgacaaaggactt

SEQ ID NO: 1822778 - DNA, 15 bp, Homo sapiens
ctgacaaaggacttt

SEQ ID NO: 1822779 - DNA, 15 bp, Homo sapiens
tgacaaaggactttt

SEQ ID NO: 1822780 - DNA, 15 bp, Homo sapiens
gacaaaggacttttt

SEQ ID NO: 1822781 - DNA, 15 bp, Homo sapiens
acaaaggactttttc

SEQ ID NO: 1822782 - DNA, 15 bp, Homo sapiens
caaaggactttttct

SEQ ID NO: 1822783 - DNA, 15 bp, Homo sapiens
aaaggactttttcta

SEQ ID NO: 1822784 - DNA, 15 bp, Homo sapiens
aaggactttttctag

SEQ ID NO: 1822785 - DNA, 15 bp, Homo sapiens
aggactttttctaga

SEQ ID NO: 1822786 - DNA, 15 bp, Homo sapiens
ggactttttctagaa

SEQ ID NO: 1822787 - DNA, 15 bp, Homo sapiens
gactttttctagaat

SEQ ID NO: 1822788 - DNA, 15 bp, Homo sapiens
actttttctagaata

SEQ ID NO: 1822789 - DNA, 15 bp, Homo sapiens
ctttttctagaatat

SEQ ID NO: 1822790 - DNA, 15 bp, Homo sapiens
tttttctagaatata

SEQ ID NO: 1822791 - DNA, 15 bp, Homo sapiens
ttttctagaatatat

SEQ ID NO: 1822792 - DNA, 15 bp, Homo sapiens
tttctagaatatata

SEQ ID NO: 1822793 - DNA, 15 bp, Homo sapiens
ttctagaatatatag

SEQ ID NO: 1822794 - DNA, 15 bp, Homo sapiens
tctagaatatataga

SEQ ID NO: 1822795 - DNA, 15 bp, Homo sapiens
ctagaatatatagaa

SEQ ID NO: 1822796 - DNA, 15 bp, Homo sapiens
tagaatatatagaaa

SEQ ID NO: 1822797 - DNA, 15 bp, Homo sapiens
agaatatatagaaaa

SEQ ID NO: 1822798 - DNA, 15 bp, Homo sapiens
gaatatatagaaaac

SEQ ID NO: 1822799 - DNA, 15 bp, Homo sapiens
aatatatagaaaaca

SEQ ID NO: 1822800 - DNA, 15 bp, Homo sapiens
atatatagaaaacat

SEQ ID NO: 1822801 - DNA, 15 bp, Homo sapiens
tatatagaaaacata

SEQ ID NO: 1822802 - DNA, 15 bp, Homo sapiens
atatagaaaacataa

SEQ ID NO: 1822803 - DNA, 15 bp, Homo sapiens
tatagaaaacataag

SEQ ID NO: 1822804 - DNA, 15 bp, Homo sapiens
atagaaaacataaga

SEQ ID NO: 1822805 - DNA, 15 bp, Homo sapiens
tagaaaacataagac

SEQ ID NO: 1822806 - DNA, 15 bp, Homo sapiens
agaaaacataagacc

SEQ ID NO: 1822807 - DNA, 15 bp, Homo sapiens
gaaaacataagaccg

SEQ ID NO: 1822808 - DNA, 15 bp, Homo sapiens
aaaacataagaccgg

SEQ ID NO: 1822809 - DNA, 15 bp, Homo sapiens
aaacataagaccggg

SEQ ID NO: 1822810 - DNA, 15 bp, Homo sapiens
aacataagaccgggc

SEQ ID NO: 1822811 - DNA, 15 bp, Homo sapiens
acataagaccgggcg

SEQ ID NO: 1822812 - DNA, 15 bp, Homo sapiens
cataagaccgggcgc

SEQ ID NO: 1822813 - DNA, 15 bp, Homo sapiens
ataagaccgggcgcg

SEQ ID NO: 1822814 - DNA, 15 bp, Homo sapiens
taagaccgggcgcgg

SEQ ID NO: 1822815 - DNA, 15 bp, Homo sapiens
aagaccgggcgcggt

SEQ ID NO: 1822816 - DNA, 15 bp, Homo sapiens
agaccgggcgcggtg

SEQ ID NO: 1822817 - DNA, 15 bp, Homo sapiens
gaggtcaggagatcc

SEQ ID NO: 1822818 - DNA, 15 bp, Homo sapiens
aggtcaggagatcca

SEQ ID NO: 1822819 - DNA, 15 bp, Homo sapiens
ggtcaggagatccag

SEQ ID NO: 1822820 - DNA, 15 bp, Homo sapiens
gtcaggagatccaga

SEQ ID NO: 1822821 - DNA, 15 bp, Homo sapiens
tcaggagatccagac

SEQ ID NO: 1822822 - DNA, 15 bp, Homo sapiens
caggagatccagacc

SEQ ID NO: 1822823 - DNA, 15 bp, Homo sapiens
aggagatccagacca

SEQ ID NO: 1822824 - DNA, 15 bp, Homo sapiens
ggagatccagaccat

SEQ ID NO: 1822825 - DNA, 15 bp, Homo sapiens
gagatccagaccatc

SEQ ID NO: 1822826 - DNA, 15 bp, Homo sapiens
agatccagaccatcc

SEQ ID NO: 1822827 - DNA, 15 bp, Homo sapiens
gatccagaccatcct

SEQ ID NO: 1822828 - DNA, 15 bp, Homo sapiens
atccagaccatcctg

SEQ ID NO: 1822829 - DNA, 15 bp, Homo sapiens
tccagaccatcctgg

SEQ ID NO: 1822830 - DNA, 15 bp, Homo sapiens
ccagaccatcctggc

SEQ ID NO: 1822831 - DNA, 15 bp, Homo sapiens
cagaccatcctggct

SEQ ID NO: 1822832 - DNA, 15 bp, Homo sapiens
ctggctaacacggta

SEQ ID NO: 1822833 - DNA, 15 bp, Homo sapiens
tggctaacacggtaa

SEQ ID NO: 1822834 - DNA, 15 bp, Homo sapiens
ggctaacacggtaaa

SEQ ID NO: 1822835 - DNA, 15 bp, Homo sapiens
gctaacacggtaaaa

SEQ ID NO: 1822836 - DNA, 15 bp, Homo sapiens
ctaacacggtaaaac

SEQ ID NO: 1822837 - DNA, 15 bp, Homo sapiens
taacacggtaaaacc

SEQ ID NO: 1822838 - DNA, 15 bp, Homo sapiens
aacacggtaaaaccc

SEQ ID NO: 1822839 - DNA, 15 bp, Homo sapiens
acacggtaaaacccc

SEQ ID NO: 1822840 - DNA, 15 bp, Homo sapiens
cacggtaaaaccccg

SEQ ID NO: 1822841 - DNA, 15 bp, Homo sapiens
acggtaaaaccccgt

SEQ ID NO: 1822842 - DNA, 15 bp, Homo sapiens
cggtaaaaccccgtc

SEQ ID NO: 1822843 - DNA, 15 bp, Homo sapiens
caaaaaaattagccg

SEQ ID NO: 1822844 - DNA, 15 bp, Homo sapiens
cgggtgtggtggcac

SEQ ID NO: 1822845 - DNA, 15 bp, Homo sapiens
ggtgtggtggcacgt

SEQ ID NO: 1822846 - DNA, 15 bp, Homo sapiens
gtgtggtggcacgtg

SEQ ID NO: 1822847 - DNA, 15 bp, Homo sapiens
tgtggtggcacgtgc

SEQ ID NO: 1822848 - DNA, 15 bp, Homo sapiens
gtggtggcacgtgcc

SEQ ID NO: 1822849 - DNA, 15 bp, Homo sapiens
tggtggcacgtgcct

SEQ ID NO: 1822850 - DNA, 15 bp, Homo sapiens
tggcacgtgcctgta

SEQ ID NO: 1822851 - DNA, 15 bp, Homo sapiens
ggcacgtgcctgtag

SEQ ID NO: 1822852 - DNA, 15 bp, Homo sapiens
gcacgtgcctgtagt

SEQ ID NO: 1822853 - DNA, 15 bp, Homo sapiens
cacgtgcctgtagtc

SEQ ID NO: 1822854 - DNA, 15 bp, Homo sapiens
acgtgcctgtagtcc

SEQ ID NO: 1822855 - DNA, 15 bp, Homo sapiens
cgtgcctgtagtccc

SEQ ID NO: 1822856 - DNA, 15 bp, Homo sapiens
agctacttgagaggc

SEQ ID NO: 1822857 - DNA, 15 bp, Homo sapiens
gctacttgagaggct

SEQ ID NO: 1822858 - DNA, 15 bp, Homo sapiens
ctacttgagaggctg

SEQ ID NO: 1822859 - DNA, 15 bp, Homo sapiens
tacttgagaggctga

SEQ ID NO: 1822860 - DNA, 15 bp, Homo sapiens
acttgagaggctgag

SEQ ID NO: 1822861 - DNA, 15 bp, Homo sapiens
cttgagaggctgagg

SEQ ID NO: 1822862 - DNA, 15 bp, Homo sapiens
caggagaatggcgtt

SEQ ID NO: 1822863 - DNA, 15 bp, Homo sapiens
aggagaatggcgtta

SEQ ID NO: 1822864 - DNA, 15 bp, Homo sapiens
ggagaatggcgttaa

SEQ ID NO: 1822865 - DNA, 15 bp, Homo sapiens
gagaatggcgttaac

SEQ ID NO: 1822866 - DNA, 15 bp, Homo sapiens
agaatggcgttaacc

SEQ ID NO: 1822867 - DNA, 15 bp, Homo sapiens
gaatggcgttaaccc

SEQ ID NO: 1822868 - DNA, 15 bp, Homo sapiens
aatggcgttaacccg

SEQ ID NO: 1822869 - DNA, 15 bp, Homo sapiens
atggcgttaacccgg

SEQ ID NO: 1822870 - DNA, 15 bp, Homo sapiens
tggcgttaacccggg

SEQ ID NO: 1822871 - DNA, 15 bp, Homo sapiens
ggcgttaacccggga

SEQ ID NO: 1822872 - DNA, 15 bp, Homo sapiens
gcgttaacccgggag

SEQ ID NO: 1822873 - DNA, 15 bp, Homo sapiens
cgttaacccgggagg

SEQ ID NO: 1822874 - DNA, 15 bp, Homo sapiens
gttaacccgggaggc

SEQ ID NO: 1822875 - DNA, 15 bp, Homo sapiens
ttaacccgggaggcg

SEQ ID NO: 1822876 - DNA, 15 bp, Homo sapiens
taacccgggaggcga

SEQ ID NO: 1822877 - DNA, 15 bp, Homo sapiens
aacccgggaggcgaa

SEQ ID NO: 1822878 - DNA, 15 bp, Homo sapiens
acccgggaggcgaag

SEQ ID NO: 1822879 - DNA, 15 bp, Homo sapiens
cccgggaggcgaagg

SEQ ID NO: 1822880 - DNA, 15 bp, Homo sapiens
ccgggaggcgaaggt

SEQ ID NO: 1822881 - DNA, 15 bp, Homo sapiens
cgggaggcgaaggtt

SEQ ID NO: 1822882 - DNA, 15 bp, Homo sapiens
gggaggcgaaggttg

SEQ ID NO: 1822883 - DNA, 15 bp, Homo sapiens
ggaggcgaaggttgc

SEQ ID NO: 1822884 - DNA, 15 bp, Homo sapiens
gaggcgaaggttgca

SEQ ID NO: 1822885 - DNA, 15 bp, Homo sapiens
aggcgaaggttgcag

SEQ ID NO: 1822886 - DNA, 15 bp, Homo sapiens
ggcgaaggttgcagt

SEQ ID NO: 1822887 - DNA, 15 bp, Homo sapiens
gcgaaggttgcagtg

SEQ ID NO: 1822888 - DNA, 15 bp, Homo sapiens
cgaaggttgcagtga

SEQ ID NO: 1822889 - DNA, 15 bp, Homo sapiens
gaaggttgcagtgag

SEQ ID NO: 1822890 - DNA, 15 bp, Homo sapiens
gatcgcgccactgcc

SEQ ID NO: 1822891 - DNA, 15 bp, Homo sapiens
cgcgccactgccctt

SEQ ID NO: 1822892 - DNA, 15 bp, Homo sapiens
gcgccactgcccttc

SEQ ID NO: 1822893 - DNA, 15 bp, Homo sapiens
cgccactgcccttca

SEQ ID NO: 1822894 - DNA, 15 bp, Homo sapiens
gccactgcccttcag

SEQ ID NO: 1822895 - DNA, 15 bp, Homo sapiens
ccactgcccttcagc

SEQ ID NO: 1822896 - DNA, 15 bp, Homo sapiens
cactgcccttcagcc

SEQ ID NO: 1822897 - DNA, 15 bp, Homo sapiens
actgcccttcagcct

SEQ ID NO: 1822898 - DNA, 15 bp, Homo sapiens
ctgcccttcagcctg

SEQ ID NO: 1822899 - DNA, 15 bp, Homo sapiens
tgcccttcagcctgg

SEQ ID NO: 1822900 - DNA, 15 bp, Homo sapiens
gcccttcagcctggg

SEQ ID NO: 1822901 - DNA, 15 bp, Homo sapiens
cccttcagcctgggt

SEQ ID NO: 1822902 - DNA, 15 bp, Homo sapiens
ccttcagcctgggtg

SEQ ID NO: 1822903 - DNA, 15 bp, Homo sapiens
cttcagcctgggtga

SEQ ID NO: 1822904 - DNA, 15 bp, Homo sapiens
ttcagcctgggtgac

SEQ ID NO: 1822905 - DNA, 15 bp, Homo sapiens
tcagcctgggtgaca

SEQ ID NO: 1822906 - DNA, 15 bp, Homo sapiens
cctgggtgacagaac

SEQ ID NO: 1822907 - DNA, 15 bp, Homo sapiens
ctgggtgacagaacg

SEQ ID NO: 1822908 - DNA, 15 bp, Homo sapiens
tgggtgacagaacga

SEQ ID NO: 1822909 - DNA, 15 bp, Homo sapiens
gacagaacgagactc

SEQ ID NO: 1822910 - DNA, 15 bp, Homo sapiens
acagaacgagactct

SEQ ID NO: 1822911 - DNA, 15 bp, Homo sapiens
cagaacgagactctg

SEQ ID NO: 1822912 - DNA, 15 bp, Homo sapiens
agaacgagactctgt

SEQ ID NO: 1822913 - DNA, 15 bp, Homo sapiens
gaacgagactctgtc

SEQ ID NO: 1822914 - DNA, 15 bp, Homo sapiens
aacgagactctgtct

SEQ ID NO: 1822915 - DNA, 15 bp, Homo sapiens
acgagactctgtctc

SEQ ID NO: 1822916 - DNA, 15 bp, Homo sapiens
aaaagaaaagaaaac

SEQ ID NO: 1822917 - DNA, 15 bp, Homo sapiens
aaagaaaagaaaaca

SEQ ID NO: 1822918 - DNA, 15 bp, Homo sapiens
gaaaagaaaacatga

SEQ ID NO: 1822919 - DNA, 15 bp, Homo sapiens
aaaagaaaacatgaa

SEQ ID NO: 1822920 - DNA, 15 bp, Homo sapiens
aaagaaaacatgaaa

SEQ ID NO: 1822921 - DNA, 15 bp, Homo sapiens
aagaaaacatgaaac

SEQ ID NO: 1822922 - DNA, 15 bp, Homo sapiens
agaaaacatgaaaca

SEQ ID NO: 1822923 - DNA, 15 bp, Homo sapiens
gaaaacatgaaacac

SEQ ID NO: 1822924 - DNA, 15 bp, Homo sapiens
aaaacatgaaacaca

SEQ ID NO: 1822925 - DNA, 15 bp, Homo sapiens
aaacatgaaacacaa

SEQ ID NO: 1822926 - DNA, 15 bp, Homo sapiens
aacatgaaacacaac

SEQ ID NO: 1822927 - DNA, 15 bp, Homo sapiens
acatgaaacacaaca

SEQ ID NO: 1822928 - DNA, 15 bp, Homo sapiens
catgaaacacaacaa

SEQ ID NO: 1822929 - DNA, 15 bp, Homo sapiens
atgaaacacaacaat

SEQ ID NO: 1822930 - DNA, 15 bp, Homo sapiens
tgaaacacaacaata

SEQ ID NO: 1822931 - DNA, 15 bp, Homo sapiens
gaaacacaacaatat

SEQ ID NO: 1822932 - DNA, 15 bp, Homo sapiens
aaacacaacaatatg

SEQ ID NO: 1822933 - DNA, 15 bp, Homo sapiens
aacacaacaatatga

SEQ ID NO: 1822934 - DNA, 15 bp, Homo sapiens
acacaacaatatgaa

SEQ ID NO: 1822935 - DNA, 15 bp, Homo sapiens
cacaacaatatgaaa

SEQ ID NO: 1822936 - DNA, 15 bp, Homo sapiens
acaacaatatgaaaa

SEQ ID NO: 1822937 - DNA, 15 bp, Homo sapiens
caacaatatgaaaac

SEQ ID NO: 1822938 - DNA, 15 bp, Homo sapiens
aacaatatgaaaaca

SEQ ID NO: 1822939 - DNA, 15 bp, Homo sapiens
acaatatgaaaacag

SEQ ID NO: 1822940 - DNA, 15 bp, Homo sapiens
caatatgaaaacagc

SEQ ID NO: 1822941 - DNA, 15 bp, Homo sapiens
aatatgaaaacagct

SEQ ID NO: 1822942 - DNA, 15 bp, Homo sapiens
atatgaaaacagctc

SEQ ID NO: 1822943 - DNA, 15 bp, Homo sapiens
tatgaaaacagctct

SEQ ID NO: 1822944 - DNA, 15 bp, Homo sapiens
atgaaaacagctctc

SEQ ID NO: 1822945 - DNA, 15 bp, Homo sapiens
tgaaaacagctctcg

SEQ ID NO: 1822946 - DNA, 15 bp, Homo sapiens
gaaaacagctctcgg

SEQ ID NO: 1822947 - DNA, 15 bp, Homo sapiens
aaaacagctctcggc

SEQ ID NO: 1822948 - DNA, 15 bp, Homo sapiens
aaacagctctcggct

SEQ ID NO: 1822949 - DNA, 15 bp, Homo sapiens
aacagctctcggctt

SEQ ID NO: 1822950 - DNA, 15 bp, Homo sapiens
acagctctcggcttt

SEQ ID NO: 1822951 - DNA, 15 bp, Homo sapiens
cagctctcggctttc

SEQ ID NO: 1822952 - DNA, 15 bp, Homo sapiens
agctctcggctttcg

SEQ ID NO: 1822953 - DNA, 15 bp, Homo sapiens
gctctcggctttcgg

SEQ ID NO: 1822954 - DNA, 15 bp, Homo sapiens
ctctcggctttcggc

SEQ ID NO: 1822955 - DNA, 15 bp, Homo sapiens
tctcggctttcggct

SEQ ID NO: 1822956 - DNA, 15 bp, Homo sapiens
ctcggctttcggctc

SEQ ID NO: 1822957 - DNA, 15 bp, Homo sapiens
tcggctttcggctcg

SEQ ID NO: 1822958 - DNA, 15 bp, Homo sapiens
cggctttcggctcgg

SEQ ID NO: 1822959 - DNA, 15 bp, Homo sapiens
ggctttcggctcgga

SEQ ID NO: 1822960 - DNA, 15 bp, Homo sapiens
gctttcggctcggag

SEQ ID NO: 1822961 - DNA, 15 bp, Homo sapiens
ctttcggctcggagg

SEQ ID NO: 1822962 - DNA, 15 bp, Homo sapiens
tttcggctcggagga

SEQ ID NO: 1822963 - DNA, 15 bp, Homo sapiens
ttcggctcggaggag

SEQ ID NO: 1822964 - DNA, 15 bp, Homo sapiens
tcggctcggaggagg

SEQ ID NO: 1822965 - DNA, 15 bp, Homo sapiens
cggctcggaggaggc

SEQ ID NO: 1822966 - DNA, 15 bp, Homo sapiens
ggctcggaggaggcc

SEQ ID NO: 1822967 - DNA, 15 bp, Homo sapiens
gctcggaggaggcca

SEQ ID NO: 1822968 - DNA, 15 bp, Homo sapiens
ctcggaggaggccaa

SEQ ID NO: 1822969 - DNA, 15 bp, Homo sapiens
tcggaggaggccaag

SEQ ID NO: 1822970 - DNA, 15 bp, Homo sapiens
cggaggaggccaagg

SEQ ID NO: 1822971 - DNA, 15 bp, Homo sapiens
ggaggaggccaaggt

SEQ ID NO: 1822972 - DNA, 15 bp, Homo sapiens
gaggaggccaaggtg

SEQ ID NO: 1822973 - DNA, 15 bp, Homo sapiens
aggaggccaaggtgc

SEQ ID NO: 1822974 - DNA, 15 bp, Homo sapiens
ggaggccaaggtgca

SEQ ID NO: 1822975 - DNA, 15 bp, Homo sapiens
gaggccaaggtgcaa

SEQ ID NO: 1822976 - DNA, 15 bp, Homo sapiens
aggccaaggtgcaac

SEQ ID NO: 1822977 - DNA, 15 bp, Homo sapiens
ggccaaggtgcaact

SEQ ID NO: 1822978 - DNA, 15 bp, Homo sapiens
gccaaggtgcaactt

SEQ ID NO: 1822979 - DNA, 15 bp, Homo sapiens
ccaaggtgcaacttt

SEQ ID NO: 1822980 - DNA, 15 bp, Homo sapiens
caaggtgcaactttc

SEQ ID NO: 1822981 - DNA, 15 bp, Homo sapiens
aaggtgcaactttct

SEQ ID NO: 1822982 - DNA, 15 bp, Homo sapiens
aggtgcaactttctt

SEQ ID NO: 1822983 - DNA, 15 bp, Homo sapiens
ggtgcaactttcttc

SEQ ID NO: 1822984 - DNA, 15 bp, Homo sapiens
gtgcaactttcttcc

SEQ ID NO: 1822985 - DNA, 15 bp, Homo sapiens
tgcaactttcttccg

SEQ ID NO: 1822986 - DNA, 15 bp, Homo sapiens
gcaactttcttccgt

SEQ ID NO: 1822987 - DNA, 15 bp, Homo sapiens
caactttcttccgtc

SEQ ID NO: 1822988 - DNA, 15 bp, Homo sapiens
aactttcttccgtcg

SEQ ID NO: 1822989 - DNA, 15 bp, Homo sapiens
actttcttccgtcgt

SEQ ID NO: 1822990 - DNA, 15 bp, Homo sapiens
ctttcttccgtcgtt

SEQ ID NO: 1822991 - DNA, 15 bp, Homo sapiens
tttcttccgtcgttc

SEQ ID NO: 1822992 - DNA, 15 bp, Homo sapiens
ttcttccgtcgttcc

SEQ ID NO: 1822993 - DNA, 15 bp, Homo sapiens
tcttccgtcgttccg

SEQ ID NO: 1822994 - DNA, 15 bp, Homo sapiens
cttccgtcgttccga

SEQ ID NO: 1822995 - DNA, 15 bp, Homo sapiens
ttccgtcgttccgaa

SEQ ID NO: 1822996 - DNA, 15 bp, Homo sapiens
tccgtcgttccgaat

SEQ ID NO: 1822997 - DNA, 15 bp, Homo sapiens
ccgtcgttccgaatc

SEQ ID NO: 1822998 - DNA, 15 bp, Homo sapiens
cgtcgttccgaatcc

SEQ ID NO: 1822999 - DNA, 15 bp, Homo sapiens
gtcgttccgaatccg

SEQ ID NO: 1823000 - DNA, 15 bp, Homo sapiens
tcgttccgaatccgg

SEQ ID NO: 1823001 - DNA, 15 bp, Homo sapiens
cgttccgaatccggg

SEQ ID NO: 1823002 - DNA, 15 bp, Homo sapiens
gttccgaatccgggt

SEQ ID NO: 1823003 - DNA, 15 bp, Homo sapiens
ttccgaatccgggtt

SEQ ID NO: 1823004 - DNA, 15 bp, Homo sapiens
tccgaatccgggttc

SEQ ID NO: 1823005 - DNA, 15 bp, Homo sapiens
ccgaatccgggttca

SEQ ID NO: 1823006 - DNA, 15 bp, Homo sapiens
cgaatccgggttcat

SEQ ID NO: 1823007 - DNA, 15 bp, Homo sapiens
gaatccgggttcatc

SEQ ID NO: 1823008 - DNA, 15 bp, Homo sapiens
aatccgggttcatcc

SEQ ID NO: 1823009 - DNA, 15 bp, Homo sapiens
atccgggttcatccc

SEQ ID NO: 1823010 - DNA, 15 bp, Homo sapiens
tccgggttcatccca

SEQ ID NO: 1823011 - DNA, 15 bp, Homo sapiens
ccgggttcatcccac

SEQ ID NO: 1823012 - DNA, 15 bp, Homo sapiens
cgggttcatcccaca

SEQ ID NO: 1823013 - DNA, 15 bp, Homo sapiens
gggttcatcccacac

SEQ ID NO: 1823014 - DNA, 15 bp, Homo sapiens
ggttcatcccacacc

SEQ ID NO: 1823015 - DNA, 15 bp, Homo sapiens
gttcatcccacacca

SEQ ID NO: 1823016 - DNA, 15 bp, Homo sapiens
ttcatcccacaccag

SEQ ID NO: 1823017 - DNA, 15 bp, Homo sapiens
tcatcccacaccagc

SEQ ID NO: 1823018 - DNA, 15 bp, Homo sapiens
catcccacaccagcc

SEQ ID NO: 1823019 - DNA, 15 bp, Homo sapiens
atcccacaccagccg

SEQ ID NO: 1823020 - DNA, 15 bp, Homo sapiens
tcccacaccagccgc

SEQ ID NO: 1823021 - DNA, 15 bp, Homo sapiens
cccacaccagccgcc

SEQ ID NO: 1823022 - DNA, 15 bp, Homo sapiens
ccacaccagccgcct

SEQ ID NO: 1823023 - DNA, 15 bp, Homo sapiens
cacaccagccgcctc

SEQ ID NO: 1823024 - DNA, 15 bp, Homo sapiens
acaccagccgcctcc

SEQ ID NO: 1823025 - DNA, 15 bp, Homo sapiens
caccagccgcctcca

SEQ ID NO: 1823026 - DNA, 15 bp, Homo sapiens
accagccgcctccac

SEQ ID NO: 1823027 - DNA, 15 bp, Homo sapiens
ccagccgcctccacc

SEQ ID NO: 1823028 - DNA, 15 bp, Homo sapiens
cagccgcctccacca

SEQ ID NO: 1823029 - DNA, 15 bp, Homo sapiens
agccgcctccaccat

SEQ ID NO: 1823030 - DNA, 15 bp, Homo sapiens
gccgcctccaccatg

SEQ ID NO: 1823031 - DNA, 15 bp, Homo sapiens
ccgcctccaccatgc

SEQ ID NO: 1823032 - DNA, 15 bp, Homo sapiens
cgcctccaccatgcc

SEQ ID NO: 1823033 - DNA, 15 bp, Homo sapiens
gcctccaccatgcca

SEQ ID NO: 1823034 - DNA, 15 bp, Homo sapiens
cctccaccatgccac

SEQ ID NO: 1823035 - DNA, 15 bp, Homo sapiens
ctccaccatgccacc

SEQ ID NO: 1823036 - DNA, 15 bp, Homo sapiens
tccaccatgccaccg

SEQ ID NO: 1823037 - DNA, 15 bp, Homo sapiens
ccaccatgccaccga

SEQ ID NO: 1823038 - DNA, 15 bp, Homo sapiens
caccatgccaccgaa

SEQ ID NO: 1823039 - DNA, 15 bp, Homo sapiens
accatgccaccgaag

SEQ ID NO: 1823040 - DNA, 15 bp, Homo sapiens
ccatgccaccgaagt

SEQ ID NO: 1823041 - DNA, 15 bp, Homo sapiens
catgccaccgaagtt

SEQ ID NO: 1823042 - DNA, 15 bp, Homo sapiens
atgccaccgaagttc

SEQ ID NO: 1823043 - DNA, 15 bp, Homo sapiens
tgccaccgaagttcg

SEQ ID NO: 1823044 - DNA, 15 bp, Homo sapiens
gccaccgaagttcga

SEQ ID NO: 1823045 - DNA, 15 bp, Homo sapiens
ccaccgaagttcgac

SEQ ID NO: 1823046 - DNA, 15 bp, Homo sapiens
caccgaagttcgacc

SEQ ID NO: 1823047 - DNA, 15 bp, Homo sapiens
accgaagttcgaccc

SEQ ID NO: 1823048 - DNA, 15 bp, Homo sapiens
ccgaagttcgacccc

SEQ ID NO: 1823049 - DNA, 15 bp, Homo sapiens
cgaagttcgacccca

SEQ ID NO: 1823050 - DNA, 15 bp, Homo sapiens
gaagttcgaccccaa

SEQ ID NO: 1823051 - DNA, 15 bp, Homo sapiens
aagttcgaccccaac

SEQ ID NO: 1823052 - DNA, 15 bp, Homo sapiens
agttcgaccccaaca

SEQ ID NO: 1823053 - DNA, 15 bp, Homo sapiens
gttcgaccccaacaa

SEQ ID NO: 1823054 - DNA, 15 bp, Homo sapiens
ttcgaccccaacaag

SEQ ID NO: 1823055 - DNA, 15 bp, Homo sapiens
tcgaccccaacaaga

SEQ ID NO: 1823056 - DNA, 15 bp, Homo sapiens
cgaccccaacaagat

SEQ ID NO: 1823057 - DNA, 15 bp, Homo sapiens
gaccccaacaagatc

SEQ ID NO: 1823058 - DNA, 15 bp, Homo sapiens
accccaacaagatca

SEQ ID NO: 1823059 - DNA, 15 bp, Homo sapiens
ccccaacaagatcaa

SEQ ID NO: 1823060 - DNA, 15 bp, Homo sapiens
cccaacaagatcaaa

SEQ ID NO: 1823061 - DNA, 15 bp, Homo sapiens
ccaacaagatcaaag

SEQ ID NO: 1823062 - DNA, 15 bp, Homo sapiens
caacaagatcaaagt

SEQ ID NO: 1823063 - DNA, 15 bp, Homo sapiens
aacaagatcaaagtc

SEQ ID NO: 1823064 - DNA, 15 bp, Homo sapiens
acaagatcaaagtcg

SEQ ID NO: 1823065 - DNA, 15 bp, Homo sapiens
caagatcaaagtcgt

SEQ ID NO: 1823066 - DNA, 15 bp, Homo sapiens
aagatcaaagtcgta

SEQ ID NO: 1823067 - DNA, 15 bp, Homo sapiens
agatcaaagtcgtat

SEQ ID NO: 1823068 - DNA, 15 bp, Homo sapiens
gatcaaagtcgtata

SEQ ID NO: 1823069 - DNA, 15 bp, Homo sapiens
atcaaagtcgtatac

SEQ ID NO: 1823070 - DNA, 15 bp, Homo sapiens
tcaaagtcgtatacc

SEQ ID NO: 1823071 - DNA, 15 bp, Homo sapiens
caaagtcgtatacct

SEQ ID NO: 1823072 - DNA, 15 bp, Homo sapiens
aaagtcgtatacctg

SEQ ID NO: 1823073 - DNA, 15 bp, Homo sapiens
aagtcgtatacctga

SEQ ID NO: 1823074 - DNA, 15 bp, Homo sapiens
agtcgtatacctgag

SEQ ID NO: 1823075 - DNA, 15 bp, Homo sapiens
gtcgtatacctgagg

SEQ ID NO: 1823076 - DNA, 15 bp, Homo sapiens
tcgtatacctgaggt

SEQ ID NO: 1823077 - DNA, 15 bp, Homo sapiens
cgtatacctgaggtg

SEQ ID NO: 1823078 - DNA, 15 bp, Homo sapiens
gtatacctgaggtgc

SEQ ID NO: 1823079 - DNA, 15 bp, Homo sapiens
tatacctgaggtgca

SEQ ID NO: 1823080 - DNA, 15 bp, Homo sapiens
atacctgaggtgcac

SEQ ID NO: 1823081 - DNA, 15 bp, Homo sapiens
tacctgaggtgcacc

SEQ ID NO: 1823082 - DNA, 15 bp, Homo sapiens
acctgaggtgcaccg

SEQ ID NO: 1823083 - DNA, 15 bp, Homo sapiens
cctgaggtgcaccgg

SEQ ID NO: 1823084 - DNA, 15 bp, Homo sapiens
ctgaggtgcaccgga

SEQ ID NO: 1823085 - DNA, 15 bp, Homo sapiens
tgaggtgcaccggag

SEQ ID NO: 1823086 - DNA, 15 bp, Homo sapiens
gaggtgcaccggagg

SEQ ID NO: 1823087 - DNA, 15 bp, Homo sapiens
aggtgcaccggaggt

SEQ ID NO: 1823088 - DNA, 15 bp, Homo sapiens
ggtgcaccggaggtg

SEQ ID NO: 1823089 - DNA, 15 bp, Homo sapiens
gtgcaccggaggtga

SEQ ID NO: 1823090 - DNA, 15 bp, Homo sapiens
tgcaccggaggtgaa

SEQ ID NO: 1823091 - DNA, 15 bp, Homo sapiens
gcaccggaggtgaag

SEQ ID NO: 1823092 - DNA, 15 bp, Homo sapiens
caccggaggtgaagt

SEQ ID NO: 1823093 - DNA, 15 bp, Homo sapiens
accggaggtgaagtc

SEQ ID NO: 1823094 - DNA, 15 bp, Homo sapiens
ccggaggtgaagtcg

SEQ ID NO: 1823095 - DNA, 15 bp, Homo sapiens
cggaggtgaagtcgg

SEQ ID NO: 1823096 - DNA, 15 bp, Homo sapiens
ggaggtgaagtcggt

SEQ ID NO: 1823097 - DNA, 15 bp, Homo sapiens
gaggtgaagtcggtg

SEQ ID NO: 1823098 - DNA, 15 bp, Homo sapiens
aggtgaagtcggtgc

SEQ ID NO: 1823099 - DNA, 15 bp, Homo sapiens
ggtgaagtcggtgcc

SEQ ID NO: 1823100 - DNA, 15 bp, Homo sapiens
gtgaagtcggtgcca

SEQ ID NO: 1823101 - DNA, 15 bp, Homo sapiens
tgaagtcggtgccac

SEQ ID NO: 1823102 - DNA, 15 bp, Homo sapiens
gaagtcggtgccact

SEQ ID NO: 1823103 - DNA, 15 bp, Homo sapiens
aagtcggtgccactt

SEQ ID NO: 1823104 - DNA, 15 bp, Homo sapiens
agtcggtgccacttc

SEQ ID NO: 1823105 - DNA, 15 bp, Homo sapiens
gtcggtgccacttct

SEQ ID NO: 1823106 - DNA, 15 bp, Homo sapiens
tcggtgccacttctg

SEQ ID NO: 1823107 - DNA, 15 bp, Homo sapiens
cggtgccacttctgc

SEQ ID NO: 1823108 - DNA, 15 bp, Homo sapiens
ggtgccacttctgcc

SEQ ID NO: 1823109 - DNA, 15 bp, Homo sapiens
gtgccacttctgccc

SEQ ID NO: 1823110 - DNA, 15 bp, Homo sapiens
tgccacttctgccct

SEQ ID NO: 1823111 - DNA, 15 bp, Homo sapiens
gccacttctgccctg

SEQ ID NO: 1823112 - DNA, 15 bp, Homo sapiens
ccacttctgccctgg

SEQ ID NO: 1823113 - DNA, 15 bp, Homo sapiens
cacttctgccctggc

SEQ ID NO: 1823114 - DNA, 15 bp, Homo sapiens
acttctgccctggcc

SEQ ID NO: 1823115 - DNA, 15 bp, Homo sapiens
cttctgccctggccc

SEQ ID NO: 1823116 - DNA, 15 bp, Homo sapiens
ttctgccctggcccc

SEQ ID NO: 1823117 - DNA, 15 bp, Homo sapiens
tctgccctggccccc

SEQ ID NO: 1823118 - DNA, 15 bp, Homo sapiens
gccctggcccccaag

SEQ ID NO: 1823119 - DNA, 15 bp, Homo sapiens
ccctggcccccaaga

SEQ ID NO: 1823120 - DNA, 15 bp, Homo sapiens
cctggcccccaagat

SEQ ID NO: 1823121 - DNA, 15 bp, Homo sapiens
ctggcccccaagatc

SEQ ID NO: 1823122 - DNA, 15 bp, Homo sapiens
tggcccccaagatcg

SEQ ID NO: 1823123 - DNA, 15 bp, Homo sapiens
ggcccccaagatcgg

SEQ ID NO: 1823124 - DNA, 15 bp, Homo sapiens
gcccccaagatcggc

SEQ ID NO: 1823125 - DNA, 15 bp, Homo sapiens
cccccaagatcggcc

SEQ ID NO: 1823126 - DNA, 15 bp, Homo sapiens
ccccaagatcggccc

SEQ ID NO: 1823127 - DNA, 15 bp, Homo sapiens
cccaagatcggcccc

SEQ ID NO: 1823128 - DNA, 15 bp, Homo sapiens
ccaagatcggccccc

SEQ ID NO: 1823129 - DNA, 15 bp, Homo sapiens
caagatcggccccct

SEQ ID NO: 1823130 - DNA, 15 bp, Homo sapiens
aagatcggccccctg

SEQ ID NO: 1823131 - DNA, 15 bp, Homo sapiens
agatcggccccctgg

SEQ ID NO: 1823132 - DNA, 15 bp, Homo sapiens
gatcggccccctggg

SEQ ID NO: 1823133 - DNA, 15 bp, Homo sapiens
atcggccccctgggt

SEQ ID NO: 1823134 - DNA, 15 bp, Homo sapiens
tcggccccctgggtc

SEQ ID NO: 1823135 - DNA, 15 bp, Homo sapiens
cggccccctgggtct

SEQ ID NO: 1823136 - DNA, 15 bp, Homo sapiens
ggccccctgggtctg

SEQ ID NO: 1823137 - DNA, 15 bp, Homo sapiens
gccccctgggtctgt

SEQ ID NO: 1823138 - DNA, 15 bp, Homo sapiens
ccccctgggtctgtc

SEQ ID NO: 1823139 - DNA, 15 bp, Homo sapiens
cccctgggtctgtct

SEQ ID NO: 1823140 - DNA, 15 bp, Homo sapiens
ccctgggtctgtctc

SEQ ID NO: 1823141 - DNA, 15 bp, Homo sapiens
cctgggtctgtctcc

SEQ ID NO: 1823142 - DNA, 15 bp, Homo sapiens
ctgggtctgtctcca

SEQ ID NO: 1823143 - DNA, 15 bp, Homo sapiens
tgggtctgtctccaa

SEQ ID NO: 1823144 - DNA, 15 bp, Homo sapiens
gggtctgtctccaaa

SEQ ID NO: 1823145 - DNA, 15 bp, Homo sapiens
ggtctgtctccaaaa

SEQ ID NO: 1823146 - DNA, 15 bp, Homo sapiens
gtctgtctccaaaaa

SEQ ID NO: 1823147 - DNA, 15 bp, Homo sapiens
tgtctccaaaaaagg

SEQ ID NO: 1823148 - DNA, 15 bp, Homo sapiens
gtctccaaaaaaggt

SEQ ID NO: 1823149 - DNA, 15 bp, Homo sapiens
tctccaaaaaaggtt

SEQ ID NO: 1823150 - DNA, 15 bp, Homo sapiens
ctccaaaaaaggttg

SEQ ID NO: 1823151 - DNA, 15 bp, Homo sapiens
tccaaaaaaggttgg

SEQ ID NO: 1823152 - DNA, 15 bp, Homo sapiens
ccaaaaaaggttggt

SEQ ID NO: 1823153 - DNA, 15 bp, Homo sapiens
caaaaaaggttggtg

SEQ ID NO: 1823154 - DNA, 15 bp, Homo sapiens
aaaaaaggttggtga

SEQ ID NO: 1823155 - DNA, 15 bp, Homo sapiens
aaaaaggttggtgat

SEQ ID NO: 1823156 - DNA, 15 bp, Homo sapiens
aaaaggttggtgatg

SEQ ID NO: 1823157 - DNA, 15 bp, Homo sapiens
aaaggttggtgatga

SEQ ID NO: 1823158 - DNA, 15 bp, Homo sapiens
aaggttggtgatgac

SEQ ID NO: 1823159 - DNA, 15 bp, Homo sapiens
aggttggtgatgaca

SEQ ID NO: 1823160 - DNA, 15 bp, Homo sapiens
ggttggtgatgacat

SEQ ID NO: 1823161 - DNA, 15 bp, Homo sapiens
gttggtgatgacatt

SEQ ID NO: 1823162 - DNA, 15 bp, Homo sapiens
ttggtgatgacattg

SEQ ID NO: 1823163 - DNA, 15 bp, Homo sapiens
tggtgatgacattgc

SEQ ID NO: 1823164 - DNA, 15 bp, Homo sapiens
ggtgatgacattgcc

SEQ ID NO: 1823165 - DNA, 15 bp, Homo sapiens
gtgatgacattgcca

SEQ ID NO: 1823166 - DNA, 15 bp, Homo sapiens
tgatgacattgccaa

SEQ ID NO: 1823167 - DNA, 15 bp, Homo sapiens
gatgacattgccaag

SEQ ID NO: 1823168 - DNA, 15 bp, Homo sapiens
atgacattgccaagg

SEQ ID NO: 1823169 - DNA, 15 bp, Homo sapiens
tgacattgccaaggc

SEQ ID NO: 1823170 - DNA, 15 bp, Homo sapiens
gacattgccaaggca

SEQ ID NO: 1823171 - DNA, 15 bp, Homo sapiens
acattgccaaggcaa

SEQ ID NO: 1823172 - DNA, 15 bp, Homo sapiens
cattgccaaggcaac

SEQ ID NO: 1823173 - DNA, 15 bp, Homo sapiens
attgccaaggcaacg

SEQ ID NO: 1823174 - DNA, 15 bp, Homo sapiens
ttgccaaggcaacgg

SEQ ID NO: 1823175 - DNA, 15 bp, Homo sapiens
tgccaaggcaacggg

SEQ ID NO: 1823176 - DNA, 15 bp, Homo sapiens
gccaaggcaacgggt

SEQ ID NO: 1823177 - DNA, 15 bp, Homo sapiens
ccaaggcaacgggtg

SEQ ID NO: 1823178 - DNA, 15 bp, Homo sapiens
caaggcaacgggtga

SEQ ID NO: 1823179 - DNA, 15 bp, Homo sapiens
aaggcaacgggtgac

SEQ ID NO: 1823180 - DNA, 15 bp, Homo sapiens
aggcaacgggtgact

SEQ ID NO: 1823181 - DNA, 15 bp, Homo sapiens
ggcaacgggtgactg

SEQ ID NO: 1823182 - DNA, 15 bp, Homo sapiens
gcaacgggtgactgg

SEQ ID NO: 1823183 - DNA, 15 bp, Homo sapiens
caacgggtgactgga

SEQ ID NO: 1823184 - DNA, 15 bp, Homo sapiens
aacgggtgactggaa

SEQ ID NO: 1823185 - DNA, 15 bp, Homo sapiens
acgggtgactggaag

SEQ ID NO: 1823186 - DNA, 15 bp, Homo sapiens
cgggtgactggaagg

SEQ ID NO: 1823187 - DNA, 15 bp, Homo sapiens
gggtgactggaaggg

SEQ ID NO: 1823188 - DNA, 15 bp, Homo sapiens
ggtgactggaagggc

SEQ ID NO: 1823189 - DNA, 15 bp, Homo sapiens
gtgactggaagggcc

SEQ ID NO: 1823190 - DNA, 15 bp, Homo sapiens
tgactggaagggcct

SEQ ID NO: 1823191 - DNA, 15 bp, Homo sapiens
gactggaagggcctg

SEQ ID NO: 1823192 - DNA, 15 bp, Homo sapiens
actggaagggcctga

SEQ ID NO: 1823193 - DNA, 15 bp, Homo sapiens
ctggaagggcctgag

SEQ ID NO: 1823194 - DNA, 15 bp, Homo sapiens
tggaagggcctgagg

SEQ ID NO: 1823195 - DNA, 15 bp, Homo sapiens
ggaagggcctgagga

SEQ ID NO: 1823196 - DNA, 15 bp, Homo sapiens
gaagggcctgaggat

SEQ ID NO: 1823197 - DNA, 15 bp, Homo sapiens
aagggcctgaggatt

SEQ ID NO: 1823198 - DNA, 15 bp, Homo sapiens
agggcctgaggatta

SEQ ID NO: 1823199 - DNA, 15 bp, Homo sapiens
gggcctgaggattac

SEQ ID NO: 1823200 - DNA, 15 bp, Homo sapiens
ggcctgaggattaca

SEQ ID NO: 1823201 - DNA, 15 bp, Homo sapiens
gcctgaggattacag

SEQ ID NO: 1823202 - DNA, 15 bp, Homo sapiens
cctgaggattacagt

SEQ ID NO: 1823203 - DNA, 15 bp, Homo sapiens
ctgaggattacagtg

SEQ ID NO: 1823204 - DNA, 15 bp, Homo sapiens
tgaggattacagtga

SEQ ID NO: 1823205 - DNA, 15 bp, Homo sapiens
gaggattacagtgaa

SEQ ID NO: 1823206 - DNA, 15 bp, Homo sapiens
aggattacagtgaaa

SEQ ID NO: 1823207 - DNA, 15 bp, Homo sapiens
ggattacagtgaaac

SEQ ID NO: 1823208 - DNA, 15 bp, Homo sapiens
gattacagtgaaact

SEQ ID NO: 1823209 - DNA, 15 bp, Homo sapiens
attacagtgaaactg

SEQ ID NO: 1823210 - DNA, 15 bp, Homo sapiens
ttacagtgaaactga

SEQ ID NO: 1823211 - DNA, 15 bp, Homo sapiens
tacagtgaaactgac

SEQ ID NO: 1823212 - DNA, 15 bp, Homo sapiens
acagtgaaactgaca

SEQ ID NO: 1823213 - DNA, 15 bp, Homo sapiens
cagtgaaactgacaa

SEQ ID NO: 1823214 - DNA, 15 bp, Homo sapiens
agtgaaactgacaat

SEQ ID NO: 1823215 - DNA, 15 bp, Homo sapiens
gtgaaactgacaatt

SEQ ID NO: 1823216 - DNA, 15 bp, Homo sapiens
tgaaactgacaattc

SEQ ID NO: 1823217 - DNA, 15 bp, Homo sapiens
gaaactgacaattca

SEQ ID NO: 1823218 - DNA, 15 bp, Homo sapiens
aaactgacaattcag

SEQ ID NO: 1823219 - DNA, 15 bp, Homo sapiens
aactgacaattcaga

SEQ ID NO: 1823220 - DNA, 15 bp, Homo sapiens
actgacaattcagaa

SEQ ID NO: 1823221 - DNA, 15 bp, Homo sapiens
ctgacaattcagaac

SEQ ID NO: 1823222 - DNA, 15 bp, Homo sapiens
tgacaattcagaaca

SEQ ID NO: 1823223 - DNA, 15 bp, Homo sapiens
gacaattcagaacag

SEQ ID NO: 1823224 - DNA, 15 bp, Homo sapiens
acaattcagaacaga

SEQ ID NO: 1823225 - DNA, 15 bp, Homo sapiens
caattcagaacagac

SEQ ID NO: 1823226 - DNA, 15 bp, Homo sapiens
aattcagaacagaca

SEQ ID NO: 1823227 - DNA, 15 bp, Homo sapiens
attcagaacagacaa

SEQ ID NO: 1823228 - DNA, 15 bp, Homo sapiens
ttcagaacagacaag

SEQ ID NO: 1823229 - DNA, 15 bp, Homo sapiens
tcagaacagacaagc

SEQ ID NO: 1823230 - DNA, 15 bp, Homo sapiens
cagaacagacaagcc

SEQ ID NO: 1823231 - DNA, 15 bp, Homo sapiens
agaacagacaagccc

SEQ ID NO: 1823232 - DNA, 15 bp, Homo sapiens
gaacagacaagccca

SEQ ID NO: 1823233 - DNA, 15 bp, Homo sapiens
cagacaagcccagat

SEQ ID NO: 1823234 - DNA, 15 bp, Homo sapiens
agacaagcccagatt

SEQ ID NO: 1823235 - DNA, 15 bp, Homo sapiens
gacaagcccagattg

SEQ ID NO: 1823236 - DNA, 15 bp, Homo sapiens
acaagcccagattga

SEQ ID NO: 1823237 - DNA, 15 bp, Homo sapiens
caagcccagattgag

SEQ ID NO: 1823238 - DNA, 15 bp, Homo sapiens
aagcccagattgagg

SEQ ID NO: 1823239 - DNA, 15 bp, Homo sapiens
agcccagattgaggt

SEQ ID NO: 1823240 - DNA, 15 bp, Homo sapiens
gcccagattgaggtg

SEQ ID NO: 1823241 - DNA, 15 bp, Homo sapiens
cccagattgaggtgg

SEQ ID NO: 1823242 - DNA, 15 bp, Homo sapiens
ccagattgaggtggt

SEQ ID NO: 1823243 - DNA, 15 bp, Homo sapiens
cagattgaggtggtg

SEQ ID NO: 1823244 - DNA, 15 bp, Homo sapiens
agattgaggtggtgc

SEQ ID NO: 1823245 - DNA, 15 bp, Homo sapiens
gattgaggtggtgcc

SEQ ID NO: 1823246 - DNA, 15 bp, Homo sapiens
attgaggtggtgcct

SEQ ID NO: 1823247 - DNA, 15 bp, Homo sapiens
ttgaggtggtgcctt

SEQ ID NO: 1823248 - DNA, 15 bp, Homo sapiens
tgaggtggtgccttc

SEQ ID NO: 1823249 - DNA, 15 bp, Homo sapiens
gaggtggtgccttct

SEQ ID NO: 1823250 - DNA, 15 bp, Homo sapiens
aggtggtgccttctg

SEQ ID NO: 1823251 - DNA, 15 bp, Homo sapiens
ggtggtgccttctgc

SEQ ID NO: 1823252 - DNA, 15 bp, Homo sapiens
gtggtgccttctgcc

SEQ ID NO: 1823253 - DNA, 15 bp, Homo sapiens
tggtgccttctgcct

SEQ ID NO: 1823254 - DNA, 15 bp, Homo sapiens
ggtgccttctgcctc

SEQ ID NO: 1823255 - DNA, 15 bp, Homo sapiens
gtgccttctgcctcc

SEQ ID NO: 1823256 - DNA, 15 bp, Homo sapiens
tgccttctgcctccg

SEQ ID NO: 1823257 - DNA, 15 bp, Homo sapiens
gccttctgcctccgc

SEQ ID NO: 1823258 - DNA, 15 bp, Homo sapiens
cttctgcctccgccc

SEQ ID NO: 1823259 - DNA, 15 bp, Homo sapiens
ttctgcctccgccct

SEQ ID NO: 1823260 - DNA, 15 bp, Homo sapiens
tctgcctccgccctg

SEQ ID NO: 1823261 - DNA, 15 bp, Homo sapiens
ctgcctccgccctga

SEQ ID NO: 1823262 - DNA, 15 bp, Homo sapiens
tgcctccgccctgac

SEQ ID NO: 1823263 - DNA, 15 bp, Homo sapiens
gcctccgccctgacc

SEQ ID NO: 1823264 - DNA, 15 bp, Homo sapiens
cctccgccctgacca

SEQ ID NO: 1823265 - DNA, 15 bp, Homo sapiens
ctccgccctgaccat

SEQ ID NO: 1823266 - DNA, 15 bp, Homo sapiens
tccgccctgaccatc

SEQ ID NO: 1823267 - DNA, 15 bp, Homo sapiens
ccgccctgaccatca

SEQ ID NO: 1823268 - DNA, 15 bp, Homo sapiens
cgccctgaccatcaa

SEQ ID NO: 1823269 - DNA, 15 bp, Homo sapiens
gccctgaccatcaaa

SEQ ID NO: 1823270 - DNA, 15 bp, Homo sapiens
ccctgaccatcaaag

SEQ ID NO: 1823271 - DNA, 15 bp, Homo sapiens
cctgaccatcaaagc

SEQ ID NO: 1823272 - DNA, 15 bp, Homo sapiens
ctgaccatcaaagcc

SEQ ID NO: 1823273 - DNA, 15 bp, Homo sapiens
tgaccatcaaagccc

SEQ ID NO: 1823274 - DNA, 15 bp, Homo sapiens
gaccatcaaagccct

SEQ ID NO: 1823275 - DNA, 15 bp, Homo sapiens
accatcaaagccctc

SEQ ID NO: 1823276 - DNA, 15 bp, Homo sapiens
ccatcaaagccctca

SEQ ID NO: 1823277 - DNA, 15 bp, Homo sapiens
catcaaagccctcaa

SEQ ID NO: 1823278 - DNA, 15 bp, Homo sapiens
atcaaagccctcaag

SEQ ID NO: 1823279 - DNA, 15 bp, Homo sapiens
tcaaagccctcaagg

SEQ ID NO: 1823280 - DNA, 15 bp, Homo sapiens
caaagccctcaagga

SEQ ID NO: 1823281 - DNA, 15 bp, Homo sapiens
aaagccctcaaggag

SEQ ID NO: 1823282 - DNA, 15 bp, Homo sapiens
aagccctcaaggagc

SEQ ID NO: 1823283 - DNA, 15 bp, Homo sapiens
agccctcaaggagcc

SEQ ID NO: 1823284 - DNA, 15 bp, Homo sapiens
gccctcaaggagcca

SEQ ID NO: 1823285 - DNA, 15 bp, Homo sapiens
ccctcaaggagccac

SEQ ID NO: 1823286 - DNA, 15 bp, Homo sapiens
cctcaaggagccacc

SEQ ID NO: 1823287 - DNA, 15 bp, Homo sapiens
ctcaaggagccacca

SEQ ID NO: 1823288 - DNA, 15 bp, Homo sapiens
tcaaggagccaccaa

SEQ ID NO: 1823289 - DNA, 15 bp, Homo sapiens
caaggagccaccaag

SEQ ID NO: 1823290 - DNA, 15 bp, Homo sapiens
aaggagccaccaaga

SEQ ID NO: 1823291 - DNA, 15 bp, Homo sapiens
aggagccaccaagag

SEQ ID NO: 1823292 - DNA, 15 bp, Homo sapiens
ggagccaccaagaga

SEQ ID NO: 1823293 - DNA, 15 bp, Homo sapiens
gagccaccaagagac

SEQ ID NO: 1823294 - DNA, 15 bp, Homo sapiens
agccaccaagagacg

SEQ ID NO: 1823295 - DNA, 15 bp, Homo sapiens
gccaccaagagacgg

SEQ ID NO: 1823296 - DNA, 15 bp, Homo sapiens
ccaccaagagacgga

SEQ ID NO: 1823297 - DNA, 15 bp, Homo sapiens
caccaagagacggaa

SEQ ID NO: 1823298 - DNA, 15 bp, Homo sapiens
accaagagacggaaa

SEQ ID NO: 1823299 - DNA, 15 bp, Homo sapiens
ccaagagacggaaag

SEQ ID NO: 1823300 - DNA, 15 bp, Homo sapiens
caagagacggaaaga

SEQ ID NO: 1823301 - DNA, 15 bp, Homo sapiens
aagagacggaaagaa

SEQ ID NO: 1823302 - DNA, 15 bp, Homo sapiens
agagacggaaagaaa

SEQ ID NO: 1823303 - DNA, 15 bp, Homo sapiens
gagacggaaagaaac

SEQ ID NO: 1823304 - DNA, 15 bp, Homo sapiens
agacggaaagaaaca

SEQ ID NO: 1823305 - DNA, 15 bp, Homo sapiens
gacggaaagaaacag

SEQ ID NO: 1823306 - DNA, 15 bp, Homo sapiens
acggaaagaaacaga

SEQ ID NO: 1823307 - DNA, 15 bp, Homo sapiens
cggaaagaaacagag

SEQ ID NO: 1823308 - DNA, 15 bp, Homo sapiens
ggaaagaaacagaga

SEQ ID NO: 1823309 - DNA, 15 bp, Homo sapiens
gaaagaaacagagaa

SEQ ID NO: 1823310 - DNA, 15 bp, Homo sapiens
aaagaaacagagaaa

SEQ ID NO: 1823311 - DNA, 15 bp, Homo sapiens
aagaaacagagaaac

SEQ ID NO: 1823312 - DNA, 15 bp, Homo sapiens
agaaacagagaaaca

SEQ ID NO: 1823313 - DNA, 15 bp, Homo sapiens
gaaacagagaaacat

SEQ ID NO: 1823314 - DNA, 15 bp, Homo sapiens
aaacagagaaacatt

SEQ ID NO: 1823315 - DNA, 15 bp, Homo sapiens
aacagagaaacatta

SEQ ID NO: 1823316 - DNA, 15 bp, Homo sapiens
acagagaaacattaa

SEQ ID NO: 1823317 - DNA, 15 bp, Homo sapiens
cagagaaacattaaa

SEQ ID NO: 1823318 - DNA, 15 bp, Homo sapiens
agagaaacattaaac

SEQ ID NO: 1823319 - DNA, 15 bp, Homo sapiens
gagaaacattaaaca

SEQ ID NO: 1823320 - DNA, 15 bp, Homo sapiens
agaaacattaaacac

SEQ ID NO: 1823321 - DNA, 15 bp, Homo sapiens
gaaacattaaacaca

SEQ ID NO: 1823322 - DNA, 15 bp, Homo sapiens
aaacattaaacacag

SEQ ID NO: 1823323 - DNA, 15 bp, Homo sapiens
aacattaaacacagt

SEQ ID NO: 1823324 - DNA, 15 bp, Homo sapiens
acattaaacacagtg

SEQ ID NO: 1823325 - DNA, 15 bp, Homo sapiens
cattaaacacagtgg

SEQ ID NO: 1823326 - DNA, 15 bp, Homo sapiens
attaaacacagtggg

SEQ ID NO: 1823327 - DNA, 15 bp, Homo sapiens
ttaaacacagtggga

SEQ ID NO: 1823328 - DNA, 15 bp, Homo sapiens
taaacacagtgggaa

SEQ ID NO: 1823329 - DNA, 15 bp, Homo sapiens
aaacacagtgggaat

SEQ ID NO: 1823330 - DNA, 15 bp, Homo sapiens
aacacagtgggaata

SEQ ID NO: 1823331 - DNA, 15 bp, Homo sapiens
acacagtgggaatat

SEQ ID NO: 1823332 - DNA, 15 bp, Homo sapiens
cacagtgggaatatc

SEQ ID NO: 1823333 - DNA, 15 bp, Homo sapiens
acagtgggaatatca

SEQ ID NO: 1823334 - DNA, 15 bp, Homo sapiens
cagtgggaatatcac

SEQ ID NO: 1823335 - DNA, 15 bp, Homo sapiens
agtgggaatatcact

SEQ ID NO: 1823336 - DNA, 15 bp, Homo sapiens
gtgggaatatcactt

SEQ ID NO: 1823337 - DNA, 15 bp, Homo sapiens
tgggaatatcacttt

SEQ ID NO: 1823338 - DNA, 15 bp, Homo sapiens
gggaatatcactttt

SEQ ID NO: 1823339 - DNA, 15 bp, Homo sapiens
ggaatatcacttttg

SEQ ID NO: 1823340 - DNA, 15 bp, Homo sapiens
gaatatcacttttga

SEQ ID NO: 1823341 - DNA, 15 bp, Homo sapiens
aatatcacttttgat

SEQ ID NO: 1823342 - DNA, 15 bp, Homo sapiens
atatcacttttgatg

SEQ ID NO: 1823343 - DNA, 15 bp, Homo sapiens
tatcacttttgatga

SEQ ID NO: 1823344 - DNA, 15 bp, Homo sapiens
atcacttttgatgag

SEQ ID NO: 1823345 - DNA, 15 bp, Homo sapiens
tcacttttgatgaga

SEQ ID NO: 1823346 - DNA, 15 bp, Homo sapiens
cacttttgatgagat

SEQ ID NO: 1823347 - DNA, 15 bp, Homo sapiens
acttttgatgagatc

SEQ ID NO: 1823348 - DNA, 15 bp, Homo sapiens
cttttgatgagatca

SEQ ID NO: 1823349 - DNA, 15 bp, Homo sapiens
ttttgatgagatcat

SEQ ID NO: 1823350 - DNA, 15 bp, Homo sapiens
tttgatgagatcatc

SEQ ID NO: 1823351 - DNA, 15 bp, Homo sapiens
ttgatgagatcatca

SEQ ID NO: 1823352 - DNA, 15 bp, Homo sapiens
tgatgagatcatcaa

SEQ ID NO: 1823353 - DNA, 15 bp, Homo sapiens
gatgagatcatcaag

SEQ ID NO: 1823354 - DNA, 15 bp, Homo sapiens
atgagatcatcaagg

SEQ ID NO: 1823355 - DNA, 15 bp, Homo sapiens
tgagatcatcaaggt

SEQ ID NO: 1823356 - DNA, 15 bp, Homo sapiens
gagatcatcaaggtt

SEQ ID NO: 1823357 - DNA, 15 bp, Homo sapiens
agatcatcaaggttg

SEQ ID NO: 1823358 - DNA, 15 bp, Homo sapiens
gatcatcaaggttgc

SEQ ID NO: 1823359 - DNA, 15 bp, Homo sapiens
atcatcaaggttgct

SEQ ID NO: 1823360 - DNA, 15 bp, Homo sapiens
tcatcaaggttgctc

SEQ ID NO: 1823361 - DNA, 15 bp, Homo sapiens
catcaaggttgctcg

SEQ ID NO: 1823362 - DNA, 15 bp, Homo sapiens
atcaaggttgctcga

SEQ ID NO: 1823363 - DNA, 15 bp, Homo sapiens
tcaaggttgctcgac

SEQ ID NO: 1823364 - DNA, 15 bp, Homo sapiens
caaggttgctcgaca

SEQ ID NO: 1823365 - DNA, 15 bp, Homo sapiens
aaggttgctcgacag

SEQ ID NO: 1823366 - DNA, 15 bp, Homo sapiens
aggttgctcgacaga

SEQ ID NO: 1823367 - DNA, 15 bp, Homo sapiens
ggttgctcgacagat

SEQ ID NO: 1823368 - DNA, 15 bp, Homo sapiens
gttgctcgacagatg

SEQ ID NO: 1823369 - DNA, 15 bp, Homo sapiens
ttgctcgacagatgc

SEQ ID NO: 1823370 - DNA, 15 bp, Homo sapiens
tgctcgacagatgcg

SEQ ID NO: 1823371 - DNA, 15 bp, Homo sapiens
gctcgacagatgcgg

SEQ ID NO: 1823372 - DNA, 15 bp, Homo sapiens
ctcgacagatgcggc

SEQ ID NO: 1823373 - DNA, 15 bp, Homo sapiens
tcgacagatgcggca

SEQ ID NO: 1823374 - DNA, 15 bp, Homo sapiens
cgacagatgcggcac

SEQ ID NO: 1823375 - DNA, 15 bp, Homo sapiens
gacagatgcggcacc

SEQ ID NO: 1823376 - DNA, 15 bp, Homo sapiens
acagatgcggcaccg

SEQ ID NO: 1823377 - DNA, 15 bp, Homo sapiens
cagatgcggcaccga

SEQ ID NO: 1823378 - DNA, 15 bp, Homo sapiens
agatgcggcaccgat

SEQ ID NO: 1823379 - DNA, 15 bp, Homo sapiens
gatgcggcaccgatc

SEQ ID NO: 1823380 - DNA, 15 bp, Homo sapiens
atgcggcaccgatcc

SEQ ID NO: 1823381 - DNA, 15 bp, Homo sapiens
tgcggcaccgatcct

SEQ ID NO: 1823382 - DNA, 15 bp, Homo sapiens
gcggcaccgatcctt

SEQ ID NO: 1823383 - DNA, 15 bp, Homo sapiens
cggcaccgatcctta

SEQ ID NO: 1823384 - DNA, 15 bp, Homo sapiens
ggcaccgatccttag

SEQ ID NO: 1823385 - DNA, 15 bp, Homo sapiens
gcaccgatccttagc

SEQ ID NO: 1823386 - DNA, 15 bp, Homo sapiens
caccgatccttagcc

SEQ ID NO: 1823387 - DNA, 15 bp, Homo sapiens
accgatccttagcca

SEQ ID NO: 1823388 - DNA, 15 bp, Homo sapiens
ccgatccttagccag

SEQ ID NO: 1823389 - DNA, 15 bp, Homo sapiens
cgatccttagccaga

SEQ ID NO: 1823390 - DNA, 15 bp, Homo sapiens
gatccttagccagag

SEQ ID NO: 1823391 - DNA, 15 bp, Homo sapiens
atccttagccagaga

SEQ ID NO: 1823392 - DNA, 15 bp, Homo sapiens
tccttagccagagaa

SEQ ID NO: 1823393 - DNA, 15 bp, Homo sapiens
ccttagccagagaac

SEQ ID NO: 1823394 - DNA, 15 bp, Homo sapiens
cttagccagagaact

SEQ ID NO: 1823395 - DNA, 15 bp, Homo sapiens
ttagccagagaactc

SEQ ID NO: 1823396 - DNA, 15 bp, Homo sapiens
tagccagagaactct

SEQ ID NO: 1823397 - DNA, 15 bp, Homo sapiens
agccagagaactctc

SEQ ID NO: 1823398 - DNA, 15 bp, Homo sapiens
gccagagaactctct

SEQ ID NO: 1823399 - DNA, 15 bp, Homo sapiens
ccagagaactctctg

SEQ ID NO: 1823400 - DNA, 15 bp, Homo sapiens
cagagaactctctgg

SEQ ID NO: 1823401 - DNA, 15 bp, Homo sapiens
agagaactctctgga

SEQ ID NO: 1823402 - DNA, 15 bp, Homo sapiens
gagaactctctggaa

SEQ ID NO: 1823403 - DNA, 15 bp, Homo sapiens
agaactctctggaac

SEQ ID NO: 1823404 - DNA, 15 bp, Homo sapiens
gaactctctggaacc

SEQ ID NO: 1823405 - DNA, 15 bp, Homo sapiens
aactctctggaacca

SEQ ID NO: 1823406 - DNA, 15 bp, Homo sapiens
actctctggaaccat

SEQ ID NO: 1823407 - DNA, 15 bp, Homo sapiens
ctctctggaaccatt

SEQ ID NO: 1823408 - DNA, 15 bp, Homo sapiens
tctctggaaccatta

SEQ ID NO: 1823409 - DNA, 15 bp, Homo sapiens
ctctggaaccattaa

SEQ ID NO: 1823410 - DNA, 15 bp, Homo sapiens
tctggaaccattaaa

SEQ ID NO: 1823411 - DNA, 15 bp, Homo sapiens
ctggaaccattaaag

SEQ ID NO: 1823412 - DNA, 15 bp, Homo sapiens
tggaaccattaaaga

SEQ ID NO: 1823413 - DNA, 15 bp, Homo sapiens
ggaaccattaaagag

SEQ ID NO: 1823414 - DNA, 15 bp, Homo sapiens
gaaccattaaagaga

SEQ ID NO: 1823415 - DNA, 15 bp, Homo sapiens
aaccattaaagagat

SEQ ID NO: 1823416 - DNA, 15 bp, Homo sapiens
accattaaagagatc

SEQ ID NO: 1823417 - DNA, 15 bp, Homo sapiens
ccattaaagagatcc

SEQ ID NO: 1823418 - DNA, 15 bp, Homo sapiens
cattaaagagatcct

SEQ ID NO: 1823419 - DNA, 15 bp, Homo sapiens
attaaagagatcctg

SEQ ID NO: 1823420 - DNA, 15 bp, Homo sapiens
ttaaagagatcctgg

SEQ ID NO: 1823421 - DNA, 15 bp, Homo sapiens
taaagagatcctggg

SEQ ID NO: 1823422 - DNA, 15 bp, Homo sapiens
aaagagatcctgggg

SEQ ID NO: 1823423 - DNA, 15 bp, Homo sapiens
aagagatcctgggga

SEQ ID NO: 1823424 - DNA, 15 bp, Homo sapiens
agagatcctggggac

SEQ ID NO: 1823425 - DNA, 15 bp, Homo sapiens
gagatcctggggact

SEQ ID NO: 1823426 - DNA, 15 bp, Homo sapiens
agatcctggggactg

SEQ ID NO: 1823427 - DNA, 15 bp, Homo sapiens
gatcctggggactgc

SEQ ID NO: 1823428 - DNA, 15 bp, Homo sapiens
atcctggggactgcc

SEQ ID NO: 1823429 - DNA, 15 bp, Homo sapiens
tcctggggactgccc

SEQ ID NO: 1823430 - DNA, 15 bp, Homo sapiens
cctggggactgccca

SEQ ID NO: 1823431 - DNA, 15 bp, Homo sapiens
ctggggactgcccag

SEQ ID NO: 1823432 - DNA, 15 bp, Homo sapiens
tggggactgcccagt

SEQ ID NO: 1823433 - DNA, 15 bp, Homo sapiens
ggggactgcccagtc

SEQ ID NO: 1823434 - DNA, 15 bp, Homo sapiens
gggactgcccagtct

SEQ ID NO: 1823435 - DNA, 15 bp, Homo sapiens
ggactgcccagtctg

SEQ ID NO: 1823436 - DNA, 15 bp, Homo sapiens
gactgcccagtctgt

SEQ ID NO: 1823437 - DNA, 15 bp, Homo sapiens
actgcccagtctgtg

SEQ ID NO: 1823438 - DNA, 15 bp, Homo sapiens
ctgcccagtctgtgg

SEQ ID NO: 1823439 - DNA, 15 bp, Homo sapiens
tgcccagtctgtggg

SEQ ID NO: 1823440 - DNA, 15 bp, Homo sapiens
gcccagtctgtgggc

SEQ ID NO: 1823441 - DNA, 15 bp, Homo sapiens
cccagtctgtgggct

SEQ ID NO: 1823442 - DNA, 15 bp, Homo sapiens
ccagtctgtgggctg

SEQ ID NO: 1823443 - DNA, 15 bp, Homo sapiens
cagtctgtgggctgt

SEQ ID NO: 1823444 - DNA, 15 bp, Homo sapiens
agtctgtgggctgta

SEQ ID NO: 1823445 - DNA, 15 bp, Homo sapiens
gtctgtgggctgtaa

SEQ ID NO: 1823446 - DNA, 15 bp, Homo sapiens
tctgtgggctgtaat

SEQ ID NO: 1823447 - DNA, 15 bp, Homo sapiens
ctgtgggctgtaatg

SEQ ID NO: 1823448 - DNA, 15 bp, Homo sapiens
tgtgggctgtaatgt

SEQ ID NO: 1823449 - DNA, 15 bp, Homo sapiens
gtgggctgtaatgtt

SEQ ID NO: 1823450 - DNA, 15 bp, Homo sapiens
tgggctgtaatgttg

SEQ ID NO: 1823451 - DNA, 15 bp, Homo sapiens
gggctgtaatgttga

SEQ ID NO: 1823452 - DNA, 15 bp, Homo sapiens
ggctgtaatgttgat

SEQ ID NO: 1823453 - DNA, 15 bp, Homo sapiens
gctgtaatgttgatg

SEQ ID NO: 1823454 - DNA, 15 bp, Homo sapiens
ctgtaatgttgatgg

SEQ ID NO: 1823455 - DNA, 15 bp, Homo sapiens
tgtaatgttgatggc

SEQ ID NO: 1823456 - DNA, 15 bp, Homo sapiens
gtaatgttgatggcc

SEQ ID NO: 1823457 - DNA, 15 bp, Homo sapiens
taatgttgatggccg

SEQ ID NO: 1823458 - DNA, 15 bp, Homo sapiens
aatgttgatggccgc

SEQ ID NO: 1823459 - DNA, 15 bp, Homo sapiens
atgttgatggccgcc

SEQ ID NO: 1823460 - DNA, 15 bp, Homo sapiens
tgttgatggccgcca

SEQ ID NO: 1823461 - DNA, 15 bp, Homo sapiens
gttgatggccgccac

SEQ ID NO: 1823462 - DNA, 15 bp, Homo sapiens
ttgatggccgccact

SEQ ID NO: 1823463 - DNA, 15 bp, Homo sapiens
tgatggccgccactc

SEQ ID NO: 1823464 - DNA, 15 bp, Homo sapiens
gatggccgccactct

SEQ ID NO: 1823465 - DNA, 15 bp, Homo sapiens
atggccgccactctc

SEQ ID NO: 1823466 - DNA, 15 bp, Homo sapiens
tggccgccactctca

SEQ ID NO: 1823467 - DNA, 15 bp, Homo sapiens
ggccgccactctcat

SEQ ID NO: 1823468 - DNA, 15 bp, Homo sapiens
gccgccactctcatg

SEQ ID NO: 1823469 - DNA, 15 bp, Homo sapiens
ccgccactctcatga

SEQ ID NO: 1823470 - DNA, 15 bp, Homo sapiens
cgccactctcatgac

SEQ ID NO: 1823471 - DNA, 15 bp, Homo sapiens
gccactctcatgaca

SEQ ID NO: 1823472 - DNA, 15 bp, Homo sapiens
ccactctcatgacat

SEQ ID NO: 1823473 - DNA, 15 bp, Homo sapiens
cactctcatgacatc

SEQ ID NO: 1823474 - DNA, 15 bp, Homo sapiens
actctcatgacatca

SEQ ID NO: 1823475 - DNA, 15 bp, Homo sapiens
ctctcatgacatcat

SEQ ID NO: 1823476 - DNA, 15 bp, Homo sapiens
tctcatgacatcata

SEQ ID NO: 1823477 - DNA, 15 bp, Homo sapiens
ctcatgacatcatag

SEQ ID NO: 1823478 - DNA, 15 bp, Homo sapiens
tcatgacatcataga

SEQ ID NO: 1823479 - DNA, 15 bp, Homo sapiens
catgacatcatagat

SEQ ID NO: 1823480 - DNA, 15 bp, Homo sapiens
atgacatcatagatg

SEQ ID NO: 1823481 - DNA, 15 bp, Homo sapiens
tgacatcatagatga

SEQ ID NO: 1823482 - DNA, 15 bp, Homo sapiens
gacatcatagatgac

SEQ ID NO: 1823483 - DNA, 15 bp, Homo sapiens
acatcatagatgaca

SEQ ID NO: 1823484 - DNA, 15 bp, Homo sapiens
catcatagatgacat

SEQ ID NO: 1823485 - DNA, 15 bp, Homo sapiens
atcatagatgacatc

SEQ ID NO: 1823486 - DNA, 15 bp, Homo sapiens
tcatagatgacatca

SEQ ID NO: 1823487 - DNA, 15 bp, Homo sapiens
catagatgacatcaa

SEQ ID NO: 1823488 - DNA, 15 bp, Homo sapiens
atagatgacatcaac

SEQ ID NO: 1823489 - DNA, 15 bp, Homo sapiens
tagatgacatcaaca

SEQ ID NO: 1823490 - DNA, 15 bp, Homo sapiens
agatgacatcaacag

SEQ ID NO: 1823491 - DNA, 15 bp, Homo sapiens
gatgacatcaacagt

SEQ ID NO: 1823492 - DNA, 15 bp, Homo sapiens
atgacatcaacagtg

SEQ ID NO: 1823493 - DNA, 15 bp, Homo sapiens
tgacatcaacagtga

SEQ ID NO: 1823494 - DNA, 15 bp, Homo sapiens
gacatcaacagtgac

SEQ ID NO: 1823495 - DNA, 15 bp, Homo sapiens
acatcaacagtgaca

SEQ ID NO: 1823496 - DNA, 15 bp, Homo sapiens
catcaacagtgacaa

SEQ ID NO: 1823497 - DNA, 15 bp, Homo sapiens
atcaacagtgacaaa

SEQ ID NO: 1823498 - DNA, 15 bp, Homo sapiens
tcaacagtgacaaag

SEQ ID NO: 1823499 - DNA, 15 bp, Homo sapiens
caacagtgacaaagc

SEQ ID NO: 1823500 - DNA, 15 bp, Homo sapiens
aacagtgacaaagca

SEQ ID NO: 1823501 - DNA, 15 bp, Homo sapiens
acagtgacaaagcaa

SEQ ID NO: 1823502 - DNA, 15 bp, Homo sapiens
cagtgacaaagcaag

SEQ ID NO: 1823503 - DNA, 15 bp, Homo sapiens
agtgacaaagcaaga

SEQ ID NO: 1823504 - DNA, 15 bp, Homo sapiens
gtgacaaagcaagac

SEQ ID NO: 1823505 - DNA, 15 bp, Homo sapiens
tgacaaagcaagact

SEQ ID NO: 1823506 - DNA, 15 bp, Homo sapiens
gacaaagcaagactc

SEQ ID NO: 1823507 - DNA, 15 bp, Homo sapiens
acaaagcaagactcc

SEQ ID NO: 1823508 - DNA, 15 bp, Homo sapiens
caaagcaagactcca

SEQ ID NO: 1823509 - DNA, 15 bp, Homo sapiens
aaagcaagactccat

SEQ ID NO: 1823510 - DNA, 15 bp, Homo sapiens
aagcaagactccatc

SEQ ID NO: 1823511 - DNA, 15 bp, Homo sapiens
agactccatctcaac

SEQ ID NO: 1823512 - DNA, 15 bp, Homo sapiens
gactccatctcaaca

SEQ ID NO: 1823513 - DNA, 15 bp, Homo sapiens
actccatctcaacaa

SEQ ID NO: 1823514 - DNA, 15 bp, Homo sapiens
ctccatctcaacaaa

SEQ ID NO: 1823515 - DNA, 15 bp, Homo sapiens
tccatctcaacaaaa

SEQ ID NO: 1823516 - DNA, 15 bp, Homo sapiens
ccatctcaacaaaaa

SEQ ID NO: 1823517 - DNA, 15 bp, Homo sapiens
catctcaacaaaaaa

SEQ ID NO: 1823518 - DNA, 15 bp, Homo sapiens
atctcaacaaaaaaa

SEQ ID NO: 1823519 - DNA, 15 bp, Homo sapiens
tctcaacaaaaaaaa

SEQ ID NO: 1823520 - DNA, 15 bp, Homo sapiens
ctcaacaaaaaaaaa

SEQ ID NO: 1823521 - DNA, 15 bp, Homo sapiens
tcaacaaaaaaaaaa

SEQ ID NO: 1823522 - DNA, 15 bp, Homo sapiens
caacaaaaaaaaaaa

SEQ ID NO: 1823523 - DNA, 15 bp, Homo sapiens
aacaaaaaaaaaaag

SEQ ID NO: 1823524 - DNA, 15 bp, Homo sapiens
acaaaaaaaaaaaga

SEQ ID NO: 1823525 - DNA, 15 bp, Homo sapiens
caaaaaaaaaaagag

SEQ ID NO: 1823526 - DNA, 15 bp, Homo sapiens
aaaaaaaaagaggga

SEQ ID NO: 1823527 - DNA, 15 bp, Homo sapiens
aaaaaaaagagggag

SEQ ID NO: 1823528 - DNA, 15 bp, Homo sapiens
aaaaaaagagggaga

SEQ ID NO: 1823529 - DNA, 15 bp, Homo sapiens
aaaaaagagggagaa

SEQ ID NO: 1823530 - DNA, 15 bp, Homo sapiens
aaaaagagggagaaa

SEQ ID NO: 1823531 - DNA, 15 bp, Homo sapiens
aaaagagggagaaaa

SEQ ID NO: 1823532 - DNA, 15 bp, Homo sapiens
aaagagggagaaaaa

SEQ ID NO: 1823533 - DNA, 15 bp, Homo sapiens
aagagggagaaaaaa

SEQ ID NO: 1823534 - DNA, 15 bp, Homo sapiens
agagggagaaaaaaa

SEQ ID NO: 1823535 - DNA, 15 bp, Homo sapiens
gagggagaaaaaaaa

SEQ ID NO: 1823536 - DNA, 15 bp, Homo sapiens
agggagaaaaaaaaa

SEQ ID NO: 1823537 - DNA, 15 bp, Homo sapiens
gggagaaaaaaaaaa

SEQ ID NO: 1823538 - DNA, 15 bp, Homo sapiens
ggagaaaaaaaaaag

SEQ ID NO: 1823539 - DNA, 15 bp, Homo sapiens
gagaaaaaaaaaagt

SEQ ID NO: 1823540 - DNA, 15 bp, Homo sapiens
aaaaaaaaaagtctt

SEQ ID NO: 1823541 - DNA, 15 bp, Homo sapiens
aaaaaaaaagtcttg

SEQ ID NO: 1823542 - DNA, 15 bp, Homo sapiens
aaaaaaaagtcttgc

SEQ ID NO: 1823543 - DNA, 15 bp, Homo sapiens
aaaaaaagtcttgct

SEQ ID NO: 1823544 - DNA, 15 bp, Homo sapiens
aaaaaagtcttgctc

SEQ ID NO: 1823545 - DNA, 15 bp, Homo sapiens
aaaaagtcttgctct

SEQ ID NO: 1823546 - DNA, 15 bp, Homo sapiens
aaaagtcttgctctg

SEQ ID NO: 1823547 - DNA, 15 bp, Homo sapiens
aaagtcttgctctgt

SEQ ID NO: 1823548 - DNA, 15 bp, Homo sapiens
aagtcttgctctgtc

SEQ ID NO: 1823549 - DNA, 15 bp, Homo sapiens
aacctcctcctccct

SEQ ID NO: 1823550 - DNA, 15 bp, Homo sapiens
acctcctcctccctg

SEQ ID NO: 1823551 - DNA, 15 bp, Homo sapiens
cctcctcctccctgg

SEQ ID NO: 1823552 - DNA, 15 bp, Homo sapiens
ctcctcctccctggt

SEQ ID NO: 1823553 - DNA, 15 bp, Homo sapiens
tcctcctccctggtt

SEQ ID NO: 1823554 - DNA, 15 bp, Homo sapiens
cctcctccctggttc

SEQ ID NO: 1823555 - DNA, 15 bp, Homo sapiens
ctcctccctggttca

SEQ ID NO: 1823556 - DNA, 15 bp, Homo sapiens
tcctccctggttcaa

SEQ ID NO: 1823557 - DNA, 15 bp, Homo sapiens
cctccctggttcaag

SEQ ID NO: 1823558 - DNA, 15 bp, Homo sapiens
ctccctggttcaagt

SEQ ID NO: 1823559 - DNA, 15 bp, Homo sapiens
tccctggttcaagtg

SEQ ID NO: 1823560 - DNA, 15 bp, Homo sapiens
ccctggttcaagtga

SEQ ID NO: 1823561 - DNA, 15 bp, Homo sapiens
cctggttcaagtgat

SEQ ID NO: 1823562 - DNA, 15 bp, Homo sapiens
ctggttcaagtgatt

SEQ ID NO: 1823563 - DNA, 15 bp, Homo sapiens
tggttcaagtgattc

SEQ ID NO: 1823564 - DNA, 15 bp, Homo sapiens
ctcctgagtagctgt

SEQ ID NO: 1823565 - DNA, 15 bp, Homo sapiens
tcctgagtagctgtg

SEQ ID NO: 1823566 - DNA, 15 bp, Homo sapiens
cctgagtagctgtga

SEQ ID NO: 1823567 - DNA, 15 bp, Homo sapiens
ctgagtagctgtgat

SEQ ID NO: 1823568 - DNA, 15 bp, Homo sapiens
tgagtagctgtgatt

SEQ ID NO: 1823569 - DNA, 15 bp, Homo sapiens
gagtagctgtgatta

SEQ ID NO: 1823570 - DNA, 15 bp, Homo sapiens
agctgtgattacaga

SEQ ID NO: 1823571 - DNA, 15 bp, Homo sapiens
gctgtgattacagat

SEQ ID NO: 1823572 - DNA, 15 bp, Homo sapiens
ctgtgattacagatg

SEQ ID NO: 1823573 - DNA, 15 bp, Homo sapiens
tgtgattacagatgc

SEQ ID NO: 1823574 - DNA, 15 bp, Homo sapiens
gtgattacagatgcc

SEQ ID NO: 1823575 - DNA, 15 bp, Homo sapiens
tgattacagatgccc

SEQ ID NO: 1823576 - DNA, 15 bp, Homo sapiens
gattacagatgccca

SEQ ID NO: 1823577 - DNA, 15 bp, Homo sapiens
attacagatgcccac

SEQ ID NO: 1823578 - DNA, 15 bp, Homo sapiens
ttacagatgcccacc

SEQ ID NO: 1823579 - DNA, 15 bp, Homo sapiens
tacagatgcccacca

SEQ ID NO: 1823580 - DNA, 15 bp, Homo sapiens
acagatgcccaccac

SEQ ID NO: 1823581 - DNA, 15 bp, Homo sapiens
cagatgcccaccacc

SEQ ID NO: 1823582 - DNA, 15 bp, Homo sapiens
agatgcccaccacca

SEQ ID NO: 1823583 - DNA, 15 bp, Homo sapiens
gatgcccaccaccat

SEQ ID NO: 1823584 - DNA, 15 bp, Homo sapiens
atgcccaccaccatg

SEQ ID NO: 1823585 - DNA, 15 bp, Homo sapiens
tgcccaccaccatgc

SEQ ID NO: 1823586 - DNA, 15 bp, Homo sapiens
gcccaccaccatgcc

SEQ ID NO: 1823587 - DNA, 15 bp, Homo sapiens
cccaccaccatgccc

SEQ ID NO: 1823588 - DNA, 15 bp, Homo sapiens
ccaccaccatgccca

SEQ ID NO: 1823589 - DNA, 15 bp, Homo sapiens
tagagacggagtttt

SEQ ID NO: 1823590 - DNA, 15 bp, Homo sapiens
agagacggagttttg

SEQ ID NO: 1823591 - DNA, 15 bp, Homo sapiens
agacggagttttgcc

SEQ ID NO: 1823592 - DNA, 15 bp, Homo sapiens
gacggagttttgcca

SEQ ID NO: 1823593 - DNA, 15 bp, Homo sapiens
acggagttttgccat

SEQ ID NO: 1823594 - DNA, 15 bp, Homo sapiens
cggagttttgccatg

SEQ ID NO: 1823595 - DNA, 15 bp, Homo sapiens
ggagttttgccatgt

SEQ ID NO: 1823596 - DNA, 15 bp, Homo sapiens
gagttttgccatgtt

SEQ ID NO: 1823597 - DNA, 15 bp, Homo sapiens
agttttgccatgttg

SEQ ID NO: 1823598 - DNA, 15 bp, Homo sapiens
acctcaagtgatttt

SEQ ID NO: 1823599 - DNA, 15 bp, Homo sapiens
cctcaagtgattttg

SEQ ID NO: 1823600 - DNA, 15 bp, Homo sapiens
ctcaagtgattttgc

SEQ ID NO: 1823601 - DNA, 15 bp, Homo sapiens
tcaagtgattttgct

SEQ ID NO: 1823602 - DNA, 15 bp, Homo sapiens
caagtgattttgctc

SEQ ID NO: 1823603 - DNA, 15 bp, Homo sapiens
aagtgattttgctcg

SEQ ID NO: 1823604 - DNA, 15 bp, Homo sapiens
agtgattttgctcgc

SEQ ID NO: 1823605 - DNA, 15 bp, Homo sapiens
gtgattttgctcgcc

SEQ ID NO: 1823606 - DNA, 15 bp, Homo sapiens
tgattttgctcgcct

SEQ ID NO: 1823607 - DNA, 15 bp, Homo sapiens
gattttgctcgcctc

SEQ ID NO: 1823608 - DNA, 15 bp, Homo sapiens
attttgctcgcctcg

SEQ ID NO: 1823609 - DNA, 15 bp, Homo sapiens
ttttgctcgcctcgg

SEQ ID NO: 1823610 - DNA, 15 bp, Homo sapiens
tttgctcgcctcggc

SEQ ID NO: 1823611 - DNA, 15 bp, Homo sapiens
ttgctcgcctcggcc

SEQ ID NO: 1823612 - DNA, 15 bp, Homo sapiens
tgctcgcctcggcct

SEQ ID NO: 1823613 - DNA, 15 bp, Homo sapiens
gctcgcctcggcctc

SEQ ID NO: 1823614 - DNA, 15 bp, Homo sapiens
ctcgcctcggcctcc

SEQ ID NO: 1823615 - DNA, 15 bp, Homo sapiens
tcgcctcggcctccc

SEQ ID NO: 1823616 - DNA, 15 bp, Homo sapiens
ctcggcctcccaaaa

SEQ ID NO: 1823617 - DNA, 15 bp, Homo sapiens
tcggcctcccaaaat

SEQ ID NO: 1823618 - DNA, 15 bp, Homo sapiens
cggcctcccaaaatg

SEQ ID NO: 1823619 - DNA, 15 bp, Homo sapiens
cctcccaaaatgcta

SEQ ID NO: 1823620 - DNA, 15 bp, Homo sapiens
ctcccaaaatgctag

SEQ ID NO: 1823621 - DNA, 15 bp, Homo sapiens
tcccaaaatgctagg

SEQ ID NO: 1823622 - DNA, 15 bp, Homo sapiens
cccaaaatgctagga

SEQ ID NO: 1823623 - DNA, 15 bp, Homo sapiens
ccaaaatgctaggat

SEQ ID NO: 1823624 - DNA, 15 bp, Homo sapiens
caaaatgctaggatt

SEQ ID NO: 1823625 - DNA, 15 bp, Homo sapiens
aaaatgctaggatta

SEQ ID NO: 1823626 - DNA, 15 bp, Homo sapiens
aaatgctaggattac

SEQ ID NO: 1823627 - DNA, 15 bp, Homo sapiens
aatgctaggattaca

SEQ ID NO: 1823628 - DNA, 15 bp, Homo sapiens
atgctaggattacag

SEQ ID NO: 1823629 - DNA, 15 bp, Homo sapiens
ctaggattacaggcc

SEQ ID NO: 1823630 - DNA, 15 bp, Homo sapiens
taggattacaggccg

SEQ ID NO: 1823631 - DNA, 15 bp, Homo sapiens
aggattacaggccgt

SEQ ID NO: 1823632 - DNA, 15 bp, Homo sapiens
ggattacaggccgtg

SEQ ID NO: 1823633 - DNA, 15 bp, Homo sapiens
gattacaggccgtgc

SEQ ID NO: 1823634 - DNA, 15 bp, Homo sapiens
attacaggccgtgcc

SEQ ID NO: 1823635 - DNA, 15 bp, Homo sapiens
ttacaggccgtgcct

SEQ ID NO: 1823636 - DNA, 15 bp, Homo sapiens
tacaggccgtgcctg

SEQ ID NO: 1823637 - DNA, 15 bp, Homo sapiens
acaggccgtgcctgg

SEQ ID NO: 1823638 - DNA, 15 bp, Homo sapiens
caggccgtgcctggc

SEQ ID NO: 1823639 - DNA, 15 bp, Homo sapiens
aggccgtgcctggcc

SEQ ID NO: 1823640 - DNA, 15 bp, Homo sapiens
ggccgtgcctggcca

SEQ ID NO: 1823641 - DNA, 15 bp, Homo sapiens
gccgtgcctggccag

SEQ ID NO: 1823642 - DNA, 15 bp, Homo sapiens
ccgtgcctggccagt

SEQ ID NO: 1823643 - DNA, 15 bp, Homo sapiens
cgtgcctggccagtt

SEQ ID NO: 1823644 - DNA, 15 bp, Homo sapiens
gtgcctggccagttc

SEQ ID NO: 1823645 - DNA, 15 bp, Homo sapiens
tgcctggccagttcc

SEQ ID NO: 1823646 - DNA, 15 bp, Homo sapiens
gcctggccagttcct

SEQ ID NO: 1823647 - DNA, 15 bp, Homo sapiens
cctggccagttcctt

SEQ ID NO: 1823648 - DNA, 15 bp, Homo sapiens
ctggccagttcctta

SEQ ID NO: 1823649 - DNA, 15 bp, Homo sapiens
tggccagttccttac

SEQ ID NO: 1823650 - DNA, 15 bp, Homo sapiens
ggccagttccttact

SEQ ID NO: 1823651 - DNA, 15 bp, Homo sapiens
gccagttccttacta

SEQ ID NO: 1823652 - DNA, 15 bp, Homo sapiens
ccagttccttactat

SEQ ID NO: 1823653 - DNA, 15 bp, Homo sapiens
cagttccttactatt

SEQ ID NO: 1823654 - DNA, 15 bp, Homo sapiens
agttccttactattt

SEQ ID NO: 1823655 - DNA, 15 bp, Homo sapiens
gttccttactatttt

SEQ ID NO: 1823656 - DNA, 15 bp, Homo sapiens
ttccttactattttg

SEQ ID NO: 1823657 - DNA, 15 bp, Homo sapiens
tccttactattttga

SEQ ID NO: 1823658 - DNA, 15 bp, Homo sapiens
ccttactattttgat

SEQ ID NO: 1823659 - DNA, 15 bp, Homo sapiens
cttactattttgatg

SEQ ID NO: 1823660 - DNA, 15 bp, Homo sapiens
ttactattttgatgg

SEQ ID NO: 1823661 - DNA, 15 bp, Homo sapiens
tactattttgatggg

SEQ ID NO: 1823662 - DNA, 15 bp, Homo sapiens
actattttgatgggt

SEQ ID NO: 1823663 - DNA, 15 bp, Homo sapiens
ctattttgatgggtg

SEQ ID NO: 1823664 - DNA, 15 bp, Homo sapiens
tattttgatgggtga

SEQ ID NO: 1823665 - DNA, 15 bp, Homo sapiens
attttgatgggtgaa

SEQ ID NO: 1823666 - DNA, 15 bp, Homo sapiens
ttttgatgggtgaaa

SEQ ID NO: 1823667 - DNA, 15 bp, Homo sapiens
tttgatgggtgaaaa

SEQ ID NO: 1823668 - DNA, 15 bp, Homo sapiens
ttgatgggtgaaaac

SEQ ID NO: 1823669 - DNA, 15 bp, Homo sapiens
tgatgggtgaaaact

SEQ ID NO: 1823670 - DNA, 15 bp, Homo sapiens
gatgggtgaaaactg

SEQ ID NO: 1823671 - DNA, 15 bp, Homo sapiens
atgggtgaaaactga

SEQ ID NO: 1823672 - DNA, 15 bp, Homo sapiens
tgggtgaaaactgac

SEQ ID NO: 1823673 - DNA, 15 bp, Homo sapiens
gggtgaaaactgaca

SEQ ID NO: 1823674 - DNA, 15 bp, Homo sapiens
ggtgaaaactgacat

SEQ ID NO: 1823675 - DNA, 15 bp, Homo sapiens
gtgaaaactgacatt

SEQ ID NO: 1823676 - DNA, 15 bp, Homo sapiens
tgaaaactgacattt

SEQ ID NO: 1823677 - DNA, 15 bp, Homo sapiens
aaaactgacattttg

SEQ ID NO: 1823678 - DNA, 15 bp, Homo sapiens
aaactgacattttgt

SEQ ID NO: 1823679 - DNA, 15 bp, Homo sapiens
aactgacattttgtt

SEQ ID NO: 1823680 - DNA, 15 bp, Homo sapiens
actgacattttgtta

SEQ ID NO: 1823681 - DNA, 15 bp, Homo sapiens
ctgacattttgttat

SEQ ID NO: 1823682 - DNA, 15 bp, Homo sapiens
tgacattttgttata

SEQ ID NO: 1823683 - DNA, 15 bp, Homo sapiens
gacattttgttatag

SEQ ID NO: 1823684 - DNA, 15 bp, Homo sapiens
acattttgttatagg

SEQ ID NO: 1823685 - DNA, 15 bp, Homo sapiens
cattttgttataggt

SEQ ID NO: 1823686 - DNA, 15 bp, Homo sapiens
attttgttataggtt

SEQ ID NO: 1823687 - DNA, 15 bp, Homo sapiens
ttttgttataggtta

SEQ ID NO: 1823688 - DNA, 15 bp, Homo sapiens
tttgttataggttaa

SEQ ID NO: 1823689 - DNA, 15 bp, Homo sapiens
ttgttataggttaat

SEQ ID NO: 1823690 - DNA, 15 bp, Homo sapiens
tgttataggttaatg

SEQ ID NO: 1823691 - DNA, 15 bp, Homo sapiens
gttataggttaatgc

SEQ ID NO: 1823692 - DNA, 15 bp, Homo sapiens
ttataggttaatgca

SEQ ID NO: 1823693 - DNA, 15 bp, Homo sapiens
tataggttaatgcat

SEQ ID NO: 1823694 - DNA, 15 bp, Homo sapiens
ataggttaatgcata

SEQ ID NO: 1823695 - DNA, 15 bp, Homo sapiens
taggttaatgcatag

SEQ ID NO: 1823696 - DNA, 15 bp, Homo sapiens
aggttaatgcatagt

SEQ ID NO: 1823697 - DNA, 15 bp, Homo sapiens
ggttaatgcatagtt

SEQ ID NO: 1823698 - DNA, 15 bp, Homo sapiens
gttaatgcatagttg

SEQ ID NO: 1823699 - DNA, 15 bp, Homo sapiens
ttaatgcatagttgt

SEQ ID NO: 1823700 - DNA, 15 bp, Homo sapiens
taatgcatagttgtg

SEQ ID NO: 1823701 - DNA, 15 bp, Homo sapiens
aatgcatagttgtgt

SEQ ID NO: 1823702 - DNA, 15 bp, Homo sapiens
atgcatagttgtgta

SEQ ID NO: 1823703 - DNA, 15 bp, Homo sapiens
tgcatagttgtgtat

SEQ ID NO: 1823704 - DNA, 15 bp, Homo sapiens
gcatagttgtgtatt

SEQ ID NO: 1823705 - DNA, 15 bp, Homo sapiens
catagttgtgtattt

SEQ ID NO: 1823706 - DNA, 15 bp, Homo sapiens
atagttgtgtattta

SEQ ID NO: 1823707 - DNA, 15 bp, Homo sapiens
tagttgtgtatttat

SEQ ID NO: 1823708 - DNA, 15 bp, Homo sapiens
agttgtgtatttatg

SEQ ID NO: 1823709 - DNA, 15 bp, Homo sapiens
gttgtgtatttatga

SEQ ID NO: 1823710 - DNA, 15 bp, Homo sapiens
ttgtgtatttatgag

SEQ ID NO: 1823711 - DNA, 15 bp, Homo sapiens
tgtgtatttatgagt

SEQ ID NO: 1823712 - DNA, 15 bp, Homo sapiens
gtgtatttatgagtg

SEQ ID NO: 1823713 - DNA, 15 bp, Homo sapiens
tgtatttatgagtga

SEQ ID NO: 1823714 - DNA, 15 bp, Homo sapiens
gtatttatgagtgag

SEQ ID NO: 1823715 - DNA, 15 bp, Homo sapiens
tatttatgagtgagg

SEQ ID NO: 1823716 - DNA, 15 bp, Homo sapiens
atttatgagtgaggt

SEQ ID NO: 1823717 - DNA, 15 bp, Homo sapiens
tttatgagtgaggtt

SEQ ID NO: 1823718 - DNA, 15 bp, Homo sapiens
ttatgagtgaggttt

SEQ ID NO: 1823719 - DNA, 15 bp, Homo sapiens
tatgagtgaggtttt

SEQ ID NO: 1823720 - DNA, 15 bp, Homo sapiens
atgagtgaggtttta

SEQ ID NO: 1823721 - DNA, 15 bp, Homo sapiens
tgagtgaggttttac

SEQ ID NO: 1823722 - DNA, 15 bp, Homo sapiens
gagtgaggttttaca

SEQ ID NO: 1823723 - DNA, 15 bp, Homo sapiens
agtgaggttttacaa

SEQ ID NO: 1823724 - DNA, 15 bp, Homo sapiens
gtgaggttttacaac

SEQ ID NO: 1823725 - DNA, 15 bp, Homo sapiens
tgaggttttacaact

SEQ ID NO: 1823726 - DNA, 15 bp, Homo sapiens
gaggttttacaactt

SEQ ID NO: 1823727 - DNA, 15 bp, Homo sapiens
aggttttacaacttt

SEQ ID NO: 1823728 - DNA, 15 bp, Homo sapiens
ggttttacaactttc

SEQ ID NO: 1823729 - DNA, 15 bp, Homo sapiens
gttttacaactttca

SEQ ID NO: 1823730 - DNA, 15 bp, Homo sapiens
ttttacaactttcat

SEQ ID NO: 1823731 - DNA, 15 bp, Homo sapiens
tttacaactttcata

SEQ ID NO: 1823732 - DNA, 15 bp, Homo sapiens
ttacaactttcatat

SEQ ID NO: 1823733 - DNA, 15 bp, Homo sapiens
tacaactttcatatg

SEQ ID NO: 1823734 - DNA, 15 bp, Homo sapiens
acaactttcatatgt

SEQ ID NO: 1823735 - DNA, 15 bp, Homo sapiens
caactttcatatgtt

SEQ ID NO: 1823736 - DNA, 15 bp, Homo sapiens
aactttcatatgttt

SEQ ID NO: 1823737 - DNA, 15 bp, Homo sapiens
actttcatatgttta

SEQ ID NO: 1823738 - DNA, 15 bp, Homo sapiens
ctttcatatgtttaa

SEQ ID NO: 1823739 - DNA, 15 bp, Homo sapiens
tttcatatgtttaaa

SEQ ID NO: 1823740 - DNA, 15 bp, Homo sapiens
ttcatatgtttaaaa

SEQ ID NO: 1823741 - DNA, 15 bp, Homo sapiens
tcatatgtttaaaag

SEQ ID NO: 1823742 - DNA, 15 bp, Homo sapiens
catatgtttaaaagc

SEQ ID NO: 1823743 - DNA, 15 bp, Homo sapiens
atatgtttaaaagcc

SEQ ID NO: 1823744 - DNA, 15 bp, Homo sapiens
tatgtttaaaagcca

SEQ ID NO: 1823745 - DNA, 15 bp, Homo sapiens
atgtttaaaagccac

SEQ ID NO: 1823746 - DNA, 15 bp, Homo sapiens
tgtttaaaagccact

SEQ ID NO: 1823747 - DNA, 15 bp, Homo sapiens
gtttaaaagccactt

SEQ ID NO: 1823748 - DNA, 15 bp, Homo sapiens
tttaaaagccacttg

SEQ ID NO: 1823749 - DNA, 15 bp, Homo sapiens
ttaaaagccacttgt

SEQ ID NO: 1823750 - DNA, 15 bp, Homo sapiens
taaaagccacttgtg

SEQ ID NO: 1823751 - DNA, 15 bp, Homo sapiens
aaaagccacttgtgt

SEQ ID NO: 1823752 - DNA, 15 bp, Homo sapiens
aaagccacttgtgtc

SEQ ID NO: 1823753 - DNA, 15 bp, Homo sapiens
aagccacttgtgtcc

SEQ ID NO: 1823754 - DNA, 15 bp, Homo sapiens
agccacttgtgtcct

SEQ ID NO: 1823755 - DNA, 15 bp, Homo sapiens
gccacttgtgtccta

SEQ ID NO: 1823756 - DNA, 15 bp, Homo sapiens
ccacttgtgtcctat

SEQ ID NO: 1823757 - DNA, 15 bp, Homo sapiens
cacttgtgtcctatt

SEQ ID NO: 1823758 - DNA, 15 bp, Homo sapiens
acttgtgtcctattt

SEQ ID NO: 1823759 - DNA, 15 bp, Homo sapiens
cttgtgtcctatttt

SEQ ID NO: 1823760 - DNA, 15 bp, Homo sapiens
ttgtgtcctattttc

SEQ ID NO: 1823761 - DNA, 15 bp, Homo sapiens
tgtgtcctattttct

SEQ ID NO: 1823762 - DNA, 15 bp, Homo sapiens
gtgtcctattttctg

SEQ ID NO: 1823763 - DNA, 15 bp, Homo sapiens
tgtcctattttctgt

SEQ ID NO: 1823764 - DNA, 15 bp, Homo sapiens
gtcctattttctgtg

SEQ ID NO: 1823765 - DNA, 15 bp, Homo sapiens
tcctattttctgtga

SEQ ID NO: 1823766 - DNA, 15 bp, Homo sapiens
cctattttctgtgaa

SEQ ID NO: 1823767 - DNA, 15 bp, Homo sapiens
ctattttctgtgaac

SEQ ID NO: 1823768 - DNA, 15 bp, Homo sapiens
tattttctgtgaact

SEQ ID NO: 1823769 - DNA, 15 bp, Homo sapiens
attttctgtgaactg

SEQ ID NO: 1823770 - DNA, 15 bp, Homo sapiens
ttttctgtgaactga

SEQ ID NO: 1823771 - DNA, 15 bp, Homo sapiens
tttctgtgaactgaa

SEQ ID NO: 1823772 - DNA, 15 bp, Homo sapiens
ttctgtgaactgaac

SEQ ID NO: 1823773 - DNA, 15 bp, Homo sapiens
tctgtgaactgaact

SEQ ID NO: 1823774 - DNA, 15 bp, Homo sapiens
ctgtgaactgaactc

SEQ ID NO: 1823775 - DNA, 15 bp, Homo sapiens
tgtgaactgaactct

SEQ ID NO: 1823776 - DNA, 15 bp, Homo sapiens
gtgaactgaactctt

SEQ ID NO: 1823777 - DNA, 15 bp, Homo sapiens
tgaactgaactcttc

SEQ ID NO: 1823778 - DNA, 15 bp, Homo sapiens
gaactgaactcttca

SEQ ID NO: 1823779 - DNA, 15 bp, Homo sapiens
aactgaactcttcat

SEQ ID NO: 1823780 - DNA, 15 bp, Homo sapiens
actgaactcttcatt

SEQ ID NO: 1823781 - DNA, 15 bp, Homo sapiens
ctgaactcttcattt

SEQ ID NO: 1823782 - DNA, 15 bp, Homo sapiens
gaactcttcatttcc

SEQ ID NO: 1823783 - DNA, 15 bp, Homo sapiens
aactcttcatttcca

SEQ ID NO: 1823784 - DNA, 15 bp, Homo sapiens
actcttcatttccaa

SEQ ID NO: 1823785 - DNA, 15 bp, Homo sapiens
ctcttcatttccaac

SEQ ID NO: 1823786 - DNA, 15 bp, Homo sapiens
tcttcatttccaact

SEQ ID NO: 1823787 - DNA, 15 bp, Homo sapiens
cttcatttccaacta

SEQ ID NO: 1823788 - DNA, 15 bp, Homo sapiens
ttcatttccaactac

SEQ ID NO: 1823789 - DNA, 15 bp, Homo sapiens
tcatttccaactacg

SEQ ID NO: 1823790 - DNA, 15 bp, Homo sapiens
catttccaactacgc

SEQ ID NO: 1823791 - DNA, 15 bp, Homo sapiens
atttccaactacgct

SEQ ID NO: 1823792 - DNA, 15 bp, Homo sapiens
tttccaactacgcta

SEQ ID NO: 1823793 - DNA, 15 bp, Homo sapiens
ttccaactacgctat

SEQ ID NO: 1823794 - DNA, 15 bp, Homo sapiens
tccaactacgctatc

SEQ ID NO: 1823795 - DNA, 15 bp, Homo sapiens
ccaactacgctatca

SEQ ID NO: 1823796 - DNA, 15 bp, Homo sapiens
caactacgctatcaa

SEQ ID NO: 1823797 - DNA, 15 bp, Homo sapiens
aactacgctatcaat

SEQ ID NO: 1823798 - DNA, 15 bp, Homo sapiens
actacgctatcaatc

SEQ ID NO: 1823799 - DNA, 15 bp, Homo sapiens
ctacgctatcaatct

SEQ ID NO: 1823800 - DNA, 15 bp, Homo sapiens
tacgctatcaatctt

SEQ ID NO: 1823801 - DNA, 15 bp, Homo sapiens
acgctatcaatcttt

SEQ ID NO: 1823802 - DNA, 15 bp, Homo sapiens
cgctatcaatctttt

SEQ ID NO: 1823803 - DNA, 15 bp, Homo sapiens
gctatcaatcttttt

SEQ ID NO: 1823804 - DNA, 15 bp, Homo sapiens
ctatcaatctttttc

SEQ ID NO: 1823805 - DNA, 15 bp, Homo sapiens
tatcaatctttttct

SEQ ID NO: 1823806 - DNA, 15 bp, Homo sapiens
atcaatctttttctt

SEQ ID NO: 1823807 - DNA, 15 bp, Homo sapiens
tcaatctttttctta

SEQ ID NO: 1823808 - DNA, 15 bp, Homo sapiens
caatctttttcttac

SEQ ID NO: 1823809 - DNA, 15 bp, Homo sapiens
aatctttttcttact

SEQ ID NO: 1823810 - DNA, 15 bp, Homo sapiens
atctttttcttactg

SEQ ID NO: 1823811 - DNA, 15 bp, Homo sapiens
tctttttcttactga

SEQ ID NO: 1823812 - DNA, 15 bp, Homo sapiens
ctttttcttactgat

SEQ ID NO: 1823813 - DNA, 15 bp, Homo sapiens
tttttcttactgatt

SEQ ID NO: 1823814 - DNA, 15 bp, Homo sapiens
ttttcttactgatta

SEQ ID NO: 1823815 - DNA, 15 bp, Homo sapiens
tttcttactgattaa

SEQ ID NO: 1823816 - DNA, 15 bp, Homo sapiens
ttcttactgattaat

SEQ ID NO: 1823817 - DNA, 15 bp, Homo sapiens
tcttactgattaatg

SEQ ID NO: 1823818 - DNA, 15 bp, Homo sapiens
cttactgattaatga

SEQ ID NO: 1823819 - DNA, 15 bp, Homo sapiens
ttactgattaatgag

SEQ ID NO: 1823820 - DNA, 15 bp, Homo sapiens
tactgattaatgaga

SEQ ID NO: 1823821 - DNA, 15 bp, Homo sapiens
actgattaatgagag

SEQ ID NO: 1823822 - DNA, 15 bp, Homo sapiens
ctgattaatgagagt

SEQ ID NO: 1823823 - DNA, 15 bp, Homo sapiens
tgattaatgagagtc

SEQ ID NO: 1823824 - DNA, 15 bp, Homo sapiens
gattaatgagagtcc

SEQ ID NO: 1823825 - DNA, 15 bp, Homo sapiens
attaatgagagtcct

SEQ ID NO: 1823826 - DNA, 15 bp, Homo sapiens
ttaatgagagtcctt

SEQ ID NO: 1823827 - DNA, 15 bp, Homo sapiens
taatgagagtccttt

SEQ ID NO: 1823828 - DNA, 15 bp, Homo sapiens
aatgagagtccttta

SEQ ID NO: 1823829 - DNA, 15 bp, Homo sapiens
atgagagtcctttat

SEQ ID NO: 1823830 - DNA, 15 bp, Homo sapiens
tgagagtcctttata

SEQ ID NO: 1823831 - DNA, 15 bp, Homo sapiens
gagagtcctttataa

SEQ ID NO: 1823832 - DNA, 15 bp, Homo sapiens
agagtcctttataaa

SEQ ID NO: 1823833 - DNA, 15 bp, Homo sapiens
gagtcctttataaag

SEQ ID NO: 1823834 - DNA, 15 bp, Homo sapiens
agtcctttataaagg

SEQ ID NO: 1823835 - DNA, 15 bp, Homo sapiens
gtcctttataaagga

SEQ ID NO: 1823836 - DNA, 15 bp, Homo sapiens
tcctttataaaggaa

SEQ ID NO: 1823837 - DNA, 15 bp, Homo sapiens
cctttataaaggaaa

SEQ ID NO: 1823838 - DNA, 15 bp, Homo sapiens
ctttataaaggaaat

SEQ ID NO: 1823839 - DNA, 15 bp, Homo sapiens
tttataaaggaaata

SEQ ID NO: 1823840 - DNA, 15 bp, Homo sapiens
ttataaaggaaatat

SEQ ID NO: 1823841 - DNA, 15 bp, Homo sapiens
tataaaggaaatata

SEQ ID NO: 1823842 - DNA, 15 bp, Homo sapiens
ataaaggaaatatat

SEQ ID NO: 1823843 - DNA, 15 bp, Homo sapiens
taaaggaaatatatc

SEQ ID NO: 1823844 - DNA, 15 bp, Homo sapiens
aaaggaaatatatct

SEQ ID NO: 1823845 - DNA, 15 bp, Homo sapiens
aaggaaatatatctt

SEQ ID NO: 1823846 - DNA, 15 bp, Homo sapiens
aggaaatatatcttt

SEQ ID NO: 1823847 - DNA, 15 bp, Homo sapiens
ggaaatatatcttta

SEQ ID NO: 1823848 - DNA, 15 bp, Homo sapiens
gaaatatatctttat

SEQ ID NO: 1823849 - DNA, 15 bp, Homo sapiens
aaatatatctttatg

SEQ ID NO: 1823850 - DNA, 15 bp, Homo sapiens
aatatatctttatga

SEQ ID NO: 1823851 - DNA, 15 bp, Homo sapiens
atatatctttatgat

SEQ ID NO: 1823852 - DNA, 15 bp, Homo sapiens
tatatctttatgata

SEQ ID NO: 1823853 - DNA, 15 bp, Homo sapiens
atatctttatgatac

SEQ ID NO: 1823854 - DNA, 15 bp, Homo sapiens
tatctttatgatact

SEQ ID NO: 1823855 - DNA, 15 bp, Homo sapiens
atctttatgatactg

SEQ ID NO: 1823856 - DNA, 15 bp, Homo sapiens
tctttatgatactgt

SEQ ID NO: 1823857 - DNA, 15 bp, Homo sapiens
ctttatgatactgta

SEQ ID NO: 1823858 - DNA, 15 bp, Homo sapiens
tttatgatactgtac

SEQ ID NO: 1823859 - DNA, 15 bp, Homo sapiens
ttatgatactgtaca

SEQ ID NO: 1823860 - DNA, 15 bp, Homo sapiens
tatgatactgtacag

SEQ ID NO: 1823861 - DNA, 15 bp, Homo sapiens
atgatactgtacagt

SEQ ID NO: 1823862 - DNA, 15 bp, Homo sapiens
tgatactgtacagta

SEQ ID NO: 1823863 - DNA, 15 bp, Homo sapiens
gatactgtacagtag

SEQ ID NO: 1823864 - DNA, 15 bp, Homo sapiens
atactgtacagtaga

SEQ ID NO: 1823865 - DNA, 15 bp, Homo sapiens
tactgtacagtagag

SEQ ID NO: 1823866 - DNA, 15 bp, Homo sapiens
actgtacagtagagt

SEQ ID NO: 1823867 - DNA, 15 bp, Homo sapiens
ctgtacagtagagtt

SEQ ID NO: 1823868 - DNA, 15 bp, Homo sapiens
tgtacagtagagtta

SEQ ID NO: 1823869 - DNA, 15 bp, Homo sapiens
gtacagtagagttaa

SEQ ID NO: 1823870 - DNA, 15 bp, Homo sapiens
tacagtagagttaag

SEQ ID NO: 1823871 - DNA, 15 bp, Homo sapiens
acagtagagttaagt

SEQ ID NO: 1823872 - DNA, 15 bp, Homo sapiens
cagtagagttaagtt

SEQ ID NO: 1823873 - DNA, 15 bp, Homo sapiens
agtagagttaagttc

SEQ ID NO: 1823874 - DNA, 15 bp, Homo sapiens
gtagagttaagttca

SEQ ID NO: 1823875 - DNA, 15 bp, Homo sapiens
tagagttaagttcat

SEQ ID NO: 1823876 - DNA, 15 bp, Homo sapiens
agagttaagttcatt

SEQ ID NO: 1823877 - DNA, 15 bp, Homo sapiens
gagttaagttcattc

SEQ ID NO: 1823878 - DNA, 15 bp, Homo sapiens
agttaagttcattca

SEQ ID NO: 1823879 - DNA, 15 bp, Homo sapiens
gttaagttcattcag

SEQ ID NO: 1823880 - DNA, 15 bp, Homo sapiens
ttaagttcattcagt

SEQ ID NO: 1823881 - DNA, 15 bp, Homo sapiens
taagttcattcagtg

SEQ ID NO: 1823882 - DNA, 15 bp, Homo sapiens
aagttcattcagtgg

SEQ ID NO: 1823883 - DNA, 15 bp, Homo sapiens
agttcattcagtggg

SEQ ID NO: 1823884 - DNA, 15 bp, Homo sapiens
gttcattcagtgggt

SEQ ID NO: 1823885 - DNA, 15 bp, Homo sapiens
ttcattcagtgggtg

SEQ ID NO: 1823886 - DNA, 15 bp, Homo sapiens
tcattcagtgggtgg

SEQ ID NO: 1823887 - DNA, 15 bp, Homo sapiens
cattcagtgggtgga

SEQ ID NO: 1823888 - DNA, 15 bp, Homo sapiens
attcagtgggtggat

SEQ ID NO: 1823889 - DNA, 15 bp, Homo sapiens
ttcagtgggtggatt

SEQ ID NO: 1823890 - DNA, 15 bp, Homo sapiens
tcagtgggtggattc

SEQ ID NO: 1823891 - DNA, 15 bp, Homo sapiens
cagtgggtggattct

SEQ ID NO: 1823892 - DNA, 15 bp, Homo sapiens
agtgggtggattctg

SEQ ID NO: 1823893 - DNA, 15 bp, Homo sapiens
gtgggtggattctgc

SEQ ID NO: 1823894 - DNA, 15 bp, Homo sapiens
tgggtggattctgct

SEQ ID NO: 1823895 - DNA, 15 bp, Homo sapiens
gggtggattctgctg

SEQ ID NO: 1823896 - DNA, 15 bp, Homo sapiens
ggtggattctgctga

SEQ ID NO: 1823897 - DNA, 15 bp, Homo sapiens
gtggattctgctgat

SEQ ID NO: 1823898 - DNA, 15 bp, Homo sapiens
tggattctgctgata

SEQ ID NO: 1823899 - DNA, 15 bp, Homo sapiens
ggattctgctgataa

SEQ ID NO: 1823900 - DNA, 15 bp, Homo sapiens
gattctgctgataaa

SEQ ID NO: 1823901 - DNA, 15 bp, Homo sapiens
attctgctgataaaa

SEQ ID NO: 1823902 - DNA, 15 bp, Homo sapiens
ttctgctgataaaaa

SEQ ID NO: 1823903 - DNA, 15 bp, Homo sapiens
tctgctgataaaaac

SEQ ID NO: 1823904 - DNA, 15 bp, Homo sapiens
ctgctgataaaaacc

SEQ ID NO: 1823905 - DNA, 15 bp, Homo sapiens
tgctgataaaaacca

SEQ ID NO: 1823906 - DNA, 15 bp, Homo sapiens
gctgataaaaaccaa

SEQ ID NO: 1823907 - DNA, 15 bp, Homo sapiens
ctgataaaaaccaat

SEQ ID NO: 1823908 - DNA, 15 bp, Homo sapiens
tgataaaaaccaatg

SEQ ID NO: 1823909 - DNA, 15 bp, Homo sapiens
gataaaaaccaatgt

SEQ ID NO: 1823910 - DNA, 15 bp, Homo sapiens
ataaaaaccaatgtg

SEQ ID NO: 1823911 - DNA, 15 bp, Homo sapiens
taaaaaccaatgtga

SEQ ID NO: 1823912 - DNA, 15 bp, Homo sapiens
aaaaaccaatgtgaa

SEQ ID NO: 1823913 - DNA, 15 bp, Homo sapiens
aaaaccaatgtgaaa

SEQ ID NO: 1823914 - DNA, 15 bp, Homo sapiens
aaaccaatgtgaaaa

SEQ ID NO: 1823915 - DNA, 15 bp, Homo sapiens
aaccaatgtgaaaat

SEQ ID NO: 1823916 - DNA, 15 bp, Homo sapiens
accaatgtgaaaatc

SEQ ID NO: 1823917 - DNA, 15 bp, Homo sapiens
ccaatgtgaaaatca

SEQ ID NO: 1823918 - DNA, 15 bp, Homo sapiens
caatgtgaaaatcac

SEQ ID NO: 1823919 - DNA, 15 bp, Homo sapiens
aatgtgaaaatcact

SEQ ID NO: 1823920 - DNA, 15 bp, Homo sapiens
atgtgaaaatcactc

SEQ ID NO: 1823921 - DNA, 15 bp, Homo sapiens
tgtgaaaatcactcc

SEQ ID NO: 1823922 - DNA, 15 bp, Homo sapiens
gtgaaaatcactcct

SEQ ID NO: 1823923 - DNA, 15 bp, Homo sapiens
tgaaaatcactcctc

SEQ ID NO: 1823924 - DNA, 15 bp, Homo sapiens
gaaaatcactcctct

SEQ ID NO: 1823925 - DNA, 15 bp, Homo sapiens
aaaatcactcctctg

SEQ ID NO: 1823926 - DNA, 15 bp, Homo sapiens
aaatcactcctctgc

SEQ ID NO: 1823927 - DNA, 15 bp, Homo sapiens
aatcactcctctgct

SEQ ID NO: 1823928 - DNA, 15 bp, Homo sapiens
atcactcctctgctg

SEQ ID NO: 1823929 - DNA, 15 bp, Homo sapiens
tcactcctctgctgc

SEQ ID NO: 1823930 - DNA, 15 bp, Homo sapiens
cactcctctgctgct

SEQ ID NO: 1823931 - DNA, 15 bp, Homo sapiens
actcctctgctgctc

SEQ ID NO: 1823932 - DNA, 15 bp, Homo sapiens
ctcctctgctgctct

SEQ ID NO: 1823933 - DNA, 15 bp, Homo sapiens
tcctctgctgctctg

SEQ ID NO: 1823934 - DNA, 15 bp, Homo sapiens
cctctgctgctctgc

SEQ ID NO: 1823935 - DNA, 15 bp, Homo sapiens
ctctgctgctctgca

SEQ ID NO: 1823936 - DNA, 15 bp, Homo sapiens
tctgctgctctgcaa

SEQ ID NO: 1823937 - DNA, 15 bp, Homo sapiens
ctgctgctctgcaac

SEQ ID NO: 1823938 - DNA, 15 bp, Homo sapiens
tgctgctctgcaacc

SEQ ID NO: 1823939 - DNA, 15 bp, Homo sapiens
gctgctctgcaacct

SEQ ID NO: 1823940 - DNA, 15 bp, Homo sapiens
ctgctctgcaaccta

SEQ ID NO: 1823941 - DNA, 15 bp, Homo sapiens
tgctctgcaacctag

SEQ ID NO: 1823942 - DNA, 15 bp, Homo sapiens
gctctgcaacctagc

SEQ ID NO: 1823943 - DNA, 15 bp, Homo sapiens
ctctgcaacctagcc

SEQ ID NO: 1823944 - DNA, 15 bp, Homo sapiens
tctgcaacctagcct

SEQ ID NO: 1823945 - DNA, 15 bp, Homo sapiens
ctgcaacctagcctt

SEQ ID NO: 1823946 - DNA, 15 bp, Homo sapiens
tgcaacctagccttg

SEQ ID NO: 1823947 - DNA, 15 bp, Homo sapiens
gcaacctagccttga

SEQ ID NO: 1823948 - DNA, 15 bp, Homo sapiens
caacctagccttgat

SEQ ID NO: 1823949 - DNA, 15 bp, Homo sapiens
aacctagccttgata

SEQ ID NO: 1823950 - DNA, 15 bp, Homo sapiens
acctagccttgataa

SEQ ID NO: 1823951 - DNA, 15 bp, Homo sapiens
cctagccttgataat

SEQ ID NO: 1823952 - DNA, 15 bp, Homo sapiens
ctagccttgataata

SEQ ID NO: 1823953 - DNA, 15 bp, Homo sapiens
tagccttgataataa

SEQ ID NO: 1823954 - DNA, 15 bp, Homo sapiens
agccttgataataaa

SEQ ID NO: 1823955 - DNA, 15 bp, Homo sapiens
gccttgataataaaa

SEQ ID NO: 1823956 - DNA, 15 bp, Homo sapiens
ccttgataataaaag

SEQ ID NO: 1823957 - DNA, 15 bp, Homo sapiens
cttgataataaaagc

SEQ ID NO: 1823958 - DNA, 15 bp, Homo sapiens
ttgataataaaagct

SEQ ID NO: 1823959 - DNA, 15 bp, Homo sapiens
tgataataaaagctt

SEQ ID NO: 1823960 - DNA, 15 bp, Homo sapiens
gataataaaagcttg

SEQ ID NO: 1823961 - DNA, 15 bp, Homo sapiens
ataataaaagcttgc

SEQ ID NO: 1823962 - DNA, 15 bp, Homo sapiens
taataaaagcttgcc

SEQ ID NO: 1823963 - DNA, 15 bp, Homo sapiens
aataaaagcttgccc

SEQ ID NO: 1823964 - DNA, 15 bp, Homo sapiens
ataaaagcttgccct

SEQ ID NO: 1823965 - DNA, 15 bp, Homo sapiens
taaaagcttgccctt

SEQ ID NO: 1823966 - DNA, 15 bp, Homo sapiens
aaaagcttgcccttt

SEQ ID NO: 1823967 - DNA, 15 bp, Homo sapiens
aaagcttgccctttc

SEQ ID NO: 1823968 - DNA, 15 bp, Homo sapiens
aagcttgccctttca

SEQ ID NO: 1823969 - DNA, 15 bp, Homo sapiens
agcttgccctttcat

SEQ ID NO: 1823970 - DNA, 15 bp, Homo sapiens
gcttgccctttcatt

SEQ ID NO: 1823971 - DNA, 15 bp, Homo sapiens
cttgccctttcattc

SEQ ID NO: 1823972 - DNA, 15 bp, Homo sapiens
ttgccctttcattcc

SEQ ID NO: 1823973 - DNA, 15 bp, Homo sapiens
tgccctttcattccc

SEQ ID NO: 1823974 - DNA, 15 bp, Homo sapiens
gccctttcattccct

SEQ ID NO: 1823975 - DNA, 15 bp, Homo sapiens
ccctttcattccctt

SEQ ID NO: 1823976 - DNA, 15 bp, Homo sapiens
cctttcattcccttg

SEQ ID NO: 1823977 - DNA, 15 bp, Homo sapiens
ctttcattcccttgg

SEQ ID NO: 1823978 - DNA, 15 bp, Homo sapiens
tttcattcccttggg

SEQ ID NO: 1823979 - DNA, 15 bp, Homo sapiens
ttcattcccttggga

SEQ ID NO: 1823980 - DNA, 15 bp, Homo sapiens
tcattcccttgggaa

SEQ ID NO: 1823981 - DNA, 15 bp, Homo sapiens
cattcccttgggaac

SEQ ID NO: 1823982 - DNA, 15 bp, Homo sapiens
attcccttgggaacc

SEQ ID NO: 1823983 - DNA, 15 bp, Homo sapiens
ttcccttgggaacct

SEQ ID NO: 1823984 - DNA, 15 bp, Homo sapiens
tcccttgggaacctt

SEQ ID NO: 1823985 - DNA, 15 bp, Homo sapiens
cccttgggaaccttc

SEQ ID NO: 1823986 - DNA, 15 bp, Homo sapiens
ccttgggaaccttcc

SEQ ID NO: 1823987 - DNA, 15 bp, Homo sapiens
cttgggaaccttcct

SEQ ID NO: 1823988 - DNA, 15 bp, Homo sapiens
ttgggaaccttcctc

SEQ ID NO: 1823989 - DNA, 15 bp, Homo sapiens
tgggaaccttcctca

SEQ ID NO: 1823990 - DNA, 15 bp, Homo sapiens
gggaaccttcctcat

SEQ ID NO: 1823991 - DNA, 15 bp, Homo sapiens
ggaaccttcctcatt

SEQ ID NO: 1823992 - DNA, 15 bp, Homo sapiens
gaaccttcctcattt

SEQ ID NO: 1823993 - DNA, 15 bp, Homo sapiens
aaccttcctcattta

SEQ ID NO: 1823994 - DNA, 15 bp, Homo sapiens
accttcctcatttag

SEQ ID NO: 1823995 - DNA, 15 bp, Homo sapiens
ccttcctcatttaga

SEQ ID NO: 1823996 - DNA, 15 bp, Homo sapiens
cttcctcatttagag

SEQ ID NO: 1823997 - DNA, 15 bp, Homo sapiens
ttcctcatttagagc

SEQ ID NO: 1823998 - DNA, 15 bp, Homo sapiens
tcctcatttagagcc

SEQ ID NO: 1823999 - DNA, 15 bp, Homo sapiens
cctcatttagagccc

SEQ ID NO: 1824000 - DNA, 15 bp, Homo sapiens
ctcatttagagcccc

SEQ ID NO: 1824001 - DNA, 15 bp, Homo sapiens
tcatttagagcccca

SEQ ID NO: 1824002 - DNA, 15 bp, Homo sapiens
catttagagccccaa

SEQ ID NO: 1824003 - DNA, 15 bp, Homo sapiens
atttagagccccaat

SEQ ID NO: 1824004 - DNA, 15 bp, Homo sapiens
tttagagccccaatc

SEQ ID NO: 1824005 - DNA, 15 bp, Homo sapiens
ttagagccccaatca

SEQ ID NO: 1824006 - DNA, 15 bp, Homo sapiens
tagagccccaatcat

SEQ ID NO: 1824007 - DNA, 15 bp, Homo sapiens
agagccccaatcatt

SEQ ID NO: 1824008 - DNA, 15 bp, Homo sapiens
gagccccaatcatta

SEQ ID NO: 1824009 - DNA, 15 bp, Homo sapiens
agccccaatcattac

SEQ ID NO: 1824010 - DNA, 15 bp, Homo sapiens
gccccaatcattacc

SEQ ID NO: 1824011 - DNA, 15 bp, Homo sapiens
ccccaatcattacca

SEQ ID NO: 1824012 - DNA, 15 bp, Homo sapiens
cccaatcattaccac

SEQ ID NO: 1824013 - DNA, 15 bp, Homo sapiens
ccaatcattaccact

SEQ ID NO: 1824014 - DNA, 15 bp, Homo sapiens
caatcattaccactt

SEQ ID NO: 1824015 - DNA, 15 bp, Homo sapiens
aatcattaccacttg

SEQ ID NO: 1824016 - DNA, 15 bp, Homo sapiens
atcattaccacttgc

SEQ ID NO: 1824017 - DNA, 15 bp, Homo sapiens
tcattaccacttgcc

SEQ ID NO: 1824018 - DNA, 15 bp, Homo sapiens
cattaccacttgccc

SEQ ID NO: 1824019 - DNA, 15 bp, Homo sapiens
attaccacttgccct

SEQ ID NO: 1824020 - DNA, 15 bp, Homo sapiens
ttaccacttgcccta

SEQ ID NO: 1824021 - DNA, 15 bp, Homo sapiens
taccacttgccctat

SEQ ID NO: 1824022 - DNA, 15 bp, Homo sapiens
accacttgccctata

SEQ ID NO: 1824023 - DNA, 15 bp, Homo sapiens
ccacttgccctatat

SEQ ID NO: 1824024 - DNA, 15 bp, Homo sapiens
cacttgccctatatg

SEQ ID NO: 1824025 - DNA, 15 bp, Homo sapiens
acttgccctatatgg

SEQ ID NO: 1824026 - DNA, 15 bp, Homo sapiens
cttgccctatatggt

SEQ ID NO: 1824027 - DNA, 15 bp, Homo sapiens
ttgccctatatggtt

SEQ ID NO: 1824028 - DNA, 15 bp, Homo sapiens
tgccctatatggttg

SEQ ID NO: 1824029 - DNA, 15 bp, Homo sapiens
gccctatatggttga

SEQ ID NO: 1824030 - DNA, 15 bp, Homo sapiens
ccctatatggttgaa

SEQ ID NO: 1824031 - DNA, 15 bp, Homo sapiens
cctatatggttgaaa

SEQ ID NO: 1824032 - DNA, 15 bp, Homo sapiens
ctatatggttgaaat

SEQ ID NO: 1824033 - DNA, 15 bp, Homo sapiens
tatatggttgaaatt

SEQ ID NO: 1824034 - DNA, 15 bp, Homo sapiens
atatggttgaaattt

SEQ ID NO: 1824035 - DNA, 15 bp, Homo sapiens
tatggttgaaatttt

SEQ ID NO: 1824036 - DNA, 15 bp, Homo sapiens
atggttgaaatttta

SEQ ID NO: 1824037 - DNA, 15 bp, Homo sapiens
tggttgaaattttag

SEQ ID NO: 1824038 - DNA, 15 bp, Homo sapiens
ggttgaaattttagg

SEQ ID NO: 1824039 - DNA, 15 bp, Homo sapiens
gttgaaattttaggc

SEQ ID NO: 1824040 - DNA, 15 bp, Homo sapiens
ttgaaattttaggcc

SEQ ID NO: 1824041 - DNA, 15 bp, Homo sapiens
tgaaattttaggcca

SEQ ID NO: 1824042 - DNA, 15 bp, Homo sapiens
gaaattttaggccag

SEQ ID NO: 1824043 - DNA, 15 bp, Homo sapiens
aaattttaggccagt

SEQ ID NO: 1824044 - DNA, 15 bp, Homo sapiens
aattttaggccagtg

SEQ ID NO: 1824045 - DNA, 15 bp, Homo sapiens
attttaggccagtgt

SEQ ID NO: 1824046 - DNA, 15 bp, Homo sapiens
ttttaggccagtgtt

SEQ ID NO: 1824047 - DNA, 15 bp, Homo sapiens
tttaggccagtgttt

SEQ ID NO: 1824048 - DNA, 15 bp, Homo sapiens
ttaggccagtgtttc

SEQ ID NO: 1824049 - DNA, 15 bp, Homo sapiens
taggccagtgtttct

SEQ ID NO: 1824050 - DNA, 15 bp, Homo sapiens
aggccagtgtttctc

SEQ ID NO: 1824051 - DNA, 15 bp, Homo sapiens
ggccagtgtttctca

SEQ ID NO: 1824052 - DNA, 15 bp, Homo sapiens
gccagtgtttctcag

SEQ ID NO: 1824053 - DNA, 15 bp, Homo sapiens
ccagtgtttctcagg

SEQ ID NO: 1824054 - DNA, 15 bp, Homo sapiens
cagtgtttctcaggc

SEQ ID NO: 1824055 - DNA, 15 bp, Homo sapiens
agtgtttctcaggca

SEQ ID NO: 1824056 - DNA, 15 bp, Homo sapiens
gtgtttctcaggcat

SEQ ID NO: 1824057 - DNA, 15 bp, Homo sapiens
tgtttctcaggcatg

SEQ ID NO: 1824058 - DNA, 15 bp, Homo sapiens
gtttctcaggcatgg

SEQ ID NO: 1824059 - DNA, 15 bp, Homo sapiens
tttctcaggcatggc

SEQ ID NO: 1824060 - DNA, 15 bp, Homo sapiens
ttctcaggcatggca

SEQ ID NO: 1824061 - DNA, 15 bp, Homo sapiens
tctcaggcatggcac

SEQ ID NO: 1824062 - DNA, 15 bp, Homo sapiens
ctcaggcatggcact

SEQ ID NO: 1824063 - DNA, 15 bp, Homo sapiens
tcaggcatggcactg

SEQ ID NO: 1824064 - DNA, 15 bp, Homo sapiens
caggcatggcactgt

SEQ ID NO: 1824065 - DNA, 15 bp, Homo sapiens
aggcatggcactgtt

SEQ ID NO: 1824066 - DNA, 15 bp, Homo sapiens
ggcatggcactgttg

SEQ ID NO: 1824067 - DNA, 15 bp, Homo sapiens
gcatggcactgttga

SEQ ID NO: 1824068 - DNA, 15 bp, Homo sapiens
catggcactgttgaa

SEQ ID NO: 1824069 - DNA, 15 bp, Homo sapiens
atggcactgttgaaa

SEQ ID NO: 1824070 - DNA, 15 bp, Homo sapiens
tggcactgttgaaat

SEQ ID NO: 1824071 - DNA, 15 bp, Homo sapiens
ggcactgttgaaatt

SEQ ID NO: 1824072 - DNA, 15 bp, Homo sapiens
gcactgttgaaattt

SEQ ID NO: 1824073 - DNA, 15 bp, Homo sapiens
cactgttgaaatttt

SEQ ID NO: 1824074 - DNA, 15 bp, Homo sapiens
actgttgaaattttg

SEQ ID NO: 1824075 - DNA, 15 bp, Homo sapiens
ctgttgaaattttgg

SEQ ID NO: 1824076 - DNA, 15 bp, Homo sapiens
tgttgaaattttggc

SEQ ID NO: 1824077 - DNA, 15 bp, Homo sapiens
gttgaaattttggct

SEQ ID NO: 1824078 - DNA, 15 bp, Homo sapiens
ttgaaattttggctg

SEQ ID NO: 1824079 - DNA, 15 bp, Homo sapiens
tgaaattttggctgg

SEQ ID NO: 1824080 - DNA, 15 bp, Homo sapiens
gaaattttggctgga

SEQ ID NO: 1824081 - DNA, 15 bp, Homo sapiens
aaattttggctggat

SEQ ID NO: 1824082 - DNA, 15 bp, Homo sapiens
aattttggctggata

SEQ ID NO: 1824083 - DNA, 15 bp, Homo sapiens
attttggctggataa

SEQ ID NO: 1824084 - DNA, 15 bp, Homo sapiens
ttttggctggataat

SEQ ID NO: 1824085 - DNA, 15 bp, Homo sapiens
tttggctggataatt

SEQ ID NO: 1824086 - DNA, 15 bp, Homo sapiens
ttggctggataatta

SEQ ID NO: 1824087 - DNA, 15 bp, Homo sapiens
tggctggataattat

SEQ ID NO: 1824088 - DNA, 15 bp, Homo sapiens
ggctggataattatt

SEQ ID NO: 1824089 - DNA, 15 bp, Homo sapiens
gctggataattattt

SEQ ID NO: 1824090 - DNA, 15 bp, Homo sapiens
ctggataattatttg

SEQ ID NO: 1824091 - DNA, 15 bp, Homo sapiens
tggataattatttgt

SEQ ID NO: 1824092 - DNA, 15 bp, Homo sapiens
ggataattatttgtt

SEQ ID NO: 1824093 - DNA, 15 bp, Homo sapiens
gataattatttgttg

SEQ ID NO: 1824094 - DNA, 15 bp, Homo sapiens
ataattatttgttgt

SEQ ID NO: 1824095 - DNA, 15 bp, Homo sapiens
taattatttgttgta

SEQ ID NO: 1824096 - DNA, 15 bp, Homo sapiens
aattatttgttgtag

SEQ ID NO: 1824097 - DNA, 15 bp, Homo sapiens
attatttgttgtaga

SEQ ID NO: 1824098 - DNA, 15 bp, Homo sapiens
ttatttgttgtagat

SEQ ID NO: 1824099 - DNA, 15 bp, Homo sapiens
tatttgttgtagatg

SEQ ID NO: 1824100 - DNA, 15 bp, Homo sapiens
atttgttgtagatgg

SEQ ID NO: 1824101 - DNA, 15 bp, Homo sapiens
tttgttgtagatggc

SEQ ID NO: 1824102 - DNA, 15 bp, Homo sapiens
ttgttgtagatggct

SEQ ID NO: 1824103 - DNA, 15 bp, Homo sapiens
tgttgtagatggctg

SEQ ID NO: 1824104 - DNA, 15 bp, Homo sapiens
gttgtagatggctgt

SEQ ID NO: 1824105 - DNA, 15 bp, Homo sapiens
ttgtagatggctgtt

SEQ ID NO: 1824106 - DNA, 15 bp, Homo sapiens
tgtagatggctgttt

SEQ ID NO: 1824107 - DNA, 15 bp, Homo sapiens
gtagatggctgtttt

SEQ ID NO: 1824108 - DNA, 15 bp, Homo sapiens
tagatggctgttttc

SEQ ID NO: 1824109 - DNA, 15 bp, Homo sapiens
agatggctgttttct

SEQ ID NO: 1824110 - DNA, 15 bp, Homo sapiens
gatggctgttttcta

SEQ ID NO: 1824111 - DNA, 15 bp, Homo sapiens
atggctgttttctag

SEQ ID NO: 1824112 - DNA, 15 bp, Homo sapiens
tggctgttttctaga

SEQ ID NO: 1824113 - DNA, 15 bp, Homo sapiens
ggctgttttctagat

SEQ ID NO: 1824114 - DNA, 15 bp, Homo sapiens
ttttctcaaaaaagc

SEQ ID NO: 1824115 - DNA, 15 bp, Homo sapiens
tttctcaaaaaagct

SEQ ID NO: 1824116 - DNA, 15 bp, Homo sapiens
ttctcaaaaaagctg

SEQ ID NO: 1824117 - DNA, 15 bp, Homo sapiens
tctcaaaaaagctgg

SEQ ID NO: 1824118 - DNA, 15 bp, Homo sapiens
ctcaaaaaagctggg

SEQ ID NO: 1824119 - DNA, 15 bp, Homo sapiens
tcaaaaaagctggga

SEQ ID NO: 1824120 - DNA, 15 bp, Homo sapiens
caaaaaagctgggaa

SEQ ID NO: 1824121 - DNA, 15 bp, Homo sapiens
aaaaaagctgggaat

SEQ ID NO: 1824122 - DNA, 15 bp, Homo sapiens
aaaaagctgggaatt

SEQ ID NO: 1824123 - DNA, 15 bp, Homo sapiens
aaaagctgggaattt

SEQ ID NO: 1824124 - DNA, 15 bp, Homo sapiens
aaagctgggaatttt

SEQ ID NO: 1824125 - DNA, 15 bp, Homo sapiens
aagctgggaattttg

SEQ ID NO: 1824126 - DNA, 15 bp, Homo sapiens
agctgggaattttgt

SEQ ID NO: 1824127 - DNA, 15 bp, Homo sapiens
gctgggaattttgtt

SEQ ID NO: 1824128 - DNA, 15 bp, Homo sapiens
ctgggaattttgttt

SEQ ID NO: 1824129 - DNA, 15 bp, Homo sapiens
tgggaattttgtttc

SEQ ID NO: 1824130 - DNA, 15 bp, Homo sapiens
gggaattttgtttct

SEQ ID NO: 1824131 - DNA, 15 bp, Homo sapiens
ggaattttgtttctg

SEQ ID NO: 1824132 - DNA, 15 bp, Homo sapiens
gaattttgtttctgt

SEQ ID NO: 1824133 - DNA, 15 bp, Homo sapiens
aattttgtttctgtt

SEQ ID NO: 1824134 - DNA, 15 bp, Homo sapiens
ttttgtttctgtttt

SEQ ID NO: 1824135 - DNA, 15 bp, Homo sapiens
tttgtttctgtttta

SEQ ID NO: 1824136 - DNA, 15 bp, Homo sapiens
ttgtttctgttttat

SEQ ID NO: 1824137 - DNA, 15 bp, Homo sapiens
tgtttctgttttatt

SEQ ID NO: 1824138 - DNA, 15 bp, Homo sapiens
gtttctgttttattg

SEQ ID NO: 1824139 - DNA, 15 bp, Homo sapiens
tttctgttttattgg

SEQ ID NO: 1824140 - DNA, 15 bp, Homo sapiens
ttctgttttattggg

SEQ ID NO: 1824141 - DNA, 15 bp, Homo sapiens
tctgttttattggga

SEQ ID NO: 1824142 - DNA, 15 bp, Homo sapiens
ctgttttattgggat

SEQ ID NO: 1824143 - DNA, 15 bp, Homo sapiens
tgttttattgggata

SEQ ID NO: 1824144 - DNA, 15 bp, Homo sapiens
gttttattgggatac

SEQ ID NO: 1824145 - DNA, 15 bp, Homo sapiens
ttttattgggatact

SEQ ID NO: 1824146 - DNA, 15 bp, Homo sapiens
tttattgggatactg

SEQ ID NO: 1824147 - DNA, 15 bp, Homo sapiens
ttattgggatactga

SEQ ID NO: 1824148 - DNA, 15 bp, Homo sapiens
tattgggatactgac

SEQ ID NO: 1824149 - DNA, 15 bp, Homo sapiens
attgggatactgact

SEQ ID NO: 1824150 - DNA, 15 bp, Homo sapiens
ttgggatactgactc

SEQ ID NO: 1824151 - DNA, 15 bp, Homo sapiens
tgggatactgactct

SEQ ID NO: 1824152 - DNA, 15 bp, Homo sapiens
gggatactgactctc

SEQ ID NO: 1824153 - DNA, 15 bp, Homo sapiens
ggatactgactctca

SEQ ID NO: 1824154 - DNA, 15 bp, Homo sapiens
gatactgactctcaa

SEQ ID NO: 1824155 - DNA, 15 bp, Homo sapiens
atactgactctcaac

SEQ ID NO: 1824156 - DNA, 15 bp, Homo sapiens
tactgactctcaaca

SEQ ID NO: 1824157 - DNA, 15 bp, Homo sapiens
actgactctcaacat

SEQ ID NO: 1824158 - DNA, 15 bp, Homo sapiens
ctgactctcaacatt

SEQ ID NO: 1824159 - DNA, 15 bp, Homo sapiens
tgactctcaacattt

SEQ ID NO: 1824160 - DNA, 15 bp, Homo sapiens
gactctcaacatttc

SEQ ID NO: 1824161 - DNA, 15 bp, Homo sapiens
actctcaacatttca

SEQ ID NO: 1824162 - DNA, 15 bp, Homo sapiens
ctctcaacatttcat

SEQ ID NO: 1824163 - DNA, 15 bp, Homo sapiens
tctcaacatttcata

SEQ ID NO: 1824164 - DNA, 15 bp, Homo sapiens
ctcaacatttcatat

SEQ ID NO: 1824165 - DNA, 15 bp, Homo sapiens
tcaacatttcatata

SEQ ID NO: 1824166 - DNA, 15 bp, Homo sapiens
caacatttcatatat

SEQ ID NO: 1824167 - DNA, 15 bp, Homo sapiens
aacatttcatatatt

SEQ ID NO: 1824168 - DNA, 15 bp, Homo sapiens
acatttcatatattg

SEQ ID NO: 1824169 - DNA, 15 bp, Homo sapiens
catttcatatattgc

SEQ ID NO: 1824170 - DNA, 15 bp, Homo sapiens
atttcatatattgca

SEQ ID NO: 1824171 - DNA, 15 bp, Homo sapiens
tttcatatattgcat

SEQ ID NO: 1824172 - DNA, 15 bp, Homo sapiens
ttcatatattgcatt

SEQ ID NO: 1824173 - DNA, 15 bp, Homo sapiens
tcatatattgcattc

SEQ ID NO: 1824174 - DNA, 15 bp, Homo sapiens
catatattgcattcc

SEQ ID NO: 1824175 - DNA, 15 bp, Homo sapiens
atatattgcattcca

SEQ ID NO: 1824176 - DNA, 15 bp, Homo sapiens
tatattgcattccac

SEQ ID NO: 1824177 - DNA, 15 bp, Homo sapiens
atattgcattccacc

SEQ ID NO: 1824178 - DNA, 15 bp, Homo sapiens
tattgcattccacca

SEQ ID NO: 1824179 - DNA, 15 bp, Homo sapiens
attgcattccaccaa

SEQ ID NO: 1824180 - DNA, 15 bp, Homo sapiens
ttgcattccaccaac

SEQ ID NO: 1824181 - DNA, 15 bp, Homo sapiens
tgcattccaccaacg

SEQ ID NO: 1824182 - DNA, 15 bp, Homo sapiens
gcattccaccaacgt

SEQ ID NO: 1824183 - DNA, 15 bp, Homo sapiens
cattccaccaacgta

SEQ ID NO: 1824184 - DNA, 15 bp, Homo sapiens
attccaccaacgtag

SEQ ID NO: 1824185 - DNA, 15 bp, Homo sapiens
ttccaccaacgtagc

SEQ ID NO: 1824186 - DNA, 15 bp, Homo sapiens
tccaccaacgtagct

SEQ ID NO: 1824187 - DNA, 15 bp, Homo sapiens
ccaccaacgtagctg

SEQ ID NO: 1824188 - DNA, 15 bp, Homo sapiens
caccaacgtagctga

SEQ ID NO: 1824189 - DNA, 15 bp, Homo sapiens
accaacgtagctgag

SEQ ID NO: 1824190 - DNA, 15 bp, Homo sapiens
ccaacgtagctgaga

SEQ ID NO: 1824191 - DNA, 15 bp, Homo sapiens
caacgtagctgagag

SEQ ID NO: 1824192 - DNA, 15 bp, Homo sapiens
aacgtagctgagagt

SEQ ID NO: 1824193 - DNA, 15 bp, Homo sapiens
acgtagctgagagtc

SEQ ID NO: 1824194 - DNA, 15 bp, Homo sapiens
cgtagctgagagtca

SEQ ID NO: 1824195 - DNA, 15 bp, Homo sapiens
gtagctgagagtcaa

SEQ ID NO: 1824196 - DNA, 15 bp, Homo sapiens
tagctgagagtcaat

SEQ ID NO: 1824197 - DNA, 15 bp, Homo sapiens
agctgagagtcaatt

SEQ ID NO: 1824198 - DNA, 15 bp, Homo sapiens
gctgagagtcaattt

SEQ ID NO: 1824199 - DNA, 15 bp, Homo sapiens
ctgagagtcaattta

SEQ ID NO: 1824200 - DNA, 15 bp, Homo sapiens
tgagagtcaatttat

SEQ ID NO: 1824201 - DNA, 15 bp, Homo sapiens
gagagtcaatttatg

SEQ ID NO: 1824202 - DNA, 15 bp, Homo sapiens
agagtcaatttatga

SEQ ID NO: 1824203 - DNA, 15 bp, Homo sapiens
gagtcaatttatgaa

SEQ ID NO: 1824204 - DNA, 15 bp, Homo sapiens
agtcaatttatgaaa

SEQ ID NO: 1824205 - DNA, 15 bp, Homo sapiens
gtcaatttatgaaat

SEQ ID NO: 1824206 - DNA, 15 bp, Homo sapiens
tcaatttatgaaata

SEQ ID NO: 1824207 - DNA, 15 bp, Homo sapiens
caatttatgaaatat

SEQ ID NO: 1824208 - DNA, 15 bp, Homo sapiens
aatttatgaaatatt

SEQ ID NO: 1824209 - DNA, 15 bp, Homo sapiens
atttatgaaatattt

SEQ ID NO: 1824210 - DNA, 15 bp, Homo sapiens
tttatgaaatatttt

SEQ ID NO: 1824211 - DNA, 15 bp, Homo sapiens
ttatgaaatattttg

SEQ ID NO: 1824212 - DNA, 15 bp, Homo sapiens
tatgaaatattttgt

SEQ ID NO: 1824213 - DNA, 15 bp, Homo sapiens
atgaaatattttgta

SEQ ID NO: 1824214 - DNA, 15 bp, Homo sapiens
tgaaatattttgtag

SEQ ID NO: 1824215 - DNA, 15 bp, Homo sapiens
gaaatattttgtagt

SEQ ID NO: 1824216 - DNA, 15 bp, Homo sapiens
aaatattttgtagtg

SEQ ID NO: 1824217 - DNA, 15 bp, Homo sapiens
aatattttgtagtgt

SEQ ID NO: 1824218 - DNA, 15 bp, Homo sapiens
atattttgtagtgta

SEQ ID NO: 1824219 - DNA, 15 bp, Homo sapiens
tattttgtagtgtaa

SEQ ID NO: 1824220 - DNA, 15 bp, Homo sapiens
attttgtagtgtaag

SEQ ID NO: 1824221 - DNA, 15 bp, Homo sapiens
ttttgtagtgtaaga

SEQ ID NO: 1824222 - DNA, 15 bp, Homo sapiens
tttgtagtgtaagac

SEQ ID NO: 1824223 - DNA, 15 bp, Homo sapiens
ttgtagtgtaagaca

SEQ ID NO: 1824224 - DNA, 15 bp, Homo sapiens
tgtagtgtaagacag

SEQ ID NO: 1824225 - DNA, 15 bp, Homo sapiens
gtagtgtaagacaga

SEQ ID NO: 1824226 - DNA, 15 bp, Homo sapiens
tagtgtaagacagaa

SEQ ID NO: 1824227 - DNA, 15 bp, Homo sapiens
agtgtaagacagaaa

SEQ ID NO: 1824228 - DNA, 15 bp, Homo sapiens
gtgtaagacagaaag

SEQ ID NO: 1824229 - DNA, 15 bp, Homo sapiens
tgtaagacagaaagt

SEQ ID NO: 1824230 - DNA, 15 bp, Homo sapiens
gtaagacagaaagtg

SEQ ID NO: 1824231 - DNA, 15 bp, Homo sapiens
taagacagaaagtgg

SEQ ID NO: 1824232 - DNA, 15 bp, Homo sapiens
aagacagaaagtggg

SEQ ID NO: 1824233 - DNA, 15 bp, Homo sapiens
agacagaaagtgggg

SEQ ID NO: 1824234 - DNA, 15 bp, Homo sapiens
gacagaaagtgggga

SEQ ID NO: 1824235 - DNA, 15 bp, Homo sapiens
acagaaagtggggag

SEQ ID NO: 1824236 - DNA, 15 bp, Homo sapiens
cagaaagtggggagg

SEQ ID NO: 1824237 - DNA, 15 bp, Homo sapiens
agaaagtggggagga

SEQ ID NO: 1824238 - DNA, 15 bp, Homo sapiens
gaaagtggggaggac

SEQ ID NO: 1824239 - DNA, 15 bp, Homo sapiens
aaagtggggaggacc

SEQ ID NO: 1824240 - DNA, 15 bp, Homo sapiens
aagtggggaggacca

SEQ ID NO: 1824241 - DNA, 15 bp, Homo sapiens
agtggggaggaccaa

SEQ ID NO: 1824242 - DNA, 15 bp, Homo sapiens
gtggggaggaccaag

SEQ ID NO: 1824243 - DNA, 15 bp, Homo sapiens
tggggaggaccaagt

SEQ ID NO: 1824244 - DNA, 15 bp, Homo sapiens
ggggaggaccaagta

SEQ ID NO: 1824245 - DNA, 15 bp, Homo sapiens
gggaggaccaagtat

SEQ ID NO: 1824246 - DNA, 15 bp, Homo sapiens
ggaggaccaagtatg

SEQ ID NO: 1824247 - DNA, 15 bp, Homo sapiens
gaggaccaagtatgt

SEQ ID NO: 1824248 - DNA, 15 bp, Homo sapiens
aggaccaagtatgtc

SEQ ID NO: 1824249 - DNA, 15 bp, Homo sapiens
ggaccaagtatgtca

SEQ ID NO: 1824250 - DNA, 15 bp, Homo sapiens
gaccaagtatgtcaa

SEQ ID NO: 1824251 - DNA, 15 bp, Homo sapiens
accaagtatgtcaac

SEQ ID NO: 1824252 - DNA, 15 bp, Homo sapiens
ccaagtatgtcaacc

SEQ ID NO: 1824253 - DNA, 15 bp, Homo sapiens
caagtatgtcaacca

SEQ ID NO: 1824254 - DNA, 15 bp, Homo sapiens
aagtatgtcaaccac

SEQ ID NO: 1824255 - DNA, 15 bp, Homo sapiens
agtatgtcaaccact

SEQ ID NO: 1824256 - DNA, 15 bp, Homo sapiens
gtatgtcaaccacta

SEQ ID NO: 1824257 - DNA, 15 bp, Homo sapiens
tatgtcaaccactag

SEQ ID NO: 1824258 - DNA, 15 bp, Homo sapiens
atgtcaaccactagg

SEQ ID NO: 1824259 - DNA, 15 bp, Homo sapiens
tgtcaaccactagga

SEQ ID NO: 1824260 - DNA, 15 bp, Homo sapiens
gtcaaccactaggag

SEQ ID NO: 1824261 - DNA, 15 bp, Homo sapiens
tcaaccactaggagt

SEQ ID NO: 1824262 - DNA, 15 bp, Homo sapiens
caaccactaggagtg

SEQ ID NO: 1824263 - DNA, 15 bp, Homo sapiens
aaccactaggagtgt

SEQ ID NO: 1824264 - DNA, 15 bp, Homo sapiens
accactaggagtgtg

SEQ ID NO: 1824265 - DNA, 15 bp, Homo sapiens
ccactaggagtgtgg

SEQ ID NO: 1824266 - DNA, 15 bp, Homo sapiens
cactaggagtgtggt

SEQ ID NO: 1824267 - DNA, 15 bp, Homo sapiens
actaggagtgtggtg

SEQ ID NO: 1824268 - DNA, 15 bp, Homo sapiens
ctaggagtgtggtgc

SEQ ID NO: 1824269 - DNA, 15 bp, Homo sapiens
taggagtgtggtgcc

SEQ ID NO: 1824270 - DNA, 15 bp, Homo sapiens
aggagtgtggtgcct

SEQ ID NO: 1824271 - DNA, 15 bp, Homo sapiens
ggagtgtggtgccta

SEQ ID NO: 1824272 - DNA, 15 bp, Homo sapiens
gagtgtggtgcctag

SEQ ID NO: 1824273 - DNA, 15 bp, Homo sapiens
agtgtggtgcctagt

SEQ ID NO: 1824274 - DNA, 15 bp, Homo sapiens
gtgtggtgcctagtc

SEQ ID NO: 1824275 - DNA, 15 bp, Homo sapiens
tgtggtgcctagtca

SEQ ID NO: 1824276 - DNA, 15 bp, Homo sapiens
gtggtgcctagtcag

SEQ ID NO: 1824277 - DNA, 15 bp, Homo sapiens
tggtgcctagtcagg

SEQ ID NO: 1824278 - DNA, 15 bp, Homo sapiens
ggtgcctagtcagga

SEQ ID NO: 1824279 - DNA, 15 bp, Homo sapiens
gtgcctagtcaggaa

SEQ ID NO: 1824280 - DNA, 15 bp, Homo sapiens
tgcctagtcaggaat

SEQ ID NO: 1824281 - DNA, 15 bp, Homo sapiens
gcctagtcaggaatt

SEQ ID NO: 1824282 - DNA, 15 bp, Homo sapiens
cctagtcaggaattg

SEQ ID NO: 1824283 - DNA, 15 bp, Homo sapiens
ctagtcaggaattgg

SEQ ID NO: 1824284 - DNA, 15 bp, Homo sapiens
tagtcaggaattggg

SEQ ID NO: 1824285 - DNA, 15 bp, Homo sapiens
agtcaggaattggga

SEQ ID NO: 1824286 - DNA, 15 bp, Homo sapiens
gtcaggaattgggag

SEQ ID NO: 1824287 - DNA, 15 bp, Homo sapiens
tcaggaattgggagg

SEQ ID NO: 1824288 - DNA, 15 bp, Homo sapiens
caggaattgggagga

SEQ ID NO: 1824289 - DNA, 15 bp, Homo sapiens
aggaattgggaggag

SEQ ID NO: 1824290 - DNA, 15 bp, Homo sapiens
ggaattgggaggagt

SEQ ID NO: 1824291 - DNA, 15 bp, Homo sapiens
gaattgggaggagtg

SEQ ID NO: 1824292 - DNA, 15 bp, Homo sapiens
aattgggaggagtgt

SEQ ID NO: 1824293 - DNA, 15 bp, Homo sapiens
attgggaggagtgta

SEQ ID NO: 1824294 - DNA, 15 bp, Homo sapiens
ttgggaggagtgtag

SEQ ID NO: 1824295 - DNA, 15 bp, Homo sapiens
tgggaggagtgtagc

SEQ ID NO: 1824296 - DNA, 15 bp, Homo sapiens
gggaggagtgtagca

SEQ ID NO: 1824297 - DNA, 15 bp, Homo sapiens
ggaggagtgtagcaa

SEQ ID NO: 1824298 - DNA, 15 bp, Homo sapiens
gaggagtgtagcaag

SEQ ID NO: 1824299 - DNA, 15 bp, Homo sapiens
aggagtgtagcaaga

SEQ ID NO: 1824300 - DNA, 15 bp, Homo sapiens
ggagtgtagcaagaa

SEQ ID NO: 1824301 - DNA, 15 bp, Homo sapiens
gagtgtagcaagaaa

SEQ ID NO: 1824302 - DNA, 15 bp, Homo sapiens
agtgtagcaagaaag

SEQ ID NO: 1824303 - DNA, 15 bp, Homo sapiens
gtgtagcaagaaagg

SEQ ID NO: 1824304 - DNA, 15 bp, Homo sapiens
tgtagcaagaaagga

SEQ ID NO: 1824305 - DNA, 15 bp, Homo sapiens
gtagcaagaaaggaa

SEQ ID NO: 1824306 - DNA, 15 bp, Homo sapiens
tagcaagaaaggaag

SEQ ID NO: 1824307 - DNA, 15 bp, Homo sapiens
agcaagaaaggaagg

SEQ ID NO: 1824308 - DNA, 15 bp, Homo sapiens
gcaagaaaggaagga

SEQ ID NO: 1824309 - DNA, 15 bp, Homo sapiens
caagaaaggaaggac

SEQ ID NO: 1824310 - DNA, 15 bp, Homo sapiens
aagaaaggaaggaca

SEQ ID NO: 1824311 - DNA, 15 bp, Homo sapiens
agaaaggaaggacaa

SEQ ID NO: 1824312 - DNA, 15 bp, Homo sapiens
gaaaggaaggacaac

SEQ ID NO: 1824313 - DNA, 15 bp, Homo sapiens
aaaggaaggacaaca

SEQ ID NO: 1824314 - DNA, 15 bp, Homo sapiens
aaggaaggacaacag

SEQ ID NO: 1824315 - DNA, 15 bp, Homo sapiens
aggaaggacaacagg

SEQ ID NO: 1824316 - DNA, 15 bp, Homo sapiens
ggaaggacaacagga

SEQ ID NO: 1824317 - DNA, 15 bp, Homo sapiens
gaaggacaacaggat

SEQ ID NO: 1824318 - DNA, 15 bp, Homo sapiens
aaggacaacaggatt

SEQ ID NO: 1824319 - DNA, 15 bp, Homo sapiens
aggacaacaggattt

SEQ ID NO: 1824320 - DNA, 15 bp, Homo sapiens
ggacaacaggatttg

SEQ ID NO: 1824321 - DNA, 15 bp, Homo sapiens
gacaacaggatttgg

SEQ ID NO: 1824322 - DNA, 15 bp, Homo sapiens
acaacaggatttggt

SEQ ID NO: 1824323 - DNA, 15 bp, Homo sapiens
caacaggatttggtc

SEQ ID NO: 1824324 - DNA, 15 bp, Homo sapiens
aacaggatttggtca

SEQ ID NO: 1824325 - DNA, 15 bp, Homo sapiens
acaggatttggtcat

SEQ ID NO: 1824326 - DNA, 15 bp, Homo sapiens
caggatttggtcatt

SEQ ID NO: 1824327 - DNA, 15 bp, Homo sapiens
aggatttggtcattg

SEQ ID NO: 1824328 - DNA, 15 bp, Homo sapiens
ggatttggtcattga

SEQ ID NO: 1824329 - DNA, 15 bp, Homo sapiens
gatttggtcattgat

SEQ ID NO: 1824330 - DNA, 15 bp, Homo sapiens
atttggtcattgatt

SEQ ID NO: 1824331 - DNA, 15 bp, Homo sapiens
tttggtcattgattg

SEQ ID NO: 1824332 - DNA, 15 bp, Homo sapiens
ttggtcattgattgg

SEQ ID NO: 1824333 - DNA, 15 bp, Homo sapiens
tggtcattgattggt

SEQ ID NO: 1824334 - DNA, 15 bp, Homo sapiens
ggtcattgattggtc

SEQ ID NO: 1824335 - DNA, 15 bp, Homo sapiens
gtcattgattggtca

SEQ ID NO: 1824336 - DNA, 15 bp, Homo sapiens
tcattgattggtcag

SEQ ID NO: 1824337 - DNA, 15 bp, Homo sapiens
cattgattggtcaga

SEQ ID NO: 1824338 - DNA, 15 bp, Homo sapiens
attgattggtcagat

SEQ ID NO: 1824339 - DNA, 15 bp, Homo sapiens
ttgattggtcagatg

SEQ ID NO: 1824340 - DNA, 15 bp, Homo sapiens
tgattggtcagatgg

SEQ ID NO: 1824341 - DNA, 15 bp, Homo sapiens
gattggtcagatgga

SEQ ID NO: 1824342 - DNA, 15 bp, Homo sapiens
attggtcagatggat

SEQ ID NO: 1824343 - DNA, 15 bp, Homo sapiens
ttggtcagatggatt

SEQ ID NO: 1824344 - DNA, 15 bp, Homo sapiens
tggtcagatggattt

SEQ ID NO: 1824345 - DNA, 15 bp, Homo sapiens
ggtcagatggatttc

SEQ ID NO: 1824346 - DNA, 15 bp, Homo sapiens
gtcagatggatttca

SEQ ID NO: 1824347 - DNA, 15 bp, Homo sapiens
tcagatggatttcag

SEQ ID NO: 1824348 - DNA, 15 bp, Homo sapiens
cagatggatttcaga

SEQ ID NO: 1824349 - DNA, 15 bp, Homo sapiens
agatggatttcagag

SEQ ID NO: 1824350 - DNA, 15 bp, Homo sapiens
gatggatttcagagg

SEQ ID NO: 1824351 - DNA, 15 bp, Homo sapiens
atggatttcagaggg

SEQ ID NO: 1824352 - DNA, 15 bp, Homo sapiens
tggatttcagaggga

SEQ ID NO: 1824353 - DNA, 15 bp, Homo sapiens
ggatttcagagggat

SEQ ID NO: 1824354 - DNA, 15 bp, Homo sapiens
gatttcagagggatt

SEQ ID NO: 1824355 - DNA, 15 bp, Homo sapiens
atttcagagggattg

SEQ ID NO: 1824356 - DNA, 15 bp, Homo sapiens
tttcagagggattgg

SEQ ID NO: 1824357 - DNA, 15 bp, Homo sapiens
ttcagagggattggt

SEQ ID NO: 1824358 - DNA, 15 bp, Homo sapiens
tcagagggattggta

SEQ ID NO: 1824359 - DNA, 15 bp, Homo sapiens
cagagggattggtat

SEQ ID NO: 1824360 - DNA, 15 bp, Homo sapiens
gggattggtatgaag

SEQ ID NO: 1824361 - DNA, 15 bp, Homo sapiens
ggattggtatgaagg

SEQ ID NO: 1824362 - DNA, 15 bp, Homo sapiens
gattggtatgaagga

SEQ ID NO: 1824363 - DNA, 15 bp, Homo sapiens
attggtatgaaggaa

SEQ ID NO: 1824364 - DNA, 15 bp, Homo sapiens
ttggtatgaaggaac

SEQ ID NO: 1824365 - DNA, 15 bp, Homo sapiens
tggtatgaaggaacg

SEQ ID NO: 1824366 - DNA, 15 bp, Homo sapiens
ggtatgaaggaacgc

SEQ ID NO: 1824367 - DNA, 15 bp, Homo sapiens
gtatgaaggaacgct

SEQ ID NO: 1824368 - DNA, 15 bp, Homo sapiens
tatgaaggaacgctt

SEQ ID NO: 1824369 - DNA, 15 bp, Homo sapiens
atgaaggaacgcttc

SEQ ID NO: 1824370 - DNA, 15 bp, Homo sapiens
tgaaggaacgcttca

SEQ ID NO: 1824371 - DNA, 15 bp, Homo sapiens
gaaggaacgcttcaa

SEQ ID NO: 1824372 - DNA, 15 bp, Homo sapiens
aaggaacgcttcaaa

SEQ ID NO: 1824373 - DNA, 15 bp, Homo sapiens
aggaacgcttcaaag

SEQ ID NO: 1824374 - DNA, 15 bp, Homo sapiens
ggaacgcttcaaaga

SEQ ID NO: 1824375 - DNA, 15 bp, Homo sapiens
gaacgcttcaaagat

SEQ ID NO: 1824376 - DNA, 15 bp, Homo sapiens
aacgcttcaaagatt

SEQ ID NO: 1824377 - DNA, 15 bp, Homo sapiens
acgcttcaaagattt

SEQ ID NO: 1824378 - DNA, 15 bp, Homo sapiens
cgcttcaaagatttt

SEQ ID NO: 1824379 - DNA, 15 bp, Homo sapiens
gcttcaaagattttt

SEQ ID NO: 1824380 - DNA, 15 bp, Homo sapiens
cttcaaagatttttt

SEQ ID NO: 1824381 - DNA, 15 bp, Homo sapiens
ttcaaagattttttt

SEQ ID NO: 1824382 - DNA, 15 bp, Homo sapiens
tcaaagatttttttt

SEQ ID NO: 1824383 - DNA, 15 bp, Homo sapiens
caaagattttttttt

SEQ ID NO: 1824384 - DNA, 15 bp, Homo sapiens
aagatttttttttta

SEQ ID NO: 1824385 - DNA, 15 bp, Homo sapiens
agattttttttttaa

SEQ ID NO: 1824386 - DNA, 15 bp, Homo sapiens
gattttttttttaat

SEQ ID NO: 1824387 - DNA, 15 bp, Homo sapiens
attttttttttaatt

SEQ ID NO: 1824388 - DNA, 15 bp, Homo sapiens
tttttttaatttaag

SEQ ID NO: 1824389 - DNA, 15 bp, Homo sapiens
ttttttaatttaagt

SEQ ID NO: 1824390 - DNA, 15 bp, Homo sapiens
tttttaatttaagtt

SEQ ID NO: 1824391 - DNA, 15 bp, Homo sapiens
ttttaatttaagttc

SEQ ID NO: 1824392 - DNA, 15 bp, Homo sapiens
tttaatttaagttcc

SEQ ID NO: 1824393 - DNA, 15 bp, Homo sapiens
ttaatttaagttcca

SEQ ID NO: 1824394 - DNA, 15 bp, Homo sapiens
taatttaagttccag

SEQ ID NO: 1824395 - DNA, 15 bp, Homo sapiens
aatttaagttccagg

SEQ ID NO: 1824396 - DNA, 15 bp, Homo sapiens
atttaagttccagga

SEQ ID NO: 1824397 - DNA, 15 bp, Homo sapiens
tttaagttccaggat

SEQ ID NO: 1824398 - DNA, 15 bp, Homo sapiens
ttaagttccaggata

SEQ ID NO: 1824399 - DNA, 15 bp, Homo sapiens
taagttccaggatac

SEQ ID NO: 1824400 - DNA, 15 bp, Homo sapiens
aagttccaggataca

SEQ ID NO: 1824401 - DNA, 15 bp, Homo sapiens
agttccaggatacag

SEQ ID NO: 1824402 - DNA, 15 bp, Homo sapiens
gttccaggatacagg

SEQ ID NO: 1824403 - DNA, 15 bp, Homo sapiens
ttccaggatacaggt

SEQ ID NO: 1824404 - DNA, 15 bp, Homo sapiens
tccaggatacaggtg

SEQ ID NO: 1824405 - DNA, 15 bp, Homo sapiens
ccaggatacaggtgc

SEQ ID NO: 1824406 - DNA, 15 bp, Homo sapiens
caggatacaggtgca

SEQ ID NO: 1824407 - DNA, 15 bp, Homo sapiens
aggatacaggtgcag

SEQ ID NO: 1824408 - DNA, 15 bp, Homo sapiens
ggatacaggtgcaga

SEQ ID NO: 1824409 - DNA, 15 bp, Homo sapiens
gatacaggtgcagaa

SEQ ID NO: 1824410 - DNA, 15 bp, Homo sapiens
atacaggtgcagaat

SEQ ID NO: 1824411 - DNA, 15 bp, Homo sapiens
tacaggtgcagaatg

SEQ ID NO: 1824412 - DNA, 15 bp, Homo sapiens
acaggtgcagaatgt

SEQ ID NO: 1824413 - DNA, 15 bp, Homo sapiens
caggtgcagaatgtg

SEQ ID NO: 1824414 - DNA, 15 bp, Homo sapiens
aggtgcagaatgtgt

SEQ ID NO: 1824415 - DNA, 15 bp, Homo sapiens
ggtgcagaatgtgta

SEQ ID NO: 1824416 - DNA, 15 bp, Homo sapiens
gtgcagaatgtgtag

SEQ ID NO: 1824417 - DNA, 15 bp, Homo sapiens
tgcagaatgtgtagg

SEQ ID NO: 1824418 - DNA, 15 bp, Homo sapiens
gcagaatgtgtaggt

SEQ ID NO: 1824419 - DNA, 15 bp, Homo sapiens
cagaatgtgtaggtt

SEQ ID NO: 1824420 - DNA, 15 bp, Homo sapiens
agaatgtgtaggttt

SEQ ID NO: 1824421 - DNA, 15 bp, Homo sapiens
gaatgtgtaggtttg

SEQ ID NO: 1824422 - DNA, 15 bp, Homo sapiens
aatgtgtaggtttgt

SEQ ID NO: 1824423 - DNA, 15 bp, Homo sapiens
atgtgtaggtttgtt

SEQ ID NO: 1824424 - DNA, 15 bp, Homo sapiens
tgtgtaggtttgtta

SEQ ID NO: 1824425 - DNA, 15 bp, Homo sapiens
gtgtaggtttgttac

SEQ ID NO: 1824426 - DNA, 15 bp, Homo sapiens
tgtaggtttgttaca

SEQ ID NO: 1824427 - DNA, 15 bp, Homo sapiens
gtaggtttgttacat

SEQ ID NO: 1824428 - DNA, 15 bp, Homo sapiens
taggtttgttacata

SEQ ID NO: 1824429 - DNA, 15 bp, Homo sapiens
aggtttgttacatac

SEQ ID NO: 1824430 - DNA, 15 bp, Homo sapiens
ggtttgttacatact

SEQ ID NO: 1824431 - DNA, 15 bp, Homo sapiens
gtttgttacatactt

SEQ ID NO: 1824432 - DNA, 15 bp, Homo sapiens
tttgttacatactta

SEQ ID NO: 1824433 - DNA, 15 bp, Homo sapiens
ttgttacatacttat

SEQ ID NO: 1824434 - DNA, 15 bp, Homo sapiens
tgttacatacttata

SEQ ID NO: 1824435 - DNA, 15 bp, Homo sapiens
gttacatacttatag

SEQ ID NO: 1824436 - DNA, 15 bp, Homo sapiens
ttacatacttatagg

SEQ ID NO: 1824437 - DNA, 15 bp, Homo sapiens
tacatacttataggt

SEQ ID NO: 1824438 - DNA, 15 bp, Homo sapiens
acatacttataggtg

SEQ ID NO: 1824439 - DNA, 15 bp, Homo sapiens
catacttataggtga

SEQ ID NO: 1824440 - DNA, 15 bp, Homo sapiens
atacttataggtgag

SEQ ID NO: 1824441 - DNA, 15 bp, Homo sapiens
tacttataggtgagc

SEQ ID NO: 1824442 - DNA, 15 bp, Homo sapiens
acttataggtgagcc

SEQ ID NO: 1824443 - DNA, 15 bp, Homo sapiens
cttataggtgagcca

SEQ ID NO: 1824444 - DNA, 15 bp, Homo sapiens
ttataggtgagccat

SEQ ID NO: 1824445 - DNA, 15 bp, Homo sapiens
tataggtgagccatg

SEQ ID NO: 1824446 - DNA, 15 bp, Homo sapiens
ataggtgagccatgg

SEQ ID NO: 1824447 - DNA, 15 bp, Homo sapiens
taggtgagccatggt

SEQ ID NO: 1824448 - DNA, 15 bp, Homo sapiens
aggtgagccatggtg

SEQ ID NO: 1824449 - DNA, 15 bp, Homo sapiens
ggtgagccatggtgg

SEQ ID NO: 1824450 - DNA, 15 bp, Homo sapiens
gtgagccatggtggt

SEQ ID NO: 1824451 - DNA, 15 bp, Homo sapiens
tgagccatggtggtt

SEQ ID NO: 1824452 - DNA, 15 bp, Homo sapiens
gagccatggtggttt

SEQ ID NO: 1824453 - DNA, 15 bp, Homo sapiens
agccatggtggtttg

SEQ ID NO: 1824454 - DNA, 15 bp, Homo sapiens
gccatggtggtttgc

SEQ ID NO: 1824455 - DNA, 15 bp, Homo sapiens
ccatggtggtttgct

SEQ ID NO: 1824456 - DNA, 15 bp, Homo sapiens
catggtggtttgctg

SEQ ID NO: 1824457 - DNA, 15 bp, Homo sapiens
atggtggtttgctgc

SEQ ID NO: 1824458 - DNA, 15 bp, Homo sapiens
tggtggtttgctgca

SEQ ID NO: 1824459 - DNA, 15 bp, Homo sapiens
ggtggtttgctgcac

SEQ ID NO: 1824460 - DNA, 15 bp, Homo sapiens
gtggtttgctgcacc

SEQ ID NO: 1824461 - DNA, 15 bp, Homo sapiens
tggtttgctgcacca

SEQ ID NO: 1824462 - DNA, 15 bp, Homo sapiens
ggtttgctgcaccaa

SEQ ID NO: 1824463 - DNA, 15 bp, Homo sapiens
gtttgctgcaccaat

SEQ ID NO: 1824464 - DNA, 15 bp, Homo sapiens
tttgctgcaccaatc

SEQ ID NO: 1824465 - DNA, 15 bp, Homo sapiens
ttgctgcaccaatca

SEQ ID NO: 1824466 - DNA, 15 bp, Homo sapiens
tgctgcaccaatcaa

SEQ ID NO: 1824467 - DNA, 15 bp, Homo sapiens
gctgcaccaatcaac

SEQ ID NO: 1824468 - DNA, 15 bp, Homo sapiens
ctgcaccaatcaacc

SEQ ID NO: 1824469 - DNA, 15 bp, Homo sapiens
tgcaccaatcaaccc

SEQ ID NO: 1824470 - DNA, 15 bp, Homo sapiens
gcaccaatcaacccc

SEQ ID NO: 1824471 - DNA, 15 bp, Homo sapiens
caccaatcaacccct

SEQ ID NO: 1824472 - DNA, 15 bp, Homo sapiens
accaatcaacccctc

SEQ ID NO: 1824473 - DNA, 15 bp, Homo sapiens
ccaatcaacccctca

SEQ ID NO: 1824474 - DNA, 15 bp, Homo sapiens
caatcaacccctcat

SEQ ID NO: 1824475 - DNA, 15 bp, Homo sapiens
aatcaacccctcatc

SEQ ID NO: 1824476 - DNA, 15 bp, Homo sapiens
atcaacccctcatct

SEQ ID NO: 1824477 - DNA, 15 bp, Homo sapiens
tcaacccctcatcta

SEQ ID NO: 1824478 - DNA, 15 bp, Homo sapiens
caacccctcatctag

SEQ ID NO: 1824479 - DNA, 15 bp, Homo sapiens
aacccctcatctagg

SEQ ID NO: 1824480 - DNA, 15 bp, Homo sapiens
acccctcatctaggt

SEQ ID NO: 1824481 - DNA, 15 bp, Homo sapiens
cccctcatctaggtt

SEQ ID NO: 1824482 - DNA, 15 bp, Homo sapiens
ccctcatctaggttt

SEQ ID NO: 1824483 - DNA, 15 bp, Homo sapiens
cctcatctaggtttt

SEQ ID NO: 1824484 - DNA, 15 bp, Homo sapiens
ctcatctaggtttta

SEQ ID NO: 1824485 - DNA, 15 bp, Homo sapiens
tcatctaggttttat

SEQ ID NO: 1824486 - DNA, 15 bp, Homo sapiens
catctaggttttatt

SEQ ID NO: 1824487 - DNA, 15 bp, Homo sapiens
atctaggttttattt

SEQ ID NO: 1824488 - DNA, 15 bp, Homo sapiens
tctaggttttattta

SEQ ID NO: 1824489 - DNA, 15 bp, Homo sapiens
ctaggttttatttat

SEQ ID NO: 1824490 - DNA, 15 bp, Homo sapiens
taggttttatttata

SEQ ID NO: 1824491 - DNA, 15 bp, Homo sapiens
aggttttatttatat

SEQ ID NO: 1824492 - DNA, 15 bp, Homo sapiens
ggttttatttatatt

SEQ ID NO: 1824493 - DNA, 15 bp, Homo sapiens
gttttatttatattt

SEQ ID NO: 1824494 - DNA, 15 bp, Homo sapiens
ttttatttatatttt

SEQ ID NO: 1824495 - DNA, 15 bp, Homo sapiens
tttatttatattttt

SEQ ID NO: 1824496 - DNA, 15 bp, Homo sapiens
ttatttatatttttt

SEQ ID NO: 1824497 - DNA, 15 bp, Homo sapiens
tatttatattttttt

SEQ ID NO: 1824498 - DNA, 15 bp, Homo sapiens
atttatatttttttt

SEQ ID NO: 1824499 - DNA, 15 bp, Homo sapiens
tttatattttttttt

SEQ ID NO: 1824500 - DNA, 15 bp, Homo sapiens
ttatatttttttttg

SEQ ID NO: 1824501 - DNA, 15 bp, Homo sapiens
tatatttttttttga

SEQ ID NO: 1824502 - DNA, 15 bp, Homo sapiens
atatttttttttgag

SEQ ID NO: 1824503 - DNA, 15 bp, Homo sapiens
tatttttttttgaga

SEQ ID NO: 1824504 - DNA, 15 bp, Homo sapiens
gagtttcgctcttgc

SEQ ID NO: 1824505 - DNA, 15 bp, Homo sapiens
agtttcgctcttgct

SEQ ID NO: 1824506 - DNA, 15 bp, Homo sapiens
gtttcgctcttgctg

SEQ ID NO: 1824507 - DNA, 15 bp, Homo sapiens
tttcgctcttgctgc

SEQ ID NO: 1824508 - DNA, 15 bp, Homo sapiens
ttcgctcttgctgcc

SEQ ID NO: 1824509 - DNA, 15 bp, Homo sapiens
tcgctcttgctgccc

SEQ ID NO: 1824510 - DNA, 15 bp, Homo sapiens
cgctcttgctgccca

SEQ ID NO: 1824511 - DNA, 15 bp, Homo sapiens
gctcttgctgcccag

SEQ ID NO: 1824512 - DNA, 15 bp, Homo sapiens
ctcttgctgcccagg

SEQ ID NO: 1824513 - DNA, 15 bp, Homo sapiens
tcttgctgcccaggc

SEQ ID NO: 1824514 - DNA, 15 bp, Homo sapiens
cttgctgcccaggct

SEQ ID NO: 1824515 - DNA, 15 bp, Homo sapiens
ttgctgcccaggctg

SEQ ID NO: 1824516 - DNA, 15 bp, Homo sapiens
gctgcccaggctggt

SEQ ID NO: 1824517 - DNA, 15 bp, Homo sapiens
ctgcccaggctggtg

SEQ ID NO: 1824518 - DNA, 15 bp, Homo sapiens
tgcccaggctggtgt

SEQ ID NO: 1824519 - DNA, 15 bp, Homo sapiens
gcccaggctggtgtg

SEQ ID NO: 1824520 - DNA, 15 bp, Homo sapiens
ccaggctggtgtgca

SEQ ID NO: 1824521 - DNA, 15 bp, Homo sapiens
caggctggtgtgcaa

SEQ ID NO: 1824522 - DNA, 15 bp, Homo sapiens
aggctggtgtgcaat

SEQ ID NO: 1824523 - DNA, 15 bp, Homo sapiens
ggctggtgtgcaatg

SEQ ID NO: 1824524 - DNA, 15 bp, Homo sapiens
gctggtgtgcaatgg

SEQ ID NO: 1824525 - DNA, 15 bp, Homo sapiens
ctggtgtgcaatggt

SEQ ID NO: 1824526 - DNA, 15 bp, Homo sapiens
tggtgtgcaatggtg

SEQ ID NO: 1824527 - DNA, 15 bp, Homo sapiens
ggtgtgcaatggtgc

SEQ ID NO: 1824528 - DNA, 15 bp, Homo sapiens
gtgtgcaatggtgcg

SEQ ID NO: 1824529 - DNA, 15 bp, Homo sapiens
tgtgcaatggtgcga

SEQ ID NO: 1824530 - DNA, 15 bp, Homo sapiens
gtgcaatggtgcgat

SEQ ID NO: 1824531 - DNA, 15 bp, Homo sapiens
tgcaatggtgcgatc

SEQ ID NO: 1824532 - DNA, 15 bp, Homo sapiens
gcaatggtgcgatct

SEQ ID NO: 1824533 - DNA, 15 bp, Homo sapiens
caatggtgcgatctc

SEQ ID NO: 1824534 - DNA, 15 bp, Homo sapiens
aatggtgcgatctcg

SEQ ID NO: 1824535 - DNA, 15 bp, Homo sapiens
atggtgcgatctcgg

SEQ ID NO: 1824536 - DNA, 15 bp, Homo sapiens
cgatctcggctcacc

SEQ ID NO: 1824537 - DNA, 15 bp, Homo sapiens
gatctcggctcaccg

SEQ ID NO: 1824538 - DNA, 15 bp, Homo sapiens
ggctcaccgcaacct

SEQ ID NO: 1824539 - DNA, 15 bp, Homo sapiens
ctcaccgcaacctct

SEQ ID NO: 1824540 - DNA, 15 bp, Homo sapiens
tcaccgcaacctctg

SEQ ID NO: 1824541 - DNA, 15 bp, Homo sapiens
caccgcaacctctgc

SEQ ID NO: 1824542 - DNA, 15 bp, Homo sapiens
cgcaacctctgcctg

SEQ ID NO: 1824543 - DNA, 15 bp, Homo sapiens
gcaacctctgcctgc

SEQ ID NO: 1824544 - DNA, 15 bp, Homo sapiens
caacctctgcctgct

SEQ ID NO: 1824545 - DNA, 15 bp, Homo sapiens
aacctctgcctgctg

SEQ ID NO: 1824546 - DNA, 15 bp, Homo sapiens
acctctgcctgctgg

SEQ ID NO: 1824547 - DNA, 15 bp, Homo sapiens
cctctgcctgctggg

SEQ ID NO: 1824548 - DNA, 15 bp, Homo sapiens
ctctgcctgctgggt

SEQ ID NO: 1824549 - DNA, 15 bp, Homo sapiens
tctgcctgctgggtt

SEQ ID NO: 1824550 - DNA, 15 bp, Homo sapiens
ctgcctgctgggttc

SEQ ID NO: 1824551 - DNA, 15 bp, Homo sapiens
tgcctgctgggttca

SEQ ID NO: 1824552 - DNA, 15 bp, Homo sapiens
gcctgctgggttcaa

SEQ ID NO: 1824553 - DNA, 15 bp, Homo sapiens
cctgctgggttcaag

SEQ ID NO: 1824554 - DNA, 15 bp, Homo sapiens
ctgctgggttcaagc

SEQ ID NO: 1824555 - DNA, 15 bp, Homo sapiens
tgctgggttcaagcg

SEQ ID NO: 1824556 - DNA, 15 bp, Homo sapiens
gctgggttcaagcga

SEQ ID NO: 1824557 - DNA, 15 bp, Homo sapiens
ctgcctcagccttct

SEQ ID NO: 1824558 - DNA, 15 bp, Homo sapiens
gtgccaccacgcccg

SEQ ID NO: 1824559 - DNA, 15 bp, Homo sapiens
tggtctcgaacttcc

SEQ ID NO: 1824560 - DNA, 15 bp, Homo sapiens
ggtctcgaacttccg

SEQ ID NO: 1824561 - DNA, 15 bp, Homo sapiens
gtctcgaacttccga

SEQ ID NO: 1824562 - DNA, 15 bp, Homo sapiens
tctcgaacttccgac

SEQ ID NO: 1824563 - DNA, 15 bp, Homo sapiens
ctcgaacttccgact

SEQ ID NO: 1824564 - DNA, 15 bp, Homo sapiens
tcgaacttccgactt

SEQ ID NO: 1824565 - DNA, 15 bp, Homo sapiens
cgaacttccgacttc

SEQ ID NO: 1824566 - DNA, 15 bp, Homo sapiens
gaacttccgacttca

SEQ ID NO: 1824567 - DNA, 15 bp, Homo sapiens
aacttccgacttcag

SEQ ID NO: 1824568 - DNA, 15 bp, Homo sapiens
acttccgacttcagg

SEQ ID NO: 1824569 - DNA, 15 bp, Homo sapiens
cttccgacttcaggt

SEQ ID NO: 1824570 - DNA, 15 bp, Homo sapiens
ttccgacttcaggtg

SEQ ID NO: 1824571 - DNA, 15 bp, Homo sapiens
tccgacttcaggtga

SEQ ID NO: 1824572 - DNA, 15 bp, Homo sapiens
cttcaggtgatctgt

SEQ ID NO: 1824573 - DNA, 15 bp, Homo sapiens
ttcaggtgatctgtc

SEQ ID NO: 1824574 - DNA, 15 bp, Homo sapiens
tcaggtgatctgtcc

SEQ ID NO: 1824575 - DNA, 15 bp, Homo sapiens
caggtgatctgtccg

SEQ ID NO: 1824576 - DNA, 15 bp, Homo sapiens
aggtgatctgtccgc

SEQ ID NO: 1824577 - DNA, 15 bp, Homo sapiens
ggtgatctgtccgcc

SEQ ID NO: 1824578 - DNA, 15 bp, Homo sapiens
tgatctgtccgcctc

SEQ ID NO: 1824579 - DNA, 15 bp, Homo sapiens
gatctgtccgcctcg

SEQ ID NO: 1824580 - DNA, 15 bp, Homo sapiens
atctgtccgcctcgg

SEQ ID NO: 1824581 - DNA, 15 bp, Homo sapiens
tctgtccgcctcggc

SEQ ID NO: 1824582 - DNA, 15 bp, Homo sapiens
ctgtccgcctcggcc

SEQ ID NO: 1824583 - DNA, 15 bp, Homo sapiens
tgtccgcctcggcct

SEQ ID NO: 1824584 - DNA, 15 bp, Homo sapiens
gtccgcctcggcctc

SEQ ID NO: 1824585 - DNA, 15 bp, Homo sapiens
tccgcctcggcctcc

SEQ ID NO: 1824586 - DNA, 15 bp, Homo sapiens
tgggattacaggcag

SEQ ID NO: 1824587 - DNA, 15 bp, Homo sapiens
gggattacaggcagc

SEQ ID NO: 1824588 - DNA, 15 bp, Homo sapiens
ggattacaggcagca

SEQ ID NO: 1824589 - DNA, 15 bp, Homo sapiens
gattacaggcagcag

SEQ ID NO: 1824590 - DNA, 15 bp, Homo sapiens
attacaggcagcagc

SEQ ID NO: 1824591 - DNA, 15 bp, Homo sapiens
ttacaggcagcagcc

SEQ ID NO: 1824592 - DNA, 15 bp, Homo sapiens
tacaggcagcagcca

SEQ ID NO: 1824593 - DNA, 15 bp, Homo sapiens
acaggcagcagccac

SEQ ID NO: 1824594 - DNA, 15 bp, Homo sapiens
caggcagcagccacc

SEQ ID NO: 1824595 - DNA, 15 bp, Homo sapiens
aggcagcagccaccg

SEQ ID NO: 1824596 - DNA, 15 bp, Homo sapiens
ggcagcagccaccgc

SEQ ID NO: 1824597 - DNA, 15 bp, Homo sapiens
gcagcagccaccgcg

SEQ ID NO: 1824598 - DNA, 15 bp, Homo sapiens
cagcagccaccgcgc

SEQ ID NO: 1824599 - DNA, 15 bp, Homo sapiens
agcagccaccgcgcc

SEQ ID NO: 1824600 - DNA, 15 bp, Homo sapiens
gcagccaccgcgccc

SEQ ID NO: 1824601 - DNA, 15 bp, Homo sapiens
cagccaccgcgccca

SEQ ID NO: 1824602 - DNA, 15 bp, Homo sapiens
accgcgcccagccag

SEQ ID NO: 1824603 - DNA, 15 bp, Homo sapiens
ccgcgcccagccagg

SEQ ID NO: 1824604 - DNA, 15 bp, Homo sapiens
cgcgcccagccaggt

SEQ ID NO: 1824605 - DNA, 15 bp, Homo sapiens
gcgcccagccaggtt

SEQ ID NO: 1824606 - DNA, 15 bp, Homo sapiens
cgcccagccaggttt

SEQ ID NO: 1824607 - DNA, 15 bp, Homo sapiens
gcccagccaggtttt

SEQ ID NO: 1824608 - DNA, 15 bp, Homo sapiens
cccagccaggtttta

SEQ ID NO: 1824609 - DNA, 15 bp, Homo sapiens
ccagccaggttttaa

SEQ ID NO: 1824610 - DNA, 15 bp, Homo sapiens
cagccaggttttaag

SEQ ID NO: 1824611 - DNA, 15 bp, Homo sapiens
agccaggttttaagt

SEQ ID NO: 1824612 - DNA, 15 bp, Homo sapiens
gccaggttttaagtc

SEQ ID NO: 1824613 - DNA, 15 bp, Homo sapiens
ccaggttttaagtcc

SEQ ID NO: 1824614 - DNA, 15 bp, Homo sapiens
caggttttaagtccc

SEQ ID NO: 1824615 - DNA, 15 bp, Homo sapiens
aggttttaagtcccg

SEQ ID NO: 1824616 - DNA, 15 bp, Homo sapiens
ggttttaagtcccgc

SEQ ID NO: 1824617 - DNA, 15 bp, Homo sapiens
gttttaagtcccgca

SEQ ID NO: 1824618 - DNA, 15 bp, Homo sapiens
ttttaagtcccgcat

SEQ ID NO: 1824619 - DNA, 15 bp, Homo sapiens
tttaagtcccgcatg

SEQ ID NO: 1824620 - DNA, 15 bp, Homo sapiens
ttaagtcccgcatgc

SEQ ID NO: 1824621 - DNA, 15 bp, Homo sapiens
taagtcccgcatgca

SEQ ID NO: 1824622 - DNA, 15 bp, Homo sapiens
aagtcccgcatgcat

SEQ ID NO: 1824623 - DNA, 15 bp, Homo sapiens
agtcccgcatgcatt

SEQ ID NO: 1824624 - DNA, 15 bp, Homo sapiens
gtcccgcatgcatta

SEQ ID NO: 1824625 - DNA, 15 bp, Homo sapiens
tcccgcatgcattag

SEQ ID NO: 1824626 - DNA, 15 bp, Homo sapiens
cccgcatgcattagc

SEQ ID NO: 1824627 - DNA, 15 bp, Homo sapiens
ccgcatgcattagct

SEQ ID NO: 1824628 - DNA, 15 bp, Homo sapiens
cgcatgcattagcta

SEQ ID NO: 1824629 - DNA, 15 bp, Homo sapiens
gcatgcattagctat

SEQ ID NO: 1824630 - DNA, 15 bp, Homo sapiens
catgcattagctatt

SEQ ID NO: 1824631 - DNA, 15 bp, Homo sapiens
atgcattagctattt

SEQ ID NO: 1824632 - DNA, 15 bp, Homo sapiens
tgcattagctatttg

SEQ ID NO: 1824633 - DNA, 15 bp, Homo sapiens
gcattagctatttgt

SEQ ID NO: 1824634 - DNA, 15 bp, Homo sapiens
cattagctatttgtc

SEQ ID NO: 1824635 - DNA, 15 bp, Homo sapiens
attagctatttgtcc

SEQ ID NO: 1824636 - DNA, 15 bp, Homo sapiens
ttagctatttgtcct

SEQ ID NO: 1824637 - DNA, 15 bp, Homo sapiens
tagctatttgtccta

SEQ ID NO: 1824638 - DNA, 15 bp, Homo sapiens
agctatttgtcctaa

SEQ ID NO: 1824639 - DNA, 15 bp, Homo sapiens
gctatttgtcctaat

SEQ ID NO: 1824640 - DNA, 15 bp, Homo sapiens
ctatttgtcctaatg

SEQ ID NO: 1824641 - DNA, 15 bp, Homo sapiens
tatttgtcctaatgc

SEQ ID NO: 1824642 - DNA, 15 bp, Homo sapiens
atttgtcctaatgct

SEQ ID NO: 1824643 - DNA, 15 bp, Homo sapiens
tttgtcctaatgctc

SEQ ID NO: 1824644 - DNA, 15 bp, Homo sapiens
ttgtcctaatgctct

SEQ ID NO: 1824645 - DNA, 15 bp, Homo sapiens
tgtcctaatgctctc

SEQ ID NO: 1824646 - DNA, 15 bp, Homo sapiens
gtcctaatgctctcc

SEQ ID NO: 1824647 - DNA, 15 bp, Homo sapiens
tcctaatgctctccc

SEQ ID NO: 1824648 - DNA, 15 bp, Homo sapiens
cctaatgctctccct

SEQ ID NO: 1824649 - DNA, 15 bp, Homo sapiens
ctaatgctctccctc

SEQ ID NO: 1824650 - DNA, 15 bp, Homo sapiens
taatgctctccctcc

SEQ ID NO: 1824651 - DNA, 15 bp, Homo sapiens
tgctctccctcccct

SEQ ID NO: 1824652 - DNA, 15 bp, Homo sapiens
gctctccctcccctt

SEQ ID NO: 1824653 - DNA, 15 bp, Homo sapiens
ctctccctccccttg

SEQ ID NO: 1824654 - DNA, 15 bp, Homo sapiens
tctccctccccttga

SEQ ID NO: 1824655 - DNA, 15 bp, Homo sapiens
ctccctccccttgac

SEQ ID NO: 1824656 - DNA, 15 bp, Homo sapiens
tccctccccttgacc

SEQ ID NO: 1824657 - DNA, 15 bp, Homo sapiens
ccctccccttgaccc

SEQ ID NO: 1824658 - DNA, 15 bp, Homo sapiens
cctccccttgacccc

SEQ ID NO: 1824659 - DNA, 15 bp, Homo sapiens
ctccccttgaccccc

SEQ ID NO: 1824660 - DNA, 15 bp, Homo sapiens
tccccttgaccccca

SEQ ID NO: 1824661 - DNA, 15 bp, Homo sapiens
ccccttgacccccac

SEQ ID NO: 1824662 - DNA, 15 bp, Homo sapiens
cccttgacccccacg

SEQ ID NO: 1824663 - DNA, 15 bp, Homo sapiens
ccttgacccccacgc

SEQ ID NO: 1824664 - DNA, 15 bp, Homo sapiens
cttgacccccacgca

SEQ ID NO: 1824665 - DNA, 15 bp, Homo sapiens
ttgacccccacgcaa

SEQ ID NO: 1824666 - DNA, 15 bp, Homo sapiens
tgacccccacgcaac

SEQ ID NO: 1824667 - DNA, 15 bp, Homo sapiens
gacccccacgcaacc

SEQ ID NO: 1824668 - DNA, 15 bp, Homo sapiens
acccccacgcaacca

SEQ ID NO: 1824669 - DNA, 15 bp, Homo sapiens
cccccacgcaaccaa

SEQ ID NO: 1824670 - DNA, 15 bp, Homo sapiens
ccccacgcaaccaaa

SEQ ID NO: 1824671 - DNA, 15 bp, Homo sapiens
cccacgcaaccaaag

SEQ ID NO: 1824672 - DNA, 15 bp, Homo sapiens
ccacgcaaccaaaga

SEQ ID NO: 1824673 - DNA, 15 bp, Homo sapiens
cacgcaaccaaagat

SEQ ID NO: 1824674 - DNA, 15 bp, Homo sapiens
acgcaaccaaagatg

SEQ ID NO: 1824675 - DNA, 15 bp, Homo sapiens
cgcaaccaaagatgg

SEQ ID NO: 1824676 - DNA, 15 bp, Homo sapiens
gcaaccaaagatggt

SEQ ID NO: 1824677 - DNA, 15 bp, Homo sapiens
caaccaaagatggtt

SEQ ID NO: 1824678 - DNA, 15 bp, Homo sapiens
aaccaaagatggttt

SEQ ID NO: 1824679 - DNA, 15 bp, Homo sapiens
accaaagatggtttt

SEQ ID NO: 1824680 - DNA, 15 bp, Homo sapiens
ccaaagatggtttta

SEQ ID NO: 1824681 - DNA, 15 bp, Homo sapiens
caaagatggttttaa

SEQ ID NO: 1824682 - DNA, 15 bp, Homo sapiens
aaagatggttttaag

SEQ ID NO: 1824683 - DNA, 15 bp, Homo sapiens
aagatggttttaagg

SEQ ID NO: 1824684 - DNA, 15 bp, Homo sapiens
agatggttttaaggc

SEQ ID NO: 1824685 - DNA, 15 bp, Homo sapiens
gatggttttaaggct

SEQ ID NO: 1824686 - DNA, 15 bp, Homo sapiens
atggttttaaggctt

SEQ ID NO: 1824687 - DNA, 15 bp, Homo sapiens
tggttttaaggcttc

SEQ ID NO: 1824688 - DNA, 15 bp, Homo sapiens
ggttttaaggcttct

SEQ ID NO: 1824689 - DNA, 15 bp, Homo sapiens
gttttaaggcttcta

SEQ ID NO: 1824690 - DNA, 15 bp, Homo sapiens
ttttaaggcttctag

SEQ ID NO: 1824691 - DNA, 15 bp, Homo sapiens
tttaaggcttctagg

SEQ ID NO: 1824692 - DNA, 15 bp, Homo sapiens
ttaaggcttctagga

SEQ ID NO: 1824693 - DNA, 15 bp, Homo sapiens
taaggcttctaggac

SEQ ID NO: 1824694 - DNA, 15 bp, Homo sapiens
aaggcttctaggact

SEQ ID NO: 1824695 - DNA, 15 bp, Homo sapiens
aggcttctaggactg

SEQ ID NO: 1824696 - DNA, 15 bp, Homo sapiens
ggcttctaggactgg

SEQ ID NO: 1824697 - DNA, 15 bp, Homo sapiens
gcttctaggactgga

SEQ ID NO: 1824698 - DNA, 15 bp, Homo sapiens
cttctaggactggag

SEQ ID NO: 1824699 - DNA, 15 bp, Homo sapiens
ttctaggactggaga

SEQ ID NO: 1824700 - DNA, 15 bp, Homo sapiens
tctaggactggagat

SEQ ID NO: 1824701 - DNA, 15 bp, Homo sapiens
ctaggactggagatg

SEQ ID NO: 1824702 - DNA, 15 bp, Homo sapiens
taggactggagatga

SEQ ID NO: 1824703 - DNA, 15 bp, Homo sapiens
aggactggagatgat

SEQ ID NO: 1824704 - DNA, 15 bp, Homo sapiens
ggactggagatgatt

SEQ ID NO: 1824705 - DNA, 15 bp, Homo sapiens
gactggagatgatta

SEQ ID NO: 1824706 - DNA, 15 bp, Homo sapiens
actggagatgattac

SEQ ID NO: 1824707 - DNA, 15 bp, Homo sapiens
ctggagatgattact

SEQ ID NO: 1824708 - DNA, 15 bp, Homo sapiens
tggagatgattactt

SEQ ID NO: 1824709 - DNA, 15 bp, Homo sapiens
ggagatgattacttt

SEQ ID NO: 1824710 - DNA, 15 bp, Homo sapiens
gagatgattactttc

SEQ ID NO: 1824711 - DNA, 15 bp, Homo sapiens
agatgattactttca

SEQ ID NO: 1824712 - DNA, 15 bp, Homo sapiens
gatgattactttcag

SEQ ID NO: 1824713 - DNA, 15 bp, Homo sapiens
atgattactttcaga

SEQ ID NO: 1824714 - DNA, 15 bp, Homo sapiens
tgattactttcagaa

SEQ ID NO: 1824715 - DNA, 15 bp, Homo sapiens
gattactttcagaaa

SEQ ID NO: 1824716 - DNA, 15 bp, Homo sapiens
attactttcagaaat

SEQ ID NO: 1824717 - DNA, 15 bp, Homo sapiens
ttactttcagaaatg

SEQ ID NO: 1824718 - DNA, 15 bp, Homo sapiens
tactttcagaaatga

SEQ ID NO: 1824719 - DNA, 15 bp, Homo sapiens
actttcagaaatgaa

SEQ ID NO: 1824720 - DNA, 15 bp, Homo sapiens
ctttcagaaatgaat

SEQ ID NO: 1824721 - DNA, 15 bp, Homo sapiens
tttcagaaatgaata

SEQ ID NO: 1824722 - DNA, 15 bp, Homo sapiens
ttcagaaatgaatag

SEQ ID NO: 1824723 - DNA, 15 bp, Homo sapiens
tcagaaatgaatagt

SEQ ID NO: 1824724 - DNA, 15 bp, Homo sapiens
cagaaatgaatagtg

SEQ ID NO: 1824725 - DNA, 15 bp, Homo sapiens
agaaatgaatagtgg

SEQ ID NO: 1824726 - DNA, 15 bp, Homo sapiens
gaaatgaatagtggt

SEQ ID NO: 1824727 - DNA, 15 bp, Homo sapiens
aaatgaatagtggtg

SEQ ID NO: 1824728 - DNA, 15 bp, Homo sapiens
aatgaatagtggtga

SEQ ID NO: 1824729 - DNA, 15 bp, Homo sapiens
atgaatagtggtgac

SEQ ID NO: 1824730 - DNA, 15 bp, Homo sapiens
tgaatagtggtgacc

SEQ ID NO: 1824731 - DNA, 15 bp, Homo sapiens
gaatagtggtgacca

SEQ ID NO: 1824732 - DNA, 15 bp, Homo sapiens
aatagtggtgaccag

SEQ ID NO: 1824733 - DNA, 15 bp, Homo sapiens
atagtggtgaccaga

SEQ ID NO: 1824734 - DNA, 15 bp, Homo sapiens
tagtggtgaccagat

SEQ ID NO: 1824735 - DNA, 15 bp, Homo sapiens
agtggtgaccagatg

SEQ ID NO: 1824736 - DNA, 15 bp, Homo sapiens
gtggtgaccagatga

SEQ ID NO: 1824737 - DNA, 15 bp, Homo sapiens
tggtgaccagatgaa

SEQ ID NO: 1824738 - DNA, 15 bp, Homo sapiens
ggtgaccagatgaaa

SEQ ID NO: 1824739 - DNA, 15 bp, Homo sapiens
gtgaccagatgaaat

SEQ ID NO: 1824740 - DNA, 15 bp, Homo sapiens
tgaccagatgaaata

SEQ ID NO: 1824741 - DNA, 15 bp, Homo sapiens
gaccagatgaaataa

SEQ ID NO: 1824742 - DNA, 15 bp, Homo sapiens
accagatgaaataag

SEQ ID NO: 1824743 - DNA, 15 bp, Homo sapiens
ccagatgaaataaga

SEQ ID NO: 1824744 - DNA, 15 bp, Homo sapiens
cagatgaaataagac

SEQ ID NO: 1824745 - DNA, 15 bp, Homo sapiens
agatgaaataagact

SEQ ID NO: 1824746 - DNA, 15 bp, Homo sapiens
gatgaaataagactt

SEQ ID NO: 1824747 - DNA, 15 bp, Homo sapiens
atgaaataagacttt

SEQ ID NO: 1824748 - DNA, 15 bp, Homo sapiens
tgaaataagactttt

SEQ ID NO: 1824749 - DNA, 15 bp, Homo sapiens
gaaataagacttttg

SEQ ID NO: 1824750 - DNA, 15 bp, Homo sapiens
aaataagacttttgg

SEQ ID NO: 1824751 - DNA, 15 bp, Homo sapiens
aataagacttttgga

SEQ ID NO: 1824752 - DNA, 15 bp, Homo sapiens
ataagacttttggat

SEQ ID NO: 1824753 - DNA, 15 bp, Homo sapiens
taagacttttggatg

SEQ ID NO: 1824754 - DNA, 15 bp, Homo sapiens
aagacttttggatgt

SEQ ID NO: 1824755 - DNA, 15 bp, Homo sapiens
agacttttggatgta

SEQ ID NO: 1824756 - DNA, 15 bp, Homo sapiens
gacttttggatgtag

SEQ ID NO: 1824757 - DNA, 15 bp, Homo sapiens
acttttggatgtaga

SEQ ID NO: 1824758 - DNA, 15 bp, Homo sapiens
cttttggatgtagat

SEQ ID NO: 1824759 - DNA, 15 bp, Homo sapiens
ttttggatgtagata

SEQ ID NO: 1824760 - DNA, 15 bp, Homo sapiens
tttggatgtagatag

SEQ ID NO: 1824761 - DNA, 15 bp, Homo sapiens
ttggatgtagatagg

SEQ ID NO: 1824762 - DNA, 15 bp, Homo sapiens
tggatgtagatagga

SEQ ID NO: 1824763 - DNA, 15 bp, Homo sapiens
ggatgtagataggac

SEQ ID NO: 1824764 - DNA, 15 bp, Homo sapiens
gatgtagataggacc

SEQ ID NO: 1824765 - DNA, 15 bp, Homo sapiens
atgtagataggacct

SEQ ID NO: 1824766 - DNA, 15 bp, Homo sapiens
tgtagataggacctt

SEQ ID NO: 1824767 - DNA, 15 bp, Homo sapiens
gtagataggacctta

SEQ ID NO: 1824768 - DNA, 15 bp, Homo sapiens
tagataggaccttag

SEQ ID NO: 1824769 - DNA, 15 bp, Homo sapiens
agataggaccttagc

SEQ ID NO: 1824770 - DNA, 15 bp, Homo sapiens
gataggaccttagcg

SEQ ID NO: 1824771 - DNA, 15 bp, Homo sapiens
ataggaccttagcga

SEQ ID NO: 1824772 - DNA, 15 bp, Homo sapiens
taggaccttagcgat

SEQ ID NO: 1824773 - DNA, 15 bp, Homo sapiens
aggaccttagcgata

SEQ ID NO: 1824774 - DNA, 15 bp, Homo sapiens
ggaccttagcgatat

SEQ ID NO: 1824775 - DNA, 15 bp, Homo sapiens
gaccttagcgatata

SEQ ID NO: 1824776 - DNA, 15 bp, Homo sapiens
accttagcgatatat

SEQ ID NO: 1824777 - DNA, 15 bp, Homo sapiens
ccttagcgatatatt

SEQ ID NO: 1824778 - DNA, 15 bp, Homo sapiens
cttagcgatatattt

SEQ ID NO: 1824779 - DNA, 15 bp, Homo sapiens
ttagcgatatatttc

SEQ ID NO: 1824780 - DNA, 15 bp, Homo sapiens
tagcgatatatttcc

SEQ ID NO: 1824781 - DNA, 15 bp, Homo sapiens
agcgatatatttcca

SEQ ID NO: 1824782 - DNA, 15 bp, Homo sapiens
gcgatatatttccag

SEQ ID NO: 1824783 - DNA, 15 bp, Homo sapiens
cgatatatttccagc

SEQ ID NO: 1824784 - DNA, 15 bp, Homo sapiens
gatatatttccagct

SEQ ID NO: 1824785 - DNA, 15 bp, Homo sapiens
atatatttccagctt

SEQ ID NO: 1824786 - DNA, 15 bp, Homo sapiens
tatatttccagcttt

SEQ ID NO: 1824787 - DNA, 15 bp, Homo sapiens
atatttccagctttt

SEQ ID NO: 1824788 - DNA, 15 bp, Homo sapiens
tatttccagcttttt

SEQ ID NO: 1824789 - DNA, 15 bp, Homo sapiens
atttccagcttttta

SEQ ID NO: 1824790 - DNA, 15 bp, Homo sapiens
tttccagctttttat

SEQ ID NO: 1824791 - DNA, 15 bp, Homo sapiens
ttccagctttttatt

SEQ ID NO: 1824792 - DNA, 15 bp, Homo sapiens
tccagctttttattt

SEQ ID NO: 1824793 - DNA, 15 bp, Homo sapiens
ccagctttttatttt

SEQ ID NO: 1824794 - DNA, 15 bp, Homo sapiens
cagctttttattttt

SEQ ID NO: 1824795 - DNA, 15 bp, Homo sapiens
agctttttatttttt

SEQ ID NO: 1824796 - DNA, 15 bp, Homo sapiens
gctttttatttttta

SEQ ID NO: 1824797 - DNA, 15 bp, Homo sapiens
ctttttattttttat

SEQ ID NO: 1824798 - DNA, 15 bp, Homo sapiens
tttttattttttatt

SEQ ID NO: 1824799 - DNA, 15 bp, Homo sapiens
ttttattttttattt

SEQ ID NO: 1824800 - DNA, 15 bp, Homo sapiens
tttattttttatttt

SEQ ID NO: 1824801 - DNA, 15 bp, Homo sapiens
ttattttttatttta

SEQ ID NO: 1824802 - DNA, 15 bp, Homo sapiens
tattttttattttaa

SEQ ID NO: 1824803 - DNA, 15 bp, Homo sapiens
attttttattttaag

SEQ ID NO: 1824804 - DNA, 15 bp, Homo sapiens
ttttttattttaagg

SEQ ID NO: 1824805 - DNA, 15 bp, Homo sapiens
tttttattttaagga

SEQ ID NO: 1824806 - DNA, 15 bp, Homo sapiens
ttttattttaaggat

SEQ ID NO: 1824807 - DNA, 15 bp, Homo sapiens
tttattttaaggatg

SEQ ID NO: 1824808 - DNA, 15 bp, Homo sapiens
ttattttaaggatga

SEQ ID NO: 1824809 - DNA, 15 bp, Homo sapiens
tattttaaggatgaa

SEQ ID NO: 1824810 - DNA, 15 bp, Homo sapiens
attttaaggatgaag

SEQ ID NO: 1824811 - DNA, 15 bp, Homo sapiens
ttttaaggatgaaga

SEQ ID NO: 1824812 - DNA, 15 bp, Homo sapiens
tttaaggatgaagaa

SEQ ID NO: 1824813 - DNA, 15 bp, Homo sapiens
ttaaggatgaagaaa

SEQ ID NO: 1824814 - DNA, 15 bp, Homo sapiens
taaggatgaagaaac

SEQ ID NO: 1824815 - DNA, 15 bp, Homo sapiens
aaggatgaagaaaca

SEQ ID NO: 1824816 - DNA, 15 bp, Homo sapiens
aggatgaagaaacag

SEQ ID NO: 1824817 - DNA, 15 bp, Homo sapiens
ggatgaagaaacagc

SEQ ID NO: 1824818 - DNA, 15 bp, Homo sapiens
gatgaagaaacagct

SEQ ID NO: 1824819 - DNA, 15 bp, Homo sapiens
atgaagaaacagctt

SEQ ID NO: 1824820 - DNA, 15 bp, Homo sapiens
tgaagaaacagcttt

SEQ ID NO: 1824821 - DNA, 15 bp, Homo sapiens
gaagaaacagcttta

SEQ ID NO: 1824822 - DNA, 15 bp, Homo sapiens
aagaaacagctttaa

SEQ ID NO: 1824823 - DNA, 15 bp, Homo sapiens
agaaacagctttaag

SEQ ID NO: 1824824 - DNA, 15 bp, Homo sapiens
gaaacagctttaagt

SEQ ID NO: 1824825 - DNA, 15 bp, Homo sapiens
aaacagctttaagtt

SEQ ID NO: 1824826 - DNA, 15 bp, Homo sapiens
aacagctttaagttg

SEQ ID NO: 1824827 - DNA, 15 bp, Homo sapiens
acagctttaagttgg

SEQ ID NO: 1824828 - DNA, 15 bp, Homo sapiens
cagctttaagttggt

SEQ ID NO: 1824829 - DNA, 15 bp, Homo sapiens
agctttaagttggtt

SEQ ID NO: 1824830 - DNA, 15 bp, Homo sapiens
gctttaagttggttg

SEQ ID NO: 1824831 - DNA, 15 bp, Homo sapiens
ctttaagttggttgc

SEQ ID NO: 1824832 - DNA, 15 bp, Homo sapiens
tttaagttggttgcc

SEQ ID NO: 1824833 - DNA, 15 bp, Homo sapiens
ttaagttggttgcct

SEQ ID NO: 1824834 - DNA, 15 bp, Homo sapiens
taagttggttgccta

SEQ ID NO: 1824835 - DNA, 15 bp, Homo sapiens
aagttggttgcctaa

SEQ ID NO: 1824836 - DNA, 15 bp, Homo sapiens
agttggttgcctaaa

SEQ ID NO: 1824837 - DNA, 15 bp, Homo sapiens
gttggttgcctaaag

SEQ ID NO: 1824838 - DNA, 15 bp, Homo sapiens
ttggttgcctaaagt

SEQ ID NO: 1824839 - DNA, 15 bp, Homo sapiens
tggttgcctaaagtc

SEQ ID NO: 1824840 - DNA, 15 bp, Homo sapiens
ggttgcctaaagtca

SEQ ID NO: 1824841 - DNA, 15 bp, Homo sapiens
gttgcctaaagtcac

SEQ ID NO: 1824842 - DNA, 15 bp, Homo sapiens
ttgcctaaagtcacg

SEQ ID NO: 1824843 - DNA, 15 bp, Homo sapiens
tgcctaaagtcacgc

SEQ ID NO: 1824844 - DNA, 15 bp, Homo sapiens
gcctaaagtcacgca

SEQ ID NO: 1824845 - DNA, 15 bp, Homo sapiens
cctaaagtcacgcag

SEQ ID NO: 1824846 - DNA, 15 bp, Homo sapiens
ctaaagtcacgcagg

SEQ ID NO: 1824847 - DNA, 15 bp, Homo sapiens
taaagtcacgcaggt

SEQ ID NO: 1824848 - DNA, 15 bp, Homo sapiens
aaagtcacgcaggta

SEQ ID NO: 1824849 - DNA, 15 bp, Homo sapiens
aagtcacgcaggtaa

SEQ ID NO: 1824850 - DNA, 15 bp, Homo sapiens
agtcacgcaggtaat

SEQ ID NO: 1824851 - DNA, 15 bp, Homo sapiens
gtcacgcaggtaatt

SEQ ID NO: 1824852 - DNA, 15 bp, Homo sapiens
tcacgcaggtaattg

SEQ ID NO: 1824853 - DNA, 15 bp, Homo sapiens
cacgcaggtaattga

SEQ ID NO: 1824854 - DNA, 15 bp, Homo sapiens
acgcaggtaattgat

SEQ ID NO: 1824855 - DNA, 15 bp, Homo sapiens
cgcaggtaattgatg

SEQ ID NO: 1824856 - DNA, 15 bp, Homo sapiens
gcaggtaattgatgc

SEQ ID NO: 1824857 - DNA, 15 bp, Homo sapiens
caggtaattgatgca

SEQ ID NO: 1824858 - DNA, 15 bp, Homo sapiens
aggtaattgatgcag

SEQ ID NO: 1824859 - DNA, 15 bp, Homo sapiens
ggtaattgatgcagt

SEQ ID NO: 1824860 - DNA, 15 bp, Homo sapiens
gtaattgatgcagta

SEQ ID NO: 1824861 - DNA, 15 bp, Homo sapiens
taattgatgcagtat

SEQ ID NO: 1824862 - DNA, 15 bp, Homo sapiens
aattgatgcagtatg

SEQ ID NO: 1824863 - DNA, 15 bp, Homo sapiens
attgatgcagtatgg

SEQ ID NO: 1824864 - DNA, 15 bp, Homo sapiens
ttgatgcagtatggc

SEQ ID NO: 1824865 - DNA, 15 bp, Homo sapiens
tgatgcagtatggcc

SEQ ID NO: 1824866 - DNA, 15 bp, Homo sapiens
gatgcagtatggcca

SEQ ID NO: 1824867 - DNA, 15 bp, Homo sapiens
atgcagtatggccag

SEQ ID NO: 1824868 - DNA, 15 bp, Homo sapiens
tgcagtatggccaga

SEQ ID NO: 1824869 - DNA, 15 bp, Homo sapiens
gcagtatggccagaa

SEQ ID NO: 1824870 - DNA, 15 bp, Homo sapiens
cagtatggccagaac

SEQ ID NO: 1824871 - DNA, 15 bp, Homo sapiens
agtatggccagaacc

SEQ ID NO: 1824872 - DNA, 15 bp, Homo sapiens
gtatggccagaaccc

SEQ ID NO: 1824873 - DNA, 15 bp, Homo sapiens
tatggccagaaccca

SEQ ID NO: 1824874 - DNA, 15 bp, Homo sapiens
atggccagaacccat

SEQ ID NO: 1824875 - DNA, 15 bp, Homo sapiens
tggccagaacccata

SEQ ID NO: 1824876 - DNA, 15 bp, Homo sapiens
ggccagaacccatac

SEQ ID NO: 1824877 - DNA, 15 bp, Homo sapiens
gccagaacccatact

SEQ ID NO: 1824878 - DNA, 15 bp, Homo sapiens
ccagaacccatacta

SEQ ID NO: 1824879 - DNA, 15 bp, Homo sapiens
cagaacccatactag

SEQ ID NO: 1824880 - DNA, 15 bp, Homo sapiens
agaacccatactagg

SEQ ID NO: 1824881 - DNA, 15 bp, Homo sapiens
gaacccatactaggc

SEQ ID NO: 1824882 - DNA, 15 bp, Homo sapiens
aacccatactaggct

SEQ ID NO: 1824883 - DNA, 15 bp, Homo sapiens
acccatactaggctt

SEQ ID NO: 1824884 - DNA, 15 bp, Homo sapiens
cccatactaggctta

SEQ ID NO: 1824885 - DNA, 15 bp, Homo sapiens
ccatactaggcttaa

SEQ ID NO: 1824886 - DNA, 15 bp, Homo sapiens
catactaggcttaag

SEQ ID NO: 1824887 - DNA, 15 bp, Homo sapiens
atactaggcttaagg

SEQ ID NO: 1824888 - DNA, 15 bp, Homo sapiens
tactaggcttaaggg

SEQ ID NO: 1824889 - DNA, 15 bp, Homo sapiens
actaggcttaaggga

SEQ ID NO: 1824890 - DNA, 15 bp, Homo sapiens
ctaggcttaagggac

SEQ ID NO: 1824891 - DNA, 15 bp, Homo sapiens
taggcttaagggaca

SEQ ID NO: 1824892 - DNA, 15 bp, Homo sapiens
aggcttaagggacag

SEQ ID NO: 1824893 - DNA, 15 bp, Homo sapiens
ggcttaagggacagt

SEQ ID NO: 1824894 - DNA, 15 bp, Homo sapiens
gcttaagggacagtg

SEQ ID NO: 1824895 - DNA, 15 bp, Homo sapiens
cttaagggacagtgt

SEQ ID NO: 1824896 - DNA, 15 bp, Homo sapiens
ttaagggacagtgta

SEQ ID NO: 1824897 - DNA, 15 bp, Homo sapiens
taagggacagtgtac

SEQ ID NO: 1824898 - DNA, 15 bp, Homo sapiens
aagggacagtgtacc

SEQ ID NO: 1824899 - DNA, 15 bp, Homo sapiens
agggacagtgtacca

SEQ ID NO: 1824900 - DNA, 15 bp, Homo sapiens
gggacagtgtaccat

SEQ ID NO: 1824901 - DNA, 15 bp, Homo sapiens
ggacagtgtaccata

SEQ ID NO: 1824902 - DNA, 15 bp, Homo sapiens
gacagtgtaccataa

SEQ ID NO: 1824903 - DNA, 15 bp, Homo sapiens
acagtgtaccataaa

SEQ ID NO: 1824904 - DNA, 15 bp, Homo sapiens
cagtgtaccataaac

SEQ ID NO: 1824905 - DNA, 15 bp, Homo sapiens
agtgtaccataaact

SEQ ID NO: 1824906 - DNA, 15 bp, Homo sapiens
gtgtaccataaactc

SEQ ID NO: 1824907 - DNA, 15 bp, Homo sapiens
tgtaccataaactcg

SEQ ID NO: 1824908 - DNA, 15 bp, Homo sapiens
gtaccataaactcgt

SEQ ID NO: 1824909 - DNA, 15 bp, Homo sapiens
taccataaactcgta

SEQ ID NO: 1824910 - DNA, 15 bp, Homo sapiens
accataaactcgtag

SEQ ID NO: 1824911 - DNA, 15 bp, Homo sapiens
ccataaactcgtaga

SEQ ID NO: 1824912 - DNA, 15 bp, Homo sapiens
cataaactcgtagag

SEQ ID NO: 1824913 - DNA, 15 bp, Homo sapiens
ataaactcgtagagg

SEQ ID NO: 1824914 - DNA, 15 bp, Homo sapiens
taaactcgtagaggt

SEQ ID NO: 1824915 - DNA, 15 bp, Homo sapiens
aaactcgtagaggtc

SEQ ID NO: 1824916 - DNA, 15 bp, Homo sapiens
aactcgtagaggtcc

SEQ ID NO: 1824917 - DNA, 15 bp, Homo sapiens
actcgtagaggtcct

SEQ ID NO: 1824918 - DNA, 15 bp, Homo sapiens
ctcgtagaggtcctt

SEQ ID NO: 1824919 - DNA, 15 bp, Homo sapiens
tcgtagaggtccttt

SEQ ID NO: 1824920 - DNA, 15 bp, Homo sapiens
cgtagaggtccttta

SEQ ID NO: 1824921 - DNA, 15 bp, Homo sapiens
gtagaggtcctttaa

SEQ ID NO: 1824922 - DNA, 15 bp, Homo sapiens
tagaggtcctttaaa

SEQ ID NO: 1824923 - DNA, 15 bp, Homo sapiens
agaggtcctttaaac

SEQ ID NO: 1824924 - DNA, 15 bp, Homo sapiens
gaggtcctttaaaca

SEQ ID NO: 1824925 - DNA, 15 bp, Homo sapiens
aggtcctttaaacag

SEQ ID NO: 1824926 - DNA, 15 bp, Homo sapiens
ggtcctttaaacaga

SEQ ID NO: 1824927 - DNA, 15 bp, Homo sapiens
gtcctttaaacagat

SEQ ID NO: 1824928 - DNA, 15 bp, Homo sapiens
tcctttaaacagata

SEQ ID NO: 1824929 - DNA, 15 bp, Homo sapiens
cctttaaacagatag

SEQ ID NO: 1824930 - DNA, 15 bp, Homo sapiens
ctttaaacagataga

SEQ ID NO: 1824931 - DNA, 15 bp, Homo sapiens
tttaaacagatagaa

SEQ ID NO: 1824932 - DNA, 15 bp, Homo sapiens
ttaaacagatagaaa

SEQ ID NO: 1824933 - DNA, 15 bp, Homo sapiens
taaacagatagaaac

SEQ ID NO: 1824934 - DNA, 15 bp, Homo sapiens
aaacagatagaaacg

SEQ ID NO: 1824935 - DNA, 15 bp, Homo sapiens
aacagatagaaacgc

SEQ ID NO: 1824936 - DNA, 15 bp, Homo sapiens
acagatagaaacgct

SEQ ID NO: 1824937 - DNA, 15 bp, Homo sapiens
cagatagaaacgctg

SEQ ID NO: 1824938 - DNA, 15 bp, Homo sapiens
agatagaaacgctgt

SEQ ID NO: 1824939 - DNA, 15 bp, Homo sapiens
gatagaaacgctgtg

SEQ ID NO: 1824940 - DNA, 15 bp, Homo sapiens
atagaaacgctgtgc

SEQ ID NO: 1824941 - DNA, 15 bp, Homo sapiens
tagaaacgctgtgct

SEQ ID NO: 1824942 - DNA, 15 bp, Homo sapiens
agaaacgctgtgctc

SEQ ID NO: 1824943 - DNA, 15 bp, Homo sapiens
gaaacgctgtgctcc

SEQ ID NO: 1824944 - DNA, 15 bp, Homo sapiens
aaacgctgtgctcca

SEQ ID NO: 1824945 - DNA, 15 bp, Homo sapiens
aacgctgtgctccag

SEQ ID NO: 1824946 - DNA, 15 bp, Homo sapiens
acgctgtgctccagg

SEQ ID NO: 1824947 - DNA, 15 bp, Homo sapiens
cgctgtgctccaggc

SEQ ID NO: 1824948 - DNA, 15 bp, Homo sapiens
gctgtgctccaggca

SEQ ID NO: 1824949 - DNA, 15 bp, Homo sapiens
ctgtgctccaggcag

SEQ ID NO: 1824950 - DNA, 15 bp, Homo sapiens
tgtgctccaggcaga

SEQ ID NO: 1824951 - DNA, 15 bp, Homo sapiens
gtgctccaggcagat

SEQ ID NO: 1824952 - DNA, 15 bp, Homo sapiens
tgctccaggcagatg

SEQ ID NO: 1824953 - DNA, 15 bp, Homo sapiens
gctccaggcagatgc

SEQ ID NO: 1824954 - DNA, 15 bp, Homo sapiens
ctccaggcagatgcc

SEQ ID NO: 1824955 - DNA, 15 bp, Homo sapiens
tccaggcagatgcca

SEQ ID NO: 1824956 - DNA, 15 bp, Homo sapiens
ccaggcagatgccat

SEQ ID NO: 1824957 - DNA, 15 bp, Homo sapiens
caggcagatgccata

SEQ ID NO: 1824958 - DNA, 15 bp, Homo sapiens
aggcagatgccataa

SEQ ID NO: 1824959 - DNA, 15 bp, Homo sapiens
ggcagatgccataac

SEQ ID NO: 1824960 - DNA, 15 bp, Homo sapiens
gcagatgccataaca

SEQ ID NO: 1824961 - DNA, 15 bp, Homo sapiens
cagatgccataacaa

SEQ ID NO: 1824962 - DNA, 15 bp, Homo sapiens
agatgccataacaaa

SEQ ID NO: 1824963 - DNA, 15 bp, Homo sapiens
gatgccataacaaac

SEQ ID NO: 1824964 - DNA, 15 bp, Homo sapiens
atgccataacaaaca

SEQ ID NO: 1824965 - DNA, 15 bp, Homo sapiens
tgccataacaaacac

SEQ ID NO: 1824966 - DNA, 15 bp, Homo sapiens
gccataacaaacact

SEQ ID NO: 1824967 - DNA, 15 bp, Homo sapiens
ccataacaaacactg

SEQ ID NO: 1824968 - DNA, 15 bp, Homo sapiens
cataacaaacactgg

SEQ ID NO: 1824969 - DNA, 15 bp, Homo sapiens
ataacaaacactggc

SEQ ID NO: 1824970 - DNA, 15 bp, Homo sapiens
taacaaacactggct

SEQ ID NO: 1824971 - DNA, 15 bp, Homo sapiens
aacaaacactggctc

SEQ ID NO: 1824972 - DNA, 15 bp, Homo sapiens
acaaacactggctct

SEQ ID NO: 1824973 - DNA, 15 bp, Homo sapiens
caaacactggctcta

SEQ ID NO: 1824974 - DNA, 15 bp, Homo sapiens
aaacactggctctag

SEQ ID NO: 1824975 - DNA, 15 bp, Homo sapiens
aacactggctctaga

SEQ ID NO: 1824976 - DNA, 15 bp, Homo sapiens
acactggctctagat

SEQ ID NO: 1824977 - DNA, 15 bp, Homo sapiens
cactggctctagatc

SEQ ID NO: 1824978 - DNA, 15 bp, Homo sapiens
actggctctagatct

SEQ ID NO: 1824979 - DNA, 15 bp, Homo sapiens
ctggctctagatcta

SEQ ID NO: 1824980 - DNA, 15 bp, Homo sapiens
tggctctagatctac

SEQ ID NO: 1824981 - DNA, 15 bp, Homo sapiens
ggctctagatctacc

SEQ ID NO: 1824982 - DNA, 15 bp, Homo sapiens
gctctagatctacca

SEQ ID NO: 1824983 - DNA, 15 bp, Homo sapiens
ctctagatctaccat

SEQ ID NO: 1824984 - DNA, 15 bp, Homo sapiens
tctagatctaccatg

SEQ ID NO: 1824985 - DNA, 15 bp, Homo sapiens
ctagatctaccatgg

SEQ ID NO: 1824986 - DNA, 15 bp, Homo sapiens
tagatctaccatggg

SEQ ID NO: 1824987 - DNA, 15 bp, Homo sapiens
agatctaccatgggt

SEQ ID NO: 1824988 - DNA, 15 bp, Homo sapiens
gatctaccatgggtt

SEQ ID NO: 1824989 - DNA, 15 bp, Homo sapiens
atctaccatgggtta

SEQ ID NO: 1824990 - DNA, 15 bp, Homo sapiens
tctaccatgggttat

SEQ ID NO: 1824991 - DNA, 15 bp, Homo sapiens
ctaccatgggttata

SEQ ID NO: 1824992 - DNA, 15 bp, Homo sapiens
taccatgggttatat

SEQ ID NO: 1824993 - DNA, 15 bp, Homo sapiens
accatgggttatatg

SEQ ID NO: 1824994 - DNA, 15 bp, Homo sapiens
ccatgggttatatgg

SEQ ID NO: 1824995 - DNA, 15 bp, Homo sapiens
catgggttatatggg

SEQ ID NO: 1824996 - DNA, 15 bp, Homo sapiens
atgggttatatgggt

SEQ ID NO: 1824997 - DNA, 15 bp, Homo sapiens
tgggttatatgggtc

SEQ ID NO: 1824998 - DNA, 15 bp, Homo sapiens
gggttatatgggtcc

SEQ ID NO: 1824999 - DNA, 15 bp, Homo sapiens
ggttatatgggtcct

SEQ ID NO: 1825000 - DNA, 15 bp, Homo sapiens
gttatatgggtcctt

SEQ ID NO: 1825001 - DNA, 15 bp, Homo sapiens
ttatatgggtcctta

SEQ ID NO: 1825002 - DNA, 15 bp, Homo sapiens
tatatgggtccttag

SEQ ID NO: 1825003 - DNA, 15 bp, Homo sapiens
atatgggtccttagt

SEQ ID NO: 1825004 - DNA, 15 bp, Homo sapiens
tatgggtccttagtt

SEQ ID NO: 1825005 - DNA, 15 bp, Homo sapiens
atgggtccttagtta

SEQ ID NO: 1825006 - DNA, 15 bp, Homo sapiens
tgggtccttagttaa

SEQ ID NO: 1825007 - DNA, 15 bp, Homo sapiens
gggtccttagttaag

SEQ ID NO: 1825008 - DNA, 15 bp, Homo sapiens
ggtccttagttaaga

SEQ ID NO: 1825009 - DNA, 15 bp, Homo sapiens
gtccttagttaagat

SEQ ID NO: 1825010 - DNA, 15 bp, Homo sapiens
tccttagttaagatt

SEQ ID NO: 1825011 - DNA, 15 bp, Homo sapiens
ccttagttaagatta

SEQ ID NO: 1825012 - DNA, 15 bp, Homo sapiens
cttagttaagattag

SEQ ID NO: 1825013 - DNA, 15 bp, Homo sapiens
ttagttaagattaga

SEQ ID NO: 1825014 - DNA, 15 bp, Homo sapiens
tagttaagattagat

SEQ ID NO: 1825015 - DNA, 15 bp, Homo sapiens
agttaagattagata

SEQ ID NO: 1825016 - DNA, 15 bp, Homo sapiens
gttaagattagatat

SEQ ID NO: 1825017 - DNA, 15 bp, Homo sapiens
ttaagattagatatg

SEQ ID NO: 1825018 - DNA, 15 bp, Homo sapiens
taagattagatatgg

SEQ ID NO: 1825019 - DNA, 15 bp, Homo sapiens
aagattagatatgga

SEQ ID NO: 1825020 - DNA, 15 bp, Homo sapiens
agattagatatggag

SEQ ID NO: 1825021 - DNA, 15 bp, Homo sapiens
gattagatatggagt

SEQ ID NO: 1825022 - DNA, 15 bp, Homo sapiens
attagatatggagtc

SEQ ID NO: 1825023 - DNA, 15 bp, Homo sapiens
ttagatatggagtca

SEQ ID NO: 1825024 - DNA, 15 bp, Homo sapiens
tagatatggagtcac

SEQ ID NO: 1825025 - DNA, 15 bp, Homo sapiens
agatatggagtcaca

SEQ ID NO: 1825026 - DNA, 15 bp, Homo sapiens
gatatggagtcacag

SEQ ID NO: 1825027 - DNA, 15 bp, Homo sapiens
atatggagtcacagt

SEQ ID NO: 1825028 - DNA, 15 bp, Homo sapiens
tatggagtcacagtg

SEQ ID NO: 1825029 - DNA, 15 bp, Homo sapiens
atggagtcacagtgt

SEQ ID NO: 1825030 - DNA, 15 bp, Homo sapiens
tggagtcacagtgtg

SEQ ID NO: 1825031 - DNA, 15 bp, Homo sapiens
ggagtcacagtgtgc

SEQ ID NO: 1825032 - DNA, 15 bp, Homo sapiens
gagtcacagtgtgcc

SEQ ID NO: 1825033 - DNA, 15 bp, Homo sapiens
agtcacagtgtgcca

SEQ ID NO: 1825034 - DNA, 15 bp, Homo sapiens
gtcacagtgtgccag

SEQ ID NO: 1825035 - DNA, 15 bp, Homo sapiens
tcacagtgtgccaga

SEQ ID NO: 1825036 - DNA, 15 bp, Homo sapiens
cacagtgtgccagaa

SEQ ID NO: 1825037 - DNA, 15 bp, Homo sapiens
acagtgtgccagaat

SEQ ID NO: 1825038 - DNA, 15 bp, Homo sapiens
cagtgtgccagaatt

SEQ ID NO: 1825039 - DNA, 15 bp, Homo sapiens
agtgtgccagaattt

SEQ ID NO: 1825040 - DNA, 15 bp, Homo sapiens
gtgtgccagaatttc

SEQ ID NO: 1825041 - DNA, 15 bp, Homo sapiens
tgtgccagaatttca

SEQ ID NO: 1825042 - DNA, 15 bp, Homo sapiens
gtgccagaatttcag

SEQ ID NO: 1825043 - DNA, 15 bp, Homo sapiens
tgccagaatttcagg

SEQ ID NO: 1825044 - DNA, 15 bp, Homo sapiens
gccagaatttcaggg

SEQ ID NO: 1825045 - DNA, 15 bp, Homo sapiens
ccagaatttcaggga

SEQ ID NO: 1825046 - DNA, 15 bp, Homo sapiens
cagaatttcagggag

SEQ ID NO: 1825047 - DNA, 15 bp, Homo sapiens
agaatttcagggaga

SEQ ID NO: 1825048 - DNA, 15 bp, Homo sapiens
gaatttcagggagag

SEQ ID NO: 1825049 - DNA, 15 bp, Homo sapiens
aatttcagggagaga

SEQ ID NO: 1825050 - DNA, 15 bp, Homo sapiens
atttcagggagagag

SEQ ID NO: 1825051 - DNA, 15 bp, Homo sapiens
tttcagggagagagg

SEQ ID NO: 1825052 - DNA, 15 bp, Homo sapiens
ttcagggagagagga

SEQ ID NO: 1825053 - DNA, 15 bp, Homo sapiens
tcagggagagaggaa

SEQ ID NO: 1825054 - DNA, 15 bp, Homo sapiens
cagggagagaggaaa

SEQ ID NO: 1825055 - DNA, 15 bp, Homo sapiens
agggagagaggaaag

SEQ ID NO: 1825056 - DNA, 15 bp, Homo sapiens
gggagagaggaaagt

SEQ ID NO: 1825057 - DNA, 15 bp, Homo sapiens
ggagagaggaaagtg

SEQ ID NO: 1825058 - DNA, 15 bp, Homo sapiens
gagagaggaaagtgg

SEQ ID NO: 1825059 - DNA, 15 bp, Homo sapiens
agagaggaaagtgga

SEQ ID NO: 1825060 - DNA, 15 bp, Homo sapiens
gagaggaaagtggaa

SEQ ID NO: 1825061 - DNA, 15 bp, Homo sapiens
agaggaaagtggaag

SEQ ID NO: 1825062 - DNA, 15 bp, Homo sapiens
gaggaaagtggaagg

SEQ ID NO: 1825063 - DNA, 15 bp, Homo sapiens
aggaaagtggaaggg

SEQ ID NO: 1825064 - DNA, 15 bp, Homo sapiens
ggaaagtggaagggc

SEQ ID NO: 1825065 - DNA, 15 bp, Homo sapiens
gaaagtggaagggct

SEQ ID NO: 1825066 - DNA, 15 bp, Homo sapiens
aaagtggaagggctt

SEQ ID NO: 1825067 - DNA, 15 bp, Homo sapiens
aagtggaagggcttt

SEQ ID NO: 1825068 - DNA, 15 bp, Homo sapiens
agtggaagggctttc

SEQ ID NO: 1825069 - DNA, 15 bp, Homo sapiens
gtggaagggctttcc

SEQ ID NO: 1825070 - DNA, 15 bp, Homo sapiens
tggaagggctttcca

SEQ ID NO: 1825071 - DNA, 15 bp, Homo sapiens
ggaagggctttccac

SEQ ID NO: 1825072 - DNA, 15 bp, Homo sapiens
gaagggctttccact

SEQ ID NO: 1825073 - DNA, 15 bp, Homo sapiens
aagggctttccacta

SEQ ID NO: 1825074 - DNA, 15 bp, Homo sapiens
agggctttccactaa

SEQ ID NO: 1825075 - DNA, 15 bp, Homo sapiens
gggctttccactaag

SEQ ID NO: 1825076 - DNA, 15 bp, Homo sapiens
ggctttccactaagc

SEQ ID NO: 1825077 - DNA, 15 bp, Homo sapiens
gctttccactaagcc

SEQ ID NO: 1825078 - DNA, 15 bp, Homo sapiens
ctttccactaagcct

SEQ ID NO: 1825079 - DNA, 15 bp, Homo sapiens
tttccactaagcctt

SEQ ID NO: 1825080 - DNA, 15 bp, Homo sapiens
ttccactaagccttt

SEQ ID NO: 1825081 - DNA, 15 bp, Homo sapiens
tccactaagcctttt

SEQ ID NO: 1825082 - DNA, 15 bp, Homo sapiens
ccactaagccttttg

SEQ ID NO: 1825083 - DNA, 15 bp, Homo sapiens
cactaagccttttga

SEQ ID NO: 1825084 - DNA, 15 bp, Homo sapiens
actaagccttttgaa

SEQ ID NO: 1825085 - DNA, 15 bp, Homo sapiens
ctaagccttttgaac

SEQ ID NO: 1825086 - DNA, 15 bp, Homo sapiens
taagccttttgaact

SEQ ID NO: 1825087 - DNA, 15 bp, Homo sapiens
aagccttttgaacta

SEQ ID NO: 1825088 - DNA, 15 bp, Homo sapiens
agccttttgaactac

SEQ ID NO: 1825089 - DNA, 15 bp, Homo sapiens
gccttttgaactact

SEQ ID NO: 1825090 - DNA, 15 bp, Homo sapiens
ccttttgaactacta

SEQ ID NO: 1825091 - DNA, 15 bp, Homo sapiens
cttttgaactactag

SEQ ID NO: 1825092 - DNA, 15 bp, Homo sapiens
ttttgaactactagg

SEQ ID NO: 1825093 - DNA, 15 bp, Homo sapiens
tttgaactactaggt

SEQ ID NO: 1825094 - DNA, 15 bp, Homo sapiens
ttgaactactaggta

SEQ ID NO: 1825095 - DNA, 15 bp, Homo sapiens
tgaactactaggtac

SEQ ID NO: 1825096 - DNA, 15 bp, Homo sapiens
gaactactaggtacc

SEQ ID NO: 1825097 - DNA, 15 bp, Homo sapiens
aactactaggtaccc

SEQ ID NO: 1825098 - DNA, 15 bp, Homo sapiens
actactaggtacccc

SEQ ID NO: 1825099 - DNA, 15 bp, Homo sapiens
ctactaggtacccct

SEQ ID NO: 1825100 - DNA, 15 bp, Homo sapiens
tactaggtacccctc

SEQ ID NO: 1825101 - DNA, 15 bp, Homo sapiens
actaggtacccctcg

SEQ ID NO: 1825102 - DNA, 15 bp, Homo sapiens
ctaggtacccctcgt

SEQ ID NO: 1825103 - DNA, 15 bp, Homo sapiens
taggtacccctcgtt

SEQ ID NO: 1825104 - DNA, 15 bp, Homo sapiens
aggtacccctcgttt

SEQ ID NO: 1825105 - DNA, 15 bp, Homo sapiens
ggtacccctcgtttt

SEQ ID NO: 1825106 - DNA, 15 bp, Homo sapiens
gtacccctcgtttta

SEQ ID NO: 1825107 - DNA, 15 bp, Homo sapiens
tacccctcgttttac

SEQ ID NO: 1825108 - DNA, 15 bp, Homo sapiens
acccctcgttttaca

SEQ ID NO: 1825109 - DNA, 15 bp, Homo sapiens
cccctcgttttacat

SEQ ID NO: 1825110 - DNA, 15 bp, Homo sapiens
ccctcgttttacatc

SEQ ID NO: 1825111 - DNA, 15 bp, Homo sapiens
cctcgttttacatct

SEQ ID NO: 1825112 - DNA, 15 bp, Homo sapiens
ctcgttttacatctg

SEQ ID NO: 1825113 - DNA, 15 bp, Homo sapiens
tcgttttacatctgg

SEQ ID NO: 1825114 - DNA, 15 bp, Homo sapiens
cgttttacatctggt

SEQ ID NO: 1825115 - DNA, 15 bp, Homo sapiens
gttttacatctggtt

SEQ ID NO: 1825116 - DNA, 15 bp, Homo sapiens
ttttacatctggtta

SEQ ID NO: 1825117 - DNA, 15 bp, Homo sapiens
tttacatctggttat

SEQ ID NO: 1825118 - DNA, 15 bp, Homo sapiens
ttacatctggttatc

SEQ ID NO: 1825119 - DNA, 15 bp, Homo sapiens
tacatctggttatct

SEQ ID NO: 1825120 - DNA, 15 bp, Homo sapiens
acatctggttatctc

SEQ ID NO: 1825121 - DNA, 15 bp, Homo sapiens
catctggttatctca

SEQ ID NO: 1825122 - DNA, 15 bp, Homo sapiens
atctggttatctcat

SEQ ID NO: 1825123 - DNA, 15 bp, Homo sapiens
tctggttatctcatt

SEQ ID NO: 1825124 - DNA, 15 bp, Homo sapiens
ctggttatctcattt

SEQ ID NO: 1825125 - DNA, 15 bp, Homo sapiens
tggttatctcattta

SEQ ID NO: 1825126 - DNA, 15 bp, Homo sapiens
gttatctcatttaaa

SEQ ID NO: 1825127 - DNA, 15 bp, Homo sapiens
ttatctcatttaaat

SEQ ID NO: 1825128 - DNA, 15 bp, Homo sapiens
tatctcatttaaatc

SEQ ID NO: 1825129 - DNA, 15 bp, Homo sapiens
atctcatttaaatct

SEQ ID NO: 1825130 - DNA, 15 bp, Homo sapiens
tctcatttaaatcta

SEQ ID NO: 1825131 - DNA, 15 bp, Homo sapiens
ctcatttaaatctat

SEQ ID NO: 1825132 - DNA, 15 bp, Homo sapiens
tcatttaaatctatg

SEQ ID NO: 1825133 - DNA, 15 bp, Homo sapiens
catttaaatctatga

SEQ ID NO: 1825134 - DNA, 15 bp, Homo sapiens
atttaaatctatgac

SEQ ID NO: 1825135 - DNA, 15 bp, Homo sapiens
tttaaatctatgacg

SEQ ID NO: 1825136 - DNA, 15 bp, Homo sapiens
ttaaatctatgacgt

SEQ ID NO: 1825137 - DNA, 15 bp, Homo sapiens
taaatctatgacgtt

SEQ ID NO: 1825138 - DNA, 15 bp, Homo sapiens
aaatctatgacgttt

SEQ ID NO: 1825139 - DNA, 15 bp, Homo sapiens
aatctatgacgtttt

SEQ ID NO: 1825140 - DNA, 15 bp, Homo sapiens
atctatgacgtttta

SEQ ID NO: 1825141 - DNA, 15 bp, Homo sapiens
tctatgacgttttaa

SEQ ID NO: 1825142 - DNA, 15 bp, Homo sapiens
ctatgacgttttaaa

SEQ ID NO: 1825143 - DNA, 15 bp, Homo sapiens
tatgacgttttaaaa

SEQ ID NO: 1825144 - DNA, 15 bp, Homo sapiens
atgacgttttaaaat

SEQ ID NO: 1825145 - DNA, 15 bp, Homo sapiens
tgacgttttaaaata

SEQ ID NO: 1825146 - DNA, 15 bp, Homo sapiens
gacgttttaaaatac

SEQ ID NO: 1825147 - DNA, 15 bp, Homo sapiens
acgttttaaaatact

SEQ ID NO: 1825148 - DNA, 15 bp, Homo sapiens
cgttttaaaatactt

SEQ ID NO: 1825149 - DNA, 15 bp, Homo sapiens
gttttaaaatactta

SEQ ID NO: 1825150 - DNA, 15 bp, Homo sapiens
ttttaaaatacttat

SEQ ID NO: 1825151 - DNA, 15 bp, Homo sapiens
tttaaaatacttatt

SEQ ID NO: 1825152 - DNA, 15 bp, Homo sapiens
ttaaaatacttatta

SEQ ID NO: 1825153 - DNA, 15 bp, Homo sapiens
taaaatacttattac

SEQ ID NO: 1825154 - DNA, 15 bp, Homo sapiens
aaaatacttattacc

SEQ ID NO: 1825155 - DNA, 15 bp, Homo sapiens
aaatacttattacca

SEQ ID NO: 1825156 - DNA, 15 bp, Homo sapiens
aatacttattaccat

SEQ ID NO: 1825157 - DNA, 15 bp, Homo sapiens
atacttattaccatt

SEQ ID NO: 1825158 - DNA, 15 bp, Homo sapiens
tacttattaccattt

SEQ ID NO: 1825159 - DNA, 15 bp, Homo sapiens
acttattaccattta

SEQ ID NO: 1825160 - DNA, 15 bp, Homo sapiens
cttattaccatttaa

SEQ ID NO: 1825161 - DNA, 15 bp, Homo sapiens
ttattaccatttaag

SEQ ID NO: 1825162 - DNA, 15 bp, Homo sapiens
tattaccatttaaga

SEQ ID NO: 1825163 - DNA, 15 bp, Homo sapiens
attaccatttaagac

SEQ ID NO: 1825164 - DNA, 15 bp, Homo sapiens
ttaccatttaagaca

SEQ ID NO: 1825165 - DNA, 15 bp, Homo sapiens
taccatttaagacat

SEQ ID NO: 1825166 - DNA, 15 bp, Homo sapiens
accatttaagacatg

SEQ ID NO: 1825167 - DNA, 15 bp, Homo sapiens
ccatttaagacatga

SEQ ID NO: 1825168 - DNA, 15 bp, Homo sapiens
catttaagacatgag

SEQ ID NO: 1825169 - DNA, 15 bp, Homo sapiens
atttaagacatgaga

SEQ ID NO: 1825170 - DNA, 15 bp, Homo sapiens
tttaagacatgagaa

SEQ ID NO: 1825171 - DNA, 15 bp, Homo sapiens
ttaagacatgagaaa

SEQ ID NO: 1825172 - DNA, 15 bp, Homo sapiens
taagacatgagaaaa

SEQ ID NO: 1825173 - DNA, 15 bp, Homo sapiens
aagacatgagaaaaa

SEQ ID NO: 1825174 - DNA, 15 bp, Homo sapiens
agacatgagaaaaat

SEQ ID NO: 1825175 - DNA, 15 bp, Homo sapiens
gacatgagaaaaatt

SEQ ID NO: 1825176 - DNA, 15 bp, Homo sapiens
acatgagaaaaatta

SEQ ID NO: 1825177 - DNA, 15 bp, Homo sapiens
catgagaaaaattaa

SEQ ID NO: 1825178 - DNA, 15 bp, Homo sapiens
atgagaaaaattaag

SEQ ID NO: 1825179 - DNA, 15 bp, Homo sapiens
tgagaaaaattaagt

SEQ ID NO: 1825180 - DNA, 15 bp, Homo sapiens
agaaaaattaagttt

SEQ ID NO: 1825181 - DNA, 15 bp, Homo sapiens
gaaaaattaagttta

SEQ ID NO: 1825182 - DNA, 15 bp, Homo sapiens
aaaaattaagtttag

SEQ ID NO: 1825183 - DNA, 15 bp, Homo sapiens
aaaattaagtttaga

SEQ ID NO: 1825184 - DNA, 15 bp, Homo sapiens
aaattaagtttagaa

SEQ ID NO: 1825185 - DNA, 15 bp, Homo sapiens
aattaagtttagaaa

SEQ ID NO: 1825186 - DNA, 15 bp, Homo sapiens
attaagtttagaaac

SEQ ID NO: 1825187 - DNA, 15 bp, Homo sapiens
ttaagtttagaaacg

SEQ ID NO: 1825188 - DNA, 15 bp, Homo sapiens
taagtttagaaacgg

SEQ ID NO: 1825189 - DNA, 15 bp, Homo sapiens
aagtttagaaacggc

SEQ ID NO: 1825190 - DNA, 15 bp, Homo sapiens
agtttagaaacggct

SEQ ID NO: 1825191 - DNA, 15 bp, Homo sapiens
gtttagaaacggcta

SEQ ID NO: 1825192 - DNA, 15 bp, Homo sapiens
tttagaaacggctag

SEQ ID NO: 1825193 - DNA, 15 bp, Homo sapiens
ttagaaacggctaga

SEQ ID NO: 1825194 - DNA, 15 bp, Homo sapiens
tagaaacggctagat

SEQ ID NO: 1825195 - DNA, 15 bp, Homo sapiens
agaaacggctagata

SEQ ID NO: 1825196 - DNA, 15 bp, Homo sapiens
gaaacggctagatag

SEQ ID NO: 1825197 - DNA, 15 bp, Homo sapiens
aaacggctagatagc

SEQ ID NO: 1825198 - DNA, 15 bp, Homo sapiens
aacggctagatagct

SEQ ID NO: 1825199 - DNA, 15 bp, Homo sapiens
acggctagatagctc

SEQ ID NO: 1825200 - DNA, 15 bp, Homo sapiens
cggctagatagctca

SEQ ID NO: 1825201 - DNA, 15 bp, Homo sapiens
ggctagatagctcac

SEQ ID NO: 1825202 - DNA, 15 bp, Homo sapiens
gctagatagctcacg

SEQ ID NO: 1825203 - DNA, 15 bp, Homo sapiens
ctagatagctcacgc

SEQ ID NO: 1825204 - DNA, 15 bp, Homo sapiens
tagatagctcacgct

SEQ ID NO: 1825205 - DNA, 15 bp, Homo sapiens
agatagctcacgcta

SEQ ID NO: 1825206 - DNA, 15 bp, Homo sapiens
gatagctcacgctag

SEQ ID NO: 1825207 - DNA, 15 bp, Homo sapiens
atagctcacgctaga

SEQ ID NO: 1825208 - DNA, 15 bp, Homo sapiens
tagctcacgctagaa

SEQ ID NO: 1825209 - DNA, 15 bp, Homo sapiens
agctcacgctagaaa

SEQ ID NO: 1825210 - DNA, 15 bp, Homo sapiens
gctcacgctagaaag

SEQ ID NO: 1825211 - DNA, 15 bp, Homo sapiens
ctcacgctagaaagg

SEQ ID NO: 1825212 - DNA, 15 bp, Homo sapiens
tcacgctagaaagga

SEQ ID NO: 1825213 - DNA, 15 bp, Homo sapiens
cacgctagaaaggaa

SEQ ID NO: 1825214 - DNA, 15 bp, Homo sapiens
acgctagaaaggaag

SEQ ID NO: 1825215 - DNA, 15 bp, Homo sapiens
cgctagaaaggaagg

SEQ ID NO: 1825216 - DNA, 15 bp, Homo sapiens
gctagaaaggaagga

SEQ ID NO: 1825217 - DNA, 15 bp, Homo sapiens
ctagaaaggaaggac

SEQ ID NO: 1825218 - DNA, 15 bp, Homo sapiens
tagaaaggaaggact

SEQ ID NO: 1825219 - DNA, 15 bp, Homo sapiens
agaaaggaaggactc

SEQ ID NO: 1825220 - DNA, 15 bp, Homo sapiens
gaaaggaaggactcc

SEQ ID NO: 1825221 - DNA, 15 bp, Homo sapiens
aaaggaaggactcca

SEQ ID NO: 1825222 - DNA, 15 bp, Homo sapiens
aaggaaggactccaa

SEQ ID NO: 1825223 - DNA, 15 bp, Homo sapiens
aggaaggactccaaa

SEQ ID NO: 1825224 - DNA, 15 bp, Homo sapiens
ggaaggactccaaat

SEQ ID NO: 1825225 - DNA, 15 bp, Homo sapiens
gaaggactccaaatt

SEQ ID NO: 1825226 - DNA, 15 bp, Homo sapiens
aaggactccaaattt

SEQ ID NO: 1825227 - DNA, 15 bp, Homo sapiens
aggactccaaatttt

SEQ ID NO: 1825228 - DNA, 15 bp, Homo sapiens
ggactccaaatttta

SEQ ID NO: 1825229 - DNA, 15 bp, Homo sapiens
gactccaaattttaa

SEQ ID NO: 1825230 - DNA, 15 bp, Homo sapiens
actccaaattttaac

SEQ ID NO: 1825231 - DNA, 15 bp, Homo sapiens
ctccaaattttaacc

SEQ ID NO: 1825232 - DNA, 15 bp, Homo sapiens
tccaaattttaacca

SEQ ID NO: 1825233 - DNA, 15 bp, Homo sapiens
ccaaattttaaccaa

SEQ ID NO: 1825234 - DNA, 15 bp, Homo sapiens
caaattttaaccaag

SEQ ID NO: 1825235 - DNA, 15 bp, Homo sapiens
aaattttaaccaagg

SEQ ID NO: 1825236 - DNA, 15 bp, Homo sapiens
aattttaaccaaggg

SEQ ID NO: 1825237 - DNA, 15 bp, Homo sapiens
attttaaccaagggc

SEQ ID NO: 1825238 - DNA, 15 bp, Homo sapiens
ttttaaccaagggca

SEQ ID NO: 1825239 - DNA, 15 bp, Homo sapiens
tttaaccaagggcag

SEQ ID NO: 1825240 - DNA, 15 bp, Homo sapiens
ttaaccaagggcaga

SEQ ID NO: 1825241 - DNA, 15 bp, Homo sapiens
taaccaagggcagat

SEQ ID NO: 1825242 - DNA, 15 bp, Homo sapiens
aaccaagggcagatg

SEQ ID NO: 1825243 - DNA, 15 bp, Homo sapiens
accaagggcagatgt

SEQ ID NO: 1825244 - DNA, 15 bp, Homo sapiens
ccaagggcagatgtg

SEQ ID NO: 1825245 - DNA, 15 bp, Homo sapiens
caagggcagatgtgc

SEQ ID NO: 1825246 - DNA, 15 bp, Homo sapiens
aagggcagatgtgca

SEQ ID NO: 1825247 - DNA, 15 bp, Homo sapiens
agggcagatgtgcat

SEQ ID NO: 1825248 - DNA, 15 bp, Homo sapiens
gggcagatgtgcatg

SEQ ID NO: 1825249 - DNA, 15 bp, Homo sapiens
ggcagatgtgcatgg

SEQ ID NO: 1825250 - DNA, 15 bp, Homo sapiens
gcagatgtgcatgga

SEQ ID NO: 1825251 - DNA, 15 bp, Homo sapiens
cagatgtgcatggag

SEQ ID NO: 1825252 - DNA, 15 bp, Homo sapiens
agatgtgcatggagg

SEQ ID NO: 1825253 - DNA, 15 bp, Homo sapiens
gatgtgcatggaggc

SEQ ID NO: 1825254 - DNA, 15 bp, Homo sapiens
atgtgcatggaggcc

SEQ ID NO: 1825255 - DNA, 15 bp, Homo sapiens
tgtgcatggaggcca

SEQ ID NO: 1825256 - DNA, 15 bp, Homo sapiens
gtgcatggaggccaa

SEQ ID NO: 1825257 - DNA, 15 bp, Homo sapiens
tgcatggaggccaag

SEQ ID NO: 1825258 - DNA, 15 bp, Homo sapiens
gcatggaggccaagt

SEQ ID NO: 1825259 - DNA, 15 bp, Homo sapiens
catggaggccaagtc

SEQ ID NO: 1825260 - DNA, 15 bp, Homo sapiens
atggaggccaagtca

SEQ ID NO: 1825261 - DNA, 15 bp, Homo sapiens
tggaggccaagtcat

SEQ ID NO: 1825262 - DNA, 15 bp, Homo sapiens
ggaggccaagtcatt

SEQ ID NO: 1825263 - DNA, 15 bp, Homo sapiens
gaggccaagtcattt

SEQ ID NO: 1825264 - DNA, 15 bp, Homo sapiens
aggccaagtcatttc

SEQ ID NO: 1825265 - DNA, 15 bp, Homo sapiens
ggccaagtcatttcc

SEQ ID NO: 1825266 - DNA, 15 bp, Homo sapiens
gccaagtcatttcct

SEQ ID NO: 1825267 - DNA, 15 bp, Homo sapiens
ccaagtcatttcctt

SEQ ID NO: 1825268 - DNA, 15 bp, Homo sapiens
caagtcatttccttc

SEQ ID NO: 1825269 - DNA, 15 bp, Homo sapiens
aagtcatttccttcc

SEQ ID NO: 1825270 - DNA, 15 bp, Homo sapiens
agtcatttccttccc

SEQ ID NO: 1825271 - DNA, 15 bp, Homo sapiens
gtcatttccttccca

SEQ ID NO: 1825272 - DNA, 15 bp, Homo sapiens
tcatttccttcccat

SEQ ID NO: 1825273 - DNA, 15 bp, Homo sapiens
catttccttcccatg

SEQ ID NO: 1825274 - DNA, 15 bp, Homo sapiens
atttccttcccatgc

SEQ ID NO: 1825275 - DNA, 15 bp, Homo sapiens
tttccttcccatgct

SEQ ID NO: 1825276 - DNA, 15 bp, Homo sapiens
ttccttcccatgctc

SEQ ID NO: 1825277 - DNA, 15 bp, Homo sapiens
tccttcccatgctct

SEQ ID NO: 1825278 - DNA, 15 bp, Homo sapiens
ccttcccatgctctc

SEQ ID NO: 1825279 - DNA, 15 bp, Homo sapiens
cttcccatgctctca

SEQ ID NO: 1825280 - DNA, 15 bp, Homo sapiens
ttcccatgctctcat

SEQ ID NO: 1825281 - DNA, 15 bp, Homo sapiens
tcccatgctctcata

SEQ ID NO: 1825282 - DNA, 15 bp, Homo sapiens
cccatgctctcatac

SEQ ID NO: 1825283 - DNA, 15 bp, Homo sapiens
ccatgctctcatact

SEQ ID NO: 1825284 - DNA, 15 bp, Homo sapiens
catgctctcatactg

SEQ ID NO: 1825285 - DNA, 15 bp, Homo sapiens
atgctctcatactga

SEQ ID NO: 1825286 - DNA, 15 bp, Homo sapiens
tgctctcatactgac

SEQ ID NO: 1825287 - DNA, 15 bp, Homo sapiens
gctctcatactgacc

SEQ ID NO: 1825288 - DNA, 15 bp, Homo sapiens
ctctcatactgaccc

SEQ ID NO: 1825289 - DNA, 15 bp, Homo sapiens
tctcatactgaccca

SEQ ID NO: 1825290 - DNA, 15 bp, Homo sapiens
ctcatactgacccaa

SEQ ID NO: 1825291 - DNA, 15 bp, Homo sapiens
tcatactgacccaac

SEQ ID NO: 1825292 - DNA, 15 bp, Homo sapiens
catactgacccaaca

SEQ ID NO: 1825293 - DNA, 15 bp, Homo sapiens
atactgacccaacaa

SEQ ID NO: 1825294 - DNA, 15 bp, Homo sapiens
tactgacccaacaaa

SEQ ID NO: 1825295 - DNA, 15 bp, Homo sapiens
actgacccaacaaac

SEQ ID NO: 1825296 - DNA, 15 bp, Homo sapiens
ctgacccaacaaacc

SEQ ID NO: 1825297 - DNA, 15 bp, Homo sapiens
tgacccaacaaaccc

SEQ ID NO: 1825298 - DNA, 15 bp, Homo sapiens
gacccaacaaaccca

SEQ ID NO: 1825299 - DNA, 15 bp, Homo sapiens
acccaacaaacccat

SEQ ID NO: 1825300 - DNA, 15 bp, Homo sapiens
cccaacaaacccatt

SEQ ID NO: 1825301 - DNA, 15 bp, Homo sapiens
ccaacaaacccattc

SEQ ID NO: 1825302 - DNA, 15 bp, Homo sapiens
caacaaacccattct

SEQ ID NO: 1825303 - DNA, 15 bp, Homo sapiens
aacaaacccattctg

SEQ ID NO: 1825304 - DNA, 15 bp, Homo sapiens
acaaacccattctgc

SEQ ID NO: 1825305 - DNA, 15 bp, Homo sapiens
caaacccattctgca

SEQ ID NO: 1825306 - DNA, 15 bp, Homo sapiens
aaacccattctgcac

SEQ ID NO: 1825307 - DNA, 15 bp, Homo sapiens
aacccattctgcacg

SEQ ID NO: 1825308 - DNA, 15 bp, Homo sapiens
acccattctgcacgt

SEQ ID NO: 1825309 - DNA, 15 bp, Homo sapiens
cccattctgcacgtg

SEQ ID NO: 1825310 - DNA, 15 bp, Homo sapiens
ccattctgcacgtga

SEQ ID NO: 1825311 - DNA, 15 bp, Homo sapiens
cattctgcacgtgag

SEQ ID NO: 1825312 - DNA, 15 bp, Homo sapiens
attctgcacgtgaga

SEQ ID NO: 1825313 - DNA, 15 bp, Homo sapiens
ttctgcacgtgagaa

SEQ ID NO: 1825314 - DNA, 15 bp, Homo sapiens
tctgcacgtgagaaa

SEQ ID NO: 1825315 - DNA, 15 bp, Homo sapiens
ctgcacgtgagaaaa

SEQ ID NO: 1825316 - DNA, 15 bp, Homo sapiens
tgcacgtgagaaaac

SEQ ID NO: 1825317 - DNA, 15 bp, Homo sapiens
gcacgtgagaaaact

SEQ ID NO: 1825318 - DNA, 15 bp, Homo sapiens
cacgtgagaaaactg

SEQ ID NO: 1825319 - DNA, 15 bp, Homo sapiens
acgtgagaaaactga

SEQ ID NO: 1825320 - DNA, 15 bp, Homo sapiens
cgtgagaaaactgag

SEQ ID NO: 1825321 - DNA, 15 bp, Homo sapiens
gtgagaaaactgagg

SEQ ID NO: 1825322 - DNA, 15 bp, Homo sapiens
gaaaactgaggcccg

SEQ ID NO: 1825323 - DNA, 15 bp, Homo sapiens
aaaactgaggcccgg

SEQ ID NO: 1825324 - DNA, 15 bp, Homo sapiens
aaactgaggcccgga

SEQ ID NO: 1825325 - DNA, 15 bp, Homo sapiens
aactgaggcccggag

SEQ ID NO: 1825326 - DNA, 15 bp, Homo sapiens
actgaggcccggagg

SEQ ID NO: 1825327 - DNA, 15 bp, Homo sapiens
ctgaggcccggagga

SEQ ID NO: 1825328 - DNA, 15 bp, Homo sapiens
tgaggcccggaggag

SEQ ID NO: 1825329 - DNA, 15 bp, Homo sapiens
gaggcccggaggagg

SEQ ID NO: 1825330 - DNA, 15 bp, Homo sapiens
aggcccggaggaggg

SEQ ID NO: 1825331 - DNA, 15 bp, Homo sapiens
ggcccggaggaggga

SEQ ID NO: 1825332 - DNA, 15 bp, Homo sapiens
gcccggaggagggaa

SEQ ID NO: 1825333 - DNA, 15 bp, Homo sapiens
cccggaggagggaat

SEQ ID NO: 1825334 - DNA, 15 bp, Homo sapiens
ccggaggagggaatt

SEQ ID NO: 1825335 - DNA, 15 bp, Homo sapiens
cggaggagggaattc

SEQ ID NO: 1825336 - DNA, 15 bp, Homo sapiens
ggaggagggaattca

SEQ ID NO: 1825337 - DNA, 15 bp, Homo sapiens
gaggagggaattcac

SEQ ID NO: 1825338 - DNA, 15 bp, Homo sapiens
aggagggaattcaca

SEQ ID NO: 1825339 - DNA, 15 bp, Homo sapiens
ggagggaattcacac

SEQ ID NO: 1825340 - DNA, 15 bp, Homo sapiens
gagggaattcacaca

SEQ ID NO: 1825341 - DNA, 15 bp, Homo sapiens
agggaattcacacac

SEQ ID NO: 1825342 - DNA, 15 bp, Homo sapiens
gggaattcacacacg

SEQ ID NO: 1825343 - DNA, 15 bp, Homo sapiens
ggaattcacacacgt

SEQ ID NO: 1825344 - DNA, 15 bp, Homo sapiens
gaattcacacacgtt

SEQ ID NO: 1825345 - DNA, 15 bp, Homo sapiens
aattcacacacgttt

SEQ ID NO: 1825346 - DNA, 15 bp, Homo sapiens
attcacacacgtttg

SEQ ID NO: 1825347 - DNA, 15 bp, Homo sapiens
ttcacacacgtttga

SEQ ID NO: 1825348 - DNA, 15 bp, Homo sapiens
tcacacacgtttgaa

SEQ ID NO: 1825349 - DNA, 15 bp, Homo sapiens
cacacacgtttgaag

SEQ ID NO: 1825350 - DNA, 15 bp, Homo sapiens
acacacgtttgaagc

SEQ ID NO: 1825351 - DNA, 15 bp, Homo sapiens
cacacgtttgaagcc

SEQ ID NO: 1825352 - DNA, 15 bp, Homo sapiens
acacgtttgaagcca

SEQ ID NO: 1825353 - DNA, 15 bp, Homo sapiens
cacgtttgaagccaa

SEQ ID NO: 1825354 - DNA, 15 bp, Homo sapiens
acgtttgaagccaag

SEQ ID NO: 1825355 - DNA, 15 bp, Homo sapiens
cgtttgaagccaagc

SEQ ID NO: 1825356 - DNA, 15 bp, Homo sapiens
gtttgaagccaagct

SEQ ID NO: 1825357 - DNA, 15 bp, Homo sapiens
tttgaagccaagctg

SEQ ID NO: 1825358 - DNA, 15 bp, Homo sapiens
ttgaagccaagctgg

SEQ ID NO: 1825359 - DNA, 15 bp, Homo sapiens
tgaagccaagctggg

SEQ ID NO: 1825360 - DNA, 15 bp, Homo sapiens
gaagccaagctgggg

SEQ ID NO: 1825361 - DNA, 15 bp, Homo sapiens
aagccaagctggggc

SEQ ID NO: 1825362 - DNA, 15 bp, Homo sapiens
agccaagctggggcc

SEQ ID NO: 1825363 - DNA, 15 bp, Homo sapiens
gccaagctggggcca

SEQ ID NO: 1825364 - DNA, 15 bp, Homo sapiens
ccaagctggggccag

SEQ ID NO: 1825365 - DNA, 15 bp, Homo sapiens
caagctggggccaga

SEQ ID NO: 1825366 - DNA, 15 bp, Homo sapiens
aagctggggccagaa

SEQ ID NO: 1825367 - DNA, 15 bp, Homo sapiens
agctggggccagaaa

SEQ ID NO: 1825368 - DNA, 15 bp, Homo sapiens
gctggggccagaaag

SEQ ID NO: 1825369 - DNA, 15 bp, Homo sapiens
ctggggccagaaagt

SEQ ID NO: 1825370 - DNA, 15 bp, Homo sapiens
tggggccagaaagta

SEQ ID NO: 1825371 - DNA, 15 bp, Homo sapiens
ggggccagaaagtag

SEQ ID NO: 1825372 - DNA, 15 bp, Homo sapiens
gggccagaaagtaga

SEQ ID NO: 1825373 - DNA, 15 bp, Homo sapiens
ggccagaaagtagat

SEQ ID NO: 1825374 - DNA, 15 bp, Homo sapiens
gccagaaagtagatc

SEQ ID NO: 1825375 - DNA, 15 bp, Homo sapiens
ccagaaagtagatcg

SEQ ID NO: 1825376 - DNA, 15 bp, Homo sapiens
cagaaagtagatcgg

SEQ ID NO: 1825377 - DNA, 15 bp, Homo sapiens
agaaagtagatcggc

SEQ ID NO: 1825378 - DNA, 15 bp, Homo sapiens
gaaagtagatcggct

SEQ ID NO: 1825379 - DNA, 15 bp, Homo sapiens
aaagtagatcggctg

SEQ ID NO: 1825380 - DNA, 15 bp, Homo sapiens
aagtagatcggctga

SEQ ID NO: 1825381 - DNA, 15 bp, Homo sapiens
agtagatcggctgat

SEQ ID NO: 1825382 - DNA, 15 bp, Homo sapiens
gtagatcggctgatc

SEQ ID NO: 1825383 - DNA, 15 bp, Homo sapiens
tagatcggctgatct

SEQ ID NO: 1825384 - DNA, 15 bp, Homo sapiens
agatcggctgatctc

SEQ ID NO: 1825385 - DNA, 15 bp, Homo sapiens
gatcggctgatctcc

SEQ ID NO: 1825386 - DNA, 15 bp, Homo sapiens
atcggctgatctcca

SEQ ID NO: 1825387 - DNA, 15 bp, Homo sapiens
tcggctgatctccaa

SEQ ID NO: 1825388 - DNA, 15 bp, Homo sapiens
cggctgatctccaaa

SEQ ID NO: 1825389 - DNA, 15 bp, Homo sapiens
ggctgatctccaaac

SEQ ID NO: 1825390 - DNA, 15 bp, Homo sapiens
gctgatctccaaacc

SEQ ID NO: 1825391 - DNA, 15 bp, Homo sapiens
ctgatctccaaacct

SEQ ID NO: 1825392 - DNA, 15 bp, Homo sapiens
tgatctccaaacctc

SEQ ID NO: 1825393 - DNA, 15 bp, Homo sapiens
gatctccaaacctcc

SEQ ID NO: 1825394 - DNA, 15 bp, Homo sapiens
atctccaaacctcca

SEQ ID NO: 1825395 - DNA, 15 bp, Homo sapiens
tctccaaacctccac

SEQ ID NO: 1825396 - DNA, 15 bp, Homo sapiens
ctccaaacctccacg

SEQ ID NO: 1825397 - DNA, 15 bp, Homo sapiens
tccaaacctccacgt

SEQ ID NO: 1825398 - DNA, 15 bp, Homo sapiens
ccaaacctccacgtc

SEQ ID NO: 1825399 - DNA, 15 bp, Homo sapiens
caaacctccacgtca

SEQ ID NO: 1825400 - DNA, 15 bp, Homo sapiens
aaacctccacgtcaa

SEQ ID NO: 1825401 - DNA, 15 bp, Homo sapiens
aacctccacgtcaaa

SEQ ID NO: 1825402 - DNA, 15 bp, Homo sapiens
acctccacgtcaaag

SEQ ID NO: 1825403 - DNA, 15 bp, Homo sapiens
cctccacgtcaaagg

SEQ ID NO: 1825404 - DNA, 15 bp, Homo sapiens
ctccacgtcaaaggt

SEQ ID NO: 1825405 - DNA, 15 bp, Homo sapiens
tccacgtcaaaggtc

SEQ ID NO: 1825406 - DNA, 15 bp, Homo sapiens
ccacgtcaaaggtct

SEQ ID NO: 1825407 - DNA, 15 bp, Homo sapiens
cacgtcaaaggtctt

SEQ ID NO: 1825408 - DNA, 15 bp, Homo sapiens
acgtcaaaggtcttc

SEQ ID NO: 1825409 - DNA, 15 bp, Homo sapiens
cgtcaaaggtcttcc

SEQ ID NO: 1825410 - DNA, 15 bp, Homo sapiens
gtcaaaggtcttccc

SEQ ID NO: 1825411 - DNA, 15 bp, Homo sapiens
tcaaaggtcttccca

SEQ ID NO: 1825412 - DNA, 15 bp, Homo sapiens
caaaggtcttcccag

SEQ ID NO: 1825413 - DNA, 15 bp, Homo sapiens
aaaggtcttcccagg

SEQ ID NO: 1825414 - DNA, 15 bp, Homo sapiens
aaggtcttcccagga

SEQ ID NO: 1825415 - DNA, 15 bp, Homo sapiens
aggtcttcccaggag

SEQ ID NO: 1825416 - DNA, 15 bp, Homo sapiens
ggtcttcccaggagg

SEQ ID NO: 1825417 - DNA, 15 bp, Homo sapiens
gtcttcccaggagga

SEQ ID NO: 1825418 - DNA, 15 bp, Homo sapiens
tcttcccaggaggac

SEQ ID NO: 1825419 - DNA, 15 bp, Homo sapiens
cttcccaggaggaca

SEQ ID NO: 1825420 - DNA, 15 bp, Homo sapiens
ttcccaggaggacat

SEQ ID NO: 1825421 - DNA, 15 bp, Homo sapiens
tcccaggaggacata

SEQ ID NO: 1825422 - DNA, 15 bp, Homo sapiens
cccaggaggacatat

SEQ ID NO: 1825423 - DNA, 15 bp, Homo sapiens
ccaggaggacatatg

SEQ ID NO: 1825424 - DNA, 15 bp, Homo sapiens
caggaggacatatgc

SEQ ID NO: 1825425 - DNA, 15 bp, Homo sapiens
aggaggacatatgcc

SEQ ID NO: 1825426 - DNA, 15 bp, Homo sapiens
ggaggacatatgcct

SEQ ID NO: 1825427 - DNA, 15 bp, Homo sapiens
gaggacatatgcctt

SEQ ID NO: 1825428 - DNA, 15 bp, Homo sapiens
aggacatatgccttc

SEQ ID NO: 1825429 - DNA, 15 bp, Homo sapiens
ggacatatgccttca

SEQ ID NO: 1825430 - DNA, 15 bp, Homo sapiens
gacatatgccttcaa

SEQ ID NO: 1825431 - DNA, 15 bp, Homo sapiens
acatatgccttcaag

SEQ ID NO: 1825432 - DNA, 15 bp, Homo sapiens
catatgccttcaagg

SEQ ID NO: 1825433 - DNA, 15 bp, Homo sapiens
atatgccttcaagga

SEQ ID NO: 1825434 - DNA, 15 bp, Homo sapiens
tatgccttcaaggat

SEQ ID NO: 1825435 - DNA, 15 bp, Homo sapiens
atgccttcaaggatt

SEQ ID NO: 1825436 - DNA, 15 bp, Homo sapiens
tgccttcaaggattt

SEQ ID NO: 1825437 - DNA, 15 bp, Homo sapiens
gccttcaaggatttt

SEQ ID NO: 1825438 - DNA, 15 bp, Homo sapiens
ccttcaaggatttta

SEQ ID NO: 1825439 - DNA, 15 bp, Homo sapiens
cttcaaggattttac

SEQ ID NO: 1825440 - DNA, 15 bp, Homo sapiens
ttcaaggattttaca

SEQ ID NO: 1825441 - DNA, 15 bp, Homo sapiens
tcaaggattttacaa

SEQ ID NO: 1825442 - DNA, 15 bp, Homo sapiens
caaggattttacaat

SEQ ID NO: 1825443 - DNA, 15 bp, Homo sapiens
aaggattttacaatg

SEQ ID NO: 1825444 - DNA, 15 bp, Homo sapiens
aggattttacaatgt

SEQ ID NO: 1825445 - DNA, 15 bp, Homo sapiens
ggattttacaatgta

SEQ ID NO: 1825446 - DNA, 15 bp, Homo sapiens
gattttacaatgtat

SEQ ID NO: 1825447 - DNA, 15 bp, Homo sapiens
attttacaatgtata

SEQ ID NO: 1825448 - DNA, 15 bp, Homo sapiens
ttttacaatgtatac

SEQ ID NO: 1825449 - DNA, 15 bp, Homo sapiens
tttacaatgtatacc

SEQ ID NO: 1825450 - DNA, 15 bp, Homo sapiens
ttacaatgtatacca

SEQ ID NO: 1825451 - DNA, 15 bp, Homo sapiens
tacaatgtataccac

SEQ ID NO: 1825452 - DNA, 15 bp, Homo sapiens
acaatgtataccacc

SEQ ID NO: 1825453 - DNA, 15 bp, Homo sapiens
caatgtataccaccc

SEQ ID NO: 1825454 - DNA, 15 bp, Homo sapiens
aatgtataccaccct

SEQ ID NO: 1825455 - DNA, 15 bp, Homo sapiens
atgtataccacccta

SEQ ID NO: 1825456 - DNA, 15 bp, Homo sapiens
tgtataccaccctac

SEQ ID NO: 1825457 - DNA, 15 bp, Homo sapiens
gtataccaccctaca

SEQ ID NO: 1825458 - DNA, 15 bp, Homo sapiens
tataccaccctacaa

SEQ ID NO: 1825459 - DNA, 15 bp, Homo sapiens
ataccaccctacaag

SEQ ID NO: 1825460 - DNA, 15 bp, Homo sapiens
taccaccctacaagt

SEQ ID NO: 1825461 - DNA, 15 bp, Homo sapiens
accaccctacaagtg

SEQ ID NO: 1825462 - DNA, 15 bp, Homo sapiens
ccaccctacaagtga

SEQ ID NO: 1825463 - DNA, 15 bp, Homo sapiens
caccctacaagtgat

SEQ ID NO: 1825464 - DNA, 15 bp, Homo sapiens
accctacaagtgatg

SEQ ID NO: 1825465 - DNA, 15 bp, Homo sapiens
ccctacaagtgatgg

SEQ ID NO: 1825466 - DNA, 15 bp, Homo sapiens
cctacaagtgatggg

SEQ ID NO: 1825467 - DNA, 15 bp, Homo sapiens
ctacaagtgatggga

SEQ ID NO: 1825468 - DNA, 15 bp, Homo sapiens
tacaagtgatgggag

SEQ ID NO: 1825469 - DNA, 15 bp, Homo sapiens
acaagtgatgggaga

SEQ ID NO: 1825470 - DNA, 15 bp, Homo sapiens
caagtgatgggagag

SEQ ID NO: 1825471 - DNA, 15 bp, Homo sapiens
aagtgatgggagaga

SEQ ID NO: 1825472 - DNA, 15 bp, Homo sapiens
agtgatgggagagag

SEQ ID NO: 1825473 - DNA, 15 bp, Homo sapiens
gtgatgggagagagg

SEQ ID NO: 1825474 - DNA, 15 bp, Homo sapiens
tgatgggagagaggg

SEQ ID NO: 1825475 - DNA, 15 bp, Homo sapiens
gatgggagagagggg

SEQ ID NO: 1825476 - DNA, 15 bp, Homo sapiens
atgggagagagggga

SEQ ID NO: 1825477 - DNA, 15 bp, Homo sapiens
tgggagagaggggaa

SEQ ID NO: 1825478 - DNA, 15 bp, Homo sapiens
gggagagaggggaaa

SEQ ID NO: 1825479 - DNA, 15 bp, Homo sapiens
ggagagaggggaaaa

SEQ ID NO: 1825480 - DNA, 15 bp, Homo sapiens
gagagaggggaaaaa

SEQ ID NO: 1825481 - DNA, 15 bp, Homo sapiens
agagaggggaaaaaa

SEQ ID NO: 1825482 - DNA, 15 bp, Homo sapiens
gagaggggaaaaaag

SEQ ID NO: 1825483 - DNA, 15 bp, Homo sapiens
agaggggaaaaaagc

SEQ ID NO: 1825484 - DNA, 15 bp, Homo sapiens
gaggggaaaaaagca

SEQ ID NO: 1825485 - DNA, 15 bp, Homo sapiens
aggggaaaaaagcaa

SEQ ID NO: 1825486 - DNA, 15 bp, Homo sapiens
ggggaaaaaagcaac

SEQ ID NO: 1825487 - DNA, 15 bp, Homo sapiens
gggaaaaaagcaacc

SEQ ID NO: 1825488 - DNA, 15 bp, Homo sapiens
ggaaaaaagcaaccg

SEQ ID NO: 1825489 - DNA, 15 bp, Homo sapiens
gaaaaaagcaaccga

SEQ ID NO: 1825490 - DNA, 15 bp, Homo sapiens
aaaaaagcaaccgac

SEQ ID NO: 1825491 - DNA, 15 bp, Homo sapiens
aaaaagcaaccgact

SEQ ID NO: 1825492 - DNA, 15 bp, Homo sapiens
aaaagcaaccgacta

SEQ ID NO: 1825493 - DNA, 15 bp, Homo sapiens
aaagcaaccgactaa

SEQ ID NO: 1825494 - DNA, 15 bp, Homo sapiens
aagcaaccgactaag

SEQ ID NO: 1825495 - DNA, 15 bp, Homo sapiens
agcaaccgactaagg

SEQ ID NO: 1825496 - DNA, 15 bp, Homo sapiens
gcaaccgactaagga

SEQ ID NO: 1825497 - DNA, 15 bp, Homo sapiens
caaccgactaaggag

SEQ ID NO: 1825498 - DNA, 15 bp, Homo sapiens
aaccgactaaggaga

SEQ ID NO: 1825499 - DNA, 15 bp, Homo sapiens
accgactaaggagaa

SEQ ID NO: 1825500 - DNA, 15 bp, Homo sapiens
ccgactaaggagaaa

SEQ ID NO: 1825501 - DNA, 15 bp, Homo sapiens
cgactaaggagaaaa

SEQ ID NO: 1825502 - DNA, 15 bp, Homo sapiens
gactaaggagaaaag

SEQ ID NO: 1825503 - DNA, 15 bp, Homo sapiens
actaaggagaaaagc

SEQ ID NO: 1825504 - DNA, 15 bp, Homo sapiens
ctaaggagaaaagca

SEQ ID NO: 1825505 - DNA, 15 bp, Homo sapiens
taaggagaaaagcaa

SEQ ID NO: 1825506 - DNA, 15 bp, Homo sapiens
aaggagaaaagcaag

SEQ ID NO: 1825507 - DNA, 15 bp, Homo sapiens
aggagaaaagcaagg

SEQ ID NO: 1825508 - DNA, 15 bp, Homo sapiens
ggagaaaagcaagga

SEQ ID NO: 1825509 - DNA, 15 bp, Homo sapiens
gagaaaagcaaggag

SEQ ID NO: 1825510 - DNA, 15 bp, Homo sapiens
agaaaagcaaggagc

SEQ ID NO: 1825511 - DNA, 15 bp, Homo sapiens
gaaaagcaaggagca

SEQ ID NO: 1825512 - DNA, 15 bp, Homo sapiens
aaaagcaaggagcag

SEQ ID NO: 1825513 - DNA, 15 bp, Homo sapiens
aaagcaaggagcaga

SEQ ID NO: 1825514 - DNA, 15 bp, Homo sapiens
aagcaaggagcagaa

SEQ ID NO: 1825515 - DNA, 15 bp, Homo sapiens
agcaaggagcagaaa

SEQ ID NO: 1825516 - DNA, 15 bp, Homo sapiens
gcaaggagcagaaaa

SEQ ID NO: 1825517 - DNA, 15 bp, Homo sapiens
caaggagcagaaaaa

SEQ ID NO: 1825518 - DNA, 15 bp, Homo sapiens
aaggagcagaaaaag

SEQ ID NO: 1825519 - DNA, 15 bp, Homo sapiens
aggagcagaaaaagg

SEQ ID NO: 1825520 - DNA, 15 bp, Homo sapiens
ggagcagaaaaagga

SEQ ID NO: 1825521 - DNA, 15 bp, Homo sapiens
gagcagaaaaaggag

SEQ ID NO: 1825522 - DNA, 15 bp, Homo sapiens
agcagaaaaaggagc

SEQ ID NO: 1825523 - DNA, 15 bp, Homo sapiens
gcagaaaaaggagca

SEQ ID NO: 1825524 - DNA, 15 bp, Homo sapiens
cagaaaaaggagcaa

SEQ ID NO: 1825525 - DNA, 15 bp, Homo sapiens
agaaaaaggagcaaa

SEQ ID NO: 1825526 - DNA, 15 bp, Homo sapiens
gaaaaaggagcaaaa

SEQ ID NO: 1825527 - DNA, 15 bp, Homo sapiens
aaaaaggagcaaaag

SEQ ID NO: 1825528 - DNA, 15 bp, Homo sapiens
aaaaggagcaaaaga

SEQ ID NO: 1825529 - DNA, 15 bp, Homo sapiens
aaaggagcaaaagag

SEQ ID NO: 1825530 - DNA, 15 bp, Homo sapiens
aaggagcaaaagagg

SEQ ID NO: 1825531 - DNA, 15 bp, Homo sapiens
aggagcaaaagagga

SEQ ID NO: 1825532 - DNA, 15 bp, Homo sapiens
ggagcaaaagaggag

SEQ ID NO: 1825533 - DNA, 15 bp, Homo sapiens
gagcaaaagaggagc

SEQ ID NO: 1825534 - DNA, 15 bp, Homo sapiens
agcaaaagaggagct

SEQ ID NO: 1825535 - DNA, 15 bp, Homo sapiens
gcaaaagaggagctg

SEQ ID NO: 1825536 - DNA, 15 bp, Homo sapiens
caaaagaggagctgt

SEQ ID NO: 1825537 - DNA, 15 bp, Homo sapiens
aaaagaggagctgtc

SEQ ID NO: 1825538 - DNA, 15 bp, Homo sapiens
aaagaggagctgtca

SEQ ID NO: 1825539 - DNA, 15 bp, Homo sapiens
aagaggagctgtcag

SEQ ID NO: 1825540 - DNA, 15 bp, Homo sapiens
agaggagctgtcaga

SEQ ID NO: 1825541 - DNA, 15 bp, Homo sapiens
gaggagctgtcagaa

SEQ ID NO: 1825542 - DNA, 15 bp, Homo sapiens
aggagctgtcagaac

SEQ ID NO: 1825543 - DNA, 15 bp, Homo sapiens
ggagctgtcagaacg

SEQ ID NO: 1825544 - DNA, 15 bp, Homo sapiens
gagctgtcagaacgg

SEQ ID NO: 1825545 - DNA, 15 bp, Homo sapiens
agctgtcagaacggt

SEQ ID NO: 1825546 - DNA, 15 bp, Homo sapiens
gctgtcagaacggtg

SEQ ID NO: 1825547 - DNA, 15 bp, Homo sapiens
ctgtcagaacggtgt

SEQ ID NO: 1825548 - DNA, 15 bp, Homo sapiens
tgtcagaacggtgtg

SEQ ID NO: 1825549 - DNA, 15 bp, Homo sapiens
gtcagaacggtgtga

SEQ ID NO: 1825550 - DNA, 15 bp, Homo sapiens
tcagaacggtgtgag

SEQ ID NO: 1825551 - DNA, 15 bp, Homo sapiens
cagaacggtgtgagg

SEQ ID NO: 1825552 - DNA, 15 bp, Homo sapiens
agaacggtgtgagga

SEQ ID NO: 1825553 - DNA, 15 bp, Homo sapiens
gaacggtgtgaggag

SEQ ID NO: 1825554 - DNA, 15 bp, Homo sapiens
aacggtgtgaggaga

SEQ ID NO: 1825555 - DNA, 15 bp, Homo sapiens
acggtgtgaggagag

SEQ ID NO: 1825556 - DNA, 15 bp, Homo sapiens
cggtgtgaggagagt

SEQ ID NO: 1825557 - DNA, 15 bp, Homo sapiens
ggtgtgaggagagtg

SEQ ID NO: 1825558 - DNA, 15 bp, Homo sapiens
gtgtgaggagagtgg

SEQ ID NO: 1825559 - DNA, 15 bp, Homo sapiens
tgtgaggagagtggg

SEQ ID NO: 1825560 - DNA, 15 bp, Homo sapiens
gtgaggagagtggga

SEQ ID NO: 1825561 - DNA, 15 bp, Homo sapiens
tgaggagagtgggaa

SEQ ID NO: 1825562 - DNA, 15 bp, Homo sapiens
gaggagagtgggaaa

SEQ ID NO: 1825563 - DNA, 15 bp, Homo sapiens
aggagagtgggaaag

SEQ ID NO: 1825564 - DNA, 15 bp, Homo sapiens
ggagagtgggaaagg

SEQ ID NO: 1825565 - DNA, 15 bp, Homo sapiens
gagagtgggaaagga

SEQ ID NO: 1825566 - DNA, 15 bp, Homo sapiens
agagtgggaaaggag

SEQ ID NO: 1825567 - DNA, 15 bp, Homo sapiens
gagtgggaaaggagc

SEQ ID NO: 1825568 - DNA, 15 bp, Homo sapiens
agtgggaaaggagcc

SEQ ID NO: 1825569 - DNA, 15 bp, Homo sapiens
gtgggaaaggagccg

SEQ ID NO: 1825570 - DNA, 15 bp, Homo sapiens
tgggaaaggagccgc

SEQ ID NO: 1825571 - DNA, 15 bp, Homo sapiens
gggaaaggagccgcc

SEQ ID NO: 1825572 - DNA, 15 bp, Homo sapiens
ggaaaggagccgcct

SEQ ID NO: 1825573 - DNA, 15 bp, Homo sapiens
gaaaggagccgcctc

SEQ ID NO: 1825574 - DNA, 15 bp, Homo sapiens
aaaggagccgcctcc

SEQ ID NO: 1825575 - DNA, 15 bp, Homo sapiens
aaggagccgcctcct

SEQ ID NO: 1825576 - DNA, 15 bp, Homo sapiens
aggagccgcctcctt

SEQ ID NO: 1825577 - DNA, 15 bp, Homo sapiens
ggagccgcctccttt

SEQ ID NO: 1825578 - DNA, 15 bp, Homo sapiens
gagccgcctcctttt

SEQ ID NO: 1825579 - DNA, 15 bp, Homo sapiens
agccgcctccttttg

SEQ ID NO: 1825580 - DNA, 15 bp, Homo sapiens
gccgcctccttttgc

SEQ ID NO: 1825581 - DNA, 15 bp, Homo sapiens
ccgcctccttttgcc

SEQ ID NO: 1825582 - DNA, 15 bp, Homo sapiens
cgcctccttttgcct

SEQ ID NO: 1825583 - DNA, 15 bp, Homo sapiens
gcctccttttgcctc

SEQ ID NO: 1825584 - DNA, 15 bp, Homo sapiens
cctccttttgcctct

SEQ ID NO: 1825585 - DNA, 15 bp, Homo sapiens
ctccttttgcctctc

SEQ ID NO: 1825586 - DNA, 15 bp, Homo sapiens
tccttttgcctctct

SEQ ID NO: 1825587 - DNA, 15 bp, Homo sapiens
ccttttgcctctctt

SEQ ID NO: 1825588 - DNA, 15 bp, Homo sapiens
cttttgcctctcttc

SEQ ID NO: 1825589 - DNA, 15 bp, Homo sapiens
ttttgcctctcttcc

SEQ ID NO: 1825590 - DNA, 15 bp, Homo sapiens
tttgcctctcttcct

SEQ ID NO: 1825591 - DNA, 15 bp, Homo sapiens
ttgcctctcttccta

SEQ ID NO: 1825592 - DNA, 15 bp, Homo sapiens
tgcctctcttcctac

SEQ ID NO: 1825593 - DNA, 15 bp, Homo sapiens
gcctctcttcctact

SEQ ID NO: 1825594 - DNA, 15 bp, Homo sapiens
cctctcttcctactt

SEQ ID NO: 1825595 - DNA, 15 bp, Homo sapiens
ctctcttcctactta

SEQ ID NO: 1825596 - DNA, 15 bp, Homo sapiens
tctcttcctacttat

SEQ ID NO: 1825597 - DNA, 15 bp, Homo sapiens
ctcttcctacttatt

SEQ ID NO: 1825598 - DNA, 15 bp, Homo sapiens
tcttcctacttatta

SEQ ID NO: 1825599 - DNA, 15 bp, Homo sapiens
cttcctacttattaa

SEQ ID NO: 1825600 - DNA, 15 bp, Homo sapiens
ttcctacttattaac

SEQ ID NO: 1825601 - DNA, 15 bp, Homo sapiens
tcctacttattaaca

SEQ ID NO: 1825602 - DNA, 15 bp, Homo sapiens
cctacttattaacaa

SEQ ID NO: 1825603 - DNA, 15 bp, Homo sapiens
ctacttattaacaaa

SEQ ID NO: 1825604 - DNA, 15 bp, Homo sapiens
tacttattaacaaaa

SEQ ID NO: 1825605 - DNA, 15 bp, Homo sapiens
acttattaacaaaac

SEQ ID NO: 1825606 - DNA, 15 bp, Homo sapiens
cttattaacaaaaca

SEQ ID NO: 1825607 - DNA, 15 bp, Homo sapiens
ttattaacaaaacag

SEQ ID NO: 1825608 - DNA, 15 bp, Homo sapiens
tattaacaaaacaga

SEQ ID NO: 1825609 - DNA, 15 bp, Homo sapiens
attaacaaaacagaa

SEQ ID NO: 1825610 - DNA, 15 bp, Homo sapiens
ttaacaaaacagaac

SEQ ID NO: 1825611 - DNA, 15 bp, Homo sapiens
taacaaaacagaacg

SEQ ID NO: 1825612 - DNA, 15 bp, Homo sapiens
aacaaaacagaacga

SEQ ID NO: 1825613 - DNA, 15 bp, Homo sapiens
acaaaacagaacgac

SEQ ID NO: 1825614 - DNA, 15 bp, Homo sapiens
caaaacagaacgact

SEQ ID NO: 1825615 - DNA, 15 bp, Homo sapiens
aaaacagaacgacta

SEQ ID NO: 1825616 - DNA, 15 bp, Homo sapiens
aaacagaacgactat

SEQ ID NO: 1825617 - DNA, 15 bp, Homo sapiens
aacagaacgactatc

SEQ ID NO: 1825618 - DNA, 15 bp, Homo sapiens
acagaacgactatcc

SEQ ID NO: 1825619 - DNA, 15 bp, Homo sapiens
cagaacgactatcca

SEQ ID NO: 1825620 - DNA, 15 bp, Homo sapiens
agaacgactatccaa

SEQ ID NO: 1825621 - DNA, 15 bp, Homo sapiens
gaacgactatccaac

SEQ ID NO: 1825622 - DNA, 15 bp, Homo sapiens
aacgactatccaacg

SEQ ID NO: 1825623 - DNA, 15 bp, Homo sapiens
acgactatccaacgt

SEQ ID NO: 1825624 - DNA, 15 bp, Homo sapiens
cgactatccaacgta

SEQ ID NO: 1825625 - DNA, 15 bp, Homo sapiens
gactatccaacgtat

SEQ ID NO: 1825626 - DNA, 15 bp, Homo sapiens
actatccaacgtatt

SEQ ID NO: 1825627 - DNA, 15 bp, Homo sapiens
ctatccaacgtattt

SEQ ID NO: 1825628 - DNA, 15 bp, Homo sapiens
tatccaacgtatttc

SEQ ID NO: 1825629 - DNA, 15 bp, Homo sapiens
atccaacgtatttca

SEQ ID NO: 1825630 - DNA, 15 bp, Homo sapiens
tccaacgtatttcag

SEQ ID NO: 1825631 - DNA, 15 bp, Homo sapiens
ccaacgtatttcagg

SEQ ID NO: 1825632 - DNA, 15 bp, Homo sapiens
caacgtatttcaggg

SEQ ID NO: 1825633 - DNA, 15 bp, Homo sapiens
aacgtatttcaggga

SEQ ID NO: 1825634 - DNA, 15 bp, Homo sapiens
acgtatttcagggag

SEQ ID NO: 1825635 - DNA, 15 bp, Homo sapiens
cgtatttcagggagc

SEQ ID NO: 1825636 - DNA, 15 bp, Homo sapiens
gtatttcagggagct

SEQ ID NO: 1825637 - DNA, 15 bp, Homo sapiens
tatttcagggagcta

SEQ ID NO: 1825638 - DNA, 15 bp, Homo sapiens
atttcagggagctaa

SEQ ID NO: 1825639 - DNA, 15 bp, Homo sapiens
tttcagggagctaag

SEQ ID NO: 1825640 - DNA, 15 bp, Homo sapiens
ttcagggagctaagt

SEQ ID NO: 1825641 - DNA, 15 bp, Homo sapiens
tcagggagctaagtc

SEQ ID NO: 1825642 - DNA, 15 bp, Homo sapiens
cagggagctaagtct

SEQ ID NO: 1825643 - DNA, 15 bp, Homo sapiens
agggagctaagtctt

SEQ ID NO: 1825644 - DNA, 15 bp, Homo sapiens
gggagctaagtctta

SEQ ID NO: 1825645 - DNA, 15 bp, Homo sapiens
ggagctaagtcttag

SEQ ID NO: 1825646 - DNA, 15 bp, Homo sapiens
gagctaagtcttagc

SEQ ID NO: 1825647 - DNA, 15 bp, Homo sapiens
agctaagtcttagcc

SEQ ID NO: 1825648 - DNA, 15 bp, Homo sapiens
gctaagtcttagcca

SEQ ID NO: 1825649 - DNA, 15 bp, Homo sapiens
ctaagtcttagccag

SEQ ID NO: 1825650 - DNA, 15 bp, Homo sapiens
taagtcttagccagc

SEQ ID NO: 1825651 - DNA, 15 bp, Homo sapiens
aagtcttagccagct

SEQ ID NO: 1825652 - DNA, 15 bp, Homo sapiens
agtcttagccagctt

SEQ ID NO: 1825653 - DNA, 15 bp, Homo sapiens
gtcttagccagcttc

SEQ ID NO: 1825654 - DNA, 15 bp, Homo sapiens
tcttagccagcttca

SEQ ID NO: 1825655 - DNA, 15 bp, Homo sapiens
cttagccagcttcag

SEQ ID NO: 1825656 - DNA, 15 bp, Homo sapiens
ttagccagcttcagc

SEQ ID NO: 1825657 - DNA, 15 bp, Homo sapiens
tagccagcttcagct

SEQ ID NO: 1825658 - DNA, 15 bp, Homo sapiens
agccagcttcagctg

SEQ ID NO: 1825659 - DNA, 15 bp, Homo sapiens
gccagcttcagctgt

SEQ ID NO: 1825660 - DNA, 15 bp, Homo sapiens
ccagcttcagctgtg

SEQ ID NO: 1825661 - DNA, 15 bp, Homo sapiens
cagcttcagctgtgt

SEQ ID NO: 1825662 - DNA, 15 bp, Homo sapiens
agcttcagctgtgtt

SEQ ID NO: 1825663 - DNA, 15 bp, Homo sapiens
gcttcagctgtgttt

SEQ ID NO: 1825664 - DNA, 15 bp, Homo sapiens
cttcagctgtgtttt

SEQ ID NO: 1825665 - DNA, 15 bp, Homo sapiens
ttcagctgtgtttta

SEQ ID NO: 1825666 - DNA, 15 bp, Homo sapiens
tcagctgtgttttaa

SEQ ID NO: 1825667 - DNA, 15 bp, Homo sapiens
cagctgtgttttaac

SEQ ID NO: 1825668 - DNA, 15 bp, Homo sapiens
agctgtgttttaacc

SEQ ID NO: 1825669 - DNA, 15 bp, Homo sapiens
gctgtgttttaaccc

SEQ ID NO: 1825670 - DNA, 15 bp, Homo sapiens
ctgtgttttaaccct

SEQ ID NO: 1825671 - DNA, 15 bp, Homo sapiens
tgtgttttaaccctt

SEQ ID NO: 1825672 - DNA, 15 bp, Homo sapiens
gtgttttaaccctta

SEQ ID NO: 1825673 - DNA, 15 bp, Homo sapiens
tgttttaacccttag

SEQ ID NO: 1825674 - DNA, 15 bp, Homo sapiens
gttttaacccttagc

SEQ ID NO: 1825675 - DNA, 15 bp, Homo sapiens
ttttaacccttagct

SEQ ID NO: 1825676 - DNA, 15 bp, Homo sapiens
tttaacccttagcta

SEQ ID NO: 1825677 - DNA, 15 bp, Homo sapiens
ttaacccttagctaa

SEQ ID NO: 1825678 - DNA, 15 bp, Homo sapiens
taacccttagctaaa

SEQ ID NO: 1825679 - DNA, 15 bp, Homo sapiens
aacccttagctaaat

SEQ ID NO: 1825680 - DNA, 15 bp, Homo sapiens
acccttagctaaata

SEQ ID NO: 1825681 - DNA, 15 bp, Homo sapiens
cccttagctaaatat

SEQ ID NO: 1825682 - DNA, 15 bp, Homo sapiens
ccttagctaaatata

SEQ ID NO: 1825683 - DNA, 15 bp, Homo sapiens
cttagctaaatatag

SEQ ID NO: 1825684 - DNA, 15 bp, Homo sapiens
ttagctaaatataga

SEQ ID NO: 1825685 - DNA, 15 bp, Homo sapiens
tagctaaatatagac

SEQ ID NO: 1825686 - DNA, 15 bp, Homo sapiens
agctaaatatagaca

SEQ ID NO: 1825687 - DNA, 15 bp, Homo sapiens
gctaaatatagacaa

SEQ ID NO: 1825688 - DNA, 15 bp, Homo sapiens
ctaaatatagacaag

SEQ ID NO: 1825689 - DNA, 15 bp, Homo sapiens
taaatatagacaagg

SEQ ID NO: 1825690 - DNA, 15 bp, Homo sapiens
aaatatagacaaggc

SEQ ID NO: 1825691 - DNA, 15 bp, Homo sapiens
aatatagacaaggct

SEQ ID NO: 1825692 - DNA, 15 bp, Homo sapiens
atatagacaaggcta

SEQ ID NO: 1825693 - DNA, 15 bp, Homo sapiens
tatagacaaggctaa

SEQ ID NO: 1825694 - DNA, 15 bp, Homo sapiens
atagacaaggctaag

SEQ ID NO: 1825695 - DNA, 15 bp, Homo sapiens
tagacaaggctaagg

SEQ ID NO: 1825696 - DNA, 15 bp, Homo sapiens
agacaaggctaaggc

SEQ ID NO: 1825697 - DNA, 15 bp, Homo sapiens
gacaaggctaaggca

SEQ ID NO: 1825698 - DNA, 15 bp, Homo sapiens
acaaggctaaggcag

SEQ ID NO: 1825699 - DNA, 15 bp, Homo sapiens
caaggctaaggcagg

SEQ ID NO: 1825700 - DNA, 15 bp, Homo sapiens
aaggctaaggcaggc

SEQ ID NO: 1825701 - DNA, 15 bp, Homo sapiens
aggctaaggcaggcc

SEQ ID NO: 1825702 - DNA, 15 bp, Homo sapiens
gggcgggtcacgtga

SEQ ID NO: 1825703 - DNA, 15 bp, Homo sapiens
ggcgggtcacgtgat

SEQ ID NO: 1825704 - DNA, 15 bp, Homo sapiens
gcgggtcacgtgatg

SEQ ID NO: 1825705 - DNA, 15 bp, Homo sapiens
cgggtcacgtgatgg

SEQ ID NO: 1825706 - DNA, 15 bp, Homo sapiens
gggtcacgtgatggg

SEQ ID NO: 1825707 - DNA, 15 bp, Homo sapiens
ggtcacgtgatgggg

SEQ ID NO: 1825708 - DNA, 15 bp, Homo sapiens
gtcacgtgatggggt

SEQ ID NO: 1825709 - DNA, 15 bp, Homo sapiens
tcacgtgatggggtt

SEQ ID NO: 1825710 - DNA, 15 bp, Homo sapiens
cacgtgatggggttt

SEQ ID NO: 1825711 - DNA, 15 bp, Homo sapiens
acgtgatggggttta

SEQ ID NO: 1825712 - DNA, 15 bp, Homo sapiens
cgtgatggggtttaa

SEQ ID NO: 1825713 - DNA, 15 bp, Homo sapiens
gtgatggggtttaaa

SEQ ID NO: 1825714 - DNA, 15 bp, Homo sapiens
tgatggggtttaaat

SEQ ID NO: 1825715 - DNA, 15 bp, Homo sapiens
gatggggtttaaatc

SEQ ID NO: 1825716 - DNA, 15 bp, Homo sapiens
atggggtttaaatct

SEQ ID NO: 1825717 - DNA, 15 bp, Homo sapiens
tggggtttaaatctc

SEQ ID NO: 1825718 - DNA, 15 bp, Homo sapiens
ggggtttaaatctcc

SEQ ID NO: 1825719 - DNA, 15 bp, Homo sapiens
gggtttaaatctccc

SEQ ID NO: 1825720 - DNA, 15 bp, Homo sapiens
ggtttaaatctcccg

SEQ ID NO: 1825721 - DNA, 15 bp, Homo sapiens
gtttaaatctcccgc

SEQ ID NO: 1825722 - DNA, 15 bp, Homo sapiens
tttaaatctcccgca

SEQ ID NO: 1825723 - DNA, 15 bp, Homo sapiens
ttaaatctcccgcag

SEQ ID NO: 1825724 - DNA, 15 bp, Homo sapiens
taaatctcccgcagc

SEQ ID NO: 1825725 - DNA, 15 bp, Homo sapiens
aaatctcccgcagcc

SEQ ID NO: 1825726 - DNA, 15 bp, Homo sapiens
aatctcccgcagccg

SEQ ID NO: 1825727 - DNA, 15 bp, Homo sapiens
atctcccgcagccgg

SEQ ID NO: 1825728 - DNA, 15 bp, Homo sapiens
tctcccgcagccgga

SEQ ID NO: 1825729 - DNA, 15 bp, Homo sapiens
ctcccgcagccggag

SEQ ID NO: 1825730 - DNA, 15 bp, Homo sapiens
tcccgcagccggagc

SEQ ID NO: 1825731 - DNA, 15 bp, Homo sapiens
cccgcagccggagcc

SEQ ID NO: 1825732 - DNA, 15 bp, Homo sapiens
ccgcagccggagccg

SEQ ID NO: 1825733 - DNA, 15 bp, Homo sapiens
cgcagccggagccgc

SEQ ID NO: 1825734 - DNA, 15 bp, Homo sapiens
gcagccggagccgcg

SEQ ID NO: 1825735 - DNA, 15 bp, Homo sapiens
cagccggagccgcgg

SEQ ID NO: 1825736 - DNA, 15 bp, Homo sapiens
agccggagccgcggg

SEQ ID NO: 1825737 - DNA, 15 bp, Homo sapiens
gccggagccgcgggg

SEQ ID NO: 1825738 - DNA, 15 bp, Homo sapiens
ccggagccgcggggg

SEQ ID NO: 1825739 - DNA, 15 bp, Homo sapiens
cggagccgcgggggc

SEQ ID NO: 1825740 - DNA, 15 bp, Homo sapiens
ggagccgcgggggcg

SEQ ID NO: 1825741 - DNA, 15 bp, Homo sapiens
gagccgcgggggcgc

SEQ ID NO: 1825742 - DNA, 15 bp, Homo sapiens
agccgcgggggcgcc

SEQ ID NO: 1825743 - DNA, 15 bp, Homo sapiens
gccgcgggggcgcca

SEQ ID NO: 1825744 - DNA, 15 bp, Homo sapiens
ccgcgggggcgccag

SEQ ID NO: 1825745 - DNA, 15 bp, Homo sapiens
cgcgggggcgccagt

SEQ ID NO: 1825746 - DNA, 15 bp, Homo sapiens
gcgggggcgccagtg

SEQ ID NO: 1825747 - DNA, 15 bp, Homo sapiens
cgggggcgccagtgc

SEQ ID NO: 1825748 - DNA, 15 bp, Homo sapiens
gggggcgccagtgcc

SEQ ID NO: 1825749 - DNA, 15 bp, Homo sapiens
ggggcgccagtgccg

SEQ ID NO: 1825750 - DNA, 15 bp, Homo sapiens
gggcgccagtgccgc

SEQ ID NO: 1825751 - DNA, 15 bp, Homo sapiens
ggcgccagtgccgcg

SEQ ID NO: 1825752 - DNA, 15 bp, Homo sapiens
gcgccagtgccgcgc

SEQ ID NO: 1825753 - DNA, 15 bp, Homo sapiens
cgccagtgccgcgcg

SEQ ID NO: 1825754 - DNA, 15 bp, Homo sapiens
gccagtgccgcgcgt

SEQ ID NO: 1825755 - DNA, 15 bp, Homo sapiens
ccagtgccgcgcgtc

SEQ ID NO: 1825756 - DNA, 15 bp, Homo sapiens
cagtgccgcgcgtcg

SEQ ID NO: 1825757 - DNA, 15 bp, Homo sapiens
agtgccgcgcgtcga

SEQ ID NO: 1825758 - DNA, 15 bp, Homo sapiens
gtgccgcgcgtcgag

SEQ ID NO: 1825759 - DNA, 15 bp, Homo sapiens
tgccgcgcgtcgagc

SEQ ID NO: 1825760 - DNA, 15 bp, Homo sapiens
gccgcgcgtcgagcg

SEQ ID NO: 1825761 - DNA, 15 bp, Homo sapiens
ccgcgcgtcgagcgg

SEQ ID NO: 1825762 - DNA, 15 bp, Homo sapiens
cgcgcgtcgagcggg

SEQ ID NO: 1825763 - DNA, 15 bp, Homo sapiens
gcgcgtcgagcggga

SEQ ID NO: 1825764 - DNA, 15 bp, Homo sapiens
cgcgtcgagcgggag

SEQ ID NO: 1825765 - DNA, 15 bp, Homo sapiens
gcgtcgagcgggagc

SEQ ID NO: 1825766 - DNA, 15 bp, Homo sapiens
cgtcgagcgggagca

SEQ ID NO: 1825767 - DNA, 15 bp, Homo sapiens
gtcgagcgggagcag

SEQ ID NO: 1825768 - DNA, 15 bp, Homo sapiens
tcgagcgggagcaga

SEQ ID NO: 1825769 - DNA, 15 bp, Homo sapiens
cgagcgggagcagag

SEQ ID NO: 1825770 - DNA, 15 bp, Homo sapiens
gagcgggagcagagg

SEQ ID NO: 1825771 - DNA, 15 bp, Homo sapiens
agcgggagcagagga

SEQ ID NO: 1825772 - DNA, 15 bp, Homo sapiens
gcgggagcagaggag

SEQ ID NO: 1825773 - DNA, 15 bp, Homo sapiens
cgggagcagaggagg

SEQ ID NO: 1825774 - DNA, 15 bp, Homo sapiens
gggagcagaggaggc

SEQ ID NO: 1825775 - DNA, 15 bp, Homo sapiens
ggagcagaggaggcg

SEQ ID NO: 1825776 - DNA, 15 bp, Homo sapiens
gagcagaggaggcga

SEQ ID NO: 1825777 - DNA, 15 bp, Homo sapiens
agcagaggaggcgag

SEQ ID NO: 1825778 - DNA, 15 bp, Homo sapiens
gcagaggaggcgagg

SEQ ID NO: 1825779 - DNA, 15 bp, Homo sapiens
cagaggaggcgaggg

SEQ ID NO: 1825780 - DNA, 15 bp, Homo sapiens
agaggaggcgaggga

SEQ ID NO: 1825781 - DNA, 15 bp, Homo sapiens
gaggaggcgagggag

SEQ ID NO: 1825782 - DNA, 15 bp, Homo sapiens
aggaggcgagggagg

SEQ ID NO: 1825783 - DNA, 15 bp, Homo sapiens
ggaggcgagggagga

SEQ ID NO: 1825784 - DNA, 15 bp, Homo sapiens
gaggcgagggaggag

SEQ ID NO: 1825785 - DNA, 15 bp, Homo sapiens
aggcgagggaggagg

SEQ ID NO: 1825786 - DNA, 15 bp, Homo sapiens
ggcgagggaggaggg

SEQ ID NO: 1825787 - DNA, 15 bp, Homo sapiens
gcgagggaggagggc

SEQ ID NO: 1825788 - DNA, 15 bp, Homo sapiens
cgagggaggagggcc

SEQ ID NO: 1825789 - DNA, 15 bp, Homo sapiens
gagggaggagggcca

SEQ ID NO: 1825790 - DNA, 15 bp, Homo sapiens
agggaggagggccag

SEQ ID NO: 1825791 - DNA, 15 bp, Homo sapiens
gggaggagggccaga

SEQ ID NO: 1825792 - DNA, 15 bp, Homo sapiens
ggaggagggccagag

SEQ ID NO: 1825793 - DNA, 15 bp, Homo sapiens
gaggagggccagaga

SEQ ID NO: 1825794 - DNA, 15 bp, Homo sapiens
aggagggccagagag

SEQ ID NO: 1825795 - DNA, 15 bp, Homo sapiens
ggagggccagagagg

SEQ ID NO: 1825796 - DNA, 15 bp, Homo sapiens
gagggccagagaggc

SEQ ID NO: 1825797 - DNA, 15 bp, Homo sapiens
agggccagagaggca

SEQ ID NO: 1825798 - DNA, 15 bp, Homo sapiens
gggccagagaggcag

SEQ ID NO: 1825799 - DNA, 15 bp, Homo sapiens
ggccagagaggcagt

SEQ ID NO: 1825800 - DNA, 15 bp, Homo sapiens
gccagagaggcagtt

SEQ ID NO: 1825801 - DNA, 15 bp, Homo sapiens
ccagagaggcagttg

SEQ ID NO: 1825802 - DNA, 15 bp, Homo sapiens
cagagaggcagttgg

SEQ ID NO: 1825803 - DNA, 15 bp, Homo sapiens
agagaggcagttgga

SEQ ID NO: 1825804 - DNA, 15 bp, Homo sapiens
gagaggcagttggaa

SEQ ID NO: 1825805 - DNA, 15 bp, Homo sapiens
agaggcagttggaag

SEQ ID NO: 1825806 - DNA, 15 bp, Homo sapiens
gaggcagttggaaga

SEQ ID NO: 1825807 - DNA, 15 bp, Homo sapiens
aggcagttggaagat

SEQ ID NO: 1825808 - DNA, 15 bp, Homo sapiens
ggcagttggaagatg

SEQ ID NO: 1825809 - DNA, 15 bp, Homo sapiens
gcagttggaagatgg

SEQ ID NO: 1825810 - DNA, 15 bp, Homo sapiens
cagttggaagatggc

SEQ ID NO: 1825811 - DNA, 15 bp, Homo sapiens
agttggaagatggcg

SEQ ID NO: 1825812 - DNA, 15 bp, Homo sapiens
gttggaagatggcgg

SEQ ID NO: 1825813 - DNA, 15 bp, Homo sapiens
ttggaagatggcgga

SEQ ID NO: 1825814 - DNA, 15 bp, Homo sapiens
tggaagatggcggac

SEQ ID NO: 1825815 - DNA, 15 bp, Homo sapiens
ggaagatggcggacg

SEQ ID NO: 1825816 - DNA, 15 bp, Homo sapiens
gaagatggcggacga

SEQ ID NO: 1825817 - DNA, 15 bp, Homo sapiens
aagatggcggacgag

SEQ ID NO: 1825818 - DNA, 15 bp, Homo sapiens
agatggcggacgagg

SEQ ID NO: 1825819 - DNA, 15 bp, Homo sapiens
gatggcggacgaggc

SEQ ID NO: 1825820 - DNA, 15 bp, Homo sapiens
atggcggacgaggcg

SEQ ID NO: 1825821 - DNA, 15 bp, Homo sapiens
tggcggacgaggcgg

SEQ ID NO: 1825822 - DNA, 15 bp, Homo sapiens
ggcggacgaggcggc

SEQ ID NO: 1825823 - DNA, 15 bp, Homo sapiens
gcggacgaggcggcc

SEQ ID NO: 1825824 - DNA, 15 bp, Homo sapiens
cggacgaggcggccc

SEQ ID NO: 1825825 - DNA, 15 bp, Homo sapiens
ggacgaggcggccct

SEQ ID NO: 1825826 - DNA, 15 bp, Homo sapiens
gacgaggcggccctc

SEQ ID NO: 1825827 - DNA, 15 bp, Homo sapiens
acgaggcggccctcg

SEQ ID NO: 1825828 - DNA, 15 bp, Homo sapiens
cgaggcggccctcgc

SEQ ID NO: 1825829 - DNA, 15 bp, Homo sapiens
gaggcggccctcgcc

SEQ ID NO: 1825830 - DNA, 15 bp, Homo sapiens
aggcggccctcgccc

SEQ ID NO: 1825831 - DNA, 15 bp, Homo sapiens
ggcggccctcgccct

SEQ ID NO: 1825832 - DNA, 15 bp, Homo sapiens
gcggccctcgccctt

SEQ ID NO: 1825833 - DNA, 15 bp, Homo sapiens
cggccctcgcccttc

SEQ ID NO: 1825834 - DNA, 15 bp, Homo sapiens
ggccctcgcccttca

SEQ ID NO: 1825835 - DNA, 15 bp, Homo sapiens
gccctcgcccttcag

SEQ ID NO: 1825836 - DNA, 15 bp, Homo sapiens
ccctcgcccttcagc

SEQ ID NO: 1825837 - DNA, 15 bp, Homo sapiens
cctcgcccttcagcc

SEQ ID NO: 1825838 - DNA, 15 bp, Homo sapiens
ctcgcccttcagccc

SEQ ID NO: 1825839 - DNA, 15 bp, Homo sapiens
tcgcccttcagcccg

SEQ ID NO: 1825840 - DNA, 15 bp, Homo sapiens
cgcccttcagcccgg

SEQ ID NO: 1825841 - DNA, 15 bp, Homo sapiens
gcccttcagcccggc

SEQ ID NO: 1825842 - DNA, 15 bp, Homo sapiens
cccttcagcccggcg

SEQ ID NO: 1825843 - DNA, 15 bp, Homo sapiens
ccttcagcccggcgg

SEQ ID NO: 1825844 - DNA, 15 bp, Homo sapiens
cttcagcccggcggc

SEQ ID NO: 1825845 - DNA, 15 bp, Homo sapiens
ttcagcccggcggct

SEQ ID NO: 1825846 - DNA, 15 bp, Homo sapiens
tcagcccggcggctc

SEQ ID NO: 1825847 - DNA, 15 bp, Homo sapiens
cagcccggcggctcc

SEQ ID NO: 1825848 - DNA, 15 bp, Homo sapiens
agcccggcggctccc

SEQ ID NO: 1825849 - DNA, 15 bp, Homo sapiens
gcccggcggctcccc

SEQ ID NO: 1825850 - DNA, 15 bp, Homo sapiens
cccggcggctccccc

SEQ ID NO: 1825851 - DNA, 15 bp, Homo sapiens
ccggcggctccccct

SEQ ID NO: 1825852 - DNA, 15 bp, Homo sapiens
cggcggctccccctc

SEQ ID NO: 1825853 - DNA, 15 bp, Homo sapiens
ggcggctccccctcg

SEQ ID NO: 1825854 - DNA, 15 bp, Homo sapiens
gcggctccccctcgg

SEQ ID NO: 1825855 - DNA, 15 bp, Homo sapiens
cggctccccctcggc

SEQ ID NO: 1825856 - DNA, 15 bp, Homo sapiens
ggctccccctcggcg

SEQ ID NO: 1825857 - DNA, 15 bp, Homo sapiens
gctccccctcggcgg

SEQ ID NO: 1825858 - DNA, 15 bp, Homo sapiens
ctccccctcggcggc

SEQ ID NO: 1825859 - DNA, 15 bp, Homo sapiens
tccccctcggcggcg

SEQ ID NO: 1825860 - DNA, 15 bp, Homo sapiens
ccccctcggcggcgg

SEQ ID NO: 1825861 - DNA, 15 bp, Homo sapiens
cccctcggcggcggg

SEQ ID NO: 1825862 - DNA, 15 bp, Homo sapiens
ccctcggcggcgggg

SEQ ID NO: 1825863 - DNA, 15 bp, Homo sapiens
cctcggcggcggggg

SEQ ID NO: 1825864 - DNA, 15 bp, Homo sapiens
ctcggcggcgggggc

SEQ ID NO: 1825865 - DNA, 15 bp, Homo sapiens
tcggcggcgggggcc

SEQ ID NO: 1825866 - DNA, 15 bp, Homo sapiens
cggcggcgggggccg

SEQ ID NO: 1825867 - DNA, 15 bp, Homo sapiens
ggcggcgggggccga

SEQ ID NO: 1825868 - DNA, 15 bp, Homo sapiens
gcggcgggggccgac

SEQ ID NO: 1825869 - DNA, 15 bp, Homo sapiens
cggcgggggccgaca

SEQ ID NO: 1825870 - DNA, 15 bp, Homo sapiens
ggcgggggccgacag

SEQ ID NO: 1825871 - DNA, 15 bp, Homo sapiens
gcgggggccgacagg

SEQ ID NO: 1825872 - DNA, 15 bp, Homo sapiens
cgggggccgacaggg

SEQ ID NO: 1825873 - DNA, 15 bp, Homo sapiens
gggggccgacaggga

SEQ ID NO: 1825874 - DNA, 15 bp, Homo sapiens
ggggccgacagggag

SEQ ID NO: 1825875 - DNA, 15 bp, Homo sapiens
gggccgacagggagg

SEQ ID NO: 1825876 - DNA, 15 bp, Homo sapiens
ggccgacagggaggc

SEQ ID NO: 1825877 - DNA, 15 bp, Homo sapiens
gccgacagggaggcc

SEQ ID NO: 1825878 - DNA, 15 bp, Homo sapiens
ccgacagggaggccg

SEQ ID NO: 1825879 - DNA, 15 bp, Homo sapiens
cgacagggaggccgc

SEQ ID NO: 1825880 - DNA, 15 bp, Homo sapiens
gacagggaggccgcg

SEQ ID NO: 1825881 - DNA, 15 bp, Homo sapiens
acagggaggccgcgt

SEQ ID NO: 1825882 - DNA, 15 bp, Homo sapiens
cagggaggccgcgtc

SEQ ID NO: 1825883 - DNA, 15 bp, Homo sapiens
agggaggccgcgtcg

SEQ ID NO: 1825884 - DNA, 15 bp, Homo sapiens
gggaggccgcgtcgt

SEQ ID NO: 1825885 - DNA, 15 bp, Homo sapiens
ggaggccgcgtcgtc

SEQ ID NO: 1825886 - DNA, 15 bp, Homo sapiens
gaggccgcgtcgtcc

SEQ ID NO: 1825887 - DNA, 15 bp, Homo sapiens
aggccgcgtcgtccc

SEQ ID NO: 1825888 - DNA, 15 bp, Homo sapiens
ggccgcgtcgtcccc

SEQ ID NO: 1825889 - DNA, 15 bp, Homo sapiens
gccgcgtcgtccccc

SEQ ID NO: 1825890 - DNA, 15 bp, Homo sapiens
ccgcgtcgtcccccg

SEQ ID NO: 1825891 - DNA, 15 bp, Homo sapiens
cgcgtcgtcccccgc

SEQ ID NO: 1825892 - DNA, 15 bp, Homo sapiens
gcgtcgtcccccgcc

SEQ ID NO: 1825893 - DNA, 15 bp, Homo sapiens
cgtcgtcccccgccg

SEQ ID NO: 1825894 - DNA, 15 bp, Homo sapiens
gtcgtcccccgccgg

SEQ ID NO: 1825895 - DNA, 15 bp, Homo sapiens
tcgtcccccgccggg

SEQ ID NO: 1825896 - DNA, 15 bp, Homo sapiens
cgtcccccgccgggg

SEQ ID NO: 1825897 - DNA, 15 bp, Homo sapiens
gtcccccgccgggga

SEQ ID NO: 1825898 - DNA, 15 bp, Homo sapiens
tcccccgccggggag

SEQ ID NO: 1825899 - DNA, 15 bp, Homo sapiens
cccccgccggggagc

SEQ ID NO: 1825900 - DNA, 15 bp, Homo sapiens
ccccgccggggagcc

SEQ ID NO: 1825901 - DNA, 15 bp, Homo sapiens
cccgccggggagccg

SEQ ID NO: 1825902 - DNA, 15 bp, Homo sapiens
ccgccggggagccgc

SEQ ID NO: 1825903 - DNA, 15 bp, Homo sapiens
cgccggggagccgct

SEQ ID NO: 1825904 - DNA, 15 bp, Homo sapiens
gccggggagccgctc

SEQ ID NO: 1825905 - DNA, 15 bp, Homo sapiens
ccggggagccgctcc

SEQ ID NO: 1825906 - DNA, 15 bp, Homo sapiens
cggggagccgctccg

SEQ ID NO: 1825907 - DNA, 15 bp, Homo sapiens
ggggagccgctccgc

SEQ ID NO: 1825908 - DNA, 15 bp, Homo sapiens
gggagccgctccgca

SEQ ID NO: 1825909 - DNA, 15 bp, Homo sapiens
ggagccgctccgcaa

SEQ ID NO: 1825910 - DNA, 15 bp, Homo sapiens
gagccgctccgcaag

SEQ ID NO: 1825911 - DNA, 15 bp, Homo sapiens
agccgctccgcaaga

SEQ ID NO: 1825912 - DNA, 15 bp, Homo sapiens
gccgctccgcaagag

SEQ ID NO: 1825913 - DNA, 15 bp, Homo sapiens
ccgctccgcaagagg

SEQ ID NO: 1825914 - DNA, 15 bp, Homo sapiens
cgctccgcaagaggc

SEQ ID NO: 1825915 - DNA, 15 bp, Homo sapiens
gctccgcaagaggcc

SEQ ID NO: 1825916 - DNA, 15 bp, Homo sapiens
ctccgcaagaggccg

SEQ ID NO: 1825917 - DNA, 15 bp, Homo sapiens
tccgcaagaggccgc

SEQ ID NO: 1825918 - DNA, 15 bp, Homo sapiens
ccgcaagaggccgcg

SEQ ID NO: 1825919 - DNA, 15 bp, Homo sapiens
cgcaagaggccgcgg

SEQ ID NO: 1825920 - DNA, 15 bp, Homo sapiens
gcaagaggccgcgga

SEQ ID NO: 1825921 - DNA, 15 bp, Homo sapiens
caagaggccgcggag

SEQ ID NO: 1825922 - DNA, 15 bp, Homo sapiens
aagaggccgcggaga

SEQ ID NO: 1825923 - DNA, 15 bp, Homo sapiens
agaggccgcggagag

SEQ ID NO: 1825924 - DNA, 15 bp, Homo sapiens
gaggccgcggagaga

SEQ ID NO: 1825925 - DNA, 15 bp, Homo sapiens
aggccgcggagagat

SEQ ID NO: 1825926 - DNA, 15 bp, Homo sapiens
ggccgcggagagatg

SEQ ID NO: 1825927 - DNA, 15 bp, Homo sapiens
gccgcggagagatgg

SEQ ID NO: 1825928 - DNA, 15 bp, Homo sapiens
ccgcggagagatggt

SEQ ID NO: 1825929 - DNA, 15 bp, Homo sapiens
cgcggagagatggtc

SEQ ID NO: 1825930 - DNA, 15 bp, Homo sapiens
gcggagagatggtcc

SEQ ID NO: 1825931 - DNA, 15 bp, Homo sapiens
cggagagatggtccc

SEQ ID NO: 1825932 - DNA, 15 bp, Homo sapiens
ggagagatggtcccg

SEQ ID NO: 1825933 - DNA, 15 bp, Homo sapiens
gagagatggtcccgg

SEQ ID NO: 1825934 - DNA, 15 bp, Homo sapiens
agagatggtcccggc

SEQ ID NO: 1825935 - DNA, 15 bp, Homo sapiens
gagatggtcccggcc

SEQ ID NO: 1825936 - DNA, 15 bp, Homo sapiens
agatggtcccggcct

SEQ ID NO: 1825937 - DNA, 15 bp, Homo sapiens
gatggtcccggcctc

SEQ ID NO: 1825938 - DNA, 15 bp, Homo sapiens
atggtcccggcctcg

SEQ ID NO: 1825939 - DNA, 15 bp, Homo sapiens
tggtcccggcctcga

SEQ ID NO: 1825940 - DNA, 15 bp, Homo sapiens
ggtcccggcctcgag

SEQ ID NO: 1825941 - DNA, 15 bp, Homo sapiens
gtcccggcctcgagc

SEQ ID NO: 1825942 - DNA, 15 bp, Homo sapiens
tcccggcctcgagcg

SEQ ID NO: 1825943 - DNA, 15 bp, Homo sapiens
cccggcctcgagcgg

SEQ ID NO: 1825944 - DNA, 15 bp, Homo sapiens
ccggcctcgagcgga

SEQ ID NO: 1825945 - DNA, 15 bp, Homo sapiens
cggcctcgagcggag

SEQ ID NO: 1825946 - DNA, 15 bp, Homo sapiens
ggcctcgagcggagc

SEQ ID NO: 1825947 - DNA, 15 bp, Homo sapiens
gcctcgagcggagcc

SEQ ID NO: 1825948 - DNA, 15 bp, Homo sapiens
cctcgagcggagccc

SEQ ID NO: 1825949 - DNA, 15 bp, Homo sapiens
ctcgagcggagcccg

SEQ ID NO: 1825950 - DNA, 15 bp, Homo sapiens
tcgagcggagcccgg

SEQ ID NO: 1825951 - DNA, 15 bp, Homo sapiens
cgagcggagcccggg

SEQ ID NO: 1825952 - DNA, 15 bp, Homo sapiens
gagcggagcccgggc

SEQ ID NO: 1825953 - DNA, 15 bp, Homo sapiens
agcggagcccgggcg

SEQ ID NO: 1825954 - DNA, 15 bp, Homo sapiens
gcggagcccgggcga

SEQ ID NO: 1825955 - DNA, 15 bp, Homo sapiens
cggagcccgggcgag

SEQ ID NO: 1825956 - DNA, 15 bp, Homo sapiens
ggagcccgggcgagc

SEQ ID NO: 1825957 - DNA, 15 bp, Homo sapiens
gagcccgggcgagcc

SEQ ID NO: 1825958 - DNA, 15 bp, Homo sapiens
agcccgggcgagccc

SEQ ID NO: 1825959 - DNA, 15 bp, Homo sapiens
gcccgggcgagcccg

SEQ ID NO: 1825960 - DNA, 15 bp, Homo sapiens
cccgggcgagcccgg

SEQ ID NO: 1825961 - DNA, 15 bp, Homo sapiens
ccgggcgagcccggt

SEQ ID NO: 1825962 - DNA, 15 bp, Homo sapiens
cgggcgagcccggtg

SEQ ID NO: 1825963 - DNA, 15 bp, Homo sapiens
gggcgagcccggtgg

SEQ ID NO: 1825964 - DNA, 15 bp, Homo sapiens
ggcgagcccggtggg

SEQ ID NO: 1825965 - DNA, 15 bp, Homo sapiens
gcgagcccggtgggg

SEQ ID NO: 1825966 - DNA, 15 bp, Homo sapiens
cgagcccggtggggc

SEQ ID NO: 1825967 - DNA, 15 bp, Homo sapiens
gagcccggtggggcg

SEQ ID NO: 1825968 - DNA, 15 bp, Homo sapiens
agcccggtggggcgg

SEQ ID NO: 1825969 - DNA, 15 bp, Homo sapiens
gcccggtggggcggc

SEQ ID NO: 1825970 - DNA, 15 bp, Homo sapiens
cccggtggggcggcc

SEQ ID NO: 1825971 - DNA, 15 bp, Homo sapiens
ccggtggggcggccc

SEQ ID NO: 1825972 - DNA, 15 bp, Homo sapiens
cggtggggcggcccc

SEQ ID NO: 1825973 - DNA, 15 bp, Homo sapiens
ggtggggcggcccca

SEQ ID NO: 1825974 - DNA, 15 bp, Homo sapiens
gtggggcggccccag

SEQ ID NO: 1825975 - DNA, 15 bp, Homo sapiens
tggggcggccccaga

SEQ ID NO: 1825976 - DNA, 15 bp, Homo sapiens
ggggcggccccagag

SEQ ID NO: 1825977 - DNA, 15 bp, Homo sapiens
gggcggccccagagc

SEQ ID NO: 1825978 - DNA, 15 bp, Homo sapiens
ggcggccccagagcg

SEQ ID NO: 1825979 - DNA, 15 bp, Homo sapiens
gcggccccagagcgt

SEQ ID NO: 1825980 - DNA, 15 bp, Homo sapiens
cggccccagagcgtg

SEQ ID NO: 1825981 - DNA, 15 bp, Homo sapiens
ggccccagagcgtga

SEQ ID NO: 1825982 - DNA, 15 bp, Homo sapiens
gccccagagcgtgag

SEQ ID NO: 1825983 - DNA, 15 bp, Homo sapiens
ccccagagcgtgagg

SEQ ID NO: 1825984 - DNA, 15 bp, Homo sapiens
cccagagcgtgaggt

SEQ ID NO: 1825985 - DNA, 15 bp, Homo sapiens
ccagagcgtgaggtg

SEQ ID NO: 1825986 - DNA, 15 bp, Homo sapiens
cagagcgtgaggtgc

SEQ ID NO: 1825987 - DNA, 15 bp, Homo sapiens
agagcgtgaggtgcc

SEQ ID NO: 1825988 - DNA, 15 bp, Homo sapiens
gagcgtgaggtgccg

SEQ ID NO: 1825989 - DNA, 15 bp, Homo sapiens
agcgtgaggtgccgg

SEQ ID NO: 1825990 - DNA, 15 bp, Homo sapiens
gcgtgaggtgccggc

SEQ ID NO: 1825991 - DNA, 15 bp, Homo sapiens
cgtgaggtgccggcg

SEQ ID NO: 1825992 - DNA, 15 bp, Homo sapiens
gtgaggtgccggcgg

SEQ ID NO: 1825993 - DNA, 15 bp, Homo sapiens
tgaggtgccggcggc

SEQ ID NO: 1825994 - DNA, 15 bp, Homo sapiens
gaggtgccggcggcg

SEQ ID NO: 1825995 - DNA, 15 bp, Homo sapiens
aggtgccggcggcgg

SEQ ID NO: 1825996 - DNA, 15 bp, Homo sapiens
gtgccggcggcggcc

SEQ ID NO: 1825997 - DNA, 15 bp, Homo sapiens
tgccggcggcggcca

SEQ ID NO: 1825998 - DNA, 15 bp, Homo sapiens
gccggcggcggccag

SEQ ID NO: 1825999 - DNA, 15 bp, Homo sapiens
ccggcggcggccagg

SEQ ID NO: 1826000 - DNA, 15 bp, Homo sapiens
cggcggcggccaggg

SEQ ID NO: 1826001 - DNA, 15 bp, Homo sapiens
ggcggcggccagggg

SEQ ID NO: 1826002 - DNA, 15 bp, Homo sapiens
gcggcggccaggggc

SEQ ID NO: 1826003 - DNA, 15 bp, Homo sapiens
cggcggccaggggct

SEQ ID NO: 1826004 - DNA, 15 bp, Homo sapiens
ggcggccaggggctg

SEQ ID NO: 1826005 - DNA, 15 bp, Homo sapiens
gcggccaggggctgc

SEQ ID NO: 1826006 - DNA, 15 bp, Homo sapiens
cggccaggggctgcc

SEQ ID NO: 1826007 - DNA, 15 bp, Homo sapiens
ggccaggggctgccc

SEQ ID NO: 1826008 - DNA, 15 bp, Homo sapiens
gccaggggctgcccg

SEQ ID NO: 1826009 - DNA, 15 bp, Homo sapiens
ccaggggctgcccgg

SEQ ID NO: 1826010 - DNA, 15 bp, Homo sapiens
caggggctgcccggg

SEQ ID NO: 1826011 - DNA, 15 bp, Homo sapiens
aggggctgcccgggt

SEQ ID NO: 1826012 - DNA, 15 bp, Homo sapiens
ggggctgcccgggtg

SEQ ID NO: 1826013 - DNA, 15 bp, Homo sapiens
gggctgcccgggtgc

SEQ ID NO: 1826014 - DNA, 15 bp, Homo sapiens
ggctgcccgggtgcg

SEQ ID NO: 1826015 - DNA, 15 bp, Homo sapiens
gctgcccgggtgcgg

SEQ ID NO: 1826016 - DNA, 15 bp, Homo sapiens
ctgcccgggtgcggc

SEQ ID NO: 1826017 - DNA, 15 bp, Homo sapiens
tgcccgggtgcggcg

SEQ ID NO: 1826018 - DNA, 15 bp, Homo sapiens
gcccgggtgcggcgg

SEQ ID NO: 1826019 - DNA, 15 bp, Homo sapiens
cccgggtgcggcggc

SEQ ID NO: 1826020 - DNA, 15 bp, Homo sapiens
ccgggtgcggcggcg

SEQ ID NO: 1826021 - DNA, 15 bp, Homo sapiens
cgggtgcggcggcgg

SEQ ID NO: 1826022 - DNA, 15 bp, Homo sapiens
gggtgcggcggcggc

SEQ ID NO: 1826023 - DNA, 15 bp, Homo sapiens
ggtgcggcggcggcg

SEQ ID NO: 1826024 - DNA, 15 bp, Homo sapiens
gtgcggcggcggcgg

SEQ ID NO: 1826025 - DNA, 15 bp, Homo sapiens
tgcggcggcggcggc

SEQ ID NO: 1826026 - DNA, 15 bp, Homo sapiens
ggcggcggcggcgct

SEQ ID NO: 1826027 - DNA, 15 bp, Homo sapiens
gcggcggcggcgctg

SEQ ID NO: 1826028 - DNA, 15 bp, Homo sapiens
cggcggcggcgctgt

SEQ ID NO: 1826029 - DNA, 15 bp, Homo sapiens
ggcggcggcgctgtg

SEQ ID NO: 1826030 - DNA, 15 bp, Homo sapiens
gcggcggcgctgtgg

SEQ ID NO: 1826031 - DNA, 15 bp, Homo sapiens
cggcggcgctgtggc

SEQ ID NO: 1826032 - DNA, 15 bp, Homo sapiens
ggcggcgctgtggcg

SEQ ID NO: 1826033 - DNA, 15 bp, Homo sapiens
gcggcgctgtggcgg

SEQ ID NO: 1826034 - DNA, 15 bp, Homo sapiens
cggcgctgtggcggg

SEQ ID NO: 1826035 - DNA, 15 bp, Homo sapiens
ggcgctgtggcggga

SEQ ID NO: 1826036 - DNA, 15 bp, Homo sapiens
gcgctgtggcgggag

SEQ ID NO: 1826037 - DNA, 15 bp, Homo sapiens
cgctgtggcgggagg

SEQ ID NO: 1826038 - DNA, 15 bp, Homo sapiens
gctgtggcgggaggc

SEQ ID NO: 1826039 - DNA, 15 bp, Homo sapiens
ctgtggcgggaggcg

SEQ ID NO: 1826040 - DNA, 15 bp, Homo sapiens
tgtggcgggaggcgg

SEQ ID NO: 1826041 - DNA, 15 bp, Homo sapiens
gtggcgggaggcgga

SEQ ID NO: 1826042 - DNA, 15 bp, Homo sapiens
tggcgggaggcggag

SEQ ID NO: 1826043 - DNA, 15 bp, Homo sapiens
ggcgggaggcggagg

SEQ ID NO: 1826044 - DNA, 15 bp, Homo sapiens
gcgggaggcggaggc

SEQ ID NO: 1826045 - DNA, 15 bp, Homo sapiens
cgggaggcggaggca

SEQ ID NO: 1826046 - DNA, 15 bp, Homo sapiens
ggaggcggaggcaga

SEQ ID NO: 1826047 - DNA, 15 bp, Homo sapiens
gaggcggaggcagag

SEQ ID NO: 1826048 - DNA, 15 bp, Homo sapiens
aggcggaggcagagg

SEQ ID NO: 1826049 - DNA, 15 bp, Homo sapiens
ggcggaggcagaggc

SEQ ID NO: 1826050 - DNA, 15 bp, Homo sapiens
gcggaggcagaggcg

SEQ ID NO: 1826051 - DNA, 15 bp, Homo sapiens
cggaggcagaggcgg

SEQ ID NO: 1826052 - DNA, 15 bp, Homo sapiens
ggaggcagaggcggc

SEQ ID NO: 1826053 - DNA, 15 bp, Homo sapiens
gaggcagaggcggcg

SEQ ID NO: 1826054 - DNA, 15 bp, Homo sapiens
aggcagaggcggcgg

SEQ ID NO: 1826055 - DNA, 15 bp, Homo sapiens
ggcagaggcggcggc

SEQ ID NO: 1826056 - DNA, 15 bp, Homo sapiens
gcagaggcggcggcg

SEQ ID NO: 1826057 - DNA, 15 bp, Homo sapiens
cagaggcggcggcgg

SEQ ID NO: 1826058 - DNA, 15 bp, Homo sapiens
agaggcggcggcggc

SEQ ID NO: 1826059 - DNA, 15 bp, Homo sapiens
gaggcggcggcggca

SEQ ID NO: 1826060 - DNA, 15 bp, Homo sapiens
aggcggcggcggcag

SEQ ID NO: 1826061 - DNA, 15 bp, Homo sapiens
ggcggcggcggcagg

SEQ ID NO: 1826062 - DNA, 15 bp, Homo sapiens
gcggcggcggcaggc

SEQ ID NO: 1826063 - DNA, 15 bp, Homo sapiens
cggcggcggcaggcg

SEQ ID NO: 1826064 - DNA, 15 bp, Homo sapiens
ggcggcggcaggcgg

SEQ ID NO: 1826065 - DNA, 15 bp, Homo sapiens
gcggcggcaggcggg

SEQ ID NO: 1826066 - DNA, 15 bp, Homo sapiens
cggcggcaggcgggg

SEQ ID NO: 1826067 - DNA, 15 bp, Homo sapiens
ggcggcaggcgggga

SEQ ID NO: 1826068 - DNA, 15 bp, Homo sapiens
gcggcaggcggggag

SEQ ID NO: 1826069 - DNA, 15 bp, Homo sapiens
cggcaggcggggagc

SEQ ID NO: 1826070 - DNA, 15 bp, Homo sapiens
ggcaggcggggagca

SEQ ID NO: 1826071 - DNA, 15 bp, Homo sapiens
gcaggcggggagcaa

SEQ ID NO: 1826072 - DNA, 15 bp, Homo sapiens
caggcggggagcaag

SEQ ID NO: 1826073 - DNA, 15 bp, Homo sapiens
aggcggggagcaaga

SEQ ID NO: 1826074 - DNA, 15 bp, Homo sapiens
ggcggggagcaagag

SEQ ID NO: 1826075 - DNA, 15 bp, Homo sapiens
gcggggagcaagagg

SEQ ID NO: 1826076 - DNA, 15 bp, Homo sapiens
cggggagcaagaggc

SEQ ID NO: 1826077 - DNA, 15 bp, Homo sapiens
ggggagcaagaggcc

SEQ ID NO: 1826078 - DNA, 15 bp, Homo sapiens
gggagcaagaggccc

SEQ ID NO: 1826079 - DNA, 15 bp, Homo sapiens
ggagcaagaggccca

SEQ ID NO: 1826080 - DNA, 15 bp, Homo sapiens
gagcaagaggcccag

SEQ ID NO: 1826081 - DNA, 15 bp, Homo sapiens
agcaagaggcccagg

SEQ ID NO: 1826082 - DNA, 15 bp, Homo sapiens
gcaagaggcccaggc

SEQ ID NO: 1826083 - DNA, 15 bp, Homo sapiens
caagaggcccaggcg

SEQ ID NO: 1826084 - DNA, 15 bp, Homo sapiens
aagaggcccaggcga

SEQ ID NO: 1826085 - DNA, 15 bp, Homo sapiens
agaggcccaggcgac

SEQ ID NO: 1826086 - DNA, 15 bp, Homo sapiens
gaggcccaggcgact

SEQ ID NO: 1826087 - DNA, 15 bp, Homo sapiens
aggcccaggcgactg

SEQ ID NO: 1826088 - DNA, 15 bp, Homo sapiens
ggcccaggcgactgc

SEQ ID NO: 1826089 - DNA, 15 bp, Homo sapiens
gcccaggcgactgcg

SEQ ID NO: 1826090 - DNA, 15 bp, Homo sapiens
cccaggcgactgcgg

SEQ ID NO: 1826091 - DNA, 15 bp, Homo sapiens
ccaggcgactgcggc

SEQ ID NO: 1826092 - DNA, 15 bp, Homo sapiens
caggcgactgcggcg

SEQ ID NO: 1826093 - DNA, 15 bp, Homo sapiens
aggcgactgcggcgg

SEQ ID NO: 1826094 - DNA, 15 bp, Homo sapiens
ggcgactgcggcggc

SEQ ID NO: 1826095 - DNA, 15 bp, Homo sapiens
gcgactgcggcggct

SEQ ID NO: 1826096 - DNA, 15 bp, Homo sapiens
cgactgcggcggctg

SEQ ID NO: 1826097 - DNA, 15 bp, Homo sapiens
gactgcggcggctgg

SEQ ID NO: 1826098 - DNA, 15 bp, Homo sapiens
actgcggcggctggg

SEQ ID NO: 1826099 - DNA, 15 bp, Homo sapiens
ctgcggcggctgggg

SEQ ID NO: 1826100 - DNA, 15 bp, Homo sapiens
tgcggcggctgggga

SEQ ID NO: 1826101 - DNA, 15 bp, Homo sapiens
gcggcggctggggaa

SEQ ID NO: 1826102 - DNA, 15 bp, Homo sapiens
cggcggctggggaag

SEQ ID NO: 1826103 - DNA, 15 bp, Homo sapiens
ggcggctggggaagg

SEQ ID NO: 1826104 - DNA, 15 bp, Homo sapiens
gcggctggggaagga

SEQ ID NO: 1826105 - DNA, 15 bp, Homo sapiens
cggctggggaaggag

SEQ ID NO: 1826106 - DNA, 15 bp, Homo sapiens
ggctggggaaggaga

SEQ ID NO: 1826107 - DNA, 15 bp, Homo sapiens
gctggggaaggagac

SEQ ID NO: 1826108 - DNA, 15 bp, Homo sapiens
ctggggaaggagaca

SEQ ID NO: 1826109 - DNA, 15 bp, Homo sapiens
tggggaaggagacaa

SEQ ID NO: 1826110 - DNA, 15 bp, Homo sapiens
ggggaaggagacaat

SEQ ID NO: 1826111 - DNA, 15 bp, Homo sapiens
gggaaggagacaatg

SEQ ID NO: 1826112 - DNA, 15 bp, Homo sapiens
ggaaggagacaatgg

SEQ ID NO: 1826113 - DNA, 15 bp, Homo sapiens
gaaggagacaatggg

SEQ ID NO: 1826114 - DNA, 15 bp, Homo sapiens
aaggagacaatgggc

SEQ ID NO: 1826115 - DNA, 15 bp, Homo sapiens
aggagacaatgggcc

SEQ ID NO: 1826116 - DNA, 15 bp, Homo sapiens
ggagacaatgggccg

SEQ ID NO: 1826117 - DNA, 15 bp, Homo sapiens
gagacaatgggccgg

SEQ ID NO: 1826118 - DNA, 15 bp, Homo sapiens
agacaatgggccggg

SEQ ID NO: 1826119 - DNA, 15 bp, Homo sapiens
gacaatgggccgggc

SEQ ID NO: 1826120 - DNA, 15 bp, Homo sapiens
acaatgggccgggcc

SEQ ID NO: 1826121 - DNA, 15 bp, Homo sapiens
caatgggccgggcct

SEQ ID NO: 1826122 - DNA, 15 bp, Homo sapiens
aatgggccgggcctg

SEQ ID NO: 1826123 - DNA, 15 bp, Homo sapiens
atgggccgggcctgc

SEQ ID NO: 1826124 - DNA, 15 bp, Homo sapiens
tgggccgggcctgca

SEQ ID NO: 1826125 - DNA, 15 bp, Homo sapiens
gggccgggcctgcag

SEQ ID NO: 1826126 - DNA, 15 bp, Homo sapiens
ggccgggcctgcagg

SEQ ID NO: 1826127 - DNA, 15 bp, Homo sapiens
gccgggcctgcaggg

SEQ ID NO: 1826128 - DNA, 15 bp, Homo sapiens
ccgggcctgcagggc

SEQ ID NO: 1826129 - DNA, 15 bp, Homo sapiens
cgggcctgcagggcc

SEQ ID NO: 1826130 - DNA, 15 bp, Homo sapiens
gggcctgcagggccc

SEQ ID NO: 1826131 - DNA, 15 bp, Homo sapiens
ggcctgcagggccca

SEQ ID NO: 1826132 - DNA, 15 bp, Homo sapiens
gcctgcagggcccat

SEQ ID NO: 1826133 - DNA, 15 bp, Homo sapiens
cctgcagggcccatc

SEQ ID NO: 1826134 - DNA, 15 bp, Homo sapiens
ctgcagggcccatct

SEQ ID NO: 1826135 - DNA, 15 bp, Homo sapiens
tgcagggcccatctc

SEQ ID NO: 1826136 - DNA, 15 bp, Homo sapiens
gcagggcccatctcg

SEQ ID NO: 1826137 - DNA, 15 bp, Homo sapiens
cagggcccatctcgg

SEQ ID NO: 1826138 - DNA, 15 bp, Homo sapiens
agggcccatctcggg

SEQ ID NO: 1826139 - DNA, 15 bp, Homo sapiens
gggcccatctcggga

SEQ ID NO: 1826140 - DNA, 15 bp, Homo sapiens
ggcccatctcgggag

SEQ ID NO: 1826141 - DNA, 15 bp, Homo sapiens
gcccatctcgggagc

SEQ ID NO: 1826142 - DNA, 15 bp, Homo sapiens
cccatctcgggagcc

SEQ ID NO: 1826143 - DNA, 15 bp, Homo sapiens
ccatctcgggagcca

SEQ ID NO: 1826144 - DNA, 15 bp, Homo sapiens
catctcgggagccac

SEQ ID NO: 1826145 - DNA, 15 bp, Homo sapiens
atctcgggagccacc

SEQ ID NO: 1826146 - DNA, 15 bp, Homo sapiens
tctcgggagccaccg

SEQ ID NO: 1826147 - DNA, 15 bp, Homo sapiens
ctcgggagccaccgc

SEQ ID NO: 1826148 - DNA, 15 bp, Homo sapiens
tcgggagccaccgct

SEQ ID NO: 1826149 - DNA, 15 bp, Homo sapiens
cgggagccaccgctg

SEQ ID NO: 1826150 - DNA, 15 bp, Homo sapiens
gggagccaccgctgg

SEQ ID NO: 1826151 - DNA, 15 bp, Homo sapiens
ggagccaccgctggc

SEQ ID NO: 1826152 - DNA, 15 bp, Homo sapiens
gagccaccgctggcc

SEQ ID NO: 1826153 - DNA, 15 bp, Homo sapiens
agccaccgctggccg

SEQ ID NO: 1826154 - DNA, 15 bp, Homo sapiens
gccaccgctggccga

SEQ ID NO: 1826155 - DNA, 15 bp, Homo sapiens
ccaccgctggccgac

SEQ ID NO: 1826156 - DNA, 15 bp, Homo sapiens
caccgctggccgaca

SEQ ID NO: 1826157 - DNA, 15 bp, Homo sapiens
accgctggccgacaa

SEQ ID NO: 1826158 - DNA, 15 bp, Homo sapiens
ccgctggccgacaac

SEQ ID NO: 1826159 - DNA, 15 bp, Homo sapiens
cgctggccgacaact

SEQ ID NO: 1826160 - DNA, 15 bp, Homo sapiens
gctggccgacaactt

SEQ ID NO: 1826161 - DNA, 15 bp, Homo sapiens
ctggccgacaacttg

SEQ ID NO: 1826162 - DNA, 15 bp, Homo sapiens
tggccgacaacttgt

SEQ ID NO: 1826163 - DNA, 15 bp, Homo sapiens
ggccgacaacttgta

SEQ ID NO: 1826164 - DNA, 15 bp, Homo sapiens
gccgacaacttgtac

SEQ ID NO: 1826165 - DNA, 15 bp, Homo sapiens
ccgacaacttgtacg

SEQ ID NO: 1826166 - DNA, 15 bp, Homo sapiens
cgacaacttgtacga

SEQ ID NO: 1826167 - DNA, 15 bp, Homo sapiens
gacaacttgtacgac

SEQ ID NO: 1826168 - DNA, 15 bp, Homo sapiens
acaacttgtacgacg

SEQ ID NO: 1826169 - DNA, 15 bp, Homo sapiens
caacttgtacgacga

SEQ ID NO: 1826170 - DNA, 15 bp, Homo sapiens
aacttgtacgacgaa

SEQ ID NO: 1826171 - DNA, 15 bp, Homo sapiens
acttgtacgacgaag

SEQ ID NO: 1826172 - DNA, 15 bp, Homo sapiens
cttgtacgacgaaga

SEQ ID NO: 1826173 - DNA, 15 bp, Homo sapiens
ttgtacgacgaagac

SEQ ID NO: 1826174 - DNA, 15 bp, Homo sapiens
tgtacgacgaagacg

SEQ ID NO: 1826175 - DNA, 15 bp, Homo sapiens
gtacgacgaagacga

SEQ ID NO: 1826176 - DNA, 15 bp, Homo sapiens
tacgacgaagacgac

SEQ ID NO: 1826177 - DNA, 15 bp, Homo sapiens
acgacgaagacgacg

SEQ ID NO: 1826178 - DNA, 15 bp, Homo sapiens
cgacgaagacgacga

SEQ ID NO: 1826179 - DNA, 15 bp, Homo sapiens
gacgaagacgacgac

SEQ ID NO: 1826180 - DNA, 15 bp, Homo sapiens
acgaagacgacgacg

SEQ ID NO: 1826181 - DNA, 15 bp, Homo sapiens
cgaagacgacgacga

SEQ ID NO: 1826182 - DNA, 15 bp, Homo sapiens
gaagacgacgacgac

SEQ ID NO: 1826183 - DNA, 15 bp, Homo sapiens
aagacgacgacgacg

SEQ ID NO: 1826184 - DNA, 15 bp, Homo sapiens
agacgacgacgacga

SEQ ID NO: 1826185 - DNA, 15 bp, Homo sapiens
gacgacgacgacgag

SEQ ID NO: 1826186 - DNA, 15 bp, Homo sapiens
acgacgacgacgagg

SEQ ID NO: 1826187 - DNA, 15 bp, Homo sapiens
cgacgacgacgaggg

SEQ ID NO: 1826188 - DNA, 15 bp, Homo sapiens
gacgacgacgagggc

SEQ ID NO: 1826189 - DNA, 15 bp, Homo sapiens
acgacgacgagggcg

SEQ ID NO: 1826190 - DNA, 15 bp, Homo sapiens
cgacgacgagggcga

SEQ ID NO: 1826191 - DNA, 15 bp, Homo sapiens
gacgacgagggcgag

SEQ ID NO: 1826192 - DNA, 15 bp, Homo sapiens
acgacgagggcgagg

SEQ ID NO: 1826193 - DNA, 15 bp, Homo sapiens
cgacgagggcgagga

SEQ ID NO: 1826194 - DNA, 15 bp, Homo sapiens
gacgagggcgaggag

SEQ ID NO: 1826195 - DNA, 15 bp, Homo sapiens
acgagggcgaggagg

SEQ ID NO: 1826196 - DNA, 15 bp, Homo sapiens
cgagggcgaggagga

SEQ ID NO: 1826197 - DNA, 15 bp, Homo sapiens
gagggcgaggaggag

SEQ ID NO: 1826198 - DNA, 15 bp, Homo sapiens
agggcgaggaggagg

SEQ ID NO: 1826199 - DNA, 15 bp, Homo sapiens
gggcgaggaggagga

SEQ ID NO: 1826200 - DNA, 15 bp, Homo sapiens
ggcgaggaggaggaa

SEQ ID NO: 1826201 - DNA, 15 bp, Homo sapiens
gcgaggaggaggaag

SEQ ID NO: 1826202 - DNA, 15 bp, Homo sapiens
cgaggaggaggaaga

SEQ ID NO: 1826203 - DNA, 15 bp, Homo sapiens
gaggaggaggaagag

SEQ ID NO: 1826204 - DNA, 15 bp, Homo sapiens
aggaggaggaagagg

SEQ ID NO: 1826205 - DNA, 15 bp, Homo sapiens
ggaggaggaagaggc

SEQ ID NO: 1826206 - DNA, 15 bp, Homo sapiens
gaggaggaagaggcg

SEQ ID NO: 1826207 - DNA, 15 bp, Homo sapiens
aggaggaagaggcgg

SEQ ID NO: 1826208 - DNA, 15 bp, Homo sapiens
ggaggaagaggcggc

SEQ ID NO: 1826209 - DNA, 15 bp, Homo sapiens
gaggaagaggcggcg

SEQ ID NO: 1826210 - DNA, 15 bp, Homo sapiens
aggaagaggcggcgg

SEQ ID NO: 1826211 - DNA, 15 bp, Homo sapiens
ggaagaggcggcggc

SEQ ID NO: 1826212 - DNA, 15 bp, Homo sapiens
gaagaggcggcggcg

SEQ ID NO: 1826213 - DNA, 15 bp, Homo sapiens
aagaggcggcggcgg

SEQ ID NO: 1826214 - DNA, 15 bp, Homo sapiens
cggcggcggcggcga

SEQ ID NO: 1826215 - DNA, 15 bp, Homo sapiens
ggcggcggcggcgat

SEQ ID NO: 1826216 - DNA, 15 bp, Homo sapiens
gcggcggcggcgatt

SEQ ID NO: 1826217 - DNA, 15 bp, Homo sapiens
cggcggcggcgattg

SEQ ID NO: 1826218 - DNA, 15 bp, Homo sapiens
ggcggcggcgattgg

SEQ ID NO: 1826219 - DNA, 15 bp, Homo sapiens
gcggcggcgattggg

SEQ ID NO: 1826220 - DNA, 15 bp, Homo sapiens
cggcggcgattgggt

SEQ ID NO: 1826221 - DNA, 15 bp, Homo sapiens
ggcggcgattgggta

SEQ ID NO: 1826222 - DNA, 15 bp, Homo sapiens
gcggcgattgggtac

SEQ ID NO: 1826223 - DNA, 15 bp, Homo sapiens
cggcgattgggtacc

SEQ ID NO: 1826224 - DNA, 15 bp, Homo sapiens
ggcgattgggtaccg

SEQ ID NO: 1826225 - DNA, 15 bp, Homo sapiens
gcgattgggtaccga

SEQ ID NO: 1826226 - DNA, 15 bp, Homo sapiens
cgattgggtaccgag

SEQ ID NO: 1826227 - DNA, 15 bp, Homo sapiens
gattgggtaccgagg

SEQ ID NO: 1826228 - DNA, 15 bp, Homo sapiens
attgggtaccgaggt

SEQ ID NO: 1826229 - DNA, 15 bp, Homo sapiens
ttgggtaccgaggtg

SEQ ID NO: 1826230 - DNA, 15 bp, Homo sapiens
tgggtaccgaggtgc

SEQ ID NO: 1826231 - DNA, 15 bp, Homo sapiens
gggtaccgaggtgcg

SEQ ID NO: 1826232 - DNA, 15 bp, Homo sapiens
ggtaccgaggtgcgc

SEQ ID NO: 1826233 - DNA, 15 bp, Homo sapiens
gtaccgaggtgcgca

SEQ ID NO: 1826234 - DNA, 15 bp, Homo sapiens
taccgaggtgcgcag

SEQ ID NO: 1826235 - DNA, 15 bp, Homo sapiens
accgaggtgcgcagg

SEQ ID NO: 1826236 - DNA, 15 bp, Homo sapiens
ccgaggtgcgcaggg

SEQ ID NO: 1826237 - DNA, 15 bp, Homo sapiens
cgaggtgcgcagggt

SEQ ID NO: 1826238 - DNA, 15 bp, Homo sapiens
gaggtgcgcagggtg

SEQ ID NO: 1826239 - DNA, 15 bp, Homo sapiens
aggtgcgcagggtgc

SEQ ID NO: 1826240 - DNA, 15 bp, Homo sapiens
ggtgcgcagggtgcg

SEQ ID NO: 1826241 - DNA, 15 bp, Homo sapiens
gtgcgcagggtgcgg

SEQ ID NO: 1826242 - DNA, 15 bp, Homo sapiens
tgcgcagggtgcggg

SEQ ID NO: 1826243 - DNA, 15 bp, Homo sapiens
gcgcagggtgcgggc

SEQ ID NO: 1826244 - DNA, 15 bp, Homo sapiens
cgcagggtgcgggcg

SEQ ID NO: 1826245 - DNA, 15 bp, Homo sapiens
gcagggtgcgggcgg

SEQ ID NO: 1826246 - DNA, 15 bp, Homo sapiens
cagggtgcgggcggc

SEQ ID NO: 1826247 - DNA, 15 bp, Homo sapiens
agggtgcgggcggcc

SEQ ID NO: 1826248 - DNA, 15 bp, Homo sapiens
gggtgcgggcggccg

SEQ ID NO: 1826249 - DNA, 15 bp, Homo sapiens
ggtgcgggcggccgg

SEQ ID NO: 1826250 - DNA, 15 bp, Homo sapiens
gtgcgggcggccgga

SEQ ID NO: 1826251 - DNA, 15 bp, Homo sapiens
tgcgggcggccggaa

SEQ ID NO: 1826252 - DNA, 15 bp, Homo sapiens
gcgggcggccggaac

SEQ ID NO: 1826253 - DNA, 15 bp, Homo sapiens
cgggcggccggaact

SEQ ID NO: 1826254 - DNA, 15 bp, Homo sapiens
gggcggccggaactg

SEQ ID NO: 1826255 - DNA, 15 bp, Homo sapiens
ggcggccggaactgc

SEQ ID NO: 1826256 - DNA, 15 bp, Homo sapiens
gcggccggaactgcg

SEQ ID NO: 1826257 - DNA, 15 bp, Homo sapiens
cggccggaactgcgc

SEQ ID NO: 1826258 - DNA, 15 bp, Homo sapiens
ggccggaactgcgca

SEQ ID NO: 1826259 - DNA, 15 bp, Homo sapiens
gccggaactgcgcat

SEQ ID NO: 1826260 - DNA, 15 bp, Homo sapiens
ccggaactgcgcatc

SEQ ID NO: 1826261 - DNA, 15 bp, Homo sapiens
cggaactgcgcatct

SEQ ID NO: 1826262 - DNA, 15 bp, Homo sapiens
ggaactgcgcatctc

SEQ ID NO: 1826263 - DNA, 15 bp, Homo sapiens
gaactgcgcatctcc

SEQ ID NO: 1826264 - DNA, 15 bp, Homo sapiens
aactgcgcatctcct

SEQ ID NO: 1826265 - DNA, 15 bp, Homo sapiens
actgcgcatctcctc

SEQ ID NO: 1826266 - DNA, 15 bp, Homo sapiens
ctgcgcatctcctcc

SEQ ID NO: 1826267 - DNA, 15 bp, Homo sapiens
tgcgcatctcctcct

SEQ ID NO: 1826268 - DNA, 15 bp, Homo sapiens
gcgcatctcctcctc

SEQ ID NO: 1826269 - DNA, 15 bp, Homo sapiens
cgcatctcctcctcc

SEQ ID NO: 1826270 - DNA, 15 bp, Homo sapiens
gcatctcctcctccc

SEQ ID NO: 1826271 - DNA, 15 bp, Homo sapiens
catctcctcctccct

SEQ ID NO: 1826272 - DNA, 15 bp, Homo sapiens
atctcctcctccctc

SEQ ID NO: 1826273 - DNA, 15 bp, Homo sapiens
tctcctcctccctct

SEQ ID NO: 1826274 - DNA, 15 bp, Homo sapiens
ctcctcctccctctc

SEQ ID NO: 1826275 - DNA, 15 bp, Homo sapiens
tcctcctccctctcc

SEQ ID NO: 1826276 - DNA, 15 bp, Homo sapiens
cctcctccctctccc

SEQ ID NO: 1826277 - DNA, 15 bp, Homo sapiens
ctcctccctctcccc

SEQ ID NO: 1826278 - DNA, 15 bp, Homo sapiens
tcctccctctccccg

SEQ ID NO: 1826279 - DNA, 15 bp, Homo sapiens
cctccctctccccgg

SEQ ID NO: 1826280 - DNA, 15 bp, Homo sapiens
ctccctctccccggg

SEQ ID NO: 1826281 - DNA, 15 bp, Homo sapiens
tccctctccccgggc

SEQ ID NO: 1826282 - DNA, 15 bp, Homo sapiens
ccctctccccgggct

SEQ ID NO: 1826283 - DNA, 15 bp, Homo sapiens
cctctccccgggctc

SEQ ID NO: 1826284 - DNA, 15 bp, Homo sapiens
ctctccccgggctcc

SEQ ID NO: 1826285 - DNA, 15 bp, Homo sapiens
tctccccgggctcct

SEQ ID NO: 1826286 - DNA, 15 bp, Homo sapiens
ctccccgggctccta

SEQ ID NO: 1826287 - DNA, 15 bp, Homo sapiens
tccccgggctcctac

SEQ ID NO: 1826288 - DNA, 15 bp, Homo sapiens
ccccgggctcctact

SEQ ID NO: 1826289 - DNA, 15 bp, Homo sapiens
cccgggctcctactg

SEQ ID NO: 1826290 - DNA, 15 bp, Homo sapiens
ccgggctcctactgg

SEQ ID NO: 1826291 - DNA, 15 bp, Homo sapiens
cgggctcctactggc

SEQ ID NO: 1826292 - DNA, 15 bp, Homo sapiens
gggctcctactggcc

SEQ ID NO: 1826293 - DNA, 15 bp, Homo sapiens
ggctcctactggcct

SEQ ID NO: 1826294 - DNA, 15 bp, Homo sapiens
gctcctactggcctg

SEQ ID NO: 1826295 - DNA, 15 bp, Homo sapiens
ctcctactggcctga

SEQ ID NO: 1826296 - DNA, 15 bp, Homo sapiens
tcctactggcctgag

SEQ ID NO: 1826297 - DNA, 15 bp, Homo sapiens
cctactggcctgagg

SEQ ID NO: 1826298 - DNA, 15 bp, Homo sapiens
ctactggcctgaggt

SEQ ID NO: 1826299 - DNA, 15 bp, Homo sapiens
tactggcctgaggtt

SEQ ID NO: 1826300 - DNA, 15 bp, Homo sapiens
actggcctgaggttg

SEQ ID NO: 1826301 - DNA, 15 bp, Homo sapiens
ctggcctgaggttga

SEQ ID NO: 1826302 - DNA, 15 bp, Homo sapiens
tggcctgaggttgag

SEQ ID NO: 1826303 - DNA, 15 bp, Homo sapiens
ggcctgaggttgagg

SEQ ID NO: 1826304 - DNA, 15 bp, Homo sapiens
gcctgaggttgaggg

SEQ ID NO: 1826305 - DNA, 15 bp, Homo sapiens
cctgaggttgagggc

SEQ ID NO: 1826306 - DNA, 15 bp, Homo sapiens
ctgaggttgagggcg

SEQ ID NO: 1826307 - DNA, 15 bp, Homo sapiens
tgaggttgagggcgg

SEQ ID NO: 1826308 - DNA, 15 bp, Homo sapiens
gaggttgagggcggc

SEQ ID NO: 1826309 - DNA, 15 bp, Homo sapiens
aggttgagggcggct

SEQ ID NO: 1826310 - DNA, 15 bp, Homo sapiens
ggttgagggcggctg

SEQ ID NO: 1826311 - DNA, 15 bp, Homo sapiens
gttgagggcggctgg

SEQ ID NO: 1826312 - DNA, 15 bp, Homo sapiens
ttgagggcggctggg

SEQ ID NO: 1826313 - DNA, 15 bp, Homo sapiens
tgagggcggctgggg

SEQ ID NO: 1826314 - DNA, 15 bp, Homo sapiens
gagggcggctggggg

SEQ ID NO: 1826315 - DNA, 15 bp, Homo sapiens
agggcggctgggggc

SEQ ID NO: 1826316 - DNA, 15 bp, Homo sapiens
gggcggctgggggct

SEQ ID NO: 1826317 - DNA, 15 bp, Homo sapiens
ggcggctgggggctc

SEQ ID NO: 1826318 - DNA, 15 bp, Homo sapiens
gcggctgggggctcg

SEQ ID NO: 1826319 - DNA, 15 bp, Homo sapiens
cggctgggggctcgg

SEQ ID NO: 1826320 - DNA, 15 bp, Homo sapiens
ggctgggggctcggg

SEQ ID NO: 1826321 - DNA, 15 bp, Homo sapiens
gctgggggctcgggg

SEQ ID NO: 1826322 - DNA, 15 bp, Homo sapiens
ctgggggctcggggc

SEQ ID NO: 1826323 - DNA, 15 bp, Homo sapiens
ggggctcggggcagg

SEQ ID NO: 1826324 - DNA, 15 bp, Homo sapiens
gggctcggggcaggc

SEQ ID NO: 1826325 - DNA, 15 bp, Homo sapiens
ggctcggggcaggct

SEQ ID NO: 1826326 - DNA, 15 bp, Homo sapiens
gctcggggcaggctc

SEQ ID NO: 1826327 - DNA, 15 bp, Homo sapiens
ctcggggcaggctcc

SEQ ID NO: 1826328 - DNA, 15 bp, Homo sapiens
tcggggcaggctccg

SEQ ID NO: 1826329 - DNA, 15 bp, Homo sapiens
cggggcaggctccgc

SEQ ID NO: 1826330 - DNA, 15 bp, Homo sapiens
ggggcaggctccgcg

SEQ ID NO: 1826331 - DNA, 15 bp, Homo sapiens
gggcaggctccgcgg

SEQ ID NO: 1826332 - DNA, 15 bp, Homo sapiens
ggcaggctccgcggc

SEQ ID NO: 1826333 - DNA, 15 bp, Homo sapiens
gcaggctccgcggcg

SEQ ID NO: 1826334 - DNA, 15 bp, Homo sapiens
caggctccgcggcgt

SEQ ID NO: 1826335 - DNA, 15 bp, Homo sapiens
aggctccgcggcgtt

SEQ ID NO: 1826336 - DNA, 15 bp, Homo sapiens
ggctccgcggcgttc

SEQ ID NO: 1826337 - DNA, 15 bp, Homo sapiens
gctccgcggcgttcc

SEQ ID NO: 1826338 - DNA, 15 bp, Homo sapiens
ctccgcggcgttccc

SEQ ID NO: 1826339 - DNA, 15 bp, Homo sapiens
tccgcggcgttcccc

SEQ ID NO: 1826340 - DNA, 15 bp, Homo sapiens
ccgcggcgttcccct

SEQ ID NO: 1826341 - DNA, 15 bp, Homo sapiens
cgcggcgttcccctc

SEQ ID NO: 1826342 - DNA, 15 bp, Homo sapiens
gcggcgttcccctcc

SEQ ID NO: 1826343 - DNA, 15 bp, Homo sapiens
cggcgttcccctccc

SEQ ID NO: 1826344 - DNA, 15 bp, Homo sapiens
ggcgttcccctcccc

SEQ ID NO: 1826345 - DNA, 15 bp, Homo sapiens
gcgttcccctcccca

SEQ ID NO: 1826346 - DNA, 15 bp, Homo sapiens
cgttcccctccccac

SEQ ID NO: 1826347 - DNA, 15 bp, Homo sapiens
gttcccctccccacc

SEQ ID NO: 1826348 - DNA, 15 bp, Homo sapiens
ttcccctccccaccc

SEQ ID NO: 1826349 - DNA, 15 bp, Homo sapiens
tcccctccccacccc

SEQ ID NO: 1826350 - DNA, 15 bp, Homo sapiens
cccctccccaccccg

SEQ ID NO: 1826351 - DNA, 15 bp, Homo sapiens
ccctccccaccccgg

SEQ ID NO: 1826352 - DNA, 15 bp, Homo sapiens
cctccccaccccggc

SEQ ID NO: 1826353 - DNA, 15 bp, Homo sapiens
ctccccaccccggcc

SEQ ID NO: 1826354 - DNA, 15 bp, Homo sapiens
tccccaccccggccc

SEQ ID NO: 1826355 - DNA, 15 bp, Homo sapiens
ccaccccggccctcc

SEQ ID NO: 1826356 - DNA, 15 bp, Homo sapiens
caccccggccctccg

SEQ ID NO: 1826357 - DNA, 15 bp, Homo sapiens
accccggccctccgt

SEQ ID NO: 1826358 - DNA, 15 bp, Homo sapiens
ccccggccctccgtt

SEQ ID NO: 1826359 - DNA, 15 bp, Homo sapiens
cccggccctccgttc

SEQ ID NO: 1826360 - DNA, 15 bp, Homo sapiens
ccggccctccgttca

SEQ ID NO: 1826361 - DNA, 15 bp, Homo sapiens
cggccctccgttcag

SEQ ID NO: 1826362 - DNA, 15 bp, Homo sapiens
ggccctccgttcagc

SEQ ID NO: 1826363 - DNA, 15 bp, Homo sapiens
gccctccgttcagcc

SEQ ID NO: 1826364 - DNA, 15 bp, Homo sapiens
ccctccgttcagccg

SEQ ID NO: 1826365 - DNA, 15 bp, Homo sapiens
cctccgttcagccgc

SEQ ID NO: 1826366 - DNA, 15 bp, Homo sapiens
ctccgttcagccgcg

SEQ ID NO: 1826367 - DNA, 15 bp, Homo sapiens
tccgttcagccgcgc

SEQ ID NO: 1826368 - DNA, 15 bp, Homo sapiens
ccgttcagccgcgct

SEQ ID NO: 1826369 - DNA, 15 bp, Homo sapiens
cgttcagccgcgctc

SEQ ID NO: 1826370 - DNA, 15 bp, Homo sapiens
gttcagccgcgctcc

SEQ ID NO: 1826371 - DNA, 15 bp, Homo sapiens
ttcagccgcgctcct

SEQ ID NO: 1826372 - DNA, 15 bp, Homo sapiens
tcagccgcgctcctc

SEQ ID NO: 1826373 - DNA, 15 bp, Homo sapiens
cagccgcgctcctcc

SEQ ID NO: 1826374 - DNA, 15 bp, Homo sapiens
agccgcgctcctccg

SEQ ID NO: 1826375 - DNA, 15 bp, Homo sapiens
gccgcgctcctccgg

SEQ ID NO: 1826376 - DNA, 15 bp, Homo sapiens
ccgcgctcctccggg

SEQ ID NO: 1826377 - DNA, 15 bp, Homo sapiens
cgcgctcctccgggg

SEQ ID NO: 1826378 - DNA, 15 bp, Homo sapiens
gcgctcctccggggc

SEQ ID NO: 1826379 - DNA, 15 bp, Homo sapiens
cgctcctccggggct

SEQ ID NO: 1826380 - DNA, 15 bp, Homo sapiens
gctcctccggggctg

SEQ ID NO: 1826381 - DNA, 15 bp, Homo sapiens
ctcctccggggctgc

SEQ ID NO: 1826382 - DNA, 15 bp, Homo sapiens
tcctccggggctgcg

SEQ ID NO: 1826383 - DNA, 15 bp, Homo sapiens
cctccggggctgcgg

SEQ ID NO: 1826384 - DNA, 15 bp, Homo sapiens
ctccggggctgcggt

SEQ ID NO: 1826385 - DNA, 15 bp, Homo sapiens
tccggggctgcggtt

SEQ ID NO: 1826386 - DNA, 15 bp, Homo sapiens
ccggggctgcggttc

SEQ ID NO: 1826387 - DNA, 15 bp, Homo sapiens
cggggctgcggttcc

SEQ ID NO: 1826388 - DNA, 15 bp, Homo sapiens
ggggctgcggttcct

SEQ ID NO: 1826389 - DNA, 15 bp, Homo sapiens
gggctgcggttccta

SEQ ID NO: 1826390 - DNA, 15 bp, Homo sapiens
ggctgcggttcctac

SEQ ID NO: 1826391 - DNA, 15 bp, Homo sapiens
gctgcggttcctact

SEQ ID NO: 1826392 - DNA, 15 bp, Homo sapiens
ctgcggttcctactg

SEQ ID NO: 1826393 - DNA, 15 bp, Homo sapiens
tgcggttcctactgc

SEQ ID NO: 1826394 - DNA, 15 bp, Homo sapiens
gcggttcctactgcg

SEQ ID NO: 1826395 - DNA, 15 bp, Homo sapiens
cggttcctactgcgc

SEQ ID NO: 1826396 - DNA, 15 bp, Homo sapiens
ggttcctactgcgcg

SEQ ID NO: 1826397 - DNA, 15 bp, Homo sapiens
gttcctactgcgcga

SEQ ID NO: 1826398 - DNA, 15 bp, Homo sapiens
ttcctactgcgcgag

SEQ ID NO: 1826399 - DNA, 15 bp, Homo sapiens
tcctactgcgcgagc

SEQ ID NO: 1826400 - DNA, 15 bp, Homo sapiens
cctactgcgcgagct

SEQ ID NO: 1826401 - DNA, 15 bp, Homo sapiens
ctactgcgcgagctg

SEQ ID NO: 1826402 - DNA, 15 bp, Homo sapiens
tactgcgcgagctgc

SEQ ID NO: 1826403 - DNA, 15 bp, Homo sapiens
actgcgcgagctgcc

SEQ ID NO: 1826404 - DNA, 15 bp, Homo sapiens
ctgcgcgagctgcca

SEQ ID NO: 1826405 - DNA, 15 bp, Homo sapiens
tgcgcgagctgccag

SEQ ID NO: 1826406 - DNA, 15 bp, Homo sapiens
gcgcgagctgccagt

SEQ ID NO: 1826407 - DNA, 15 bp, Homo sapiens
cgcgagctgccagtg

SEQ ID NO: 1826408 - DNA, 15 bp, Homo sapiens
gcgagctgccagtgg

SEQ ID NO: 1826409 - DNA, 15 bp, Homo sapiens
cgagctgccagtgga

SEQ ID NO: 1826410 - DNA, 15 bp, Homo sapiens
gagctgccagtggat

SEQ ID NO: 1826411 - DNA, 15 bp, Homo sapiens
agctgccagtggatt

SEQ ID NO: 1826412 - DNA, 15 bp, Homo sapiens
gctgccagtggattc

SEQ ID NO: 1826413 - DNA, 15 bp, Homo sapiens
ctgccagtggattcg

SEQ ID NO: 1826414 - DNA, 15 bp, Homo sapiens
tgccagtggattcgc

SEQ ID NO: 1826415 - DNA, 15 bp, Homo sapiens
gccagtggattcgct

SEQ ID NO: 1826416 - DNA, 15 bp, Homo sapiens
ccagtggattcgctc

SEQ ID NO: 1826417 - DNA, 15 bp, Homo sapiens
cagtggattcgctct

SEQ ID NO: 1826418 - DNA, 15 bp, Homo sapiens
agtggattcgctctt

SEQ ID NO: 1826419 - DNA, 15 bp, Homo sapiens
gtggattcgctcttt

SEQ ID NO: 1826420 - DNA, 15 bp, Homo sapiens
tggattcgctctttt

SEQ ID NO: 1826421 - DNA, 15 bp, Homo sapiens
ggattcgctcttttc

SEQ ID NO: 1826422 - DNA, 15 bp, Homo sapiens
gattcgctcttttcc

SEQ ID NO: 1826423 - DNA, 15 bp, Homo sapiens
attcgctcttttcct

SEQ ID NO: 1826424 - DNA, 15 bp, Homo sapiens
ttcgctcttttcctc

SEQ ID NO: 1826425 - DNA, 15 bp, Homo sapiens
tcgctcttttcctcc

SEQ ID NO: 1826426 - DNA, 15 bp, Homo sapiens
cgctcttttcctccg

SEQ ID NO: 1826427 - DNA, 15 bp, Homo sapiens
gctcttttcctccgt

SEQ ID NO: 1826428 - DNA, 15 bp, Homo sapiens
ctcttttcctccgtc

SEQ ID NO: 1826429 - DNA, 15 bp, Homo sapiens
tcttttcctccgtcc

SEQ ID NO: 1826430 - DNA, 15 bp, Homo sapiens
cttttcctccgtccg

SEQ ID NO: 1826431 - DNA, 15 bp, Homo sapiens
ttttcctccgtccgt

SEQ ID NO: 1826432 - DNA, 15 bp, Homo sapiens
tttcctccgtccgtg

SEQ ID NO: 1826433 - DNA, 15 bp, Homo sapiens
ttcctccgtccgtgg

SEQ ID NO: 1826434 - DNA, 15 bp, Homo sapiens
tcctccgtccgtggc

SEQ ID NO: 1826435 - DNA, 15 bp, Homo sapiens
cctccgtccgtggcc

SEQ ID NO: 1826436 - DNA, 15 bp, Homo sapiens
ctccgtccgtggccc

SEQ ID NO: 1826437 - DNA, 15 bp, Homo sapiens
tccgtccgtggcccg

SEQ ID NO: 1826438 - DNA, 15 bp, Homo sapiens
ccgtccgtggcccgc

SEQ ID NO: 1826439 - DNA, 15 bp, Homo sapiens
cgtccgtggcccgcc

SEQ ID NO: 1826440 - DNA, 15 bp, Homo sapiens
gtccgtggcccgcct

SEQ ID NO: 1826441 - DNA, 15 bp, Homo sapiens
tccgtggcccgcctg

SEQ ID NO: 1826442 - DNA, 15 bp, Homo sapiens
ccgtggcccgcctgg

SEQ ID NO: 1826443 - DNA, 15 bp, Homo sapiens
cgtggcccgcctggg

SEQ ID NO: 1826444 - DNA, 15 bp, Homo sapiens
gtggcccgcctgggc

SEQ ID NO: 1826445 - DNA, 15 bp, Homo sapiens
tggcccgcctgggcg

SEQ ID NO: 1826446 - DNA, 15 bp, Homo sapiens
ggcccgcctgggcgg

SEQ ID NO: 1826447 - DNA, 15 bp, Homo sapiens
gcccgcctgggcggc

SEQ ID NO: 1826448 - DNA, 15 bp, Homo sapiens
cccgcctgggcggcc

SEQ ID NO: 1826449 - DNA, 15 bp, Homo sapiens
ccgcctgggcggcct

SEQ ID NO: 1826450 - DNA, 15 bp, Homo sapiens
cgcctgggcggcctt

SEQ ID NO: 1826451 - DNA, 15 bp, Homo sapiens
gcctgggcggccttg

SEQ ID NO: 1826452 - DNA, 15 bp, Homo sapiens
cctgggcggccttgt

SEQ ID NO: 1826453 - DNA, 15 bp, Homo sapiens
ctgggcggccttgtt

SEQ ID NO: 1826454 - DNA, 15 bp, Homo sapiens
tgggcggccttgttc

SEQ ID NO: 1826455 - DNA, 15 bp, Homo sapiens
gggcggccttgttct

SEQ ID NO: 1826456 - DNA, 15 bp, Homo sapiens
ggcggccttgttctt

SEQ ID NO: 1826457 - DNA, 15 bp, Homo sapiens
gcggccttgttcttt

SEQ ID NO: 1826458 - DNA, 15 bp, Homo sapiens
cggccttgttctttc

SEQ ID NO: 1826459 - DNA, 15 bp, Homo sapiens
ggccttgttctttcc

SEQ ID NO: 1826460 - DNA, 15 bp, Homo sapiens
gccttgttctttccg

SEQ ID NO: 1826461 - DNA, 15 bp, Homo sapiens
ccttgttctttccgc

SEQ ID NO: 1826462 - DNA, 15 bp, Homo sapiens
cttgttctttccgca

SEQ ID NO: 1826463 - DNA, 15 bp, Homo sapiens
ttgttctttccgcag

SEQ ID NO: 1826464 - DNA, 15 bp, Homo sapiens
tgttctttccgcagc

SEQ ID NO: 1826465 - DNA, 15 bp, Homo sapiens
gttctttccgcagca

SEQ ID NO: 1826466 - DNA, 15 bp, Homo sapiens
ttctttccgcagcag

SEQ ID NO: 1826467 - DNA, 15 bp, Homo sapiens
tctttccgcagcagc

SEQ ID NO: 1826468 - DNA, 15 bp, Homo sapiens
ctttccgcagcagcc

SEQ ID NO: 1826469 - DNA, 15 bp, Homo sapiens
tttccgcagcagcca

SEQ ID NO: 1826470 - DNA, 15 bp, Homo sapiens
ttccgcagcagccag

SEQ ID NO: 1826471 - DNA, 15 bp, Homo sapiens
tccgcagcagccagg

SEQ ID NO: 1826472 - DNA, 15 bp, Homo sapiens
ccgcagcagccaggt

SEQ ID NO: 1826473 - DNA, 15 bp, Homo sapiens
cgcagcagccaggtc

SEQ ID NO: 1826474 - DNA, 15 bp, Homo sapiens
gcagcagccaggtcg

SEQ ID NO: 1826475 - DNA, 15 bp, Homo sapiens
cagcagccaggtcgg

SEQ ID NO: 1826476 - DNA, 15 bp, Homo sapiens
agcagccaggtcggg

SEQ ID NO: 1826477 - DNA, 15 bp, Homo sapiens
gcagccaggtcggga

SEQ ID NO: 1826478 - DNA, 15 bp, Homo sapiens
cagccaggtcgggag

SEQ ID NO: 1826479 - DNA, 15 bp, Homo sapiens
agccaggtcgggaga

SEQ ID NO: 1826480 - DNA, 15 bp, Homo sapiens
gccaggtcgggagac

SEQ ID NO: 1826481 - DNA, 15 bp, Homo sapiens
ccaggtcgggagact

SEQ ID NO: 1826482 - DNA, 15 bp, Homo sapiens
caggtcgggagactc

SEQ ID NO: 1826483 - DNA, 15 bp, Homo sapiens
aggtcgggagactct

SEQ ID NO: 1826484 - DNA, 15 bp, Homo sapiens
ggtcgggagactctc

SEQ ID NO: 1826485 - DNA, 15 bp, Homo sapiens
gtcgggagactctcg

SEQ ID NO: 1826486 - DNA, 15 bp, Homo sapiens
tcgggagactctcgc

SEQ ID NO: 1826487 - DNA, 15 bp, Homo sapiens
cgggagactctcgca

SEQ ID NO: 1826488 - DNA, 15 bp, Homo sapiens
gggagactctcgcag

SEQ ID NO: 1826489 - DNA, 15 bp, Homo sapiens
ggagactctcgcagt

SEQ ID NO: 1826490 - DNA, 15 bp, Homo sapiens
gagactctcgcagtc

SEQ ID NO: 1826491 - DNA, 15 bp, Homo sapiens
agactctcgcagtcg

SEQ ID NO: 1826492 - DNA, 15 bp, Homo sapiens
gactctcgcagtcgc

SEQ ID NO: 1826493 - DNA, 15 bp, Homo sapiens
actctcgcagtcgct

SEQ ID NO: 1826494 - DNA, 15 bp, Homo sapiens
ctctcgcagtcgctt

SEQ ID NO: 1826495 - DNA, 15 bp, Homo sapiens
tctcgcagtcgcttt

SEQ ID NO: 1826496 - DNA, 15 bp, Homo sapiens
ctcgcagtcgcttta

SEQ ID NO: 1826497 - DNA, 15 bp, Homo sapiens
tcgcagtcgctttaa

SEQ ID NO: 1826498 - DNA, 15 bp, Homo sapiens
cgcagtcgctttaaa

SEQ ID NO: 1826499 - DNA, 15 bp, Homo sapiens
gcagtcgctttaaaa

SEQ ID NO: 1826500 - DNA, 15 bp, Homo sapiens
cagtcgctttaaaat

SEQ ID NO: 1826501 - DNA, 15 bp, Homo sapiens
agtcgctttaaaata

SEQ ID NO: 1826502 - DNA, 15 bp, Homo sapiens
gtcgctttaaaataa

SEQ ID NO: 1826503 - DNA, 15 bp, Homo sapiens
tcgctttaaaataag

SEQ ID NO: 1826504 - DNA, 15 bp, Homo sapiens
cgctttaaaataagt

SEQ ID NO: 1826505 - DNA, 15 bp, Homo sapiens
gctttaaaataagtt

SEQ ID NO: 1826506 - DNA, 15 bp, Homo sapiens
ctttaaaataagttt

SEQ ID NO: 1826507 - DNA, 15 bp, Homo sapiens
tttaaaataagtttc

SEQ ID NO: 1826508 - DNA, 15 bp, Homo sapiens
ttaaaataagtttct

SEQ ID NO: 1826509 - DNA, 15 bp, Homo sapiens
taaaataagtttctc

SEQ ID NO: 1826510 - DNA, 15 bp, Homo sapiens
aaaataagtttctct

SEQ ID NO: 1826511 - DNA, 15 bp, Homo sapiens
aaataagtttctctc

SEQ ID NO: 1826512 - DNA, 15 bp, Homo sapiens
aataagtttctctcc

SEQ ID NO: 1826513 - DNA, 15 bp, Homo sapiens
ataagtttctctccc

SEQ ID NO: 1826514 - DNA, 15 bp, Homo sapiens
taagtttctctcccc

SEQ ID NO: 1826515 - DNA, 15 bp, Homo sapiens
aagtttctctccccc

SEQ ID NO: 1826516 - DNA, 15 bp, Homo sapiens
agtttctctccccct

SEQ ID NO: 1826517 - DNA, 15 bp, Homo sapiens
gtttctctccccctc

SEQ ID NO: 1826518 - DNA, 15 bp, Homo sapiens
tttctctccccctct

SEQ ID NO: 1826519 - DNA, 15 bp, Homo sapiens
ttctctccccctctt

SEQ ID NO: 1826520 - DNA, 15 bp, Homo sapiens
tctctccccctctta

SEQ ID NO: 1826521 - DNA, 15 bp, Homo sapiens
ctctccccctcttac

SEQ ID NO: 1826522 - DNA, 15 bp, Homo sapiens
tctccccctcttact

SEQ ID NO: 1826523 - DNA, 15 bp, Homo sapiens
ctccccctcttactc

SEQ ID NO: 1826524 - DNA, 15 bp, Homo sapiens
tccccctcttactct

SEQ ID NO: 1826525 - DNA, 15 bp, Homo sapiens
ccccctcttactctt

SEQ ID NO: 1826526 - DNA, 15 bp, Homo sapiens
cccctcttactcttt

SEQ ID NO: 1826527 - DNA, 15 bp, Homo sapiens
ccctcttactctttt

SEQ ID NO: 1826528 - DNA, 15 bp, Homo sapiens
cctcttactctttta

SEQ ID NO: 1826529 - DNA, 15 bp, Homo sapiens
ctcttactcttttag

SEQ ID NO: 1826530 - DNA, 15 bp, Homo sapiens
tcttactcttttagc

SEQ ID NO: 1826531 - DNA, 15 bp, Homo sapiens
cttactcttttagca

SEQ ID NO: 1826532 - DNA, 15 bp, Homo sapiens
ttactcttttagcat

SEQ ID NO: 1826533 - DNA, 15 bp, Homo sapiens
tactcttttagcata

SEQ ID NO: 1826534 - DNA, 15 bp, Homo sapiens
actcttttagcatat

SEQ ID NO: 1826535 - DNA, 15 bp, Homo sapiens
ctcttttagcatatt

SEQ ID NO: 1826536 - DNA, 15 bp, Homo sapiens
tcttttagcatattg

SEQ ID NO: 1826537 - DNA, 15 bp, Homo sapiens
cttttagcatattgc

SEQ ID NO: 1826538 - DNA, 15 bp, Homo sapiens
ttttagcatattgct

SEQ ID NO: 1826539 - DNA, 15 bp, Homo sapiens
tttagcatattgctt

SEQ ID NO: 1826540 - DNA, 15 bp, Homo sapiens
ttagcatattgcttt

SEQ ID NO: 1826541 - DNA, 15 bp, Homo sapiens
tagcatattgctttt

SEQ ID NO: 1826542 - DNA, 15 bp, Homo sapiens
agcatattgcttttg

SEQ ID NO: 1826543 - DNA, 15 bp, Homo sapiens
gcatattgcttttgt

SEQ ID NO: 1826544 - DNA, 15 bp, Homo sapiens
catattgcttttgtt

SEQ ID NO: 1826545 - DNA, 15 bp, Homo sapiens
atattgcttttgtta

SEQ ID NO: 1826546 - DNA, 15 bp, Homo sapiens
tattgcttttgttag

SEQ ID NO: 1826547 - DNA, 15 bp, Homo sapiens
attgcttttgttaga

SEQ ID NO: 1826548 - DNA, 15 bp, Homo sapiens
ttgcttttgttagag

SEQ ID NO: 1826549 - DNA, 15 bp, Homo sapiens
tgcttttgttagagc

SEQ ID NO: 1826550 - DNA, 15 bp, Homo sapiens
gcttttgttagagct

SEQ ID NO: 1826551 - DNA, 15 bp, Homo sapiens
cttttgttagagctt

SEQ ID NO: 1826552 - DNA, 15 bp, Homo sapiens
ttttgttagagcttt

SEQ ID NO: 1826553 - DNA, 15 bp, Homo sapiens
tttgttagagctttt

SEQ ID NO: 1826554 - DNA, 15 bp, Homo sapiens
ttgttagagcttttt

SEQ ID NO: 1826555 - DNA, 15 bp, Homo sapiens
tgttagagctttttt

SEQ ID NO: 1826556 - DNA, 15 bp, Homo sapiens
gttagagcttttttt

SEQ ID NO: 1826557 - DNA, 15 bp, Homo sapiens
ttagagctttttttt

SEQ ID NO: 1826558 - DNA, 15 bp, Homo sapiens
tagagcttttttttt

SEQ ID NO: 1826559 - DNA, 15 bp, Homo sapiens
agagctttttttttc

SEQ ID NO: 1826560 - DNA, 15 bp, Homo sapiens
gagctttttttttct

SEQ ID NO: 1826561 - DNA, 15 bp, Homo sapiens
agctttttttttctt

SEQ ID NO: 1826562 - DNA, 15 bp, Homo sapiens
gctttttttttcttt

SEQ ID NO: 1826563 - DNA, 15 bp, Homo sapiens
tttctttatttttta

SEQ ID NO: 1826564 - DNA, 15 bp, Homo sapiens
ttctttattttttat

SEQ ID NO: 1826565 - DNA, 15 bp, Homo sapiens
tctttattttttatt

SEQ ID NO: 1826566 - DNA, 15 bp, Homo sapiens
ctttattttttattt

SEQ ID NO: 1826567 - DNA, 15 bp, Homo sapiens
ttattttttattttc

SEQ ID NO: 1826568 - DNA, 15 bp, Homo sapiens
tattttttattttca

SEQ ID NO: 1826569 - DNA, 15 bp, Homo sapiens
attttttattttcat

SEQ ID NO: 1826570 - DNA, 15 bp, Homo sapiens
ttttttattttcatt

SEQ ID NO: 1826571 - DNA, 15 bp, Homo sapiens
tttttattttcattg

SEQ ID NO: 1826572 - DNA, 15 bp, Homo sapiens
ttttattttcattgc

SEQ ID NO: 1826573 - DNA, 15 bp, Homo sapiens
tttattttcattgct

SEQ ID NO: 1826574 - DNA, 15 bp, Homo sapiens
ttattttcattgctt

SEQ ID NO: 1826575 - DNA, 15 bp, Homo sapiens
tattttcattgcttt

SEQ ID NO: 1826576 - DNA, 15 bp, Homo sapiens
attttcattgctttt

SEQ ID NO: 1826577 - DNA, 15 bp, Homo sapiens
ttttcattgcttttc

SEQ ID NO: 1826578 - DNA, 15 bp, Homo sapiens
tttcattgcttttct

SEQ ID NO: 1826579 - DNA, 15 bp, Homo sapiens
ttcattgcttttctc

SEQ ID NO: 1826580 - DNA, 15 bp, Homo sapiens
tcattgcttttctcc

SEQ ID NO: 1826581 - DNA, 15 bp, Homo sapiens
cattgcttttctcct

SEQ ID NO: 1826582 - DNA, 15 bp, Homo sapiens
attgcttttctcctc

SEQ ID NO: 1826583 - DNA, 15 bp, Homo sapiens
ttgcttttctcctct

SEQ ID NO: 1826584 - DNA, 15 bp, Homo sapiens
tgcttttctcctcta

SEQ ID NO: 1826585 - DNA, 15 bp, Homo sapiens
gcttttctcctctac

SEQ ID NO: 1826586 - DNA, 15 bp, Homo sapiens
cttttctcctctacc

SEQ ID NO: 1826587 - DNA, 15 bp, Homo sapiens
ttttctcctctaccc

SEQ ID NO: 1826588 - DNA, 15 bp, Homo sapiens
tttctcctctacccc

SEQ ID NO: 1826589 - DNA, 15 bp, Homo sapiens
ttctcctctaccccc

SEQ ID NO: 1826590 - DNA, 15 bp, Homo sapiens
tctcctctacccccc

SEQ ID NO: 1826591 - DNA, 15 bp, Homo sapiens
ctcctctacccccca

SEQ ID NO: 1826592 - DNA, 15 bp, Homo sapiens
tcctctaccccccag

SEQ ID NO: 1826593 - DNA, 15 bp, Homo sapiens
cctctaccccccagc

SEQ ID NO: 1826594 - DNA, 15 bp, Homo sapiens
ctctaccccccagca

SEQ ID NO: 1826595 - DNA, 15 bp, Homo sapiens
tctaccccccagcac

SEQ ID NO: 1826596 - DNA, 15 bp, Homo sapiens
ctaccccccagcaca

SEQ ID NO: 1826597 - DNA, 15 bp, Homo sapiens
taccccccagcacac

SEQ ID NO: 1826598 - DNA, 15 bp, Homo sapiens
accccccagcacact

SEQ ID NO: 1826599 - DNA, 15 bp, Homo sapiens
ccccccagcacactt

SEQ ID NO: 1826600 - DNA, 15 bp, Homo sapiens
cccccagcacactta

SEQ ID NO: 1826601 - DNA, 15 bp, Homo sapiens
ccccagcacacttaa

SEQ ID NO: 1826602 - DNA, 15 bp, Homo sapiens
cccagcacacttaag

SEQ ID NO: 1826603 - DNA, 15 bp, Homo sapiens
ccagcacacttaagt

SEQ ID NO: 1826604 - DNA, 15 bp, Homo sapiens
cagcacacttaagtc

SEQ ID NO: 1826605 - DNA, 15 bp, Homo sapiens
agcacacttaagtct

SEQ ID NO: 1826606 - DNA, 15 bp, Homo sapiens
gcacacttaagtctg

SEQ ID NO: 1826607 - DNA, 15 bp, Homo sapiens
cacacttaagtctgc

SEQ ID NO: 1826608 - DNA, 15 bp, Homo sapiens
acacttaagtctgca

SEQ ID NO: 1826609 - DNA, 15 bp, Homo sapiens
cacttaagtctgcaa

SEQ ID NO: 1826610 - DNA, 15 bp, Homo sapiens
acttaagtctgcaac

SEQ ID NO: 1826611 - DNA, 15 bp, Homo sapiens
cttaagtctgcaact

SEQ ID NO: 1826612 - DNA, 15 bp, Homo sapiens
ttaagtctgcaactt

SEQ ID NO: 1826613 - DNA, 15 bp, Homo sapiens
taagtctgcaacttt

SEQ ID NO: 1826614 - DNA, 15 bp, Homo sapiens
aagtctgcaactttt

SEQ ID NO: 1826615 - DNA, 15 bp, Homo sapiens
agtctgcaacttttt

SEQ ID NO: 1826616 - DNA, 15 bp, Homo sapiens
gtctgcaactttttg

SEQ ID NO: 1826617 - DNA, 15 bp, Homo sapiens
tctgcaactttttgg

SEQ ID NO: 1826618 - DNA, 15 bp, Homo sapiens
ctgcaactttttggc

SEQ ID NO: 1826619 - DNA, 15 bp, Homo sapiens
tgcaactttttggct

SEQ ID NO: 1826620 - DNA, 15 bp, Homo sapiens
gcaactttttggctg

SEQ ID NO: 1826621 - DNA, 15 bp, Homo sapiens
caactttttggctgt

SEQ ID NO: 1826622 - DNA, 15 bp, Homo sapiens
aactttttggctgtc

SEQ ID NO: 1826623 - DNA, 15 bp, Homo sapiens
actttttggctgtcc

SEQ ID NO: 1826624 - DNA, 15 bp, Homo sapiens
ctttttggctgtccc

SEQ ID NO: 1826625 - DNA, 15 bp, Homo sapiens
tttttggctgtcccg

SEQ ID NO: 1826626 - DNA, 15 bp, Homo sapiens
ttttggctgtcccgt

SEQ ID NO: 1826627 - DNA, 15 bp, Homo sapiens
tttggctgtcccgtt

SEQ ID NO: 1826628 - DNA, 15 bp, Homo sapiens
ttggctgtcccgttg

SEQ ID NO: 1826629 - DNA, 15 bp, Homo sapiens
tggctgtcccgttgg

SEQ ID NO: 1826630 - DNA, 15 bp, Homo sapiens
ggctgtcccgttggt

SEQ ID NO: 1826631 - DNA, 15 bp, Homo sapiens
gctgtcccgttggtc

SEQ ID NO: 1826632 - DNA, 15 bp, Homo sapiens
ctgtcccgttggtct

SEQ ID NO: 1826633 - DNA, 15 bp, Homo sapiens
tgtcccgttggtctg

SEQ ID NO: 1826634 - DNA, 15 bp, Homo sapiens
gtcccgttggtctgc

SEQ ID NO: 1826635 - DNA, 15 bp, Homo sapiens
tcccgttggtctgcg

SEQ ID NO: 1826636 - DNA, 15 bp, Homo sapiens
cccgttggtctgcgt

SEQ ID NO: 1826637 - DNA, 15 bp, Homo sapiens
ccgttggtctgcgtt

SEQ ID NO: 1826638 - DNA, 15 bp, Homo sapiens
cgttggtctgcgttt

SEQ ID NO: 1826639 - DNA, 15 bp, Homo sapiens
gttggtctgcgtttt

SEQ ID NO: 1826640 - DNA, 15 bp, Homo sapiens
ttggtctgcgttttc

SEQ ID NO: 1826641 - DNA, 15 bp, Homo sapiens
tggtctgcgttttca

SEQ ID NO: 1826642 - DNA, 15 bp, Homo sapiens
ggtctgcgttttcaa

SEQ ID NO: 1826643 - DNA, 15 bp, Homo sapiens
gtctgcgttttcaat

SEQ ID NO: 1826644 - DNA, 15 bp, Homo sapiens
tctgcgttttcaatt

SEQ ID NO: 1826645 - DNA, 15 bp, Homo sapiens
ctgcgttttcaattg

SEQ ID NO: 1826646 - DNA, 15 bp, Homo sapiens
tgcgttttcaattgc

SEQ ID NO: 1826647 - DNA, 15 bp, Homo sapiens
gcgttttcaattgct

SEQ ID NO: 1826648 - DNA, 15 bp, Homo sapiens
cgttttcaattgctt

SEQ ID NO: 1826649 - DNA, 15 bp, Homo sapiens
gttttcaattgcttt

SEQ ID NO: 1826650 - DNA, 15 bp, Homo sapiens
ttttcaattgctttt

SEQ ID NO: 1826651 - DNA, 15 bp, Homo sapiens
tttcaattgcttttt

SEQ ID NO: 1826652 - DNA, 15 bp, Homo sapiens
ttcaattgctttttg

SEQ ID NO: 1826653 - DNA, 15 bp, Homo sapiens
tcaattgctttttgc

SEQ ID NO: 1826654 - DNA, 15 bp, Homo sapiens
caattgctttttgca

SEQ ID NO: 1826655 - DNA, 15 bp, Homo sapiens
aattgctttttgcaa

SEQ ID NO: 1826656 - DNA, 15 bp, Homo sapiens
attgctttttgcaaa

SEQ ID NO: 1826657 - DNA, 15 bp, Homo sapiens
ttgctttttgcaaac

SEQ ID NO: 1826658 - DNA, 15 bp, Homo sapiens
tgctttttgcaaact

SEQ ID NO: 1826659 - DNA, 15 bp, Homo sapiens
gctttttgcaaactt

SEQ ID NO: 1826660 - DNA, 15 bp, Homo sapiens
ctttttgcaaacttg

SEQ ID NO: 1826661 - DNA, 15 bp, Homo sapiens
tttttgcaaacttga

SEQ ID NO: 1826662 - DNA, 15 bp, Homo sapiens
ttttgcaaacttgac

SEQ ID NO: 1826663 - DNA, 15 bp, Homo sapiens
tttgcaaacttgaca

SEQ ID NO: 1826664 - DNA, 15 bp, Homo sapiens
ttgcaaacttgacac

SEQ ID NO: 1826665 - DNA, 15 bp, Homo sapiens
tgcaaacttgacacc

SEQ ID NO: 1826666 - DNA, 15 bp, Homo sapiens
gcaaacttgacacct

SEQ ID NO: 1826667 - DNA, 15 bp, Homo sapiens
caaacttgacacctg

SEQ ID NO: 1826668 - DNA, 15 bp, Homo sapiens
aaacttgacacctgt

SEQ ID NO: 1826669 - DNA, 15 bp, Homo sapiens
aacttgacacctgtg

SEQ ID NO: 1826670 - DNA, 15 bp, Homo sapiens
acttgacacctgtgc

SEQ ID NO: 1826671 - DNA, 15 bp, Homo sapiens
cttgacacctgtgca

SEQ ID NO: 1826672 - DNA, 15 bp, Homo sapiens
ttgacacctgtgcag

SEQ ID NO: 1826673 - DNA, 15 bp, Homo sapiens
tgacacctgtgcagt

SEQ ID NO: 1826674 - DNA, 15 bp, Homo sapiens
gacacctgtgcagtt

SEQ ID NO: 1826675 - DNA, 15 bp, Homo sapiens
acacctgtgcagttt

SEQ ID NO: 1826676 - DNA, 15 bp, Homo sapiens
cacctgtgcagtttg

SEQ ID NO: 1826677 - DNA, 15 bp, Homo sapiens
acctgtgcagtttgc

SEQ ID NO: 1826678 - DNA, 15 bp, Homo sapiens
cctgtgcagtttgct

SEQ ID NO: 1826679 - DNA, 15 bp, Homo sapiens
ctgtgcagtttgctt

SEQ ID NO: 1826680 - DNA, 15 bp, Homo sapiens
tgtgcagtttgcttt

SEQ ID NO: 1826681 - DNA, 15 bp, Homo sapiens
gtgcagtttgctttt

SEQ ID NO: 1826682 - DNA, 15 bp, Homo sapiens
tgcagtttgcttttt

SEQ ID NO: 1826683 - DNA, 15 bp, Homo sapiens
gcagtttgctttttt

SEQ ID NO: 1826684 - DNA, 15 bp, Homo sapiens
cagtttgcttttttt

SEQ ID NO: 1826685 - DNA, 15 bp, Homo sapiens
agtttgctttttttg

SEQ ID NO: 1826686 - DNA, 15 bp, Homo sapiens
gtttgctttttttgg

SEQ ID NO: 1826687 - DNA, 15 bp, Homo sapiens
tttgctttttttggt

SEQ ID NO: 1826688 - DNA, 15 bp, Homo sapiens
ttgctttttttggtc

SEQ ID NO: 1826689 - DNA, 15 bp, Homo sapiens
tgctttttttggtct

SEQ ID NO: 1826690 - DNA, 15 bp, Homo sapiens
gctttttttggtcta

SEQ ID NO: 1826691 - DNA, 15 bp, Homo sapiens
ctttttttggtctat

SEQ ID NO: 1826692 - DNA, 15 bp, Homo sapiens
tttttttggtctata

SEQ ID NO: 1826693 - DNA, 15 bp, Homo sapiens
ttttttggtctatat

SEQ ID NO: 1826694 - DNA, 15 bp, Homo sapiens
tttttggtctatatt

SEQ ID NO: 1826695 - DNA, 15 bp, Homo sapiens
ttttggtctatattt

SEQ ID NO: 1826696 - DNA, 15 bp, Homo sapiens
tttggtctatatttt

SEQ ID NO: 1826697 - DNA, 15 bp, Homo sapiens
ttggtctatattttt

SEQ ID NO: 1826698 - DNA, 15 bp, Homo sapiens
tggtctatattttta

SEQ ID NO: 1826699 - DNA, 15 bp, Homo sapiens
ggtctatatttttat

SEQ ID NO: 1826700 - DNA, 15 bp, Homo sapiens
gtctatatttttatg

SEQ ID NO: 1826701 - DNA, 15 bp, Homo sapiens
tctatatttttatga

SEQ ID NO: 1826702 - DNA, 15 bp, Homo sapiens
ctatatttttatgac

SEQ ID NO: 1826703 - DNA, 15 bp, Homo sapiens
tatatttttatgact

SEQ ID NO: 1826704 - DNA, 15 bp, Homo sapiens
atatttttatgactg

SEQ ID NO: 1826705 - DNA, 15 bp, Homo sapiens
tatttttatgactga

SEQ ID NO: 1826706 - DNA, 15 bp, Homo sapiens
atttttatgactgaa

SEQ ID NO: 1826707 - DNA, 15 bp, Homo sapiens
tttttatgactgaaa

SEQ ID NO: 1826708 - DNA, 15 bp, Homo sapiens
ttttatgactgaaat

SEQ ID NO: 1826709 - DNA, 15 bp, Homo sapiens
tttatgactgaaatt

SEQ ID NO: 1826710 - DNA, 15 bp, Homo sapiens
ttatgactgaaatta

SEQ ID NO: 1826711 - DNA, 15 bp, Homo sapiens
tatgactgaaattac

SEQ ID NO: 1826712 - DNA, 15 bp, Homo sapiens
atgactgaaattaca

SEQ ID NO: 1826713 - DNA, 15 bp, Homo sapiens
tgactgaaattacaa

SEQ ID NO: 1826714 - DNA, 15 bp, Homo sapiens
gactgaaattacaat

SEQ ID NO: 1826715 - DNA, 15 bp, Homo sapiens
actgaaattacaatt

SEQ ID NO: 1826716 - DNA, 15 bp, Homo sapiens
ctgaaattacaattt

SEQ ID NO: 1826717 - DNA, 15 bp, Homo sapiens
tgaaattacaatttt

SEQ ID NO: 1826718 - DNA, 15 bp, Homo sapiens
gaaattacaattttt

SEQ ID NO: 1826719 - DNA, 15 bp, Homo sapiens
aaattacaatttttg

SEQ ID NO: 1826720 - DNA, 15 bp, Homo sapiens
aattacaatttttga

SEQ ID NO: 1826721 - DNA, 15 bp, Homo sapiens
attacaatttttgaa

SEQ ID NO: 1826722 - DNA, 15 bp, Homo sapiens
ttacaatttttgaaa

SEQ ID NO: 1826723 - DNA, 15 bp, Homo sapiens
tacaatttttgaaag

SEQ ID NO: 1826724 - DNA, 15 bp, Homo sapiens
acaatttttgaaaga

SEQ ID NO: 1826725 - DNA, 15 bp, Homo sapiens
caatttttgaaagag

SEQ ID NO: 1826726 - DNA, 15 bp, Homo sapiens
aatttttgaaagagg

SEQ ID NO: 1826727 - DNA, 15 bp, Homo sapiens
atttttgaaagagga

SEQ ID NO: 1826728 - DNA, 15 bp, Homo sapiens
tttttgaaagaggaa

SEQ ID NO: 1826729 - DNA, 15 bp, Homo sapiens
ttttgaaagaggaaa

SEQ ID NO: 1826730 - DNA, 15 bp, Homo sapiens
tttgaaagaggaaag

SEQ ID NO: 1826731 - DNA, 15 bp, Homo sapiens
ttgaaagaggaaagc

SEQ ID NO: 1826732 - DNA, 15 bp, Homo sapiens
tgaaagaggaaagct

SEQ ID NO: 1826733 - DNA, 15 bp, Homo sapiens
gaaagaggaaagctg

SEQ ID NO: 1826734 - DNA, 15 bp, Homo sapiens
aaagaggaaagctgt

SEQ ID NO: 1826735 - DNA, 15 bp, Homo sapiens
aagaggaaagctgtt

SEQ ID NO: 1826736 - DNA, 15 bp, Homo sapiens
agaggaaagctgttt

SEQ ID NO: 1826737 - DNA, 15 bp, Homo sapiens
gaggaaagctgtttc

SEQ ID NO: 1826738 - DNA, 15 bp, Homo sapiens
aggaaagctgtttct

SEQ ID NO: 1826739 - DNA, 15 bp, Homo sapiens
ggaaagctgtttcta

SEQ ID NO: 1826740 - DNA, 15 bp, Homo sapiens
gaaagctgtttctat

SEQ ID NO: 1826741 - DNA, 15 bp, Homo sapiens
aaagctgtttctata

SEQ ID NO: 1826742 - DNA, 15 bp, Homo sapiens
aagctgtttctatag

SEQ ID NO: 1826743 - DNA, 15 bp, Homo sapiens
agctgtttctatagt

SEQ ID NO: 1826744 - DNA, 15 bp, Homo sapiens
gctgtttctatagtc

SEQ ID NO: 1826745 - DNA, 15 bp, Homo sapiens
ctgtttctatagtca

SEQ ID NO: 1826746 - DNA, 15 bp, Homo sapiens
tgtttctatagtcac

SEQ ID NO: 1826747 - DNA, 15 bp, Homo sapiens
gtttctatagtcaca

SEQ ID NO: 1826748 - DNA, 15 bp, Homo sapiens
tttctatagtcacag

SEQ ID NO: 1826749 - DNA, 15 bp, Homo sapiens
ttctatagtcacagc

SEQ ID NO: 1826750 - DNA, 15 bp, Homo sapiens
tctatagtcacagct

SEQ ID NO: 1826751 - DNA, 15 bp, Homo sapiens
ctatagtcacagctt

SEQ ID NO: 1826752 - DNA, 15 bp, Homo sapiens
tatagtcacagcttg

SEQ ID NO: 1826753 - DNA, 15 bp, Homo sapiens
atagtcacagcttgc

SEQ ID NO: 1826754 - DNA, 15 bp, Homo sapiens
tagtcacagcttgca

SEQ ID NO: 1826755 - DNA, 15 bp, Homo sapiens
agtcacagcttgcaa

SEQ ID NO: 1826756 - DNA, 15 bp, Homo sapiens
gtcacagcttgcaaa

SEQ ID NO: 1826757 - DNA, 15 bp, Homo sapiens
tcacagcttgcaaaa

SEQ ID NO: 1826758 - DNA, 15 bp, Homo sapiens
cacagcttgcaaaat

SEQ ID NO: 1826759 - DNA, 15 bp, Homo sapiens
acagcttgcaaaatt

SEQ ID NO: 1826760 - DNA, 15 bp, Homo sapiens
cagcttgcaaaattt

SEQ ID NO: 1826761 - DNA, 15 bp, Homo sapiens
agcttgcaaaattta

SEQ ID NO: 1826762 - DNA, 15 bp, Homo sapiens
gcttgcaaaatttaa

SEQ ID NO: 1826763 - DNA, 15 bp, Homo sapiens
cttgcaaaatttaaa

SEQ ID NO: 1826764 - DNA, 15 bp, Homo sapiens
ttgcaaaatttaaag

SEQ ID NO: 1826765 - DNA, 15 bp, Homo sapiens
gcaaaatttaaagaa

SEQ ID NO: 1826766 - DNA, 15 bp, Homo sapiens
caaaatttaaagaac

SEQ ID NO: 1826767 - DNA, 15 bp, Homo sapiens
aaaatttaaagaacg

SEQ ID NO: 1826768 - DNA, 15 bp, Homo sapiens
aaatttaaagaacgt

SEQ ID NO: 1826769 - DNA, 15 bp, Homo sapiens
aatttaaagaacgtg

SEQ ID NO: 1826770 - DNA, 15 bp, Homo sapiens
atttaaagaacgtgg

SEQ ID NO: 1826771 - DNA, 15 bp, Homo sapiens
tttaaagaacgtggc

SEQ ID NO: 1826772 - DNA, 15 bp, Homo sapiens
ttaaagaacgtggct

SEQ ID NO: 1826773 - DNA, 15 bp, Homo sapiens
taaagaacgtggctg

SEQ ID NO: 1826774 - DNA, 15 bp, Homo sapiens
aaagaacgtggctgt

SEQ ID NO: 1826775 - DNA, 15 bp, Homo sapiens
aagaacgtggctgtt

SEQ ID NO: 1826776 - DNA, 15 bp, Homo sapiens
agaacgtggctgttc

SEQ ID NO: 1826777 - DNA, 15 bp, Homo sapiens
gaacgtggctgttcc

SEQ ID NO: 1826778 - DNA, 15 bp, Homo sapiens
aacgtggctgttcct

SEQ ID NO: 1826779 - DNA, 15 bp, Homo sapiens
acgtggctgttcctg

SEQ ID NO: 1826780 - DNA, 15 bp, Homo sapiens
cgtggctgttcctga

SEQ ID NO: 1826781 - DNA, 15 bp, Homo sapiens
gtggctgttcctgaa

SEQ ID NO: 1826782 - DNA, 15 bp, Homo sapiens
tggctgttcctgaag

SEQ ID NO: 1826783 - DNA, 15 bp, Homo sapiens
ggctgttcctgaaga

SEQ ID NO: 1826784 - DNA, 15 bp, Homo sapiens
gctgttcctgaagac

SEQ ID NO: 1826785 - DNA, 15 bp, Homo sapiens
ctgttcctgaagaca

SEQ ID NO: 1826786 - DNA, 15 bp, Homo sapiens
tgttcctgaagacat

SEQ ID NO: 1826787 - DNA, 15 bp, Homo sapiens
gttcctgaagacatt

SEQ ID NO: 1826788 - DNA, 15 bp, Homo sapiens
ttcctgaagacatta

SEQ ID NO: 1826789 - DNA, 15 bp, Homo sapiens
tcctgaagacattac

SEQ ID NO: 1826790 - DNA, 15 bp, Homo sapiens
cctgaagacattacc

SEQ ID NO: 1826791 - DNA, 15 bp, Homo sapiens
ctgaagacattacca

SEQ ID NO: 1826792 - DNA, 15 bp, Homo sapiens
tgaagacattaccat

SEQ ID NO: 1826793 - DNA, 15 bp, Homo sapiens
gaagacattaccatt

SEQ ID NO: 1826794 - DNA, 15 bp, Homo sapiens
aagacattaccattc

SEQ ID NO: 1826795 - DNA, 15 bp, Homo sapiens
agacattaccattct

SEQ ID NO: 1826796 - DNA, 15 bp, Homo sapiens
gacattaccattctg

SEQ ID NO: 1826797 - DNA, 15 bp, Homo sapiens
acattaccattctgt

SEQ ID NO: 1826798 - DNA, 15 bp, Homo sapiens
cattaccattctgta

SEQ ID NO: 1826799 - DNA, 15 bp, Homo sapiens
attaccattctgtaa

SEQ ID NO: 1826800 - DNA, 15 bp, Homo sapiens
ttaccattctgtaat

SEQ ID NO: 1826801 - DNA, 15 bp, Homo sapiens
taccattctgtaatg

SEQ ID NO: 1826802 - DNA, 15 bp, Homo sapiens
accattctgtaatgc

SEQ ID NO: 1826803 - DNA, 15 bp, Homo sapiens
ccattctgtaatgca

SEQ ID NO: 1826804 - DNA, 15 bp, Homo sapiens
cattctgtaatgcag

SEQ ID NO: 1826805 - DNA, 15 bp, Homo sapiens
attctgtaatgcagt

SEQ ID NO: 1826806 - DNA, 15 bp, Homo sapiens
ttctgtaatgcagtt

SEQ ID NO: 1826807 - DNA, 15 bp, Homo sapiens
tctgtaatgcagtta

SEQ ID NO: 1826808 - DNA, 15 bp, Homo sapiens
ctgtaatgcagttag

SEQ ID NO: 1826809 - DNA, 15 bp, Homo sapiens
tgtaatgcagttagg

SEQ ID NO: 1826810 - DNA, 15 bp, Homo sapiens
gtaatgcagttagga

SEQ ID NO: 1826811 - DNA, 15 bp, Homo sapiens
taatgcagttaggag

SEQ ID NO: 1826812 - DNA, 15 bp, Homo sapiens
aatgcagttaggagt

SEQ ID NO: 1826813 - DNA, 15 bp, Homo sapiens
atgcagttaggagtg

SEQ ID NO: 1826814 - DNA, 15 bp, Homo sapiens
tgcagttaggagtgg

SEQ ID NO: 1826815 - DNA, 15 bp, Homo sapiens
gcagttaggagtggg

SEQ ID NO: 1826816 - DNA, 15 bp, Homo sapiens
cagttaggagtgggt

SEQ ID NO: 1826817 - DNA, 15 bp, Homo sapiens
agttaggagtgggta

SEQ ID NO: 1826818 - DNA, 15 bp, Homo sapiens
gttaggagtgggtat

SEQ ID NO: 1826819 - DNA, 15 bp, Homo sapiens
ttaggagtgggtatg

SEQ ID NO: 1826820 - DNA, 15 bp, Homo sapiens
taggagtgggtatgg

SEQ ID NO: 1826821 - DNA, 15 bp, Homo sapiens
aggagtgggtatggg

SEQ ID NO: 1826822 - DNA, 15 bp, Homo sapiens
ggagtgggtatggga

SEQ ID NO: 1826823 - DNA, 15 bp, Homo sapiens
gagtgggtatgggag

SEQ ID NO: 1826824 - DNA, 15 bp, Homo sapiens
agtgggtatgggaga

SEQ ID NO: 1826825 - DNA, 15 bp, Homo sapiens
gtgggtatgggagag

SEQ ID NO: 1826826 - DNA, 15 bp, Homo sapiens
tgggtatgggagaga

SEQ ID NO: 1826827 - DNA, 15 bp, Homo sapiens
gggtatgggagagag

SEQ ID NO: 1826828 - DNA, 15 bp, Homo sapiens
ggtatgggagagaga

SEQ ID NO: 1826829 - DNA, 15 bp, Homo sapiens
gtatgggagagagag

SEQ ID NO: 1826830 - DNA, 15 bp, Homo sapiens
tatgggagagagagt

SEQ ID NO: 1826831 - DNA, 15 bp, Homo sapiens
atgggagagagagta

SEQ ID NO: 1826832 - DNA, 15 bp, Homo sapiens
tgggagagagagtac

SEQ ID NO: 1826833 - DNA, 15 bp, Homo sapiens
gggagagagagtact

SEQ ID NO: 1826834 - DNA, 15 bp, Homo sapiens
ggagagagagtactt

SEQ ID NO: 1826835 - DNA, 15 bp, Homo sapiens
gagagagagtacttt

SEQ ID NO: 1826836 - DNA, 15 bp, Homo sapiens
agagagagtactttt

SEQ ID NO: 1826837 - DNA, 15 bp, Homo sapiens
gagagagtactttta

SEQ ID NO: 1826838 - DNA, 15 bp, Homo sapiens
agagagtacttttag

SEQ ID NO: 1826839 - DNA, 15 bp, Homo sapiens
gagagtacttttaga

SEQ ID NO: 1826840 - DNA, 15 bp, Homo sapiens
agagtacttttagag

SEQ ID NO: 1826841 - DNA, 15 bp, Homo sapiens
gagtacttttagagc

SEQ ID NO: 1826842 - DNA, 15 bp, Homo sapiens
agtacttttagagct

SEQ ID NO: 1826843 - DNA, 15 bp, Homo sapiens
gtacttttagagctg

SEQ ID NO: 1826844 - DNA, 15 bp, Homo sapiens
tacttttagagctgt

SEQ ID NO: 1826845 - DNA, 15 bp, Homo sapiens
acttttagagctgtt

SEQ ID NO: 1826846 - DNA, 15 bp, Homo sapiens
cttttagagctgttc

SEQ ID NO: 1826847 - DNA, 15 bp, Homo sapiens
ttttagagctgttca

SEQ ID NO: 1826848 - DNA, 15 bp, Homo sapiens
tttagagctgttcat

SEQ ID NO: 1826849 - DNA, 15 bp, Homo sapiens
ttagagctgttcata

SEQ ID NO: 1826850 - DNA, 15 bp, Homo sapiens
tagagctgttcatat

SEQ ID NO: 1826851 - DNA, 15 bp, Homo sapiens
agagctgttcatatt

SEQ ID NO: 1826852 - DNA, 15 bp, Homo sapiens
gagctgttcatatta

SEQ ID NO: 1826853 - DNA, 15 bp, Homo sapiens
agctgttcatattac

SEQ ID NO: 1826854 - DNA, 15 bp, Homo sapiens
gctgttcatattact

SEQ ID NO: 1826855 - DNA, 15 bp, Homo sapiens
ctgttcatattactt

SEQ ID NO: 1826856 - DNA, 15 bp, Homo sapiens
tgttcatattacttt

SEQ ID NO: 1826857 - DNA, 15 bp, Homo sapiens
gttcatattactttt

SEQ ID NO: 1826858 - DNA, 15 bp, Homo sapiens
ttcatattactttta

SEQ ID NO: 1826859 - DNA, 15 bp, Homo sapiens
tcatattacttttat

SEQ ID NO: 1826860 - DNA, 15 bp, Homo sapiens
catattacttttatt

SEQ ID NO: 1826861 - DNA, 15 bp, Homo sapiens
atattacttttattc

SEQ ID NO: 1826862 - DNA, 15 bp, Homo sapiens
tattacttttattct

SEQ ID NO: 1826863 - DNA, 15 bp, Homo sapiens
attacttttattcta

SEQ ID NO: 1826864 - DNA, 15 bp, Homo sapiens
ttacttttattctaa

SEQ ID NO: 1826865 - DNA, 15 bp, Homo sapiens
tacttttattctaat

SEQ ID NO: 1826866 - DNA, 15 bp, Homo sapiens
acttttattctaatc

SEQ ID NO: 1826867 - DNA, 15 bp, Homo sapiens
cttttattctaatct

SEQ ID NO: 1826868 - DNA, 15 bp, Homo sapiens
ttttattctaatctt

SEQ ID NO: 1826869 - DNA, 15 bp, Homo sapiens
tttattctaatcttg

SEQ ID NO: 1826870 - DNA, 15 bp, Homo sapiens
ttattctaatcttgc

SEQ ID NO: 1826871 - DNA, 15 bp, Homo sapiens
tattctaatcttgct

SEQ ID NO: 1826872 - DNA, 15 bp, Homo sapiens
attctaatcttgctc

SEQ ID NO: 1826873 - DNA, 15 bp, Homo sapiens
ttctaatcttgctct

SEQ ID NO: 1826874 - DNA, 15 bp, Homo sapiens
tctaatcttgctctt

SEQ ID NO: 1826875 - DNA, 15 bp, Homo sapiens
ctaatcttgctcttg

SEQ ID NO: 1826876 - DNA, 15 bp, Homo sapiens
taatcttgctcttgt

SEQ ID NO: 1826877 - DNA, 15 bp, Homo sapiens
aatcttgctcttgtg

SEQ ID NO: 1826878 - DNA, 15 bp, Homo sapiens
atcttgctcttgtgc

SEQ ID NO: 1826879 - DNA, 15 bp, Homo sapiens
tcttgctcttgtgcg

SEQ ID NO: 1826880 - DNA, 15 bp, Homo sapiens
cttgctcttgtgcgg

SEQ ID NO: 1826881 - DNA, 15 bp, Homo sapiens
ttgctcttgtgcggt

SEQ ID NO: 1826882 - DNA, 15 bp, Homo sapiens
tgctcttgtgcggta

SEQ ID NO: 1826883 - DNA, 15 bp, Homo sapiens
gctcttgtgcggtaa

SEQ ID NO: 1826884 - DNA, 15 bp, Homo sapiens
ctcttgtgcggtaat

SEQ ID NO: 1826885 - DNA, 15 bp, Homo sapiens
tcttgtgcggtaatg

SEQ ID NO: 1826886 - DNA, 15 bp, Homo sapiens
cttgtgcggtaatgg

SEQ ID NO: 1826887 - DNA, 15 bp, Homo sapiens
ttgtgcggtaatggt

SEQ ID NO: 1826888 - DNA, 15 bp, Homo sapiens
tgtgcggtaatggtg

SEQ ID NO: 1826889 - DNA, 15 bp, Homo sapiens
gtgcggtaatggtgt

SEQ ID NO: 1826890 - DNA, 15 bp, Homo sapiens
tgcggtaatggtgtt

SEQ ID NO: 1826891 - DNA, 15 bp, Homo sapiens
gcggtaatggtgttt

SEQ ID NO: 1826892 - DNA, 15 bp, Homo sapiens
cggtaatggtgtttg

SEQ ID NO: 1826893 - DNA, 15 bp, Homo sapiens
ggtaatggtgtttgg

SEQ ID NO: 1826894 - DNA, 15 bp, Homo sapiens
gtaatggtgtttggg

SEQ ID NO: 1826895 - DNA, 15 bp, Homo sapiens
taatggtgtttgggc

SEQ ID NO: 1826896 - DNA, 15 bp, Homo sapiens
aatggtgtttgggct

SEQ ID NO: 1826897 - DNA, 15 bp, Homo sapiens
atggtgtttgggcta

SEQ ID NO: 1826898 - DNA, 15 bp, Homo sapiens
tggtgtttgggctaa

SEQ ID NO: 1826899 - DNA, 15 bp, Homo sapiens
ggtgtttgggctaaa

SEQ ID NO: 1826900 - DNA, 15 bp, Homo sapiens
gtgtttgggctaaac

SEQ ID NO: 1826901 - DNA, 15 bp, Homo sapiens
tgtttgggctaaaca

SEQ ID NO: 1826902 - DNA, 15 bp, Homo sapiens
gtttgggctaaacat

SEQ ID NO: 1826903 - DNA, 15 bp, Homo sapiens
tttgggctaaacatg

SEQ ID NO: 1826904 - DNA, 15 bp, Homo sapiens
ttgggctaaacatgc

SEQ ID NO: 1826905 - DNA, 15 bp, Homo sapiens
tgggctaaacatgct

SEQ ID NO: 1826906 - DNA, 15 bp, Homo sapiens
gggctaaacatgctt

SEQ ID NO: 1826907 - DNA, 15 bp, Homo sapiens
ggctaaacatgcttt

SEQ ID NO: 1826908 - DNA, 15 bp, Homo sapiens
gctaaacatgctttt

SEQ ID NO: 1826909 - DNA, 15 bp, Homo sapiens
ctaaacatgcttttt

SEQ ID NO: 1826910 - DNA, 15 bp, Homo sapiens
taaacatgctttttt

SEQ ID NO: 1826911 - DNA, 15 bp, Homo sapiens
aaacatgcttttttt

SEQ ID NO: 1826912 - DNA, 15 bp, Homo sapiens
aacatgctttttttg

SEQ ID NO: 1826913 - DNA, 15 bp, Homo sapiens
acatgctttttttgt

SEQ ID NO: 1826914 - DNA, 15 bp, Homo sapiens
catgctttttttgta

SEQ ID NO: 1826915 - DNA, 15 bp, Homo sapiens
atgctttttttgtat

SEQ ID NO: 1826916 - DNA, 15 bp, Homo sapiens
tgctttttttgtatg

SEQ ID NO: 1826917 - DNA, 15 bp, Homo sapiens
gctttttttgtatgt

SEQ ID NO: 1826918 - DNA, 15 bp, Homo sapiens
ctttttttgtatgta

SEQ ID NO: 1826919 - DNA, 15 bp, Homo sapiens
tttttttgtatgtat

SEQ ID NO: 1826920 - DNA, 15 bp, Homo sapiens
ttttttgtatgtatg

SEQ ID NO: 1826921 - DNA, 15 bp, Homo sapiens
tttttgtatgtatgt

SEQ ID NO: 1826922 - DNA, 15 bp, Homo sapiens
ttttgtatgtatgta

SEQ ID NO: 1826923 - DNA, 15 bp, Homo sapiens
tttgtatgtatgtag

SEQ ID NO: 1826924 - DNA, 15 bp, Homo sapiens
ttgtatgtatgtagt

SEQ ID NO: 1826925 - DNA, 15 bp, Homo sapiens
tgtatgtatgtagta

SEQ ID NO: 1826926 - DNA, 15 bp, Homo sapiens
gtatgtatgtagtat

SEQ ID NO: 1826927 - DNA, 15 bp, Homo sapiens
tatgtatgtagtatt

SEQ ID NO: 1826928 - DNA, 15 bp, Homo sapiens
atgtatgtagtattg

SEQ ID NO: 1826929 - DNA, 15 bp, Homo sapiens
tgtatgtagtattga

SEQ ID NO: 1826930 - DNA, 15 bp, Homo sapiens
gtatgtagtattgag

SEQ ID NO: 1826931 - DNA, 15 bp, Homo sapiens
tatgtagtattgaga

SEQ ID NO: 1826932 - DNA, 15 bp, Homo sapiens
atgtagtattgagac

SEQ ID NO: 1826933 - DNA, 15 bp, Homo sapiens
tgtagtattgagaca

SEQ ID NO: 1826934 - DNA, 15 bp, Homo sapiens
gtagtattgagacac

SEQ ID NO: 1826935 - DNA, 15 bp, Homo sapiens
tagtattgagacaca

SEQ ID NO: 1826936 - DNA, 15 bp, Homo sapiens
agtattgagacacaa

SEQ ID NO: 1826937 - DNA, 15 bp, Homo sapiens
gtattgagacacaaa

SEQ ID NO: 1826938 - DNA, 15 bp, Homo sapiens
tattgagacacaaac

SEQ ID NO: 1826939 - DNA, 15 bp, Homo sapiens
attgagacacaaact

SEQ ID NO: 1826940 - DNA, 15 bp, Homo sapiens
ttgagacacaaactt

SEQ ID NO: 1826941 - DNA, 15 bp, Homo sapiens
tgagacacaaactta

SEQ ID NO: 1826942 - DNA, 15 bp, Homo sapiens
gagacacaaacttaa

SEQ ID NO: 1826943 - DNA, 15 bp, Homo sapiens
agacacaaacttaac

SEQ ID NO: 1826944 - DNA, 15 bp, Homo sapiens
gacacaaacttaaca

SEQ ID NO: 1826945 - DNA, 15 bp, Homo sapiens
acacaaacttaacac

SEQ ID NO: 1826946 - DNA, 15 bp, Homo sapiens
cacaaacttaacact

SEQ ID NO: 1826947 - DNA, 15 bp, Homo sapiens
acaaacttaacactt

SEQ ID NO: 1826948 - DNA, 15 bp, Homo sapiens
caaacttaacacttc

SEQ ID NO: 1826949 - DNA, 15 bp, Homo sapiens
aaacttaacacttct

SEQ ID NO: 1826950 - DNA, 15 bp, Homo sapiens
aacttaacacttcta

SEQ ID NO: 1826951 - DNA, 15 bp, Homo sapiens
acttaacacttctag

SEQ ID NO: 1826952 - DNA, 15 bp, Homo sapiens
cttaacacttctagc

SEQ ID NO: 1826953 - DNA, 15 bp, Homo sapiens
ttaacacttctagca

SEQ ID NO: 1826954 - DNA, 15 bp, Homo sapiens
taacacttctagcat

SEQ ID NO: 1826955 - DNA, 15 bp, Homo sapiens
aacacttctagcata

SEQ ID NO: 1826956 - DNA, 15 bp, Homo sapiens
acacttctagcataa

SEQ ID NO: 1826957 - DNA, 15 bp, Homo sapiens
cacttctagcataat

SEQ ID NO: 1826958 - DNA, 15 bp, Homo sapiens
acttctagcataatg

SEQ ID NO: 1826959 - DNA, 15 bp, Homo sapiens
cttctagcataatga

SEQ ID NO: 1826960 - DNA, 15 bp, Homo sapiens
ttctagcataatgaa

SEQ ID NO: 1826961 - DNA, 15 bp, Homo sapiens
tctagcataatgaag

SEQ ID NO: 1826962 - DNA, 15 bp, Homo sapiens
ctagcataatgaagc

SEQ ID NO: 1826963 - DNA, 15 bp, Homo sapiens
tagcataatgaagca

SEQ ID NO: 1826964 - DNA, 15 bp, Homo sapiens
agcataatgaagcag

SEQ ID NO: 1826965 - DNA, 15 bp, Homo sapiens
gcataatgaagcaga

SEQ ID NO: 1826966 - DNA, 15 bp, Homo sapiens
cataatgaagcagat

SEQ ID NO: 1826967 - DNA, 15 bp, Homo sapiens
ataatgaagcagata

SEQ ID NO: 1826968 - DNA, 15 bp, Homo sapiens
taatgaagcagatat

SEQ ID NO: 1826969 - DNA, 15 bp, Homo sapiens
aatgaagcagatatg

SEQ ID NO: 1826970 - DNA, 15 bp, Homo sapiens
atgaagcagatatgt

SEQ ID NO: 1826971 - DNA, 15 bp, Homo sapiens
tgaagcagatatgtt

SEQ ID NO: 1826972 - DNA, 15 bp, Homo sapiens
gaagcagatatgttg

SEQ ID NO: 1826973 - DNA, 15 bp, Homo sapiens
aagcagatatgttgc

SEQ ID NO: 1826974 - DNA, 15 bp, Homo sapiens
agcagatatgttgca

SEQ ID NO: 1826975 - DNA, 15 bp, Homo sapiens
gcagatatgttgcag

SEQ ID NO: 1826976 - DNA, 15 bp, Homo sapiens
cagatatgttgcagt

SEQ ID NO: 1826977 - DNA, 15 bp, Homo sapiens
agatatgttgcagtt

SEQ ID NO: 1826978 - DNA, 15 bp, Homo sapiens
gatatgttgcagttg

SEQ ID NO: 1826979 - DNA, 15 bp, Homo sapiens
atatgttgcagttgt

SEQ ID NO: 1826980 - DNA, 15 bp, Homo sapiens
tatgttgcagttgtc

SEQ ID NO: 1826981 - DNA, 15 bp, Homo sapiens
atgttgcagttgtca

SEQ ID NO: 1826982 - DNA, 15 bp, Homo sapiens
tgttgcagttgtcat

SEQ ID NO: 1826983 - DNA, 15 bp, Homo sapiens
gttgcagttgtcatg

SEQ ID NO: 1826984 - DNA, 15 bp, Homo sapiens
ttgcagttgtcatgt

SEQ ID NO: 1826985 - DNA, 15 bp, Homo sapiens
tgcagttgtcatgtt

SEQ ID NO: 1826986 - DNA, 15 bp, Homo sapiens
gcagttgtcatgttc

SEQ ID NO: 1826987 - DNA, 15 bp, Homo sapiens
cagttgtcatgttct

SEQ ID NO: 1826988 - DNA, 15 bp, Homo sapiens
agttgtcatgttctt

SEQ ID NO: 1826989 - DNA, 15 bp, Homo sapiens
gttgtcatgttcttg

SEQ ID NO: 1826990 - DNA, 15 bp, Homo sapiens
ttgtcatgttcttga

SEQ ID NO: 1826991 - DNA, 15 bp, Homo sapiens
tgtcatgttcttgaa

SEQ ID NO: 1826992 - DNA, 15 bp, Homo sapiens
gtcatgttcttgaag

SEQ ID NO: 1826993 - DNA, 15 bp, Homo sapiens
tcatgttcttgaagg

SEQ ID NO: 1826994 - DNA, 15 bp, Homo sapiens
catgttcttgaaggt

SEQ ID NO: 1826995 - DNA, 15 bp, Homo sapiens
atgttcttgaaggtt

SEQ ID NO: 1826996 - DNA, 15 bp, Homo sapiens
tgttcttgaaggttt

SEQ ID NO: 1826997 - DNA, 15 bp, Homo sapiens
gttcttgaaggtttc

SEQ ID NO: 1826998 - DNA, 15 bp, Homo sapiens
ttcttgaaggtttct

SEQ ID NO: 1826999 - DNA, 15 bp, Homo sapiens
tcttgaaggtttctt

SEQ ID NO: 1827000 - DNA, 15 bp, Homo sapiens
cttgaaggtttcttt

SEQ ID NO: 1827001 - DNA, 15 bp, Homo sapiens
ttgaaggtttctttt

SEQ ID NO: 1827002 - DNA, 15 bp, Homo sapiens
tgaaggtttcttttt

SEQ ID NO: 1827003 - DNA, 15 bp, Homo sapiens
gaaggtttctttttt

SEQ ID NO: 1827004 - DNA, 15 bp, Homo sapiens
aaggtttcttttttt

SEQ ID NO: 1827005 - DNA, 15 bp, Homo sapiens
aggtttctttttttt

SEQ ID NO: 1827006 - DNA, 15 bp, Homo sapiens
ggtttcttttttttt

SEQ ID NO: 1827007 - DNA, 15 bp, Homo sapiens
tctcgctctgtcgct

SEQ ID NO: 1827008 - DNA, 15 bp, Homo sapiens
ctcgctctgtcgcta

SEQ ID NO: 1827009 - DNA, 15 bp, Homo sapiens
tcgctctgtcgctag

SEQ ID NO: 1827010 - DNA, 15 bp, Homo sapiens
cgctctgtcgctagg

SEQ ID NO: 1827011 - DNA, 15 bp, Homo sapiens
gctctgtcgctaggc

SEQ ID NO: 1827012 - DNA, 15 bp, Homo sapiens
ctctgtcgctaggct

SEQ ID NO: 1827013 - DNA, 15 bp, Homo sapiens
tctgtcgctaggctg

SEQ ID NO: 1827014 - DNA, 15 bp, Homo sapiens
ctgtcgctaggctgg

SEQ ID NO: 1827015 - DNA, 15 bp, Homo sapiens
tgtcgctaggctgga

SEQ ID NO: 1827016 - DNA, 15 bp, Homo sapiens
gtcgctaggctggag

SEQ ID NO: 1827017 - DNA, 15 bp, Homo sapiens
tcgctaggctggagt

SEQ ID NO: 1827018 - DNA, 15 bp, Homo sapiens
cgctaggctggagtg

SEQ ID NO: 1827019 - DNA, 15 bp, Homo sapiens
gctaggctggagtgc

SEQ ID NO: 1827020 - DNA, 15 bp, Homo sapiens
agtggcgcgatctcg

SEQ ID NO: 1827021 - DNA, 15 bp, Homo sapiens
gtggcgcgatctcgg

SEQ ID NO: 1827022 - DNA, 15 bp, Homo sapiens
gcgatctcggctcag

SEQ ID NO: 1827023 - DNA, 15 bp, Homo sapiens
cgatctcggctcagt

SEQ ID NO: 1827024 - DNA, 15 bp, Homo sapiens
acctccgcctcccgc

SEQ ID NO: 1827025 - DNA, 15 bp, Homo sapiens
cctccgcctcccgcg

SEQ ID NO: 1827026 - DNA, 15 bp, Homo sapiens
ctccgcctcccgcgt

SEQ ID NO: 1827027 - DNA, 15 bp, Homo sapiens
tccgcctcccgcgtt

SEQ ID NO: 1827028 - DNA, 15 bp, Homo sapiens
ccgcctcccgcgttc

SEQ ID NO: 1827029 - DNA, 15 bp, Homo sapiens
cgcctcccgcgttca

SEQ ID NO: 1827030 - DNA, 15 bp, Homo sapiens
gcctcccgcgttcaa

SEQ ID NO: 1827031 - DNA, 15 bp, Homo sapiens
cctcccgcgttcaac

SEQ ID NO: 1827032 - DNA, 15 bp, Homo sapiens
ctcccgcgttcaacc

SEQ ID NO: 1827033 - DNA, 15 bp, Homo sapiens
tcccgcgttcaaccg

SEQ ID NO: 1827034 - DNA, 15 bp, Homo sapiens
cccgcgttcaaccga

SEQ ID NO: 1827035 - DNA, 15 bp, Homo sapiens
ccgcgttcaaccgat

SEQ ID NO: 1827036 - DNA, 15 bp, Homo sapiens
cgcgttcaaccgatt

SEQ ID NO: 1827037 - DNA, 15 bp, Homo sapiens
gcgttcaaccgattc

SEQ ID NO: 1827038 - DNA, 15 bp, Homo sapiens
cgttcaaccgattct

SEQ ID NO: 1827039 - DNA, 15 bp, Homo sapiens
gttcaaccgattctc

SEQ ID NO: 1827040 - DNA, 15 bp, Homo sapiens
ttcaaccgattctcc

SEQ ID NO: 1827041 - DNA, 15 bp, Homo sapiens
tcaaccgattctcct

SEQ ID NO: 1827042 - DNA, 15 bp, Homo sapiens
caaccgattctcctt

SEQ ID NO: 1827043 - DNA, 15 bp, Homo sapiens
aaccgattctccttc

SEQ ID NO: 1827044 - DNA, 15 bp, Homo sapiens
accgattctccttca

SEQ ID NO: 1827045 - DNA, 15 bp, Homo sapiens
ccgattctccttcag

SEQ ID NO: 1827046 - DNA, 15 bp, Homo sapiens
cgattctccttcagc

SEQ ID NO: 1827047 - DNA, 15 bp, Homo sapiens
gattctccttcagcc

SEQ ID NO: 1827048 - DNA, 15 bp, Homo sapiens
attctccttcagcct

SEQ ID NO: 1827049 - DNA, 15 bp, Homo sapiens
ttctccttcagcctg

SEQ ID NO: 1827050 - DNA, 15 bp, Homo sapiens
tctccttcagcctgc

SEQ ID NO: 1827051 - DNA, 15 bp, Homo sapiens
ctccttcagcctgcc

SEQ ID NO: 1827052 - DNA, 15 bp, Homo sapiens
tccttcagcctgccg

SEQ ID NO: 1827053 - DNA, 15 bp, Homo sapiens
ccttcagcctgccga

SEQ ID NO: 1827054 - DNA, 15 bp, Homo sapiens
cttcagcctgccgag

SEQ ID NO: 1827055 - DNA, 15 bp, Homo sapiens
ttcagcctgccgagt

SEQ ID NO: 1827056 - DNA, 15 bp, Homo sapiens
tcagcctgccgagta

SEQ ID NO: 1827057 - DNA, 15 bp, Homo sapiens
cagcctgccgagtag

SEQ ID NO: 1827058 - DNA, 15 bp, Homo sapiens
agcctgccgagtagc

SEQ ID NO: 1827059 - DNA, 15 bp, Homo sapiens
gcctgccgagtagct

SEQ ID NO: 1827060 - DNA, 15 bp, Homo sapiens
cctgccgagtagctg

SEQ ID NO: 1827061 - DNA, 15 bp, Homo sapiens
ctgccgagtagctgg

SEQ ID NO: 1827062 - DNA, 15 bp, Homo sapiens
tgccgagtagctggg

SEQ ID NO: 1827063 - DNA, 15 bp, Homo sapiens
gccgagtagctggga

SEQ ID NO: 1827064 - DNA, 15 bp, Homo sapiens
gggactacagacacc

SEQ ID NO: 1827065 - DNA, 15 bp, Homo sapiens
ggactacagacaccc

SEQ ID NO: 1827066 - DNA, 15 bp, Homo sapiens
gactacagacacccg

SEQ ID NO: 1827067 - DNA, 15 bp, Homo sapiens
actacagacacccgc

SEQ ID NO: 1827068 - DNA, 15 bp, Homo sapiens
ctacagacacccgcc

SEQ ID NO: 1827069 - DNA, 15 bp, Homo sapiens
tacagacacccgcca

SEQ ID NO: 1827070 - DNA, 15 bp, Homo sapiens
acagacacccgccac

SEQ ID NO: 1827071 - DNA, 15 bp, Homo sapiens
cagacacccgccacc

SEQ ID NO: 1827072 - DNA, 15 bp, Homo sapiens
agacacccgccacca

SEQ ID NO: 1827073 - DNA, 15 bp, Homo sapiens
gacacccgccaccac

SEQ ID NO: 1827074 - DNA, 15 bp, Homo sapiens
acacccgccaccacg

SEQ ID NO: 1827075 - DNA, 15 bp, Homo sapiens
ttttgtgtttttagc

SEQ ID NO: 1827076 - DNA, 15 bp, Homo sapiens
tttgtgtttttagca

SEQ ID NO: 1827077 - DNA, 15 bp, Homo sapiens
ttgtgtttttagcag

SEQ ID NO: 1827078 - DNA, 15 bp, Homo sapiens
tgtgtttttagcaga

SEQ ID NO: 1827079 - DNA, 15 bp, Homo sapiens
gtgtttttagcagag

SEQ ID NO: 1827080 - DNA, 15 bp, Homo sapiens
tgtttttagcagaga

SEQ ID NO: 1827081 - DNA, 15 bp, Homo sapiens
gtttttagcagagac

SEQ ID NO: 1827082 - DNA, 15 bp, Homo sapiens
aggatggtcttgatt

SEQ ID NO: 1827083 - DNA, 15 bp, Homo sapiens
ggatggtcttgattt

SEQ ID NO: 1827084 - DNA, 15 bp, Homo sapiens
gatggtcttgatttc

SEQ ID NO: 1827085 - DNA, 15 bp, Homo sapiens
atggtcttgatttct

SEQ ID NO: 1827086 - DNA, 15 bp, Homo sapiens
tggtcttgatttctt

SEQ ID NO: 1827087 - DNA, 15 bp, Homo sapiens
ggtcttgatttcttg

SEQ ID NO: 1827088 - DNA, 15 bp, Homo sapiens
gtcttgatttcttga

SEQ ID NO: 1827089 - DNA, 15 bp, Homo sapiens
tcttgatttcttgac

SEQ ID NO: 1827090 - DNA, 15 bp, Homo sapiens
cttgatttcttgact

SEQ ID NO: 1827091 - DNA, 15 bp, Homo sapiens
ttgatttcttgactt

SEQ ID NO: 1827092 - DNA, 15 bp, Homo sapiens
tgatttcttgacttc

SEQ ID NO: 1827093 - DNA, 15 bp, Homo sapiens
gatttcttgacttcg

SEQ ID NO: 1827094 - DNA, 15 bp, Homo sapiens
atttcttgacttcgt

SEQ ID NO: 1827095 - DNA, 15 bp, Homo sapiens
tttcttgacttcgtg

SEQ ID NO: 1827096 - DNA, 15 bp, Homo sapiens
ttcttgacttcgtga

SEQ ID NO: 1827097 - DNA, 15 bp, Homo sapiens
tcttgacttcgtgat

SEQ ID NO: 1827098 - DNA, 15 bp, Homo sapiens
cttgacttcgtgatc

SEQ ID NO: 1827099 - DNA, 15 bp, Homo sapiens
ttgacttcgtgatcc

SEQ ID NO: 1827100 - DNA, 15 bp, Homo sapiens
tgacttcgtgatccg

SEQ ID NO: 1827101 - DNA, 15 bp, Homo sapiens
gacttcgtgatccgt

SEQ ID NO: 1827102 - DNA, 15 bp, Homo sapiens
acttcgtgatccgtc

SEQ ID NO: 1827103 - DNA, 15 bp, Homo sapiens
cttcgtgatccgtcc

SEQ ID NO: 1827104 - DNA, 15 bp, Homo sapiens
ttcgtgatccgtccg

SEQ ID NO: 1827105 - DNA, 15 bp, Homo sapiens
tcgtgatccgtccgc

SEQ ID NO: 1827106 - DNA, 15 bp, Homo sapiens
cgtgatccgtccgcc

SEQ ID NO: 1827107 - DNA, 15 bp, Homo sapiens
gtgatccgtccgcct

SEQ ID NO: 1827108 - DNA, 15 bp, Homo sapiens
tgatccgtccgcctc

SEQ ID NO: 1827109 - DNA, 15 bp, Homo sapiens
gatccgtccgcctcg

SEQ ID NO: 1827110 - DNA, 15 bp, Homo sapiens
atccgtccgcctcgg

SEQ ID NO: 1827111 - DNA, 15 bp, Homo sapiens
tccgtccgcctcggc

SEQ ID NO: 1827112 - DNA, 15 bp, Homo sapiens
ccgtccgcctcggcc

SEQ ID NO: 1827113 - DNA, 15 bp, Homo sapiens
cgtccgcctcggccg

SEQ ID NO: 1827114 - DNA, 15 bp, Homo sapiens
gtccgcctcggccgc

SEQ ID NO: 1827115 - DNA, 15 bp, Homo sapiens
tccgcctcggccgcc

SEQ ID NO: 1827116 - DNA, 15 bp, Homo sapiens
ccgcctcggccgccc

SEQ ID NO: 1827117 - DNA, 15 bp, Homo sapiens
cgcctcggccgccca

SEQ ID NO: 1827118 - DNA, 15 bp, Homo sapiens
gcctcggccgcccaa

SEQ ID NO: 1827119 - DNA, 15 bp, Homo sapiens
cctcggccgcccaaa

SEQ ID NO: 1827120 - DNA, 15 bp, Homo sapiens
ctcggccgcccaaag

SEQ ID NO: 1827121 - DNA, 15 bp, Homo sapiens
tcggccgcccaaagt

SEQ ID NO: 1827122 - DNA, 15 bp, Homo sapiens
cggccgcccaaagtg

SEQ ID NO: 1827123 - DNA, 15 bp, Homo sapiens
ggccgcccaaagtgc

SEQ ID NO: 1827124 - DNA, 15 bp, Homo sapiens
gccgcccaaagtgct

SEQ ID NO: 1827125 - DNA, 15 bp, Homo sapiens
ccgcccaaagtgctg

SEQ ID NO: 1827126 - DNA, 15 bp, Homo sapiens
cgcccaaagtgctgg

SEQ ID NO: 1827127 - DNA, 15 bp, Homo sapiens
gcccaaagtgctggg

SEQ ID NO: 1827128 - DNA, 15 bp, Homo sapiens
gccaccgcgcccggt

SEQ ID NO: 1827129 - DNA, 15 bp, Homo sapiens
ccaccgcgcccggtc

SEQ ID NO: 1827130 - DNA, 15 bp, Homo sapiens
caccgcgcccggtca

SEQ ID NO: 1827131 - DNA, 15 bp, Homo sapiens
accgcgcccggtcag

SEQ ID NO: 1827132 - DNA, 15 bp, Homo sapiens
ccgcgcccggtcagg

SEQ ID NO: 1827133 - DNA, 15 bp, Homo sapiens
cgcgcccggtcaggt

SEQ ID NO: 1827134 - DNA, 15 bp, Homo sapiens
gcgcccggtcaggtt

SEQ ID NO: 1827135 - DNA, 15 bp, Homo sapiens
cgcccggtcaggttt

SEQ ID NO: 1827136 - DNA, 15 bp, Homo sapiens
gcccggtcaggtttc

SEQ ID NO: 1827137 - DNA, 15 bp, Homo sapiens
cccggtcaggtttct

SEQ ID NO: 1827138 - DNA, 15 bp, Homo sapiens
ccggtcaggtttctt

SEQ ID NO: 1827139 - DNA, 15 bp, Homo sapiens
cggtcaggtttctta

SEQ ID NO: 1827140 - DNA, 15 bp, Homo sapiens
ggtcaggtttcttat

SEQ ID NO: 1827141 - DNA, 15 bp, Homo sapiens
gtcaggtttcttatt

SEQ ID NO: 1827142 - DNA, 15 bp, Homo sapiens
tcaggtttcttattt

SEQ ID NO: 1827143 - DNA, 15 bp, Homo sapiens
caggtttcttatttt

SEQ ID NO: 1827144 - DNA, 15 bp, Homo sapiens
aggtttcttattttt

SEQ ID NO: 1827145 - DNA, 15 bp, Homo sapiens
ggtttcttatttttg

SEQ ID NO: 1827146 - DNA, 15 bp, Homo sapiens
gtttcttatttttga

SEQ ID NO: 1827147 - DNA, 15 bp, Homo sapiens
tttcttatttttgat

SEQ ID NO: 1827148 - DNA, 15 bp, Homo sapiens
ttcttatttttgatc

SEQ ID NO: 1827149 - DNA, 15 bp, Homo sapiens
tcttatttttgatct

SEQ ID NO: 1827150 - DNA, 15 bp, Homo sapiens
cttatttttgatctg

SEQ ID NO: 1827151 - DNA, 15 bp, Homo sapiens
ttatttttgatctga

SEQ ID NO: 1827152 - DNA, 15 bp, Homo sapiens
tatttttgatctgag

SEQ ID NO: 1827153 - DNA, 15 bp, Homo sapiens
atttttgatctgagg

SEQ ID NO: 1827154 - DNA, 15 bp, Homo sapiens
tttttgatctgagga

SEQ ID NO: 1827155 - DNA, 15 bp, Homo sapiens
ttttgatctgaggag

SEQ ID NO: 1827156 - DNA, 15 bp, Homo sapiens
tttgatctgaggagt

SEQ ID NO: 1827157 - DNA, 15 bp, Homo sapiens
ttgatctgaggagtt

SEQ ID NO: 1827158 - DNA, 15 bp, Homo sapiens
tgatctgaggagttt

SEQ ID NO: 1827159 - DNA, 15 bp, Homo sapiens
gatctgaggagtttc

SEQ ID NO: 1827160 - DNA, 15 bp, Homo sapiens
atctgaggagtttct

SEQ ID NO: 1827161 - DNA, 15 bp, Homo sapiens
tctgaggagtttcta

SEQ ID NO: 1827162 - DNA, 15 bp, Homo sapiens
ctgaggagtttctat

SEQ ID NO: 1827163 - DNA, 15 bp, Homo sapiens
tgaggagtttctatc

SEQ ID NO: 1827164 - DNA, 15 bp, Homo sapiens
gaggagtttctatcc

SEQ ID NO: 1827165 - DNA, 15 bp, Homo sapiens
aggagtttctatcct

SEQ ID NO: 1827166 - DNA, 15 bp, Homo sapiens
ggagtttctatcctt

SEQ ID NO: 1827167 - DNA, 15 bp, Homo sapiens
gagtttctatccttg

SEQ ID NO: 1827168 - DNA, 15 bp, Homo sapiens
agtttctatccttga

SEQ ID NO: 1827169 - DNA, 15 bp, Homo sapiens
gtttctatccttgat

SEQ ID NO: 1827170 - DNA, 15 bp, Homo sapiens
tttctatccttgata

SEQ ID NO: 1827171 - DNA, 15 bp, Homo sapiens
ttctatccttgatag

SEQ ID NO: 1827172 - DNA, 15 bp, Homo sapiens
tctatccttgatagg

SEQ ID NO: 1827173 - DNA, 15 bp, Homo sapiens
ctatccttgataggt

SEQ ID NO: 1827174 - DNA, 15 bp, Homo sapiens
tatccttgataggtg

SEQ ID NO: 1827175 - DNA, 15 bp, Homo sapiens
atccttgataggtgt

SEQ ID NO: 1827176 - DNA, 15 bp, Homo sapiens
tccttgataggtgtt

SEQ ID NO: 1827177 - DNA, 15 bp, Homo sapiens
ccttgataggtgttc

SEQ ID NO: 1827178 - DNA, 15 bp, Homo sapiens
cttgataggtgttca

SEQ ID NO: 1827179 - DNA, 15 bp, Homo sapiens
ttgataggtgttcat

SEQ ID NO: 1827180 - DNA, 15 bp, Homo sapiens
tgataggtgttcatc

SEQ ID NO: 1827181 - DNA, 15 bp, Homo sapiens
gataggtgttcatct

SEQ ID NO: 1827182 - DNA, 15 bp, Homo sapiens
ataggtgttcatctt

SEQ ID NO: 1827183 - DNA, 15 bp, Homo sapiens
taggtgttcatcttt

SEQ ID NO: 1827184 - DNA, 15 bp, Homo sapiens
aggtgttcatcttta

SEQ ID NO: 1827185 - DNA, 15 bp, Homo sapiens
ggtgttcatctttat

SEQ ID NO: 1827186 - DNA, 15 bp, Homo sapiens
gtgttcatctttatc

SEQ ID NO: 1827187 - DNA, 15 bp, Homo sapiens
tgttcatctttatca

SEQ ID NO: 1827188 - DNA, 15 bp, Homo sapiens
gttcatctttatcaa

SEQ ID NO: 1827189 - DNA, 15 bp, Homo sapiens
ttcatctttatcaat

SEQ ID NO: 1827190 - DNA, 15 bp, Homo sapiens
tcatctttatcaata

SEQ ID NO: 1827191 - DNA, 15 bp, Homo sapiens
catctttatcaatat

SEQ ID NO: 1827192 - DNA, 15 bp, Homo sapiens
atctttatcaatatt

SEQ ID NO: 1827193 - DNA, 15 bp, Homo sapiens
tctttatcaatattt

SEQ ID NO: 1827194 - DNA, 15 bp, Homo sapiens
ctttatcaatatttg

SEQ ID NO: 1827195 - DNA, 15 bp, Homo sapiens
tttatcaatatttgg

SEQ ID NO: 1827196 - DNA, 15 bp, Homo sapiens
ttatcaatatttggg

SEQ ID NO: 1827197 - DNA, 15 bp, Homo sapiens
tatcaatatttgggt

SEQ ID NO: 1827198 - DNA, 15 bp, Homo sapiens
atcaatatttgggtc

SEQ ID NO: 1827199 - DNA, 15 bp, Homo sapiens
tcaatatttgggtca

SEQ ID NO: 1827200 - DNA, 15 bp, Homo sapiens
caatatttgggtcag

SEQ ID NO: 1827201 - DNA, 15 bp, Homo sapiens
aatatttgggtcagg

SEQ ID NO: 1827202 - DNA, 15 bp, Homo sapiens
atatttgggtcaggc

SEQ ID NO: 1827203 - DNA, 15 bp, Homo sapiens
tatttgggtcaggcc

SEQ ID NO: 1827204 - DNA, 15 bp, Homo sapiens
atttgggtcaggccg

SEQ ID NO: 1827205 - DNA, 15 bp, Homo sapiens
tttgggtcaggccgg

SEQ ID NO: 1827206 - DNA, 15 bp, Homo sapiens
ttgggtcaggccggg

SEQ ID NO: 1827207 - DNA, 15 bp, Homo sapiens
tgggtcaggccgggc

SEQ ID NO: 1827208 - DNA, 15 bp, Homo sapiens
gggtcaggccgggcg

SEQ ID NO: 1827209 - DNA, 15 bp, Homo sapiens
ggtcaggccgggcgc

SEQ ID NO: 1827210 - DNA, 15 bp, Homo sapiens
gtcaggccgggcgcg

SEQ ID NO: 1827211 - DNA, 15 bp, Homo sapiens
tcaggccgggcgcgg

SEQ ID NO: 1827212 - DNA, 15 bp, Homo sapiens
caggccgggcgcggt

SEQ ID NO: 1827213 - DNA, 15 bp, Homo sapiens
gggcgcggtggctct

SEQ ID NO: 1827214 - DNA, 15 bp, Homo sapiens
ggcgcggtggctctt

SEQ ID NO: 1827215 - DNA, 15 bp, Homo sapiens
gcgcggtggctcttt

SEQ ID NO: 1827216 - DNA, 15 bp, Homo sapiens
cgcggtggctctttc

SEQ ID NO: 1827217 - DNA, 15 bp, Homo sapiens
gcggtggctctttcg

SEQ ID NO: 1827218 - DNA, 15 bp, Homo sapiens
cggtggctctttcgt

SEQ ID NO: 1827219 - DNA, 15 bp, Homo sapiens
ggtggctctttcgtg

SEQ ID NO: 1827220 - DNA, 15 bp, Homo sapiens
gtggctctttcgtgt

SEQ ID NO: 1827221 - DNA, 15 bp, Homo sapiens
tggctctttcgtgta

SEQ ID NO: 1827222 - DNA, 15 bp, Homo sapiens
ggctctttcgtgtaa

SEQ ID NO: 1827223 - DNA, 15 bp, Homo sapiens
gctctttcgtgtaat

SEQ ID NO: 1827224 - DNA, 15 bp, Homo sapiens
ctctttcgtgtaatc

SEQ ID NO: 1827225 - DNA, 15 bp, Homo sapiens
tctttcgtgtaatcc

SEQ ID NO: 1827226 - DNA, 15 bp, Homo sapiens
ctttcgtgtaatcct

SEQ ID NO: 1827227 - DNA, 15 bp, Homo sapiens
tttcgtgtaatccta

SEQ ID NO: 1827228 - DNA, 15 bp, Homo sapiens
ttcgtgtaatcctag

SEQ ID NO: 1827229 - DNA, 15 bp, Homo sapiens
tcgtgtaatcctagc

SEQ ID NO: 1827230 - DNA, 15 bp, Homo sapiens
cgtgtaatcctagca

SEQ ID NO: 1827231 - DNA, 15 bp, Homo sapiens
gtgtaatcctagcac

SEQ ID NO: 1827232 - DNA, 15 bp, Homo sapiens
tgggaggccaaagcg

SEQ ID NO: 1827233 - DNA, 15 bp, Homo sapiens
gggaggccaaagcgg

SEQ ID NO: 1827234 - DNA, 15 bp, Homo sapiens
ggaggccaaagcggg

SEQ ID NO: 1827235 - DNA, 15 bp, Homo sapiens
gaggccaaagcggga

SEQ ID NO: 1827236 - DNA, 15 bp, Homo sapiens
aggccaaagcgggag

SEQ ID NO: 1827237 - DNA, 15 bp, Homo sapiens
ggccaaagcgggagg

SEQ ID NO: 1827238 - DNA, 15 bp, Homo sapiens
gccaaagcgggagga

SEQ ID NO: 1827239 - DNA, 15 bp, Homo sapiens
ccaaagcgggaggat

SEQ ID NO: 1827240 - DNA, 15 bp, Homo sapiens
caaagcgggaggatc

SEQ ID NO: 1827241 - DNA, 15 bp, Homo sapiens
aaagcgggaggatct

SEQ ID NO: 1827242 - DNA, 15 bp, Homo sapiens
aagcgggaggatctc

SEQ ID NO: 1827243 - DNA, 15 bp, Homo sapiens
agcgggaggatctct

SEQ ID NO: 1827244 - DNA, 15 bp, Homo sapiens
gcgggaggatctctt

SEQ ID NO: 1827245 - DNA, 15 bp, Homo sapiens
cgggaggatctcttg

SEQ ID NO: 1827246 - DNA, 15 bp, Homo sapiens
gatctcttgagccta

SEQ ID NO: 1827247 - DNA, 15 bp, Homo sapiens
atctcttgagcctag

SEQ ID NO: 1827248 - DNA, 15 bp, Homo sapiens
tctcttgagcctagg

SEQ ID NO: 1827249 - DNA, 15 bp, Homo sapiens
ctcttgagcctagga

SEQ ID NO: 1827250 - DNA, 15 bp, Homo sapiens
tcttgagcctaggag

SEQ ID NO: 1827251 - DNA, 15 bp, Homo sapiens
cttgagcctaggagt

SEQ ID NO: 1827252 - DNA, 15 bp, Homo sapiens
ttgagcctaggagtt

SEQ ID NO: 1827253 - DNA, 15 bp, Homo sapiens
tgagcctaggagttt

SEQ ID NO: 1827254 - DNA, 15 bp, Homo sapiens
gagcctaggagtttc

SEQ ID NO: 1827255 - DNA, 15 bp, Homo sapiens
agcctaggagtttca

SEQ ID NO: 1827256 - DNA, 15 bp, Homo sapiens
gcctaggagtttcag

SEQ ID NO: 1827257 - DNA, 15 bp, Homo sapiens
cctaggagtttcagg

SEQ ID NO: 1827258 - DNA, 15 bp, Homo sapiens
ctaggagtttcaggc

SEQ ID NO: 1827259 - DNA, 15 bp, Homo sapiens
taggagtttcaggcc

SEQ ID NO: 1827260 - DNA, 15 bp, Homo sapiens
aggagtttcaggcca

SEQ ID NO: 1827261 - DNA, 15 bp, Homo sapiens
ggagtttcaggccag

SEQ ID NO: 1827262 - DNA, 15 bp, Homo sapiens
gagtttcaggccagc

SEQ ID NO: 1827263 - DNA, 15 bp, Homo sapiens
agtttcaggccagcc

SEQ ID NO: 1827264 - DNA, 15 bp, Homo sapiens
gtttcaggccagcct

SEQ ID NO: 1827265 - DNA, 15 bp, Homo sapiens
tttcaggccagcctg

SEQ ID NO: 1827266 - DNA, 15 bp, Homo sapiens
ttcaggccagcctgg

SEQ ID NO: 1827267 - DNA, 15 bp, Homo sapiens
tcaggccagcctggg

SEQ ID NO: 1827268 - DNA, 15 bp, Homo sapiens
caggccagcctgggc

SEQ ID NO: 1827269 - DNA, 15 bp, Homo sapiens
aggccagcctgggca

SEQ ID NO: 1827270 - DNA, 15 bp, Homo sapiens
ggccagcctgggcaa

SEQ ID NO: 1827271 - DNA, 15 bp, Homo sapiens
gccagcctgggcaac

SEQ ID NO: 1827272 - DNA, 15 bp, Homo sapiens
ctgggcaacatagcg

SEQ ID NO: 1827273 - DNA, 15 bp, Homo sapiens
tgggcaacatagcga

SEQ ID NO: 1827274 - DNA, 15 bp, Homo sapiens
gggcaacatagcgag

SEQ ID NO: 1827275 - DNA, 15 bp, Homo sapiens
ggcaacatagcgaga

SEQ ID NO: 1827276 - DNA, 15 bp, Homo sapiens
gcaacatagcgagac

SEQ ID NO: 1827277 - DNA, 15 bp, Homo sapiens
caacatagcgagacc

SEQ ID NO: 1827278 - DNA, 15 bp, Homo sapiens
aacatagcgagacct

SEQ ID NO: 1827279 - DNA, 15 bp, Homo sapiens
acatagcgagacctc

SEQ ID NO: 1827280 - DNA, 15 bp, Homo sapiens
catagcgagacctcc

SEQ ID NO: 1827281 - DNA, 15 bp, Homo sapiens
atagcgagacctcct

SEQ ID NO: 1827282 - DNA, 15 bp, Homo sapiens
tagcgagacctcctc

SEQ ID NO: 1827283 - DNA, 15 bp, Homo sapiens
agcgagacctcctct

SEQ ID NO: 1827284 - DNA, 15 bp, Homo sapiens
gcgagacctcctctc

SEQ ID NO: 1827285 - DNA, 15 bp, Homo sapiens
cgagacctcctctct

SEQ ID NO: 1827286 - DNA, 15 bp, Homo sapiens
gagacctcctctcta

SEQ ID NO: 1827287 - DNA, 15 bp, Homo sapiens
agacctcctctctac

SEQ ID NO: 1827288 - DNA, 15 bp, Homo sapiens
gacctcctctctact

SEQ ID NO: 1827289 - DNA, 15 bp, Homo sapiens
acctcctctctacta

SEQ ID NO: 1827290 - DNA, 15 bp, Homo sapiens
cctcctctctactaa

SEQ ID NO: 1827291 - DNA, 15 bp, Homo sapiens
ctcctctctactaaa

SEQ ID NO: 1827292 - DNA, 15 bp, Homo sapiens
tcctctctactaaaa

SEQ ID NO: 1827293 - DNA, 15 bp, Homo sapiens
cctctctactaaaag

SEQ ID NO: 1827294 - DNA, 15 bp, Homo sapiens
ctctctactaaaagt

SEQ ID NO: 1827295 - DNA, 15 bp, Homo sapiens
ctctactaaaagtaa

SEQ ID NO: 1827296 - DNA, 15 bp, Homo sapiens
tctactaaaagtaaa

SEQ ID NO: 1827297 - DNA, 15 bp, Homo sapiens
ctactaaaagtaaaa

SEQ ID NO: 1827298 - DNA, 15 bp, Homo sapiens
tactaaaagtaaaaa

SEQ ID NO: 1827299 - DNA, 15 bp, Homo sapiens
actaaaagtaaaaaa

SEQ ID NO: 1827300 - DNA, 15 bp, Homo sapiens
ctaaaagtaaaaaaa

SEQ ID NO: 1827301 - DNA, 15 bp, Homo sapiens
taaaagtaaaaaaag

SEQ ID NO: 1827302 - DNA, 15 bp, Homo sapiens
aaaagtaaaaaaagc

SEQ ID NO: 1827303 - DNA, 15 bp, Homo sapiens
aaagtaaaaaaagcg

SEQ ID NO: 1827304 - DNA, 15 bp, Homo sapiens
aagtaaaaaaagcgg

SEQ ID NO: 1827305 - DNA, 15 bp, Homo sapiens
agtaaaaaaagcggg

SEQ ID NO: 1827306 - DNA, 15 bp, Homo sapiens
gtaaaaaaagcggga

SEQ ID NO: 1827307 - DNA, 15 bp, Homo sapiens
taaaaaaagcgggac

SEQ ID NO: 1827308 - DNA, 15 bp, Homo sapiens
aaaaaaagcgggacg

SEQ ID NO: 1827309 - DNA, 15 bp, Homo sapiens
aaaaaagcgggacgt

SEQ ID NO: 1827310 - DNA, 15 bp, Homo sapiens
aaaaagcgggacgtg

SEQ ID NO: 1827311 - DNA, 15 bp, Homo sapiens
aaaagcgggacgtgg

SEQ ID NO: 1827312 - DNA, 15 bp, Homo sapiens
aaagcgggacgtggt

SEQ ID NO: 1827313 - DNA, 15 bp, Homo sapiens
aagcgggacgtggtg

SEQ ID NO: 1827314 - DNA, 15 bp, Homo sapiens
agcgggacgtggtgt

SEQ ID NO: 1827315 - DNA, 15 bp, Homo sapiens
gcgggacgtggtgtc

SEQ ID NO: 1827316 - DNA, 15 bp, Homo sapiens
cgggacgtggtgtcg

SEQ ID NO: 1827317 - DNA, 15 bp, Homo sapiens
gggacgtggtgtcgc

SEQ ID NO: 1827318 - DNA, 15 bp, Homo sapiens
ggacgtggtgtcgca

SEQ ID NO: 1827319 - DNA, 15 bp, Homo sapiens
gacgtggtgtcgcac

SEQ ID NO: 1827320 - DNA, 15 bp, Homo sapiens
acgtggtgtcgcaca

SEQ ID NO: 1827321 - DNA, 15 bp, Homo sapiens
cgtggtgtcgcacac

SEQ ID NO: 1827322 - DNA, 15 bp, Homo sapiens
gtggtgtcgcacacc

SEQ ID NO: 1827323 - DNA, 15 bp, Homo sapiens
tggtgtcgcacacct

SEQ ID NO: 1827324 - DNA, 15 bp, Homo sapiens
ggtgtcgcacacctt

SEQ ID NO: 1827325 - DNA, 15 bp, Homo sapiens
gtgtcgcacaccttt

SEQ ID NO: 1827326 - DNA, 15 bp, Homo sapiens
tgtcgcacaccttta

SEQ ID NO: 1827327 - DNA, 15 bp, Homo sapiens
gtcgcacacctttag

SEQ ID NO: 1827328 - DNA, 15 bp, Homo sapiens
tcgcacacctttagt

SEQ ID NO: 1827329 - DNA, 15 bp, Homo sapiens
cgcacacctttagtc

SEQ ID NO: 1827330 - DNA, 15 bp, Homo sapiens
gcacacctttagtcc

SEQ ID NO: 1827331 - DNA, 15 bp, Homo sapiens
cacacctttagtccc

SEQ ID NO: 1827332 - DNA, 15 bp, Homo sapiens
acacctttagtccca

SEQ ID NO: 1827333 - DNA, 15 bp, Homo sapiens
cacctttagtcccag

SEQ ID NO: 1827334 - DNA, 15 bp, Homo sapiens
acctttagtcccagg

SEQ ID NO: 1827335 - DNA, 15 bp, Homo sapiens
cctttagtcccaggt

SEQ ID NO: 1827336 - DNA, 15 bp, Homo sapiens
ctttagtcccaggta

SEQ ID NO: 1827337 - DNA, 15 bp, Homo sapiens
tttagtcccaggtac

SEQ ID NO: 1827338 - DNA, 15 bp, Homo sapiens
ttagtcccaggtact

SEQ ID NO: 1827339 - DNA, 15 bp, Homo sapiens
tagtcccaggtacta

SEQ ID NO: 1827340 - DNA, 15 bp, Homo sapiens
agtcccaggtactag

SEQ ID NO: 1827341 - DNA, 15 bp, Homo sapiens
gtcccaggtactaga

SEQ ID NO: 1827342 - DNA, 15 bp, Homo sapiens
tcccaggtactagag

SEQ ID NO: 1827343 - DNA, 15 bp, Homo sapiens
cccaggtactagagt

SEQ ID NO: 1827344 - DNA, 15 bp, Homo sapiens
ccaggtactagagtt

SEQ ID NO: 1827345 - DNA, 15 bp, Homo sapiens
caggtactagagttc

SEQ ID NO: 1827346 - DNA, 15 bp, Homo sapiens
aggtactagagttcg

SEQ ID NO: 1827347 - DNA, 15 bp, Homo sapiens
ggtactagagttcga

SEQ ID NO: 1827348 - DNA, 15 bp, Homo sapiens
gtactagagttcgag

SEQ ID NO: 1827349 - DNA, 15 bp, Homo sapiens
tactagagttcgagg

SEQ ID NO: 1827350 - DNA, 15 bp, Homo sapiens
actagagttcgaggt

SEQ ID NO: 1827351 - DNA, 15 bp, Homo sapiens
ctagagttcgaggtt

SEQ ID NO: 1827352 - DNA, 15 bp, Homo sapiens
tagagttcgaggttg

SEQ ID NO: 1827353 - DNA, 15 bp, Homo sapiens
agagttcgaggttgc

SEQ ID NO: 1827354 - DNA, 15 bp, Homo sapiens
gagttcgaggttgca

SEQ ID NO: 1827355 - DNA, 15 bp, Homo sapiens
agttcgaggttgcag

SEQ ID NO: 1827356 - DNA, 15 bp, Homo sapiens
gttcgaggttgcagt

SEQ ID NO: 1827357 - DNA, 15 bp, Homo sapiens
ttcgaggttgcagtg

SEQ ID NO: 1827358 - DNA, 15 bp, Homo sapiens
cgaggttgcagtgag

SEQ ID NO: 1827359 - DNA, 15 bp, Homo sapiens
gttgcagtgagctgt

SEQ ID NO: 1827360 - DNA, 15 bp, Homo sapiens
ttgcagtgagctgtg

SEQ ID NO: 1827361 - DNA, 15 bp, Homo sapiens
agtgagctgtgatcc

SEQ ID NO: 1827362 - DNA, 15 bp, Homo sapiens
gtgagctgtgatcct

SEQ ID NO: 1827363 - DNA, 15 bp, Homo sapiens
tgagctgtgatcctg

SEQ ID NO: 1827364 - DNA, 15 bp, Homo sapiens
gagctgtgatcctgc

SEQ ID NO: 1827365 - DNA, 15 bp, Homo sapiens
agctgtgatcctgcc

SEQ ID NO: 1827366 - DNA, 15 bp, Homo sapiens
gctgtgatcctgcca

SEQ ID NO: 1827367 - DNA, 15 bp, Homo sapiens
ctgtgatcctgccac

SEQ ID NO: 1827368 - DNA, 15 bp, Homo sapiens
tgtgatcctgccact

SEQ ID NO: 1827369 - DNA, 15 bp, Homo sapiens
gtgatcctgccactg

SEQ ID NO: 1827370 - DNA, 15 bp, Homo sapiens
tgatcctgccactgc

SEQ ID NO: 1827371 - DNA, 15 bp, Homo sapiens
cactgcactccaggg

SEQ ID NO: 1827372 - DNA, 15 bp, Homo sapiens
actgcactccagggt

SEQ ID NO: 1827373 - DNA, 15 bp, Homo sapiens
ctgcactccagggtg

SEQ ID NO: 1827374 - DNA, 15 bp, Homo sapiens
tgcactccagggtgg

SEQ ID NO: 1827375 - DNA, 15 bp, Homo sapiens
gcactccagggtggg

SEQ ID NO: 1827376 - DNA, 15 bp, Homo sapiens
cactccagggtgggc

SEQ ID NO: 1827377 - DNA, 15 bp, Homo sapiens
actccagggtgggca

SEQ ID NO: 1827378 - DNA, 15 bp, Homo sapiens
ctccagggtgggcaa

SEQ ID NO: 1827379 - DNA, 15 bp, Homo sapiens
tccagggtgggcaac

SEQ ID NO: 1827380 - DNA, 15 bp, Homo sapiens
ccagggtgggcaaca

SEQ ID NO: 1827381 - DNA, 15 bp, Homo sapiens
cagggtgggcaacag

SEQ ID NO: 1827382 - DNA, 15 bp, Homo sapiens
agggtgggcaacaga

SEQ ID NO: 1827383 - DNA, 15 bp, Homo sapiens
gggtgggcaacagag

SEQ ID NO: 1827384 - DNA, 15 bp, Homo sapiens
ggtgggcaacagagt

SEQ ID NO: 1827385 - DNA, 15 bp, Homo sapiens
gtgggcaacagagtg

SEQ ID NO: 1827386 - DNA, 15 bp, Homo sapiens
cagagtgagaccccg

SEQ ID NO: 1827387 - DNA, 15 bp, Homo sapiens
agagtgagaccccgt

SEQ ID NO: 1827388 - DNA, 15 bp, Homo sapiens
gagtgagaccccgtc

SEQ ID NO: 1827389 - DNA, 15 bp, Homo sapiens
agtgagaccccgtct

SEQ ID NO: 1827390 - DNA, 15 bp, Homo sapiens
gtgagaccccgtctc

SEQ ID NO: 1827391 - DNA, 15 bp, Homo sapiens
tgagaccccgtctca

SEQ ID NO: 1827392 - DNA, 15 bp, Homo sapiens
caagctggagtgcaa

SEQ ID NO: 1827393 - DNA, 15 bp, Homo sapiens
aagctggagtgcaat

SEQ ID NO: 1827394 - DNA, 15 bp, Homo sapiens
agctggagtgcaatg

SEQ ID NO: 1827395 - DNA, 15 bp, Homo sapiens
accgcaacctccgct

SEQ ID NO: 1827396 - DNA, 15 bp, Homo sapiens
ccgcaacctccgctt

SEQ ID NO: 1827397 - DNA, 15 bp, Homo sapiens
cgcaacctccgcttc

SEQ ID NO: 1827398 - DNA, 15 bp, Homo sapiens
ttcccgggttcaagc

SEQ ID NO: 1827399 - DNA, 15 bp, Homo sapiens
gttcaagccattctc

SEQ ID NO: 1827400 - DNA, 15 bp, Homo sapiens
ttcaagccattctcg

SEQ ID NO: 1827401 - DNA, 15 bp, Homo sapiens
tcaagccattctcgt

SEQ ID NO: 1827402 - DNA, 15 bp, Homo sapiens
caagccattctcgtg

SEQ ID NO: 1827403 - DNA, 15 bp, Homo sapiens
aagccattctcgtgc

SEQ ID NO: 1827404 - DNA, 15 bp, Homo sapiens
agccattctcgtgcc

SEQ ID NO: 1827405 - DNA, 15 bp, Homo sapiens
gccattctcgtgcct

SEQ ID NO: 1827406 - DNA, 15 bp, Homo sapiens
ccattctcgtgcctc

SEQ ID NO: 1827407 - DNA, 15 bp, Homo sapiens
cattctcgtgcctca

SEQ ID NO: 1827408 - DNA, 15 bp, Homo sapiens
agcctcctgagtagt

SEQ ID NO: 1827409 - DNA, 15 bp, Homo sapiens
gcctcctgagtagtt

SEQ ID NO: 1827410 - DNA, 15 bp, Homo sapiens
cctcctgagtagttg

SEQ ID NO: 1827411 - DNA, 15 bp, Homo sapiens
ctcctgagtagttgg

SEQ ID NO: 1827412 - DNA, 15 bp, Homo sapiens
tcctgagtagttggg

SEQ ID NO: 1827413 - DNA, 15 bp, Homo sapiens
cctgagtagttggga

SEQ ID NO: 1827414 - DNA, 15 bp, Homo sapiens
ctgagtagttgggat

SEQ ID NO: 1827415 - DNA, 15 bp, Homo sapiens
tgagtagttgggatt

SEQ ID NO: 1827416 - DNA, 15 bp, Homo sapiens
gagtagttgggatta

SEQ ID NO: 1827417 - DNA, 15 bp, Homo sapiens
tttttgtattattag

SEQ ID NO: 1827418 - DNA, 15 bp, Homo sapiens
ttttgtattattagt

SEQ ID NO: 1827419 - DNA, 15 bp, Homo sapiens
tttgtattattagta

SEQ ID NO: 1827420 - DNA, 15 bp, Homo sapiens
ttgtattattagtag

SEQ ID NO: 1827421 - DNA, 15 bp, Homo sapiens
tgtattattagtaga

SEQ ID NO: 1827422 - DNA, 15 bp, Homo sapiens
gtattattagtagag

SEQ ID NO: 1827423 - DNA, 15 bp, Homo sapiens
tattattagtagaga

SEQ ID NO: 1827424 - DNA, 15 bp, Homo sapiens
attattagtagagac

SEQ ID NO: 1827425 - DNA, 15 bp, Homo sapiens
ttattagtagagacg

SEQ ID NO: 1827426 - DNA, 15 bp, Homo sapiens
tattagtagagacga

SEQ ID NO: 1827427 - DNA, 15 bp, Homo sapiens
attagtagagacgag

SEQ ID NO: 1827428 - DNA, 15 bp, Homo sapiens
ttagtagagacgaga

SEQ ID NO: 1827429 - DNA, 15 bp, Homo sapiens
tagtagagacgagat

SEQ ID NO: 1827430 - DNA, 15 bp, Homo sapiens
agtagagacgagatt

SEQ ID NO: 1827431 - DNA, 15 bp, Homo sapiens
gtagagacgagattt

SEQ ID NO: 1827432 - DNA, 15 bp, Homo sapiens
tagagacgagatttc

SEQ ID NO: 1827433 - DNA, 15 bp, Homo sapiens
agagacgagatttct

SEQ ID NO: 1827434 - DNA, 15 bp, Homo sapiens
gagacgagatttctc

SEQ ID NO: 1827435 - DNA, 15 bp, Homo sapiens
agacgagatttctcc

SEQ ID NO: 1827436 - DNA, 15 bp, Homo sapiens
gacgagatttctcca

SEQ ID NO: 1827437 - DNA, 15 bp, Homo sapiens
acgagatttctccat

SEQ ID NO: 1827438 - DNA, 15 bp, Homo sapiens
cgagatttctccatg

SEQ ID NO: 1827439 - DNA, 15 bp, Homo sapiens
gagatttctccatgt

SEQ ID NO: 1827440 - DNA, 15 bp, Homo sapiens
agatttctccatgtt

SEQ ID NO: 1827441 - DNA, 15 bp, Homo sapiens
gatttctccatgttg

SEQ ID NO: 1827442 - DNA, 15 bp, Homo sapiens
atttctccatgttgg

SEQ ID NO: 1827443 - DNA, 15 bp, Homo sapiens
ctggtctcgaattct

SEQ ID NO: 1827444 - DNA, 15 bp, Homo sapiens
tggtctcgaattctc

SEQ ID NO: 1827445 - DNA, 15 bp, Homo sapiens
ggtctcgaattctca

SEQ ID NO: 1827446 - DNA, 15 bp, Homo sapiens
gtctcgaattctcaa

SEQ ID NO: 1827447 - DNA, 15 bp, Homo sapiens
tctcgaattctcaac

SEQ ID NO: 1827448 - DNA, 15 bp, Homo sapiens
ctcgaattctcaacc

SEQ ID NO: 1827449 - DNA, 15 bp, Homo sapiens
tcgaattctcaacct

SEQ ID NO: 1827450 - DNA, 15 bp, Homo sapiens
cgaattctcaacctc

SEQ ID NO: 1827451 - DNA, 15 bp, Homo sapiens
gaattctcaacctca

SEQ ID NO: 1827452 - DNA, 15 bp, Homo sapiens
aattctcaacctcag

SEQ ID NO: 1827453 - DNA, 15 bp, Homo sapiens
attctcaacctcagg

SEQ ID NO: 1827454 - DNA, 15 bp, Homo sapiens
ttctcaacctcaggt

SEQ ID NO: 1827455 - DNA, 15 bp, Homo sapiens
tctcaacctcaggtg

SEQ ID NO: 1827456 - DNA, 15 bp, Homo sapiens
ctcaacctcaggtga

SEQ ID NO: 1827457 - DNA, 15 bp, Homo sapiens
tcaacctcaggtgat

SEQ ID NO: 1827458 - DNA, 15 bp, Homo sapiens
caacctcaggtgatc

SEQ ID NO: 1827459 - DNA, 15 bp, Homo sapiens
aacctcaggtgatcc

SEQ ID NO: 1827460 - DNA, 15 bp, Homo sapiens
tcggcctcccaaagc

SEQ ID NO: 1827461 - DNA, 15 bp, Homo sapiens
cggcctcccaaagct

SEQ ID NO: 1827462 - DNA, 15 bp, Homo sapiens
ggcctcccaaagctc

SEQ ID NO: 1827463 - DNA, 15 bp, Homo sapiens
gcctcccaaagctct

SEQ ID NO: 1827464 - DNA, 15 bp, Homo sapiens
cctcccaaagctctg

SEQ ID NO: 1827465 - DNA, 15 bp, Homo sapiens
ctcccaaagctctgg

SEQ ID NO: 1827466 - DNA, 15 bp, Homo sapiens
tcccaaagctctgga

SEQ ID NO: 1827467 - DNA, 15 bp, Homo sapiens
cccaaagctctggaa

SEQ ID NO: 1827468 - DNA, 15 bp, Homo sapiens
ccaaagctctggaat

SEQ ID NO: 1827469 - DNA, 15 bp, Homo sapiens
caaagctctggaatt

SEQ ID NO: 1827470 - DNA, 15 bp, Homo sapiens
aaagctctggaatta

SEQ ID NO: 1827471 - DNA, 15 bp, Homo sapiens
aagctctggaattag

SEQ ID NO: 1827472 - DNA, 15 bp, Homo sapiens
agctctggaattaga

SEQ ID NO: 1827473 - DNA, 15 bp, Homo sapiens
gctctggaattagag

SEQ ID NO: 1827474 - DNA, 15 bp, Homo sapiens
ctctggaattagagg

SEQ ID NO: 1827475 - DNA, 15 bp, Homo sapiens
tctggaattagaggc

SEQ ID NO: 1827476 - DNA, 15 bp, Homo sapiens
ctggaattagaggcg

SEQ ID NO: 1827477 - DNA, 15 bp, Homo sapiens
tggaattagaggcgt

SEQ ID NO: 1827478 - DNA, 15 bp, Homo sapiens
ggaattagaggcgtg

SEQ ID NO: 1827479 - DNA, 15 bp, Homo sapiens
gaattagaggcgtga

SEQ ID NO: 1827480 - DNA, 15 bp, Homo sapiens
aattagaggcgtgag

SEQ ID NO: 1827481 - DNA, 15 bp, Homo sapiens
attagaggcgtgagc

SEQ ID NO: 1827482 - DNA, 15 bp, Homo sapiens
ttagaggcgtgagcc

SEQ ID NO: 1827483 - DNA, 15 bp, Homo sapiens
tagaggcgtgagcca

SEQ ID NO: 1827484 - DNA, 15 bp, Homo sapiens
agaggcgtgagccac

SEQ ID NO: 1827485 - DNA, 15 bp, Homo sapiens
gaggcgtgagccacc

SEQ ID NO: 1827486 - DNA, 15 bp, Homo sapiens
gcgtgagccaccgct

SEQ ID NO: 1827487 - DNA, 15 bp, Homo sapiens
cgtgagccaccgctc

SEQ ID NO: 1827488 - DNA, 15 bp, Homo sapiens
gtgagccaccgctcc

SEQ ID NO: 1827489 - DNA, 15 bp, Homo sapiens
tgagccaccgctccc

SEQ ID NO: 1827490 - DNA, 15 bp, Homo sapiens
gagccaccgctcccg

SEQ ID NO: 1827491 - DNA, 15 bp, Homo sapiens
agccaccgctcccgg

SEQ ID NO: 1827492 - DNA, 15 bp, Homo sapiens
gccaccgctcccggc

SEQ ID NO: 1827493 - DNA, 15 bp, Homo sapiens
ccaccgctcccggct

SEQ ID NO: 1827494 - DNA, 15 bp, Homo sapiens
caccgctcccggcta

SEQ ID NO: 1827495 - DNA, 15 bp, Homo sapiens
accgctcccggctat

SEQ ID NO: 1827496 - DNA, 15 bp, Homo sapiens
ccgctcccggctatc

SEQ ID NO: 1827497 - DNA, 15 bp, Homo sapiens
cgctcccggctatct

SEQ ID NO: 1827498 - DNA, 15 bp, Homo sapiens
gctcccggctatctt

SEQ ID NO: 1827499 - DNA, 15 bp, Homo sapiens
ctcccggctatcttt

SEQ ID NO: 1827500 - DNA, 15 bp, Homo sapiens
tcccggctatctttt

SEQ ID NO: 1827501 - DNA, 15 bp, Homo sapiens
cccggctatcttttc

SEQ ID NO: 1827502 - DNA, 15 bp, Homo sapiens
ccggctatcttttct

SEQ ID NO: 1827503 - DNA, 15 bp, Homo sapiens
caatacctccacctg

SEQ ID NO: 1827504 - DNA, 15 bp, Homo sapiens
aatacctccacctga

SEQ ID NO: 1827505 - DNA, 15 bp, Homo sapiens
atacctccacctgag

SEQ ID NO: 1827506 - DNA, 15 bp, Homo sapiens
tacctccacctgagt

SEQ ID NO: 1827507 - DNA, 15 bp, Homo sapiens
acctccacctgagtt

SEQ ID NO: 1827508 - DNA, 15 bp, Homo sapiens
cctccacctgagttg

SEQ ID NO: 1827509 - DNA, 15 bp, Homo sapiens
ctccacctgagttgg

SEQ ID NO: 1827510 - DNA, 15 bp, Homo sapiens
tccacctgagttgga

SEQ ID NO: 1827511 - DNA, 15 bp, Homo sapiens
ccacctgagttggat

SEQ ID NO: 1827512 - DNA, 15 bp, Homo sapiens
cacctgagttggatg

SEQ ID NO: 1827513 - DNA, 15 bp, Homo sapiens
acctgagttggatga

SEQ ID NO: 1827514 - DNA, 15 bp, Homo sapiens
cctgagttggatgat

SEQ ID NO: 1827515 - DNA, 15 bp, Homo sapiens
ctgagttggatgata

SEQ ID NO: 1827516 - DNA, 15 bp, Homo sapiens
tgagttggatgatat

SEQ ID NO: 1827517 - DNA, 15 bp, Homo sapiens
gagttggatgatatg

SEQ ID NO: 1827518 - DNA, 15 bp, Homo sapiens
agttggatgatatga

SEQ ID NO: 1827519 - DNA, 15 bp, Homo sapiens
gttggatgatatgac

SEQ ID NO: 1827520 - DNA, 15 bp, Homo sapiens
ttggatgatatgaca

SEQ ID NO: 1827521 - DNA, 15 bp, Homo sapiens
tggatgatatgacac

SEQ ID NO: 1827522 - DNA, 15 bp, Homo sapiens
ggatgatatgacact

SEQ ID NO: 1827523 - DNA, 15 bp, Homo sapiens
gatgatatgacactg

SEQ ID NO: 1827524 - DNA, 15 bp, Homo sapiens
atgatatgacactgt

SEQ ID NO: 1827525 - DNA, 15 bp, Homo sapiens
tgatatgacactgtg

SEQ ID NO: 1827526 - DNA, 15 bp, Homo sapiens
gatatgacactgtgg

SEQ ID NO: 1827527 - DNA, 15 bp, Homo sapiens
atatgacactgtggc

SEQ ID NO: 1827528 - DNA, 15 bp, Homo sapiens
tatgacactgtggca

SEQ ID NO: 1827529 - DNA, 15 bp, Homo sapiens
atgacactgtggcag

SEQ ID NO: 1827530 - DNA, 15 bp, Homo sapiens
tgacactgtggcaga

SEQ ID NO: 1827531 - DNA, 15 bp, Homo sapiens
gacactgtggcagat

SEQ ID NO: 1827532 - DNA, 15 bp, Homo sapiens
acactgtggcagatt

SEQ ID NO: 1827533 - DNA, 15 bp, Homo sapiens
cactgtggcagattg

SEQ ID NO: 1827534 - DNA, 15 bp, Homo sapiens
actgtggcagattgt

SEQ ID NO: 1827535 - DNA, 15 bp, Homo sapiens
ctgtggcagattgtt

SEQ ID NO: 1827536 - DNA, 15 bp, Homo sapiens
tgtggcagattgtta

SEQ ID NO: 1827537 - DNA, 15 bp, Homo sapiens
gtggcagattgttat

SEQ ID NO: 1827538 - DNA, 15 bp, Homo sapiens
tggcagattgttatt

SEQ ID NO: 1827539 - DNA, 15 bp, Homo sapiens
ggcagattgttatta

SEQ ID NO: 1827540 - DNA, 15 bp, Homo sapiens
gcagattgttattaa

SEQ ID NO: 1827541 - DNA, 15 bp, Homo sapiens
cagattgttattaat

SEQ ID NO: 1827542 - DNA, 15 bp, Homo sapiens
agattgttattaata

SEQ ID NO: 1827543 - DNA, 15 bp, Homo sapiens
gattgttattaatat

SEQ ID NO: 1827544 - DNA, 15 bp, Homo sapiens
attgttattaatatc

SEQ ID NO: 1827545 - DNA, 15 bp, Homo sapiens
ttgttattaatatcc

SEQ ID NO: 1827546 - DNA, 15 bp, Homo sapiens
tgttattaatatcct

SEQ ID NO: 1827547 - DNA, 15 bp, Homo sapiens
gttattaatatcctt

SEQ ID NO: 1827548 - DNA, 15 bp, Homo sapiens
ttattaatatccttt

SEQ ID NO: 1827549 - DNA, 15 bp, Homo sapiens
tattaatatcctttc

SEQ ID NO: 1827550 - DNA, 15 bp, Homo sapiens
attaatatcctttca

SEQ ID NO: 1827551 - DNA, 15 bp, Homo sapiens
ttaatatcctttcag

SEQ ID NO: 1827552 - DNA, 15 bp, Homo sapiens
taatatcctttcaga

SEQ ID NO: 1827553 - DNA, 15 bp, Homo sapiens
aatatcctttcagaa

SEQ ID NO: 1827554 - DNA, 15 bp, Homo sapiens
atatcctttcagaac

SEQ ID NO: 1827555 - DNA, 15 bp, Homo sapiens
tatcctttcagaacc

SEQ ID NO: 1827556 - DNA, 15 bp, Homo sapiens
atcctttcagaacca

SEQ ID NO: 1827557 - DNA, 15 bp, Homo sapiens
tcctttcagaaccac

SEQ ID NO: 1827558 - DNA, 15 bp, Homo sapiens
cctttcagaaccacc

SEQ ID NO: 1827559 - DNA, 15 bp, Homo sapiens
ctttcagaaccacca

SEQ ID NO: 1827560 - DNA, 15 bp, Homo sapiens
tttcagaaccaccaa

SEQ ID NO: 1827561 - DNA, 15 bp, Homo sapiens
ttcagaaccaccaaa

SEQ ID NO: 1827562 - DNA, 15 bp, Homo sapiens
tcagaaccaccaaaa

SEQ ID NO: 1827563 - DNA, 15 bp, Homo sapiens
cagaaccaccaaaaa

SEQ ID NO: 1827564 - DNA, 15 bp, Homo sapiens
agaaccaccaaaaag

SEQ ID NO: 1827565 - DNA, 15 bp, Homo sapiens
gaaccaccaaaaagg

SEQ ID NO: 1827566 - DNA, 15 bp, Homo sapiens
aaccaccaaaaagga

SEQ ID NO: 1827567 - DNA, 15 bp, Homo sapiens
accaccaaaaaggaa

SEQ ID NO: 1827568 - DNA, 15 bp, Homo sapiens
ccaccaaaaaggaaa

SEQ ID NO: 1827569 - DNA, 15 bp, Homo sapiens
caccaaaaaggaaaa

SEQ ID NO: 1827570 - DNA, 15 bp, Homo sapiens
accaaaaaggaaaaa

SEQ ID NO: 1827571 - DNA, 15 bp, Homo sapiens
ccaaaaaggaaaaaa

SEQ ID NO: 1827572 - DNA, 15 bp, Homo sapiens
caaaaaggaaaaaaa

SEQ ID NO: 1827573 - DNA, 15 bp, Homo sapiens
aaaaggaaaaaaaga

SEQ ID NO: 1827574 - DNA, 15 bp, Homo sapiens
aaaggaaaaaaagaa

SEQ ID NO: 1827575 - DNA, 15 bp, Homo sapiens
aaggaaaaaaagaaa

SEQ ID NO: 1827576 - DNA, 15 bp, Homo sapiens
aggaaaaaaagaaaa

SEQ ID NO: 1827577 - DNA, 15 bp, Homo sapiens
ggaaaaaaagaaaag

SEQ ID NO: 1827578 - DNA, 15 bp, Homo sapiens
gaaaaaaagaaaaga

SEQ ID NO: 1827579 - DNA, 15 bp, Homo sapiens
aaaaagaaaagatat

SEQ ID NO: 1827580 - DNA, 15 bp, Homo sapiens
aaaagaaaagatatt

SEQ ID NO: 1827581 - DNA, 15 bp, Homo sapiens
aaagaaaagatatta

SEQ ID NO: 1827582 - DNA, 15 bp, Homo sapiens
aagaaaagatattaa

SEQ ID NO: 1827583 - DNA, 15 bp, Homo sapiens
agaaaagatattaat

SEQ ID NO: 1827584 - DNA, 15 bp, Homo sapiens
gaaaagatattaata

SEQ ID NO: 1827585 - DNA, 15 bp, Homo sapiens
aaaagatattaatac

SEQ ID NO: 1827586 - DNA, 15 bp, Homo sapiens
aaagatattaataca

SEQ ID NO: 1827587 - DNA, 15 bp, Homo sapiens
aagatattaatacaa

SEQ ID NO: 1827588 - DNA, 15 bp, Homo sapiens
agatattaatacaat

SEQ ID NO: 1827589 - DNA, 15 bp, Homo sapiens
gatattaatacaatt

SEQ ID NO: 1827590 - DNA, 15 bp, Homo sapiens
atattaatacaattg

SEQ ID NO: 1827591 - DNA, 15 bp, Homo sapiens
tattaatacaattga

SEQ ID NO: 1827592 - DNA, 15 bp, Homo sapiens
attaatacaattgaa

SEQ ID NO: 1827593 - DNA, 15 bp, Homo sapiens
ttaatacaattgaag

SEQ ID NO: 1827594 - DNA, 15 bp, Homo sapiens
taatacaattgaaga

SEQ ID NO: 1827595 - DNA, 15 bp, Homo sapiens
aatacaattgaagat

SEQ ID NO: 1827596 - DNA, 15 bp, Homo sapiens
atacaattgaagatg

SEQ ID NO: 1827597 - DNA, 15 bp, Homo sapiens
tacaattgaagatgc

SEQ ID NO: 1827598 - DNA, 15 bp, Homo sapiens
acaattgaagatgct

SEQ ID NO: 1827599 - DNA, 15 bp, Homo sapiens
caattgaagatgctg

SEQ ID NO: 1827600 - DNA, 15 bp, Homo sapiens
aattgaagatgctgt

SEQ ID NO: 1827601 - DNA, 15 bp, Homo sapiens
attgaagatgctgtg

SEQ ID NO: 1827602 - DNA, 15 bp, Homo sapiens
ttgaagatgctgtga

SEQ ID NO: 1827603 - DNA, 15 bp, Homo sapiens
tgaagatgctgtgaa

SEQ ID NO: 1827604 - DNA, 15 bp, Homo sapiens
gaagatgctgtgaaa

SEQ ID NO: 1827605 - DNA, 15 bp, Homo sapiens
aagatgctgtgaaat

SEQ ID NO: 1827606 - DNA, 15 bp, Homo sapiens
agatgctgtgaaatt

SEQ ID NO: 1827607 - DNA, 15 bp, Homo sapiens
gatgctgtgaaatta

SEQ ID NO: 1827608 - DNA, 15 bp, Homo sapiens
atgctgtgaaattac

SEQ ID NO: 1827609 - DNA, 15 bp, Homo sapiens
tgctgtgaaattact

SEQ ID NO: 1827610 - DNA, 15 bp, Homo sapiens
gctgtgaaattactg

SEQ ID NO: 1827611 - DNA, 15 bp, Homo sapiens
ctgtgaaattactgc

SEQ ID NO: 1827612 - DNA, 15 bp, Homo sapiens
tgtgaaattactgca

SEQ ID NO: 1827613 - DNA, 15 bp, Homo sapiens
gtgaaattactgcaa

SEQ ID NO: 1827614 - DNA, 15 bp, Homo sapiens
tgaaattactgcaag

SEQ ID NO: 1827615 - DNA, 15 bp, Homo sapiens
gaaattactgcaaga

SEQ ID NO: 1827616 - DNA, 15 bp, Homo sapiens
aaattactgcaagag

SEQ ID NO: 1827617 - DNA, 15 bp, Homo sapiens
aattactgcaagagt

SEQ ID NO: 1827618 - DNA, 15 bp, Homo sapiens
attactgcaagagtg

SEQ ID NO: 1827619 - DNA, 15 bp, Homo sapiens
ttactgcaagagtgc

SEQ ID NO: 1827620 - DNA, 15 bp, Homo sapiens
tactgcaagagtgca

SEQ ID NO: 1827621 - DNA, 15 bp, Homo sapiens
actgcaagagtgcaa

SEQ ID NO: 1827622 - DNA, 15 bp, Homo sapiens
ctgcaagagtgcaaa

SEQ ID NO: 1827623 - DNA, 15 bp, Homo sapiens
tgcaagagtgcaaaa

SEQ ID NO: 1827624 - DNA, 15 bp, Homo sapiens
gcaagagtgcaaaaa

SEQ ID NO: 1827625 - DNA, 15 bp, Homo sapiens
caagagtgcaaaaaa

SEQ ID NO: 1827626 - DNA, 15 bp, Homo sapiens
aagagtgcaaaaaaa

SEQ ID NO: 1827627 - DNA, 15 bp, Homo sapiens
agagtgcaaaaaaat

SEQ ID NO: 1827628 - DNA, 15 bp, Homo sapiens
gagtgcaaaaaaatt

SEQ ID NO: 1827629 - DNA, 15 bp, Homo sapiens
agtgcaaaaaaatta

SEQ ID NO: 1827630 - DNA, 15 bp, Homo sapiens
gtgcaaaaaaattat

SEQ ID NO: 1827631 - DNA, 15 bp, Homo sapiens
gcaaaaaaattatag

SEQ ID NO: 1827632 - DNA, 15 bp, Homo sapiens
caaaaaaattatagt

SEQ ID NO: 1827633 - DNA, 15 bp, Homo sapiens
aaaaaaattatagtt

SEQ ID NO: 1827634 - DNA, 15 bp, Homo sapiens
aaaaaattatagttc

SEQ ID NO: 1827635 - DNA, 15 bp, Homo sapiens
aaaaattatagttct

SEQ ID NO: 1827636 - DNA, 15 bp, Homo sapiens
aaaattatagttcta

SEQ ID NO: 1827637 - DNA, 15 bp, Homo sapiens
aaattatagttctaa

SEQ ID NO: 1827638 - DNA, 15 bp, Homo sapiens
aattatagttctaac

SEQ ID NO: 1827639 - DNA, 15 bp, Homo sapiens
attatagttctaact

SEQ ID NO: 1827640 - DNA, 15 bp, Homo sapiens
ttatagttctaactg

SEQ ID NO: 1827641 - DNA, 15 bp, Homo sapiens
tatagttctaactgg

SEQ ID NO: 1827642 - DNA, 15 bp, Homo sapiens
atagttctaactgga

SEQ ID NO: 1827643 - DNA, 15 bp, Homo sapiens
tagttctaactggag

SEQ ID NO: 1827644 - DNA, 15 bp, Homo sapiens
agttctaactggagc

SEQ ID NO: 1827645 - DNA, 15 bp, Homo sapiens
gttctaactggagct

SEQ ID NO: 1827646 - DNA, 15 bp, Homo sapiens
ttctaactggagctg

SEQ ID NO: 1827647 - DNA, 15 bp, Homo sapiens
tctaactggagctgg

SEQ ID NO: 1827648 - DNA, 15 bp, Homo sapiens
ctaactggagctggg

SEQ ID NO: 1827649 - DNA, 15 bp, Homo sapiens
taactggagctgggg

SEQ ID NO: 1827650 - DNA, 15 bp, Homo sapiens
aactggagctggggt

SEQ ID NO: 1827651 - DNA, 15 bp, Homo sapiens
actggagctggggta

SEQ ID NO: 1827652 - DNA, 15 bp, Homo sapiens
ctggagctggggtat

SEQ ID NO: 1827653 - DNA, 15 bp, Homo sapiens
tggagctggggtatg

SEQ ID NO: 1827654 - DNA, 15 bp, Homo sapiens
ggagctggggtatgt

SEQ ID NO: 1827655 - DNA, 15 bp, Homo sapiens
gagctggggtatgta

SEQ ID NO: 1827656 - DNA, 15 bp, Homo sapiens
agctggggtatgtaa

SEQ ID NO: 1827657 - DNA, 15 bp, Homo sapiens
gctggggtatgtaag

SEQ ID NO: 1827658 - DNA, 15 bp, Homo sapiens
ctggggtatgtaaga

SEQ ID NO: 1827659 - DNA, 15 bp, Homo sapiens
tggggtatgtaagac

SEQ ID NO: 1827660 - DNA, 15 bp, Homo sapiens
ggggtatgtaagact

SEQ ID NO: 1827661 - DNA, 15 bp, Homo sapiens
gggtatgtaagacta

SEQ ID NO: 1827662 - DNA, 15 bp, Homo sapiens
ggtatgtaagactag

SEQ ID NO: 1827663 - DNA, 15 bp, Homo sapiens
gtatgtaagactagt

SEQ ID NO: 1827664 - DNA, 15 bp, Homo sapiens
tatgtaagactagta

SEQ ID NO: 1827665 - DNA, 15 bp, Homo sapiens
atgtaagactagtac

SEQ ID NO: 1827666 - DNA, 15 bp, Homo sapiens
tgtaagactagtaca

SEQ ID NO: 1827667 - DNA, 15 bp, Homo sapiens
gtaagactagtacat

SEQ ID NO: 1827668 - DNA, 15 bp, Homo sapiens
taagactagtacatg

SEQ ID NO: 1827669 - DNA, 15 bp, Homo sapiens
aagactagtacatgg

SEQ ID NO: 1827670 - DNA, 15 bp, Homo sapiens
agactagtacatggg

SEQ ID NO: 1827671 - DNA, 15 bp, Homo sapiens
gactagtacatgggg

SEQ ID NO: 1827672 - DNA, 15 bp, Homo sapiens
actagtacatgggga

SEQ ID NO: 1827673 - DNA, 15 bp, Homo sapiens
ctagtacatggggag

SEQ ID NO: 1827674 - DNA, 15 bp, Homo sapiens
tagtacatggggagg

SEQ ID NO: 1827675 - DNA, 15 bp, Homo sapiens
agtacatggggaggt

SEQ ID NO: 1827676 - DNA, 15 bp, Homo sapiens
gtacatggggaggtc

SEQ ID NO: 1827677 - DNA, 15 bp, Homo sapiens
tacatggggaggtcg

SEQ ID NO: 1827678 - DNA, 15 bp, Homo sapiens
acatggggaggtcgt

SEQ ID NO: 1827679 - DNA, 15 bp, Homo sapiens
catggggaggtcgta

SEQ ID NO: 1827680 - DNA, 15 bp, Homo sapiens
atggggaggtcgtat

SEQ ID NO: 1827681 - DNA, 15 bp, Homo sapiens
tggggaggtcgtata

SEQ ID NO: 1827682 - DNA, 15 bp, Homo sapiens
ggggaggtcgtatat

SEQ ID NO: 1827683 - DNA, 15 bp, Homo sapiens
gggaggtcgtatatg

SEQ ID NO: 1827684 - DNA, 15 bp, Homo sapiens
ggaggtcgtatatgt

SEQ ID NO: 1827685 - DNA, 15 bp, Homo sapiens
gaggtcgtatatgta

SEQ ID NO: 1827686 - DNA, 15 bp, Homo sapiens
aggtcgtatatgtat

SEQ ID NO: 1827687 - DNA, 15 bp, Homo sapiens
ggtcgtatatgtatt

SEQ ID NO: 1827688 - DNA, 15 bp, Homo sapiens
gtcgtatatgtattt

SEQ ID NO: 1827689 - DNA, 15 bp, Homo sapiens
tcgtatatgtatttt

SEQ ID NO: 1827690 - DNA, 15 bp, Homo sapiens
cgtatatgtattttc

SEQ ID NO: 1827691 - DNA, 15 bp, Homo sapiens
gtatatgtattttct

SEQ ID NO: 1827692 - DNA, 15 bp, Homo sapiens
tatatgtattttctt

SEQ ID NO: 1827693 - DNA, 15 bp, Homo sapiens
atatgtattttctta

SEQ ID NO: 1827694 - DNA, 15 bp, Homo sapiens
tatgtattttcttat

SEQ ID NO: 1827695 - DNA, 15 bp, Homo sapiens
atgtattttcttatg

SEQ ID NO: 1827696 - DNA, 15 bp, Homo sapiens
tgtattttcttatgc

SEQ ID NO: 1827697 - DNA, 15 bp, Homo sapiens
gtattttcttatgcc

SEQ ID NO: 1827698 - DNA, 15 bp, Homo sapiens
tattttcttatgcct

SEQ ID NO: 1827699 - DNA, 15 bp, Homo sapiens
attttcttatgcctt

SEQ ID NO: 1827700 - DNA, 15 bp, Homo sapiens
ttttcttatgccttt

SEQ ID NO: 1827701 - DNA, 15 bp, Homo sapiens
tttcttatgcctttt

SEQ ID NO: 1827702 - DNA, 15 bp, Homo sapiens
ttcttatgccttttc

SEQ ID NO: 1827703 - DNA, 15 bp, Homo sapiens
tcttatgccttttcc

SEQ ID NO: 1827704 - DNA, 15 bp, Homo sapiens
cttatgccttttcca

SEQ ID NO: 1827705 - DNA, 15 bp, Homo sapiens
ttatgccttttccaa

SEQ ID NO: 1827706 - DNA, 15 bp, Homo sapiens
tatgccttttccaag

SEQ ID NO: 1827707 - DNA, 15 bp, Homo sapiens
atgccttttccaagt

SEQ ID NO: 1827708 - DNA, 15 bp, Homo sapiens
tgccttttccaagta

SEQ ID NO: 1827709 - DNA, 15 bp, Homo sapiens
gccttttccaagtag

SEQ ID NO: 1827710 - DNA, 15 bp, Homo sapiens
ccttttccaagtagg

SEQ ID NO: 1827711 - DNA, 15 bp, Homo sapiens
cttttccaagtagga

SEQ ID NO: 1827712 - DNA, 15 bp, Homo sapiens
ttttccaagtaggaa

SEQ ID NO: 1827713 - DNA, 15 bp, Homo sapiens
tttccaagtaggaaa

SEQ ID NO: 1827714 - DNA, 15 bp, Homo sapiens
ttccaagtaggaaac

SEQ ID NO: 1827715 - DNA, 15 bp, Homo sapiens
tccaagtaggaaaca

SEQ ID NO: 1827716 - DNA, 15 bp, Homo sapiens
ccaagtaggaaacat

SEQ ID NO: 1827717 - DNA, 15 bp, Homo sapiens
caagtaggaaacatt

SEQ ID NO: 1827718 - DNA, 15 bp, Homo sapiens
aagtaggaaacattt

SEQ ID NO: 1827719 - DNA, 15 bp, Homo sapiens
agtaggaaacatttt

SEQ ID NO: 1827720 - DNA, 15 bp, Homo sapiens
gtaggaaacattttt

SEQ ID NO: 1827721 - DNA, 15 bp, Homo sapiens
taggaaacatttttc

SEQ ID NO: 1827722 - DNA, 15 bp, Homo sapiens
aggaaacatttttct

SEQ ID NO: 1827723 - DNA, 15 bp, Homo sapiens
ggaaacatttttctg

SEQ ID NO: 1827724 - DNA, 15 bp, Homo sapiens
gaaacatttttctgg

SEQ ID NO: 1827725 - DNA, 15 bp, Homo sapiens
aaacatttttctggt

SEQ ID NO: 1827726 - DNA, 15 bp, Homo sapiens
acatttttctggttt

SEQ ID NO: 1827727 - DNA, 15 bp, Homo sapiens
catttttctggttta

SEQ ID NO: 1827728 - DNA, 15 bp, Homo sapiens
atttttctggtttag

SEQ ID NO: 1827729 - DNA, 15 bp, Homo sapiens
tttttctggtttaga

SEQ ID NO: 1827730 - DNA, 15 bp, Homo sapiens
ttttctggtttagaa

SEQ ID NO: 1827731 - DNA, 15 bp, Homo sapiens
tttctggtttagaag

SEQ ID NO: 1827732 - DNA, 15 bp, Homo sapiens
ttctggtttagaagg

SEQ ID NO: 1827733 - DNA, 15 bp, Homo sapiens
tctggtttagaagga

SEQ ID NO: 1827734 - DNA, 15 bp, Homo sapiens
ctggtttagaaggat

SEQ ID NO: 1827735 - DNA, 15 bp, Homo sapiens
tggtttagaaggatt

SEQ ID NO: 1827736 - DNA, 15 bp, Homo sapiens
ggtttagaaggattt

SEQ ID NO: 1827737 - DNA, 15 bp, Homo sapiens
gtttagaaggattta

SEQ ID NO: 1827738 - DNA, 15 bp, Homo sapiens
tttagaaggatttat

SEQ ID NO: 1827739 - DNA, 15 bp, Homo sapiens
ttagaaggatttatc

SEQ ID NO: 1827740 - DNA, 15 bp, Homo sapiens
tagaaggatttatcc

SEQ ID NO: 1827741 - DNA, 15 bp, Homo sapiens
agaaggatttatcct

SEQ ID NO: 1827742 - DNA, 15 bp, Homo sapiens
gaaggatttatcctt

SEQ ID NO: 1827743 - DNA, 15 bp, Homo sapiens
aaggatttatcctta

SEQ ID NO: 1827744 - DNA, 15 bp, Homo sapiens
aggatttatccttac

SEQ ID NO: 1827745 - DNA, 15 bp, Homo sapiens
ggatttatccttaca

SEQ ID NO: 1827746 - DNA, 15 bp, Homo sapiens
gatttatccttacat

SEQ ID NO: 1827747 - DNA, 15 bp, Homo sapiens
atttatccttacatg

SEQ ID NO: 1827748 - DNA, 15 bp, Homo sapiens
tttatccttacatga

SEQ ID NO: 1827749 - DNA, 15 bp, Homo sapiens
atccttacatgataa

SEQ ID NO: 1827750 - DNA, 15 bp, Homo sapiens
tccttacatgataat

SEQ ID NO: 1827751 - DNA, 15 bp, Homo sapiens
ccttacatgataatg

SEQ ID NO: 1827752 - DNA, 15 bp, Homo sapiens
cttacatgataatgg

SEQ ID NO: 1827753 - DNA, 15 bp, Homo sapiens
ttacatgataatgga

SEQ ID NO: 1827754 - DNA, 15 bp, Homo sapiens
tacatgataatggat

SEQ ID NO: 1827755 - DNA, 15 bp, Homo sapiens
acatgataatggatg

SEQ ID NO: 1827756 - DNA, 15 bp, Homo sapiens
catgataatggatgt

SEQ ID NO: 1827757 - DNA, 15 bp, Homo sapiens
atgataatggatgtt

SEQ ID NO: 1827758 - DNA, 15 bp, Homo sapiens
tgataatggatgttt

SEQ ID NO: 1827759 - DNA, 15 bp, Homo sapiens
gataatggatgtttg

SEQ ID NO: 1827760 - DNA, 15 bp, Homo sapiens
ataatggatgtttgg

SEQ ID NO: 1827761 - DNA, 15 bp, Homo sapiens
taatggatgtttggg

SEQ ID NO: 1827762 - DNA, 15 bp, Homo sapiens
aatggatgtttggga

SEQ ID NO: 1827763 - DNA, 15 bp, Homo sapiens
atggatgtttgggaa

SEQ ID NO: 1827764 - DNA, 15 bp, Homo sapiens
tggatgtttgggaac

SEQ ID NO: 1827765 - DNA, 15 bp, Homo sapiens
ggatgtttgggaact

SEQ ID NO: 1827766 - DNA, 15 bp, Homo sapiens
gatgtttgggaactg

SEQ ID NO: 1827767 - DNA, 15 bp, Homo sapiens
atgtttgggaactgc

SEQ ID NO: 1827768 - DNA, 15 bp, Homo sapiens
tgtttgggaactgcc

SEQ ID NO: 1827769 - DNA, 15 bp, Homo sapiens
gtttgggaactgcca

SEQ ID NO: 1827770 - DNA, 15 bp, Homo sapiens
tttgggaactgccaa

SEQ ID NO: 1827771 - DNA, 15 bp, Homo sapiens
ttgggaactgccaaa

SEQ ID NO: 1827772 - DNA, 15 bp, Homo sapiens
tgggaactgccaaaa

SEQ ID NO: 1827773 - DNA, 15 bp, Homo sapiens
gggaactgccaaaaa

SEQ ID NO: 1827774 - DNA, 15 bp, Homo sapiens
ggaactgccaaaaac

SEQ ID NO: 1827775 - DNA, 15 bp, Homo sapiens
gaactgccaaaaact

SEQ ID NO: 1827776 - DNA, 15 bp, Homo sapiens
aactgccaaaaactg

SEQ ID NO: 1827777 - DNA, 15 bp, Homo sapiens
actgccaaaaactga

SEQ ID NO: 1827778 - DNA, 15 bp, Homo sapiens
ctgccaaaaactgag

SEQ ID NO: 1827779 - DNA, 15 bp, Homo sapiens
tgccaaaaactgagt

SEQ ID NO: 1827780 - DNA, 15 bp, Homo sapiens
gccaaaaactgagtg

SEQ ID NO: 1827781 - DNA, 15 bp, Homo sapiens
ccaaaaactgagtgc

SEQ ID NO: 1827782 - DNA, 15 bp, Homo sapiens
caaaaactgagtgca

SEQ ID NO: 1827783 - DNA, 15 bp, Homo sapiens
aaaaactgagtgcag

SEQ ID NO: 1827784 - DNA, 15 bp, Homo sapiens
aaaactgagtgcagc

SEQ ID NO: 1827785 - DNA, 15 bp, Homo sapiens
aaactgagtgcagca

SEQ ID NO: 1827786 - DNA, 15 bp, Homo sapiens
aactgagtgcagcag

SEQ ID NO: 1827787 - DNA, 15 bp, Homo sapiens
actgagtgcagcagc

SEQ ID NO: 1827788 - DNA, 15 bp, Homo sapiens
ctgagtgcagcagca

SEQ ID NO: 1827789 - DNA, 15 bp, Homo sapiens
tgagtgcagcagcag

SEQ ID NO: 1827790 - DNA, 15 bp, Homo sapiens
gagtgcagcagcagt

SEQ ID NO: 1827791 - DNA, 15 bp, Homo sapiens
agtgcagcagcagtt

SEQ ID NO: 1827792 - DNA, 15 bp, Homo sapiens
gtgcagcagcagttg

SEQ ID NO: 1827793 - DNA, 15 bp, Homo sapiens
tgcagcagcagttgc

SEQ ID NO: 1827794 - DNA, 15 bp, Homo sapiens
gcagcagcagttgct

SEQ ID NO: 1827795 - DNA, 15 bp, Homo sapiens
cagcagcagttgcta

SEQ ID NO: 1827796 - DNA, 15 bp, Homo sapiens
agcagcagttgctaa

SEQ ID NO: 1827797 - DNA, 15 bp, Homo sapiens
gcagcagttgctaaa

SEQ ID NO: 1827798 - DNA, 15 bp, Homo sapiens
cagcagttgctaaat

SEQ ID NO: 1827799 - DNA, 15 bp, Homo sapiens
agcagttgctaaatt

SEQ ID NO: 1827800 - DNA, 15 bp, Homo sapiens
gcagttgctaaatta

SEQ ID NO: 1827801 - DNA, 15 bp, Homo sapiens
cagttgctaaattag

SEQ ID NO: 1827802 - DNA, 15 bp, Homo sapiens
agttgctaaattagt

SEQ ID NO: 1827803 - DNA, 15 bp, Homo sapiens
gttgctaaattagtt

SEQ ID NO: 1827804 - DNA, 15 bp, Homo sapiens
ttgctaaattagttc

SEQ ID NO: 1827805 - DNA, 15 bp, Homo sapiens
tgctaaattagttca

SEQ ID NO: 1827806 - DNA, 15 bp, Homo sapiens
gctaaattagttcag

SEQ ID NO: 1827807 - DNA, 15 bp, Homo sapiens
ctaaattagttcaga

SEQ ID NO: 1827808 - DNA, 15 bp, Homo sapiens
taaattagttcagat

SEQ ID NO: 1827809 - DNA, 15 bp, Homo sapiens
aaattagttcagatt

SEQ ID NO: 1827810 - DNA, 15 bp, Homo sapiens
aattagttcagattt

SEQ ID NO: 1827811 - DNA, 15 bp, Homo sapiens
attagttcagatttt

SEQ ID NO: 1827812 - DNA, 15 bp, Homo sapiens
ttagttcagattttt

SEQ ID NO: 1827813 - DNA, 15 bp, Homo sapiens
tagttcagattttta

SEQ ID NO: 1827814 - DNA, 15 bp, Homo sapiens
agttcagatttttaa

SEQ ID NO: 1827815 - DNA, 15 bp, Homo sapiens
gttcagatttttaaa

SEQ ID NO: 1827816 - DNA, 15 bp, Homo sapiens
ttcagatttttaaaa

SEQ ID NO: 1827817 - DNA, 15 bp, Homo sapiens
tcagatttttaaaac

SEQ ID NO: 1827818 - DNA, 15 bp, Homo sapiens
cagatttttaaaacc

SEQ ID NO: 1827819 - DNA, 15 bp, Homo sapiens
agatttttaaaacct

SEQ ID NO: 1827820 - DNA, 15 bp, Homo sapiens
gatttttaaaacctc

SEQ ID NO: 1827821 - DNA, 15 bp, Homo sapiens
atttttaaaacctct

SEQ ID NO: 1827822 - DNA, 15 bp, Homo sapiens
tttttaaaacctctc

SEQ ID NO: 1827823 - DNA, 15 bp, Homo sapiens
ttttaaaacctctcc

SEQ ID NO: 1827824 - DNA, 15 bp, Homo sapiens
tttaaaacctctcca

SEQ ID NO: 1827825 - DNA, 15 bp, Homo sapiens
ttaaaacctctccag

SEQ ID NO: 1827826 - DNA, 15 bp, Homo sapiens
taaaacctctccagc

SEQ ID NO: 1827827 - DNA, 15 bp, Homo sapiens
aaaacctctccagcc

SEQ ID NO: 1827828 - DNA, 15 bp, Homo sapiens
aaacctctccagcct

SEQ ID NO: 1827829 - DNA, 15 bp, Homo sapiens
aacctctccagcctt

SEQ ID NO: 1827830 - DNA, 15 bp, Homo sapiens
acctctccagcctta

SEQ ID NO: 1827831 - DNA, 15 bp, Homo sapiens
cctctccagccttaa

SEQ ID NO: 1827832 - DNA, 15 bp, Homo sapiens
ctctccagccttaaa

SEQ ID NO: 1827833 - DNA, 15 bp, Homo sapiens
tctccagccttaaaa

SEQ ID NO: 1827834 - DNA, 15 bp, Homo sapiens
ctccagccttaaaaa

SEQ ID NO: 1827835 - DNA, 15 bp, Homo sapiens
tccagccttaaaaaa

SEQ ID NO: 1827836 - DNA, 15 bp, Homo sapiens
ccagccttaaaaaaa

SEQ ID NO: 1827837 - DNA, 15 bp, Homo sapiens
cagccttaaaaaaat

SEQ ID NO: 1827838 - DNA, 15 bp, Homo sapiens
agccttaaaaaaata

SEQ ID NO: 1827839 - DNA, 15 bp, Homo sapiens
gccttaaaaaaatat

SEQ ID NO: 1827840 - DNA, 15 bp, Homo sapiens
ccttaaaaaaatatt

SEQ ID NO: 1827841 - DNA, 15 bp, Homo sapiens
cttaaaaaaatattt

SEQ ID NO: 1827842 - DNA, 15 bp, Homo sapiens
ttaaaaaaatatttg

SEQ ID NO: 1827843 - DNA, 15 bp, Homo sapiens
taaaaaaatatttgc

SEQ ID NO: 1827844 - DNA, 15 bp, Homo sapiens
aaaaaaatatttgct

SEQ ID NO: 1827845 - DNA, 15 bp, Homo sapiens
aaaaaatatttgctt

SEQ ID NO: 1827846 - DNA, 15 bp, Homo sapiens
aaaaatatttgcttc

SEQ ID NO: 1827847 - DNA, 15 bp, Homo sapiens
aaaatatttgcttct

SEQ ID NO: 1827848 - DNA, 15 bp, Homo sapiens
aaatatttgcttctg

SEQ ID NO: 1827849 - DNA, 15 bp, Homo sapiens
aatatttgcttctgc

SEQ ID NO: 1827850 - DNA, 15 bp, Homo sapiens
tatttgcttctgctt

SEQ ID NO: 1827851 - DNA, 15 bp, Homo sapiens
atttgcttctgctta

SEQ ID NO: 1827852 - DNA, 15 bp, Homo sapiens
tttgcttctgcttat

SEQ ID NO: 1827853 - DNA, 15 bp, Homo sapiens
ttgcttctgcttatt

SEQ ID NO: 1827854 - DNA, 15 bp, Homo sapiens
tgcttctgcttattt

SEQ ID NO: 1827855 - DNA, 15 bp, Homo sapiens
gcttctgcttattta

SEQ ID NO: 1827856 - DNA, 15 bp, Homo sapiens
cttctgcttatttat

SEQ ID NO: 1827857 - DNA, 15 bp, Homo sapiens
ttctgcttatttata

SEQ ID NO: 1827858 - DNA, 15 bp, Homo sapiens
tctgcttatttatag

SEQ ID NO: 1827859 - DNA, 15 bp, Homo sapiens
ctgcttatttatagc

SEQ ID NO: 1827860 - DNA, 15 bp, Homo sapiens
tgcttatttatagca

SEQ ID NO: 1827861 - DNA, 15 bp, Homo sapiens
gcttatttatagcac

SEQ ID NO: 1827862 - DNA, 15 bp, Homo sapiens
cttatttatagcaca

SEQ ID NO: 1827863 - DNA, 15 bp, Homo sapiens
ttatttatagcacag

SEQ ID NO: 1827864 - DNA, 15 bp, Homo sapiens
tatttatagcacagt

SEQ ID NO: 1827865 - DNA, 15 bp, Homo sapiens
atttatagcacagtg

SEQ ID NO: 1827866 - DNA, 15 bp, Homo sapiens
tttatagcacagtgg

SEQ ID NO: 1827867 - DNA, 15 bp, Homo sapiens
ttatagcacagtggg

SEQ ID NO: 1827868 - DNA, 15 bp, Homo sapiens
tatagcacagtgggt

SEQ ID NO: 1827869 - DNA, 15 bp, Homo sapiens
atagcacagtgggta

SEQ ID NO: 1827870 - DNA, 15 bp, Homo sapiens
tagcacagtgggtaa

SEQ ID NO: 1827871 - DNA, 15 bp, Homo sapiens
agcacagtgggtaaa

SEQ ID NO: 1827872 - DNA, 15 bp, Homo sapiens
gcacagtgggtaaat

SEQ ID NO: 1827873 - DNA, 15 bp, Homo sapiens
cacagtgggtaaatg

SEQ ID NO: 1827874 - DNA, 15 bp, Homo sapiens
acagtgggtaaatgg

SEQ ID NO: 1827875 - DNA, 15 bp, Homo sapiens
cagtgggtaaatgga

SEQ ID NO: 1827876 - DNA, 15 bp, Homo sapiens
agtgggtaaatggag

SEQ ID NO: 1827877 - DNA, 15 bp, Homo sapiens
gtgggtaaatggagt

SEQ ID NO: 1827878 - DNA, 15 bp, Homo sapiens
tgggtaaatggagtt

SEQ ID NO: 1827879 - DNA, 15 bp, Homo sapiens
gggtaaatggagtta

SEQ ID NO: 1827880 - DNA, 15 bp, Homo sapiens
ggtaaatggagttaa

SEQ ID NO: 1827881 - DNA, 15 bp, Homo sapiens
gtaaatggagttaag

SEQ ID NO: 1827882 - DNA, 15 bp, Homo sapiens
taaatggagttaagg

SEQ ID NO: 1827883 - DNA, 15 bp, Homo sapiens
aaatggagttaaggc

SEQ ID NO: 1827884 - DNA, 15 bp, Homo sapiens
aatggagttaaggca

SEQ ID NO: 1827885 - DNA, 15 bp, Homo sapiens
atggagttaaggcaa

SEQ ID NO: 1827886 - DNA, 15 bp, Homo sapiens
tggagttaaggcaag

SEQ ID NO: 1827887 - DNA, 15 bp, Homo sapiens
ggagttaaggcaaga

SEQ ID NO: 1827888 - DNA, 15 bp, Homo sapiens
gagttaaggcaagat

SEQ ID NO: 1827889 - DNA, 15 bp, Homo sapiens
agttaaggcaagatt

SEQ ID NO: 1827890 - DNA, 15 bp, Homo sapiens
gttaaggcaagattt

SEQ ID NO: 1827891 - DNA, 15 bp, Homo sapiens
ttaaggcaagatttc

SEQ ID NO: 1827892 - DNA, 15 bp, Homo sapiens
taaggcaagatttct

SEQ ID NO: 1827893 - DNA, 15 bp, Homo sapiens
aaggcaagatttcta

SEQ ID NO: 1827894 - DNA, 15 bp, Homo sapiens
aggcaagatttctac

SEQ ID NO: 1827895 - DNA, 15 bp, Homo sapiens
ggcaagatttctacc

SEQ ID NO: 1827896 - DNA, 15 bp, Homo sapiens
gcaagatttctacct

SEQ ID NO: 1827897 - DNA, 15 bp, Homo sapiens
caagatttctaccta

SEQ ID NO: 1827898 - DNA, 15 bp, Homo sapiens
aagatttctacctac

SEQ ID NO: 1827899 - DNA, 15 bp, Homo sapiens
agatttctacctaca

SEQ ID NO: 1827900 - DNA, 15 bp, Homo sapiens
gatttctacctacat

SEQ ID NO: 1827901 - DNA, 15 bp, Homo sapiens
atttctacctacatt

SEQ ID NO: 1827902 - DNA, 15 bp, Homo sapiens
tttctacctacatta

SEQ ID NO: 1827903 - DNA, 15 bp, Homo sapiens
ttctacctacattat

SEQ ID NO: 1827904 - DNA, 15 bp, Homo sapiens
tctacctacattata

SEQ ID NO: 1827905 - DNA, 15 bp, Homo sapiens
ctacctacattatat

SEQ ID NO: 1827906 - DNA, 15 bp, Homo sapiens
tacctacattatatc

SEQ ID NO: 1827907 - DNA, 15 bp, Homo sapiens
acctacattatatca

SEQ ID NO: 1827908 - DNA, 15 bp, Homo sapiens
cctacattatatcat

SEQ ID NO: 1827909 - DNA, 15 bp, Homo sapiens
ctacattatatcata

SEQ ID NO: 1827910 - DNA, 15 bp, Homo sapiens
tacattatatcatag

SEQ ID NO: 1827911 - DNA, 15 bp, Homo sapiens
acattatatcatagc

SEQ ID NO: 1827912 - DNA, 15 bp, Homo sapiens
cattatatcatagct

SEQ ID NO: 1827913 - DNA, 15 bp, Homo sapiens
attatatcatagctc

SEQ ID NO: 1827914 - DNA, 15 bp, Homo sapiens
ttatatcatagctcc

SEQ ID NO: 1827915 - DNA, 15 bp, Homo sapiens
tatatcatagctcct

SEQ ID NO: 1827916 - DNA, 15 bp, Homo sapiens
atatcatagctccta

SEQ ID NO: 1827917 - DNA, 15 bp, Homo sapiens
tatcatagctcctaa

SEQ ID NO: 1827918 - DNA, 15 bp, Homo sapiens
atcatagctcctaaa

SEQ ID NO: 1827919 - DNA, 15 bp, Homo sapiens
tcatagctcctaaag

SEQ ID NO: 1827920 - DNA, 15 bp, Homo sapiens
catagctcctaaagg

SEQ ID NO: 1827921 - DNA, 15 bp, Homo sapiens
atagctcctaaagga

SEQ ID NO: 1827922 - DNA, 15 bp, Homo sapiens
tagctcctaaaggag

SEQ ID NO: 1827923 - DNA, 15 bp, Homo sapiens
agctcctaaaggaga

SEQ ID NO: 1827924 - DNA, 15 bp, Homo sapiens
gctcctaaaggagat

SEQ ID NO: 1827925 - DNA, 15 bp, Homo sapiens
ctcctaaaggagatg

SEQ ID NO: 1827926 - DNA, 15 bp, Homo sapiens
tcctaaaggagatgc

SEQ ID NO: 1827927 - DNA, 15 bp, Homo sapiens
cctaaaggagatgca

SEQ ID NO: 1827928 - DNA, 15 bp, Homo sapiens
ctaaaggagatgcag

SEQ ID NO: 1827929 - DNA, 15 bp, Homo sapiens
taaaggagatgcagg

SEQ ID NO: 1827930 - DNA, 15 bp, Homo sapiens
aaaggagatgcaggg

SEQ ID NO: 1827931 - DNA, 15 bp, Homo sapiens
aaggagatgcaggga

SEQ ID NO: 1827932 - DNA, 15 bp, Homo sapiens
aggagatgcagggaa

SEQ ID NO: 1827933 - DNA, 15 bp, Homo sapiens
ggagatgcagggaat

SEQ ID NO: 1827934 - DNA, 15 bp, Homo sapiens
gagatgcagggaatt

SEQ ID NO: 1827935 - DNA, 15 bp, Homo sapiens
agatgcagggaattg

SEQ ID NO: 1827936 - DNA, 15 bp, Homo sapiens
gatgcagggaattga

SEQ ID NO: 1827937 - DNA, 15 bp, Homo sapiens
atgcagggaattgaa

SEQ ID NO: 1827938 - DNA, 15 bp, Homo sapiens
tgcagggaattgaaa

SEQ ID NO: 1827939 - DNA, 15 bp, Homo sapiens
gcagggaattgaaac

SEQ ID NO: 1827940 - DNA, 15 bp, Homo sapiens
cagggaattgaaact

SEQ ID NO: 1827941 - DNA, 15 bp, Homo sapiens
agggaattgaaactc

SEQ ID NO: 1827942 - DNA, 15 bp, Homo sapiens
gggaattgaaactct

SEQ ID NO: 1827943 - DNA, 15 bp, Homo sapiens
ggaattgaaactctg

SEQ ID NO: 1827944 - DNA, 15 bp, Homo sapiens
gaattgaaactctgc

SEQ ID NO: 1827945 - DNA, 15 bp, Homo sapiens
aattgaaactctgct

SEQ ID NO: 1827946 - DNA, 15 bp, Homo sapiens
attgaaactctgctt

SEQ ID NO: 1827947 - DNA, 15 bp, Homo sapiens
ttgaaactctgcttt

SEQ ID NO: 1827948 - DNA, 15 bp, Homo sapiens
tgaaactctgctttt

SEQ ID NO: 1827949 - DNA, 15 bp, Homo sapiens
gaaactctgcttttg

SEQ ID NO: 1827950 - DNA, 15 bp, Homo sapiens
aaactctgcttttgt

SEQ ID NO: 1827951 - DNA, 15 bp, Homo sapiens
aactctgcttttgtt

SEQ ID NO: 1827952 - DNA, 15 bp, Homo sapiens
actctgcttttgtta

SEQ ID NO: 1827953 - DNA, 15 bp, Homo sapiens
ctctgcttttgttaa

SEQ ID NO: 1827954 - DNA, 15 bp, Homo sapiens
tctgcttttgttaag

SEQ ID NO: 1827955 - DNA, 15 bp, Homo sapiens
ctgcttttgttaagg

SEQ ID NO: 1827956 - DNA, 15 bp, Homo sapiens
tgcttttgttaaggg

SEQ ID NO: 1827957 - DNA, 15 bp, Homo sapiens
gcttttgttaaggga

SEQ ID NO: 1827958 - DNA, 15 bp, Homo sapiens
cttttgttaagggat

SEQ ID NO: 1827959 - DNA, 15 bp, Homo sapiens
ttttgttaagggatg

SEQ ID NO: 1827960 - DNA, 15 bp, Homo sapiens
tttgttaagggatgt

SEQ ID NO: 1827961 - DNA, 15 bp, Homo sapiens
ttgttaagggatgtc

SEQ ID NO: 1827962 - DNA, 15 bp, Homo sapiens
tgttaagggatgtca

SEQ ID NO: 1827963 - DNA, 15 bp, Homo sapiens
gttaagggatgtcag

SEQ ID NO: 1827964 - DNA, 15 bp, Homo sapiens
ttaagggatgtcagt

SEQ ID NO: 1827965 - DNA, 15 bp, Homo sapiens
taagggatgtcagtc

SEQ ID NO: 1827966 - DNA, 15 bp, Homo sapiens
aagggatgtcagtct

SEQ ID NO: 1827967 - DNA, 15 bp, Homo sapiens
agggatgtcagtctg

SEQ ID NO: 1827968 - DNA, 15 bp, Homo sapiens
gggatgtcagtctga

SEQ ID NO: 1827969 - DNA, 15 bp, Homo sapiens
ggatgtcagtctgat

SEQ ID NO: 1827970 - DNA, 15 bp, Homo sapiens
gatgtcagtctgatg

SEQ ID NO: 1827971 - DNA, 15 bp, Homo sapiens
atgtcagtctgatgg

SEQ ID NO: 1827972 - DNA, 15 bp, Homo sapiens
tgtcagtctgatgga

SEQ ID NO: 1827973 - DNA, 15 bp, Homo sapiens
gtcagtctgatggag

SEQ ID NO: 1827974 - DNA, 15 bp, Homo sapiens
tcagtctgatggaga

SEQ ID NO: 1827975 - DNA, 15 bp, Homo sapiens
cagtctgatggagaa

SEQ ID NO: 1827976 - DNA, 15 bp, Homo sapiens
agtctgatggagaaa

SEQ ID NO: 1827977 - DNA, 15 bp, Homo sapiens
gtctgatggagaaat

SEQ ID NO: 1827978 - DNA, 15 bp, Homo sapiens
tctgatggagaaatt

SEQ ID NO: 1827979 - DNA, 15 bp, Homo sapiens
ctgatggagaaattg

SEQ ID NO: 1827980 - DNA, 15 bp, Homo sapiens
tgatggagaaattgg

SEQ ID NO: 1827981 - DNA, 15 bp, Homo sapiens
gatggagaaattggg

SEQ ID NO: 1827982 - DNA, 15 bp, Homo sapiens
atggagaaattgggt

SEQ ID NO: 1827983 - DNA, 15 bp, Homo sapiens
tggagaaattgggta

SEQ ID NO: 1827984 - DNA, 15 bp, Homo sapiens
ggagaaattgggtat

SEQ ID NO: 1827985 - DNA, 15 bp, Homo sapiens
gagaaattgggtatt

SEQ ID NO: 1827986 - DNA, 15 bp, Homo sapiens
agaaattgggtattt

SEQ ID NO: 1827987 - DNA, 15 bp, Homo sapiens
gaaattgggtatttg

SEQ ID NO: 1827988 - DNA, 15 bp, Homo sapiens
aaattgggtatttgt

SEQ ID NO: 1827989 - DNA, 15 bp, Homo sapiens
aattgggtatttgtt

SEQ ID NO: 1827990 - DNA, 15 bp, Homo sapiens
attgggtatttgtta

SEQ ID NO: 1827991 - DNA, 15 bp, Homo sapiens
ttgggtatttgttag

SEQ ID NO: 1827992 - DNA, 15 bp, Homo sapiens
tgggtatttgttaga

SEQ ID NO: 1827993 - DNA, 15 bp, Homo sapiens
gggtatttgttagat

SEQ ID NO: 1827994 - DNA, 15 bp, Homo sapiens
ggtatttgttagatc

SEQ ID NO: 1827995 - DNA, 15 bp, Homo sapiens
gtatttgttagatct

SEQ ID NO: 1827996 - DNA, 15 bp, Homo sapiens
tatttgttagatctt

SEQ ID NO: 1827997 - DNA, 15 bp, Homo sapiens
atttgttagatcttt

SEQ ID NO: 1827998 - DNA, 15 bp, Homo sapiens
tttgttagatcttta

SEQ ID NO: 1827999 - DNA, 15 bp, Homo sapiens
ttgttagatctttat

SEQ ID NO: 1828000 - DNA, 15 bp, Homo sapiens
tgttagatctttatg

SEQ ID NO: 1828001 - DNA, 15 bp, Homo sapiens
gttagatctttatga

SEQ ID NO: 1828002 - DNA, 15 bp, Homo sapiens
ttagatctttatgag

SEQ ID NO: 1828003 - DNA, 15 bp, Homo sapiens
tagatctttatgaga

SEQ ID NO: 1828004 - DNA, 15 bp, Homo sapiens
agatctttatgagaa

SEQ ID NO: 1828005 - DNA, 15 bp, Homo sapiens
gatctttatgagaaa

SEQ ID NO: 1828006 - DNA, 15 bp, Homo sapiens
atctttatgagaaac

SEQ ID NO: 1828007 - DNA, 15 bp, Homo sapiens
tctttatgagaaact

SEQ ID NO: 1828008 - DNA, 15 bp, Homo sapiens
ctttatgagaaactg

SEQ ID NO: 1828009 - DNA, 15 bp, Homo sapiens
tttatgagaaactgg

SEQ ID NO: 1828010 - DNA, 15 bp, Homo sapiens
ttatgagaaactgga

SEQ ID NO: 1828011 - DNA, 15 bp, Homo sapiens
tatgagaaactggaa

SEQ ID NO: 1828012 - DNA, 15 bp, Homo sapiens
atgagaaactggaaa

SEQ ID NO: 1828013 - DNA, 15 bp, Homo sapiens
tgagaaactggaaac

SEQ ID NO: 1828014 - DNA, 15 bp, Homo sapiens
gagaaactggaaacc

SEQ ID NO: 1828015 - DNA, 15 bp, Homo sapiens
agaaactggaaacct

SEQ ID NO: 1828016 - DNA, 15 bp, Homo sapiens
gaaactggaaaccta

SEQ ID NO: 1828017 - DNA, 15 bp, Homo sapiens
aaactggaaacctaa

SEQ ID NO: 1828018 - DNA, 15 bp, Homo sapiens
aactggaaacctaat

SEQ ID NO: 1828019 - DNA, 15 bp, Homo sapiens
actggaaacctaatt

SEQ ID NO: 1828020 - DNA, 15 bp, Homo sapiens
ctggaaacctaattg

SEQ ID NO: 1828021 - DNA, 15 bp, Homo sapiens
tggaaacctaattgg

SEQ ID NO: 1828022 - DNA, 15 bp, Homo sapiens
ggaaacctaattggt

SEQ ID NO: 1828023 - DNA, 15 bp, Homo sapiens
gaaacctaattggta

SEQ ID NO: 1828024 - DNA, 15 bp, Homo sapiens
aaacctaattggtat

SEQ ID NO: 1828025 - DNA, 15 bp, Homo sapiens
aacctaattggtatt

SEQ ID NO: 1828026 - DNA, 15 bp, Homo sapiens
acctaattggtattc

SEQ ID NO: 1828027 - DNA, 15 bp, Homo sapiens
cctaattggtattca

SEQ ID NO: 1828028 - DNA, 15 bp, Homo sapiens
ctaattggtattcac

SEQ ID NO: 1828029 - DNA, 15 bp, Homo sapiens
taattggtattcaca

SEQ ID NO: 1828030 - DNA, 15 bp, Homo sapiens
aattggtattcacaa

SEQ ID NO: 1828031 - DNA, 15 bp, Homo sapiens
attggtattcacaag

SEQ ID NO: 1828032 - DNA, 15 bp, Homo sapiens
ttggtattcacaagt

SEQ ID NO: 1828033 - DNA, 15 bp, Homo sapiens
tggtattcacaagtg

SEQ ID NO: 1828034 - DNA, 15 bp, Homo sapiens
ggtattcacaagtga

SEQ ID NO: 1828035 - DNA, 15 bp, Homo sapiens
gtattcacaagtgaa

SEQ ID NO: 1828036 - DNA, 15 bp, Homo sapiens
tattcacaagtgaaa

SEQ ID NO: 1828037 - DNA, 15 bp, Homo sapiens
attcacaagtgaaaa

SEQ ID NO: 1828038 - DNA, 15 bp, Homo sapiens
ttcacaagtgaaaag

SEQ ID NO: 1828039 - DNA, 15 bp, Homo sapiens
tcacaagtgaaaagc

SEQ ID NO: 1828040 - DNA, 15 bp, Homo sapiens
cacaagtgaaaagct

SEQ ID NO: 1828041 - DNA, 15 bp, Homo sapiens
acaagtgaaaagctt

SEQ ID NO: 1828042 - DNA, 15 bp, Homo sapiens
caagtgaaaagctta

SEQ ID NO: 1828043 - DNA, 15 bp, Homo sapiens
aagtgaaaagcttag

SEQ ID NO: 1828044 - DNA, 15 bp, Homo sapiens
agtgaaaagcttagt

SEQ ID NO: 1828045 - DNA, 15 bp, Homo sapiens
gtgaaaagcttagtg

SEQ ID NO: 1828046 - DNA, 15 bp, Homo sapiens
tgaaaagcttagtgt

SEQ ID NO: 1828047 - DNA, 15 bp, Homo sapiens
gaaaagcttagtgtt

SEQ ID NO: 1828048 - DNA, 15 bp, Homo sapiens
aaaagcttagtgttg

SEQ ID NO: 1828049 - DNA, 15 bp, Homo sapiens
aaagcttagtgttgg

SEQ ID NO: 1828050 - DNA, 15 bp, Homo sapiens
aagcttagtgttggg

SEQ ID NO: 1828051 - DNA, 15 bp, Homo sapiens
agcttagtgttggga

SEQ ID NO: 1828052 - DNA, 15 bp, Homo sapiens
gcttagtgttgggaa

SEQ ID NO: 1828053 - DNA, 15 bp, Homo sapiens
cttagtgttgggaag

SEQ ID NO: 1828054 - DNA, 15 bp, Homo sapiens
ttagtgttgggaaga

SEQ ID NO: 1828055 - DNA, 15 bp, Homo sapiens
tagtgttgggaagag

SEQ ID NO: 1828056 - DNA, 15 bp, Homo sapiens
agtgttgggaagagt

SEQ ID NO: 1828057 - DNA, 15 bp, Homo sapiens
gtgttgggaagagta

SEQ ID NO: 1828058 - DNA, 15 bp, Homo sapiens
tgttgggaagagtaa

SEQ ID NO: 1828059 - DNA, 15 bp, Homo sapiens
gttgggaagagtaac

SEQ ID NO: 1828060 - DNA, 15 bp, Homo sapiens
ttgggaagagtaaca

SEQ ID NO: 1828061 - DNA, 15 bp, Homo sapiens
tgggaagagtaacag

SEQ ID NO: 1828062 - DNA, 15 bp, Homo sapiens
gggaagagtaacaga

SEQ ID NO: 1828063 - DNA, 15 bp, Homo sapiens
ggaagagtaacagat

SEQ ID NO: 1828064 - DNA, 15 bp, Homo sapiens
gaagagtaacagatt

SEQ ID NO: 1828065 - DNA, 15 bp, Homo sapiens
aagagtaacagattc

SEQ ID NO: 1828066 - DNA, 15 bp, Homo sapiens
agagtaacagattcc

SEQ ID NO: 1828067 - DNA, 15 bp, Homo sapiens
gagtaacagattcct

SEQ ID NO: 1828068 - DNA, 15 bp, Homo sapiens
agtaacagattccta

SEQ ID NO: 1828069 - DNA, 15 bp, Homo sapiens
gtaacagattcctac

SEQ ID NO: 1828070 - DNA, 15 bp, Homo sapiens
taacagattcctacc

SEQ ID NO: 1828071 - DNA, 15 bp, Homo sapiens
aacagattcctacct

SEQ ID NO: 1828072 - DNA, 15 bp, Homo sapiens
acagattcctacctt

SEQ ID NO: 1828073 - DNA, 15 bp, Homo sapiens
cagattcctaccttc

SEQ ID NO: 1828074 - DNA, 15 bp, Homo sapiens
agattcctaccttcc

SEQ ID NO: 1828075 - DNA, 15 bp, Homo sapiens
gattcctaccttccc

SEQ ID NO: 1828076 - DNA, 15 bp, Homo sapiens
ttcctaccttccctc

SEQ ID NO: 1828077 - DNA, 15 bp, Homo sapiens
tcctaccttccctcc

SEQ ID NO: 1828078 - DNA, 15 bp, Homo sapiens
cctaccttccctcca

SEQ ID NO: 1828079 - DNA, 15 bp, Homo sapiens
ctaccttccctccat

SEQ ID NO: 1828080 - DNA, 15 bp, Homo sapiens
taccttccctccata

SEQ ID NO: 1828081 - DNA, 15 bp, Homo sapiens
accttccctccatat

SEQ ID NO: 1828082 - DNA, 15 bp, Homo sapiens
ccttccctccatatt

SEQ ID NO: 1828083 - DNA, 15 bp, Homo sapiens
cttccctccatatta

SEQ ID NO: 1828084 - DNA, 15 bp, Homo sapiens
ttccctccatattaa

SEQ ID NO: 1828085 - DNA, 15 bp, Homo sapiens
tccctccatattaat

SEQ ID NO: 1828086 - DNA, 15 bp, Homo sapiens
ccctccatattaatt

SEQ ID NO: 1828087 - DNA, 15 bp, Homo sapiens
cctccatattaatta

SEQ ID NO: 1828088 - DNA, 15 bp, Homo sapiens
ctccatattaattaa

SEQ ID NO: 1828089 - DNA, 15 bp, Homo sapiens
tccatattaattaag

SEQ ID NO: 1828090 - DNA, 15 bp, Homo sapiens
ccatattaattaaga

SEQ ID NO: 1828091 - DNA, 15 bp, Homo sapiens
catattaattaagat

SEQ ID NO: 1828092 - DNA, 15 bp, Homo sapiens
atattaattaagatg

SEQ ID NO: 1828093 - DNA, 15 bp, Homo sapiens
tattaattaagatga

SEQ ID NO: 1828094 - DNA, 15 bp, Homo sapiens
attaattaagatgat

SEQ ID NO: 1828095 - DNA, 15 bp, Homo sapiens
ttaattaagatgatg

SEQ ID NO: 1828096 - DNA, 15 bp, Homo sapiens
taattaagatgatgt

SEQ ID NO: 1828097 - DNA, 15 bp, Homo sapiens
aattaagatgatgtg

SEQ ID NO: 1828098 - DNA, 15 bp, Homo sapiens
attaagatgatgtga

SEQ ID NO: 1828099 - DNA, 15 bp, Homo sapiens
ttaagatgatgtgat

SEQ ID NO: 1828100 - DNA, 15 bp, Homo sapiens
taagatgatgtgatt

SEQ ID NO: 1828101 - DNA, 15 bp, Homo sapiens
aagatgatgtgattg

SEQ ID NO: 1828102 - DNA, 15 bp, Homo sapiens
agatgatgtgattgt

SEQ ID NO: 1828103 - DNA, 15 bp, Homo sapiens
gatgatgtgattgtg

SEQ ID NO: 1828104 - DNA, 15 bp, Homo sapiens
atgatgtgattgtgg

SEQ ID NO: 1828105 - DNA, 15 bp, Homo sapiens
tgatgtgattgtggc

SEQ ID NO: 1828106 - DNA, 15 bp, Homo sapiens
gatgtgattgtggcg

SEQ ID NO: 1828107 - DNA, 15 bp, Homo sapiens
atgtgattgtggcga

SEQ ID NO: 1828108 - DNA, 15 bp, Homo sapiens
tgtgattgtggcgac

SEQ ID NO: 1828109 - DNA, 15 bp, Homo sapiens
gtgattgtggcgact

SEQ ID NO: 1828110 - DNA, 15 bp, Homo sapiens
tgattgtggcgactt

SEQ ID NO: 1828111 - DNA, 15 bp, Homo sapiens
gattgtggcgacttg

SEQ ID NO: 1828112 - DNA, 15 bp, Homo sapiens
attgtggcgacttga

SEQ ID NO: 1828113 - DNA, 15 bp, Homo sapiens
ttgtggcgacttgac

SEQ ID NO: 1828114 - DNA, 15 bp, Homo sapiens
tgtggcgacttgaca

SEQ ID NO: 1828115 - DNA, 15 bp, Homo sapiens
gtggcgacttgacat

SEQ ID NO: 1828116 - DNA, 15 bp, Homo sapiens
tggcgacttgacatt

SEQ ID NO: 1828117 - DNA, 15 bp, Homo sapiens
ggcgacttgacattt

SEQ ID NO: 1828118 - DNA, 15 bp, Homo sapiens
gcgacttgacatttt

SEQ ID NO: 1828119 - DNA, 15 bp, Homo sapiens
cgacttgacattttc

SEQ ID NO: 1828120 - DNA, 15 bp, Homo sapiens
gacttgacattttct

SEQ ID NO: 1828121 - DNA, 15 bp, Homo sapiens
acttgacattttcta

SEQ ID NO: 1828122 - DNA, 15 bp, Homo sapiens
cttgacattttctat

SEQ ID NO: 1828123 - DNA, 15 bp, Homo sapiens
ttgacattttctatt

SEQ ID NO: 1828124 - DNA, 15 bp, Homo sapiens
tgacattttctattt

SEQ ID NO: 1828125 - DNA, 15 bp, Homo sapiens
gacattttctatttg

SEQ ID NO: 1828126 - DNA, 15 bp, Homo sapiens
acattttctatttga

SEQ ID NO: 1828127 - DNA, 15 bp, Homo sapiens
cattttctatttgat

SEQ ID NO: 1828128 - DNA, 15 bp, Homo sapiens
attttctatttgatc

SEQ ID NO: 1828129 - DNA, 15 bp, Homo sapiens
ttttctatttgatct

SEQ ID NO: 1828130 - DNA, 15 bp, Homo sapiens
tttctatttgatcta

SEQ ID NO: 1828131 - DNA, 15 bp, Homo sapiens
ttctatttgatctac

SEQ ID NO: 1828132 - DNA, 15 bp, Homo sapiens
tctatttgatctacc

SEQ ID NO: 1828133 - DNA, 15 bp, Homo sapiens
ctatttgatctacct

SEQ ID NO: 1828134 - DNA, 15 bp, Homo sapiens
tatttgatctacctt

SEQ ID NO: 1828135 - DNA, 15 bp, Homo sapiens
atttgatctacctta

SEQ ID NO: 1828136 - DNA, 15 bp, Homo sapiens
tttgatctaccttag

SEQ ID NO: 1828137 - DNA, 15 bp, Homo sapiens
ttgatctaccttagg

SEQ ID NO: 1828138 - DNA, 15 bp, Homo sapiens
tgatctaccttaggg

SEQ ID NO: 1828139 - DNA, 15 bp, Homo sapiens
gatctaccttagggt

SEQ ID NO: 1828140 - DNA, 15 bp, Homo sapiens
atctaccttagggtt

SEQ ID NO: 1828141 - DNA, 15 bp, Homo sapiens
tctaccttagggttg

SEQ ID NO: 1828142 - DNA, 15 bp, Homo sapiens
ctaccttagggttgc

SEQ ID NO: 1828143 - DNA, 15 bp, Homo sapiens
taccttagggttgca

SEQ ID NO: 1828144 - DNA, 15 bp, Homo sapiens
accttagggttgcag

SEQ ID NO: 1828145 - DNA, 15 bp, Homo sapiens
ccttagggttgcagc

SEQ ID NO: 1828146 - DNA, 15 bp, Homo sapiens
cttagggttgcagct

SEQ ID NO: 1828147 - DNA, 15 bp, Homo sapiens
ttagggttgcagcta

SEQ ID NO: 1828148 - DNA, 15 bp, Homo sapiens
tagggttgcagctaa

SEQ ID NO: 1828149 - DNA, 15 bp, Homo sapiens
agggttgcagctaat

SEQ ID NO: 1828150 - DNA, 15 bp, Homo sapiens
gggttgcagctaatt

SEQ ID NO: 1828151 - DNA, 15 bp, Homo sapiens
ggttgcagctaatta

SEQ ID NO: 1828152 - DNA, 15 bp, Homo sapiens
gttgcagctaattag

SEQ ID NO: 1828153 - DNA, 15 bp, Homo sapiens
ttgcagctaattagt

SEQ ID NO: 1828154 - DNA, 15 bp, Homo sapiens
tgcagctaattagtt

SEQ ID NO: 1828155 - DNA, 15 bp, Homo sapiens
gcagctaattagtta

SEQ ID NO: 1828156 - DNA, 15 bp, Homo sapiens
cagctaattagttac

SEQ ID NO: 1828157 - DNA, 15 bp, Homo sapiens
agctaattagttacc

SEQ ID NO: 1828158 - DNA, 15 bp, Homo sapiens
gctaattagttacct

SEQ ID NO: 1828159 - DNA, 15 bp, Homo sapiens
ctaattagttaccta

SEQ ID NO: 1828160 - DNA, 15 bp, Homo sapiens
taattagttacctaa

SEQ ID NO: 1828161 - DNA, 15 bp, Homo sapiens
aattagttacctaag

SEQ ID NO: 1828162 - DNA, 15 bp, Homo sapiens
attagttacctaaga

SEQ ID NO: 1828163 - DNA, 15 bp, Homo sapiens
ttagttacctaagac

SEQ ID NO: 1828164 - DNA, 15 bp, Homo sapiens
tagttacctaagact

SEQ ID NO: 1828165 - DNA, 15 bp, Homo sapiens
agttacctaagacta

SEQ ID NO: 1828166 - DNA, 15 bp, Homo sapiens
gttacctaagactat

SEQ ID NO: 1828167 - DNA, 15 bp, Homo sapiens
ttacctaagactatt

SEQ ID NO: 1828168 - DNA, 15 bp, Homo sapiens
tacctaagactattg

SEQ ID NO: 1828169 - DNA, 15 bp, Homo sapiens
acctaagactattgc

SEQ ID NO: 1828170 - DNA, 15 bp, Homo sapiens
cctaagactattgca

SEQ ID NO: 1828171 - DNA, 15 bp, Homo sapiens
ctaagactattgcat

SEQ ID NO: 1828172 - DNA, 15 bp, Homo sapiens
taagactattgcata

SEQ ID NO: 1828173 - DNA, 15 bp, Homo sapiens
aagactattgcatag

SEQ ID NO: 1828174 - DNA, 15 bp, Homo sapiens
agactattgcatagt

SEQ ID NO: 1828175 - DNA, 15 bp, Homo sapiens
gactattgcatagtg

SEQ ID NO: 1828176 - DNA, 15 bp, Homo sapiens
actattgcatagtgt

SEQ ID NO: 1828177 - DNA, 15 bp, Homo sapiens
ctattgcatagtgtg

SEQ ID NO: 1828178 - DNA, 15 bp, Homo sapiens
tattgcatagtgtgt

SEQ ID NO: 1828179 - DNA, 15 bp, Homo sapiens
attgcatagtgtgtg

SEQ ID NO: 1828180 - DNA, 15 bp, Homo sapiens
ttgcatagtgtgtgt

SEQ ID NO: 1828181 - DNA, 15 bp, Homo sapiens
tgcatagtgtgtgtt

SEQ ID NO: 1828182 - DNA, 15 bp, Homo sapiens
gcatagtgtgtgttt

SEQ ID NO: 1828183 - DNA, 15 bp, Homo sapiens
catagtgtgtgtttt

SEQ ID NO: 1828184 - DNA, 15 bp, Homo sapiens
atagtgtgtgtttta

SEQ ID NO: 1828185 - DNA, 15 bp, Homo sapiens
tagtgtgtgttttat

SEQ ID NO: 1828186 - DNA, 15 bp, Homo sapiens
agtgtgtgttttata

SEQ ID NO: 1828187 - DNA, 15 bp, Homo sapiens
gtgtgtgttttatac

SEQ ID NO: 1828188 - DNA, 15 bp, Homo sapiens
tgtgtgttttataca

SEQ ID NO: 1828189 - DNA, 15 bp, Homo sapiens
gtgtgttttatacag

SEQ ID NO: 1828190 - DNA, 15 bp, Homo sapiens
tgtgttttatacaga

SEQ ID NO: 1828191 - DNA, 15 bp, Homo sapiens
gtgttttatacagag

SEQ ID NO: 1828192 - DNA, 15 bp, Homo sapiens
tgttttatacagagt

SEQ ID NO: 1828193 - DNA, 15 bp, Homo sapiens
gttttatacagagta

SEQ ID NO: 1828194 - DNA, 15 bp, Homo sapiens
ttttatacagagtat

SEQ ID NO: 1828195 - DNA, 15 bp, Homo sapiens
tttatacagagtata

SEQ ID NO: 1828196 - DNA, 15 bp, Homo sapiens
ttatacagagtatat

SEQ ID NO: 1828197 - DNA, 15 bp, Homo sapiens
tatacagagtatatt

SEQ ID NO: 1828198 - DNA, 15 bp, Homo sapiens
atacagagtatatta

SEQ ID NO: 1828199 - DNA, 15 bp, Homo sapiens
tacagagtatattac

SEQ ID NO: 1828200 - DNA, 15 bp, Homo sapiens
acagagtatattaca

SEQ ID NO: 1828201 - DNA, 15 bp, Homo sapiens
cagagtatattacat

SEQ ID NO: 1828202 - DNA, 15 bp, Homo sapiens
agagtatattacatg

SEQ ID NO: 1828203 - DNA, 15 bp, Homo sapiens
gagtatattacatgt

SEQ ID NO: 1828204 - DNA, 15 bp, Homo sapiens
agtatattacatgtt

SEQ ID NO: 1828205 - DNA, 15 bp, Homo sapiens
gtatattacatgtta

SEQ ID NO: 1828206 - DNA, 15 bp, Homo sapiens
tatattacatgttag

SEQ ID NO: 1828207 - DNA, 15 bp, Homo sapiens
atattacatgttagc

SEQ ID NO: 1828208 - DNA, 15 bp, Homo sapiens
tattacatgttagca

SEQ ID NO: 1828209 - DNA, 15 bp, Homo sapiens
attacatgttagcaa

SEQ ID NO: 1828210 - DNA, 15 bp, Homo sapiens
ttacatgttagcaac

SEQ ID NO: 1828211 - DNA, 15 bp, Homo sapiens
tacatgttagcaacc

SEQ ID NO: 1828212 - DNA, 15 bp, Homo sapiens
acatgttagcaacca

SEQ ID NO: 1828213 - DNA, 15 bp, Homo sapiens
catgttagcaaccag

SEQ ID NO: 1828214 - DNA, 15 bp, Homo sapiens
atgttagcaaccaga

SEQ ID NO: 1828215 - DNA, 15 bp, Homo sapiens
tgttagcaaccagag

SEQ ID NO: 1828216 - DNA, 15 bp, Homo sapiens
gttagcaaccagagc

SEQ ID NO: 1828217 - DNA, 15 bp, Homo sapiens
ttagcaaccagagca

SEQ ID NO: 1828218 - DNA, 15 bp, Homo sapiens
tagcaaccagagcaa

SEQ ID NO: 1828219 - DNA, 15 bp, Homo sapiens
agcaaccagagcaac

SEQ ID NO: 1828220 - DNA, 15 bp, Homo sapiens
gcaaccagagcaact

SEQ ID NO: 1828221 - DNA, 15 bp, Homo sapiens
caaccagagcaactg

SEQ ID NO: 1828222 - DNA, 15 bp, Homo sapiens
aaccagagcaactgc

SEQ ID NO: 1828223 - DNA, 15 bp, Homo sapiens
accagagcaactgct

SEQ ID NO: 1828224 - DNA, 15 bp, Homo sapiens
ccagagcaactgctg

SEQ ID NO: 1828225 - DNA, 15 bp, Homo sapiens
cagagcaactgctgt

SEQ ID NO: 1828226 - DNA, 15 bp, Homo sapiens
agagcaactgctgta

SEQ ID NO: 1828227 - DNA, 15 bp, Homo sapiens
gagcaactgctgtag

SEQ ID NO: 1828228 - DNA, 15 bp, Homo sapiens
agcaactgctgtagt

SEQ ID NO: 1828229 - DNA, 15 bp, Homo sapiens
gcaactgctgtagta

SEQ ID NO: 1828230 - DNA, 15 bp, Homo sapiens
caactgctgtagtaa

SEQ ID NO: 1828231 - DNA, 15 bp, Homo sapiens
aactgctgtagtaaa

SEQ ID NO: 1828232 - DNA, 15 bp, Homo sapiens
actgctgtagtaaaa

SEQ ID NO: 1828233 - DNA, 15 bp, Homo sapiens
ctgctgtagtaaaat

SEQ ID NO: 1828234 - DNA, 15 bp, Homo sapiens
tgctgtagtaaaatt

SEQ ID NO: 1828235 - DNA, 15 bp, Homo sapiens
gctgtagtaaaattt

SEQ ID NO: 1828236 - DNA, 15 bp, Homo sapiens
ctgtagtaaaatttt

SEQ ID NO: 1828237 - DNA, 15 bp, Homo sapiens
tgtagtaaaattttg

SEQ ID NO: 1828238 - DNA, 15 bp, Homo sapiens
gtagtaaaattttgt

SEQ ID NO: 1828239 - DNA, 15 bp, Homo sapiens
tagtaaaattttgtc

SEQ ID NO: 1828240 - DNA, 15 bp, Homo sapiens
agtaaaattttgtcc

SEQ ID NO: 1828241 - DNA, 15 bp, Homo sapiens
gtaaaattttgtcct

SEQ ID NO: 1828242 - DNA, 15 bp, Homo sapiens
taaaattttgtcctg

SEQ ID NO: 1828243 - DNA, 15 bp, Homo sapiens
aaaattttgtcctgt

SEQ ID NO: 1828244 - DNA, 15 bp, Homo sapiens
aaattttgtcctgtt

SEQ ID NO: 1828245 - DNA, 15 bp, Homo sapiens
aattttgtcctgttt

SEQ ID NO: 1828246 - DNA, 15 bp, Homo sapiens
attttgtcctgtttt

SEQ ID NO: 1828247 - DNA, 15 bp, Homo sapiens
ttttgtcctgttttc

SEQ ID NO: 1828248 - DNA, 15 bp, Homo sapiens
tttgtcctgttttct

SEQ ID NO: 1828249 - DNA, 15 bp, Homo sapiens
ttgtcctgttttctg

SEQ ID NO: 1828250 - DNA, 15 bp, Homo sapiens
tgtcctgttttctgc

SEQ ID NO: 1828251 - DNA, 15 bp, Homo sapiens
gtcctgttttctgcc

SEQ ID NO: 1828252 - DNA, 15 bp, Homo sapiens
tcctgttttctgcca

SEQ ID NO: 1828253 - DNA, 15 bp, Homo sapiens
cctgttttctgccat

SEQ ID NO: 1828254 - DNA, 15 bp, Homo sapiens
ctgttttctgccatt

SEQ ID NO: 1828255 - DNA, 15 bp, Homo sapiens
tgttttctgccattt

SEQ ID NO: 1828256 - DNA, 15 bp, Homo sapiens
gttttctgccatttc

SEQ ID NO: 1828257 - DNA, 15 bp, Homo sapiens
ttttctgccatttcg

SEQ ID NO: 1828258 - DNA, 15 bp, Homo sapiens
tttctgccatttcga

SEQ ID NO: 1828259 - DNA, 15 bp, Homo sapiens
ttctgccatttcgag

SEQ ID NO: 1828260 - DNA, 15 bp, Homo sapiens
tctgccatttcgagt

SEQ ID NO: 1828261 - DNA, 15 bp, Homo sapiens
ctgccatttcgagtt

SEQ ID NO: 1828262 - DNA, 15 bp, Homo sapiens
tgccatttcgagttg

SEQ ID NO: 1828263 - DNA, 15 bp, Homo sapiens
gccatttcgagttgc

SEQ ID NO: 1828264 - DNA, 15 bp, Homo sapiens
ccatttcgagttgcg

SEQ ID NO: 1828265 - DNA, 15 bp, Homo sapiens
catttcgagttgcga

SEQ ID NO: 1828266 - DNA, 15 bp, Homo sapiens
atttcgagttgcgaa

SEQ ID NO: 1828267 - DNA, 15 bp, Homo sapiens
tttcgagttgcgaaa

SEQ ID NO: 1828268 - DNA, 15 bp, Homo sapiens
ttcgagttgcgaaag

SEQ ID NO: 1828269 - DNA, 15 bp, Homo sapiens
tcgagttgcgaaagg

SEQ ID NO: 1828270 - DNA, 15 bp, Homo sapiens
cgagttgcgaaaggg

SEQ ID NO: 1828271 - DNA, 15 bp, Homo sapiens
gagttgcgaaagggt

SEQ ID NO: 1828272 - DNA, 15 bp, Homo sapiens
agttgcgaaagggtg

SEQ ID NO: 1828273 - DNA, 15 bp, Homo sapiens
gttgcgaaagggtgt

SEQ ID NO: 1828274 - DNA, 15 bp, Homo sapiens
ttgcgaaagggtgtt

SEQ ID NO: 1828275 - DNA, 15 bp, Homo sapiens
tgcgaaagggtgtta

SEQ ID NO: 1828276 - DNA, 15 bp, Homo sapiens
gcgaaagggtgttac

SEQ ID NO: 1828277 - DNA, 15 bp, Homo sapiens
cgaaagggtgttaca

SEQ ID NO: 1828278 - DNA, 15 bp, Homo sapiens
gaaagggtgttacat

SEQ ID NO: 1828279 - DNA, 15 bp, Homo sapiens
aaagggtgttacata

SEQ ID NO: 1828280 - DNA, 15 bp, Homo sapiens
aagggtgttacataa

SEQ ID NO: 1828281 - DNA, 15 bp, Homo sapiens
agggtgttacataat

SEQ ID NO: 1828282 - DNA, 15 bp, Homo sapiens
gggtgttacataatc

SEQ ID NO: 1828283 - DNA, 15 bp, Homo sapiens
ggtgttacataatct

SEQ ID NO: 1828284 - DNA, 15 bp, Homo sapiens
gtgttacataatctt

SEQ ID NO: 1828285 - DNA, 15 bp, Homo sapiens
tgttacataatctta

SEQ ID NO: 1828286 - DNA, 15 bp, Homo sapiens
gttacataatcttag

SEQ ID NO: 1828287 - DNA, 15 bp, Homo sapiens
ttacataatcttaga

SEQ ID NO: 1828288 - DNA, 15 bp, Homo sapiens
tacataatcttagat

SEQ ID NO: 1828289 - DNA, 15 bp, Homo sapiens
acataatcttagatg

SEQ ID NO: 1828290 - DNA, 15 bp, Homo sapiens
cataatcttagatga

SEQ ID NO: 1828291 - DNA, 15 bp, Homo sapiens
ataatcttagatgat

SEQ ID NO: 1828292 - DNA, 15 bp, Homo sapiens
taatcttagatgatc

SEQ ID NO: 1828293 - DNA, 15 bp, Homo sapiens
aatcttagatgatca

SEQ ID NO: 1828294 - DNA, 15 bp, Homo sapiens
atcttagatgatcat

SEQ ID NO: 1828295 - DNA, 15 bp, Homo sapiens
tcttagatgatcatc

SEQ ID NO: 1828296 - DNA, 15 bp, Homo sapiens
cttagatgatcatca

SEQ ID NO: 1828297 - DNA, 15 bp, Homo sapiens
ttagatgatcatcag

SEQ ID NO: 1828298 - DNA, 15 bp, Homo sapiens
tagatgatcatcagg

SEQ ID NO: 1828299 - DNA, 15 bp, Homo sapiens
agatgatcatcagga

SEQ ID NO: 1828300 - DNA, 15 bp, Homo sapiens
gatgatcatcaggag

SEQ ID NO: 1828301 - DNA, 15 bp, Homo sapiens
atgatcatcaggagt

SEQ ID NO: 1828302 - DNA, 15 bp, Homo sapiens
tgatcatcaggagta

SEQ ID NO: 1828303 - DNA, 15 bp, Homo sapiens
gatcatcaggagtat

SEQ ID NO: 1828304 - DNA, 15 bp, Homo sapiens
atcatcaggagtatg

SEQ ID NO: 1828305 - DNA, 15 bp, Homo sapiens
tcatcaggagtatgt

SEQ ID NO: 1828306 - DNA, 15 bp, Homo sapiens
catcaggagtatgtt

SEQ ID NO: 1828307 - DNA, 15 bp, Homo sapiens
atcaggagtatgttt

SEQ ID NO: 1828308 - DNA, 15 bp, Homo sapiens
tcaggagtatgtttt

SEQ ID NO: 1828309 - DNA, 15 bp, Homo sapiens
caggagtatgttttg

SEQ ID NO: 1828310 - DNA, 15 bp, Homo sapiens
aggagtatgttttgc

SEQ ID NO: 1828311 - DNA, 15 bp, Homo sapiens
ggagtatgttttgct

SEQ ID NO: 1828312 - DNA, 15 bp, Homo sapiens
gagtatgttttgctc

SEQ ID NO: 1828313 - DNA, 15 bp, Homo sapiens
agtatgttttgctca

SEQ ID NO: 1828314 - DNA, 15 bp, Homo sapiens
gtatgttttgctcac

SEQ ID NO: 1828315 - DNA, 15 bp, Homo sapiens
tatgttttgctcaca

SEQ ID NO: 1828316 - DNA, 15 bp, Homo sapiens
atgttttgctcacag

SEQ ID NO: 1828317 - DNA, 15 bp, Homo sapiens
tgttttgctcacaga

SEQ ID NO: 1828318 - DNA, 15 bp, Homo sapiens
gttttgctcacagat

SEQ ID NO: 1828319 - DNA, 15 bp, Homo sapiens
ttttgctcacagata

SEQ ID NO: 1828320 - DNA, 15 bp, Homo sapiens
tttgctcacagataa

SEQ ID NO: 1828321 - DNA, 15 bp, Homo sapiens
ttgctcacagataac

SEQ ID NO: 1828322 - DNA, 15 bp, Homo sapiens
tgctcacagataacg

SEQ ID NO: 1828323 - DNA, 15 bp, Homo sapiens
gctcacagataacga

SEQ ID NO: 1828324 - DNA, 15 bp, Homo sapiens
ctcacagataacgat

SEQ ID NO: 1828325 - DNA, 15 bp, Homo sapiens
tcacagataacgatg

SEQ ID NO: 1828326 - DNA, 15 bp, Homo sapiens
cacagataacgatgt

SEQ ID NO: 1828327 - DNA, 15 bp, Homo sapiens
acagataacgatgta

SEQ ID NO: 1828328 - DNA, 15 bp, Homo sapiens
cagataacgatgtag

SEQ ID NO: 1828329 - DNA, 15 bp, Homo sapiens
agataacgatgtaga

SEQ ID NO: 1828330 - DNA, 15 bp, Homo sapiens
gataacgatgtagac

SEQ ID NO: 1828331 - DNA, 15 bp, Homo sapiens
ataacgatgtagaca

SEQ ID NO: 1828332 - DNA, 15 bp, Homo sapiens
taacgatgtagacaa

SEQ ID NO: 1828333 - DNA, 15 bp, Homo sapiens
aacgatgtagacaag

SEQ ID NO: 1828334 - DNA, 15 bp, Homo sapiens
acgatgtagacaagt

SEQ ID NO: 1828335 - DNA, 15 bp, Homo sapiens
cgatgtagacaagtt

SEQ ID NO: 1828336 - DNA, 15 bp, Homo sapiens
gatgtagacaagttt

SEQ ID NO: 1828337 - DNA, 15 bp, Homo sapiens
atgtagacaagtttg

SEQ ID NO: 1828338 - DNA, 15 bp, Homo sapiens
tgtagacaagtttgt

SEQ ID NO: 1828339 - DNA, 15 bp, Homo sapiens
gtagacaagtttgtt

SEQ ID NO: 1828340 - DNA, 15 bp, Homo sapiens
tagacaagtttgttt

SEQ ID NO: 1828341 - DNA, 15 bp, Homo sapiens
agacaagtttgttta

SEQ ID NO: 1828342 - DNA, 15 bp, Homo sapiens
gacaagtttgtttaa

SEQ ID NO: 1828343 - DNA, 15 bp, Homo sapiens
acaagtttgtttaac

SEQ ID NO: 1828344 - DNA, 15 bp, Homo sapiens
caagtttgtttaact

SEQ ID NO: 1828345 - DNA, 15 bp, Homo sapiens
aagtttgtttaactt

SEQ ID NO: 1828346 - DNA, 15 bp, Homo sapiens
agtttgtttaactta

SEQ ID NO: 1828347 - DNA, 15 bp, Homo sapiens
gtttgtttaacttaa

SEQ ID NO: 1828348 - DNA, 15 bp, Homo sapiens
tttgtttaacttaaa

SEQ ID NO: 1828349 - DNA, 15 bp, Homo sapiens
ttgtttaacttaaat

SEQ ID NO: 1828350 - DNA, 15 bp, Homo sapiens
tgtttaacttaaatt

SEQ ID NO: 1828351 - DNA, 15 bp, Homo sapiens
gtttaacttaaattg

SEQ ID NO: 1828352 - DNA, 15 bp, Homo sapiens
tttaacttaaattga

SEQ ID NO: 1828353 - DNA, 15 bp, Homo sapiens
ttaacttaaattgac

SEQ ID NO: 1828354 - DNA, 15 bp, Homo sapiens
taacttaaattgacc

SEQ ID NO: 1828355 - DNA, 15 bp, Homo sapiens
aacttaaattgacct

SEQ ID NO: 1828356 - DNA, 15 bp, Homo sapiens
acttaaattgacctt

SEQ ID NO: 1828357 - DNA, 15 bp, Homo sapiens
cttaaattgaccttg

SEQ ID NO: 1828358 - DNA, 15 bp, Homo sapiens
ttaaattgaccttga

SEQ ID NO: 1828359 - DNA, 15 bp, Homo sapiens
taaattgaccttgac

SEQ ID NO: 1828360 - DNA, 15 bp, Homo sapiens
aaattgaccttgact

SEQ ID NO: 1828361 - DNA, 15 bp, Homo sapiens
aattgaccttgactc

SEQ ID NO: 1828362 - DNA, 15 bp, Homo sapiens
attgaccttgactcc

SEQ ID NO: 1828363 - DNA, 15 bp, Homo sapiens
ttgaccttgactcca

SEQ ID NO: 1828364 - DNA, 15 bp, Homo sapiens
tgaccttgactccag

SEQ ID NO: 1828365 - DNA, 15 bp, Homo sapiens
gaccttgactccagg

SEQ ID NO: 1828366 - DNA, 15 bp, Homo sapiens
accttgactccaggt

SEQ ID NO: 1828367 - DNA, 15 bp, Homo sapiens
ccttgactccaggtc

SEQ ID NO: 1828368 - DNA, 15 bp, Homo sapiens
cttgactccaggtca

SEQ ID NO: 1828369 - DNA, 15 bp, Homo sapiens
ttgactccaggtcaa

SEQ ID NO: 1828370 - DNA, 15 bp, Homo sapiens
tgactccaggtcaaa

SEQ ID NO: 1828371 - DNA, 15 bp, Homo sapiens
gactccaggtcaaat

SEQ ID NO: 1828372 - DNA, 15 bp, Homo sapiens
actccaggtcaaatt

SEQ ID NO: 1828373 - DNA, 15 bp, Homo sapiens
ctccaggtcaaattg

SEQ ID NO: 1828374 - DNA, 15 bp, Homo sapiens
tccaggtcaaattgg

SEQ ID NO: 1828375 - DNA, 15 bp, Homo sapiens
ccaggtcaaattgga

SEQ ID NO: 1828376 - DNA, 15 bp, Homo sapiens
caggtcaaattggag

SEQ ID NO: 1828377 - DNA, 15 bp, Homo sapiens
aggtcaaattggagt

SEQ ID NO: 1828378 - DNA, 15 bp, Homo sapiens
ggtcaaattggagtc

SEQ ID NO: 1828379 - DNA, 15 bp, Homo sapiens
gtcaaattggagtca

SEQ ID NO: 1828380 - DNA, 15 bp, Homo sapiens
tcaaattggagtcaa

SEQ ID NO: 1828381 - DNA, 15 bp, Homo sapiens
caaattggagtcaac

SEQ ID NO: 1828382 - DNA, 15 bp, Homo sapiens
aaattggagtcaact

SEQ ID NO: 1828383 - DNA, 15 bp, Homo sapiens
aattggagtcaactc

SEQ ID NO: 1828384 - DNA, 15 bp, Homo sapiens
attggagtcaactct

SEQ ID NO: 1828385 - DNA, 15 bp, Homo sapiens
ttggagtcaactctg

SEQ ID NO: 1828386 - DNA, 15 bp, Homo sapiens
tggagtcaactctgg

SEQ ID NO: 1828387 - DNA, 15 bp, Homo sapiens
ggagtcaactctggt

SEQ ID NO: 1828388 - DNA, 15 bp, Homo sapiens
gagtcaactctggta

SEQ ID NO: 1828389 - DNA, 15 bp, Homo sapiens
agtcaactctggtaa

SEQ ID NO: 1828390 - DNA, 15 bp, Homo sapiens
gtcaactctggtaag

SEQ ID NO: 1828391 - DNA, 15 bp, Homo sapiens
tcaactctggtaaga

SEQ ID NO: 1828392 - DNA, 15 bp, Homo sapiens
caactctggtaagat

SEQ ID NO: 1828393 - DNA, 15 bp, Homo sapiens
aactctggtaagatg

SEQ ID NO: 1828394 - DNA, 15 bp, Homo sapiens
actctggtaagatga

SEQ ID NO: 1828395 - DNA, 15 bp, Homo sapiens
ctctggtaagatgat

SEQ ID NO: 1828396 - DNA, 15 bp, Homo sapiens
tctggtaagatgatg

SEQ ID NO: 1828397 - DNA, 15 bp, Homo sapiens
ctggtaagatgatga

SEQ ID NO: 1828398 - DNA, 15 bp, Homo sapiens
tggtaagatgatgaa

SEQ ID NO: 1828399 - DNA, 15 bp, Homo sapiens
ggtaagatgatgaaa

SEQ ID NO: 1828400 - DNA, 15 bp, Homo sapiens
gtaagatgatgaaac

SEQ ID NO: 1828401 - DNA, 15 bp, Homo sapiens
taagatgatgaaaca

SEQ ID NO: 1828402 - DNA, 15 bp, Homo sapiens
aagatgatgaaacaa

SEQ ID NO: 1828403 - DNA, 15 bp, Homo sapiens
agatgatgaaacaat

SEQ ID NO: 1828404 - DNA, 15 bp, Homo sapiens
gatgatgaaacaata

SEQ ID NO: 1828405 - DNA, 15 bp, Homo sapiens
atgatgaaacaataa

SEQ ID NO: 1828406 - DNA, 15 bp, Homo sapiens
tgatgaaacaataac

SEQ ID NO: 1828407 - DNA, 15 bp, Homo sapiens
gatgaaacaataact

SEQ ID NO: 1828408 - DNA, 15 bp, Homo sapiens
atgaaacaataactt

SEQ ID NO: 1828409 - DNA, 15 bp, Homo sapiens
gaaacaataacttct

SEQ ID NO: 1828410 - DNA, 15 bp, Homo sapiens
aaacaataacttctg

SEQ ID NO: 1828411 - DNA, 15 bp, Homo sapiens
aacaataacttctga

SEQ ID NO: 1828412 - DNA, 15 bp, Homo sapiens
acaataacttctgaa

SEQ ID NO: 1828413 - DNA, 15 bp, Homo sapiens
caataacttctgaaa

SEQ ID NO: 1828414 - DNA, 15 bp, Homo sapiens
aataacttctgaaat

SEQ ID NO: 1828415 - DNA, 15 bp, Homo sapiens
ataacttctgaaatc

SEQ ID NO: 1828416 - DNA, 15 bp, Homo sapiens
taacttctgaaatct

SEQ ID NO: 1828417 - DNA, 15 bp, Homo sapiens
aacttctgaaatctc

SEQ ID NO: 1828418 - DNA, 15 bp, Homo sapiens
acttctgaaatctct

SEQ ID NO: 1828419 - DNA, 15 bp, Homo sapiens
cttctgaaatctcta

SEQ ID NO: 1828420 - DNA, 15 bp, Homo sapiens
ttctgaaatctctat

SEQ ID NO: 1828421 - DNA, 15 bp, Homo sapiens
tctgaaatctctatt

SEQ ID NO: 1828422 - DNA, 15 bp, Homo sapiens
ctgaaatctctattt

SEQ ID NO: 1828423 - DNA, 15 bp, Homo sapiens
tgaaatctctatttg

SEQ ID NO: 1828424 - DNA, 15 bp, Homo sapiens
gaaatctctatttga

SEQ ID NO: 1828425 - DNA, 15 bp, Homo sapiens
aaatctctatttgaa

SEQ ID NO: 1828426 - DNA, 15 bp, Homo sapiens
aatctctatttgaaa

SEQ ID NO: 1828427 - DNA, 15 bp, Homo sapiens
atctctatttgaaat

SEQ ID NO: 1828428 - DNA, 15 bp, Homo sapiens
tctctatttgaaatg

SEQ ID NO: 1828429 - DNA, 15 bp, Homo sapiens
ctctatttgaaatgt

SEQ ID NO: 1828430 - DNA, 15 bp, Homo sapiens
tctatttgaaatgtc

SEQ ID NO: 1828431 - DNA, 15 bp, Homo sapiens
ctatttgaaatgtca

SEQ ID NO: 1828432 - DNA, 15 bp, Homo sapiens
tatttgaaatgtcag

SEQ ID NO: 1828433 - DNA, 15 bp, Homo sapiens
atttgaaatgtcagg

SEQ ID NO: 1828434 - DNA, 15 bp, Homo sapiens
tttgaaatgtcagga

SEQ ID NO: 1828435 - DNA, 15 bp, Homo sapiens
ttgaaatgtcaggat

SEQ ID NO: 1828436 - DNA, 15 bp, Homo sapiens
tgaaatgtcaggatt

SEQ ID NO: 1828437 - DNA, 15 bp, Homo sapiens
gaaatgtcaggattt

SEQ ID NO: 1828438 - DNA, 15 bp, Homo sapiens
aaatgtcaggatttt

SEQ ID NO: 1828439 - DNA, 15 bp, Homo sapiens
aatgtcaggattttt

SEQ ID NO: 1828440 - DNA, 15 bp, Homo sapiens
atgtcaggatttttt

SEQ ID NO: 1828441 - DNA, 15 bp, Homo sapiens
tgtcaggattttttt

SEQ ID NO: 1828442 - DNA, 15 bp, Homo sapiens
gtcaggatttttttg

SEQ ID NO: 1828443 - DNA, 15 bp, Homo sapiens
tcaggatttttttgt

SEQ ID NO: 1828444 - DNA, 15 bp, Homo sapiens
caggatttttttgta

SEQ ID NO: 1828445 - DNA, 15 bp, Homo sapiens
aggatttttttgtac

SEQ ID NO: 1828446 - DNA, 15 bp, Homo sapiens
ggatttttttgtacg

SEQ ID NO: 1828447 - DNA, 15 bp, Homo sapiens
gatttttttgtacga

SEQ ID NO: 1828448 - DNA, 15 bp, Homo sapiens
atttttttgtacgat

SEQ ID NO: 1828449 - DNA, 15 bp, Homo sapiens
tttttttgtacgatt

SEQ ID NO: 1828450 - DNA, 15 bp, Homo sapiens
ttttttgtacgatta

SEQ ID NO: 1828451 - DNA, 15 bp, Homo sapiens
tttttgtacgattag

SEQ ID NO: 1828452 - DNA, 15 bp, Homo sapiens
ttttgtacgattagt

SEQ ID NO: 1828453 - DNA, 15 bp, Homo sapiens
tttgtacgattagtg

SEQ ID NO: 1828454 - DNA, 15 bp, Homo sapiens
ttgtacgattagtgg

SEQ ID NO: 1828455 - DNA, 15 bp, Homo sapiens
tgtacgattagtggg

SEQ ID NO: 1828456 - DNA, 15 bp, Homo sapiens
gtacgattagtgggc

SEQ ID NO: 1828457 - DNA, 15 bp, Homo sapiens
tacgattagtgggca

SEQ ID NO: 1828458 - DNA, 15 bp, Homo sapiens
acgattagtgggcac

SEQ ID NO: 1828459 - DNA, 15 bp, Homo sapiens
cgattagtgggcacg

SEQ ID NO: 1828460 - DNA, 15 bp, Homo sapiens
gattagtgggcacgt

SEQ ID NO: 1828461 - DNA, 15 bp, Homo sapiens
attagtgggcacgtc

SEQ ID NO: 1828462 - DNA, 15 bp, Homo sapiens
ttagtgggcacgtct

SEQ ID NO: 1828463 - DNA, 15 bp, Homo sapiens
tagtgggcacgtctc

SEQ ID NO: 1828464 - DNA, 15 bp, Homo sapiens
agtgggcacgtctca

SEQ ID NO: 1828465 - DNA, 15 bp, Homo sapiens
gtgggcacgtctcaa

SEQ ID NO: 1828466 - DNA, 15 bp, Homo sapiens
tgggcacgtctcaaa

SEQ ID NO: 1828467 - DNA, 15 bp, Homo sapiens
gggcacgtctcaaag

SEQ ID NO: 1828468 - DNA, 15 bp, Homo sapiens
ggcacgtctcaaaga

SEQ ID NO: 1828469 - DNA, 15 bp, Homo sapiens
gcacgtctcaaagaa

SEQ ID NO: 1828470 - DNA, 15 bp, Homo sapiens
cacgtctcaaagaaa

SEQ ID NO: 1828471 - DNA, 15 bp, Homo sapiens
acgtctcaaagaaat

SEQ ID NO: 1828472 - DNA, 15 bp, Homo sapiens
cgtctcaaagaaatg

SEQ ID NO: 1828473 - DNA, 15 bp, Homo sapiens
gtctcaaagaaatga

SEQ ID NO: 1828474 - DNA, 15 bp, Homo sapiens
tctcaaagaaatgaa

SEQ ID NO: 1828475 - DNA, 15 bp, Homo sapiens
ctcaaagaaatgaag

SEQ ID NO: 1828476 - DNA, 15 bp, Homo sapiens
tcaaagaaatgaaga

SEQ ID NO: 1828477 - DNA, 15 bp, Homo sapiens
caaagaaatgaagaa

SEQ ID NO: 1828478 - DNA, 15 bp, Homo sapiens
aaagaaatgaagaat

SEQ ID NO: 1828479 - DNA, 15 bp, Homo sapiens
aagaaatgaagaatt

SEQ ID NO: 1828480 - DNA, 15 bp, Homo sapiens
agaaatgaagaattg

SEQ ID NO: 1828481 - DNA, 15 bp, Homo sapiens
gaaatgaagaattga

SEQ ID NO: 1828482 - DNA, 15 bp, Homo sapiens
aaatgaagaattgaa

SEQ ID NO: 1828483 - DNA, 15 bp, Homo sapiens
aatgaagaattgaaa

SEQ ID NO: 1828484 - DNA, 15 bp, Homo sapiens
atgaagaattgaaat

SEQ ID NO: 1828485 - DNA, 15 bp, Homo sapiens
tgaagaattgaaata

SEQ ID NO: 1828486 - DNA, 15 bp, Homo sapiens
gaagaattgaaatat

SEQ ID NO: 1828487 - DNA, 15 bp, Homo sapiens
aagaattgaaatatt

SEQ ID NO: 1828488 - DNA, 15 bp, Homo sapiens
agaattgaaatatta

SEQ ID NO: 1828489 - DNA, 15 bp, Homo sapiens
gaattgaaatattat

SEQ ID NO: 1828490 - DNA, 15 bp, Homo sapiens
aattgaaatattata

SEQ ID NO: 1828491 - DNA, 15 bp, Homo sapiens
attgaaatattatac

SEQ ID NO: 1828492 - DNA, 15 bp, Homo sapiens
ttgaaatattataca

SEQ ID NO: 1828493 - DNA, 15 bp, Homo sapiens
tgaaatattatacac

SEQ ID NO: 1828494 - DNA, 15 bp, Homo sapiens
gaaatattatacacc

SEQ ID NO: 1828495 - DNA, 15 bp, Homo sapiens
aaatattatacacct

SEQ ID NO: 1828496 - DNA, 15 bp, Homo sapiens
aatattatacacctt

SEQ ID NO: 1828497 - DNA, 15 bp, Homo sapiens
atattatacaccttt

SEQ ID NO: 1828498 - DNA, 15 bp, Homo sapiens
tattatacacctttt

SEQ ID NO: 1828499 - DNA, 15 bp, Homo sapiens
attatacaccttttt

SEQ ID NO: 1828500 - DNA, 15 bp, Homo sapiens
ttatacacctttttt

SEQ ID NO: 1828501 - DNA, 15 bp, Homo sapiens
tatacaccttttttt

SEQ ID NO: 1828502 - DNA, 15 bp, Homo sapiens
atacacctttttttt

SEQ ID NO: 1828503 - DNA, 15 bp, Homo sapiens
tacaccttttttttt

SEQ ID NO: 1828504 - DNA, 15 bp, Homo sapiens
acacctttttttttt

SEQ ID NO: 1828505 - DNA, 15 bp, Homo sapiens
caccttttttttttt

SEQ ID NO: 1828506 - DNA, 15 bp, Homo sapiens
acctttttttttttt

SEQ ID NO: 1828507 - DNA, 15 bp, Homo sapiens
ccttttttttttttc

SEQ ID NO: 1828508 - DNA, 15 bp, Homo sapiens
ttttcttttttttgg

SEQ ID NO: 1828509 - DNA, 15 bp, Homo sapiens
tttcttttttttgga

SEQ ID NO: 1828510 - DNA, 15 bp, Homo sapiens
ttcttttttttggat

SEQ ID NO: 1828511 - DNA, 15 bp, Homo sapiens
tcttttttttggata

SEQ ID NO: 1828512 - DNA, 15 bp, Homo sapiens
cttttttttggatac

SEQ ID NO: 1828513 - DNA, 15 bp, Homo sapiens
ttttttttggataca

SEQ ID NO: 1828514 - DNA, 15 bp, Homo sapiens
tttttttggatacag

SEQ ID NO: 1828515 - DNA, 15 bp, Homo sapiens
ttttttggatacagg

SEQ ID NO: 1828516 - DNA, 15 bp, Homo sapiens
tttttggatacaggg

SEQ ID NO: 1828517 - DNA, 15 bp, Homo sapiens
ttttggatacagggt

SEQ ID NO: 1828518 - DNA, 15 bp, Homo sapiens
tttggatacagggtc

SEQ ID NO: 1828519 - DNA, 15 bp, Homo sapiens
ttggatacagggtct

SEQ ID NO: 1828520 - DNA, 15 bp, Homo sapiens
tggatacagggtctt

SEQ ID NO: 1828521 - DNA, 15 bp, Homo sapiens
ggatacagggtcttg

SEQ ID NO: 1828522 - DNA, 15 bp, Homo sapiens
gatacagggtcttgc

SEQ ID NO: 1828523 - DNA, 15 bp, Homo sapiens
atacagggtcttgct

SEQ ID NO: 1828524 - DNA, 15 bp, Homo sapiens
tacagggtcttgctg

SEQ ID NO: 1828525 - DNA, 15 bp, Homo sapiens
acagggtcttgctgt

SEQ ID NO: 1828526 - DNA, 15 bp, Homo sapiens
cagggtcttgctgtg

SEQ ID NO: 1828527 - DNA, 15 bp, Homo sapiens
ttgctgtgttgccct

SEQ ID NO: 1828528 - DNA, 15 bp, Homo sapiens
tgctgtgttgccctg

SEQ ID NO: 1828529 - DNA, 15 bp, Homo sapiens
gctgtgttgccctgg

SEQ ID NO: 1828530 - DNA, 15 bp, Homo sapiens
ctgtgttgccctggc

SEQ ID NO: 1828531 - DNA, 15 bp, Homo sapiens
tgtgttgccctggct

SEQ ID NO: 1828532 - DNA, 15 bp, Homo sapiens
gtgttgccctggctg

SEQ ID NO: 1828533 - DNA, 15 bp, Homo sapiens
ctggctggagtgcag

SEQ ID NO: 1828534 - DNA, 15 bp, Homo sapiens
tggctggagtgcagt

SEQ ID NO: 1828535 - DNA, 15 bp, Homo sapiens
gagtgcagtggtgtc

SEQ ID NO: 1828536 - DNA, 15 bp, Homo sapiens
agtgcagtggtgtca

SEQ ID NO: 1828537 - DNA, 15 bp, Homo sapiens
gtgcagtggtgtcat

SEQ ID NO: 1828538 - DNA, 15 bp, Homo sapiens
tgcagtggtgtcatc

SEQ ID NO: 1828539 - DNA, 15 bp, Homo sapiens
gcagtggtgtcatca

SEQ ID NO: 1828540 - DNA, 15 bp, Homo sapiens
cagtggtgtcatcat

SEQ ID NO: 1828541 - DNA, 15 bp, Homo sapiens
agtggtgtcatcatg

SEQ ID NO: 1828542 - DNA, 15 bp, Homo sapiens
gtggtgtcatcatgg

SEQ ID NO: 1828543 - DNA, 15 bp, Homo sapiens
tggtgtcatcatggc

SEQ ID NO: 1828544 - DNA, 15 bp, Homo sapiens
ggtgtcatcatggct

SEQ ID NO: 1828545 - DNA, 15 bp, Homo sapiens
gtgtcatcatggctc

SEQ ID NO: 1828546 - DNA, 15 bp, Homo sapiens
tgtcatcatggctca

SEQ ID NO: 1828547 - DNA, 15 bp, Homo sapiens
gtcatcatggctcac

SEQ ID NO: 1828548 - DNA, 15 bp, Homo sapiens
tcatcatggctcact

SEQ ID NO: 1828549 - DNA, 15 bp, Homo sapiens
catcatggctcactg

SEQ ID NO: 1828550 - DNA, 15 bp, Homo sapiens
tcactgcagtctcag

SEQ ID NO: 1828551 - DNA, 15 bp, Homo sapiens
cactgcagtctcagc

SEQ ID NO: 1828552 - DNA, 15 bp, Homo sapiens
actgcagtctcagcc

SEQ ID NO: 1828553 - DNA, 15 bp, Homo sapiens
ctgcagtctcagcct

SEQ ID NO: 1828554 - DNA, 15 bp, Homo sapiens
tgcagtctcagcctc

SEQ ID NO: 1828555 - DNA, 15 bp, Homo sapiens
gcagtctcagcctct

SEQ ID NO: 1828556 - DNA, 15 bp, Homo sapiens
cagtctcagcctctc

SEQ ID NO: 1828557 - DNA, 15 bp, Homo sapiens
agtctcagcctctcc

SEQ ID NO: 1828558 - DNA, 15 bp, Homo sapiens
gtctcagcctctcct

SEQ ID NO: 1828559 - DNA, 15 bp, Homo sapiens
tctcagcctctcctg

SEQ ID NO: 1828560 - DNA, 15 bp, Homo sapiens
ctcagcctctcctgg

SEQ ID NO: 1828561 - DNA, 15 bp, Homo sapiens
tcagcctctcctggc

SEQ ID NO: 1828562 - DNA, 15 bp, Homo sapiens
cagcctctcctggcc

SEQ ID NO: 1828563 - DNA, 15 bp, Homo sapiens
agcctctcctggcct

SEQ ID NO: 1828564 - DNA, 15 bp, Homo sapiens
gcctctcctggcctg

SEQ ID NO: 1828565 - DNA, 15 bp, Homo sapiens
cctctcctggcctga

SEQ ID NO: 1828566 - DNA, 15 bp, Homo sapiens
ctctcctggcctgag

SEQ ID NO: 1828567 - DNA, 15 bp, Homo sapiens
tctcctggcctgagt

SEQ ID NO: 1828568 - DNA, 15 bp, Homo sapiens
ctcctggcctgagtc

SEQ ID NO: 1828569 - DNA, 15 bp, Homo sapiens
tcctggcctgagtct

SEQ ID NO: 1828570 - DNA, 15 bp, Homo sapiens
cctggcctgagtctt

SEQ ID NO: 1828571 - DNA, 15 bp, Homo sapiens
ctggcctgagtcttg

SEQ ID NO: 1828572 - DNA, 15 bp, Homo sapiens
tggcctgagtcttgc

SEQ ID NO: 1828573 - DNA, 15 bp, Homo sapiens
ggcctgagtcttgct

SEQ ID NO: 1828574 - DNA, 15 bp, Homo sapiens
gcctgagtcttgctc

SEQ ID NO: 1828575 - DNA, 15 bp, Homo sapiens
cctgagtcttgctct

SEQ ID NO: 1828576 - DNA, 15 bp, Homo sapiens
ctgagtcttgctctg

SEQ ID NO: 1828577 - DNA, 15 bp, Homo sapiens
cttgctctgttgcct

SEQ ID NO: 1828578 - DNA, 15 bp, Homo sapiens
ttgctctgttgccta

SEQ ID NO: 1828579 - DNA, 15 bp, Homo sapiens
tgctctgttgcctag

SEQ ID NO: 1828580 - DNA, 15 bp, Homo sapiens
gctctgttgcctagg

SEQ ID NO: 1828581 - DNA, 15 bp, Homo sapiens
gattacaggcgcaca

SEQ ID NO: 1828582 - DNA, 15 bp, Homo sapiens
attacaggcgcacac

SEQ ID NO: 1828583 - DNA, 15 bp, Homo sapiens
ttacaggcgcacacc

SEQ ID NO: 1828584 - DNA, 15 bp, Homo sapiens
ggccaggctggtctg

SEQ ID NO: 1828585 - DNA, 15 bp, Homo sapiens
gccaggctggtctga

SEQ ID NO: 1828586 - DNA, 15 bp, Homo sapiens
ccaggctggtctgaa

SEQ ID NO: 1828587 - DNA, 15 bp, Homo sapiens
caggctggtctgaaa

SEQ ID NO: 1828588 - DNA, 15 bp, Homo sapiens
aggctggtctgaaac

SEQ ID NO: 1828589 - DNA, 15 bp, Homo sapiens
ggctggtctgaaact

SEQ ID NO: 1828590 - DNA, 15 bp, Homo sapiens
gctggtctgaaactc

SEQ ID NO: 1828591 - DNA, 15 bp, Homo sapiens
ctggtctgaaactcc

SEQ ID NO: 1828592 - DNA, 15 bp, Homo sapiens
tctgaaactcctgac

SEQ ID NO: 1828593 - DNA, 15 bp, Homo sapiens
ctgaaactcctgacc

SEQ ID NO: 1828594 - DNA, 15 bp, Homo sapiens
tgaaactcctgacct

SEQ ID NO: 1828595 - DNA, 15 bp, Homo sapiens
gaaactcctgacctt

SEQ ID NO: 1828596 - DNA, 15 bp, Homo sapiens
aaactcctgaccttg

SEQ ID NO: 1828597 - DNA, 15 bp, Homo sapiens
ccttgtgatccgcct

SEQ ID NO: 1828598 - DNA, 15 bp, Homo sapiens
cttgtgatccgcctg

SEQ ID NO: 1828599 - DNA, 15 bp, Homo sapiens
ttgtgatccgcctgc

SEQ ID NO: 1828600 - DNA, 15 bp, Homo sapiens
tgtgatccgcctgcc

SEQ ID NO: 1828601 - DNA, 15 bp, Homo sapiens
cctcccaaagtgcca

SEQ ID NO: 1828602 - DNA, 15 bp, Homo sapiens
ctcccaaagtgccag

SEQ ID NO: 1828603 - DNA, 15 bp, Homo sapiens
ccaaagtgccaggat

SEQ ID NO: 1828604 - DNA, 15 bp, Homo sapiens
caaagtgccaggatt

SEQ ID NO: 1828605 - DNA, 15 bp, Homo sapiens
aaagtgccaggatta

SEQ ID NO: 1828606 - DNA, 15 bp, Homo sapiens
aagtgccaggattac

SEQ ID NO: 1828607 - DNA, 15 bp, Homo sapiens
agtgccaggattaca

SEQ ID NO: 1828608 - DNA, 15 bp, Homo sapiens
gtgccaggattacag

SEQ ID NO: 1828609 - DNA, 15 bp, Homo sapiens
tgccaggattacagg

SEQ ID NO: 1828610 - DNA, 15 bp, Homo sapiens
gccaggattacaggc

SEQ ID NO: 1828611 - DNA, 15 bp, Homo sapiens
ccaggattacaggcg

SEQ ID NO: 1828612 - DNA, 15 bp, Homo sapiens
caggattacaggcgt

SEQ ID NO: 1828613 - DNA, 15 bp, Homo sapiens
ggcgtgatccaccgt

SEQ ID NO: 1828614 - DNA, 15 bp, Homo sapiens
gcgtgatccaccgtg

SEQ ID NO: 1828615 - DNA, 15 bp, Homo sapiens
cgtgatccaccgtgc

SEQ ID NO: 1828616 - DNA, 15 bp, Homo sapiens
gtgatccaccgtgcc

SEQ ID NO: 1828617 - DNA, 15 bp, Homo sapiens
tgatccaccgtgcct

SEQ ID NO: 1828618 - DNA, 15 bp, Homo sapiens
gatccaccgtgcctg

SEQ ID NO: 1828619 - DNA, 15 bp, Homo sapiens
atccaccgtgcctgg

SEQ ID NO: 1828620 - DNA, 15 bp, Homo sapiens
tccaccgtgcctggc

SEQ ID NO: 1828621 - DNA, 15 bp, Homo sapiens
ccaccgtgcctggct

SEQ ID NO: 1828622 - DNA, 15 bp, Homo sapiens
caccgtgcctggcta

SEQ ID NO: 1828623 - DNA, 15 bp, Homo sapiens
accgtgcctggctat

SEQ ID NO: 1828624 - DNA, 15 bp, Homo sapiens
ccgtgcctggctata

SEQ ID NO: 1828625 - DNA, 15 bp, Homo sapiens
cgtgcctggctatac

SEQ ID NO: 1828626 - DNA, 15 bp, Homo sapiens
gtgcctggctataca

SEQ ID NO: 1828627 - DNA, 15 bp, Homo sapiens
tgcctggctatacat

SEQ ID NO: 1828628 - DNA, 15 bp, Homo sapiens
gcctggctatacatt

SEQ ID NO: 1828629 - DNA, 15 bp, Homo sapiens
cctggctatacattg

SEQ ID NO: 1828630 - DNA, 15 bp, Homo sapiens
ctggctatacattgt

SEQ ID NO: 1828631 - DNA, 15 bp, Homo sapiens
ggctatacattgttt

SEQ ID NO: 1828632 - DNA, 15 bp, Homo sapiens
gctatacattgtttt

SEQ ID NO: 1828633 - DNA, 15 bp, Homo sapiens
ctatacattgttttt

SEQ ID NO: 1828634 - DNA, 15 bp, Homo sapiens
tatacattgtttttt

SEQ ID NO: 1828635 - DNA, 15 bp, Homo sapiens
atacattgttttttt

SEQ ID NO: 1828636 - DNA, 15 bp, Homo sapiens
tacattgtttttttt

SEQ ID NO: 1828637 - DNA, 15 bp, Homo sapiens
acattgtttttttta

SEQ ID NO: 1828638 - DNA, 15 bp, Homo sapiens
cattgttttttttaa

SEQ ID NO: 1828639 - DNA, 15 bp, Homo sapiens
attgttttttttaat

SEQ ID NO: 1828640 - DNA, 15 bp, Homo sapiens
ttgttttttttaatg

SEQ ID NO: 1828641 - DNA, 15 bp, Homo sapiens
tgttttttttaatga

SEQ ID NO: 1828642 - DNA, 15 bp, Homo sapiens
gttttttttaatgaa

SEQ ID NO: 1828643 - DNA, 15 bp, Homo sapiens
ttttttttaatgaaa

SEQ ID NO: 1828644 - DNA, 15 bp, Homo sapiens
tttttttaatgaaaa

SEQ ID NO: 1828645 - DNA, 15 bp, Homo sapiens
ttttttaatgaaaat

SEQ ID NO: 1828646 - DNA, 15 bp, Homo sapiens
tttttaatgaaaata

SEQ ID NO: 1828647 - DNA, 15 bp, Homo sapiens
ttttaatgaaaatag

SEQ ID NO: 1828648 - DNA, 15 bp, Homo sapiens
tttaatgaaaataga

SEQ ID NO: 1828649 - DNA, 15 bp, Homo sapiens
ttaatgaaaatagag

SEQ ID NO: 1828650 - DNA, 15 bp, Homo sapiens
taatgaaaatagaga

SEQ ID NO: 1828651 - DNA, 15 bp, Homo sapiens
aatgaaaatagagaa

SEQ ID NO: 1828652 - DNA, 15 bp, Homo sapiens
atgaaaatagagaat

SEQ ID NO: 1828653 - DNA, 15 bp, Homo sapiens
tgaaaatagagaatt

SEQ ID NO: 1828654 - DNA, 15 bp, Homo sapiens
gaaaatagagaattg

SEQ ID NO: 1828655 - DNA, 15 bp, Homo sapiens
aaaatagagaattgt

SEQ ID NO: 1828656 - DNA, 15 bp, Homo sapiens
aaatagagaattgtt

SEQ ID NO: 1828657 - DNA, 15 bp, Homo sapiens
aatagagaattgttg

SEQ ID NO: 1828658 - DNA, 15 bp, Homo sapiens
atagagaattgttgt

SEQ ID NO: 1828659 - DNA, 15 bp, Homo sapiens
tagagaattgttgta

SEQ ID NO: 1828660 - DNA, 15 bp, Homo sapiens
agagaattgttgtag

SEQ ID NO: 1828661 - DNA, 15 bp, Homo sapiens
gagaattgttgtagt

SEQ ID NO: 1828662 - DNA, 15 bp, Homo sapiens
agaattgttgtagta

SEQ ID NO: 1828663 - DNA, 15 bp, Homo sapiens
gaattgttgtagtat

SEQ ID NO: 1828664 - DNA, 15 bp, Homo sapiens
aattgttgtagtatt

SEQ ID NO: 1828665 - DNA, 15 bp, Homo sapiens
attgttgtagtattg

SEQ ID NO: 1828666 - DNA, 15 bp, Homo sapiens
ttgttgtagtattga

SEQ ID NO: 1828667 - DNA, 15 bp, Homo sapiens
tgttgtagtattgag

SEQ ID NO: 1828668 - DNA, 15 bp, Homo sapiens
gttgtagtattgagg

SEQ ID NO: 1828669 - DNA, 15 bp, Homo sapiens
ttgtagtattgaggt

SEQ ID NO: 1828670 - DNA, 15 bp, Homo sapiens
tgtagtattgaggta

SEQ ID NO: 1828671 - DNA, 15 bp, Homo sapiens
gtagtattgaggtaa

SEQ ID NO: 1828672 - DNA, 15 bp, Homo sapiens
tagtattgaggtaat

SEQ ID NO: 1828673 - DNA, 15 bp, Homo sapiens
agtattgaggtaata

SEQ ID NO: 1828674 - DNA, 15 bp, Homo sapiens
gtattgaggtaatag

SEQ ID NO: 1828675 - DNA, 15 bp, Homo sapiens
tattgaggtaataga

SEQ ID NO: 1828676 - DNA, 15 bp, Homo sapiens
attgaggtaatagaa

SEQ ID NO: 1828677 - DNA, 15 bp, Homo sapiens
ttgaggtaatagaat

SEQ ID NO: 1828678 - DNA, 15 bp, Homo sapiens
tgaggtaatagaatc

SEQ ID NO: 1828679 - DNA, 15 bp, Homo sapiens
gaggtaatagaatcc

SEQ ID NO: 1828680 - DNA, 15 bp, Homo sapiens
aggtaatagaatcct

SEQ ID NO: 1828681 - DNA, 15 bp, Homo sapiens
ggtaatagaatccta

SEQ ID NO: 1828682 - DNA, 15 bp, Homo sapiens
gtaatagaatcctaa

SEQ ID NO: 1828683 - DNA, 15 bp, Homo sapiens
taatagaatcctaac

SEQ ID NO: 1828684 - DNA, 15 bp, Homo sapiens
aatagaatcctaact

SEQ ID NO: 1828685 - DNA, 15 bp, Homo sapiens
atagaatcctaacta

SEQ ID NO: 1828686 - DNA, 15 bp, Homo sapiens
tagaatcctaactaa

SEQ ID NO: 1828687 - DNA, 15 bp, Homo sapiens
agaatcctaactaaa

SEQ ID NO: 1828688 - DNA, 15 bp, Homo sapiens
gaatcctaactaaag

SEQ ID NO: 1828689 - DNA, 15 bp, Homo sapiens
aatcctaactaaagg

SEQ ID NO: 1828690 - DNA, 15 bp, Homo sapiens
atcctaactaaagga

SEQ ID NO: 1828691 - DNA, 15 bp, Homo sapiens
tcctaactaaaggag

SEQ ID NO: 1828692 - DNA, 15 bp, Homo sapiens
cctaactaaaggagc

SEQ ID NO: 1828693 - DNA, 15 bp, Homo sapiens
ctaactaaaggagca

SEQ ID NO: 1828694 - DNA, 15 bp, Homo sapiens
taactaaaggagcaa

SEQ ID NO: 1828695 - DNA, 15 bp, Homo sapiens
aactaaaggagcaat

SEQ ID NO: 1828696 - DNA, 15 bp, Homo sapiens
actaaaggagcaatt

SEQ ID NO: 1828697 - DNA, 15 bp, Homo sapiens
ctaaaggagcaattt

SEQ ID NO: 1828698 - DNA, 15 bp, Homo sapiens
taaaggagcaatttc

SEQ ID NO: 1828699 - DNA, 15 bp, Homo sapiens
aaaggagcaatttct

SEQ ID NO: 1828700 - DNA, 15 bp, Homo sapiens
aaggagcaatttctt

SEQ ID NO: 1828701 - DNA, 15 bp, Homo sapiens
aggagcaatttcttt

SEQ ID NO: 1828702 - DNA, 15 bp, Homo sapiens
ggagcaatttctttg

SEQ ID NO: 1828703 - DNA, 15 bp, Homo sapiens
gagcaatttctttgg

SEQ ID NO: 1828704 - DNA, 15 bp, Homo sapiens
agcaatttctttgga

SEQ ID NO: 1828705 - DNA, 15 bp, Homo sapiens
gcaatttctttggaa

SEQ ID NO: 1828706 - DNA, 15 bp, Homo sapiens
caatttctttggaat

SEQ ID NO: 1828707 - DNA, 15 bp, Homo sapiens
aatttctttggaatt

SEQ ID NO: 1828708 - DNA, 15 bp, Homo sapiens
atttctttggaatta

SEQ ID NO: 1828709 - DNA, 15 bp, Homo sapiens
tttctttggaattac

SEQ ID NO: 1828710 - DNA, 15 bp, Homo sapiens
ttctttggaattact

SEQ ID NO: 1828711 - DNA, 15 bp, Homo sapiens
tctttggaattactt

SEQ ID NO: 1828712 - DNA, 15 bp, Homo sapiens
ctttggaattacttc

SEQ ID NO: 1828713 - DNA, 15 bp, Homo sapiens
tttggaattacttct

SEQ ID NO: 1828714 - DNA, 15 bp, Homo sapiens
ttggaattacttctc

SEQ ID NO: 1828715 - DNA, 15 bp, Homo sapiens
tggaattacttctct

SEQ ID NO: 1828716 - DNA, 15 bp, Homo sapiens
ggaattacttctctg

SEQ ID NO: 1828717 - DNA, 15 bp, Homo sapiens
gaattacttctctgt

SEQ ID NO: 1828718 - DNA, 15 bp, Homo sapiens
aattacttctctgta

SEQ ID NO: 1828719 - DNA, 15 bp, Homo sapiens
attacttctctgtaa

SEQ ID NO: 1828720 - DNA, 15 bp, Homo sapiens
ttacttctctgtaat

SEQ ID NO: 1828721 - DNA, 15 bp, Homo sapiens
tacttctctgtaata

SEQ ID NO: 1828722 - DNA, 15 bp, Homo sapiens
acttctctgtaatag

SEQ ID NO: 1828723 - DNA, 15 bp, Homo sapiens
cttctctgtaataga

SEQ ID NO: 1828724 - DNA, 15 bp, Homo sapiens
ttctctgtaatagaa

SEQ ID NO: 1828725 - DNA, 15 bp, Homo sapiens
tctctgtaatagaaa

SEQ ID NO: 1828726 - DNA, 15 bp, Homo sapiens
ctctgtaatagaaat

SEQ ID NO: 1828727 - DNA, 15 bp, Homo sapiens
tctgtaatagaaatt

SEQ ID NO: 1828728 - DNA, 15 bp, Homo sapiens
ctgtaatagaaattc

SEQ ID NO: 1828729 - DNA, 15 bp, Homo sapiens
tgtaatagaaattct

SEQ ID NO: 1828730 - DNA, 15 bp, Homo sapiens
gtaatagaaattctt

SEQ ID NO: 1828731 - DNA, 15 bp, Homo sapiens
taatagaaattcttg

SEQ ID NO: 1828732 - DNA, 15 bp, Homo sapiens
aatagaaattcttgg

SEQ ID NO: 1828733 - DNA, 15 bp, Homo sapiens
atagaaattcttggc

SEQ ID NO: 1828734 - DNA, 15 bp, Homo sapiens
tagaaattcttggct

SEQ ID NO: 1828735 - DNA, 15 bp, Homo sapiens
agaaattcttggctg

SEQ ID NO: 1828736 - DNA, 15 bp, Homo sapiens
gaaattcttggctgg

SEQ ID NO: 1828737 - DNA, 15 bp, Homo sapiens
aaattcttggctggt

SEQ ID NO: 1828738 - DNA, 15 bp, Homo sapiens
aattcttggctggtg

SEQ ID NO: 1828739 - DNA, 15 bp, Homo sapiens
attcttggctggtgg

SEQ ID NO: 1828740 - DNA, 15 bp, Homo sapiens
ttcttggctggtgga

SEQ ID NO: 1828741 - DNA, 15 bp, Homo sapiens
tcttggctggtggag

SEQ ID NO: 1828742 - DNA, 15 bp, Homo sapiens
cttggctggtggagt

SEQ ID NO: 1828743 - DNA, 15 bp, Homo sapiens
ttggctggtggagtg

SEQ ID NO: 1828744 - DNA, 15 bp, Homo sapiens
tggctggtggagtgg

SEQ ID NO: 1828745 - DNA, 15 bp, Homo sapiens
ggctggtggagtggc

SEQ ID NO: 1828746 - DNA, 15 bp, Homo sapiens
gctggtggagtggct

SEQ ID NO: 1828747 - DNA, 15 bp, Homo sapiens
ctggtggagtggctc

SEQ ID NO: 1828748 - DNA, 15 bp, Homo sapiens
tggtggagtggctca

SEQ ID NO: 1828749 - DNA, 15 bp, Homo sapiens
ggagtggctcatgca

SEQ ID NO: 1828750 - DNA, 15 bp, Homo sapiens
gagtggctcatgcat

SEQ ID NO: 1828751 - DNA, 15 bp, Homo sapiens
agtggctcatgcatg

SEQ ID NO: 1828752 - DNA, 15 bp, Homo sapiens
gtggctcatgcatgt

SEQ ID NO: 1828753 - DNA, 15 bp, Homo sapiens
tggctcatgcatgta

SEQ ID NO: 1828754 - DNA, 15 bp, Homo sapiens
ggctcatgcatgtaa

SEQ ID NO: 1828755 - DNA, 15 bp, Homo sapiens
gctcatgcatgtaat

SEQ ID NO: 1828756 - DNA, 15 bp, Homo sapiens
ctcatgcatgtaatt

SEQ ID NO: 1828757 - DNA, 15 bp, Homo sapiens
tcatgcatgtaattc

SEQ ID NO: 1828758 - DNA, 15 bp, Homo sapiens
catgcatgtaattcc

SEQ ID NO: 1828759 - DNA, 15 bp, Homo sapiens
atgcatgtaattcca

SEQ ID NO: 1828760 - DNA, 15 bp, Homo sapiens
tgcatgtaattccag

SEQ ID NO: 1828761 - DNA, 15 bp, Homo sapiens
gcatgtaattccagc

SEQ ID NO: 1828762 - DNA, 15 bp, Homo sapiens
catgtaattccagca

SEQ ID NO: 1828763 - DNA, 15 bp, Homo sapiens
atgtaattccagcac

SEQ ID NO: 1828764 - DNA, 15 bp, Homo sapiens
ctttgggaggctaaa

SEQ ID NO: 1828765 - DNA, 15 bp, Homo sapiens
tttgggaggctaaag

SEQ ID NO: 1828766 - DNA, 15 bp, Homo sapiens
ttgggaggctaaagt

SEQ ID NO: 1828767 - DNA, 15 bp, Homo sapiens
tgggaggctaaagtg

SEQ ID NO: 1828768 - DNA, 15 bp, Homo sapiens
gggaggctaaagtgg

SEQ ID NO: 1828769 - DNA, 15 bp, Homo sapiens
ggaggctaaagtggg

SEQ ID NO: 1828770 - DNA, 15 bp, Homo sapiens
gaggctaaagtggga

SEQ ID NO: 1828771 - DNA, 15 bp, Homo sapiens
aggctaaagtgggag

SEQ ID NO: 1828772 - DNA, 15 bp, Homo sapiens
ggctaaagtgggagg

SEQ ID NO: 1828773 - DNA, 15 bp, Homo sapiens
gctaaagtgggagga

SEQ ID NO: 1828774 - DNA, 15 bp, Homo sapiens
ctaaagtgggaggat

SEQ ID NO: 1828775 - DNA, 15 bp, Homo sapiens
taaagtgggaggatc

SEQ ID NO: 1828776 - DNA, 15 bp, Homo sapiens
aaagtgggaggatca

SEQ ID NO: 1828777 - DNA, 15 bp, Homo sapiens
gatcacttgagccct

SEQ ID NO: 1828778 - DNA, 15 bp, Homo sapiens
atcacttgagccctg

SEQ ID NO: 1828779 - DNA, 15 bp, Homo sapiens
tcacttgagccctgg

SEQ ID NO: 1828780 - DNA, 15 bp, Homo sapiens
cctggagtttgagat

SEQ ID NO: 1828781 - DNA, 15 bp, Homo sapiens
ctggagtttgagatc

SEQ ID NO: 1828782 - DNA, 15 bp, Homo sapiens
tggagtttgagatca

SEQ ID NO: 1828783 - DNA, 15 bp, Homo sapiens
ggagtttgagatcac

SEQ ID NO: 1828784 - DNA, 15 bp, Homo sapiens
gagtttgagatcacc

SEQ ID NO: 1828785 - DNA, 15 bp, Homo sapiens
agtttgagatcaccc

SEQ ID NO: 1828786 - DNA, 15 bp, Homo sapiens
gtttgagatcaccct

SEQ ID NO: 1828787 - DNA, 15 bp, Homo sapiens
tttgagatcaccctg

SEQ ID NO: 1828788 - DNA, 15 bp, Homo sapiens
ttgagatcaccctga

SEQ ID NO: 1828789 - DNA, 15 bp, Homo sapiens
tgagatcaccctgag

SEQ ID NO: 1828790 - DNA, 15 bp, Homo sapiens
gagatcaccctgagc

SEQ ID NO: 1828791 - DNA, 15 bp, Homo sapiens
agatcaccctgagca

SEQ ID NO: 1828792 - DNA, 15 bp, Homo sapiens
gatcaccctgagcaa

SEQ ID NO: 1828793 - DNA, 15 bp, Homo sapiens
atcaccctgagcaac

SEQ ID NO: 1828794 - DNA, 15 bp, Homo sapiens
tcaccctgagcaaca

SEQ ID NO: 1828795 - DNA, 15 bp, Homo sapiens
caccctgagcaacat

SEQ ID NO: 1828796 - DNA, 15 bp, Homo sapiens
accctgagcaacata

SEQ ID NO: 1828797 - DNA, 15 bp, Homo sapiens
ccctgagcaacatag

SEQ ID NO: 1828798 - DNA, 15 bp, Homo sapiens
cctgagcaacataga

SEQ ID NO: 1828799 - DNA, 15 bp, Homo sapiens
ctgagcaacatagac

SEQ ID NO: 1828800 - DNA, 15 bp, Homo sapiens
tgagcaacatagacc

SEQ ID NO: 1828801 - DNA, 15 bp, Homo sapiens
gagcaacatagaccc

SEQ ID NO: 1828802 - DNA, 15 bp, Homo sapiens
agcaacatagaccct

SEQ ID NO: 1828803 - DNA, 15 bp, Homo sapiens
gcaacatagaccctg

SEQ ID NO: 1828804 - DNA, 15 bp, Homo sapiens
caacatagaccctga

SEQ ID NO: 1828805 - DNA, 15 bp, Homo sapiens
aacatagaccctgac

SEQ ID NO: 1828806 - DNA, 15 bp, Homo sapiens
acatagaccctgact

SEQ ID NO: 1828807 - DNA, 15 bp, Homo sapiens
catagaccctgactc

SEQ ID NO: 1828808 - DNA, 15 bp, Homo sapiens
atagaccctgactct

SEQ ID NO: 1828809 - DNA, 15 bp, Homo sapiens
tagaccctgactcta

SEQ ID NO: 1828810 - DNA, 15 bp, Homo sapiens
agaccctgactctac

SEQ ID NO: 1828811 - DNA, 15 bp, Homo sapiens
gaccctgactctaca

SEQ ID NO: 1828812 - DNA, 15 bp, Homo sapiens
accctgactctacaa

SEQ ID NO: 1828813 - DNA, 15 bp, Homo sapiens
ccctgactctacaaa

SEQ ID NO: 1828814 - DNA, 15 bp, Homo sapiens
cctgactctacaaaa

SEQ ID NO: 1828815 - DNA, 15 bp, Homo sapiens
ctgactctacaaaaa

SEQ ID NO: 1828816 - DNA, 15 bp, Homo sapiens
tgactctacaaaaaa

SEQ ID NO: 1828817 - DNA, 15 bp, Homo sapiens
gactctacaaaaaat

SEQ ID NO: 1828818 - DNA, 15 bp, Homo sapiens
actctacaaaaaatt

SEQ ID NO: 1828819 - DNA, 15 bp, Homo sapiens
tctacaaaaaattag

SEQ ID NO: 1828820 - DNA, 15 bp, Homo sapiens
ctacaaaaaattagc

SEQ ID NO: 1828821 - DNA, 15 bp, Homo sapiens
acaaaaaattagcct

SEQ ID NO: 1828822 - DNA, 15 bp, Homo sapiens
caaaaaattagcctg

SEQ ID NO: 1828823 - DNA, 15 bp, Homo sapiens
aaaaaattagcctgg

SEQ ID NO: 1828824 - DNA, 15 bp, Homo sapiens
aaaaattagcctggt

SEQ ID NO: 1828825 - DNA, 15 bp, Homo sapiens
aaaattagcctggtg

SEQ ID NO: 1828826 - DNA, 15 bp, Homo sapiens
aaattagcctggtgt

SEQ ID NO: 1828827 - DNA, 15 bp, Homo sapiens
aattagcctggtgtg

SEQ ID NO: 1828828 - DNA, 15 bp, Homo sapiens
attagcctggtgtgc

SEQ ID NO: 1828829 - DNA, 15 bp, Homo sapiens
ttagcctggtgtgct

SEQ ID NO: 1828830 - DNA, 15 bp, Homo sapiens
tagcctggtgtgctg

SEQ ID NO: 1828831 - DNA, 15 bp, Homo sapiens
agcctggtgtgctgg

SEQ ID NO: 1828832 - DNA, 15 bp, Homo sapiens
gcctggtgtgctggt

SEQ ID NO: 1828833 - DNA, 15 bp, Homo sapiens
cctggtgtgctggtg

SEQ ID NO: 1828834 - DNA, 15 bp, Homo sapiens
ctggtgtgctggtgc

SEQ ID NO: 1828835 - DNA, 15 bp, Homo sapiens
tggtgtgctggtgcg

SEQ ID NO: 1828836 - DNA, 15 bp, Homo sapiens
ggtgtgctggtgcgt

SEQ ID NO: 1828837 - DNA, 15 bp, Homo sapiens
gtgtgctggtgcgta

SEQ ID NO: 1828838 - DNA, 15 bp, Homo sapiens
tgtgctggtgcgtac

SEQ ID NO: 1828839 - DNA, 15 bp, Homo sapiens
gtgctggtgcgtact

SEQ ID NO: 1828840 - DNA, 15 bp, Homo sapiens
tgctggtgcgtactt

SEQ ID NO: 1828841 - DNA, 15 bp, Homo sapiens
gctggtgcgtacttg

SEQ ID NO: 1828842 - DNA, 15 bp, Homo sapiens
ctggtgcgtacttgt

SEQ ID NO: 1828843 - DNA, 15 bp, Homo sapiens
tggtgcgtacttgta

SEQ ID NO: 1828844 - DNA, 15 bp, Homo sapiens
ggtgcgtacttgtag

SEQ ID NO: 1828845 - DNA, 15 bp, Homo sapiens
gtgcgtacttgtagt

SEQ ID NO: 1828846 - DNA, 15 bp, Homo sapiens
tgcgtacttgtagtc

SEQ ID NO: 1828847 - DNA, 15 bp, Homo sapiens
gcgtacttgtagtcc

SEQ ID NO: 1828848 - DNA, 15 bp, Homo sapiens
cgtacttgtagtccc

SEQ ID NO: 1828849 - DNA, 15 bp, Homo sapiens
gtacttgtagtccca

SEQ ID NO: 1828850 - DNA, 15 bp, Homo sapiens
tacttgtagtcccag

SEQ ID NO: 1828851 - DNA, 15 bp, Homo sapiens
ttgtagtcccagctg

SEQ ID NO: 1828852 - DNA, 15 bp, Homo sapiens
tagtcccagctgcta

SEQ ID NO: 1828853 - DNA, 15 bp, Homo sapiens
agtcccagctgctaa

SEQ ID NO: 1828854 - DNA, 15 bp, Homo sapiens
gtcccagctgctaag

SEQ ID NO: 1828855 - DNA, 15 bp, Homo sapiens
tcccagctgctaagg

SEQ ID NO: 1828856 - DNA, 15 bp, Homo sapiens
cccagctgctaagga

SEQ ID NO: 1828857 - DNA, 15 bp, Homo sapiens
ccagctgctaaggag

SEQ ID NO: 1828858 - DNA, 15 bp, Homo sapiens
cagctgctaaggagg

SEQ ID NO: 1828859 - DNA, 15 bp, Homo sapiens
agctgctaaggaggt

SEQ ID NO: 1828860 - DNA, 15 bp, Homo sapiens
gctgctaaggaggtt

SEQ ID NO: 1828861 - DNA, 15 bp, Homo sapiens
ctgctaaggaggttg

SEQ ID NO: 1828862 - DNA, 15 bp, Homo sapiens
tgctaaggaggttga

SEQ ID NO: 1828863 - DNA, 15 bp, Homo sapiens
gctaaggaggttgag

SEQ ID NO: 1828864 - DNA, 15 bp, Homo sapiens
ctaaggaggttgagg

SEQ ID NO: 1828865 - DNA, 15 bp, Homo sapiens
taaggaggttgaggt

SEQ ID NO: 1828866 - DNA, 15 bp, Homo sapiens
aaggaggttgaggtg

SEQ ID NO: 1828867 - DNA, 15 bp, Homo sapiens
ggattgcttgagccg

SEQ ID NO: 1828868 - DNA, 15 bp, Homo sapiens
gattgcttgagccgg

SEQ ID NO: 1828869 - DNA, 15 bp, Homo sapiens
attgcttgagccgga

SEQ ID NO: 1828870 - DNA, 15 bp, Homo sapiens
ttgcttgagccggaa

SEQ ID NO: 1828871 - DNA, 15 bp, Homo sapiens
tgcttgagccggaaa

SEQ ID NO: 1828872 - DNA, 15 bp, Homo sapiens
gcttgagccggaaag

SEQ ID NO: 1828873 - DNA, 15 bp, Homo sapiens
cttgagccggaaagg

SEQ ID NO: 1828874 - DNA, 15 bp, Homo sapiens
ttgagccggaaaggt

SEQ ID NO: 1828875 - DNA, 15 bp, Homo sapiens
tgagccggaaaggtt

SEQ ID NO: 1828876 - DNA, 15 bp, Homo sapiens
gagccggaaaggtta

SEQ ID NO: 1828877 - DNA, 15 bp, Homo sapiens
agccggaaaggttaa

SEQ ID NO: 1828878 - DNA, 15 bp, Homo sapiens
gccggaaaggttaag

SEQ ID NO: 1828879 - DNA, 15 bp, Homo sapiens
ccggaaaggttaagg

SEQ ID NO: 1828880 - DNA, 15 bp, Homo sapiens
cggaaaggttaaggc

SEQ ID NO: 1828881 - DNA, 15 bp, Homo sapiens
ggaaaggttaaggcc

SEQ ID NO: 1828882 - DNA, 15 bp, Homo sapiens
gaaaggttaaggcca

SEQ ID NO: 1828883 - DNA, 15 bp, Homo sapiens
aaaggttaaggccat

SEQ ID NO: 1828884 - DNA, 15 bp, Homo sapiens
aaggttaaggccata

SEQ ID NO: 1828885 - DNA, 15 bp, Homo sapiens
aggttaaggccataa

SEQ ID NO: 1828886 - DNA, 15 bp, Homo sapiens
ggttaaggccataat

SEQ ID NO: 1828887 - DNA, 15 bp, Homo sapiens
gttaaggccataatg

SEQ ID NO: 1828888 - DNA, 15 bp, Homo sapiens
ttaaggccataatga

SEQ ID NO: 1828889 - DNA, 15 bp, Homo sapiens
taaggccataatgag

SEQ ID NO: 1828890 - DNA, 15 bp, Homo sapiens
aaggccataatgagc

SEQ ID NO: 1828891 - DNA, 15 bp, Homo sapiens
aggccataatgagcc

SEQ ID NO: 1828892 - DNA, 15 bp, Homo sapiens
ggccataatgagcca

SEQ ID NO: 1828893 - DNA, 15 bp, Homo sapiens
gccataatgagccat

SEQ ID NO: 1828894 - DNA, 15 bp, Homo sapiens
ccataatgagccatg

SEQ ID NO: 1828895 - DNA, 15 bp, Homo sapiens
cataatgagccatga

SEQ ID NO: 1828896 - DNA, 15 bp, Homo sapiens
ataatgagccatgat

SEQ ID NO: 1828897 - DNA, 15 bp, Homo sapiens
taatgagccatgatg

SEQ ID NO: 1828898 - DNA, 15 bp, Homo sapiens
aatgagccatgatgg

SEQ ID NO: 1828899 - DNA, 15 bp, Homo sapiens
atgagccatgatggc

SEQ ID NO: 1828900 - DNA, 15 bp, Homo sapiens
tgagccatgatggca

SEQ ID NO: 1828901 - DNA, 15 bp, Homo sapiens
gagccatgatggcac

SEQ ID NO: 1828902 - DNA, 15 bp, Homo sapiens
agccatgatggcacc

SEQ ID NO: 1828903 - DNA, 15 bp, Homo sapiens
gccatgatggcacca

SEQ ID NO: 1828904 - DNA, 15 bp, Homo sapiens
ccatgatggcaccac

SEQ ID NO: 1828905 - DNA, 15 bp, Homo sapiens
catgatggcaccact

SEQ ID NO: 1828906 - DNA, 15 bp, Homo sapiens
atgatggcaccactg

SEQ ID NO: 1828907 - DNA, 15 bp, Homo sapiens
tgatggcaccactgc

SEQ ID NO: 1828908 - DNA, 15 bp, Homo sapiens
ctccagcctgggcgt

SEQ ID NO: 1828909 - DNA, 15 bp, Homo sapiens
tccagcctgggcgtc

SEQ ID NO: 1828910 - DNA, 15 bp, Homo sapiens
ccagcctgggcgtca

SEQ ID NO: 1828911 - DNA, 15 bp, Homo sapiens
cagcctgggcgtcag

SEQ ID NO: 1828912 - DNA, 15 bp, Homo sapiens
agcctgggcgtcaga

SEQ ID NO: 1828913 - DNA, 15 bp, Homo sapiens
gcctgggcgtcagag

SEQ ID NO: 1828914 - DNA, 15 bp, Homo sapiens
cctgggcgtcagagc

SEQ ID NO: 1828915 - DNA, 15 bp, Homo sapiens
ctgggcgtcagagcg

SEQ ID NO: 1828916 - DNA, 15 bp, Homo sapiens
tgggcgtcagagcga

SEQ ID NO: 1828917 - DNA, 15 bp, Homo sapiens
gggcgtcagagcgaa

SEQ ID NO: 1828918 - DNA, 15 bp, Homo sapiens
ggcgtcagagcgaaa

SEQ ID NO: 1828919 - DNA, 15 bp, Homo sapiens
gcgtcagagcgaaac

SEQ ID NO: 1828920 - DNA, 15 bp, Homo sapiens
cgtcagagcgaaact

SEQ ID NO: 1828921 - DNA, 15 bp, Homo sapiens
gtcagagcgaaactg

SEQ ID NO: 1828922 - DNA, 15 bp, Homo sapiens
tcagagcgaaactgt

SEQ ID NO: 1828923 - DNA, 15 bp, Homo sapiens
cagagcgaaactgtc

SEQ ID NO: 1828924 - DNA, 15 bp, Homo sapiens
agagcgaaactgtct

SEQ ID NO: 1828925 - DNA, 15 bp, Homo sapiens
gagcgaaactgtcta

SEQ ID NO: 1828926 - DNA, 15 bp, Homo sapiens
agcgaaactgtctaa

SEQ ID NO: 1828927 - DNA, 15 bp, Homo sapiens
gcgaaactgtctaaa

SEQ ID NO: 1828928 - DNA, 15 bp, Homo sapiens
cgaaactgtctaaaa

SEQ ID NO: 1828929 - DNA, 15 bp, Homo sapiens
gaaactgtctaaaaa

SEQ ID NO: 1828930 - DNA, 15 bp, Homo sapiens
aaactgtctaaaaag

SEQ ID NO: 1828931 - DNA, 15 bp, Homo sapiens
aactgtctaaaaaga

SEQ ID NO: 1828932 - DNA, 15 bp, Homo sapiens
actgtctaaaaagaa

SEQ ID NO: 1828933 - DNA, 15 bp, Homo sapiens
ctgtctaaaaagaaa

SEQ ID NO: 1828934 - DNA, 15 bp, Homo sapiens
tgtctaaaaagaaaa

SEQ ID NO: 1828935 - DNA, 15 bp, Homo sapiens
gtctaaaaagaaaaa

SEQ ID NO: 1828936 - DNA, 15 bp, Homo sapiens
tctaaaaagaaaaaa

SEQ ID NO: 1828937 - DNA, 15 bp, Homo sapiens
ctaaaaagaaaaaaa

SEQ ID NO: 1828938 - DNA, 15 bp, Homo sapiens
taaaaagaaaaaaaa

SEQ ID NO: 1828939 - DNA, 15 bp, Homo sapiens
aaaaagaaaaaaaac

SEQ ID NO: 1828940 - DNA, 15 bp, Homo sapiens
aaaagaaaaaaaaca

SEQ ID NO: 1828941 - DNA, 15 bp, Homo sapiens
aaagaaaaaaaacaa

SEQ ID NO: 1828942 - DNA, 15 bp, Homo sapiens
aagaaaaaaaacaaa

SEQ ID NO: 1828943 - DNA, 15 bp, Homo sapiens
agaaaaaaaacaaaa

SEQ ID NO: 1828944 - DNA, 15 bp, Homo sapiens
gaaaaaaaacaaaaa

SEQ ID NO: 1828945 - DNA, 15 bp, Homo sapiens
aaaaaaacaaaaagc

SEQ ID NO: 1828946 - DNA, 15 bp, Homo sapiens
aaaaaacaaaaagcc

SEQ ID NO: 1828947 - DNA, 15 bp, Homo sapiens
aaaaacaaaaagccg

SEQ ID NO: 1828948 - DNA, 15 bp, Homo sapiens
aaaacaaaaagccgg

SEQ ID NO: 1828949 - DNA, 15 bp, Homo sapiens
aaacaaaaagccggg

SEQ ID NO: 1828950 - DNA, 15 bp, Homo sapiens
aacaaaaagccgggc

SEQ ID NO: 1828951 - DNA, 15 bp, Homo sapiens
acaaaaagccgggcg

SEQ ID NO: 1828952 - DNA, 15 bp, Homo sapiens
caaaaagccgggcgc

SEQ ID NO: 1828953 - DNA, 15 bp, Homo sapiens
aaaaagccgggcgcg

SEQ ID NO: 1828954 - DNA, 15 bp, Homo sapiens
aaaagccgggcgcgg

SEQ ID NO: 1828955 - DNA, 15 bp, Homo sapiens
aaagccgggcgcggt

SEQ ID NO: 1828956 - DNA, 15 bp, Homo sapiens
aagccgggcgcggtg

SEQ ID NO: 1828957 - DNA, 15 bp, Homo sapiens
cgcggtggctcacac

SEQ ID NO: 1828958 - DNA, 15 bp, Homo sapiens
tgggaggctgaggcc

SEQ ID NO: 1828959 - DNA, 15 bp, Homo sapiens
gggaggctgaggcct

SEQ ID NO: 1828960 - DNA, 15 bp, Homo sapiens
ggaggctgaggcctg

SEQ ID NO: 1828961 - DNA, 15 bp, Homo sapiens
gaggctgaggcctgc

SEQ ID NO: 1828962 - DNA, 15 bp, Homo sapiens
aggctgaggcctgcg

SEQ ID NO: 1828963 - DNA, 15 bp, Homo sapiens
ggctgaggcctgcgg

SEQ ID NO: 1828964 - DNA, 15 bp, Homo sapiens
gctgaggcctgcgga

SEQ ID NO: 1828965 - DNA, 15 bp, Homo sapiens
ctgaggcctgcggat

SEQ ID NO: 1828966 - DNA, 15 bp, Homo sapiens
tgaggcctgcggatc

SEQ ID NO: 1828967 - DNA, 15 bp, Homo sapiens
gaggcctgcggatca

SEQ ID NO: 1828968 - DNA, 15 bp, Homo sapiens
aggcctgcggatcac

SEQ ID NO: 1828969 - DNA, 15 bp, Homo sapiens
ggcctgcggatcacg

SEQ ID NO: 1828970 - DNA, 15 bp, Homo sapiens
gcctgcggatcacga

SEQ ID NO: 1828971 - DNA, 15 bp, Homo sapiens
cctgcggatcacgag

SEQ ID NO: 1828972 - DNA, 15 bp, Homo sapiens
ctgcggatcacgagg

SEQ ID NO: 1828973 - DNA, 15 bp, Homo sapiens
tgcggatcacgaggt

SEQ ID NO: 1828974 - DNA, 15 bp, Homo sapiens
gcggatcacgaggtt

SEQ ID NO: 1828975 - DNA, 15 bp, Homo sapiens
cggatcacgaggtta

SEQ ID NO: 1828976 - DNA, 15 bp, Homo sapiens
ggatcacgaggttag

SEQ ID NO: 1828977 - DNA, 15 bp, Homo sapiens
gatcacgaggttagg

SEQ ID NO: 1828978 - DNA, 15 bp, Homo sapiens
atcacgaggttagga

SEQ ID NO: 1828979 - DNA, 15 bp, Homo sapiens
tcacgaggttaggag

SEQ ID NO: 1828980 - DNA, 15 bp, Homo sapiens
cacgaggttaggaga

SEQ ID NO: 1828981 - DNA, 15 bp, Homo sapiens
acgaggttaggagat

SEQ ID NO: 1828982 - DNA, 15 bp, Homo sapiens
cgaggttaggagatc

SEQ ID NO: 1828983 - DNA, 15 bp, Homo sapiens
gaggttaggagatcg

SEQ ID NO: 1828984 - DNA, 15 bp, Homo sapiens
aggttaggagatcga

SEQ ID NO: 1828985 - DNA, 15 bp, Homo sapiens
ggttaggagatcgag

SEQ ID NO: 1828986 - DNA, 15 bp, Homo sapiens
gttaggagatcgaga

SEQ ID NO: 1828987 - DNA, 15 bp, Homo sapiens
ttaggagatcgagac

SEQ ID NO: 1828988 - DNA, 15 bp, Homo sapiens
taggagatcgagacc

SEQ ID NO: 1828989 - DNA, 15 bp, Homo sapiens
agatcgagaccatct

SEQ ID NO: 1828990 - DNA, 15 bp, Homo sapiens
gatcgagaccatctt

SEQ ID NO: 1828991 - DNA, 15 bp, Homo sapiens
atcgagaccatcttg

SEQ ID NO: 1828992 - DNA, 15 bp, Homo sapiens
tcgagaccatcttgg

SEQ ID NO: 1828993 - DNA, 15 bp, Homo sapiens
cgagaccatcttggc

SEQ ID NO: 1828994 - DNA, 15 bp, Homo sapiens
gagaccatcttggct

SEQ ID NO: 1828995 - DNA, 15 bp, Homo sapiens
agaccatcttggcta

SEQ ID NO: 1828996 - DNA, 15 bp, Homo sapiens
gaccatcttggctaa

SEQ ID NO: 1828997 - DNA, 15 bp, Homo sapiens
accatcttggctaac

SEQ ID NO: 1828998 - DNA, 15 bp, Homo sapiens
ccatcttggctaaca

SEQ ID NO: 1828999 - DNA, 15 bp, Homo sapiens
catcttggctaacat

SEQ ID NO: 1829000 - DNA, 15 bp, Homo sapiens
atcttggctaacatg

SEQ ID NO: 1829001 - DNA, 15 bp, Homo sapiens
tcttggctaacatgg

SEQ ID NO: 1829002 - DNA, 15 bp, Homo sapiens
cttggctaacatggt

SEQ ID NO: 1829003 - DNA, 15 bp, Homo sapiens
ttggctaacatggtg

SEQ ID NO: 1829004 - DNA, 15 bp, Homo sapiens
ggctaacatggtgac

SEQ ID NO: 1829005 - DNA, 15 bp, Homo sapiens
gctaacatggtgaca

SEQ ID NO: 1829006 - DNA, 15 bp, Homo sapiens
ctaacatggtgacac

SEQ ID NO: 1829007 - DNA, 15 bp, Homo sapiens
taacatggtgacacc

SEQ ID NO: 1829008 - DNA, 15 bp, Homo sapiens
aacatggtgacaccc

SEQ ID NO: 1829009 - DNA, 15 bp, Homo sapiens
acatggtgacacccc

SEQ ID NO: 1829010 - DNA, 15 bp, Homo sapiens
catggtgacaccccg

SEQ ID NO: 1829011 - DNA, 15 bp, Homo sapiens
atggtgacaccccgt

SEQ ID NO: 1829012 - DNA, 15 bp, Homo sapiens
tggtgacaccccgtc

SEQ ID NO: 1829013 - DNA, 15 bp, Homo sapiens
ggtgacaccccgtct

SEQ ID NO: 1829014 - DNA, 15 bp, Homo sapiens
gtgacaccccgtctc

SEQ ID NO: 1829015 - DNA, 15 bp, Homo sapiens
tgacaccccgtctct

SEQ ID NO: 1829016 - DNA, 15 bp, Homo sapiens
gacaccccgtctcta

SEQ ID NO: 1829017 - DNA, 15 bp, Homo sapiens
acaccccgtctctac

SEQ ID NO: 1829018 - DNA, 15 bp, Homo sapiens
caccccgtctctact

SEQ ID NO: 1829019 - DNA, 15 bp, Homo sapiens
aaaatacaaaaaatc

SEQ ID NO: 1829020 - DNA, 15 bp, Homo sapiens
aaatacaaaaaatca

SEQ ID NO: 1829021 - DNA, 15 bp, Homo sapiens
aatacaaaaaatcag

SEQ ID NO: 1829022 - DNA, 15 bp, Homo sapiens
atacaaaaaatcagc

SEQ ID NO: 1829023 - DNA, 15 bp, Homo sapiens
tacaaaaaatcagcc

SEQ ID NO: 1829024 - DNA, 15 bp, Homo sapiens
acaaaaaatcagccg

SEQ ID NO: 1829025 - DNA, 15 bp, Homo sapiens
caaaaaatcagccgg

SEQ ID NO: 1829026 - DNA, 15 bp, Homo sapiens
aaaaaatcagccggt

SEQ ID NO: 1829027 - DNA, 15 bp, Homo sapiens
aaaaatcagccggtc

SEQ ID NO: 1829028 - DNA, 15 bp, Homo sapiens
aaaatcagccggtcg

SEQ ID NO: 1829029 - DNA, 15 bp, Homo sapiens
aaatcagccggtcgc

SEQ ID NO: 1829030 - DNA, 15 bp, Homo sapiens
aatcagccggtcgcg

SEQ ID NO: 1829031 - DNA, 15 bp, Homo sapiens
atcagccggtcgcgg

SEQ ID NO: 1829032 - DNA, 15 bp, Homo sapiens
tcagccggtcgcggt

SEQ ID NO: 1829033 - DNA, 15 bp, Homo sapiens
cagccggtcgcggtg

SEQ ID NO: 1829034 - DNA, 15 bp, Homo sapiens
agccggtcgcggtgg

SEQ ID NO: 1829035 - DNA, 15 bp, Homo sapiens
gccggtcgcggtggc

SEQ ID NO: 1829036 - DNA, 15 bp, Homo sapiens
ccggtcgcggtggca

SEQ ID NO: 1829037 - DNA, 15 bp, Homo sapiens
cggtcgcggtggcag

SEQ ID NO: 1829038 - DNA, 15 bp, Homo sapiens
ggtcgcggtggcagg

SEQ ID NO: 1829039 - DNA, 15 bp, Homo sapiens
gtcgcggtggcaggc

SEQ ID NO: 1829040 - DNA, 15 bp, Homo sapiens
tcgcggtggcaggca

SEQ ID NO: 1829041 - DNA, 15 bp, Homo sapiens
cgcggtggcaggcac

SEQ ID NO: 1829042 - DNA, 15 bp, Homo sapiens
gcggtggcaggcacc

SEQ ID NO: 1829043 - DNA, 15 bp, Homo sapiens
cggtggcaggcacct

SEQ ID NO: 1829044 - DNA, 15 bp, Homo sapiens
gtggcaggcacctgc

SEQ ID NO: 1829045 - DNA, 15 bp, Homo sapiens
tggcaggcacctgca

SEQ ID NO: 1829046 - DNA, 15 bp, Homo sapiens
ggcaggcacctgcat

SEQ ID NO: 1829047 - DNA, 15 bp, Homo sapiens
gcaggcacctgcatt

SEQ ID NO: 1829048 - DNA, 15 bp, Homo sapiens
caggcacctgcattc

SEQ ID NO: 1829049 - DNA, 15 bp, Homo sapiens
aggcacctgcattcc

SEQ ID NO: 1829050 - DNA, 15 bp, Homo sapiens
ggcacctgcattccc

SEQ ID NO: 1829051 - DNA, 15 bp, Homo sapiens
gcacctgcattccca

SEQ ID NO: 1829052 - DNA, 15 bp, Homo sapiens
cacctgcattcccag

SEQ ID NO: 1829053 - DNA, 15 bp, Homo sapiens
acctgcattcccagc

SEQ ID NO: 1829054 - DNA, 15 bp, Homo sapiens
cctgcattcccagct

SEQ ID NO: 1829055 - DNA, 15 bp, Homo sapiens
ctgcattcccagcta

SEQ ID NO: 1829056 - DNA, 15 bp, Homo sapiens
tgcattcccagctaa

SEQ ID NO: 1829057 - DNA, 15 bp, Homo sapiens
gcattcccagctaat

SEQ ID NO: 1829058 - DNA, 15 bp, Homo sapiens
cattcccagctaatc

SEQ ID NO: 1829059 - DNA, 15 bp, Homo sapiens
attcccagctaatca

SEQ ID NO: 1829060 - DNA, 15 bp, Homo sapiens
ttcccagctaatcag

SEQ ID NO: 1829061 - DNA, 15 bp, Homo sapiens
tcccagctaatcagt

SEQ ID NO: 1829062 - DNA, 15 bp, Homo sapiens
cccagctaatcagta

SEQ ID NO: 1829063 - DNA, 15 bp, Homo sapiens
ccagctaatcagtag

SEQ ID NO: 1829064 - DNA, 15 bp, Homo sapiens
cagctaatcagtagg

SEQ ID NO: 1829065 - DNA, 15 bp, Homo sapiens
agctaatcagtaggc

SEQ ID NO: 1829066 - DNA, 15 bp, Homo sapiens
gctaatcagtaggct

SEQ ID NO: 1829067 - DNA, 15 bp, Homo sapiens
ctaatcagtaggcta

SEQ ID NO: 1829068 - DNA, 15 bp, Homo sapiens
taatcagtaggctaa

SEQ ID NO: 1829069 - DNA, 15 bp, Homo sapiens
aatcagtaggctaag

SEQ ID NO: 1829070 - DNA, 15 bp, Homo sapiens
atcagtaggctaagg

SEQ ID NO: 1829071 - DNA, 15 bp, Homo sapiens
tcagtaggctaaggc

SEQ ID NO: 1829072 - DNA, 15 bp, Homo sapiens
cagtaggctaaggca

SEQ ID NO: 1829073 - DNA, 15 bp, Homo sapiens
agtaggctaaggcag

SEQ ID NO: 1829074 - DNA, 15 bp, Homo sapiens
gtaggctaaggcagg

SEQ ID NO: 1829075 - DNA, 15 bp, Homo sapiens
taggctaaggcagga

SEQ ID NO: 1829076 - DNA, 15 bp, Homo sapiens
taaggcaggagaatg

SEQ ID NO: 1829077 - DNA, 15 bp, Homo sapiens
aaggcaggagaatgg

SEQ ID NO: 1829078 - DNA, 15 bp, Homo sapiens
gaatggtgtgaaccc

SEQ ID NO: 1829079 - DNA, 15 bp, Homo sapiens
gtgaacccaggaggc

SEQ ID NO: 1829080 - DNA, 15 bp, Homo sapiens
cccaggaggcggagc

SEQ ID NO: 1829081 - DNA, 15 bp, Homo sapiens
ccaggaggcggagct

SEQ ID NO: 1829082 - DNA, 15 bp, Homo sapiens
caggaggcggagctt

SEQ ID NO: 1829083 - DNA, 15 bp, Homo sapiens
aggaggcggagctta

SEQ ID NO: 1829084 - DNA, 15 bp, Homo sapiens
ggaggcggagcttac

SEQ ID NO: 1829085 - DNA, 15 bp, Homo sapiens
gaggcggagcttaca

SEQ ID NO: 1829086 - DNA, 15 bp, Homo sapiens
aggcggagcttacag

SEQ ID NO: 1829087 - DNA, 15 bp, Homo sapiens
ggcggagcttacagt

SEQ ID NO: 1829088 - DNA, 15 bp, Homo sapiens
gcggagcttacagtg

SEQ ID NO: 1829089 - DNA, 15 bp, Homo sapiens
cggagcttacagtga

SEQ ID NO: 1829090 - DNA, 15 bp, Homo sapiens
ggagcttacagtgag

SEQ ID NO: 1829091 - DNA, 15 bp, Homo sapiens
gagcttacagtgagc

SEQ ID NO: 1829092 - DNA, 15 bp, Homo sapiens
agcttacagtgagcc

SEQ ID NO: 1829093 - DNA, 15 bp, Homo sapiens
gcttacagtgagccg

SEQ ID NO: 1829094 - DNA, 15 bp, Homo sapiens
cttacagtgagccga

SEQ ID NO: 1829095 - DNA, 15 bp, Homo sapiens
ttacagtgagccgag

SEQ ID NO: 1829096 - DNA, 15 bp, Homo sapiens
tacagtgagccgaga

SEQ ID NO: 1829097 - DNA, 15 bp, Homo sapiens
acagtgagccgagat

SEQ ID NO: 1829098 - DNA, 15 bp, Homo sapiens
actccagactgggcg

SEQ ID NO: 1829099 - DNA, 15 bp, Homo sapiens
ctccagactgggcga

SEQ ID NO: 1829100 - DNA, 15 bp, Homo sapiens
tccagactgggcgac

SEQ ID NO: 1829101 - DNA, 15 bp, Homo sapiens
ccagactgggcgaca

SEQ ID NO: 1829102 - DNA, 15 bp, Homo sapiens
cagactgggcgacag

SEQ ID NO: 1829103 - DNA, 15 bp, Homo sapiens
agactgggcgacagt

SEQ ID NO: 1829104 - DNA, 15 bp, Homo sapiens
gactgggcgacagtg

SEQ ID NO: 1829105 - DNA, 15 bp, Homo sapiens
actgggcgacagtgt

SEQ ID NO: 1829106 - DNA, 15 bp, Homo sapiens
ctgggcgacagtgtg

SEQ ID NO: 1829107 - DNA, 15 bp, Homo sapiens
tgggcgacagtgtga

SEQ ID NO: 1829108 - DNA, 15 bp, Homo sapiens
gggcgacagtgtgag

SEQ ID NO: 1829109 - DNA, 15 bp, Homo sapiens
ggcgacagtgtgaga

SEQ ID NO: 1829110 - DNA, 15 bp, Homo sapiens
gcgacagtgtgagac

SEQ ID NO: 1829111 - DNA, 15 bp, Homo sapiens
cgacagtgtgagact

SEQ ID NO: 1829112 - DNA, 15 bp, Homo sapiens
gacagtgtgagactc

SEQ ID NO: 1829113 - DNA, 15 bp, Homo sapiens
acagtgtgagactct

SEQ ID NO: 1829114 - DNA, 15 bp, Homo sapiens
cagtgtgagactctg

SEQ ID NO: 1829115 - DNA, 15 bp, Homo sapiens
agtgtgagactctgt

SEQ ID NO: 1829116 - DNA, 15 bp, Homo sapiens
gtgtgagactctgtc

SEQ ID NO: 1829117 - DNA, 15 bp, Homo sapiens
tgtgagactctgtct

SEQ ID NO: 1829118 - DNA, 15 bp, Homo sapiens
caaaaaaaaaaagaa

SEQ ID NO: 1829119 - DNA, 15 bp, Homo sapiens
aaaaaaagaaaaaat

SEQ ID NO: 1829120 - DNA, 15 bp, Homo sapiens
aaaaaagaaaaaatt

SEQ ID NO: 1829121 - DNA, 15 bp, Homo sapiens
aaaaagaaaaaattc

SEQ ID NO: 1829122 - DNA, 15 bp, Homo sapiens
aaaagaaaaaattct

SEQ ID NO: 1829123 - DNA, 15 bp, Homo sapiens
aaagaaaaaattctt

SEQ ID NO: 1829124 - DNA, 15 bp, Homo sapiens
aagaaaaaattcttc

SEQ ID NO: 1829125 - DNA, 15 bp, Homo sapiens
agaaaaaattcttcc

SEQ ID NO: 1829126 - DNA, 15 bp, Homo sapiens
gaaaaaattcttccc

SEQ ID NO: 1829127 - DNA, 15 bp, Homo sapiens
aaaaaattcttccct

SEQ ID NO: 1829128 - DNA, 15 bp, Homo sapiens
aaaaattcttcccta

SEQ ID NO: 1829129 - DNA, 15 bp, Homo sapiens
aaaattcttccctac

SEQ ID NO: 1829130 - DNA, 15 bp, Homo sapiens
aaattcttccctact

SEQ ID NO: 1829131 - DNA, 15 bp, Homo sapiens
aattcttccctactt

SEQ ID NO: 1829132 - DNA, 15 bp, Homo sapiens
attcttccctactta

SEQ ID NO: 1829133 - DNA, 15 bp, Homo sapiens
ttcttccctacttaa

SEQ ID NO: 1829134 - DNA, 15 bp, Homo sapiens
tcttccctacttaaa

SEQ ID NO: 1829135 - DNA, 15 bp, Homo sapiens
cttccctacttaaaa

SEQ ID NO: 1829136 - DNA, 15 bp, Homo sapiens
ttccctacttaaaat

SEQ ID NO: 1829137 - DNA, 15 bp, Homo sapiens
tccctacttaaaata

SEQ ID NO: 1829138 - DNA, 15 bp, Homo sapiens
ccctacttaaaataa

SEQ ID NO: 1829139 - DNA, 15 bp, Homo sapiens
cctacttaaaataat

SEQ ID NO: 1829140 - DNA, 15 bp, Homo sapiens
ctacttaaaataatt

SEQ ID NO: 1829141 - DNA, 15 bp, Homo sapiens
tacttaaaataattt

SEQ ID NO: 1829142 - DNA, 15 bp, Homo sapiens
acttaaaataatttg

SEQ ID NO: 1829143 - DNA, 15 bp, Homo sapiens
cttaaaataatttgt

SEQ ID NO: 1829144 - DNA, 15 bp, Homo sapiens
ttaaaataatttgtt

SEQ ID NO: 1829145 - DNA, 15 bp, Homo sapiens
taaaataatttgttg

SEQ ID NO: 1829146 - DNA, 15 bp, Homo sapiens
aaaataatttgttga

SEQ ID NO: 1829147 - DNA, 15 bp, Homo sapiens
aaataatttgttgaa

SEQ ID NO: 1829148 - DNA, 15 bp, Homo sapiens
aataatttgttgaaa

SEQ ID NO: 1829149 - DNA, 15 bp, Homo sapiens
ataatttgttgaaat

SEQ ID NO: 1829150 - DNA, 15 bp, Homo sapiens
taatttgttgaaatg

SEQ ID NO: 1829151 - DNA, 15 bp, Homo sapiens
aatttgttgaaatgg

SEQ ID NO: 1829152 - DNA, 15 bp, Homo sapiens
atttgttgaaatggt

SEQ ID NO: 1829153 - DNA, 15 bp, Homo sapiens
tttgttgaaatggtt

SEQ ID NO: 1829154 - DNA, 15 bp, Homo sapiens
ttgttgaaatggttt

SEQ ID NO: 1829155 - DNA, 15 bp, Homo sapiens
tgttgaaatggttta

SEQ ID NO: 1829156 - DNA, 15 bp, Homo sapiens
gttgaaatggtttat

SEQ ID NO: 1829157 - DNA, 15 bp, Homo sapiens
ttgaaatggtttatt

SEQ ID NO: 1829158 - DNA, 15 bp, Homo sapiens
tgaaatggtttattt

SEQ ID NO: 1829159 - DNA, 15 bp, Homo sapiens
gaaatggtttatttt

SEQ ID NO: 1829160 - DNA, 15 bp, Homo sapiens
aaatggtttattttc

SEQ ID NO: 1829161 - DNA, 15 bp, Homo sapiens
aatggtttattttct

SEQ ID NO: 1829162 - DNA, 15 bp, Homo sapiens
atggtttattttctt

SEQ ID NO: 1829163 - DNA, 15 bp, Homo sapiens
tggtttattttcttc

SEQ ID NO: 1829164 - DNA, 15 bp, Homo sapiens
ggtttattttcttct

SEQ ID NO: 1829165 - DNA, 15 bp, Homo sapiens
gtttattttcttctc

SEQ ID NO: 1829166 - DNA, 15 bp, Homo sapiens
tttattttcttctca

SEQ ID NO: 1829167 - DNA, 15 bp, Homo sapiens
ttattttcttctcaa

SEQ ID NO: 1829168 - DNA, 15 bp, Homo sapiens
tattttcttctcaag

SEQ ID NO: 1829169 - DNA, 15 bp, Homo sapiens
attttcttctcaagt

SEQ ID NO: 1829170 - DNA, 15 bp, Homo sapiens
ttttcttctcaagtt

SEQ ID NO: 1829171 - DNA, 15 bp, Homo sapiens
tttcttctcaagttg

SEQ ID NO: 1829172 - DNA, 15 bp, Homo sapiens
ttcttctcaagttgc

SEQ ID NO: 1829173 - DNA, 15 bp, Homo sapiens
tcttctcaagttgca

SEQ ID NO: 1829174 - DNA, 15 bp, Homo sapiens
cttctcaagttgcat

SEQ ID NO: 1829175 - DNA, 15 bp, Homo sapiens
ttctcaagttgcatt

SEQ ID NO: 1829176 - DNA, 15 bp, Homo sapiens
tctcaagttgcattt

SEQ ID NO: 1829177 - DNA, 15 bp, Homo sapiens
ctcaagttgcatttg

SEQ ID NO: 1829178 - DNA, 15 bp, Homo sapiens
tcaagttgcatttgc

SEQ ID NO: 1829179 - DNA, 15 bp, Homo sapiens
caagttgcatttgct

SEQ ID NO: 1829180 - DNA, 15 bp, Homo sapiens
aagttgcatttgctt

SEQ ID NO: 1829181 - DNA, 15 bp, Homo sapiens
agttgcatttgcttt

SEQ ID NO: 1829182 - DNA, 15 bp, Homo sapiens
gttgcatttgcttta

SEQ ID NO: 1829183 - DNA, 15 bp, Homo sapiens
ttgcatttgctttaa

SEQ ID NO: 1829184 - DNA, 15 bp, Homo sapiens
tgcatttgctttaat

SEQ ID NO: 1829185 - DNA, 15 bp, Homo sapiens
gcatttgctttaatt

SEQ ID NO: 1829186 - DNA, 15 bp, Homo sapiens
catttgctttaattt

SEQ ID NO: 1829187 - DNA, 15 bp, Homo sapiens
atttgctttaatttg

SEQ ID NO: 1829188 - DNA, 15 bp, Homo sapiens
tttgctttaatttgt

SEQ ID NO: 1829189 - DNA, 15 bp, Homo sapiens
ttgctttaatttgtt

SEQ ID NO: 1829190 - DNA, 15 bp, Homo sapiens
tgctttaatttgttg

SEQ ID NO: 1829191 - DNA, 15 bp, Homo sapiens
gctttaatttgttgg

SEQ ID NO: 1829192 - DNA, 15 bp, Homo sapiens
ctttaatttgttggc

SEQ ID NO: 1829193 - DNA, 15 bp, Homo sapiens
tttaatttgttggct

SEQ ID NO: 1829194 - DNA, 15 bp, Homo sapiens
ttaatttgttggcta

SEQ ID NO: 1829195 - DNA, 15 bp, Homo sapiens
taatttgttggctaa

SEQ ID NO: 1829196 - DNA, 15 bp, Homo sapiens
aatttgttggctaaa

SEQ ID NO: 1829197 - DNA, 15 bp, Homo sapiens
atttgttggctaaat

SEQ ID NO: 1829198 - DNA, 15 bp, Homo sapiens
tttgttggctaaatg

SEQ ID NO: 1829199 - DNA, 15 bp, Homo sapiens
ttgttggctaaatgc

SEQ ID NO: 1829200 - DNA, 15 bp, Homo sapiens
tgttggctaaatgct

SEQ ID NO: 1829201 - DNA, 15 bp, Homo sapiens
gttggctaaatgctt

SEQ ID NO: 1829202 - DNA, 15 bp, Homo sapiens
ttggctaaatgctta

SEQ ID NO: 1829203 - DNA, 15 bp, Homo sapiens
tggctaaatgcttaa

SEQ ID NO: 1829204 - DNA, 15 bp, Homo sapiens
ggctaaatgcttaaa

SEQ ID NO: 1829205 - DNA, 15 bp, Homo sapiens
gctaaatgcttaaaa

SEQ ID NO: 1829206 - DNA, 15 bp, Homo sapiens
ctaaatgcttaaaag

SEQ ID NO: 1829207 - DNA, 15 bp, Homo sapiens
taaatgcttaaaagg

SEQ ID NO: 1829208 - DNA, 15 bp, Homo sapiens
aaatgcttaaaaggc

SEQ ID NO: 1829209 - DNA, 15 bp, Homo sapiens
aatgcttaaaaggct

SEQ ID NO: 1829210 - DNA, 15 bp, Homo sapiens
atgcttaaaaggctt

SEQ ID NO: 1829211 - DNA, 15 bp, Homo sapiens
tgcttaaaaggctta

SEQ ID NO: 1829212 - DNA, 15 bp, Homo sapiens
gcttaaaaggcttaa

SEQ ID NO: 1829213 - DNA, 15 bp, Homo sapiens
cttaaaaggcttaaa

SEQ ID NO: 1829214 - DNA, 15 bp, Homo sapiens
ttaaaaggcttaaaa

SEQ ID NO: 1829215 - DNA, 15 bp, Homo sapiens
taaaaggcttaaaat

SEQ ID NO: 1829216 - DNA, 15 bp, Homo sapiens
aaaaggcttaaaatt

SEQ ID NO: 1829217 - DNA, 15 bp, Homo sapiens
aaaggcttaaaattg

SEQ ID NO: 1829218 - DNA, 15 bp, Homo sapiens
aaggcttaaaattgg

SEQ ID NO: 1829219 - DNA, 15 bp, Homo sapiens
aggcttaaaattggc

SEQ ID NO: 1829220 - DNA, 15 bp, Homo sapiens
ggcttaaaattggcc

SEQ ID NO: 1829221 - DNA, 15 bp, Homo sapiens
gcttaaaattggcct

SEQ ID NO: 1829222 - DNA, 15 bp, Homo sapiens
cttaaaattggcctg

SEQ ID NO: 1829223 - DNA, 15 bp, Homo sapiens
ttaaaattggcctga

SEQ ID NO: 1829224 - DNA, 15 bp, Homo sapiens
taaaattggcctgac

SEQ ID NO: 1829225 - DNA, 15 bp, Homo sapiens
aaaattggcctgact

SEQ ID NO: 1829226 - DNA, 15 bp, Homo sapiens
aaattggcctgactt

SEQ ID NO: 1829227 - DNA, 15 bp, Homo sapiens
aattggcctgactta

SEQ ID NO: 1829228 - DNA, 15 bp, Homo sapiens
attggcctgacttaa

SEQ ID NO: 1829229 - DNA, 15 bp, Homo sapiens
ttggcctgacttaaa

SEQ ID NO: 1829230 - DNA, 15 bp, Homo sapiens
tggcctgacttaaaa

SEQ ID NO: 1829231 - DNA, 15 bp, Homo sapiens
ggcctgacttaaaaa

SEQ ID NO: 1829232 - DNA, 15 bp, Homo sapiens
gcctgacttaaaaat

SEQ ID NO: 1829233 - DNA, 15 bp, Homo sapiens
cctgacttaaaaatt

SEQ ID NO: 1829234 - DNA, 15 bp, Homo sapiens
ctgacttaaaaattc

SEQ ID NO: 1829235 - DNA, 15 bp, Homo sapiens
tgacttaaaaattcc

SEQ ID NO: 1829236 - DNA, 15 bp, Homo sapiens
gacttaaaaattcct

SEQ ID NO: 1829237 - DNA, 15 bp, Homo sapiens
acttaaaaattcctt

SEQ ID NO: 1829238 - DNA, 15 bp, Homo sapiens
cttaaaaattcctta

SEQ ID NO: 1829239 - DNA, 15 bp, Homo sapiens
ttaaaaattccttat

SEQ ID NO: 1829240 - DNA, 15 bp, Homo sapiens
taaaaattccttatc

SEQ ID NO: 1829241 - DNA, 15 bp, Homo sapiens
aaaaattccttatct

SEQ ID NO: 1829242 - DNA, 15 bp, Homo sapiens
aaaattccttatctg

SEQ ID NO: 1829243 - DNA, 15 bp, Homo sapiens
aaattccttatctgt

SEQ ID NO: 1829244 - DNA, 15 bp, Homo sapiens
aattccttatctgtg

SEQ ID NO: 1829245 - DNA, 15 bp, Homo sapiens
attccttatctgtgt

SEQ ID NO: 1829246 - DNA, 15 bp, Homo sapiens
ttccttatctgtgtt

SEQ ID NO: 1829247 - DNA, 15 bp, Homo sapiens
tccttatctgtgtta

SEQ ID NO: 1829248 - DNA, 15 bp, Homo sapiens
ccttatctgtgttaa

SEQ ID NO: 1829249 - DNA, 15 bp, Homo sapiens
cttatctgtgttaaa

SEQ ID NO: 1829250 - DNA, 15 bp, Homo sapiens
ttatctgtgttaaag

SEQ ID NO: 1829251 - DNA, 15 bp, Homo sapiens
tatctgtgttaaaga

SEQ ID NO: 1829252 - DNA, 15 bp, Homo sapiens
atctgtgttaaagat

SEQ ID NO: 1829253 - DNA, 15 bp, Homo sapiens
tctgtgttaaagatg

SEQ ID NO: 1829254 - DNA, 15 bp, Homo sapiens
ctgtgttaaagatgg

SEQ ID NO: 1829255 - DNA, 15 bp, Homo sapiens
tgtgttaaagatgga

SEQ ID NO: 1829256 - DNA, 15 bp, Homo sapiens
gtgttaaagatggaa

SEQ ID NO: 1829257 - DNA, 15 bp, Homo sapiens
tgttaaagatggaat

SEQ ID NO: 1829258 - DNA, 15 bp, Homo sapiens
gttaaagatggaata

SEQ ID NO: 1829259 - DNA, 15 bp, Homo sapiens
ttaaagatggaatat

SEQ ID NO: 1829260 - DNA, 15 bp, Homo sapiens
taaagatggaatatg

SEQ ID NO: 1829261 - DNA, 15 bp, Homo sapiens
aaagatggaatatga

SEQ ID NO: 1829262 - DNA, 15 bp, Homo sapiens
aagatggaatatgag

SEQ ID NO: 1829263 - DNA, 15 bp, Homo sapiens
agatggaatatgagg

SEQ ID NO: 1829264 - DNA, 15 bp, Homo sapiens
gatggaatatgaggt

SEQ ID NO: 1829265 - DNA, 15 bp, Homo sapiens
atggaatatgaggta

SEQ ID NO: 1829266 - DNA, 15 bp, Homo sapiens
tggaatatgaggtat

SEQ ID NO: 1829267 - DNA, 15 bp, Homo sapiens
ggaatatgaggtatg

SEQ ID NO: 1829268 - DNA, 15 bp, Homo sapiens
gaatatgaggtatgt

SEQ ID NO: 1829269 - DNA, 15 bp, Homo sapiens
aatatgaggtatgtt

SEQ ID NO: 1829270 - DNA, 15 bp, Homo sapiens
atatgaggtatgttt

SEQ ID NO: 1829271 - DNA, 15 bp, Homo sapiens
tatgaggtatgttta

SEQ ID NO: 1829272 - DNA, 15 bp, Homo sapiens
atgaggtatgtttaa

SEQ ID NO: 1829273 - DNA, 15 bp, Homo sapiens
tgaggtatgtttaat

SEQ ID NO: 1829274 - DNA, 15 bp, Homo sapiens
gaggtatgtttaatt

SEQ ID NO: 1829275 - DNA, 15 bp, Homo sapiens
aggtatgtttaattt

SEQ ID NO: 1829276 - DNA, 15 bp, Homo sapiens
ggtatgtttaatttt

SEQ ID NO: 1829277 - DNA, 15 bp, Homo sapiens
gtatgtttaatttta

SEQ ID NO: 1829278 - DNA, 15 bp, Homo sapiens
tatgtttaattttac

SEQ ID NO: 1829279 - DNA, 15 bp, Homo sapiens
atgtttaattttact

SEQ ID NO: 1829280 - DNA, 15 bp, Homo sapiens
tgtttaattttactc

SEQ ID NO: 1829281 - DNA, 15 bp, Homo sapiens
gtttaattttactca

SEQ ID NO: 1829282 - DNA, 15 bp, Homo sapiens
tttaattttactcag

SEQ ID NO: 1829283 - DNA, 15 bp, Homo sapiens
ttaattttactcagt

SEQ ID NO: 1829284 - DNA, 15 bp, Homo sapiens
taattttactcagtt

SEQ ID NO: 1829285 - DNA, 15 bp, Homo sapiens
aattttactcagtta

SEQ ID NO: 1829286 - DNA, 15 bp, Homo sapiens
attttactcagttat

SEQ ID NO: 1829287 - DNA, 15 bp, Homo sapiens
ttttactcagttatt

SEQ ID NO: 1829288 - DNA, 15 bp, Homo sapiens
tttactcagttattt

SEQ ID NO: 1829289 - DNA, 15 bp, Homo sapiens
ttactcagttatttg

SEQ ID NO: 1829290 - DNA, 15 bp, Homo sapiens
tactcagttatttgg

SEQ ID NO: 1829291 - DNA, 15 bp, Homo sapiens
actcagttatttggg

SEQ ID NO: 1829292 - DNA, 15 bp, Homo sapiens
ctcagttatttggga

SEQ ID NO: 1829293 - DNA, 15 bp, Homo sapiens
tcagttatttgggag

SEQ ID NO: 1829294 - DNA, 15 bp, Homo sapiens
cagttatttgggagt

SEQ ID NO: 1829295 - DNA, 15 bp, Homo sapiens
agttatttgggagtt

SEQ ID NO: 1829296 - DNA, 15 bp, Homo sapiens
gttatttgggagttt

SEQ ID NO: 1829297 - DNA, 15 bp, Homo sapiens
ttatttgggagtttt

SEQ ID NO: 1829298 - DNA, 15 bp, Homo sapiens
tatttgggagtttta

SEQ ID NO: 1829299 - DNA, 15 bp, Homo sapiens
atttgggagttttat

SEQ ID NO: 1829300 - DNA, 15 bp, Homo sapiens
tttgggagttttatt

SEQ ID NO: 1829301 - DNA, 15 bp, Homo sapiens
ttgggagttttattt

SEQ ID NO: 1829302 - DNA, 15 bp, Homo sapiens
tgggagttttatttc

SEQ ID NO: 1829303 - DNA, 15 bp, Homo sapiens
gggagttttatttct

SEQ ID NO: 1829304 - DNA, 15 bp, Homo sapiens
ggagttttatttctg

SEQ ID NO: 1829305 - DNA, 15 bp, Homo sapiens
gagttttatttctga

SEQ ID NO: 1829306 - DNA, 15 bp, Homo sapiens
gttttatttctgaaa

SEQ ID NO: 1829307 - DNA, 15 bp, Homo sapiens
ttttatttctgaaat

SEQ ID NO: 1829308 - DNA, 15 bp, Homo sapiens
tttatttctgaaata

SEQ ID NO: 1829309 - DNA, 15 bp, Homo sapiens
ttatttctgaaataa

SEQ ID NO: 1829310 - DNA, 15 bp, Homo sapiens
tatttctgaaataag

SEQ ID NO: 1829311 - DNA, 15 bp, Homo sapiens
atttctgaaataagg

SEQ ID NO: 1829312 - DNA, 15 bp, Homo sapiens
tttctgaaataaggg

SEQ ID NO: 1829313 - DNA, 15 bp, Homo sapiens
ttctgaaataagggt

SEQ ID NO: 1829314 - DNA, 15 bp, Homo sapiens
tctgaaataagggta

SEQ ID NO: 1829315 - DNA, 15 bp, Homo sapiens
ctgaaataagggtag

SEQ ID NO: 1829316 - DNA, 15 bp, Homo sapiens
tgaaataagggtagg

SEQ ID NO: 1829317 - DNA, 15 bp, Homo sapiens
gaaataagggtaggg

SEQ ID NO: 1829318 - DNA, 15 bp, Homo sapiens
aaataagggtagggt

SEQ ID NO: 1829319 - DNA, 15 bp, Homo sapiens
aataagggtagggtt

SEQ ID NO: 1829320 - DNA, 15 bp, Homo sapiens
ataagggtagggttg

SEQ ID NO: 1829321 - DNA, 15 bp, Homo sapiens
taagggtagggttgt

SEQ ID NO: 1829322 - DNA, 15 bp, Homo sapiens
aagggtagggttgta

SEQ ID NO: 1829323 - DNA, 15 bp, Homo sapiens
agggtagggttgtat

SEQ ID NO: 1829324 - DNA, 15 bp, Homo sapiens
gggtagggttgtatt

SEQ ID NO: 1829325 - DNA, 15 bp, Homo sapiens
ggtagggttgtattt

SEQ ID NO: 1829326 - DNA, 15 bp, Homo sapiens
gtagggttgtatttt

SEQ ID NO: 1829327 - DNA, 15 bp, Homo sapiens
tagggttgtattttt

SEQ ID NO: 1829328 - DNA, 15 bp, Homo sapiens
agggttgtattttta

SEQ ID NO: 1829329 - DNA, 15 bp, Homo sapiens
gggttgtatttttat

SEQ ID NO: 1829330 - DNA, 15 bp, Homo sapiens
ggttgtatttttatt

SEQ ID NO: 1829331 - DNA, 15 bp, Homo sapiens
gttgtatttttattt

SEQ ID NO: 1829332 - DNA, 15 bp, Homo sapiens
ttgtatttttatttc

SEQ ID NO: 1829333 - DNA, 15 bp, Homo sapiens
tgtatttttatttct

SEQ ID NO: 1829334 - DNA, 15 bp, Homo sapiens
gtatttttatttctt

SEQ ID NO: 1829335 - DNA, 15 bp, Homo sapiens
tatttttatttctta

SEQ ID NO: 1829336 - DNA, 15 bp, Homo sapiens
atttttatttcttaa

SEQ ID NO: 1829337 - DNA, 15 bp, Homo sapiens
tttttatttcttaaa

SEQ ID NO: 1829338 - DNA, 15 bp, Homo sapiens
ttttatttcttaaaa

SEQ ID NO: 1829339 - DNA, 15 bp, Homo sapiens
tttatttcttaaaag

SEQ ID NO: 1829340 - DNA, 15 bp, Homo sapiens
ttatttcttaaaaga

SEQ ID NO: 1829341 - DNA, 15 bp, Homo sapiens
tatttcttaaaagaa

SEQ ID NO: 1829342 - DNA, 15 bp, Homo sapiens
atttcttaaaagaag

SEQ ID NO: 1829343 - DNA, 15 bp, Homo sapiens
tttcttaaaagaagt

SEQ ID NO: 1829344 - DNA, 15 bp, Homo sapiens
ttcttaaaagaagtt

SEQ ID NO: 1829345 - DNA, 15 bp, Homo sapiens
tcttaaaagaagttt

SEQ ID NO: 1829346 - DNA, 15 bp, Homo sapiens
cttaaaagaagtttc

SEQ ID NO: 1829347 - DNA, 15 bp, Homo sapiens
ttaaaagaagtttca

SEQ ID NO: 1829348 - DNA, 15 bp, Homo sapiens
taaaagaagtttcag

SEQ ID NO: 1829349 - DNA, 15 bp, Homo sapiens
aaaagaagtttcaga

SEQ ID NO: 1829350 - DNA, 15 bp, Homo sapiens
aaagaagtttcagac

SEQ ID NO: 1829351 - DNA, 15 bp, Homo sapiens
aagaagtttcagact

SEQ ID NO: 1829352 - DNA, 15 bp, Homo sapiens
agaagtttcagacta

SEQ ID NO: 1829353 - DNA, 15 bp, Homo sapiens
gaagtttcagactaa

SEQ ID NO: 1829354 - DNA, 15 bp, Homo sapiens
aagtttcagactaaa

SEQ ID NO: 1829355 - DNA, 15 bp, Homo sapiens
agtttcagactaaaa

SEQ ID NO: 1829356 - DNA, 15 bp, Homo sapiens
gtttcagactaaaat

SEQ ID NO: 1829357 - DNA, 15 bp, Homo sapiens
tttcagactaaaatt

SEQ ID NO: 1829358 - DNA, 15 bp, Homo sapiens
ttcagactaaaattt

SEQ ID NO: 1829359 - DNA, 15 bp, Homo sapiens
tcagactaaaatttt

SEQ ID NO: 1829360 - DNA, 15 bp, Homo sapiens
cagactaaaattttc

SEQ ID NO: 1829361 - DNA, 15 bp, Homo sapiens
agactaaaattttct

SEQ ID NO: 1829362 - DNA, 15 bp, Homo sapiens
gactaaaattttctt

SEQ ID NO: 1829363 - DNA, 15 bp, Homo sapiens
actaaaattttcttt

SEQ ID NO: 1829364 - DNA, 15 bp, Homo sapiens
ctaaaattttctttc

SEQ ID NO: 1829365 - DNA, 15 bp, Homo sapiens
taaaattttctttct

SEQ ID NO: 1829366 - DNA, 15 bp, Homo sapiens
aaaattttctttctc

SEQ ID NO: 1829367 - DNA, 15 bp, Homo sapiens
aaattttctttctca

SEQ ID NO: 1829368 - DNA, 15 bp, Homo sapiens
aattttctttctcaa

SEQ ID NO: 1829369 - DNA, 15 bp, Homo sapiens
attttctttctcaac

SEQ ID NO: 1829370 - DNA, 15 bp, Homo sapiens
ttttctttctcaact

SEQ ID NO: 1829371 - DNA, 15 bp, Homo sapiens
tttctttctcaactc

SEQ ID NO: 1829372 - DNA, 15 bp, Homo sapiens
ttctttctcaactct

SEQ ID NO: 1829373 - DNA, 15 bp, Homo sapiens
tctttctcaactctt

SEQ ID NO: 1829374 - DNA, 15 bp, Homo sapiens
ctttctcaactctta

SEQ ID NO: 1829375 - DNA, 15 bp, Homo sapiens
tttctcaactcttac

SEQ ID NO: 1829376 - DNA, 15 bp, Homo sapiens
ttctcaactcttacc

SEQ ID NO: 1829377 - DNA, 15 bp, Homo sapiens
tctcaactcttacct

SEQ ID NO: 1829378 - DNA, 15 bp, Homo sapiens
ctcaactcttaccta

SEQ ID NO: 1829379 - DNA, 15 bp, Homo sapiens
tcaactcttacctaa

SEQ ID NO: 1829380 - DNA, 15 bp, Homo sapiens
caactcttacctaat

SEQ ID NO: 1829381 - DNA, 15 bp, Homo sapiens
aactcttacctaatt

SEQ ID NO: 1829382 - DNA, 15 bp, Homo sapiens
actcttacctaatta

SEQ ID NO: 1829383 - DNA, 15 bp, Homo sapiens
ctcttacctaattat

SEQ ID NO: 1829384 - DNA, 15 bp, Homo sapiens
tcttacctaattata

SEQ ID NO: 1829385 - DNA, 15 bp, Homo sapiens
cttacctaattatat

SEQ ID NO: 1829386 - DNA, 15 bp, Homo sapiens
ttacctaattatatg

SEQ ID NO: 1829387 - DNA, 15 bp, Homo sapiens
tacctaattatatgg

SEQ ID NO: 1829388 - DNA, 15 bp, Homo sapiens
acctaattatatggt

SEQ ID NO: 1829389 - DNA, 15 bp, Homo sapiens
cctaattatatggta

SEQ ID NO: 1829390 - DNA, 15 bp, Homo sapiens
ctaattatatggtaa

SEQ ID NO: 1829391 - DNA, 15 bp, Homo sapiens
taattatatggtaag

SEQ ID NO: 1829392 - DNA, 15 bp, Homo sapiens
aattatatggtaaga

SEQ ID NO: 1829393 - DNA, 15 bp, Homo sapiens
attatatggtaagag

SEQ ID NO: 1829394 - DNA, 15 bp, Homo sapiens
ttatatggtaagaga

SEQ ID NO: 1829395 - DNA, 15 bp, Homo sapiens
tatatggtaagagag

SEQ ID NO: 1829396 - DNA, 15 bp, Homo sapiens
atatggtaagagagc

SEQ ID NO: 1829397 - DNA, 15 bp, Homo sapiens
tatggtaagagagct

SEQ ID NO: 1829398 - DNA, 15 bp, Homo sapiens
atggtaagagagcta

SEQ ID NO: 1829399 - DNA, 15 bp, Homo sapiens
tggtaagagagctag

SEQ ID NO: 1829400 - DNA, 15 bp, Homo sapiens
ggtaagagagctagc

SEQ ID NO: 1829401 - DNA, 15 bp, Homo sapiens
gtaagagagctagct

SEQ ID NO: 1829402 - DNA, 15 bp, Homo sapiens
taagagagctagcta

SEQ ID NO: 1829403 - DNA, 15 bp, Homo sapiens
aagagagctagctag

SEQ ID NO: 1829404 - DNA, 15 bp, Homo sapiens
agagagctagctagt

SEQ ID NO: 1829405 - DNA, 15 bp, Homo sapiens
gagagctagctagtt

SEQ ID NO: 1829406 - DNA, 15 bp, Homo sapiens
agagctagctagttc

SEQ ID NO: 1829407 - DNA, 15 bp, Homo sapiens
gagctagctagttcc

SEQ ID NO: 1829408 - DNA, 15 bp, Homo sapiens
agctagctagttcct

SEQ ID NO: 1829409 - DNA, 15 bp, Homo sapiens
gctagctagttccta

SEQ ID NO: 1829410 - DNA, 15 bp, Homo sapiens
ctagctagttcctat

SEQ ID NO: 1829411 - DNA, 15 bp, Homo sapiens
tagctagttcctata

SEQ ID NO: 1829412 - DNA, 15 bp, Homo sapiens
agctagttcctataa

SEQ ID NO: 1829413 - DNA, 15 bp, Homo sapiens
gctagttcctataaa

SEQ ID NO: 1829414 - DNA, 15 bp, Homo sapiens
ctagttcctataaag

SEQ ID NO: 1829415 - DNA, 15 bp, Homo sapiens
tagttcctataaagg

SEQ ID NO: 1829416 - DNA, 15 bp, Homo sapiens
agttcctataaaggt

SEQ ID NO: 1829417 - DNA, 15 bp, Homo sapiens
gttcctataaaggta

SEQ ID NO: 1829418 - DNA, 15 bp, Homo sapiens
ttcctataaaggtag

SEQ ID NO: 1829419 - DNA, 15 bp, Homo sapiens
tcctataaaggtaga

SEQ ID NO: 1829420 - DNA, 15 bp, Homo sapiens
cctataaaggtagaa

SEQ ID NO: 1829421 - DNA, 15 bp, Homo sapiens
ctataaaggtagaag

SEQ ID NO: 1829422 - DNA, 15 bp, Homo sapiens
tataaaggtagaaga

SEQ ID NO: 1829423 - DNA, 15 bp, Homo sapiens
ataaaggtagaagat

SEQ ID NO: 1829424 - DNA, 15 bp, Homo sapiens
taaaggtagaagatt

SEQ ID NO: 1829425 - DNA, 15 bp, Homo sapiens
aaaggtagaagattt

SEQ ID NO: 1829426 - DNA, 15 bp, Homo sapiens
aaggtagaagattta

SEQ ID NO: 1829427 - DNA, 15 bp, Homo sapiens
aggtagaagatttaa

SEQ ID NO: 1829428 - DNA, 15 bp, Homo sapiens
ggtagaagatttaat

SEQ ID NO: 1829429 - DNA, 15 bp, Homo sapiens
gtagaagatttaatt

SEQ ID NO: 1829430 - DNA, 15 bp, Homo sapiens
tagaagatttaattt

SEQ ID NO: 1829431 - DNA, 15 bp, Homo sapiens
agaagatttaatttt

SEQ ID NO: 1829432 - DNA, 15 bp, Homo sapiens
gaagatttaatttta

SEQ ID NO: 1829433 - DNA, 15 bp, Homo sapiens
aagatttaattttac

SEQ ID NO: 1829434 - DNA, 15 bp, Homo sapiens
agatttaattttaca

SEQ ID NO: 1829435 - DNA, 15 bp, Homo sapiens
gatttaattttacaa

SEQ ID NO: 1829436 - DNA, 15 bp, Homo sapiens
atttaattttacaaa

SEQ ID NO: 1829437 - DNA, 15 bp, Homo sapiens
tttaattttacaaat

SEQ ID NO: 1829438 - DNA, 15 bp, Homo sapiens
ttaattttacaaatt

SEQ ID NO: 1829439 - DNA, 15 bp, Homo sapiens
taattttacaaatta

SEQ ID NO: 1829440 - DNA, 15 bp, Homo sapiens
aattttacaaattat

SEQ ID NO: 1829441 - DNA, 15 bp, Homo sapiens
attttacaaattatg

SEQ ID NO: 1829442 - DNA, 15 bp, Homo sapiens
ttttacaaattatgc

SEQ ID NO: 1829443 - DNA, 15 bp, Homo sapiens
tttacaaattatgcc

SEQ ID NO: 1829444 - DNA, 15 bp, Homo sapiens
ttacaaattatgcca

SEQ ID NO: 1829445 - DNA, 15 bp, Homo sapiens
tacaaattatgccat

SEQ ID NO: 1829446 - DNA, 15 bp, Homo sapiens
acaaattatgccatg

SEQ ID NO: 1829447 - DNA, 15 bp, Homo sapiens
caaattatgccatgc

SEQ ID NO: 1829448 - DNA, 15 bp, Homo sapiens
aaattatgccatgca

SEQ ID NO: 1829449 - DNA, 15 bp, Homo sapiens
aattatgccatgcac

SEQ ID NO: 1829450 - DNA, 15 bp, Homo sapiens
attatgccatgcaca

SEQ ID NO: 1829451 - DNA, 15 bp, Homo sapiens
ttatgccatgcacat

SEQ ID NO: 1829452 - DNA, 15 bp, Homo sapiens
tatgccatgcacatt

SEQ ID NO: 1829453 - DNA, 15 bp, Homo sapiens
atgccatgcacattt

SEQ ID NO: 1829454 - DNA, 15 bp, Homo sapiens
tgccatgcacatttt

SEQ ID NO: 1829455 - DNA, 15 bp, Homo sapiens
gccatgcacatttta

SEQ ID NO: 1829456 - DNA, 15 bp, Homo sapiens
ccatgcacattttag

SEQ ID NO: 1829457 - DNA, 15 bp, Homo sapiens
catgcacattttagg

SEQ ID NO: 1829458 - DNA, 15 bp, Homo sapiens
atgcacattttaggt

SEQ ID NO: 1829459 - DNA, 15 bp, Homo sapiens
tgcacattttaggtg

SEQ ID NO: 1829460 - DNA, 15 bp, Homo sapiens
gcacattttaggtgt

SEQ ID NO: 1829461 - DNA, 15 bp, Homo sapiens
cacattttaggtgtc

SEQ ID NO: 1829462 - DNA, 15 bp, Homo sapiens
acattttaggtgtct

SEQ ID NO: 1829463 - DNA, 15 bp, Homo sapiens
cattttaggtgtctg

SEQ ID NO: 1829464 - DNA, 15 bp, Homo sapiens
attttaggtgtctgt

SEQ ID NO: 1829465 - DNA, 15 bp, Homo sapiens
ttttaggtgtctgtt

SEQ ID NO: 1829466 - DNA, 15 bp, Homo sapiens
tttaggtgtctgttt

SEQ ID NO: 1829467 - DNA, 15 bp, Homo sapiens
ttaggtgtctgtttc

SEQ ID NO: 1829468 - DNA, 15 bp, Homo sapiens
taggtgtctgtttca

SEQ ID NO: 1829469 - DNA, 15 bp, Homo sapiens
aggtgtctgtttcat

SEQ ID NO: 1829470 - DNA, 15 bp, Homo sapiens
ggtgtctgtttcatg

SEQ ID NO: 1829471 - DNA, 15 bp, Homo sapiens
gtgtctgtttcatgt

SEQ ID NO: 1829472 - DNA, 15 bp, Homo sapiens
tgtctgtttcatgtg

SEQ ID NO: 1829473 - DNA, 15 bp, Homo sapiens
gtctgtttcatgtgg

SEQ ID NO: 1829474 - DNA, 15 bp, Homo sapiens
tctgtttcatgtgga

SEQ ID NO: 1829475 - DNA, 15 bp, Homo sapiens
ctgtttcatgtggaa

SEQ ID NO: 1829476 - DNA, 15 bp, Homo sapiens
tgtttcatgtggaat

SEQ ID NO: 1829477 - DNA, 15 bp, Homo sapiens
gtttcatgtggaata

SEQ ID NO: 1829478 - DNA, 15 bp, Homo sapiens
tttcatgtggaatac

SEQ ID NO: 1829479 - DNA, 15 bp, Homo sapiens
ttcatgtggaatacc

SEQ ID NO: 1829480 - DNA, 15 bp, Homo sapiens
tcatgtggaatacct

SEQ ID NO: 1829481 - DNA, 15 bp, Homo sapiens
catgtggaatacctg

SEQ ID NO: 1829482 - DNA, 15 bp, Homo sapiens
atgtggaatacctga

SEQ ID NO: 1829483 - DNA, 15 bp, Homo sapiens
tgtggaatacctgac

SEQ ID NO: 1829484 - DNA, 15 bp, Homo sapiens
gtggaatacctgact

SEQ ID NO: 1829485 - DNA, 15 bp, Homo sapiens
tggaatacctgactt

SEQ ID NO: 1829486 - DNA, 15 bp, Homo sapiens
ggaatacctgacttc

SEQ ID NO: 1829487 - DNA, 15 bp, Homo sapiens
gaatacctgacttca

SEQ ID NO: 1829488 - DNA, 15 bp, Homo sapiens
aatacctgacttcag

SEQ ID NO: 1829489 - DNA, 15 bp, Homo sapiens
atacctgacttcagg

SEQ ID NO: 1829490 - DNA, 15 bp, Homo sapiens
tacctgacttcaggt

SEQ ID NO: 1829491 - DNA, 15 bp, Homo sapiens
acctgacttcaggtc

SEQ ID NO: 1829492 - DNA, 15 bp, Homo sapiens
cctgacttcaggtca

SEQ ID NO: 1829493 - DNA, 15 bp, Homo sapiens
ctgacttcaggtcaa

SEQ ID NO: 1829494 - DNA, 15 bp, Homo sapiens
tgacttcaggtcaag

SEQ ID NO: 1829495 - DNA, 15 bp, Homo sapiens
gacttcaggtcaagg

SEQ ID NO: 1829496 - DNA, 15 bp, Homo sapiens
acttcaggtcaaggg

SEQ ID NO: 1829497 - DNA, 15 bp, Homo sapiens
cttcaggtcaaggga

SEQ ID NO: 1829498 - DNA, 15 bp, Homo sapiens
ttcaggtcaagggat

SEQ ID NO: 1829499 - DNA, 15 bp, Homo sapiens
tcaggtcaagggatg

SEQ ID NO: 1829500 - DNA, 15 bp, Homo sapiens
caggtcaagggatgg

SEQ ID NO: 1829501 - DNA, 15 bp, Homo sapiens
aggtcaagggatggt

SEQ ID NO: 1829502 - DNA, 15 bp, Homo sapiens
ggtcaagggatggta

SEQ ID NO: 1829503 - DNA, 15 bp, Homo sapiens
gtcaagggatggtat

SEQ ID NO: 1829504 - DNA, 15 bp, Homo sapiens
tcaagggatggtatt

SEQ ID NO: 1829505 - DNA, 15 bp, Homo sapiens
caagggatggtattt

SEQ ID NO: 1829506 - DNA, 15 bp, Homo sapiens
aagggatggtattta

SEQ ID NO: 1829507 - DNA, 15 bp, Homo sapiens
agggatggtatttat

SEQ ID NO: 1829508 - DNA, 15 bp, Homo sapiens
gggatggtatttatg

SEQ ID NO: 1829509 - DNA, 15 bp, Homo sapiens
ggatggtatttatgc

SEQ ID NO: 1829510 - DNA, 15 bp, Homo sapiens
gatggtatttatgct

SEQ ID NO: 1829511 - DNA, 15 bp, Homo sapiens
atggtatttatgctc

SEQ ID NO: 1829512 - DNA, 15 bp, Homo sapiens
tggtatttatgctcg

SEQ ID NO: 1829513 - DNA, 15 bp, Homo sapiens
ggtatttatgctcgc

SEQ ID NO: 1829514 - DNA, 15 bp, Homo sapiens
gtatttatgctcgcc

SEQ ID NO: 1829515 - DNA, 15 bp, Homo sapiens
tatttatgctcgcct

SEQ ID NO: 1829516 - DNA, 15 bp, Homo sapiens
atttatgctcgcctt

SEQ ID NO: 1829517 - DNA, 15 bp, Homo sapiens
tttatgctcgccttg

SEQ ID NO: 1829518 - DNA, 15 bp, Homo sapiens
ttatgctcgccttgc

SEQ ID NO: 1829519 - DNA, 15 bp, Homo sapiens
tatgctcgccttgct

SEQ ID NO: 1829520 - DNA, 15 bp, Homo sapiens
atgctcgccttgctg

SEQ ID NO: 1829521 - DNA, 15 bp, Homo sapiens
tgctcgccttgctgt

SEQ ID NO: 1829522 - DNA, 15 bp, Homo sapiens
gctcgccttgctgta

SEQ ID NO: 1829523 - DNA, 15 bp, Homo sapiens
ctcgccttgctgtag

SEQ ID NO: 1829524 - DNA, 15 bp, Homo sapiens
tcgccttgctgtaga

SEQ ID NO: 1829525 - DNA, 15 bp, Homo sapiens
cgccttgctgtagac

SEQ ID NO: 1829526 - DNA, 15 bp, Homo sapiens
gccttgctgtagact

SEQ ID NO: 1829527 - DNA, 15 bp, Homo sapiens
ccttgctgtagactt

SEQ ID NO: 1829528 - DNA, 15 bp, Homo sapiens
cttgctgtagacttc

SEQ ID NO: 1829529 - DNA, 15 bp, Homo sapiens
ttgctgtagacttcc

SEQ ID NO: 1829530 - DNA, 15 bp, Homo sapiens
tgctgtagacttccc

SEQ ID NO: 1829531 - DNA, 15 bp, Homo sapiens
gctgtagacttccca

SEQ ID NO: 1829532 - DNA, 15 bp, Homo sapiens
ctgtagacttcccag

SEQ ID NO: 1829533 - DNA, 15 bp, Homo sapiens
tgtagacttcccaga

SEQ ID NO: 1829534 - DNA, 15 bp, Homo sapiens
gtagacttcccagat

SEQ ID NO: 1829535 - DNA, 15 bp, Homo sapiens
tagacttcccagatc

SEQ ID NO: 1829536 - DNA, 15 bp, Homo sapiens
agacttcccagatct

SEQ ID NO: 1829537 - DNA, 15 bp, Homo sapiens
gacttcccagatctt

SEQ ID NO: 1829538 - DNA, 15 bp, Homo sapiens
acttcccagatcttc

SEQ ID NO: 1829539 - DNA, 15 bp, Homo sapiens
cttcccagatcttcc

SEQ ID NO: 1829540 - DNA, 15 bp, Homo sapiens
ttcccagatcttcca

SEQ ID NO: 1829541 - DNA, 15 bp, Homo sapiens
tcccagatcttccag

SEQ ID NO: 1829542 - DNA, 15 bp, Homo sapiens
cccagatcttccaga

SEQ ID NO: 1829543 - DNA, 15 bp, Homo sapiens
ccagatcttccagat

SEQ ID NO: 1829544 - DNA, 15 bp, Homo sapiens
cagatcttccagatc

SEQ ID NO: 1829545 - DNA, 15 bp, Homo sapiens
agatcttccagatcc

SEQ ID NO: 1829546 - DNA, 15 bp, Homo sapiens
gatcttccagatcct

SEQ ID NO: 1829547 - DNA, 15 bp, Homo sapiens
atcttccagatcctc

SEQ ID NO: 1829548 - DNA, 15 bp, Homo sapiens
tcttccagatcctca

SEQ ID NO: 1829549 - DNA, 15 bp, Homo sapiens
cttccagatcctcaa

SEQ ID NO: 1829550 - DNA, 15 bp, Homo sapiens
ttccagatcctcaag

SEQ ID NO: 1829551 - DNA, 15 bp, Homo sapiens
tccagatcctcaagc

SEQ ID NO: 1829552 - DNA, 15 bp, Homo sapiens
ccagatcctcaagcg

SEQ ID NO: 1829553 - DNA, 15 bp, Homo sapiens
cagatcctcaagcga

SEQ ID NO: 1829554 - DNA, 15 bp, Homo sapiens
agatcctcaagcgat

SEQ ID NO: 1829555 - DNA, 15 bp, Homo sapiens
gatcctcaagcgatg

SEQ ID NO: 1829556 - DNA, 15 bp, Homo sapiens
atcctcaagcgatgt

SEQ ID NO: 1829557 - DNA, 15 bp, Homo sapiens
tcctcaagcgatgtt

SEQ ID NO: 1829558 - DNA, 15 bp, Homo sapiens
cctcaagcgatgttt

SEQ ID NO: 1829559 - DNA, 15 bp, Homo sapiens
ctcaagcgatgtttg

SEQ ID NO: 1829560 - DNA, 15 bp, Homo sapiens
tcaagcgatgtttga

SEQ ID NO: 1829561 - DNA, 15 bp, Homo sapiens
caagcgatgtttgat

SEQ ID NO: 1829562 - DNA, 15 bp, Homo sapiens
aagcgatgtttgata

SEQ ID NO: 1829563 - DNA, 15 bp, Homo sapiens
agcgatgtttgatat

SEQ ID NO: 1829564 - DNA, 15 bp, Homo sapiens
gcgatgtttgatatt

SEQ ID NO: 1829565 - DNA, 15 bp, Homo sapiens
cgatgtttgatattg

SEQ ID NO: 1829566 - DNA, 15 bp, Homo sapiens
gatgtttgatattga

SEQ ID NO: 1829567 - DNA, 15 bp, Homo sapiens
atgtttgatattgaa

SEQ ID NO: 1829568 - DNA, 15 bp, Homo sapiens
tgtttgatattgaat

SEQ ID NO: 1829569 - DNA, 15 bp, Homo sapiens
gtttgatattgaata

SEQ ID NO: 1829570 - DNA, 15 bp, Homo sapiens
tttgatattgaatat

SEQ ID NO: 1829571 - DNA, 15 bp, Homo sapiens
ttgatattgaatatt

SEQ ID NO: 1829572 - DNA, 15 bp, Homo sapiens
tgatattgaatattt

SEQ ID NO: 1829573 - DNA, 15 bp, Homo sapiens
gatattgaatatttc

SEQ ID NO: 1829574 - DNA, 15 bp, Homo sapiens
atattgaatatttca

SEQ ID NO: 1829575 - DNA, 15 bp, Homo sapiens
tattgaatatttcag

SEQ ID NO: 1829576 - DNA, 15 bp, Homo sapiens
attgaatatttcaga

SEQ ID NO: 1829577 - DNA, 15 bp, Homo sapiens
ttgaatatttcagaa

SEQ ID NO: 1829578 - DNA, 15 bp, Homo sapiens
tgaatatttcagaaa

SEQ ID NO: 1829579 - DNA, 15 bp, Homo sapiens
gaatatttcagaaaa

SEQ ID NO: 1829580 - DNA, 15 bp, Homo sapiens
aatatttcagaaaag

SEQ ID NO: 1829581 - DNA, 15 bp, Homo sapiens
atatttcagaaaaga

SEQ ID NO: 1829582 - DNA, 15 bp, Homo sapiens
tatttcagaaaagat

SEQ ID NO: 1829583 - DNA, 15 bp, Homo sapiens
atttcagaaaagatc

SEQ ID NO: 1829584 - DNA, 15 bp, Homo sapiens
tttcagaaaagatcc

SEQ ID NO: 1829585 - DNA, 15 bp, Homo sapiens
ttcagaaaagatcca

SEQ ID NO: 1829586 - DNA, 15 bp, Homo sapiens
tcagaaaagatccaa

SEQ ID NO: 1829587 - DNA, 15 bp, Homo sapiens
cagaaaagatccaag

SEQ ID NO: 1829588 - DNA, 15 bp, Homo sapiens
agaaaagatccaaga

SEQ ID NO: 1829589 - DNA, 15 bp, Homo sapiens
gaaaagatccaagac

SEQ ID NO: 1829590 - DNA, 15 bp, Homo sapiens
tttttttggagacgg

SEQ ID NO: 1829591 - DNA, 15 bp, Homo sapiens
ttttttggagacgga

SEQ ID NO: 1829592 - DNA, 15 bp, Homo sapiens
tttttggagacggag

SEQ ID NO: 1829593 - DNA, 15 bp, Homo sapiens
ttttggagacggagt

SEQ ID NO: 1829594 - DNA, 15 bp, Homo sapiens
tttggagacggagtc

SEQ ID NO: 1829595 - DNA, 15 bp, Homo sapiens
ttggagacggagtct

SEQ ID NO: 1829596 - DNA, 15 bp, Homo sapiens
tggagacggagtctg

SEQ ID NO: 1829597 - DNA, 15 bp, Homo sapiens
ggagacggagtctgg

SEQ ID NO: 1829598 - DNA, 15 bp, Homo sapiens
gagacggagtctggc

SEQ ID NO: 1829599 - DNA, 15 bp, Homo sapiens
agacggagtctggct

SEQ ID NO: 1829600 - DNA, 15 bp, Homo sapiens
gacggagtctggctc

SEQ ID NO: 1829601 - DNA, 15 bp, Homo sapiens
acggagtctggctct

SEQ ID NO: 1829602 - DNA, 15 bp, Homo sapiens
cggagtctggctctg

SEQ ID NO: 1829603 - DNA, 15 bp, Homo sapiens
gagtctggctctgtt

SEQ ID NO: 1829604 - DNA, 15 bp, Homo sapiens
agtctggctctgttt

SEQ ID NO: 1829605 - DNA, 15 bp, Homo sapiens
gtctggctctgtttc

SEQ ID NO: 1829606 - DNA, 15 bp, Homo sapiens
tctggctctgtttcc

SEQ ID NO: 1829607 - DNA, 15 bp, Homo sapiens
ctggctctgtttccc

SEQ ID NO: 1829608 - DNA, 15 bp, Homo sapiens
tggctctgtttccca

SEQ ID NO: 1829609 - DNA, 15 bp, Homo sapiens
ggctctgtttcccag

SEQ ID NO: 1829610 - DNA, 15 bp, Homo sapiens
agtggtgtgatctct

SEQ ID NO: 1829611 - DNA, 15 bp, Homo sapiens
gtggtgtgatctctg

SEQ ID NO: 1829612 - DNA, 15 bp, Homo sapiens
tggtgtgatctctgc

SEQ ID NO: 1829613 - DNA, 15 bp, Homo sapiens
ggtgtgatctctgct

SEQ ID NO: 1829614 - DNA, 15 bp, Homo sapiens
gtgtgatctctgctc

SEQ ID NO: 1829615 - DNA, 15 bp, Homo sapiens
tgtgatctctgctca

SEQ ID NO: 1829616 - DNA, 15 bp, Homo sapiens
gtgatctctgctcac

SEQ ID NO: 1829617 - DNA, 15 bp, Homo sapiens
tgatctctgctcacc

SEQ ID NO: 1829618 - DNA, 15 bp, Homo sapiens
gatctctgctcacca

SEQ ID NO: 1829619 - DNA, 15 bp, Homo sapiens
atctctgctcaccat

SEQ ID NO: 1829620 - DNA, 15 bp, Homo sapiens
tctctgctcaccata

SEQ ID NO: 1829621 - DNA, 15 bp, Homo sapiens
ctctgctcaccatac

SEQ ID NO: 1829622 - DNA, 15 bp, Homo sapiens
tctgctcaccataca

SEQ ID NO: 1829623 - DNA, 15 bp, Homo sapiens
ctgctcaccatacaa

SEQ ID NO: 1829624 - DNA, 15 bp, Homo sapiens
tgctcaccatacaac

SEQ ID NO: 1829625 - DNA, 15 bp, Homo sapiens
gctcaccatacaacc

SEQ ID NO: 1829626 - DNA, 15 bp, Homo sapiens
ctcaccatacaacct

SEQ ID NO: 1829627 - DNA, 15 bp, Homo sapiens
tcaccatacaacctc

SEQ ID NO: 1829628 - DNA, 15 bp, Homo sapiens
caccatacaacctcc

SEQ ID NO: 1829629 - DNA, 15 bp, Homo sapiens
accatacaacctcca

SEQ ID NO: 1829630 - DNA, 15 bp, Homo sapiens
ccatacaacctccac

SEQ ID NO: 1829631 - DNA, 15 bp, Homo sapiens
catacaacctccact

SEQ ID NO: 1829632 - DNA, 15 bp, Homo sapiens
atacaacctccactt

SEQ ID NO: 1829633 - DNA, 15 bp, Homo sapiens
tacaacctccacttc

SEQ ID NO: 1829634 - DNA, 15 bp, Homo sapiens
acaacctccacttcc

SEQ ID NO: 1829635 - DNA, 15 bp, Homo sapiens
acctccacttcccga

SEQ ID NO: 1829636 - DNA, 15 bp, Homo sapiens
cctccacttcccgag

SEQ ID NO: 1829637 - DNA, 15 bp, Homo sapiens
ctccacttcccgagt

SEQ ID NO: 1829638 - DNA, 15 bp, Homo sapiens
tccacttcccgagtt

SEQ ID NO: 1829639 - DNA, 15 bp, Homo sapiens
ccacttcccgagttc

SEQ ID NO: 1829640 - DNA, 15 bp, Homo sapiens
cacttcccgagttca

SEQ ID NO: 1829641 - DNA, 15 bp, Homo sapiens
acttcccgagttcaa

SEQ ID NO: 1829642 - DNA, 15 bp, Homo sapiens
cttcccgagttcaag

SEQ ID NO: 1829643 - DNA, 15 bp, Homo sapiens
ttcccgagttcaaga

SEQ ID NO: 1829644 - DNA, 15 bp, Homo sapiens
tcccgagttcaagag

SEQ ID NO: 1829645 - DNA, 15 bp, Homo sapiens
cccgagttcaagaga

SEQ ID NO: 1829646 - DNA, 15 bp, Homo sapiens
ccgagttcaagagat

SEQ ID NO: 1829647 - DNA, 15 bp, Homo sapiens
cgagttcaagagatt

SEQ ID NO: 1829648 - DNA, 15 bp, Homo sapiens
gagttcaagagattc

SEQ ID NO: 1829649 - DNA, 15 bp, Homo sapiens
tgcctcagccttccg

SEQ ID NO: 1829650 - DNA, 15 bp, Homo sapiens
gcctcagccttccga

SEQ ID NO: 1829651 - DNA, 15 bp, Homo sapiens
cctcagccttccgag

SEQ ID NO: 1829652 - DNA, 15 bp, Homo sapiens
ctcagccttccgagt

SEQ ID NO: 1829653 - DNA, 15 bp, Homo sapiens
tcagccttccgagtt

SEQ ID NO: 1829654 - DNA, 15 bp, Homo sapiens
cagccttccgagttg

SEQ ID NO: 1829655 - DNA, 15 bp, Homo sapiens
agccttccgagttgt

SEQ ID NO: 1829656 - DNA, 15 bp, Homo sapiens
gccttccgagttgtt

SEQ ID NO: 1829657 - DNA, 15 bp, Homo sapiens
ccttccgagttgttg

SEQ ID NO: 1829658 - DNA, 15 bp, Homo sapiens
cttccgagttgttgg

SEQ ID NO: 1829659 - DNA, 15 bp, Homo sapiens
ttccgagttgttggg

SEQ ID NO: 1829660 - DNA, 15 bp, Homo sapiens
tccgagttgttggga

SEQ ID NO: 1829661 - DNA, 15 bp, Homo sapiens
ccgagttgttgggac

SEQ ID NO: 1829662 - DNA, 15 bp, Homo sapiens
cgagttgttgggact

SEQ ID NO: 1829663 - DNA, 15 bp, Homo sapiens
gagttgttgggacta

SEQ ID NO: 1829664 - DNA, 15 bp, Homo sapiens
agttgttgggactac

SEQ ID NO: 1829665 - DNA, 15 bp, Homo sapiens
gttgttgggactaca

SEQ ID NO: 1829666 - DNA, 15 bp, Homo sapiens
ttgttgggactacag

SEQ ID NO: 1829667 - DNA, 15 bp, Homo sapiens
tgttgggactacagg

SEQ ID NO: 1829668 - DNA, 15 bp, Homo sapiens
gttgggactacaggc

SEQ ID NO: 1829669 - DNA, 15 bp, Homo sapiens
ttgggactacaggcg

SEQ ID NO: 1829670 - DNA, 15 bp, Homo sapiens
ctacaggcgcgtgct

SEQ ID NO: 1829671 - DNA, 15 bp, Homo sapiens
tacaggcgcgtgctg

SEQ ID NO: 1829672 - DNA, 15 bp, Homo sapiens
acaggcgcgtgctgc

SEQ ID NO: 1829673 - DNA, 15 bp, Homo sapiens
caggcgcgtgctgcc

SEQ ID NO: 1829674 - DNA, 15 bp, Homo sapiens
aggcgcgtgctgcca

SEQ ID NO: 1829675 - DNA, 15 bp, Homo sapiens
ggcgcgtgctgccat

SEQ ID NO: 1829676 - DNA, 15 bp, Homo sapiens
gcgcgtgctgccatg

SEQ ID NO: 1829677 - DNA, 15 bp, Homo sapiens
cgcgtgctgccatgc

SEQ ID NO: 1829678 - DNA, 15 bp, Homo sapiens
gcgtgctgccatgcc

SEQ ID NO: 1829679 - DNA, 15 bp, Homo sapiens
cgtgctgccatgcct

SEQ ID NO: 1829680 - DNA, 15 bp, Homo sapiens
gtgctgccatgcctg

SEQ ID NO: 1829681 - DNA, 15 bp, Homo sapiens
tgctgccatgcctgg

SEQ ID NO: 1829682 - DNA, 15 bp, Homo sapiens
gctgccatgcctggc

SEQ ID NO: 1829683 - DNA, 15 bp, Homo sapiens
ctgccatgcctggct

SEQ ID NO: 1829684 - DNA, 15 bp, Homo sapiens
tgccatgcctggcta

SEQ ID NO: 1829685 - DNA, 15 bp, Homo sapiens
tttttggtagagacg

SEQ ID NO: 1829686 - DNA, 15 bp, Homo sapiens
ttttggtagagacgg

SEQ ID NO: 1829687 - DNA, 15 bp, Homo sapiens
tttggtagagacggg

SEQ ID NO: 1829688 - DNA, 15 bp, Homo sapiens
ttggtagagacgggg

SEQ ID NO: 1829689 - DNA, 15 bp, Homo sapiens
tggtagagacgggga

SEQ ID NO: 1829690 - DNA, 15 bp, Homo sapiens
ggtagagacggggat

SEQ ID NO: 1829691 - DNA, 15 bp, Homo sapiens
gtagagacggggatt

SEQ ID NO: 1829692 - DNA, 15 bp, Homo sapiens
tagagacggggattc

SEQ ID NO: 1829693 - DNA, 15 bp, Homo sapiens
agagacggggattca

SEQ ID NO: 1829694 - DNA, 15 bp, Homo sapiens
gagacggggattcac

SEQ ID NO: 1829695 - DNA, 15 bp, Homo sapiens
agacggggattcact

SEQ ID NO: 1829696 - DNA, 15 bp, Homo sapiens
gacggggattcacta

SEQ ID NO: 1829697 - DNA, 15 bp, Homo sapiens
acggggattcactat

SEQ ID NO: 1829698 - DNA, 15 bp, Homo sapiens
cggggattcactatg

SEQ ID NO: 1829699 - DNA, 15 bp, Homo sapiens
ggggattcactatgt

SEQ ID NO: 1829700 - DNA, 15 bp, Homo sapiens
gggattcactatgtt

SEQ ID NO: 1829701 - DNA, 15 bp, Homo sapiens
ggattcactatgttg

SEQ ID NO: 1829702 - DNA, 15 bp, Homo sapiens
gattcactatgttgg

SEQ ID NO: 1829703 - DNA, 15 bp, Homo sapiens
attcactatgttggc

SEQ ID NO: 1829704 - DNA, 15 bp, Homo sapiens
ctatgttggccaggt

SEQ ID NO: 1829705 - DNA, 15 bp, Homo sapiens
tatgttggccaggtt

SEQ ID NO: 1829706 - DNA, 15 bp, Homo sapiens
ggccaggttggtctt

SEQ ID NO: 1829707 - DNA, 15 bp, Homo sapiens
gccaggttggtcttg

SEQ ID NO: 1829708 - DNA, 15 bp, Homo sapiens
caggttggtcttgaa

SEQ ID NO: 1829709 - DNA, 15 bp, Homo sapiens
aggttggtcttgaac

SEQ ID NO: 1829710 - DNA, 15 bp, Homo sapiens
ggttggtcttgaact

SEQ ID NO: 1829711 - DNA, 15 bp, Homo sapiens
gttggtcttgaactc

SEQ ID NO: 1829712 - DNA, 15 bp, Homo sapiens
ttggtcttgaactcc

SEQ ID NO: 1829713 - DNA, 15 bp, Homo sapiens
ctcctgaccttgtgg

SEQ ID NO: 1829714 - DNA, 15 bp, Homo sapiens
tcctgaccttgtggt

SEQ ID NO: 1829715 - DNA, 15 bp, Homo sapiens
cctgaccttgtggtc

SEQ ID NO: 1829716 - DNA, 15 bp, Homo sapiens
ctgaccttgtggtcc

SEQ ID NO: 1829717 - DNA, 15 bp, Homo sapiens
tgaccttgtggtccg

SEQ ID NO: 1829718 - DNA, 15 bp, Homo sapiens
gaccttgtggtccgc

SEQ ID NO: 1829719 - DNA, 15 bp, Homo sapiens
accttgtggtccgcc

SEQ ID NO: 1829720 - DNA, 15 bp, Homo sapiens
ccttgtggtccgccc

SEQ ID NO: 1829721 - DNA, 15 bp, Homo sapiens
cttgtggtccgccca

SEQ ID NO: 1829722 - DNA, 15 bp, Homo sapiens
ttgtggtccgcccat

SEQ ID NO: 1829723 - DNA, 15 bp, Homo sapiens
tgtggtccgcccatc

SEQ ID NO: 1829724 - DNA, 15 bp, Homo sapiens
gtggtccgcccatct

SEQ ID NO: 1829725 - DNA, 15 bp, Homo sapiens
tggtccgcccatctc

SEQ ID NO: 1829726 - DNA, 15 bp, Homo sapiens
ggtccgcccatctca

SEQ ID NO: 1829727 - DNA, 15 bp, Homo sapiens
gtccgcccatctcag

SEQ ID NO: 1829728 - DNA, 15 bp, Homo sapiens
tccgcccatctcagc

SEQ ID NO: 1829729 - DNA, 15 bp, Homo sapiens
ccgcccatctcagcc

SEQ ID NO: 1829730 - DNA, 15 bp, Homo sapiens
cgcccatctcagcct

SEQ ID NO: 1829731 - DNA, 15 bp, Homo sapiens
gcccatctcagcctc

SEQ ID NO: 1829732 - DNA, 15 bp, Homo sapiens
cccatctcagcctcc

SEQ ID NO: 1829733 - DNA, 15 bp, Homo sapiens
ccatctcagcctccc

SEQ ID NO: 1829734 - DNA, 15 bp, Homo sapiens
ggattacaggtgcga

SEQ ID NO: 1829735 - DNA, 15 bp, Homo sapiens
gattacaggtgcgag

SEQ ID NO: 1829736 - DNA, 15 bp, Homo sapiens
attacaggtgcgagg

SEQ ID NO: 1829737 - DNA, 15 bp, Homo sapiens
ttacaggtgcgaggc

SEQ ID NO: 1829738 - DNA, 15 bp, Homo sapiens
tacaggtgcgaggca

SEQ ID NO: 1829739 - DNA, 15 bp, Homo sapiens
acaggtgcgaggcac

SEQ ID NO: 1829740 - DNA, 15 bp, Homo sapiens
caggtgcgaggcacc

SEQ ID NO: 1829741 - DNA, 15 bp, Homo sapiens
aggtgcgaggcaccg

SEQ ID NO: 1829742 - DNA, 15 bp, Homo sapiens
ggtgcgaggcaccgc

SEQ ID NO: 1829743 - DNA, 15 bp, Homo sapiens
gtgcgaggcaccgcg

SEQ ID NO: 1829744 - DNA, 15 bp, Homo sapiens
tgcgaggcaccgcgc

SEQ ID NO: 1829745 - DNA, 15 bp, Homo sapiens
gcgaggcaccgcgcc

SEQ ID NO: 1829746 - DNA, 15 bp, Homo sapiens
cgaggcaccgcgccc

SEQ ID NO: 1829747 - DNA, 15 bp, Homo sapiens
gaggcaccgcgcccc

SEQ ID NO: 1829748 - DNA, 15 bp, Homo sapiens
aggcaccgcgccccg

SEQ ID NO: 1829749 - DNA, 15 bp, Homo sapiens
ggcaccgcgccccgc

SEQ ID NO: 1829750 - DNA, 15 bp, Homo sapiens
gcaccgcgccccgcg

SEQ ID NO: 1829751 - DNA, 15 bp, Homo sapiens
caccgcgccccgcgc

SEQ ID NO: 1829752 - DNA, 15 bp, Homo sapiens
accgcgccccgcgcc

SEQ ID NO: 1829753 - DNA, 15 bp, Homo sapiens
ccgcgccccgcgccc

SEQ ID NO: 1829754 - DNA, 15 bp, Homo sapiens
cgcgccccgcgccct

SEQ ID NO: 1829755 - DNA, 15 bp, Homo sapiens
gcgccccgcgccctg

SEQ ID NO: 1829756 - DNA, 15 bp, Homo sapiens
cgccccgcgccctgc

SEQ ID NO: 1829757 - DNA, 15 bp, Homo sapiens
gccccgcgccctgcc

SEQ ID NO: 1829758 - DNA, 15 bp, Homo sapiens
ccccgcgccctgccg

SEQ ID NO: 1829759 - DNA, 15 bp, Homo sapiens
cccgcgccctgccga

SEQ ID NO: 1829760 - DNA, 15 bp, Homo sapiens
ccgcgccctgccgat

SEQ ID NO: 1829761 - DNA, 15 bp, Homo sapiens
cgcgccctgccgatg

SEQ ID NO: 1829762 - DNA, 15 bp, Homo sapiens
gcgccctgccgatga

SEQ ID NO: 1829763 - DNA, 15 bp, Homo sapiens
cgccctgccgatgaa

SEQ ID NO: 1829764 - DNA, 15 bp, Homo sapiens
gccctgccgatgaac

SEQ ID NO: 1829765 - DNA, 15 bp, Homo sapiens
ccctgccgatgaacc

SEQ ID NO: 1829766 - DNA, 15 bp, Homo sapiens
cctgccgatgaacct

SEQ ID NO: 1829767 - DNA, 15 bp, Homo sapiens
ctgccgatgaaccta

SEQ ID NO: 1829768 - DNA, 15 bp, Homo sapiens
tgccgatgaacctaa

SEQ ID NO: 1829769 - DNA, 15 bp, Homo sapiens
gccgatgaacctaaa

SEQ ID NO: 1829770 - DNA, 15 bp, Homo sapiens
ccgatgaacctaaat

SEQ ID NO: 1829771 - DNA, 15 bp, Homo sapiens
cgatgaacctaaatt

SEQ ID NO: 1829772 - DNA, 15 bp, Homo sapiens
gatgaacctaaattt

SEQ ID NO: 1829773 - DNA, 15 bp, Homo sapiens
atgaacctaaatttt

SEQ ID NO: 1829774 - DNA, 15 bp, Homo sapiens
tgaacctaaatttta

SEQ ID NO: 1829775 - DNA, 15 bp, Homo sapiens
gaacctaaattttaa

SEQ ID NO: 1829776 - DNA, 15 bp, Homo sapiens
aacctaaattttaac

SEQ ID NO: 1829777 - DNA, 15 bp, Homo sapiens
acctaaattttaact

SEQ ID NO: 1829778 - DNA, 15 bp, Homo sapiens
cctaaattttaacta

SEQ ID NO: 1829779 - DNA, 15 bp, Homo sapiens
ctaaattttaactaa

SEQ ID NO: 1829780 - DNA, 15 bp, Homo sapiens
taaattttaactaaa

SEQ ID NO: 1829781 - DNA, 15 bp, Homo sapiens
aaattttaactaaac

SEQ ID NO: 1829782 - DNA, 15 bp, Homo sapiens
aattttaactaaaca

SEQ ID NO: 1829783 - DNA, 15 bp, Homo sapiens
attttaactaaacag

SEQ ID NO: 1829784 - DNA, 15 bp, Homo sapiens
ttttaactaaacagt

SEQ ID NO: 1829785 - DNA, 15 bp, Homo sapiens
tttaactaaacagtg

SEQ ID NO: 1829786 - DNA, 15 bp, Homo sapiens
ttaactaaacagtgg

SEQ ID NO: 1829787 - DNA, 15 bp, Homo sapiens
taactaaacagtggc

SEQ ID NO: 1829788 - DNA, 15 bp, Homo sapiens
aactaaacagtggcc

SEQ ID NO: 1829789 - DNA, 15 bp, Homo sapiens
actaaacagtggcct

SEQ ID NO: 1829790 - DNA, 15 bp, Homo sapiens
ctaaacagtggcctt

SEQ ID NO: 1829791 - DNA, 15 bp, Homo sapiens
taaacagtggcctta

SEQ ID NO: 1829792 - DNA, 15 bp, Homo sapiens
aaacagtggccttat

SEQ ID NO: 1829793 - DNA, 15 bp, Homo sapiens
aacagtggccttatc

SEQ ID NO: 1829794 - DNA, 15 bp, Homo sapiens
acagtggccttatct

SEQ ID NO: 1829795 - DNA, 15 bp, Homo sapiens
cagtggccttatcta

SEQ ID NO: 1829796 - DNA, 15 bp, Homo sapiens
agtggccttatctac

SEQ ID NO: 1829797 - DNA, 15 bp, Homo sapiens
gtggccttatctact

SEQ ID NO: 1829798 - DNA, 15 bp, Homo sapiens
tggccttatctactt

SEQ ID NO: 1829799 - DNA, 15 bp, Homo sapiens
ggccttatctacttt

SEQ ID NO: 1829800 - DNA, 15 bp, Homo sapiens
gccttatctactttc

SEQ ID NO: 1829801 - DNA, 15 bp, Homo sapiens
ccttatctactttca

SEQ ID NO: 1829802 - DNA, 15 bp, Homo sapiens
cttatctactttcag

SEQ ID NO: 1829803 - DNA, 15 bp, Homo sapiens
ttatctactttcaga

SEQ ID NO: 1829804 - DNA, 15 bp, Homo sapiens
tatctactttcagac

SEQ ID NO: 1829805 - DNA, 15 bp, Homo sapiens
atctactttcagacc

SEQ ID NO: 1829806 - DNA, 15 bp, Homo sapiens
tctactttcagacca

SEQ ID NO: 1829807 - DNA, 15 bp, Homo sapiens
ctactttcagaccat

SEQ ID NO: 1829808 - DNA, 15 bp, Homo sapiens
tactttcagaccatg

SEQ ID NO: 1829809 - DNA, 15 bp, Homo sapiens
actttcagaccatgt

SEQ ID NO: 1829810 - DNA, 15 bp, Homo sapiens
ctttcagaccatgtg

SEQ ID NO: 1829811 - DNA, 15 bp, Homo sapiens
tttcagaccatgtgg

SEQ ID NO: 1829812 - DNA, 15 bp, Homo sapiens
ttcagaccatgtggt

SEQ ID NO: 1829813 - DNA, 15 bp, Homo sapiens
tcagaccatgtggta

SEQ ID NO: 1829814 - DNA, 15 bp, Homo sapiens
cagaccatgtggtat

SEQ ID NO: 1829815 - DNA, 15 bp, Homo sapiens
agaccatgtggtata

SEQ ID NO: 1829816 - DNA, 15 bp, Homo sapiens
gaccatgtggtatat

SEQ ID NO: 1829817 - DNA, 15 bp, Homo sapiens
accatgtggtatatt

SEQ ID NO: 1829818 - DNA, 15 bp, Homo sapiens
ccatgtggtatattt

SEQ ID NO: 1829819 - DNA, 15 bp, Homo sapiens
catgtggtatattta

SEQ ID NO: 1829820 - DNA, 15 bp, Homo sapiens
atgtggtatatttac

SEQ ID NO: 1829821 - DNA, 15 bp, Homo sapiens
tgtggtatatttaca

SEQ ID NO: 1829822 - DNA, 15 bp, Homo sapiens
gtggtatatttacat

SEQ ID NO: 1829823 - DNA, 15 bp, Homo sapiens
tggtatatttacatg

SEQ ID NO: 1829824 - DNA, 15 bp, Homo sapiens
ggtatatttacatga

SEQ ID NO: 1829825 - DNA, 15 bp, Homo sapiens
gtatatttacatgac

SEQ ID NO: 1829826 - DNA, 15 bp, Homo sapiens
tatatttacatgact

SEQ ID NO: 1829827 - DNA, 15 bp, Homo sapiens
atatttacatgacta

SEQ ID NO: 1829828 - DNA, 15 bp, Homo sapiens
tatttacatgactac

SEQ ID NO: 1829829 - DNA, 15 bp, Homo sapiens
atttacatgactaca

SEQ ID NO: 1829830 - DNA, 15 bp, Homo sapiens
tttacatgactacag

SEQ ID NO: 1829831 - DNA, 15 bp, Homo sapiens
ttacatgactacagg

SEQ ID NO: 1829832 - DNA, 15 bp, Homo sapiens
tacatgactacagga

SEQ ID NO: 1829833 - DNA, 15 bp, Homo sapiens
acatgactacaggag

SEQ ID NO: 1829834 - DNA, 15 bp, Homo sapiens
catgactacaggaga

SEQ ID NO: 1829835 - DNA, 15 bp, Homo sapiens
atgactacaggagaa

SEQ ID NO: 1829836 - DNA, 15 bp, Homo sapiens
tgactacaggagaag

SEQ ID NO: 1829837 - DNA, 15 bp, Homo sapiens
gactacaggagaagc

SEQ ID NO: 1829838 - DNA, 15 bp, Homo sapiens
actacaggagaagct

SEQ ID NO: 1829839 - DNA, 15 bp, Homo sapiens
ctacaggagaagctt

SEQ ID NO: 1829840 - DNA, 15 bp, Homo sapiens
tacaggagaagcttt

SEQ ID NO: 1829841 - DNA, 15 bp, Homo sapiens
acaggagaagctttg

SEQ ID NO: 1829842 - DNA, 15 bp, Homo sapiens
caggagaagctttgc

SEQ ID NO: 1829843 - DNA, 15 bp, Homo sapiens
aggagaagctttgct

SEQ ID NO: 1829844 - DNA, 15 bp, Homo sapiens
ggagaagctttgcta

SEQ ID NO: 1829845 - DNA, 15 bp, Homo sapiens
gagaagctttgctaa

SEQ ID NO: 1829846 - DNA, 15 bp, Homo sapiens
agaagctttgctaat

SEQ ID NO: 1829847 - DNA, 15 bp, Homo sapiens
gaagctttgctaatt

SEQ ID NO: 1829848 - DNA, 15 bp, Homo sapiens
aagctttgctaattc

SEQ ID NO: 1829849 - DNA, 15 bp, Homo sapiens
agctttgctaattca

SEQ ID NO: 1829850 - DNA, 15 bp, Homo sapiens
gctttgctaattcag

SEQ ID NO: 1829851 - DNA, 15 bp, Homo sapiens
ctttgctaattcaga

SEQ ID NO: 1829852 - DNA, 15 bp, Homo sapiens
tttgctaattcagaa

SEQ ID NO: 1829853 - DNA, 15 bp, Homo sapiens
ttgctaattcagaat

SEQ ID NO: 1829854 - DNA, 15 bp, Homo sapiens
tgctaattcagaata

SEQ ID NO: 1829855 - DNA, 15 bp, Homo sapiens
gctaattcagaataa

SEQ ID NO: 1829856 - DNA, 15 bp, Homo sapiens
ctaattcagaataaa

SEQ ID NO: 1829857 - DNA, 15 bp, Homo sapiens
taattcagaataaat

SEQ ID NO: 1829858 - DNA, 15 bp, Homo sapiens
aattcagaataaatt

SEQ ID NO: 1829859 - DNA, 15 bp, Homo sapiens
attcagaataaatta

SEQ ID NO: 1829860 - DNA, 15 bp, Homo sapiens
ttcagaataaattat

SEQ ID NO: 1829861 - DNA, 15 bp, Homo sapiens
tcagaataaattatg

SEQ ID NO: 1829862 - DNA, 15 bp, Homo sapiens
cagaataaattatgt

SEQ ID NO: 1829863 - DNA, 15 bp, Homo sapiens
agaataaattatgtt

SEQ ID NO: 1829864 - DNA, 15 bp, Homo sapiens
gaataaattatgtta

SEQ ID NO: 1829865 - DNA, 15 bp, Homo sapiens
aataaattatgttac

SEQ ID NO: 1829866 - DNA, 15 bp, Homo sapiens
ataaattatgttact

SEQ ID NO: 1829867 - DNA, 15 bp, Homo sapiens
taaattatgttactt

SEQ ID NO: 1829868 - DNA, 15 bp, Homo sapiens
aaattatgttactta

SEQ ID NO: 1829869 - DNA, 15 bp, Homo sapiens
aattatgttacttaa

SEQ ID NO: 1829870 - DNA, 15 bp, Homo sapiens
attatgttacttaaa

SEQ ID NO: 1829871 - DNA, 15 bp, Homo sapiens
ttatgttacttaaat

SEQ ID NO: 1829872 - DNA, 15 bp, Homo sapiens
tatgttacttaaatt

SEQ ID NO: 1829873 - DNA, 15 bp, Homo sapiens
atgttacttaaattg

SEQ ID NO: 1829874 - DNA, 15 bp, Homo sapiens
tgttacttaaattgg

SEQ ID NO: 1829875 - DNA, 15 bp, Homo sapiens
gttacttaaattggc

SEQ ID NO: 1829876 - DNA, 15 bp, Homo sapiens
ttacttaaattggcg

SEQ ID NO: 1829877 - DNA, 15 bp, Homo sapiens
tacttaaattggcga

SEQ ID NO: 1829878 - DNA, 15 bp, Homo sapiens
acttaaattggcgac

SEQ ID NO: 1829879 - DNA, 15 bp, Homo sapiens
cttaaattggcgact

SEQ ID NO: 1829880 - DNA, 15 bp, Homo sapiens
ttaaattggcgactg

SEQ ID NO: 1829881 - DNA, 15 bp, Homo sapiens
taaattggcgactgt

SEQ ID NO: 1829882 - DNA, 15 bp, Homo sapiens
aaattggcgactgtc

SEQ ID NO: 1829883 - DNA, 15 bp, Homo sapiens
aattggcgactgtct

SEQ ID NO: 1829884 - DNA, 15 bp, Homo sapiens
attggcgactgtctt

SEQ ID NO: 1829885 - DNA, 15 bp, Homo sapiens
ttggcgactgtcttt

SEQ ID NO: 1829886 - DNA, 15 bp, Homo sapiens
tggcgactgtcttta

SEQ ID NO: 1829887 - DNA, 15 bp, Homo sapiens
ggcgactgtctttaa

SEQ ID NO: 1829888 - DNA, 15 bp, Homo sapiens
gcgactgtctttaaa

SEQ ID NO: 1829889 - DNA, 15 bp, Homo sapiens
cgactgtctttaaaa

SEQ ID NO: 1829890 - DNA, 15 bp, Homo sapiens
gactgtctttaaaaa

SEQ ID NO: 1829891 - DNA, 15 bp, Homo sapiens
actgtctttaaaaaa

SEQ ID NO: 1829892 - DNA, 15 bp, Homo sapiens
tctttaaaaaaaaag

SEQ ID NO: 1829893 - DNA, 15 bp, Homo sapiens
ctttaaaaaaaaagt

SEQ ID NO: 1829894 - DNA, 15 bp, Homo sapiens
tttaaaaaaaaagtg

SEQ ID NO: 1829895 - DNA, 15 bp, Homo sapiens
ttaaaaaaaaagtga

SEQ ID NO: 1829896 - DNA, 15 bp, Homo sapiens
taaaaaaaaagtgat

SEQ ID NO: 1829897 - DNA, 15 bp, Homo sapiens
aaaaaaaaagtgatt

SEQ ID NO: 1829898 - DNA, 15 bp, Homo sapiens
aaaaaaaagtgattt

SEQ ID NO: 1829899 - DNA, 15 bp, Homo sapiens
aaaaaaagtgatttt

SEQ ID NO: 1829900 - DNA, 15 bp, Homo sapiens
aaaaaagtgattttt

SEQ ID NO: 1829901 - DNA, 15 bp, Homo sapiens
aaaaagtgatttttt

SEQ ID NO: 1829902 - DNA, 15 bp, Homo sapiens
aaaagtgattttttg

SEQ ID NO: 1829903 - DNA, 15 bp, Homo sapiens
aaagtgattttttgg

SEQ ID NO: 1829904 - DNA, 15 bp, Homo sapiens
aagtgattttttgga

SEQ ID NO: 1829905 - DNA, 15 bp, Homo sapiens
agtgattttttggat

SEQ ID NO: 1829906 - DNA, 15 bp, Homo sapiens
gtgattttttggatg

SEQ ID NO: 1829907 - DNA, 15 bp, Homo sapiens
tgattttttggatgc

SEQ ID NO: 1829908 - DNA, 15 bp, Homo sapiens
gattttttggatgca

SEQ ID NO: 1829909 - DNA, 15 bp, Homo sapiens
attttttggatgcag

SEQ ID NO: 1829910 - DNA, 15 bp, Homo sapiens
ttttttggatgcagt

SEQ ID NO: 1829911 - DNA, 15 bp, Homo sapiens
tttttggatgcagta

SEQ ID NO: 1829912 - DNA, 15 bp, Homo sapiens
ttttggatgcagtag

SEQ ID NO: 1829913 - DNA, 15 bp, Homo sapiens
tttggatgcagtagc

SEQ ID NO: 1829914 - DNA, 15 bp, Homo sapiens
ttggatgcagtagct

SEQ ID NO: 1829915 - DNA, 15 bp, Homo sapiens
tggatgcagtagctc

SEQ ID NO: 1829916 - DNA, 15 bp, Homo sapiens
ggatgcagtagctcg

SEQ ID NO: 1829917 - DNA, 15 bp, Homo sapiens
gatgcagtagctcgt

SEQ ID NO: 1829918 - DNA, 15 bp, Homo sapiens
atgcagtagctcgtg

SEQ ID NO: 1829919 - DNA, 15 bp, Homo sapiens
tgcagtagctcgtgc

SEQ ID NO: 1829920 - DNA, 15 bp, Homo sapiens
gcagtagctcgtgcc

SEQ ID NO: 1829921 - DNA, 15 bp, Homo sapiens
cagtagctcgtgcct

SEQ ID NO: 1829922 - DNA, 15 bp, Homo sapiens
agtagctcgtgccta

SEQ ID NO: 1829923 - DNA, 15 bp, Homo sapiens
gtagctcgtgcctat

SEQ ID NO: 1829924 - DNA, 15 bp, Homo sapiens
tagctcgtgcctata

SEQ ID NO: 1829925 - DNA, 15 bp, Homo sapiens
agctcgtgcctataa

SEQ ID NO: 1829926 - DNA, 15 bp, Homo sapiens
gctcgtgcctataat

SEQ ID NO: 1829927 - DNA, 15 bp, Homo sapiens
ctcgtgcctataatc

SEQ ID NO: 1829928 - DNA, 15 bp, Homo sapiens
tcgtgcctataatcc

SEQ ID NO: 1829929 - DNA, 15 bp, Homo sapiens
cgtgcctataatccc

SEQ ID NO: 1829930 - DNA, 15 bp, Homo sapiens
gcctataatcccagt

SEQ ID NO: 1829931 - DNA, 15 bp, Homo sapiens
cctataatcccagtg

SEQ ID NO: 1829932 - DNA, 15 bp, Homo sapiens
ctataatcccagtgc

SEQ ID NO: 1829933 - DNA, 15 bp, Homo sapiens
tataatcccagtgct

SEQ ID NO: 1829934 - DNA, 15 bp, Homo sapiens
ataatcccagtgctt

SEQ ID NO: 1829935 - DNA, 15 bp, Homo sapiens
taatcccagtgcttt

SEQ ID NO: 1829936 - DNA, 15 bp, Homo sapiens
aatcccagtgctttg

SEQ ID NO: 1829937 - DNA, 15 bp, Homo sapiens
atcccagtgctttgg

SEQ ID NO: 1829938 - DNA, 15 bp, Homo sapiens
ccagtgctttgggaa

SEQ ID NO: 1829939 - DNA, 15 bp, Homo sapiens
cagtgctttgggaag

SEQ ID NO: 1829940 - DNA, 15 bp, Homo sapiens
agtgctttgggaagc

SEQ ID NO: 1829941 - DNA, 15 bp, Homo sapiens
gtgctttgggaagct

SEQ ID NO: 1829942 - DNA, 15 bp, Homo sapiens
tgctttgggaagctg

SEQ ID NO: 1829943 - DNA, 15 bp, Homo sapiens
gctttgggaagctga

SEQ ID NO: 1829944 - DNA, 15 bp, Homo sapiens
tttgggaagctgaga

SEQ ID NO: 1829945 - DNA, 15 bp, Homo sapiens
ttgggaagctgagat

SEQ ID NO: 1829946 - DNA, 15 bp, Homo sapiens
tgggaagctgagata

SEQ ID NO: 1829947 - DNA, 15 bp, Homo sapiens
gggaagctgagatag

SEQ ID NO: 1829948 - DNA, 15 bp, Homo sapiens
ggaagctgagatagg

SEQ ID NO: 1829949 - DNA, 15 bp, Homo sapiens
gaagctgagatagga

SEQ ID NO: 1829950 - DNA, 15 bp, Homo sapiens
aagctgagataggaa

SEQ ID NO: 1829951 - DNA, 15 bp, Homo sapiens
agctgagataggaag

SEQ ID NO: 1829952 - DNA, 15 bp, Homo sapiens
gctgagataggaaga

SEQ ID NO: 1829953 - DNA, 15 bp, Homo sapiens
ctgagataggaagat

SEQ ID NO: 1829954 - DNA, 15 bp, Homo sapiens
tgagataggaagatc

SEQ ID NO: 1829955 - DNA, 15 bp, Homo sapiens
gagataggaagatct

SEQ ID NO: 1829956 - DNA, 15 bp, Homo sapiens
agataggaagatctc

SEQ ID NO: 1829957 - DNA, 15 bp, Homo sapiens
gataggaagatctct

SEQ ID NO: 1829958 - DNA, 15 bp, Homo sapiens
ataggaagatctctt

SEQ ID NO: 1829959 - DNA, 15 bp, Homo sapiens
taggaagatctcttg

SEQ ID NO: 1829960 - DNA, 15 bp, Homo sapiens
aggaagatctcttga

SEQ ID NO: 1829961 - DNA, 15 bp, Homo sapiens
ggaagatctcttgaa

SEQ ID NO: 1829962 - DNA, 15 bp, Homo sapiens
gaagatctcttgaac

SEQ ID NO: 1829963 - DNA, 15 bp, Homo sapiens
aagatctcttgaact

SEQ ID NO: 1829964 - DNA, 15 bp, Homo sapiens
agatctcttgaactc

SEQ ID NO: 1829965 - DNA, 15 bp, Homo sapiens
gatctcttgaactcc

SEQ ID NO: 1829966 - DNA, 15 bp, Homo sapiens
atctcttgaactccg

SEQ ID NO: 1829967 - DNA, 15 bp, Homo sapiens
tctcttgaactccgg

SEQ ID NO: 1829968 - DNA, 15 bp, Homo sapiens
ctcttgaactccgga

SEQ ID NO: 1829969 - DNA, 15 bp, Homo sapiens
tcttgaactccggag

SEQ ID NO: 1829970 - DNA, 15 bp, Homo sapiens
cttgaactccggagt

SEQ ID NO: 1829971 - DNA, 15 bp, Homo sapiens
ttgaactccggagtt

SEQ ID NO: 1829972 - DNA, 15 bp, Homo sapiens
tgaactccggagttt

SEQ ID NO: 1829973 - DNA, 15 bp, Homo sapiens
gaactccggagtttg

SEQ ID NO: 1829974 - DNA, 15 bp, Homo sapiens
aactccggagtttga

SEQ ID NO: 1829975 - DNA, 15 bp, Homo sapiens
actccggagtttgag

SEQ ID NO: 1829976 - DNA, 15 bp, Homo sapiens
ctccggagtttgaga

SEQ ID NO: 1829977 - DNA, 15 bp, Homo sapiens
tccggagtttgagac

SEQ ID NO: 1829978 - DNA, 15 bp, Homo sapiens
ccggagtttgagacc

SEQ ID NO: 1829979 - DNA, 15 bp, Homo sapiens
cggagtttgagacca

SEQ ID NO: 1829980 - DNA, 15 bp, Homo sapiens
ttgagaccagcctgc

SEQ ID NO: 1829981 - DNA, 15 bp, Homo sapiens
tgagaccagcctgcg

SEQ ID NO: 1829982 - DNA, 15 bp, Homo sapiens
gagaccagcctgcgc

SEQ ID NO: 1829983 - DNA, 15 bp, Homo sapiens
agaccagcctgcgca

SEQ ID NO: 1829984 - DNA, 15 bp, Homo sapiens
gaccagcctgcgcaa

SEQ ID NO: 1829985 - DNA, 15 bp, Homo sapiens
accagcctgcgcaac

SEQ ID NO: 1829986 - DNA, 15 bp, Homo sapiens
ccagcctgcgcaaca

SEQ ID NO: 1829987 - DNA, 15 bp, Homo sapiens
cagcctgcgcaacac

SEQ ID NO: 1829988 - DNA, 15 bp, Homo sapiens
agcctgcgcaacaca

SEQ ID NO: 1829989 - DNA, 15 bp, Homo sapiens
gcctgcgcaacacag

SEQ ID NO: 1829990 - DNA, 15 bp, Homo sapiens
cctgcgcaacacagt

SEQ ID NO: 1829991 - DNA, 15 bp, Homo sapiens
ctgcgcaacacagtg

SEQ ID NO: 1829992 - DNA, 15 bp, Homo sapiens
tgcgcaacacagtga

SEQ ID NO: 1829993 - DNA, 15 bp, Homo sapiens
gcgcaacacagtgag

SEQ ID NO: 1829994 - DNA, 15 bp, Homo sapiens
cgcaacacagtgaga

SEQ ID NO: 1829995 - DNA, 15 bp, Homo sapiens
gcaacacagtgagac

SEQ ID NO: 1829996 - DNA, 15 bp, Homo sapiens
acacagtgagaccct

SEQ ID NO: 1829997 - DNA, 15 bp, Homo sapiens
cacagtgagacccta

SEQ ID NO: 1829998 - DNA, 15 bp, Homo sapiens
acagtgagaccctaa

SEQ ID NO: 1829999 - DNA, 15 bp, Homo sapiens
cagtgagaccctaat

SEQ ID NO: 1830000 - DNA, 15 bp, Homo sapiens
agtgagaccctaatc

SEQ ID NO: 1830001 - DNA, 15 bp, Homo sapiens
gtgagaccctaatca

SEQ ID NO: 1830002 - DNA, 15 bp, Homo sapiens
tgagaccctaatcac

SEQ ID NO: 1830003 - DNA, 15 bp, Homo sapiens
gagaccctaatcact

SEQ ID NO: 1830004 - DNA, 15 bp, Homo sapiens
agaccctaatcacta

SEQ ID NO: 1830005 - DNA, 15 bp, Homo sapiens
gaccctaatcactac

SEQ ID NO: 1830006 - DNA, 15 bp, Homo sapiens
accctaatcactaca

SEQ ID NO: 1830007 - DNA, 15 bp, Homo sapiens
ccctaatcactacac

SEQ ID NO: 1830008 - DNA, 15 bp, Homo sapiens
cctaatcactacacc

SEQ ID NO: 1830009 - DNA, 15 bp, Homo sapiens
ctaatcactacaccc

SEQ ID NO: 1830010 - DNA, 15 bp, Homo sapiens
taatcactacacccc

SEQ ID NO: 1830011 - DNA, 15 bp, Homo sapiens
aatcactacacccct

SEQ ID NO: 1830012 - DNA, 15 bp, Homo sapiens
atcactacacccctc

SEQ ID NO: 1830013 - DNA, 15 bp, Homo sapiens
tcactacacccctcc

SEQ ID NO: 1830014 - DNA, 15 bp, Homo sapiens
cactacacccctcca

SEQ ID NO: 1830015 - DNA, 15 bp, Homo sapiens
actacacccctccac

SEQ ID NO: 1830016 - DNA, 15 bp, Homo sapiens
ctacacccctccacc

SEQ ID NO: 1830017 - DNA, 15 bp, Homo sapiens
tacacccctccaccc

SEQ ID NO: 1830018 - DNA, 15 bp, Homo sapiens
acacccctccacccc

SEQ ID NO: 1830019 - DNA, 15 bp, Homo sapiens
cacccctccacccca

SEQ ID NO: 1830020 - DNA, 15 bp, Homo sapiens
acccctccaccccat

SEQ ID NO: 1830021 - DNA, 15 bp, Homo sapiens
cccctccaccccatg

SEQ ID NO: 1830022 - DNA, 15 bp, Homo sapiens
ccctccaccccatgt

SEQ ID NO: 1830023 - DNA, 15 bp, Homo sapiens
cctccaccccatgta

SEQ ID NO: 1830024 - DNA, 15 bp, Homo sapiens
ctccaccccatgtaa

SEQ ID NO: 1830025 - DNA, 15 bp, Homo sapiens
tccaccccatgtaac

SEQ ID NO: 1830026 - DNA, 15 bp, Homo sapiens
ccaccccatgtaact

SEQ ID NO: 1830027 - DNA, 15 bp, Homo sapiens
caccccatgtaactt

SEQ ID NO: 1830028 - DNA, 15 bp, Homo sapiens
accccatgtaacttt

SEQ ID NO: 1830029 - DNA, 15 bp, Homo sapiens
ccccatgtaactttt

SEQ ID NO: 1830030 - DNA, 15 bp, Homo sapiens
cccatgtaacttttg

SEQ ID NO: 1830031 - DNA, 15 bp, Homo sapiens
ccatgtaacttttgt

SEQ ID NO: 1830032 - DNA, 15 bp, Homo sapiens
catgtaacttttgtt

SEQ ID NO: 1830033 - DNA, 15 bp, Homo sapiens
atgtaacttttgttt

SEQ ID NO: 1830034 - DNA, 15 bp, Homo sapiens
gtaacttttgtttta

SEQ ID NO: 1830035 - DNA, 15 bp, Homo sapiens
taacttttgttttat

SEQ ID NO: 1830036 - DNA, 15 bp, Homo sapiens
aacttttgttttatc

SEQ ID NO: 1830037 - DNA, 15 bp, Homo sapiens
acttttgttttatcc

SEQ ID NO: 1830038 - DNA, 15 bp, Homo sapiens
cttttgttttatcca

SEQ ID NO: 1830039 - DNA, 15 bp, Homo sapiens
ttttgttttatccag

SEQ ID NO: 1830040 - DNA, 15 bp, Homo sapiens
tttgttttatccagg

SEQ ID NO: 1830041 - DNA, 15 bp, Homo sapiens
ttgttttatccaggt

SEQ ID NO: 1830042 - DNA, 15 bp, Homo sapiens
tgttttatccaggtt

SEQ ID NO: 1830043 - DNA, 15 bp, Homo sapiens
gttttatccaggttg

SEQ ID NO: 1830044 - DNA, 15 bp, Homo sapiens
ttttatccaggttgt

SEQ ID NO: 1830045 - DNA, 15 bp, Homo sapiens
tttatccaggttgtg

SEQ ID NO: 1830046 - DNA, 15 bp, Homo sapiens
ttatccaggttgtgg

SEQ ID NO: 1830047 - DNA, 15 bp, Homo sapiens
tatccaggttgtggt

SEQ ID NO: 1830048 - DNA, 15 bp, Homo sapiens
atccaggttgtggta

SEQ ID NO: 1830049 - DNA, 15 bp, Homo sapiens
tccaggttgtggtat

SEQ ID NO: 1830050 - DNA, 15 bp, Homo sapiens
ccaggttgtggtata

SEQ ID NO: 1830051 - DNA, 15 bp, Homo sapiens
caggttgtggtatat

SEQ ID NO: 1830052 - DNA, 15 bp, Homo sapiens
aggttgtggtatatt

SEQ ID NO: 1830053 - DNA, 15 bp, Homo sapiens
ggttgtggtatatta

SEQ ID NO: 1830054 - DNA, 15 bp, Homo sapiens
gttgtggtatattaa

SEQ ID NO: 1830055 - DNA, 15 bp, Homo sapiens
ttgtggtatattaaa

SEQ ID NO: 1830056 - DNA, 15 bp, Homo sapiens
tgtggtatattaaat

SEQ ID NO: 1830057 - DNA, 15 bp, Homo sapiens
gtggtatattaaatg

SEQ ID NO: 1830058 - DNA, 15 bp, Homo sapiens
tggtatattaaatgg

SEQ ID NO: 1830059 - DNA, 15 bp, Homo sapiens
ggtatattaaatggg

SEQ ID NO: 1830060 - DNA, 15 bp, Homo sapiens
gtatattaaatgggc

SEQ ID NO: 1830061 - DNA, 15 bp, Homo sapiens
tatattaaatgggca

SEQ ID NO: 1830062 - DNA, 15 bp, Homo sapiens
atattaaatgggcat

SEQ ID NO: 1830063 - DNA, 15 bp, Homo sapiens
tattaaatgggcatt

SEQ ID NO: 1830064 - DNA, 15 bp, Homo sapiens
attaaatgggcatta

SEQ ID NO: 1830065 - DNA, 15 bp, Homo sapiens
ttaaatgggcattag

SEQ ID NO: 1830066 - DNA, 15 bp, Homo sapiens
taaatgggcattagt

SEQ ID NO: 1830067 - DNA, 15 bp, Homo sapiens
aaatgggcattagtg

SEQ ID NO: 1830068 - DNA, 15 bp, Homo sapiens
aatgggcattagtgt

SEQ ID NO: 1830069 - DNA, 15 bp, Homo sapiens
atgggcattagtgta

SEQ ID NO: 1830070 - DNA, 15 bp, Homo sapiens
tgggcattagtgtaa

SEQ ID NO: 1830071 - DNA, 15 bp, Homo sapiens
gggcattagtgtaaa

SEQ ID NO: 1830072 - DNA, 15 bp, Homo sapiens
ggcattagtgtaaag

SEQ ID NO: 1830073 - DNA, 15 bp, Homo sapiens
gcattagtgtaaagt

SEQ ID NO: 1830074 - DNA, 15 bp, Homo sapiens
cattagtgtaaagtg

SEQ ID NO: 1830075 - DNA, 15 bp, Homo sapiens
attagtgtaaagtgg

SEQ ID NO: 1830076 - DNA, 15 bp, Homo sapiens
ttagtgtaaagtggg

SEQ ID NO: 1830077 - DNA, 15 bp, Homo sapiens
tagtgtaaagtggga

SEQ ID NO: 1830078 - DNA, 15 bp, Homo sapiens
agtgtaaagtgggaa

SEQ ID NO: 1830079 - DNA, 15 bp, Homo sapiens
gtgtaaagtgggaaa

SEQ ID NO: 1830080 - DNA, 15 bp, Homo sapiens
tgtaaagtgggaaaa

SEQ ID NO: 1830081 - DNA, 15 bp, Homo sapiens
gtaaagtgggaaaat

SEQ ID NO: 1830082 - DNA, 15 bp, Homo sapiens
taaagtgggaaaatt

SEQ ID NO: 1830083 - DNA, 15 bp, Homo sapiens
aaagtgggaaaatta

SEQ ID NO: 1830084 - DNA, 15 bp, Homo sapiens
aagtgggaaaattat

SEQ ID NO: 1830085 - DNA, 15 bp, Homo sapiens
agtgggaaaattata

SEQ ID NO: 1830086 - DNA, 15 bp, Homo sapiens
gtgggaaaattatat

SEQ ID NO: 1830087 - DNA, 15 bp, Homo sapiens
tgggaaaattatatt

SEQ ID NO: 1830088 - DNA, 15 bp, Homo sapiens
gggaaaattatatta

SEQ ID NO: 1830089 - DNA, 15 bp, Homo sapiens
ggaaaattatattaa

SEQ ID NO: 1830090 - DNA, 15 bp, Homo sapiens
gaaaattatattaat

SEQ ID NO: 1830091 - DNA, 15 bp, Homo sapiens
aaaattatattaatt

SEQ ID NO: 1830092 - DNA, 15 bp, Homo sapiens
aaattatattaattc

SEQ ID NO: 1830093 - DNA, 15 bp, Homo sapiens
aattatattaattct

SEQ ID NO: 1830094 - DNA, 15 bp, Homo sapiens
attatattaattctt

SEQ ID NO: 1830095 - DNA, 15 bp, Homo sapiens
ttatattaattcttg

SEQ ID NO: 1830096 - DNA, 15 bp, Homo sapiens
tatattaattcttga

SEQ ID NO: 1830097 - DNA, 15 bp, Homo sapiens
atattaattcttgaa

SEQ ID NO: 1830098 - DNA, 15 bp, Homo sapiens
tattaattcttgaat

SEQ ID NO: 1830099 - DNA, 15 bp, Homo sapiens
attaattcttgaata

SEQ ID NO: 1830100 - DNA, 15 bp, Homo sapiens
ttaattcttgaatat

SEQ ID NO: 1830101 - DNA, 15 bp, Homo sapiens
taattcttgaatatg

SEQ ID NO: 1830102 - DNA, 15 bp, Homo sapiens
aattcttgaatatga

SEQ ID NO: 1830103 - DNA, 15 bp, Homo sapiens
attcttgaatatgat

SEQ ID NO: 1830104 - DNA, 15 bp, Homo sapiens
ttcttgaatatgatt

SEQ ID NO: 1830105 - DNA, 15 bp, Homo sapiens
tcttgaatatgatta

SEQ ID NO: 1830106 - DNA, 15 bp, Homo sapiens
cttgaatatgattac

SEQ ID NO: 1830107 - DNA, 15 bp, Homo sapiens
ttgaatatgattact

SEQ ID NO: 1830108 - DNA, 15 bp, Homo sapiens
tgaatatgattacta

SEQ ID NO: 1830109 - DNA, 15 bp, Homo sapiens
gaatatgattactaa

SEQ ID NO: 1830110 - DNA, 15 bp, Homo sapiens
aatatgattactaaa

SEQ ID NO: 1830111 - DNA, 15 bp, Homo sapiens
atatgattactaaac

SEQ ID NO: 1830112 - DNA, 15 bp, Homo sapiens
tatgattactaaact

SEQ ID NO: 1830113 - DNA, 15 bp, Homo sapiens
atgattactaaactg

SEQ ID NO: 1830114 - DNA, 15 bp, Homo sapiens
tgattactaaactga

SEQ ID NO: 1830115 - DNA, 15 bp, Homo sapiens
gattactaaactgaa

SEQ ID NO: 1830116 - DNA, 15 bp, Homo sapiens
attactaaactgaat

SEQ ID NO: 1830117 - DNA, 15 bp, Homo sapiens
ttactaaactgaatt

SEQ ID NO: 1830118 - DNA, 15 bp, Homo sapiens
tactaaactgaattt

SEQ ID NO: 1830119 - DNA, 15 bp, Homo sapiens
actaaactgaatttg

SEQ ID NO: 1830120 - DNA, 15 bp, Homo sapiens
ctaaactgaatttga

SEQ ID NO: 1830121 - DNA, 15 bp, Homo sapiens
taaactgaatttgaa

SEQ ID NO: 1830122 - DNA, 15 bp, Homo sapiens
aaactgaatttgaaa

SEQ ID NO: 1830123 - DNA, 15 bp, Homo sapiens
aactgaatttgaaaa

SEQ ID NO: 1830124 - DNA, 15 bp, Homo sapiens
actgaatttgaaaag

SEQ ID NO: 1830125 - DNA, 15 bp, Homo sapiens
ctgaatttgaaaagt

SEQ ID NO: 1830126 - DNA, 15 bp, Homo sapiens
tgaatttgaaaagtt

SEQ ID NO: 1830127 - DNA, 15 bp, Homo sapiens
gaatttgaaaagttt

SEQ ID NO: 1830128 - DNA, 15 bp, Homo sapiens
aatttgaaaagtttt

SEQ ID NO: 1830129 - DNA, 15 bp, Homo sapiens
atttgaaaagttttc

SEQ ID NO: 1830130 - DNA, 15 bp, Homo sapiens
tttgaaaagttttca

SEQ ID NO: 1830131 - DNA, 15 bp, Homo sapiens
ttgaaaagttttcag

SEQ ID NO: 1830132 - DNA, 15 bp, Homo sapiens
tgaaaagttttcagg

SEQ ID NO: 1830133 - DNA, 15 bp, Homo sapiens
gaaaagttttcaggc

SEQ ID NO: 1830134 - DNA, 15 bp, Homo sapiens
aaaagttttcaggct

SEQ ID NO: 1830135 - DNA, 15 bp, Homo sapiens
aaagttttcaggcta

SEQ ID NO: 1830136 - DNA, 15 bp, Homo sapiens
aagttttcaggctat

SEQ ID NO: 1830137 - DNA, 15 bp, Homo sapiens
agttttcaggctatc

SEQ ID NO: 1830138 - DNA, 15 bp, Homo sapiens
gttttcaggctatca

SEQ ID NO: 1830139 - DNA, 15 bp, Homo sapiens
ttttcaggctatcaa

SEQ ID NO: 1830140 - DNA, 15 bp, Homo sapiens
tttcaggctatcaag

SEQ ID NO: 1830141 - DNA, 15 bp, Homo sapiens
ttcaggctatcaaga

SEQ ID NO: 1830142 - DNA, 15 bp, Homo sapiens
tcaggctatcaagag

SEQ ID NO: 1830143 - DNA, 15 bp, Homo sapiens
caggctatcaagaga

SEQ ID NO: 1830144 - DNA, 15 bp, Homo sapiens
aggctatcaagagaa

SEQ ID NO: 1830145 - DNA, 15 bp, Homo sapiens
ggctatcaagagaat

SEQ ID NO: 1830146 - DNA, 15 bp, Homo sapiens
gctatcaagagaatt

SEQ ID NO: 1830147 - DNA, 15 bp, Homo sapiens
ctatcaagagaattt

SEQ ID NO: 1830148 - DNA, 15 bp, Homo sapiens
tatcaagagaatttt

SEQ ID NO: 1830149 - DNA, 15 bp, Homo sapiens
atcaagagaattttt

SEQ ID NO: 1830150 - DNA, 15 bp, Homo sapiens
tcaagagaattttta

SEQ ID NO: 1830151 - DNA, 15 bp, Homo sapiens
caagagaatttttaa

SEQ ID NO: 1830152 - DNA, 15 bp, Homo sapiens
aagagaatttttaac

SEQ ID NO: 1830153 - DNA, 15 bp, Homo sapiens
agagaatttttaact

SEQ ID NO: 1830154 - DNA, 15 bp, Homo sapiens
gagaatttttaactt

SEQ ID NO: 1830155 - DNA, 15 bp, Homo sapiens
agaatttttaactta

SEQ ID NO: 1830156 - DNA, 15 bp, Homo sapiens
gaatttttaacttaa

SEQ ID NO: 1830157 - DNA, 15 bp, Homo sapiens
aatttttaacttaaa

SEQ ID NO: 1830158 - DNA, 15 bp, Homo sapiens
atttttaacttaaaa

SEQ ID NO: 1830159 - DNA, 15 bp, Homo sapiens
tttttaacttaaaac

SEQ ID NO: 1830160 - DNA, 15 bp, Homo sapiens
ttttaacttaaaact

SEQ ID NO: 1830161 - DNA, 15 bp, Homo sapiens
tttaacttaaaactt

SEQ ID NO: 1830162 - DNA, 15 bp, Homo sapiens
ttaacttaaaactta

SEQ ID NO: 1830163 - DNA, 15 bp, Homo sapiens
taacttaaaacttat

SEQ ID NO: 1830164 - DNA, 15 bp, Homo sapiens
aacttaaaacttata

SEQ ID NO: 1830165 - DNA, 15 bp, Homo sapiens
acttaaaacttatat

SEQ ID NO: 1830166 - DNA, 15 bp, Homo sapiens
cttaaaacttatata

SEQ ID NO: 1830167 - DNA, 15 bp, Homo sapiens
ttaaaacttatataa

SEQ ID NO: 1830168 - DNA, 15 bp, Homo sapiens
taaaacttatataat

SEQ ID NO: 1830169 - DNA, 15 bp, Homo sapiens
aaaacttatataatt

SEQ ID NO: 1830170 - DNA, 15 bp, Homo sapiens
aaacttatataattt

SEQ ID NO: 1830171 - DNA, 15 bp, Homo sapiens
aacttatataatttg

SEQ ID NO: 1830172 - DNA, 15 bp, Homo sapiens
acttatataatttga

SEQ ID NO: 1830173 - DNA, 15 bp, Homo sapiens
cttatataatttgaa

SEQ ID NO: 1830174 - DNA, 15 bp, Homo sapiens
ttatataatttgaac

SEQ ID NO: 1830175 - DNA, 15 bp, Homo sapiens
tatataatttgaact

SEQ ID NO: 1830176 - DNA, 15 bp, Homo sapiens
atataatttgaactt

SEQ ID NO: 1830177 - DNA, 15 bp, Homo sapiens
tataatttgaacttt

SEQ ID NO: 1830178 - DNA, 15 bp, Homo sapiens
ataatttgaactttt

SEQ ID NO: 1830179 - DNA, 15 bp, Homo sapiens
taatttgaacttttt

SEQ ID NO: 1830180 - DNA, 15 bp, Homo sapiens
aatttgaacttttta

SEQ ID NO: 1830181 - DNA, 15 bp, Homo sapiens
atttgaactttttac

SEQ ID NO: 1830182 - DNA, 15 bp, Homo sapiens
tttgaactttttact

SEQ ID NO: 1830183 - DNA, 15 bp, Homo sapiens
ttgaactttttactt

SEQ ID NO: 1830184 - DNA, 15 bp, Homo sapiens
tgaactttttacttc

SEQ ID NO: 1830185 - DNA, 15 bp, Homo sapiens
gaactttttacttca

SEQ ID NO: 1830186 - DNA, 15 bp, Homo sapiens
aactttttacttcat

SEQ ID NO: 1830187 - DNA, 15 bp, Homo sapiens
actttttacttcata

SEQ ID NO: 1830188 - DNA, 15 bp, Homo sapiens
ctttttacttcatat

SEQ ID NO: 1830189 - DNA, 15 bp, Homo sapiens
tttttacttcatata

SEQ ID NO: 1830190 - DNA, 15 bp, Homo sapiens
ttttacttcatatat

SEQ ID NO: 1830191 - DNA, 15 bp, Homo sapiens
tttacttcatatatc

SEQ ID NO: 1830192 - DNA, 15 bp, Homo sapiens
ttacttcatatatcc

SEQ ID NO: 1830193 - DNA, 15 bp, Homo sapiens
tacttcatatatccg

SEQ ID NO: 1830194 - DNA, 15 bp, Homo sapiens
acttcatatatccgt

SEQ ID NO: 1830195 - DNA, 15 bp, Homo sapiens
cttcatatatccgta

SEQ ID NO: 1830196 - DNA, 15 bp, Homo sapiens
ttcatatatccgtaa

SEQ ID NO: 1830197 - DNA, 15 bp, Homo sapiens
tcatatatccgtaat

SEQ ID NO: 1830198 - DNA, 15 bp, Homo sapiens
catatatccgtaatg

SEQ ID NO: 1830199 - DNA, 15 bp, Homo sapiens
atatatccgtaatga

SEQ ID NO: 1830200 - DNA, 15 bp, Homo sapiens
tatatccgtaatgat

SEQ ID NO: 1830201 - DNA, 15 bp, Homo sapiens
atatccgtaatgatg

SEQ ID NO: 1830202 - DNA, 15 bp, Homo sapiens
tatccgtaatgatga

SEQ ID NO: 1830203 - DNA, 15 bp, Homo sapiens
atccgtaatgatgat

SEQ ID NO: 1830204 - DNA, 15 bp, Homo sapiens
tccgtaatgatgatg

SEQ ID NO: 1830205 - DNA, 15 bp, Homo sapiens
ccgtaatgatgatgg

SEQ ID NO: 1830206 - DNA, 15 bp, Homo sapiens
cgtaatgatgatggt

SEQ ID NO: 1830207 - DNA, 15 bp, Homo sapiens
gtaatgatgatggtc

SEQ ID NO: 1830208 - DNA, 15 bp, Homo sapiens
taatgatgatggtca

SEQ ID NO: 1830209 - DNA, 15 bp, Homo sapiens
aatgatgatggtcat

SEQ ID NO: 1830210 - DNA, 15 bp, Homo sapiens
atgatgatggtcatc

SEQ ID NO: 1830211 - DNA, 15 bp, Homo sapiens
tgatgatggtcatct

SEQ ID NO: 1830212 - DNA, 15 bp, Homo sapiens
gatgatggtcatcta

SEQ ID NO: 1830213 - DNA, 15 bp, Homo sapiens
atgatggtcatctat

SEQ ID NO: 1830214 - DNA, 15 bp, Homo sapiens
tgatggtcatctata

SEQ ID NO: 1830215 - DNA, 15 bp, Homo sapiens
gatggtcatctatat

SEQ ID NO: 1830216 - DNA, 15 bp, Homo sapiens
atggtcatctatatc

SEQ ID NO: 1830217 - DNA, 15 bp, Homo sapiens
tggtcatctatatct

SEQ ID NO: 1830218 - DNA, 15 bp, Homo sapiens
ggtcatctatatcta

SEQ ID NO: 1830219 - DNA, 15 bp, Homo sapiens
gtcatctatatctag

SEQ ID NO: 1830220 - DNA, 15 bp, Homo sapiens
tcatctatatctagc

SEQ ID NO: 1830221 - DNA, 15 bp, Homo sapiens
catctatatctagct

SEQ ID NO: 1830222 - DNA, 15 bp, Homo sapiens
atctatatctagctt

SEQ ID NO: 1830223 - DNA, 15 bp, Homo sapiens
tctatatctagcttt

SEQ ID NO: 1830224 - DNA, 15 bp, Homo sapiens
ctatatctagctttt

SEQ ID NO: 1830225 - DNA, 15 bp, Homo sapiens
tatatctagctttta

SEQ ID NO: 1830226 - DNA, 15 bp, Homo sapiens
atatctagcttttag

SEQ ID NO: 1830227 - DNA, 15 bp, Homo sapiens
tatctagcttttaga

SEQ ID NO: 1830228 - DNA, 15 bp, Homo sapiens
atctagcttttagag

SEQ ID NO: 1830229 - DNA, 15 bp, Homo sapiens
tctagcttttagagc

SEQ ID NO: 1830230 - DNA, 15 bp, Homo sapiens
ctagcttttagagca

SEQ ID NO: 1830231 - DNA, 15 bp, Homo sapiens
tagcttttagagcag

SEQ ID NO: 1830232 - DNA, 15 bp, Homo sapiens
agcttttagagcaga

SEQ ID NO: 1830233 - DNA, 15 bp, Homo sapiens
gcttttagagcagac

SEQ ID NO: 1830234 - DNA, 15 bp, Homo sapiens
cttttagagcagaca

SEQ ID NO: 1830235 - DNA, 15 bp, Homo sapiens
ttttagagcagacaa

SEQ ID NO: 1830236 - DNA, 15 bp, Homo sapiens
tttagagcagacaac

SEQ ID NO: 1830237 - DNA, 15 bp, Homo sapiens
ttagagcagacaact

SEQ ID NO: 1830238 - DNA, 15 bp, Homo sapiens
tagagcagacaactg

SEQ ID NO: 1830239 - DNA, 15 bp, Homo sapiens
agagcagacaactgg

SEQ ID NO: 1830240 - DNA, 15 bp, Homo sapiens
gagcagacaactggt

SEQ ID NO: 1830241 - DNA, 15 bp, Homo sapiens
agcagacaactggtt

SEQ ID NO: 1830242 - DNA, 15 bp, Homo sapiens
gcagacaactggttc

SEQ ID NO: 1830243 - DNA, 15 bp, Homo sapiens
cagacaactggttca

SEQ ID NO: 1830244 - DNA, 15 bp, Homo sapiens
agacaactggttcat

SEQ ID NO: 1830245 - DNA, 15 bp, Homo sapiens
gacaactggttcata

SEQ ID NO: 1830246 - DNA, 15 bp, Homo sapiens
acaactggttcatac

SEQ ID NO: 1830247 - DNA, 15 bp, Homo sapiens
caactggttcatacc

SEQ ID NO: 1830248 - DNA, 15 bp, Homo sapiens
aactggttcatacct

SEQ ID NO: 1830249 - DNA, 15 bp, Homo sapiens
actggttcatacctg

SEQ ID NO: 1830250 - DNA, 15 bp, Homo sapiens
ctggttcatacctgg

SEQ ID NO: 1830251 - DNA, 15 bp, Homo sapiens
tggttcatacctgga

SEQ ID NO: 1830252 - DNA, 15 bp, Homo sapiens
ggttcatacctggat

SEQ ID NO: 1830253 - DNA, 15 bp, Homo sapiens
gttcatacctggatt

SEQ ID NO: 1830254 - DNA, 15 bp, Homo sapiens
ttcatacctggatta

SEQ ID NO: 1830255 - DNA, 15 bp, Homo sapiens
tcatacctggattaa

SEQ ID NO: 1830256 - DNA, 15 bp, Homo sapiens
catacctggattaaa

SEQ ID NO: 1830257 - DNA, 15 bp, Homo sapiens
atacctggattaaat

SEQ ID NO: 1830258 - DNA, 15 bp, Homo sapiens
tacctggattaaata

SEQ ID NO: 1830259 - DNA, 15 bp, Homo sapiens
acctggattaaataa

SEQ ID NO: 1830260 - DNA, 15 bp, Homo sapiens
cctggattaaataaa

SEQ ID NO: 1830261 - DNA, 15 bp, Homo sapiens
ctggattaaataaat

SEQ ID NO: 1830262 - DNA, 15 bp, Homo sapiens
tggattaaataaata

SEQ ID NO: 1830263 - DNA, 15 bp, Homo sapiens
ggattaaataaataa

SEQ ID NO: 1830264 - DNA, 15 bp, Homo sapiens
gattaaataaataat

SEQ ID NO: 1830265 - DNA, 15 bp, Homo sapiens
attaaataaataatg

SEQ ID NO: 1830266 - DNA, 15 bp, Homo sapiens
ttaaataaataatgt

SEQ ID NO: 1830267 - DNA, 15 bp, Homo sapiens
taaataaataatgta

SEQ ID NO: 1830268 - DNA, 15 bp, Homo sapiens
aaataaataatgtaa

SEQ ID NO: 1830269 - DNA, 15 bp, Homo sapiens
aataaataatgtaaa

SEQ ID NO: 1830270 - DNA, 15 bp, Homo sapiens
ataaataatgtaaag

SEQ ID NO: 1830271 - DNA, 15 bp, Homo sapiens
taaataatgtaaagt

SEQ ID NO: 1830272 - DNA, 15 bp, Homo sapiens
aaataatgtaaagtt

SEQ ID NO: 1830273 - DNA, 15 bp, Homo sapiens
aataatgtaaagtta

SEQ ID NO: 1830274 - DNA, 15 bp, Homo sapiens
ataatgtaaagttat

SEQ ID NO: 1830275 - DNA, 15 bp, Homo sapiens
taatgtaaagttatt

SEQ ID NO: 1830276 - DNA, 15 bp, Homo sapiens
aatgtaaagttattt

SEQ ID NO: 1830277 - DNA, 15 bp, Homo sapiens
atgtaaagttatttt

SEQ ID NO: 1830278 - DNA, 15 bp, Homo sapiens
tgtaaagttattttt

SEQ ID NO: 1830279 - DNA, 15 bp, Homo sapiens
gtaaagttatttttt

SEQ ID NO: 1830280 - DNA, 15 bp, Homo sapiens
taaagttattttttg

SEQ ID NO: 1830281 - DNA, 15 bp, Homo sapiens
aaagttattttttgt

SEQ ID NO: 1830282 - DNA, 15 bp, Homo sapiens
aagttattttttgtt

SEQ ID NO: 1830283 - DNA, 15 bp, Homo sapiens
agttattttttgtta

SEQ ID NO: 1830284 - DNA, 15 bp, Homo sapiens
gttattttttgttaa

SEQ ID NO: 1830285 - DNA, 15 bp, Homo sapiens
ttattttttgttaat

SEQ ID NO: 1830286 - DNA, 15 bp, Homo sapiens
tattttttgttaatt

SEQ ID NO: 1830287 - DNA, 15 bp, Homo sapiens
attttttgttaatta

SEQ ID NO: 1830288 - DNA, 15 bp, Homo sapiens
ttttttgttaattat

SEQ ID NO: 1830289 - DNA, 15 bp, Homo sapiens
tttttgttaattatg

SEQ ID NO: 1830290 - DNA, 15 bp, Homo sapiens
ttttgttaattatgg

SEQ ID NO: 1830291 - DNA, 15 bp, Homo sapiens
tttgttaattatgga

SEQ ID NO: 1830292 - DNA, 15 bp, Homo sapiens
ttgttaattatggat

SEQ ID NO: 1830293 - DNA, 15 bp, Homo sapiens
tgttaattatggatt

SEQ ID NO: 1830294 - DNA, 15 bp, Homo sapiens
gttaattatggatta

SEQ ID NO: 1830295 - DNA, 15 bp, Homo sapiens
ttaattatggattag

SEQ ID NO: 1830296 - DNA, 15 bp, Homo sapiens
taattatggattagt

SEQ ID NO: 1830297 - DNA, 15 bp, Homo sapiens
aattatggattagtg

SEQ ID NO: 1830298 - DNA, 15 bp, Homo sapiens
attatggattagtga

SEQ ID NO: 1830299 - DNA, 15 bp, Homo sapiens
ttatggattagtgaa

SEQ ID NO: 1830300 - DNA, 15 bp, Homo sapiens
tatggattagtgaag

SEQ ID NO: 1830301 - DNA, 15 bp, Homo sapiens
atggattagtgaaga

SEQ ID NO: 1830302 - DNA, 15 bp, Homo sapiens
tggattagtgaagat

SEQ ID NO: 1830303 - DNA, 15 bp, Homo sapiens
ggattagtgaagatt

SEQ ID NO: 1830304 - DNA, 15 bp, Homo sapiens
gattagtgaagattt

SEQ ID NO: 1830305 - DNA, 15 bp, Homo sapiens
attagtgaagattta

SEQ ID NO: 1830306 - DNA, 15 bp, Homo sapiens
ttagtgaagatttac

SEQ ID NO: 1830307 - DNA, 15 bp, Homo sapiens
tagtgaagatttact

SEQ ID NO: 1830308 - DNA, 15 bp, Homo sapiens
agtgaagatttactg

SEQ ID NO: 1830309 - DNA, 15 bp, Homo sapiens
gtgaagatttactgt

SEQ ID NO: 1830310 - DNA, 15 bp, Homo sapiens
tgaagatttactgtt

SEQ ID NO: 1830311 - DNA, 15 bp, Homo sapiens
gaagatttactgttt

SEQ ID NO: 1830312 - DNA, 15 bp, Homo sapiens
aagatttactgtttt

SEQ ID NO: 1830313 - DNA, 15 bp, Homo sapiens
agatttactgtttta

SEQ ID NO: 1830314 - DNA, 15 bp, Homo sapiens
gatttactgttttaa

SEQ ID NO: 1830315 - DNA, 15 bp, Homo sapiens
atttactgttttaac

SEQ ID NO: 1830316 - DNA, 15 bp, Homo sapiens
tttactgttttaacc

SEQ ID NO: 1830317 - DNA, 15 bp, Homo sapiens
ttactgttttaacct

SEQ ID NO: 1830318 - DNA, 15 bp, Homo sapiens
tactgttttaaccta

SEQ ID NO: 1830319 - DNA, 15 bp, Homo sapiens
actgttttaacctac

SEQ ID NO: 1830320 - DNA, 15 bp, Homo sapiens
ctgttttaacctact

SEQ ID NO: 1830321 - DNA, 15 bp, Homo sapiens
tgttttaacctactc

SEQ ID NO: 1830322 - DNA, 15 bp, Homo sapiens
gttttaacctactcc

SEQ ID NO: 1830323 - DNA, 15 bp, Homo sapiens
ttttaacctactcct

SEQ ID NO: 1830324 - DNA, 15 bp, Homo sapiens
tttaacctactcctg

SEQ ID NO: 1830325 - DNA, 15 bp, Homo sapiens
ttaacctactcctgc

SEQ ID NO: 1830326 - DNA, 15 bp, Homo sapiens
taacctactcctgct

SEQ ID NO: 1830327 - DNA, 15 bp, Homo sapiens
aacctactcctgcta

SEQ ID NO: 1830328 - DNA, 15 bp, Homo sapiens
acctactcctgctag

SEQ ID NO: 1830329 - DNA, 15 bp, Homo sapiens
cctactcctgctagt

SEQ ID NO: 1830330 - DNA, 15 bp, Homo sapiens
ctactcctgctagtg

SEQ ID NO: 1830331 - DNA, 15 bp, Homo sapiens
tactcctgctagtgg

SEQ ID NO: 1830332 - DNA, 15 bp, Homo sapiens
actcctgctagtggc

SEQ ID NO: 1830333 - DNA, 15 bp, Homo sapiens
ctcctgctagtggca

SEQ ID NO: 1830334 - DNA, 15 bp, Homo sapiens
tcctgctagtggcac

SEQ ID NO: 1830335 - DNA, 15 bp, Homo sapiens
cctgctagtggcact

SEQ ID NO: 1830336 - DNA, 15 bp, Homo sapiens
ctgctagtggcacta

SEQ ID NO: 1830337 - DNA, 15 bp, Homo sapiens
tgctagtggcactac

SEQ ID NO: 1830338 - DNA, 15 bp, Homo sapiens
gctagtggcactact

SEQ ID NO: 1830339 - DNA, 15 bp, Homo sapiens
ctagtggcactactg

SEQ ID NO: 1830340 - DNA, 15 bp, Homo sapiens
tagtggcactactgc

SEQ ID NO: 1830341 - DNA, 15 bp, Homo sapiens
agtggcactactgca

SEQ ID NO: 1830342 - DNA, 15 bp, Homo sapiens
gtggcactactgcat

SEQ ID NO: 1830343 - DNA, 15 bp, Homo sapiens
tggcactactgcatg

SEQ ID NO: 1830344 - DNA, 15 bp, Homo sapiens
ggcactactgcatgg

SEQ ID NO: 1830345 - DNA, 15 bp, Homo sapiens
gcactactgcatggt

SEQ ID NO: 1830346 - DNA, 15 bp, Homo sapiens
cactactgcatggtt

SEQ ID NO: 1830347 - DNA, 15 bp, Homo sapiens
actactgcatggttt

SEQ ID NO: 1830348 - DNA, 15 bp, Homo sapiens
ctactgcatggtttt

SEQ ID NO: 1830349 - DNA, 15 bp, Homo sapiens
tactgcatggttttg

SEQ ID NO: 1830350 - DNA, 15 bp, Homo sapiens
actgcatggttttga

SEQ ID NO: 1830351 - DNA, 15 bp, Homo sapiens
ctgcatggttttgaa

SEQ ID NO: 1830352 - DNA, 15 bp, Homo sapiens
tgcatggttttgaag

SEQ ID NO: 1830353 - DNA, 15 bp, Homo sapiens
gcatggttttgaaga

SEQ ID NO: 1830354 - DNA, 15 bp, Homo sapiens
catggttttgaagac

SEQ ID NO: 1830355 - DNA, 15 bp, Homo sapiens
atggttttgaagacc

SEQ ID NO: 1830356 - DNA, 15 bp, Homo sapiens
tggttttgaagacca

SEQ ID NO: 1830357 - DNA, 15 bp, Homo sapiens
ggttttgaagaccag

SEQ ID NO: 1830358 - DNA, 15 bp, Homo sapiens
gttttgaagaccagt

SEQ ID NO: 1830359 - DNA, 15 bp, Homo sapiens
ttttgaagaccagtg

SEQ ID NO: 1830360 - DNA, 15 bp, Homo sapiens
tttgaagaccagtga

SEQ ID NO: 1830361 - DNA, 15 bp, Homo sapiens
ttgaagaccagtgaa

SEQ ID NO: 1830362 - DNA, 15 bp, Homo sapiens
tgaagaccagtgaag

SEQ ID NO: 1830363 - DNA, 15 bp, Homo sapiens
gaagaccagtgaagt

SEQ ID NO: 1830364 - DNA, 15 bp, Homo sapiens
aagaccagtgaagta

SEQ ID NO: 1830365 - DNA, 15 bp, Homo sapiens
agaccagtgaagtat

SEQ ID NO: 1830366 - DNA, 15 bp, Homo sapiens
gaccagtgaagtatg

SEQ ID NO: 1830367 - DNA, 15 bp, Homo sapiens
accagtgaagtatga

SEQ ID NO: 1830368 - DNA, 15 bp, Homo sapiens
ccagtgaagtatgac

SEQ ID NO: 1830369 - DNA, 15 bp, Homo sapiens
cagtgaagtatgact

SEQ ID NO: 1830370 - DNA, 15 bp, Homo sapiens
agtgaagtatgactt

SEQ ID NO: 1830371 - DNA, 15 bp, Homo sapiens
gtgaagtatgactta

SEQ ID NO: 1830372 - DNA, 15 bp, Homo sapiens
tgaagtatgacttaa

SEQ ID NO: 1830373 - DNA, 15 bp, Homo sapiens
gaagtatgacttaaa

SEQ ID NO: 1830374 - DNA, 15 bp, Homo sapiens
aagtatgacttaaag

SEQ ID NO: 1830375 - DNA, 15 bp, Homo sapiens
agtatgacttaaagg

SEQ ID NO: 1830376 - DNA, 15 bp, Homo sapiens
gtatgacttaaaggt

SEQ ID NO: 1830377 - DNA, 15 bp, Homo sapiens
tatgacttaaaggtt

SEQ ID NO: 1830378 - DNA, 15 bp, Homo sapiens
atgacttaaaggttt

SEQ ID NO: 1830379 - DNA, 15 bp, Homo sapiens
tgacttaaaggtttc

SEQ ID NO: 1830380 - DNA, 15 bp, Homo sapiens
gacttaaaggtttct

SEQ ID NO: 1830381 - DNA, 15 bp, Homo sapiens
acttaaaggtttctt

SEQ ID NO: 1830382 - DNA, 15 bp, Homo sapiens
cttaaaggtttcttg

SEQ ID NO: 1830383 - DNA, 15 bp, Homo sapiens
ttaaaggtttcttga

SEQ ID NO: 1830384 - DNA, 15 bp, Homo sapiens
taaaggtttcttgaa

SEQ ID NO: 1830385 - DNA, 15 bp, Homo sapiens
aaaggtttcttgaat

SEQ ID NO: 1830386 - DNA, 15 bp, Homo sapiens
aaggtttcttgaatt

SEQ ID NO: 1830387 - DNA, 15 bp, Homo sapiens
aggtttcttgaattg

SEQ ID NO: 1830388 - DNA, 15 bp, Homo sapiens
ggtttcttgaattgg

SEQ ID NO: 1830389 - DNA, 15 bp, Homo sapiens
gtttcttgaattgga

SEQ ID NO: 1830390 - DNA, 15 bp, Homo sapiens
tttcttgaattggag

SEQ ID NO: 1830391 - DNA, 15 bp, Homo sapiens
ttcttgaattggagc

SEQ ID NO: 1830392 - DNA, 15 bp, Homo sapiens
tcttgaattggagct

SEQ ID NO: 1830393 - DNA, 15 bp, Homo sapiens
cttgaattggagcta

SEQ ID NO: 1830394 - DNA, 15 bp, Homo sapiens
ttgaattggagctag

SEQ ID NO: 1830395 - DNA, 15 bp, Homo sapiens
tgaattggagctagg

SEQ ID NO: 1830396 - DNA, 15 bp, Homo sapiens
gaattggagctagga

SEQ ID NO: 1830397 - DNA, 15 bp, Homo sapiens
aattggagctaggac

SEQ ID NO: 1830398 - DNA, 15 bp, Homo sapiens
attggagctaggaca

SEQ ID NO: 1830399 - DNA, 15 bp, Homo sapiens
ttggagctaggacac

SEQ ID NO: 1830400 - DNA, 15 bp, Homo sapiens
tggagctaggacact

SEQ ID NO: 1830401 - DNA, 15 bp, Homo sapiens
ggagctaggacactg

SEQ ID NO: 1830402 - DNA, 15 bp, Homo sapiens
gagctaggacactgg

SEQ ID NO: 1830403 - DNA, 15 bp, Homo sapiens
agctaggacactggc

SEQ ID NO: 1830404 - DNA, 15 bp, Homo sapiens
gctaggacactggca

SEQ ID NO: 1830405 - DNA, 15 bp, Homo sapiens
ctaggacactggcat

SEQ ID NO: 1830406 - DNA, 15 bp, Homo sapiens
taggacactggcatt

SEQ ID NO: 1830407 - DNA, 15 bp, Homo sapiens
aggacactggcattt

SEQ ID NO: 1830408 - DNA, 15 bp, Homo sapiens
ggacactggcattta

SEQ ID NO: 1830409 - DNA, 15 bp, Homo sapiens
gacactggcatttat

SEQ ID NO: 1830410 - DNA, 15 bp, Homo sapiens
acactggcatttata

SEQ ID NO: 1830411 - DNA, 15 bp, Homo sapiens
cactggcatttataa

SEQ ID NO: 1830412 - DNA, 15 bp, Homo sapiens
actggcatttataaa

SEQ ID NO: 1830413 - DNA, 15 bp, Homo sapiens
ctggcatttataaaa

SEQ ID NO: 1830414 - DNA, 15 bp, Homo sapiens
tggcatttataaaat

SEQ ID NO: 1830415 - DNA, 15 bp, Homo sapiens
ggcatttataaaatc

SEQ ID NO: 1830416 - DNA, 15 bp, Homo sapiens
gcatttataaaatct

SEQ ID NO: 1830417 - DNA, 15 bp, Homo sapiens
catttataaaatctc

SEQ ID NO: 1830418 - DNA, 15 bp, Homo sapiens
atttataaaatctcc

SEQ ID NO: 1830419 - DNA, 15 bp, Homo sapiens
tttataaaatctcca

SEQ ID NO: 1830420 - DNA, 15 bp, Homo sapiens
ttataaaatctccac

SEQ ID NO: 1830421 - DNA, 15 bp, Homo sapiens
tataaaatctccacg

SEQ ID NO: 1830422 - DNA, 15 bp, Homo sapiens
ataaaatctccacgt

SEQ ID NO: 1830423 - DNA, 15 bp, Homo sapiens
taaaatctccacgta

SEQ ID NO: 1830424 - DNA, 15 bp, Homo sapiens
aaaatctccacgtag

SEQ ID NO: 1830425 - DNA, 15 bp, Homo sapiens
aaatctccacgtagc

SEQ ID NO: 1830426 - DNA, 15 bp, Homo sapiens
aatctccacgtagcg

SEQ ID NO: 1830427 - DNA, 15 bp, Homo sapiens
atctccacgtagcgc

SEQ ID NO: 1830428 - DNA, 15 bp, Homo sapiens
tctccacgtagcgca

SEQ ID NO: 1830429 - DNA, 15 bp, Homo sapiens
ctccacgtagcgcag

SEQ ID NO: 1830430 - DNA, 15 bp, Homo sapiens
tccacgtagcgcaga

SEQ ID NO: 1830431 - DNA, 15 bp, Homo sapiens
ccacgtagcgcagac

SEQ ID NO: 1830432 - DNA, 15 bp, Homo sapiens
cacgtagcgcagaca

SEQ ID NO: 1830433 - DNA, 15 bp, Homo sapiens
acgtagcgcagacat

SEQ ID NO: 1830434 - DNA, 15 bp, Homo sapiens
cgtagcgcagacatt

SEQ ID NO: 1830435 - DNA, 15 bp, Homo sapiens
gtagcgcagacattg

SEQ ID NO: 1830436 - DNA, 15 bp, Homo sapiens
tagcgcagacattga

SEQ ID NO: 1830437 - DNA, 15 bp, Homo sapiens
agcgcagacattgac

SEQ ID NO: 1830438 - DNA, 15 bp, Homo sapiens
gcgcagacattgaca

SEQ ID NO: 1830439 - DNA, 15 bp, Homo sapiens
cgcagacattgacac

SEQ ID NO: 1830440 - DNA, 15 bp, Homo sapiens
gcagacattgacact

SEQ ID NO: 1830441 - DNA, 15 bp, Homo sapiens
cagacattgacacta

SEQ ID NO: 1830442 - DNA, 15 bp, Homo sapiens
agacattgacactat

SEQ ID NO: 1830443 - DNA, 15 bp, Homo sapiens
gacattgacactatc

SEQ ID NO: 1830444 - DNA, 15 bp, Homo sapiens
acattgacactatca

SEQ ID NO: 1830445 - DNA, 15 bp, Homo sapiens
cattgacactatcag

SEQ ID NO: 1830446 - DNA, 15 bp, Homo sapiens
attgacactatcaga

SEQ ID NO: 1830447 - DNA, 15 bp, Homo sapiens
ttgacactatcagaa

SEQ ID NO: 1830448 - DNA, 15 bp, Homo sapiens
tgacactatcagaag

SEQ ID NO: 1830449 - DNA, 15 bp, Homo sapiens
gacactatcagaaga

SEQ ID NO: 1830450 - DNA, 15 bp, Homo sapiens
acactatcagaagac

SEQ ID NO: 1830451 - DNA, 15 bp, Homo sapiens
cactatcagaagacc

SEQ ID NO: 1830452 - DNA, 15 bp, Homo sapiens
actatcagaagacca

SEQ ID NO: 1830453 - DNA, 15 bp, Homo sapiens
ctatcagaagaccag

SEQ ID NO: 1830454 - DNA, 15 bp, Homo sapiens
tatcagaagaccagc

SEQ ID NO: 1830455 - DNA, 15 bp, Homo sapiens
atcagaagaccagca

SEQ ID NO: 1830456 - DNA, 15 bp, Homo sapiens
tcagaagaccagcaa

SEQ ID NO: 1830457 - DNA, 15 bp, Homo sapiens
cagaagaccagcaag

SEQ ID NO: 1830458 - DNA, 15 bp, Homo sapiens
agaagaccagcaagt

SEQ ID NO: 1830459 - DNA, 15 bp, Homo sapiens
gaagaccagcaagta

SEQ ID NO: 1830460 - DNA, 15 bp, Homo sapiens
aagaccagcaagtaa

SEQ ID NO: 1830461 - DNA, 15 bp, Homo sapiens
agaccagcaagtaac

SEQ ID NO: 1830462 - DNA, 15 bp, Homo sapiens
gaccagcaagtaact

SEQ ID NO: 1830463 - DNA, 15 bp, Homo sapiens
accagcaagtaacta

SEQ ID NO: 1830464 - DNA, 15 bp, Homo sapiens
ccagcaagtaactag

SEQ ID NO: 1830465 - DNA, 15 bp, Homo sapiens
cagcaagtaactaga

SEQ ID NO: 1830466 - DNA, 15 bp, Homo sapiens
agcaagtaactagaa

SEQ ID NO: 1830467 - DNA, 15 bp, Homo sapiens
gcaagtaactagaag

SEQ ID NO: 1830468 - DNA, 15 bp, Homo sapiens
caagtaactagaagt

SEQ ID NO: 1830469 - DNA, 15 bp, Homo sapiens
aagtaactagaagtt

SEQ ID NO: 1830470 - DNA, 15 bp, Homo sapiens
agtaactagaagtta

SEQ ID NO: 1830471 - DNA, 15 bp, Homo sapiens
gtaactagaagttac

SEQ ID NO: 1830472 - DNA, 15 bp, Homo sapiens
taactagaagttact

SEQ ID NO: 1830473 - DNA, 15 bp, Homo sapiens
aactagaagttactt

SEQ ID NO: 1830474 - DNA, 15 bp, Homo sapiens
actagaagttacttt

SEQ ID NO: 1830475 - DNA, 15 bp, Homo sapiens
ctagaagttactttg

SEQ ID NO: 1830476 - DNA, 15 bp, Homo sapiens
tagaagttactttga

SEQ ID NO: 1830477 - DNA, 15 bp, Homo sapiens
agaagttactttgat

SEQ ID NO: 1830478 - DNA, 15 bp, Homo sapiens
gaagttactttgatc

SEQ ID NO: 1830479 - DNA, 15 bp, Homo sapiens
aagttactttgatct

SEQ ID NO: 1830480 - DNA, 15 bp, Homo sapiens
agttactttgatctt

SEQ ID NO: 1830481 - DNA, 15 bp, Homo sapiens
gttactttgatctta

SEQ ID NO: 1830482 - DNA, 15 bp, Homo sapiens
ttactttgatcttaa

SEQ ID NO: 1830483 - DNA, 15 bp, Homo sapiens
tactttgatcttaaa

SEQ ID NO: 1830484 - DNA, 15 bp, Homo sapiens
actttgatcttaaat

SEQ ID NO: 1830485 - DNA, 15 bp, Homo sapiens
ctttgatcttaaatc

SEQ ID NO: 1830486 - DNA, 15 bp, Homo sapiens
tttgatcttaaatca

SEQ ID NO: 1830487 - DNA, 15 bp, Homo sapiens
ttgatcttaaatcaa

SEQ ID NO: 1830488 - DNA, 15 bp, Homo sapiens
tgatcttaaatcaac

SEQ ID NO: 1830489 - DNA, 15 bp, Homo sapiens
gatcttaaatcaact

SEQ ID NO: 1830490 - DNA, 15 bp, Homo sapiens
atcttaaatcaacta

SEQ ID NO: 1830491 - DNA, 15 bp, Homo sapiens
tcttaaatcaactac

SEQ ID NO: 1830492 - DNA, 15 bp, Homo sapiens
cttaaatcaactaca

SEQ ID NO: 1830493 - DNA, 15 bp, Homo sapiens
ttaaatcaactacaa

SEQ ID NO: 1830494 - DNA, 15 bp, Homo sapiens
taaatcaactacaaa

SEQ ID NO: 1830495 - DNA, 15 bp, Homo sapiens
aaatcaactacaaaa

SEQ ID NO: 1830496 - DNA, 15 bp, Homo sapiens
aatcaactacaaaaa

SEQ ID NO: 1830497 - DNA, 15 bp, Homo sapiens
atcaactacaaaaaa

SEQ ID NO: 1830498 - DNA, 15 bp, Homo sapiens
tcaactacaaaaaac

SEQ ID NO: 1830499 - DNA, 15 bp, Homo sapiens
caactacaaaaaact

SEQ ID NO: 1830500 - DNA, 15 bp, Homo sapiens
aactacaaaaaactt

SEQ ID NO: 1830501 - DNA, 15 bp, Homo sapiens
actacaaaaaacttg

SEQ ID NO: 1830502 - DNA, 15 bp, Homo sapiens
ctacaaaaaacttga

SEQ ID NO: 1830503 - DNA, 15 bp, Homo sapiens
tacaaaaaacttgac

SEQ ID NO: 1830504 - DNA, 15 bp, Homo sapiens
acaaaaaacttgact

SEQ ID NO: 1830505 - DNA, 15 bp, Homo sapiens
caaaaaacttgactc

SEQ ID NO: 1830506 - DNA, 15 bp, Homo sapiens
aaaaaacttgactca

SEQ ID NO: 1830507 - DNA, 15 bp, Homo sapiens
aaaaacttgactcac

SEQ ID NO: 1830508 - DNA, 15 bp, Homo sapiens
aaaacttgactcact

SEQ ID NO: 1830509 - DNA, 15 bp, Homo sapiens
aaacttgactcacta

SEQ ID NO: 1830510 - DNA, 15 bp, Homo sapiens
aacttgactcactag

SEQ ID NO: 1830511 - DNA, 15 bp, Homo sapiens
acttgactcactagt

SEQ ID NO: 1830512 - DNA, 15 bp, Homo sapiens
cttgactcactagtt

SEQ ID NO: 1830513 - DNA, 15 bp, Homo sapiens
ttgactcactagtta

SEQ ID NO: 1830514 - DNA, 15 bp, Homo sapiens
tgactcactagttat

SEQ ID NO: 1830515 - DNA, 15 bp, Homo sapiens
gactcactagttatg

SEQ ID NO: 1830516 - DNA, 15 bp, Homo sapiens
actcactagttatgg

SEQ ID NO: 1830517 - DNA, 15 bp, Homo sapiens
ctcactagttatgga

SEQ ID NO: 1830518 - DNA, 15 bp, Homo sapiens
tcactagttatggag

SEQ ID NO: 1830519 - DNA, 15 bp, Homo sapiens
cactagttatggaga

SEQ ID NO: 1830520 - DNA, 15 bp, Homo sapiens
actagttatggagaa

SEQ ID NO: 1830521 - DNA, 15 bp, Homo sapiens
ctagttatggagaat

SEQ ID NO: 1830522 - DNA, 15 bp, Homo sapiens
tagttatggagaata

SEQ ID NO: 1830523 - DNA, 15 bp, Homo sapiens
agttatggagaatac

SEQ ID NO: 1830524 - DNA, 15 bp, Homo sapiens
gttatggagaataca

SEQ ID NO: 1830525 - DNA, 15 bp, Homo sapiens
ttatggagaatacat

SEQ ID NO: 1830526 - DNA, 15 bp, Homo sapiens
tatggagaatacatt

SEQ ID NO: 1830527 - DNA, 15 bp, Homo sapiens
atggagaatacattt

SEQ ID NO: 1830528 - DNA, 15 bp, Homo sapiens
tggagaatacatttt

SEQ ID NO: 1830529 - DNA, 15 bp, Homo sapiens
ggagaatacattttt

SEQ ID NO: 1830530 - DNA, 15 bp, Homo sapiens
gagaatacatttttt

SEQ ID NO: 1830531 - DNA, 15 bp, Homo sapiens
agaatacatttttta

SEQ ID NO: 1830532 - DNA, 15 bp, Homo sapiens
gaatacattttttat

SEQ ID NO: 1830533 - DNA, 15 bp, Homo sapiens
aatacattttttatt

SEQ ID NO: 1830534 - DNA, 15 bp, Homo sapiens
atacattttttattg

SEQ ID NO: 1830535 - DNA, 15 bp, Homo sapiens
tacattttttattgt

SEQ ID NO: 1830536 - DNA, 15 bp, Homo sapiens
acattttttattgtt

SEQ ID NO: 1830537 - DNA, 15 bp, Homo sapiens
cattttttattgtta

SEQ ID NO: 1830538 - DNA, 15 bp, Homo sapiens
attttttattgttaa

SEQ ID NO: 1830539 - DNA, 15 bp, Homo sapiens
ttttttattgttaaa

SEQ ID NO: 1830540 - DNA, 15 bp, Homo sapiens
tttttattgttaaac

SEQ ID NO: 1830541 - DNA, 15 bp, Homo sapiens
ttttattgttaaact

SEQ ID NO: 1830542 - DNA, 15 bp, Homo sapiens
tttattgttaaactg

SEQ ID NO: 1830543 - DNA, 15 bp, Homo sapiens
ttattgttaaactga

SEQ ID NO: 1830544 - DNA, 15 bp, Homo sapiens
tattgttaaactgaa

SEQ ID NO: 1830545 - DNA, 15 bp, Homo sapiens
attgttaaactgaaa

SEQ ID NO: 1830546 - DNA, 15 bp, Homo sapiens
ttgttaaactgaaaa

SEQ ID NO: 1830547 - DNA, 15 bp, Homo sapiens
tgttaaactgaaaaa

SEQ ID NO: 1830548 - DNA, 15 bp, Homo sapiens
gttaaactgaaaaaa

SEQ ID NO: 1830549 - DNA, 15 bp, Homo sapiens
ttaaactgaaaaaaa

SEQ ID NO: 1830550 - DNA, 15 bp, Homo sapiens
taaactgaaaaaaaa

SEQ ID NO: 1830551 - DNA, 15 bp, Homo sapiens
aaactgaaaaaaaat

SEQ ID NO: 1830552 - DNA, 15 bp, Homo sapiens
aactgaaaaaaaatt

SEQ ID NO: 1830553 - DNA, 15 bp, Homo sapiens
actgaaaaaaaattc

SEQ ID NO: 1830554 - DNA, 15 bp, Homo sapiens
ctgaaaaaaaattca

SEQ ID NO: 1830555 - DNA, 15 bp, Homo sapiens
tgaaaaaaaattcag

SEQ ID NO: 1830556 - DNA, 15 bp, Homo sapiens
gaaaaaaaattcagt

SEQ ID NO: 1830557 - DNA, 15 bp, Homo sapiens
aaaaaaaattcagtc

SEQ ID NO: 1830558 - DNA, 15 bp, Homo sapiens
aaaaaaattcagtca

SEQ ID NO: 1830559 - DNA, 15 bp, Homo sapiens
aaaaaattcagtcac

SEQ ID NO: 1830560 - DNA, 15 bp, Homo sapiens
aaaaattcagtcact

SEQ ID NO: 1830561 - DNA, 15 bp, Homo sapiens
aaaattcagtcactt

SEQ ID NO: 1830562 - DNA, 15 bp, Homo sapiens
aaattcagtcactta

SEQ ID NO: 1830563 - DNA, 15 bp, Homo sapiens
aattcagtcacttat

SEQ ID NO: 1830564 - DNA, 15 bp, Homo sapiens
attcagtcacttata

SEQ ID NO: 1830565 - DNA, 15 bp, Homo sapiens
ttcagtcacttataa

SEQ ID NO: 1830566 - DNA, 15 bp, Homo sapiens
tcagtcacttataag

SEQ ID NO: 1830567 - DNA, 15 bp, Homo sapiens
cagtcacttataagg

SEQ ID NO: 1830568 - DNA, 15 bp, Homo sapiens
agtcacttataaggt

SEQ ID NO: 1830569 - DNA, 15 bp, Homo sapiens
gtcacttataaggtg

SEQ ID NO: 1830570 - DNA, 15 bp, Homo sapiens
tcacttataaggtgt

SEQ ID NO: 1830571 - DNA, 15 bp, Homo sapiens
cacttataaggtgta

SEQ ID NO: 1830572 - DNA, 15 bp, Homo sapiens
acttataaggtgtag

SEQ ID NO: 1830573 - DNA, 15 bp, Homo sapiens
cttataaggtgtagc

SEQ ID NO: 1830574 - DNA, 15 bp, Homo sapiens
ttataaggtgtagcc

SEQ ID NO: 1830575 - DNA, 15 bp, Homo sapiens
tataaggtgtagcct

SEQ ID NO: 1830576 - DNA, 15 bp, Homo sapiens
ataaggtgtagcctc

SEQ ID NO: 1830577 - DNA, 15 bp, Homo sapiens
taaggtgtagcctct

SEQ ID NO: 1830578 - DNA, 15 bp, Homo sapiens
aaggtgtagcctctt

SEQ ID NO: 1830579 - DNA, 15 bp, Homo sapiens
aggtgtagcctcttc

SEQ ID NO: 1830580 - DNA, 15 bp, Homo sapiens
ggtgtagcctcttct

SEQ ID NO: 1830581 - DNA, 15 bp, Homo sapiens
gtgtagcctcttcta

SEQ ID NO: 1830582 - DNA, 15 bp, Homo sapiens
tgtagcctcttctaa

SEQ ID NO: 1830583 - DNA, 15 bp, Homo sapiens
gtagcctcttctaat

SEQ ID NO: 1830584 - DNA, 15 bp, Homo sapiens
tagcctcttctaatc

SEQ ID NO: 1830585 - DNA, 15 bp, Homo sapiens
agcctcttctaatcc

SEQ ID NO: 1830586 - DNA, 15 bp, Homo sapiens
gcctcttctaatcct

SEQ ID NO: 1830587 - DNA, 15 bp, Homo sapiens
cctcttctaatcctg

SEQ ID NO: 1830588 - DNA, 15 bp, Homo sapiens
ctcttctaatcctgt

SEQ ID NO: 1830589 - DNA, 15 bp, Homo sapiens
tcttctaatcctgtt

SEQ ID NO: 1830590 - DNA, 15 bp, Homo sapiens
cttctaatcctgttt

SEQ ID NO: 1830591 - DNA, 15 bp, Homo sapiens
ttctaatcctgttta

SEQ ID NO: 1830592 - DNA, 15 bp, Homo sapiens
tctaatcctgtttat

SEQ ID NO: 1830593 - DNA, 15 bp, Homo sapiens
ctaatcctgtttata

SEQ ID NO: 1830594 - DNA, 15 bp, Homo sapiens
taatcctgtttatat

SEQ ID NO: 1830595 - DNA, 15 bp, Homo sapiens
aatcctgtttatata

SEQ ID NO: 1830596 - DNA, 15 bp, Homo sapiens
atcctgtttatataa

SEQ ID NO: 1830597 - DNA, 15 bp, Homo sapiens
tcctgtttatataaa

SEQ ID NO: 1830598 - DNA, 15 bp, Homo sapiens
cctgtttatataaat

SEQ ID NO: 1830599 - DNA, 15 bp, Homo sapiens
ctgtttatataaatt

SEQ ID NO: 1830600 - DNA, 15 bp, Homo sapiens
tgtttatataaattt

SEQ ID NO: 1830601 - DNA, 15 bp, Homo sapiens
gtttatataaattta

SEQ ID NO: 1830602 - DNA, 15 bp, Homo sapiens
tttatataaatttat

SEQ ID NO: 1830603 - DNA, 15 bp, Homo sapiens
ttatataaatttatt

SEQ ID NO: 1830604 - DNA, 15 bp, Homo sapiens
tatataaatttattt

SEQ ID NO: 1830605 - DNA, 15 bp, Homo sapiens
atataaatttattta

SEQ ID NO: 1830606 - DNA, 15 bp, Homo sapiens
tataaatttatttat

SEQ ID NO: 1830607 - DNA, 15 bp, Homo sapiens
ataaatttatttatt

SEQ ID NO: 1830608 - DNA, 15 bp, Homo sapiens
taaatttatttatta

SEQ ID NO: 1830609 - DNA, 15 bp, Homo sapiens
aaatttatttattat

SEQ ID NO: 1830610 - DNA, 15 bp, Homo sapiens
aatttatttattatt

SEQ ID NO: 1830611 - DNA, 15 bp, Homo sapiens
atttattattattat

SEQ ID NO: 1830612 - DNA, 15 bp, Homo sapiens
tattattattttttg

SEQ ID NO: 1830613 - DNA, 15 bp, Homo sapiens
attattattttttga

SEQ ID NO: 1830614 - DNA, 15 bp, Homo sapiens
ttattattttttgag

SEQ ID NO: 1830615 - DNA, 15 bp, Homo sapiens
tattattttttgaga

SEQ ID NO: 1830616 - DNA, 15 bp, Homo sapiens
attattttttgagat

SEQ ID NO: 1830617 - DNA, 15 bp, Homo sapiens
tctgttgccaggctg

SEQ ID NO: 1830618 - DNA, 15 bp, Homo sapiens
ctgttgccaggctgt

SEQ ID NO: 1830619 - DNA, 15 bp, Homo sapiens
tgttgccaggctgta

SEQ ID NO: 1830620 - DNA, 15 bp, Homo sapiens
gttgccaggctgtag

SEQ ID NO: 1830621 - DNA, 15 bp, Homo sapiens
ttgccaggctgtagt

SEQ ID NO: 1830622 - DNA, 15 bp, Homo sapiens
tgccaggctgtagtg

SEQ ID NO: 1830623 - DNA, 15 bp, Homo sapiens
gccaggctgtagtgc

SEQ ID NO: 1830624 - DNA, 15 bp, Homo sapiens
caggctgtagtgcat

SEQ ID NO: 1830625 - DNA, 15 bp, Homo sapiens
aggctgtagtgcatt

SEQ ID NO: 1830626 - DNA, 15 bp, Homo sapiens
ggctgtagtgcattg

SEQ ID NO: 1830627 - DNA, 15 bp, Homo sapiens
gctgtagtgcattgg

SEQ ID NO: 1830628 - DNA, 15 bp, Homo sapiens
ctgtagtgcattggc

SEQ ID NO: 1830629 - DNA, 15 bp, Homo sapiens
tgtagtgcattggcg

SEQ ID NO: 1830630 - DNA, 15 bp, Homo sapiens
gtagtgcattggcgc

SEQ ID NO: 1830631 - DNA, 15 bp, Homo sapiens
tagtgcattggcgcg

SEQ ID NO: 1830632 - DNA, 15 bp, Homo sapiens
agtgcattggcgcga

SEQ ID NO: 1830633 - DNA, 15 bp, Homo sapiens
gtgcattggcgcgat

SEQ ID NO: 1830634 - DNA, 15 bp, Homo sapiens
tgcattggcgcgatc

SEQ ID NO: 1830635 - DNA, 15 bp, Homo sapiens
gcattggcgcgatct

SEQ ID NO: 1830636 - DNA, 15 bp, Homo sapiens
cattggcgcgatctc

SEQ ID NO: 1830637 - DNA, 15 bp, Homo sapiens
attggcgcgatctcg

SEQ ID NO: 1830638 - DNA, 15 bp, Homo sapiens
ttggcgcgatctcgg

SEQ ID NO: 1830639 - DNA, 15 bp, Homo sapiens
gctcactgcatcctc

SEQ ID NO: 1830640 - DNA, 15 bp, Homo sapiens
ctcactgcatcctcc

SEQ ID NO: 1830641 - DNA, 15 bp, Homo sapiens
tcactgcatcctcca

SEQ ID NO: 1830642 - DNA, 15 bp, Homo sapiens
cactgcatcctccac

SEQ ID NO: 1830643 - DNA, 15 bp, Homo sapiens
actgcatcctccacc

SEQ ID NO: 1830644 - DNA, 15 bp, Homo sapiens
ctgcatcctccacct

SEQ ID NO: 1830645 - DNA, 15 bp, Homo sapiens
tgcatcctccacctc

SEQ ID NO: 1830646 - DNA, 15 bp, Homo sapiens
gcatcctccacctcc

SEQ ID NO: 1830647 - DNA, 15 bp, Homo sapiens
catcctccacctccc

SEQ ID NO: 1830648 - DNA, 15 bp, Homo sapiens
atcctccacctcccg

SEQ ID NO: 1830649 - DNA, 15 bp, Homo sapiens
tcctccacctcccgg

SEQ ID NO: 1830650 - DNA, 15 bp, Homo sapiens
gactacaggcacgtg

SEQ ID NO: 1830651 - DNA, 15 bp, Homo sapiens
actacaggcacgtgc

SEQ ID NO: 1830652 - DNA, 15 bp, Homo sapiens
ctacaggcacgtgcc

SEQ ID NO: 1830653 - DNA, 15 bp, Homo sapiens
acaggcacgtgccat

SEQ ID NO: 1830654 - DNA, 15 bp, Homo sapiens
caggcacgtgccatc

SEQ ID NO: 1830655 - DNA, 15 bp, Homo sapiens
aggcacgtgccatca

SEQ ID NO: 1830656 - DNA, 15 bp, Homo sapiens
ggcacgtgccatcac

SEQ ID NO: 1830657 - DNA, 15 bp, Homo sapiens
gcacgtgccatcacg

SEQ ID NO: 1830658 - DNA, 15 bp, Homo sapiens
cacgtgccatcacga

SEQ ID NO: 1830659 - DNA, 15 bp, Homo sapiens
acgtgccatcacgat

SEQ ID NO: 1830660 - DNA, 15 bp, Homo sapiens
cgtgccatcacgatc

SEQ ID NO: 1830661 - DNA, 15 bp, Homo sapiens
gtgccatcacgatca

SEQ ID NO: 1830662 - DNA, 15 bp, Homo sapiens
tgccatcacgatcag

SEQ ID NO: 1830663 - DNA, 15 bp, Homo sapiens
gccatcacgatcagc

SEQ ID NO: 1830664 - DNA, 15 bp, Homo sapiens
ccatcacgatcagca

SEQ ID NO: 1830665 - DNA, 15 bp, Homo sapiens
catcacgatcagcac

SEQ ID NO: 1830666 - DNA, 15 bp, Homo sapiens
atcacgatcagcact

SEQ ID NO: 1830667 - DNA, 15 bp, Homo sapiens
tcacgatcagcactt

SEQ ID NO: 1830668 - DNA, 15 bp, Homo sapiens
cacgatcagcacttt

SEQ ID NO: 1830669 - DNA, 15 bp, Homo sapiens
acgatcagcactttt

SEQ ID NO: 1830670 - DNA, 15 bp, Homo sapiens
cgatcagcactttta

SEQ ID NO: 1830671 - DNA, 15 bp, Homo sapiens
gatcagcacttttag

SEQ ID NO: 1830672 - DNA, 15 bp, Homo sapiens
atcagcacttttagt

SEQ ID NO: 1830673 - DNA, 15 bp, Homo sapiens
tcagcacttttagta

SEQ ID NO: 1830674 - DNA, 15 bp, Homo sapiens
cagcacttttagtag

SEQ ID NO: 1830675 - DNA, 15 bp, Homo sapiens
agcacttttagtaga

SEQ ID NO: 1830676 - DNA, 15 bp, Homo sapiens
gcacttttagtagag

SEQ ID NO: 1830677 - DNA, 15 bp, Homo sapiens
cacttttagtagaga

SEQ ID NO: 1830678 - DNA, 15 bp, Homo sapiens
ttcaccatgttggca

SEQ ID NO: 1830679 - DNA, 15 bp, Homo sapiens
tcaccatgttggcaa

SEQ ID NO: 1830680 - DNA, 15 bp, Homo sapiens
caccatgttggcaag

SEQ ID NO: 1830681 - DNA, 15 bp, Homo sapiens
accatgttggcaagg

SEQ ID NO: 1830682 - DNA, 15 bp, Homo sapiens
ccatgttggcaagga

SEQ ID NO: 1830683 - DNA, 15 bp, Homo sapiens
catgttggcaaggac

SEQ ID NO: 1830684 - DNA, 15 bp, Homo sapiens
atgttggcaaggacg

SEQ ID NO: 1830685 - DNA, 15 bp, Homo sapiens
tgttggcaaggacgt

SEQ ID NO: 1830686 - DNA, 15 bp, Homo sapiens
gttggcaaggacgtg

SEQ ID NO: 1830687 - DNA, 15 bp, Homo sapiens
ttggcaaggacgtgt

SEQ ID NO: 1830688 - DNA, 15 bp, Homo sapiens
tggcaaggacgtgtc

SEQ ID NO: 1830689 - DNA, 15 bp, Homo sapiens
ggcaaggacgtgtct

SEQ ID NO: 1830690 - DNA, 15 bp, Homo sapiens
gcaaggacgtgtctc

SEQ ID NO: 1830691 - DNA, 15 bp, Homo sapiens
caaggacgtgtctcg

SEQ ID NO: 1830692 - DNA, 15 bp, Homo sapiens
aaggacgtgtctcgt

SEQ ID NO: 1830693 - DNA, 15 bp, Homo sapiens
aggacgtgtctcgtc

SEQ ID NO: 1830694 - DNA, 15 bp, Homo sapiens
ggacgtgtctcgtcg

SEQ ID NO: 1830695 - DNA, 15 bp, Homo sapiens
gacgtgtctcgtcgt

SEQ ID NO: 1830696 - DNA, 15 bp, Homo sapiens
acgtgtctcgtcgtg

SEQ ID NO: 1830697 - DNA, 15 bp, Homo sapiens
cgtgtctcgtcgtga

SEQ ID NO: 1830698 - DNA, 15 bp, Homo sapiens
gtgtctcgtcgtgac

SEQ ID NO: 1830699 - DNA, 15 bp, Homo sapiens
tgtctcgtcgtgacc

SEQ ID NO: 1830700 - DNA, 15 bp, Homo sapiens
gtctcgtcgtgacct

SEQ ID NO: 1830701 - DNA, 15 bp, Homo sapiens
tctcgtcgtgacctc

SEQ ID NO: 1830702 - DNA, 15 bp, Homo sapiens
ctcgtcgtgacctcg

SEQ ID NO: 1830703 - DNA, 15 bp, Homo sapiens
tcgtcgtgacctcgt

SEQ ID NO: 1830704 - DNA, 15 bp, Homo sapiens
cgtcgtgacctcgtg

SEQ ID NO: 1830705 - DNA, 15 bp, Homo sapiens
gtcgtgacctcgtga

SEQ ID NO: 1830706 - DNA, 15 bp, Homo sapiens
tcgtgacctcgtgat

SEQ ID NO: 1830707 - DNA, 15 bp, Homo sapiens
cgtgacctcgtgatc

SEQ ID NO: 1830708 - DNA, 15 bp, Homo sapiens
gtgacctcgtgatcc

SEQ ID NO: 1830709 - DNA, 15 bp, Homo sapiens
tcgtgatccgcccgt

SEQ ID NO: 1830710 - DNA, 15 bp, Homo sapiens
cgtgatccgcccgtt

SEQ ID NO: 1830711 - DNA, 15 bp, Homo sapiens
gtgatccgcccgttt

SEQ ID NO: 1830712 - DNA, 15 bp, Homo sapiens
tgatccgcccgtttc

SEQ ID NO: 1830713 - DNA, 15 bp, Homo sapiens
gatccgcccgtttca

SEQ ID NO: 1830714 - DNA, 15 bp, Homo sapiens
atccgcccgtttcag

SEQ ID NO: 1830715 - DNA, 15 bp, Homo sapiens
tccgcccgtttcagc

SEQ ID NO: 1830716 - DNA, 15 bp, Homo sapiens
ccgcccgtttcagcc

SEQ ID NO: 1830717 - DNA, 15 bp, Homo sapiens
cgcccgtttcagcct

SEQ ID NO: 1830718 - DNA, 15 bp, Homo sapiens
gcccgtttcagcctc

SEQ ID NO: 1830719 - DNA, 15 bp, Homo sapiens
cccgtttcagcctcc

SEQ ID NO: 1830720 - DNA, 15 bp, Homo sapiens
ccgtttcagcctccc

SEQ ID NO: 1830721 - DNA, 15 bp, Homo sapiens
cgtttcagcctccca

SEQ ID NO: 1830722 - DNA, 15 bp, Homo sapiens
gtttcagcctcccaa

SEQ ID NO: 1830723 - DNA, 15 bp, Homo sapiens
tttcagcctcccaaa

SEQ ID NO: 1830724 - DNA, 15 bp, Homo sapiens
aggtgtgagccacaa

SEQ ID NO: 1830725 - DNA, 15 bp, Homo sapiens
ggtgtgagccacaat

SEQ ID NO: 1830726 - DNA, 15 bp, Homo sapiens
gtgtgagccacaatg

SEQ ID NO: 1830727 - DNA, 15 bp, Homo sapiens
tgtgagccacaatgt

SEQ ID NO: 1830728 - DNA, 15 bp, Homo sapiens
gtgagccacaatgtc

SEQ ID NO: 1830729 - DNA, 15 bp, Homo sapiens
tgagccacaatgtcc

SEQ ID NO: 1830730 - DNA, 15 bp, Homo sapiens
gagccacaatgtcca

SEQ ID NO: 1830731 - DNA, 15 bp, Homo sapiens
agccacaatgtccag

SEQ ID NO: 1830732 - DNA, 15 bp, Homo sapiens
gccacaatgtccagc

SEQ ID NO: 1830733 - DNA, 15 bp, Homo sapiens
ccacaatgtccagct

SEQ ID NO: 1830734 - DNA, 15 bp, Homo sapiens
cacaatgtccagctg

SEQ ID NO: 1830735 - DNA, 15 bp, Homo sapiens
acaatgtccagctga

SEQ ID NO: 1830736 - DNA, 15 bp, Homo sapiens
caatgtccagctgat

SEQ ID NO: 1830737 - DNA, 15 bp, Homo sapiens
aatgtccagctgata

SEQ ID NO: 1830738 - DNA, 15 bp, Homo sapiens
atgtccagctgataa

SEQ ID NO: 1830739 - DNA, 15 bp, Homo sapiens
tgtccagctgataaa

SEQ ID NO: 1830740 - DNA, 15 bp, Homo sapiens
gtccagctgataaat

SEQ ID NO: 1830741 - DNA, 15 bp, Homo sapiens
tccagctgataaatt

SEQ ID NO: 1830742 - DNA, 15 bp, Homo sapiens
ccagctgataaattt

SEQ ID NO: 1830743 - DNA, 15 bp, Homo sapiens
cagctgataaattta

SEQ ID NO: 1830744 - DNA, 15 bp, Homo sapiens
agctgataaatttaa

SEQ ID NO: 1830745 - DNA, 15 bp, Homo sapiens
gctgataaatttaat

SEQ ID NO: 1830746 - DNA, 15 bp, Homo sapiens
ctgataaatttaatt

SEQ ID NO: 1830747 - DNA, 15 bp, Homo sapiens
tgataaatttaattt

SEQ ID NO: 1830748 - DNA, 15 bp, Homo sapiens
gataaatttaatttt

SEQ ID NO: 1830749 - DNA, 15 bp, Homo sapiens
ataaatttaattttg

SEQ ID NO: 1830750 - DNA, 15 bp, Homo sapiens
taaatttaattttgc

SEQ ID NO: 1830751 - DNA, 15 bp, Homo sapiens
aaatttaattttgct

SEQ ID NO: 1830752 - DNA, 15 bp, Homo sapiens
aatttaattttgctt

SEQ ID NO: 1830753 - DNA, 15 bp, Homo sapiens
atttaattttgcttt

SEQ ID NO: 1830754 - DNA, 15 bp, Homo sapiens
tttaattttgctttt

SEQ ID NO: 1830755 - DNA, 15 bp, Homo sapiens
ttaattttgcttttc

SEQ ID NO: 1830756 - DNA, 15 bp, Homo sapiens
taattttgcttttct

SEQ ID NO: 1830757 - DNA, 15 bp, Homo sapiens
aattttgcttttctg

SEQ ID NO: 1830758 - DNA, 15 bp, Homo sapiens
attttgcttttctga

SEQ ID NO: 1830759 - DNA, 15 bp, Homo sapiens
ttttgcttttctgag

SEQ ID NO: 1830760 - DNA, 15 bp, Homo sapiens
tttgcttttctgagt

SEQ ID NO: 1830761 - DNA, 15 bp, Homo sapiens
ttgcttttctgagtt

SEQ ID NO: 1830762 - DNA, 15 bp, Homo sapiens
tgcttttctgagttt

SEQ ID NO: 1830763 - DNA, 15 bp, Homo sapiens
gcttttctgagtttt

SEQ ID NO: 1830764 - DNA, 15 bp, Homo sapiens
cttttctgagttttc

SEQ ID NO: 1830765 - DNA, 15 bp, Homo sapiens
ttttctgagttttca

SEQ ID NO: 1830766 - DNA, 15 bp, Homo sapiens
tttctgagttttcat

SEQ ID NO: 1830767 - DNA, 15 bp, Homo sapiens
ttctgagttttcatt

SEQ ID NO: 1830768 - DNA, 15 bp, Homo sapiens
tctgagttttcattt

SEQ ID NO: 1830769 - DNA, 15 bp, Homo sapiens
ctgagttttcattta

SEQ ID NO: 1830770 - DNA, 15 bp, Homo sapiens
tgagttttcatttat

SEQ ID NO: 1830771 - DNA, 15 bp, Homo sapiens
gagttttcatttatg

SEQ ID NO: 1830772 - DNA, 15 bp, Homo sapiens
agttttcatttatgg

SEQ ID NO: 1830773 - DNA, 15 bp, Homo sapiens
gttttcatttatggt

SEQ ID NO: 1830774 - DNA, 15 bp, Homo sapiens
ttttcatttatggta

SEQ ID NO: 1830775 - DNA, 15 bp, Homo sapiens
tttcatttatggtaa

SEQ ID NO: 1830776 - DNA, 15 bp, Homo sapiens
ttcatttatggtaat

SEQ ID NO: 1830777 - DNA, 15 bp, Homo sapiens
tcatttatggtaatg

SEQ ID NO: 1830778 - DNA, 15 bp, Homo sapiens
catttatggtaatgg

SEQ ID NO: 1830779 - DNA, 15 bp, Homo sapiens
atttatggtaatggt

SEQ ID NO: 1830780 - DNA, 15 bp, Homo sapiens
tttatggtaatggtt

SEQ ID NO: 1830781 - DNA, 15 bp, Homo sapiens
ttatggtaatggtta

SEQ ID NO: 1830782 - DNA, 15 bp, Homo sapiens
tatggtaatggttaa

SEQ ID NO: 1830783 - DNA, 15 bp, Homo sapiens
atggtaatggttaaa

SEQ ID NO: 1830784 - DNA, 15 bp, Homo sapiens
tggtaatggttaaat

SEQ ID NO: 1830785 - DNA, 15 bp, Homo sapiens
ggtaatggttaaatc

SEQ ID NO: 1830786 - DNA, 15 bp, Homo sapiens
gtaatggttaaatca

SEQ ID NO: 1830787 - DNA, 15 bp, Homo sapiens
taatggttaaatcag

SEQ ID NO: 1830788 - DNA, 15 bp, Homo sapiens
aatggttaaatcagc

SEQ ID NO: 1830789 - DNA, 15 bp, Homo sapiens
atggttaaatcagct

SEQ ID NO: 1830790 - DNA, 15 bp, Homo sapiens
tggttaaatcagcta

SEQ ID NO: 1830791 - DNA, 15 bp, Homo sapiens
ggttaaatcagctag

SEQ ID NO: 1830792 - DNA, 15 bp, Homo sapiens
gttaaatcagctagg

SEQ ID NO: 1830793 - DNA, 15 bp, Homo sapiens
ttaaatcagctaggc

SEQ ID NO: 1830794 - DNA, 15 bp, Homo sapiens
taaatcagctaggct

SEQ ID NO: 1830795 - DNA, 15 bp, Homo sapiens
aaatcagctaggctt

SEQ ID NO: 1830796 - DNA, 15 bp, Homo sapiens
aatcagctaggcttt

SEQ ID NO: 1830797 - DNA, 15 bp, Homo sapiens
atcagctaggcttta

SEQ ID NO: 1830798 - DNA, 15 bp, Homo sapiens
tcagctaggctttac

SEQ ID NO: 1830799 - DNA, 15 bp, Homo sapiens
cagctaggctttaca

SEQ ID NO: 1830800 - DNA, 15 bp, Homo sapiens
agctaggctttacag

SEQ ID NO: 1830801 - DNA, 15 bp, Homo sapiens
gctaggctttacagt

SEQ ID NO: 1830802 - DNA, 15 bp, Homo sapiens
ctaggctttacagtt

SEQ ID NO: 1830803 - DNA, 15 bp, Homo sapiens
taggctttacagttg

SEQ ID NO: 1830804 - DNA, 15 bp, Homo sapiens
aggctttacagttgt

SEQ ID NO: 1830805 - DNA, 15 bp, Homo sapiens
ggctttacagttgtt

SEQ ID NO: 1830806 - DNA, 15 bp, Homo sapiens
gctttacagttgtta

SEQ ID NO: 1830807 - DNA, 15 bp, Homo sapiens
ctttacagttgttac

SEQ ID NO: 1830808 - DNA, 15 bp, Homo sapiens
tttacagttgttact

SEQ ID NO: 1830809 - DNA, 15 bp, Homo sapiens
ttacagttgttactc

SEQ ID NO: 1830810 - DNA, 15 bp, Homo sapiens
tacagttgttactca

SEQ ID NO: 1830811 - DNA, 15 bp, Homo sapiens
acagttgttactcac

SEQ ID NO: 1830812 - DNA, 15 bp, Homo sapiens
cagttgttactcaca

SEQ ID NO: 1830813 - DNA, 15 bp, Homo sapiens
agttgttactcacat

SEQ ID NO: 1830814 - DNA, 15 bp, Homo sapiens
gttgttactcacata

SEQ ID NO: 1830815 - DNA, 15 bp, Homo sapiens
ttgttactcacatat

SEQ ID NO: 1830816 - DNA, 15 bp, Homo sapiens
tgttactcacatata

SEQ ID NO: 1830817 - DNA, 15 bp, Homo sapiens
gttactcacatataa

SEQ ID NO: 1830818 - DNA, 15 bp, Homo sapiens
ttactcacatataat

SEQ ID NO: 1830819 - DNA, 15 bp, Homo sapiens
tactcacatataatt

SEQ ID NO: 1830820 - DNA, 15 bp, Homo sapiens
actcacatataattc

SEQ ID NO: 1830821 - DNA, 15 bp, Homo sapiens
ctcacatataattct

SEQ ID NO: 1830822 - DNA, 15 bp, Homo sapiens
tcacatataattctt

SEQ ID NO: 1830823 - DNA, 15 bp, Homo sapiens
cacatataattcttt

SEQ ID NO: 1830824 - DNA, 15 bp, Homo sapiens
acatataattctttg

SEQ ID NO: 1830825 - DNA, 15 bp, Homo sapiens
catataattctttgt

SEQ ID NO: 1830826 - DNA, 15 bp, Homo sapiens
atataattctttgtc

SEQ ID NO: 1830827 - DNA, 15 bp, Homo sapiens
tataattctttgtcc

SEQ ID NO: 1830828 - DNA, 15 bp, Homo sapiens
ataattctttgtcca

SEQ ID NO: 1830829 - DNA, 15 bp, Homo sapiens
taattctttgtccat

SEQ ID NO: 1830830 - DNA, 15 bp, Homo sapiens
aattctttgtccatc

SEQ ID NO: 1830831 - DNA, 15 bp, Homo sapiens
attctttgtccatcc

SEQ ID NO: 1830832 - DNA, 15 bp, Homo sapiens
ttctttgtccatcct

SEQ ID NO: 1830833 - DNA, 15 bp, Homo sapiens
tctttgtccatcctt

SEQ ID NO: 1830834 - DNA, 15 bp, Homo sapiens
ctttgtccatccttt

SEQ ID NO: 1830835 - DNA, 15 bp, Homo sapiens
tttgtccatccttta

SEQ ID NO: 1830836 - DNA, 15 bp, Homo sapiens
ttgtccatcctttaa

SEQ ID NO: 1830837 - DNA, 15 bp, Homo sapiens
tgtccatcctttaat

SEQ ID NO: 1830838 - DNA, 15 bp, Homo sapiens
gtccatcctttaatt

SEQ ID NO: 1830839 - DNA, 15 bp, Homo sapiens
tccatcctttaattc

SEQ ID NO: 1830840 - DNA, 15 bp, Homo sapiens
ccatcctttaattct

SEQ ID NO: 1830841 - DNA, 15 bp, Homo sapiens
catcctttaattctc

SEQ ID NO: 1830842 - DNA, 15 bp, Homo sapiens
atcctttaattctca

SEQ ID NO: 1830843 - DNA, 15 bp, Homo sapiens
tcctttaattctcac

SEQ ID NO: 1830844 - DNA, 15 bp, Homo sapiens
cctttaattctcaca

SEQ ID NO: 1830845 - DNA, 15 bp, Homo sapiens
ctttaattctcacat

SEQ ID NO: 1830846 - DNA, 15 bp, Homo sapiens
tttaattctcacatt

SEQ ID NO: 1830847 - DNA, 15 bp, Homo sapiens
ttaattctcacattg

SEQ ID NO: 1830848 - DNA, 15 bp, Homo sapiens
taattctcacattgg

SEQ ID NO: 1830849 - DNA, 15 bp, Homo sapiens
aattctcacattggg

SEQ ID NO: 1830850 - DNA, 15 bp, Homo sapiens
attctcacattggga

SEQ ID NO: 1830851 - DNA, 15 bp, Homo sapiens
ttctcacattgggaa

SEQ ID NO: 1830852 - DNA, 15 bp, Homo sapiens
tctcacattgggaac

SEQ ID NO: 1830853 - DNA, 15 bp, Homo sapiens
ctcacattgggaact

SEQ ID NO: 1830854 - DNA, 15 bp, Homo sapiens
tcacattgggaactg

SEQ ID NO: 1830855 - DNA, 15 bp, Homo sapiens
cacattgggaactga

SEQ ID NO: 1830856 - DNA, 15 bp, Homo sapiens
acattgggaactgac

SEQ ID NO: 1830857 - DNA, 15 bp, Homo sapiens
cattgggaactgact

SEQ ID NO: 1830858 - DNA, 15 bp, Homo sapiens
attgggaactgacta

SEQ ID NO: 1830859 - DNA, 15 bp, Homo sapiens
ttgggaactgactaa

SEQ ID NO: 1830860 - DNA, 15 bp, Homo sapiens
tgggaactgactaaa

SEQ ID NO: 1830861 - DNA, 15 bp, Homo sapiens
gggaactgactaaaa

SEQ ID NO: 1830862 - DNA, 15 bp, Homo sapiens
ggaactgactaaaaa

SEQ ID NO: 1830863 - DNA, 15 bp, Homo sapiens
gaactgactaaaaaa

SEQ ID NO: 1830864 - DNA, 15 bp, Homo sapiens
aactgactaaaaaaa

SEQ ID NO: 1830865 - DNA, 15 bp, Homo sapiens
actgactaaaaaaag

SEQ ID NO: 1830866 - DNA, 15 bp, Homo sapiens
ctgactaaaaaaaga

SEQ ID NO: 1830867 - DNA, 15 bp, Homo sapiens
tgactaaaaaaagaa

SEQ ID NO: 1830868 - DNA, 15 bp, Homo sapiens
gactaaaaaaagaaa

SEQ ID NO: 1830869 - DNA, 15 bp, Homo sapiens
actaaaaaaagaaag

SEQ ID NO: 1830870 - DNA, 15 bp, Homo sapiens
ctaaaaaaagaaagc

SEQ ID NO: 1830871 - DNA, 15 bp, Homo sapiens
taaaaaaagaaagct

SEQ ID NO: 1830872 - DNA, 15 bp, Homo sapiens
aaaaaaagaaagctt

SEQ ID NO: 1830873 - DNA, 15 bp, Homo sapiens
aaaaaagaaagcttc

SEQ ID NO: 1830874 - DNA, 15 bp, Homo sapiens
aaaaagaaagcttcc

SEQ ID NO: 1830875 - DNA, 15 bp, Homo sapiens
aaaagaaagcttcca

SEQ ID NO: 1830876 - DNA, 15 bp, Homo sapiens
aaagaaagcttccag

SEQ ID NO: 1830877 - DNA, 15 bp, Homo sapiens
aagaaagcttccagt

SEQ ID NO: 1830878 - DNA, 15 bp, Homo sapiens
agaaagcttccagtc

SEQ ID NO: 1830879 - DNA, 15 bp, Homo sapiens
gaaagcttccagtct

SEQ ID NO: 1830880 - DNA, 15 bp, Homo sapiens
aaagcttccagtctg

SEQ ID NO: 1830881 - DNA, 15 bp, Homo sapiens
aagcttccagtctgg

SEQ ID NO: 1830882 - DNA, 15 bp, Homo sapiens
agcttccagtctggg

SEQ ID NO: 1830883 - DNA, 15 bp, Homo sapiens
gcttccagtctgggc

SEQ ID NO: 1830884 - DNA, 15 bp, Homo sapiens
cttccagtctgggca

SEQ ID NO: 1830885 - DNA, 15 bp, Homo sapiens
ttccagtctgggcac

SEQ ID NO: 1830886 - DNA, 15 bp, Homo sapiens
tccagtctgggcaca

SEQ ID NO: 1830887 - DNA, 15 bp, Homo sapiens
ccagtctgggcacag

SEQ ID NO: 1830888 - DNA, 15 bp, Homo sapiens
cagtctgggcacagt

SEQ ID NO: 1830889 - DNA, 15 bp, Homo sapiens
agtctgggcacagtg

SEQ ID NO: 1830890 - DNA, 15 bp, Homo sapiens
gtctgggcacagtgg

SEQ ID NO: 1830891 - DNA, 15 bp, Homo sapiens
tctgggcacagtggc

SEQ ID NO: 1830892 - DNA, 15 bp, Homo sapiens
gaggccgaggtgggt

SEQ ID NO: 1830893 - DNA, 15 bp, Homo sapiens
aggccgaggtgggtg

SEQ ID NO: 1830894 - DNA, 15 bp, Homo sapiens
ggccgaggtgggtgg

SEQ ID NO: 1830895 - DNA, 15 bp, Homo sapiens
cctggccaacacagc

SEQ ID NO: 1830896 - DNA, 15 bp, Homo sapiens
ctggccaacacagca

SEQ ID NO: 1830897 - DNA, 15 bp, Homo sapiens
tggccaacacagcaa

SEQ ID NO: 1830898 - DNA, 15 bp, Homo sapiens
ggccaacacagcaat

SEQ ID NO: 1830899 - DNA, 15 bp, Homo sapiens
gccaacacagcaata

SEQ ID NO: 1830900 - DNA, 15 bp, Homo sapiens
ccaacacagcaatac

SEQ ID NO: 1830901 - DNA, 15 bp, Homo sapiens
caacacagcaatacc

SEQ ID NO: 1830902 - DNA, 15 bp, Homo sapiens
aacacagcaataccc

SEQ ID NO: 1830903 - DNA, 15 bp, Homo sapiens
acacagcaatacccc

SEQ ID NO: 1830904 - DNA, 15 bp, Homo sapiens
cacagcaataccccg

SEQ ID NO: 1830905 - DNA, 15 bp, Homo sapiens
acagcaataccccgt

SEQ ID NO: 1830906 - DNA, 15 bp, Homo sapiens
cagcaataccccgtc

SEQ ID NO: 1830907 - DNA, 15 bp, Homo sapiens
agcaataccccgtct

SEQ ID NO: 1830908 - DNA, 15 bp, Homo sapiens
gcaataccccgtctc

SEQ ID NO: 1830909 - DNA, 15 bp, Homo sapiens
caataccccgtctct

SEQ ID NO: 1830910 - DNA, 15 bp, Homo sapiens
aataccccgtctcta

SEQ ID NO: 1830911 - DNA, 15 bp, Homo sapiens
ataccccgtctctaa

SEQ ID NO: 1830912 - DNA, 15 bp, Homo sapiens
taccccgtctctaat

SEQ ID NO: 1830913 - DNA, 15 bp, Homo sapiens
gtctctaataaaaaa

SEQ ID NO: 1830914 - DNA, 15 bp, Homo sapiens
tctctaataaaaaat

SEQ ID NO: 1830915 - DNA, 15 bp, Homo sapiens
ctctaataaaaaata

SEQ ID NO: 1830916 - DNA, 15 bp, Homo sapiens
tctaataaaaaatac

SEQ ID NO: 1830917 - DNA, 15 bp, Homo sapiens
ctaataaaaaataca

SEQ ID NO: 1830918 - DNA, 15 bp, Homo sapiens
taataaaaaatacaa

SEQ ID NO: 1830919 - DNA, 15 bp, Homo sapiens
aataaaaaatacaaa

SEQ ID NO: 1830920 - DNA, 15 bp, Homo sapiens
ataaaaaatacaaaa

SEQ ID NO: 1830921 - DNA, 15 bp, Homo sapiens
aaaaatacaaaaatc

SEQ ID NO: 1830922 - DNA, 15 bp, Homo sapiens
aaaatacaaaaatca

SEQ ID NO: 1830923 - DNA, 15 bp, Homo sapiens
aaatacaaaaatcag

SEQ ID NO: 1830924 - DNA, 15 bp, Homo sapiens
aatacaaaaatcagc

SEQ ID NO: 1830925 - DNA, 15 bp, Homo sapiens
atacaaaaatcagcc

SEQ ID NO: 1830926 - DNA, 15 bp, Homo sapiens
aaaaatcagccaggc

SEQ ID NO: 1830927 - DNA, 15 bp, Homo sapiens
aaaatcagccaggct

SEQ ID NO: 1830928 - DNA, 15 bp, Homo sapiens
aaatcagccaggctt

SEQ ID NO: 1830929 - DNA, 15 bp, Homo sapiens
aatcagccaggcttg

SEQ ID NO: 1830930 - DNA, 15 bp, Homo sapiens
atcagccaggcttgg

SEQ ID NO: 1830931 - DNA, 15 bp, Homo sapiens
tcagccaggcttggg

SEQ ID NO: 1830932 - DNA, 15 bp, Homo sapiens
cagccaggcttgggt

SEQ ID NO: 1830933 - DNA, 15 bp, Homo sapiens
agccaggcttgggtg

SEQ ID NO: 1830934 - DNA, 15 bp, Homo sapiens
gccaggcttgggtgg

SEQ ID NO: 1830935 - DNA, 15 bp, Homo sapiens
ccaggcttgggtggc

SEQ ID NO: 1830936 - DNA, 15 bp, Homo sapiens
caggcttgggtggcg

SEQ ID NO: 1830937 - DNA, 15 bp, Homo sapiens
aggcttgggtggcgg

SEQ ID NO: 1830938 - DNA, 15 bp, Homo sapiens
ggcttgggtggcggg

SEQ ID NO: 1830939 - DNA, 15 bp, Homo sapiens
gcttgggtggcgggc

SEQ ID NO: 1830940 - DNA, 15 bp, Homo sapiens
cttgggtggcgggcg

SEQ ID NO: 1830941 - DNA, 15 bp, Homo sapiens
ttgggtggcgggcgc

SEQ ID NO: 1830942 - DNA, 15 bp, Homo sapiens
tgggtggcgggcgcc

SEQ ID NO: 1830943 - DNA, 15 bp, Homo sapiens
gggtggcgggcgcct

SEQ ID NO: 1830944 - DNA, 15 bp, Homo sapiens
tggcgggcgcctgtc

SEQ ID NO: 1830945 - DNA, 15 bp, Homo sapiens
ggcgggcgcctgtcg

SEQ ID NO: 1830946 - DNA, 15 bp, Homo sapiens
gcgggcgcctgtcgt

SEQ ID NO: 1830947 - DNA, 15 bp, Homo sapiens
cgggcgcctgtcgtc

SEQ ID NO: 1830948 - DNA, 15 bp, Homo sapiens
gggcgcctgtcgtcc

SEQ ID NO: 1830949 - DNA, 15 bp, Homo sapiens
ggcgcctgtcgtccc

SEQ ID NO: 1830950 - DNA, 15 bp, Homo sapiens
gcgcctgtcgtccca

SEQ ID NO: 1830951 - DNA, 15 bp, Homo sapiens
cgcctgtcgtcccag

SEQ ID NO: 1830952 - DNA, 15 bp, Homo sapiens
gcctgtcgtcccagc

SEQ ID NO: 1830953 - DNA, 15 bp, Homo sapiens
cctgtcgtcccagct

SEQ ID NO: 1830954 - DNA, 15 bp, Homo sapiens
ctgtcgtcccagcta

SEQ ID NO: 1830955 - DNA, 15 bp, Homo sapiens
tgtcgtcccagctac

SEQ ID NO: 1830956 - DNA, 15 bp, Homo sapiens
gtcgtcccagctacg

SEQ ID NO: 1830957 - DNA, 15 bp, Homo sapiens
tcgtcccagctacgc

SEQ ID NO: 1830958 - DNA, 15 bp, Homo sapiens
cgtcccagctacgca

SEQ ID NO: 1830959 - DNA, 15 bp, Homo sapiens
gtcccagctacgcag

SEQ ID NO: 1830960 - DNA, 15 bp, Homo sapiens
tcccagctacgcagg

SEQ ID NO: 1830961 - DNA, 15 bp, Homo sapiens
cccagctacgcagga

SEQ ID NO: 1830962 - DNA, 15 bp, Homo sapiens
ccagctacgcaggag

SEQ ID NO: 1830963 - DNA, 15 bp, Homo sapiens
cagctacgcaggagg

SEQ ID NO: 1830964 - DNA, 15 bp, Homo sapiens
agctacgcaggaggc

SEQ ID NO: 1830965 - DNA, 15 bp, Homo sapiens
gctacgcaggaggct

SEQ ID NO: 1830966 - DNA, 15 bp, Homo sapiens
ctacgcaggaggctg

SEQ ID NO: 1830967 - DNA, 15 bp, Homo sapiens
tacgcaggaggctga

SEQ ID NO: 1830968 - DNA, 15 bp, Homo sapiens
acgcaggaggctgag

SEQ ID NO: 1830969 - DNA, 15 bp, Homo sapiens
cgcaggaggctgaga

SEQ ID NO: 1830970 - DNA, 15 bp, Homo sapiens
gcaggaggctgagac

SEQ ID NO: 1830971 - DNA, 15 bp, Homo sapiens
gaggctgagacgggg

SEQ ID NO: 1830972 - DNA, 15 bp, Homo sapiens
aggctgagacgggga

SEQ ID NO: 1830973 - DNA, 15 bp, Homo sapiens
ggctgagacggggag

SEQ ID NO: 1830974 - DNA, 15 bp, Homo sapiens
gctgagacggggaga

SEQ ID NO: 1830975 - DNA, 15 bp, Homo sapiens
ctgagacggggagaa

SEQ ID NO: 1830976 - DNA, 15 bp, Homo sapiens
tgagacggggagaat

SEQ ID NO: 1830977 - DNA, 15 bp, Homo sapiens
gagacggggagaatt

SEQ ID NO: 1830978 - DNA, 15 bp, Homo sapiens
agacggggagaattg

SEQ ID NO: 1830979 - DNA, 15 bp, Homo sapiens
gacggggagaattgc

SEQ ID NO: 1830980 - DNA, 15 bp, Homo sapiens
acggggagaattgct

SEQ ID NO: 1830981 - DNA, 15 bp, Homo sapiens
cggggagaattgctt

SEQ ID NO: 1830982 - DNA, 15 bp, Homo sapiens
ggggagaattgcttg

SEQ ID NO: 1830983 - DNA, 15 bp, Homo sapiens
gggagaattgcttga

SEQ ID NO: 1830984 - DNA, 15 bp, Homo sapiens
gagaattgcttgaag

SEQ ID NO: 1830985 - DNA, 15 bp, Homo sapiens
agaattgcttgaagc

SEQ ID NO: 1830986 - DNA, 15 bp, Homo sapiens
gaattgcttgaagcc

SEQ ID NO: 1830987 - DNA, 15 bp, Homo sapiens
aattgcttgaagcca

SEQ ID NO: 1830988 - DNA, 15 bp, Homo sapiens
cttgaagccaggagg

SEQ ID NO: 1830989 - DNA, 15 bp, Homo sapiens
ttgaagccaggaggt

SEQ ID NO: 1830990 - DNA, 15 bp, Homo sapiens
tgaagccaggaggtg

SEQ ID NO: 1830991 - DNA, 15 bp, Homo sapiens
gaagccaggaggtgg

SEQ ID NO: 1830992 - DNA, 15 bp, Homo sapiens
aagccaggaggtgga

SEQ ID NO: 1830993 - DNA, 15 bp, Homo sapiens
agccaggaggtggag

SEQ ID NO: 1830994 - DNA, 15 bp, Homo sapiens
gccaggaggtggagg

SEQ ID NO: 1830995 - DNA, 15 bp, Homo sapiens
gcagtgagccgaaag

SEQ ID NO: 1830996 - DNA, 15 bp, Homo sapiens
cagtgagccgaaagc

SEQ ID NO: 1830997 - DNA, 15 bp, Homo sapiens
agtgagccgaaagcg

SEQ ID NO: 1830998 - DNA, 15 bp, Homo sapiens
gtgagccgaaagcgc

SEQ ID NO: 1830999 - DNA, 15 bp, Homo sapiens
tgagccgaaagcgct

SEQ ID NO: 1831000 - DNA, 15 bp, Homo sapiens
gagccgaaagcgctt

SEQ ID NO: 1831001 - DNA, 15 bp, Homo sapiens
agccgaaagcgctta

SEQ ID NO: 1831002 - DNA, 15 bp, Homo sapiens
gccgaaagcgcttaa

SEQ ID NO: 1831003 - DNA, 15 bp, Homo sapiens
ccgaaagcgcttaag

SEQ ID NO: 1831004 - DNA, 15 bp, Homo sapiens
cgaaagcgcttaagg

SEQ ID NO: 1831005 - DNA, 15 bp, Homo sapiens
gaaagcgcttaagga

SEQ ID NO: 1831006 - DNA, 15 bp, Homo sapiens
aaagcgcttaaggag

SEQ ID NO: 1831007 - DNA, 15 bp, Homo sapiens
aagcgcttaaggaga

SEQ ID NO: 1831008 - DNA, 15 bp, Homo sapiens
agcgcttaaggagaa

SEQ ID NO: 1831009 - DNA, 15 bp, Homo sapiens
gcgcttaaggagaaa

SEQ ID NO: 1831010 - DNA, 15 bp, Homo sapiens
cgcttaaggagaaat

SEQ ID NO: 1831011 - DNA, 15 bp, Homo sapiens
gcttaaggagaaata

SEQ ID NO: 1831012 - DNA, 15 bp, Homo sapiens
cttaaggagaaataa

SEQ ID NO: 1831013 - DNA, 15 bp, Homo sapiens
ttaaggagaaataag

SEQ ID NO: 1831014 - DNA, 15 bp, Homo sapiens
taaggagaaataagt

SEQ ID NO: 1831015 - DNA, 15 bp, Homo sapiens
aaggagaaataagta

SEQ ID NO: 1831016 - DNA, 15 bp, Homo sapiens
aggagaaataagtaa

SEQ ID NO: 1831017 - DNA, 15 bp, Homo sapiens
ggagaaataagtaag

SEQ ID NO: 1831018 - DNA, 15 bp, Homo sapiens
gagaaataagtaagg

SEQ ID NO: 1831019 - DNA, 15 bp, Homo sapiens
agaaataagtaagga

SEQ ID NO: 1831020 - DNA, 15 bp, Homo sapiens
gaaataagtaaggac

SEQ ID NO: 1831021 - DNA, 15 bp, Homo sapiens
aaataagtaaggaca

SEQ ID NO: 1831022 - DNA, 15 bp, Homo sapiens
aataagtaaggacaa

SEQ ID NO: 1831023 - DNA, 15 bp, Homo sapiens
ataagtaaggacaaa

SEQ ID NO: 1831024 - DNA, 15 bp, Homo sapiens
taagtaaggacaaag

SEQ ID NO: 1831025 - DNA, 15 bp, Homo sapiens
aagtaaggacaaaga

SEQ ID NO: 1831026 - DNA, 15 bp, Homo sapiens
agtaaggacaaagag

SEQ ID NO: 1831027 - DNA, 15 bp, Homo sapiens
gtaaggacaaagagt

SEQ ID NO: 1831028 - DNA, 15 bp, Homo sapiens
taaggacaaagagtg

SEQ ID NO: 1831029 - DNA, 15 bp, Homo sapiens
aaggacaaagagtgc

SEQ ID NO: 1831030 - DNA, 15 bp, Homo sapiens
aggacaaagagtgca

SEQ ID NO: 1831031 - DNA, 15 bp, Homo sapiens
ggacaaagagtgcag

SEQ ID NO: 1831032 - DNA, 15 bp, Homo sapiens
gacaaagagtgcagg

SEQ ID NO: 1831033 - DNA, 15 bp, Homo sapiens
acaaagagtgcagga

SEQ ID NO: 1831034 - DNA, 15 bp, Homo sapiens
caaagagtgcaggat

SEQ ID NO: 1831035 - DNA, 15 bp, Homo sapiens
aaagagtgcaggata

SEQ ID NO: 1831036 - DNA, 15 bp, Homo sapiens
aagagtgcaggatag

SEQ ID NO: 1831037 - DNA, 15 bp, Homo sapiens
agagtgcaggatagt

SEQ ID NO: 1831038 - DNA, 15 bp, Homo sapiens
gagtgcaggatagta

SEQ ID NO: 1831039 - DNA, 15 bp, Homo sapiens
agtgcaggatagtat

SEQ ID NO: 1831040 - DNA, 15 bp, Homo sapiens
gtgcaggatagtatc

SEQ ID NO: 1831041 - DNA, 15 bp, Homo sapiens
tgcaggatagtatcc

SEQ ID NO: 1831042 - DNA, 15 bp, Homo sapiens
gcaggatagtatcct

SEQ ID NO: 1831043 - DNA, 15 bp, Homo sapiens
caggatagtatcctg

SEQ ID NO: 1831044 - DNA, 15 bp, Homo sapiens
aggatagtatcctga

SEQ ID NO: 1831045 - DNA, 15 bp, Homo sapiens
ggatagtatcctgac

SEQ ID NO: 1831046 - DNA, 15 bp, Homo sapiens
gatagtatcctgaca

SEQ ID NO: 1831047 - DNA, 15 bp, Homo sapiens
atagtatcctgacac

SEQ ID NO: 1831048 - DNA, 15 bp, Homo sapiens
tagtatcctgacacg

SEQ ID NO: 1831049 - DNA, 15 bp, Homo sapiens
agtatcctgacacgg

SEQ ID NO: 1831050 - DNA, 15 bp, Homo sapiens
gtatcctgacacgga

SEQ ID NO: 1831051 - DNA, 15 bp, Homo sapiens
tatcctgacacggag

SEQ ID NO: 1831052 - DNA, 15 bp, Homo sapiens
atcctgacacggagg

SEQ ID NO: 1831053 - DNA, 15 bp, Homo sapiens
tcctgacacggagga

SEQ ID NO: 1831054 - DNA, 15 bp, Homo sapiens
cctgacacggaggat

SEQ ID NO: 1831055 - DNA, 15 bp, Homo sapiens
ctgacacggaggatg

SEQ ID NO: 1831056 - DNA, 15 bp, Homo sapiens
tgacacggaggatgg

SEQ ID NO: 1831057 - DNA, 15 bp, Homo sapiens
gacacggaggatggg

SEQ ID NO: 1831058 - DNA, 15 bp, Homo sapiens
acacggaggatgggg

SEQ ID NO: 1831059 - DNA, 15 bp, Homo sapiens
cacggaggatgggga

SEQ ID NO: 1831060 - DNA, 15 bp, Homo sapiens
acggaggatggggag

SEQ ID NO: 1831061 - DNA, 15 bp, Homo sapiens
cggaggatggggagg

SEQ ID NO: 1831062 - DNA, 15 bp, Homo sapiens
ggaggatggggaggg

SEQ ID NO: 1831063 - DNA, 15 bp, Homo sapiens
gaggatggggagggt

SEQ ID NO: 1831064 - DNA, 15 bp, Homo sapiens
aggatggggagggta

SEQ ID NO: 1831065 - DNA, 15 bp, Homo sapiens
ggatggggagggtat

SEQ ID NO: 1831066 - DNA, 15 bp, Homo sapiens
gatggggagggtatg

SEQ ID NO: 1831067 - DNA, 15 bp, Homo sapiens
atggggagggtatgt

SEQ ID NO: 1831068 - DNA, 15 bp, Homo sapiens
tggggagggtatgta

SEQ ID NO: 1831069 - DNA, 15 bp, Homo sapiens
ggggagggtatgtaa

SEQ ID NO: 1831070 - DNA, 15 bp, Homo sapiens
gggagggtatgtaaa

SEQ ID NO: 1831071 - DNA, 15 bp, Homo sapiens
ggagggtatgtaaat

SEQ ID NO: 1831072 - DNA, 15 bp, Homo sapiens
gagggtatgtaaata

SEQ ID NO: 1831073 - DNA, 15 bp, Homo sapiens
agggtatgtaaatat

SEQ ID NO: 1831074 - DNA, 15 bp, Homo sapiens
gggtatgtaaatatt

SEQ ID NO: 1831075 - DNA, 15 bp, Homo sapiens
ggtatgtaaatattg

SEQ ID NO: 1831076 - DNA, 15 bp, Homo sapiens
gtatgtaaatattgt

SEQ ID NO: 1831077 - DNA, 15 bp, Homo sapiens
tatgtaaatattgtc

SEQ ID NO: 1831078 - DNA, 15 bp, Homo sapiens
atgtaaatattgtcg

SEQ ID NO: 1831079 - DNA, 15 bp, Homo sapiens
tgtaaatattgtcga

SEQ ID NO: 1831080 - DNA, 15 bp, Homo sapiens
gtaaatattgtcgat

SEQ ID NO: 1831081 - DNA, 15 bp, Homo sapiens
taaatattgtcgata

SEQ ID NO: 1831082 - DNA, 15 bp, Homo sapiens
aaatattgtcgatat

SEQ ID NO: 1831083 - DNA, 15 bp, Homo sapiens
aatattgtcgatatt

SEQ ID NO: 1831084 - DNA, 15 bp, Homo sapiens
atattgtcgatattt

SEQ ID NO: 1831085 - DNA, 15 bp, Homo sapiens
tattgtcgatatttt

SEQ ID NO: 1831086 - DNA, 15 bp, Homo sapiens
attgtcgatatttta

SEQ ID NO: 1831087 - DNA, 15 bp, Homo sapiens
ttgtcgatattttac

SEQ ID NO: 1831088 - DNA, 15 bp, Homo sapiens
tgtcgatattttact

SEQ ID NO: 1831089 - DNA, 15 bp, Homo sapiens
gtcgatattttactg

SEQ ID NO: 1831090 - DNA, 15 bp, Homo sapiens
tcgatattttactga

SEQ ID NO: 1831091 - DNA, 15 bp, Homo sapiens
cgatattttactgaa

SEQ ID NO: 1831092 - DNA, 15 bp, Homo sapiens
gatattttactgaat

SEQ ID NO: 1831093 - DNA, 15 bp, Homo sapiens
atattttactgaatt

SEQ ID NO: 1831094 - DNA, 15 bp, Homo sapiens
tattttactgaattt

SEQ ID NO: 1831095 - DNA, 15 bp, Homo sapiens
attttactgaatttc

SEQ ID NO: 1831096 - DNA, 15 bp, Homo sapiens
ttttactgaatttct

SEQ ID NO: 1831097 - DNA, 15 bp, Homo sapiens
tttactgaatttcta

SEQ ID NO: 1831098 - DNA, 15 bp, Homo sapiens
ttactgaatttctaa

SEQ ID NO: 1831099 - DNA, 15 bp, Homo sapiens
tactgaatttctaaa

SEQ ID NO: 1831100 - DNA, 15 bp, Homo sapiens
actgaatttctaaat

SEQ ID NO: 1831101 - DNA, 15 bp, Homo sapiens
ctgaatttctaaata

SEQ ID NO: 1831102 - DNA, 15 bp, Homo sapiens
tgaatttctaaatat

SEQ ID NO: 1831103 - DNA, 15 bp, Homo sapiens
gaatttctaaatatt

SEQ ID NO: 1831104 - DNA, 15 bp, Homo sapiens
aatttctaaatatta

SEQ ID NO: 1831105 - DNA, 15 bp, Homo sapiens
atttctaaatattac

SEQ ID NO: 1831106 - DNA, 15 bp, Homo sapiens
tttctaaatattaca

SEQ ID NO: 1831107 - DNA, 15 bp, Homo sapiens
ttctaaatattacaa

SEQ ID NO: 1831108 - DNA, 15 bp, Homo sapiens
tctaaatattacaag

SEQ ID NO: 1831109 - DNA, 15 bp, Homo sapiens
ctaaatattacaaga

SEQ ID NO: 1831110 - DNA, 15 bp, Homo sapiens
taaatattacaagaa

SEQ ID NO: 1831111 - DNA, 15 bp, Homo sapiens
aaatattacaagaat

SEQ ID NO: 1831112 - DNA, 15 bp, Homo sapiens
aatattacaagaata

SEQ ID NO: 1831113 - DNA, 15 bp, Homo sapiens
atattacaagaatag

SEQ ID NO: 1831114 - DNA, 15 bp, Homo sapiens
tattacaagaataga

SEQ ID NO: 1831115 - DNA, 15 bp, Homo sapiens
attacaagaatagaa

SEQ ID NO: 1831116 - DNA, 15 bp, Homo sapiens
ttacaagaatagaat

SEQ ID NO: 1831117 - DNA, 15 bp, Homo sapiens
tacaagaatagaata

SEQ ID NO: 1831118 - DNA, 15 bp, Homo sapiens
acaagaatagaatat

SEQ ID NO: 1831119 - DNA, 15 bp, Homo sapiens
caagaatagaatatt

SEQ ID NO: 1831120 - DNA, 15 bp, Homo sapiens
aagaatagaatattc

SEQ ID NO: 1831121 - DNA, 15 bp, Homo sapiens
agaatagaatattca

SEQ ID NO: 1831122 - DNA, 15 bp, Homo sapiens
gaatagaatattcat

SEQ ID NO: 1831123 - DNA, 15 bp, Homo sapiens
aatagaatattcata

SEQ ID NO: 1831124 - DNA, 15 bp, Homo sapiens
atagaatattcatag

SEQ ID NO: 1831125 - DNA, 15 bp, Homo sapiens
tagaatattcatagg

SEQ ID NO: 1831126 - DNA, 15 bp, Homo sapiens
agaatattcatagga

SEQ ID NO: 1831127 - DNA, 15 bp, Homo sapiens
gaatattcataggat

SEQ ID NO: 1831128 - DNA, 15 bp, Homo sapiens
aatattcataggata

SEQ ID NO: 1831129 - DNA, 15 bp, Homo sapiens
atattcataggataa

SEQ ID NO: 1831130 - DNA, 15 bp, Homo sapiens
tattcataggataac

SEQ ID NO: 1831131 - DNA, 15 bp, Homo sapiens
attcataggataacc

SEQ ID NO: 1831132 - DNA, 15 bp, Homo sapiens
ttcataggataacct

SEQ ID NO: 1831133 - DNA, 15 bp, Homo sapiens
tcataggataaccta

SEQ ID NO: 1831134 - DNA, 15 bp, Homo sapiens
cataggataacctaa

SEQ ID NO: 1831135 - DNA, 15 bp, Homo sapiens
ataggataacctaag

SEQ ID NO: 1831136 - DNA, 15 bp, Homo sapiens
taggataacctaagc

SEQ ID NO: 1831137 - DNA, 15 bp, Homo sapiens
aggataacctaagct

SEQ ID NO: 1831138 - DNA, 15 bp, Homo sapiens
ggataacctaagctt

SEQ ID NO: 1831139 - DNA, 15 bp, Homo sapiens
gataacctaagcttt

SEQ ID NO: 1831140 - DNA, 15 bp, Homo sapiens
ataacctaagctttt

SEQ ID NO: 1831141 - DNA, 15 bp, Homo sapiens
taacctaagcttttc

SEQ ID NO: 1831142 - DNA, 15 bp, Homo sapiens
aacctaagcttttct

SEQ ID NO: 1831143 - DNA, 15 bp, Homo sapiens
acctaagcttttctg

SEQ ID NO: 1831144 - DNA, 15 bp, Homo sapiens
cctaagcttttctgt

SEQ ID NO: 1831145 - DNA, 15 bp, Homo sapiens
ctaagcttttctgtg

SEQ ID NO: 1831146 - DNA, 15 bp, Homo sapiens
taagcttttctgtga

SEQ ID NO: 1831147 - DNA, 15 bp, Homo sapiens
aagcttttctgtgag

SEQ ID NO: 1831148 - DNA, 15 bp, Homo sapiens
agcttttctgtgagt

SEQ ID NO: 1831149 - DNA, 15 bp, Homo sapiens
gcttttctgtgagtc

SEQ ID NO: 1831150 - DNA, 15 bp, Homo sapiens
cttttctgtgagtca

SEQ ID NO: 1831151 - DNA, 15 bp, Homo sapiens
ttttctgtgagtcag

SEQ ID NO: 1831152 - DNA, 15 bp, Homo sapiens
tttctgtgagtcagt

SEQ ID NO: 1831153 - DNA, 15 bp, Homo sapiens
ttctgtgagtcagtg

SEQ ID NO: 1831154 - DNA, 15 bp, Homo sapiens
tctgtgagtcagtgt

SEQ ID NO: 1831155 - DNA, 15 bp, Homo sapiens
ctgtgagtcagtgta

SEQ ID NO: 1831156 - DNA, 15 bp, Homo sapiens
tgtgagtcagtgtac

SEQ ID NO: 1831157 - DNA, 15 bp, Homo sapiens
gtgagtcagtgtact

SEQ ID NO: 1831158 - DNA, 15 bp, Homo sapiens
tgagtcagtgtacta

SEQ ID NO: 1831159 - DNA, 15 bp, Homo sapiens
gagtcagtgtactag

SEQ ID NO: 1831160 - DNA, 15 bp, Homo sapiens
agtcagtgtactagg

SEQ ID NO: 1831161 - DNA, 15 bp, Homo sapiens
gtcagtgtactaggc

SEQ ID NO: 1831162 - DNA, 15 bp, Homo sapiens
tcagtgtactaggca

SEQ ID NO: 1831163 - DNA, 15 bp, Homo sapiens
cagtgtactaggcag

SEQ ID NO: 1831164 - DNA, 15 bp, Homo sapiens
agtgtactaggcaga

SEQ ID NO: 1831165 - DNA, 15 bp, Homo sapiens
gtgtactaggcagaa

SEQ ID NO: 1831166 - DNA, 15 bp, Homo sapiens
tgtactaggcagaaa

SEQ ID NO: 1831167 - DNA, 15 bp, Homo sapiens
gtactaggcagaaag

SEQ ID NO: 1831168 - DNA, 15 bp, Homo sapiens
tactaggcagaaagt

SEQ ID NO: 1831169 - DNA, 15 bp, Homo sapiens
actaggcagaaagtt

SEQ ID NO: 1831170 - DNA, 15 bp, Homo sapiens
ctaggcagaaagttc

SEQ ID NO: 1831171 - DNA, 15 bp, Homo sapiens
taggcagaaagttca

SEQ ID NO: 1831172 - DNA, 15 bp, Homo sapiens
aggcagaaagttcac

SEQ ID NO: 1831173 - DNA, 15 bp, Homo sapiens
ggcagaaagttcact

SEQ ID NO: 1831174 - DNA, 15 bp, Homo sapiens
gcagaaagttcacta

SEQ ID NO: 1831175 - DNA, 15 bp, Homo sapiens
cagaaagttcactaa

SEQ ID NO: 1831176 - DNA, 15 bp, Homo sapiens
agaaagttcactaaa

SEQ ID NO: 1831177 - DNA, 15 bp, Homo sapiens
gaaagttcactaaag

SEQ ID NO: 1831178 - DNA, 15 bp, Homo sapiens
aaagttcactaaagt

SEQ ID NO: 1831179 - DNA, 15 bp, Homo sapiens
aagttcactaaagtg

SEQ ID NO: 1831180 - DNA, 15 bp, Homo sapiens
agttcactaaagtgg

SEQ ID NO: 1831181 - DNA, 15 bp, Homo sapiens
gttcactaaagtggt

SEQ ID NO: 1831182 - DNA, 15 bp, Homo sapiens
ttcactaaagtggtt

SEQ ID NO: 1831183 - DNA, 15 bp, Homo sapiens
tcactaaagtggttt

SEQ ID NO: 1831184 - DNA, 15 bp, Homo sapiens
cactaaagtggttta

SEQ ID NO: 1831185 - DNA, 15 bp, Homo sapiens
actaaagtggtttat

SEQ ID NO: 1831186 - DNA, 15 bp, Homo sapiens
ctaaagtggtttatg

SEQ ID NO: 1831187 - DNA, 15 bp, Homo sapiens
taaagtggtttatga

SEQ ID NO: 1831188 - DNA, 15 bp, Homo sapiens
aaagtggtttatgat

SEQ ID NO: 1831189 - DNA, 15 bp, Homo sapiens
aagtggtttatgatt

SEQ ID NO: 1831190 - DNA, 15 bp, Homo sapiens
agtggtttatgattt

SEQ ID NO: 1831191 - DNA, 15 bp, Homo sapiens
gtggtttatgatttt

SEQ ID NO: 1831192 - DNA, 15 bp, Homo sapiens
tggtttatgattttt

SEQ ID NO: 1831193 - DNA, 15 bp, Homo sapiens
ggtttatgatttttg

SEQ ID NO: 1831194 - DNA, 15 bp, Homo sapiens
gtttatgatttttgc

SEQ ID NO: 1831195 - DNA, 15 bp, Homo sapiens
tttatgatttttgct

SEQ ID NO: 1831196 - DNA, 15 bp, Homo sapiens
ttatgatttttgcta

SEQ ID NO: 1831197 - DNA, 15 bp, Homo sapiens
tatgatttttgctac

SEQ ID NO: 1831198 - DNA, 15 bp, Homo sapiens
atgatttttgctact

SEQ ID NO: 1831199 - DNA, 15 bp, Homo sapiens
tgatttttgctactt

SEQ ID NO: 1831200 - DNA, 15 bp, Homo sapiens
gatttttgctactta

SEQ ID NO: 1831201 - DNA, 15 bp, Homo sapiens
atttttgctacttat

SEQ ID NO: 1831202 - DNA, 15 bp, Homo sapiens
tttttgctacttatg

SEQ ID NO: 1831203 - DNA, 15 bp, Homo sapiens
ttttgctacttatga

SEQ ID NO: 1831204 - DNA, 15 bp, Homo sapiens
tttgctacttatgag

SEQ ID NO: 1831205 - DNA, 15 bp, Homo sapiens
ttgctacttatgaga

SEQ ID NO: 1831206 - DNA, 15 bp, Homo sapiens
tgctacttatgagaa

SEQ ID NO: 1831207 - DNA, 15 bp, Homo sapiens
gctacttatgagaaa

SEQ ID NO: 1831208 - DNA, 15 bp, Homo sapiens
ctacttatgagaaaa

SEQ ID NO: 1831209 - DNA, 15 bp, Homo sapiens
tacttatgagaaaac

SEQ ID NO: 1831210 - DNA, 15 bp, Homo sapiens
acttatgagaaaaca

SEQ ID NO: 1831211 - DNA, 15 bp, Homo sapiens
cttatgagaaaacat

SEQ ID NO: 1831212 - DNA, 15 bp, Homo sapiens
ttatgagaaaacatt

SEQ ID NO: 1831213 - DNA, 15 bp, Homo sapiens
tatgagaaaacatta

SEQ ID NO: 1831214 - DNA, 15 bp, Homo sapiens
atgagaaaacattaa

SEQ ID NO: 1831215 - DNA, 15 bp, Homo sapiens
tgagaaaacattaaa

SEQ ID NO: 1831216 - DNA, 15 bp, Homo sapiens
gagaaaacattaaaa

SEQ ID NO: 1831217 - DNA, 15 bp, Homo sapiens
agaaaacattaaaaa

SEQ ID NO: 1831218 - DNA, 15 bp, Homo sapiens
gaaaacattaaaaat

SEQ ID NO: 1831219 - DNA, 15 bp, Homo sapiens
aaaacattaaaaatg

SEQ ID NO: 1831220 - DNA, 15 bp, Homo sapiens
aaacattaaaaatga

SEQ ID NO: 1831221 - DNA, 15 bp, Homo sapiens
aacattaaaaatgaa

SEQ ID NO: 1831222 - DNA, 15 bp, Homo sapiens
acattaaaaatgaag

SEQ ID NO: 1831223 - DNA, 15 bp, Homo sapiens
cattaaaaatgaagc

SEQ ID NO: 1831224 - DNA, 15 bp, Homo sapiens
attaaaaatgaagcc

SEQ ID NO: 1831225 - DNA, 15 bp, Homo sapiens
ttaaaaatgaagcca

SEQ ID NO: 1831226 - DNA, 15 bp, Homo sapiens
taaaaatgaagccat

SEQ ID NO: 1831227 - DNA, 15 bp, Homo sapiens
aaaaatgaagccatg

SEQ ID NO: 1831228 - DNA, 15 bp, Homo sapiens
aaaatgaagccatga

SEQ ID NO: 1831229 - DNA, 15 bp, Homo sapiens
aaatgaagccatgaa

SEQ ID NO: 1831230 - DNA, 15 bp, Homo sapiens
aatgaagccatgaaa

SEQ ID NO: 1831231 - DNA, 15 bp, Homo sapiens
atgaagccatgaaaa

SEQ ID NO: 1831232 - DNA, 15 bp, Homo sapiens
tgaagccatgaaaag

SEQ ID NO: 1831233 - DNA, 15 bp, Homo sapiens
gaagccatgaaaagg

SEQ ID NO: 1831234 - DNA, 15 bp, Homo sapiens
aagccatgaaaagga

SEQ ID NO: 1831235 - DNA, 15 bp, Homo sapiens
agccatgaaaaggaa

SEQ ID NO: 1831236 - DNA, 15 bp, Homo sapiens
gccatgaaaaggaaa

SEQ ID NO: 1831237 - DNA, 15 bp, Homo sapiens
ccatgaaaaggaaat

SEQ ID NO: 1831238 - DNA, 15 bp, Homo sapiens
catgaaaaggaaata

SEQ ID NO: 1831239 - DNA, 15 bp, Homo sapiens
atgaaaaggaaatat

SEQ ID NO: 1831240 - DNA, 15 bp, Homo sapiens
tgaaaaggaaatatt

SEQ ID NO: 1831241 - DNA, 15 bp, Homo sapiens
gaaaaggaaatattg

SEQ ID NO: 1831242 - DNA, 15 bp, Homo sapiens
aaaaggaaatattgg

SEQ ID NO: 1831243 - DNA, 15 bp, Homo sapiens
aaaggaaatattggt

SEQ ID NO: 1831244 - DNA, 15 bp, Homo sapiens
aaggaaatattggtg

SEQ ID NO: 1831245 - DNA, 15 bp, Homo sapiens
aggaaatattggtga

SEQ ID NO: 1831246 - DNA, 15 bp, Homo sapiens
ggaaatattggtgaa

SEQ ID NO: 1831247 - DNA, 15 bp, Homo sapiens
gaaatattggtgaaa

SEQ ID NO: 1831248 - DNA, 15 bp, Homo sapiens
aaatattggtgaaat

SEQ ID NO: 1831249 - DNA, 15 bp, Homo sapiens
aatattggtgaaatt

SEQ ID NO: 1831250 - DNA, 15 bp, Homo sapiens
atattggtgaaattt

SEQ ID NO: 1831251 - DNA, 15 bp, Homo sapiens
tattggtgaaattta

SEQ ID NO: 1831252 - DNA, 15 bp, Homo sapiens
attggtgaaatttag

SEQ ID NO: 1831253 - DNA, 15 bp, Homo sapiens
ttggtgaaatttaga

SEQ ID NO: 1831254 - DNA, 15 bp, Homo sapiens
tggtgaaatttagat

SEQ ID NO: 1831255 - DNA, 15 bp, Homo sapiens
ggtgaaatttagata

SEQ ID NO: 1831256 - DNA, 15 bp, Homo sapiens
gtgaaatttagatac

SEQ ID NO: 1831257 - DNA, 15 bp, Homo sapiens
tgaaatttagatact

SEQ ID NO: 1831258 - DNA, 15 bp, Homo sapiens
gaaatttagatactt

SEQ ID NO: 1831259 - DNA, 15 bp, Homo sapiens
aaatttagatacttc

SEQ ID NO: 1831260 - DNA, 15 bp, Homo sapiens
aatttagatacttca

SEQ ID NO: 1831261 - DNA, 15 bp, Homo sapiens
atttagatacttcag

SEQ ID NO: 1831262 - DNA, 15 bp, Homo sapiens
tttagatacttcaga

SEQ ID NO: 1831263 - DNA, 15 bp, Homo sapiens
ttagatacttcagaa

SEQ ID NO: 1831264 - DNA, 15 bp, Homo sapiens
tagatacttcagaag

SEQ ID NO: 1831265 - DNA, 15 bp, Homo sapiens
agatacttcagaagg

SEQ ID NO: 1831266 - DNA, 15 bp, Homo sapiens
gatacttcagaagga

SEQ ID NO: 1831267 - DNA, 15 bp, Homo sapiens
atacttcagaaggaa

SEQ ID NO: 1831268 - DNA, 15 bp, Homo sapiens
tacttcagaaggaaa

SEQ ID NO: 1831269 - DNA, 15 bp, Homo sapiens
acttcagaaggaaag

SEQ ID NO: 1831270 - DNA, 15 bp, Homo sapiens
cttcagaaggaaaga

SEQ ID NO: 1831271 - DNA, 15 bp, Homo sapiens
ttcagaaggaaagag

SEQ ID NO: 1831272 - DNA, 15 bp, Homo sapiens
tcagaaggaaagaga

SEQ ID NO: 1831273 - DNA, 15 bp, Homo sapiens
cagaaggaaagagag

SEQ ID NO: 1831274 - DNA, 15 bp, Homo sapiens
agaaggaaagagaga

SEQ ID NO: 1831275 - DNA, 15 bp, Homo sapiens
gaaggaaagagagac

SEQ ID NO: 1831276 - DNA, 15 bp, Homo sapiens
aaggaaagagagact

SEQ ID NO: 1831277 - DNA, 15 bp, Homo sapiens
aggaaagagagactt

SEQ ID NO: 1831278 - DNA, 15 bp, Homo sapiens
ggaaagagagacttt

SEQ ID NO: 1831279 - DNA, 15 bp, Homo sapiens
gaaagagagactttc

SEQ ID NO: 1831280 - DNA, 15 bp, Homo sapiens
aaagagagactttct

SEQ ID NO: 1831281 - DNA, 15 bp, Homo sapiens
aagagagactttctt

SEQ ID NO: 1831282 - DNA, 15 bp, Homo sapiens
agagagactttcttt

SEQ ID NO: 1831283 - DNA, 15 bp, Homo sapiens
gagagactttctttt

SEQ ID NO: 1831284 - DNA, 15 bp, Homo sapiens
agagactttcttttt

SEQ ID NO: 1831285 - DNA, 15 bp, Homo sapiens
gagactttctttttt

SEQ ID NO: 1831286 - DNA, 15 bp, Homo sapiens
agactttcttttttt

SEQ ID NO: 1831287 - DNA, 15 bp, Homo sapiens
gactttctttttttt

SEQ ID NO: 1831288 - DNA, 15 bp, Homo sapiens
cttttttttttggaa

SEQ ID NO: 1831289 - DNA, 15 bp, Homo sapiens
ttttttttttggaaa

SEQ ID NO: 1831290 - DNA, 15 bp, Homo sapiens
tttttttttggaaag

SEQ ID NO: 1831291 - DNA, 15 bp, Homo sapiens
ttttttttggaaaga

SEQ ID NO: 1831292 - DNA, 15 bp, Homo sapiens
tttttttggaaagaa

SEQ ID NO: 1831293 - DNA, 15 bp, Homo sapiens
ttttttggaaagaat

SEQ ID NO: 1831294 - DNA, 15 bp, Homo sapiens
tttttggaaagaatt

SEQ ID NO: 1831295 - DNA, 15 bp, Homo sapiens
ttttggaaagaattt

SEQ ID NO: 1831296 - DNA, 15 bp, Homo sapiens
tttggaaagaatttc

SEQ ID NO: 1831297 - DNA, 15 bp, Homo sapiens
ttggaaagaatttct

SEQ ID NO: 1831298 - DNA, 15 bp, Homo sapiens
tggaaagaatttcta

SEQ ID NO: 1831299 - DNA, 15 bp, Homo sapiens
ggaaagaatttctat

SEQ ID NO: 1831300 - DNA, 15 bp, Homo sapiens
gaaagaatttctata

SEQ ID NO: 1831301 - DNA, 15 bp, Homo sapiens
aaagaatttctatac

SEQ ID NO: 1831302 - DNA, 15 bp, Homo sapiens
aagaatttctatacc

SEQ ID NO: 1831303 - DNA, 15 bp, Homo sapiens
agaatttctatacca

SEQ ID NO: 1831304 - DNA, 15 bp, Homo sapiens
gaatttctataccat

SEQ ID NO: 1831305 - DNA, 15 bp, Homo sapiens
aatttctataccatc

SEQ ID NO: 1831306 - DNA, 15 bp, Homo sapiens
atttctataccatct

SEQ ID NO: 1831307 - DNA, 15 bp, Homo sapiens
tttctataccatcta

SEQ ID NO: 1831308 - DNA, 15 bp, Homo sapiens
ttctataccatctat

SEQ ID NO: 1831309 - DNA, 15 bp, Homo sapiens
tctataccatctatt

SEQ ID NO: 1831310 - DNA, 15 bp, Homo sapiens
ctataccatctatta

SEQ ID NO: 1831311 - DNA, 15 bp, Homo sapiens
tataccatctattat

SEQ ID NO: 1831312 - DNA, 15 bp, Homo sapiens
ataccatctattata

SEQ ID NO: 1831313 - DNA, 15 bp, Homo sapiens
taccatctattatat

SEQ ID NO: 1831314 - DNA, 15 bp, Homo sapiens
accatctattatatc

SEQ ID NO: 1831315 - DNA, 15 bp, Homo sapiens
ccatctattatatca

SEQ ID NO: 1831316 - DNA, 15 bp, Homo sapiens
catctattatatcat

SEQ ID NO: 1831317 - DNA, 15 bp, Homo sapiens
atctattatatcatt

SEQ ID NO: 1831318 - DNA, 15 bp, Homo sapiens
tctattatatcattg

SEQ ID NO: 1831319 - DNA, 15 bp, Homo sapiens
ctattatatcattga

SEQ ID NO: 1831320 - DNA, 15 bp, Homo sapiens
tattatatcattgat

SEQ ID NO: 1831321 - DNA, 15 bp, Homo sapiens
attatatcattgatt

SEQ ID NO: 1831322 - DNA, 15 bp, Homo sapiens
ttatatcattgattg

SEQ ID NO: 1831323 - DNA, 15 bp, Homo sapiens
tatatcattgattgt

SEQ ID NO: 1831324 - DNA, 15 bp, Homo sapiens
atatcattgattgta

SEQ ID NO: 1831325 - DNA, 15 bp, Homo sapiens
tatcattgattgtat

SEQ ID NO: 1831326 - DNA, 15 bp, Homo sapiens
atcattgattgtatg

SEQ ID NO: 1831327 - DNA, 15 bp, Homo sapiens
tcattgattgtatgt

SEQ ID NO: 1831328 - DNA, 15 bp, Homo sapiens
cattgattgtatgtg

SEQ ID NO: 1831329 - DNA, 15 bp, Homo sapiens
attgattgtatgtga

SEQ ID NO: 1831330 - DNA, 15 bp, Homo sapiens
ttgattgtatgtgat

SEQ ID NO: 1831331 - DNA, 15 bp, Homo sapiens
tgattgtatgtgatt

SEQ ID NO: 1831332 - DNA, 15 bp, Homo sapiens
gattgtatgtgatta

SEQ ID NO: 1831333 - DNA, 15 bp, Homo sapiens
attgtatgtgattat

SEQ ID NO: 1831334 - DNA, 15 bp, Homo sapiens
ttgtatgtgattatt

SEQ ID NO: 1831335 - DNA, 15 bp, Homo sapiens
tgtatgtgattattg

SEQ ID NO: 1831336 - DNA, 15 bp, Homo sapiens
gtatgtgattattga

SEQ ID NO: 1831337 - DNA, 15 bp, Homo sapiens
tatgtgattattgag

SEQ ID NO: 1831338 - DNA, 15 bp, Homo sapiens
atgtgattattgaga

SEQ ID NO: 1831339 - DNA, 15 bp, Homo sapiens
tgtgattattgagaa

SEQ ID NO: 1831340 - DNA, 15 bp, Homo sapiens
gtgattattgagaat

SEQ ID NO: 1831341 - DNA, 15 bp, Homo sapiens
tgattattgagaatt

SEQ ID NO: 1831342 - DNA, 15 bp, Homo sapiens
gattattgagaatta

SEQ ID NO: 1831343 - DNA, 15 bp, Homo sapiens
attattgagaattaa

SEQ ID NO: 1831344 - DNA, 15 bp, Homo sapiens
ttattgagaattaac

SEQ ID NO: 1831345 - DNA, 15 bp, Homo sapiens
tattgagaattaact

SEQ ID NO: 1831346 - DNA, 15 bp, Homo sapiens
attgagaattaactt

SEQ ID NO: 1831347 - DNA, 15 bp, Homo sapiens
ttgagaattaacttg

SEQ ID NO: 1831348 - DNA, 15 bp, Homo sapiens
tgagaattaacttgt

SEQ ID NO: 1831349 - DNA, 15 bp, Homo sapiens
gagaattaacttgtt

SEQ ID NO: 1831350 - DNA, 15 bp, Homo sapiens
agaattaacttgttt

SEQ ID NO: 1831351 - DNA, 15 bp, Homo sapiens
gaattaacttgtttt

SEQ ID NO: 1831352 - DNA, 15 bp, Homo sapiens
aattaacttgttttt

SEQ ID NO: 1831353 - DNA, 15 bp, Homo sapiens
attaacttgtttttt

SEQ ID NO: 1831354 - DNA, 15 bp, Homo sapiens
ttaacttgttttttt

SEQ ID NO: 1831355 - DNA, 15 bp, Homo sapiens
taacttgtttttttt

SEQ ID NO: 1831356 - DNA, 15 bp, Homo sapiens
aacttgttttttttt

SEQ ID NO: 1831357 - DNA, 15 bp, Homo sapiens
acttgtttttttttt

SEQ ID NO: 1831358 - DNA, 15 bp, Homo sapiens
ttttgagacagtttt

SEQ ID NO: 1831359 - DNA, 15 bp, Homo sapiens
tttgagacagttttg

SEQ ID NO: 1831360 - DNA, 15 bp, Homo sapiens
ttgagacagttttgc

SEQ ID NO: 1831361 - DNA, 15 bp, Homo sapiens
tgagacagttttgct

SEQ ID NO: 1831362 - DNA, 15 bp, Homo sapiens
gacagttttgctctt

SEQ ID NO: 1831363 - DNA, 15 bp, Homo sapiens
acagttttgctcttg

SEQ ID NO: 1831364 - DNA, 15 bp, Homo sapiens
cagttttgctcttgt

SEQ ID NO: 1831365 - DNA, 15 bp, Homo sapiens
gttttgctcttgtca

SEQ ID NO: 1831366 - DNA, 15 bp, Homo sapiens
ttttgctcttgtcac

SEQ ID NO: 1831367 - DNA, 15 bp, Homo sapiens
tttgctcttgtcacc

SEQ ID NO: 1831368 - DNA, 15 bp, Homo sapiens
tggagtgccgtggtg

SEQ ID NO: 1831369 - DNA, 15 bp, Homo sapiens
ggagtgccgtggtga

SEQ ID NO: 1831370 - DNA, 15 bp, Homo sapiens
gagtgccgtggtgag

SEQ ID NO: 1831371 - DNA, 15 bp, Homo sapiens
agtgccgtggtgaga

SEQ ID NO: 1831372 - DNA, 15 bp, Homo sapiens
gtgccgtggtgagat

SEQ ID NO: 1831373 - DNA, 15 bp, Homo sapiens
tgccgtggtgagatc

SEQ ID NO: 1831374 - DNA, 15 bp, Homo sapiens
gccgtggtgagatct

SEQ ID NO: 1831375 - DNA, 15 bp, Homo sapiens
ccgtggtgagatctc

SEQ ID NO: 1831376 - DNA, 15 bp, Homo sapiens
cgtggtgagatctcg

SEQ ID NO: 1831377 - DNA, 15 bp, Homo sapiens
gtggtgagatctcgg

SEQ ID NO: 1831378 - DNA, 15 bp, Homo sapiens
tggtgagatctcggc

SEQ ID NO: 1831379 - DNA, 15 bp, Homo sapiens
ggtgagatctcggct

SEQ ID NO: 1831380 - DNA, 15 bp, Homo sapiens
gtgagatctcggctc

SEQ ID NO: 1831381 - DNA, 15 bp, Homo sapiens
tgagatctcggctca

SEQ ID NO: 1831382 - DNA, 15 bp, Homo sapiens
gagatctcggctcac

SEQ ID NO: 1831383 - DNA, 15 bp, Homo sapiens
agatctcggctcact

SEQ ID NO: 1831384 - DNA, 15 bp, Homo sapiens
gatctcggctcacta

SEQ ID NO: 1831385 - DNA, 15 bp, Homo sapiens
gctcactacaacctt

SEQ ID NO: 1831386 - DNA, 15 bp, Homo sapiens
ctcactacaaccttc

SEQ ID NO: 1831387 - DNA, 15 bp, Homo sapiens
tcactacaaccttca

SEQ ID NO: 1831388 - DNA, 15 bp, Homo sapiens
cactacaaccttcac

SEQ ID NO: 1831389 - DNA, 15 bp, Homo sapiens
actacaaccttcacc

SEQ ID NO: 1831390 - DNA, 15 bp, Homo sapiens
ctacaaccttcacct

SEQ ID NO: 1831391 - DNA, 15 bp, Homo sapiens
tacaaccttcacctc

SEQ ID NO: 1831392 - DNA, 15 bp, Homo sapiens
acaaccttcacctcc

SEQ ID NO: 1831393 - DNA, 15 bp, Homo sapiens
aaccttcacctcccg

SEQ ID NO: 1831394 - DNA, 15 bp, Homo sapiens
accttcacctcccga

SEQ ID NO: 1831395 - DNA, 15 bp, Homo sapiens
ccttcacctcccgag

SEQ ID NO: 1831396 - DNA, 15 bp, Homo sapiens
cttcacctcccgagt

SEQ ID NO: 1831397 - DNA, 15 bp, Homo sapiens
ttcacctcccgagtt

SEQ ID NO: 1831398 - DNA, 15 bp, Homo sapiens
tcacctcccgagttc

SEQ ID NO: 1831399 - DNA, 15 bp, Homo sapiens
cctcccgagttcaag

SEQ ID NO: 1831400 - DNA, 15 bp, Homo sapiens
ctcccgagttcaagc

SEQ ID NO: 1831401 - DNA, 15 bp, Homo sapiens
tcccgagttcaagca

SEQ ID NO: 1831402 - DNA, 15 bp, Homo sapiens
cccgagttcaagcaa

SEQ ID NO: 1831403 - DNA, 15 bp, Homo sapiens
ccgagttcaagcaat

SEQ ID NO: 1831404 - DNA, 15 bp, Homo sapiens
cgagttcaagcaatt

SEQ ID NO: 1831405 - DNA, 15 bp, Homo sapiens
ttctgctgcctcagt

SEQ ID NO: 1831406 - DNA, 15 bp, Homo sapiens
tctgctgcctcagtc

SEQ ID NO: 1831407 - DNA, 15 bp, Homo sapiens
ctgctgcctcagtct

SEQ ID NO: 1831408 - DNA, 15 bp, Homo sapiens
tgctgcctcagtcta

SEQ ID NO: 1831409 - DNA, 15 bp, Homo sapiens
gctgcctcagtctac

SEQ ID NO: 1831410 - DNA, 15 bp, Homo sapiens
ctgcctcagtctact

SEQ ID NO: 1831411 - DNA, 15 bp, Homo sapiens
tgcctcagtctactg

SEQ ID NO: 1831412 - DNA, 15 bp, Homo sapiens
gcctcagtctactga

SEQ ID NO: 1831413 - DNA, 15 bp, Homo sapiens
cctcagtctactgag

SEQ ID NO: 1831414 - DNA, 15 bp, Homo sapiens
ctcagtctactgagt

SEQ ID NO: 1831415 - DNA, 15 bp, Homo sapiens
tcagtctactgagta

SEQ ID NO: 1831416 - DNA, 15 bp, Homo sapiens
cagtctactgagtag

SEQ ID NO: 1831417 - DNA, 15 bp, Homo sapiens
agtctactgagtagc

SEQ ID NO: 1831418 - DNA, 15 bp, Homo sapiens
gtctactgagtagct

SEQ ID NO: 1831419 - DNA, 15 bp, Homo sapiens
tctactgagtagctg

SEQ ID NO: 1831420 - DNA, 15 bp, Homo sapiens
ctactgagtagctgg

SEQ ID NO: 1831421 - DNA, 15 bp, Homo sapiens
tactgagtagctggg

SEQ ID NO: 1831422 - DNA, 15 bp, Homo sapiens
actgagtagctggga

SEQ ID NO: 1831423 - DNA, 15 bp, Homo sapiens
attacaggtgcccat

SEQ ID NO: 1831424 - DNA, 15 bp, Homo sapiens
ttacaggtgcccatc

SEQ ID NO: 1831425 - DNA, 15 bp, Homo sapiens
tacaggtgcccatca

SEQ ID NO: 1831426 - DNA, 15 bp, Homo sapiens
acaggtgcccatcac

SEQ ID NO: 1831427 - DNA, 15 bp, Homo sapiens
caggtgcccatcacc

SEQ ID NO: 1831428 - DNA, 15 bp, Homo sapiens
aggtgcccatcacca

SEQ ID NO: 1831429 - DNA, 15 bp, Homo sapiens
ggtgcccatcaccac

SEQ ID NO: 1831430 - DNA, 15 bp, Homo sapiens
gtgcccatcaccacg

SEQ ID NO: 1831431 - DNA, 15 bp, Homo sapiens
tgcccatcaccacgc

SEQ ID NO: 1831432 - DNA, 15 bp, Homo sapiens
gcccatcaccacgcc

SEQ ID NO: 1831433 - DNA, 15 bp, Homo sapiens
cccatcaccacgccc

SEQ ID NO: 1831434 - DNA, 15 bp, Homo sapiens
ccatcaccacgccca

SEQ ID NO: 1831435 - DNA, 15 bp, Homo sapiens
catcaccacgcccag

SEQ ID NO: 1831436 - DNA, 15 bp, Homo sapiens
atcaccacgcccagc

SEQ ID NO: 1831437 - DNA, 15 bp, Homo sapiens
tcaccacgcccagct

SEQ ID NO: 1831438 - DNA, 15 bp, Homo sapiens
cccagctaatttttc

SEQ ID NO: 1831439 - DNA, 15 bp, Homo sapiens
ccagctaatttttct

SEQ ID NO: 1831440 - DNA, 15 bp, Homo sapiens
cagctaatttttcta

SEQ ID NO: 1831441 - DNA, 15 bp, Homo sapiens
agctaatttttctaa

SEQ ID NO: 1831442 - DNA, 15 bp, Homo sapiens
gctaatttttctaat

SEQ ID NO: 1831443 - DNA, 15 bp, Homo sapiens
ctaatttttctaatt

SEQ ID NO: 1831444 - DNA, 15 bp, Homo sapiens
taatttttctaattt

SEQ ID NO: 1831445 - DNA, 15 bp, Homo sapiens
aatttttctaatttt

SEQ ID NO: 1831446 - DNA, 15 bp, Homo sapiens
atttttctaatttta

SEQ ID NO: 1831447 - DNA, 15 bp, Homo sapiens
tttttctaattttag

SEQ ID NO: 1831448 - DNA, 15 bp, Homo sapiens
ttttctaattttagt

SEQ ID NO: 1831449 - DNA, 15 bp, Homo sapiens
tttctaattttagta

SEQ ID NO: 1831450 - DNA, 15 bp, Homo sapiens
ttctaattttagtag

SEQ ID NO: 1831451 - DNA, 15 bp, Homo sapiens
tctaattttagtaga

SEQ ID NO: 1831452 - DNA, 15 bp, Homo sapiens
ctaattttagtagag

SEQ ID NO: 1831453 - DNA, 15 bp, Homo sapiens
aattttagtagagac

SEQ ID NO: 1831454 - DNA, 15 bp, Homo sapiens
gacgggatttcacca

SEQ ID NO: 1831455 - DNA, 15 bp, Homo sapiens
acgggatttcaccat

SEQ ID NO: 1831456 - DNA, 15 bp, Homo sapiens
cgggatttcaccatg

SEQ ID NO: 1831457 - DNA, 15 bp, Homo sapiens
tgatccgcccgccta

SEQ ID NO: 1831458 - DNA, 15 bp, Homo sapiens
gatccgcccgcctag

SEQ ID NO: 1831459 - DNA, 15 bp, Homo sapiens
atccgcccgcctagg

SEQ ID NO: 1831460 - DNA, 15 bp, Homo sapiens
tccgcccgcctaggc

SEQ ID NO: 1831461 - DNA, 15 bp, Homo sapiens
ccgcccgcctaggcc

SEQ ID NO: 1831462 - DNA, 15 bp, Homo sapiens
cgcccgcctaggcca

SEQ ID NO: 1831463 - DNA, 15 bp, Homo sapiens
gcccgcctaggccaa

SEQ ID NO: 1831464 - DNA, 15 bp, Homo sapiens
cccgcctaggccaaa

SEQ ID NO: 1831465 - DNA, 15 bp, Homo sapiens
ccgcctaggccaaag

SEQ ID NO: 1831466 - DNA, 15 bp, Homo sapiens
cgcctaggccaaagt

SEQ ID NO: 1831467 - DNA, 15 bp, Homo sapiens
gcctaggccaaagtg

SEQ ID NO: 1831468 - DNA, 15 bp, Homo sapiens
cctaggccaaagtgc

SEQ ID NO: 1831469 - DNA, 15 bp, Homo sapiens
ctaggccaaagtgct

SEQ ID NO: 1831470 - DNA, 15 bp, Homo sapiens
taggccaaagtgctg

SEQ ID NO: 1831471 - DNA, 15 bp, Homo sapiens
aggccaaagtgctgg

SEQ ID NO: 1831472 - DNA, 15 bp, Homo sapiens
ggccaaagtgctggg

SEQ ID NO: 1831473 - DNA, 15 bp, Homo sapiens
ttacaggcgtgagtc

SEQ ID NO: 1831474 - DNA, 15 bp, Homo sapiens
tacaggcgtgagtct

SEQ ID NO: 1831475 - DNA, 15 bp, Homo sapiens
acaggcgtgagtctc

SEQ ID NO: 1831476 - DNA, 15 bp, Homo sapiens
caggcgtgagtctcc

SEQ ID NO: 1831477 - DNA, 15 bp, Homo sapiens
aggcgtgagtctccc

SEQ ID NO: 1831478 - DNA, 15 bp, Homo sapiens
ggcgtgagtctccca

SEQ ID NO: 1831479 - DNA, 15 bp, Homo sapiens
gcgtgagtctcccac

SEQ ID NO: 1831480 - DNA, 15 bp, Homo sapiens
cgtgagtctcccacg

SEQ ID NO: 1831481 - DNA, 15 bp, Homo sapiens
gtgagtctcccacgc

SEQ ID NO: 1831482 - DNA, 15 bp, Homo sapiens
tgagtctcccacgcc

SEQ ID NO: 1831483 - DNA, 15 bp, Homo sapiens
gagtctcccacgccc

SEQ ID NO: 1831484 - DNA, 15 bp, Homo sapiens
agtctcccacgccca

SEQ ID NO: 1831485 - DNA, 15 bp, Homo sapiens
gtctcccacgcccag

SEQ ID NO: 1831486 - DNA, 15 bp, Homo sapiens
tctcccacgcccagc

SEQ ID NO: 1831487 - DNA, 15 bp, Homo sapiens
ctcccacgcccagcc

SEQ ID NO: 1831488 - DNA, 15 bp, Homo sapiens
tcccacgcccagccc

SEQ ID NO: 1831489 - DNA, 15 bp, Homo sapiens
cccacgcccagccct

SEQ ID NO: 1831490 - DNA, 15 bp, Homo sapiens
ccacgcccagccctt

SEQ ID NO: 1831491 - DNA, 15 bp, Homo sapiens
cacgcccagccctta

SEQ ID NO: 1831492 - DNA, 15 bp, Homo sapiens
acgcccagcccttaa

SEQ ID NO: 1831493 - DNA, 15 bp, Homo sapiens
cgcccagcccttaaa

SEQ ID NO: 1831494 - DNA, 15 bp, Homo sapiens
gcccagcccttaaat

SEQ ID NO: 1831495 - DNA, 15 bp, Homo sapiens
cccagcccttaaatt

SEQ ID NO: 1831496 - DNA, 15 bp, Homo sapiens
ccagcccttaaattt

SEQ ID NO: 1831497 - DNA, 15 bp, Homo sapiens
cagcccttaaatttc

SEQ ID NO: 1831498 - DNA, 15 bp, Homo sapiens
agcccttaaatttca

SEQ ID NO: 1831499 - DNA, 15 bp, Homo sapiens
gcccttaaatttcat

SEQ ID NO: 1831500 - DNA, 15 bp, Homo sapiens
cccttaaatttcatt

SEQ ID NO: 1831501 - DNA, 15 bp, Homo sapiens
ccttaaatttcattt

SEQ ID NO: 1831502 - DNA, 15 bp, Homo sapiens
cttaaatttcattta

SEQ ID NO: 1831503 - DNA, 15 bp, Homo sapiens
ttaaatttcatttag

SEQ ID NO: 1831504 - DNA, 15 bp, Homo sapiens
taaatttcatttaga

SEQ ID NO: 1831505 - DNA, 15 bp, Homo sapiens
aaatttcatttagac

SEQ ID NO: 1831506 - DNA, 15 bp, Homo sapiens
aatttcatttagact

SEQ ID NO: 1831507 - DNA, 15 bp, Homo sapiens
atttcatttagactg

SEQ ID NO: 1831508 - DNA, 15 bp, Homo sapiens
tttcatttagactgg

SEQ ID NO: 1831509 - DNA, 15 bp, Homo sapiens
ttcatttagactgga

SEQ ID NO: 1831510 - DNA, 15 bp, Homo sapiens
tcatttagactggaa

SEQ ID NO: 1831511 - DNA, 15 bp, Homo sapiens
catttagactggaaa

SEQ ID NO: 1831512 - DNA, 15 bp, Homo sapiens
atttagactggaaat

SEQ ID NO: 1831513 - DNA, 15 bp, Homo sapiens
tttagactggaaatt

SEQ ID NO: 1831514 - DNA, 15 bp, Homo sapiens
ttagactggaaattt

SEQ ID NO: 1831515 - DNA, 15 bp, Homo sapiens
tagactggaaatttc

SEQ ID NO: 1831516 - DNA, 15 bp, Homo sapiens
agactggaaatttca

SEQ ID NO: 1831517 - DNA, 15 bp, Homo sapiens
gactggaaatttcaa

SEQ ID NO: 1831518 - DNA, 15 bp, Homo sapiens
actggaaatttcaag

SEQ ID NO: 1831519 - DNA, 15 bp, Homo sapiens
ctggaaatttcaagt

SEQ ID NO: 1831520 - DNA, 15 bp, Homo sapiens
tggaaatttcaagta

SEQ ID NO: 1831521 - DNA, 15 bp, Homo sapiens
ggaaatttcaagtaa

SEQ ID NO: 1831522 - DNA, 15 bp, Homo sapiens
gaaatttcaagtaat

SEQ ID NO: 1831523 - DNA, 15 bp, Homo sapiens
aaatttcaagtaatg

SEQ ID NO: 1831524 - DNA, 15 bp, Homo sapiens
aatttcaagtaatgg

SEQ ID NO: 1831525 - DNA, 15 bp, Homo sapiens
atttcaagtaatgga

SEQ ID NO: 1831526 - DNA, 15 bp, Homo sapiens
tttcaagtaatggag

SEQ ID NO: 1831527 - DNA, 15 bp, Homo sapiens
ttcaagtaatggaga

SEQ ID NO: 1831528 - DNA, 15 bp, Homo sapiens
tcaagtaatggagag

SEQ ID NO: 1831529 - DNA, 15 bp, Homo sapiens
caagtaatggagagg

SEQ ID NO: 1831530 - DNA, 15 bp, Homo sapiens
aagtaatggagaggt

SEQ ID NO: 1831531 - DNA, 15 bp, Homo sapiens
agtaatggagaggtg

SEQ ID NO: 1831532 - DNA, 15 bp, Homo sapiens
gtaatggagaggtgt

SEQ ID NO: 1831533 - DNA, 15 bp, Homo sapiens
taatggagaggtgtg

SEQ ID NO: 1831534 - DNA, 15 bp, Homo sapiens
aatggagaggtgtgt

SEQ ID NO: 1831535 - DNA, 15 bp, Homo sapiens
atggagaggtgtgtt

SEQ ID NO: 1831536 - DNA, 15 bp, Homo sapiens
tggagaggtgtgtta

SEQ ID NO: 1831537 - DNA, 15 bp, Homo sapiens
ggagaggtgtgttaa

SEQ ID NO: 1831538 - DNA, 15 bp, Homo sapiens
gagaggtgtgttaag

SEQ ID NO: 1831539 - DNA, 15 bp, Homo sapiens
agaggtgtgttaagg

SEQ ID NO: 1831540 - DNA, 15 bp, Homo sapiens
gaggtgtgttaagga

SEQ ID NO: 1831541 - DNA, 15 bp, Homo sapiens
aggtgtgttaaggaa

SEQ ID NO: 1831542 - DNA, 15 bp, Homo sapiens
ggtgtgttaaggaag

SEQ ID NO: 1831543 - DNA, 15 bp, Homo sapiens
gtgtgttaaggaagt

SEQ ID NO: 1831544 - DNA, 15 bp, Homo sapiens
tgtgttaaggaagtt

SEQ ID NO: 1831545 - DNA, 15 bp, Homo sapiens
gtgttaaggaagtta

SEQ ID NO: 1831546 - DNA, 15 bp, Homo sapiens
tgttaaggaagttat

SEQ ID NO: 1831547 - DNA, 15 bp, Homo sapiens
gttaaggaagttatt

SEQ ID NO: 1831548 - DNA, 15 bp, Homo sapiens
ttaaggaagttattg

SEQ ID NO: 1831549 - DNA, 15 bp, Homo sapiens
taaggaagttattgc

SEQ ID NO: 1831550 - DNA, 15 bp, Homo sapiens
aaggaagttattgct

SEQ ID NO: 1831551 - DNA, 15 bp, Homo sapiens
aggaagttattgctc

SEQ ID NO: 1831552 - DNA, 15 bp, Homo sapiens
ggaagttattgctct

SEQ ID NO: 1831553 - DNA, 15 bp, Homo sapiens
gaagttattgctctg

SEQ ID NO: 1831554 - DNA, 15 bp, Homo sapiens
aagttattgctctgt

SEQ ID NO: 1831555 - DNA, 15 bp, Homo sapiens
agttattgctctgtt

SEQ ID NO: 1831556 - DNA, 15 bp, Homo sapiens
gttattgctctgtta

SEQ ID NO: 1831557 - DNA, 15 bp, Homo sapiens
ttattgctctgttag

SEQ ID NO: 1831558 - DNA, 15 bp, Homo sapiens
tattgctctgttaga

SEQ ID NO: 1831559 - DNA, 15 bp, Homo sapiens
attgctctgttagag

SEQ ID NO: 1831560 - DNA, 15 bp, Homo sapiens
ttgctctgttagagc

SEQ ID NO: 1831561 - DNA, 15 bp, Homo sapiens
tgctctgttagagca

SEQ ID NO: 1831562 - DNA, 15 bp, Homo sapiens
gctctgttagagcag

SEQ ID NO: 1831563 - DNA, 15 bp, Homo sapiens
ctctgttagagcagt

SEQ ID NO: 1831564 - DNA, 15 bp, Homo sapiens
tctgttagagcagtt

SEQ ID NO: 1831565 - DNA, 15 bp, Homo sapiens
ctgttagagcagttt

SEQ ID NO: 1831566 - DNA, 15 bp, Homo sapiens
tgttagagcagtttc

SEQ ID NO: 1831567 - DNA, 15 bp, Homo sapiens
gttagagcagtttct

SEQ ID NO: 1831568 - DNA, 15 bp, Homo sapiens
ttagagcagtttctt

SEQ ID NO: 1831569 - DNA, 15 bp, Homo sapiens
tagagcagtttctta

SEQ ID NO: 1831570 - DNA, 15 bp, Homo sapiens
agagcagtttcttaa

SEQ ID NO: 1831571 - DNA, 15 bp, Homo sapiens
gagcagtttcttaaa

SEQ ID NO: 1831572 - DNA, 15 bp, Homo sapiens
agcagtttcttaaat

SEQ ID NO: 1831573 - DNA, 15 bp, Homo sapiens
gcagtttcttaaatt

SEQ ID NO: 1831574 - DNA, 15 bp, Homo sapiens
cagtttcttaaattt

SEQ ID NO: 1831575 - DNA, 15 bp, Homo sapiens
agtttcttaaatttg

SEQ ID NO: 1831576 - DNA, 15 bp, Homo sapiens
gtttcttaaatttgg

SEQ ID NO: 1831577 - DNA, 15 bp, Homo sapiens
tttcttaaatttggc

SEQ ID NO: 1831578 - DNA, 15 bp, Homo sapiens
ttcttaaatttggca

SEQ ID NO: 1831579 - DNA, 15 bp, Homo sapiens
tcttaaatttggcac

SEQ ID NO: 1831580 - DNA, 15 bp, Homo sapiens
cttaaatttggcact

SEQ ID NO: 1831581 - DNA, 15 bp, Homo sapiens
ttaaatttggcacta

SEQ ID NO: 1831582 - DNA, 15 bp, Homo sapiens
taaatttggcactat

SEQ ID NO: 1831583 - DNA, 15 bp, Homo sapiens
aaatttggcactatt

SEQ ID NO: 1831584 - DNA, 15 bp, Homo sapiens
aatttggcactattg

SEQ ID NO: 1831585 - DNA, 15 bp, Homo sapiens
atttggcactattga

SEQ ID NO: 1831586 - DNA, 15 bp, Homo sapiens
tttggcactattgac

SEQ ID NO: 1831587 - DNA, 15 bp, Homo sapiens
ttggcactattgaca

SEQ ID NO: 1831588 - DNA, 15 bp, Homo sapiens
tggcactattgacat

SEQ ID NO: 1831589 - DNA, 15 bp, Homo sapiens
ggcactattgacatt

SEQ ID NO: 1831590 - DNA, 15 bp, Homo sapiens
gcactattgacattt

SEQ ID NO: 1831591 - DNA, 15 bp, Homo sapiens
cactattgacatttt

SEQ ID NO: 1831592 - DNA, 15 bp, Homo sapiens
actattgacattttg

SEQ ID NO: 1831593 - DNA, 15 bp, Homo sapiens
ctattgacattttgg

SEQ ID NO: 1831594 - DNA, 15 bp, Homo sapiens
tattgacattttggg

SEQ ID NO: 1831595 - DNA, 15 bp, Homo sapiens
attgacattttgggc

SEQ ID NO: 1831596 - DNA, 15 bp, Homo sapiens
ttgacattttgggct

SEQ ID NO: 1831597 - DNA, 15 bp, Homo sapiens
tgacattttgggctg

SEQ ID NO: 1831598 - DNA, 15 bp, Homo sapiens
gacattttgggctgg

SEQ ID NO: 1831599 - DNA, 15 bp, Homo sapiens
acattttgggctgga

SEQ ID NO: 1831600 - DNA, 15 bp, Homo sapiens
cattttgggctggat

SEQ ID NO: 1831601 - DNA, 15 bp, Homo sapiens
attttgggctggatt

SEQ ID NO: 1831602 - DNA, 15 bp, Homo sapiens
ttttgggctggattt

SEQ ID NO: 1831603 - DNA, 15 bp, Homo sapiens
tttgggctggatttt

SEQ ID NO: 1831604 - DNA, 15 bp, Homo sapiens
ttgggctggattttt

SEQ ID NO: 1831605 - DNA, 15 bp, Homo sapiens
tgggctggatttttc

SEQ ID NO: 1831606 - DNA, 15 bp, Homo sapiens
gggctggatttttct

SEQ ID NO: 1831607 - DNA, 15 bp, Homo sapiens
ggctggatttttctt

SEQ ID NO: 1831608 - DNA, 15 bp, Homo sapiens
gctggatttttcttt

SEQ ID NO: 1831609 - DNA, 15 bp, Homo sapiens
ctggatttttctttt

SEQ ID NO: 1831610 - DNA, 15 bp, Homo sapiens
tggatttttcttttt

SEQ ID NO: 1831611 - DNA, 15 bp, Homo sapiens
ggatttttctttttg

SEQ ID NO: 1831612 - DNA, 15 bp, Homo sapiens
gatttttctttttgt

SEQ ID NO: 1831613 - DNA, 15 bp, Homo sapiens
ttttctttttgtttc

SEQ ID NO: 1831614 - DNA, 15 bp, Homo sapiens
tttctttttgtttct

SEQ ID NO: 1831615 - DNA, 15 bp, Homo sapiens
ttctttttgtttctg

SEQ ID NO: 1831616 - DNA, 15 bp, Homo sapiens
tctttttgtttctga

SEQ ID NO: 1831617 - DNA, 15 bp, Homo sapiens
ctttttgtttctgag

SEQ ID NO: 1831618 - DNA, 15 bp, Homo sapiens
tttttgtttctgaga

SEQ ID NO: 1831619 - DNA, 15 bp, Homo sapiens
ttttgtttctgagat

SEQ ID NO: 1831620 - DNA, 15 bp, Homo sapiens
tttgtttctgagata

SEQ ID NO: 1831621 - DNA, 15 bp, Homo sapiens
ttgtttctgagatag

SEQ ID NO: 1831622 - DNA, 15 bp, Homo sapiens
tgtttctgagatagt

SEQ ID NO: 1831623 - DNA, 15 bp, Homo sapiens
gtttctgagatagtt

SEQ ID NO: 1831624 - DNA, 15 bp, Homo sapiens
tttctgagatagttt

SEQ ID NO: 1831625 - DNA, 15 bp, Homo sapiens
ttctgagatagtttc

SEQ ID NO: 1831626 - DNA, 15 bp, Homo sapiens
tctgagatagtttca

SEQ ID NO: 1831627 - DNA, 15 bp, Homo sapiens
ctgagatagtttcac

SEQ ID NO: 1831628 - DNA, 15 bp, Homo sapiens
tgagatagtttcact

SEQ ID NO: 1831629 - DNA, 15 bp, Homo sapiens
gagatagtttcactc

SEQ ID NO: 1831630 - DNA, 15 bp, Homo sapiens
agatagtttcactct

SEQ ID NO: 1831631 - DNA, 15 bp, Homo sapiens
gatagtttcactctg

SEQ ID NO: 1831632 - DNA, 15 bp, Homo sapiens
atagtttcactctgt

SEQ ID NO: 1831633 - DNA, 15 bp, Homo sapiens
tagtttcactctgtc

SEQ ID NO: 1831634 - DNA, 15 bp, Homo sapiens
agtttcactctgtcg

SEQ ID NO: 1831635 - DNA, 15 bp, Homo sapiens
gtttcactctgtcga

SEQ ID NO: 1831636 - DNA, 15 bp, Homo sapiens
tttcactctgtcgag

SEQ ID NO: 1831637 - DNA, 15 bp, Homo sapiens
ttcactctgtcgagc

SEQ ID NO: 1831638 - DNA, 15 bp, Homo sapiens
tcactctgtcgagcc

SEQ ID NO: 1831639 - DNA, 15 bp, Homo sapiens
cactctgtcgagcca

SEQ ID NO: 1831640 - DNA, 15 bp, Homo sapiens
actctgtcgagccat

SEQ ID NO: 1831641 - DNA, 15 bp, Homo sapiens
ctctgtcgagccatc

SEQ ID NO: 1831642 - DNA, 15 bp, Homo sapiens
tctgtcgagccatca

SEQ ID NO: 1831643 - DNA, 15 bp, Homo sapiens
ctgtcgagccatcac

SEQ ID NO: 1831644 - DNA, 15 bp, Homo sapiens
tgtcgagccatcaca

SEQ ID NO: 1831645 - DNA, 15 bp, Homo sapiens
gtcgagccatcacag

SEQ ID NO: 1831646 - DNA, 15 bp, Homo sapiens
tcgagccatcacagc

SEQ ID NO: 1831647 - DNA, 15 bp, Homo sapiens
cgagccatcacagct

SEQ ID NO: 1831648 - DNA, 15 bp, Homo sapiens
gagccatcacagctc

SEQ ID NO: 1831649 - DNA, 15 bp, Homo sapiens
agccatcacagctcg

SEQ ID NO: 1831650 - DNA, 15 bp, Homo sapiens
gccatcacagctcgt

SEQ ID NO: 1831651 - DNA, 15 bp, Homo sapiens
ccatcacagctcgtt

SEQ ID NO: 1831652 - DNA, 15 bp, Homo sapiens
catcacagctcgttg

SEQ ID NO: 1831653 - DNA, 15 bp, Homo sapiens
atcacagctcgttgc

SEQ ID NO: 1831654 - DNA, 15 bp, Homo sapiens
tcacagctcgttgca

SEQ ID NO: 1831655 - DNA, 15 bp, Homo sapiens
cacagctcgttgcag

SEQ ID NO: 1831656 - DNA, 15 bp, Homo sapiens
acagctcgttgcagc

SEQ ID NO: 1831657 - DNA, 15 bp, Homo sapiens
cagctcgttgcagcc

SEQ ID NO: 1831658 - DNA, 15 bp, Homo sapiens
agctcgttgcagcct

SEQ ID NO: 1831659 - DNA, 15 bp, Homo sapiens
gctcgttgcagcctt

SEQ ID NO: 1831660 - DNA, 15 bp, Homo sapiens
ctcgttgcagccttg

SEQ ID NO: 1831661 - DNA, 15 bp, Homo sapiens
tcgttgcagccttga

SEQ ID NO: 1831662 - DNA, 15 bp, Homo sapiens
cgttgcagccttgaa

SEQ ID NO: 1831663 - DNA, 15 bp, Homo sapiens
gttgcagccttgaac

SEQ ID NO: 1831664 - DNA, 15 bp, Homo sapiens
ttgcagccttgaact

SEQ ID NO: 1831665 - DNA, 15 bp, Homo sapiens
tgcagccttgaactc

SEQ ID NO: 1831666 - DNA, 15 bp, Homo sapiens
gcagccttgaactcc

SEQ ID NO: 1831667 - DNA, 15 bp, Homo sapiens
agccttgaactcctg

SEQ ID NO: 1831668 - DNA, 15 bp, Homo sapiens
gaactcctgggctcc

SEQ ID NO: 1831669 - DNA, 15 bp, Homo sapiens
aactcctgggctcct

SEQ ID NO: 1831670 - DNA, 15 bp, Homo sapiens
actcctgggctcctt

SEQ ID NO: 1831671 - DNA, 15 bp, Homo sapiens
ctcctgggctccttg

SEQ ID NO: 1831672 - DNA, 15 bp, Homo sapiens
tcctgggctccttga

SEQ ID NO: 1831673 - DNA, 15 bp, Homo sapiens
cctgggctccttgaa

SEQ ID NO: 1831674 - DNA, 15 bp, Homo sapiens
ctgggctccttgaac

SEQ ID NO: 1831675 - DNA, 15 bp, Homo sapiens
tgggctccttgaaca

SEQ ID NO: 1831676 - DNA, 15 bp, Homo sapiens
gggctccttgaacag

SEQ ID NO: 1831677 - DNA, 15 bp, Homo sapiens
ggctccttgaacagg

SEQ ID NO: 1831678 - DNA, 15 bp, Homo sapiens
gctccttgaacagga

SEQ ID NO: 1831679 - DNA, 15 bp, Homo sapiens
ctccttgaacaggag

SEQ ID NO: 1831680 - DNA, 15 bp, Homo sapiens
tccttgaacaggagg

SEQ ID NO: 1831681 - DNA, 15 bp, Homo sapiens
ccttgaacaggaggc

SEQ ID NO: 1831682 - DNA, 15 bp, Homo sapiens
cttgaacaggaggct

SEQ ID NO: 1831683 - DNA, 15 bp, Homo sapiens
ttgaacaggaggctc

SEQ ID NO: 1831684 - DNA, 15 bp, Homo sapiens
tgaacaggaggctcc

SEQ ID NO: 1831685 - DNA, 15 bp, Homo sapiens
gaacaggaggctcct

SEQ ID NO: 1831686 - DNA, 15 bp, Homo sapiens
aacaggaggctcctg

SEQ ID NO: 1831687 - DNA, 15 bp, Homo sapiens
acaggaggctcctgc

SEQ ID NO: 1831688 - DNA, 15 bp, Homo sapiens
caggaggctcctgcc

SEQ ID NO: 1831689 - DNA, 15 bp, Homo sapiens
aggaggctcctgcct

SEQ ID NO: 1831690 - DNA, 15 bp, Homo sapiens
ggaggctcctgcctg

SEQ ID NO: 1831691 - DNA, 15 bp, Homo sapiens
gaggctcctgcctga

SEQ ID NO: 1831692 - DNA, 15 bp, Homo sapiens
aggctcctgcctgag

SEQ ID NO: 1831693 - DNA, 15 bp, Homo sapiens
ggctcctgcctgagc

SEQ ID NO: 1831694 - DNA, 15 bp, Homo sapiens
gctcctgcctgagcc

SEQ ID NO: 1831695 - DNA, 15 bp, Homo sapiens
ctgagcctcctgagt

SEQ ID NO: 1831696 - DNA, 15 bp, Homo sapiens
tgagcctcctgagta

SEQ ID NO: 1831697 - DNA, 15 bp, Homo sapiens
gagcctcctgagtag

SEQ ID NO: 1831698 - DNA, 15 bp, Homo sapiens
tgagtagctgagacc

SEQ ID NO: 1831699 - DNA, 15 bp, Homo sapiens
gagtagctgagacca

SEQ ID NO: 1831700 - DNA, 15 bp, Homo sapiens
agtagctgagaccat

SEQ ID NO: 1831701 - DNA, 15 bp, Homo sapiens
gtagctgagaccata

SEQ ID NO: 1831702 - DNA, 15 bp, Homo sapiens
tagctgagaccatag

SEQ ID NO: 1831703 - DNA, 15 bp, Homo sapiens
agctgagaccatagg

SEQ ID NO: 1831704 - DNA, 15 bp, Homo sapiens
gctgagaccataggc

SEQ ID NO: 1831705 - DNA, 15 bp, Homo sapiens
ctgagaccataggca

SEQ ID NO: 1831706 - DNA, 15 bp, Homo sapiens
tgagaccataggcac

SEQ ID NO: 1831707 - DNA, 15 bp, Homo sapiens
gagaccataggcacg

SEQ ID NO: 1831708 - DNA, 15 bp, Homo sapiens
agaccataggcacgt

SEQ ID NO: 1831709 - DNA, 15 bp, Homo sapiens
gaccataggcacgta

SEQ ID NO: 1831710 - DNA, 15 bp, Homo sapiens
accataggcacgtac

SEQ ID NO: 1831711 - DNA, 15 bp, Homo sapiens
ccataggcacgtacc

SEQ ID NO: 1831712 - DNA, 15 bp, Homo sapiens
cataggcacgtacca

SEQ ID NO: 1831713 - DNA, 15 bp, Homo sapiens
ataggcacgtaccat

SEQ ID NO: 1831714 - DNA, 15 bp, Homo sapiens
taggcacgtaccata

SEQ ID NO: 1831715 - DNA, 15 bp, Homo sapiens
aggcacgtaccatat

SEQ ID NO: 1831716 - DNA, 15 bp, Homo sapiens
ggcacgtaccatata

SEQ ID NO: 1831717 - DNA, 15 bp, Homo sapiens
gcacgtaccatatac

SEQ ID NO: 1831718 - DNA, 15 bp, Homo sapiens
cacgtaccatatacc

SEQ ID NO: 1831719 - DNA, 15 bp, Homo sapiens
acgtaccatatacct

SEQ ID NO: 1831720 - DNA, 15 bp, Homo sapiens
cgtaccatataccta

SEQ ID NO: 1831721 - DNA, 15 bp, Homo sapiens
gtaccatatacctag

SEQ ID NO: 1831722 - DNA, 15 bp, Homo sapiens
taccatatacctagc

SEQ ID NO: 1831723 - DNA, 15 bp, Homo sapiens
accatatacctagct

SEQ ID NO: 1831724 - DNA, 15 bp, Homo sapiens
ccatatacctagcta

SEQ ID NO: 1831725 - DNA, 15 bp, Homo sapiens
catatacctagctaa

SEQ ID NO: 1831726 - DNA, 15 bp, Homo sapiens
atatacctagctaaa

SEQ ID NO: 1831727 - DNA, 15 bp, Homo sapiens
tatacctagctaaat

SEQ ID NO: 1831728 - DNA, 15 bp, Homo sapiens
atacctagctaaatg

SEQ ID NO: 1831729 - DNA, 15 bp, Homo sapiens
tacctagctaaatgt

SEQ ID NO: 1831730 - DNA, 15 bp, Homo sapiens
acctagctaaatgtg

SEQ ID NO: 1831731 - DNA, 15 bp, Homo sapiens
cctagctaaatgtgt

SEQ ID NO: 1831732 - DNA, 15 bp, Homo sapiens
ctagctaaatgtgtt

SEQ ID NO: 1831733 - DNA, 15 bp, Homo sapiens
tagctaaatgtgttt

SEQ ID NO: 1831734 - DNA, 15 bp, Homo sapiens
agctaaatgtgtttt

SEQ ID NO: 1831735 - DNA, 15 bp, Homo sapiens
gctaaatgtgttttt

SEQ ID NO: 1831736 - DNA, 15 bp, Homo sapiens
ctaaatgtgtttttg

SEQ ID NO: 1831737 - DNA, 15 bp, Homo sapiens
taaatgtgtttttga

SEQ ID NO: 1831738 - DNA, 15 bp, Homo sapiens
aaatgtgtttttgac

SEQ ID NO: 1831739 - DNA, 15 bp, Homo sapiens
aatgtgtttttgact

SEQ ID NO: 1831740 - DNA, 15 bp, Homo sapiens
atgtgtttttgactt

SEQ ID NO: 1831741 - DNA, 15 bp, Homo sapiens
tgtgtttttgacttt

SEQ ID NO: 1831742 - DNA, 15 bp, Homo sapiens
gtgtttttgactttc

SEQ ID NO: 1831743 - DNA, 15 bp, Homo sapiens
tgtttttgactttct

SEQ ID NO: 1831744 - DNA, 15 bp, Homo sapiens
gtttttgactttctt

SEQ ID NO: 1831745 - DNA, 15 bp, Homo sapiens
tttttgactttcttt

SEQ ID NO: 1831746 - DNA, 15 bp, Homo sapiens
ttttgactttctttt

SEQ ID NO: 1831747 - DNA, 15 bp, Homo sapiens
tttgactttcttttt

SEQ ID NO: 1831748 - DNA, 15 bp, Homo sapiens
ttgactttctttttt

SEQ ID NO: 1831749 - DNA, 15 bp, Homo sapiens
tgactttcttttttc

SEQ ID NO: 1831750 - DNA, 15 bp, Homo sapiens
gactttcttttttct

SEQ ID NO: 1831751 - DNA, 15 bp, Homo sapiens
tttcttttttctttg

SEQ ID NO: 1831752 - DNA, 15 bp, Homo sapiens
ttcttttttctttgt

SEQ ID NO: 1831753 - DNA, 15 bp, Homo sapiens
tcttttttctttgta

SEQ ID NO: 1831754 - DNA, 15 bp, Homo sapiens
cttttttctttgtag

SEQ ID NO: 1831755 - DNA, 15 bp, Homo sapiens
ttttttctttgtaga

SEQ ID NO: 1831756 - DNA, 15 bp, Homo sapiens
tttttctttgtagag

SEQ ID NO: 1831757 - DNA, 15 bp, Homo sapiens
ttttctttgtagagt

SEQ ID NO: 1831758 - DNA, 15 bp, Homo sapiens
tttctttgtagagtc

SEQ ID NO: 1831759 - DNA, 15 bp, Homo sapiens
ttctttgtagagtca

SEQ ID NO: 1831760 - DNA, 15 bp, Homo sapiens
tctttgtagagtcaa

SEQ ID NO: 1831761 - DNA, 15 bp, Homo sapiens
ctttgtagagtcaag

SEQ ID NO: 1831762 - DNA, 15 bp, Homo sapiens
tttgtagagtcaagt

SEQ ID NO: 1831763 - DNA, 15 bp, Homo sapiens
ttgtagagtcaagtt

SEQ ID NO: 1831764 - DNA, 15 bp, Homo sapiens
tgtagagtcaagttc

SEQ ID NO: 1831765 - DNA, 15 bp, Homo sapiens
gtagagtcaagttct

SEQ ID NO: 1831766 - DNA, 15 bp, Homo sapiens
tagagtcaagttctc

SEQ ID NO: 1831767 - DNA, 15 bp, Homo sapiens
agagtcaagttctca

SEQ ID NO: 1831768 - DNA, 15 bp, Homo sapiens
gagtcaagttctcac

SEQ ID NO: 1831769 - DNA, 15 bp, Homo sapiens
agtcaagttctcact

SEQ ID NO: 1831770 - DNA, 15 bp, Homo sapiens
gtcaagttctcacta

SEQ ID NO: 1831771 - DNA, 15 bp, Homo sapiens
tcaagttctcactat

SEQ ID NO: 1831772 - DNA, 15 bp, Homo sapiens
caagttctcactatg

SEQ ID NO: 1831773 - DNA, 15 bp, Homo sapiens
aagttctcactatgt

SEQ ID NO: 1831774 - DNA, 15 bp, Homo sapiens
agttctcactatgtt

SEQ ID NO: 1831775 - DNA, 15 bp, Homo sapiens
gttctcactatgttg

SEQ ID NO: 1831776 - DNA, 15 bp, Homo sapiens
aggctggtcttgaaa

SEQ ID NO: 1831777 - DNA, 15 bp, Homo sapiens
ggctggtcttgaaat

SEQ ID NO: 1831778 - DNA, 15 bp, Homo sapiens
gctggtcttgaaatc

SEQ ID NO: 1831779 - DNA, 15 bp, Homo sapiens
ctggtcttgaaatcc

SEQ ID NO: 1831780 - DNA, 15 bp, Homo sapiens
tggtcttgaaatcct

SEQ ID NO: 1831781 - DNA, 15 bp, Homo sapiens
ggtcttgaaatcctg

SEQ ID NO: 1831782 - DNA, 15 bp, Homo sapiens
gtcttgaaatcctgg

SEQ ID NO: 1831783 - DNA, 15 bp, Homo sapiens
tcttgaaatcctggg

SEQ ID NO: 1831784 - DNA, 15 bp, Homo sapiens
cttgaaatcctgggt

SEQ ID NO: 1831785 - DNA, 15 bp, Homo sapiens
ttgaaatcctgggtt

SEQ ID NO: 1831786 - DNA, 15 bp, Homo sapiens
tgaaatcctgggttc

SEQ ID NO: 1831787 - DNA, 15 bp, Homo sapiens
gaaatcctgggttcc

SEQ ID NO: 1831788 - DNA, 15 bp, Homo sapiens
aaatcctgggttcca

SEQ ID NO: 1831789 - DNA, 15 bp, Homo sapiens
aatcctgggttccag

SEQ ID NO: 1831790 - DNA, 15 bp, Homo sapiens
atcctgggttccagc

SEQ ID NO: 1831791 - DNA, 15 bp, Homo sapiens
tcctgggttccagca

SEQ ID NO: 1831792 - DNA, 15 bp, Homo sapiens
cctgggttccagcaa

SEQ ID NO: 1831793 - DNA, 15 bp, Homo sapiens
ctgggttccagcaat

SEQ ID NO: 1831794 - DNA, 15 bp, Homo sapiens
tgggttccagcaatt

SEQ ID NO: 1831795 - DNA, 15 bp, Homo sapiens
gggttccagcaattc

SEQ ID NO: 1831796 - DNA, 15 bp, Homo sapiens
ggttccagcaattct

SEQ ID NO: 1831797 - DNA, 15 bp, Homo sapiens
gttccagcaattctc

SEQ ID NO: 1831798 - DNA, 15 bp, Homo sapiens
ttccagcaattctcc

SEQ ID NO: 1831799 - DNA, 15 bp, Homo sapiens
tccagcaattctcct

SEQ ID NO: 1831800 - DNA, 15 bp, Homo sapiens
ccagcaattctcctg

SEQ ID NO: 1831801 - DNA, 15 bp, Homo sapiens
cagcaattctcctgc

SEQ ID NO: 1831802 - DNA, 15 bp, Homo sapiens
agcaattctcctgct

SEQ ID NO: 1831803 - DNA, 15 bp, Homo sapiens
gcaattctcctgctt

SEQ ID NO: 1831804 - DNA, 15 bp, Homo sapiens
caattctcctgctta

SEQ ID NO: 1831805 - DNA, 15 bp, Homo sapiens
aattctcctgcttag

SEQ ID NO: 1831806 - DNA, 15 bp, Homo sapiens
attctcctgcttagc

SEQ ID NO: 1831807 - DNA, 15 bp, Homo sapiens
ttctcctgcttagcc

SEQ ID NO: 1831808 - DNA, 15 bp, Homo sapiens
tctcctgcttagcct

SEQ ID NO: 1831809 - DNA, 15 bp, Homo sapiens
ctcctgcttagcctt

SEQ ID NO: 1831810 - DNA, 15 bp, Homo sapiens
tcctgcttagcctta

SEQ ID NO: 1831811 - DNA, 15 bp, Homo sapiens
cctgcttagccttac

SEQ ID NO: 1831812 - DNA, 15 bp, Homo sapiens
ctgcttagccttaca

SEQ ID NO: 1831813 - DNA, 15 bp, Homo sapiens
tgcttagccttacag

SEQ ID NO: 1831814 - DNA, 15 bp, Homo sapiens
gcttagccttacaga

SEQ ID NO: 1831815 - DNA, 15 bp, Homo sapiens
cttagccttacagag

SEQ ID NO: 1831816 - DNA, 15 bp, Homo sapiens
ttagccttacagagt

SEQ ID NO: 1831817 - DNA, 15 bp, Homo sapiens
tagccttacagagtg

SEQ ID NO: 1831818 - DNA, 15 bp, Homo sapiens
agccttacagagtgt

SEQ ID NO: 1831819 - DNA, 15 bp, Homo sapiens
gccttacagagtgtc

SEQ ID NO: 1831820 - DNA, 15 bp, Homo sapiens
ccttacagagtgtcg

SEQ ID NO: 1831821 - DNA, 15 bp, Homo sapiens
cttacagagtgtcgg

SEQ ID NO: 1831822 - DNA, 15 bp, Homo sapiens
ttacagagtgtcggg

SEQ ID NO: 1831823 - DNA, 15 bp, Homo sapiens
tacagagtgtcggga

SEQ ID NO: 1831824 - DNA, 15 bp, Homo sapiens
acagagtgtcgggat

SEQ ID NO: 1831825 - DNA, 15 bp, Homo sapiens
cagagtgtcgggatt

SEQ ID NO: 1831826 - DNA, 15 bp, Homo sapiens
agagtgtcgggattg

SEQ ID NO: 1831827 - DNA, 15 bp, Homo sapiens
gagtgtcgggattgt

SEQ ID NO: 1831828 - DNA, 15 bp, Homo sapiens
agtgtcgggattgta

SEQ ID NO: 1831829 - DNA, 15 bp, Homo sapiens
gtgtcgggattgtag

SEQ ID NO: 1831830 - DNA, 15 bp, Homo sapiens
tgtcgggattgtagg

SEQ ID NO: 1831831 - DNA, 15 bp, Homo sapiens
gtcgggattgtaggc

SEQ ID NO: 1831832 - DNA, 15 bp, Homo sapiens
tcgggattgtaggca

SEQ ID NO: 1831833 - DNA, 15 bp, Homo sapiens
cgggattgtaggcat

SEQ ID NO: 1831834 - DNA, 15 bp, Homo sapiens
gggattgtaggcata

SEQ ID NO: 1831835 - DNA, 15 bp, Homo sapiens
ggattgtaggcatag

SEQ ID NO: 1831836 - DNA, 15 bp, Homo sapiens
gattgtaggcatagg

SEQ ID NO: 1831837 - DNA, 15 bp, Homo sapiens
attgtaggcataggc

SEQ ID NO: 1831838 - DNA, 15 bp, Homo sapiens
ttgtaggcataggcc

SEQ ID NO: 1831839 - DNA, 15 bp, Homo sapiens
tgtaggcataggcca

SEQ ID NO: 1831840 - DNA, 15 bp, Homo sapiens
gtaggcataggccac

SEQ ID NO: 1831841 - DNA, 15 bp, Homo sapiens
taggcataggccact

SEQ ID NO: 1831842 - DNA, 15 bp, Homo sapiens
aggcataggccactg

SEQ ID NO: 1831843 - DNA, 15 bp, Homo sapiens
ggcataggccactgc

SEQ ID NO: 1831844 - DNA, 15 bp, Homo sapiens
gcataggccactgca

SEQ ID NO: 1831845 - DNA, 15 bp, Homo sapiens
cataggccactgcac

SEQ ID NO: 1831846 - DNA, 15 bp, Homo sapiens
ataggccactgcacc

SEQ ID NO: 1831847 - DNA, 15 bp, Homo sapiens
taggccactgcaccc

SEQ ID NO: 1831848 - DNA, 15 bp, Homo sapiens
aggccactgcacccg

SEQ ID NO: 1831849 - DNA, 15 bp, Homo sapiens
ggccactgcacccgg

SEQ ID NO: 1831850 - DNA, 15 bp, Homo sapiens
cactgcacccggcct

SEQ ID NO: 1831851 - DNA, 15 bp, Homo sapiens
actgcacccggcctt

SEQ ID NO: 1831852 - DNA, 15 bp, Homo sapiens
ctgcacccggccttg

SEQ ID NO: 1831853 - DNA, 15 bp, Homo sapiens
tgcacccggccttgg

SEQ ID NO: 1831854 - DNA, 15 bp, Homo sapiens
gcacccggccttggg

SEQ ID NO: 1831855 - DNA, 15 bp, Homo sapiens
cacccggccttgggc

SEQ ID NO: 1831856 - DNA, 15 bp, Homo sapiens
acccggccttgggct

SEQ ID NO: 1831857 - DNA, 15 bp, Homo sapiens
cccggccttgggctg

SEQ ID NO: 1831858 - DNA, 15 bp, Homo sapiens
ccggccttgggctga

SEQ ID NO: 1831859 - DNA, 15 bp, Homo sapiens
cggccttgggctgat

SEQ ID NO: 1831860 - DNA, 15 bp, Homo sapiens
ggccttgggctgata

SEQ ID NO: 1831861 - DNA, 15 bp, Homo sapiens
gccttgggctgatat

SEQ ID NO: 1831862 - DNA, 15 bp, Homo sapiens
ccttgggctgatatt

SEQ ID NO: 1831863 - DNA, 15 bp, Homo sapiens
cttgggctgatattt

SEQ ID NO: 1831864 - DNA, 15 bp, Homo sapiens
ttgggctgatattta

SEQ ID NO: 1831865 - DNA, 15 bp, Homo sapiens
tgggctgatatttat

SEQ ID NO: 1831866 - DNA, 15 bp, Homo sapiens
gggctgatatttatt

SEQ ID NO: 1831867 - DNA, 15 bp, Homo sapiens
ggctgatatttattt

SEQ ID NO: 1831868 - DNA, 15 bp, Homo sapiens
gctgatatttatttg

SEQ ID NO: 1831869 - DNA, 15 bp, Homo sapiens
ctgatatttatttgc

SEQ ID NO: 1831870 - DNA, 15 bp, Homo sapiens
tgatatttatttgct

SEQ ID NO: 1831871 - DNA, 15 bp, Homo sapiens
gatatttatttgcta

SEQ ID NO: 1831872 - DNA, 15 bp, Homo sapiens
atatttatttgctat

SEQ ID NO: 1831873 - DNA, 15 bp, Homo sapiens
tatttatttgctatg

SEQ ID NO: 1831874 - DNA, 15 bp, Homo sapiens
atttatttgctatgg

SEQ ID NO: 1831875 - DNA, 15 bp, Homo sapiens
tttatttgctatggg

SEQ ID NO: 1831876 - DNA, 15 bp, Homo sapiens
ttatttgctatgggg

SEQ ID NO: 1831877 - DNA, 15 bp, Homo sapiens
tatttgctatgggga

SEQ ID NO: 1831878 - DNA, 15 bp, Homo sapiens
atttgctatggggaa

SEQ ID NO: 1831879 - DNA, 15 bp, Homo sapiens
tttgctatggggaac

SEQ ID NO: 1831880 - DNA, 15 bp, Homo sapiens
ttgctatggggaact

SEQ ID NO: 1831881 - DNA, 15 bp, Homo sapiens
tgctatggggaactt

SEQ ID NO: 1831882 - DNA, 15 bp, Homo sapiens
gctatggggaacttt

SEQ ID NO: 1831883 - DNA, 15 bp, Homo sapiens
ctatggggaactttc

SEQ ID NO: 1831884 - DNA, 15 bp, Homo sapiens
tatggggaactttcc

SEQ ID NO: 1831885 - DNA, 15 bp, Homo sapiens
atggggaactttcct

SEQ ID NO: 1831886 - DNA, 15 bp, Homo sapiens
tggggaactttcctg

SEQ ID NO: 1831887 - DNA, 15 bp, Homo sapiens
ggggaactttcctgt

SEQ ID NO: 1831888 - DNA, 15 bp, Homo sapiens
gggaactttcctgtg

SEQ ID NO: 1831889 - DNA, 15 bp, Homo sapiens
ggaactttcctgtgc

SEQ ID NO: 1831890 - DNA, 15 bp, Homo sapiens
gaactttcctgtgcg

SEQ ID NO: 1831891 - DNA, 15 bp, Homo sapiens
aactttcctgtgcgt

SEQ ID NO: 1831892 - DNA, 15 bp, Homo sapiens
actttcctgtgcgtt

SEQ ID NO: 1831893 - DNA, 15 bp, Homo sapiens
ctttcctgtgcgttg

SEQ ID NO: 1831894 - DNA, 15 bp, Homo sapiens
tttcctgtgcgttgt

SEQ ID NO: 1831895 - DNA, 15 bp, Homo sapiens
ttcctgtgcgttgta

SEQ ID NO: 1831896 - DNA, 15 bp, Homo sapiens
tcctgtgcgttgtag

SEQ ID NO: 1831897 - DNA, 15 bp, Homo sapiens
cctgtgcgttgtagg

SEQ ID NO: 1831898 - DNA, 15 bp, Homo sapiens
ctgtgcgttgtagga

SEQ ID NO: 1831899 - DNA, 15 bp, Homo sapiens
tgtgcgttgtaggat

SEQ ID NO: 1831900 - DNA, 15 bp, Homo sapiens
gtgcgttgtaggatg

SEQ ID NO: 1831901 - DNA, 15 bp, Homo sapiens
tgcgttgtaggatgt

SEQ ID NO: 1831902 - DNA, 15 bp, Homo sapiens
gcgttgtaggatgtt

SEQ ID NO: 1831903 - DNA, 15 bp, Homo sapiens
cgttgtaggatgttt

SEQ ID NO: 1831904 - DNA, 15 bp, Homo sapiens
gttgtaggatgtttg

SEQ ID NO: 1831905 - DNA, 15 bp, Homo sapiens
ttgtaggatgtttgg

SEQ ID NO: 1831906 - DNA, 15 bp, Homo sapiens
tgtaggatgtttggc

SEQ ID NO: 1831907 - DNA, 15 bp, Homo sapiens
gtaggatgtttggca

SEQ ID NO: 1831908 - DNA, 15 bp, Homo sapiens
taggatgtttggcaa

SEQ ID NO: 1831909 - DNA, 15 bp, Homo sapiens
aggatgtttggcaat

SEQ ID NO: 1831910 - DNA, 15 bp, Homo sapiens
ggatgtttggcaatg

SEQ ID NO: 1831911 - DNA, 15 bp, Homo sapiens
gatgtttggcaatgt

SEQ ID NO: 1831912 - DNA, 15 bp, Homo sapiens
atgtttggcaatgtc

SEQ ID NO: 1831913 - DNA, 15 bp, Homo sapiens
tgtttggcaatgtcc

SEQ ID NO: 1831914 - DNA, 15 bp, Homo sapiens
gtttggcaatgtccc

SEQ ID NO: 1831915 - DNA, 15 bp, Homo sapiens
tttggcaatgtccct

SEQ ID NO: 1831916 - DNA, 15 bp, Homo sapiens
ttggcaatgtccctg

SEQ ID NO: 1831917 - DNA, 15 bp, Homo sapiens
tggcaatgtccctgg

SEQ ID NO: 1831918 - DNA, 15 bp, Homo sapiens
ggcaatgtccctggc

SEQ ID NO: 1831919 - DNA, 15 bp, Homo sapiens
gcaatgtccctggcc

SEQ ID NO: 1831920 - DNA, 15 bp, Homo sapiens
caatgtccctggccg

SEQ ID NO: 1831921 - DNA, 15 bp, Homo sapiens
tgtccctggccggcc

SEQ ID NO: 1831922 - DNA, 15 bp, Homo sapiens
gtccctggccggcca

SEQ ID NO: 1831923 - DNA, 15 bp, Homo sapiens
tccctggccggccag

SEQ ID NO: 1831924 - DNA, 15 bp, Homo sapiens
ccctggccggccagg

SEQ ID NO: 1831925 - DNA, 15 bp, Homo sapiens
cctggccggccaggt

SEQ ID NO: 1831926 - DNA, 15 bp, Homo sapiens
ctggccggccaggtg

SEQ ID NO: 1831927 - DNA, 15 bp, Homo sapiens
tggccggccaggtgc

SEQ ID NO: 1831928 - DNA, 15 bp, Homo sapiens
ggccggccaggtgca

SEQ ID NO: 1831929 - DNA, 15 bp, Homo sapiens
gccggccaggtgcag

SEQ ID NO: 1831930 - DNA, 15 bp, Homo sapiens
ccggccaggtgcagc

SEQ ID NO: 1831931 - DNA, 15 bp, Homo sapiens
cggccaggtgcagcg

SEQ ID NO: 1831932 - DNA, 15 bp, Homo sapiens
ggccaggtgcagcgg

SEQ ID NO: 1831933 - DNA, 15 bp, Homo sapiens
gccaggtgcagcggc

SEQ ID NO: 1831934 - DNA, 15 bp, Homo sapiens
ccaggtgcagcggct

SEQ ID NO: 1831935 - DNA, 15 bp, Homo sapiens
caggtgcagcggctc

SEQ ID NO: 1831936 - DNA, 15 bp, Homo sapiens
aggtgcagcggctca

SEQ ID NO: 1831937 - DNA, 15 bp, Homo sapiens
ggtgcagcggctcac

SEQ ID NO: 1831938 - DNA, 15 bp, Homo sapiens
gtgcagcggctcaca

SEQ ID NO: 1831939 - DNA, 15 bp, Homo sapiens
tgcagcggctcacac

SEQ ID NO: 1831940 - DNA, 15 bp, Homo sapiens
gcagcggctcacacc

SEQ ID NO: 1831941 - DNA, 15 bp, Homo sapiens
cagcggctcacacct

SEQ ID NO: 1831942 - DNA, 15 bp, Homo sapiens
agcggctcacacctg

SEQ ID NO: 1831943 - DNA, 15 bp, Homo sapiens
gcggctcacacctgt

SEQ ID NO: 1831944 - DNA, 15 bp, Homo sapiens
cggctcacacctgta

SEQ ID NO: 1831945 - DNA, 15 bp, Homo sapiens
ggtgggcggatcact

SEQ ID NO: 1831946 - DNA, 15 bp, Homo sapiens
tactggccgtttgta

SEQ ID NO: 1831947 - DNA, 15 bp, Homo sapiens
actggccgtttgtat

SEQ ID NO: 1831948 - DNA, 15 bp, Homo sapiens
ctggccgtttgtata

SEQ ID NO: 1831949 - DNA, 15 bp, Homo sapiens
tggccgtttgtatat

SEQ ID NO: 1831950 - DNA, 15 bp, Homo sapiens
ggccgtttgtatatc

SEQ ID NO: 1831951 - DNA, 15 bp, Homo sapiens
gccgtttgtatatcc

SEQ ID NO: 1831952 - DNA, 15 bp, Homo sapiens
ccgtttgtatatcct

SEQ ID NO: 1831953 - DNA, 15 bp, Homo sapiens
cgtttgtatatcctt

SEQ ID NO: 1831954 - DNA, 15 bp, Homo sapiens
gtttgtatatccttg

SEQ ID NO: 1831955 - DNA, 15 bp, Homo sapiens
tttgtatatccttga

SEQ ID NO: 1831956 - DNA, 15 bp, Homo sapiens
ttgtatatccttgaa

SEQ ID NO: 1831957 - DNA, 15 bp, Homo sapiens
tgtatatccttgaat

SEQ ID NO: 1831958 - DNA, 15 bp, Homo sapiens
gtatatccttgaatt

SEQ ID NO: 1831959 - DNA, 15 bp, Homo sapiens
tatatccttgaatta

SEQ ID NO: 1831960 - DNA, 15 bp, Homo sapiens
atatccttgaattac

SEQ ID NO: 1831961 - DNA, 15 bp, Homo sapiens
tatccttgaattacc

SEQ ID NO: 1831962 - DNA, 15 bp, Homo sapiens
atccttgaattacct

SEQ ID NO: 1831963 - DNA, 15 bp, Homo sapiens
tccttgaattacctc

SEQ ID NO: 1831964 - DNA, 15 bp, Homo sapiens
ccttgaattacctct

SEQ ID NO: 1831965 - DNA, 15 bp, Homo sapiens
cttgaattacctctt

SEQ ID NO: 1831966 - DNA, 15 bp, Homo sapiens
ttgaattacctcttt

SEQ ID NO: 1831967 - DNA, 15 bp, Homo sapiens
tgaattacctctttg

SEQ ID NO: 1831968 - DNA, 15 bp, Homo sapiens
gaattacctctttgt

SEQ ID NO: 1831969 - DNA, 15 bp, Homo sapiens
aattacctctttgtt

SEQ ID NO: 1831970 - DNA, 15 bp, Homo sapiens
attacctctttgttt

SEQ ID NO: 1831971 - DNA, 15 bp, Homo sapiens
ttacctctttgtttt

SEQ ID NO: 1831972 - DNA, 15 bp, Homo sapiens
tacctctttgttttt

SEQ ID NO: 1831973 - DNA, 15 bp, Homo sapiens
acctctttgttttta

SEQ ID NO: 1831974 - DNA, 15 bp, Homo sapiens
cctctttgtttttag

SEQ ID NO: 1831975 - DNA, 15 bp, Homo sapiens
ctctttgtttttagc

SEQ ID NO: 1831976 - DNA, 15 bp, Homo sapiens
tctttgtttttagcc

SEQ ID NO: 1831977 - DNA, 15 bp, Homo sapiens
ctttgtttttagcca

SEQ ID NO: 1831978 - DNA, 15 bp, Homo sapiens
tttgtttttagccat

SEQ ID NO: 1831979 - DNA, 15 bp, Homo sapiens
ttgtttttagccatt

SEQ ID NO: 1831980 - DNA, 15 bp, Homo sapiens
tgtttttagccattt

SEQ ID NO: 1831981 - DNA, 15 bp, Homo sapiens
gtttttagccatttt

SEQ ID NO: 1831982 - DNA, 15 bp, Homo sapiens
tttttagccattttt

SEQ ID NO: 1831983 - DNA, 15 bp, Homo sapiens
ttttagccatttttc

SEQ ID NO: 1831984 - DNA, 15 bp, Homo sapiens
tttagccatttttct

SEQ ID NO: 1831985 - DNA, 15 bp, Homo sapiens
ttagccatttttctc

SEQ ID NO: 1831986 - DNA, 15 bp, Homo sapiens
tagccatttttctcc

SEQ ID NO: 1831987 - DNA, 15 bp, Homo sapiens
agccatttttctcca

SEQ ID NO: 1831988 - DNA, 15 bp, Homo sapiens
gccatttttctccat

SEQ ID NO: 1831989 - DNA, 15 bp, Homo sapiens
ccatttttctccatt

SEQ ID NO: 1831990 - DNA, 15 bp, Homo sapiens
catttttctccattt

SEQ ID NO: 1831991 - DNA, 15 bp, Homo sapiens
atttttctccatttg

SEQ ID NO: 1831992 - DNA, 15 bp, Homo sapiens
tttttctccatttgg

SEQ ID NO: 1831993 - DNA, 15 bp, Homo sapiens
ttttctccatttggg

SEQ ID NO: 1831994 - DNA, 15 bp, Homo sapiens
tttctccatttgggt

SEQ ID NO: 1831995 - DNA, 15 bp, Homo sapiens
ttctccatttgggtg

SEQ ID NO: 1831996 - DNA, 15 bp, Homo sapiens
tctccatttgggtgc

SEQ ID NO: 1831997 - DNA, 15 bp, Homo sapiens
ctccatttgggtgct

SEQ ID NO: 1831998 - DNA, 15 bp, Homo sapiens
tccatttgggtgctt

SEQ ID NO: 1831999 - DNA, 15 bp, Homo sapiens
ccatttgggtgcttt

SEQ ID NO: 1832000 - DNA, 15 bp, Homo sapiens
catttgggtgctttt

SEQ ID NO: 1832001 - DNA, 15 bp, Homo sapiens
atttgggtgcttttt

SEQ ID NO: 1832002 - DNA, 15 bp, Homo sapiens
tttgggtgctttttc

SEQ ID NO: 1832003 - DNA, 15 bp, Homo sapiens
ttgggtgctttttca

SEQ ID NO: 1832004 - DNA, 15 bp, Homo sapiens
tgggtgctttttcac

SEQ ID NO: 1832005 - DNA, 15 bp, Homo sapiens
gggtgctttttcaca

SEQ ID NO: 1832006 - DNA, 15 bp, Homo sapiens
ggtgctttttcacag

SEQ ID NO: 1832007 - DNA, 15 bp, Homo sapiens
gtgctttttcacagt

SEQ ID NO: 1832008 - DNA, 15 bp, Homo sapiens
tgctttttcacagtg

SEQ ID NO: 1832009 - DNA, 15 bp, Homo sapiens
gctttttcacagtga

SEQ ID NO: 1832010 - DNA, 15 bp, Homo sapiens
ctttttcacagtgac

SEQ ID NO: 1832011 - DNA, 15 bp, Homo sapiens
tttttcacagtgact

SEQ ID NO: 1832012 - DNA, 15 bp, Homo sapiens
ttttcacagtgactt

SEQ ID NO: 1832013 - DNA, 15 bp, Homo sapiens
tttcacagtgacttc

SEQ ID NO: 1832014 - DNA, 15 bp, Homo sapiens
ttcacagtgacttct

SEQ ID NO: 1832015 - DNA, 15 bp, Homo sapiens
tcacagtgacttctg

SEQ ID NO: 1832016 - DNA, 15 bp, Homo sapiens
cacagtgacttctgg

SEQ ID NO: 1832017 - DNA, 15 bp, Homo sapiens
acagtgacttctggg

SEQ ID NO: 1832018 - DNA, 15 bp, Homo sapiens
cagtgacttctggga

SEQ ID NO: 1832019 - DNA, 15 bp, Homo sapiens
agtgacttctgggaa

SEQ ID NO: 1832020 - DNA, 15 bp, Homo sapiens
gtgacttctgggaat

SEQ ID NO: 1832021 - DNA, 15 bp, Homo sapiens
tgacttctgggaata

SEQ ID NO: 1832022 - DNA, 15 bp, Homo sapiens
gacttctgggaatat

SEQ ID NO: 1832023 - DNA, 15 bp, Homo sapiens
acttctgggaatatt

SEQ ID NO: 1832024 - DNA, 15 bp, Homo sapiens
cttctgggaatatta

SEQ ID NO: 1832025 - DNA, 15 bp, Homo sapiens
ttctgggaatattat

SEQ ID NO: 1832026 - DNA, 15 bp, Homo sapiens
tctgggaatattatg

SEQ ID NO: 1832027 - DNA, 15 bp, Homo sapiens
ctgggaatattatgt

SEQ ID NO: 1832028 - DNA, 15 bp, Homo sapiens
tgggaatattatgtt

SEQ ID NO: 1832029 - DNA, 15 bp, Homo sapiens
gggaatattatgttc

SEQ ID NO: 1832030 - DNA, 15 bp, Homo sapiens
ggaatattatgttct

SEQ ID NO: 1832031 - DNA, 15 bp, Homo sapiens
gaatattatgttctt

SEQ ID NO: 1832032 - DNA, 15 bp, Homo sapiens
aatattatgttcttt

SEQ ID NO: 1832033 - DNA, 15 bp, Homo sapiens
atattatgttctttt

SEQ ID NO: 1832034 - DNA, 15 bp, Homo sapiens
tattatgttcttttc

SEQ ID NO: 1832035 - DNA, 15 bp, Homo sapiens
attatgttcttttct

SEQ ID NO: 1832036 - DNA, 15 bp, Homo sapiens
ttatgttcttttctt

SEQ ID NO: 1832037 - DNA, 15 bp, Homo sapiens
tatgttcttttcttt

SEQ ID NO: 1832038 - DNA, 15 bp, Homo sapiens
atgttcttttctttt

SEQ ID NO: 1832039 - DNA, 15 bp, Homo sapiens
tgttcttttcttttg

SEQ ID NO: 1832040 - DNA, 15 bp, Homo sapiens
gttcttttcttttga

SEQ ID NO: 1832041 - DNA, 15 bp, Homo sapiens
ttcttttcttttgat

SEQ ID NO: 1832042 - DNA, 15 bp, Homo sapiens
tcttttcttttgatt

SEQ ID NO: 1832043 - DNA, 15 bp, Homo sapiens
cttttcttttgattt

SEQ ID NO: 1832044 - DNA, 15 bp, Homo sapiens
ttttcttttgattta

SEQ ID NO: 1832045 - DNA, 15 bp, Homo sapiens
tttcttttgatttac

SEQ ID NO: 1832046 - DNA, 15 bp, Homo sapiens
ttcttttgatttacc

SEQ ID NO: 1832047 - DNA, 15 bp, Homo sapiens
tcttttgatttacct

SEQ ID NO: 1832048 - DNA, 15 bp, Homo sapiens
cttttgatttacctt

SEQ ID NO: 1832049 - DNA, 15 bp, Homo sapiens
ttttgatttaccttt

SEQ ID NO: 1832050 - DNA, 15 bp, Homo sapiens
tttgatttacctttc

SEQ ID NO: 1832051 - DNA, 15 bp, Homo sapiens
ttgatttacctttca

SEQ ID NO: 1832052 - DNA, 15 bp, Homo sapiens
tgatttacctttcaa

SEQ ID NO: 1832053 - DNA, 15 bp, Homo sapiens
gatttacctttcaaa

SEQ ID NO: 1832054 - DNA, 15 bp, Homo sapiens
atttacctttcaaat

SEQ ID NO: 1832055 - DNA, 15 bp, Homo sapiens
tttacctttcaaatt

SEQ ID NO: 1832056 - DNA, 15 bp, Homo sapiens
ttacctttcaaattt

SEQ ID NO: 1832057 - DNA, 15 bp, Homo sapiens
tacctttcaaatttt

SEQ ID NO: 1832058 - DNA, 15 bp, Homo sapiens
acctttcaaatttta

SEQ ID NO: 1832059 - DNA, 15 bp, Homo sapiens
cctttcaaattttat

SEQ ID NO: 1832060 - DNA, 15 bp, Homo sapiens
ctttcaaattttatt

SEQ ID NO: 1832061 - DNA, 15 bp, Homo sapiens
tttcaaattttattt

SEQ ID NO: 1832062 - DNA, 15 bp, Homo sapiens
ttcaaattttatttt

SEQ ID NO: 1832063 - DNA, 15 bp, Homo sapiens
tcaaattttattttt

SEQ ID NO: 1832064 - DNA, 15 bp, Homo sapiens
caaattttattttta

SEQ ID NO: 1832065 - DNA, 15 bp, Homo sapiens
aaattttatttttat

SEQ ID NO: 1832066 - DNA, 15 bp, Homo sapiens
aattttatttttatg

SEQ ID NO: 1832067 - DNA, 15 bp, Homo sapiens
attttatttttatgg

SEQ ID NO: 1832068 - DNA, 15 bp, Homo sapiens
ttttatttttatgga

SEQ ID NO: 1832069 - DNA, 15 bp, Homo sapiens
tttatttttatggat

SEQ ID NO: 1832070 - DNA, 15 bp, Homo sapiens
ttatttttatggata

SEQ ID NO: 1832071 - DNA, 15 bp, Homo sapiens
tatttttatggatat

SEQ ID NO: 1832072 - DNA, 15 bp, Homo sapiens
atttttatggatata

SEQ ID NO: 1832073 - DNA, 15 bp, Homo sapiens
tttttatggatatat

SEQ ID NO: 1832074 - DNA, 15 bp, Homo sapiens
ttttatggatatata

SEQ ID NO: 1832075 - DNA, 15 bp, Homo sapiens
tttatggatatataa

SEQ ID NO: 1832076 - DNA, 15 bp, Homo sapiens
ttatggatatataat

SEQ ID NO: 1832077 - DNA, 15 bp, Homo sapiens
tatggatatataata

SEQ ID NO: 1832078 - DNA, 15 bp, Homo sapiens
atggatatataatag

SEQ ID NO: 1832079 - DNA, 15 bp, Homo sapiens
tggatatataatagt

SEQ ID NO: 1832080 - DNA, 15 bp, Homo sapiens
ggatatataatagtt

SEQ ID NO: 1832081 - DNA, 15 bp, Homo sapiens
gatatataatagttg

SEQ ID NO: 1832082 - DNA, 15 bp, Homo sapiens
atatataatagttgt

SEQ ID NO: 1832083 - DNA, 15 bp, Homo sapiens
tatataatagttgta

SEQ ID NO: 1832084 - DNA, 15 bp, Homo sapiens
atataatagttgtac

SEQ ID NO: 1832085 - DNA, 15 bp, Homo sapiens
tataatagttgtacg

SEQ ID NO: 1832086 - DNA, 15 bp, Homo sapiens
ataatagttgtacgt

SEQ ID NO: 1832087 - DNA, 15 bp, Homo sapiens
taatagttgtacgtg

SEQ ID NO: 1832088 - DNA, 15 bp, Homo sapiens
aatagttgtacgtgt

SEQ ID NO: 1832089 - DNA, 15 bp, Homo sapiens
atagttgtacgtgta

SEQ ID NO: 1832090 - DNA, 15 bp, Homo sapiens
tagttgtacgtgtac

SEQ ID NO: 1832091 - DNA, 15 bp, Homo sapiens
agttgtacgtgtaca

SEQ ID NO: 1832092 - DNA, 15 bp, Homo sapiens
gttgtacgtgtacat

SEQ ID NO: 1832093 - DNA, 15 bp, Homo sapiens
ttgtacgtgtacatt

SEQ ID NO: 1832094 - DNA, 15 bp, Homo sapiens
tgtacgtgtacatta

SEQ ID NO: 1832095 - DNA, 15 bp, Homo sapiens
gtacgtgtacattat

SEQ ID NO: 1832096 - DNA, 15 bp, Homo sapiens
tacgtgtacattata

SEQ ID NO: 1832097 - DNA, 15 bp, Homo sapiens
acgtgtacattatat

SEQ ID NO: 1832098 - DNA, 15 bp, Homo sapiens
cgtgtacattatata

SEQ ID NO: 1832099 - DNA, 15 bp, Homo sapiens
gtgtacattatatat

SEQ ID NO: 1832100 - DNA, 15 bp, Homo sapiens
tgtacattatatatt

SEQ ID NO: 1832101 - DNA, 15 bp, Homo sapiens
gtacattatatattc

SEQ ID NO: 1832102 - DNA, 15 bp, Homo sapiens
tacattatatattct

SEQ ID NO: 1832103 - DNA, 15 bp, Homo sapiens
acattatatattctt

SEQ ID NO: 1832104 - DNA, 15 bp, Homo sapiens
cattatatattcttg

SEQ ID NO: 1832105 - DNA, 15 bp, Homo sapiens
attatatattcttga

SEQ ID NO: 1832106 - DNA, 15 bp, Homo sapiens
ttatatattcttgaa

SEQ ID NO: 1832107 - DNA, 15 bp, Homo sapiens
tatatattcttgaag

SEQ ID NO: 1832108 - DNA, 15 bp, Homo sapiens
atatattcttgaaga

SEQ ID NO: 1832109 - DNA, 15 bp, Homo sapiens
tatattcttgaagag

SEQ ID NO: 1832110 - DNA, 15 bp, Homo sapiens
atattcttgaagagt

SEQ ID NO: 1832111 - DNA, 15 bp, Homo sapiens
tattcttgaagagtt

SEQ ID NO: 1832112 - DNA, 15 bp, Homo sapiens
attcttgaagagtta

SEQ ID NO: 1832113 - DNA, 15 bp, Homo sapiens
ttcttgaagagttag

SEQ ID NO: 1832114 - DNA, 15 bp, Homo sapiens
tcttgaagagttagg

SEQ ID NO: 1832115 - DNA, 15 bp, Homo sapiens
cttgaagagttaggc

SEQ ID NO: 1832116 - DNA, 15 bp, Homo sapiens
ttgaagagttaggct

SEQ ID NO: 1832117 - DNA, 15 bp, Homo sapiens
tgaagagttaggctt

SEQ ID NO: 1832118 - DNA, 15 bp, Homo sapiens
gaagagttaggctta

SEQ ID NO: 1832119 - DNA, 15 bp, Homo sapiens
aagagttaggcttat

SEQ ID NO: 1832120 - DNA, 15 bp, Homo sapiens
agagttaggcttatt

SEQ ID NO: 1832121 - DNA, 15 bp, Homo sapiens
gagttaggcttattg

SEQ ID NO: 1832122 - DNA, 15 bp, Homo sapiens
agttaggcttattgg

SEQ ID NO: 1832123 - DNA, 15 bp, Homo sapiens
gttaggcttattggg

SEQ ID NO: 1832124 - DNA, 15 bp, Homo sapiens
ttaggcttattggga

SEQ ID NO: 1832125 - DNA, 15 bp, Homo sapiens
taggcttattgggat

SEQ ID NO: 1832126 - DNA, 15 bp, Homo sapiens
aggcttattgggatt

SEQ ID NO: 1832127 - DNA, 15 bp, Homo sapiens
ggcttattgggattc

SEQ ID NO: 1832128 - DNA, 15 bp, Homo sapiens
gcttattgggattcc

SEQ ID NO: 1832129 - DNA, 15 bp, Homo sapiens
cttattgggattcca

SEQ ID NO: 1832130 - DNA, 15 bp, Homo sapiens
ttattgggattccag

SEQ ID NO: 1832131 - DNA, 15 bp, Homo sapiens
tattgggattccagc

SEQ ID NO: 1832132 - DNA, 15 bp, Homo sapiens
attgggattccagcc

SEQ ID NO: 1832133 - DNA, 15 bp, Homo sapiens
ttgggattccagcct

SEQ ID NO: 1832134 - DNA, 15 bp, Homo sapiens
tgggattccagcctt

SEQ ID NO: 1832135 - DNA, 15 bp, Homo sapiens
gggattccagccttt

SEQ ID NO: 1832136 - DNA, 15 bp, Homo sapiens
ggattccagccttta

SEQ ID NO: 1832137 - DNA, 15 bp, Homo sapiens
gattccagcctttag

SEQ ID NO: 1832138 - DNA, 15 bp, Homo sapiens
attccagcctttagt

SEQ ID NO: 1832139 - DNA, 15 bp, Homo sapiens
ttccagcctttagta

SEQ ID NO: 1832140 - DNA, 15 bp, Homo sapiens
tccagcctttagtag

SEQ ID NO: 1832141 - DNA, 15 bp, Homo sapiens
ccagcctttagtagt

SEQ ID NO: 1832142 - DNA, 15 bp, Homo sapiens
cagcctttagtagtc

SEQ ID NO: 1832143 - DNA, 15 bp, Homo sapiens
agcctttagtagtcc

SEQ ID NO: 1832144 - DNA, 15 bp, Homo sapiens
gcctttagtagtccc

SEQ ID NO: 1832145 - DNA, 15 bp, Homo sapiens
cctttagtagtccca

SEQ ID NO: 1832146 - DNA, 15 bp, Homo sapiens
ctttagtagtcccat

SEQ ID NO: 1832147 - DNA, 15 bp, Homo sapiens
tttagtagtcccatg

SEQ ID NO: 1832148 - DNA, 15 bp, Homo sapiens
ttagtagtcccatga

SEQ ID NO: 1832149 - DNA, 15 bp, Homo sapiens
tagtagtcccatgaa

SEQ ID NO: 1832150 - DNA, 15 bp, Homo sapiens
agtagtcccatgaag

SEQ ID NO: 1832151 - DNA, 15 bp, Homo sapiens
gtagtcccatgaagg

SEQ ID NO: 1832152 - DNA, 15 bp, Homo sapiens
tagtcccatgaaggt

SEQ ID NO: 1832153 - DNA, 15 bp, Homo sapiens
agtcccatgaaggtg

SEQ ID NO: 1832154 - DNA, 15 bp, Homo sapiens
gtcccatgaaggtga

SEQ ID NO: 1832155 - DNA, 15 bp, Homo sapiens
tcccatgaaggtgag

SEQ ID NO: 1832156 - DNA, 15 bp, Homo sapiens
cccatgaaggtgagc

SEQ ID NO: 1832157 - DNA, 15 bp, Homo sapiens
ccatgaaggtgagca

SEQ ID NO: 1832158 - DNA, 15 bp, Homo sapiens
catgaaggtgagcaa

SEQ ID NO: 1832159 - DNA, 15 bp, Homo sapiens
atgaaggtgagcaaa

SEQ ID NO: 1832160 - DNA, 15 bp, Homo sapiens
tgaaggtgagcaaac

SEQ ID NO: 1832161 - DNA, 15 bp, Homo sapiens
gaaggtgagcaaact

SEQ ID NO: 1832162 - DNA, 15 bp, Homo sapiens
aaggtgagcaaactg

SEQ ID NO: 1832163 - DNA, 15 bp, Homo sapiens
ggtgagcaaactgaa

SEQ ID NO: 1832164 - DNA, 15 bp, Homo sapiens
gtgagcaaactgaaa

SEQ ID NO: 1832165 - DNA, 15 bp, Homo sapiens
tgagcaaactgaaat

SEQ ID NO: 1832166 - DNA, 15 bp, Homo sapiens
gagcaaactgaaatg

SEQ ID NO: 1832167 - DNA, 15 bp, Homo sapiens
agcaaactgaaatgt

SEQ ID NO: 1832168 - DNA, 15 bp, Homo sapiens
gcaaactgaaatgta

SEQ ID NO: 1832169 - DNA, 15 bp, Homo sapiens
caaactgaaatgtac

SEQ ID NO: 1832170 - DNA, 15 bp, Homo sapiens
aaactgaaatgtact

SEQ ID NO: 1832171 - DNA, 15 bp, Homo sapiens
aactgaaatgtactt

SEQ ID NO: 1832172 - DNA, 15 bp, Homo sapiens
actgaaatgtactta

SEQ ID NO: 1832173 - DNA, 15 bp, Homo sapiens
ctgaaatgtacttac

SEQ ID NO: 1832174 - DNA, 15 bp, Homo sapiens
tgaaatgtacttact

SEQ ID NO: 1832175 - DNA, 15 bp, Homo sapiens
gaaatgtacttacta

SEQ ID NO: 1832176 - DNA, 15 bp, Homo sapiens
aaatgtacttactag

SEQ ID NO: 1832177 - DNA, 15 bp, Homo sapiens
aatgtacttactagt

SEQ ID NO: 1832178 - DNA, 15 bp, Homo sapiens
atgtacttactagtc

SEQ ID NO: 1832179 - DNA, 15 bp, Homo sapiens
tgtacttactagtct

SEQ ID NO: 1832180 - DNA, 15 bp, Homo sapiens
gtacttactagtctt

SEQ ID NO: 1832181 - DNA, 15 bp, Homo sapiens
tacttactagtctta

SEQ ID NO: 1832182 - DNA, 15 bp, Homo sapiens
acttactagtcttag

SEQ ID NO: 1832183 - DNA, 15 bp, Homo sapiens
cttactagtcttagt

SEQ ID NO: 1832184 - DNA, 15 bp, Homo sapiens
ttactagtcttagtc

SEQ ID NO: 1832185 - DNA, 15 bp, Homo sapiens
tactagtcttagtca

SEQ ID NO: 1832186 - DNA, 15 bp, Homo sapiens
actagtcttagtcat

SEQ ID NO: 1832187 - DNA, 15 bp, Homo sapiens
ctagtcttagtcatt

SEQ ID NO: 1832188 - DNA, 15 bp, Homo sapiens
tagtcttagtcattt

SEQ ID NO: 1832189 - DNA, 15 bp, Homo sapiens
agtcttagtcatttg

SEQ ID NO: 1832190 - DNA, 15 bp, Homo sapiens
gtcttagtcatttgg

SEQ ID NO: 1832191 - DNA, 15 bp, Homo sapiens
tcttagtcatttggt

SEQ ID NO: 1832192 - DNA, 15 bp, Homo sapiens
cttagtcatttggtt

SEQ ID NO: 1832193 - DNA, 15 bp, Homo sapiens
ttagtcatttggttc

SEQ ID NO: 1832194 - DNA, 15 bp, Homo sapiens
tagtcatttggttcg

SEQ ID NO: 1832195 - DNA, 15 bp, Homo sapiens
agtcatttggttcgt

SEQ ID NO: 1832196 - DNA, 15 bp, Homo sapiens
gtcatttggttcgta

SEQ ID NO: 1832197 - DNA, 15 bp, Homo sapiens
tcatttggttcgtaa

SEQ ID NO: 1832198 - DNA, 15 bp, Homo sapiens
catttggttcgtaat

SEQ ID NO: 1832199 - DNA, 15 bp, Homo sapiens
atttggttcgtaata

SEQ ID NO: 1832200 - DNA, 15 bp, Homo sapiens
tttggttcgtaatat

SEQ ID NO: 1832201 - DNA, 15 bp, Homo sapiens
ttggttcgtaatatg

SEQ ID NO: 1832202 - DNA, 15 bp, Homo sapiens
tggttcgtaatatgt

SEQ ID NO: 1832203 - DNA, 15 bp, Homo sapiens
ggttcgtaatatgta

SEQ ID NO: 1832204 - DNA, 15 bp, Homo sapiens
gttcgtaatatgtaa

SEQ ID NO: 1832205 - DNA, 15 bp, Homo sapiens
ttcgtaatatgtaat

SEQ ID NO: 1832206 - DNA, 15 bp, Homo sapiens
tcgtaatatgtaata

SEQ ID NO: 1832207 - DNA, 15 bp, Homo sapiens
cgtaatatgtaatag

SEQ ID NO: 1832208 - DNA, 15 bp, Homo sapiens
gtaatatgtaataga

SEQ ID NO: 1832209 - DNA, 15 bp, Homo sapiens
taatatgtaatagaa

SEQ ID NO: 1832210 - DNA, 15 bp, Homo sapiens
aatatgtaatagaaa

SEQ ID NO: 1832211 - DNA, 15 bp, Homo sapiens
atatgtaatagaaat

SEQ ID NO: 1832212 - DNA, 15 bp, Homo sapiens
tatgtaatagaaatg

SEQ ID NO: 1832213 - DNA, 15 bp, Homo sapiens
atgtaatagaaatgg

SEQ ID NO: 1832214 - DNA, 15 bp, Homo sapiens
tgtaatagaaatggt

SEQ ID NO: 1832215 - DNA, 15 bp, Homo sapiens
gtaatagaaatggtg

SEQ ID NO: 1832216 - DNA, 15 bp, Homo sapiens
taatagaaatggtgc

SEQ ID NO: 1832217 - DNA, 15 bp, Homo sapiens
aatagaaatggtgct

SEQ ID NO: 1832218 - DNA, 15 bp, Homo sapiens
atagaaatggtgctt

SEQ ID NO: 1832219 - DNA, 15 bp, Homo sapiens
tagaaatggtgctta

SEQ ID NO: 1832220 - DNA, 15 bp, Homo sapiens
agaaatggtgcttat

SEQ ID NO: 1832221 - DNA, 15 bp, Homo sapiens
gaaatggtgcttatc

SEQ ID NO: 1832222 - DNA, 15 bp, Homo sapiens
aaatggtgcttatcc

SEQ ID NO: 1832223 - DNA, 15 bp, Homo sapiens
aatggtgcttatcct

SEQ ID NO: 1832224 - DNA, 15 bp, Homo sapiens
atggtgcttatccta

SEQ ID NO: 1832225 - DNA, 15 bp, Homo sapiens
tggtgcttatcctaa

SEQ ID NO: 1832226 - DNA, 15 bp, Homo sapiens
ggtgcttatcctaaa

SEQ ID NO: 1832227 - DNA, 15 bp, Homo sapiens
gtgcttatcctaaaa

SEQ ID NO: 1832228 - DNA, 15 bp, Homo sapiens
tgcttatcctaaaag

SEQ ID NO: 1832229 - DNA, 15 bp, Homo sapiens
gcttatcctaaaaga

SEQ ID NO: 1832230 - DNA, 15 bp, Homo sapiens
cttatcctaaaagaa

SEQ ID NO: 1832231 - DNA, 15 bp, Homo sapiens
ttatcctaaaagaaa

SEQ ID NO: 1832232 - DNA, 15 bp, Homo sapiens
tatcctaaaagaaaa

SEQ ID NO: 1832233 - DNA, 15 bp, Homo sapiens
atcctaaaagaaaaa

SEQ ID NO: 1832234 - DNA, 15 bp, Homo sapiens
tcctaaaagaaaaat

SEQ ID NO: 1832235 - DNA, 15 bp, Homo sapiens
cctaaaagaaaaata

SEQ ID NO: 1832236 - DNA, 15 bp, Homo sapiens
ctaaaagaaaaatag

SEQ ID NO: 1832237 - DNA, 15 bp, Homo sapiens
taaaagaaaaataga

SEQ ID NO: 1832238 - DNA, 15 bp, Homo sapiens
aaaagaaaaatagaa

SEQ ID NO: 1832239 - DNA, 15 bp, Homo sapiens
aaagaaaaatagaaa

SEQ ID NO: 1832240 - DNA, 15 bp, Homo sapiens
aagaaaaatagaaaa

SEQ ID NO: 1832241 - DNA, 15 bp, Homo sapiens
agaaaaatagaaaac

SEQ ID NO: 1832242 - DNA, 15 bp, Homo sapiens
gaaaaatagaaaact

SEQ ID NO: 1832243 - DNA, 15 bp, Homo sapiens
aaaaatagaaaactt

SEQ ID NO: 1832244 - DNA, 15 bp, Homo sapiens
aaaatagaaaacttg

SEQ ID NO: 1832245 - DNA, 15 bp, Homo sapiens
aaatagaaaacttga

SEQ ID NO: 1832246 - DNA, 15 bp, Homo sapiens
aatagaaaacttgag

SEQ ID NO: 1832247 - DNA, 15 bp, Homo sapiens
atagaaaacttgagg

SEQ ID NO: 1832248 - DNA, 15 bp, Homo sapiens
tagaaaacttgaggg

SEQ ID NO: 1832249 - DNA, 15 bp, Homo sapiens
agaaaacttgagggt

SEQ ID NO: 1832250 - DNA, 15 bp, Homo sapiens
gaaaacttgagggtg

SEQ ID NO: 1832251 - DNA, 15 bp, Homo sapiens
aaaacttgagggtga

SEQ ID NO: 1832252 - DNA, 15 bp, Homo sapiens
aaacttgagggtgaa

SEQ ID NO: 1832253 - DNA, 15 bp, Homo sapiens
aacttgagggtgaag

SEQ ID NO: 1832254 - DNA, 15 bp, Homo sapiens
acttgagggtgaagg

SEQ ID NO: 1832255 - DNA, 15 bp, Homo sapiens
cttgagggtgaagga

SEQ ID NO: 1832256 - DNA, 15 bp, Homo sapiens
ttgagggtgaaggat

SEQ ID NO: 1832257 - DNA, 15 bp, Homo sapiens
tgagggtgaaggatc

SEQ ID NO: 1832258 - DNA, 15 bp, Homo sapiens
gagggtgaaggatca

SEQ ID NO: 1832259 - DNA, 15 bp, Homo sapiens
agggtgaaggatcag

SEQ ID NO: 1832260 - DNA, 15 bp, Homo sapiens
gggtgaaggatcaga

SEQ ID NO: 1832261 - DNA, 15 bp, Homo sapiens
ggtgaaggatcagaa

SEQ ID NO: 1832262 - DNA, 15 bp, Homo sapiens
gtgaaggatcagaaa

SEQ ID NO: 1832263 - DNA, 15 bp, Homo sapiens
tgaaggatcagaaat

SEQ ID NO: 1832264 - DNA, 15 bp, Homo sapiens
gaaggatcagaaatt

SEQ ID NO: 1832265 - DNA, 15 bp, Homo sapiens
aaggatcagaaattg

SEQ ID NO: 1832266 - DNA, 15 bp, Homo sapiens
aggatcagaaattga

SEQ ID NO: 1832267 - DNA, 15 bp, Homo sapiens
ggatcagaaattgaa

SEQ ID NO: 1832268 - DNA, 15 bp, Homo sapiens
gatcagaaattgaag

SEQ ID NO: 1832269 - DNA, 15 bp, Homo sapiens
atcagaaattgaaga

SEQ ID NO: 1832270 - DNA, 15 bp, Homo sapiens
tcagaaattgaagac

SEQ ID NO: 1832271 - DNA, 15 bp, Homo sapiens
cagaaattgaagaca

SEQ ID NO: 1832272 - DNA, 15 bp, Homo sapiens
agaaattgaagacag

SEQ ID NO: 1832273 - DNA, 15 bp, Homo sapiens
gaaattgaagacagt

SEQ ID NO: 1832274 - DNA, 15 bp, Homo sapiens
aaattgaagacagta

SEQ ID NO: 1832275 - DNA, 15 bp, Homo sapiens
aattgaagacagtaa

SEQ ID NO: 1832276 - DNA, 15 bp, Homo sapiens
attgaagacagtaaa

SEQ ID NO: 1832277 - DNA, 15 bp, Homo sapiens
ttgaagacagtaaat

SEQ ID NO: 1832278 - DNA, 15 bp, Homo sapiens
tgaagacagtaaata

SEQ ID NO: 1832279 - DNA, 15 bp, Homo sapiens
gaagacagtaaatac

SEQ ID NO: 1832280 - DNA, 15 bp, Homo sapiens
aagacagtaaatact

SEQ ID NO: 1832281 - DNA, 15 bp, Homo sapiens
agacagtaaatactg

SEQ ID NO: 1832282 - DNA, 15 bp, Homo sapiens
gacagtaaatactgc

SEQ ID NO: 1832283 - DNA, 15 bp, Homo sapiens
acagtaaatactgca

SEQ ID NO: 1832284 - DNA, 15 bp, Homo sapiens
cagtaaatactgcat

SEQ ID NO: 1832285 - DNA, 15 bp, Homo sapiens
agtaaatactgcata

SEQ ID NO: 1832286 - DNA, 15 bp, Homo sapiens
gtaaatactgcatag

SEQ ID NO: 1832287 - DNA, 15 bp, Homo sapiens
taaatactgcataga

SEQ ID NO: 1832288 - DNA, 15 bp, Homo sapiens
aaatactgcatagag

SEQ ID NO: 1832289 - DNA, 15 bp, Homo sapiens
aatactgcatagagg

SEQ ID NO: 1832290 - DNA, 15 bp, Homo sapiens
atactgcatagaggt

SEQ ID NO: 1832291 - DNA, 15 bp, Homo sapiens
tactgcatagaggtt

SEQ ID NO: 1832292 - DNA, 15 bp, Homo sapiens
actgcatagaggttt

SEQ ID NO: 1832293 - DNA, 15 bp, Homo sapiens
ctgcatagaggttta

SEQ ID NO: 1832294 - DNA, 15 bp, Homo sapiens
tgcatagaggtttaa

SEQ ID NO: 1832295 - DNA, 15 bp, Homo sapiens
gcatagaggtttaaa

SEQ ID NO: 1832296 - DNA, 15 bp, Homo sapiens
catagaggtttaaat

SEQ ID NO: 1832297 - DNA, 15 bp, Homo sapiens
atagaggtttaaatg

SEQ ID NO: 1832298 - DNA, 15 bp, Homo sapiens
tagaggtttaaatgc

SEQ ID NO: 1832299 - DNA, 15 bp, Homo sapiens
agaggtttaaatgct

SEQ ID NO: 1832300 - DNA, 15 bp, Homo sapiens
gaggtttaaatgcta

SEQ ID NO: 1832301 - DNA, 15 bp, Homo sapiens
aggtttaaatgctag

SEQ ID NO: 1832302 - DNA, 15 bp, Homo sapiens
ggtttaaatgctagg

SEQ ID NO: 1832303 - DNA, 15 bp, Homo sapiens
gtttaaatgctaggg

SEQ ID NO: 1832304 - DNA, 15 bp, Homo sapiens
tttaaatgctagggt

SEQ ID NO: 1832305 - DNA, 15 bp, Homo sapiens
ttaaatgctagggtt

SEQ ID NO: 1832306 - DNA, 15 bp, Homo sapiens
taaatgctagggttt

SEQ ID NO: 1832307 - DNA, 15 bp, Homo sapiens
aaatgctagggtttt

SEQ ID NO: 1832308 - DNA, 15 bp, Homo sapiens
aatgctagggttttt

SEQ ID NO: 1832309 - DNA, 15 bp, Homo sapiens
atgctagggttttta

SEQ ID NO: 1832310 - DNA, 15 bp, Homo sapiens
tgctagggtttttag

SEQ ID NO: 1832311 - DNA, 15 bp, Homo sapiens
gctagggtttttagg

SEQ ID NO: 1832312 - DNA, 15 bp, Homo sapiens
ctagggtttttaggt

SEQ ID NO: 1832313 - DNA, 15 bp, Homo sapiens
tagggtttttaggtt

SEQ ID NO: 1832314 - DNA, 15 bp, Homo sapiens
agggtttttaggttt

SEQ ID NO: 1832315 - DNA, 15 bp, Homo sapiens
gggtttttaggtttt

SEQ ID NO: 1832316 - DNA, 15 bp, Homo sapiens
ggtttttaggttttc

SEQ ID NO: 1832317 - DNA, 15 bp, Homo sapiens
gtttttaggttttct

SEQ ID NO: 1832318 - DNA, 15 bp, Homo sapiens
tttttaggttttctt

SEQ ID NO: 1832319 - DNA, 15 bp, Homo sapiens
ttttaggttttcttt

SEQ ID NO: 1832320 - DNA, 15 bp, Homo sapiens
tttaggttttctttt

SEQ ID NO: 1832321 - DNA, 15 bp, Homo sapiens
ttaggttttcttttt

SEQ ID NO: 1832322 - DNA, 15 bp, Homo sapiens
taggttttctttttt

SEQ ID NO: 1832323 - DNA, 15 bp, Homo sapiens
aggttttcttttttt

SEQ ID NO: 1832324 - DNA, 15 bp, Homo sapiens
gttttcttttttttt

SEQ ID NO: 1832325 - DNA, 15 bp, Homo sapiens
ttttttgagatagtc

SEQ ID NO: 1832326 - DNA, 15 bp, Homo sapiens
tttttgagatagtct

SEQ ID NO: 1832327 - DNA, 15 bp, Homo sapiens
ttttgagatagtctt

SEQ ID NO: 1832328 - DNA, 15 bp, Homo sapiens
tttgagatagtcttg

SEQ ID NO: 1832329 - DNA, 15 bp, Homo sapiens
ttgagatagtcttgc

SEQ ID NO: 1832330 - DNA, 15 bp, Homo sapiens
tgagatagtcttgct

SEQ ID NO: 1832331 - DNA, 15 bp, Homo sapiens
gagatagtcttgctc

SEQ ID NO: 1832332 - DNA, 15 bp, Homo sapiens
agatagtcttgctct

SEQ ID NO: 1832333 - DNA, 15 bp, Homo sapiens
gatagtcttgctctg

SEQ ID NO: 1832334 - DNA, 15 bp, Homo sapiens
atagtcttgctctga

SEQ ID NO: 1832335 - DNA, 15 bp, Homo sapiens
tagtcttgctctgac

SEQ ID NO: 1832336 - DNA, 15 bp, Homo sapiens
agtcttgctctgaca

SEQ ID NO: 1832337 - DNA, 15 bp, Homo sapiens
gtcttgctctgacac

SEQ ID NO: 1832338 - DNA, 15 bp, Homo sapiens
tcttgctctgacacc

SEQ ID NO: 1832339 - DNA, 15 bp, Homo sapiens
cttgctctgacaccc

SEQ ID NO: 1832340 - DNA, 15 bp, Homo sapiens
ttgctctgacaccca

SEQ ID NO: 1832341 - DNA, 15 bp, Homo sapiens
tgctctgacacccag

SEQ ID NO: 1832342 - DNA, 15 bp, Homo sapiens
gctctgacacccagg

SEQ ID NO: 1832343 - DNA, 15 bp, Homo sapiens
ctctgacacccaggc

SEQ ID NO: 1832344 - DNA, 15 bp, Homo sapiens
tctgacacccaggct

SEQ ID NO: 1832345 - DNA, 15 bp, Homo sapiens
ctgacacccaggctg

SEQ ID NO: 1832346 - DNA, 15 bp, Homo sapiens
tgacacccaggctgg

SEQ ID NO: 1832347 - DNA, 15 bp, Homo sapiens
gacacccaggctgga

SEQ ID NO: 1832348 - DNA, 15 bp, Homo sapiens
acacccaggctggac

SEQ ID NO: 1832349 - DNA, 15 bp, Homo sapiens
cccaggctggactgc

SEQ ID NO: 1832350 - DNA, 15 bp, Homo sapiens
ccaggctggactgca

SEQ ID NO: 1832351 - DNA, 15 bp, Homo sapiens
caggctggactgcaa

SEQ ID NO: 1832352 - DNA, 15 bp, Homo sapiens
aggctggactgcaac

SEQ ID NO: 1832353 - DNA, 15 bp, Homo sapiens
ggctggactgcaacc

SEQ ID NO: 1832354 - DNA, 15 bp, Homo sapiens
gctggactgcaacct

SEQ ID NO: 1832355 - DNA, 15 bp, Homo sapiens
ctggactgcaacctc

SEQ ID NO: 1832356 - DNA, 15 bp, Homo sapiens
tggactgcaacctct

SEQ ID NO: 1832357 - DNA, 15 bp, Homo sapiens
ggactgcaacctctg

SEQ ID NO: 1832358 - DNA, 15 bp, Homo sapiens
gactgcaacctctgt

SEQ ID NO: 1832359 - DNA, 15 bp, Homo sapiens
actgcaacctctgtt

SEQ ID NO: 1832360 - DNA, 15 bp, Homo sapiens
ctgcaacctctgttc

SEQ ID NO: 1832361 - DNA, 15 bp, Homo sapiens
tgcaacctctgttcc

SEQ ID NO: 1832362 - DNA, 15 bp, Homo sapiens
gcaacctctgttccc

SEQ ID NO: 1832363 - DNA, 15 bp, Homo sapiens
caacctctgttccct

SEQ ID NO: 1832364 - DNA, 15 bp, Homo sapiens
aacctctgttccctg

SEQ ID NO: 1832365 - DNA, 15 bp, Homo sapiens
acctctgttccctgg

SEQ ID NO: 1832366 - DNA, 15 bp, Homo sapiens
cctctgttccctggc

SEQ ID NO: 1832367 - DNA, 15 bp, Homo sapiens
ctctgttccctggcc

SEQ ID NO: 1832368 - DNA, 15 bp, Homo sapiens
tctgttccctggcct

SEQ ID NO: 1832369 - DNA, 15 bp, Homo sapiens
ctgttccctggcctc

SEQ ID NO: 1832370 - DNA, 15 bp, Homo sapiens
tgttccctggcctca

SEQ ID NO: 1832371 - DNA, 15 bp, Homo sapiens
gttccctggcctcaa

SEQ ID NO: 1832372 - DNA, 15 bp, Homo sapiens
ttccctggcctcaag

SEQ ID NO: 1832373 - DNA, 15 bp, Homo sapiens
tccctggcctcaagc

SEQ ID NO: 1832374 - DNA, 15 bp, Homo sapiens
ccctggcctcaagcg

SEQ ID NO: 1832375 - DNA, 15 bp, Homo sapiens
cgatcctcccacctt

SEQ ID NO: 1832376 - DNA, 15 bp, Homo sapiens
tcctcccaccttagc

SEQ ID NO: 1832377 - DNA, 15 bp, Homo sapiens
cctcccaccttagcc

SEQ ID NO: 1832378 - DNA, 15 bp, Homo sapiens
ctcccaccttagcct

SEQ ID NO: 1832379 - DNA, 15 bp, Homo sapiens
tcccaccttagcctc

SEQ ID NO: 1832380 - DNA, 15 bp, Homo sapiens
ccaccttagcctcct

SEQ ID NO: 1832381 - DNA, 15 bp, Homo sapiens
caccttagcctcctg

SEQ ID NO: 1832382 - DNA, 15 bp, Homo sapiens
accttagcctcctga

SEQ ID NO: 1832383 - DNA, 15 bp, Homo sapiens
ccttagcctcctgac

SEQ ID NO: 1832384 - DNA, 15 bp, Homo sapiens
cttagcctcctgact

SEQ ID NO: 1832385 - DNA, 15 bp, Homo sapiens
ttagcctcctgacta

SEQ ID NO: 1832386 - DNA, 15 bp, Homo sapiens
tagcctcctgactag

SEQ ID NO: 1832387 - DNA, 15 bp, Homo sapiens
agcctcctgactagc

SEQ ID NO: 1832388 - DNA, 15 bp, Homo sapiens
gcctcctgactagct

SEQ ID NO: 1832389 - DNA, 15 bp, Homo sapiens
cctcctgactagctg

SEQ ID NO: 1832390 - DNA, 15 bp, Homo sapiens
ctcctgactagctgt

SEQ ID NO: 1832391 - DNA, 15 bp, Homo sapiens
tcctgactagctgtg

SEQ ID NO: 1832392 - DNA, 15 bp, Homo sapiens
cctgactagctgtga

SEQ ID NO: 1832393 - DNA, 15 bp, Homo sapiens
ctgactagctgtgac

SEQ ID NO: 1832394 - DNA, 15 bp, Homo sapiens
tgactagctgtgacc

SEQ ID NO: 1832395 - DNA, 15 bp, Homo sapiens
gactagctgtgacca

SEQ ID NO: 1832396 - DNA, 15 bp, Homo sapiens
actagctgtgaccac

SEQ ID NO: 1832397 - DNA, 15 bp, Homo sapiens
ctagctgtgaccaca

SEQ ID NO: 1832398 - DNA, 15 bp, Homo sapiens
tagctgtgaccacag

SEQ ID NO: 1832399 - DNA, 15 bp, Homo sapiens
agctgtgaccacaga

SEQ ID NO: 1832400 - DNA, 15 bp, Homo sapiens
gctgtgaccacagat

SEQ ID NO: 1832401 - DNA, 15 bp, Homo sapiens
ctgtgaccacagatg

SEQ ID NO: 1832402 - DNA, 15 bp, Homo sapiens
tgtgaccacagatgt

SEQ ID NO: 1832403 - DNA, 15 bp, Homo sapiens
gtgaccacagatgtg

SEQ ID NO: 1832404 - DNA, 15 bp, Homo sapiens
tgaccacagatgtgc

SEQ ID NO: 1832405 - DNA, 15 bp, Homo sapiens
gaccacagatgtgca

SEQ ID NO: 1832406 - DNA, 15 bp, Homo sapiens
accacagatgtgcac

SEQ ID NO: 1832407 - DNA, 15 bp, Homo sapiens
ccacagatgtgcacc

SEQ ID NO: 1832408 - DNA, 15 bp, Homo sapiens
cacagatgtgcacca

SEQ ID NO: 1832409 - DNA, 15 bp, Homo sapiens
acagatgtgcaccac

SEQ ID NO: 1832410 - DNA, 15 bp, Homo sapiens
cagatgtgcaccacc

SEQ ID NO: 1832411 - DNA, 15 bp, Homo sapiens
agatgtgcaccacca

SEQ ID NO: 1832412 - DNA, 15 bp, Homo sapiens
gatgtgcaccaccat

SEQ ID NO: 1832413 - DNA, 15 bp, Homo sapiens
atgtgcaccaccatg

SEQ ID NO: 1832414 - DNA, 15 bp, Homo sapiens
ccggctatttttttt

SEQ ID NO: 1832415 - DNA, 15 bp, Homo sapiens
cggctattttttttt

SEQ ID NO: 1832416 - DNA, 15 bp, Homo sapiens
ggctatttttttttg

SEQ ID NO: 1832417 - DNA, 15 bp, Homo sapiens
gctatttttttttgt

SEQ ID NO: 1832418 - DNA, 15 bp, Homo sapiens
ctatttttttttgta

SEQ ID NO: 1832419 - DNA, 15 bp, Homo sapiens
tatttttttttgtat

SEQ ID NO: 1832420 - DNA, 15 bp, Homo sapiens
atttttttttgtatt

SEQ ID NO: 1832421 - DNA, 15 bp, Homo sapiens
tttttttttgtattt

SEQ ID NO: 1832422 - DNA, 15 bp, Homo sapiens
ggtagagatggggtc

SEQ ID NO: 1832423 - DNA, 15 bp, Homo sapiens
agagatggggtctcg

SEQ ID NO: 1832424 - DNA, 15 bp, Homo sapiens
gagatggggtctcgc

SEQ ID NO: 1832425 - DNA, 15 bp, Homo sapiens
agatggggtctcgcc

SEQ ID NO: 1832426 - DNA, 15 bp, Homo sapiens
gatggggtctcgcca

SEQ ID NO: 1832427 - DNA, 15 bp, Homo sapiens
atggggtctcgccat

SEQ ID NO: 1832428 - DNA, 15 bp, Homo sapiens
tggggtctcgccatg

SEQ ID NO: 1832429 - DNA, 15 bp, Homo sapiens
ggggtctcgccatgt

SEQ ID NO: 1832430 - DNA, 15 bp, Homo sapiens
gggtctcgccatgtt

SEQ ID NO: 1832431 - DNA, 15 bp, Homo sapiens
ggtctcgccatgttg

SEQ ID NO: 1832432 - DNA, 15 bp, Homo sapiens
gtctcgccatgttgc

SEQ ID NO: 1832433 - DNA, 15 bp, Homo sapiens
tctcgccatgttgcc

SEQ ID NO: 1832434 - DNA, 15 bp, Homo sapiens
ctcgccatgttgccc

SEQ ID NO: 1832435 - DNA, 15 bp, Homo sapiens
gccatgttgcccagt

SEQ ID NO: 1832436 - DNA, 15 bp, Homo sapiens
ccatgttgcccagtc

SEQ ID NO: 1832437 - DNA, 15 bp, Homo sapiens
catgttgcccagtcc

SEQ ID NO: 1832438 - DNA, 15 bp, Homo sapiens
atgttgcccagtcca

SEQ ID NO: 1832439 - DNA, 15 bp, Homo sapiens
tgttgcccagtccag

SEQ ID NO: 1832440 - DNA, 15 bp, Homo sapiens
gttgcccagtccagt

SEQ ID NO: 1832441 - DNA, 15 bp, Homo sapiens
ttgcccagtccagtg

SEQ ID NO: 1832442 - DNA, 15 bp, Homo sapiens
tgcccagtccagtgc

SEQ ID NO: 1832443 - DNA, 15 bp, Homo sapiens
gcccagtccagtgct

SEQ ID NO: 1832444 - DNA, 15 bp, Homo sapiens
cccagtccagtgctg

SEQ ID NO: 1832445 - DNA, 15 bp, Homo sapiens
ccagtccagtgctgg

SEQ ID NO: 1832446 - DNA, 15 bp, Homo sapiens
cagtccagtgctgga

SEQ ID NO: 1832447 - DNA, 15 bp, Homo sapiens
agtccagtgctggat

SEQ ID NO: 1832448 - DNA, 15 bp, Homo sapiens
gtccagtgctggatt

SEQ ID NO: 1832449 - DNA, 15 bp, Homo sapiens
tccagtgctggattt

SEQ ID NO: 1832450 - DNA, 15 bp, Homo sapiens
ccagtgctggatttt

SEQ ID NO: 1832451 - DNA, 15 bp, Homo sapiens
cagtgctggattttc

SEQ ID NO: 1832452 - DNA, 15 bp, Homo sapiens
agtgctggattttca

SEQ ID NO: 1832453 - DNA, 15 bp, Homo sapiens
gtgctggattttcat

SEQ ID NO: 1832454 - DNA, 15 bp, Homo sapiens
tgctggattttcata

SEQ ID NO: 1832455 - DNA, 15 bp, Homo sapiens
gctggattttcatat

SEQ ID NO: 1832456 - DNA, 15 bp, Homo sapiens
ctggattttcatatc

SEQ ID NO: 1832457 - DNA, 15 bp, Homo sapiens
tggattttcatatca

SEQ ID NO: 1832458 - DNA, 15 bp, Homo sapiens
ggattttcatatcaa

SEQ ID NO: 1832459 - DNA, 15 bp, Homo sapiens
gattttcatatcaaa

SEQ ID NO: 1832460 - DNA, 15 bp, Homo sapiens
attttcatatcaaaa

SEQ ID NO: 1832461 - DNA, 15 bp, Homo sapiens
ttttcatatcaaaac

SEQ ID NO: 1832462 - DNA, 15 bp, Homo sapiens
tttcatatcaaaaca

SEQ ID NO: 1832463 - DNA, 15 bp, Homo sapiens
ttcatatcaaaacag

SEQ ID NO: 1832464 - DNA, 15 bp, Homo sapiens
tcatatcaaaacagg

SEQ ID NO: 1832465 - DNA, 15 bp, Homo sapiens
catatcaaaacaggg

SEQ ID NO: 1832466 - DNA, 15 bp, Homo sapiens
atatcaaaacagggc

SEQ ID NO: 1832467 - DNA, 15 bp, Homo sapiens
tatcaaaacagggct

SEQ ID NO: 1832468 - DNA, 15 bp, Homo sapiens
atcaaaacagggctc

SEQ ID NO: 1832469 - DNA, 15 bp, Homo sapiens
tcaaaacagggctct

SEQ ID NO: 1832470 - DNA, 15 bp, Homo sapiens
caaaacagggctctg

SEQ ID NO: 1832471 - DNA, 15 bp, Homo sapiens
aaaacagggctctgc

SEQ ID NO: 1832472 - DNA, 15 bp, Homo sapiens
aaacagggctctgct

SEQ ID NO: 1832473 - DNA, 15 bp, Homo sapiens
aacagggctctgcta

SEQ ID NO: 1832474 - DNA, 15 bp, Homo sapiens
acagggctctgctac

SEQ ID NO: 1832475 - DNA, 15 bp, Homo sapiens
cagggctctgctact

SEQ ID NO: 1832476 - DNA, 15 bp, Homo sapiens
agggctctgctactt

SEQ ID NO: 1832477 - DNA, 15 bp, Homo sapiens
gggctctgctactta

SEQ ID NO: 1832478 - DNA, 15 bp, Homo sapiens
ggctctgctacttac

SEQ ID NO: 1832479 - DNA, 15 bp, Homo sapiens
gctctgctacttact

SEQ ID NO: 1832480 - DNA, 15 bp, Homo sapiens
ctctgctacttactt

SEQ ID NO: 1832481 - DNA, 15 bp, Homo sapiens
tctgctacttacttg

SEQ ID NO: 1832482 - DNA, 15 bp, Homo sapiens
ctgctacttacttgc

SEQ ID NO: 1832483 - DNA, 15 bp, Homo sapiens
tgctacttacttgct

SEQ ID NO: 1832484 - DNA, 15 bp, Homo sapiens
gctacttacttgctc

SEQ ID NO: 1832485 - DNA, 15 bp, Homo sapiens
ctacttacttgctct

SEQ ID NO: 1832486 - DNA, 15 bp, Homo sapiens
tacttacttgctctt

SEQ ID NO: 1832487 - DNA, 15 bp, Homo sapiens
acttacttgctcttg

SEQ ID NO: 1832488 - DNA, 15 bp, Homo sapiens
cttacttgctcttgt

SEQ ID NO: 1832489 - DNA, 15 bp, Homo sapiens
ttacttgctcttgtg

SEQ ID NO: 1832490 - DNA, 15 bp, Homo sapiens
tacttgctcttgtga

SEQ ID NO: 1832491 - DNA, 15 bp, Homo sapiens
acttgctcttgtgac

SEQ ID NO: 1832492 - DNA, 15 bp, Homo sapiens
cttgctcttgtgacc

SEQ ID NO: 1832493 - DNA, 15 bp, Homo sapiens
ttgctcttgtgacca

SEQ ID NO: 1832494 - DNA, 15 bp, Homo sapiens
tgctcttgtgaccaa

SEQ ID NO: 1832495 - DNA, 15 bp, Homo sapiens
gctcttgtgaccaaa

SEQ ID NO: 1832496 - DNA, 15 bp, Homo sapiens
ctcttgtgaccaaaa

SEQ ID NO: 1832497 - DNA, 15 bp, Homo sapiens
tcttgtgaccaaaat

SEQ ID NO: 1832498 - DNA, 15 bp, Homo sapiens
cttgtgaccaaaatg

SEQ ID NO: 1832499 - DNA, 15 bp, Homo sapiens
ttgtgaccaaaatgg

SEQ ID NO: 1832500 - DNA, 15 bp, Homo sapiens
tgtgaccaaaatggc

SEQ ID NO: 1832501 - DNA, 15 bp, Homo sapiens
gtgaccaaaatggca

SEQ ID NO: 1832502 - DNA, 15 bp, Homo sapiens
tgaccaaaatggcaa

SEQ ID NO: 1832503 - DNA, 15 bp, Homo sapiens
gaccaaaatggcaag

SEQ ID NO: 1832504 - DNA, 15 bp, Homo sapiens
accaaaatggcaagt

SEQ ID NO: 1832505 - DNA, 15 bp, Homo sapiens
ccaaaatggcaagtt

SEQ ID NO: 1832506 - DNA, 15 bp, Homo sapiens
caaaatggcaagtta

SEQ ID NO: 1832507 - DNA, 15 bp, Homo sapiens
aaaatggcaagttag

SEQ ID NO: 1832508 - DNA, 15 bp, Homo sapiens
aaatggcaagttagg

SEQ ID NO: 1832509 - DNA, 15 bp, Homo sapiens
aatggcaagttaggt

SEQ ID NO: 1832510 - DNA, 15 bp, Homo sapiens
atggcaagttaggtt

SEQ ID NO: 1832511 - DNA, 15 bp, Homo sapiens
tggcaagttaggttt

SEQ ID NO: 1832512 - DNA, 15 bp, Homo sapiens
ggcaagttaggtttg

SEQ ID NO: 1832513 - DNA, 15 bp, Homo sapiens
gcaagttaggtttgt

SEQ ID NO: 1832514 - DNA, 15 bp, Homo sapiens
caagttaggtttgtt

SEQ ID NO: 1832515 - DNA, 15 bp, Homo sapiens
aagttaggtttgttt

SEQ ID NO: 1832516 - DNA, 15 bp, Homo sapiens
agttaggtttgtttt

SEQ ID NO: 1832517 - DNA, 15 bp, Homo sapiens
gttaggtttgttttg

SEQ ID NO: 1832518 - DNA, 15 bp, Homo sapiens
ttaggtttgttttgt

SEQ ID NO: 1832519 - DNA, 15 bp, Homo sapiens
taggtttgttttgta

SEQ ID NO: 1832520 - DNA, 15 bp, Homo sapiens
aggtttgttttgtat

SEQ ID NO: 1832521 - DNA, 15 bp, Homo sapiens
ggtttgttttgtatt

SEQ ID NO: 1832522 - DNA, 15 bp, Homo sapiens
gtttgttttgtattt

SEQ ID NO: 1832523 - DNA, 15 bp, Homo sapiens
tttgttttgtatttg

SEQ ID NO: 1832524 - DNA, 15 bp, Homo sapiens
ttgttttgtatttgt

SEQ ID NO: 1832525 - DNA, 15 bp, Homo sapiens
tgttttgtatttgtt

SEQ ID NO: 1832526 - DNA, 15 bp, Homo sapiens
gttttgtatttgttt

SEQ ID NO: 1832527 - DNA, 15 bp, Homo sapiens
ttgtatttgttttca

SEQ ID NO: 1832528 - DNA, 15 bp, Homo sapiens
tgtatttgttttcat

SEQ ID NO: 1832529 - DNA, 15 bp, Homo sapiens
gtatttgttttcatc

SEQ ID NO: 1832530 - DNA, 15 bp, Homo sapiens
tatttgttttcatct

SEQ ID NO: 1832531 - DNA, 15 bp, Homo sapiens
atttgttttcatctg

SEQ ID NO: 1832532 - DNA, 15 bp, Homo sapiens
tttgttttcatctgc

SEQ ID NO: 1832533 - DNA, 15 bp, Homo sapiens
ttgttttcatctgca

SEQ ID NO: 1832534 - DNA, 15 bp, Homo sapiens
tgttttcatctgcat

SEQ ID NO: 1832535 - DNA, 15 bp, Homo sapiens
gttttcatctgcatc

SEQ ID NO: 1832536 - DNA, 15 bp, Homo sapiens
ttttcatctgcatcg

SEQ ID NO: 1832537 - DNA, 15 bp, Homo sapiens
tttcatctgcatcgg

SEQ ID NO: 1832538 - DNA, 15 bp, Homo sapiens
ttcatctgcatcggg

SEQ ID NO: 1832539 - DNA, 15 bp, Homo sapiens
tcatctgcatcgggg

SEQ ID NO: 1832540 - DNA, 15 bp, Homo sapiens
catctgcatcggggt

SEQ ID NO: 1832541 - DNA, 15 bp, Homo sapiens
atctgcatcggggta

SEQ ID NO: 1832542 - DNA, 15 bp, Homo sapiens
tctgcatcggggtat

SEQ ID NO: 1832543 - DNA, 15 bp, Homo sapiens
ctgcatcggggtata

SEQ ID NO: 1832544 - DNA, 15 bp, Homo sapiens
tgcatcggggtatat

SEQ ID NO: 1832545 - DNA, 15 bp, Homo sapiens
gcatcggggtatatg

SEQ ID NO: 1832546 - DNA, 15 bp, Homo sapiens
catcggggtatatgt

SEQ ID NO: 1832547 - DNA, 15 bp, Homo sapiens
atcggggtatatgtt

SEQ ID NO: 1832548 - DNA, 15 bp, Homo sapiens
tcggggtatatgttc

SEQ ID NO: 1832549 - DNA, 15 bp, Homo sapiens
cggggtatatgttca

SEQ ID NO: 1832550 - DNA, 15 bp, Homo sapiens
ggggtatatgttcac

SEQ ID NO: 1832551 - DNA, 15 bp, Homo sapiens
gggtatatgttcaca

SEQ ID NO: 1832552 - DNA, 15 bp, Homo sapiens
ggtatatgttcacag

SEQ ID NO: 1832553 - DNA, 15 bp, Homo sapiens
gtatatgttcacagc

SEQ ID NO: 1832554 - DNA, 15 bp, Homo sapiens
tatatgttcacagct

SEQ ID NO: 1832555 - DNA, 15 bp, Homo sapiens
atatgttcacagctg

SEQ ID NO: 1832556 - DNA, 15 bp, Homo sapiens
tatgttcacagctgg

SEQ ID NO: 1832557 - DNA, 15 bp, Homo sapiens
atgttcacagctgga

SEQ ID NO: 1832558 - DNA, 15 bp, Homo sapiens
tgttcacagctggat

SEQ ID NO: 1832559 - DNA, 15 bp, Homo sapiens
gttcacagctggatc

SEQ ID NO: 1832560 - DNA, 15 bp, Homo sapiens
ttcacagctggatca

SEQ ID NO: 1832561 - DNA, 15 bp, Homo sapiens
tcacagctggatcag

SEQ ID NO: 1832562 - DNA, 15 bp, Homo sapiens
cacagctggatcagc

SEQ ID NO: 1832563 - DNA, 15 bp, Homo sapiens
acagctggatcagca

SEQ ID NO: 1832564 - DNA, 15 bp, Homo sapiens
cagctggatcagcaa

SEQ ID NO: 1832565 - DNA, 15 bp, Homo sapiens
agctggatcagcaaa

SEQ ID NO: 1832566 - DNA, 15 bp, Homo sapiens
gctggatcagcaaac

SEQ ID NO: 1832567 - DNA, 15 bp, Homo sapiens
ctggatcagcaaact

SEQ ID NO: 1832568 - DNA, 15 bp, Homo sapiens
tggatcagcaaactt

SEQ ID NO: 1832569 - DNA, 15 bp, Homo sapiens
ggatcagcaaacttt

SEQ ID NO: 1832570 - DNA, 15 bp, Homo sapiens
gatcagcaaactttc

SEQ ID NO: 1832571 - DNA, 15 bp, Homo sapiens
atcagcaaactttct

SEQ ID NO: 1832572 - DNA, 15 bp, Homo sapiens
tcagcaaactttctg

SEQ ID NO: 1832573 - DNA, 15 bp, Homo sapiens
cagcaaactttctgt

SEQ ID NO: 1832574 - DNA, 15 bp, Homo sapiens
agcaaactttctgta

SEQ ID NO: 1832575 - DNA, 15 bp, Homo sapiens
gcaaactttctgtag

SEQ ID NO: 1832576 - DNA, 15 bp, Homo sapiens
caaactttctgtagt

SEQ ID NO: 1832577 - DNA, 15 bp, Homo sapiens
aaactttctgtagta

SEQ ID NO: 1832578 - DNA, 15 bp, Homo sapiens
aactttctgtagtaa

SEQ ID NO: 1832579 - DNA, 15 bp, Homo sapiens
actttctgtagtaag

SEQ ID NO: 1832580 - DNA, 15 bp, Homo sapiens
ctttctgtagtaagg

SEQ ID NO: 1832581 - DNA, 15 bp, Homo sapiens
tttctgtagtaaggt

SEQ ID NO: 1832582 - DNA, 15 bp, Homo sapiens
ttctgtagtaaggta

SEQ ID NO: 1832583 - DNA, 15 bp, Homo sapiens
tctgtagtaaggtag

SEQ ID NO: 1832584 - DNA, 15 bp, Homo sapiens
ctgtagtaaggtagg

SEQ ID NO: 1832585 - DNA, 15 bp, Homo sapiens
tgtagtaaggtaggg

SEQ ID NO: 1832586 - DNA, 15 bp, Homo sapiens
gtagtaaggtagggc

SEQ ID NO: 1832587 - DNA, 15 bp, Homo sapiens
tagtaaggtagggcc

SEQ ID NO: 1832588 - DNA, 15 bp, Homo sapiens
agtaaggtagggcct

SEQ ID NO: 1832589 - DNA, 15 bp, Homo sapiens
gtaaggtagggcctg

SEQ ID NO: 1832590 - DNA, 15 bp, Homo sapiens
taaggtagggcctgg

SEQ ID NO: 1832591 - DNA, 15 bp, Homo sapiens
aaggtagggcctggt

SEQ ID NO: 1832592 - DNA, 15 bp, Homo sapiens
aggtagggcctggta

SEQ ID NO: 1832593 - DNA, 15 bp, Homo sapiens
ggtagggcctggtag

SEQ ID NO: 1832594 - DNA, 15 bp, Homo sapiens
gtagggcctggtagt

SEQ ID NO: 1832595 - DNA, 15 bp, Homo sapiens
tagggcctggtagta

SEQ ID NO: 1832596 - DNA, 15 bp, Homo sapiens
agggcctggtagtaa

SEQ ID NO: 1832597 - DNA, 15 bp, Homo sapiens
gggcctggtagtaaa

SEQ ID NO: 1832598 - DNA, 15 bp, Homo sapiens
ggcctggtagtaaat

SEQ ID NO: 1832599 - DNA, 15 bp, Homo sapiens
gcctggtagtaaata

SEQ ID NO: 1832600 - DNA, 15 bp, Homo sapiens
cctggtagtaaatat

SEQ ID NO: 1832601 - DNA, 15 bp, Homo sapiens
ctggtagtaaatatg

SEQ ID NO: 1832602 - DNA, 15 bp, Homo sapiens
tggtagtaaatatgt

SEQ ID NO: 1832603 - DNA, 15 bp, Homo sapiens
ggtagtaaatatgta

SEQ ID NO: 1832604 - DNA, 15 bp, Homo sapiens
gtagtaaatatgtag

SEQ ID NO: 1832605 - DNA, 15 bp, Homo sapiens
tagtaaatatgtagt

SEQ ID NO: 1832606 - DNA, 15 bp, Homo sapiens
agtaaatatgtagta

SEQ ID NO: 1832607 - DNA, 15 bp, Homo sapiens
gtaaatatgtagtat

SEQ ID NO: 1832608 - DNA, 15 bp, Homo sapiens
taaatatgtagtatg

SEQ ID NO: 1832609 - DNA, 15 bp, Homo sapiens
aaatatgtagtatgc

SEQ ID NO: 1832610 - DNA, 15 bp, Homo sapiens
aatatgtagtatgct

SEQ ID NO: 1832611 - DNA, 15 bp, Homo sapiens
atatgtagtatgctt

SEQ ID NO: 1832612 - DNA, 15 bp, Homo sapiens
tatgtagtatgcttt

SEQ ID NO: 1832613 - DNA, 15 bp, Homo sapiens
atgtagtatgctttg

SEQ ID NO: 1832614 - DNA, 15 bp, Homo sapiens
tgtagtatgctttgc

SEQ ID NO: 1832615 - DNA, 15 bp, Homo sapiens
gtagtatgctttgca

SEQ ID NO: 1832616 - DNA, 15 bp, Homo sapiens
tagtatgctttgcag

SEQ ID NO: 1832617 - DNA, 15 bp, Homo sapiens
agtatgctttgcaga

SEQ ID NO: 1832618 - DNA, 15 bp, Homo sapiens
gtatgctttgcagac

SEQ ID NO: 1832619 - DNA, 15 bp, Homo sapiens
tatgctttgcagact

SEQ ID NO: 1832620 - DNA, 15 bp, Homo sapiens
atgctttgcagactg

SEQ ID NO: 1832621 - DNA, 15 bp, Homo sapiens
tgctttgcagactgc

SEQ ID NO: 1832622 - DNA, 15 bp, Homo sapiens
gctttgcagactgca

SEQ ID NO: 1832623 - DNA, 15 bp, Homo sapiens
ctttgcagactgcat

SEQ ID NO: 1832624 - DNA, 15 bp, Homo sapiens
tttgcagactgcata

SEQ ID NO: 1832625 - DNA, 15 bp, Homo sapiens
ttgcagactgcatag

SEQ ID NO: 1832626 - DNA, 15 bp, Homo sapiens
tgcagactgcatagg

SEQ ID NO: 1832627 - DNA, 15 bp, Homo sapiens
gcagactgcataggg

SEQ ID NO: 1832628 - DNA, 15 bp, Homo sapiens
cagactgcatagggt

SEQ ID NO: 1832629 - DNA, 15 bp, Homo sapiens
agactgcatagggtc

SEQ ID NO: 1832630 - DNA, 15 bp, Homo sapiens
gactgcatagggtct

SEQ ID NO: 1832631 - DNA, 15 bp, Homo sapiens
actgcatagggtctc

SEQ ID NO: 1832632 - DNA, 15 bp, Homo sapiens
ctgcatagggtctct

SEQ ID NO: 1832633 - DNA, 15 bp, Homo sapiens
tgcatagggtctctg

SEQ ID NO: 1832634 - DNA, 15 bp, Homo sapiens
gcatagggtctctgt

SEQ ID NO: 1832635 - DNA, 15 bp, Homo sapiens
catagggtctctgtc

SEQ ID NO: 1832636 - DNA, 15 bp, Homo sapiens
atagggtctctgtca

SEQ ID NO: 1832637 - DNA, 15 bp, Homo sapiens
tagggtctctgtcat

SEQ ID NO: 1832638 - DNA, 15 bp, Homo sapiens
agggtctctgtcata

SEQ ID NO: 1832639 - DNA, 15 bp, Homo sapiens
gggtctctgtcatat

SEQ ID NO: 1832640 - DNA, 15 bp, Homo sapiens
ggtctctgtcatatg

SEQ ID NO: 1832641 - DNA, 15 bp, Homo sapiens
gtctctgtcatatgt

SEQ ID NO: 1832642 - DNA, 15 bp, Homo sapiens
tctctgtcatatgtt

SEQ ID NO: 1832643 - DNA, 15 bp, Homo sapiens
ctctgtcatatgttc

SEQ ID NO: 1832644 - DNA, 15 bp, Homo sapiens
tctgtcatatgttct

SEQ ID NO: 1832645 - DNA, 15 bp, Homo sapiens
ctgtcatatgttctt

SEQ ID NO: 1832646 - DNA, 15 bp, Homo sapiens
tgtcatatgttcttt

SEQ ID NO: 1832647 - DNA, 15 bp, Homo sapiens
gtcatatgttctttg

SEQ ID NO: 1832648 - DNA, 15 bp, Homo sapiens
tcatatgttctttgt

SEQ ID NO: 1832649 - DNA, 15 bp, Homo sapiens
catatgttctttgtt

SEQ ID NO: 1832650 - DNA, 15 bp, Homo sapiens
atatgttctttgttt

SEQ ID NO: 1832651 - DNA, 15 bp, Homo sapiens
tatgttctttgtttt

SEQ ID NO: 1832652 - DNA, 15 bp, Homo sapiens
atgttctttgttttc

SEQ ID NO: 1832653 - DNA, 15 bp, Homo sapiens
tgttctttgttttct

SEQ ID NO: 1832654 - DNA, 15 bp, Homo sapiens
gttctttgttttctt

SEQ ID NO: 1832655 - DNA, 15 bp, Homo sapiens
ttctttgttttcttt

SEQ ID NO: 1832656 - DNA, 15 bp, Homo sapiens
tctttgttttcttta

SEQ ID NO: 1832657 - DNA, 15 bp, Homo sapiens
ctttgttttctttac

SEQ ID NO: 1832658 - DNA, 15 bp, Homo sapiens
tttgttttctttaca

SEQ ID NO: 1832659 - DNA, 15 bp, Homo sapiens
ttgttttctttacag

SEQ ID NO: 1832660 - DNA, 15 bp, Homo sapiens
tgttttctttacagc

SEQ ID NO: 1832661 - DNA, 15 bp, Homo sapiens
gttttctttacagcc

SEQ ID NO: 1832662 - DNA, 15 bp, Homo sapiens
ttttctttacagcct

SEQ ID NO: 1832663 - DNA, 15 bp, Homo sapiens
tttctttacagcctt

SEQ ID NO: 1832664 - DNA, 15 bp, Homo sapiens
ttctttacagccttg

SEQ ID NO: 1832665 - DNA, 15 bp, Homo sapiens
tctttacagccttga

SEQ ID NO: 1832666 - DNA, 15 bp, Homo sapiens
ctttacagccttgaa

SEQ ID NO: 1832667 - DNA, 15 bp, Homo sapiens
tttacagccttgaac

SEQ ID NO: 1832668 - DNA, 15 bp, Homo sapiens
ttacagccttgaaca

SEQ ID NO: 1832669 - DNA, 15 bp, Homo sapiens
tacagccttgaacaa

SEQ ID NO: 1832670 - DNA, 15 bp, Homo sapiens
acagccttgaacaaa

SEQ ID NO: 1832671 - DNA, 15 bp, Homo sapiens
cagccttgaacaaat

SEQ ID NO: 1832672 - DNA, 15 bp, Homo sapiens
agccttgaacaaatt

SEQ ID NO: 1832673 - DNA, 15 bp, Homo sapiens
gccttgaacaaatta

SEQ ID NO: 1832674 - DNA, 15 bp, Homo sapiens
ccttgaacaaattaa

SEQ ID NO: 1832675 - DNA, 15 bp, Homo sapiens
cttgaacaaattaaa

SEQ ID NO: 1832676 - DNA, 15 bp, Homo sapiens
ttgaacaaattaaaa

SEQ ID NO: 1832677 - DNA, 15 bp, Homo sapiens
tgaacaaattaaaaa

SEQ ID NO: 1832678 - DNA, 15 bp, Homo sapiens
gaacaaattaaaaaa

SEQ ID NO: 1832679 - DNA, 15 bp, Homo sapiens
aacaaattaaaaaac

SEQ ID NO: 1832680 - DNA, 15 bp, Homo sapiens
acaaattaaaaaacc

SEQ ID NO: 1832681 - DNA, 15 bp, Homo sapiens
caaattaaaaaaccc

SEQ ID NO: 1832682 - DNA, 15 bp, Homo sapiens
aaattaaaaaaccca

SEQ ID NO: 1832683 - DNA, 15 bp, Homo sapiens
aattaaaaaacccag

SEQ ID NO: 1832684 - DNA, 15 bp, Homo sapiens
attaaaaaacccagt

SEQ ID NO: 1832685 - DNA, 15 bp, Homo sapiens
ttaaaaaacccagtc

SEQ ID NO: 1832686 - DNA, 15 bp, Homo sapiens
taaaaaacccagtct

SEQ ID NO: 1832687 - DNA, 15 bp, Homo sapiens
aaaaaacccagtctt

SEQ ID NO: 1832688 - DNA, 15 bp, Homo sapiens
aaaaacccagtcttc

SEQ ID NO: 1832689 - DNA, 15 bp, Homo sapiens
aaaacccagtcttca

SEQ ID NO: 1832690 - DNA, 15 bp, Homo sapiens
aaacccagtcttcag

SEQ ID NO: 1832691 - DNA, 15 bp, Homo sapiens
aacccagtcttcagc

SEQ ID NO: 1832692 - DNA, 15 bp, Homo sapiens
acccagtcttcagcc

SEQ ID NO: 1832693 - DNA, 15 bp, Homo sapiens
cccagtcttcagcct

SEQ ID NO: 1832694 - DNA, 15 bp, Homo sapiens
ccagtcttcagcctt

SEQ ID NO: 1832695 - DNA, 15 bp, Homo sapiens
cagtcttcagccttg

SEQ ID NO: 1832696 - DNA, 15 bp, Homo sapiens
agtcttcagccttgt

SEQ ID NO: 1832697 - DNA, 15 bp, Homo sapiens
gtcttcagccttgtc

SEQ ID NO: 1832698 - DNA, 15 bp, Homo sapiens
tcttcagccttgtct

SEQ ID NO: 1832699 - DNA, 15 bp, Homo sapiens
cttcagccttgtctg

SEQ ID NO: 1832700 - DNA, 15 bp, Homo sapiens
ttcagccttgtctgt

SEQ ID NO: 1832701 - DNA, 15 bp, Homo sapiens
tcagccttgtctgta

SEQ ID NO: 1832702 - DNA, 15 bp, Homo sapiens
cagccttgtctgtag

SEQ ID NO: 1832703 - DNA, 15 bp, Homo sapiens
agccttgtctgtagc

SEQ ID NO: 1832704 - DNA, 15 bp, Homo sapiens
gccttgtctgtagca

SEQ ID NO: 1832705 - DNA, 15 bp, Homo sapiens
ccttgtctgtagcat

SEQ ID NO: 1832706 - DNA, 15 bp, Homo sapiens
cttgtctgtagcata

SEQ ID NO: 1832707 - DNA, 15 bp, Homo sapiens
ttgtctgtagcataa

SEQ ID NO: 1832708 - DNA, 15 bp, Homo sapiens
tgtctgtagcataat

SEQ ID NO: 1832709 - DNA, 15 bp, Homo sapiens
gtctgtagcataata

SEQ ID NO: 1832710 - DNA, 15 bp, Homo sapiens
tctgtagcataataa

SEQ ID NO: 1832711 - DNA, 15 bp, Homo sapiens
ctgtagcataataaa

SEQ ID NO: 1832712 - DNA, 15 bp, Homo sapiens
tgtagcataataaag

SEQ ID NO: 1832713 - DNA, 15 bp, Homo sapiens
gtagcataataaaga

SEQ ID NO: 1832714 - DNA, 15 bp, Homo sapiens
tagcataataaagag

SEQ ID NO: 1832715 - DNA, 15 bp, Homo sapiens
agcataataaagagg

SEQ ID NO: 1832716 - DNA, 15 bp, Homo sapiens
gcataataaagagga

SEQ ID NO: 1832717 - DNA, 15 bp, Homo sapiens
cataataaagaggaa

SEQ ID NO: 1832718 - DNA, 15 bp, Homo sapiens
ataataaagaggaaa

SEQ ID NO: 1832719 - DNA, 15 bp, Homo sapiens
taataaagaggaaat

SEQ ID NO: 1832720 - DNA, 15 bp, Homo sapiens
aataaagaggaaatt

SEQ ID NO: 1832721 - DNA, 15 bp, Homo sapiens
ataaagaggaaatta

SEQ ID NO: 1832722 - DNA, 15 bp, Homo sapiens
taaagaggaaattaa

SEQ ID NO: 1832723 - DNA, 15 bp, Homo sapiens
aaagaggaaattaaa

SEQ ID NO: 1832724 - DNA, 15 bp, Homo sapiens
aagaggaaattaaaa

SEQ ID NO: 1832725 - DNA, 15 bp, Homo sapiens
agaggaaattaaaag

SEQ ID NO: 1832726 - DNA, 15 bp, Homo sapiens
gaggaaattaaaagt

SEQ ID NO: 1832727 - DNA, 15 bp, Homo sapiens
aggaaattaaaagtg

SEQ ID NO: 1832728 - DNA, 15 bp, Homo sapiens
ggaaattaaaagtgc

SEQ ID NO: 1832729 - DNA, 15 bp, Homo sapiens
gaaattaaaagtgct

SEQ ID NO: 1832730 - DNA, 15 bp, Homo sapiens
aaattaaaagtgctt

SEQ ID NO: 1832731 - DNA, 15 bp, Homo sapiens
aattaaaagtgctta

SEQ ID NO: 1832732 - DNA, 15 bp, Homo sapiens
attaaaagtgcttat

SEQ ID NO: 1832733 - DNA, 15 bp, Homo sapiens
ttaaaagtgcttatg

SEQ ID NO: 1832734 - DNA, 15 bp, Homo sapiens
taaaagtgcttatgt

SEQ ID NO: 1832735 - DNA, 15 bp, Homo sapiens
aaaagtgcttatgtt

SEQ ID NO: 1832736 - DNA, 15 bp, Homo sapiens
aaagtgcttatgtta

SEQ ID NO: 1832737 - DNA, 15 bp, Homo sapiens
aagtgcttatgttat

SEQ ID NO: 1832738 - DNA, 15 bp, Homo sapiens
agtgcttatgttata

SEQ ID NO: 1832739 - DNA, 15 bp, Homo sapiens
gtgcttatgttatac

SEQ ID NO: 1832740 - DNA, 15 bp, Homo sapiens
tgcttatgttatacg

SEQ ID NO: 1832741 - DNA, 15 bp, Homo sapiens
gcttatgttatacgt

SEQ ID NO: 1832742 - DNA, 15 bp, Homo sapiens
cttatgttatacgtg

SEQ ID NO: 1832743 - DNA, 15 bp, Homo sapiens
ttatgttatacgtgg

SEQ ID NO: 1832744 - DNA, 15 bp, Homo sapiens
tatgttatacgtggt

SEQ ID NO: 1832745 - DNA, 15 bp, Homo sapiens
atgttatacgtggta

SEQ ID NO: 1832746 - DNA, 15 bp, Homo sapiens
tgttatacgtggtac

SEQ ID NO: 1832747 - DNA, 15 bp, Homo sapiens
gttatacgtggtaca

SEQ ID NO: 1832748 - DNA, 15 bp, Homo sapiens
ttatacgtggtacat

SEQ ID NO: 1832749 - DNA, 15 bp, Homo sapiens
tatacgtggtacata

SEQ ID NO: 1832750 - DNA, 15 bp, Homo sapiens
atacgtggtacatac

SEQ ID NO: 1832751 - DNA, 15 bp, Homo sapiens
tacgtggtacatact

SEQ ID NO: 1832752 - DNA, 15 bp, Homo sapiens
acgtggtacatacta

SEQ ID NO: 1832753 - DNA, 15 bp, Homo sapiens
cgtggtacatactaa

SEQ ID NO: 1832754 - DNA, 15 bp, Homo sapiens
gtggtacatactaaa

SEQ ID NO: 1832755 - DNA, 15 bp, Homo sapiens
tggtacatactaaaa

SEQ ID NO: 1832756 - DNA, 15 bp, Homo sapiens
ggtacatactaaaat

SEQ ID NO: 1832757 - DNA, 15 bp, Homo sapiens
gtacatactaaaatt

SEQ ID NO: 1832758 - DNA, 15 bp, Homo sapiens
tacatactaaaattt

SEQ ID NO: 1832759 - DNA, 15 bp, Homo sapiens
acatactaaaattta

SEQ ID NO: 1832760 - DNA, 15 bp, Homo sapiens
catactaaaatttat

SEQ ID NO: 1832761 - DNA, 15 bp, Homo sapiens
atactaaaatttatt

SEQ ID NO: 1832762 - DNA, 15 bp, Homo sapiens
tactaaaatttatta

SEQ ID NO: 1832763 - DNA, 15 bp, Homo sapiens
actaaaatttattaa

SEQ ID NO: 1832764 - DNA, 15 bp, Homo sapiens
ctaaaatttattaag

SEQ ID NO: 1832765 - DNA, 15 bp, Homo sapiens
taaaatttattaagt

SEQ ID NO: 1832766 - DNA, 15 bp, Homo sapiens
aaaatttattaagtg

SEQ ID NO: 1832767 - DNA, 15 bp, Homo sapiens
aaatttattaagtgg

SEQ ID NO: 1832768 - DNA, 15 bp, Homo sapiens
aatttattaagtggc

SEQ ID NO: 1832769 - DNA, 15 bp, Homo sapiens
atttattaagtggcg

SEQ ID NO: 1832770 - DNA, 15 bp, Homo sapiens
tttattaagtggcga

SEQ ID NO: 1832771 - DNA, 15 bp, Homo sapiens
ttattaagtggcgac

SEQ ID NO: 1832772 - DNA, 15 bp, Homo sapiens
tattaagtggcgact

SEQ ID NO: 1832773 - DNA, 15 bp, Homo sapiens
attaagtggcgactg

SEQ ID NO: 1832774 - DNA, 15 bp, Homo sapiens
ttaagtggcgactgg

SEQ ID NO: 1832775 - DNA, 15 bp, Homo sapiens
taagtggcgactggc

SEQ ID NO: 1832776 - DNA, 15 bp, Homo sapiens
aagtggcgactggca

SEQ ID NO: 1832777 - DNA, 15 bp, Homo sapiens
agtggcgactggcag

SEQ ID NO: 1832778 - DNA, 15 bp, Homo sapiens
gtggcgactggcagt

SEQ ID NO: 1832779 - DNA, 15 bp, Homo sapiens
tggcgactggcagtt

SEQ ID NO: 1832780 - DNA, 15 bp, Homo sapiens
ggcgactggcagttt

SEQ ID NO: 1832781 - DNA, 15 bp, Homo sapiens
gcgactggcagttta

SEQ ID NO: 1832782 - DNA, 15 bp, Homo sapiens
cgactggcagtttaa

SEQ ID NO: 1832783 - DNA, 15 bp, Homo sapiens
gactggcagtttaac

SEQ ID NO: 1832784 - DNA, 15 bp, Homo sapiens
actggcagtttaact

SEQ ID NO: 1832785 - DNA, 15 bp, Homo sapiens
ctggcagtttaacta

SEQ ID NO: 1832786 - DNA, 15 bp, Homo sapiens
tggcagtttaactaa

SEQ ID NO: 1832787 - DNA, 15 bp, Homo sapiens
ggcagtttaactaat

SEQ ID NO: 1832788 - DNA, 15 bp, Homo sapiens
gcagtttaactaatt

SEQ ID NO: 1832789 - DNA, 15 bp, Homo sapiens
cagtttaactaattg

SEQ ID NO: 1832790 - DNA, 15 bp, Homo sapiens
agtttaactaattga

SEQ ID NO: 1832791 - DNA, 15 bp, Homo sapiens
gtttaactaattgac

SEQ ID NO: 1832792 - DNA, 15 bp, Homo sapiens
tttaactaattgaca

SEQ ID NO: 1832793 - DNA, 15 bp, Homo sapiens
ttaactaattgacat

SEQ ID NO: 1832794 - DNA, 15 bp, Homo sapiens
taactaattgacatt

SEQ ID NO: 1832795 - DNA, 15 bp, Homo sapiens
aactaattgacattc

SEQ ID NO: 1832796 - DNA, 15 bp, Homo sapiens
actaattgacattct

SEQ ID NO: 1832797 - DNA, 15 bp, Homo sapiens
ctaattgacattctc

SEQ ID NO: 1832798 - DNA, 15 bp, Homo sapiens
taattgacattctct

SEQ ID NO: 1832799 - DNA, 15 bp, Homo sapiens
aattgacattctctt

SEQ ID NO: 1832800 - DNA, 15 bp, Homo sapiens
attgacattctcttg

SEQ ID NO: 1832801 - DNA, 15 bp, Homo sapiens
ttgacattctcttgt

SEQ ID NO: 1832802 - DNA, 15 bp, Homo sapiens
tgacattctcttgtg

SEQ ID NO: 1832803 - DNA, 15 bp, Homo sapiens
gacattctcttgtgt

SEQ ID NO: 1832804 - DNA, 15 bp, Homo sapiens
acattctcttgtgtt

SEQ ID NO: 1832805 - DNA, 15 bp, Homo sapiens
cattctcttgtgtta

SEQ ID NO: 1832806 - DNA, 15 bp, Homo sapiens
attctcttgtgttag

SEQ ID NO: 1832807 - DNA, 15 bp, Homo sapiens
ttctcttgtgttagg

SEQ ID NO: 1832808 - DNA, 15 bp, Homo sapiens
tctcttgtgttaggt

SEQ ID NO: 1832809 - DNA, 15 bp, Homo sapiens
ctcttgtgttaggtt

SEQ ID NO: 1832810 - DNA, 15 bp, Homo sapiens
tcttgtgttaggtta

SEQ ID NO: 1832811 - DNA, 15 bp, Homo sapiens
cttgtgttaggttaa

SEQ ID NO: 1832812 - DNA, 15 bp, Homo sapiens
ttgtgttaggttaat

SEQ ID NO: 1832813 - DNA, 15 bp, Homo sapiens
tgtgttaggttaata

SEQ ID NO: 1832814 - DNA, 15 bp, Homo sapiens
gtgttaggttaatac

SEQ ID NO: 1832815 - DNA, 15 bp, Homo sapiens
tgttaggttaataca

SEQ ID NO: 1832816 - DNA, 15 bp, Homo sapiens
gttaggttaatacag

SEQ ID NO: 1832817 - DNA, 15 bp, Homo sapiens
ttaggttaatacagg

SEQ ID NO: 1832818 - DNA, 15 bp, Homo sapiens
taggttaatacaggg

SEQ ID NO: 1832819 - DNA, 15 bp, Homo sapiens
aggttaatacagggg

SEQ ID NO: 1832820 - DNA, 15 bp, Homo sapiens
ggttaatacaggggt

SEQ ID NO: 1832821 - DNA, 15 bp, Homo sapiens
gttaatacaggggtt

SEQ ID NO: 1832822 - DNA, 15 bp, Homo sapiens
ttaatacaggggttg

SEQ ID NO: 1832823 - DNA, 15 bp, Homo sapiens
taatacaggggttgg

SEQ ID NO: 1832824 - DNA, 15 bp, Homo sapiens
aatacaggggttggc

SEQ ID NO: 1832825 - DNA, 15 bp, Homo sapiens
atacaggggttggcg

SEQ ID NO: 1832826 - DNA, 15 bp, Homo sapiens
tacaggggttggcgt

SEQ ID NO: 1832827 - DNA, 15 bp, Homo sapiens
acaggggttggcgta

SEQ ID NO: 1832828 - DNA, 15 bp, Homo sapiens
caggggttggcgtac

SEQ ID NO: 1832829 - DNA, 15 bp, Homo sapiens
aggggttggcgtact

SEQ ID NO: 1832830 - DNA, 15 bp, Homo sapiens
ggggttggcgtacta

SEQ ID NO: 1832831 - DNA, 15 bp, Homo sapiens
gggttggcgtactat

SEQ ID NO: 1832832 - DNA, 15 bp, Homo sapiens
ggttggcgtactatg

SEQ ID NO: 1832833 - DNA, 15 bp, Homo sapiens
gttggcgtactatgg

SEQ ID NO: 1832834 - DNA, 15 bp, Homo sapiens
ttggcgtactatggc

SEQ ID NO: 1832835 - DNA, 15 bp, Homo sapiens
tggcgtactatggcc

SEQ ID NO: 1832836 - DNA, 15 bp, Homo sapiens
ggcgtactatggcct

SEQ ID NO: 1832837 - DNA, 15 bp, Homo sapiens
gcgtactatggcctc

SEQ ID NO: 1832838 - DNA, 15 bp, Homo sapiens
cgtactatggcctca

SEQ ID NO: 1832839 - DNA, 15 bp, Homo sapiens
gtactatggcctcag

SEQ ID NO: 1832840 - DNA, 15 bp, Homo sapiens
tactatggcctcagt

SEQ ID NO: 1832841 - DNA, 15 bp, Homo sapiens
actatggcctcagtc

SEQ ID NO: 1832842 - DNA, 15 bp, Homo sapiens
ctatggcctcagtcc

SEQ ID NO: 1832843 - DNA, 15 bp, Homo sapiens
tatggcctcagtcca

SEQ ID NO: 1832844 - DNA, 15 bp, Homo sapiens
atggcctcagtccaa

SEQ ID NO: 1832845 - DNA, 15 bp, Homo sapiens
tggcctcagtccaaa

SEQ ID NO: 1832846 - DNA, 15 bp, Homo sapiens
ggcctcagtccaaat

SEQ ID NO: 1832847 - DNA, 15 bp, Homo sapiens
gcctcagtccaaatg

SEQ ID NO: 1832848 - DNA, 15 bp, Homo sapiens
cctcagtccaaatgt

SEQ ID NO: 1832849 - DNA, 15 bp, Homo sapiens
ctcagtccaaatgtg

SEQ ID NO: 1832850 - DNA, 15 bp, Homo sapiens
tcagtccaaatgtgg

SEQ ID NO: 1832851 - DNA, 15 bp, Homo sapiens
cagtccaaatgtggc

SEQ ID NO: 1832852 - DNA, 15 bp, Homo sapiens
agtccaaatgtggcc

SEQ ID NO: 1832853 - DNA, 15 bp, Homo sapiens
gtccaaatgtggccc

SEQ ID NO: 1832854 - DNA, 15 bp, Homo sapiens
tccaaatgtggccca

SEQ ID NO: 1832855 - DNA, 15 bp, Homo sapiens
ccaaatgtggcccac

SEQ ID NO: 1832856 - DNA, 15 bp, Homo sapiens
caaatgtggcccact

SEQ ID NO: 1832857 - DNA, 15 bp, Homo sapiens
aaatgtggcccactc

SEQ ID NO: 1832858 - DNA, 15 bp, Homo sapiens
aatgtggcccactcc

SEQ ID NO: 1832859 - DNA, 15 bp, Homo sapiens
atgtggcccactcca

SEQ ID NO: 1832860 - DNA, 15 bp, Homo sapiens
tgtggcccactccat

SEQ ID NO: 1832861 - DNA, 15 bp, Homo sapiens
gtggcccactccatg

SEQ ID NO: 1832862 - DNA, 15 bp, Homo sapiens
tggcccactccatgt

SEQ ID NO: 1832863 - DNA, 15 bp, Homo sapiens
ggcccactccatgtt

SEQ ID NO: 1832864 - DNA, 15 bp, Homo sapiens
gcccactccatgttt

SEQ ID NO: 1832865 - DNA, 15 bp, Homo sapiens
cccactccatgtttt

SEQ ID NO: 1832866 - DNA, 15 bp, Homo sapiens
ccactccatgttttt

SEQ ID NO: 1832867 - DNA, 15 bp, Homo sapiens
cactccatgtttttg

SEQ ID NO: 1832868 - DNA, 15 bp, Homo sapiens
actccatgtttttgt

SEQ ID NO: 1832869 - DNA, 15 bp, Homo sapiens
ctccatgtttttgta

SEQ ID NO: 1832870 - DNA, 15 bp, Homo sapiens
tccatgtttttgtat

SEQ ID NO: 1832871 - DNA, 15 bp, Homo sapiens
ccatgtttttgtata

SEQ ID NO: 1832872 - DNA, 15 bp, Homo sapiens
catgtttttgtatag

SEQ ID NO: 1832873 - DNA, 15 bp, Homo sapiens
atgtttttgtatagg

SEQ ID NO: 1832874 - DNA, 15 bp, Homo sapiens
tgtttttgtataggc

SEQ ID NO: 1832875 - DNA, 15 bp, Homo sapiens
gtttttgtataggct

SEQ ID NO: 1832876 - DNA, 15 bp, Homo sapiens
tttttgtataggctg

SEQ ID NO: 1832877 - DNA, 15 bp, Homo sapiens
ttttgtataggctgt

SEQ ID NO: 1832878 - DNA, 15 bp, Homo sapiens
tttgtataggctgtg

SEQ ID NO: 1832879 - DNA, 15 bp, Homo sapiens
ttgtataggctgtga

SEQ ID NO: 1832880 - DNA, 15 bp, Homo sapiens
tgtataggctgtgag

SEQ ID NO: 1832881 - DNA, 15 bp, Homo sapiens
gtataggctgtgagc

SEQ ID NO: 1832882 - DNA, 15 bp, Homo sapiens
tataggctgtgagct

SEQ ID NO: 1832883 - DNA, 15 bp, Homo sapiens
ataggctgtgagcta

SEQ ID NO: 1832884 - DNA, 15 bp, Homo sapiens
taggctgtgagctaa

SEQ ID NO: 1832885 - DNA, 15 bp, Homo sapiens
aggctgtgagctaag

SEQ ID NO: 1832886 - DNA, 15 bp, Homo sapiens
ggctgtgagctaagc

SEQ ID NO: 1832887 - DNA, 15 bp, Homo sapiens
gctgtgagctaagca

SEQ ID NO: 1832888 - DNA, 15 bp, Homo sapiens
ctgtgagctaagcat

SEQ ID NO: 1832889 - DNA, 15 bp, Homo sapiens
tgtgagctaagcatt

SEQ ID NO: 1832890 - DNA, 15 bp, Homo sapiens
gtgagctaagcatta

SEQ ID NO: 1832891 - DNA, 15 bp, Homo sapiens
tgagctaagcattaa

SEQ ID NO: 1832892 - DNA, 15 bp, Homo sapiens
gagctaagcattaag

SEQ ID NO: 1832893 - DNA, 15 bp, Homo sapiens
agctaagcattaagc

SEQ ID NO: 1832894 - DNA, 15 bp, Homo sapiens
gctaagcattaagca

SEQ ID NO: 1832895 - DNA, 15 bp, Homo sapiens
ctaagcattaagcat

SEQ ID NO: 1832896 - DNA, 15 bp, Homo sapiens
taagcattaagcatt

SEQ ID NO: 1832897 - DNA, 15 bp, Homo sapiens
aagcattaagcatta

SEQ ID NO: 1832898 - DNA, 15 bp, Homo sapiens
agcattaagcattaa

SEQ ID NO: 1832899 - DNA, 15 bp, Homo sapiens
gcattaagcattaat

SEQ ID NO: 1832900 - DNA, 15 bp, Homo sapiens
cattaagcattaatt

SEQ ID NO: 1832901 - DNA, 15 bp, Homo sapiens
attaagcattaattt

SEQ ID NO: 1832902 - DNA, 15 bp, Homo sapiens
ttaagcattaattta

SEQ ID NO: 1832903 - DNA, 15 bp, Homo sapiens
taagcattaatttat

SEQ ID NO: 1832904 - DNA, 15 bp, Homo sapiens
aagcattaatttatt

SEQ ID NO: 1832905 - DNA, 15 bp, Homo sapiens
agcattaatttatta

SEQ ID NO: 1832906 - DNA, 15 bp, Homo sapiens
gcattaatttattac

SEQ ID NO: 1832907 - DNA, 15 bp, Homo sapiens
cattaatttattact

SEQ ID NO: 1832908 - DNA, 15 bp, Homo sapiens
attaatttattactt

SEQ ID NO: 1832909 - DNA, 15 bp, Homo sapiens
ttaatttattactta

SEQ ID NO: 1832910 - DNA, 15 bp, Homo sapiens
taatttattacttaa

SEQ ID NO: 1832911 - DNA, 15 bp, Homo sapiens
aatttattacttaaa

SEQ ID NO: 1832912 - DNA, 15 bp, Homo sapiens
atttattacttaaat

SEQ ID NO: 1832913 - DNA, 15 bp, Homo sapiens
tttattacttaaatc

SEQ ID NO: 1832914 - DNA, 15 bp, Homo sapiens
ttattacttaaatca

SEQ ID NO: 1832915 - DNA, 15 bp, Homo sapiens
tattacttaaatcaa

SEQ ID NO: 1832916 - DNA, 15 bp, Homo sapiens
attacttaaatcaac

SEQ ID NO: 1832917 - DNA, 15 bp, Homo sapiens
ttacttaaatcaaca

SEQ ID NO: 1832918 - DNA, 15 bp, Homo sapiens
tacttaaatcaacaa

SEQ ID NO: 1832919 - DNA, 15 bp, Homo sapiens
acttaaatcaacaaa

SEQ ID NO: 1832920 - DNA, 15 bp, Homo sapiens
cttaaatcaacaaat

SEQ ID NO: 1832921 - DNA, 15 bp, Homo sapiens
ttaaatcaacaaata

SEQ ID NO: 1832922 - DNA, 15 bp, Homo sapiens
taaatcaacaaataa

SEQ ID NO: 1832923 - DNA, 15 bp, Homo sapiens
aaatcaacaaataaa

SEQ ID NO: 1832924 - DNA, 15 bp, Homo sapiens
aatcaacaaataaag

SEQ ID NO: 1832925 - DNA, 15 bp, Homo sapiens
atcaacaaataaagt

SEQ ID NO: 1832926 - DNA, 15 bp, Homo sapiens
tcaacaaataaagtt

SEQ ID NO: 1832927 - DNA, 15 bp, Homo sapiens
caacaaataaagttt

SEQ ID NO: 1832928 - DNA, 15 bp, Homo sapiens
aacaaataaagttta

SEQ ID NO: 1832929 - DNA, 15 bp, Homo sapiens
acaaataaagtttat

SEQ ID NO: 1832930 - DNA, 15 bp, Homo sapiens
caaataaagtttatg

SEQ ID NO: 1832931 - DNA, 15 bp, Homo sapiens
aaataaagtttatgt

SEQ ID NO: 1832932 - DNA, 15 bp, Homo sapiens
aataaagtttatgtg

SEQ ID NO: 1832933 - DNA, 15 bp, Homo sapiens
ataaagtttatgtgg

SEQ ID NO: 1832934 - DNA, 15 bp, Homo sapiens
taaagtttatgtggt

SEQ ID NO: 1832935 - DNA, 15 bp, Homo sapiens
aaagtttatgtggtg

SEQ ID NO: 1832936 - DNA, 15 bp, Homo sapiens
aagtttatgtggtgt

SEQ ID NO: 1832937 - DNA, 15 bp, Homo sapiens
agtttatgtggtgta

SEQ ID NO: 1832938 - DNA, 15 bp, Homo sapiens
gtttatgtggtgtac

SEQ ID NO: 1832939 - DNA, 15 bp, Homo sapiens
tttatgtggtgtaca

SEQ ID NO: 1832940 - DNA, 15 bp, Homo sapiens
ttatgtggtgtacaa

SEQ ID NO: 1832941 - DNA, 15 bp, Homo sapiens
tatgtggtgtacaac

SEQ ID NO: 1832942 - DNA, 15 bp, Homo sapiens
atgtggtgtacaaca

SEQ ID NO: 1832943 - DNA, 15 bp, Homo sapiens
tgtggtgtacaacat

SEQ ID NO: 1832944 - DNA, 15 bp, Homo sapiens
gtggtgtacaacatg

SEQ ID NO: 1832945 - DNA, 15 bp, Homo sapiens
catgatgttttgatg

SEQ ID NO: 1832946 - DNA, 15 bp, Homo sapiens
atgatgttttgatgt

SEQ ID NO: 1832947 - DNA, 15 bp, Homo sapiens
tgatgttttgatgtg

SEQ ID NO: 1832948 - DNA, 15 bp, Homo sapiens
gatgttttgatgtgt

SEQ ID NO: 1832949 - DNA, 15 bp, Homo sapiens
atgttttgatgtgtg

SEQ ID NO: 1832950 - DNA, 15 bp, Homo sapiens
tgttttgatgtgtgt

SEQ ID NO: 1832951 - DNA, 15 bp, Homo sapiens
gttttgatgtgtgta

SEQ ID NO: 1832952 - DNA, 15 bp, Homo sapiens
ttttgatgtgtgtac

SEQ ID NO: 1832953 - DNA, 15 bp, Homo sapiens
tttgatgtgtgtaca

SEQ ID NO: 1832954 - DNA, 15 bp, Homo sapiens
ttgatgtgtgtacat

SEQ ID NO: 1832955 - DNA, 15 bp, Homo sapiens
tgatgtgtgtacatt

SEQ ID NO: 1832956 - DNA, 15 bp, Homo sapiens
gatgtgtgtacatta

SEQ ID NO: 1832957 - DNA, 15 bp, Homo sapiens
atgtgtgtacattat

SEQ ID NO: 1832958 - DNA, 15 bp, Homo sapiens
tgtgtgtacattatg

SEQ ID NO: 1832959 - DNA, 15 bp, Homo sapiens
gtgtgtacattatgg

SEQ ID NO: 1832960 - DNA, 15 bp, Homo sapiens
tgtgtacattatgga

SEQ ID NO: 1832961 - DNA, 15 bp, Homo sapiens
gtgtacattatggaa

SEQ ID NO: 1832962 - DNA, 15 bp, Homo sapiens
tgtacattatggaat

SEQ ID NO: 1832963 - DNA, 15 bp, Homo sapiens
gtacattatggaatg

SEQ ID NO: 1832964 - DNA, 15 bp, Homo sapiens
tacattatggaatgg

SEQ ID NO: 1832965 - DNA, 15 bp, Homo sapiens
acattatggaatggc

SEQ ID NO: 1832966 - DNA, 15 bp, Homo sapiens
cattatggaatggct

SEQ ID NO: 1832967 - DNA, 15 bp, Homo sapiens
attatggaatggcta

SEQ ID NO: 1832968 - DNA, 15 bp, Homo sapiens
ttatggaatggctaa

SEQ ID NO: 1832969 - DNA, 15 bp, Homo sapiens
tatggaatggctaac

SEQ ID NO: 1832970 - DNA, 15 bp, Homo sapiens
atggaatggctaact

SEQ ID NO: 1832971 - DNA, 15 bp, Homo sapiens
tggaatggctaactc

SEQ ID NO: 1832972 - DNA, 15 bp, Homo sapiens
ggaatggctaactca

SEQ ID NO: 1832973 - DNA, 15 bp, Homo sapiens
gaatggctaactcaa

SEQ ID NO: 1832974 - DNA, 15 bp, Homo sapiens
aatggctaactcaag

SEQ ID NO: 1832975 - DNA, 15 bp, Homo sapiens
atggctaactcaagc

SEQ ID NO: 1832976 - DNA, 15 bp, Homo sapiens
tggctaactcaagct

SEQ ID NO: 1832977 - DNA, 15 bp, Homo sapiens
ggctaactcaagcta

SEQ ID NO: 1832978 - DNA, 15 bp, Homo sapiens
gctaactcaagctaa

SEQ ID NO: 1832979 - DNA, 15 bp, Homo sapiens
ctaactcaagctaat

SEQ ID NO: 1832980 - DNA, 15 bp, Homo sapiens
taactcaagctaata

SEQ ID NO: 1832981 - DNA, 15 bp, Homo sapiens
aactcaagctaatat

SEQ ID NO: 1832982 - DNA, 15 bp, Homo sapiens
actcaagctaatatt

SEQ ID NO: 1832983 - DNA, 15 bp, Homo sapiens
ctcaagctaatattc

SEQ ID NO: 1832984 - DNA, 15 bp, Homo sapiens
tcaagctaatattca

SEQ ID NO: 1832985 - DNA, 15 bp, Homo sapiens
caagctaatattcat

SEQ ID NO: 1832986 - DNA, 15 bp, Homo sapiens
aagctaatattcatt

SEQ ID NO: 1832987 - DNA, 15 bp, Homo sapiens
agctaatattcatta

SEQ ID NO: 1832988 - DNA, 15 bp, Homo sapiens
gctaatattcattac

SEQ ID NO: 1832989 - DNA, 15 bp, Homo sapiens
ctaatattcattact

SEQ ID NO: 1832990 - DNA, 15 bp, Homo sapiens
taatattcattactt

SEQ ID NO: 1832991 - DNA, 15 bp, Homo sapiens
aatattcattacttc

SEQ ID NO: 1832992 - DNA, 15 bp, Homo sapiens
atattcattacttca

SEQ ID NO: 1832993 - DNA, 15 bp, Homo sapiens
tattcattacttcac

SEQ ID NO: 1832994 - DNA, 15 bp, Homo sapiens
attcattacttcaca

SEQ ID NO: 1832995 - DNA, 15 bp, Homo sapiens
ttcattacttcacat

SEQ ID NO: 1832996 - DNA, 15 bp, Homo sapiens
tcattacttcacata

SEQ ID NO: 1832997 - DNA, 15 bp, Homo sapiens
cattacttcacatac

SEQ ID NO: 1832998 - DNA, 15 bp, Homo sapiens
attacttcacatact

SEQ ID NO: 1832999 - DNA, 15 bp, Homo sapiens
ttacttcacatactt

SEQ ID NO: 1833000 - DNA, 15 bp, Homo sapiens
tacttcacatacttt

SEQ ID NO: 1833001 - DNA, 15 bp, Homo sapiens
acttcacatactttt

SEQ ID NO: 1833002 - DNA, 15 bp, Homo sapiens
cttcacatacttttt

SEQ ID NO: 1833003 - DNA, 15 bp, Homo sapiens
ttcacatactttttt

SEQ ID NO: 1833004 - DNA, 15 bp, Homo sapiens
tcacatacttttttt

SEQ ID NO: 1833005 - DNA, 15 bp, Homo sapiens
cacatactttttttt

SEQ ID NO: 1833006 - DNA, 15 bp, Homo sapiens
acatacttttttttg

SEQ ID NO: 1833007 - DNA, 15 bp, Homo sapiens
catacttttttttgg

SEQ ID NO: 1833008 - DNA, 15 bp, Homo sapiens
atacttttttttggt

SEQ ID NO: 1833009 - DNA, 15 bp, Homo sapiens
tacttttttttggtg

SEQ ID NO: 1833010 - DNA, 15 bp, Homo sapiens
acttttttttggtgg

SEQ ID NO: 1833011 - DNA, 15 bp, Homo sapiens
cttttttttggtggt

SEQ ID NO: 1833012 - DNA, 15 bp, Homo sapiens
ttttttttggtggtg

SEQ ID NO: 1833013 - DNA, 15 bp, Homo sapiens
tttttttggtggtga

SEQ ID NO: 1833014 - DNA, 15 bp, Homo sapiens
ttttttggtggtgag

SEQ ID NO: 1833015 - DNA, 15 bp, Homo sapiens
tttttggtggtgaga

SEQ ID NO: 1833016 - DNA, 15 bp, Homo sapiens
ttttggtggtgagaa

SEQ ID NO: 1833017 - DNA, 15 bp, Homo sapiens
tttggtggtgagaac

SEQ ID NO: 1833018 - DNA, 15 bp, Homo sapiens
ttggtggtgagaaca

SEQ ID NO: 1833019 - DNA, 15 bp, Homo sapiens
tggtggtgagaacat

SEQ ID NO: 1833020 - DNA, 15 bp, Homo sapiens
ggtggtgagaacatt

SEQ ID NO: 1833021 - DNA, 15 bp, Homo sapiens
gtggtgagaacattt

SEQ ID NO: 1833022 - DNA, 15 bp, Homo sapiens
tggtgagaacattta

SEQ ID NO: 1833023 - DNA, 15 bp, Homo sapiens
ggtgagaacatttaa

SEQ ID NO: 1833024 - DNA, 15 bp, Homo sapiens
gtgagaacatttaaa

SEQ ID NO: 1833025 - DNA, 15 bp, Homo sapiens
tgagaacatttaaaa

SEQ ID NO: 1833026 - DNA, 15 bp, Homo sapiens
gagaacatttaaaat

SEQ ID NO: 1833027 - DNA, 15 bp, Homo sapiens
agaacatttaaaatg

SEQ ID NO: 1833028 - DNA, 15 bp, Homo sapiens
gaacatttaaaatgt

SEQ ID NO: 1833029 - DNA, 15 bp, Homo sapiens
aacatttaaaatgta

SEQ ID NO: 1833030 - DNA, 15 bp, Homo sapiens
acatttaaaatgtac

SEQ ID NO: 1833031 - DNA, 15 bp, Homo sapiens
catttaaaatgtact

SEQ ID NO: 1833032 - DNA, 15 bp, Homo sapiens
atttaaaatgtactc

SEQ ID NO: 1833033 - DNA, 15 bp, Homo sapiens
tttaaaatgtactct

SEQ ID NO: 1833034 - DNA, 15 bp, Homo sapiens
ttaaaatgtactctt

SEQ ID NO: 1833035 - DNA, 15 bp, Homo sapiens
taaaatgtactctta

SEQ ID NO: 1833036 - DNA, 15 bp, Homo sapiens
aaaatgtactcttaa

SEQ ID NO: 1833037 - DNA, 15 bp, Homo sapiens
aaatgtactcttaat

SEQ ID NO: 1833038 - DNA, 15 bp, Homo sapiens
aatgtactcttaata

SEQ ID NO: 1833039 - DNA, 15 bp, Homo sapiens
atgtactcttaataa

SEQ ID NO: 1833040 - DNA, 15 bp, Homo sapiens
tgtactcttaataat

SEQ ID NO: 1833041 - DNA, 15 bp, Homo sapiens
gtactcttaataatt

SEQ ID NO: 1833042 - DNA, 15 bp, Homo sapiens
tactcttaataattt

SEQ ID NO: 1833043 - DNA, 15 bp, Homo sapiens
actcttaataatttt

SEQ ID NO: 1833044 - DNA, 15 bp, Homo sapiens
ctcttaataattttc

SEQ ID NO: 1833045 - DNA, 15 bp, Homo sapiens
tcttaataattttca

SEQ ID NO: 1833046 - DNA, 15 bp, Homo sapiens
cttaataattttcag

SEQ ID NO: 1833047 - DNA, 15 bp, Homo sapiens
ttaataattttcagg

SEQ ID NO: 1833048 - DNA, 15 bp, Homo sapiens
taataattttcaggt

SEQ ID NO: 1833049 - DNA, 15 bp, Homo sapiens
aataattttcaggta

SEQ ID NO: 1833050 - DNA, 15 bp, Homo sapiens
ataattttcaggtat

SEQ ID NO: 1833051 - DNA, 15 bp, Homo sapiens
taattttcaggtata

SEQ ID NO: 1833052 - DNA, 15 bp, Homo sapiens
aattttcaggtatac

SEQ ID NO: 1833053 - DNA, 15 bp, Homo sapiens
attttcaggtataca

SEQ ID NO: 1833054 - DNA, 15 bp, Homo sapiens
ttttcaggtatacaa

SEQ ID NO: 1833055 - DNA, 15 bp, Homo sapiens
tttcaggtatacaat

SEQ ID NO: 1833056 - DNA, 15 bp, Homo sapiens
ttcaggtatacaata

SEQ ID NO: 1833057 - DNA, 15 bp, Homo sapiens
tcaggtatacaatat

SEQ ID NO: 1833058 - DNA, 15 bp, Homo sapiens
caggtatacaatatt

SEQ ID NO: 1833059 - DNA, 15 bp, Homo sapiens
aggtatacaatattt

SEQ ID NO: 1833060 - DNA, 15 bp, Homo sapiens
ggtatacaatatttg

SEQ ID NO: 1833061 - DNA, 15 bp, Homo sapiens
gtatacaatatttgt

SEQ ID NO: 1833062 - DNA, 15 bp, Homo sapiens
tatacaatatttgtt

SEQ ID NO: 1833063 - DNA, 15 bp, Homo sapiens
atacaatatttgttt

SEQ ID NO: 1833064 - DNA, 15 bp, Homo sapiens
tacaatatttgtttt

SEQ ID NO: 1833065 - DNA, 15 bp, Homo sapiens
acaatatttgttttt

SEQ ID NO: 1833066 - DNA, 15 bp, Homo sapiens
caatatttgtttttg

SEQ ID NO: 1833067 - DNA, 15 bp, Homo sapiens
aatatttgtttttgt

SEQ ID NO: 1833068 - DNA, 15 bp, Homo sapiens
atatttgtttttgtt

SEQ ID NO: 1833069 - DNA, 15 bp, Homo sapiens
tatttgtttttgttt

SEQ ID NO: 1833070 - DNA, 15 bp, Homo sapiens
atttgtttttgtttt

SEQ ID NO: 1833071 - DNA, 15 bp, Homo sapiens
ttgtttttgttttga

SEQ ID NO: 1833072 - DNA, 15 bp, Homo sapiens
tgtttttgttttgag

SEQ ID NO: 1833073 - DNA, 15 bp, Homo sapiens
gtttttgttttgaga

SEQ ID NO: 1833074 - DNA, 15 bp, Homo sapiens
tttgttttgagacga

SEQ ID NO: 1833075 - DNA, 15 bp, Homo sapiens
ttgttttgagacgaa

SEQ ID NO: 1833076 - DNA, 15 bp, Homo sapiens
tgttttgagacgaag

SEQ ID NO: 1833077 - DNA, 15 bp, Homo sapiens
gttttgagacgaagt

SEQ ID NO: 1833078 - DNA, 15 bp, Homo sapiens
ttttgagacgaagtc

SEQ ID NO: 1833079 - DNA, 15 bp, Homo sapiens
tttgagacgaagtct

SEQ ID NO: 1833080 - DNA, 15 bp, Homo sapiens
ttgagacgaagtctc

SEQ ID NO: 1833081 - DNA, 15 bp, Homo sapiens
tgagacgaagtctcg

SEQ ID NO: 1833082 - DNA, 15 bp, Homo sapiens
gagacgaagtctcgc

SEQ ID NO: 1833083 - DNA, 15 bp, Homo sapiens
agacgaagtctcgct

SEQ ID NO: 1833084 - DNA, 15 bp, Homo sapiens
gacgaagtctcgctc

SEQ ID NO: 1833085 - DNA, 15 bp, Homo sapiens
acgaagtctcgctct

SEQ ID NO: 1833086 - DNA, 15 bp, Homo sapiens
cgaagtctcgctctt

SEQ ID NO: 1833087 - DNA, 15 bp, Homo sapiens
gaagtctcgctcttg

SEQ ID NO: 1833088 - DNA, 15 bp, Homo sapiens
aagtctcgctcttgt

SEQ ID NO: 1833089 - DNA, 15 bp, Homo sapiens
agtctcgctcttgtc

SEQ ID NO: 1833090 - DNA, 15 bp, Homo sapiens
gtctcgctcttgtcc

SEQ ID NO: 1833091 - DNA, 15 bp, Homo sapiens
gagtgcagtggcgct

SEQ ID NO: 1833092 - DNA, 15 bp, Homo sapiens
agtgcagtggcgcta

SEQ ID NO: 1833093 - DNA, 15 bp, Homo sapiens
gtgcagtggcgctat

SEQ ID NO: 1833094 - DNA, 15 bp, Homo sapiens
tgcagtggcgctatc

SEQ ID NO: 1833095 - DNA, 15 bp, Homo sapiens
gcagtggcgctatct

SEQ ID NO: 1833096 - DNA, 15 bp, Homo sapiens
cagtggcgctatctt

SEQ ID NO: 1833097 - DNA, 15 bp, Homo sapiens
agtggcgctatcttg

SEQ ID NO: 1833098 - DNA, 15 bp, Homo sapiens
gtggcgctatcttgg

SEQ ID NO: 1833099 - DNA, 15 bp, Homo sapiens
tggcgctatcttggc

SEQ ID NO: 1833100 - DNA, 15 bp, Homo sapiens
ggcgctatcttggct

SEQ ID NO: 1833101 - DNA, 15 bp, Homo sapiens
gcgctatcttggctc

SEQ ID NO: 1833102 - DNA, 15 bp, Homo sapiens
cgctatcttggctca

SEQ ID NO: 1833103 - DNA, 15 bp, Homo sapiens
gctatcttggctcac

SEQ ID NO: 1833104 - DNA, 15 bp, Homo sapiens
ctatcttggctcact

SEQ ID NO: 1833105 - DNA, 15 bp, Homo sapiens
tatcttggctcactg

SEQ ID NO: 1833106 - DNA, 15 bp, Homo sapiens
tccgcctcccaggta

SEQ ID NO: 1833107 - DNA, 15 bp, Homo sapiens
ccgcctcccaggtac

SEQ ID NO: 1833108 - DNA, 15 bp, Homo sapiens
cgcctcccaggtaca

SEQ ID NO: 1833109 - DNA, 15 bp, Homo sapiens
gcctcccaggtacaa

SEQ ID NO: 1833110 - DNA, 15 bp, Homo sapiens
cctcccaggtacaag

SEQ ID NO: 1833111 - DNA, 15 bp, Homo sapiens
ctcccaggtacaagc

SEQ ID NO: 1833112 - DNA, 15 bp, Homo sapiens
tcccaggtacaagcg

SEQ ID NO: 1833113 - DNA, 15 bp, Homo sapiens
cccaggtacaagcga

SEQ ID NO: 1833114 - DNA, 15 bp, Homo sapiens
ccaggtacaagcgat

SEQ ID NO: 1833115 - DNA, 15 bp, Homo sapiens
caggtacaagcgatt

SEQ ID NO: 1833116 - DNA, 15 bp, Homo sapiens
aggtacaagcgattc

SEQ ID NO: 1833117 - DNA, 15 bp, Homo sapiens
attacaggcgcctgt

SEQ ID NO: 1833118 - DNA, 15 bp, Homo sapiens
ttacaggcgcctgtc

SEQ ID NO: 1833119 - DNA, 15 bp, Homo sapiens
tacaggcgcctgtct

SEQ ID NO: 1833120 - DNA, 15 bp, Homo sapiens
acaggcgcctgtctc

SEQ ID NO: 1833121 - DNA, 15 bp, Homo sapiens
caggcgcctgtctcc

SEQ ID NO: 1833122 - DNA, 15 bp, Homo sapiens
aggcgcctgtctcca

SEQ ID NO: 1833123 - DNA, 15 bp, Homo sapiens
ggcgcctgtctccac

SEQ ID NO: 1833124 - DNA, 15 bp, Homo sapiens
gcgcctgtctccacg

SEQ ID NO: 1833125 - DNA, 15 bp, Homo sapiens
cgcctgtctccacgc

SEQ ID NO: 1833126 - DNA, 15 bp, Homo sapiens
gcctgtctccacgcc

SEQ ID NO: 1833127 - DNA, 15 bp, Homo sapiens
cctgtctccacgccc

SEQ ID NO: 1833128 - DNA, 15 bp, Homo sapiens
ctgtctccacgcccg

SEQ ID NO: 1833129 - DNA, 15 bp, Homo sapiens
tgtctccacgcccgg

SEQ ID NO: 1833130 - DNA, 15 bp, Homo sapiens
gtctccacgcccggc

SEQ ID NO: 1833131 - DNA, 15 bp, Homo sapiens
tctccacgcccggct

SEQ ID NO: 1833132 - DNA, 15 bp, Homo sapiens
ctccacgcccggcta

SEQ ID NO: 1833133 - DNA, 15 bp, Homo sapiens
tccacgcccggctag

SEQ ID NO: 1833134 - DNA, 15 bp, Homo sapiens
acgcccggctagtta

SEQ ID NO: 1833135 - DNA, 15 bp, Homo sapiens
cgcccggctagttat

SEQ ID NO: 1833136 - DNA, 15 bp, Homo sapiens
gcccggctagttatt

SEQ ID NO: 1833137 - DNA, 15 bp, Homo sapiens
cccggctagttattg

SEQ ID NO: 1833138 - DNA, 15 bp, Homo sapiens
ccggctagttattgt

SEQ ID NO: 1833139 - DNA, 15 bp, Homo sapiens
cggctagttattgta

SEQ ID NO: 1833140 - DNA, 15 bp, Homo sapiens
ggctagttattgtat

SEQ ID NO: 1833141 - DNA, 15 bp, Homo sapiens
gctagttattgtatt

SEQ ID NO: 1833142 - DNA, 15 bp, Homo sapiens
ctagttattgtattt

SEQ ID NO: 1833143 - DNA, 15 bp, Homo sapiens
tagttattgtatttt

SEQ ID NO: 1833144 - DNA, 15 bp, Homo sapiens
agttattgtattttt

SEQ ID NO: 1833145 - DNA, 15 bp, Homo sapiens
gttattgtattttta

SEQ ID NO: 1833146 - DNA, 15 bp, Homo sapiens
ttattgtatttttag

SEQ ID NO: 1833147 - DNA, 15 bp, Homo sapiens
tattgtatttttagt

SEQ ID NO: 1833148 - DNA, 15 bp, Homo sapiens
attgtatttttagta

SEQ ID NO: 1833149 - DNA, 15 bp, Homo sapiens
tttttagtaaagaca

SEQ ID NO: 1833150 - DNA, 15 bp, Homo sapiens
ttttagtaaagacag

SEQ ID NO: 1833151 - DNA, 15 bp, Homo sapiens
tttagtaaagacagg

SEQ ID NO: 1833152 - DNA, 15 bp, Homo sapiens
ttagtaaagacaggg

SEQ ID NO: 1833153 - DNA, 15 bp, Homo sapiens
tagtaaagacagggt

SEQ ID NO: 1833154 - DNA, 15 bp, Homo sapiens
agtaaagacagggtt

SEQ ID NO: 1833155 - DNA, 15 bp, Homo sapiens
gtaaagacagggttt

SEQ ID NO: 1833156 - DNA, 15 bp, Homo sapiens
taaagacagggtttc

SEQ ID NO: 1833157 - DNA, 15 bp, Homo sapiens
aaagacagggtttca

SEQ ID NO: 1833158 - DNA, 15 bp, Homo sapiens
caccgcgcccggcta

SEQ ID NO: 1833159 - DNA, 15 bp, Homo sapiens
accgcgcccggctac

SEQ ID NO: 1833160 - DNA, 15 bp, Homo sapiens
ccgcgcccggctaca

SEQ ID NO: 1833161 - DNA, 15 bp, Homo sapiens
cgcgcccggctacaa

SEQ ID NO: 1833162 - DNA, 15 bp, Homo sapiens
gcgcccggctacaat

SEQ ID NO: 1833163 - DNA, 15 bp, Homo sapiens
cgcccggctacaata

SEQ ID NO: 1833164 - DNA, 15 bp, Homo sapiens
gcccggctacaatat

SEQ ID NO: 1833165 - DNA, 15 bp, Homo sapiens
cccggctacaatatg

SEQ ID NO: 1833166 - DNA, 15 bp, Homo sapiens
ccggctacaatatgt

SEQ ID NO: 1833167 - DNA, 15 bp, Homo sapiens
cggctacaatatgtt

SEQ ID NO: 1833168 - DNA, 15 bp, Homo sapiens
ggctacaatatgttc

SEQ ID NO: 1833169 - DNA, 15 bp, Homo sapiens
gctacaatatgttct

SEQ ID NO: 1833170 - DNA, 15 bp, Homo sapiens
ctacaatatgttctt

SEQ ID NO: 1833171 - DNA, 15 bp, Homo sapiens
tacaatatgttctta

SEQ ID NO: 1833172 - DNA, 15 bp, Homo sapiens
acaatatgttcttaa

SEQ ID NO: 1833173 - DNA, 15 bp, Homo sapiens
caatatgttcttaat

SEQ ID NO: 1833174 - DNA, 15 bp, Homo sapiens
aatatgttcttaatt

SEQ ID NO: 1833175 - DNA, 15 bp, Homo sapiens
atatgttcttaatta

SEQ ID NO: 1833176 - DNA, 15 bp, Homo sapiens
tatgttcttaattat

SEQ ID NO: 1833177 - DNA, 15 bp, Homo sapiens
atgttcttaattata

SEQ ID NO: 1833178 - DNA, 15 bp, Homo sapiens
tgttcttaattatag

SEQ ID NO: 1833179 - DNA, 15 bp, Homo sapiens
gttcttaattatagt

SEQ ID NO: 1833180 - DNA, 15 bp, Homo sapiens
ttcttaattatagtc

SEQ ID NO: 1833181 - DNA, 15 bp, Homo sapiens
tcttaattatagtca

SEQ ID NO: 1833182 - DNA, 15 bp, Homo sapiens
cttaattatagtcag

SEQ ID NO: 1833183 - DNA, 15 bp, Homo sapiens
ttaattatagtcagc

SEQ ID NO: 1833184 - DNA, 15 bp, Homo sapiens
taattatagtcagca

SEQ ID NO: 1833185 - DNA, 15 bp, Homo sapiens
aattatagtcagcaa

SEQ ID NO: 1833186 - DNA, 15 bp, Homo sapiens
attatagtcagcaat

SEQ ID NO: 1833187 - DNA, 15 bp, Homo sapiens
ttatagtcagcaata

SEQ ID NO: 1833188 - DNA, 15 bp, Homo sapiens
tatagtcagcaatag

SEQ ID NO: 1833189 - DNA, 15 bp, Homo sapiens
atagtcagcaataga

SEQ ID NO: 1833190 - DNA, 15 bp, Homo sapiens
tagtcagcaatagat

SEQ ID NO: 1833191 - DNA, 15 bp, Homo sapiens
agtcagcaatagatc

SEQ ID NO: 1833192 - DNA, 15 bp, Homo sapiens
gtcagcaatagatct

SEQ ID NO: 1833193 - DNA, 15 bp, Homo sapiens
tcagcaatagatctc

SEQ ID NO: 1833194 - DNA, 15 bp, Homo sapiens
cagcaatagatctcc

SEQ ID NO: 1833195 - DNA, 15 bp, Homo sapiens
agcaatagatctcct

SEQ ID NO: 1833196 - DNA, 15 bp, Homo sapiens
gcaatagatctcctg

SEQ ID NO: 1833197 - DNA, 15 bp, Homo sapiens
caatagatctcctga

SEQ ID NO: 1833198 - DNA, 15 bp, Homo sapiens
aatagatctcctgaa

SEQ ID NO: 1833199 - DNA, 15 bp, Homo sapiens
atagatctcctgaac

SEQ ID NO: 1833200 - DNA, 15 bp, Homo sapiens
tagatctcctgaact

SEQ ID NO: 1833201 - DNA, 15 bp, Homo sapiens
agatctcctgaactt

SEQ ID NO: 1833202 - DNA, 15 bp, Homo sapiens
gatctcctgaactta

SEQ ID NO: 1833203 - DNA, 15 bp, Homo sapiens
atctcctgaacttat

SEQ ID NO: 1833204 - DNA, 15 bp, Homo sapiens
tctcctgaacttatt

SEQ ID NO: 1833205 - DNA, 15 bp, Homo sapiens
ctcctgaacttattc

SEQ ID NO: 1833206 - DNA, 15 bp, Homo sapiens
tcctgaacttattct

SEQ ID NO: 1833207 - DNA, 15 bp, Homo sapiens
cctgaacttattctt

SEQ ID NO: 1833208 - DNA, 15 bp, Homo sapiens
ctgaacttattcttc

SEQ ID NO: 1833209 - DNA, 15 bp, Homo sapiens
tgaacttattcttcc

SEQ ID NO: 1833210 - DNA, 15 bp, Homo sapiens
gaacttattcttccc

SEQ ID NO: 1833211 - DNA, 15 bp, Homo sapiens
aacttattcttccca

SEQ ID NO: 1833212 - DNA, 15 bp, Homo sapiens
acttattcttcccag

SEQ ID NO: 1833213 - DNA, 15 bp, Homo sapiens
cttattcttcccagc

SEQ ID NO: 1833214 - DNA, 15 bp, Homo sapiens
ttattcttcccagcg

SEQ ID NO: 1833215 - DNA, 15 bp, Homo sapiens
tattcttcccagcgt

SEQ ID NO: 1833216 - DNA, 15 bp, Homo sapiens
attcttcccagcgtc

SEQ ID NO: 1833217 - DNA, 15 bp, Homo sapiens
ttcttcccagcgtct

SEQ ID NO: 1833218 - DNA, 15 bp, Homo sapiens
tcttcccagcgtctt

SEQ ID NO: 1833219 - DNA, 15 bp, Homo sapiens
cttcccagcgtcttc

SEQ ID NO: 1833220 - DNA, 15 bp, Homo sapiens
ttcccagcgtcttcc

SEQ ID NO: 1833221 - DNA, 15 bp, Homo sapiens
tcccagcgtcttccc

SEQ ID NO: 1833222 - DNA, 15 bp, Homo sapiens
cccagcgtcttccca

SEQ ID NO: 1833223 - DNA, 15 bp, Homo sapiens
ccagcgtcttcccaa

SEQ ID NO: 1833224 - DNA, 15 bp, Homo sapiens
cagcgtcttcccaat

SEQ ID NO: 1833225 - DNA, 15 bp, Homo sapiens
agcgtcttcccaatc

SEQ ID NO: 1833226 - DNA, 15 bp, Homo sapiens
gcgtcttcccaatcc

SEQ ID NO: 1833227 - DNA, 15 bp, Homo sapiens
cgtcttcccaatccc

SEQ ID NO: 1833228 - DNA, 15 bp, Homo sapiens
gtcttcccaatccca

SEQ ID NO: 1833229 - DNA, 15 bp, Homo sapiens
tcttcccaatcccac

SEQ ID NO: 1833230 - DNA, 15 bp, Homo sapiens
cttcccaatcccacc

SEQ ID NO: 1833231 - DNA, 15 bp, Homo sapiens
ttcccaatcccacct

SEQ ID NO: 1833232 - DNA, 15 bp, Homo sapiens
tcccaatcccacctc

SEQ ID NO: 1833233 - DNA, 15 bp, Homo sapiens
cccaatcccacctcc

SEQ ID NO: 1833234 - DNA, 15 bp, Homo sapiens
ccaatcccacctcca

SEQ ID NO: 1833235 - DNA, 15 bp, Homo sapiens
caatcccacctccac

SEQ ID NO: 1833236 - DNA, 15 bp, Homo sapiens
aatcccacctccacc

SEQ ID NO: 1833237 - DNA, 15 bp, Homo sapiens
atcccacctccaccc

SEQ ID NO: 1833238 - DNA, 15 bp, Homo sapiens
tcccacctccacccc

SEQ ID NO: 1833239 - DNA, 15 bp, Homo sapiens
cccacctccaccccc

SEQ ID NO: 1833240 - DNA, 15 bp, Homo sapiens
ccacctccaccccct

SEQ ID NO: 1833241 - DNA, 15 bp, Homo sapiens
cacctccaccccctg

SEQ ID NO: 1833242 - DNA, 15 bp, Homo sapiens
acctccaccccctgc

SEQ ID NO: 1833243 - DNA, 15 bp, Homo sapiens
cctccaccccctgct

SEQ ID NO: 1833244 - DNA, 15 bp, Homo sapiens
ctccaccccctgcta

SEQ ID NO: 1833245 - DNA, 15 bp, Homo sapiens
tccaccccctgctaa

SEQ ID NO: 1833246 - DNA, 15 bp, Homo sapiens
ccaccccctgctaat

SEQ ID NO: 1833247 - DNA, 15 bp, Homo sapiens
caccccctgctaata

SEQ ID NO: 1833248 - DNA, 15 bp, Homo sapiens
accccctgctaataa

SEQ ID NO: 1833249 - DNA, 15 bp, Homo sapiens
ccccctgctaataat

SEQ ID NO: 1833250 - DNA, 15 bp, Homo sapiens
cccctgctaataatt

SEQ ID NO: 1833251 - DNA, 15 bp, Homo sapiens
ccctgctaataatta

SEQ ID NO: 1833252 - DNA, 15 bp, Homo sapiens
cctgctaataattaa

SEQ ID NO: 1833253 - DNA, 15 bp, Homo sapiens
ctgctaataattaat

SEQ ID NO: 1833254 - DNA, 15 bp, Homo sapiens
tgctaataattaatt

SEQ ID NO: 1833255 - DNA, 15 bp, Homo sapiens
gctaataattaattt

SEQ ID NO: 1833256 - DNA, 15 bp, Homo sapiens
ctaataattaatttt

SEQ ID NO: 1833257 - DNA, 15 bp, Homo sapiens
taataattaatttta

SEQ ID NO: 1833258 - DNA, 15 bp, Homo sapiens
aataattaattttaa

SEQ ID NO: 1833259 - DNA, 15 bp, Homo sapiens
ataattaattttaaa

SEQ ID NO: 1833260 - DNA, 15 bp, Homo sapiens
taattaattttaaat

SEQ ID NO: 1833261 - DNA, 15 bp, Homo sapiens
aattaattttaaatg

SEQ ID NO: 1833262 - DNA, 15 bp, Homo sapiens
attaattttaaatga

SEQ ID NO: 1833263 - DNA, 15 bp, Homo sapiens
ttaattttaaatgac

SEQ ID NO: 1833264 - DNA, 15 bp, Homo sapiens
taattttaaatgact

SEQ ID NO: 1833265 - DNA, 15 bp, Homo sapiens
aattttaaatgactg

SEQ ID NO: 1833266 - DNA, 15 bp, Homo sapiens
attttaaatgactgg

SEQ ID NO: 1833267 - DNA, 15 bp, Homo sapiens
ttttaaatgactggg

SEQ ID NO: 1833268 - DNA, 15 bp, Homo sapiens
tttaaatgactgggg

SEQ ID NO: 1833269 - DNA, 15 bp, Homo sapiens
ttaaatgactgggga

SEQ ID NO: 1833270 - DNA, 15 bp, Homo sapiens
taaatgactggggaa

SEQ ID NO: 1833271 - DNA, 15 bp, Homo sapiens
aaatgactggggaaa

SEQ ID NO: 1833272 - DNA, 15 bp, Homo sapiens
aatgactggggaaaa

SEQ ID NO: 1833273 - DNA, 15 bp, Homo sapiens
atgactggggaaaaa

SEQ ID NO: 1833274 - DNA, 15 bp, Homo sapiens
tgactggggaaaaaa

SEQ ID NO: 1833275 - DNA, 15 bp, Homo sapiens
gactggggaaaaaat

SEQ ID NO: 1833276 - DNA, 15 bp, Homo sapiens
actggggaaaaaatt

SEQ ID NO: 1833277 - DNA, 15 bp, Homo sapiens
ctggggaaaaaattg

SEQ ID NO: 1833278 - DNA, 15 bp, Homo sapiens
tggggaaaaaattga

SEQ ID NO: 1833279 - DNA, 15 bp, Homo sapiens
ggggaaaaaattgaa

SEQ ID NO: 1833280 - DNA, 15 bp, Homo sapiens
gggaaaaaattgaaa

SEQ ID NO: 1833281 - DNA, 15 bp, Homo sapiens
ggaaaaaattgaaag

SEQ ID NO: 1833282 - DNA, 15 bp, Homo sapiens
gaaaaaattgaaaga

SEQ ID NO: 1833283 - DNA, 15 bp, Homo sapiens
aaaaaattgaaagaa

SEQ ID NO: 1833284 - DNA, 15 bp, Homo sapiens
aaaaattgaaagaac

SEQ ID NO: 1833285 - DNA, 15 bp, Homo sapiens
aaaattgaaagaact

SEQ ID NO: 1833286 - DNA, 15 bp, Homo sapiens
aaattgaaagaactg

SEQ ID NO: 1833287 - DNA, 15 bp, Homo sapiens
aattgaaagaactgt

SEQ ID NO: 1833288 - DNA, 15 bp, Homo sapiens
attgaaagaactgtt

SEQ ID NO: 1833289 - DNA, 15 bp, Homo sapiens
ttgaaagaactgttt

SEQ ID NO: 1833290 - DNA, 15 bp, Homo sapiens
tgaaagaactgtttc

SEQ ID NO: 1833291 - DNA, 15 bp, Homo sapiens
gaaagaactgtttca

SEQ ID NO: 1833292 - DNA, 15 bp, Homo sapiens
aaagaactgtttcat

SEQ ID NO: 1833293 - DNA, 15 bp, Homo sapiens
aagaactgtttcatg

SEQ ID NO: 1833294 - DNA, 15 bp, Homo sapiens
agaactgtttcatga

SEQ ID NO: 1833295 - DNA, 15 bp, Homo sapiens
gaactgtttcatgac

SEQ ID NO: 1833296 - DNA, 15 bp, Homo sapiens
aactgtttcatgaca

SEQ ID NO: 1833297 - DNA, 15 bp, Homo sapiens
actgtttcatgacac

SEQ ID NO: 1833298 - DNA, 15 bp, Homo sapiens
ctgtttcatgacact

SEQ ID NO: 1833299 - DNA, 15 bp, Homo sapiens
tgtttcatgacactt

SEQ ID NO: 1833300 - DNA, 15 bp, Homo sapiens
gtttcatgacacttg

SEQ ID NO: 1833301 - DNA, 15 bp, Homo sapiens
tttcatgacacttga

SEQ ID NO: 1833302 - DNA, 15 bp, Homo sapiens
ttcatgacacttgaa

SEQ ID NO: 1833303 - DNA, 15 bp, Homo sapiens
tcatgacacttgaac

SEQ ID NO: 1833304 - DNA, 15 bp, Homo sapiens
catgacacttgaaca

SEQ ID NO: 1833305 - DNA, 15 bp, Homo sapiens
atgacacttgaacat

SEQ ID NO: 1833306 - DNA, 15 bp, Homo sapiens
tgacacttgaacatt

SEQ ID NO: 1833307 - DNA, 15 bp, Homo sapiens
gacacttgaacatta

SEQ ID NO: 1833308 - DNA, 15 bp, Homo sapiens
acacttgaacattat

SEQ ID NO: 1833309 - DNA, 15 bp, Homo sapiens
cacttgaacattata

SEQ ID NO: 1833310 - DNA, 15 bp, Homo sapiens
acttgaacattatat

SEQ ID NO: 1833311 - DNA, 15 bp, Homo sapiens
cttgaacattatata

SEQ ID NO: 1833312 - DNA, 15 bp, Homo sapiens
ttgaacattatataa

SEQ ID NO: 1833313 - DNA, 15 bp, Homo sapiens
tgaacattatataaa

SEQ ID NO: 1833314 - DNA, 15 bp, Homo sapiens
gaacattatataaaa

SEQ ID NO: 1833315 - DNA, 15 bp, Homo sapiens
aacattatataaaat

SEQ ID NO: 1833316 - DNA, 15 bp, Homo sapiens
acattatataaaatt

SEQ ID NO: 1833317 - DNA, 15 bp, Homo sapiens
cattatataaaattt

SEQ ID NO: 1833318 - DNA, 15 bp, Homo sapiens
attatataaaatttt

SEQ ID NO: 1833319 - DNA, 15 bp, Homo sapiens
ttatataaaattttc

SEQ ID NO: 1833320 - DNA, 15 bp, Homo sapiens
tatataaaattttca

SEQ ID NO: 1833321 - DNA, 15 bp, Homo sapiens
atataaaattttcat

SEQ ID NO: 1833322 - DNA, 15 bp, Homo sapiens
tataaaattttcatg

SEQ ID NO: 1833323 - DNA, 15 bp, Homo sapiens
ataaaattttcatgt

SEQ ID NO: 1833324 - DNA, 15 bp, Homo sapiens
taaaattttcatgtc

SEQ ID NO: 1833325 - DNA, 15 bp, Homo sapiens
aaaattttcatgtca

SEQ ID NO: 1833326 - DNA, 15 bp, Homo sapiens
aaattttcatgtcag

SEQ ID NO: 1833327 - DNA, 15 bp, Homo sapiens
aattttcatgtcagt

SEQ ID NO: 1833328 - DNA, 15 bp, Homo sapiens
attttcatgtcagtg

SEQ ID NO: 1833329 - DNA, 15 bp, Homo sapiens
ttttcatgtcagtgt

SEQ ID NO: 1833330 - DNA, 15 bp, Homo sapiens
tttcatgtcagtgtt

SEQ ID NO: 1833331 - DNA, 15 bp, Homo sapiens
ttcatgtcagtgttc

SEQ ID NO: 1833332 - DNA, 15 bp, Homo sapiens
tcatgtcagtgttca

SEQ ID NO: 1833333 - DNA, 15 bp, Homo sapiens
catgtcagtgttcat

SEQ ID NO: 1833334 - DNA, 15 bp, Homo sapiens
atgtcagtgttcata

SEQ ID NO: 1833335 - DNA, 15 bp, Homo sapiens
tgtcagtgttcataa

SEQ ID NO: 1833336 - DNA, 15 bp, Homo sapiens
gtcagtgttcataaa

SEQ ID NO: 1833337 - DNA, 15 bp, Homo sapiens
tcagtgttcataaat

SEQ ID NO: 1833338 - DNA, 15 bp, Homo sapiens
cagtgttcataaata

SEQ ID NO: 1833339 - DNA, 15 bp, Homo sapiens
agtgttcataaatac

SEQ ID NO: 1833340 - DNA, 15 bp, Homo sapiens
gtgttcataaataca

SEQ ID NO: 1833341 - DNA, 15 bp, Homo sapiens
tgttcataaatacaa

SEQ ID NO: 1833342 - DNA, 15 bp, Homo sapiens
gttcataaatacaaa

SEQ ID NO: 1833343 - DNA, 15 bp, Homo sapiens
ttcataaatacaaac

SEQ ID NO: 1833344 - DNA, 15 bp, Homo sapiens
tcataaatacaaact

SEQ ID NO: 1833345 - DNA, 15 bp, Homo sapiens
cataaatacaaactt

SEQ ID NO: 1833346 - DNA, 15 bp, Homo sapiens
ataaatacaaacttt

SEQ ID NO: 1833347 - DNA, 15 bp, Homo sapiens
taaatacaaactttt

SEQ ID NO: 1833348 - DNA, 15 bp, Homo sapiens
aaatacaaactttta

SEQ ID NO: 1833349 - DNA, 15 bp, Homo sapiens
aatacaaacttttat

SEQ ID NO: 1833350 - DNA, 15 bp, Homo sapiens
atacaaacttttatt

SEQ ID NO: 1833351 - DNA, 15 bp, Homo sapiens
tacaaacttttatta

SEQ ID NO: 1833352 - DNA, 15 bp, Homo sapiens
acaaacttttattag

SEQ ID NO: 1833353 - DNA, 15 bp, Homo sapiens
caaacttttattaga

SEQ ID NO: 1833354 - DNA, 15 bp, Homo sapiens
aaacttttattagaa

SEQ ID NO: 1833355 - DNA, 15 bp, Homo sapiens
aacttttattagaac

SEQ ID NO: 1833356 - DNA, 15 bp, Homo sapiens
acttttattagaaca

SEQ ID NO: 1833357 - DNA, 15 bp, Homo sapiens
cttttattagaacat

SEQ ID NO: 1833358 - DNA, 15 bp, Homo sapiens
ttttattagaacata

SEQ ID NO: 1833359 - DNA, 15 bp, Homo sapiens
tttattagaacatag

SEQ ID NO: 1833360 - DNA, 15 bp, Homo sapiens
ttattagaacatagc

SEQ ID NO: 1833361 - DNA, 15 bp, Homo sapiens
tattagaacatagcc

SEQ ID NO: 1833362 - DNA, 15 bp, Homo sapiens
attagaacatagcca

SEQ ID NO: 1833363 - DNA, 15 bp, Homo sapiens
ttagaacatagccat

SEQ ID NO: 1833364 - DNA, 15 bp, Homo sapiens
tagaacatagccata

SEQ ID NO: 1833365 - DNA, 15 bp, Homo sapiens
agaacatagccatac

SEQ ID NO: 1833366 - DNA, 15 bp, Homo sapiens
gaacatagccatact

SEQ ID NO: 1833367 - DNA, 15 bp, Homo sapiens
aacatagccatacta

SEQ ID NO: 1833368 - DNA, 15 bp, Homo sapiens
acatagccatactat

SEQ ID NO: 1833369 - DNA, 15 bp, Homo sapiens
catagccatactatt

SEQ ID NO: 1833370 - DNA, 15 bp, Homo sapiens
atagccatactattt

SEQ ID NO: 1833371 - DNA, 15 bp, Homo sapiens
tagccatactattta

SEQ ID NO: 1833372 - DNA, 15 bp, Homo sapiens
agccatactatttat

SEQ ID NO: 1833373 - DNA, 15 bp, Homo sapiens
gccatactatttata

SEQ ID NO: 1833374 - DNA, 15 bp, Homo sapiens
ccatactatttatat

SEQ ID NO: 1833375 - DNA, 15 bp, Homo sapiens
catactatttatata

SEQ ID NO: 1833376 - DNA, 15 bp, Homo sapiens
atactatttatatat

SEQ ID NO: 1833377 - DNA, 15 bp, Homo sapiens
tactatttatatatt

SEQ ID NO: 1833378 - DNA, 15 bp, Homo sapiens
actatttatatattg

SEQ ID NO: 1833379 - DNA, 15 bp, Homo sapiens
ctatttatatattga

SEQ ID NO: 1833380 - DNA, 15 bp, Homo sapiens
tatttatatattgaa

SEQ ID NO: 1833381 - DNA, 15 bp, Homo sapiens
atttatatattgaaa

SEQ ID NO: 1833382 - DNA, 15 bp, Homo sapiens
tttatatattgaaat

SEQ ID NO: 1833383 - DNA, 15 bp, Homo sapiens
ttatatattgaaata

SEQ ID NO: 1833384 - DNA, 15 bp, Homo sapiens
tatatattgaaatac

SEQ ID NO: 1833385 - DNA, 15 bp, Homo sapiens
atatattgaaataca

SEQ ID NO: 1833386 - DNA, 15 bp, Homo sapiens
tatattgaaatacag

SEQ ID NO: 1833387 - DNA, 15 bp, Homo sapiens
atattgaaatacagt

SEQ ID NO: 1833388 - DNA, 15 bp, Homo sapiens
tattgaaatacagtt

SEQ ID NO: 1833389 - DNA, 15 bp, Homo sapiens
attgaaatacagttg

SEQ ID NO: 1833390 - DNA, 15 bp, Homo sapiens
ttgaaatacagttga

SEQ ID NO: 1833391 - DNA, 15 bp, Homo sapiens
tgaaatacagttgaa

SEQ ID NO: 1833392 - DNA, 15 bp, Homo sapiens
gaaatacagttgaat

SEQ ID NO: 1833393 - DNA, 15 bp, Homo sapiens
aaatacagttgaatt

SEQ ID NO: 1833394 - DNA, 15 bp, Homo sapiens
aatacagttgaattt

SEQ ID NO: 1833395 - DNA, 15 bp, Homo sapiens
atacagttgaatttg

SEQ ID NO: 1833396 - DNA, 15 bp, Homo sapiens
tacagttgaatttgt

SEQ ID NO: 1833397 - DNA, 15 bp, Homo sapiens
acagttgaatttgtc

SEQ ID NO: 1833398 - DNA, 15 bp, Homo sapiens
cagttgaatttgtca

SEQ ID NO: 1833399 - DNA, 15 bp, Homo sapiens
agttgaatttgtcat

SEQ ID NO: 1833400 - DNA, 15 bp, Homo sapiens
gttgaatttgtcata

SEQ ID NO: 1833401 - DNA, 15 bp, Homo sapiens
ttgaatttgtcatat

SEQ ID NO: 1833402 - DNA, 15 bp, Homo sapiens
tgaatttgtcatatg

SEQ ID NO: 1833403 - DNA, 15 bp, Homo sapiens
gaatttgtcatatga

SEQ ID NO: 1833404 - DNA, 15 bp, Homo sapiens
aatttgtcatatgac

SEQ ID NO: 1833405 - DNA, 15 bp, Homo sapiens
atttgtcatatgacc

SEQ ID NO: 1833406 - DNA, 15 bp, Homo sapiens
tttgtcatatgacca

SEQ ID NO: 1833407 - DNA, 15 bp, Homo sapiens
ttgtcatatgaccaa

SEQ ID NO: 1833408 - DNA, 15 bp, Homo sapiens
tgtcatatgaccaat

SEQ ID NO: 1833409 - DNA, 15 bp, Homo sapiens
gtcatatgaccaatt

SEQ ID NO: 1833410 - DNA, 15 bp, Homo sapiens
tcatatgaccaattt

SEQ ID NO: 1833411 - DNA, 15 bp, Homo sapiens
catatgaccaattta

SEQ ID NO: 1833412 - DNA, 15 bp, Homo sapiens
atatgaccaatttat

SEQ ID NO: 1833413 - DNA, 15 bp, Homo sapiens
tatgaccaatttatt

SEQ ID NO: 1833414 - DNA, 15 bp, Homo sapiens
atgaccaatttatta

SEQ ID NO: 1833415 - DNA, 15 bp, Homo sapiens
tgaccaatttattag

SEQ ID NO: 1833416 - DNA, 15 bp, Homo sapiens
gaccaatttattagt

SEQ ID NO: 1833417 - DNA, 15 bp, Homo sapiens
accaatttattagta

SEQ ID NO: 1833418 - DNA, 15 bp, Homo sapiens
ccaatttattagtat

SEQ ID NO: 1833419 - DNA, 15 bp, Homo sapiens
caatttattagtatt

SEQ ID NO: 1833420 - DNA, 15 bp, Homo sapiens
aatttattagtattg

SEQ ID NO: 1833421 - DNA, 15 bp, Homo sapiens
atttattagtattga

SEQ ID NO: 1833422 - DNA, 15 bp, Homo sapiens
tttattagtattgat

SEQ ID NO: 1833423 - DNA, 15 bp, Homo sapiens
ttattagtattgatt

SEQ ID NO: 1833424 - DNA, 15 bp, Homo sapiens
tattagtattgatta

SEQ ID NO: 1833425 - DNA, 15 bp, Homo sapiens
attagtattgattaa

SEQ ID NO: 1833426 - DNA, 15 bp, Homo sapiens
ttagtattgattaag

SEQ ID NO: 1833427 - DNA, 15 bp, Homo sapiens
tagtattgattaaga

SEQ ID NO: 1833428 - DNA, 15 bp, Homo sapiens
agtattgattaagat

SEQ ID NO: 1833429 - DNA, 15 bp, Homo sapiens
gtattgattaagatg

SEQ ID NO: 1833430 - DNA, 15 bp, Homo sapiens
tattgattaagatgt

SEQ ID NO: 1833431 - DNA, 15 bp, Homo sapiens
attgattaagatgtt

SEQ ID NO: 1833432 - DNA, 15 bp, Homo sapiens
ttgattaagatgttg

SEQ ID NO: 1833433 - DNA, 15 bp, Homo sapiens
tgattaagatgttga

SEQ ID NO: 1833434 - DNA, 15 bp, Homo sapiens
gattaagatgttgag

SEQ ID NO: 1833435 - DNA, 15 bp, Homo sapiens
attaagatgttgagc

SEQ ID NO: 1833436 - DNA, 15 bp, Homo sapiens
ttaagatgttgagca

SEQ ID NO: 1833437 - DNA, 15 bp, Homo sapiens
taagatgttgagcag

SEQ ID NO: 1833438 - DNA, 15 bp, Homo sapiens
aagatgttgagcagt

SEQ ID NO: 1833439 - DNA, 15 bp, Homo sapiens
agatgttgagcagtt

SEQ ID NO: 1833440 - DNA, 15 bp, Homo sapiens
gatgttgagcagttt

SEQ ID NO: 1833441 - DNA, 15 bp, Homo sapiens
atgttgagcagttta

SEQ ID NO: 1833442 - DNA, 15 bp, Homo sapiens
tgttgagcagtttat

SEQ ID NO: 1833443 - DNA, 15 bp, Homo sapiens
gttgagcagtttatt

SEQ ID NO: 1833444 - DNA, 15 bp, Homo sapiens
ttgagcagtttattc

SEQ ID NO: 1833445 - DNA, 15 bp, Homo sapiens
tgagcagtttattca

SEQ ID NO: 1833446 - DNA, 15 bp, Homo sapiens
gagcagtttattcaa

SEQ ID NO: 1833447 - DNA, 15 bp, Homo sapiens
agcagtttattcaag

SEQ ID NO: 1833448 - DNA, 15 bp, Homo sapiens
gcagtttattcaagt

SEQ ID NO: 1833449 - DNA, 15 bp, Homo sapiens
cagtttattcaagtg

SEQ ID NO: 1833450 - DNA, 15 bp, Homo sapiens
agtttattcaagtgt

SEQ ID NO: 1833451 - DNA, 15 bp, Homo sapiens
gtttattcaagtgtg

SEQ ID NO: 1833452 - DNA, 15 bp, Homo sapiens
tttattcaagtgtgg

SEQ ID NO: 1833453 - DNA, 15 bp, Homo sapiens
ttattcaagtgtggt

SEQ ID NO: 1833454 - DNA, 15 bp, Homo sapiens
tattcaagtgtggtt

SEQ ID NO: 1833455 - DNA, 15 bp, Homo sapiens
attcaagtgtggttt

SEQ ID NO: 1833456 - DNA, 15 bp, Homo sapiens
ttcaagtgtggtttt

SEQ ID NO: 1833457 - DNA, 15 bp, Homo sapiens
tcaagtgtggttttg

SEQ ID NO: 1833458 - DNA, 15 bp, Homo sapiens
caagtgtggttttgt

SEQ ID NO: 1833459 - DNA, 15 bp, Homo sapiens
aagtgtggttttgtg

SEQ ID NO: 1833460 - DNA, 15 bp, Homo sapiens
agtgtggttttgtgg

SEQ ID NO: 1833461 - DNA, 15 bp, Homo sapiens
gtgtggttttgtgga

SEQ ID NO: 1833462 - DNA, 15 bp, Homo sapiens
tgtggttttgtggaa

SEQ ID NO: 1833463 - DNA, 15 bp, Homo sapiens
gtggttttgtggaat

SEQ ID NO: 1833464 - DNA, 15 bp, Homo sapiens
tggttttgtggaatg

SEQ ID NO: 1833465 - DNA, 15 bp, Homo sapiens
ggttttgtggaatga

SEQ ID NO: 1833466 - DNA, 15 bp, Homo sapiens
gttttgtggaatgaa

SEQ ID NO: 1833467 - DNA, 15 bp, Homo sapiens
ttttgtggaatgaaa

SEQ ID NO: 1833468 - DNA, 15 bp, Homo sapiens
tttgtggaatgaaag

SEQ ID NO: 1833469 - DNA, 15 bp, Homo sapiens
ttgtggaatgaaaga

SEQ ID NO: 1833470 - DNA, 15 bp, Homo sapiens
tgtggaatgaaagag

SEQ ID NO: 1833471 - DNA, 15 bp, Homo sapiens
gtggaatgaaagaga

SEQ ID NO: 1833472 - DNA, 15 bp, Homo sapiens
tggaatgaaagagac

SEQ ID NO: 1833473 - DNA, 15 bp, Homo sapiens
ggaatgaaagagaca

SEQ ID NO: 1833474 - DNA, 15 bp, Homo sapiens
gaatgaaagagacag

SEQ ID NO: 1833475 - DNA, 15 bp, Homo sapiens
aatgaaagagacagg

SEQ ID NO: 1833476 - DNA, 15 bp, Homo sapiens
atgaaagagacagga

SEQ ID NO: 1833477 - DNA, 15 bp, Homo sapiens
tgaaagagacaggag

SEQ ID NO: 1833478 - DNA, 15 bp, Homo sapiens
gaaagagacaggagg

SEQ ID NO: 1833479 - DNA, 15 bp, Homo sapiens
aaagagacaggaggg

SEQ ID NO: 1833480 - DNA, 15 bp, Homo sapiens
aagagacaggaggga

SEQ ID NO: 1833481 - DNA, 15 bp, Homo sapiens
agagacaggagggat

SEQ ID NO: 1833482 - DNA, 15 bp, Homo sapiens
gagacaggagggatt

SEQ ID NO: 1833483 - DNA, 15 bp, Homo sapiens
agacaggagggatta

SEQ ID NO: 1833484 - DNA, 15 bp, Homo sapiens
gacaggagggattat

SEQ ID NO: 1833485 - DNA, 15 bp, Homo sapiens
acaggagggattatg

SEQ ID NO: 1833486 - DNA, 15 bp, Homo sapiens
caggagggattatga

SEQ ID NO: 1833487 - DNA, 15 bp, Homo sapiens
aggagggattatgag

SEQ ID NO: 1833488 - DNA, 15 bp, Homo sapiens
ggagggattatgagg

SEQ ID NO: 1833489 - DNA, 15 bp, Homo sapiens
gagggattatgagga

SEQ ID NO: 1833490 - DNA, 15 bp, Homo sapiens
agggattatgaggac

SEQ ID NO: 1833491 - DNA, 15 bp, Homo sapiens
gggattatgaggact

SEQ ID NO: 1833492 - DNA, 15 bp, Homo sapiens
ggattatgaggactc

SEQ ID NO: 1833493 - DNA, 15 bp, Homo sapiens
gattatgaggactct

SEQ ID NO: 1833494 - DNA, 15 bp, Homo sapiens
attatgaggactctc

SEQ ID NO: 1833495 - DNA, 15 bp, Homo sapiens
ttatgaggactctcc

SEQ ID NO: 1833496 - DNA, 15 bp, Homo sapiens
tatgaggactctcct

SEQ ID NO: 1833497 - DNA, 15 bp, Homo sapiens
atgaggactctcctt

SEQ ID NO: 1833498 - DNA, 15 bp, Homo sapiens
tgaggactctcctta

SEQ ID NO: 1833499 - DNA, 15 bp, Homo sapiens
gaggactctccttag

SEQ ID NO: 1833500 - DNA, 15 bp, Homo sapiens
aggactctccttagc

SEQ ID NO: 1833501 - DNA, 15 bp, Homo sapiens
ggactctccttagca

SEQ ID NO: 1833502 - DNA, 15 bp, Homo sapiens
gactctccttagcag

SEQ ID NO: 1833503 - DNA, 15 bp, Homo sapiens
actctccttagcagg

SEQ ID NO: 1833504 - DNA, 15 bp, Homo sapiens
ctctccttagcagga

SEQ ID NO: 1833505 - DNA, 15 bp, Homo sapiens
tctccttagcaggat

SEQ ID NO: 1833506 - DNA, 15 bp, Homo sapiens
ctccttagcaggatt

SEQ ID NO: 1833507 - DNA, 15 bp, Homo sapiens
tccttagcaggattg

SEQ ID NO: 1833508 - DNA, 15 bp, Homo sapiens
ccttagcaggattga

SEQ ID NO: 1833509 - DNA, 15 bp, Homo sapiens
cttagcaggattgat

SEQ ID NO: 1833510 - DNA, 15 bp, Homo sapiens
ttagcaggattgatg

SEQ ID NO: 1833511 - DNA, 15 bp, Homo sapiens
tagcaggattgatgc

SEQ ID NO: 1833512 - DNA, 15 bp, Homo sapiens
agcaggattgatgca

SEQ ID NO: 1833513 - DNA, 15 bp, Homo sapiens
gcaggattgatgcat

SEQ ID NO: 1833514 - DNA, 15 bp, Homo sapiens
caggattgatgcatt

SEQ ID NO: 1833515 - DNA, 15 bp, Homo sapiens
aggattgatgcattt

SEQ ID NO: 1833516 - DNA, 15 bp, Homo sapiens
ggattgatgcatttc

SEQ ID NO: 1833517 - DNA, 15 bp, Homo sapiens
gattgatgcatttca

SEQ ID NO: 1833518 - DNA, 15 bp, Homo sapiens
attgatgcatttcac

SEQ ID NO: 1833519 - DNA, 15 bp, Homo sapiens
ttgatgcatttcact

SEQ ID NO: 1833520 - DNA, 15 bp, Homo sapiens
tgatgcatttcactt

SEQ ID NO: 1833521 - DNA, 15 bp, Homo sapiens
gatgcatttcacttt

SEQ ID NO: 1833522 - DNA, 15 bp, Homo sapiens
atgcatttcactttt

SEQ ID NO: 1833523 - DNA, 15 bp, Homo sapiens
tgcatttcacttttt

SEQ ID NO: 1833524 - DNA, 15 bp, Homo sapiens
gcatttcactttttt

SEQ ID NO: 1833525 - DNA, 15 bp, Homo sapiens
catttcacttttttt

SEQ ID NO: 1833526 - DNA, 15 bp, Homo sapiens
atttcactttttttg

SEQ ID NO: 1833527 - DNA, 15 bp, Homo sapiens
tttcactttttttga

SEQ ID NO: 1833528 - DNA, 15 bp, Homo sapiens
ttcactttttttgac

SEQ ID NO: 1833529 - DNA, 15 bp, Homo sapiens
tcactttttttgaca

SEQ ID NO: 1833530 - DNA, 15 bp, Homo sapiens
cactttttttgacag

SEQ ID NO: 1833531 - DNA, 15 bp, Homo sapiens
actttttttgacagg

SEQ ID NO: 1833532 - DNA, 15 bp, Homo sapiens
ctttttttgacagga

SEQ ID NO: 1833533 - DNA, 15 bp, Homo sapiens
tttttttgacaggaa

SEQ ID NO: 1833534 - DNA, 15 bp, Homo sapiens
ttttttgacaggaag

SEQ ID NO: 1833535 - DNA, 15 bp, Homo sapiens
tttttgacaggaagg

SEQ ID NO: 1833536 - DNA, 15 bp, Homo sapiens
ttttgacaggaagga

SEQ ID NO: 1833537 - DNA, 15 bp, Homo sapiens
tttgacaggaaggaa

SEQ ID NO: 1833538 - DNA, 15 bp, Homo sapiens
ttgacaggaaggaaa

SEQ ID NO: 1833539 - DNA, 15 bp, Homo sapiens
tgacaggaaggaaag

SEQ ID NO: 1833540 - DNA, 15 bp, Homo sapiens
gacaggaaggaaagt

SEQ ID NO: 1833541 - DNA, 15 bp, Homo sapiens
acaggaaggaaagtt

SEQ ID NO: 1833542 - DNA, 15 bp, Homo sapiens
caggaaggaaagttt

SEQ ID NO: 1833543 - DNA, 15 bp, Homo sapiens
aggaaggaaagttta

SEQ ID NO: 1833544 - DNA, 15 bp, Homo sapiens
ggaaggaaagtttag

SEQ ID NO: 1833545 - DNA, 15 bp, Homo sapiens
gaaggaaagtttagg

SEQ ID NO: 1833546 - DNA, 15 bp, Homo sapiens
aaggaaagtttaggt

SEQ ID NO: 1833547 - DNA, 15 bp, Homo sapiens
aggaaagtttaggtt

SEQ ID NO: 1833548 - DNA, 15 bp, Homo sapiens
ggaaagtttaggttc

SEQ ID NO: 1833549 - DNA, 15 bp, Homo sapiens
gaaagtttaggttct

SEQ ID NO: 1833550 - DNA, 15 bp, Homo sapiens
aaagtttaggttcta

SEQ ID NO: 1833551 - DNA, 15 bp, Homo sapiens
aagtttaggttctat

SEQ ID NO: 1833552 - DNA, 15 bp, Homo sapiens
agtttaggttctatt

SEQ ID NO: 1833553 - DNA, 15 bp, Homo sapiens
gtttaggttctattt

SEQ ID NO: 1833554 - DNA, 15 bp, Homo sapiens
tttaggttctatttt

SEQ ID NO: 1833555 - DNA, 15 bp, Homo sapiens
ttaggttctattttc

SEQ ID NO: 1833556 - DNA, 15 bp, Homo sapiens
taggttctattttct

SEQ ID NO: 1833557 - DNA, 15 bp, Homo sapiens
aggttctattttctc

SEQ ID NO: 1833558 - DNA, 15 bp, Homo sapiens
ggttctattttctca

SEQ ID NO: 1833559 - DNA, 15 bp, Homo sapiens
gttctattttctcag

SEQ ID NO: 1833560 - DNA, 15 bp, Homo sapiens
ttctattttctcagc

SEQ ID NO: 1833561 - DNA, 15 bp, Homo sapiens
tctattttctcagca

SEQ ID NO: 1833562 - DNA, 15 bp, Homo sapiens
ctattttctcagcaa

SEQ ID NO: 1833563 - DNA, 15 bp, Homo sapiens
tattttctcagcaac

SEQ ID NO: 1833564 - DNA, 15 bp, Homo sapiens
attttctcagcaact

SEQ ID NO: 1833565 - DNA, 15 bp, Homo sapiens
ttttctcagcaactc

SEQ ID NO: 1833566 - DNA, 15 bp, Homo sapiens
tttctcagcaactct

SEQ ID NO: 1833567 - DNA, 15 bp, Homo sapiens
ttctcagcaactcta

SEQ ID NO: 1833568 - DNA, 15 bp, Homo sapiens
tctcagcaactctac

SEQ ID NO: 1833569 - DNA, 15 bp, Homo sapiens
ctcagcaactctact

SEQ ID NO: 1833570 - DNA, 15 bp, Homo sapiens
tcagcaactctactt

SEQ ID NO: 1833571 - DNA, 15 bp, Homo sapiens
cagcaactctactta

SEQ ID NO: 1833572 - DNA, 15 bp, Homo sapiens
agcaactctacttaa

SEQ ID NO: 1833573 - DNA, 15 bp, Homo sapiens
gcaactctacttaac

SEQ ID NO: 1833574 - DNA, 15 bp, Homo sapiens
caactctacttaact

SEQ ID NO: 1833575 - DNA, 15 bp, Homo sapiens
aactctacttaactg

SEQ ID NO: 1833576 - DNA, 15 bp, Homo sapiens
actctacttaactgc

SEQ ID NO: 1833577 - DNA, 15 bp, Homo sapiens
ctctacttaactgcc

SEQ ID NO: 1833578 - DNA, 15 bp, Homo sapiens
tctacttaactgcct

SEQ ID NO: 1833579 - DNA, 15 bp, Homo sapiens
ctacttaactgcctc

SEQ ID NO: 1833580 - DNA, 15 bp, Homo sapiens
tacttaactgcctcc

SEQ ID NO: 1833581 - DNA, 15 bp, Homo sapiens
acttaactgcctcca

SEQ ID NO: 1833582 - DNA, 15 bp, Homo sapiens
cttaactgcctccat

SEQ ID NO: 1833583 - DNA, 15 bp, Homo sapiens
ttaactgcctccatc

SEQ ID NO: 1833584 - DNA, 15 bp, Homo sapiens
taactgcctccatct

SEQ ID NO: 1833585 - DNA, 15 bp, Homo sapiens
aactgcctccatctg

SEQ ID NO: 1833586 - DNA, 15 bp, Homo sapiens
actgcctccatctga

SEQ ID NO: 1833587 - DNA, 15 bp, Homo sapiens
ctgcctccatctgaa

SEQ ID NO: 1833588 - DNA, 15 bp, Homo sapiens
tgcctccatctgaac

SEQ ID NO: 1833589 - DNA, 15 bp, Homo sapiens
gcctccatctgaact

SEQ ID NO: 1833590 - DNA, 15 bp, Homo sapiens
cctccatctgaacta

SEQ ID NO: 1833591 - DNA, 15 bp, Homo sapiens
ctccatctgaactat

SEQ ID NO: 1833592 - DNA, 15 bp, Homo sapiens
tccatctgaactata

SEQ ID NO: 1833593 - DNA, 15 bp, Homo sapiens
ccatctgaactatat

SEQ ID NO: 1833594 - DNA, 15 bp, Homo sapiens
catctgaactatata

SEQ ID NO: 1833595 - DNA, 15 bp, Homo sapiens
atctgaactatatat

SEQ ID NO: 1833596 - DNA, 15 bp, Homo sapiens
tctgaactatatata

SEQ ID NO: 1833597 - DNA, 15 bp, Homo sapiens
ctgaactatatatag

SEQ ID NO: 1833598 - DNA, 15 bp, Homo sapiens
tgaactatatatagg

SEQ ID NO: 1833599 - DNA, 15 bp, Homo sapiens
gaactatatatagga

SEQ ID NO: 1833600 - DNA, 15 bp, Homo sapiens
aactatatataggag

SEQ ID NO: 1833601 - DNA, 15 bp, Homo sapiens
actatatataggagg

SEQ ID NO: 1833602 - DNA, 15 bp, Homo sapiens
ctatatataggaggg

SEQ ID NO: 1833603 - DNA, 15 bp, Homo sapiens
tatatataggagggg

SEQ ID NO: 1833604 - DNA, 15 bp, Homo sapiens
atatataggaggggg

SEQ ID NO: 1833605 - DNA, 15 bp, Homo sapiens
tatataggagggggt

SEQ ID NO: 1833606 - DNA, 15 bp, Homo sapiens
atataggagggggtg

SEQ ID NO: 1833607 - DNA, 15 bp, Homo sapiens
tataggagggggtgg

SEQ ID NO: 1833608 - DNA, 15 bp, Homo sapiens
ataggagggggtgga

SEQ ID NO: 1833609 - DNA, 15 bp, Homo sapiens
taggagggggtggat

SEQ ID NO: 1833610 - DNA, 15 bp, Homo sapiens
aggagggggtggata

SEQ ID NO: 1833611 - DNA, 15 bp, Homo sapiens
ggagggggtggatat

SEQ ID NO: 1833612 - DNA, 15 bp, Homo sapiens
gagggggtggatatc

SEQ ID NO: 1833613 - DNA, 15 bp, Homo sapiens
agggggtggatatca

SEQ ID NO: 1833614 - DNA, 15 bp, Homo sapiens
gggggtggatatcag

SEQ ID NO: 1833615 - DNA, 15 bp, Homo sapiens
ggggtggatatcagc

SEQ ID NO: 1833616 - DNA, 15 bp, Homo sapiens
gggtggatatcagca

SEQ ID NO: 1833617 - DNA, 15 bp, Homo sapiens
ggtggatatcagcaa

SEQ ID NO: 1833618 - DNA, 15 bp, Homo sapiens
gtggatatcagcaaa

SEQ ID NO: 1833619 - DNA, 15 bp, Homo sapiens
tggatatcagcaaag

SEQ ID NO: 1833620 - DNA, 15 bp, Homo sapiens
ggatatcagcaaaga

SEQ ID NO: 1833621 - DNA, 15 bp, Homo sapiens
gatatcagcaaagat

SEQ ID NO: 1833622 - DNA, 15 bp, Homo sapiens
atatcagcaaagatt

SEQ ID NO: 1833623 - DNA, 15 bp, Homo sapiens
tatcagcaaagatta

SEQ ID NO: 1833624 - DNA, 15 bp, Homo sapiens
atcagcaaagattaa

SEQ ID NO: 1833625 - DNA, 15 bp, Homo sapiens
tcagcaaagattaac

SEQ ID NO: 1833626 - DNA, 15 bp, Homo sapiens
cagcaaagattaaca

SEQ ID NO: 1833627 - DNA, 15 bp, Homo sapiens
agcaaagattaacat

SEQ ID NO: 1833628 - DNA, 15 bp, Homo sapiens
gcaaagattaacatc

SEQ ID NO: 1833629 - DNA, 15 bp, Homo sapiens
caaagattaacatca

SEQ ID NO: 1833630 - DNA, 15 bp, Homo sapiens
aaagattaacatcag

SEQ ID NO: 1833631 - DNA, 15 bp, Homo sapiens
aagattaacatcagt

SEQ ID NO: 1833632 - DNA, 15 bp, Homo sapiens
agattaacatcagta

SEQ ID NO: 1833633 - DNA, 15 bp, Homo sapiens
gattaacatcagtaa

SEQ ID NO: 1833634 - DNA, 15 bp, Homo sapiens
attaacatcagtaaa

SEQ ID NO: 1833635 - DNA, 15 bp, Homo sapiens
ttaacatcagtaaat

SEQ ID NO: 1833636 - DNA, 15 bp, Homo sapiens
taacatcagtaaatt

SEQ ID NO: 1833637 - DNA, 15 bp, Homo sapiens
aacatcagtaaattt

SEQ ID NO: 1833638 - DNA, 15 bp, Homo sapiens
acatcagtaaatttt

SEQ ID NO: 1833639 - DNA, 15 bp, Homo sapiens
catcagtaaattttg

SEQ ID NO: 1833640 - DNA, 15 bp, Homo sapiens
atcagtaaattttga

SEQ ID NO: 1833641 - DNA, 15 bp, Homo sapiens
tcagtaaattttgat

SEQ ID NO: 1833642 - DNA, 15 bp, Homo sapiens
cagtaaattttgatg

SEQ ID NO: 1833643 - DNA, 15 bp, Homo sapiens
agtaaattttgatga

SEQ ID NO: 1833644 - DNA, 15 bp, Homo sapiens
gtaaattttgatgaa

SEQ ID NO: 1833645 - DNA, 15 bp, Homo sapiens
taaattttgatgaat

SEQ ID NO: 1833646 - DNA, 15 bp, Homo sapiens
aaattttgatgaatt

SEQ ID NO: 1833647 - DNA, 15 bp, Homo sapiens
aattttgatgaattc

SEQ ID NO: 1833648 - DNA, 15 bp, Homo sapiens
attttgatgaattct

SEQ ID NO: 1833649 - DNA, 15 bp, Homo sapiens
ttttgatgaattctc

SEQ ID NO: 1833650 - DNA, 15 bp, Homo sapiens
tttgatgaattctct

SEQ ID NO: 1833651 - DNA, 15 bp, Homo sapiens
ttgatgaattctcta

SEQ ID NO: 1833652 - DNA, 15 bp, Homo sapiens
tgatgaattctctaa

SEQ ID NO: 1833653 - DNA, 15 bp, Homo sapiens
gatgaattctctaaa

SEQ ID NO: 1833654 - DNA, 15 bp, Homo sapiens
atgaattctctaaaa

SEQ ID NO: 1833655 - DNA, 15 bp, Homo sapiens
tgaattctctaaaaa

SEQ ID NO: 1833656 - DNA, 15 bp, Homo sapiens
gaattctctaaaaat

SEQ ID NO: 1833657 - DNA, 15 bp, Homo sapiens
aattctctaaaaatt

SEQ ID NO: 1833658 - DNA, 15 bp, Homo sapiens
attctctaaaaattc

SEQ ID NO: 1833659 - DNA, 15 bp, Homo sapiens
ttctctaaaaattct

SEQ ID NO: 1833660 - DNA, 15 bp, Homo sapiens
tctctaaaaattctg

SEQ ID NO: 1833661 - DNA, 15 bp, Homo sapiens
ctctaaaaattctga

SEQ ID NO: 1833662 - DNA, 15 bp, Homo sapiens
tctaaaaattctgat

SEQ ID NO: 1833663 - DNA, 15 bp, Homo sapiens
ctaaaaattctgatt

SEQ ID NO: 1833664 - DNA, 15 bp, Homo sapiens
taaaaattctgattt

SEQ ID NO: 1833665 - DNA, 15 bp, Homo sapiens
aaaaattctgatttt

SEQ ID NO: 1833666 - DNA, 15 bp, Homo sapiens
aaaattctgattttt

SEQ ID NO: 1833667 - DNA, 15 bp, Homo sapiens
aaattctgattttta

SEQ ID NO: 1833668 - DNA, 15 bp, Homo sapiens
aattctgatttttaa

SEQ ID NO: 1833669 - DNA, 15 bp, Homo sapiens
attctgatttttaaa

SEQ ID NO: 1833670 - DNA, 15 bp, Homo sapiens
ttctgatttttaaag

SEQ ID NO: 1833671 - DNA, 15 bp, Homo sapiens
tctgatttttaaaga

SEQ ID NO: 1833672 - DNA, 15 bp, Homo sapiens
ctgatttttaaagag

SEQ ID NO: 1833673 - DNA, 15 bp, Homo sapiens
tgatttttaaagagg

SEQ ID NO: 1833674 - DNA, 15 bp, Homo sapiens
gatttttaaagaggg

SEQ ID NO: 1833675 - DNA, 15 bp, Homo sapiens
atttttaaagaggga

SEQ ID NO: 1833676 - DNA, 15 bp, Homo sapiens
tttttaaagagggaa

SEQ ID NO: 1833677 - DNA, 15 bp, Homo sapiens
ttttaaagagggaat

SEQ ID NO: 1833678 - DNA, 15 bp, Homo sapiens
tttaaagagggaatt

SEQ ID NO: 1833679 - DNA, 15 bp, Homo sapiens
ttaaagagggaattt

SEQ ID NO: 1833680 - DNA, 15 bp, Homo sapiens
taaagagggaatttt

SEQ ID NO: 1833681 - DNA, 15 bp, Homo sapiens
aaagagggaattttg

SEQ ID NO: 1833682 - DNA, 15 bp, Homo sapiens
aagagggaattttgg

SEQ ID NO: 1833683 - DNA, 15 bp, Homo sapiens
agagggaattttggc

SEQ ID NO: 1833684 - DNA, 15 bp, Homo sapiens
gagggaattttggct

SEQ ID NO: 1833685 - DNA, 15 bp, Homo sapiens
agggaattttggctg

SEQ ID NO: 1833686 - DNA, 15 bp, Homo sapiens
gggaattttggctgg

SEQ ID NO: 1833687 - DNA, 15 bp, Homo sapiens
ggaattttggctggg

SEQ ID NO: 1833688 - DNA, 15 bp, Homo sapiens
gaattttggctgggc

SEQ ID NO: 1833689 - DNA, 15 bp, Homo sapiens
aattttggctgggca

SEQ ID NO: 1833690 - DNA, 15 bp, Homo sapiens
attttggctgggcac

SEQ ID NO: 1833691 - DNA, 15 bp, Homo sapiens
ttttggctgggcaca

SEQ ID NO: 1833692 - DNA, 15 bp, Homo sapiens
tttggctgggcacag

SEQ ID NO: 1833693 - DNA, 15 bp, Homo sapiens
ttggctgggcacagt

SEQ ID NO: 1833694 - DNA, 15 bp, Homo sapiens
cacctgtaatcctaa

SEQ ID NO: 1833695 - DNA, 15 bp, Homo sapiens
acctgtaatcctaag

SEQ ID NO: 1833696 - DNA, 15 bp, Homo sapiens
cctgtaatcctaagc

SEQ ID NO: 1833697 - DNA, 15 bp, Homo sapiens
ctgtaatcctaagca

SEQ ID NO: 1833698 - DNA, 15 bp, Homo sapiens
tgtaatcctaagcac

SEQ ID NO: 1833699 - DNA, 15 bp, Homo sapiens
gtaatcctaagcact

SEQ ID NO: 1833700 - DNA, 15 bp, Homo sapiens
taatcctaagcactt

SEQ ID NO: 1833701 - DNA, 15 bp, Homo sapiens
aatcctaagcacttt

SEQ ID NO: 1833702 - DNA, 15 bp, Homo sapiens
atcctaagcactttg

SEQ ID NO: 1833703 - DNA, 15 bp, Homo sapiens
tcctaagcactttgg

SEQ ID NO: 1833704 - DNA, 15 bp, Homo sapiens
cctaagcactttggg

SEQ ID NO: 1833705 - DNA, 15 bp, Homo sapiens
ctaagcactttggga

SEQ ID NO: 1833706 - DNA, 15 bp, Homo sapiens
taagcactttgggag

SEQ ID NO: 1833707 - DNA, 15 bp, Homo sapiens
aagcactttgggagg

SEQ ID NO: 1833708 - DNA, 15 bp, Homo sapiens
gatcacctgaggtct

SEQ ID NO: 1833709 - DNA, 15 bp, Homo sapiens
atcacctgaggtctg

SEQ ID NO: 1833710 - DNA, 15 bp, Homo sapiens
tcacctgaggtctgg

SEQ ID NO: 1833711 - DNA, 15 bp, Homo sapiens
cacctgaggtctgga

SEQ ID NO: 1833712 - DNA, 15 bp, Homo sapiens
acctgaggtctggag

SEQ ID NO: 1833713 - DNA, 15 bp, Homo sapiens
cctgaggtctggagt

SEQ ID NO: 1833714 - DNA, 15 bp, Homo sapiens
ctgaggtctggagtt

SEQ ID NO: 1833715 - DNA, 15 bp, Homo sapiens
tgaggtctggagttt

SEQ ID NO: 1833716 - DNA, 15 bp, Homo sapiens
gaggtctggagtttg

SEQ ID NO: 1833717 - DNA, 15 bp, Homo sapiens
aggtctggagtttga

SEQ ID NO: 1833718 - DNA, 15 bp, Homo sapiens
ggtctggagtttgag

SEQ ID NO: 1833719 - DNA, 15 bp, Homo sapiens
gtctggagtttgaga

SEQ ID NO: 1833720 - DNA, 15 bp, Homo sapiens
tctggagtttgagac

SEQ ID NO: 1833721 - DNA, 15 bp, Homo sapiens
ctggagtttgagacc

SEQ ID NO: 1833722 - DNA, 15 bp, Homo sapiens
tggagtttgagacca

SEQ ID NO: 1833723 - DNA, 15 bp, Homo sapiens
ctctactaaaaacaa

SEQ ID NO: 1833724 - DNA, 15 bp, Homo sapiens
tctactaaaaacaaa

SEQ ID NO: 1833725 - DNA, 15 bp, Homo sapiens
ctactaaaaacaaat

SEQ ID NO: 1833726 - DNA, 15 bp, Homo sapiens
tactaaaaacaaatt

SEQ ID NO: 1833727 - DNA, 15 bp, Homo sapiens
actaaaaacaaatta

SEQ ID NO: 1833728 - DNA, 15 bp, Homo sapiens
ctaaaaacaaattag

SEQ ID NO: 1833729 - DNA, 15 bp, Homo sapiens
taaaaacaaattagc

SEQ ID NO: 1833730 - DNA, 15 bp, Homo sapiens
aaaaacaaattagct

SEQ ID NO: 1833731 - DNA, 15 bp, Homo sapiens
aaaacaaattagctg

SEQ ID NO: 1833732 - DNA, 15 bp, Homo sapiens
aaacaaattagctga

SEQ ID NO: 1833733 - DNA, 15 bp, Homo sapiens
aacaaattagctgaa

SEQ ID NO: 1833734 - DNA, 15 bp, Homo sapiens
acaaattagctgaat

SEQ ID NO: 1833735 - DNA, 15 bp, Homo sapiens
caaattagctgaatg

SEQ ID NO: 1833736 - DNA, 15 bp, Homo sapiens
aaattagctgaatgt

SEQ ID NO: 1833737 - DNA, 15 bp, Homo sapiens
aattagctgaatgtg

SEQ ID NO: 1833738 - DNA, 15 bp, Homo sapiens
attagctgaatgtgg

SEQ ID NO: 1833739 - DNA, 15 bp, Homo sapiens
ttagctgaatgtggt

SEQ ID NO: 1833740 - DNA, 15 bp, Homo sapiens
tagctgaatgtggtg

SEQ ID NO: 1833741 - DNA, 15 bp, Homo sapiens
agctgaatgtggtgg

SEQ ID NO: 1833742 - DNA, 15 bp, Homo sapiens
gctgaatgtggtggc

SEQ ID NO: 1833743 - DNA, 15 bp, Homo sapiens
ctgaatgtggtggcg

SEQ ID NO: 1833744 - DNA, 15 bp, Homo sapiens
tgaatgtggtggcgc

SEQ ID NO: 1833745 - DNA, 15 bp, Homo sapiens
gaatgtggtggcgcg

SEQ ID NO: 1833746 - DNA, 15 bp, Homo sapiens
aatgtggtggcgcgc

SEQ ID NO: 1833747 - DNA, 15 bp, Homo sapiens
atgtggtggcgcgca

SEQ ID NO: 1833748 - DNA, 15 bp, Homo sapiens
tgtggtggcgcgcac

SEQ ID NO: 1833749 - DNA, 15 bp, Homo sapiens
gtggtggcgcgcacc

SEQ ID NO: 1833750 - DNA, 15 bp, Homo sapiens
tggtggcgcgcacct

SEQ ID NO: 1833751 - DNA, 15 bp, Homo sapiens
ggtggcgcgcacctg

SEQ ID NO: 1833752 - DNA, 15 bp, Homo sapiens
gtggcgcgcacctgt

SEQ ID NO: 1833753 - DNA, 15 bp, Homo sapiens
ctgtagtcccagctc

SEQ ID NO: 1833754 - DNA, 15 bp, Homo sapiens
tgtagtcccagctcc

SEQ ID NO: 1833755 - DNA, 15 bp, Homo sapiens
gtagtcccagctcct

SEQ ID NO: 1833756 - DNA, 15 bp, Homo sapiens
tagtcccagctcctt

SEQ ID NO: 1833757 - DNA, 15 bp, Homo sapiens
agtcccagctccttg

SEQ ID NO: 1833758 - DNA, 15 bp, Homo sapiens
gtcccagctccttgg

SEQ ID NO: 1833759 - DNA, 15 bp, Homo sapiens
tcccagctccttggg

SEQ ID NO: 1833760 - DNA, 15 bp, Homo sapiens
cccagctccttggga

SEQ ID NO: 1833761 - DNA, 15 bp, Homo sapiens
ccagctccttgggag

SEQ ID NO: 1833762 - DNA, 15 bp, Homo sapiens
cagctccttgggagg

SEQ ID NO: 1833763 - DNA, 15 bp, Homo sapiens
agctccttgggaggc

SEQ ID NO: 1833764 - DNA, 15 bp, Homo sapiens
gctccttgggaggct

SEQ ID NO: 1833765 - DNA, 15 bp, Homo sapiens
ctccttgggaggctg

SEQ ID NO: 1833766 - DNA, 15 bp, Homo sapiens
tccttgggaggctga

SEQ ID NO: 1833767 - DNA, 15 bp, Homo sapiens
tgaggtgggagaatt

SEQ ID NO: 1833768 - DNA, 15 bp, Homo sapiens
gaggtgggagaattg

SEQ ID NO: 1833769 - DNA, 15 bp, Homo sapiens
aggtgggagaattgc

SEQ ID NO: 1833770 - DNA, 15 bp, Homo sapiens
ggtgggagaattgcc

SEQ ID NO: 1833771 - DNA, 15 bp, Homo sapiens
gtgggagaattgcct

SEQ ID NO: 1833772 - DNA, 15 bp, Homo sapiens
tgggagaattgccta

SEQ ID NO: 1833773 - DNA, 15 bp, Homo sapiens
gggagaattgcctaa

SEQ ID NO: 1833774 - DNA, 15 bp, Homo sapiens
ggagaattgcctaaa

SEQ ID NO: 1833775 - DNA, 15 bp, Homo sapiens
gagaattgcctaaac

SEQ ID NO: 1833776 - DNA, 15 bp, Homo sapiens
agaattgcctaaacc

SEQ ID NO: 1833777 - DNA, 15 bp, Homo sapiens
gaattgcctaaaccc

SEQ ID NO: 1833778 - DNA, 15 bp, Homo sapiens
aattgcctaaaccca

SEQ ID NO: 1833779 - DNA, 15 bp, Homo sapiens
attgcctaaacccag

SEQ ID NO: 1833780 - DNA, 15 bp, Homo sapiens
ttgcctaaacccagg

SEQ ID NO: 1833781 - DNA, 15 bp, Homo sapiens
tgcctaaacccagga

SEQ ID NO: 1833782 - DNA, 15 bp, Homo sapiens
gcctaaacccaggag

SEQ ID NO: 1833783 - DNA, 15 bp, Homo sapiens
cctaaacccaggaga

SEQ ID NO: 1833784 - DNA, 15 bp, Homo sapiens
ctaaacccaggagag

SEQ ID NO: 1833785 - DNA, 15 bp, Homo sapiens
taaacccaggagagg

SEQ ID NO: 1833786 - DNA, 15 bp, Homo sapiens
aaacccaggagaggt

SEQ ID NO: 1833787 - DNA, 15 bp, Homo sapiens
aacccaggagaggtg

SEQ ID NO: 1833788 - DNA, 15 bp, Homo sapiens
acccaggagaggtgg

SEQ ID NO: 1833789 - DNA, 15 bp, Homo sapiens
cccaggagaggtgga

SEQ ID NO: 1833790 - DNA, 15 bp, Homo sapiens
ccaggagaggtggag

SEQ ID NO: 1833791 - DNA, 15 bp, Homo sapiens
caggagaggtggagg

SEQ ID NO: 1833792 - DNA, 15 bp, Homo sapiens
aggagaggtggaggt

SEQ ID NO: 1833793 - DNA, 15 bp, Homo sapiens
ggagaggtggaggtt

SEQ ID NO: 1833794 - DNA, 15 bp, Homo sapiens
ccgagattgtgccat

SEQ ID NO: 1833795 - DNA, 15 bp, Homo sapiens
cgagattgtgccatt

SEQ ID NO: 1833796 - DNA, 15 bp, Homo sapiens
gagattgtgccattg

SEQ ID NO: 1833797 - DNA, 15 bp, Homo sapiens
tccatcctgggtgac

SEQ ID NO: 1833798 - DNA, 15 bp, Homo sapiens
ccatcctgggtgaca

SEQ ID NO: 1833799 - DNA, 15 bp, Homo sapiens
catcctgggtgacag

SEQ ID NO: 1833800 - DNA, 15 bp, Homo sapiens
atcctgggtgacaga

SEQ ID NO: 1833801 - DNA, 15 bp, Homo sapiens
tcctgggtgacagag

SEQ ID NO: 1833802 - DNA, 15 bp, Homo sapiens
cagagcgagactctc

SEQ ID NO: 1833803 - DNA, 15 bp, Homo sapiens
agagcgagactctca

SEQ ID NO: 1833804 - DNA, 15 bp, Homo sapiens
gagcgagactctcaa

SEQ ID NO: 1833805 - DNA, 15 bp, Homo sapiens
agcgagactctcaaa

SEQ ID NO: 1833806 - DNA, 15 bp, Homo sapiens
gcgagactctcaaaa

SEQ ID NO: 1833807 - DNA, 15 bp, Homo sapiens
cgagactctcaaaaa

SEQ ID NO: 1833808 - DNA, 15 bp, Homo sapiens
gagactctcaaaaaa

SEQ ID NO: 1833809 - DNA, 15 bp, Homo sapiens
agactctcaaaaaaa

SEQ ID NO: 1833810 - DNA, 15 bp, Homo sapiens
gactctcaaaaaaaa

SEQ ID NO: 1833811 - DNA, 15 bp, Homo sapiens
actctcaaaaaaaaa

SEQ ID NO: 1833812 - DNA, 15 bp, Homo sapiens
ctctcaaaaaaaaag

SEQ ID NO: 1833813 - DNA, 15 bp, Homo sapiens
tctcaaaaaaaaagg

SEQ ID NO: 1833814 - DNA, 15 bp, Homo sapiens
ctcaaaaaaaaaggt

SEQ ID NO: 1833815 - DNA, 15 bp, Homo sapiens
tcaaaaaaaaaggtg

SEQ ID NO: 1833816 - DNA, 15 bp, Homo sapiens
caaaaaaaaaggtgg

SEQ ID NO: 1833817 - DNA, 15 bp, Homo sapiens
aaaaaaaaaggtggg

SEQ ID NO: 1833818 - DNA, 15 bp, Homo sapiens
aaaaaaaaggtgggt

SEQ ID NO: 1833819 - DNA, 15 bp, Homo sapiens
aaaaaaaggtgggtg

SEQ ID NO: 1833820 - DNA, 15 bp, Homo sapiens
aaaaaaggtgggtgt

SEQ ID NO: 1833821 - DNA, 15 bp, Homo sapiens
aaaaaggtgggtgtg

SEQ ID NO: 1833822 - DNA, 15 bp, Homo sapiens
aaaaggtgggtgtga

SEQ ID NO: 1833823 - DNA, 15 bp, Homo sapiens
aaaggtgggtgtgaa

SEQ ID NO: 1833824 - DNA, 15 bp, Homo sapiens
aaggtgggtgtgaat

SEQ ID NO: 1833825 - DNA, 15 bp, Homo sapiens
aggtgggtgtgaatt

SEQ ID NO: 1833826 - DNA, 15 bp, Homo sapiens
ggtgggtgtgaattt

SEQ ID NO: 1833827 - DNA, 15 bp, Homo sapiens
gtgggtgtgaatttt

SEQ ID NO: 1833828 - DNA, 15 bp, Homo sapiens
tgggtgtgaattttg

SEQ ID NO: 1833829 - DNA, 15 bp, Homo sapiens
gggtgtgaattttgt

SEQ ID NO: 1833830 - DNA, 15 bp, Homo sapiens
ggtgtgaattttgtt

SEQ ID NO: 1833831 - DNA, 15 bp, Homo sapiens
gtgtgaattttgtta

SEQ ID NO: 1833832 - DNA, 15 bp, Homo sapiens
tgtgaattttgttat

SEQ ID NO: 1833833 - DNA, 15 bp, Homo sapiens
gtgaattttgttatg

SEQ ID NO: 1833834 - DNA, 15 bp, Homo sapiens
tgaattttgttatgt

SEQ ID NO: 1833835 - DNA, 15 bp, Homo sapiens
gaattttgttatgtt

SEQ ID NO: 1833836 - DNA, 15 bp, Homo sapiens
aattttgttatgttg

SEQ ID NO: 1833837 - DNA, 15 bp, Homo sapiens
attttgttatgttgt

SEQ ID NO: 1833838 - DNA, 15 bp, Homo sapiens
ttttgttatgttgtg

SEQ ID NO: 1833839 - DNA, 15 bp, Homo sapiens
tttgttatgttgtgc

SEQ ID NO: 1833840 - DNA, 15 bp, Homo sapiens
ttgttatgttgtgcg

SEQ ID NO: 1833841 - DNA, 15 bp, Homo sapiens
tgttatgttgtgcgg

SEQ ID NO: 1833842 - DNA, 15 bp, Homo sapiens
gttatgttgtgcggg

SEQ ID NO: 1833843 - DNA, 15 bp, Homo sapiens
ttatgttgtgcgggc

SEQ ID NO: 1833844 - DNA, 15 bp, Homo sapiens
tatgttgtgcgggct

SEQ ID NO: 1833845 - DNA, 15 bp, Homo sapiens
atgttgtgcgggctg

SEQ ID NO: 1833846 - DNA, 15 bp, Homo sapiens
tgttgtgcgggctgg

SEQ ID NO: 1833847 - DNA, 15 bp, Homo sapiens
gttgtgcgggctgga

SEQ ID NO: 1833848 - DNA, 15 bp, Homo sapiens
ttgtgcgggctggag

SEQ ID NO: 1833849 - DNA, 15 bp, Homo sapiens
tgtgcgggctggagt

SEQ ID NO: 1833850 - DNA, 15 bp, Homo sapiens
gtgcgggctggagtg

SEQ ID NO: 1833851 - DNA, 15 bp, Homo sapiens
tgcgggctggagtgt

SEQ ID NO: 1833852 - DNA, 15 bp, Homo sapiens
gcgggctggagtgta

SEQ ID NO: 1833853 - DNA, 15 bp, Homo sapiens
cgggctggagtgtag

SEQ ID NO: 1833854 - DNA, 15 bp, Homo sapiens
gggctggagtgtagt

SEQ ID NO: 1833855 - DNA, 15 bp, Homo sapiens
gctggagtgtagtgc

SEQ ID NO: 1833856 - DNA, 15 bp, Homo sapiens
ctggagtgtagtgcc

SEQ ID NO: 1833857 - DNA, 15 bp, Homo sapiens
tggagtgtagtgccc

SEQ ID NO: 1833858 - DNA, 15 bp, Homo sapiens
ggagtgtagtgccca

SEQ ID NO: 1833859 - DNA, 15 bp, Homo sapiens
gagtgtagtgcccat

SEQ ID NO: 1833860 - DNA, 15 bp, Homo sapiens
agtgtagtgcccatc

SEQ ID NO: 1833861 - DNA, 15 bp, Homo sapiens
gtgtagtgcccatcc

SEQ ID NO: 1833862 - DNA, 15 bp, Homo sapiens
tgtagtgcccatcca

SEQ ID NO: 1833863 - DNA, 15 bp, Homo sapiens
gtagtgcccatccat

SEQ ID NO: 1833864 - DNA, 15 bp, Homo sapiens
tagtgcccatccatt

SEQ ID NO: 1833865 - DNA, 15 bp, Homo sapiens
agtgcccatccattg

SEQ ID NO: 1833866 - DNA, 15 bp, Homo sapiens
gtgcccatccattgg

SEQ ID NO: 1833867 - DNA, 15 bp, Homo sapiens
tgcccatccattggc

SEQ ID NO: 1833868 - DNA, 15 bp, Homo sapiens
gcccatccattggca

SEQ ID NO: 1833869 - DNA, 15 bp, Homo sapiens
cccatccattggcac

SEQ ID NO: 1833870 - DNA, 15 bp, Homo sapiens
ccatccattggcacg

SEQ ID NO: 1833871 - DNA, 15 bp, Homo sapiens
catccattggcacga

SEQ ID NO: 1833872 - DNA, 15 bp, Homo sapiens
atccattggcacgat

SEQ ID NO: 1833873 - DNA, 15 bp, Homo sapiens
tccattggcacgatc

SEQ ID NO: 1833874 - DNA, 15 bp, Homo sapiens
ccattggcacgatca

SEQ ID NO: 1833875 - DNA, 15 bp, Homo sapiens
cattggcacgatcat

SEQ ID NO: 1833876 - DNA, 15 bp, Homo sapiens
attggcacgatcata

SEQ ID NO: 1833877 - DNA, 15 bp, Homo sapiens
ttggcacgatcatag

SEQ ID NO: 1833878 - DNA, 15 bp, Homo sapiens
tggcacgatcataga

SEQ ID NO: 1833879 - DNA, 15 bp, Homo sapiens
ggcacgatcatagag

SEQ ID NO: 1833880 - DNA, 15 bp, Homo sapiens
gcacgatcatagagt

SEQ ID NO: 1833881 - DNA, 15 bp, Homo sapiens
cacgatcatagagta

SEQ ID NO: 1833882 - DNA, 15 bp, Homo sapiens
acgatcatagagtac

SEQ ID NO: 1833883 - DNA, 15 bp, Homo sapiens
cgatcatagagtact

SEQ ID NO: 1833884 - DNA, 15 bp, Homo sapiens
gatcatagagtacta

SEQ ID NO: 1833885 - DNA, 15 bp, Homo sapiens
atcatagagtactac

SEQ ID NO: 1833886 - DNA, 15 bp, Homo sapiens
tcatagagtactaca

SEQ ID NO: 1833887 - DNA, 15 bp, Homo sapiens
catagagtactacag

SEQ ID NO: 1833888 - DNA, 15 bp, Homo sapiens
atagagtactacagc

SEQ ID NO: 1833889 - DNA, 15 bp, Homo sapiens
tagagtactacagct

SEQ ID NO: 1833890 - DNA, 15 bp, Homo sapiens
agagtactacagctc

SEQ ID NO: 1833891 - DNA, 15 bp, Homo sapiens
gagtactacagctcc

SEQ ID NO: 1833892 - DNA, 15 bp, Homo sapiens
agtactacagctccc

SEQ ID NO: 1833893 - DNA, 15 bp, Homo sapiens
gtactacagctccct

SEQ ID NO: 1833894 - DNA, 15 bp, Homo sapiens
tactacagctcccta

SEQ ID NO: 1833895 - DNA, 15 bp, Homo sapiens
actacagctccctaa

SEQ ID NO: 1833896 - DNA, 15 bp, Homo sapiens
ctacagctccctaac

SEQ ID NO: 1833897 - DNA, 15 bp, Homo sapiens
tacagctccctaact

SEQ ID NO: 1833898 - DNA, 15 bp, Homo sapiens
acagctccctaactc

SEQ ID NO: 1833899 - DNA, 15 bp, Homo sapiens
cagctccctaactcc

SEQ ID NO: 1833900 - DNA, 15 bp, Homo sapiens
agctccctaactccc

SEQ ID NO: 1833901 - DNA, 15 bp, Homo sapiens
gctccctaactccca

SEQ ID NO: 1833902 - DNA, 15 bp, Homo sapiens
ctccctaactcccag

SEQ ID NO: 1833903 - DNA, 15 bp, Homo sapiens
tccctaactcccaga

SEQ ID NO: 1833904 - DNA, 15 bp, Homo sapiens
ccctaactcccagac

SEQ ID NO: 1833905 - DNA, 15 bp, Homo sapiens
cctaactcccagact

SEQ ID NO: 1833906 - DNA, 15 bp, Homo sapiens
ctaactcccagactc

SEQ ID NO: 1833907 - DNA, 15 bp, Homo sapiens
taactcccagactca

SEQ ID NO: 1833908 - DNA, 15 bp, Homo sapiens
aactcccagactcaa

SEQ ID NO: 1833909 - DNA, 15 bp, Homo sapiens
actcccagactcaag

SEQ ID NO: 1833910 - DNA, 15 bp, Homo sapiens
ctcccagactcaagt

SEQ ID NO: 1833911 - DNA, 15 bp, Homo sapiens
tcccagactcaagtg

SEQ ID NO: 1833912 - DNA, 15 bp, Homo sapiens
cccagactcaagtga

SEQ ID NO: 1833913 - DNA, 15 bp, Homo sapiens
ccagactcaagtgat

SEQ ID NO: 1833914 - DNA, 15 bp, Homo sapiens
cagactcaagtgatt

SEQ ID NO: 1833915 - DNA, 15 bp, Homo sapiens
agactcaagtgattc

SEQ ID NO: 1833916 - DNA, 15 bp, Homo sapiens
gactcaagtgattct

SEQ ID NO: 1833917 - DNA, 15 bp, Homo sapiens
actcaagtgattctc

SEQ ID NO: 1833918 - DNA, 15 bp, Homo sapiens
ctcaagtgattctcc

SEQ ID NO: 1833919 - DNA, 15 bp, Homo sapiens
caagtgattctccct

SEQ ID NO: 1833920 - DNA, 15 bp, Homo sapiens
aagtgattctccctc

SEQ ID NO: 1833921 - DNA, 15 bp, Homo sapiens
agtgattctccctcc

SEQ ID NO: 1833922 - DNA, 15 bp, Homo sapiens
gtgattctccctcct

SEQ ID NO: 1833923 - DNA, 15 bp, Homo sapiens
tgattctccctcctc

SEQ ID NO: 1833924 - DNA, 15 bp, Homo sapiens
gattctccctcctct

SEQ ID NO: 1833925 - DNA, 15 bp, Homo sapiens
attctccctcctctg

SEQ ID NO: 1833926 - DNA, 15 bp, Homo sapiens
ttctccctcctctgt

SEQ ID NO: 1833927 - DNA, 15 bp, Homo sapiens
tctccctcctctgtc

SEQ ID NO: 1833928 - DNA, 15 bp, Homo sapiens
ctccctcctctgtct

SEQ ID NO: 1833929 - DNA, 15 bp, Homo sapiens
tccctcctctgtctc

SEQ ID NO: 1833930 - DNA, 15 bp, Homo sapiens
ccctcctctgtctcc

SEQ ID NO: 1833931 - DNA, 15 bp, Homo sapiens
cctcctctgtctccc

SEQ ID NO: 1833932 - DNA, 15 bp, Homo sapiens
ctcctctgtctcccc

SEQ ID NO: 1833933 - DNA, 15 bp, Homo sapiens
tcctctgtctcccca

SEQ ID NO: 1833934 - DNA, 15 bp, Homo sapiens
cctctgtctccccag

SEQ ID NO: 1833935 - DNA, 15 bp, Homo sapiens
ctctgtctccccagt

SEQ ID NO: 1833936 - DNA, 15 bp, Homo sapiens
tctgtctccccagta

SEQ ID NO: 1833937 - DNA, 15 bp, Homo sapiens
ctgtctccccagtag

SEQ ID NO: 1833938 - DNA, 15 bp, Homo sapiens
tgtctccccagtagc

SEQ ID NO: 1833939 - DNA, 15 bp, Homo sapiens
gtctccccagtagca

SEQ ID NO: 1833940 - DNA, 15 bp, Homo sapiens
tctccccagtagcag

SEQ ID NO: 1833941 - DNA, 15 bp, Homo sapiens
ctccccagtagcagg

SEQ ID NO: 1833942 - DNA, 15 bp, Homo sapiens
tccccagtagcagga

SEQ ID NO: 1833943 - DNA, 15 bp, Homo sapiens
ccccagtagcaggaa

SEQ ID NO: 1833944 - DNA, 15 bp, Homo sapiens
cccagtagcaggaac

SEQ ID NO: 1833945 - DNA, 15 bp, Homo sapiens
ccagtagcaggaact

SEQ ID NO: 1833946 - DNA, 15 bp, Homo sapiens
cagtagcaggaacta

SEQ ID NO: 1833947 - DNA, 15 bp, Homo sapiens
agtagcaggaactac

SEQ ID NO: 1833948 - DNA, 15 bp, Homo sapiens
gtagcaggaactaca

SEQ ID NO: 1833949 - DNA, 15 bp, Homo sapiens
tagcaggaactacag

SEQ ID NO: 1833950 - DNA, 15 bp, Homo sapiens
agcaggaactacagg

SEQ ID NO: 1833951 - DNA, 15 bp, Homo sapiens
gcaggaactacaggc

SEQ ID NO: 1833952 - DNA, 15 bp, Homo sapiens
caggaactacaggcc

SEQ ID NO: 1833953 - DNA, 15 bp, Homo sapiens
aggaactacaggcct

SEQ ID NO: 1833954 - DNA, 15 bp, Homo sapiens
ggaactacaggcctg

SEQ ID NO: 1833955 - DNA, 15 bp, Homo sapiens
gaactacaggcctgt

SEQ ID NO: 1833956 - DNA, 15 bp, Homo sapiens
aactacaggcctgtg

SEQ ID NO: 1833957 - DNA, 15 bp, Homo sapiens
actacaggcctgtgc

SEQ ID NO: 1833958 - DNA, 15 bp, Homo sapiens
ctacaggcctgtgcc

SEQ ID NO: 1833959 - DNA, 15 bp, Homo sapiens
tacaggcctgtgcca

SEQ ID NO: 1833960 - DNA, 15 bp, Homo sapiens
acaggcctgtgccac

SEQ ID NO: 1833961 - DNA, 15 bp, Homo sapiens
caggcctgtgccacc

SEQ ID NO: 1833962 - DNA, 15 bp, Homo sapiens
aggcctgtgccacca

SEQ ID NO: 1833963 - DNA, 15 bp, Homo sapiens
ggcctgtgccaccat

SEQ ID NO: 1833964 - DNA, 15 bp, Homo sapiens
gcctgtgccaccatg

SEQ ID NO: 1833965 - DNA, 15 bp, Homo sapiens
cctgtgccaccatgc

SEQ ID NO: 1833966 - DNA, 15 bp, Homo sapiens
ctgtgccaccatgcc

SEQ ID NO: 1833967 - DNA, 15 bp, Homo sapiens
caccatgcccagctt

SEQ ID NO: 1833968 - DNA, 15 bp, Homo sapiens
accatgcccagcttt

SEQ ID NO: 1833969 - DNA, 15 bp, Homo sapiens
ccatgcccagctttc

SEQ ID NO: 1833970 - DNA, 15 bp, Homo sapiens
catgcccagctttct

SEQ ID NO: 1833971 - DNA, 15 bp, Homo sapiens
atgcccagctttctt

SEQ ID NO: 1833972 - DNA, 15 bp, Homo sapiens
tgcccagctttctta

SEQ ID NO: 1833973 - DNA, 15 bp, Homo sapiens
gcccagctttcttag

SEQ ID NO: 1833974 - DNA, 15 bp, Homo sapiens
cccagctttcttagt

SEQ ID NO: 1833975 - DNA, 15 bp, Homo sapiens
ccagctttcttagtc

SEQ ID NO: 1833976 - DNA, 15 bp, Homo sapiens
cagctttcttagtct

SEQ ID NO: 1833977 - DNA, 15 bp, Homo sapiens
agctttcttagtctt

SEQ ID NO: 1833978 - DNA, 15 bp, Homo sapiens
gctttcttagtcttg

SEQ ID NO: 1833979 - DNA, 15 bp, Homo sapiens
ctttcttagtcttga

SEQ ID NO: 1833980 - DNA, 15 bp, Homo sapiens
tttcttagtcttgag

SEQ ID NO: 1833981 - DNA, 15 bp, Homo sapiens
ttcttagtcttgagg

SEQ ID NO: 1833982 - DNA, 15 bp, Homo sapiens
tcttagtcttgaggg

SEQ ID NO: 1833983 - DNA, 15 bp, Homo sapiens
cttagtcttgaggga

SEQ ID NO: 1833984 - DNA, 15 bp, Homo sapiens
ttagtcttgagggac

SEQ ID NO: 1833985 - DNA, 15 bp, Homo sapiens
tagtcttgagggact

SEQ ID NO: 1833986 - DNA, 15 bp, Homo sapiens
agtcttgagggactg

SEQ ID NO: 1833987 - DNA, 15 bp, Homo sapiens
gtcttgagggactgc

SEQ ID NO: 1833988 - DNA, 15 bp, Homo sapiens
tcttgagggactgca

SEQ ID NO: 1833989 - DNA, 15 bp, Homo sapiens
cttgagggactgcat

SEQ ID NO: 1833990 - DNA, 15 bp, Homo sapiens
ttgagggactgcatt

SEQ ID NO: 1833991 - DNA, 15 bp, Homo sapiens
tgagggactgcattt

SEQ ID NO: 1833992 - DNA, 15 bp, Homo sapiens
gagggactgcattta

SEQ ID NO: 1833993 - DNA, 15 bp, Homo sapiens
agggactgcatttac

SEQ ID NO: 1833994 - DNA, 15 bp, Homo sapiens
gggactgcatttaca

SEQ ID NO: 1833995 - DNA, 15 bp, Homo sapiens
ggactgcatttacac

SEQ ID NO: 1833996 - DNA, 15 bp, Homo sapiens
gactgcatttacacc

SEQ ID NO: 1833997 - DNA, 15 bp, Homo sapiens
actgcatttacacct

SEQ ID NO: 1833998 - DNA, 15 bp, Homo sapiens
ctgcatttacaccta

SEQ ID NO: 1833999 - DNA, 15 bp, Homo sapiens
tgcatttacacctat

SEQ ID NO: 1834000 - DNA, 15 bp, Homo sapiens
gcatttacacctatg

SEQ ID NO: 1834001 - DNA, 15 bp, Homo sapiens
catttacacctatgc

SEQ ID NO: 1834002 - DNA, 15 bp, Homo sapiens
atttacacctatgcc

SEQ ID NO: 1834003 - DNA, 15 bp, Homo sapiens
tttacacctatgcct

SEQ ID NO: 1834004 - DNA, 15 bp, Homo sapiens
ttacacctatgcctt

SEQ ID NO: 1834005 - DNA, 15 bp, Homo sapiens
tacacctatgccttt

SEQ ID NO: 1834006 - DNA, 15 bp, Homo sapiens
acacctatgcctttt

SEQ ID NO: 1834007 - DNA, 15 bp, Homo sapiens
cacctatgcctttta

SEQ ID NO: 1834008 - DNA, 15 bp, Homo sapiens
acctatgccttttac

SEQ ID NO: 1834009 - DNA, 15 bp, Homo sapiens
cctatgccttttact

SEQ ID NO: 1834010 - DNA, 15 bp, Homo sapiens
ctatgccttttactc

SEQ ID NO: 1834011 - DNA, 15 bp, Homo sapiens
tatgccttttactct

SEQ ID NO: 1834012 - DNA, 15 bp, Homo sapiens
atgccttttactcta

SEQ ID NO: 1834013 - DNA, 15 bp, Homo sapiens
tgccttttactctag

SEQ ID NO: 1834014 - DNA, 15 bp, Homo sapiens
gccttttactctagg

SEQ ID NO: 1834015 - DNA, 15 bp, Homo sapiens
ccttttactctaggg

SEQ ID NO: 1834016 - DNA, 15 bp, Homo sapiens
cttttactctagggt

SEQ ID NO: 1834017 - DNA, 15 bp, Homo sapiens
ttttactctagggtc

SEQ ID NO: 1834018 - DNA, 15 bp, Homo sapiens
tttactctagggtct

SEQ ID NO: 1834019 - DNA, 15 bp, Homo sapiens
ttactctagggtctt

SEQ ID NO: 1834020 - DNA, 15 bp, Homo sapiens
tactctagggtcttt

SEQ ID NO: 1834021 - DNA, 15 bp, Homo sapiens
actctagggtctttt

SEQ ID NO: 1834022 - DNA, 15 bp, Homo sapiens
ctctagggtctttta

SEQ ID NO: 1834023 - DNA, 15 bp, Homo sapiens
tctagggtcttttat

SEQ ID NO: 1834024 - DNA, 15 bp, Homo sapiens
ctagggtcttttatt

SEQ ID NO: 1834025 - DNA, 15 bp, Homo sapiens
tagggtcttttattc

SEQ ID NO: 1834026 - DNA, 15 bp, Homo sapiens
agggtcttttattca

SEQ ID NO: 1834027 - DNA, 15 bp, Homo sapiens
gggtcttttattcat

SEQ ID NO: 1834028 - DNA, 15 bp, Homo sapiens
ggtcttttattcata

SEQ ID NO: 1834029 - DNA, 15 bp, Homo sapiens
gtcttttattcatat

SEQ ID NO: 1834030 - DNA, 15 bp, Homo sapiens
tcttttattcatatt

SEQ ID NO: 1834031 - DNA, 15 bp, Homo sapiens
cttttattcatattg

SEQ ID NO: 1834032 - DNA, 15 bp, Homo sapiens
ttttattcatattgc

SEQ ID NO: 1834033 - DNA, 15 bp, Homo sapiens
tttattcatattgct

SEQ ID NO: 1834034 - DNA, 15 bp, Homo sapiens
ttattcatattgcta

SEQ ID NO: 1834035 - DNA, 15 bp, Homo sapiens
tattcatattgctag

SEQ ID NO: 1834036 - DNA, 15 bp, Homo sapiens
attcatattgctaga

SEQ ID NO: 1834037 - DNA, 15 bp, Homo sapiens
ttcatattgctagaa

SEQ ID NO: 1834038 - DNA, 15 bp, Homo sapiens
tcatattgctagaaa

SEQ ID NO: 1834039 - DNA, 15 bp, Homo sapiens
catattgctagaaat

SEQ ID NO: 1834040 - DNA, 15 bp, Homo sapiens
atattgctagaaatt

SEQ ID NO: 1834041 - DNA, 15 bp, Homo sapiens
tattgctagaaattt

SEQ ID NO: 1834042 - DNA, 15 bp, Homo sapiens
attgctagaaatttg

SEQ ID NO: 1834043 - DNA, 15 bp, Homo sapiens
ttgctagaaatttgg

SEQ ID NO: 1834044 - DNA, 15 bp, Homo sapiens
tgctagaaatttgga

SEQ ID NO: 1834045 - DNA, 15 bp, Homo sapiens
gctagaaatttggag

SEQ ID NO: 1834046 - DNA, 15 bp, Homo sapiens
ctagaaatttggaga

SEQ ID NO: 1834047 - DNA, 15 bp, Homo sapiens
tagaaatttggagaa

SEQ ID NO: 1834048 - DNA, 15 bp, Homo sapiens
agaaatttggagaag

SEQ ID NO: 1834049 - DNA, 15 bp, Homo sapiens
gaaatttggagaaga

SEQ ID NO: 1834050 - DNA, 15 bp, Homo sapiens
aaatttggagaagaa

SEQ ID NO: 1834051 - DNA, 15 bp, Homo sapiens
aatttggagaagaaa

SEQ ID NO: 1834052 - DNA, 15 bp, Homo sapiens
atttggagaagaaag

SEQ ID NO: 1834053 - DNA, 15 bp, Homo sapiens
tttggagaagaaaga

SEQ ID NO: 1834054 - DNA, 15 bp, Homo sapiens
ttggagaagaaagaa

SEQ ID NO: 1834055 - DNA, 15 bp, Homo sapiens
tggagaagaaagaaa

SEQ ID NO: 1834056 - DNA, 15 bp, Homo sapiens
ggagaagaaagaaag

SEQ ID NO: 1834057 - DNA, 15 bp, Homo sapiens
gagaagaaagaaagg

SEQ ID NO: 1834058 - DNA, 15 bp, Homo sapiens
agaagaaagaaaggc

SEQ ID NO: 1834059 - DNA, 15 bp, Homo sapiens
gaagaaagaaaggca

SEQ ID NO: 1834060 - DNA, 15 bp, Homo sapiens
aagaaagaaaggcat

SEQ ID NO: 1834061 - DNA, 15 bp, Homo sapiens
agaaagaaaggcata

SEQ ID NO: 1834062 - DNA, 15 bp, Homo sapiens
gaaagaaaggcataa

SEQ ID NO: 1834063 - DNA, 15 bp, Homo sapiens
aaagaaaggcataat

SEQ ID NO: 1834064 - DNA, 15 bp, Homo sapiens
aagaaaggcataatc

SEQ ID NO: 1834065 - DNA, 15 bp, Homo sapiens
agaaaggcataatct

SEQ ID NO: 1834066 - DNA, 15 bp, Homo sapiens
gaaaggcataatctc

SEQ ID NO: 1834067 - DNA, 15 bp, Homo sapiens
aaaggcataatctct

SEQ ID NO: 1834068 - DNA, 15 bp, Homo sapiens
aaggcataatctctg

SEQ ID NO: 1834069 - DNA, 15 bp, Homo sapiens
aggcataatctctgc

SEQ ID NO: 1834070 - DNA, 15 bp, Homo sapiens
ggcataatctctgca

SEQ ID NO: 1834071 - DNA, 15 bp, Homo sapiens
gcataatctctgcag

SEQ ID NO: 1834072 - DNA, 15 bp, Homo sapiens
cataatctctgcaga

SEQ ID NO: 1834073 - DNA, 15 bp, Homo sapiens
ataatctctgcagaa

SEQ ID NO: 1834074 - DNA, 15 bp, Homo sapiens
taatctctgcagaaa

SEQ ID NO: 1834075 - DNA, 15 bp, Homo sapiens
aatctctgcagaaaa

SEQ ID NO: 1834076 - DNA, 15 bp, Homo sapiens
atctctgcagaaaag

SEQ ID NO: 1834077 - DNA, 15 bp, Homo sapiens
tctctgcagaaaagc

SEQ ID NO: 1834078 - DNA, 15 bp, Homo sapiens
ctctgcagaaaagcc

SEQ ID NO: 1834079 - DNA, 15 bp, Homo sapiens
tctgcagaaaagcca

SEQ ID NO: 1834080 - DNA, 15 bp, Homo sapiens
ctgcagaaaagccat

SEQ ID NO: 1834081 - DNA, 15 bp, Homo sapiens
tgcagaaaagccatt

SEQ ID NO: 1834082 - DNA, 15 bp, Homo sapiens
gcagaaaagccatta

SEQ ID NO: 1834083 - DNA, 15 bp, Homo sapiens
cagaaaagccattat

SEQ ID NO: 1834084 - DNA, 15 bp, Homo sapiens
agaaaagccattatt

SEQ ID NO: 1834085 - DNA, 15 bp, Homo sapiens
gaaaagccattattt

SEQ ID NO: 1834086 - DNA, 15 bp, Homo sapiens
aaaagccattatttc

SEQ ID NO: 1834087 - DNA, 15 bp, Homo sapiens
aaagccattatttct

SEQ ID NO: 1834088 - DNA, 15 bp, Homo sapiens
aagccattatttctg

SEQ ID NO: 1834089 - DNA, 15 bp, Homo sapiens
agccattatttctgc

SEQ ID NO: 1834090 - DNA, 15 bp, Homo sapiens
gccattatttctgca

SEQ ID NO: 1834091 - DNA, 15 bp, Homo sapiens
ccattatttctgcag

SEQ ID NO: 1834092 - DNA, 15 bp, Homo sapiens
cattatttctgcaga

SEQ ID NO: 1834093 - DNA, 15 bp, Homo sapiens
attatttctgcagat

SEQ ID NO: 1834094 - DNA, 15 bp, Homo sapiens
ttatttctgcagata

SEQ ID NO: 1834095 - DNA, 15 bp, Homo sapiens
tatttctgcagatag

SEQ ID NO: 1834096 - DNA, 15 bp, Homo sapiens
atttctgcagatagt

SEQ ID NO: 1834097 - DNA, 15 bp, Homo sapiens
tttctgcagatagtt

SEQ ID NO: 1834098 - DNA, 15 bp, Homo sapiens
ttctgcagatagttc

SEQ ID NO: 1834099 - DNA, 15 bp, Homo sapiens
tctgcagatagttct

SEQ ID NO: 1834100 - DNA, 15 bp, Homo sapiens
ctgcagatagttctt

SEQ ID NO: 1834101 - DNA, 15 bp, Homo sapiens
tgcagatagttcttt

SEQ ID NO: 1834102 - DNA, 15 bp, Homo sapiens
gcagatagttctttt

SEQ ID NO: 1834103 - DNA, 15 bp, Homo sapiens
cagatagttcttttt

SEQ ID NO: 1834104 - DNA, 15 bp, Homo sapiens
agatagttctttttt

SEQ ID NO: 1834105 - DNA, 15 bp, Homo sapiens
gatagttcttttttt

SEQ ID NO: 1834106 - DNA, 15 bp, Homo sapiens
atagttctttttttt

SEQ ID NO: 1834107 - DNA, 15 bp, Homo sapiens
tgagatggagtcttt

SEQ ID NO: 1834108 - DNA, 15 bp, Homo sapiens
gagatggagtctttc

SEQ ID NO: 1834109 - DNA, 15 bp, Homo sapiens
agatggagtctttct

SEQ ID NO: 1834110 - DNA, 15 bp, Homo sapiens
gatggagtctttctt

SEQ ID NO: 1834111 - DNA, 15 bp, Homo sapiens
atggagtctttcttt

SEQ ID NO: 1834112 - DNA, 15 bp, Homo sapiens
tggagtctttctttg

SEQ ID NO: 1834113 - DNA, 15 bp, Homo sapiens
ggagtctttctttgt

SEQ ID NO: 1834114 - DNA, 15 bp, Homo sapiens
gagtctttctttgtc

SEQ ID NO: 1834115 - DNA, 15 bp, Homo sapiens
agtctttctttgtca

SEQ ID NO: 1834116 - DNA, 15 bp, Homo sapiens
gtctttctttgtcac

SEQ ID NO: 1834117 - DNA, 15 bp, Homo sapiens
tctttctttgtcacc

SEQ ID NO: 1834118 - DNA, 15 bp, Homo sapiens
ctttctttgtcaccc

SEQ ID NO: 1834119 - DNA, 15 bp, Homo sapiens
tttctttgtcaccca

SEQ ID NO: 1834120 - DNA, 15 bp, Homo sapiens
ttctttgtcacccag

SEQ ID NO: 1834121 - DNA, 15 bp, Homo sapiens
tctttgtcacccagg

SEQ ID NO: 1834122 - DNA, 15 bp, Homo sapiens
cagtggtgtgatcta

SEQ ID NO: 1834123 - DNA, 15 bp, Homo sapiens
agtggtgtgatctag

SEQ ID NO: 1834124 - DNA, 15 bp, Homo sapiens
gtggtgtgatctagg

SEQ ID NO: 1834125 - DNA, 15 bp, Homo sapiens
tggtgtgatctaggc

SEQ ID NO: 1834126 - DNA, 15 bp, Homo sapiens
ggtgtgatctaggct

SEQ ID NO: 1834127 - DNA, 15 bp, Homo sapiens
gtgtgatctaggctc

SEQ ID NO: 1834128 - DNA, 15 bp, Homo sapiens
tgtgatctaggctca

SEQ ID NO: 1834129 - DNA, 15 bp, Homo sapiens
gtgatctaggctcac

SEQ ID NO: 1834130 - DNA, 15 bp, Homo sapiens
tgatctaggctcact

SEQ ID NO: 1834131 - DNA, 15 bp, Homo sapiens
gatctaggctcacta

SEQ ID NO: 1834132 - DNA, 15 bp, Homo sapiens
atctaggctcactac

SEQ ID NO: 1834133 - DNA, 15 bp, Homo sapiens
tctaggctcactaca

SEQ ID NO: 1834134 - DNA, 15 bp, Homo sapiens
ctaggctcactacaa

SEQ ID NO: 1834135 - DNA, 15 bp, Homo sapiens
taggctcactacaag

SEQ ID NO: 1834136 - DNA, 15 bp, Homo sapiens
aggctcactacaagc

SEQ ID NO: 1834137 - DNA, 15 bp, Homo sapiens
ggctcactacaagct

SEQ ID NO: 1834138 - DNA, 15 bp, Homo sapiens
gctcactacaagctc

SEQ ID NO: 1834139 - DNA, 15 bp, Homo sapiens
ctcactacaagctcc

SEQ ID NO: 1834140 - DNA, 15 bp, Homo sapiens
tcactacaagctcca

SEQ ID NO: 1834141 - DNA, 15 bp, Homo sapiens
cactacaagctccac

SEQ ID NO: 1834142 - DNA, 15 bp, Homo sapiens
actacaagctccacc

SEQ ID NO: 1834143 - DNA, 15 bp, Homo sapiens
ctacaagctccacct

SEQ ID NO: 1834144 - DNA, 15 bp, Homo sapiens
tacaagctccacctc

SEQ ID NO: 1834145 - DNA, 15 bp, Homo sapiens
acaagctccacctcc

SEQ ID NO: 1834146 - DNA, 15 bp, Homo sapiens
caagctccacctcct

SEQ ID NO: 1834147 - DNA, 15 bp, Homo sapiens
aagctccacctcctg

SEQ ID NO: 1834148 - DNA, 15 bp, Homo sapiens
agctccacctcctgg

SEQ ID NO: 1834149 - DNA, 15 bp, Homo sapiens
gctccacctcctggg

SEQ ID NO: 1834150 - DNA, 15 bp, Homo sapiens
tgccttagcctcccg

SEQ ID NO: 1834151 - DNA, 15 bp, Homo sapiens
gccttagcctcccga

SEQ ID NO: 1834152 - DNA, 15 bp, Homo sapiens
ccttagcctcccgag

SEQ ID NO: 1834153 - DNA, 15 bp, Homo sapiens
cttagcctcccgagt

SEQ ID NO: 1834154 - DNA, 15 bp, Homo sapiens
ttagcctcccgagta

SEQ ID NO: 1834155 - DNA, 15 bp, Homo sapiens
tagcctcccgagtag

SEQ ID NO: 1834156 - DNA, 15 bp, Homo sapiens
agcctcccgagtagt

SEQ ID NO: 1834157 - DNA, 15 bp, Homo sapiens
gcctcccgagtagtg

SEQ ID NO: 1834158 - DNA, 15 bp, Homo sapiens
cctcccgagtagtgg

SEQ ID NO: 1834159 - DNA, 15 bp, Homo sapiens
ctcccgagtagtggg

SEQ ID NO: 1834160 - DNA, 15 bp, Homo sapiens
tcccgagtagtggga

SEQ ID NO: 1834161 - DNA, 15 bp, Homo sapiens
cccgagtagtgggac

SEQ ID NO: 1834162 - DNA, 15 bp, Homo sapiens
ccgagtagtgggact

SEQ ID NO: 1834163 - DNA, 15 bp, Homo sapiens
cgagtagtgggacta

SEQ ID NO: 1834164 - DNA, 15 bp, Homo sapiens
gagtagtgggactac

SEQ ID NO: 1834165 - DNA, 15 bp, Homo sapiens
agtagtgggactaca

SEQ ID NO: 1834166 - DNA, 15 bp, Homo sapiens
gtagtgggactacag

SEQ ID NO: 1834167 - DNA, 15 bp, Homo sapiens
tagtgggactacagg

SEQ ID NO: 1834168 - DNA, 15 bp, Homo sapiens
agtgggactacaggc

SEQ ID NO: 1834169 - DNA, 15 bp, Homo sapiens
taatttttttttgta

SEQ ID NO: 1834170 - DNA, 15 bp, Homo sapiens
aatttttttttgtat

SEQ ID NO: 1834171 - DNA, 15 bp, Homo sapiens
cggggtttcaccatc

SEQ ID NO: 1834172 - DNA, 15 bp, Homo sapiens
ggtttcaccatctta

SEQ ID NO: 1834173 - DNA, 15 bp, Homo sapiens
gtttcaccatcttag

SEQ ID NO: 1834174 - DNA, 15 bp, Homo sapiens
tttcaccatcttagc

SEQ ID NO: 1834175 - DNA, 15 bp, Homo sapiens
ccatcttagccagga

SEQ ID NO: 1834176 - DNA, 15 bp, Homo sapiens
catcttagccaggat

SEQ ID NO: 1834177 - DNA, 15 bp, Homo sapiens
atcttagccaggatg

SEQ ID NO: 1834178 - DNA, 15 bp, Homo sapiens
tcttagccaggatgg

SEQ ID NO: 1834179 - DNA, 15 bp, Homo sapiens
cttagccaggatggt

SEQ ID NO: 1834180 - DNA, 15 bp, Homo sapiens
gatggtctcgatctt

SEQ ID NO: 1834181 - DNA, 15 bp, Homo sapiens
atggtctcgatcttc

SEQ ID NO: 1834182 - DNA, 15 bp, Homo sapiens
tggtctcgatcttct

SEQ ID NO: 1834183 - DNA, 15 bp, Homo sapiens
ggtctcgatcttctg

SEQ ID NO: 1834184 - DNA, 15 bp, Homo sapiens
gtctcgatcttctga

SEQ ID NO: 1834185 - DNA, 15 bp, Homo sapiens
tctcgatcttctgac

SEQ ID NO: 1834186 - DNA, 15 bp, Homo sapiens
ctcgatcttctgacc

SEQ ID NO: 1834187 - DNA, 15 bp, Homo sapiens
tcgatcttctgacct

SEQ ID NO: 1834188 - DNA, 15 bp, Homo sapiens
cgatcttctgacctt

SEQ ID NO: 1834189 - DNA, 15 bp, Homo sapiens
gatcttctgaccttg

SEQ ID NO: 1834190 - DNA, 15 bp, Homo sapiens
atcttctgaccttgt

SEQ ID NO: 1834191 - DNA, 15 bp, Homo sapiens
tcttctgaccttgtg

SEQ ID NO: 1834192 - DNA, 15 bp, Homo sapiens
cttctgaccttgtga

SEQ ID NO: 1834193 - DNA, 15 bp, Homo sapiens
ttctgaccttgtgat

SEQ ID NO: 1834194 - DNA, 15 bp, Homo sapiens
tctgaccttgtgatc

SEQ ID NO: 1834195 - DNA, 15 bp, Homo sapiens
ccttgtgatccgccg

SEQ ID NO: 1834196 - DNA, 15 bp, Homo sapiens
cttgtgatccgccga

SEQ ID NO: 1834197 - DNA, 15 bp, Homo sapiens
ttgtgatccgccgac

SEQ ID NO: 1834198 - DNA, 15 bp, Homo sapiens
tgtgatccgccgacc

SEQ ID NO: 1834199 - DNA, 15 bp, Homo sapiens
gtgatccgccgacct

SEQ ID NO: 1834200 - DNA, 15 bp, Homo sapiens
tgatccgccgacctc

SEQ ID NO: 1834201 - DNA, 15 bp, Homo sapiens
gatccgccgacctcg

SEQ ID NO: 1834202 - DNA, 15 bp, Homo sapiens
atccgccgacctcgg

SEQ ID NO: 1834203 - DNA, 15 bp, Homo sapiens
tccgccgacctcggc

SEQ ID NO: 1834204 - DNA, 15 bp, Homo sapiens
ccgccgacctcggcc

SEQ ID NO: 1834205 - DNA, 15 bp, Homo sapiens
cgccgacctcggcca

SEQ ID NO: 1834206 - DNA, 15 bp, Homo sapiens
gccgacctcggccac

SEQ ID NO: 1834207 - DNA, 15 bp, Homo sapiens
ccgacctcggccacc

SEQ ID NO: 1834208 - DNA, 15 bp, Homo sapiens
cgacctcggccaccc

SEQ ID NO: 1834209 - DNA, 15 bp, Homo sapiens
gacctcggccaccca

SEQ ID NO: 1834210 - DNA, 15 bp, Homo sapiens
acctcggccacccaa

SEQ ID NO: 1834211 - DNA, 15 bp, Homo sapiens
cctcggccacccaaa

SEQ ID NO: 1834212 - DNA, 15 bp, Homo sapiens
ctcggccacccaaag

SEQ ID NO: 1834213 - DNA, 15 bp, Homo sapiens
tcggccacccaaagt

SEQ ID NO: 1834214 - DNA, 15 bp, Homo sapiens
cggccacccaaagtg

SEQ ID NO: 1834215 - DNA, 15 bp, Homo sapiens
catgagccaccacat

SEQ ID NO: 1834216 - DNA, 15 bp, Homo sapiens
atgagccaccacatc

SEQ ID NO: 1834217 - DNA, 15 bp, Homo sapiens
tgagccaccacatcc

SEQ ID NO: 1834218 - DNA, 15 bp, Homo sapiens
gagccaccacatccg

SEQ ID NO: 1834219 - DNA, 15 bp, Homo sapiens
agccaccacatccgg

SEQ ID NO: 1834220 - DNA, 15 bp, Homo sapiens
gccaccacatccggc

SEQ ID NO: 1834221 - DNA, 15 bp, Homo sapiens
ccaccacatccggcc

SEQ ID NO: 1834222 - DNA, 15 bp, Homo sapiens
caccacatccggcca

SEQ ID NO: 1834223 - DNA, 15 bp, Homo sapiens
accacatccggccaa

SEQ ID NO: 1834224 - DNA, 15 bp, Homo sapiens
ccacatccggccaat

SEQ ID NO: 1834225 - DNA, 15 bp, Homo sapiens
cacatccggccaatt

SEQ ID NO: 1834226 - DNA, 15 bp, Homo sapiens
acatccggccaattt

SEQ ID NO: 1834227 - DNA, 15 bp, Homo sapiens
catccggccaatttc

SEQ ID NO: 1834228 - DNA, 15 bp, Homo sapiens
atccggccaatttct

SEQ ID NO: 1834229 - DNA, 15 bp, Homo sapiens
tccggccaatttctg

SEQ ID NO: 1834230 - DNA, 15 bp, Homo sapiens
ccggccaatttctgc

SEQ ID NO: 1834231 - DNA, 15 bp, Homo sapiens
cggccaatttctgcg

SEQ ID NO: 1834232 - DNA, 15 bp, Homo sapiens
ggccaatttctgcgg

SEQ ID NO: 1834233 - DNA, 15 bp, Homo sapiens
gccaatttctgcgga

SEQ ID NO: 1834234 - DNA, 15 bp, Homo sapiens
ccaatttctgcggat

SEQ ID NO: 1834235 - DNA, 15 bp, Homo sapiens
caatttctgcggata

SEQ ID NO: 1834236 - DNA, 15 bp, Homo sapiens
aatttctgcggatag

SEQ ID NO: 1834237 - DNA, 15 bp, Homo sapiens
atttctgcggatagt

SEQ ID NO: 1834238 - DNA, 15 bp, Homo sapiens
tttctgcggatagtt

SEQ ID NO: 1834239 - DNA, 15 bp, Homo sapiens
ttctgcggatagttc

SEQ ID NO: 1834240 - DNA, 15 bp, Homo sapiens
tctgcggatagttct

SEQ ID NO: 1834241 - DNA, 15 bp, Homo sapiens
ctgcggatagttcta

SEQ ID NO: 1834242 - DNA, 15 bp, Homo sapiens
tgcggatagttctaa

SEQ ID NO: 1834243 - DNA, 15 bp, Homo sapiens
gcggatagttctaag

SEQ ID NO: 1834244 - DNA, 15 bp, Homo sapiens
cggatagttctaagc

SEQ ID NO: 1834245 - DNA, 15 bp, Homo sapiens
ggatagttctaagct

SEQ ID NO: 1834246 - DNA, 15 bp, Homo sapiens
gatagttctaagctt

SEQ ID NO: 1834247 - DNA, 15 bp, Homo sapiens
atagttctaagcttt

SEQ ID NO: 1834248 - DNA, 15 bp, Homo sapiens
tagttctaagcttta

SEQ ID NO: 1834249 - DNA, 15 bp, Homo sapiens
agttctaagctttag

SEQ ID NO: 1834250 - DNA, 15 bp, Homo sapiens
gttctaagctttagt

SEQ ID NO: 1834251 - DNA, 15 bp, Homo sapiens
ttctaagctttagtt

SEQ ID NO: 1834252 - DNA, 15 bp, Homo sapiens
tctaagctttagttt

SEQ ID NO: 1834253 - DNA, 15 bp, Homo sapiens
ctaagctttagtttt

SEQ ID NO: 1834254 - DNA, 15 bp, Homo sapiens
taagctttagttttg

SEQ ID NO: 1834255 - DNA, 15 bp, Homo sapiens
aagctttagttttga

SEQ ID NO: 1834256 - DNA, 15 bp, Homo sapiens
agctttagttttgac

SEQ ID NO: 1834257 - DNA, 15 bp, Homo sapiens
gctttagttttgacc

SEQ ID NO: 1834258 - DNA, 15 bp, Homo sapiens
ctttagttttgacca

SEQ ID NO: 1834259 - DNA, 15 bp, Homo sapiens
tttagttttgaccac

SEQ ID NO: 1834260 - DNA, 15 bp, Homo sapiens
ttagttttgaccacg

SEQ ID NO: 1834261 - DNA, 15 bp, Homo sapiens
tagttttgaccacgt

SEQ ID NO: 1834262 - DNA, 15 bp, Homo sapiens
agttttgaccacgtt

SEQ ID NO: 1834263 - DNA, 15 bp, Homo sapiens
gttttgaccacgttg

SEQ ID NO: 1834264 - DNA, 15 bp, Homo sapiens
ttttgaccacgttgg

SEQ ID NO: 1834265 - DNA, 15 bp, Homo sapiens
tttgaccacgttggt

SEQ ID NO: 1834266 - DNA, 15 bp, Homo sapiens
ttgaccacgttggtt

SEQ ID NO: 1834267 - DNA, 15 bp, Homo sapiens
tgaccacgttggttg

SEQ ID NO: 1834268 - DNA, 15 bp, Homo sapiens
gaccacgttggttgc

SEQ ID NO: 1834269 - DNA, 15 bp, Homo sapiens
accacgttggttgcc

SEQ ID NO: 1834270 - DNA, 15 bp, Homo sapiens
ccacgttggttgcct

SEQ ID NO: 1834271 - DNA, 15 bp, Homo sapiens
cacgttggttgccta

SEQ ID NO: 1834272 - DNA, 15 bp, Homo sapiens
acgttggttgcctat

SEQ ID NO: 1834273 - DNA, 15 bp, Homo sapiens
cgttggttgcctatg

SEQ ID NO: 1834274 - DNA, 15 bp, Homo sapiens
gttggttgcctatgg

SEQ ID NO: 1834275 - DNA, 15 bp, Homo sapiens
ttggttgcctatggc

SEQ ID NO: 1834276 - DNA, 15 bp, Homo sapiens
tggttgcctatggcc

SEQ ID NO: 1834277 - DNA, 15 bp, Homo sapiens
ggttgcctatggcca

SEQ ID NO: 1834278 - DNA, 15 bp, Homo sapiens
gttgcctatggccaa

SEQ ID NO: 1834279 - DNA, 15 bp, Homo sapiens
ttgcctatggccaat

SEQ ID NO: 1834280 - DNA, 15 bp, Homo sapiens
tgcctatggccaatt

SEQ ID NO: 1834281 - DNA, 15 bp, Homo sapiens
gcctatggccaattc

SEQ ID NO: 1834282 - DNA, 15 bp, Homo sapiens
cctatggccaattcc

SEQ ID NO: 1834283 - DNA, 15 bp, Homo sapiens
ctatggccaattcct

SEQ ID NO: 1834284 - DNA, 15 bp, Homo sapiens
tatggccaattcctg

SEQ ID NO: 1834285 - DNA, 15 bp, Homo sapiens
atggccaattcctgg

SEQ ID NO: 1834286 - DNA, 15 bp, Homo sapiens
tggccaattcctgga

SEQ ID NO: 1834287 - DNA, 15 bp, Homo sapiens
ggccaattcctggat

SEQ ID NO: 1834288 - DNA, 15 bp, Homo sapiens
gccaattcctggatt

SEQ ID NO: 1834289 - DNA, 15 bp, Homo sapiens
ccaattcctggatta

SEQ ID NO: 1834290 - DNA, 15 bp, Homo sapiens
caattcctggattat

SEQ ID NO: 1834291 - DNA, 15 bp, Homo sapiens
aattcctggattatt

SEQ ID NO: 1834292 - DNA, 15 bp, Homo sapiens
attcctggattattt

SEQ ID NO: 1834293 - DNA, 15 bp, Homo sapiens
ttcctggattatttg

SEQ ID NO: 1834294 - DNA, 15 bp, Homo sapiens
tcctggattatttgc

SEQ ID NO: 1834295 - DNA, 15 bp, Homo sapiens
cctggattatttgca

SEQ ID NO: 1834296 - DNA, 15 bp, Homo sapiens
ctggattatttgcat

SEQ ID NO: 1834297 - DNA, 15 bp, Homo sapiens
tggattatttgcatg

SEQ ID NO: 1834298 - DNA, 15 bp, Homo sapiens
ggattatttgcatgt

SEQ ID NO: 1834299 - DNA, 15 bp, Homo sapiens
gattatttgcatgtt

SEQ ID NO: 1834300 - DNA, 15 bp, Homo sapiens
attatttgcatgttt

SEQ ID NO: 1834301 - DNA, 15 bp, Homo sapiens
ttatttgcatgtttc

SEQ ID NO: 1834302 - DNA, 15 bp, Homo sapiens
tatttgcatgtttcc

SEQ ID NO: 1834303 - DNA, 15 bp, Homo sapiens
atttgcatgtttcca

SEQ ID NO: 1834304 - DNA, 15 bp, Homo sapiens
tttgcatgtttccag

SEQ ID NO: 1834305 - DNA, 15 bp, Homo sapiens
ttgcatgtttccaga

SEQ ID NO: 1834306 - DNA, 15 bp, Homo sapiens
tgcatgtttccagac

SEQ ID NO: 1834307 - DNA, 15 bp, Homo sapiens
gcatgtttccagaca

SEQ ID NO: 1834308 - DNA, 15 bp, Homo sapiens
catgtttccagacac

SEQ ID NO: 1834309 - DNA, 15 bp, Homo sapiens
atgtttccagacaca

SEQ ID NO: 1834310 - DNA, 15 bp, Homo sapiens
tgtttccagacacag

SEQ ID NO: 1834311 - DNA, 15 bp, Homo sapiens
gtttccagacacagc

SEQ ID NO: 1834312 - DNA, 15 bp, Homo sapiens
tttccagacacagct

SEQ ID NO: 1834313 - DNA, 15 bp, Homo sapiens
ttccagacacagcta

SEQ ID NO: 1834314 - DNA, 15 bp, Homo sapiens
tccagacacagctat

SEQ ID NO: 1834315 - DNA, 15 bp, Homo sapiens
ccagacacagctatg

SEQ ID NO: 1834316 - DNA, 15 bp, Homo sapiens
cagacacagctatgt

SEQ ID NO: 1834317 - DNA, 15 bp, Homo sapiens
agacacagctatgtg

SEQ ID NO: 1834318 - DNA, 15 bp, Homo sapiens
gacacagctatgtga

SEQ ID NO: 1834319 - DNA, 15 bp, Homo sapiens
acacagctatgtgaa

SEQ ID NO: 1834320 - DNA, 15 bp, Homo sapiens
cacagctatgtgaaa

SEQ ID NO: 1834321 - DNA, 15 bp, Homo sapiens
acagctatgtgaaag

SEQ ID NO: 1834322 - DNA, 15 bp, Homo sapiens
cagctatgtgaaagc

SEQ ID NO: 1834323 - DNA, 15 bp, Homo sapiens
agctatgtgaaagca

SEQ ID NO: 1834324 - DNA, 15 bp, Homo sapiens
gctatgtgaaagcag

SEQ ID NO: 1834325 - DNA, 15 bp, Homo sapiens
ctatgtgaaagcagg

SEQ ID NO: 1834326 - DNA, 15 bp, Homo sapiens
tatgtgaaagcaggg

SEQ ID NO: 1834327 - DNA, 15 bp, Homo sapiens
atgtgaaagcagggt

SEQ ID NO: 1834328 - DNA, 15 bp, Homo sapiens
tgtgaaagcagggtt

SEQ ID NO: 1834329 - DNA, 15 bp, Homo sapiens
gtgaaagcagggttt

SEQ ID NO: 1834330 - DNA, 15 bp, Homo sapiens
tgaaagcagggtttg

SEQ ID NO: 1834331 - DNA, 15 bp, Homo sapiens
gaaagcagggtttgt

SEQ ID NO: 1834332 - DNA, 15 bp, Homo sapiens
aaagcagggtttgtt

SEQ ID NO: 1834333 - DNA, 15 bp, Homo sapiens
aagcagggtttgttt

SEQ ID NO: 1834334 - DNA, 15 bp, Homo sapiens
agcagggtttgtttt

SEQ ID NO: 1834335 - DNA, 15 bp, Homo sapiens
gcagggtttgtttta

SEQ ID NO: 1834336 - DNA, 15 bp, Homo sapiens
cagggtttgttttaa

SEQ ID NO: 1834337 - DNA, 15 bp, Homo sapiens
agggtttgttttaat

SEQ ID NO: 1834338 - DNA, 15 bp, Homo sapiens
gggtttgttttaata

SEQ ID NO: 1834339 - DNA, 15 bp, Homo sapiens
ggtttgttttaatag

SEQ ID NO: 1834340 - DNA, 15 bp, Homo sapiens
gtttgttttaatagt

SEQ ID NO: 1834341 - DNA, 15 bp, Homo sapiens
tttgttttaatagtg

SEQ ID NO: 1834342 - DNA, 15 bp, Homo sapiens
ttgttttaatagtgt

SEQ ID NO: 1834343 - DNA, 15 bp, Homo sapiens
tgttttaatagtgtt

SEQ ID NO: 1834344 - DNA, 15 bp, Homo sapiens
gttttaatagtgttt

SEQ ID NO: 1834345 - DNA, 15 bp, Homo sapiens
ttttaatagtgtttt

SEQ ID NO: 1834346 - DNA, 15 bp, Homo sapiens
tttaatagtgttttg

SEQ ID NO: 1834347 - DNA, 15 bp, Homo sapiens
ttaatagtgttttga

SEQ ID NO: 1834348 - DNA, 15 bp, Homo sapiens
taatagtgttttgag

SEQ ID NO: 1834349 - DNA, 15 bp, Homo sapiens
aatagtgttttgagc

SEQ ID NO: 1834350 - DNA, 15 bp, Homo sapiens
atagtgttttgagcc

SEQ ID NO: 1834351 - DNA, 15 bp, Homo sapiens
tagtgttttgagcct

SEQ ID NO: 1834352 - DNA, 15 bp, Homo sapiens
agtgttttgagcctt

SEQ ID NO: 1834353 - DNA, 15 bp, Homo sapiens
gtgttttgagccttt

SEQ ID NO: 1834354 - DNA, 15 bp, Homo sapiens
tgttttgagcctttg

SEQ ID NO: 1834355 - DNA, 15 bp, Homo sapiens
gttttgagcctttga

SEQ ID NO: 1834356 - DNA, 15 bp, Homo sapiens
ttttgagcctttgat

SEQ ID NO: 1834357 - DNA, 15 bp, Homo sapiens
tttgagcctttgatt

SEQ ID NO: 1834358 - DNA, 15 bp, Homo sapiens
ttgagcctttgattc

SEQ ID NO: 1834359 - DNA, 15 bp, Homo sapiens
tgagcctttgattcc

SEQ ID NO: 1834360 - DNA, 15 bp, Homo sapiens
gagcctttgattcca

SEQ ID NO: 1834361 - DNA, 15 bp, Homo sapiens
agcctttgattccag

SEQ ID NO: 1834362 - DNA, 15 bp, Homo sapiens
gcctttgattccagt

SEQ ID NO: 1834363 - DNA, 15 bp, Homo sapiens
cctttgattccagtt

SEQ ID NO: 1834364 - DNA, 15 bp, Homo sapiens
ctttgattccagttc

SEQ ID NO: 1834365 - DNA, 15 bp, Homo sapiens
tttgattccagttct

SEQ ID NO: 1834366 - DNA, 15 bp, Homo sapiens
ttgattccagttctg

SEQ ID NO: 1834367 - DNA, 15 bp, Homo sapiens
tgattccagttctgc

SEQ ID NO: 1834368 - DNA, 15 bp, Homo sapiens
gattccagttctgct

SEQ ID NO: 1834369 - DNA, 15 bp, Homo sapiens
attccagttctgctt

SEQ ID NO: 1834370 - DNA, 15 bp, Homo sapiens
ttccagttctgcttc

SEQ ID NO: 1834371 - DNA, 15 bp, Homo sapiens
tccagttctgcttcc

SEQ ID NO: 1834372 - DNA, 15 bp, Homo sapiens
ccagttctgcttcca

SEQ ID NO: 1834373 - DNA, 15 bp, Homo sapiens
cagttctgcttccac

SEQ ID NO: 1834374 - DNA, 15 bp, Homo sapiens
agttctgcttccact

SEQ ID NO: 1834375 - DNA, 15 bp, Homo sapiens
gttctgcttccactc

SEQ ID NO: 1834376 - DNA, 15 bp, Homo sapiens
ttctgcttccactct

SEQ ID NO: 1834377 - DNA, 15 bp, Homo sapiens
tctgcttccactctt

SEQ ID NO: 1834378 - DNA, 15 bp, Homo sapiens
ctgcttccactcttg

SEQ ID NO: 1834379 - DNA, 15 bp, Homo sapiens
tgcttccactcttgg

SEQ ID NO: 1834380 - DNA, 15 bp, Homo sapiens
gcttccactcttggt

SEQ ID NO: 1834381 - DNA, 15 bp, Homo sapiens
cttccactcttggtc

SEQ ID NO: 1834382 - DNA, 15 bp, Homo sapiens
ttccactcttggtct

SEQ ID NO: 1834383 - DNA, 15 bp, Homo sapiens
tccactcttggtcta

SEQ ID NO: 1834384 - DNA, 15 bp, Homo sapiens
ccactcttggtctat

SEQ ID NO: 1834385 - DNA, 15 bp, Homo sapiens
cactcttggtctata

SEQ ID NO: 1834386 - DNA, 15 bp, Homo sapiens
actcttggtctataa

SEQ ID NO: 1834387 - DNA, 15 bp, Homo sapiens
ctcttggtctataag

SEQ ID NO: 1834388 - DNA, 15 bp, Homo sapiens
tcttggtctataagg

SEQ ID NO: 1834389 - DNA, 15 bp, Homo sapiens
cttggtctataagga

SEQ ID NO: 1834390 - DNA, 15 bp, Homo sapiens
ttggtctataaggat

SEQ ID NO: 1834391 - DNA, 15 bp, Homo sapiens
tggtctataaggatc

SEQ ID NO: 1834392 - DNA, 15 bp, Homo sapiens
ggtctataaggatcc

SEQ ID NO: 1834393 - DNA, 15 bp, Homo sapiens
gtctataaggatccc

SEQ ID NO: 1834394 - DNA, 15 bp, Homo sapiens
tctataaggatccct

SEQ ID NO: 1834395 - DNA, 15 bp, Homo sapiens
ctataaggatcccta

SEQ ID NO: 1834396 - DNA, 15 bp, Homo sapiens
tataaggatccctat

SEQ ID NO: 1834397 - DNA, 15 bp, Homo sapiens
ataaggatccctatg

SEQ ID NO: 1834398 - DNA, 15 bp, Homo sapiens
taaggatccctatgg

SEQ ID NO: 1834399 - DNA, 15 bp, Homo sapiens
aaggatccctatggc

SEQ ID NO: 1834400 - DNA, 15 bp, Homo sapiens
aggatccctatggca

SEQ ID NO: 1834401 - DNA, 15 bp, Homo sapiens
ggatccctatggcag

SEQ ID NO: 1834402 - DNA, 15 bp, Homo sapiens
gatccctatggcagc

SEQ ID NO: 1834403 - DNA, 15 bp, Homo sapiens
atccctatggcagca

SEQ ID NO: 1834404 - DNA, 15 bp, Homo sapiens
tccctatggcagcaa

SEQ ID NO: 1834405 - DNA, 15 bp, Homo sapiens
ccctatggcagcaac

SEQ ID NO: 1834406 - DNA, 15 bp, Homo sapiens
cctatggcagcaaca

SEQ ID NO: 1834407 - DNA, 15 bp, Homo sapiens
ctatggcagcaacag

SEQ ID NO: 1834408 - DNA, 15 bp, Homo sapiens
tatggcagcaacaga

SEQ ID NO: 1834409 - DNA, 15 bp, Homo sapiens
atggcagcaacagaa

SEQ ID NO: 1834410 - DNA, 15 bp, Homo sapiens
tggcagcaacagaat

SEQ ID NO: 1834411 - DNA, 15 bp, Homo sapiens
ggcagcaacagaatg

SEQ ID NO: 1834412 - DNA, 15 bp, Homo sapiens
gcagcaacagaatgg

SEQ ID NO: 1834413 - DNA, 15 bp, Homo sapiens
cagcaacagaatggc

SEQ ID NO: 1834414 - DNA, 15 bp, Homo sapiens
agcaacagaatggcc

SEQ ID NO: 1834415 - DNA, 15 bp, Homo sapiens
gcaacagaatggccc

SEQ ID NO: 1834416 - DNA, 15 bp, Homo sapiens
caacagaatggccca

SEQ ID NO: 1834417 - DNA, 15 bp, Homo sapiens
aacagaatggcccag

SEQ ID NO: 1834418 - DNA, 15 bp, Homo sapiens
acagaatggcccagc

SEQ ID NO: 1834419 - DNA, 15 bp, Homo sapiens
cagaatggcccagcc

SEQ ID NO: 1834420 - DNA, 15 bp, Homo sapiens
agaatggcccagccc

SEQ ID NO: 1834421 - DNA, 15 bp, Homo sapiens
gaatggcccagccct

SEQ ID NO: 1834422 - DNA, 15 bp, Homo sapiens
aatggcccagccctc

SEQ ID NO: 1834423 - DNA, 15 bp, Homo sapiens
atggcccagccctca

SEQ ID NO: 1834424 - DNA, 15 bp, Homo sapiens
tggcccagccctcat

SEQ ID NO: 1834425 - DNA, 15 bp, Homo sapiens
ggcccagccctcatg

SEQ ID NO: 1834426 - DNA, 15 bp, Homo sapiens
gcccagccctcatga

SEQ ID NO: 1834427 - DNA, 15 bp, Homo sapiens
cccagccctcatgat

SEQ ID NO: 1834428 - DNA, 15 bp, Homo sapiens
ccagccctcatgatt

SEQ ID NO: 1834429 - DNA, 15 bp, Homo sapiens
cagccctcatgattg

SEQ ID NO: 1834430 - DNA, 15 bp, Homo sapiens
agccctcatgattgg

SEQ ID NO: 1834431 - DNA, 15 bp, Homo sapiens
gccctcatgattggt

SEQ ID NO: 1834432 - DNA, 15 bp, Homo sapiens
ccctcatgattggtt

SEQ ID NO: 1834433 - DNA, 15 bp, Homo sapiens
cctcatgattggttg

SEQ ID NO: 1834434 - DNA, 15 bp, Homo sapiens
ctcatgattggttgc

SEQ ID NO: 1834435 - DNA, 15 bp, Homo sapiens
tcatgattggttgct

SEQ ID NO: 1834436 - DNA, 15 bp, Homo sapiens
catgattggttgctt

SEQ ID NO: 1834437 - DNA, 15 bp, Homo sapiens
atgattggttgctta

SEQ ID NO: 1834438 - DNA, 15 bp, Homo sapiens
tgattggttgcttaa

SEQ ID NO: 1834439 - DNA, 15 bp, Homo sapiens
gattggttgcttaaa

SEQ ID NO: 1834440 - DNA, 15 bp, Homo sapiens
attggttgcttaaaa

SEQ ID NO: 1834441 - DNA, 15 bp, Homo sapiens
ttggttgcttaaaaa

SEQ ID NO: 1834442 - DNA, 15 bp, Homo sapiens
tggttgcttaaaaag

SEQ ID NO: 1834443 - DNA, 15 bp, Homo sapiens
ggttgcttaaaaagg

SEQ ID NO: 1834444 - DNA, 15 bp, Homo sapiens
gttgcttaaaaaggc

SEQ ID NO: 1834445 - DNA, 15 bp, Homo sapiens
ttgcttaaaaaggct

SEQ ID NO: 1834446 - DNA, 15 bp, Homo sapiens
tgcttaaaaaggctt

SEQ ID NO: 1834447 - DNA, 15 bp, Homo sapiens
gcttaaaaaggcttt

SEQ ID NO: 1834448 - DNA, 15 bp, Homo sapiens
cttaaaaaggcttta

SEQ ID NO: 1834449 - DNA, 15 bp, Homo sapiens
ttaaaaaggctttag

SEQ ID NO: 1834450 - DNA, 15 bp, Homo sapiens
taaaaaggctttagg

SEQ ID NO: 1834451 - DNA, 15 bp, Homo sapiens
aaaaaggctttagga

SEQ ID NO: 1834452 - DNA, 15 bp, Homo sapiens
aaaaggctttaggat

SEQ ID NO: 1834453 - DNA, 15 bp, Homo sapiens
aaaggctttaggata

SEQ ID NO: 1834454 - DNA, 15 bp, Homo sapiens
aaggctttaggatat

SEQ ID NO: 1834455 - DNA, 15 bp, Homo sapiens
aggctttaggatatt

SEQ ID NO: 1834456 - DNA, 15 bp, Homo sapiens
ggctttaggatattc

SEQ ID NO: 1834457 - DNA, 15 bp, Homo sapiens
gctttaggatattca

SEQ ID NO: 1834458 - DNA, 15 bp, Homo sapiens
ctttaggatattcaa

SEQ ID NO: 1834459 - DNA, 15 bp, Homo sapiens
tttaggatattcaaa

SEQ ID NO: 1834460 - DNA, 15 bp, Homo sapiens
ttaggatattcaaac

SEQ ID NO: 1834461 - DNA, 15 bp, Homo sapiens
taggatattcaaact

SEQ ID NO: 1834462 - DNA, 15 bp, Homo sapiens
aggatattcaaactg

SEQ ID NO: 1834463 - DNA, 15 bp, Homo sapiens
ggatattcaaactgg

SEQ ID NO: 1834464 - DNA, 15 bp, Homo sapiens
gatattcaaactggg

SEQ ID NO: 1834465 - DNA, 15 bp, Homo sapiens
atattcaaactgggt

SEQ ID NO: 1834466 - DNA, 15 bp, Homo sapiens
tattcaaactgggtg

SEQ ID NO: 1834467 - DNA, 15 bp, Homo sapiens
attcaaactgggtgg

SEQ ID NO: 1834468 - DNA, 15 bp, Homo sapiens
ttcaaactgggtggc

SEQ ID NO: 1834469 - DNA, 15 bp, Homo sapiens
tcaaactgggtggcc

SEQ ID NO: 1834470 - DNA, 15 bp, Homo sapiens
caaactgggtggcct

SEQ ID NO: 1834471 - DNA, 15 bp, Homo sapiens
aaactgggtggcctg

SEQ ID NO: 1834472 - DNA, 15 bp, Homo sapiens
aactgggtggcctgt

SEQ ID NO: 1834473 - DNA, 15 bp, Homo sapiens
actgggtggcctgtc

SEQ ID NO: 1834474 - DNA, 15 bp, Homo sapiens
ctgggtggcctgtct

SEQ ID NO: 1834475 - DNA, 15 bp, Homo sapiens
tgggtggcctgtctt

SEQ ID NO: 1834476 - DNA, 15 bp, Homo sapiens
gggtggcctgtcttg

SEQ ID NO: 1834477 - DNA, 15 bp, Homo sapiens
ggtggcctgtcttgt

SEQ ID NO: 1834478 - DNA, 15 bp, Homo sapiens
gtggcctgtcttgtt

SEQ ID NO: 1834479 - DNA, 15 bp, Homo sapiens
tggcctgtcttgttt

SEQ ID NO: 1834480 - DNA, 15 bp, Homo sapiens
ggcctgtcttgtttg

SEQ ID NO: 1834481 - DNA, 15 bp, Homo sapiens
gcctgtcttgtttgg

SEQ ID NO: 1834482 - DNA, 15 bp, Homo sapiens
cctgtcttgtttgga

SEQ ID NO: 1834483 - DNA, 15 bp, Homo sapiens
ctgtcttgtttggaa

SEQ ID NO: 1834484 - DNA, 15 bp, Homo sapiens
tgtcttgtttggaat

SEQ ID NO: 1834485 - DNA, 15 bp, Homo sapiens
gtcttgtttggaata

SEQ ID NO: 1834486 - DNA, 15 bp, Homo sapiens
tcttgtttggaatag

SEQ ID NO: 1834487 - DNA, 15 bp, Homo sapiens
cttgtttggaatagg

SEQ ID NO: 1834488 - DNA, 15 bp, Homo sapiens
ttgtttggaatagga

SEQ ID NO: 1834489 - DNA, 15 bp, Homo sapiens
tgtttggaataggac

SEQ ID NO: 1834490 - DNA, 15 bp, Homo sapiens
gtttggaataggact

SEQ ID NO: 1834491 - DNA, 15 bp, Homo sapiens
tttggaataggacta

SEQ ID NO: 1834492 - DNA, 15 bp, Homo sapiens
ttggaataggactaa

SEQ ID NO: 1834493 - DNA, 15 bp, Homo sapiens
tggaataggactaag

SEQ ID NO: 1834494 - DNA, 15 bp, Homo sapiens
ggaataggactaagc

SEQ ID NO: 1834495 - DNA, 15 bp, Homo sapiens
gaataggactaagca

SEQ ID NO: 1834496 - DNA, 15 bp, Homo sapiens
aataggactaagcat

SEQ ID NO: 1834497 - DNA, 15 bp, Homo sapiens
ataggactaagcatg

SEQ ID NO: 1834498 - DNA, 15 bp, Homo sapiens
taggactaagcatgt

SEQ ID NO: 1834499 - DNA, 15 bp, Homo sapiens
aggactaagcatgtc

SEQ ID NO: 1834500 - DNA, 15 bp, Homo sapiens
ggactaagcatgtca

SEQ ID NO: 1834501 - DNA, 15 bp, Homo sapiens
gactaagcatgtcac

SEQ ID NO: 1834502 - DNA, 15 bp, Homo sapiens
actaagcatgtcaca

SEQ ID NO: 1834503 - DNA, 15 bp, Homo sapiens
ctaagcatgtcacac

SEQ ID NO: 1834504 - DNA, 15 bp, Homo sapiens
taagcatgtcacact

SEQ ID NO: 1834505 - DNA, 15 bp, Homo sapiens
aagcatgtcacactt

SEQ ID NO: 1834506 - DNA, 15 bp, Homo sapiens
agcatgtcacacttt

SEQ ID NO: 1834507 - DNA, 15 bp, Homo sapiens
gcatgtcacactttc

SEQ ID NO: 1834508 - DNA, 15 bp, Homo sapiens
catgtcacactttca

SEQ ID NO: 1834509 - DNA, 15 bp, Homo sapiens
atgtcacactttcac

SEQ ID NO: 1834510 - DNA, 15 bp, Homo sapiens
tgtcacactttcacc

SEQ ID NO: 1834511 - DNA, 15 bp, Homo sapiens
gtcacactttcacca

SEQ ID NO: 1834512 - DNA, 15 bp, Homo sapiens
tcacactttcaccat

SEQ ID NO: 1834513 - DNA, 15 bp, Homo sapiens
cacactttcaccatg

SEQ ID NO: 1834514 - DNA, 15 bp, Homo sapiens
acactttcaccatgg

SEQ ID NO: 1834515 - DNA, 15 bp, Homo sapiens
cactttcaccatgga

SEQ ID NO: 1834516 - DNA, 15 bp, Homo sapiens
actttcaccatggaa

SEQ ID NO: 1834517 - DNA, 15 bp, Homo sapiens
ctttcaccatggaag

SEQ ID NO: 1834518 - DNA, 15 bp, Homo sapiens
tttcaccatggaaga

SEQ ID NO: 1834519 - DNA, 15 bp, Homo sapiens
ttcaccatggaagag

SEQ ID NO: 1834520 - DNA, 15 bp, Homo sapiens
tcaccatggaagagt

SEQ ID NO: 1834521 - DNA, 15 bp, Homo sapiens
caccatggaagagtt

SEQ ID NO: 1834522 - DNA, 15 bp, Homo sapiens
accatggaagagtta

SEQ ID NO: 1834523 - DNA, 15 bp, Homo sapiens
ccatggaagagttaa

SEQ ID NO: 1834524 - DNA, 15 bp, Homo sapiens
catggaagagttaat

SEQ ID NO: 1834525 - DNA, 15 bp, Homo sapiens
atggaagagttaatc

SEQ ID NO: 1834526 - DNA, 15 bp, Homo sapiens
tggaagagttaatcc

SEQ ID NO: 1834527 - DNA, 15 bp, Homo sapiens
ggaagagttaatcca

SEQ ID NO: 1834528 - DNA, 15 bp, Homo sapiens
gaagagttaatccat

SEQ ID NO: 1834529 - DNA, 15 bp, Homo sapiens
aagagttaatccata

SEQ ID NO: 1834530 - DNA, 15 bp, Homo sapiens
agagttaatccatat

SEQ ID NO: 1834531 - DNA, 15 bp, Homo sapiens
gagttaatccatatt

SEQ ID NO: 1834532 - DNA, 15 bp, Homo sapiens
agttaatccatattc

SEQ ID NO: 1834533 - DNA, 15 bp, Homo sapiens
gttaatccatattct

SEQ ID NO: 1834534 - DNA, 15 bp, Homo sapiens
ttaatccatattcta

SEQ ID NO: 1834535 - DNA, 15 bp, Homo sapiens
taatccatattctat

SEQ ID NO: 1834536 - DNA, 15 bp, Homo sapiens
aatccatattctatc

SEQ ID NO: 1834537 - DNA, 15 bp, Homo sapiens
atccatattctatct

SEQ ID NO: 1834538 - DNA, 15 bp, Homo sapiens
tccatattctatctg

SEQ ID NO: 1834539 - DNA, 15 bp, Homo sapiens
ccatattctatctgt

SEQ ID NO: 1834540 - DNA, 15 bp, Homo sapiens
catattctatctgta

SEQ ID NO: 1834541 - DNA, 15 bp, Homo sapiens
atattctatctgtaa

SEQ ID NO: 1834542 - DNA, 15 bp, Homo sapiens
tattctatctgtaag

SEQ ID NO: 1834543 - DNA, 15 bp, Homo sapiens
attctatctgtaagt

SEQ ID NO: 1834544 - DNA, 15 bp, Homo sapiens
ttctatctgtaagtt

SEQ ID NO: 1834545 - DNA, 15 bp, Homo sapiens
tctatctgtaagttg

SEQ ID NO: 1834546 - DNA, 15 bp, Homo sapiens
ctatctgtaagttgt

SEQ ID NO: 1834547 - DNA, 15 bp, Homo sapiens
tatctgtaagttgta

SEQ ID NO: 1834548 - DNA, 15 bp, Homo sapiens
atctgtaagttgtat

SEQ ID NO: 1834549 - DNA, 15 bp, Homo sapiens
tctgtaagttgtatc

SEQ ID NO: 1834550 - DNA, 15 bp, Homo sapiens
ctgtaagttgtatct

SEQ ID NO: 1834551 - DNA, 15 bp, Homo sapiens
tgtaagttgtatctc

SEQ ID NO: 1834552 - DNA, 15 bp, Homo sapiens
gtaagttgtatctcc

SEQ ID NO: 1834553 - DNA, 15 bp, Homo sapiens
taagttgtatctcca

SEQ ID NO: 1834554 - DNA, 15 bp, Homo sapiens
aagttgtatctccag

SEQ ID NO: 1834555 - DNA, 15 bp, Homo sapiens
agttgtatctccagt

SEQ ID NO: 1834556 - DNA, 15 bp, Homo sapiens
gttgtatctccagtc

SEQ ID NO: 1834557 - DNA, 15 bp, Homo sapiens
ttgtatctccagtca

SEQ ID NO: 1834558 - DNA, 15 bp, Homo sapiens
tgtatctccagtcat

SEQ ID NO: 1834559 - DNA, 15 bp, Homo sapiens
gtatctccagtcatt

SEQ ID NO: 1834560 - DNA, 15 bp, Homo sapiens
tatctccagtcattg

SEQ ID NO: 1834561 - DNA, 15 bp, Homo sapiens
atctccagtcattgg

SEQ ID NO: 1834562 - DNA, 15 bp, Homo sapiens
tctccagtcattggt

SEQ ID NO: 1834563 - DNA, 15 bp, Homo sapiens
ctccagtcattggtt

SEQ ID NO: 1834564 - DNA, 15 bp, Homo sapiens
tccagtcattggttt

SEQ ID NO: 1834565 - DNA, 15 bp, Homo sapiens
ccagtcattggtttt

SEQ ID NO: 1834566 - DNA, 15 bp, Homo sapiens
cagtcattggttttc

SEQ ID NO: 1834567 - DNA, 15 bp, Homo sapiens
agtcattggttttca

SEQ ID NO: 1834568 - DNA, 15 bp, Homo sapiens
gtcattggttttcaa

SEQ ID NO: 1834569 - DNA, 15 bp, Homo sapiens
tcattggttttcaac

SEQ ID NO: 1834570 - DNA, 15 bp, Homo sapiens
cattggttttcaaca

SEQ ID NO: 1834571 - DNA, 15 bp, Homo sapiens
attggttttcaacaa

SEQ ID NO: 1834572 - DNA, 15 bp, Homo sapiens
ttggttttcaacaag

SEQ ID NO: 1834573 - DNA, 15 bp, Homo sapiens
tggttttcaacaagt

SEQ ID NO: 1834574 - DNA, 15 bp, Homo sapiens
ggttttcaacaagtg

SEQ ID NO: 1834575 - DNA, 15 bp, Homo sapiens
gttttcaacaagtgg

SEQ ID NO: 1834576 - DNA, 15 bp, Homo sapiens
ttttcaacaagtggt

SEQ ID NO: 1834577 - DNA, 15 bp, Homo sapiens
tttcaacaagtggtc

SEQ ID NO: 1834578 - DNA, 15 bp, Homo sapiens
ttcaacaagtggtcc

SEQ ID NO: 1834579 - DNA, 15 bp, Homo sapiens
tcaacaagtggtcct

SEQ ID NO: 1834580 - DNA, 15 bp, Homo sapiens
caacaagtggtccta

SEQ ID NO: 1834581 - DNA, 15 bp, Homo sapiens
aacaagtggtcctat

SEQ ID NO: 1834582 - DNA, 15 bp, Homo sapiens
acaagtggtcctatc

SEQ ID NO: 1834583 - DNA, 15 bp, Homo sapiens
caagtggtcctatct

SEQ ID NO: 1834584 - DNA, 15 bp, Homo sapiens
aagtggtcctatctt

SEQ ID NO: 1834585 - DNA, 15 bp, Homo sapiens
agtggtcctatctta

SEQ ID NO: 1834586 - DNA, 15 bp, Homo sapiens
gtggtcctatcttag

SEQ ID NO: 1834587 - DNA, 15 bp, Homo sapiens
tggtcctatcttagg

SEQ ID NO: 1834588 - DNA, 15 bp, Homo sapiens
ggtcctatcttagga

SEQ ID NO: 1834589 - DNA, 15 bp, Homo sapiens
gtcctatcttaggag

SEQ ID NO: 1834590 - DNA, 15 bp, Homo sapiens
tcctatcttaggagg

SEQ ID NO: 1834591 - DNA, 15 bp, Homo sapiens
cctatcttaggagga

SEQ ID NO: 1834592 - DNA, 15 bp, Homo sapiens
ctatcttaggaggag

SEQ ID NO: 1834593 - DNA, 15 bp, Homo sapiens
tatcttaggaggagt

SEQ ID NO: 1834594 - DNA, 15 bp, Homo sapiens
atcttaggaggagtg

SEQ ID NO: 1834595 - DNA, 15 bp, Homo sapiens
tcttaggaggagtgg

SEQ ID NO: 1834596 - DNA, 15 bp, Homo sapiens
cttaggaggagtggt

SEQ ID NO: 1834597 - DNA, 15 bp, Homo sapiens
ttaggaggagtggta

SEQ ID NO: 1834598 - DNA, 15 bp, Homo sapiens
taggaggagtggtat

SEQ ID NO: 1834599 - DNA, 15 bp, Homo sapiens
aggaggagtggtata

SEQ ID NO: 1834600 - DNA, 15 bp, Homo sapiens
ggaggagtggtatat

SEQ ID NO: 1834601 - DNA, 15 bp, Homo sapiens
gaggagtggtatatt

SEQ ID NO: 1834602 - DNA, 15 bp, Homo sapiens
aggagtggtatatta

SEQ ID NO: 1834603 - DNA, 15 bp, Homo sapiens
ggagtggtatattag

SEQ ID NO: 1834604 - DNA, 15 bp, Homo sapiens
gagtggtatattaga

SEQ ID NO: 1834605 - DNA, 15 bp, Homo sapiens
agtggtatattagaa

SEQ ID NO: 1834606 - DNA, 15 bp, Homo sapiens
gtggtatattagaac

SEQ ID NO: 1834607 - DNA, 15 bp, Homo sapiens
tggtatattagaaca

SEQ ID NO: 1834608 - DNA, 15 bp, Homo sapiens
ggtatattagaacag

SEQ ID NO: 1834609 - DNA, 15 bp, Homo sapiens
gtatattagaacagt

SEQ ID NO: 1834610 - DNA, 15 bp, Homo sapiens
tatattagaacagtc

SEQ ID NO: 1834611 - DNA, 15 bp, Homo sapiens
atattagaacagtcc

SEQ ID NO: 1834612 - DNA, 15 bp, Homo sapiens
tattagaacagtcct

SEQ ID NO: 1834613 - DNA, 15 bp, Homo sapiens
attagaacagtcctt

SEQ ID NO: 1834614 - DNA, 15 bp, Homo sapiens
ttagaacagtccttc

SEQ ID NO: 1834615 - DNA, 15 bp, Homo sapiens
tagaacagtccttcc

SEQ ID NO: 1834616 - DNA, 15 bp, Homo sapiens
agaacagtccttcca

SEQ ID NO: 1834617 - DNA, 15 bp, Homo sapiens
gaacagtccttccag

SEQ ID NO: 1834618 - DNA, 15 bp, Homo sapiens
aacagtccttccaga

SEQ ID NO: 1834619 - DNA, 15 bp, Homo sapiens
acagtccttccagag

SEQ ID NO: 1834620 - DNA, 15 bp, Homo sapiens
cagtccttccagagt

SEQ ID NO: 1834621 - DNA, 15 bp, Homo sapiens
agtccttccagagta

SEQ ID NO: 1834622 - DNA, 15 bp, Homo sapiens
gtccttccagagtaa

SEQ ID NO: 1834623 - DNA, 15 bp, Homo sapiens
tccttccagagtaat

SEQ ID NO: 1834624 - DNA, 15 bp, Homo sapiens
ccttccagagtaatt

SEQ ID NO: 1834625 - DNA, 15 bp, Homo sapiens
cttccagagtaattt

SEQ ID NO: 1834626 - DNA, 15 bp, Homo sapiens
ttccagagtaatttt

SEQ ID NO: 1834627 - DNA, 15 bp, Homo sapiens
tccagagtaattttt

SEQ ID NO: 1834628 - DNA, 15 bp, Homo sapiens
ccagagtaatttttt

SEQ ID NO: 1834629 - DNA, 15 bp, Homo sapiens
cagagtaattttttt

SEQ ID NO: 1834630 - DNA, 15 bp, Homo sapiens
agagtaatttttttc

SEQ ID NO: 1834631 - DNA, 15 bp, Homo sapiens
gagtaatttttttca

SEQ ID NO: 1834632 - DNA, 15 bp, Homo sapiens
agtaatttttttcat

SEQ ID NO: 1834633 - DNA, 15 bp, Homo sapiens
gtaatttttttcatt

SEQ ID NO: 1834634 - DNA, 15 bp, Homo sapiens
taatttttttcatta

SEQ ID NO: 1834635 - DNA, 15 bp, Homo sapiens
aatttttttcattat

SEQ ID NO: 1834636 - DNA, 15 bp, Homo sapiens
atttttttcattatt

SEQ ID NO: 1834637 - DNA, 15 bp, Homo sapiens
tttttttcattattt

SEQ ID NO: 1834638 - DNA, 15 bp, Homo sapiens
ttttttcattatttc

SEQ ID NO: 1834639 - DNA, 15 bp, Homo sapiens
tttttcattatttca

SEQ ID NO: 1834640 - DNA, 15 bp, Homo sapiens
ttttcattatttcag

SEQ ID NO: 1834641 - DNA, 15 bp, Homo sapiens
tttcattatttcaga

SEQ ID NO: 1834642 - DNA, 15 bp, Homo sapiens
ttcattatttcagat

SEQ ID NO: 1834643 - DNA, 15 bp, Homo sapiens
tcattatttcagatt

SEQ ID NO: 1834644 - DNA, 15 bp, Homo sapiens
cattatttcagattt

SEQ ID NO: 1834645 - DNA, 15 bp, Homo sapiens
attatttcagatttt

SEQ ID NO: 1834646 - DNA, 15 bp, Homo sapiens
ttatttcagattttt

SEQ ID NO: 1834647 - DNA, 15 bp, Homo sapiens
tatttcagatttttt

SEQ ID NO: 1834648 - DNA, 15 bp, Homo sapiens
atttcagatttttta

SEQ ID NO: 1834649 - DNA, 15 bp, Homo sapiens
tttcagattttttag

SEQ ID NO: 1834650 - DNA, 15 bp, Homo sapiens
ttcagattttttagt

SEQ ID NO: 1834651 - DNA, 15 bp, Homo sapiens
tcagattttttagtt

SEQ ID NO: 1834652 - DNA, 15 bp, Homo sapiens
cagattttttagttt

SEQ ID NO: 1834653 - DNA, 15 bp, Homo sapiens
agattttttagtttt

SEQ ID NO: 1834654 - DNA, 15 bp, Homo sapiens
gattttttagttttt

SEQ ID NO: 1834655 - DNA, 15 bp, Homo sapiens
attttttagtttttt

SEQ ID NO: 1834656 - DNA, 15 bp, Homo sapiens
ttttttagttttttt

SEQ ID NO: 1834657 - DNA, 15 bp, Homo sapiens
tttttagtttttttt

SEQ ID NO: 1834658 - DNA, 15 bp, Homo sapiens
ttttagttttttttg

SEQ ID NO: 1834659 - DNA, 15 bp, Homo sapiens
tttagttttttttgt

SEQ ID NO: 1834660 - DNA, 15 bp, Homo sapiens
ttagttttttttgtt

SEQ ID NO: 1834661 - DNA, 15 bp, Homo sapiens
agttttttttgtttg

SEQ ID NO: 1834662 - DNA, 15 bp, Homo sapiens
gttttttttgtttgt

SEQ ID NO: 1834663 - DNA, 15 bp, Homo sapiens
tttgtttgttttttt

SEQ ID NO: 1834664 - DNA, 15 bp, Homo sapiens
tttttttaaaggctc

SEQ ID NO: 1834665 - DNA, 15 bp, Homo sapiens
ttttttaaaggctct

SEQ ID NO: 1834666 - DNA, 15 bp, Homo sapiens
tttttaaaggctctc

SEQ ID NO: 1834667 - DNA, 15 bp, Homo sapiens
ttttaaaggctctca

SEQ ID NO: 1834668 - DNA, 15 bp, Homo sapiens
tttaaaggctctcac

SEQ ID NO: 1834669 - DNA, 15 bp, Homo sapiens
ttaaaggctctcact

SEQ ID NO: 1834670 - DNA, 15 bp, Homo sapiens
taaaggctctcactc

SEQ ID NO: 1834671 - DNA, 15 bp, Homo sapiens
aaaggctctcactct

SEQ ID NO: 1834672 - DNA, 15 bp, Homo sapiens
aaggctctcactctg

SEQ ID NO: 1834673 - DNA, 15 bp, Homo sapiens
aggctctcactctgt

SEQ ID NO: 1834674 - DNA, 15 bp, Homo sapiens
ggctctcactctgtc

SEQ ID NO: 1834675 - DNA, 15 bp, Homo sapiens
gctctcactctgtca

SEQ ID NO: 1834676 - DNA, 15 bp, Homo sapiens
ctctcactctgtcac

SEQ ID NO: 1834677 - DNA, 15 bp, Homo sapiens
cacccaggctggaga

SEQ ID NO: 1834678 - DNA, 15 bp, Homo sapiens
acccaggctggagag

SEQ ID NO: 1834679 - DNA, 15 bp, Homo sapiens
gctggagagcagtga

SEQ ID NO: 1834680 - DNA, 15 bp, Homo sapiens
ctggagagcagtgat

SEQ ID NO: 1834681 - DNA, 15 bp, Homo sapiens
tggagagcagtgata

SEQ ID NO: 1834682 - DNA, 15 bp, Homo sapiens
ggagagcagtgatac

SEQ ID NO: 1834683 - DNA, 15 bp, Homo sapiens
gagagcagtgatacg

SEQ ID NO: 1834684 - DNA, 15 bp, Homo sapiens
agagcagtgatacga

SEQ ID NO: 1834685 - DNA, 15 bp, Homo sapiens
gagcagtgatacgat

SEQ ID NO: 1834686 - DNA, 15 bp, Homo sapiens
agcagtgatacgatc

SEQ ID NO: 1834687 - DNA, 15 bp, Homo sapiens
gcagtgatacgatca

SEQ ID NO: 1834688 - DNA, 15 bp, Homo sapiens
cagtgatacgatcat

SEQ ID NO: 1834689 - DNA, 15 bp, Homo sapiens
agtgatacgatcata

SEQ ID NO: 1834690 - DNA, 15 bp, Homo sapiens
gtgatacgatcatag

SEQ ID NO: 1834691 - DNA, 15 bp, Homo sapiens
tgatacgatcatagc

SEQ ID NO: 1834692 - DNA, 15 bp, Homo sapiens
gatacgatcatagct

SEQ ID NO: 1834693 - DNA, 15 bp, Homo sapiens
atacgatcatagctc

SEQ ID NO: 1834694 - DNA, 15 bp, Homo sapiens
tacgatcatagctca

SEQ ID NO: 1834695 - DNA, 15 bp, Homo sapiens
acgatcatagctcac

SEQ ID NO: 1834696 - DNA, 15 bp, Homo sapiens
cgatcatagctcact

SEQ ID NO: 1834697 - DNA, 15 bp, Homo sapiens
atcatagctcactgg

SEQ ID NO: 1834698 - DNA, 15 bp, Homo sapiens
tcatagctcactgga

SEQ ID NO: 1834699 - DNA, 15 bp, Homo sapiens
catagctcactggaa

SEQ ID NO: 1834700 - DNA, 15 bp, Homo sapiens
atagctcactggaac

SEQ ID NO: 1834701 - DNA, 15 bp, Homo sapiens
tagctcactggaacc

SEQ ID NO: 1834702 - DNA, 15 bp, Homo sapiens
agctcactggaacct

SEQ ID NO: 1834703 - DNA, 15 bp, Homo sapiens
gctcactggaacctc

SEQ ID NO: 1834704 - DNA, 15 bp, Homo sapiens
ctcactggaacctct

SEQ ID NO: 1834705 - DNA, 15 bp, Homo sapiens
tcactggaacctcta

SEQ ID NO: 1834706 - DNA, 15 bp, Homo sapiens
cactggaacctctac

SEQ ID NO: 1834707 - DNA, 15 bp, Homo sapiens
actggaacctctacc

SEQ ID NO: 1834708 - DNA, 15 bp, Homo sapiens
ctggaacctctacct

SEQ ID NO: 1834709 - DNA, 15 bp, Homo sapiens
tggaacctctacctc

SEQ ID NO: 1834710 - DNA, 15 bp, Homo sapiens
ggaacctctacctcc

SEQ ID NO: 1834711 - DNA, 15 bp, Homo sapiens
gaacctctacctccc

SEQ ID NO: 1834712 - DNA, 15 bp, Homo sapiens
aacctctacctccct

SEQ ID NO: 1834713 - DNA, 15 bp, Homo sapiens
acctctacctccctg

SEQ ID NO: 1834714 - DNA, 15 bp, Homo sapiens
cctctacctccctgg

SEQ ID NO: 1834715 - DNA, 15 bp, Homo sapiens
ctctacctccctggg

SEQ ID NO: 1834716 - DNA, 15 bp, Homo sapiens
tctacctccctgggc

SEQ ID NO: 1834717 - DNA, 15 bp, Homo sapiens
ctacctccctgggct

SEQ ID NO: 1834718 - DNA, 15 bp, Homo sapiens
tacctccctgggctc

SEQ ID NO: 1834719 - DNA, 15 bp, Homo sapiens
acctccctgggctca

SEQ ID NO: 1834720 - DNA, 15 bp, Homo sapiens
cctccctgggctcag

SEQ ID NO: 1834721 - DNA, 15 bp, Homo sapiens
ctccctgggctcagg

SEQ ID NO: 1834722 - DNA, 15 bp, Homo sapiens
tccctgggctcaggt

SEQ ID NO: 1834723 - DNA, 15 bp, Homo sapiens
ccctgggctcaggtg

SEQ ID NO: 1834724 - DNA, 15 bp, Homo sapiens
cctgggctcaggtga

SEQ ID NO: 1834725 - DNA, 15 bp, Homo sapiens
ctgggctcaggtgat

SEQ ID NO: 1834726 - DNA, 15 bp, Homo sapiens
tgggctcaggtgatc

SEQ ID NO: 1834727 - DNA, 15 bp, Homo sapiens
ccacctcagccttct

SEQ ID NO: 1834728 - DNA, 15 bp, Homo sapiens
cacctcagccttctg

SEQ ID NO: 1834729 - DNA, 15 bp, Homo sapiens
acctcagccttctga

SEQ ID NO: 1834730 - DNA, 15 bp, Homo sapiens
tcagccttctgagtt

SEQ ID NO: 1834731 - DNA, 15 bp, Homo sapiens
cagccttctgagttt

SEQ ID NO: 1834732 - DNA, 15 bp, Homo sapiens
agccttctgagtttc

SEQ ID NO: 1834733 - DNA, 15 bp, Homo sapiens
gccttctgagtttct

SEQ ID NO: 1834734 - DNA, 15 bp, Homo sapiens
ccttctgagtttctg

SEQ ID NO: 1834735 - DNA, 15 bp, Homo sapiens
cttctgagtttctgg

SEQ ID NO: 1834736 - DNA, 15 bp, Homo sapiens
ttctgagtttctggg

SEQ ID NO: 1834737 - DNA, 15 bp, Homo sapiens
tctgagtttctggga

SEQ ID NO: 1834738 - DNA, 15 bp, Homo sapiens
ctgagtttctgggac

SEQ ID NO: 1834739 - DNA, 15 bp, Homo sapiens
tgagtttctgggact

SEQ ID NO: 1834740 - DNA, 15 bp, Homo sapiens
gagtttctgggacta

SEQ ID NO: 1834741 - DNA, 15 bp, Homo sapiens
agtttctgggactac

SEQ ID NO: 1834742 - DNA, 15 bp, Homo sapiens
gtttctgggactaca

SEQ ID NO: 1834743 - DNA, 15 bp, Homo sapiens
tttctgggactacag

SEQ ID NO: 1834744 - DNA, 15 bp, Homo sapiens
ttctgggactacagg

SEQ ID NO: 1834745 - DNA, 15 bp, Homo sapiens
tctgggactacaggc

SEQ ID NO: 1834746 - DNA, 15 bp, Homo sapiens
gactacaggcatgaa

SEQ ID NO: 1834747 - DNA, 15 bp, Homo sapiens
actacaggcatgaac

SEQ ID NO: 1834748 - DNA, 15 bp, Homo sapiens
ctacaggcatgaacc

SEQ ID NO: 1834749 - DNA, 15 bp, Homo sapiens
tacaggcatgaaccg

SEQ ID NO: 1834750 - DNA, 15 bp, Homo sapiens
acaggcatgaaccgt

SEQ ID NO: 1834751 - DNA, 15 bp, Homo sapiens
caggcatgaaccgtg

SEQ ID NO: 1834752 - DNA, 15 bp, Homo sapiens
aggcatgaaccgtga

SEQ ID NO: 1834753 - DNA, 15 bp, Homo sapiens
ggcatgaaccgtgag

SEQ ID NO: 1834754 - DNA, 15 bp, Homo sapiens
gcatgaaccgtgagg

SEQ ID NO: 1834755 - DNA, 15 bp, Homo sapiens
catgaaccgtgaggc

SEQ ID NO: 1834756 - DNA, 15 bp, Homo sapiens
atgaaccgtgaggcc

SEQ ID NO: 1834757 - DNA, 15 bp, Homo sapiens
tgaaccgtgaggccc

SEQ ID NO: 1834758 - DNA, 15 bp, Homo sapiens
gaaccgtgaggccca

SEQ ID NO: 1834759 - DNA, 15 bp, Homo sapiens
aaccgtgaggcccag

SEQ ID NO: 1834760 - DNA, 15 bp, Homo sapiens
accgtgaggcccagc

SEQ ID NO: 1834761 - DNA, 15 bp, Homo sapiens
ccgtgaggcccagct

SEQ ID NO: 1834762 - DNA, 15 bp, Homo sapiens
cgtgaggcccagcta

SEQ ID NO: 1834763 - DNA, 15 bp, Homo sapiens
gtgaggcccagctaa

SEQ ID NO: 1834764 - DNA, 15 bp, Homo sapiens
tgaggcccagctaat

SEQ ID NO: 1834765 - DNA, 15 bp, Homo sapiens
gaggcccagctaatt

SEQ ID NO: 1834766 - DNA, 15 bp, Homo sapiens
agctaatttttgtga

SEQ ID NO: 1834767 - DNA, 15 bp, Homo sapiens
gctaatttttgtgat

SEQ ID NO: 1834768 - DNA, 15 bp, Homo sapiens
ctaatttttgtgatt

SEQ ID NO: 1834769 - DNA, 15 bp, Homo sapiens
taatttttgtgattt

SEQ ID NO: 1834770 - DNA, 15 bp, Homo sapiens
aatttttgtgatttt

SEQ ID NO: 1834771 - DNA, 15 bp, Homo sapiens
atttttgtgattttt

SEQ ID NO: 1834772 - DNA, 15 bp, Homo sapiens
tttttgtgatttttg

SEQ ID NO: 1834773 - DNA, 15 bp, Homo sapiens
ttttgtgatttttgt

SEQ ID NO: 1834774 - DNA, 15 bp, Homo sapiens
tttgtgatttttgtg

SEQ ID NO: 1834775 - DNA, 15 bp, Homo sapiens
ttgtgatttttgtgt

SEQ ID NO: 1834776 - DNA, 15 bp, Homo sapiens
tgtgatttttgtgtt

SEQ ID NO: 1834777 - DNA, 15 bp, Homo sapiens
gtgatttttgtgttt

SEQ ID NO: 1834778 - DNA, 15 bp, Homo sapiens
tgatttttgtgtttt

SEQ ID NO: 1834779 - DNA, 15 bp, Homo sapiens
gatttttgtgttttt

SEQ ID NO: 1834780 - DNA, 15 bp, Homo sapiens
atttttgtgtttttt

SEQ ID NO: 1834781 - DNA, 15 bp, Homo sapiens
tttttgtgttttttg

SEQ ID NO: 1834782 - DNA, 15 bp, Homo sapiens
ttttgtgttttttgt

SEQ ID NO: 1834783 - DNA, 15 bp, Homo sapiens
tttgtgttttttgta

SEQ ID NO: 1834784 - DNA, 15 bp, Homo sapiens
ttgtgttttttgtag

SEQ ID NO: 1834785 - DNA, 15 bp, Homo sapiens
tgtgttttttgtaga

SEQ ID NO: 1834786 - DNA, 15 bp, Homo sapiens
gtgttttttgtagag

SEQ ID NO: 1834787 - DNA, 15 bp, Homo sapiens
tgttttttgtagagt

SEQ ID NO: 1834788 - DNA, 15 bp, Homo sapiens
gttttttgtagagtc

SEQ ID NO: 1834789 - DNA, 15 bp, Homo sapiens
tgtagagtcagggtt

SEQ ID NO: 1834790 - DNA, 15 bp, Homo sapiens
gtagagtcagggttt

SEQ ID NO: 1834791 - DNA, 15 bp, Homo sapiens
tagagtcagggtttc

SEQ ID NO: 1834792 - DNA, 15 bp, Homo sapiens
gtttctccatgttgc

SEQ ID NO: 1834793 - DNA, 15 bp, Homo sapiens
tttctccatgttgcc

SEQ ID NO: 1834794 - DNA, 15 bp, Homo sapiens
ttctccatgttgccc

SEQ ID NO: 1834795 - DNA, 15 bp, Homo sapiens
tctccatgttgccca

SEQ ID NO: 1834796 - DNA, 15 bp, Homo sapiens
ctccatgttgcccag

SEQ ID NO: 1834797 - DNA, 15 bp, Homo sapiens
tccatgttgcccagg

SEQ ID NO: 1834798 - DNA, 15 bp, Homo sapiens
gtctcgtactcctgg

SEQ ID NO: 1834799 - DNA, 15 bp, Homo sapiens
tctcgtactcctggt

SEQ ID NO: 1834800 - DNA, 15 bp, Homo sapiens
ctcgtactcctggtc

SEQ ID NO: 1834801 - DNA, 15 bp, Homo sapiens
tcgtactcctggtct

SEQ ID NO: 1834802 - DNA, 15 bp, Homo sapiens
cgtactcctggtctc

SEQ ID NO: 1834803 - DNA, 15 bp, Homo sapiens
gtactcctggtctca

SEQ ID NO: 1834804 - DNA, 15 bp, Homo sapiens
tactcctggtctcaa

SEQ ID NO: 1834805 - DNA, 15 bp, Homo sapiens
ctcctggtctcaagt

SEQ ID NO: 1834806 - DNA, 15 bp, Homo sapiens
tcctggtctcaagta

SEQ ID NO: 1834807 - DNA, 15 bp, Homo sapiens
cctggtctcaagtaa

SEQ ID NO: 1834808 - DNA, 15 bp, Homo sapiens
ctggtctcaagtaac

SEQ ID NO: 1834809 - DNA, 15 bp, Homo sapiens
tggtctcaagtaacc

SEQ ID NO: 1834810 - DNA, 15 bp, Homo sapiens
ggtctcaagtaacct

SEQ ID NO: 1834811 - DNA, 15 bp, Homo sapiens
gtctcaagtaacctg

SEQ ID NO: 1834812 - DNA, 15 bp, Homo sapiens
tctcaagtaacctgc

SEQ ID NO: 1834813 - DNA, 15 bp, Homo sapiens
ctcaagtaacctgcc

SEQ ID NO: 1834814 - DNA, 15 bp, Homo sapiens
tcaagtaacctgccc

SEQ ID NO: 1834815 - DNA, 15 bp, Homo sapiens
caagtaacctgcccg

SEQ ID NO: 1834816 - DNA, 15 bp, Homo sapiens
aagtaacctgcccgc

SEQ ID NO: 1834817 - DNA, 15 bp, Homo sapiens
agtaacctgcccgcc

SEQ ID NO: 1834818 - DNA, 15 bp, Homo sapiens
gtaacctgcccgcct

SEQ ID NO: 1834819 - DNA, 15 bp, Homo sapiens
taacctgcccgcctc

SEQ ID NO: 1834820 - DNA, 15 bp, Homo sapiens
aacctgcccgcctcg

SEQ ID NO: 1834821 - DNA, 15 bp, Homo sapiens
acctgcccgcctcgg

SEQ ID NO: 1834822 - DNA, 15 bp, Homo sapiens
cctgcccgcctcggc

SEQ ID NO: 1834823 - DNA, 15 bp, Homo sapiens
gcccgcctcggcctt

SEQ ID NO: 1834824 - DNA, 15 bp, Homo sapiens
cccgcctcggccttc

SEQ ID NO: 1834825 - DNA, 15 bp, Homo sapiens
ccgcctcggccttcc

SEQ ID NO: 1834826 - DNA, 15 bp, Homo sapiens
cgcctcggccttcca

SEQ ID NO: 1834827 - DNA, 15 bp, Homo sapiens
tgctgggattagagg

SEQ ID NO: 1834828 - DNA, 15 bp, Homo sapiens
gctgggattagaggt

SEQ ID NO: 1834829 - DNA, 15 bp, Homo sapiens
ctgggattagaggtg

SEQ ID NO: 1834830 - DNA, 15 bp, Homo sapiens
tgggattagaggtgt

SEQ ID NO: 1834831 - DNA, 15 bp, Homo sapiens
gggattagaggtgtg

SEQ ID NO: 1834832 - DNA, 15 bp, Homo sapiens
ggattagaggtgtga

SEQ ID NO: 1834833 - DNA, 15 bp, Homo sapiens
gattagaggtgtgag

SEQ ID NO: 1834834 - DNA, 15 bp, Homo sapiens
attagaggtgtgagc

SEQ ID NO: 1834835 - DNA, 15 bp, Homo sapiens
ttagaggtgtgagcc

SEQ ID NO: 1834836 - DNA, 15 bp, Homo sapiens
tagaggtgtgagcca

SEQ ID NO: 1834837 - DNA, 15 bp, Homo sapiens
agaggtgtgagccac

SEQ ID NO: 1834838 - DNA, 15 bp, Homo sapiens
gaggtgtgagccacc

SEQ ID NO: 1834839 - DNA, 15 bp, Homo sapiens
agccaccacacctgt

SEQ ID NO: 1834840 - DNA, 15 bp, Homo sapiens
gccaccacacctgta

SEQ ID NO: 1834841 - DNA, 15 bp, Homo sapiens
ccaccacacctgtac

SEQ ID NO: 1834842 - DNA, 15 bp, Homo sapiens
caccacacctgtact

SEQ ID NO: 1834843 - DNA, 15 bp, Homo sapiens
accacacctgtacta

SEQ ID NO: 1834844 - DNA, 15 bp, Homo sapiens
ccacacctgtactac

SEQ ID NO: 1834845 - DNA, 15 bp, Homo sapiens
cacacctgtactact

SEQ ID NO: 1834846 - DNA, 15 bp, Homo sapiens
acacctgtactacta

SEQ ID NO: 1834847 - DNA, 15 bp, Homo sapiens
cacctgtactactac

SEQ ID NO: 1834848 - DNA, 15 bp, Homo sapiens
acctgtactactact

SEQ ID NO: 1834849 - DNA, 15 bp, Homo sapiens
cctgtactactactt

SEQ ID NO: 1834850 - DNA, 15 bp, Homo sapiens
ctgtactactacttt

SEQ ID NO: 1834851 - DNA, 15 bp, Homo sapiens
tgtactactacttta

SEQ ID NO: 1834852 - DNA, 15 bp, Homo sapiens
gtactactactttag

SEQ ID NO: 1834853 - DNA, 15 bp, Homo sapiens
tactactactttagt

SEQ ID NO: 1834854 - DNA, 15 bp, Homo sapiens
actactactttagtt

SEQ ID NO: 1834855 - DNA, 15 bp, Homo sapiens
ctactactttagttt

SEQ ID NO: 1834856 - DNA, 15 bp, Homo sapiens
tactactttagtttg

SEQ ID NO: 1834857 - DNA, 15 bp, Homo sapiens
actactttagtttga

SEQ ID NO: 1834858 - DNA, 15 bp, Homo sapiens
ctactttagtttgaa

SEQ ID NO: 1834859 - DNA, 15 bp, Homo sapiens
tactttagtttgaac

SEQ ID NO: 1834860 - DNA, 15 bp, Homo sapiens
actttagtttgaaca

SEQ ID NO: 1834861 - DNA, 15 bp, Homo sapiens
ctttagtttgaacac

SEQ ID NO: 1834862 - DNA, 15 bp, Homo sapiens
tttagtttgaacact

SEQ ID NO: 1834863 - DNA, 15 bp, Homo sapiens
ttagtttgaacacta

SEQ ID NO: 1834864 - DNA, 15 bp, Homo sapiens
tagtttgaacactat

SEQ ID NO: 1834865 - DNA, 15 bp, Homo sapiens
agtttgaacactata

SEQ ID NO: 1834866 - DNA, 15 bp, Homo sapiens
gtttgaacactatat

SEQ ID NO: 1834867 - DNA, 15 bp, Homo sapiens
tttgaacactatatt

SEQ ID NO: 1834868 - DNA, 15 bp, Homo sapiens
ttgaacactatattt

SEQ ID NO: 1834869 - DNA, 15 bp, Homo sapiens
tgaacactatattta

SEQ ID NO: 1834870 - DNA, 15 bp, Homo sapiens
gaacactatatttaa

SEQ ID NO: 1834871 - DNA, 15 bp, Homo sapiens
aacactatatttaaa

SEQ ID NO: 1834872 - DNA, 15 bp, Homo sapiens
acactatatttaaat

SEQ ID NO: 1834873 - DNA, 15 bp, Homo sapiens
cactatatttaaatc

SEQ ID NO: 1834874 - DNA, 15 bp, Homo sapiens
actatatttaaatct

SEQ ID NO: 1834875 - DNA, 15 bp, Homo sapiens
ctatatttaaatcta

SEQ ID NO: 1834876 - DNA, 15 bp, Homo sapiens
tatatttaaatctaa

SEQ ID NO: 1834877 - DNA, 15 bp, Homo sapiens
atatttaaatctaat

SEQ ID NO: 1834878 - DNA, 15 bp, Homo sapiens
tatttaaatctaata

SEQ ID NO: 1834879 - DNA, 15 bp, Homo sapiens
atttaaatctaataa

SEQ ID NO: 1834880 - DNA, 15 bp, Homo sapiens
tttaaatctaataat

SEQ ID NO: 1834881 - DNA, 15 bp, Homo sapiens
ttaaatctaataatt

SEQ ID NO: 1834882 - DNA, 15 bp, Homo sapiens
taaatctaataattc

SEQ ID NO: 1834883 - DNA, 15 bp, Homo sapiens
aaatctaataattca

SEQ ID NO: 1834884 - DNA, 15 bp, Homo sapiens
aatctaataattcag

SEQ ID NO: 1834885 - DNA, 15 bp, Homo sapiens
atctaataattcaga

SEQ ID NO: 1834886 - DNA, 15 bp, Homo sapiens
tctaataattcagac

SEQ ID NO: 1834887 - DNA, 15 bp, Homo sapiens
ctaataattcagaca

SEQ ID NO: 1834888 - DNA, 15 bp, Homo sapiens
taataattcagacat

SEQ ID NO: 1834889 - DNA, 15 bp, Homo sapiens
aataattcagacatg

SEQ ID NO: 1834890 - DNA, 15 bp, Homo sapiens
ataattcagacatgg

SEQ ID NO: 1834891 - DNA, 15 bp, Homo sapiens
taattcagacatggc

SEQ ID NO: 1834892 - DNA, 15 bp, Homo sapiens
aattcagacatggcc

SEQ ID NO: 1834893 - DNA, 15 bp, Homo sapiens
attcagacatggccc

SEQ ID NO: 1834894 - DNA, 15 bp, Homo sapiens
ttcagacatggccca

SEQ ID NO: 1834895 - DNA, 15 bp, Homo sapiens
tcagacatggcccat

SEQ ID NO: 1834896 - DNA, 15 bp, Homo sapiens
cagacatggcccatt

SEQ ID NO: 1834897 - DNA, 15 bp, Homo sapiens
agacatggcccattt

SEQ ID NO: 1834898 - DNA, 15 bp, Homo sapiens
gacatggcccatttc

SEQ ID NO: 1834899 - DNA, 15 bp, Homo sapiens
acatggcccatttca

SEQ ID NO: 1834900 - DNA, 15 bp, Homo sapiens
catggcccatttcat

SEQ ID NO: 1834901 - DNA, 15 bp, Homo sapiens
atggcccatttcata

SEQ ID NO: 1834902 - DNA, 15 bp, Homo sapiens
tggcccatttcatac

SEQ ID NO: 1834903 - DNA, 15 bp, Homo sapiens
ggcccatttcatact

SEQ ID NO: 1834904 - DNA, 15 bp, Homo sapiens
gcccatttcatactt

SEQ ID NO: 1834905 - DNA, 15 bp, Homo sapiens
cccatttcatacttg

SEQ ID NO: 1834906 - DNA, 15 bp, Homo sapiens
ccatttcatacttga

SEQ ID NO: 1834907 - DNA, 15 bp, Homo sapiens
catttcatacttgac

SEQ ID NO: 1834908 - DNA, 15 bp, Homo sapiens
atttcatacttgaca

SEQ ID NO: 1834909 - DNA, 15 bp, Homo sapiens
tttcatacttgacag

SEQ ID NO: 1834910 - DNA, 15 bp, Homo sapiens
ttcatacttgacaga

SEQ ID NO: 1834911 - DNA, 15 bp, Homo sapiens
tcatacttgacagaa

SEQ ID NO: 1834912 - DNA, 15 bp, Homo sapiens
catacttgacagaaa

SEQ ID NO: 1834913 - DNA, 15 bp, Homo sapiens
atacttgacagaaag

SEQ ID NO: 1834914 - DNA, 15 bp, Homo sapiens
tacttgacagaaagt

SEQ ID NO: 1834915 - DNA, 15 bp, Homo sapiens
acttgacagaaagta

SEQ ID NO: 1834916 - DNA, 15 bp, Homo sapiens
cttgacagaaagtat

SEQ ID NO: 1834917 - DNA, 15 bp, Homo sapiens
ttgacagaaagtatg

SEQ ID NO: 1834918 - DNA, 15 bp, Homo sapiens
tgacagaaagtatga

SEQ ID NO: 1834919 - DNA, 15 bp, Homo sapiens
gacagaaagtatgag

SEQ ID NO: 1834920 - DNA, 15 bp, Homo sapiens
acagaaagtatgagt

SEQ ID NO: 1834921 - DNA, 15 bp, Homo sapiens
cagaaagtatgagtc

SEQ ID NO: 1834922 - DNA, 15 bp, Homo sapiens
agaaagtatgagtca

SEQ ID NO: 1834923 - DNA, 15 bp, Homo sapiens
gaaagtatgagtcaa

SEQ ID NO: 1834924 - DNA, 15 bp, Homo sapiens
aaagtatgagtcaaa

SEQ ID NO: 1834925 - DNA, 15 bp, Homo sapiens
aagtatgagtcaaag

SEQ ID NO: 1834926 - DNA, 15 bp, Homo sapiens
agtatgagtcaaaga

SEQ ID NO: 1834927 - DNA, 15 bp, Homo sapiens
gtatgagtcaaagac

SEQ ID NO: 1834928 - DNA, 15 bp, Homo sapiens
tatgagtcaaagact

SEQ ID NO: 1834929 - DNA, 15 bp, Homo sapiens
atgagtcaaagactc

SEQ ID NO: 1834930 - DNA, 15 bp, Homo sapiens
tgagtcaaagactca

SEQ ID NO: 1834931 - DNA, 15 bp, Homo sapiens
gagtcaaagactcaa

SEQ ID NO: 1834932 - DNA, 15 bp, Homo sapiens
agtcaaagactcaaa

SEQ ID NO: 1834933 - DNA, 15 bp, Homo sapiens
gtcaaagactcaaat

SEQ ID NO: 1834934 - DNA, 15 bp, Homo sapiens
tcaaagactcaaatc

SEQ ID NO: 1834935 - DNA, 15 bp, Homo sapiens
caaagactcaaatca

SEQ ID NO: 1834936 - DNA, 15 bp, Homo sapiens
aaagactcaaatcat

SEQ ID NO: 1834937 - DNA, 15 bp, Homo sapiens
aagactcaaatcatt

SEQ ID NO: 1834938 - DNA, 15 bp, Homo sapiens
agactcaaatcattc

SEQ ID NO: 1834939 - DNA, 15 bp, Homo sapiens
gactcaaatcattca

SEQ ID NO: 1834940 - DNA, 15 bp, Homo sapiens
actcaaatcattcag

SEQ ID NO: 1834941 - DNA, 15 bp, Homo sapiens
ctcaaatcattcaga

SEQ ID NO: 1834942 - DNA, 15 bp, Homo sapiens
tcaaatcattcagat

SEQ ID NO: 1834943 - DNA, 15 bp, Homo sapiens
caaatcattcagatt

SEQ ID NO: 1834944 - DNA, 15 bp, Homo sapiens
aaatcattcagattc

SEQ ID NO: 1834945 - DNA, 15 bp, Homo sapiens
aatcattcagattct

SEQ ID NO: 1834946 - DNA, 15 bp, Homo sapiens
atcattcagattctc

SEQ ID NO: 1834947 - DNA, 15 bp, Homo sapiens
tcattcagattctca

SEQ ID NO: 1834948 - DNA, 15 bp, Homo sapiens
cattcagattctcac

SEQ ID NO: 1834949 - DNA, 15 bp, Homo sapiens
attcagattctcaca

SEQ ID NO: 1834950 - DNA, 15 bp, Homo sapiens
ttcagattctcacat

SEQ ID NO: 1834951 - DNA, 15 bp, Homo sapiens
tcagattctcacata

SEQ ID NO: 1834952 - DNA, 15 bp, Homo sapiens
cagattctcacatat

SEQ ID NO: 1834953 - DNA, 15 bp, Homo sapiens
agattctcacatatg

SEQ ID NO: 1834954 - DNA, 15 bp, Homo sapiens
gattctcacatatgt

SEQ ID NO: 1834955 - DNA, 15 bp, Homo sapiens
attctcacatatgta

SEQ ID NO: 1834956 - DNA, 15 bp, Homo sapiens
ttctcacatatgtaa

SEQ ID NO: 1834957 - DNA, 15 bp, Homo sapiens
tctcacatatgtaaa

SEQ ID NO: 1834958 - DNA, 15 bp, Homo sapiens
ctcacatatgtaaaa

SEQ ID NO: 1834959 - DNA, 15 bp, Homo sapiens
tcacatatgtaaaac

SEQ ID NO: 1834960 - DNA, 15 bp, Homo sapiens
cacatatgtaaaacg

SEQ ID NO: 1834961 - DNA, 15 bp, Homo sapiens
acatatgtaaaacgt

SEQ ID NO: 1834962 - DNA, 15 bp, Homo sapiens
catatgtaaaacgta

SEQ ID NO: 1834963 - DNA, 15 bp, Homo sapiens
atatgtaaaacgtac

SEQ ID NO: 1834964 - DNA, 15 bp, Homo sapiens
tatgtaaaacgtacg

SEQ ID NO: 1834965 - DNA, 15 bp, Homo sapiens
atgtaaaacgtacgc

SEQ ID NO: 1834966 - DNA, 15 bp, Homo sapiens
tgtaaaacgtacgct

SEQ ID NO: 1834967 - DNA, 15 bp, Homo sapiens
gtaaaacgtacgctt

SEQ ID NO: 1834968 - DNA, 15 bp, Homo sapiens
taaaacgtacgcttg

SEQ ID NO: 1834969 - DNA, 15 bp, Homo sapiens
aaaacgtacgcttgg

SEQ ID NO: 1834970 - DNA, 15 bp, Homo sapiens
aaacgtacgcttggc

SEQ ID NO: 1834971 - DNA, 15 bp, Homo sapiens
aacgtacgcttggcc

SEQ ID NO: 1834972 - DNA, 15 bp, Homo sapiens
acgtacgcttggccg

SEQ ID NO: 1834973 - DNA, 15 bp, Homo sapiens
cgtacgcttggccgg

SEQ ID NO: 1834974 - DNA, 15 bp, Homo sapiens
gtacgcttggccggg

SEQ ID NO: 1834975 - DNA, 15 bp, Homo sapiens
tacgcttggccgggt

SEQ ID NO: 1834976 - DNA, 15 bp, Homo sapiens
acgcttggccgggtg

SEQ ID NO: 1834977 - DNA, 15 bp, Homo sapiens
cgcttggccgggtgc

SEQ ID NO: 1834978 - DNA, 15 bp, Homo sapiens
gcttggccgggtgca

SEQ ID NO: 1834979 - DNA, 15 bp, Homo sapiens
cttggccgggtgcag

SEQ ID NO: 1834980 - DNA, 15 bp, Homo sapiens
ttggccgggtgcagt

SEQ ID NO: 1834981 - DNA, 15 bp, Homo sapiens
tggccgggtgcagtg

SEQ ID NO: 1834982 - DNA, 15 bp, Homo sapiens
atcccagcactttgt

SEQ ID NO: 1834983 - DNA, 15 bp, Homo sapiens
tcccagcactttgtg

SEQ ID NO: 1834984 - DNA, 15 bp, Homo sapiens
cccagcactttgtga

SEQ ID NO: 1834985 - DNA, 15 bp, Homo sapiens
ccagcactttgtgag

SEQ ID NO: 1834986 - DNA, 15 bp, Homo sapiens
cagcactttgtgaga

SEQ ID NO: 1834987 - DNA, 15 bp, Homo sapiens
agcactttgtgagac

SEQ ID NO: 1834988 - DNA, 15 bp, Homo sapiens
gcactttgtgagacc

SEQ ID NO: 1834989 - DNA, 15 bp, Homo sapiens
cactttgtgagacca

SEQ ID NO: 1834990 - DNA, 15 bp, Homo sapiens
actttgtgagaccaa

SEQ ID NO: 1834991 - DNA, 15 bp, Homo sapiens
ctttgtgagaccaag

SEQ ID NO: 1834992 - DNA, 15 bp, Homo sapiens
tttgtgagaccaagg

SEQ ID NO: 1834993 - DNA, 15 bp, Homo sapiens
ttgtgagaccaaggt

SEQ ID NO: 1834994 - DNA, 15 bp, Homo sapiens
tgtgagaccaaggtg

SEQ ID NO: 1834995 - DNA, 15 bp, Homo sapiens
gtgagaccaaggtgg

SEQ ID NO: 1834996 - DNA, 15 bp, Homo sapiens
tgagaccaaggtggg

SEQ ID NO: 1834997 - DNA, 15 bp, Homo sapiens
gagaccaaggtgggc

SEQ ID NO: 1834998 - DNA, 15 bp, Homo sapiens
agaccaaggtgggcg

SEQ ID NO: 1834999 - DNA, 15 bp, Homo sapiens
gaccaaggtgggcgg

SEQ ID NO: 1835000 - DNA, 15 bp, Homo sapiens
accaaggtgggcgga

SEQ ID NO: 1835001 - DNA, 15 bp, Homo sapiens
caaaattagctgggg

SEQ ID NO: 1835002 - DNA, 15 bp, Homo sapiens
aaaattagctggggt

SEQ ID NO: 1835003 - DNA, 15 bp, Homo sapiens
aaattagctggggtg

SEQ ID NO: 1835004 - DNA, 15 bp, Homo sapiens
aattagctggggtgg

SEQ ID NO: 1835005 - DNA, 15 bp, Homo sapiens
attagctggggtggt

SEQ ID NO: 1835006 - DNA, 15 bp, Homo sapiens
ttagctggggtggtg

SEQ ID NO: 1835007 - DNA, 15 bp, Homo sapiens
tagctggggtggtgg

SEQ ID NO: 1835008 - DNA, 15 bp, Homo sapiens
agctggggtggtggc

SEQ ID NO: 1835009 - DNA, 15 bp, Homo sapiens
gctggggtggtggca

SEQ ID NO: 1835010 - DNA, 15 bp, Homo sapiens
ctggggtggtggcac

SEQ ID NO: 1835011 - DNA, 15 bp, Homo sapiens
tggggtggtggcaca

SEQ ID NO: 1835012 - DNA, 15 bp, Homo sapiens
ggggtggtggcacat

SEQ ID NO: 1835013 - DNA, 15 bp, Homo sapiens
gggtggtggcacatg

SEQ ID NO: 1835014 - DNA, 15 bp, Homo sapiens
cccagctattcagga

SEQ ID NO: 1835015 - DNA, 15 bp, Homo sapiens
ccagctattcaggaa

SEQ ID NO: 1835016 - DNA, 15 bp, Homo sapiens
cagctattcaggaag

SEQ ID NO: 1835017 - DNA, 15 bp, Homo sapiens
agctattcaggaagc

SEQ ID NO: 1835018 - DNA, 15 bp, Homo sapiens
gctattcaggaagct

SEQ ID NO: 1835019 - DNA, 15 bp, Homo sapiens
ctattcaggaagctg

SEQ ID NO: 1835020 - DNA, 15 bp, Homo sapiens
tattcaggaagctga

SEQ ID NO: 1835021 - DNA, 15 bp, Homo sapiens
attcaggaagctgag

SEQ ID NO: 1835022 - DNA, 15 bp, Homo sapiens
ttcaggaagctgagg

SEQ ID NO: 1835023 - DNA, 15 bp, Homo sapiens
tcaggaagctgaggc

SEQ ID NO: 1835024 - DNA, 15 bp, Homo sapiens
caggaagctgaggca

SEQ ID NO: 1835025 - DNA, 15 bp, Homo sapiens
aggaagctgaggcag

SEQ ID NO: 1835026 - DNA, 15 bp, Homo sapiens
aggttgtggtgagct

SEQ ID NO: 1835027 - DNA, 15 bp, Homo sapiens
ggttgtggtgagctg

SEQ ID NO: 1835028 - DNA, 15 bp, Homo sapiens
gttgtggtgagctga

SEQ ID NO: 1835029 - DNA, 15 bp, Homo sapiens
ttgtggtgagctgag

SEQ ID NO: 1835030 - DNA, 15 bp, Homo sapiens
tgtggtgagctgaga

SEQ ID NO: 1835031 - DNA, 15 bp, Homo sapiens
gtggtgagctgagat

SEQ ID NO: 1835032 - DNA, 15 bp, Homo sapiens
tggtgagctgagatc

SEQ ID NO: 1835033 - DNA, 15 bp, Homo sapiens
ctgagatcgcgccat

SEQ ID NO: 1835034 - DNA, 15 bp, Homo sapiens
tgagatcgcgccatt

SEQ ID NO: 1835035 - DNA, 15 bp, Homo sapiens
agcctgggcaaaaag

SEQ ID NO: 1835036 - DNA, 15 bp, Homo sapiens
gcctgggcaaaaaga

SEQ ID NO: 1835037 - DNA, 15 bp, Homo sapiens
cctgggcaaaaagag

SEQ ID NO: 1835038 - DNA, 15 bp, Homo sapiens
ctgggcaaaaagagc

SEQ ID NO: 1835039 - DNA, 15 bp, Homo sapiens
tgggcaaaaagagcg

SEQ ID NO: 1835040 - DNA, 15 bp, Homo sapiens
gggcaaaaagagcga

SEQ ID NO: 1835041 - DNA, 15 bp, Homo sapiens
aaagagcgaaactct

SEQ ID NO: 1835042 - DNA, 15 bp, Homo sapiens
aagagcgaaactctg

SEQ ID NO: 1835043 - DNA, 15 bp, Homo sapiens
agagcgaaactctgt

SEQ ID NO: 1835044 - DNA, 15 bp, Homo sapiens
gagcgaaactctgtc

SEQ ID NO: 1835045 - DNA, 15 bp, Homo sapiens
agcgaaactctgtct

SEQ ID NO: 1835046 - DNA, 15 bp, Homo sapiens
gcgaaactctgtctc

SEQ ID NO: 1835047 - DNA, 15 bp, Homo sapiens
cgaaactctgtctca

SEQ ID NO: 1835048 - DNA, 15 bp, Homo sapiens
aaactctgtctcaaa

SEQ ID NO: 1835049 - DNA, 15 bp, Homo sapiens
aactctgtctcaaaa

SEQ ID NO: 1835050 - DNA, 15 bp, Homo sapiens
aaaaaaaaaagcagg

SEQ ID NO: 1835051 - DNA, 15 bp, Homo sapiens
aaaaaaaaagcaggc

SEQ ID NO: 1835052 - DNA, 15 bp, Homo sapiens
aaaaaaaagcaggct

SEQ ID NO: 1835053 - DNA, 15 bp, Homo sapiens
aaaaaaagcaggctt

SEQ ID NO: 1835054 - DNA, 15 bp, Homo sapiens
aaaaaagcaggctta

SEQ ID NO: 1835055 - DNA, 15 bp, Homo sapiens
aaaaagcaggcttat

SEQ ID NO: 1835056 - DNA, 15 bp, Homo sapiens
aaaagcaggcttata

SEQ ID NO: 1835057 - DNA, 15 bp, Homo sapiens
aaagcaggcttataa

SEQ ID NO: 1835058 - DNA, 15 bp, Homo sapiens
aagcaggcttataaa

SEQ ID NO: 1835059 - DNA, 15 bp, Homo sapiens
agcaggcttataaaa

SEQ ID NO: 1835060 - DNA, 15 bp, Homo sapiens
gcaggcttataaaat

SEQ ID NO: 1835061 - DNA, 15 bp, Homo sapiens
caggcttataaaata

SEQ ID NO: 1835062 - DNA, 15 bp, Homo sapiens
aggcttataaaataa

SEQ ID NO: 1835063 - DNA, 15 bp, Homo sapiens
ggcttataaaataaa

SEQ ID NO: 1835064 - DNA, 15 bp, Homo sapiens
gcttataaaataaaa

SEQ ID NO: 1835065 - DNA, 15 bp, Homo sapiens
cttataaaataaaac

SEQ ID NO: 1835066 - DNA, 15 bp, Homo sapiens
ttataaaataaaaca

SEQ ID NO: 1835067 - DNA, 15 bp, Homo sapiens
tataaaataaaacaa

SEQ ID NO: 1835068 - DNA, 15 bp, Homo sapiens
ataaaataaaacaaa

SEQ ID NO: 1835069 - DNA, 15 bp, Homo sapiens
taaaataaaacaaaa

SEQ ID NO: 1835070 - DNA, 15 bp, Homo sapiens
aaataaaacaaaaat

SEQ ID NO: 1835071 - DNA, 15 bp, Homo sapiens
aataaaacaaaaatg

SEQ ID NO: 1835072 - DNA, 15 bp, Homo sapiens
ataaaacaaaaatgt

SEQ ID NO: 1835073 - DNA, 15 bp, Homo sapiens
taaaacaaaaatgtc

SEQ ID NO: 1835074 - DNA, 15 bp, Homo sapiens
aaaacaaaaatgtcc

SEQ ID NO: 1835075 - DNA, 15 bp, Homo sapiens
aaacaaaaatgtccc

SEQ ID NO: 1835076 - DNA, 15 bp, Homo sapiens
aacaaaaatgtccct

SEQ ID NO: 1835077 - DNA, 15 bp, Homo sapiens
acaaaaatgtccctt

SEQ ID NO: 1835078 - DNA, 15 bp, Homo sapiens
caaaaatgtccctta

SEQ ID NO: 1835079 - DNA, 15 bp, Homo sapiens
aaaaatgtcccttat

SEQ ID NO: 1835080 - DNA, 15 bp, Homo sapiens
aaaatgtcccttatg

SEQ ID NO: 1835081 - DNA, 15 bp, Homo sapiens
aaatgtcccttatga

SEQ ID NO: 1835082 - DNA, 15 bp, Homo sapiens
aatgtcccttatgat

SEQ ID NO: 1835083 - DNA, 15 bp, Homo sapiens
atgtcccttatgatt

SEQ ID NO: 1835084 - DNA, 15 bp, Homo sapiens
tgtcccttatgattt

SEQ ID NO: 1835085 - DNA, 15 bp, Homo sapiens
gtcccttatgatttg

SEQ ID NO: 1835086 - DNA, 15 bp, Homo sapiens
tcccttatgatttgt

SEQ ID NO: 1835087 - DNA, 15 bp, Homo sapiens
cccttatgatttgtc

SEQ ID NO: 1835088 - DNA, 15 bp, Homo sapiens
ccttatgatttgtct

SEQ ID NO: 1835089 - DNA, 15 bp, Homo sapiens
cttatgatttgtctt

SEQ ID NO: 1835090 - DNA, 15 bp, Homo sapiens
ttatgatttgtctta

SEQ ID NO: 1835091 - DNA, 15 bp, Homo sapiens
tatgatttgtcttaa

SEQ ID NO: 1835092 - DNA, 15 bp, Homo sapiens
atgatttgtcttaaa

SEQ ID NO: 1835093 - DNA, 15 bp, Homo sapiens
tgatttgtcttaaag

SEQ ID NO: 1835094 - DNA, 15 bp, Homo sapiens
gatttgtcttaaagg

SEQ ID NO: 1835095 - DNA, 15 bp, Homo sapiens
atttgtcttaaaggt

SEQ ID NO: 1835096 - DNA, 15 bp, Homo sapiens
tttgtcttaaaggta

SEQ ID NO: 1835097 - DNA, 15 bp, Homo sapiens
ttgtcttaaaggtag

SEQ ID NO: 1835098 - DNA, 15 bp, Homo sapiens
tgtcttaaaggtagt

SEQ ID NO: 1835099 - DNA, 15 bp, Homo sapiens
gtcttaaaggtagtt

SEQ ID NO: 1835100 - DNA, 15 bp, Homo sapiens
tcttaaaggtagttg

SEQ ID NO: 1835101 - DNA, 15 bp, Homo sapiens
cttaaaggtagttga

SEQ ID NO: 1835102 - DNA, 15 bp, Homo sapiens
ttaaaggtagttgaa

SEQ ID NO: 1835103 - DNA, 15 bp, Homo sapiens
taaaggtagttgaat

SEQ ID NO: 1835104 - DNA, 15 bp, Homo sapiens
aaaggtagttgaatt

SEQ ID NO: 1835105 - DNA, 15 bp, Homo sapiens
aaggtagttgaatta

SEQ ID NO: 1835106 - DNA, 15 bp, Homo sapiens
aggtagttgaattaa

SEQ ID NO: 1835107 - DNA, 15 bp, Homo sapiens
ggtagttgaattaat

SEQ ID NO: 1835108 - DNA, 15 bp, Homo sapiens
gtagttgaattaata

SEQ ID NO: 1835109 - DNA, 15 bp, Homo sapiens
tagttgaattaataa

SEQ ID NO: 1835110 - DNA, 15 bp, Homo sapiens
agttgaattaataag

SEQ ID NO: 1835111 - DNA, 15 bp, Homo sapiens
gttgaattaataaga

SEQ ID NO: 1835112 - DNA, 15 bp, Homo sapiens
ttgaattaataagag

SEQ ID NO: 1835113 - DNA, 15 bp, Homo sapiens
tgaattaataagagc

SEQ ID NO: 1835114 - DNA, 15 bp, Homo sapiens
gaattaataagagct

SEQ ID NO: 1835115 - DNA, 15 bp, Homo sapiens
aattaataagagcta

SEQ ID NO: 1835116 - DNA, 15 bp, Homo sapiens
attaataagagctaa

SEQ ID NO: 1835117 - DNA, 15 bp, Homo sapiens
ttaataagagctaaa

SEQ ID NO: 1835118 - DNA, 15 bp, Homo sapiens
taataagagctaaat

SEQ ID NO: 1835119 - DNA, 15 bp, Homo sapiens
aataagagctaaatc

SEQ ID NO: 1835120 - DNA, 15 bp, Homo sapiens
ataagagctaaatct

SEQ ID NO: 1835121 - DNA, 15 bp, Homo sapiens
taagagctaaatcta

SEQ ID NO: 1835122 - DNA, 15 bp, Homo sapiens
aagagctaaatctag

SEQ ID NO: 1835123 - DNA, 15 bp, Homo sapiens
agagctaaatctagt

SEQ ID NO: 1835124 - DNA, 15 bp, Homo sapiens
gagctaaatctagtg

SEQ ID NO: 1835125 - DNA, 15 bp, Homo sapiens
agctaaatctagtgt

SEQ ID NO: 1835126 - DNA, 15 bp, Homo sapiens
gctaaatctagtgtc

SEQ ID NO: 1835127 - DNA, 15 bp, Homo sapiens
ctaaatctagtgtcc

SEQ ID NO: 1835128 - DNA, 15 bp, Homo sapiens
taaatctagtgtccc

SEQ ID NO: 1835129 - DNA, 15 bp, Homo sapiens
aaatctagtgtccca

SEQ ID NO: 1835130 - DNA, 15 bp, Homo sapiens
aatctagtgtcccat

SEQ ID NO: 1835131 - DNA, 15 bp, Homo sapiens
atctagtgtcccata

SEQ ID NO: 1835132 - DNA, 15 bp, Homo sapiens
tctagtgtcccatac

SEQ ID NO: 1835133 - DNA, 15 bp, Homo sapiens
ctagtgtcccataca

SEQ ID NO: 1835134 - DNA, 15 bp, Homo sapiens
tagtgtcccatacat

SEQ ID NO: 1835135 - DNA, 15 bp, Homo sapiens
agtgtcccatacatc

SEQ ID NO: 1835136 - DNA, 15 bp, Homo sapiens
gtgtcccatacatct

SEQ ID NO: 1835137 - DNA, 15 bp, Homo sapiens
tgtcccatacatctt

SEQ ID NO: 1835138 - DNA, 15 bp, Homo sapiens
gtcccatacatcttt

SEQ ID NO: 1835139 - DNA, 15 bp, Homo sapiens
tcccatacatctttg

SEQ ID NO: 1835140 - DNA, 15 bp, Homo sapiens
cccatacatctttgt

SEQ ID NO: 1835141 - DNA, 15 bp, Homo sapiens
ccatacatctttgtg

SEQ ID NO: 1835142 - DNA, 15 bp, Homo sapiens
catacatctttgtgt

SEQ ID NO: 1835143 - DNA, 15 bp, Homo sapiens
atacatctttgtgtt

SEQ ID NO: 1835144 - DNA, 15 bp, Homo sapiens
tacatctttgtgttt

SEQ ID NO: 1835145 - DNA, 15 bp, Homo sapiens
acatctttgtgtttc

SEQ ID NO: 1835146 - DNA, 15 bp, Homo sapiens
catctttgtgtttct

SEQ ID NO: 1835147 - DNA, 15 bp, Homo sapiens
atctttgtgtttctt

SEQ ID NO: 1835148 - DNA, 15 bp, Homo sapiens
tctttgtgtttctta

SEQ ID NO: 1835149 - DNA, 15 bp, Homo sapiens
ctttgtgtttcttac

SEQ ID NO: 1835150 - DNA, 15 bp, Homo sapiens
tttgtgtttcttact

SEQ ID NO: 1835151 - DNA, 15 bp, Homo sapiens
ttgtgtttcttactc

SEQ ID NO: 1835152 - DNA, 15 bp, Homo sapiens
tgtgtttcttactct

SEQ ID NO: 1835153 - DNA, 15 bp, Homo sapiens
gtgtttcttactcta

SEQ ID NO: 1835154 - DNA, 15 bp, Homo sapiens
gtttcttactctacc

SEQ ID NO: 1835155 - DNA, 15 bp, Homo sapiens
tttcttactctaccc

SEQ ID NO: 1835156 - DNA, 15 bp, Homo sapiens
ttcttactctaccct

SEQ ID NO: 1835157 - DNA, 15 bp, Homo sapiens
tcttactctaccctt

SEQ ID NO: 1835158 - DNA, 15 bp, Homo sapiens
cttactctacccttt

SEQ ID NO: 1835159 - DNA, 15 bp, Homo sapiens
ttactctacccttta

SEQ ID NO: 1835160 - DNA, 15 bp, Homo sapiens
tactctaccctttag

SEQ ID NO: 1835161 - DNA, 15 bp, Homo sapiens
actctaccctttaga

SEQ ID NO: 1835162 - DNA, 15 bp, Homo sapiens
ctctaccctttagaa

SEQ ID NO: 1835163 - DNA, 15 bp, Homo sapiens
tctaccctttagaaa

SEQ ID NO: 1835164 - DNA, 15 bp, Homo sapiens
ctaccctttagaaag

SEQ ID NO: 1835165 - DNA, 15 bp, Homo sapiens
taccctttagaaagg

SEQ ID NO: 1835166 - DNA, 15 bp, Homo sapiens
accctttagaaaggg

SEQ ID NO: 1835167 - DNA, 15 bp, Homo sapiens
ccctttagaaagggt

SEQ ID NO: 1835168 - DNA, 15 bp, Homo sapiens
cctttagaaagggtg

SEQ ID NO: 1835169 - DNA, 15 bp, Homo sapiens
ctttagaaagggtgg

SEQ ID NO: 1835170 - DNA, 15 bp, Homo sapiens
tttagaaagggtggg

SEQ ID NO: 1835171 - DNA, 15 bp, Homo sapiens
ttagaaagggtgggg

SEQ ID NO: 1835172 - DNA, 15 bp, Homo sapiens
tagaaagggtggggg

SEQ ID NO: 1835173 - DNA, 15 bp, Homo sapiens
agaaagggtgggggt

SEQ ID NO: 1835174 - DNA, 15 bp, Homo sapiens
gaaagggtgggggtg

SEQ ID NO: 1835175 - DNA, 15 bp, Homo sapiens
aaagggtgggggtgg

SEQ ID NO: 1835176 - DNA, 15 bp, Homo sapiens
aagggtgggggtgga

SEQ ID NO: 1835177 - DNA, 15 bp, Homo sapiens
agggtgggggtggac

SEQ ID NO: 1835178 - DNA, 15 bp, Homo sapiens
gggtgggggtggacg

SEQ ID NO: 1835179 - DNA, 15 bp, Homo sapiens
ggtgggggtggacgt

SEQ ID NO: 1835180 - DNA, 15 bp, Homo sapiens
gtgggggtggacgtg

SEQ ID NO: 1835181 - DNA, 15 bp, Homo sapiens
tgggggtggacgtgg

SEQ ID NO: 1835182 - DNA, 15 bp, Homo sapiens
gggggtggacgtgga

SEQ ID NO: 1835183 - DNA, 15 bp, Homo sapiens
ggggtggacgtggat

SEQ ID NO: 1835184 - DNA, 15 bp, Homo sapiens
gggtggacgtggata

SEQ ID NO: 1835185 - DNA, 15 bp, Homo sapiens
ggtggacgtggataa

SEQ ID NO: 1835186 - DNA, 15 bp, Homo sapiens
gtggacgtggataag

SEQ ID NO: 1835187 - DNA, 15 bp, Homo sapiens
tggacgtggataagg

SEQ ID NO: 1835188 - DNA, 15 bp, Homo sapiens
ggacgtggataaggc

SEQ ID NO: 1835189 - DNA, 15 bp, Homo sapiens
gacgtggataaggca

SEQ ID NO: 1835190 - DNA, 15 bp, Homo sapiens
acgtggataaggcac

SEQ ID NO: 1835191 - DNA, 15 bp, Homo sapiens
cgtggataaggcaca

SEQ ID NO: 1835192 - DNA, 15 bp, Homo sapiens
gtggataaggcacac

SEQ ID NO: 1835193 - DNA, 15 bp, Homo sapiens
tggataaggcacaca

SEQ ID NO: 1835194 - DNA, 15 bp, Homo sapiens
ggataaggcacacag

SEQ ID NO: 1835195 - DNA, 15 bp, Homo sapiens
gataaggcacacagt

SEQ ID NO: 1835196 - DNA, 15 bp, Homo sapiens
ataaggcacacagtt

SEQ ID NO: 1835197 - DNA, 15 bp, Homo sapiens
taaggcacacagtta

SEQ ID NO: 1835198 - DNA, 15 bp, Homo sapiens
aaggcacacagttaa

SEQ ID NO: 1835199 - DNA, 15 bp, Homo sapiens
aggcacacagttaat

SEQ ID NO: 1835200 - DNA, 15 bp, Homo sapiens
gcacacagttaattc

SEQ ID NO: 1835201 - DNA, 15 bp, Homo sapiens
cacacagttaattca

SEQ ID NO: 1835202 - DNA, 15 bp, Homo sapiens
acacagttaattcag

SEQ ID NO: 1835203 - DNA, 15 bp, Homo sapiens
cacagttaattcagg

SEQ ID NO: 1835204 - DNA, 15 bp, Homo sapiens
acagttaattcaggg

SEQ ID NO: 1835205 - DNA, 15 bp, Homo sapiens
cagttaattcaggga

SEQ ID NO: 1835206 - DNA, 15 bp, Homo sapiens
agttaattcagggac

SEQ ID NO: 1835207 - DNA, 15 bp, Homo sapiens
gttaattcagggacg

SEQ ID NO: 1835208 - DNA, 15 bp, Homo sapiens
ttaattcagggacgg

SEQ ID NO: 1835209 - DNA, 15 bp, Homo sapiens
taattcagggacggt

SEQ ID NO: 1835210 - DNA, 15 bp, Homo sapiens
aattcagggacggtg

SEQ ID NO: 1835211 - DNA, 15 bp, Homo sapiens
attcagggacggtgg

SEQ ID NO: 1835212 - DNA, 15 bp, Homo sapiens
ttcagggacggtgga

SEQ ID NO: 1835213 - DNA, 15 bp, Homo sapiens
tcagggacggtggag

SEQ ID NO: 1835214 - DNA, 15 bp, Homo sapiens
cagggacggtggagt

SEQ ID NO: 1835215 - DNA, 15 bp, Homo sapiens
agggacggtggagtc

SEQ ID NO: 1835216 - DNA, 15 bp, Homo sapiens
gggacggtggagtct

SEQ ID NO: 1835217 - DNA, 15 bp, Homo sapiens
ggacggtggagtctt

SEQ ID NO: 1835218 - DNA, 15 bp, Homo sapiens
gacggtggagtcttg

SEQ ID NO: 1835219 - DNA, 15 bp, Homo sapiens
acggtggagtcttgg

SEQ ID NO: 1835220 - DNA, 15 bp, Homo sapiens
cggtggagtcttggt

SEQ ID NO: 1835221 - DNA, 15 bp, Homo sapiens
ggtggagtcttggta

SEQ ID NO: 1835222 - DNA, 15 bp, Homo sapiens
gtggagtcttggtac

SEQ ID NO: 1835223 - DNA, 15 bp, Homo sapiens
tggagtcttggtact

SEQ ID NO: 1835224 - DNA, 15 bp, Homo sapiens
ggagtcttggtactt

SEQ ID NO: 1835225 - DNA, 15 bp, Homo sapiens
gagtcttggtacttg

SEQ ID NO: 1835226 - DNA, 15 bp, Homo sapiens
agtcttggtacttgc

SEQ ID NO: 1835227 - DNA, 15 bp, Homo sapiens
gtcttggtacttgct

SEQ ID NO: 1835228 - DNA, 15 bp, Homo sapiens
tcttggtacttgctc

SEQ ID NO: 1835229 - DNA, 15 bp, Homo sapiens
cttggtacttgctct

SEQ ID NO: 1835230 - DNA, 15 bp, Homo sapiens
ttggtacttgctctt

SEQ ID NO: 1835231 - DNA, 15 bp, Homo sapiens
tggtacttgctcttt

SEQ ID NO: 1835232 - DNA, 15 bp, Homo sapiens
ggtacttgctctttt

SEQ ID NO: 1835233 - DNA, 15 bp, Homo sapiens
gtacttgctcttttt

SEQ ID NO: 1835234 - DNA, 15 bp, Homo sapiens
tacttgctctttttc

SEQ ID NO: 1835235 - DNA, 15 bp, Homo sapiens
acttgctctttttcc

SEQ ID NO: 1835236 - DNA, 15 bp, Homo sapiens
cttgctctttttccc

SEQ ID NO: 1835237 - DNA, 15 bp, Homo sapiens
ttgctctttttccct

SEQ ID NO: 1835238 - DNA, 15 bp, Homo sapiens
tgctctttttccctg

SEQ ID NO: 1835239 - DNA, 15 bp, Homo sapiens
gctctttttccctga

SEQ ID NO: 1835240 - DNA, 15 bp, Homo sapiens
ctctttttccctgac

SEQ ID NO: 1835241 - DNA, 15 bp, Homo sapiens
tctttttccctgacc

SEQ ID NO: 1835242 - DNA, 15 bp, Homo sapiens
ctttttccctgacct

SEQ ID NO: 1835243 - DNA, 15 bp, Homo sapiens
tttttccctgacctt

SEQ ID NO: 1835244 - DNA, 15 bp, Homo sapiens
ttttccctgaccttg

SEQ ID NO: 1835245 - DNA, 15 bp, Homo sapiens
tttccctgaccttgc

SEQ ID NO: 1835246 - DNA, 15 bp, Homo sapiens
ttccctgaccttgct

SEQ ID NO: 1835247 - DNA, 15 bp, Homo sapiens
tccctgaccttgctt

SEQ ID NO: 1835248 - DNA, 15 bp, Homo sapiens
ccctgaccttgcttt

SEQ ID NO: 1835249 - DNA, 15 bp, Homo sapiens
cctgaccttgctttg

SEQ ID NO: 1835250 - DNA, 15 bp, Homo sapiens
ctgaccttgctttgg

SEQ ID NO: 1835251 - DNA, 15 bp, Homo sapiens
tgaccttgctttgga

SEQ ID NO: 1835252 - DNA, 15 bp, Homo sapiens
gaccttgctttggag

SEQ ID NO: 1835253 - DNA, 15 bp, Homo sapiens
accttgctttggagt

SEQ ID NO: 1835254 - DNA, 15 bp, Homo sapiens
ccttgctttggagtt

SEQ ID NO: 1835255 - DNA, 15 bp, Homo sapiens
cttgctttggagtta

SEQ ID NO: 1835256 - DNA, 15 bp, Homo sapiens
ttgctttggagttat

SEQ ID NO: 1835257 - DNA, 15 bp, Homo sapiens
tgctttggagttatt

SEQ ID NO: 1835258 - DNA, 15 bp, Homo sapiens
gctttggagttattt

SEQ ID NO: 1835259 - DNA, 15 bp, Homo sapiens
ctttggagttatttt

SEQ ID NO: 1835260 - DNA, 15 bp, Homo sapiens
tttggagttatttta

SEQ ID NO: 1835261 - DNA, 15 bp, Homo sapiens
ttggagttattttat

SEQ ID NO: 1835262 - DNA, 15 bp, Homo sapiens
tggagttattttatt

SEQ ID NO: 1835263 - DNA, 15 bp, Homo sapiens
ggagttattttattt

SEQ ID NO: 1835264 - DNA, 15 bp, Homo sapiens
gagttattttatttt

SEQ ID NO: 1835265 - DNA, 15 bp, Homo sapiens
agttattttattttt

SEQ ID NO: 1835266 - DNA, 15 bp, Homo sapiens
gttattttatttttt

SEQ ID NO: 1835267 - DNA, 15 bp, Homo sapiens
attttattttttaaa

SEQ ID NO: 1835268 - DNA, 15 bp, Homo sapiens
ttttattttttaaat

SEQ ID NO: 1835269 - DNA, 15 bp, Homo sapiens
tttattttttaaatt

SEQ ID NO: 1835270 - DNA, 15 bp, Homo sapiens
ttattttttaaattc

SEQ ID NO: 1835271 - DNA, 15 bp, Homo sapiens
tattttttaaattct

SEQ ID NO: 1835272 - DNA, 15 bp, Homo sapiens
attttttaaattctg

SEQ ID NO: 1835273 - DNA, 15 bp, Homo sapiens
ttttttaaattctgc

SEQ ID NO: 1835274 - DNA, 15 bp, Homo sapiens
tttttaaattctgca

SEQ ID NO: 1835275 - DNA, 15 bp, Homo sapiens
ttttaaattctgcat

SEQ ID NO: 1835276 - DNA, 15 bp, Homo sapiens
tttaaattctgcatt

SEQ ID NO: 1835277 - DNA, 15 bp, Homo sapiens
ttaaattctgcattt

SEQ ID NO: 1835278 - DNA, 15 bp, Homo sapiens
taaattctgcatttg

SEQ ID NO: 1835279 - DNA, 15 bp, Homo sapiens
aaattctgcatttgg

SEQ ID NO: 1835280 - DNA, 15 bp, Homo sapiens
aattctgcatttggc

SEQ ID NO: 1835281 - DNA, 15 bp, Homo sapiens
attctgcatttggca

SEQ ID NO: 1835282 - DNA, 15 bp, Homo sapiens
ttctgcatttggcat

SEQ ID NO: 1835283 - DNA, 15 bp, Homo sapiens
tctgcatttggcatg

SEQ ID NO: 1835284 - DNA, 15 bp, Homo sapiens
ctgcatttggcatgc

SEQ ID NO: 1835285 - DNA, 15 bp, Homo sapiens
tgcatttggcatgct

SEQ ID NO: 1835286 - DNA, 15 bp, Homo sapiens
gcatttggcatgcta

SEQ ID NO: 1835287 - DNA, 15 bp, Homo sapiens
catttggcatgctat

SEQ ID NO: 1835288 - DNA, 15 bp, Homo sapiens
atttggcatgctatt

SEQ ID NO: 1835289 - DNA, 15 bp, Homo sapiens
tttggcatgctatta

SEQ ID NO: 1835290 - DNA, 15 bp, Homo sapiens
ttggcatgctattat

SEQ ID NO: 1835291 - DNA, 15 bp, Homo sapiens
tggcatgctattatc

SEQ ID NO: 1835292 - DNA, 15 bp, Homo sapiens
ggcatgctattatca

SEQ ID NO: 1835293 - DNA, 15 bp, Homo sapiens
gcatgctattatcac

SEQ ID NO: 1835294 - DNA, 15 bp, Homo sapiens
catgctattatcact

SEQ ID NO: 1835295 - DNA, 15 bp, Homo sapiens
atgctattatcactt

SEQ ID NO: 1835296 - DNA, 15 bp, Homo sapiens
tgctattatcacttg

SEQ ID NO: 1835297 - DNA, 15 bp, Homo sapiens
gctattatcacttgc

SEQ ID NO: 1835298 - DNA, 15 bp, Homo sapiens
ctattatcacttgct

SEQ ID NO: 1835299 - DNA, 15 bp, Homo sapiens
tattatcacttgctt

SEQ ID NO: 1835300 - DNA, 15 bp, Homo sapiens
attatcacttgctta

SEQ ID NO: 1835301 - DNA, 15 bp, Homo sapiens
ttatcacttgcttac

SEQ ID NO: 1835302 - DNA, 15 bp, Homo sapiens
tatcacttgcttact

SEQ ID NO: 1835303 - DNA, 15 bp, Homo sapiens
atcacttgcttacta

SEQ ID NO: 1835304 - DNA, 15 bp, Homo sapiens
tcacttgcttactat

SEQ ID NO: 1835305 - DNA, 15 bp, Homo sapiens
cacttgcttactatt

SEQ ID NO: 1835306 - DNA, 15 bp, Homo sapiens
acttgcttactatta

SEQ ID NO: 1835307 - DNA, 15 bp, Homo sapiens
cttgcttactattat

SEQ ID NO: 1835308 - DNA, 15 bp, Homo sapiens
ttgcttactattata

SEQ ID NO: 1835309 - DNA, 15 bp, Homo sapiens
tgcttactattatag

SEQ ID NO: 1835310 - DNA, 15 bp, Homo sapiens
gcttactattatagg

SEQ ID NO: 1835311 - DNA, 15 bp, Homo sapiens
cttactattataggt

SEQ ID NO: 1835312 - DNA, 15 bp, Homo sapiens
ttactattataggtc

SEQ ID NO: 1835313 - DNA, 15 bp, Homo sapiens
tactattataggtcc

SEQ ID NO: 1835314 - DNA, 15 bp, Homo sapiens
actattataggtcct

SEQ ID NO: 1835315 - DNA, 15 bp, Homo sapiens
ctattataggtccta

SEQ ID NO: 1835316 - DNA, 15 bp, Homo sapiens
tattataggtcctat

SEQ ID NO: 1835317 - DNA, 15 bp, Homo sapiens
attataggtcctatt

SEQ ID NO: 1835318 - DNA, 15 bp, Homo sapiens
ttataggtcctattt

SEQ ID NO: 1835319 - DNA, 15 bp, Homo sapiens
tataggtcctatttt

SEQ ID NO: 1835320 - DNA, 15 bp, Homo sapiens
ataggtcctatttta

SEQ ID NO: 1835321 - DNA, 15 bp, Homo sapiens
taggtcctattttat

SEQ ID NO: 1835322 - DNA, 15 bp, Homo sapiens
aggtcctattttatc

SEQ ID NO: 1835323 - DNA, 15 bp, Homo sapiens
ggtcctattttatct

SEQ ID NO: 1835324 - DNA, 15 bp, Homo sapiens
gtcctattttatctg

SEQ ID NO: 1835325 - DNA, 15 bp, Homo sapiens
tcctattttatctgt

SEQ ID NO: 1835326 - DNA, 15 bp, Homo sapiens
cctattttatctgtt

SEQ ID NO: 1835327 - DNA, 15 bp, Homo sapiens
ctattttatctgttg

SEQ ID NO: 1835328 - DNA, 15 bp, Homo sapiens
tattttatctgttgc

SEQ ID NO: 1835329 - DNA, 15 bp, Homo sapiens
attttatctgttgcc

SEQ ID NO: 1835330 - DNA, 15 bp, Homo sapiens
ttttatctgttgcct

SEQ ID NO: 1835331 - DNA, 15 bp, Homo sapiens
tttatctgttgccta

SEQ ID NO: 1835332 - DNA, 15 bp, Homo sapiens
ttatctgttgcctag

SEQ ID NO: 1835333 - DNA, 15 bp, Homo sapiens
tatctgttgcctagc

SEQ ID NO: 1835334 - DNA, 15 bp, Homo sapiens
atctgttgcctagca

SEQ ID NO: 1835335 - DNA, 15 bp, Homo sapiens
tctgttgcctagcat

SEQ ID NO: 1835336 - DNA, 15 bp, Homo sapiens
ctgttgcctagcata

SEQ ID NO: 1835337 - DNA, 15 bp, Homo sapiens
tgttgcctagcatat

SEQ ID NO: 1835338 - DNA, 15 bp, Homo sapiens
gttgcctagcatatt

SEQ ID NO: 1835339 - DNA, 15 bp, Homo sapiens
ttgcctagcatattc

SEQ ID NO: 1835340 - DNA, 15 bp, Homo sapiens
tgcctagcatattct

SEQ ID NO: 1835341 - DNA, 15 bp, Homo sapiens
gcctagcatattctc

SEQ ID NO: 1835342 - DNA, 15 bp, Homo sapiens
cctagcatattctca

SEQ ID NO: 1835343 - DNA, 15 bp, Homo sapiens
ctagcatattctcat

SEQ ID NO: 1835344 - DNA, 15 bp, Homo sapiens
tagcatattctcata

SEQ ID NO: 1835345 - DNA, 15 bp, Homo sapiens
agcatattctcatag

SEQ ID NO: 1835346 - DNA, 15 bp, Homo sapiens
gcatattctcatagt

SEQ ID NO: 1835347 - DNA, 15 bp, Homo sapiens
catattctcatagtg

SEQ ID NO: 1835348 - DNA, 15 bp, Homo sapiens
atattctcatagtgc

SEQ ID NO: 1835349 - DNA, 15 bp, Homo sapiens
tattctcatagtgcc

SEQ ID NO: 1835350 - DNA, 15 bp, Homo sapiens
attctcatagtgcct

SEQ ID NO: 1835351 - DNA, 15 bp, Homo sapiens
ttctcatagtgccta

SEQ ID NO: 1835352 - DNA, 15 bp, Homo sapiens
tctcatagtgcctaa

SEQ ID NO: 1835353 - DNA, 15 bp, Homo sapiens
ctcatagtgcctaaa

SEQ ID NO: 1835354 - DNA, 15 bp, Homo sapiens
tcatagtgcctaaaa

SEQ ID NO: 1835355 - DNA, 15 bp, Homo sapiens
catagtgcctaaaat

SEQ ID NO: 1835356 - DNA, 15 bp, Homo sapiens
atagtgcctaaaata

SEQ ID NO: 1835357 - DNA, 15 bp, Homo sapiens
tagtgcctaaaatac

SEQ ID NO: 1835358 - DNA, 15 bp, Homo sapiens
agtgcctaaaatact

SEQ ID NO: 1835359 - DNA, 15 bp, Homo sapiens
gtgcctaaaatactc

SEQ ID NO: 1835360 - DNA, 15 bp, Homo sapiens
tgcctaaaatactct

SEQ ID NO: 1835361 - DNA, 15 bp, Homo sapiens
gcctaaaatactcta

SEQ ID NO: 1835362 - DNA, 15 bp, Homo sapiens
cctaaaatactctaa

SEQ ID NO: 1835363 - DNA, 15 bp, Homo sapiens
ctaaaatactctaaa

SEQ ID NO: 1835364 - DNA, 15 bp, Homo sapiens
taaaatactctaaaa

SEQ ID NO: 1835365 - DNA, 15 bp, Homo sapiens
aaaatactctaaaag

SEQ ID NO: 1835366 - DNA, 15 bp, Homo sapiens
aaatactctaaaagc

SEQ ID NO: 1835367 - DNA, 15 bp, Homo sapiens
aatactctaaaagct

SEQ ID NO: 1835368 - DNA, 15 bp, Homo sapiens
atactctaaaagcta

SEQ ID NO: 1835369 - DNA, 15 bp, Homo sapiens
tactctaaaagctat

SEQ ID NO: 1835370 - DNA, 15 bp, Homo sapiens
actctaaaagctatt

SEQ ID NO: 1835371 - DNA, 15 bp, Homo sapiens
ctctaaaagctattt

SEQ ID NO: 1835372 - DNA, 15 bp, Homo sapiens
ctaaaagctatttcc

SEQ ID NO: 1835373 - DNA, 15 bp, Homo sapiens
taaaagctatttcca

SEQ ID NO: 1835374 - DNA, 15 bp, Homo sapiens
aaaagctatttccag

SEQ ID NO: 1835375 - DNA, 15 bp, Homo sapiens
aaagctatttccaga

SEQ ID NO: 1835376 - DNA, 15 bp, Homo sapiens
aagctatttccagag

SEQ ID NO: 1835377 - DNA, 15 bp, Homo sapiens
agctatttccagagg

SEQ ID NO: 1835378 - DNA, 15 bp, Homo sapiens
gctatttccagaggg

SEQ ID NO: 1835379 - DNA, 15 bp, Homo sapiens
ctatttccagaggga

SEQ ID NO: 1835380 - DNA, 15 bp, Homo sapiens
tatttccagagggag

SEQ ID NO: 1835381 - DNA, 15 bp, Homo sapiens
atttccagagggagc

SEQ ID NO: 1835382 - DNA, 15 bp, Homo sapiens
tttccagagggagct

SEQ ID NO: 1835383 - DNA, 15 bp, Homo sapiens
ttccagagggagctt

SEQ ID NO: 1835384 - DNA, 15 bp, Homo sapiens
tccagagggagcttt

SEQ ID NO: 1835385 - DNA, 15 bp, Homo sapiens
ccagagggagcttta

SEQ ID NO: 1835386 - DNA, 15 bp, Homo sapiens
cagagggagctttaa

SEQ ID NO: 1835387 - DNA, 15 bp, Homo sapiens
agagggagctttaat

SEQ ID NO: 1835388 - DNA, 15 bp, Homo sapiens
gagggagctttaatg

SEQ ID NO: 1835389 - DNA, 15 bp, Homo sapiens
agggagctttaatga

SEQ ID NO: 1835390 - DNA, 15 bp, Homo sapiens
gggagctttaatgag

SEQ ID NO: 1835391 - DNA, 15 bp, Homo sapiens
ggagctttaatgaga

SEQ ID NO: 1835392 - DNA, 15 bp, Homo sapiens
gagctttaatgagac

SEQ ID NO: 1835393 - DNA, 15 bp, Homo sapiens
agctttaatgagaca

SEQ ID NO: 1835394 - DNA, 15 bp, Homo sapiens
gctttaatgagacat

SEQ ID NO: 1835395 - DNA, 15 bp, Homo sapiens
ctttaatgagacata

SEQ ID NO: 1835396 - DNA, 15 bp, Homo sapiens
tttaatgagacatac

SEQ ID NO: 1835397 - DNA, 15 bp, Homo sapiens
ttaatgagacataca

SEQ ID NO: 1835398 - DNA, 15 bp, Homo sapiens
taatgagacatacaa

SEQ ID NO: 1835399 - DNA, 15 bp, Homo sapiens
aatgagacatacaat

SEQ ID NO: 1835400 - DNA, 15 bp, Homo sapiens
atgagacatacaatg

SEQ ID NO: 1835401 - DNA, 15 bp, Homo sapiens
tgagacatacaatgc

SEQ ID NO: 1835402 - DNA, 15 bp, Homo sapiens
gagacatacaatgct

SEQ ID NO: 1835403 - DNA, 15 bp, Homo sapiens
agacatacaatgctt

SEQ ID NO: 1835404 - DNA, 15 bp, Homo sapiens
gacatacaatgctta

SEQ ID NO: 1835405 - DNA, 15 bp, Homo sapiens
acatacaatgcttaa

SEQ ID NO: 1835406 - DNA, 15 bp, Homo sapiens
catacaatgcttaat

SEQ ID NO: 1835407 - DNA, 15 bp, Homo sapiens
atacaatgcttaatc

SEQ ID NO: 1835408 - DNA, 15 bp, Homo sapiens
tacaatgcttaatct

SEQ ID NO: 1835409 - DNA, 15 bp, Homo sapiens
acaatgcttaatctc

SEQ ID NO: 1835410 - DNA, 15 bp, Homo sapiens
caatgcttaatctct

SEQ ID NO: 1835411 - DNA, 15 bp, Homo sapiens
aatgcttaatctctc

SEQ ID NO: 1835412 - DNA, 15 bp, Homo sapiens
atgcttaatctctca

SEQ ID NO: 1835413 - DNA, 15 bp, Homo sapiens
tgcttaatctctcaa

SEQ ID NO: 1835414 - DNA, 15 bp, Homo sapiens
gcttaatctctcaaa

SEQ ID NO: 1835415 - DNA, 15 bp, Homo sapiens
cttaatctctcaaat

SEQ ID NO: 1835416 - DNA, 15 bp, Homo sapiens
ttaatctctcaaatg

SEQ ID NO: 1835417 - DNA, 15 bp, Homo sapiens
taatctctcaaatgt

SEQ ID NO: 1835418 - DNA, 15 bp, Homo sapiens
aatctctcaaatgta

SEQ ID NO: 1835419 - DNA, 15 bp, Homo sapiens
atctctcaaatgtaa

SEQ ID NO: 1835420 - DNA, 15 bp, Homo sapiens
tctctcaaatgtaaa

SEQ ID NO: 1835421 - DNA, 15 bp, Homo sapiens
ctctcaaatgtaaat

SEQ ID NO: 1835422 - DNA, 15 bp, Homo sapiens
tctcaaatgtaaatg

SEQ ID NO: 1835423 - DNA, 15 bp, Homo sapiens
ctcaaatgtaaatgt

SEQ ID NO: 1835424 - DNA, 15 bp, Homo sapiens
tcaaatgtaaatgta

SEQ ID NO: 1835425 - DNA, 15 bp, Homo sapiens
caaatgtaaatgtac

SEQ ID NO: 1835426 - DNA, 15 bp, Homo sapiens
aaatgtaaatgtact

SEQ ID NO: 1835427 - DNA, 15 bp, Homo sapiens
aatgtaaatgtacta

SEQ ID NO: 1835428 - DNA, 15 bp, Homo sapiens
atgtaaatgtactag

SEQ ID NO: 1835429 - DNA, 15 bp, Homo sapiens
tgtaaatgtactaga

SEQ ID NO: 1835430 - DNA, 15 bp, Homo sapiens
gtaaatgtactagaa

SEQ ID NO: 1835431 - DNA, 15 bp, Homo sapiens
taaatgtactagaac

SEQ ID NO: 1835432 - DNA, 15 bp, Homo sapiens
aaatgtactagaaca

SEQ ID NO: 1835433 - DNA, 15 bp, Homo sapiens
aatgtactagaacaa

SEQ ID NO: 1835434 - DNA, 15 bp, Homo sapiens
atgtactagaacaaa

SEQ ID NO: 1835435 - DNA, 15 bp, Homo sapiens
tgtactagaacaaag

SEQ ID NO: 1835436 - DNA, 15 bp, Homo sapiens
gtactagaacaaagc

SEQ ID NO: 1835437 - DNA, 15 bp, Homo sapiens
tactagaacaaagca

SEQ ID NO: 1835438 - DNA, 15 bp, Homo sapiens
actagaacaaagcat

SEQ ID NO: 1835439 - DNA, 15 bp, Homo sapiens
ctagaacaaagcatt

SEQ ID NO: 1835440 - DNA, 15 bp, Homo sapiens
tagaacaaagcattc

SEQ ID NO: 1835441 - DNA, 15 bp, Homo sapiens
agaacaaagcattct

SEQ ID NO: 1835442 - DNA, 15 bp, Homo sapiens
gaacaaagcattctg

SEQ ID NO: 1835443 - DNA, 15 bp, Homo sapiens
aacaaagcattctgg

SEQ ID NO: 1835444 - DNA, 15 bp, Homo sapiens
acaaagcattctggg

SEQ ID NO: 1835445 - DNA, 15 bp, Homo sapiens
caaagcattctgggg

SEQ ID NO: 1835446 - DNA, 15 bp, Homo sapiens
aaagcattctgggga

SEQ ID NO: 1835447 - DNA, 15 bp, Homo sapiens
aagcattctggggaa

SEQ ID NO: 1835448 - DNA, 15 bp, Homo sapiens
agcattctggggaag

SEQ ID NO: 1835449 - DNA, 15 bp, Homo sapiens
gcattctggggaaga

SEQ ID NO: 1835450 - DNA, 15 bp, Homo sapiens
cattctggggaagaa

SEQ ID NO: 1835451 - DNA, 15 bp, Homo sapiens
attctggggaagaaa

SEQ ID NO: 1835452 - DNA, 15 bp, Homo sapiens
ttctggggaagaaaa

SEQ ID NO: 1835453 - DNA, 15 bp, Homo sapiens
tctggggaagaaaac

SEQ ID NO: 1835454 - DNA, 15 bp, Homo sapiens
ctggggaagaaaaca

SEQ ID NO: 1835455 - DNA, 15 bp, Homo sapiens
tggggaagaaaacag

SEQ ID NO: 1835456 - DNA, 15 bp, Homo sapiens
ggggaagaaaacagt

SEQ ID NO: 1835457 - DNA, 15 bp, Homo sapiens
gggaagaaaacagtg

SEQ ID NO: 1835458 - DNA, 15 bp, Homo sapiens
ggaagaaaacagtgg

SEQ ID NO: 1835459 - DNA, 15 bp, Homo sapiens
gaagaaaacagtggt

SEQ ID NO: 1835460 - DNA, 15 bp, Homo sapiens
aagaaaacagtggtt

SEQ ID NO: 1835461 - DNA, 15 bp, Homo sapiens
agaaaacagtggttg

SEQ ID NO: 1835462 - DNA, 15 bp, Homo sapiens
gaaaacagtggttga

SEQ ID NO: 1835463 - DNA, 15 bp, Homo sapiens
aaaacagtggttgat

SEQ ID NO: 1835464 - DNA, 15 bp, Homo sapiens
aaacagtggttgatt

SEQ ID NO: 1835465 - DNA, 15 bp, Homo sapiens
aacagtggttgattt

SEQ ID NO: 1835466 - DNA, 15 bp, Homo sapiens
acagtggttgattta

SEQ ID NO: 1835467 - DNA, 15 bp, Homo sapiens
cagtggttgatttaa

SEQ ID NO: 1835468 - DNA, 15 bp, Homo sapiens
agtggttgatttaac

SEQ ID NO: 1835469 - DNA, 15 bp, Homo sapiens
gtggttgatttaact

SEQ ID NO: 1835470 - DNA, 15 bp, Homo sapiens
tggttgatttaactg

SEQ ID NO: 1835471 - DNA, 15 bp, Homo sapiens
ggttgatttaactga

SEQ ID NO: 1835472 - DNA, 15 bp, Homo sapiens
gttgatttaactgaa

SEQ ID NO: 1835473 - DNA, 15 bp, Homo sapiens
ttgatttaactgaac

SEQ ID NO: 1835474 - DNA, 15 bp, Homo sapiens
tgatttaactgaact

SEQ ID NO: 1835475 - DNA, 15 bp, Homo sapiens
gatttaactgaactc

SEQ ID NO: 1835476 - DNA, 15 bp, Homo sapiens
atttaactgaactca

SEQ ID NO: 1835477 - DNA, 15 bp, Homo sapiens
tttaactgaactcac

SEQ ID NO: 1835478 - DNA, 15 bp, Homo sapiens
ttaactgaactcact

SEQ ID NO: 1835479 - DNA, 15 bp, Homo sapiens
taactgaactcactt

SEQ ID NO: 1835480 - DNA, 15 bp, Homo sapiens
aactgaactcacttt

SEQ ID NO: 1835481 - DNA, 15 bp, Homo sapiens
actgaactcactttt

SEQ ID NO: 1835482 - DNA, 15 bp, Homo sapiens
ctgaactcacttttc

SEQ ID NO: 1835483 - DNA, 15 bp, Homo sapiens
tgaactcacttttcc

SEQ ID NO: 1835484 - DNA, 15 bp, Homo sapiens
gaactcacttttcca

SEQ ID NO: 1835485 - DNA, 15 bp, Homo sapiens
aactcacttttccaa

SEQ ID NO: 1835486 - DNA, 15 bp, Homo sapiens
actcacttttccaaa

SEQ ID NO: 1835487 - DNA, 15 bp, Homo sapiens
ctcacttttccaaaa

SEQ ID NO: 1835488 - DNA, 15 bp, Homo sapiens
tcacttttccaaaac

SEQ ID NO: 1835489 - DNA, 15 bp, Homo sapiens
cacttttccaaaaca

SEQ ID NO: 1835490 - DNA, 15 bp, Homo sapiens
acttttccaaaacag

SEQ ID NO: 1835491 - DNA, 15 bp, Homo sapiens
cttttccaaaacagt

SEQ ID NO: 1835492 - DNA, 15 bp, Homo sapiens
ttttccaaaacagtg

SEQ ID NO: 1835493 - DNA, 15 bp, Homo sapiens
tttccaaaacagtgg

SEQ ID NO: 1835494 - DNA, 15 bp, Homo sapiens
ttccaaaacagtggc

SEQ ID NO: 1835495 - DNA, 15 bp, Homo sapiens
tccaaaacagtggct

SEQ ID NO: 1835496 - DNA, 15 bp, Homo sapiens
ccaaaacagtggctt

SEQ ID NO: 1835497 - DNA, 15 bp, Homo sapiens
caaaacagtggcttt

SEQ ID NO: 1835498 - DNA, 15 bp, Homo sapiens
aaaacagtggctttt

SEQ ID NO: 1835499 - DNA, 15 bp, Homo sapiens
aaacagtggcttttg

SEQ ID NO: 1835500 - DNA, 15 bp, Homo sapiens
aacagtggcttttga

SEQ ID NO: 1835501 - DNA, 15 bp, Homo sapiens
acagtggcttttgat

SEQ ID NO: 1835502 - DNA, 15 bp, Homo sapiens
cagtggcttttgatt

SEQ ID NO: 1835503 - DNA, 15 bp, Homo sapiens
agtggcttttgattt

SEQ ID NO: 1835504 - DNA, 15 bp, Homo sapiens
gtggcttttgatttt

SEQ ID NO: 1835505 - DNA, 15 bp, Homo sapiens
tggcttttgattttc

SEQ ID NO: 1835506 - DNA, 15 bp, Homo sapiens
ggcttttgattttct

SEQ ID NO: 1835507 - DNA, 15 bp, Homo sapiens
gcttttgattttctg

SEQ ID NO: 1835508 - DNA, 15 bp, Homo sapiens
cttttgattttctgt

SEQ ID NO: 1835509 - DNA, 15 bp, Homo sapiens
ttttgattttctgta

SEQ ID NO: 1835510 - DNA, 15 bp, Homo sapiens
tttgattttctgtaa

SEQ ID NO: 1835511 - DNA, 15 bp, Homo sapiens
ttgattttctgtaaa

SEQ ID NO: 1835512 - DNA, 15 bp, Homo sapiens
tgattttctgtaaac

SEQ ID NO: 1835513 - DNA, 15 bp, Homo sapiens
gattttctgtaaaca

SEQ ID NO: 1835514 - DNA, 15 bp, Homo sapiens
attttctgtaaacat

SEQ ID NO: 1835515 - DNA, 15 bp, Homo sapiens
ttttctgtaaacatt

SEQ ID NO: 1835516 - DNA, 15 bp, Homo sapiens
tttctgtaaacattg

SEQ ID NO: 1835517 - DNA, 15 bp, Homo sapiens
ttctgtaaacattga

SEQ ID NO: 1835518 - DNA, 15 bp, Homo sapiens
tctgtaaacattgac

SEQ ID NO: 1835519 - DNA, 15 bp, Homo sapiens
ctgtaaacattgact

SEQ ID NO: 1835520 - DNA, 15 bp, Homo sapiens
tgtaaacattgactt

SEQ ID NO: 1835521 - DNA, 15 bp, Homo sapiens
gtaaacattgacttt

SEQ ID NO: 1835522 - DNA, 15 bp, Homo sapiens
taaacattgacttta

SEQ ID NO: 1835523 - DNA, 15 bp, Homo sapiens
aaacattgactttat

SEQ ID NO: 1835524 - DNA, 15 bp, Homo sapiens
aacattgactttatt

SEQ ID NO: 1835525 - DNA, 15 bp, Homo sapiens
acattgactttatta

SEQ ID NO: 1835526 - DNA, 15 bp, Homo sapiens
cattgactttattaa

SEQ ID NO: 1835527 - DNA, 15 bp, Homo sapiens
attgactttattaag

SEQ ID NO: 1835528 - DNA, 15 bp, Homo sapiens
ttgactttattaagc

SEQ ID NO: 1835529 - DNA, 15 bp, Homo sapiens
tgactttattaagct

SEQ ID NO: 1835530 - DNA, 15 bp, Homo sapiens
gactttattaagctt

SEQ ID NO: 1835531 - DNA, 15 bp, Homo sapiens
actttattaagcttt

SEQ ID NO: 1835532 - DNA, 15 bp, Homo sapiens
ctttattaagctttt

SEQ ID NO: 1835533 - DNA, 15 bp, Homo sapiens
tttattaagcttttc

SEQ ID NO: 1835534 - DNA, 15 bp, Homo sapiens
ttattaagcttttcc

SEQ ID NO: 1835535 - DNA, 15 bp, Homo sapiens
tattaagcttttccc

SEQ ID NO: 1835536 - DNA, 15 bp, Homo sapiens
attaagcttttccct

SEQ ID NO: 1835537 - DNA, 15 bp, Homo sapiens
ttaagcttttccctt

SEQ ID NO: 1835538 - DNA, 15 bp, Homo sapiens
taagcttttcccttg

SEQ ID NO: 1835539 - DNA, 15 bp, Homo sapiens
aagcttttcccttgc

SEQ ID NO: 1835540 - DNA, 15 bp, Homo sapiens
agcttttcccttgct

SEQ ID NO: 1835541 - DNA, 15 bp, Homo sapiens
gcttttcccttgcta

SEQ ID NO: 1835542 - DNA, 15 bp, Homo sapiens
cttttcccttgctac

SEQ ID NO: 1835543 - DNA, 15 bp, Homo sapiens
ttttcccttgctact

SEQ ID NO: 1835544 - DNA, 15 bp, Homo sapiens
tttcccttgctacta

SEQ ID NO: 1835545 - DNA, 15 bp, Homo sapiens
ttcccttgctactat

SEQ ID NO: 1835546 - DNA, 15 bp, Homo sapiens
tcccttgctactata

SEQ ID NO: 1835547 - DNA, 15 bp, Homo sapiens
cccttgctactatat

SEQ ID NO: 1835548 - DNA, 15 bp, Homo sapiens
ccttgctactatatg

SEQ ID NO: 1835549 - DNA, 15 bp, Homo sapiens
cttgctactatatgc

SEQ ID NO: 1835550 - DNA, 15 bp, Homo sapiens
ttgctactatatgca

SEQ ID NO: 1835551 - DNA, 15 bp, Homo sapiens
tgctactatatgcac

SEQ ID NO: 1835552 - DNA, 15 bp, Homo sapiens
gctactatatgcact

SEQ ID NO: 1835553 - DNA, 15 bp, Homo sapiens
ctactatatgcactc

SEQ ID NO: 1835554 - DNA, 15 bp, Homo sapiens
tactatatgcactct

SEQ ID NO: 1835555 - DNA, 15 bp, Homo sapiens
actatatgcactctc

SEQ ID NO: 1835556 - DNA, 15 bp, Homo sapiens
ctatatgcactctct

SEQ ID NO: 1835557 - DNA, 15 bp, Homo sapiens
tatatgcactctcta

SEQ ID NO: 1835558 - DNA, 15 bp, Homo sapiens
atatgcactctctat

SEQ ID NO: 1835559 - DNA, 15 bp, Homo sapiens
tatgcactctctatt

SEQ ID NO: 1835560 - DNA, 15 bp, Homo sapiens
atgcactctctattt

SEQ ID NO: 1835561 - DNA, 15 bp, Homo sapiens
tgcactctctatttc

SEQ ID NO: 1835562 - DNA, 15 bp, Homo sapiens
gcactctctatttct

SEQ ID NO: 1835563 - DNA, 15 bp, Homo sapiens
cactctctatttctt

SEQ ID NO: 1835564 - DNA, 15 bp, Homo sapiens
actctctatttctta

SEQ ID NO: 1835565 - DNA, 15 bp, Homo sapiens
ctctctatttcttaa

SEQ ID NO: 1835566 - DNA, 15 bp, Homo sapiens
tctctatttcttaaa

SEQ ID NO: 1835567 - DNA, 15 bp, Homo sapiens
ctctatttcttaaat

SEQ ID NO: 1835568 - DNA, 15 bp, Homo sapiens
tctatttcttaaatt

SEQ ID NO: 1835569 - DNA, 15 bp, Homo sapiens
ctatttcttaaattg

SEQ ID NO: 1835570 - DNA, 15 bp, Homo sapiens
tatttcttaaattgc

SEQ ID NO: 1835571 - DNA, 15 bp, Homo sapiens
atttcttaaattgca

SEQ ID NO: 1835572 - DNA, 15 bp, Homo sapiens
tttcttaaattgcaa

SEQ ID NO: 1835573 - DNA, 15 bp, Homo sapiens
ttcttaaattgcaaa

SEQ ID NO: 1835574 - DNA, 15 bp, Homo sapiens
tcttaaattgcaaag

SEQ ID NO: 1835575 - DNA, 15 bp, Homo sapiens
cttaaattgcaaaga

SEQ ID NO: 1835576 - DNA, 15 bp, Homo sapiens
ttaaattgcaaagag

SEQ ID NO: 1835577 - DNA, 15 bp, Homo sapiens
taaattgcaaagagt

SEQ ID NO: 1835578 - DNA, 15 bp, Homo sapiens
aaattgcaaagagtt

SEQ ID NO: 1835579 - DNA, 15 bp, Homo sapiens
aattgcaaagagtta

SEQ ID NO: 1835580 - DNA, 15 bp, Homo sapiens
attgcaaagagttat

SEQ ID NO: 1835581 - DNA, 15 bp, Homo sapiens
ttgcaaagagttatt

SEQ ID NO: 1835582 - DNA, 15 bp, Homo sapiens
tgcaaagagttattc

SEQ ID NO: 1835583 - DNA, 15 bp, Homo sapiens
gcaaagagttattca

SEQ ID NO: 1835584 - DNA, 15 bp, Homo sapiens
caaagagttattcat

SEQ ID NO: 1835585 - DNA, 15 bp, Homo sapiens
aaagagttattcatg

SEQ ID NO: 1835586 - DNA, 15 bp, Homo sapiens
aagagttattcatga

SEQ ID NO: 1835587 - DNA, 15 bp, Homo sapiens
agagttattcatgaa

SEQ ID NO: 1835588 - DNA, 15 bp, Homo sapiens
gagttattcatgaaa

SEQ ID NO: 1835589 - DNA, 15 bp, Homo sapiens
agttattcatgaaat

SEQ ID NO: 1835590 - DNA, 15 bp, Homo sapiens
gttattcatgaaatt

SEQ ID NO: 1835591 - DNA, 15 bp, Homo sapiens
ttattcatgaaattt

SEQ ID NO: 1835592 - DNA, 15 bp, Homo sapiens
tattcatgaaatttg

SEQ ID NO: 1835593 - DNA, 15 bp, Homo sapiens
attcatgaaatttgt

SEQ ID NO: 1835594 - DNA, 15 bp, Homo sapiens
ttcatgaaatttgtg

SEQ ID NO: 1835595 - DNA, 15 bp, Homo sapiens
tcatgaaatttgtga

SEQ ID NO: 1835596 - DNA, 15 bp, Homo sapiens
catgaaatttgtgat

SEQ ID NO: 1835597 - DNA, 15 bp, Homo sapiens
atgaaatttgtgata

SEQ ID NO: 1835598 - DNA, 15 bp, Homo sapiens
tgaaatttgtgataa

SEQ ID NO: 1835599 - DNA, 15 bp, Homo sapiens
gaaatttgtgataaa

SEQ ID NO: 1835600 - DNA, 15 bp, Homo sapiens
aaatttgtgataaat

SEQ ID NO: 1835601 - DNA, 15 bp, Homo sapiens
aatttgtgataaata

SEQ ID NO: 1835602 - DNA, 15 bp, Homo sapiens
atttgtgataaatat

SEQ ID NO: 1835603 - DNA, 15 bp, Homo sapiens
tttgtgataaatatt

SEQ ID NO: 1835604 - DNA, 15 bp, Homo sapiens
ttgtgataaatattt

SEQ ID NO: 1835605 - DNA, 15 bp, Homo sapiens
tgtgataaatatttg

SEQ ID NO: 1835606 - DNA, 15 bp, Homo sapiens
gtgataaatatttga

SEQ ID NO: 1835607 - DNA, 15 bp, Homo sapiens
tgataaatatttgaa

SEQ ID NO: 1835608 - DNA, 15 bp, Homo sapiens
gataaatatttgaat

SEQ ID NO: 1835609 - DNA, 15 bp, Homo sapiens
ataaatatttgaatc

SEQ ID NO: 1835610 - DNA, 15 bp, Homo sapiens
taaatatttgaatct

SEQ ID NO: 1835611 - DNA, 15 bp, Homo sapiens
aaatatttgaatcta

SEQ ID NO: 1835612 - DNA, 15 bp, Homo sapiens
aatatttgaatctaa

SEQ ID NO: 1835613 - DNA, 15 bp, Homo sapiens
atatttgaatctaag

SEQ ID NO: 1835614 - DNA, 15 bp, Homo sapiens
tatttgaatctaagg

SEQ ID NO: 1835615 - DNA, 15 bp, Homo sapiens
atttgaatctaaggc

SEQ ID NO: 1835616 - DNA, 15 bp, Homo sapiens
tttgaatctaaggca

SEQ ID NO: 1835617 - DNA, 15 bp, Homo sapiens
ttgaatctaaggcaa

SEQ ID NO: 1835618 - DNA, 15 bp, Homo sapiens
tgaatctaaggcaac

SEQ ID NO: 1835619 - DNA, 15 bp, Homo sapiens
gaatctaaggcaacg

SEQ ID NO: 1835620 - DNA, 15 bp, Homo sapiens
aatctaaggcaacgt

SEQ ID NO: 1835621 - DNA, 15 bp, Homo sapiens
atctaaggcaacgtt

SEQ ID NO: 1835622 - DNA, 15 bp, Homo sapiens
tctaaggcaacgttt

SEQ ID NO: 1835623 - DNA, 15 bp, Homo sapiens
ctaaggcaacgtttt

SEQ ID NO: 1835624 - DNA, 15 bp, Homo sapiens
taaggcaacgttttt

SEQ ID NO: 1835625 - DNA, 15 bp, Homo sapiens
aaggcaacgtttttg

SEQ ID NO: 1835626 - DNA, 15 bp, Homo sapiens
aggcaacgtttttgg

SEQ ID NO: 1835627 - DNA, 15 bp, Homo sapiens
ggcaacgtttttgga

SEQ ID NO: 1835628 - DNA, 15 bp, Homo sapiens
gcaacgtttttggat

SEQ ID NO: 1835629 - DNA, 15 bp, Homo sapiens
caacgtttttggatt

SEQ ID NO: 1835630 - DNA, 15 bp, Homo sapiens
aacgtttttggattc

SEQ ID NO: 1835631 - DNA, 15 bp, Homo sapiens
acgtttttggattct

SEQ ID NO: 1835632 - DNA, 15 bp, Homo sapiens
cgtttttggattctt

SEQ ID NO: 1835633 - DNA, 15 bp, Homo sapiens
gtttttggattcttt

SEQ ID NO: 1835634 - DNA, 15 bp, Homo sapiens
tttttggattcttta

SEQ ID NO: 1835635 - DNA, 15 bp, Homo sapiens
ttttggattctttat

SEQ ID NO: 1835636 - DNA, 15 bp, Homo sapiens
tttggattctttata

SEQ ID NO: 1835637 - DNA, 15 bp, Homo sapiens
ttggattctttatac

SEQ ID NO: 1835638 - DNA, 15 bp, Homo sapiens
tggattctttatacg

SEQ ID NO: 1835639 - DNA, 15 bp, Homo sapiens
ggattctttatacga

SEQ ID NO: 1835640 - DNA, 15 bp, Homo sapiens
gattctttatacgag

SEQ ID NO: 1835641 - DNA, 15 bp, Homo sapiens
attctttatacgagg

SEQ ID NO: 1835642 - DNA, 15 bp, Homo sapiens
ttctttatacgaggt

SEQ ID NO: 1835643 - DNA, 15 bp, Homo sapiens
tctttatacgaggtt

SEQ ID NO: 1835644 - DNA, 15 bp, Homo sapiens
ctttatacgaggttt

SEQ ID NO: 1835645 - DNA, 15 bp, Homo sapiens
tttatacgaggtttt

SEQ ID NO: 1835646 - DNA, 15 bp, Homo sapiens
ttatacgaggttttt

SEQ ID NO: 1835647 - DNA, 15 bp, Homo sapiens
tatacgaggttttta

SEQ ID NO: 1835648 - DNA, 15 bp, Homo sapiens
atacgaggtttttag

SEQ ID NO: 1835649 - DNA, 15 bp, Homo sapiens
tacgaggtttttagc

SEQ ID NO: 1835650 - DNA, 15 bp, Homo sapiens
acgaggtttttagca

SEQ ID NO: 1835651 - DNA, 15 bp, Homo sapiens
cgaggtttttagcag

SEQ ID NO: 1835652 - DNA, 15 bp, Homo sapiens
gaggtttttagcagc

SEQ ID NO: 1835653 - DNA, 15 bp, Homo sapiens
aggtttttagcagca

SEQ ID NO: 1835654 - DNA, 15 bp, Homo sapiens
ggtttttagcagcat

SEQ ID NO: 1835655 - DNA, 15 bp, Homo sapiens
gtttttagcagcatg

SEQ ID NO: 1835656 - DNA, 15 bp, Homo sapiens
tttttagcagcatgt

SEQ ID NO: 1835657 - DNA, 15 bp, Homo sapiens
ttttagcagcatgtg

SEQ ID NO: 1835658 - DNA, 15 bp, Homo sapiens
tttagcagcatgtgt

SEQ ID NO: 1835659 - DNA, 15 bp, Homo sapiens
ttagcagcatgtgta

SEQ ID NO: 1835660 - DNA, 15 bp, Homo sapiens
tagcagcatgtgtac

SEQ ID NO: 1835661 - DNA, 15 bp, Homo sapiens
agcagcatgtgtaca

SEQ ID NO: 1835662 - DNA, 15 bp, Homo sapiens
gcagcatgtgtacat

SEQ ID NO: 1835663 - DNA, 15 bp, Homo sapiens
cagcatgtgtacatg

SEQ ID NO: 1835664 - DNA, 15 bp, Homo sapiens
agcatgtgtacatgt

SEQ ID NO: 1835665 - DNA, 15 bp, Homo sapiens
gcatgtgtacatgta

SEQ ID NO: 1835666 - DNA, 15 bp, Homo sapiens
catgtgtacatgtat

SEQ ID NO: 1835667 - DNA, 15 bp, Homo sapiens
atgtgtacatgtatg

SEQ ID NO: 1835668 - DNA, 15 bp, Homo sapiens
tgtgtacatgtatgt

SEQ ID NO: 1835669 - DNA, 15 bp, Homo sapiens
gtgtacatgtatgtg

SEQ ID NO: 1835670 - DNA, 15 bp, Homo sapiens
tgtacatgtatgtga

SEQ ID NO: 1835671 - DNA, 15 bp, Homo sapiens
gtacatgtatgtgat

SEQ ID NO: 1835672 - DNA, 15 bp, Homo sapiens
tacatgtatgtgata

SEQ ID NO: 1835673 - DNA, 15 bp, Homo sapiens
acatgtatgtgatag

SEQ ID NO: 1835674 - DNA, 15 bp, Homo sapiens
catgtatgtgatagc

SEQ ID NO: 1835675 - DNA, 15 bp, Homo sapiens
atgtatgtgatagct

SEQ ID NO: 1835676 - DNA, 15 bp, Homo sapiens
tgtatgtgatagctg

SEQ ID NO: 1835677 - DNA, 15 bp, Homo sapiens
gtatgtgatagctgt

SEQ ID NO: 1835678 - DNA, 15 bp, Homo sapiens
tatgtgatagctgtt

SEQ ID NO: 1835679 - DNA, 15 bp, Homo sapiens
atgtgatagctgtta

SEQ ID NO: 1835680 - DNA, 15 bp, Homo sapiens
tgtgatagctgttaa

SEQ ID NO: 1835681 - DNA, 15 bp, Homo sapiens
gtgatagctgttaac

SEQ ID NO: 1835682 - DNA, 15 bp, Homo sapiens
tgatagctgttaacg

SEQ ID NO: 1835683 - DNA, 15 bp, Homo sapiens
gatagctgttaacgg

SEQ ID NO: 1835684 - DNA, 15 bp, Homo sapiens
atagctgttaacgga

SEQ ID NO: 1835685 - DNA, 15 bp, Homo sapiens
tagctgttaacggaa

SEQ ID NO: 1835686 - DNA, 15 bp, Homo sapiens
agctgttaacggaat

SEQ ID NO: 1835687 - DNA, 15 bp, Homo sapiens
gctgttaacggaatt

SEQ ID NO: 1835688 - DNA, 15 bp, Homo sapiens
ctgttaacggaattc

SEQ ID NO: 1835689 - DNA, 15 bp, Homo sapiens
tgttaacggaattca

SEQ ID NO: 1835690 - DNA, 15 bp, Homo sapiens
gttaacggaattcac

SEQ ID NO: 1835691 - DNA, 15 bp, Homo sapiens
ttaacggaattcact

SEQ ID NO: 1835692 - DNA, 15 bp, Homo sapiens
taacggaattcactt

SEQ ID NO: 1835693 - DNA, 15 bp, Homo sapiens
aacggaattcactta

SEQ ID NO: 1835694 - DNA, 15 bp, Homo sapiens
acggaattcacttaa

SEQ ID NO: 1835695 - DNA, 15 bp, Homo sapiens
cggaattcacttaag

SEQ ID NO: 1835696 - DNA, 15 bp, Homo sapiens
ggaattcacttaagt

SEQ ID NO: 1835697 - DNA, 15 bp, Homo sapiens
gaattcacttaagtt

SEQ ID NO: 1835698 - DNA, 15 bp, Homo sapiens
aattcacttaagttt

SEQ ID NO: 1835699 - DNA, 15 bp, Homo sapiens
attcacttaagtttt

SEQ ID NO: 1835700 - DNA, 15 bp, Homo sapiens
ttcacttaagtttta

SEQ ID NO: 1835701 - DNA, 15 bp, Homo sapiens
tcacttaagttttac

SEQ ID NO: 1835702 - DNA, 15 bp, Homo sapiens
cacttaagttttact

SEQ ID NO: 1835703 - DNA, 15 bp, Homo sapiens
acttaagttttactt

SEQ ID NO: 1835704 - DNA, 15 bp, Homo sapiens
cttaagttttactta

SEQ ID NO: 1835705 - DNA, 15 bp, Homo sapiens
ttaagttttacttag

SEQ ID NO: 1835706 - DNA, 15 bp, Homo sapiens
taagttttacttaga

SEQ ID NO: 1835707 - DNA, 15 bp, Homo sapiens
aagttttacttagaa

SEQ ID NO: 1835708 - DNA, 15 bp, Homo sapiens
agttttacttagaag

SEQ ID NO: 1835709 - DNA, 15 bp, Homo sapiens
gttttacttagaagc

SEQ ID NO: 1835710 - DNA, 15 bp, Homo sapiens
ttttacttagaagcc

SEQ ID NO: 1835711 - DNA, 15 bp, Homo sapiens
tttacttagaagcct

SEQ ID NO: 1835712 - DNA, 15 bp, Homo sapiens
ttacttagaagcctg

SEQ ID NO: 1835713 - DNA, 15 bp, Homo sapiens
tacttagaagcctgg

SEQ ID NO: 1835714 - DNA, 15 bp, Homo sapiens
acttagaagcctggg

SEQ ID NO: 1835715 - DNA, 15 bp, Homo sapiens
cttagaagcctgggt

SEQ ID NO: 1835716 - DNA, 15 bp, Homo sapiens
ttagaagcctgggta

SEQ ID NO: 1835717 - DNA, 15 bp, Homo sapiens
tagaagcctgggtag

SEQ ID NO: 1835718 - DNA, 15 bp, Homo sapiens
agaagcctgggtagt

SEQ ID NO: 1835719 - DNA, 15 bp, Homo sapiens
gaagcctgggtagta

SEQ ID NO: 1835720 - DNA, 15 bp, Homo sapiens
aagcctgggtagtag

SEQ ID NO: 1835721 - DNA, 15 bp, Homo sapiens
agcctgggtagtaga

SEQ ID NO: 1835722 - DNA, 15 bp, Homo sapiens
gcctgggtagtagaa

SEQ ID NO: 1835723 - DNA, 15 bp, Homo sapiens
cctgggtagtagaac

SEQ ID NO: 1835724 - DNA, 15 bp, Homo sapiens
ctgggtagtagaacc

SEQ ID NO: 1835725 - DNA, 15 bp, Homo sapiens
tgggtagtagaacct

SEQ ID NO: 1835726 - DNA, 15 bp, Homo sapiens
gggtagtagaaccta

SEQ ID NO: 1835727 - DNA, 15 bp, Homo sapiens
ggtagtagaacctag

SEQ ID NO: 1835728 - DNA, 15 bp, Homo sapiens
gtagtagaacctaga

SEQ ID NO: 1835729 - DNA, 15 bp, Homo sapiens
tagtagaacctagaa

SEQ ID NO: 1835730 - DNA, 15 bp, Homo sapiens
agtagaacctagaag

SEQ ID NO: 1835731 - DNA, 15 bp, Homo sapiens
gtagaacctagaagt

SEQ ID NO: 1835732 - DNA, 15 bp, Homo sapiens
tagaacctagaagtt

SEQ ID NO: 1835733 - DNA, 15 bp, Homo sapiens
agaacctagaagttg

SEQ ID NO: 1835734 - DNA, 15 bp, Homo sapiens
gaacctagaagttgc

SEQ ID NO: 1835735 - DNA, 15 bp, Homo sapiens
aacctagaagttgca

SEQ ID NO: 1835736 - DNA, 15 bp, Homo sapiens
acctagaagttgcag

SEQ ID NO: 1835737 - DNA, 15 bp, Homo sapiens
cctagaagttgcagt

SEQ ID NO: 1835738 - DNA, 15 bp, Homo sapiens
ctagaagttgcagtg

SEQ ID NO: 1835739 - DNA, 15 bp, Homo sapiens
tagaagttgcagtgg

SEQ ID NO: 1835740 - DNA, 15 bp, Homo sapiens
agaagttgcagtggg

SEQ ID NO: 1835741 - DNA, 15 bp, Homo sapiens
gaagttgcagtggga

SEQ ID NO: 1835742 - DNA, 15 bp, Homo sapiens
aagttgcagtgggaa

SEQ ID NO: 1835743 - DNA, 15 bp, Homo sapiens
agttgcagtgggaat

SEQ ID NO: 1835744 - DNA, 15 bp, Homo sapiens
gttgcagtgggaatt

SEQ ID NO: 1835745 - DNA, 15 bp, Homo sapiens
ttgcagtgggaattt

SEQ ID NO: 1835746 - DNA, 15 bp, Homo sapiens
tgcagtgggaatttt

SEQ ID NO: 1835747 - DNA, 15 bp, Homo sapiens
gcagtgggaattttt

SEQ ID NO: 1835748 - DNA, 15 bp, Homo sapiens
cagtgggaatttttt

SEQ ID NO: 1835749 - DNA, 15 bp, Homo sapiens
agtgggaattttttt

SEQ ID NO: 1835750 - DNA, 15 bp, Homo sapiens
gtgggaatttttttt

SEQ ID NO: 1835751 - DNA, 15 bp, Homo sapiens
tgggaattttttttt

SEQ ID NO: 1835752 - DNA, 15 bp, Homo sapiens
gggaattttttttta

SEQ ID NO: 1835753 - DNA, 15 bp, Homo sapiens
ggaatttttttttaa

SEQ ID NO: 1835754 - DNA, 15 bp, Homo sapiens
gaatttttttttaat

SEQ ID NO: 1835755 - DNA, 15 bp, Homo sapiens
aatttttttttaatt

SEQ ID NO: 1835756 - DNA, 15 bp, Homo sapiens
atttttttttaattt

SEQ ID NO: 1835757 - DNA, 15 bp, Homo sapiens
tttttttttaatttg

SEQ ID NO: 1835758 - DNA, 15 bp, Homo sapiens
ttttttttaatttga

SEQ ID NO: 1835759 - DNA, 15 bp, Homo sapiens
tttttttaatttgaa

SEQ ID NO: 1835760 - DNA, 15 bp, Homo sapiens
ttttttaatttgaaa

SEQ ID NO: 1835761 - DNA, 15 bp, Homo sapiens
tttttaatttgaaag

SEQ ID NO: 1835762 - DNA, 15 bp, Homo sapiens
ttttaatttgaaaga

SEQ ID NO: 1835763 - DNA, 15 bp, Homo sapiens
tttaatttgaaagat

SEQ ID NO: 1835764 - DNA, 15 bp, Homo sapiens
ttaatttgaaagatt

SEQ ID NO: 1835765 - DNA, 15 bp, Homo sapiens
taatttgaaagatta

SEQ ID NO: 1835766 - DNA, 15 bp, Homo sapiens
aatttgaaagattaa

SEQ ID NO: 1835767 - DNA, 15 bp, Homo sapiens
atttgaaagattaaa

SEQ ID NO: 1835768 - DNA, 15 bp, Homo sapiens
tttgaaagattaaat

SEQ ID NO: 1835769 - DNA, 15 bp, Homo sapiens
ttgaaagattaaata

SEQ ID NO: 1835770 - DNA, 15 bp, Homo sapiens
tgaaagattaaatag

SEQ ID NO: 1835771 - DNA, 15 bp, Homo sapiens
gaaagattaaatagg

SEQ ID NO: 1835772 - DNA, 15 bp, Homo sapiens
aaagattaaataggt

SEQ ID NO: 1835773 - DNA, 15 bp, Homo sapiens
aagattaaataggta

SEQ ID NO: 1835774 - DNA, 15 bp, Homo sapiens
agattaaataggtaa

SEQ ID NO: 1835775 - DNA, 15 bp, Homo sapiens
gattaaataggtaaa

SEQ ID NO: 1835776 - DNA, 15 bp, Homo sapiens
attaaataggtaaaa

SEQ ID NO: 1835777 - DNA, 15 bp, Homo sapiens
ttaaataggtaaaaa

SEQ ID NO: 1835778 - DNA, 15 bp, Homo sapiens
taaataggtaaaaag

SEQ ID NO: 1835779 - DNA, 15 bp, Homo sapiens
aaataggtaaaaagt

SEQ ID NO: 1835780 - DNA, 15 bp, Homo sapiens
aataggtaaaaagtc

SEQ ID NO: 1835781 - DNA, 15 bp, Homo sapiens
ataggtaaaaagtca

SEQ ID NO: 1835782 - DNA, 15 bp, Homo sapiens
taggtaaaaagtcat

SEQ ID NO: 1835783 - DNA, 15 bp, Homo sapiens
aggtaaaaagtcatc

SEQ ID NO: 1835784 - DNA, 15 bp, Homo sapiens
ggtaaaaagtcatct

SEQ ID NO: 1835785 - DNA, 15 bp, Homo sapiens
gtaaaaagtcatctt

SEQ ID NO: 1835786 - DNA, 15 bp, Homo sapiens
taaaaagtcatcttt

SEQ ID NO: 1835787 - DNA, 15 bp, Homo sapiens
aaaaagtcatcttta

SEQ ID NO: 1835788 - DNA, 15 bp, Homo sapiens
aaaagtcatctttaa

SEQ ID NO: 1835789 - DNA, 15 bp, Homo sapiens
aaagtcatctttaat

SEQ ID NO: 1835790 - DNA, 15 bp, Homo sapiens
aagtcatctttaatc

SEQ ID NO: 1835791 - DNA, 15 bp, Homo sapiens
agtcatctttaatct

SEQ ID NO: 1835792 - DNA, 15 bp, Homo sapiens
gtcatctttaatctc

SEQ ID NO: 1835793 - DNA, 15 bp, Homo sapiens
tcatctttaatctct

SEQ ID NO: 1835794 - DNA, 15 bp, Homo sapiens
catctttaatctcta

SEQ ID NO: 1835795 - DNA, 15 bp, Homo sapiens
atctttaatctctat

SEQ ID NO: 1835796 - DNA, 15 bp, Homo sapiens
tctttaatctctatt

SEQ ID NO: 1835797 - DNA, 15 bp, Homo sapiens
ctttaatctctatta

SEQ ID NO: 1835798 - DNA, 15 bp, Homo sapiens
tttaatctctattaa

SEQ ID NO: 1835799 - DNA, 15 bp, Homo sapiens
ttaatctctattaaa

SEQ ID NO: 1835800 - DNA, 15 bp, Homo sapiens
taatctctattaaac

SEQ ID NO: 1835801 - DNA, 15 bp, Homo sapiens
aatctctattaaact

SEQ ID NO: 1835802 - DNA, 15 bp, Homo sapiens
atctctattaaactt

SEQ ID NO: 1835803 - DNA, 15 bp, Homo sapiens
tctctattaaacttt

SEQ ID NO: 1835804 - DNA, 15 bp, Homo sapiens
ctctattaaactttt

SEQ ID NO: 1835805 - DNA, 15 bp, Homo sapiens
tctattaaacttttt

SEQ ID NO: 1835806 - DNA, 15 bp, Homo sapiens
ctattaaactttttt

SEQ ID NO: 1835807 - DNA, 15 bp, Homo sapiens
tattaaacttttttg

SEQ ID NO: 1835808 - DNA, 15 bp, Homo sapiens
attaaacttttttgt

SEQ ID NO: 1835809 - DNA, 15 bp, Homo sapiens
ttaaacttttttgta

SEQ ID NO: 1835810 - DNA, 15 bp, Homo sapiens
taaacttttttgtat

SEQ ID NO: 1835811 - DNA, 15 bp, Homo sapiens
aaacttttttgtata

SEQ ID NO: 1835812 - DNA, 15 bp, Homo sapiens
aacttttttgtataa

SEQ ID NO: 1835813 - DNA, 15 bp, Homo sapiens
acttttttgtataat

SEQ ID NO: 1835814 - DNA, 15 bp, Homo sapiens
cttttttgtataatg

SEQ ID NO: 1835815 - DNA, 15 bp, Homo sapiens
ttttttgtataatgt

SEQ ID NO: 1835816 - DNA, 15 bp, Homo sapiens
tttttgtataatgtc

SEQ ID NO: 1835817 - DNA, 15 bp, Homo sapiens
ttttgtataatgtca

SEQ ID NO: 1835818 - DNA, 15 bp, Homo sapiens
tttgtataatgtcag

SEQ ID NO: 1835819 - DNA, 15 bp, Homo sapiens
ttgtataatgtcaga

SEQ ID NO: 1835820 - DNA, 15 bp, Homo sapiens
tgtataatgtcagaa

SEQ ID NO: 1835821 - DNA, 15 bp, Homo sapiens
gtataatgtcagaag

SEQ ID NO: 1835822 - DNA, 15 bp, Homo sapiens
tataatgtcagaagt

SEQ ID NO: 1835823 - DNA, 15 bp, Homo sapiens
ataatgtcagaagtg

SEQ ID NO: 1835824 - DNA, 15 bp, Homo sapiens
taatgtcagaagtga

SEQ ID NO: 1835825 - DNA, 15 bp, Homo sapiens
aatgtcagaagtgaa

SEQ ID NO: 1835826 - DNA, 15 bp, Homo sapiens
atgtcagaagtgaaa

SEQ ID NO: 1835827 - DNA, 15 bp, Homo sapiens
tgtcagaagtgaaag

SEQ ID NO: 1835828 - DNA, 15 bp, Homo sapiens
gtcagaagtgaaagt

SEQ ID NO: 1835829 - DNA, 15 bp, Homo sapiens
tcagaagtgaaagtt

SEQ ID NO: 1835830 - DNA, 15 bp, Homo sapiens
cagaagtgaaagttc

SEQ ID NO: 1835831 - DNA, 15 bp, Homo sapiens
agaagtgaaagttcc

SEQ ID NO: 1835832 - DNA, 15 bp, Homo sapiens
gaagtgaaagttccc

SEQ ID NO: 1835833 - DNA, 15 bp, Homo sapiens
aagtgaaagttcccc

SEQ ID NO: 1835834 - DNA, 15 bp, Homo sapiens
agtgaaagttcccca

SEQ ID NO: 1835835 - DNA, 15 bp, Homo sapiens
gtgaaagttccccac

SEQ ID NO: 1835836 - DNA, 15 bp, Homo sapiens
tgaaagttccccaca

SEQ ID NO: 1835837 - DNA, 15 bp, Homo sapiens
gaaagttccccacat

SEQ ID NO: 1835838 - DNA, 15 bp, Homo sapiens
aaagttccccacatc

SEQ ID NO: 1835839 - DNA, 15 bp, Homo sapiens
aagttccccacatct

SEQ ID NO: 1835840 - DNA, 15 bp, Homo sapiens
agttccccacatctg

SEQ ID NO: 1835841 - DNA, 15 bp, Homo sapiens
gttccccacatctgc

SEQ ID NO: 1835842 - DNA, 15 bp, Homo sapiens
ttccccacatctgct

SEQ ID NO: 1835843 - DNA, 15 bp, Homo sapiens
tccccacatctgctt

SEQ ID NO: 1835844 - DNA, 15 bp, Homo sapiens
ccccacatctgctta

SEQ ID NO: 1835845 - DNA, 15 bp, Homo sapiens
cccacatctgcttac

SEQ ID NO: 1835846 - DNA, 15 bp, Homo sapiens
ccacatctgcttaca

SEQ ID NO: 1835847 - DNA, 15 bp, Homo sapiens
cacatctgcttacag

SEQ ID NO: 1835848 - DNA, 15 bp, Homo sapiens
acatctgcttacagc

SEQ ID NO: 1835849 - DNA, 15 bp, Homo sapiens
catctgcttacagcc

SEQ ID NO: 1835850 - DNA, 15 bp, Homo sapiens
atctgcttacagcct

SEQ ID NO: 1835851 - DNA, 15 bp, Homo sapiens
tctgcttacagcctg

SEQ ID NO: 1835852 - DNA, 15 bp, Homo sapiens
ctgcttacagcctgt

SEQ ID NO: 1835853 - DNA, 15 bp, Homo sapiens
tgcttacagcctgtt

SEQ ID NO: 1835854 - DNA, 15 bp, Homo sapiens
gcttacagcctgttt

SEQ ID NO: 1835855 - DNA, 15 bp, Homo sapiens
cttacagcctgtttg

SEQ ID NO: 1835856 - DNA, 15 bp, Homo sapiens
ttacagcctgtttgt

SEQ ID NO: 1835857 - DNA, 15 bp, Homo sapiens
tacagcctgtttgta

SEQ ID NO: 1835858 - DNA, 15 bp, Homo sapiens
acagcctgtttgtat

SEQ ID NO: 1835859 - DNA, 15 bp, Homo sapiens
cagcctgtttgtatc

SEQ ID NO: 1835860 - DNA, 15 bp, Homo sapiens
agcctgtttgtatcc

SEQ ID NO: 1835861 - DNA, 15 bp, Homo sapiens
gcctgtttgtatcct

SEQ ID NO: 1835862 - DNA, 15 bp, Homo sapiens
cctgtttgtatcctt

SEQ ID NO: 1835863 - DNA, 15 bp, Homo sapiens
ctgtttgtatccttc

SEQ ID NO: 1835864 - DNA, 15 bp, Homo sapiens
tgtttgtatccttcc

SEQ ID NO: 1835865 - DNA, 15 bp, Homo sapiens
gtttgtatccttcct

SEQ ID NO: 1835866 - DNA, 15 bp, Homo sapiens
tttgtatccttcctg

SEQ ID NO: 1835867 - DNA, 15 bp, Homo sapiens
ttgtatccttcctga

SEQ ID NO: 1835868 - DNA, 15 bp, Homo sapiens
tgtatccttcctgac

SEQ ID NO: 1835869 - DNA, 15 bp, Homo sapiens
gtatccttcctgact

SEQ ID NO: 1835870 - DNA, 15 bp, Homo sapiens
tatccttcctgactt

SEQ ID NO: 1835871 - DNA, 15 bp, Homo sapiens
atccttcctgacttg

SEQ ID NO: 1835872 - DNA, 15 bp, Homo sapiens
tccttcctgacttga

SEQ ID NO: 1835873 - DNA, 15 bp, Homo sapiens
ccttcctgacttgat

SEQ ID NO: 1835874 - DNA, 15 bp, Homo sapiens
cttcctgacttgatt

SEQ ID NO: 1835875 - DNA, 15 bp, Homo sapiens
ttcctgacttgattg

SEQ ID NO: 1835876 - DNA, 15 bp, Homo sapiens
tcctgacttgattga

SEQ ID NO: 1835877 - DNA, 15 bp, Homo sapiens
cctgacttgattgat

SEQ ID NO: 1835878 - DNA, 15 bp, Homo sapiens
ctgacttgattgatt

SEQ ID NO: 1835879 - DNA, 15 bp, Homo sapiens
tgacttgattgatta

SEQ ID NO: 1835880 - DNA, 15 bp, Homo sapiens
gacttgattgattaa

SEQ ID NO: 1835881 - DNA, 15 bp, Homo sapiens
acttgattgattaaa

SEQ ID NO: 1835882 - DNA, 15 bp, Homo sapiens
cttgattgattaaat

SEQ ID NO: 1835883 - DNA, 15 bp, Homo sapiens
ttgattgattaaatg

SEQ ID NO: 1835884 - DNA, 15 bp, Homo sapiens
tgattgattaaatgg

SEQ ID NO: 1835885 - DNA, 15 bp, Homo sapiens
gattgattaaatgga

SEQ ID NO: 1835886 - DNA, 15 bp, Homo sapiens
attgattaaatggac

SEQ ID NO: 1835887 - DNA, 15 bp, Homo sapiens
ttgattaaatggaca

SEQ ID NO: 1835888 - DNA, 15 bp, Homo sapiens
tgattaaatggacat

SEQ ID NO: 1835889 - DNA, 15 bp, Homo sapiens
gattaaatggacatc

SEQ ID NO: 1835890 - DNA, 15 bp, Homo sapiens
attaaatggacatct

SEQ ID NO: 1835891 - DNA, 15 bp, Homo sapiens
ttaaatggacatctc

SEQ ID NO: 1835892 - DNA, 15 bp, Homo sapiens
taaatggacatctct

SEQ ID NO: 1835893 - DNA, 15 bp, Homo sapiens
aaatggacatctcta

SEQ ID NO: 1835894 - DNA, 15 bp, Homo sapiens
aatggacatctctat

SEQ ID NO: 1835895 - DNA, 15 bp, Homo sapiens
atggacatctctata

SEQ ID NO: 1835896 - DNA, 15 bp, Homo sapiens
tggacatctctatat

SEQ ID NO: 1835897 - DNA, 15 bp, Homo sapiens
ggacatctctatata

SEQ ID NO: 1835898 - DNA, 15 bp, Homo sapiens
gacatctctatatac

SEQ ID NO: 1835899 - DNA, 15 bp, Homo sapiens
acatctctatataca

SEQ ID NO: 1835900 - DNA, 15 bp, Homo sapiens
catctctatatacat

SEQ ID NO: 1835901 - DNA, 15 bp, Homo sapiens
atctctatatacata

SEQ ID NO: 1835902 - DNA, 15 bp, Homo sapiens
tctctatatacatat

SEQ ID NO: 1835903 - DNA, 15 bp, Homo sapiens
ctctatatacatatg

SEQ ID NO: 1835904 - DNA, 15 bp, Homo sapiens
tctatatacatatgc

SEQ ID NO: 1835905 - DNA, 15 bp, Homo sapiens
ctatatacatatgca

SEQ ID NO: 1835906 - DNA, 15 bp, Homo sapiens
tatatacatatgcat

SEQ ID NO: 1835907 - DNA, 15 bp, Homo sapiens
atatacatatgcata

SEQ ID NO: 1835908 - DNA, 15 bp, Homo sapiens
tatacatatgcatat

SEQ ID NO: 1835909 - DNA, 15 bp, Homo sapiens
atacatatgcatata

SEQ ID NO: 1835910 - DNA, 15 bp, Homo sapiens
tacatatgcatataa

SEQ ID NO: 1835911 - DNA, 15 bp, Homo sapiens
acatatgcatataat

SEQ ID NO: 1835912 - DNA, 15 bp, Homo sapiens
catatgcatataatt

SEQ ID NO: 1835913 - DNA, 15 bp, Homo sapiens
atatgcatataattt

SEQ ID NO: 1835914 - DNA, 15 bp, Homo sapiens
tatgcatataatttc

SEQ ID NO: 1835915 - DNA, 15 bp, Homo sapiens
atgcatataatttca

SEQ ID NO: 1835916 - DNA, 15 bp, Homo sapiens
tgcatataatttcaa

SEQ ID NO: 1835917 - DNA, 15 bp, Homo sapiens
gcatataatttcaat

SEQ ID NO: 1835918 - DNA, 15 bp, Homo sapiens
catataatttcaatt

SEQ ID NO: 1835919 - DNA, 15 bp, Homo sapiens
atataatttcaattt

SEQ ID NO: 1835920 - DNA, 15 bp, Homo sapiens
tataatttcaatttt

SEQ ID NO: 1835921 - DNA, 15 bp, Homo sapiens
ataatttcaattttt

SEQ ID NO: 1835922 - DNA, 15 bp, Homo sapiens
taatttcaatttttg

SEQ ID NO: 1835923 - DNA, 15 bp, Homo sapiens
aatttcaatttttgc

SEQ ID NO: 1835924 - DNA, 15 bp, Homo sapiens
atttcaatttttgct

SEQ ID NO: 1835925 - DNA, 15 bp, Homo sapiens
tttcaatttttgctt

SEQ ID NO: 1835926 - DNA, 15 bp, Homo sapiens
ttcaatttttgctta

SEQ ID NO: 1835927 - DNA, 15 bp, Homo sapiens
tcaatttttgcttag

SEQ ID NO: 1835928 - DNA, 15 bp, Homo sapiens
caatttttgcttagt

SEQ ID NO: 1835929 - DNA, 15 bp, Homo sapiens
aatttttgcttagta

SEQ ID NO: 1835930 - DNA, 15 bp, Homo sapiens
atttttgcttagtaa

SEQ ID NO: 1835931 - DNA, 15 bp, Homo sapiens
tttttgcttagtaac

SEQ ID NO: 1835932 - DNA, 15 bp, Homo sapiens
ttttgcttagtaaca

SEQ ID NO: 1835933 - DNA, 15 bp, Homo sapiens
tttgcttagtaacaa

SEQ ID NO: 1835934 - DNA, 15 bp, Homo sapiens
ttgcttagtaacaaa

SEQ ID NO: 1835935 - DNA, 15 bp, Homo sapiens
tgcttagtaacaaaa

SEQ ID NO: 1835936 - DNA, 15 bp, Homo sapiens
gcttagtaacaaaaa

SEQ ID NO: 1835937 - DNA, 15 bp, Homo sapiens
cttagtaacaaaaac

SEQ ID NO: 1835938 - DNA, 15 bp, Homo sapiens
ttagtaacaaaaaca

SEQ ID NO: 1835939 - DNA, 15 bp, Homo sapiens
tagtaacaaaaacaa

SEQ ID NO: 1835940 - DNA, 15 bp, Homo sapiens
agtaacaaaaacaaa

SEQ ID NO: 1835941 - DNA, 15 bp, Homo sapiens
gtaacaaaaacaaaa

SEQ ID NO: 1835942 - DNA, 15 bp, Homo sapiens
taacaaaaacaaaag

SEQ ID NO: 1835943 - DNA, 15 bp, Homo sapiens
aacaaaaacaaaagt

SEQ ID NO: 1835944 - DNA, 15 bp, Homo sapiens
acaaaaacaaaagtt

SEQ ID NO: 1835945 - DNA, 15 bp, Homo sapiens
caaaaacaaaagtta

SEQ ID NO: 1835946 - DNA, 15 bp, Homo sapiens
aaaaacaaaagttac

SEQ ID NO: 1835947 - DNA, 15 bp, Homo sapiens
aaaacaaaagttaca

SEQ ID NO: 1835948 - DNA, 15 bp, Homo sapiens
aaacaaaagttacac

SEQ ID NO: 1835949 - DNA, 15 bp, Homo sapiens
aacaaaagttacaca

SEQ ID NO: 1835950 - DNA, 15 bp, Homo sapiens
acaaaagttacacat

SEQ ID NO: 1835951 - DNA, 15 bp, Homo sapiens
caaaagttacacata

SEQ ID NO: 1835952 - DNA, 15 bp, Homo sapiens
aaaagttacacatac

SEQ ID NO: 1835953 - DNA, 15 bp, Homo sapiens
aaagttacacatact

SEQ ID NO: 1835954 - DNA, 15 bp, Homo sapiens
aagttacacatactg

SEQ ID NO: 1835955 - DNA, 15 bp, Homo sapiens
agttacacatactgg

SEQ ID NO: 1835956 - DNA, 15 bp, Homo sapiens
gttacacatactggt

SEQ ID NO: 1835957 - DNA, 15 bp, Homo sapiens
ttacacatactggtg

SEQ ID NO: 1835958 - DNA, 15 bp, Homo sapiens
tacacatactggtga

SEQ ID NO: 1835959 - DNA, 15 bp, Homo sapiens
acacatactggtgac

SEQ ID NO: 1835960 - DNA, 15 bp, Homo sapiens
cacatactggtgact

SEQ ID NO: 1835961 - DNA, 15 bp, Homo sapiens
acatactggtgacta

SEQ ID NO: 1835962 - DNA, 15 bp, Homo sapiens
catactggtgactaa

SEQ ID NO: 1835963 - DNA, 15 bp, Homo sapiens
atactggtgactaat

SEQ ID NO: 1835964 - DNA, 15 bp, Homo sapiens
tactggtgactaatt

SEQ ID NO: 1835965 - DNA, 15 bp, Homo sapiens
actggtgactaattt

SEQ ID NO: 1835966 - DNA, 15 bp, Homo sapiens
ctggtgactaatttg

SEQ ID NO: 1835967 - DNA, 15 bp, Homo sapiens
tggtgactaatttgc

SEQ ID NO: 1835968 - DNA, 15 bp, Homo sapiens
ggtgactaatttgct

SEQ ID NO: 1835969 - DNA, 15 bp, Homo sapiens
gtgactaatttgctt

SEQ ID NO: 1835970 - DNA, 15 bp, Homo sapiens
tgactaatttgcttt

SEQ ID NO: 1835971 - DNA, 15 bp, Homo sapiens
gactaatttgctttt

SEQ ID NO: 1835972 - DNA, 15 bp, Homo sapiens
actaatttgcttttt

SEQ ID NO: 1835973 - DNA, 15 bp, Homo sapiens
ctaatttgctttttt

SEQ ID NO: 1835974 - DNA, 15 bp, Homo sapiens
taatttgcttttttc

SEQ ID NO: 1835975 - DNA, 15 bp, Homo sapiens
aatttgcttttttca

SEQ ID NO: 1835976 - DNA, 15 bp, Homo sapiens
atttgcttttttcac

SEQ ID NO: 1835977 - DNA, 15 bp, Homo sapiens
tttgcttttttcacg

SEQ ID NO: 1835978 - DNA, 15 bp, Homo sapiens
ttgcttttttcacgt

SEQ ID NO: 1835979 - DNA, 15 bp, Homo sapiens
tgcttttttcacgta

SEQ ID NO: 1835980 - DNA, 15 bp, Homo sapiens
gcttttttcacgtat

SEQ ID NO: 1835981 - DNA, 15 bp, Homo sapiens
cttttttcacgtatg

SEQ ID NO: 1835982 - DNA, 15 bp, Homo sapiens
ttttttcacgtatgt

SEQ ID NO: 1835983 - DNA, 15 bp, Homo sapiens
tttttcacgtatgtc

SEQ ID NO: 1835984 - DNA, 15 bp, Homo sapiens
ttttcacgtatgtca

SEQ ID NO: 1835985 - DNA, 15 bp, Homo sapiens
tttcacgtatgtcat

SEQ ID NO: 1835986 - DNA, 15 bp, Homo sapiens
ttcacgtatgtcatg

SEQ ID NO: 1835987 - DNA, 15 bp, Homo sapiens
tcacgtatgtcatga

SEQ ID NO: 1835988 - DNA, 15 bp, Homo sapiens
cacgtatgtcatgaa

SEQ ID NO: 1835989 - DNA, 15 bp, Homo sapiens
acgtatgtcatgaac

SEQ ID NO: 1835990 - DNA, 15 bp, Homo sapiens
cgtatgtcatgaacc

SEQ ID NO: 1835991 - DNA, 15 bp, Homo sapiens
gtatgtcatgaacca

SEQ ID NO: 1835992 - DNA, 15 bp, Homo sapiens
tatgtcatgaaccat

SEQ ID NO: 1835993 - DNA, 15 bp, Homo sapiens
atgtcatgaaccatt

SEQ ID NO: 1835994 - DNA, 15 bp, Homo sapiens
tgtcatgaaccattt

SEQ ID NO: 1835995 - DNA, 15 bp, Homo sapiens
gtcatgaaccatttt

SEQ ID NO: 1835996 - DNA, 15 bp, Homo sapiens
tcatgaaccattttc

SEQ ID NO: 1835997 - DNA, 15 bp, Homo sapiens
catgaaccattttcc

SEQ ID NO: 1835998 - DNA, 15 bp, Homo sapiens
atgaaccattttcca

SEQ ID NO: 1835999 - DNA, 15 bp, Homo sapiens
tgaaccattttccag

SEQ ID NO: 1836000 - DNA, 15 bp, Homo sapiens
gaaccattttccagg

SEQ ID NO: 1836001 - DNA, 15 bp, Homo sapiens
aaccattttccaggg

SEQ ID NO: 1836002 - DNA, 15 bp, Homo sapiens
accattttccagggc

SEQ ID NO: 1836003 - DNA, 15 bp, Homo sapiens
ccattttccagggca

SEQ ID NO: 1836004 - DNA, 15 bp, Homo sapiens
cattttccagggcag

SEQ ID NO: 1836005 - DNA, 15 bp, Homo sapiens
attttccagggcagt

SEQ ID NO: 1836006 - DNA, 15 bp, Homo sapiens
ttttccagggcagtt

SEQ ID NO: 1836007 - DNA, 15 bp, Homo sapiens
tttccagggcagttc

SEQ ID NO: 1836008 - DNA, 15 bp, Homo sapiens
ttccagggcagttca

SEQ ID NO: 1836009 - DNA, 15 bp, Homo sapiens
tccagggcagttcat

SEQ ID NO: 1836010 - DNA, 15 bp, Homo sapiens
ccagggcagttcatc

SEQ ID NO: 1836011 - DNA, 15 bp, Homo sapiens
cagggcagttcatct

SEQ ID NO: 1836012 - DNA, 15 bp, Homo sapiens
agggcagttcatcta

SEQ ID NO: 1836013 - DNA, 15 bp, Homo sapiens
gggcagttcatctag

SEQ ID NO: 1836014 - DNA, 15 bp, Homo sapiens
ggcagttcatctaga

SEQ ID NO: 1836015 - DNA, 15 bp, Homo sapiens
gcagttcatctagat

SEQ ID NO: 1836016 - DNA, 15 bp, Homo sapiens
cagttcatctagatc

SEQ ID NO: 1836017 - DNA, 15 bp, Homo sapiens
agttcatctagatct

SEQ ID NO: 1836018 - DNA, 15 bp, Homo sapiens
gttcatctagatctc

SEQ ID NO: 1836019 - DNA, 15 bp, Homo sapiens
ttcatctagatctcc

SEQ ID NO: 1836020 - DNA, 15 bp, Homo sapiens
tcatctagatctccc

SEQ ID NO: 1836021 - DNA, 15 bp, Homo sapiens
catctagatctccct

SEQ ID NO: 1836022 - DNA, 15 bp, Homo sapiens
atctagatctccctc

SEQ ID NO: 1836023 - DNA, 15 bp, Homo sapiens
tctagatctccctca

SEQ ID NO: 1836024 - DNA, 15 bp, Homo sapiens
ctagatctccctcaa

SEQ ID NO: 1836025 - DNA, 15 bp, Homo sapiens
tagatctccctcaat

SEQ ID NO: 1836026 - DNA, 15 bp, Homo sapiens
agatctccctcaatt

SEQ ID NO: 1836027 - DNA, 15 bp, Homo sapiens
gatctccctcaattc

SEQ ID NO: 1836028 - DNA, 15 bp, Homo sapiens
atctccctcaattct

SEQ ID NO: 1836029 - DNA, 15 bp, Homo sapiens
tctccctcaattctt

SEQ ID NO: 1836030 - DNA, 15 bp, Homo sapiens
ctccctcaattcttt

SEQ ID NO: 1836031 - DNA, 15 bp, Homo sapiens
tccctcaattctttt

SEQ ID NO: 1836032 - DNA, 15 bp, Homo sapiens
ccctcaattcttttt

SEQ ID NO: 1836033 - DNA, 15 bp, Homo sapiens
cctcaattcttttta

SEQ ID NO: 1836034 - DNA, 15 bp, Homo sapiens
ctcaattctttttaa

SEQ ID NO: 1836035 - DNA, 15 bp, Homo sapiens
tcaattctttttaat

SEQ ID NO: 1836036 - DNA, 15 bp, Homo sapiens
caattctttttaatg

SEQ ID NO: 1836037 - DNA, 15 bp, Homo sapiens
aattctttttaatgg

SEQ ID NO: 1836038 - DNA, 15 bp, Homo sapiens
attctttttaatggc

SEQ ID NO: 1836039 - DNA, 15 bp, Homo sapiens
ttctttttaatggct

SEQ ID NO: 1836040 - DNA, 15 bp, Homo sapiens
tctttttaatggcta

SEQ ID NO: 1836041 - DNA, 15 bp, Homo sapiens
ctttttaatggctac

SEQ ID NO: 1836042 - DNA, 15 bp, Homo sapiens
tttttaatggctaca

SEQ ID NO: 1836043 - DNA, 15 bp, Homo sapiens
ttttaatggctacat

SEQ ID NO: 1836044 - DNA, 15 bp, Homo sapiens
tttaatggctacata

SEQ ID NO: 1836045 - DNA, 15 bp, Homo sapiens
ttaatggctacatat

SEQ ID NO: 1836046 - DNA, 15 bp, Homo sapiens
taatggctacatatt

SEQ ID NO: 1836047 - DNA, 15 bp, Homo sapiens
aatggctacatattc

SEQ ID NO: 1836048 - DNA, 15 bp, Homo sapiens
atggctacatattcc

SEQ ID NO: 1836049 - DNA, 15 bp, Homo sapiens
tggctacatattcca

SEQ ID NO: 1836050 - DNA, 15 bp, Homo sapiens
ggctacatattccac

SEQ ID NO: 1836051 - DNA, 15 bp, Homo sapiens
gctacatattccact

SEQ ID NO: 1836052 - DNA, 15 bp, Homo sapiens
ctacatattccacta

SEQ ID NO: 1836053 - DNA, 15 bp, Homo sapiens
tacatattccactat

SEQ ID NO: 1836054 - DNA, 15 bp, Homo sapiens
acatattccactatt

SEQ ID NO: 1836055 - DNA, 15 bp, Homo sapiens
catattccactatta

SEQ ID NO: 1836056 - DNA, 15 bp, Homo sapiens
atattccactattat

SEQ ID NO: 1836057 - DNA, 15 bp, Homo sapiens
tattccactattatg

SEQ ID NO: 1836058 - DNA, 15 bp, Homo sapiens
attccactattatgg

SEQ ID NO: 1836059 - DNA, 15 bp, Homo sapiens
ttccactattatgga

SEQ ID NO: 1836060 - DNA, 15 bp, Homo sapiens
tccactattatggat

SEQ ID NO: 1836061 - DNA, 15 bp, Homo sapiens
ccactattatggatg

SEQ ID NO: 1836062 - DNA, 15 bp, Homo sapiens
cactattatggatgt

SEQ ID NO: 1836063 - DNA, 15 bp, Homo sapiens
actattatggatgta

SEQ ID NO: 1836064 - DNA, 15 bp, Homo sapiens
ctattatggatgtac

SEQ ID NO: 1836065 - DNA, 15 bp, Homo sapiens
tattatggatgtacc

SEQ ID NO: 1836066 - DNA, 15 bp, Homo sapiens
attatggatgtacca

SEQ ID NO: 1836067 - DNA, 15 bp, Homo sapiens
ttatggatgtaccat

SEQ ID NO: 1836068 - DNA, 15 bp, Homo sapiens
tatggatgtaccata

SEQ ID NO: 1836069 - DNA, 15 bp, Homo sapiens
atggatgtaccatat

SEQ ID NO: 1836070 - DNA, 15 bp, Homo sapiens
tggatgtaccatatt

SEQ ID NO: 1836071 - DNA, 15 bp, Homo sapiens
ggatgtaccatattt

SEQ ID NO: 1836072 - DNA, 15 bp, Homo sapiens
gatgtaccatattta

SEQ ID NO: 1836073 - DNA, 15 bp, Homo sapiens
atgtaccatatttat

SEQ ID NO: 1836074 - DNA, 15 bp, Homo sapiens
tgtaccatatttata

SEQ ID NO: 1836075 - DNA, 15 bp, Homo sapiens
gtaccatatttatac

SEQ ID NO: 1836076 - DNA, 15 bp, Homo sapiens
taccatatttataca

SEQ ID NO: 1836077 - DNA, 15 bp, Homo sapiens
accatatttatacaa

SEQ ID NO: 1836078 - DNA, 15 bp, Homo sapiens
ccatatttatacaac

SEQ ID NO: 1836079 - DNA, 15 bp, Homo sapiens
catatttatacaacc

SEQ ID NO: 1836080 - DNA, 15 bp, Homo sapiens
atatttatacaaccg

SEQ ID NO: 1836081 - DNA, 15 bp, Homo sapiens
tatttatacaaccgg

SEQ ID NO: 1836082 - DNA, 15 bp, Homo sapiens
atttatacaaccggt

SEQ ID NO: 1836083 - DNA, 15 bp, Homo sapiens
tttatacaaccggtt

SEQ ID NO: 1836084 - DNA, 15 bp, Homo sapiens
ttatacaaccggttc

SEQ ID NO: 1836085 - DNA, 15 bp, Homo sapiens
tatacaaccggttcc

SEQ ID NO: 1836086 - DNA, 15 bp, Homo sapiens
atacaaccggttccc

SEQ ID NO: 1836087 - DNA, 15 bp, Homo sapiens
tacaaccggttccct

SEQ ID NO: 1836088 - DNA, 15 bp, Homo sapiens
acaaccggttcccta

SEQ ID NO: 1836089 - DNA, 15 bp, Homo sapiens
caaccggttccctat

SEQ ID NO: 1836090 - DNA, 15 bp, Homo sapiens
aaccggttccctatt

SEQ ID NO: 1836091 - DNA, 15 bp, Homo sapiens
accggttccctattg

SEQ ID NO: 1836092 - DNA, 15 bp, Homo sapiens
ccggttccctattga

SEQ ID NO: 1836093 - DNA, 15 bp, Homo sapiens
cggttccctattgat

SEQ ID NO: 1836094 - DNA, 15 bp, Homo sapiens
ggttccctattgatg

SEQ ID NO: 1836095 - DNA, 15 bp, Homo sapiens
gttccctattgatgg

SEQ ID NO: 1836096 - DNA, 15 bp, Homo sapiens
ttccctattgatgga

SEQ ID NO: 1836097 - DNA, 15 bp, Homo sapiens
tccctattgatggac

SEQ ID NO: 1836098 - DNA, 15 bp, Homo sapiens
ccctattgatggaca

SEQ ID NO: 1836099 - DNA, 15 bp, Homo sapiens
cctattgatggacat

SEQ ID NO: 1836100 - DNA, 15 bp, Homo sapiens
ctattgatggacata

SEQ ID NO: 1836101 - DNA, 15 bp, Homo sapiens
tattgatggacatat

SEQ ID NO: 1836102 - DNA, 15 bp, Homo sapiens
attgatggacatatg

SEQ ID NO: 1836103 - DNA, 15 bp, Homo sapiens
ttgatggacatatgg

SEQ ID NO: 1836104 - DNA, 15 bp, Homo sapiens
tgatggacatatggt

SEQ ID NO: 1836105 - DNA, 15 bp, Homo sapiens
gatggacatatggtt

SEQ ID NO: 1836106 - DNA, 15 bp, Homo sapiens
atggacatatggttg

SEQ ID NO: 1836107 - DNA, 15 bp, Homo sapiens
tggacatatggttgt

SEQ ID NO: 1836108 - DNA, 15 bp, Homo sapiens
ggacatatggttgtg

SEQ ID NO: 1836109 - DNA, 15 bp, Homo sapiens
gacatatggttgtgt

SEQ ID NO: 1836110 - DNA, 15 bp, Homo sapiens
acatatggttgtgtc

SEQ ID NO: 1836111 - DNA, 15 bp, Homo sapiens
catatggttgtgtct

SEQ ID NO: 1836112 - DNA, 15 bp, Homo sapiens
atatggttgtgtcta

SEQ ID NO: 1836113 - DNA, 15 bp, Homo sapiens
tatggttgtgtctag

SEQ ID NO: 1836114 - DNA, 15 bp, Homo sapiens
atggttgtgtctagt

SEQ ID NO: 1836115 - DNA, 15 bp, Homo sapiens
tggttgtgtctagtt

SEQ ID NO: 1836116 - DNA, 15 bp, Homo sapiens
ggttgtgtctagttt

SEQ ID NO: 1836117 - DNA, 15 bp, Homo sapiens
gttgtgtctagtttt

SEQ ID NO: 1836118 - DNA, 15 bp, Homo sapiens
ttgtgtctagttttt

SEQ ID NO: 1836119 - DNA, 15 bp, Homo sapiens
tgtgtctagtttttt

SEQ ID NO: 1836120 - DNA, 15 bp, Homo sapiens
gtgtctagttttttg

SEQ ID NO: 1836121 - DNA, 15 bp, Homo sapiens
tgtctagttttttgc

SEQ ID NO: 1836122 - DNA, 15 bp, Homo sapiens
gtctagttttttgct

SEQ ID NO: 1836123 - DNA, 15 bp, Homo sapiens
tctagttttttgcta

SEQ ID NO: 1836124 - DNA, 15 bp, Homo sapiens
ctagttttttgctag

SEQ ID NO: 1836125 - DNA, 15 bp, Homo sapiens
tagttttttgctagc

SEQ ID NO: 1836126 - DNA, 15 bp, Homo sapiens
agttttttgctagca

SEQ ID NO: 1836127 - DNA, 15 bp, Homo sapiens
gttttttgctagcat

SEQ ID NO: 1836128 - DNA, 15 bp, Homo sapiens
ttttttgctagcatt

SEQ ID NO: 1836129 - DNA, 15 bp, Homo sapiens
tttttgctagcattg

SEQ ID NO: 1836130 - DNA, 15 bp, Homo sapiens
ttttgctagcattgt

SEQ ID NO: 1836131 - DNA, 15 bp, Homo sapiens
tttgctagcattgtg

SEQ ID NO: 1836132 - DNA, 15 bp, Homo sapiens
ttgctagcattgtga

SEQ ID NO: 1836133 - DNA, 15 bp, Homo sapiens
tgctagcattgtgat

SEQ ID NO: 1836134 - DNA, 15 bp, Homo sapiens
gctagcattgtgata

SEQ ID NO: 1836135 - DNA, 15 bp, Homo sapiens
ctagcattgtgatag

SEQ ID NO: 1836136 - DNA, 15 bp, Homo sapiens
tagcattgtgataga

SEQ ID NO: 1836137 - DNA, 15 bp, Homo sapiens
agcattgtgatagat

SEQ ID NO: 1836138 - DNA, 15 bp, Homo sapiens
gcattgtgatagatt

SEQ ID NO: 1836139 - DNA, 15 bp, Homo sapiens
cattgtgatagatta

SEQ ID NO: 1836140 - DNA, 15 bp, Homo sapiens
attgtgatagattag

SEQ ID NO: 1836141 - DNA, 15 bp, Homo sapiens
ttgtgatagattaga

SEQ ID NO: 1836142 - DNA, 15 bp, Homo sapiens
tgtgatagattagag

SEQ ID NO: 1836143 - DNA, 15 bp, Homo sapiens
gtgatagattagagc

SEQ ID NO: 1836144 - DNA, 15 bp, Homo sapiens
tgatagattagagcc

SEQ ID NO: 1836145 - DNA, 15 bp, Homo sapiens
gatagattagagcct

SEQ ID NO: 1836146 - DNA, 15 bp, Homo sapiens
atagattagagcctg

SEQ ID NO: 1836147 - DNA, 15 bp, Homo sapiens
tagattagagcctgt

SEQ ID NO: 1836148 - DNA, 15 bp, Homo sapiens
agattagagcctgta

SEQ ID NO: 1836149 - DNA, 15 bp, Homo sapiens
gattagagcctgtaa

SEQ ID NO: 1836150 - DNA, 15 bp, Homo sapiens
attagagcctgtaat

SEQ ID NO: 1836151 - DNA, 15 bp, Homo sapiens
ttagagcctgtaatg

SEQ ID NO: 1836152 - DNA, 15 bp, Homo sapiens
tagagcctgtaatga

SEQ ID NO: 1836153 - DNA, 15 bp, Homo sapiens
agagcctgtaatgaa

SEQ ID NO: 1836154 - DNA, 15 bp, Homo sapiens
gagcctgtaatgaat

SEQ ID NO: 1836155 - DNA, 15 bp, Homo sapiens
agcctgtaatgaatg

SEQ ID NO: 1836156 - DNA, 15 bp, Homo sapiens
gcctgtaatgaatgg

SEQ ID NO: 1836157 - DNA, 15 bp, Homo sapiens
cctgtaatgaatggt

SEQ ID NO: 1836158 - DNA, 15 bp, Homo sapiens
ctgtaatgaatggta

SEQ ID NO: 1836159 - DNA, 15 bp, Homo sapiens
tgtaatgaatggtaa

SEQ ID NO: 1836160 - DNA, 15 bp, Homo sapiens
gtaatgaatggtaag

SEQ ID NO: 1836161 - DNA, 15 bp, Homo sapiens
taatgaatggtaagg

SEQ ID NO: 1836162 - DNA, 15 bp, Homo sapiens
aatgaatggtaagga

SEQ ID NO: 1836163 - DNA, 15 bp, Homo sapiens
atgaatggtaaggaa

SEQ ID NO: 1836164 - DNA, 15 bp, Homo sapiens
tgaatggtaaggaag

SEQ ID NO: 1836165 - DNA, 15 bp, Homo sapiens
gaatggtaaggaagt

SEQ ID NO: 1836166 - DNA, 15 bp, Homo sapiens
aatggtaaggaagta

SEQ ID NO: 1836167 - DNA, 15 bp, Homo sapiens
atggtaaggaagtaa

SEQ ID NO: 1836168 - DNA, 15 bp, Homo sapiens
tggtaaggaagtaag

SEQ ID NO: 1836169 - DNA, 15 bp, Homo sapiens
ggtaaggaagtaagt

SEQ ID NO: 1836170 - DNA, 15 bp, Homo sapiens
gtaaggaagtaagta

SEQ ID NO: 1836171 - DNA, 15 bp, Homo sapiens
taaggaagtaagtag

SEQ ID NO: 1836172 - DNA, 15 bp, Homo sapiens
aaggaagtaagtaga

SEQ ID NO: 1836173 - DNA, 15 bp, Homo sapiens
aggaagtaagtagat

SEQ ID NO: 1836174 - DNA, 15 bp, Homo sapiens
ggaagtaagtagatg

SEQ ID NO: 1836175 - DNA, 15 bp, Homo sapiens
gaagtaagtagatga

SEQ ID NO: 1836176 - DNA, 15 bp, Homo sapiens
aagtaagtagatgat

SEQ ID NO: 1836177 - DNA, 15 bp, Homo sapiens
agtaagtagatgata

SEQ ID NO: 1836178 - DNA, 15 bp, Homo sapiens
gtaagtagatgatag

SEQ ID NO: 1836179 - DNA, 15 bp, Homo sapiens
taagtagatgatagc

SEQ ID NO: 1836180 - DNA, 15 bp, Homo sapiens
aagtagatgatagca

SEQ ID NO: 1836181 - DNA, 15 bp, Homo sapiens
agtagatgatagcac

SEQ ID NO: 1836182 - DNA, 15 bp, Homo sapiens
gtagatgatagcact

SEQ ID NO: 1836183 - DNA, 15 bp, Homo sapiens
tagatgatagcacta

SEQ ID NO: 1836184 - DNA, 15 bp, Homo sapiens
agatgatagcactac

SEQ ID NO: 1836185 - DNA, 15 bp, Homo sapiens
gatgatagcactact

SEQ ID NO: 1836186 - DNA, 15 bp, Homo sapiens
atgatagcactacta

SEQ ID NO: 1836187 - DNA, 15 bp, Homo sapiens
tgatagcactactac

SEQ ID NO: 1836188 - DNA, 15 bp, Homo sapiens
gatagcactactact

SEQ ID NO: 1836189 - DNA, 15 bp, Homo sapiens
atagcactactactt

SEQ ID NO: 1836190 - DNA, 15 bp, Homo sapiens
tagcactactacttt

SEQ ID NO: 1836191 - DNA, 15 bp, Homo sapiens
agcactactactttg

SEQ ID NO: 1836192 - DNA, 15 bp, Homo sapiens
gcactactactttga

SEQ ID NO: 1836193 - DNA, 15 bp, Homo sapiens
cactactactttgaa

SEQ ID NO: 1836194 - DNA, 15 bp, Homo sapiens
actactactttgaag

SEQ ID NO: 1836195 - DNA, 15 bp, Homo sapiens
ctactactttgaagg

SEQ ID NO: 1836196 - DNA, 15 bp, Homo sapiens
tactactttgaagga

SEQ ID NO: 1836197 - DNA, 15 bp, Homo sapiens
actactttgaaggaa

SEQ ID NO: 1836198 - DNA, 15 bp, Homo sapiens
ctactttgaaggaaa

SEQ ID NO: 1836199 - DNA, 15 bp, Homo sapiens
tactttgaaggaaaa

SEQ ID NO: 1836200 - DNA, 15 bp, Homo sapiens
actttgaaggaaaaa

SEQ ID NO: 1836201 - DNA, 15 bp, Homo sapiens
ctttgaaggaaaaag

SEQ ID NO: 1836202 - DNA, 15 bp, Homo sapiens
tttgaaggaaaaagt

SEQ ID NO: 1836203 - DNA, 15 bp, Homo sapiens
ttgaaggaaaaagta

SEQ ID NO: 1836204 - DNA, 15 bp, Homo sapiens
tgaaggaaaaagtag

SEQ ID NO: 1836205 - DNA, 15 bp, Homo sapiens
gaaggaaaaagtaga

SEQ ID NO: 1836206 - DNA, 15 bp, Homo sapiens
aaggaaaaagtagag

SEQ ID NO: 1836207 - DNA, 15 bp, Homo sapiens
aggaaaaagtagaga

SEQ ID NO: 1836208 - DNA, 15 bp, Homo sapiens
ggaaaaagtagagaa

SEQ ID NO: 1836209 - DNA, 15 bp, Homo sapiens
gaaaaagtagagaat

SEQ ID NO: 1836210 - DNA, 15 bp, Homo sapiens
aaaaagtagagaata

SEQ ID NO: 1836211 - DNA, 15 bp, Homo sapiens
aaaagtagagaataa

SEQ ID NO: 1836212 - DNA, 15 bp, Homo sapiens
aaagtagagaataaa

SEQ ID NO: 1836213 - DNA, 15 bp, Homo sapiens
aagtagagaataaac

SEQ ID NO: 1836214 - DNA, 15 bp, Homo sapiens
agtagagaataaact

SEQ ID NO: 1836215 - DNA, 15 bp, Homo sapiens
gtagagaataaactt

SEQ ID NO: 1836216 - DNA, 15 bp, Homo sapiens
tagagaataaacttc

SEQ ID NO: 1836217 - DNA, 15 bp, Homo sapiens
agagaataaacttcc

SEQ ID NO: 1836218 - DNA, 15 bp, Homo sapiens
gagaataaacttcct

SEQ ID NO: 1836219 - DNA, 15 bp, Homo sapiens
agaataaacttcctt

SEQ ID NO: 1836220 - DNA, 15 bp, Homo sapiens
gaataaacttccttt

SEQ ID NO: 1836221 - DNA, 15 bp, Homo sapiens
aataaacttcctttg

SEQ ID NO: 1836222 - DNA, 15 bp, Homo sapiens
ataaacttcctttgc

SEQ ID NO: 1836223 - DNA, 15 bp, Homo sapiens
taaacttcctttgcc

SEQ ID NO: 1836224 - DNA, 15 bp, Homo sapiens
aaacttcctttgcca

SEQ ID NO: 1836225 - DNA, 15 bp, Homo sapiens
aacttcctttgccat

SEQ ID NO: 1836226 - DNA, 15 bp, Homo sapiens
acttcctttgccata

SEQ ID NO: 1836227 - DNA, 15 bp, Homo sapiens
cttcctttgccatag

SEQ ID NO: 1836228 - DNA, 15 bp, Homo sapiens
ttcctttgccatagt

SEQ ID NO: 1836229 - DNA, 15 bp, Homo sapiens
tcctttgccatagtc

SEQ ID NO: 1836230 - DNA, 15 bp, Homo sapiens
cctttgccatagtca

SEQ ID NO: 1836231 - DNA, 15 bp, Homo sapiens
ctttgccatagtcac

SEQ ID NO: 1836232 - DNA, 15 bp, Homo sapiens
tttgccatagtcact

SEQ ID NO: 1836233 - DNA, 15 bp, Homo sapiens
ttgccatagtcactt

SEQ ID NO: 1836234 - DNA, 15 bp, Homo sapiens
tgccatagtcactta

SEQ ID NO: 1836235 - DNA, 15 bp, Homo sapiens
gccatagtcacttac

SEQ ID NO: 1836236 - DNA, 15 bp, Homo sapiens
ccatagtcacttact

SEQ ID NO: 1836237 - DNA, 15 bp, Homo sapiens
catagtcacttacta

SEQ ID NO: 1836238 - DNA, 15 bp, Homo sapiens
atagtcacttactaa

SEQ ID NO: 1836239 - DNA, 15 bp, Homo sapiens
tagtcacttactaaa

SEQ ID NO: 1836240 - DNA, 15 bp, Homo sapiens
agtcacttactaaat

SEQ ID NO: 1836241 - DNA, 15 bp, Homo sapiens
gtcacttactaaatg

SEQ ID NO: 1836242 - DNA, 15 bp, Homo sapiens
tcacttactaaatgg

SEQ ID NO: 1836243 - DNA, 15 bp, Homo sapiens
cacttactaaatgga

SEQ ID NO: 1836244 - DNA, 15 bp, Homo sapiens
acttactaaatggaa

SEQ ID NO: 1836245 - DNA, 15 bp, Homo sapiens
cttactaaatggaat

SEQ ID NO: 1836246 - DNA, 15 bp, Homo sapiens
ttactaaatggaatt

SEQ ID NO: 1836247 - DNA, 15 bp, Homo sapiens
tactaaatggaattt

SEQ ID NO: 1836248 - DNA, 15 bp, Homo sapiens
actaaatggaattta

SEQ ID NO: 1836249 - DNA, 15 bp, Homo sapiens
ctaaatggaatttaa

SEQ ID NO: 1836250 - DNA, 15 bp, Homo sapiens
taaatggaatttaat

SEQ ID NO: 1836251 - DNA, 15 bp, Homo sapiens
aaatggaatttaata

SEQ ID NO: 1836252 - DNA, 15 bp, Homo sapiens
aatggaatttaataa

SEQ ID NO: 1836253 - DNA, 15 bp, Homo sapiens
atggaatttaataaa

SEQ ID NO: 1836254 - DNA, 15 bp, Homo sapiens
tggaatttaataaaa

SEQ ID NO: 1836255 - DNA, 15 bp, Homo sapiens
ggaatttaataaaaa

SEQ ID NO: 1836256 - DNA, 15 bp, Homo sapiens
gaatttaataaaaac

SEQ ID NO: 1836257 - DNA, 15 bp, Homo sapiens
aatttaataaaaaca

SEQ ID NO: 1836258 - DNA, 15 bp, Homo sapiens
atttaataaaaacac

SEQ ID NO: 1836259 - DNA, 15 bp, Homo sapiens
tttaataaaaacact

SEQ ID NO: 1836260 - DNA, 15 bp, Homo sapiens
ttaataaaaacactg

SEQ ID NO: 1836261 - DNA, 15 bp, Homo sapiens
taataaaaacactgt

SEQ ID NO: 1836262 - DNA, 15 bp, Homo sapiens
aataaaaacactgtc

SEQ ID NO: 1836263 - DNA, 15 bp, Homo sapiens
ataaaaacactgtca

SEQ ID NO: 1836264 - DNA, 15 bp, Homo sapiens
taaaaacactgtcaa

SEQ ID NO: 1836265 - DNA, 15 bp, Homo sapiens
aaaaacactgtcaaa

SEQ ID NO: 1836266 - DNA, 15 bp, Homo sapiens
aaaacactgtcaaaa

SEQ ID NO: 1836267 - DNA, 15 bp, Homo sapiens
aaacactgtcaaaag

SEQ ID NO: 1836268 - DNA, 15 bp, Homo sapiens
aacactgtcaaaagt

SEQ ID NO: 1836269 - DNA, 15 bp, Homo sapiens
acactgtcaaaagtt

SEQ ID NO: 1836270 - DNA, 15 bp, Homo sapiens
cactgtcaaaagttg

SEQ ID NO: 1836271 - DNA, 15 bp, Homo sapiens
actgtcaaaagttgg

SEQ ID NO: 1836272 - DNA, 15 bp, Homo sapiens
ctgtcaaaagttggg

SEQ ID NO: 1836273 - DNA, 15 bp, Homo sapiens
tgtcaaaagttggga

SEQ ID NO: 1836274 - DNA, 15 bp, Homo sapiens
gtcaaaagttgggag

SEQ ID NO: 1836275 - DNA, 15 bp, Homo sapiens
tcaaaagttgggagg

SEQ ID NO: 1836276 - DNA, 15 bp, Homo sapiens
caaaagttgggagga

SEQ ID NO: 1836277 - DNA, 15 bp, Homo sapiens
aaaagttgggaggac

SEQ ID NO: 1836278 - DNA, 15 bp, Homo sapiens
aaagttgggaggacc

SEQ ID NO: 1836279 - DNA, 15 bp, Homo sapiens
aagttgggaggacca

SEQ ID NO: 1836280 - DNA, 15 bp, Homo sapiens
agttgggaggaccaa

SEQ ID NO: 1836281 - DNA, 15 bp, Homo sapiens
gttgggaggaccaaa

SEQ ID NO: 1836282 - DNA, 15 bp, Homo sapiens
ttgggaggaccaaaa

SEQ ID NO: 1836283 - DNA, 15 bp, Homo sapiens
tgggaggaccaaaat

SEQ ID NO: 1836284 - DNA, 15 bp, Homo sapiens
gggaggaccaaaatt

SEQ ID NO: 1836285 - DNA, 15 bp, Homo sapiens
ggaggaccaaaattg

SEQ ID NO: 1836286 - DNA, 15 bp, Homo sapiens
gaggaccaaaattga

SEQ ID NO: 1836287 - DNA, 15 bp, Homo sapiens
aggaccaaaattgat

SEQ ID NO: 1836288 - DNA, 15 bp, Homo sapiens
ggaccaaaattgata

SEQ ID NO: 1836289 - DNA, 15 bp, Homo sapiens
gaccaaaattgatac

SEQ ID NO: 1836290 - DNA, 15 bp, Homo sapiens
accaaaattgatact

SEQ ID NO: 1836291 - DNA, 15 bp, Homo sapiens
ccaaaattgatactt

SEQ ID NO: 1836292 - DNA, 15 bp, Homo sapiens
caaaattgatacttt

SEQ ID NO: 1836293 - DNA, 15 bp, Homo sapiens
aaaattgatactttt

SEQ ID NO: 1836294 - DNA, 15 bp, Homo sapiens
aaattgatacttttt

SEQ ID NO: 1836295 - DNA, 15 bp, Homo sapiens
aattgatactttttc

SEQ ID NO: 1836296 - DNA, 15 bp, Homo sapiens
attgatactttttct

SEQ ID NO: 1836297 - DNA, 15 bp, Homo sapiens
ttgatactttttctc

SEQ ID NO: 1836298 - DNA, 15 bp, Homo sapiens
tgatactttttctct

SEQ ID NO: 1836299 - DNA, 15 bp, Homo sapiens
gatactttttctctg

SEQ ID NO: 1836300 - DNA, 15 bp, Homo sapiens
atactttttctctga

SEQ ID NO: 1836301 - DNA, 15 bp, Homo sapiens
tactttttctctgat

SEQ ID NO: 1836302 - DNA, 15 bp, Homo sapiens
actttttctctgatc

SEQ ID NO: 1836303 - DNA, 15 bp, Homo sapiens
ctttttctctgatct

SEQ ID NO: 1836304 - DNA, 15 bp, Homo sapiens
tttttctctgatctt

SEQ ID NO: 1836305 - DNA, 15 bp, Homo sapiens
ttttctctgatcttt

SEQ ID NO: 1836306 - DNA, 15 bp, Homo sapiens
tttctctgatctttt

SEQ ID NO: 1836307 - DNA, 15 bp, Homo sapiens
ttctctgatcttttt

SEQ ID NO: 1836308 - DNA, 15 bp, Homo sapiens
tctctgatctttttg

SEQ ID NO: 1836309 - DNA, 15 bp, Homo sapiens
ctctgatctttttgc

SEQ ID NO: 1836310 - DNA, 15 bp, Homo sapiens
tctgatctttttgcc

SEQ ID NO: 1836311 - DNA, 15 bp, Homo sapiens
ctgatctttttgcca

SEQ ID NO: 1836312 - DNA, 15 bp, Homo sapiens
tgatctttttgccat

SEQ ID NO: 1836313 - DNA, 15 bp, Homo sapiens
gatctttttgccatg

SEQ ID NO: 1836314 - DNA, 15 bp, Homo sapiens
atctttttgccatgt

SEQ ID NO: 1836315 - DNA, 15 bp, Homo sapiens
tctttttgccatgtg

SEQ ID NO: 1836316 - DNA, 15 bp, Homo sapiens
ctttttgccatgtgt

SEQ ID NO: 1836317 - DNA, 15 bp, Homo sapiens
tttttgccatgtgta

SEQ ID NO: 1836318 - DNA, 15 bp, Homo sapiens
ttttgccatgtgtat

SEQ ID NO: 1836319 - DNA, 15 bp, Homo sapiens
tttgccatgtgtata

SEQ ID NO: 1836320 - DNA, 15 bp, Homo sapiens
ttgccatgtgtatat

SEQ ID NO: 1836321 - DNA, 15 bp, Homo sapiens
tgccatgtgtatatc

SEQ ID NO: 1836322 - DNA, 15 bp, Homo sapiens
gccatgtgtatatct

SEQ ID NO: 1836323 - DNA, 15 bp, Homo sapiens
ccatgtgtatatctg

SEQ ID NO: 1836324 - DNA, 15 bp, Homo sapiens
catgtgtatatctga

SEQ ID NO: 1836325 - DNA, 15 bp, Homo sapiens
atgtgtatatctgaa

SEQ ID NO: 1836326 - DNA, 15 bp, Homo sapiens
tgtgtatatctgaat

SEQ ID NO: 1836327 - DNA, 15 bp, Homo sapiens
gtgtatatctgaatt

SEQ ID NO: 1836328 - DNA, 15 bp, Homo sapiens
tgtatatctgaattc

SEQ ID NO: 1836329 - DNA, 15 bp, Homo sapiens
gtatatctgaattct

SEQ ID NO: 1836330 - DNA, 15 bp, Homo sapiens
tatatctgaattctt

SEQ ID NO: 1836331 - DNA, 15 bp, Homo sapiens
atatctgaattcttt

SEQ ID NO: 1836332 - DNA, 15 bp, Homo sapiens
tatctgaattctttg

SEQ ID NO: 1836333 - DNA, 15 bp, Homo sapiens
atctgaattctttgt

SEQ ID NO: 1836334 - DNA, 15 bp, Homo sapiens
tctgaattctttgtt

SEQ ID NO: 1836335 - DNA, 15 bp, Homo sapiens
ctgaattctttgttt

SEQ ID NO: 1836336 - DNA, 15 bp, Homo sapiens
tgaattctttgtttt

SEQ ID NO: 1836337 - DNA, 15 bp, Homo sapiens
gaattctttgttttt

SEQ ID NO: 1836338 - DNA, 15 bp, Homo sapiens
aattctttgttttta

SEQ ID NO: 1836339 - DNA, 15 bp, Homo sapiens
attctttgtttttaa

SEQ ID NO: 1836340 - DNA, 15 bp, Homo sapiens
ttctttgtttttaaa

SEQ ID NO: 1836341 - DNA, 15 bp, Homo sapiens
tctttgtttttaaag

SEQ ID NO: 1836342 - DNA, 15 bp, Homo sapiens
ctttgtttttaaaga

SEQ ID NO: 1836343 - DNA, 15 bp, Homo sapiens
tttgtttttaaagaa

SEQ ID NO: 1836344 - DNA, 15 bp, Homo sapiens
ttgtttttaaagaag

SEQ ID NO: 1836345 - DNA, 15 bp, Homo sapiens
tgtttttaaagaaga

SEQ ID NO: 1836346 - DNA, 15 bp, Homo sapiens
gtttttaaagaagaa

SEQ ID NO: 1836347 - DNA, 15 bp, Homo sapiens
tttttaaagaagaaa

SEQ ID NO: 1836348 - DNA, 15 bp, Homo sapiens
ttttaaagaagaaac

SEQ ID NO: 1836349 - DNA, 15 bp, Homo sapiens
tttaaagaagaaaca

SEQ ID NO: 1836350 - DNA, 15 bp, Homo sapiens
ttaaagaagaaacag

SEQ ID NO: 1836351 - DNA, 15 bp, Homo sapiens
taaagaagaaacagc

SEQ ID NO: 1836352 - DNA, 15 bp, Homo sapiens
aaagaagaaacagca

SEQ ID NO: 1836353 - DNA, 15 bp, Homo sapiens
aagaagaaacagcat

SEQ ID NO: 1836354 - DNA, 15 bp, Homo sapiens
agaagaaacagcatt

SEQ ID NO: 1836355 - DNA, 15 bp, Homo sapiens
gaagaaacagcattg

SEQ ID NO: 1836356 - DNA, 15 bp, Homo sapiens
aagaaacagcattga

SEQ ID NO: 1836357 - DNA, 15 bp, Homo sapiens
agaaacagcattgaa

SEQ ID NO: 1836358 - DNA, 15 bp, Homo sapiens
gaaacagcattgaag

SEQ ID NO: 1836359 - DNA, 15 bp, Homo sapiens
aaacagcattgaagc

SEQ ID NO: 1836360 - DNA, 15 bp, Homo sapiens
aacagcattgaagca

SEQ ID NO: 1836361 - DNA, 15 bp, Homo sapiens
acagcattgaagcat

SEQ ID NO: 1836362 - DNA, 15 bp, Homo sapiens
cagcattgaagcatt

SEQ ID NO: 1836363 - DNA, 15 bp, Homo sapiens
agcattgaagcatta

SEQ ID NO: 1836364 - DNA, 15 bp, Homo sapiens
gcattgaagcattat

SEQ ID NO: 1836365 - DNA, 15 bp, Homo sapiens
cattgaagcattatt

SEQ ID NO: 1836366 - DNA, 15 bp, Homo sapiens
attgaagcattattt

SEQ ID NO: 1836367 - DNA, 15 bp, Homo sapiens
ttgaagcattatttg

SEQ ID NO: 1836368 - DNA, 15 bp, Homo sapiens
tgaagcattatttgg

SEQ ID NO: 1836369 - DNA, 15 bp, Homo sapiens
gaagcattatttggg

SEQ ID NO: 1836370 - DNA, 15 bp, Homo sapiens
aagcattatttgggg

SEQ ID NO: 1836371 - DNA, 15 bp, Homo sapiens
agcattatttggggg

SEQ ID NO: 1836372 - DNA, 15 bp, Homo sapiens
gcattatttgggggg

SEQ ID NO: 1836373 - DNA, 15 bp, Homo sapiens
cattatttgggggga

SEQ ID NO: 1836374 - DNA, 15 bp, Homo sapiens
attatttggggggaa

SEQ ID NO: 1836375 - DNA, 15 bp, Homo sapiens
ttatttggggggaaa

SEQ ID NO: 1836376 - DNA, 15 bp, Homo sapiens
tatttggggggaaaa

SEQ ID NO: 1836377 - DNA, 15 bp, Homo sapiens
atttggggggaaaaa

SEQ ID NO: 1836378 - DNA, 15 bp, Homo sapiens
tttggggggaaaaac

SEQ ID NO: 1836379 - DNA, 15 bp, Homo sapiens
ttggggggaaaaaca

SEQ ID NO: 1836380 - DNA, 15 bp, Homo sapiens
tggggggaaaaacac

SEQ ID NO: 1836381 - DNA, 15 bp, Homo sapiens
ggggggaaaaacaca

SEQ ID NO: 1836382 - DNA, 15 bp, Homo sapiens
gggggaaaaacacac

SEQ ID NO: 1836383 - DNA, 15 bp, Homo sapiens
ggggaaaaacacaca

SEQ ID NO: 1836384 - DNA, 15 bp, Homo sapiens
gggaaaaacacacac

SEQ ID NO: 1836385 - DNA, 15 bp, Homo sapiens
ggaaaaacacacaca

SEQ ID NO: 1836386 - DNA, 15 bp, Homo sapiens
gaaaaacacacacac

SEQ ID NO: 1836387 - DNA, 15 bp, Homo sapiens
aaaacacacacacaa

SEQ ID NO: 1836388 - DNA, 15 bp, Homo sapiens
aaacacacacacaaa

SEQ ID NO: 1836389 - DNA, 15 bp, Homo sapiens
aacacacacacaaaa

SEQ ID NO: 1836390 - DNA, 15 bp, Homo sapiens
cacacacacaaaatc

SEQ ID NO: 1836391 - DNA, 15 bp, Homo sapiens
acacacacaaaatcc

SEQ ID NO: 1836392 - DNA, 15 bp, Homo sapiens
cacacacaaaatcca

SEQ ID NO: 1836393 - DNA, 15 bp, Homo sapiens
acacacaaaatccag

SEQ ID NO: 1836394 - DNA, 15 bp, Homo sapiens
cacacaaaatccagc

SEQ ID NO: 1836395 - DNA, 15 bp, Homo sapiens
acacaaaatccagca

SEQ ID NO: 1836396 - DNA, 15 bp, Homo sapiens
cacaaaatccagcaa

SEQ ID NO: 1836397 - DNA, 15 bp, Homo sapiens
acaaaatccagcaac

SEQ ID NO: 1836398 - DNA, 15 bp, Homo sapiens
caaaatccagcaact

SEQ ID NO: 1836399 - DNA, 15 bp, Homo sapiens
aaaatccagcaactc

SEQ ID NO: 1836400 - DNA, 15 bp, Homo sapiens
aaatccagcaactca

SEQ ID NO: 1836401 - DNA, 15 bp, Homo sapiens
aatccagcaactcag

SEQ ID NO: 1836402 - DNA, 15 bp, Homo sapiens
atccagcaactcagc

SEQ ID NO: 1836403 - DNA, 15 bp, Homo sapiens
tccagcaactcagca

SEQ ID NO: 1836404 - DNA, 15 bp, Homo sapiens
ccagcaactcagcat

SEQ ID NO: 1836405 - DNA, 15 bp, Homo sapiens
cagcaactcagcatt

SEQ ID NO: 1836406 - DNA, 15 bp, Homo sapiens
agcaactcagcattc

SEQ ID NO: 1836407 - DNA, 15 bp, Homo sapiens
gcaactcagcattca

SEQ ID NO: 1836408 - DNA, 15 bp, Homo sapiens
caactcagcattcat

SEQ ID NO: 1836409 - DNA, 15 bp, Homo sapiens
aactcagcattcatg

SEQ ID NO: 1836410 - DNA, 15 bp, Homo sapiens
actcagcattcatga

SEQ ID NO: 1836411 - DNA, 15 bp, Homo sapiens
ctcagcattcatgag

SEQ ID NO: 1836412 - DNA, 15 bp, Homo sapiens
tcagcattcatgagc

SEQ ID NO: 1836413 - DNA, 15 bp, Homo sapiens
cagcattcatgagca

SEQ ID NO: 1836414 - DNA, 15 bp, Homo sapiens
agcattcatgagcaa

SEQ ID NO: 1836415 - DNA, 15 bp, Homo sapiens
gcattcatgagcaac

SEQ ID NO: 1836416 - DNA, 15 bp, Homo sapiens
cattcatgagcaact

SEQ ID NO: 1836417 - DNA, 15 bp, Homo sapiens
attcatgagcaactc

SEQ ID NO: 1836418 - DNA, 15 bp, Homo sapiens
ttcatgagcaactct

SEQ ID NO: 1836419 - DNA, 15 bp, Homo sapiens
tcatgagcaactcta

SEQ ID NO: 1836420 - DNA, 15 bp, Homo sapiens
catgagcaactctat

SEQ ID NO: 1836421 - DNA, 15 bp, Homo sapiens
atgagcaactctata

SEQ ID NO: 1836422 - DNA, 15 bp, Homo sapiens
tgagcaactctatac

SEQ ID NO: 1836423 - DNA, 15 bp, Homo sapiens
gagcaactctatact

SEQ ID NO: 1836424 - DNA, 15 bp, Homo sapiens
agcaactctatacta

SEQ ID NO: 1836425 - DNA, 15 bp, Homo sapiens
gcaactctatactat

SEQ ID NO: 1836426 - DNA, 15 bp, Homo sapiens
caactctatactata

SEQ ID NO: 1836427 - DNA, 15 bp, Homo sapiens
aactctatactatac

SEQ ID NO: 1836428 - DNA, 15 bp, Homo sapiens
actctatactatacc

SEQ ID NO: 1836429 - DNA, 15 bp, Homo sapiens
ctctatactatacca

SEQ ID NO: 1836430 - DNA, 15 bp, Homo sapiens
tctatactataccag

SEQ ID NO: 1836431 - DNA, 15 bp, Homo sapiens
ctatactataccagt

SEQ ID NO: 1836432 - DNA, 15 bp, Homo sapiens
tatactataccagta

SEQ ID NO: 1836433 - DNA, 15 bp, Homo sapiens
atactataccagtat

SEQ ID NO: 1836434 - DNA, 15 bp, Homo sapiens
tactataccagtatg

SEQ ID NO: 1836435 - DNA, 15 bp, Homo sapiens
actataccagtatgt

SEQ ID NO: 1836436 - DNA, 15 bp, Homo sapiens
ctataccagtatgtg

SEQ ID NO: 1836437 - DNA, 15 bp, Homo sapiens
tataccagtatgtgc

SEQ ID NO: 1836438 - DNA, 15 bp, Homo sapiens
taccagtatgtgcct

SEQ ID NO: 1836439 - DNA, 15 bp, Homo sapiens
accagtatgtgcctg

SEQ ID NO: 1836440 - DNA, 15 bp, Homo sapiens
ccagtatgtgcctgt

SEQ ID NO: 1836441 - DNA, 15 bp, Homo sapiens
cagtatgtgcctgtg

SEQ ID NO: 1836442 - DNA, 15 bp, Homo sapiens
agtatgtgcctgtgc

SEQ ID NO: 1836443 - DNA, 15 bp, Homo sapiens
gtatgtgcctgtgca

SEQ ID NO: 1836444 - DNA, 15 bp, Homo sapiens
tatgtgcctgtgcag

SEQ ID NO: 1836445 - DNA, 15 bp, Homo sapiens
atgtgcctgtgcagt

SEQ ID NO: 1836446 - DNA, 15 bp, Homo sapiens
tgtgcctgtgcagtg

SEQ ID NO: 1836447 - DNA, 15 bp, Homo sapiens
gtgcctgtgcagtgg

SEQ ID NO: 1836448 - DNA, 15 bp, Homo sapiens
tgcctgtgcagtgga

SEQ ID NO: 1836449 - DNA, 15 bp, Homo sapiens
gcctgtgcagtggaa

SEQ ID NO: 1836450 - DNA, 15 bp, Homo sapiens
cctgtgcagtggaag

SEQ ID NO: 1836451 - DNA, 15 bp, Homo sapiens
ctgtgcagtggaagg

SEQ ID NO: 1836452 - DNA, 15 bp, Homo sapiens
tgtgcagtggaagga

SEQ ID NO: 1836453 - DNA, 15 bp, Homo sapiens
gtgcagtggaaggaa

SEQ ID NO: 1836454 - DNA, 15 bp, Homo sapiens
tgcagtggaaggaaa

SEQ ID NO: 1836455 - DNA, 15 bp, Homo sapiens
gcagtggaaggaaaa

SEQ ID NO: 1836456 - DNA, 15 bp, Homo sapiens
cagtggaaggaaaac

SEQ ID NO: 1836457 - DNA, 15 bp, Homo sapiens
agtggaaggaaaaca

SEQ ID NO: 1836458 - DNA, 15 bp, Homo sapiens
gtggaaggaaaacaa

SEQ ID NO: 1836459 - DNA, 15 bp, Homo sapiens
tggaaggaaaacaat

SEQ ID NO: 1836460 - DNA, 15 bp, Homo sapiens
ggaaggaaaacaatt

SEQ ID NO: 1836461 - DNA, 15 bp, Homo sapiens
gaaggaaaacaattt

SEQ ID NO: 1836462 - DNA, 15 bp, Homo sapiens
aaggaaaacaatttt

SEQ ID NO: 1836463 - DNA, 15 bp, Homo sapiens
aggaaaacaattttg

SEQ ID NO: 1836464 - DNA, 15 bp, Homo sapiens
ggaaaacaattttgg

SEQ ID NO: 1836465 - DNA, 15 bp, Homo sapiens
gaaaacaattttggt

SEQ ID NO: 1836466 - DNA, 15 bp, Homo sapiens
aaaacaattttggta

SEQ ID NO: 1836467 - DNA, 15 bp, Homo sapiens
aaacaattttggtaa

SEQ ID NO: 1836468 - DNA, 15 bp, Homo sapiens
aacaattttggtaag

SEQ ID NO: 1836469 - DNA, 15 bp, Homo sapiens
acaattttggtaagg

SEQ ID NO: 1836470 - DNA, 15 bp, Homo sapiens
caattttggtaagga

SEQ ID NO: 1836471 - DNA, 15 bp, Homo sapiens
aattttggtaaggat

SEQ ID NO: 1836472 - DNA, 15 bp, Homo sapiens
attttggtaaggatt

SEQ ID NO: 1836473 - DNA, 15 bp, Homo sapiens
ttttggtaaggatta

SEQ ID NO: 1836474 - DNA, 15 bp, Homo sapiens
tttggtaaggattaa

SEQ ID NO: 1836475 - DNA, 15 bp, Homo sapiens
ttggtaaggattaaa

SEQ ID NO: 1836476 - DNA, 15 bp, Homo sapiens
tggtaaggattaaaa

SEQ ID NO: 1836477 - DNA, 15 bp, Homo sapiens
ggtaaggattaaaac

SEQ ID NO: 1836478 - DNA, 15 bp, Homo sapiens
gtaaggattaaaact

SEQ ID NO: 1836479 - DNA, 15 bp, Homo sapiens
taaggattaaaactt

SEQ ID NO: 1836480 - DNA, 15 bp, Homo sapiens
aaggattaaaacttt

SEQ ID NO: 1836481 - DNA, 15 bp, Homo sapiens
aggattaaaacttta

SEQ ID NO: 1836482 - DNA, 15 bp, Homo sapiens
ggattaaaactttag

SEQ ID NO: 1836483 - DNA, 15 bp, Homo sapiens
gattaaaactttagc

SEQ ID NO: 1836484 - DNA, 15 bp, Homo sapiens
attaaaactttagct

SEQ ID NO: 1836485 - DNA, 15 bp, Homo sapiens
ttaaaactttagctt

SEQ ID NO: 1836486 - DNA, 15 bp, Homo sapiens
taaaactttagcttt

SEQ ID NO: 1836487 - DNA, 15 bp, Homo sapiens
aaaactttagcttta

SEQ ID NO: 1836488 - DNA, 15 bp, Homo sapiens
aaactttagctttaa

SEQ ID NO: 1836489 - DNA, 15 bp, Homo sapiens
aactttagctttaaa

SEQ ID NO: 1836490 - DNA, 15 bp, Homo sapiens
actttagctttaaac

SEQ ID NO: 1836491 - DNA, 15 bp, Homo sapiens
ctttagctttaaact

SEQ ID NO: 1836492 - DNA, 15 bp, Homo sapiens
tttagctttaaactt

SEQ ID NO: 1836493 - DNA, 15 bp, Homo sapiens
ttagctttaaacttc

SEQ ID NO: 1836494 - DNA, 15 bp, Homo sapiens
tagctttaaacttcc

SEQ ID NO: 1836495 - DNA, 15 bp, Homo sapiens
agctttaaacttcca

SEQ ID NO: 1836496 - DNA, 15 bp, Homo sapiens
gctttaaacttccag

SEQ ID NO: 1836497 - DNA, 15 bp, Homo sapiens
ctttaaacttccagc

SEQ ID NO: 1836498 - DNA, 15 bp, Homo sapiens
tttaaacttccagca

SEQ ID NO: 1836499 - DNA, 15 bp, Homo sapiens
ttaaacttccagcag

SEQ ID NO: 1836500 - DNA, 15 bp, Homo sapiens
taaacttccagcagg

SEQ ID NO: 1836501 - DNA, 15 bp, Homo sapiens
aaacttccagcaggt

SEQ ID NO: 1836502 - DNA, 15 bp, Homo sapiens
aacttccagcaggtt

SEQ ID NO: 1836503 - DNA, 15 bp, Homo sapiens
acttccagcaggttg

SEQ ID NO: 1836504 - DNA, 15 bp, Homo sapiens
cttccagcaggttga

SEQ ID NO: 1836505 - DNA, 15 bp, Homo sapiens
ttccagcaggttgat

SEQ ID NO: 1836506 - DNA, 15 bp, Homo sapiens
tccagcaggttgata

SEQ ID NO: 1836507 - DNA, 15 bp, Homo sapiens
ccagcaggttgatat

SEQ ID NO: 1836508 - DNA, 15 bp, Homo sapiens
cagcaggttgatatt

SEQ ID NO: 1836509 - DNA, 15 bp, Homo sapiens
agcaggttgatattc

SEQ ID NO: 1836510 - DNA, 15 bp, Homo sapiens
gcaggttgatattct

SEQ ID NO: 1836511 - DNA, 15 bp, Homo sapiens
caggttgatattcta

SEQ ID NO: 1836512 - DNA, 15 bp, Homo sapiens
aggttgatattctaa

SEQ ID NO: 1836513 - DNA, 15 bp, Homo sapiens
ggttgatattctaat

SEQ ID NO: 1836514 - DNA, 15 bp, Homo sapiens
gttgatattctaatg

SEQ ID NO: 1836515 - DNA, 15 bp, Homo sapiens
ttgatattctaatga

SEQ ID NO: 1836516 - DNA, 15 bp, Homo sapiens
tgatattctaatgaa

SEQ ID NO: 1836517 - DNA, 15 bp, Homo sapiens
gatattctaatgaat

SEQ ID NO: 1836518 - DNA, 15 bp, Homo sapiens
atattctaatgaatg

SEQ ID NO: 1836519 - DNA, 15 bp, Homo sapiens
tattctaatgaatga

SEQ ID NO: 1836520 - DNA, 15 bp, Homo sapiens
attctaatgaatgat

SEQ ID NO: 1836521 - DNA, 15 bp, Homo sapiens
ttctaatgaatgata

SEQ ID NO: 1836522 - DNA, 15 bp, Homo sapiens
tacttaagtaaaaaa

SEQ ID NO: 1836523 - DNA, 15 bp, Homo sapiens
acttaagtaaaaaat

SEQ ID NO: 1836524 - DNA, 15 bp, Homo sapiens
cttaagtaaaaaata

SEQ ID NO: 1836525 - DNA, 15 bp, Homo sapiens
ttaagtaaaaaataa

SEQ ID NO: 1836526 - DNA, 15 bp, Homo sapiens
taagtaaaaaataaa

SEQ ID NO: 1836527 - DNA, 15 bp, Homo sapiens
aagtaaaaaataaaa

SEQ ID NO: 1836528 - DNA, 15 bp, Homo sapiens
agtaaaaaataaaaa

SEQ ID NO: 1836529 - DNA, 15 bp, Homo sapiens
aaaaaataaaaatat

SEQ ID NO: 1836530 - DNA, 15 bp, Homo sapiens
aaaaataaaaatata

SEQ ID NO: 1836531 - DNA, 15 bp, Homo sapiens
ataaaaatataaaaa

SEQ ID NO: 1836532 - DNA, 15 bp, Homo sapiens
taaaaatataaaaag

SEQ ID NO: 1836533 - DNA, 15 bp, Homo sapiens
aaaaatataaaaaga

SEQ ID NO: 1836534 - DNA, 15 bp, Homo sapiens
aaaatataaaaagaa

SEQ ID NO: 1836535 - DNA, 15 bp, Homo sapiens
aaatataaaaagaaa

SEQ ID NO: 1836536 - DNA, 15 bp, Homo sapiens
aatataaaaagaaaa

SEQ ID NO: 1836537 - DNA, 15 bp, Homo sapiens
atataaaaagaaaaa

SEQ ID NO: 1836538 - DNA, 15 bp, Homo sapiens
tataaaaagaaaaaa

SEQ ID NO: 1836539 - DNA, 15 bp, Homo sapiens
ataaaaagaaaaaag

SEQ ID NO: 1836540 - DNA, 15 bp, Homo sapiens
aaaaagaaaaaagac

SEQ ID NO: 1836541 - DNA, 15 bp, Homo sapiens
aaaagaaaaaagaca

SEQ ID NO: 1836542 - DNA, 15 bp, Homo sapiens
aaagaaaaaagacag

SEQ ID NO: 1836543 - DNA, 15 bp, Homo sapiens
aagaaaaaagacaga

SEQ ID NO: 1836544 - DNA, 15 bp, Homo sapiens
agaaaaaagacagaa

SEQ ID NO: 1836545 - DNA, 15 bp, Homo sapiens
gaaaaaagacagaaa

SEQ ID NO: 1836546 - DNA, 15 bp, Homo sapiens
aaaaaagacagaaag

SEQ ID NO: 1836547 - DNA, 15 bp, Homo sapiens
aaaaagacagaaaga

SEQ ID NO: 1836548 - DNA, 15 bp, Homo sapiens
aaaagacagaaagag

SEQ ID NO: 1836549 - DNA, 15 bp, Homo sapiens
aaagacagaaagaga

SEQ ID NO: 1836550 - DNA, 15 bp, Homo sapiens
aagacagaaagagaa

SEQ ID NO: 1836551 - DNA, 15 bp, Homo sapiens
agacagaaagagaaa

SEQ ID NO: 1836552 - DNA, 15 bp, Homo sapiens
gacagaaagagaaag

SEQ ID NO: 1836553 - DNA, 15 bp, Homo sapiens
acagaaagagaaaga

SEQ ID NO: 1836554 - DNA, 15 bp, Homo sapiens
cagaaagagaaagag

SEQ ID NO: 1836555 - DNA, 15 bp, Homo sapiens
agaaagagaaagagg

SEQ ID NO: 1836556 - DNA, 15 bp, Homo sapiens
gaaagagaaagagga

SEQ ID NO: 1836557 - DNA, 15 bp, Homo sapiens
aaagagaaagaggac

SEQ ID NO: 1836558 - DNA, 15 bp, Homo sapiens
aagagaaagaggact

SEQ ID NO: 1836559 - DNA, 15 bp, Homo sapiens
agagaaagaggactt

SEQ ID NO: 1836560 - DNA, 15 bp, Homo sapiens
gagaaagaggacttt

SEQ ID NO: 1836561 - DNA, 15 bp, Homo sapiens
agaaagaggactttc

SEQ ID NO: 1836562 - DNA, 15 bp, Homo sapiens
gaaagaggactttcc

SEQ ID NO: 1836563 - DNA, 15 bp, Homo sapiens
aaagaggactttcca

SEQ ID NO: 1836564 - DNA, 15 bp, Homo sapiens
aagaggactttccag

SEQ ID NO: 1836565 - DNA, 15 bp, Homo sapiens
agaggactttccagg

SEQ ID NO: 1836566 - DNA, 15 bp, Homo sapiens
gaggactttccagga

SEQ ID NO: 1836567 - DNA, 15 bp, Homo sapiens
aggactttccaggaa

SEQ ID NO: 1836568 - DNA, 15 bp, Homo sapiens
ggactttccaggaag

SEQ ID NO: 1836569 - DNA, 15 bp, Homo sapiens
gactttccaggaagc

SEQ ID NO: 1836570 - DNA, 15 bp, Homo sapiens
actttccaggaagca

SEQ ID NO: 1836571 - DNA, 15 bp, Homo sapiens
ctttccaggaagcat

SEQ ID NO: 1836572 - DNA, 15 bp, Homo sapiens
tttccaggaagcatt

SEQ ID NO: 1836573 - DNA, 15 bp, Homo sapiens
ttccaggaagcattg

SEQ ID NO: 1836574 - DNA, 15 bp, Homo sapiens
tccaggaagcattga

SEQ ID NO: 1836575 - DNA, 15 bp, Homo sapiens
ccaggaagcattgat

SEQ ID NO: 1836576 - DNA, 15 bp, Homo sapiens
caggaagcattgatg

SEQ ID NO: 1836577 - DNA, 15 bp, Homo sapiens
aggaagcattgatgt

SEQ ID NO: 1836578 - DNA, 15 bp, Homo sapiens
ggaagcattgatgta

SEQ ID NO: 1836579 - DNA, 15 bp, Homo sapiens
gaagcattgatgtat

SEQ ID NO: 1836580 - DNA, 15 bp, Homo sapiens
aagcattgatgtatg

SEQ ID NO: 1836581 - DNA, 15 bp, Homo sapiens
agcattgatgtatgg

SEQ ID NO: 1836582 - DNA, 15 bp, Homo sapiens
gcattgatgtatgga

SEQ ID NO: 1836583 - DNA, 15 bp, Homo sapiens
cattgatgtatggag

SEQ ID NO: 1836584 - DNA, 15 bp, Homo sapiens
attgatgtatggagt

SEQ ID NO: 1836585 - DNA, 15 bp, Homo sapiens
ttgatgtatggagtc

SEQ ID NO: 1836586 - DNA, 15 bp, Homo sapiens
tgatgtatggagtct

SEQ ID NO: 1836587 - DNA, 15 bp, Homo sapiens
gatgtatggagtctg

SEQ ID NO: 1836588 - DNA, 15 bp, Homo sapiens
atgtatggagtctgt

SEQ ID NO: 1836589 - DNA, 15 bp, Homo sapiens
tgtatggagtctgtg

SEQ ID NO: 1836590 - DNA, 15 bp, Homo sapiens
gtatggagtctgtga

SEQ ID NO: 1836591 - DNA, 15 bp, Homo sapiens
tatggagtctgtgac

SEQ ID NO: 1836592 - DNA, 15 bp, Homo sapiens
atggagtctgtgact

SEQ ID NO: 1836593 - DNA, 15 bp, Homo sapiens
tggagtctgtgactc

SEQ ID NO: 1836594 - DNA, 15 bp, Homo sapiens
ggagtctgtgactct

SEQ ID NO: 1836595 - DNA, 15 bp, Homo sapiens
gagtctgtgactctc

SEQ ID NO: 1836596 - DNA, 15 bp, Homo sapiens
agtctgtgactctct

SEQ ID NO: 1836597 - DNA, 15 bp, Homo sapiens
gtctgtgactctcta

SEQ ID NO: 1836598 - DNA, 15 bp, Homo sapiens
tctgtgactctctag

SEQ ID NO: 1836599 - DNA, 15 bp, Homo sapiens
ctgtgactctctaga

SEQ ID NO: 1836600 - DNA, 15 bp, Homo sapiens
tgtgactctctagaa

SEQ ID NO: 1836601 - DNA, 15 bp, Homo sapiens
gtgactctctagaaa

SEQ ID NO: 1836602 - DNA, 15 bp, Homo sapiens
tgactctctagaaac

SEQ ID NO: 1836603 - DNA, 15 bp, Homo sapiens
gactctctagaaacc

SEQ ID NO: 1836604 - DNA, 15 bp, Homo sapiens
actctctagaaaccc

SEQ ID NO: 1836605 - DNA, 15 bp, Homo sapiens
ctctctagaaacccc

SEQ ID NO: 1836606 - DNA, 15 bp, Homo sapiens
tctctagaaacccca

SEQ ID NO: 1836607 - DNA, 15 bp, Homo sapiens
ctctagaaaccccaa

SEQ ID NO: 1836608 - DNA, 15 bp, Homo sapiens
tctagaaaccccaat

SEQ ID NO: 1836609 - DNA, 15 bp, Homo sapiens
ctagaaaccccaatc

SEQ ID NO: 1836610 - DNA, 15 bp, Homo sapiens
tagaaaccccaatct

SEQ ID NO: 1836611 - DNA, 15 bp, Homo sapiens
agaaaccccaatctt

SEQ ID NO: 1836612 - DNA, 15 bp, Homo sapiens
gaaaccccaatcttc

SEQ ID NO: 1836613 - DNA, 15 bp, Homo sapiens
aaaccccaatcttcc

SEQ ID NO: 1836614 - DNA, 15 bp, Homo sapiens
aaccccaatcttccc

SEQ ID NO: 1836615 - DNA, 15 bp, Homo sapiens
accccaatcttccca

SEQ ID NO: 1836616 - DNA, 15 bp, Homo sapiens
ccccaatcttcccac

SEQ ID NO: 1836617 - DNA, 15 bp, Homo sapiens
cccaatcttcccact

SEQ ID NO: 1836618 - DNA, 15 bp, Homo sapiens
ccaatcttcccactt

SEQ ID NO: 1836619 - DNA, 15 bp, Homo sapiens
caatcttcccacttg

SEQ ID NO: 1836620 - DNA, 15 bp, Homo sapiens
aatcttcccacttgg

SEQ ID NO: 1836621 - DNA, 15 bp, Homo sapiens
atcttcccacttggg

SEQ ID NO: 1836622 - DNA, 15 bp, Homo sapiens
tcttcccacttggga

SEQ ID NO: 1836623 - DNA, 15 bp, Homo sapiens
cttcccacttgggag

SEQ ID NO: 1836624 - DNA, 15 bp, Homo sapiens
ttcccacttgggaga

SEQ ID NO: 1836625 - DNA, 15 bp, Homo sapiens
tcccacttgggagat

SEQ ID NO: 1836626 - DNA, 15 bp, Homo sapiens
cccacttgggagatt

SEQ ID NO: 1836627 - DNA, 15 bp, Homo sapiens
ccacttgggagattt

SEQ ID NO: 1836628 - DNA, 15 bp, Homo sapiens
cacttgggagatttt

SEQ ID NO: 1836629 - DNA, 15 bp, Homo sapiens
acttgggagattttc

SEQ ID NO: 1836630 - DNA, 15 bp, Homo sapiens
cttgggagattttcc

SEQ ID NO: 1836631 - DNA, 15 bp, Homo sapiens
ttgggagattttcct

SEQ ID NO: 1836632 - DNA, 15 bp, Homo sapiens
tgggagattttcctg

SEQ ID NO: 1836633 - DNA, 15 bp, Homo sapiens
gggagattttcctga

SEQ ID NO: 1836634 - DNA, 15 bp, Homo sapiens
ggagattttcctgaa

SEQ ID NO: 1836635 - DNA, 15 bp, Homo sapiens
gagattttcctgaaa

SEQ ID NO: 1836636 - DNA, 15 bp, Homo sapiens
agattttcctgaaac

SEQ ID NO: 1836637 - DNA, 15 bp, Homo sapiens
gattttcctgaaacc

SEQ ID NO: 1836638 - DNA, 15 bp, Homo sapiens
attttcctgaaacct

SEQ ID NO: 1836639 - DNA, 15 bp, Homo sapiens
ttttcctgaaaccta

SEQ ID NO: 1836640 - DNA, 15 bp, Homo sapiens
tttcctgaaacctaa

SEQ ID NO: 1836641 - DNA, 15 bp, Homo sapiens
ttcctgaaacctaaa

SEQ ID NO: 1836642 - DNA, 15 bp, Homo sapiens
tcctgaaacctaaag

SEQ ID NO: 1836643 - DNA, 15 bp, Homo sapiens
cctgaaacctaaagt

SEQ ID NO: 1836644 - DNA, 15 bp, Homo sapiens
ctgaaacctaaagta

SEQ ID NO: 1836645 - DNA, 15 bp, Homo sapiens
tgaaacctaaagtaa

SEQ ID NO: 1836646 - DNA, 15 bp, Homo sapiens
gaaacctaaagtaaa

SEQ ID NO: 1836647 - DNA, 15 bp, Homo sapiens
aaacctaaagtaaag

SEQ ID NO: 1836648 - DNA, 15 bp, Homo sapiens
aacctaaagtaaagg

SEQ ID NO: 1836649 - DNA, 15 bp, Homo sapiens
acctaaagtaaaggc

SEQ ID NO: 1836650 - DNA, 15 bp, Homo sapiens
cctaaagtaaaggca

SEQ ID NO: 1836651 - DNA, 15 bp, Homo sapiens
ctaaagtaaaggcag

SEQ ID NO: 1836652 - DNA, 15 bp, Homo sapiens
taaagtaaaggcagg

SEQ ID NO: 1836653 - DNA, 15 bp, Homo sapiens
aaagtaaaggcagga

SEQ ID NO: 1836654 - DNA, 15 bp, Homo sapiens
aagtaaaggcaggag

SEQ ID NO: 1836655 - DNA, 15 bp, Homo sapiens
agtaaaggcaggagg

SEQ ID NO: 1836656 - DNA, 15 bp, Homo sapiens
gtaaaggcaggaggt

SEQ ID NO: 1836657 - DNA, 15 bp, Homo sapiens
taaaggcaggaggtc

SEQ ID NO: 1836658 - DNA, 15 bp, Homo sapiens
aaaggcaggaggtca

SEQ ID NO: 1836659 - DNA, 15 bp, Homo sapiens
aaggcaggaggtcag

SEQ ID NO: 1836660 - DNA, 15 bp, Homo sapiens
aggcaggaggtcagt

SEQ ID NO: 1836661 - DNA, 15 bp, Homo sapiens
ggcaggaggtcagtg

SEQ ID NO: 1836662 - DNA, 15 bp, Homo sapiens
gcaggaggtcagtga

SEQ ID NO: 1836663 - DNA, 15 bp, Homo sapiens
caggaggtcagtgaa

SEQ ID NO: 1836664 - DNA, 15 bp, Homo sapiens
aggaggtcagtgaag

SEQ ID NO: 1836665 - DNA, 15 bp, Homo sapiens
ggaggtcagtgaagc

SEQ ID NO: 1836666 - DNA, 15 bp, Homo sapiens
gaggtcagtgaagcc

SEQ ID NO: 1836667 - DNA, 15 bp, Homo sapiens
aggtcagtgaagccc

SEQ ID NO: 1836668 - DNA, 15 bp, Homo sapiens
ggtcagtgaagcccc

SEQ ID NO: 1836669 - DNA, 15 bp, Homo sapiens
gtcagtgaagcccca

SEQ ID NO: 1836670 - DNA, 15 bp, Homo sapiens
tcagtgaagccccaa

SEQ ID NO: 1836671 - DNA, 15 bp, Homo sapiens
cagtgaagccccaag

SEQ ID NO: 1836672 - DNA, 15 bp, Homo sapiens
agtgaagccccaagt

SEQ ID NO: 1836673 - DNA, 15 bp, Homo sapiens
gtgaagccccaagtg

SEQ ID NO: 1836674 - DNA, 15 bp, Homo sapiens
tgaagccccaagtga

SEQ ID NO: 1836675 - DNA, 15 bp, Homo sapiens
gaagccccaagtgaa

SEQ ID NO: 1836676 - DNA, 15 bp, Homo sapiens
aagccccaagtgaac

SEQ ID NO: 1836677 - DNA, 15 bp, Homo sapiens
agccccaagtgaaca

SEQ ID NO: 1836678 - DNA, 15 bp, Homo sapiens
gccccaagtgaacag

SEQ ID NO: 1836679 - DNA, 15 bp, Homo sapiens
ccccaagtgaacagc

SEQ ID NO: 1836680 - DNA, 15 bp, Homo sapiens
cccaagtgaacagct

SEQ ID NO: 1836681 - DNA, 15 bp, Homo sapiens
ccaagtgaacagctc

SEQ ID NO: 1836682 - DNA, 15 bp, Homo sapiens
caagtgaacagctcc

SEQ ID NO: 1836683 - DNA, 15 bp, Homo sapiens
aagtgaacagctcca

SEQ ID NO: 1836684 - DNA, 15 bp, Homo sapiens
agtgaacagctccag

SEQ ID NO: 1836685 - DNA, 15 bp, Homo sapiens
gtgaacagctccagg

SEQ ID NO: 1836686 - DNA, 15 bp, Homo sapiens
tgaacagctccaggt

SEQ ID NO: 1836687 - DNA, 15 bp, Homo sapiens
gaacagctccaggta

SEQ ID NO: 1836688 - DNA, 15 bp, Homo sapiens
aacagctccaggtaa

SEQ ID NO: 1836689 - DNA, 15 bp, Homo sapiens
acagctccaggtaac

SEQ ID NO: 1836690 - DNA, 15 bp, Homo sapiens
cagctccaggtaact

SEQ ID NO: 1836691 - DNA, 15 bp, Homo sapiens
agctccaggtaactc

SEQ ID NO: 1836692 - DNA, 15 bp, Homo sapiens
gctccaggtaactcc

SEQ ID NO: 1836693 - DNA, 15 bp, Homo sapiens
ctccaggtaactccc

SEQ ID NO: 1836694 - DNA, 15 bp, Homo sapiens
tccaggtaactccca

SEQ ID NO: 1836695 - DNA, 15 bp, Homo sapiens
ccaggtaactcccat

SEQ ID NO: 1836696 - DNA, 15 bp, Homo sapiens
caggtaactcccatt

SEQ ID NO: 1836697 - DNA, 15 bp, Homo sapiens
aggtaactcccattt

SEQ ID NO: 1836698 - DNA, 15 bp, Homo sapiens
ggtaactcccatttt

SEQ ID NO: 1836699 - DNA, 15 bp, Homo sapiens
gtaactcccatttta

SEQ ID NO: 1836700 - DNA, 15 bp, Homo sapiens
taactcccattttat

SEQ ID NO: 1836701 - DNA, 15 bp, Homo sapiens
aactcccattttatg

SEQ ID NO: 1836702 - DNA, 15 bp, Homo sapiens
actcccattttatgg

SEQ ID NO: 1836703 - DNA, 15 bp, Homo sapiens
ctcccattttatgga

SEQ ID NO: 1836704 - DNA, 15 bp, Homo sapiens
tcccattttatggat

SEQ ID NO: 1836705 - DNA, 15 bp, Homo sapiens
cccattttatggatg

SEQ ID NO: 1836706 - DNA, 15 bp, Homo sapiens
ccattttatggatgg

SEQ ID NO: 1836707 - DNA, 15 bp, Homo sapiens
cattttatggatgga

SEQ ID NO: 1836708 - DNA, 15 bp, Homo sapiens
attttatggatggaa

SEQ ID NO: 1836709 - DNA, 15 bp, Homo sapiens
ttttatggatggaaa

SEQ ID NO: 1836710 - DNA, 15 bp, Homo sapiens
tttatggatggaaac

SEQ ID NO: 1836711 - DNA, 15 bp, Homo sapiens
ttatggatggaaaca

SEQ ID NO: 1836712 - DNA, 15 bp, Homo sapiens
tatggatggaaacac

SEQ ID NO: 1836713 - DNA, 15 bp, Homo sapiens
atggatggaaacact

SEQ ID NO: 1836714 - DNA, 15 bp, Homo sapiens
tggatggaaacactg

SEQ ID NO: 1836715 - DNA, 15 bp, Homo sapiens
ggatggaaacactga

SEQ ID NO: 1836716 - DNA, 15 bp, Homo sapiens
gatggaaacactgag

SEQ ID NO: 1836717 - DNA, 15 bp, Homo sapiens
atggaaacactgagg

SEQ ID NO: 1836718 - DNA, 15 bp, Homo sapiens
tggaaacactgaggc

SEQ ID NO: 1836719 - DNA, 15 bp, Homo sapiens
ggaaacactgaggcc

SEQ ID NO: 1836720 - DNA, 15 bp, Homo sapiens
gaaacactgaggccc

SEQ ID NO: 1836721 - DNA, 15 bp, Homo sapiens
aaacactgaggccca

SEQ ID NO: 1836722 - DNA, 15 bp, Homo sapiens
aacactgaggcccac

SEQ ID NO: 1836723 - DNA, 15 bp, Homo sapiens
acactgaggcccacg

SEQ ID NO: 1836724 - DNA, 15 bp, Homo sapiens
cactgaggcccacgg

SEQ ID NO: 1836725 - DNA, 15 bp, Homo sapiens
actgaggcccacgga

SEQ ID NO: 1836726 - DNA, 15 bp, Homo sapiens
ctgaggcccacggac

SEQ ID NO: 1836727 - DNA, 15 bp, Homo sapiens
tgaggcccacggaca

SEQ ID NO: 1836728 - DNA, 15 bp, Homo sapiens
gaggcccacggacag

SEQ ID NO: 1836729 - DNA, 15 bp, Homo sapiens
aggcccacggacagc

SEQ ID NO: 1836730 - DNA, 15 bp, Homo sapiens
ggcccacggacagcc

SEQ ID NO: 1836731 - DNA, 15 bp, Homo sapiens
gcccacggacagccc

SEQ ID NO: 1836732 - DNA, 15 bp, Homo sapiens
cccacggacagccca

SEQ ID NO: 1836733 - DNA, 15 bp, Homo sapiens
ccacggacagcccaa

SEQ ID NO: 1836734 - DNA, 15 bp, Homo sapiens
cacggacagcccaag

SEQ ID NO: 1836735 - DNA, 15 bp, Homo sapiens
acggacagcccaagg

SEQ ID NO: 1836736 - DNA, 15 bp, Homo sapiens
cggacagcccaaggg

SEQ ID NO: 1836737 - DNA, 15 bp, Homo sapiens
ggacagcccaagggg

SEQ ID NO: 1836738 - DNA, 15 bp, Homo sapiens
gacagcccaaggggg

SEQ ID NO: 1836739 - DNA, 15 bp, Homo sapiens
acagcccaaggggga

SEQ ID NO: 1836740 - DNA, 15 bp, Homo sapiens
cagcccaagggggat

SEQ ID NO: 1836741 - DNA, 15 bp, Homo sapiens
agcccaagggggatc

SEQ ID NO: 1836742 - DNA, 15 bp, Homo sapiens
gcccaagggggatca

SEQ ID NO: 1836743 - DNA, 15 bp, Homo sapiens
cccaagggggatcag

SEQ ID NO: 1836744 - DNA, 15 bp, Homo sapiens
ccaagggggatcaga

SEQ ID NO: 1836745 - DNA, 15 bp, Homo sapiens
caagggggatcagag

SEQ ID NO: 1836746 - DNA, 15 bp, Homo sapiens
aagggggatcagagt

SEQ ID NO: 1836747 - DNA, 15 bp, Homo sapiens
agggggatcagagta

SEQ ID NO: 1836748 - DNA, 15 bp, Homo sapiens
gggggatcagagtaa

SEQ ID NO: 1836749 - DNA, 15 bp, Homo sapiens
ggggatcagagtaag

SEQ ID NO: 1836750 - DNA, 15 bp, Homo sapiens
gggatcagagtaagc

SEQ ID NO: 1836751 - DNA, 15 bp, Homo sapiens
ggatcagagtaagca

SEQ ID NO: 1836752 - DNA, 15 bp, Homo sapiens
gatcagagtaagcaa

SEQ ID NO: 1836753 - DNA, 15 bp, Homo sapiens
atcagagtaagcaat

SEQ ID NO: 1836754 - DNA, 15 bp, Homo sapiens
tcagagtaagcaatg

SEQ ID NO: 1836755 - DNA, 15 bp, Homo sapiens
cagagtaagcaatgc

SEQ ID NO: 1836756 - DNA, 15 bp, Homo sapiens
agagtaagcaatgcc

SEQ ID NO: 1836757 - DNA, 15 bp, Homo sapiens
gagtaagcaatgcca

SEQ ID NO: 1836758 - DNA, 15 bp, Homo sapiens
agtaagcaatgccaa

SEQ ID NO: 1836759 - DNA, 15 bp, Homo sapiens
gtaagcaatgccaac

SEQ ID NO: 1836760 - DNA, 15 bp, Homo sapiens
taagcaatgccaact

SEQ ID NO: 1836761 - DNA, 15 bp, Homo sapiens
aagcaatgccaactg

SEQ ID NO: 1836762 - DNA, 15 bp, Homo sapiens
agcaatgccaactgt

SEQ ID NO: 1836763 - DNA, 15 bp, Homo sapiens
gcaatgccaactgtt

SEQ ID NO: 1836764 - DNA, 15 bp, Homo sapiens
caatgccaactgttg

SEQ ID NO: 1836765 - DNA, 15 bp, Homo sapiens
aatgccaactgttgg

SEQ ID NO: 1836766 - DNA, 15 bp, Homo sapiens
atgccaactgttggg

SEQ ID NO: 1836767 - DNA, 15 bp, Homo sapiens
tgccaactgttggga

SEQ ID NO: 1836768 - DNA, 15 bp, Homo sapiens
gccaactgttgggac

SEQ ID NO: 1836769 - DNA, 15 bp, Homo sapiens
ccaactgttgggacc

SEQ ID NO: 1836770 - DNA, 15 bp, Homo sapiens
caactgttgggaccc

SEQ ID NO: 1836771 - DNA, 15 bp, Homo sapiens
aactgttgggacccc

SEQ ID NO: 1836772 - DNA, 15 bp, Homo sapiens
actgttgggacccca

SEQ ID NO: 1836773 - DNA, 15 bp, Homo sapiens
ctgttgggaccccaa

SEQ ID NO: 1836774 - DNA, 15 bp, Homo sapiens
tgttgggaccccaaa

SEQ ID NO: 1836775 - DNA, 15 bp, Homo sapiens
gttgggaccccaaag

SEQ ID NO: 1836776 - DNA, 15 bp, Homo sapiens
ttgggaccccaaaga

SEQ ID NO: 1836777 - DNA, 15 bp, Homo sapiens
tgggaccccaaagaa

SEQ ID NO: 1836778 - DNA, 15 bp, Homo sapiens
gggaccccaaagaaa

SEQ ID NO: 1836779 - DNA, 15 bp, Homo sapiens
ggaccccaaagaaag

SEQ ID NO: 1836780 - DNA, 15 bp, Homo sapiens
gaccccaaagaaaga

SEQ ID NO: 1836781 - DNA, 15 bp, Homo sapiens
accccaaagaaagaa

SEQ ID NO: 1836782 - DNA, 15 bp, Homo sapiens
ccccaaagaaagaaa

SEQ ID NO: 1836783 - DNA, 15 bp, Homo sapiens
cccaaagaaagaaac

SEQ ID NO: 1836784 - DNA, 15 bp, Homo sapiens
ccaaagaaagaaacg

SEQ ID NO: 1836785 - DNA, 15 bp, Homo sapiens
caaagaaagaaacgg

SEQ ID NO: 1836786 - DNA, 15 bp, Homo sapiens
aaagaaagaaacggt

SEQ ID NO: 1836787 - DNA, 15 bp, Homo sapiens
aagaaagaaacggtg

SEQ ID NO: 1836788 - DNA, 15 bp, Homo sapiens
agaaagaaacggtgt

SEQ ID NO: 1836789 - DNA, 15 bp, Homo sapiens
gaaagaaacggtgtt

SEQ ID NO: 1836790 - DNA, 15 bp, Homo sapiens
aaagaaacggtgttg

SEQ ID NO: 1836791 - DNA, 15 bp, Homo sapiens
aagaaacggtgttgg

SEQ ID NO: 1836792 - DNA, 15 bp, Homo sapiens
agaaacggtgttggt

SEQ ID NO: 1836793 - DNA, 15 bp, Homo sapiens
gaaacggtgttggtt

SEQ ID NO: 1836794 - DNA, 15 bp, Homo sapiens
aaacggtgttggttg

SEQ ID NO: 1836795 - DNA, 15 bp, Homo sapiens
aacggtgttggttgg

SEQ ID NO: 1836796 - DNA, 15 bp, Homo sapiens
acggtgttggttggg

SEQ ID NO: 1836797 - DNA, 15 bp, Homo sapiens
cggtgttggttgggc

SEQ ID NO: 1836798 - DNA, 15 bp, Homo sapiens
ggtgttggttgggca

SEQ ID NO: 1836799 - DNA, 15 bp, Homo sapiens
gtgttggttgggcac

SEQ ID NO: 1836800 - DNA, 15 bp, Homo sapiens
tgttggttgggcaca

SEQ ID NO: 1836801 - DNA, 15 bp, Homo sapiens
gttggttgggcacag

SEQ ID NO: 1836802 - DNA, 15 bp, Homo sapiens
ttggttgggcacagt

SEQ ID NO: 1836803 - DNA, 15 bp, Homo sapiens
tggttgggcacagtg

SEQ ID NO: 1836804 - DNA, 15 bp, Homo sapiens
gggcacagtggctct

SEQ ID NO: 1836805 - DNA, 15 bp, Homo sapiens
ggcacagtggctctc

SEQ ID NO: 1836806 - DNA, 15 bp, Homo sapiens
gcacagtggctctcg

SEQ ID NO: 1836807 - DNA, 15 bp, Homo sapiens
cacagtggctctcgc

SEQ ID NO: 1836808 - DNA, 15 bp, Homo sapiens
acagtggctctcgcc

SEQ ID NO: 1836809 - DNA, 15 bp, Homo sapiens
cagtggctctcgcct

SEQ ID NO: 1836810 - DNA, 15 bp, Homo sapiens
agtggctctcgcctg

SEQ ID NO: 1836811 - DNA, 15 bp, Homo sapiens
gtggctctcgcctgt

SEQ ID NO: 1836812 - DNA, 15 bp, Homo sapiens
tggctctcgcctgta

SEQ ID NO: 1836813 - DNA, 15 bp, Homo sapiens
ggctctcgcctgtaa

SEQ ID NO: 1836814 - DNA, 15 bp, Homo sapiens
gctctcgcctgtaat

SEQ ID NO: 1836815 - DNA, 15 bp, Homo sapiens
ctctcgcctgtaatc

SEQ ID NO: 1836816 - DNA, 15 bp, Homo sapiens
tctcgcctgtaatcc

SEQ ID NO: 1836817 - DNA, 15 bp, Homo sapiens
ctcgcctgtaatccc

SEQ ID NO: 1836818 - DNA, 15 bp, Homo sapiens
tcgcctgtaatccca

SEQ ID NO: 1836819 - DNA, 15 bp, Homo sapiens
gaggctgaggcggat

SEQ ID NO: 1836820 - DNA, 15 bp, Homo sapiens
aggctgaggcggatg

SEQ ID NO: 1836821 - DNA, 15 bp, Homo sapiens
ggctgaggcggatgg

SEQ ID NO: 1836822 - DNA, 15 bp, Homo sapiens
gctgaggcggatggc

SEQ ID NO: 1836823 - DNA, 15 bp, Homo sapiens
ctgaggcggatggct

SEQ ID NO: 1836824 - DNA, 15 bp, Homo sapiens
tgaggcggatggctc

SEQ ID NO: 1836825 - DNA, 15 bp, Homo sapiens
gaggcggatggctca

SEQ ID NO: 1836826 - DNA, 15 bp, Homo sapiens
aggcggatggctcat

SEQ ID NO: 1836827 - DNA, 15 bp, Homo sapiens
ggcggatggctcatt

SEQ ID NO: 1836828 - DNA, 15 bp, Homo sapiens
gcggatggctcattg

SEQ ID NO: 1836829 - DNA, 15 bp, Homo sapiens
cggatggctcattgg

SEQ ID NO: 1836830 - DNA, 15 bp, Homo sapiens
ggatggctcattgga

SEQ ID NO: 1836831 - DNA, 15 bp, Homo sapiens
gatggctcattggag

SEQ ID NO: 1836832 - DNA, 15 bp, Homo sapiens
atggctcattggagg

SEQ ID NO: 1836833 - DNA, 15 bp, Homo sapiens
tggctcattggaggt

SEQ ID NO: 1836834 - DNA, 15 bp, Homo sapiens
ggctcattggaggtc

SEQ ID NO: 1836835 - DNA, 15 bp, Homo sapiens
gctcattggaggtca

SEQ ID NO: 1836836 - DNA, 15 bp, Homo sapiens
ctcattggaggtcag

SEQ ID NO: 1836837 - DNA, 15 bp, Homo sapiens
tcattggaggtcagt

SEQ ID NO: 1836838 - DNA, 15 bp, Homo sapiens
cattggaggtcagta

SEQ ID NO: 1836839 - DNA, 15 bp, Homo sapiens
attggaggtcagtag

SEQ ID NO: 1836840 - DNA, 15 bp, Homo sapiens
ttggaggtcagtagt

SEQ ID NO: 1836841 - DNA, 15 bp, Homo sapiens
tggaggtcagtagtt

SEQ ID NO: 1836842 - DNA, 15 bp, Homo sapiens
ggaggtcagtagttt

SEQ ID NO: 1836843 - DNA, 15 bp, Homo sapiens
gaggtcagtagtttg

SEQ ID NO: 1836844 - DNA, 15 bp, Homo sapiens
aggtcagtagtttga

SEQ ID NO: 1836845 - DNA, 15 bp, Homo sapiens
ggtcagtagtttgag

SEQ ID NO: 1836846 - DNA, 15 bp, Homo sapiens
gtcagtagtttgaga

SEQ ID NO: 1836847 - DNA, 15 bp, Homo sapiens
tcagtagtttgagac

SEQ ID NO: 1836848 - DNA, 15 bp, Homo sapiens
cagtagtttgagacc

SEQ ID NO: 1836849 - DNA, 15 bp, Homo sapiens
agtagtttgagacca

SEQ ID NO: 1836850 - DNA, 15 bp, Homo sapiens
gtagtttgagaccag

SEQ ID NO: 1836851 - DNA, 15 bp, Homo sapiens
tagtttgagaccagc

SEQ ID NO: 1836852 - DNA, 15 bp, Homo sapiens
acatggcaaaaccca

SEQ ID NO: 1836853 - DNA, 15 bp, Homo sapiens
catggcaaaacccat

SEQ ID NO: 1836854 - DNA, 15 bp, Homo sapiens
atggcaaaacccatc

SEQ ID NO: 1836855 - DNA, 15 bp, Homo sapiens
tggcaaaacccatct

SEQ ID NO: 1836856 - DNA, 15 bp, Homo sapiens
ggcaaaacccatctc

SEQ ID NO: 1836857 - DNA, 15 bp, Homo sapiens
gcaaaacccatctct

SEQ ID NO: 1836858 - DNA, 15 bp, Homo sapiens
caaaacccatctcta

SEQ ID NO: 1836859 - DNA, 15 bp, Homo sapiens
aaaacccatctctat

SEQ ID NO: 1836860 - DNA, 15 bp, Homo sapiens
aaacccatctctatt

SEQ ID NO: 1836861 - DNA, 15 bp, Homo sapiens
aacccatctctatta

SEQ ID NO: 1836862 - DNA, 15 bp, Homo sapiens
acccatctctattaa

SEQ ID NO: 1836863 - DNA, 15 bp, Homo sapiens
cccatctctattaaa

SEQ ID NO: 1836864 - DNA, 15 bp, Homo sapiens
ccatctctattaaaa

SEQ ID NO: 1836865 - DNA, 15 bp, Homo sapiens
catctctattaaaaa

SEQ ID NO: 1836866 - DNA, 15 bp, Homo sapiens
atctctattaaaaat

SEQ ID NO: 1836867 - DNA, 15 bp, Homo sapiens
tctattaaaaatacc

SEQ ID NO: 1836868 - DNA, 15 bp, Homo sapiens
ctattaaaaatacca

SEQ ID NO: 1836869 - DNA, 15 bp, Homo sapiens
tattaaaaataccaa

SEQ ID NO: 1836870 - DNA, 15 bp, Homo sapiens
attaaaaataccaaa

SEQ ID NO: 1836871 - DNA, 15 bp, Homo sapiens
ttaaaaataccaaaa

SEQ ID NO: 1836872 - DNA, 15 bp, Homo sapiens
taaaaataccaaaaa

SEQ ID NO: 1836873 - DNA, 15 bp, Homo sapiens
aaaaataccaaaaaa

SEQ ID NO: 1836874 - DNA, 15 bp, Homo sapiens
aaaataccaaaaaaa

SEQ ID NO: 1836875 - DNA, 15 bp, Homo sapiens
aaataccaaaaaaaa

SEQ ID NO: 1836876 - DNA, 15 bp, Homo sapiens
aataccaaaaaaaaa

SEQ ID NO: 1836877 - DNA, 15 bp, Homo sapiens
ataccaaaaaaaaaa

SEQ ID NO: 1836878 - DNA, 15 bp, Homo sapiens
ccaaaaaaaaaaaat

SEQ ID NO: 1836879 - DNA, 15 bp, Homo sapiens
caaaaaaaaaaaatt

SEQ ID NO: 1836880 - DNA, 15 bp, Homo sapiens
aaaaaaattagctag

SEQ ID NO: 1836881 - DNA, 15 bp, Homo sapiens
aaaaaattagctaga

SEQ ID NO: 1836882 - DNA, 15 bp, Homo sapiens
aaaaattagctagac

SEQ ID NO: 1836883 - DNA, 15 bp, Homo sapiens
aaaattagctagacg

SEQ ID NO: 1836884 - DNA, 15 bp, Homo sapiens
aaattagctagacgt

SEQ ID NO: 1836885 - DNA, 15 bp, Homo sapiens
aattagctagacgtg

SEQ ID NO: 1836886 - DNA, 15 bp, Homo sapiens
attagctagacgtgg

SEQ ID NO: 1836887 - DNA, 15 bp, Homo sapiens
ttagctagacgtggt

SEQ ID NO: 1836888 - DNA, 15 bp, Homo sapiens
tagctagacgtggtg

SEQ ID NO: 1836889 - DNA, 15 bp, Homo sapiens
agctagacgtggtga

SEQ ID NO: 1836890 - DNA, 15 bp, Homo sapiens
gctagacgtggtgat

SEQ ID NO: 1836891 - DNA, 15 bp, Homo sapiens
ctagacgtggtgata

SEQ ID NO: 1836892 - DNA, 15 bp, Homo sapiens
tagacgtggtgatag

SEQ ID NO: 1836893 - DNA, 15 bp, Homo sapiens
agacgtggtgatagg

SEQ ID NO: 1836894 - DNA, 15 bp, Homo sapiens
gacgtggtgataggc

SEQ ID NO: 1836895 - DNA, 15 bp, Homo sapiens
acgtggtgataggca

SEQ ID NO: 1836896 - DNA, 15 bp, Homo sapiens
gtgataggcacctgt

SEQ ID NO: 1836897 - DNA, 15 bp, Homo sapiens
tgataggcacctgta

SEQ ID NO: 1836898 - DNA, 15 bp, Homo sapiens
gataggcacctgtaa

SEQ ID NO: 1836899 - DNA, 15 bp, Homo sapiens
ataggcacctgtaat

SEQ ID NO: 1836900 - DNA, 15 bp, Homo sapiens
taggcacctgtaatc

SEQ ID NO: 1836901 - DNA, 15 bp, Homo sapiens
aatcccttgaacccg

SEQ ID NO: 1836902 - DNA, 15 bp, Homo sapiens
atcccttgaacccgg

SEQ ID NO: 1836903 - DNA, 15 bp, Homo sapiens
tcccttgaacccggg

SEQ ID NO: 1836904 - DNA, 15 bp, Homo sapiens
cccttgaacccggga

SEQ ID NO: 1836905 - DNA, 15 bp, Homo sapiens
ccttgaacccgggag

SEQ ID NO: 1836906 - DNA, 15 bp, Homo sapiens
taaataaataaatag

SEQ ID NO: 1836907 - DNA, 15 bp, Homo sapiens
aaataaataaatagg

SEQ ID NO: 1836908 - DNA, 15 bp, Homo sapiens
aataaataaataggc

SEQ ID NO: 1836909 - DNA, 15 bp, Homo sapiens
ataaataaataggct

SEQ ID NO: 1836910 - DNA, 15 bp, Homo sapiens
taaataaataggctg

SEQ ID NO: 1836911 - DNA, 15 bp, Homo sapiens
aaataaataggctgg

SEQ ID NO: 1836912 - DNA, 15 bp, Homo sapiens
aataaataggctggg

SEQ ID NO: 1836913 - DNA, 15 bp, Homo sapiens
ataaataggctgggg

SEQ ID NO: 1836914 - DNA, 15 bp, Homo sapiens
taaataggctgggga

SEQ ID NO: 1836915 - DNA, 15 bp, Homo sapiens
aaataggctggggac

SEQ ID NO: 1836916 - DNA, 15 bp, Homo sapiens
aataggctggggacg

SEQ ID NO: 1836917 - DNA, 15 bp, Homo sapiens
ataggctggggacgg

SEQ ID NO: 1836918 - DNA, 15 bp, Homo sapiens
taggctggggacggt

SEQ ID NO: 1836919 - DNA, 15 bp, Homo sapiens
aggctggggacggtg

SEQ ID NO: 1836920 - DNA, 15 bp, Homo sapiens
ggctggggacggtgg

SEQ ID NO: 1836921 - DNA, 15 bp, Homo sapiens
gctggggacggtggt

SEQ ID NO: 1836922 - DNA, 15 bp, Homo sapiens
ctggggacggtggtt

SEQ ID NO: 1836923 - DNA, 15 bp, Homo sapiens
tggggacggtggttc

SEQ ID NO: 1836924 - DNA, 15 bp, Homo sapiens
ggggacggtggttca

SEQ ID NO: 1836925 - DNA, 15 bp, Homo sapiens
gggacggtggttcac

SEQ ID NO: 1836926 - DNA, 15 bp, Homo sapiens
ggacggtggttcacg

SEQ ID NO: 1836927 - DNA, 15 bp, Homo sapiens
gacggtggttcacgt

SEQ ID NO: 1836928 - DNA, 15 bp, Homo sapiens
acggtggttcacgtc

SEQ ID NO: 1836929 - DNA, 15 bp, Homo sapiens
cggtggttcacgtct

SEQ ID NO: 1836930 - DNA, 15 bp, Homo sapiens
ggtggttcacgtctg

SEQ ID NO: 1836931 - DNA, 15 bp, Homo sapiens
gtggttcacgtctgt

SEQ ID NO: 1836932 - DNA, 15 bp, Homo sapiens
tggttcacgtctgta

SEQ ID NO: 1836933 - DNA, 15 bp, Homo sapiens
ggttcacgtctgtaa

SEQ ID NO: 1836934 - DNA, 15 bp, Homo sapiens
gttcacgtctgtaat

SEQ ID NO: 1836935 - DNA, 15 bp, Homo sapiens
ttcacgtctgtaatc

SEQ ID NO: 1836936 - DNA, 15 bp, Homo sapiens
cacgtctgtaatccc

SEQ ID NO: 1836937 - DNA, 15 bp, Homo sapiens
acgtctgtaatccca

SEQ ID NO: 1836938 - DNA, 15 bp, Homo sapiens
cgtctgtaatcccag

SEQ ID NO: 1836939 - DNA, 15 bp, Homo sapiens
ggcaggcggatcatc

SEQ ID NO: 1836940 - DNA, 15 bp, Homo sapiens
gcaggcggatcatct

SEQ ID NO: 1836941 - DNA, 15 bp, Homo sapiens
caggcggatcatctg

SEQ ID NO: 1836942 - DNA, 15 bp, Homo sapiens
aggcggatcatctga

SEQ ID NO: 1836943 - DNA, 15 bp, Homo sapiens
ggcggatcatctgag

SEQ ID NO: 1836944 - DNA, 15 bp, Homo sapiens
gcggatcatctgagg

SEQ ID NO: 1836945 - DNA, 15 bp, Homo sapiens
cggatcatctgaggt

SEQ ID NO: 1836946 - DNA, 15 bp, Homo sapiens
cgagaccaacctggc

SEQ ID NO: 1836947 - DNA, 15 bp, Homo sapiens
gagaccaacctggcc

SEQ ID NO: 1836948 - DNA, 15 bp, Homo sapiens
agaccaacctggcca

SEQ ID NO: 1836949 - DNA, 15 bp, Homo sapiens
gaccaacctggccaa

SEQ ID NO: 1836950 - DNA, 15 bp, Homo sapiens
accaacctggccaac

SEQ ID NO: 1836951 - DNA, 15 bp, Homo sapiens
ccaacctggccaaca

SEQ ID NO: 1836952 - DNA, 15 bp, Homo sapiens
caacctggccaacat

SEQ ID NO: 1836953 - DNA, 15 bp, Homo sapiens
aacctggccaacatg

SEQ ID NO: 1836954 - DNA, 15 bp, Homo sapiens
acctggccaacatga

SEQ ID NO: 1836955 - DNA, 15 bp, Homo sapiens
cacaaaaattagcca

SEQ ID NO: 1836956 - DNA, 15 bp, Homo sapiens
caggtgtggtggcgt

SEQ ID NO: 1836957 - DNA, 15 bp, Homo sapiens
aggtgtggtggcgtg

SEQ ID NO: 1836958 - DNA, 15 bp, Homo sapiens
gtggcgtgcacctgt

SEQ ID NO: 1836959 - DNA, 15 bp, Homo sapiens
tggcgtgcacctgta

SEQ ID NO: 1836960 - DNA, 15 bp, Homo sapiens
ggcgtgcacctgtaa

SEQ ID NO: 1836961 - DNA, 15 bp, Homo sapiens
gcgtgcacctgtaat

SEQ ID NO: 1836962 - DNA, 15 bp, Homo sapiens
cgtgcacctgtaatc

SEQ ID NO: 1836963 - DNA, 15 bp, Homo sapiens
gtgcacctgtaatcc

SEQ ID NO: 1836964 - DNA, 15 bp, Homo sapiens
tgcacctgtaatccc

SEQ ID NO: 1836965 - DNA, 15 bp, Homo sapiens
gcacctgtaatccca

SEQ ID NO: 1836966 - DNA, 15 bp, Homo sapiens
gtaatcccagctaca

SEQ ID NO: 1836967 - DNA, 15 bp, Homo sapiens
taatcccagctacac

SEQ ID NO: 1836968 - DNA, 15 bp, Homo sapiens
aatcccagctacacg

SEQ ID NO: 1836969 - DNA, 15 bp, Homo sapiens
atcccagctacacgg

SEQ ID NO: 1836970 - DNA, 15 bp, Homo sapiens
tcccagctacacggg

SEQ ID NO: 1836971 - DNA, 15 bp, Homo sapiens
cccagctacacggga

SEQ ID NO: 1836972 - DNA, 15 bp, Homo sapiens
ccagctacacgggag

SEQ ID NO: 1836973 - DNA, 15 bp, Homo sapiens
cagctacacgggagg

SEQ ID NO: 1836974 - DNA, 15 bp, Homo sapiens
agctacacgggaggc

SEQ ID NO: 1836975 - DNA, 15 bp, Homo sapiens
gctacacgggaggct

SEQ ID NO: 1836976 - DNA, 15 bp, Homo sapiens
ctacacgggaggctg

SEQ ID NO: 1836977 - DNA, 15 bp, Homo sapiens
tacacgggaggctga

SEQ ID NO: 1836978 - DNA, 15 bp, Homo sapiens
acacgggaggctgag

SEQ ID NO: 1836979 - DNA, 15 bp, Homo sapiens
cacgggaggctgaga

SEQ ID NO: 1836980 - DNA, 15 bp, Homo sapiens
acgggaggctgagag

SEQ ID NO: 1836981 - DNA, 15 bp, Homo sapiens
aggctgagagaggat

SEQ ID NO: 1836982 - DNA, 15 bp, Homo sapiens
ggctgagagaggata

SEQ ID NO: 1836983 - DNA, 15 bp, Homo sapiens
gctgagagaggataa

SEQ ID NO: 1836984 - DNA, 15 bp, Homo sapiens
ctgagagaggataat

SEQ ID NO: 1836985 - DNA, 15 bp, Homo sapiens
tgagagaggataatc

SEQ ID NO: 1836986 - DNA, 15 bp, Homo sapiens
gagagaggataatct

SEQ ID NO: 1836987 - DNA, 15 bp, Homo sapiens
agagaggataatctc

SEQ ID NO: 1836988 - DNA, 15 bp, Homo sapiens
gagaggataatctct

SEQ ID NO: 1836989 - DNA, 15 bp, Homo sapiens
agaggataatctctt

SEQ ID NO: 1836990 - DNA, 15 bp, Homo sapiens
gaggataatctcttg

SEQ ID NO: 1836991 - DNA, 15 bp, Homo sapiens
aggataatctcttga

SEQ ID NO: 1836992 - DNA, 15 bp, Homo sapiens
ggataatctcttgaa

SEQ ID NO: 1836993 - DNA, 15 bp, Homo sapiens
gataatctcttgaac

SEQ ID NO: 1836994 - DNA, 15 bp, Homo sapiens
ataatctcttgaacc

SEQ ID NO: 1836995 - DNA, 15 bp, Homo sapiens
taatctcttgaaccc

SEQ ID NO: 1836996 - DNA, 15 bp, Homo sapiens
aatctcttgaacccg

SEQ ID NO: 1836997 - DNA, 15 bp, Homo sapiens
atctcttgaacccgg

SEQ ID NO: 1836998 - DNA, 15 bp, Homo sapiens
tctcttgaacccggg

SEQ ID NO: 1836999 - DNA, 15 bp, Homo sapiens
ctcttgaacccggga

SEQ ID NO: 1837000 - DNA, 15 bp, Homo sapiens
tcttgaacccgggag

SEQ ID NO: 1837001 - DNA, 15 bp, Homo sapiens
agatcatgccattgc

SEQ ID NO: 1837002 - DNA, 15 bp, Homo sapiens
gatcatgccattgca

SEQ ID NO: 1837003 - DNA, 15 bp, Homo sapiens
atcatgccattgcac

SEQ ID NO: 1837004 - DNA, 15 bp, Homo sapiens
tcatgccattgcact

SEQ ID NO: 1837005 - DNA, 15 bp, Homo sapiens
catgccattgcactc

SEQ ID NO: 1837006 - DNA, 15 bp, Homo sapiens
ccagcctggcaacac

SEQ ID NO: 1837007 - DNA, 15 bp, Homo sapiens
cagcctggcaacaca

SEQ ID NO: 1837008 - DNA, 15 bp, Homo sapiens
agcctggcaacacag

SEQ ID NO: 1837009 - DNA, 15 bp, Homo sapiens
gcctggcaacacagc

SEQ ID NO: 1837010 - DNA, 15 bp, Homo sapiens
cctggcaacacagcg

SEQ ID NO: 1837011 - DNA, 15 bp, Homo sapiens
ctggcaacacagcga

SEQ ID NO: 1837012 - DNA, 15 bp, Homo sapiens
tggcaacacagcgag

SEQ ID NO: 1837013 - DNA, 15 bp, Homo sapiens
ggcaacacagcgaga

SEQ ID NO: 1837014 - DNA, 15 bp, Homo sapiens
gcaacacagcgagac

SEQ ID NO: 1837015 - DNA, 15 bp, Homo sapiens
caacacagcgagact

SEQ ID NO: 1837016 - DNA, 15 bp, Homo sapiens
aacacagcgagactc

SEQ ID NO: 1837017 - DNA, 15 bp, Homo sapiens
acacagcgagactct

SEQ ID NO: 1837018 - DNA, 15 bp, Homo sapiens
cacagcgagactctg

SEQ ID NO: 1837019 - DNA, 15 bp, Homo sapiens
acagcgagactctgt

SEQ ID NO: 1837020 - DNA, 15 bp, Homo sapiens
cagcgagactctgtc

SEQ ID NO: 1837021 - DNA, 15 bp, Homo sapiens
agcgagactctgtcc

SEQ ID NO: 1837022 - DNA, 15 bp, Homo sapiens
gcgagactctgtccc

SEQ ID NO: 1837023 - DNA, 15 bp, Homo sapiens
cgagactctgtccca

SEQ ID NO: 1837024 - DNA, 15 bp, Homo sapiens
gagactctgtcccaa

SEQ ID NO: 1837025 - DNA, 15 bp, Homo sapiens
agactctgtcccaaa

SEQ ID NO: 1837026 - DNA, 15 bp, Homo sapiens
gactctgtcccaaaa

SEQ ID NO: 1837027 - DNA, 15 bp, Homo sapiens
actctgtcccaaaaa

SEQ ID NO: 1837028 - DNA, 15 bp, Homo sapiens
ctctgtcccaaaaat

SEQ ID NO: 1837029 - DNA, 15 bp, Homo sapiens
tctgtcccaaaaata

SEQ ID NO: 1837030 - DNA, 15 bp, Homo sapiens
ctgtcccaaaaataa

SEQ ID NO: 1837031 - DNA, 15 bp, Homo sapiens
tgtcccaaaaataaa

SEQ ID NO: 1837032 - DNA, 15 bp, Homo sapiens
gtcccaaaaataaat

SEQ ID NO: 1837033 - DNA, 15 bp, Homo sapiens
tcccaaaaataaata

SEQ ID NO: 1837034 - DNA, 15 bp, Homo sapiens
cccaaaaataaataa

SEQ ID NO: 1837035 - DNA, 15 bp, Homo sapiens
ccaaaaataaataaa

SEQ ID NO: 1837036 - DNA, 15 bp, Homo sapiens
aaataaaaataaaag

SEQ ID NO: 1837037 - DNA, 15 bp, Homo sapiens
aataaaaataaaaga

SEQ ID NO: 1837038 - DNA, 15 bp, Homo sapiens
taaaaataaaagaaa

SEQ ID NO: 1837039 - DNA, 15 bp, Homo sapiens
aaaaataaaagaaag

SEQ ID NO: 1837040 - DNA, 15 bp, Homo sapiens
aaataaaagaaagaa

SEQ ID NO: 1837041 - DNA, 15 bp, Homo sapiens
aataaaagaaagaaa

SEQ ID NO: 1837042 - DNA, 15 bp, Homo sapiens
ataaaagaaagaaaa

SEQ ID NO: 1837043 - DNA, 15 bp, Homo sapiens
taaaagaaagaaaat

SEQ ID NO: 1837044 - DNA, 15 bp, Homo sapiens
aaaagaaagaaaata

SEQ ID NO: 1837045 - DNA, 15 bp, Homo sapiens
aaagaaagaaaataa

SEQ ID NO: 1837046 - DNA, 15 bp, Homo sapiens
aagaaagaaaataaa

SEQ ID NO: 1837047 - DNA, 15 bp, Homo sapiens
agaaagaaaataaaa

SEQ ID NO: 1837048 - DNA, 15 bp, Homo sapiens
gaaagaaaataaaat

SEQ ID NO: 1837049 - DNA, 15 bp, Homo sapiens
aaagaaaataaaata

SEQ ID NO: 1837050 - DNA, 15 bp, Homo sapiens
aagaaaataaaataa

SEQ ID NO: 1837051 - DNA, 15 bp, Homo sapiens
aaataaaataaaagt

SEQ ID NO: 1837052 - DNA, 15 bp, Homo sapiens
aataaaataaaagta

SEQ ID NO: 1837053 - DNA, 15 bp, Homo sapiens
ataaaataaaagtaa

SEQ ID NO: 1837054 - DNA, 15 bp, Homo sapiens
taaaataaaagtaaa

SEQ ID NO: 1837055 - DNA, 15 bp, Homo sapiens
aaaataaaagtaaat

SEQ ID NO: 1837056 - DNA, 15 bp, Homo sapiens
aaataaaagtaaata

SEQ ID NO: 1837057 - DNA, 15 bp, Homo sapiens
aataaaagtaaatac

SEQ ID NO: 1837058 - DNA, 15 bp, Homo sapiens
ataaaagtaaataca

SEQ ID NO: 1837059 - DNA, 15 bp, Homo sapiens
taaaagtaaatacat

SEQ ID NO: 1837060 - DNA, 15 bp, Homo sapiens
aaaagtaaatacata

SEQ ID NO: 1837061 - DNA, 15 bp, Homo sapiens
aaagtaaatacataa

SEQ ID NO: 1837062 - DNA, 15 bp, Homo sapiens
aagtaaatacataaa

SEQ ID NO: 1837063 - DNA, 15 bp, Homo sapiens
agtaaatacataaat

SEQ ID NO: 1837064 - DNA, 15 bp, Homo sapiens
gtaaatacataaata

SEQ ID NO: 1837065 - DNA, 15 bp, Homo sapiens
taaatacataaataa

SEQ ID NO: 1837066 - DNA, 15 bp, Homo sapiens
aaatacataaataag

SEQ ID NO: 1837067 - DNA, 15 bp, Homo sapiens
aatacataaataaga

SEQ ID NO: 1837068 - DNA, 15 bp, Homo sapiens
atacataaataagaa

SEQ ID NO: 1837069 - DNA, 15 bp, Homo sapiens
tacataaataagaaa

SEQ ID NO: 1837070 - DNA, 15 bp, Homo sapiens
acataaataagaaaa

SEQ ID NO: 1837071 - DNA, 15 bp, Homo sapiens
cataaataagaaaaa

SEQ ID NO: 1837072 - DNA, 15 bp, Homo sapiens
ataaataagaaaaag

SEQ ID NO: 1837073 - DNA, 15 bp, Homo sapiens
taaataagaaaaagc

SEQ ID NO: 1837074 - DNA, 15 bp, Homo sapiens
aaataagaaaaagcc

SEQ ID NO: 1837075 - DNA, 15 bp, Homo sapiens
aataagaaaaagccg

SEQ ID NO: 1837076 - DNA, 15 bp, Homo sapiens
ataagaaaaagccgg

SEQ ID NO: 1837077 - DNA, 15 bp, Homo sapiens
taagaaaaagccggt

SEQ ID NO: 1837078 - DNA, 15 bp, Homo sapiens
aagaaaaagccggtg

SEQ ID NO: 1837079 - DNA, 15 bp, Homo sapiens
agaaaaagccggtgt

SEQ ID NO: 1837080 - DNA, 15 bp, Homo sapiens
gaaaaagccggtgtt

SEQ ID NO: 1837081 - DNA, 15 bp, Homo sapiens
aaaaagccggtgtta

SEQ ID NO: 1837082 - DNA, 15 bp, Homo sapiens
aaaagccggtgttag

SEQ ID NO: 1837083 - DNA, 15 bp, Homo sapiens
aaagccggtgttagg

SEQ ID NO: 1837084 - DNA, 15 bp, Homo sapiens
aagccggtgttaggg

SEQ ID NO: 1837085 - DNA, 15 bp, Homo sapiens
agccggtgttaggga

SEQ ID NO: 1837086 - DNA, 15 bp, Homo sapiens
gccggtgttagggac

SEQ ID NO: 1837087 - DNA, 15 bp, Homo sapiens
ccggtgttagggacc

SEQ ID NO: 1837088 - DNA, 15 bp, Homo sapiens
cggtgttagggacca

SEQ ID NO: 1837089 - DNA, 15 bp, Homo sapiens
ggtgttagggaccag

SEQ ID NO: 1837090 - DNA, 15 bp, Homo sapiens
gtgttagggaccagg

SEQ ID NO: 1837091 - DNA, 15 bp, Homo sapiens
tgttagggaccagga

SEQ ID NO: 1837092 - DNA, 15 bp, Homo sapiens
gttagggaccaggaa

SEQ ID NO: 1837093 - DNA, 15 bp, Homo sapiens
ttagggaccaggaaa

SEQ ID NO: 1837094 - DNA, 15 bp, Homo sapiens
tagggaccaggaaag

SEQ ID NO: 1837095 - DNA, 15 bp, Homo sapiens
agggaccaggaaagg

SEQ ID NO: 1837096 - DNA, 15 bp, Homo sapiens
gggaccaggaaaggc

SEQ ID NO: 1837097 - DNA, 15 bp, Homo sapiens
ggaccaggaaaggcc

SEQ ID NO: 1837098 - DNA, 15 bp, Homo sapiens
gaccaggaaaggccg

SEQ ID NO: 1837099 - DNA, 15 bp, Homo sapiens
accaggaaaggccgg

SEQ ID NO: 1837100 - DNA, 15 bp, Homo sapiens
ccaggaaaggccgga

SEQ ID NO: 1837101 - DNA, 15 bp, Homo sapiens
caggaaaggccggag

SEQ ID NO: 1837102 - DNA, 15 bp, Homo sapiens
aggaaaggccggaga

SEQ ID NO: 1837103 - DNA, 15 bp, Homo sapiens
ggaaaggccggagag

SEQ ID NO: 1837104 - DNA, 15 bp, Homo sapiens
gaaaggccggagagt

SEQ ID NO: 1837105 - DNA, 15 bp, Homo sapiens
aaaggccggagagtg

SEQ ID NO: 1837106 - DNA, 15 bp, Homo sapiens
aaggccggagagtgc

SEQ ID NO: 1837107 - DNA, 15 bp, Homo sapiens
aggccggagagtgcc

SEQ ID NO: 1837108 - DNA, 15 bp, Homo sapiens
ggccggagagtgccc

SEQ ID NO: 1837109 - DNA, 15 bp, Homo sapiens
gccggagagtgccct

SEQ ID NO: 1837110 - DNA, 15 bp, Homo sapiens
ccggagagtgcccta

SEQ ID NO: 1837111 - DNA, 15 bp, Homo sapiens
cggagagtgccctaa

SEQ ID NO: 1837112 - DNA, 15 bp, Homo sapiens
ggagagtgccctaag

SEQ ID NO: 1837113 - DNA, 15 bp, Homo sapiens
gagagtgccctaagg

SEQ ID NO: 1837114 - DNA, 15 bp, Homo sapiens
agagtgccctaagga

SEQ ID NO: 1837115 - DNA, 15 bp, Homo sapiens
gagtgccctaaggag

SEQ ID NO: 1837116 - DNA, 15 bp, Homo sapiens
agtgccctaaggaga

SEQ ID NO: 1837117 - DNA, 15 bp, Homo sapiens
gtgccctaaggagag

SEQ ID NO: 1837118 - DNA, 15 bp, Homo sapiens
tgccctaaggagagg

SEQ ID NO: 1837119 - DNA, 15 bp, Homo sapiens
gccctaaggagagga

SEQ ID NO: 1837120 - DNA, 15 bp, Homo sapiens
ccctaaggagaggag

SEQ ID NO: 1837121 - DNA, 15 bp, Homo sapiens
cctaaggagaggagg

SEQ ID NO: 1837122 - DNA, 15 bp, Homo sapiens
ctaaggagaggagga

SEQ ID NO: 1837123 - DNA, 15 bp, Homo sapiens
taaggagaggaggag

SEQ ID NO: 1837124 - DNA, 15 bp, Homo sapiens
aaggagaggaggaga

SEQ ID NO: 1837125 - DNA, 15 bp, Homo sapiens
aggagaggaggagag

SEQ ID NO: 1837126 - DNA, 15 bp, Homo sapiens
ggagaggaggagagg

SEQ ID NO: 1837127 - DNA, 15 bp, Homo sapiens
gagaggaggagaggg

SEQ ID NO: 1837128 - DNA, 15 bp, Homo sapiens
agaggaggagagggg

SEQ ID NO: 1837129 - DNA, 15 bp, Homo sapiens
gaggaggagaggggt

SEQ ID NO: 1837130 - DNA, 15 bp, Homo sapiens
aggaggagaggggta

SEQ ID NO: 1837131 - DNA, 15 bp, Homo sapiens
ggaggagaggggtag

SEQ ID NO: 1837132 - DNA, 15 bp, Homo sapiens
gaggagaggggtagc

SEQ ID NO: 1837133 - DNA, 15 bp, Homo sapiens
aggagaggggtagca

SEQ ID NO: 1837134 - DNA, 15 bp, Homo sapiens
ggagaggggtagcag

SEQ ID NO: 1837135 - DNA, 15 bp, Homo sapiens
gagaggggtagcagt

SEQ ID NO: 1837136 - DNA, 15 bp, Homo sapiens
agaggggtagcagtg

SEQ ID NO: 1837137 - DNA, 15 bp, Homo sapiens
gaggggtagcagtgg

SEQ ID NO: 1837138 - DNA, 15 bp, Homo sapiens
aggggtagcagtggc

SEQ ID NO: 1837139 - DNA, 15 bp, Homo sapiens
ggggtagcagtggct

SEQ ID NO: 1837140 - DNA, 15 bp, Homo sapiens
gggtagcagtggcta

SEQ ID NO: 1837141 - DNA, 15 bp, Homo sapiens
ggtagcagtggctag

SEQ ID NO: 1837142 - DNA, 15 bp, Homo sapiens
gtagcagtggctaga

SEQ ID NO: 1837143 - DNA, 15 bp, Homo sapiens
tagcagtggctagaa

SEQ ID NO: 1837144 - DNA, 15 bp, Homo sapiens
agcagtggctagaag

SEQ ID NO: 1837145 - DNA, 15 bp, Homo sapiens
gcagtggctagaaga

SEQ ID NO: 1837146 - DNA, 15 bp, Homo sapiens
cagtggctagaagac

SEQ ID NO: 1837147 - DNA, 15 bp, Homo sapiens
agtggctagaagaca

SEQ ID NO: 1837148 - DNA, 15 bp, Homo sapiens
gtggctagaagacac

SEQ ID NO: 1837149 - DNA, 15 bp, Homo sapiens
tggctagaagacacg

SEQ ID NO: 1837150 - DNA, 15 bp, Homo sapiens
ggctagaagacacgg

SEQ ID NO: 1837151 - DNA, 15 bp, Homo sapiens
gctagaagacacgga

SEQ ID NO: 1837152 - DNA, 15 bp, Homo sapiens
ctagaagacacggaa

SEQ ID NO: 1837153 - DNA, 15 bp, Homo sapiens
tagaagacacggaac

SEQ ID NO: 1837154 - DNA, 15 bp, Homo sapiens
agaagacacggaaca

SEQ ID NO: 1837155 - DNA, 15 bp, Homo sapiens
gaagacacggaacac

SEQ ID NO: 1837156 - DNA, 15 bp, Homo sapiens
aagacacggaacaca

SEQ ID NO: 1837157 - DNA, 15 bp, Homo sapiens
agacacggaacacaa

SEQ ID NO: 1837158 - DNA, 15 bp, Homo sapiens
gacacggaacacaag

SEQ ID NO: 1837159 - DNA, 15 bp, Homo sapiens
acacggaacacaagg

SEQ ID NO: 1837160 - DNA, 15 bp, Homo sapiens
cacggaacacaaggt

SEQ ID NO: 1837161 - DNA, 15 bp, Homo sapiens
acggaacacaaggtc

SEQ ID NO: 1837162 - DNA, 15 bp, Homo sapiens
cggaacacaaggtcc

SEQ ID NO: 1837163 - DNA, 15 bp, Homo sapiens
ggaacacaaggtccc

SEQ ID NO: 1837164 - DNA, 15 bp, Homo sapiens
gaacacaaggtccca

SEQ ID NO: 1837165 - DNA, 15 bp, Homo sapiens
aacacaaggtcccag

SEQ ID NO: 1837166 - DNA, 15 bp, Homo sapiens
acacaaggtcccagt

SEQ ID NO: 1837167 - DNA, 15 bp, Homo sapiens
cacaaggtcccagtg

SEQ ID NO: 1837168 - DNA, 15 bp, Homo sapiens
acaaggtcccagtga

SEQ ID NO: 1837169 - DNA, 15 bp, Homo sapiens
caaggtcccagtgac

SEQ ID NO: 1837170 - DNA, 15 bp, Homo sapiens
aaggtcccagtgaca

SEQ ID NO: 1837171 - DNA, 15 bp, Homo sapiens
aggtcccagtgacag

SEQ ID NO: 1837172 - DNA, 15 bp, Homo sapiens
ggtcccagtgacagg

SEQ ID NO: 1837173 - DNA, 15 bp, Homo sapiens
gtcccagtgacagga

SEQ ID NO: 1837174 - DNA, 15 bp, Homo sapiens
tcccagtgacaggag

SEQ ID NO: 1837175 - DNA, 15 bp, Homo sapiens
cccagtgacaggagg

SEQ ID NO: 1837176 - DNA, 15 bp, Homo sapiens
ccagtgacaggaggg

SEQ ID NO: 1837177 - DNA, 15 bp, Homo sapiens
cagtgacaggagggg

SEQ ID NO: 1837178 - DNA, 15 bp, Homo sapiens
agtgacaggaggggg

SEQ ID NO: 1837179 - DNA, 15 bp, Homo sapiens
gtgacaggagggggg

SEQ ID NO: 1837180 - DNA, 15 bp, Homo sapiens
tgacaggaggggggg

SEQ ID NO: 1837181 - DNA, 15 bp, Homo sapiens
gacaggagggggggg

SEQ ID NO: 1837182 - DNA, 15 bp, Homo sapiens
acaggaggggggggc

SEQ ID NO: 1837183 - DNA, 15 bp, Homo sapiens
caggaggggggggcc

SEQ ID NO: 1837184 - DNA, 15 bp, Homo sapiens
aggaggggggggcct

SEQ ID NO: 1837185 - DNA, 15 bp, Homo sapiens
ggaggggggggcctg

SEQ ID NO: 1837186 - DNA, 15 bp, Homo sapiens
gaggggggggcctgg

SEQ ID NO: 1837187 - DNA, 15 bp, Homo sapiens
aggggggggcctggc

SEQ ID NO: 1837188 - DNA, 15 bp, Homo sapiens
ggggggggcctggcc

SEQ ID NO: 1837189 - DNA, 15 bp, Homo sapiens
gggggggcctggccc

SEQ ID NO: 1837190 - DNA, 15 bp, Homo sapiens
ggggggcctggcccc

SEQ ID NO: 1837191 - DNA, 15 bp, Homo sapiens
gggggcctggcccct

SEQ ID NO: 1837192 - DNA, 15 bp, Homo sapiens
ggggcctggcccctg

SEQ ID NO: 1837193 - DNA, 15 bp, Homo sapiens
gggcctggcccctgc

SEQ ID NO: 1837194 - DNA, 15 bp, Homo sapiens
ggcctggcccctgca

SEQ ID NO: 1837195 - DNA, 15 bp, Homo sapiens
gcctggcccctgcag

SEQ ID NO: 1837196 - DNA, 15 bp, Homo sapiens
cctggcccctgcagt

SEQ ID NO: 1837197 - DNA, 15 bp, Homo sapiens
ctggcccctgcagtc

SEQ ID NO: 1837198 - DNA, 15 bp, Homo sapiens
tggcccctgcagtca

SEQ ID NO: 1837199 - DNA, 15 bp, Homo sapiens
ggcccctgcagtcat

SEQ ID NO: 1837200 - DNA, 15 bp, Homo sapiens
gcccctgcagtcatg

SEQ ID NO: 1837201 - DNA, 15 bp, Homo sapiens
cccctgcagtcatgg

SEQ ID NO: 1837202 - DNA, 15 bp, Homo sapiens
ccctgcagtcatggg

SEQ ID NO: 1837203 - DNA, 15 bp, Homo sapiens
cctgcagtcatgggt

SEQ ID NO: 1837204 - DNA, 15 bp, Homo sapiens
ctgcagtcatgggtg

SEQ ID NO: 1837205 - DNA, 15 bp, Homo sapiens
tgcagtcatgggtgt

SEQ ID NO: 1837206 - DNA, 15 bp, Homo sapiens
gcagtcatgggtgtt

SEQ ID NO: 1837207 - DNA, 15 bp, Homo sapiens
cagtcatgggtgttt

SEQ ID NO: 1837208 - DNA, 15 bp, Homo sapiens
agtcatgggtgtttg

SEQ ID NO: 1837209 - DNA, 15 bp, Homo sapiens
gtcatgggtgtttgc

SEQ ID NO: 1837210 - DNA, 15 bp, Homo sapiens
tcatgggtgtttgct

SEQ ID NO: 1837211 - DNA, 15 bp, Homo sapiens
catgggtgtttgctt

SEQ ID NO: 1837212 - DNA, 15 bp, Homo sapiens
atgggtgtttgcttt

SEQ ID NO: 1837213 - DNA, 15 bp, Homo sapiens
tgggtgtttgctttc

SEQ ID NO: 1837214 - DNA, 15 bp, Homo sapiens
gggtgtttgctttct

SEQ ID NO: 1837215 - DNA, 15 bp, Homo sapiens
ggtgtttgctttctt

SEQ ID NO: 1837216 - DNA, 15 bp, Homo sapiens
gtgtttgctttcttc

SEQ ID NO: 1837217 - DNA, 15 bp, Homo sapiens
tgtttgctttcttcc

SEQ ID NO: 1837218 - DNA, 15 bp, Homo sapiens
gtttgctttcttccc

SEQ ID NO: 1837219 - DNA, 15 bp, Homo sapiens
tttgctttcttccct

SEQ ID NO: 1837220 - DNA, 15 bp, Homo sapiens
ttgctttcttccctc

SEQ ID NO: 1837221 - DNA, 15 bp, Homo sapiens
tgctttcttccctcg

SEQ ID NO: 1837222 - DNA, 15 bp, Homo sapiens
gctttcttccctcgg

SEQ ID NO: 1837223 - DNA, 15 bp, Homo sapiens
ctttcttccctcggg

SEQ ID NO: 1837224 - DNA, 15 bp, Homo sapiens
tttcttccctcgggg

SEQ ID NO: 1837225 - DNA, 15 bp, Homo sapiens
ttcttccctcggggc

SEQ ID NO: 1837226 - DNA, 15 bp, Homo sapiens
tcttccctcggggct

SEQ ID NO: 1837227 - DNA, 15 bp, Homo sapiens
cttccctcggggctg

SEQ ID NO: 1837228 - DNA, 15 bp, Homo sapiens
ttccctcggggctgc

SEQ ID NO: 1837229 - DNA, 15 bp, Homo sapiens
tccctcggggctgct

SEQ ID NO: 1837230 - DNA, 15 bp, Homo sapiens
ccctcggggctgctg

SEQ ID NO: 1837231 - DNA, 15 bp, Homo sapiens
cctcggggctgctga

SEQ ID NO: 1837232 - DNA, 15 bp, Homo sapiens
ctcggggctgctgaa

SEQ ID NO: 1837233 - DNA, 15 bp, Homo sapiens
tcggggctgctgaac

SEQ ID NO: 1837234 - DNA, 15 bp, Homo sapiens
cggggctgctgaaca

SEQ ID NO: 1837235 - DNA, 15 bp, Homo sapiens
ggggctgctgaacaa

SEQ ID NO: 1837236 - DNA, 15 bp, Homo sapiens
gggctgctgaacaaa

SEQ ID NO: 1837237 - DNA, 15 bp, Homo sapiens
ggctgctgaacaaaa

SEQ ID NO: 1837238 - DNA, 15 bp, Homo sapiens
gctgctgaacaaaag

SEQ ID NO: 1837239 - DNA, 15 bp, Homo sapiens
ctgctgaacaaaagc

SEQ ID NO: 1837240 - DNA, 15 bp, Homo sapiens
tgctgaacaaaagct

SEQ ID NO: 1837241 - DNA, 15 bp, Homo sapiens
gctgaacaaaagctg

SEQ ID NO: 1837242 - DNA, 15 bp, Homo sapiens
ctgaacaaaagctga

SEQ ID NO: 1837243 - DNA, 15 bp, Homo sapiens
tgaacaaaagctgaa

SEQ ID NO: 1837244 - DNA, 15 bp, Homo sapiens
gaacaaaagctgaac

SEQ ID NO: 1837245 - DNA, 15 bp, Homo sapiens
aacaaaagctgaact

SEQ ID NO: 1837246 - DNA, 15 bp, Homo sapiens
acaaaagctgaactt

SEQ ID NO: 1837247 - DNA, 15 bp, Homo sapiens
caaaagctgaacttg

SEQ ID NO: 1837248 - DNA, 15 bp, Homo sapiens
aaaagctgaacttga

SEQ ID NO: 1837249 - DNA, 15 bp, Homo sapiens
aaagctgaacttgac

SEQ ID NO: 1837250 - DNA, 15 bp, Homo sapiens
aagctgaacttgact

SEQ ID NO: 1837251 - DNA, 15 bp, Homo sapiens
agctgaacttgactc

SEQ ID NO: 1837252 - DNA, 15 bp, Homo sapiens
gctgaacttgactcc

SEQ ID NO: 1837253 - DNA, 15 bp, Homo sapiens
ctgaacttgactccg

SEQ ID NO: 1837254 - DNA, 15 bp, Homo sapiens
tgaacttgactccgg

SEQ ID NO: 1837255 - DNA, 15 bp, Homo sapiens
gaacttgactccggc

SEQ ID NO: 1837256 - DNA, 15 bp, Homo sapiens
aacttgactccggct

SEQ ID NO: 1837257 - DNA, 15 bp, Homo sapiens
acttgactccggctg

SEQ ID NO: 1837258 - DNA, 15 bp, Homo sapiens
cttgactccggctgc

SEQ ID NO: 1837259 - DNA, 15 bp, Homo sapiens
ttgactccggctgcc

SEQ ID NO: 1837260 - DNA, 15 bp, Homo sapiens
tgactccggctgcct

SEQ ID NO: 1837261 - DNA, 15 bp, Homo sapiens
gactccggctgcctg

SEQ ID NO: 1837262 - DNA, 15 bp, Homo sapiens
actccggctgcctgc

SEQ ID NO: 1837263 - DNA, 15 bp, Homo sapiens
ctccggctgcctgct

SEQ ID NO: 1837264 - DNA, 15 bp, Homo sapiens
tccggctgcctgctg

SEQ ID NO: 1837265 - DNA, 15 bp, Homo sapiens
ccggctgcctgctgc

SEQ ID NO: 1837266 - DNA, 15 bp, Homo sapiens
cggctgcctgctgcg

SEQ ID NO: 1837267 - DNA, 15 bp, Homo sapiens
ggctgcctgctgcga

SEQ ID NO: 1837268 - DNA, 15 bp, Homo sapiens
gctgcctgctgcgaa

SEQ ID NO: 1837269 - DNA, 15 bp, Homo sapiens
ctgcctgctgcgaaa

SEQ ID NO: 1837270 - DNA, 15 bp, Homo sapiens
tgcctgctgcgaaac

SEQ ID NO: 1837271 - DNA, 15 bp, Homo sapiens
gcctgctgcgaaact

SEQ ID NO: 1837272 - DNA, 15 bp, Homo sapiens
cctgctgcgaaactg

SEQ ID NO: 1837273 - DNA, 15 bp, Homo sapiens
ctgctgcgaaactgg

SEQ ID NO: 1837274 - DNA, 15 bp, Homo sapiens
tgctgcgaaactgga

SEQ ID NO: 1837275 - DNA, 15 bp, Homo sapiens
gctgcgaaactggag

SEQ ID NO: 1837276 - DNA, 15 bp, Homo sapiens
ctgcgaaactggaga

SEQ ID NO: 1837277 - DNA, 15 bp, Homo sapiens
tgcgaaactggagaa

SEQ ID NO: 1837278 - DNA, 15 bp, Homo sapiens
gcgaaactggagaag

SEQ ID NO: 1837279 - DNA, 15 bp, Homo sapiens
cgaaactggagaagg

SEQ ID NO: 1837280 - DNA, 15 bp, Homo sapiens
gaaactggagaaggg

SEQ ID NO: 1837281 - DNA, 15 bp, Homo sapiens
aaactggagaagggc

SEQ ID NO: 1837282 - DNA, 15 bp, Homo sapiens
aactggagaagggca

SEQ ID NO: 1837283 - DNA, 15 bp, Homo sapiens
actggagaagggcag

SEQ ID NO: 1837284 - DNA, 15 bp, Homo sapiens
ctggagaagggcagg

SEQ ID NO: 1837285 - DNA, 15 bp, Homo sapiens
tggagaagggcaggt

SEQ ID NO: 1837286 - DNA, 15 bp, Homo sapiens
agaagggcaggtgga

SEQ ID NO: 1837287 - DNA, 15 bp, Homo sapiens
gaagggcaggtggag

SEQ ID NO: 1837288 - DNA, 15 bp, Homo sapiens
aagggcaggtggagg

SEQ ID NO: 1837289 - DNA, 15 bp, Homo sapiens
agggcaggtggaggg

SEQ ID NO: 1837290 - DNA, 15 bp, Homo sapiens
gggcaggtggaggga

SEQ ID NO: 1837291 - DNA, 15 bp, Homo sapiens
ggcaggtggagggat

SEQ ID NO: 1837292 - DNA, 15 bp, Homo sapiens
gcaggtggagggatg

SEQ ID NO: 1837293 - DNA, 15 bp, Homo sapiens
caggtggagggatgg

SEQ ID NO: 1837294 - DNA, 15 bp, Homo sapiens
aggtggagggatgga

SEQ ID NO: 1837295 - DNA, 15 bp, Homo sapiens
ggtggagggatggat

SEQ ID NO: 1837296 - DNA, 15 bp, Homo sapiens
gtggagggatggatg

SEQ ID NO: 1837297 - DNA, 15 bp, Homo sapiens
tggagggatggatgg

SEQ ID NO: 1837298 - DNA, 15 bp, Homo sapiens
ggagggatggatggc

SEQ ID NO: 1837299 - DNA, 15 bp, Homo sapiens
gagggatggatggca

SEQ ID NO: 1837300 - DNA, 15 bp, Homo sapiens
agggatggatggcaa

SEQ ID NO: 1837301 - DNA, 15 bp, Homo sapiens
gggatggatggcaag

SEQ ID NO: 1837302 - DNA, 15 bp, Homo sapiens
ggatggatggcaagg

SEQ ID NO: 1837303 - DNA, 15 bp, Homo sapiens
gatggatggcaaggt

SEQ ID NO: 1837304 - DNA, 15 bp, Homo sapiens
atggatggcaaggtg

SEQ ID NO: 1837305 - DNA, 15 bp, Homo sapiens
tggatggcaaggtgc

SEQ ID NO: 1837306 - DNA, 15 bp, Homo sapiens
ggatggcaaggtgct

SEQ ID NO: 1837307 - DNA, 15 bp, Homo sapiens
gatggcaaggtgctc

SEQ ID NO: 1837308 - DNA, 15 bp, Homo sapiens
atggcaaggtgctct

SEQ ID NO: 1837309 - DNA, 15 bp, Homo sapiens
tggcaaggtgctctg

SEQ ID NO: 1837310 - DNA, 15 bp, Homo sapiens
ggcaaggtgctctgg

SEQ ID NO: 1837311 - DNA, 15 bp, Homo sapiens
gcaaggtgctctggg

SEQ ID NO: 1837312 - DNA, 15 bp, Homo sapiens
caaggtgctctggga

SEQ ID NO: 1837313 - DNA, 15 bp, Homo sapiens
aaggtgctctgggag

SEQ ID NO: 1837314 - DNA, 15 bp, Homo sapiens
aggtgctctgggagg

SEQ ID NO: 1837315 - DNA, 15 bp, Homo sapiens
ggtgctctgggaggg

SEQ ID NO: 1837316 - DNA, 15 bp, Homo sapiens
gtgctctgggagggg

SEQ ID NO: 1837317 - DNA, 15 bp, Homo sapiens
tgctctgggagggga

SEQ ID NO: 1837318 - DNA, 15 bp, Homo sapiens
gctctgggaggggag

SEQ ID NO: 1837319 - DNA, 15 bp, Homo sapiens
ctctgggaggggagg

SEQ ID NO: 1837320 - DNA, 15 bp, Homo sapiens
tctgggaggggagga

SEQ ID NO: 1837321 - DNA, 15 bp, Homo sapiens
ctgggaggggaggat

SEQ ID NO: 1837322 - DNA, 15 bp, Homo sapiens
tgggaggggaggatg

SEQ ID NO: 1837323 - DNA, 15 bp, Homo sapiens
gggaggggaggatgg

SEQ ID NO: 1837324 - DNA, 15 bp, Homo sapiens
ggaggggaggatgga

SEQ ID NO: 1837325 - DNA, 15 bp, Homo sapiens
gaggggaggatggag

SEQ ID NO: 1837326 - DNA, 15 bp, Homo sapiens
aggggaggatggagg

SEQ ID NO: 1837327 - DNA, 15 bp, Homo sapiens
ggggaggatggaggc

SEQ ID NO: 1837328 - DNA, 15 bp, Homo sapiens
gggaggatggaggcc

SEQ ID NO: 1837329 - DNA, 15 bp, Homo sapiens
ggaggatggaggccc

SEQ ID NO: 1837330 - DNA, 15 bp, Homo sapiens
gaggatggaggccct

SEQ ID NO: 1837331 - DNA, 15 bp, Homo sapiens
aggatggaggccctg

SEQ ID NO: 1837332 - DNA, 15 bp, Homo sapiens
ggatggaggccctgc

SEQ ID NO: 1837333 - DNA, 15 bp, Homo sapiens
gatggaggccctgca

SEQ ID NO: 1837334 - DNA, 15 bp, Homo sapiens
atggaggccctgcag

SEQ ID NO: 1837335 - DNA, 15 bp, Homo sapiens
tggaggccctgcagc

SEQ ID NO: 1837336 - DNA, 15 bp, Homo sapiens
ggaggccctgcagct

SEQ ID NO: 1837337 - DNA, 15 bp, Homo sapiens
gaggccctgcagctt

SEQ ID NO: 1837338 - DNA, 15 bp, Homo sapiens
aggccctgcagcttc

SEQ ID NO: 1837339 - DNA, 15 bp, Homo sapiens
ggccctgcagcttcc

SEQ ID NO: 1837340 - DNA, 15 bp, Homo sapiens
gccctgcagcttccc

SEQ ID NO: 1837341 - DNA, 15 bp, Homo sapiens
ccctgcagcttccca

SEQ ID NO: 1837342 - DNA, 15 bp, Homo sapiens
cctgcagcttcccag

SEQ ID NO: 1837343 - DNA, 15 bp, Homo sapiens
ctgcagcttcccagc

SEQ ID NO: 1837344 - DNA, 15 bp, Homo sapiens
tgcagcttcccagca

SEQ ID NO: 1837345 - DNA, 15 bp, Homo sapiens
gcagcttcccagcaa

SEQ ID NO: 1837346 - DNA, 15 bp, Homo sapiens
cagcttcccagcaac

SEQ ID NO: 1837347 - DNA, 15 bp, Homo sapiens
agcttcccagcaaca

SEQ ID NO: 1837348 - DNA, 15 bp, Homo sapiens
gcttcccagcaacag

SEQ ID NO: 1837349 - DNA, 15 bp, Homo sapiens
cttcccagcaacagc

SEQ ID NO: 1837350 - DNA, 15 bp, Homo sapiens
ttcccagcaacagcc

SEQ ID NO: 1837351 - DNA, 15 bp, Homo sapiens
tcccagcaacagcca

SEQ ID NO: 1837352 - DNA, 15 bp, Homo sapiens
cccagcaacagccag

SEQ ID NO: 1837353 - DNA, 15 bp, Homo sapiens
ccagcaacagccagg

SEQ ID NO: 1837354 - DNA, 15 bp, Homo sapiens
cagcaacagccaggc

SEQ ID NO: 1837355 - DNA, 15 bp, Homo sapiens
agcaacagccaggcc

SEQ ID NO: 1837356 - DNA, 15 bp, Homo sapiens
gcaacagccaggcct

SEQ ID NO: 1837357 - DNA, 15 bp, Homo sapiens
caacagccaggcctc

SEQ ID NO: 1837358 - DNA, 15 bp, Homo sapiens
aacagccaggcctcc

SEQ ID NO: 1837359 - DNA, 15 bp, Homo sapiens
acagccaggcctccc

SEQ ID NO: 1837360 - DNA, 15 bp, Homo sapiens
cagccaggcctccca

SEQ ID NO: 1837361 - DNA, 15 bp, Homo sapiens
agccaggcctcccat

SEQ ID NO: 1837362 - DNA, 15 bp, Homo sapiens
gccaggcctcccatc

SEQ ID NO: 1837363 - DNA, 15 bp, Homo sapiens
ccaggcctcccatct

SEQ ID NO: 1837364 - DNA, 15 bp, Homo sapiens
caggcctcccatctg

SEQ ID NO: 1837365 - DNA, 15 bp, Homo sapiens
aggcctcccatctgc

SEQ ID NO: 1837366 - DNA, 15 bp, Homo sapiens
gcctcccatctgctg

SEQ ID NO: 1837367 - DNA, 15 bp, Homo sapiens
cctcccatctgctgc

SEQ ID NO: 1837368 - DNA, 15 bp, Homo sapiens
ctcccatctgctgca

SEQ ID NO: 1837369 - DNA, 15 bp, Homo sapiens
tcccatctgctgcaa

SEQ ID NO: 1837370 - DNA, 15 bp, Homo sapiens
cccatctgctgcaac

SEQ ID NO: 1837371 - DNA, 15 bp, Homo sapiens
ccatctgctgcaaca

SEQ ID NO: 1837372 - DNA, 15 bp, Homo sapiens
catctgctgcaacag

SEQ ID NO: 1837373 - DNA, 15 bp, Homo sapiens
atctgctgcaacagt

SEQ ID NO: 1837374 - DNA, 15 bp, Homo sapiens
tctgctgcaacagtt

SEQ ID NO: 1837375 - DNA, 15 bp, Homo sapiens
ctgctgcaacagttc

SEQ ID NO: 1837376 - DNA, 15 bp, Homo sapiens
tgctgcaacagttcc

SEQ ID NO: 1837377 - DNA, 15 bp, Homo sapiens
gctgcaacagttcca

SEQ ID NO: 1837378 - DNA, 15 bp, Homo sapiens
ctgcaacagttccag

SEQ ID NO: 1837379 - DNA, 15 bp, Homo sapiens
tgcaacagttccagc

SEQ ID NO: 1837380 - DNA, 15 bp, Homo sapiens
gcaacagttccagcc

SEQ ID NO: 1837381 - DNA, 15 bp, Homo sapiens
caacagttccagccc

SEQ ID NO: 1837382 - DNA, 15 bp, Homo sapiens
aacagttccagccca

SEQ ID NO: 1837383 - DNA, 15 bp, Homo sapiens
acagttccagcccag

SEQ ID NO: 1837384 - DNA, 15 bp, Homo sapiens
cagttccagcccagg

SEQ ID NO: 1837385 - DNA, 15 bp, Homo sapiens
agttccagcccaggc

SEQ ID NO: 1837386 - DNA, 15 bp, Homo sapiens
gttccagcccaggct

SEQ ID NO: 1837387 - DNA, 15 bp, Homo sapiens
ttccagcccaggcta

SEQ ID NO: 1837388 - DNA, 15 bp, Homo sapiens
tccagcccaggctat

SEQ ID NO: 1837389 - DNA, 15 bp, Homo sapiens
ccagcccaggctatg

SEQ ID NO: 1837390 - DNA, 15 bp, Homo sapiens
cagcccaggctatgg

SEQ ID NO: 1837391 - DNA, 15 bp, Homo sapiens
agcccaggctatggg

SEQ ID NO: 1837392 - DNA, 15 bp, Homo sapiens
gcccaggctatgggc

SEQ ID NO: 1837393 - DNA, 15 bp, Homo sapiens
cccaggctatgggct

SEQ ID NO: 1837394 - DNA, 15 bp, Homo sapiens
ccaggctatgggcta

SEQ ID NO: 1837395 - DNA, 15 bp, Homo sapiens
caggctatgggctaa

SEQ ID NO: 1837396 - DNA, 15 bp, Homo sapiens
aggctatgggctaac

SEQ ID NO: 1837397 - DNA, 15 bp, Homo sapiens
ggctatgggctaacc

SEQ ID NO: 1837398 - DNA, 15 bp, Homo sapiens
gctatgggctaacct

SEQ ID NO: 1837399 - DNA, 15 bp, Homo sapiens
ctatgggctaacctc

SEQ ID NO: 1837400 - DNA, 15 bp, Homo sapiens
tatgggctaacctca

SEQ ID NO: 1837401 - DNA, 15 bp, Homo sapiens
atgggctaacctcag

SEQ ID NO: 1837402 - DNA, 15 bp, Homo sapiens
tgggctaacctcagg

SEQ ID NO: 1837403 - DNA, 15 bp, Homo sapiens
gggctaacctcaggc

SEQ ID NO: 1837404 - DNA, 15 bp, Homo sapiens
ggctaacctcaggcc

SEQ ID NO: 1837405 - DNA, 15 bp, Homo sapiens
gctaacctcaggccc

SEQ ID NO: 1837406 - DNA, 15 bp, Homo sapiens
ctaacctcaggcccc

SEQ ID NO: 1837407 - DNA, 15 bp, Homo sapiens
taacctcaggcccct

SEQ ID NO: 1837408 - DNA, 15 bp, Homo sapiens
aacctcaggcccctc

SEQ ID NO: 1837409 - DNA, 15 bp, Homo sapiens
acctcaggcccctcc

SEQ ID NO: 1837410 - DNA, 15 bp, Homo sapiens
cctcaggcccctcca

SEQ ID NO: 1837411 - DNA, 15 bp, Homo sapiens
ctcaggcccctccag

SEQ ID NO: 1837412 - DNA, 15 bp, Homo sapiens
tcaggcccctccagc

SEQ ID NO: 1837413 - DNA, 15 bp, Homo sapiens
caggcccctccagct

SEQ ID NO: 1837414 - DNA, 15 bp, Homo sapiens
aggcccctccagctc

SEQ ID NO: 1837415 - DNA, 15 bp, Homo sapiens
ggcccctccagctcc

SEQ ID NO: 1837416 - DNA, 15 bp, Homo sapiens
gcccctccagctcca

SEQ ID NO: 1837417 - DNA, 15 bp, Homo sapiens
cccctccagctccag

SEQ ID NO: 1837418 - DNA, 15 bp, Homo sapiens
ccctccagctccaga

SEQ ID NO: 1837419 - DNA, 15 bp, Homo sapiens
cctccagctccagac

SEQ ID NO: 1837420 - DNA, 15 bp, Homo sapiens
ctccagctccagaca

SEQ ID NO: 1837421 - DNA, 15 bp, Homo sapiens
tccagctccagacac

SEQ ID NO: 1837422 - DNA, 15 bp, Homo sapiens
ccagctccagacact

SEQ ID NO: 1837423 - DNA, 15 bp, Homo sapiens
cagctccagacactc

SEQ ID NO: 1837424 - DNA, 15 bp, Homo sapiens
agctccagacactct

SEQ ID NO: 1837425 - DNA, 15 bp, Homo sapiens
gctccagacactctc

SEQ ID NO: 1837426 - DNA, 15 bp, Homo sapiens
ctccagacactctca

SEQ ID NO: 1837427 - DNA, 15 bp, Homo sapiens
tccagacactctcag

SEQ ID NO: 1837428 - DNA, 15 bp, Homo sapiens
ccagacactctcaga

SEQ ID NO: 1837429 - DNA, 15 bp, Homo sapiens
cagacactctcagag

SEQ ID NO: 1837430 - DNA, 15 bp, Homo sapiens
agacactctcagagg

SEQ ID NO: 1837431 - DNA, 15 bp, Homo sapiens
gacactctcagaggc

SEQ ID NO: 1837432 - DNA, 15 bp, Homo sapiens
acactctcagaggcc

SEQ ID NO: 1837433 - DNA, 15 bp, Homo sapiens
cactctcagaggccc

SEQ ID NO: 1837434 - DNA, 15 bp, Homo sapiens
actctcagaggccct

SEQ ID NO: 1837435 - DNA, 15 bp, Homo sapiens
ctctcagaggccctc

SEQ ID NO: 1837436 - DNA, 15 bp, Homo sapiens
tctcagaggccctca

SEQ ID NO: 1837437 - DNA, 15 bp, Homo sapiens
ctcagaggccctcac

SEQ ID NO: 1837438 - DNA, 15 bp, Homo sapiens
tcagaggccctcaca

SEQ ID NO: 1837439 - DNA, 15 bp, Homo sapiens
cagaggccctcacac

SEQ ID NO: 1837440 - DNA, 15 bp, Homo sapiens
agaggccctcacacc

SEQ ID NO: 1837441 - DNA, 15 bp, Homo sapiens
gaggccctcacaccc

SEQ ID NO: 1837442 - DNA, 15 bp, Homo sapiens
aggccctcacacccg

SEQ ID NO: 1837443 - DNA, 15 bp, Homo sapiens
ggccctcacacccgt

SEQ ID NO: 1837444 - DNA, 15 bp, Homo sapiens
gccctcacacccgtc

SEQ ID NO: 1837445 - DNA, 15 bp, Homo sapiens
ccctcacacccgtct

SEQ ID NO: 1837446 - DNA, 15 bp, Homo sapiens
cctcacacccgtctg

SEQ ID NO: 1837447 - DNA, 15 bp, Homo sapiens
ctcacacccgtctga

SEQ ID NO: 1837448 - DNA, 15 bp, Homo sapiens
tcacacccgtctgag

SEQ ID NO: 1837449 - DNA, 15 bp, Homo sapiens
cacacccgtctgagg

SEQ ID NO: 1837450 - DNA, 15 bp, Homo sapiens
acacccgtctgaggt

SEQ ID NO: 1837451 - DNA, 15 bp, Homo sapiens
cacccgtctgaggtt

SEQ ID NO: 1837452 - DNA, 15 bp, Homo sapiens
acccgtctgaggttt

SEQ ID NO: 1837453 - DNA, 15 bp, Homo sapiens
cccgtctgaggtttt

SEQ ID NO: 1837454 - DNA, 15 bp, Homo sapiens
ccgtctgaggtttta

SEQ ID NO: 1837455 - DNA, 15 bp, Homo sapiens
cgtctgaggttttaa

SEQ ID NO: 1837456 - DNA, 15 bp, Homo sapiens
gtctgaggttttaac

SEQ ID NO: 1837457 - DNA, 15 bp, Homo sapiens
tctgaggttttaaca

SEQ ID NO: 1837458 - DNA, 15 bp, Homo sapiens
ctgaggttttaacac

SEQ ID NO: 1837459 - DNA, 15 bp, Homo sapiens
tgaggttttaacacc

SEQ ID NO: 1837460 - DNA, 15 bp, Homo sapiens
gaggttttaacacct

SEQ ID NO: 1837461 - DNA, 15 bp, Homo sapiens
aggttttaacaccta

SEQ ID NO: 1837462 - DNA, 15 bp, Homo sapiens
ggttttaacacctat

SEQ ID NO: 1837463 - DNA, 15 bp, Homo sapiens
gttttaacacctatc

SEQ ID NO: 1837464 - DNA, 15 bp, Homo sapiens
ttttaacacctatcc

SEQ ID NO: 1837465 - DNA, 15 bp, Homo sapiens
tttaacacctatcct

SEQ ID NO: 1837466 - DNA, 15 bp, Homo sapiens
ttaacacctatcctg

SEQ ID NO: 1837467 - DNA, 15 bp, Homo sapiens
taacacctatcctgt

SEQ ID NO: 1837468 - DNA, 15 bp, Homo sapiens
aacacctatcctgtc

SEQ ID NO: 1837469 - DNA, 15 bp, Homo sapiens
acacctatcctgtcc

SEQ ID NO: 1837470 - DNA, 15 bp, Homo sapiens
cacctatcctgtccc

SEQ ID NO: 1837471 - DNA, 15 bp, Homo sapiens
acctatcctgtcccc

SEQ ID NO: 1837472 - DNA, 15 bp, Homo sapiens
cctatcctgtcccca

SEQ ID NO: 1837473 - DNA, 15 bp, Homo sapiens
ctatcctgtccccat

SEQ ID NO: 1837474 - DNA, 15 bp, Homo sapiens
tatcctgtccccatc

SEQ ID NO: 1837475 - DNA, 15 bp, Homo sapiens
atcctgtccccatcc

SEQ ID NO: 1837476 - DNA, 15 bp, Homo sapiens
tcctgtccccatcca

SEQ ID NO: 1837477 - DNA, 15 bp, Homo sapiens
cctgtccccatccaa

SEQ ID NO: 1837478 - DNA, 15 bp, Homo sapiens
ctgtccccatccaat

SEQ ID NO: 1837479 - DNA, 15 bp, Homo sapiens
tgtccccatccaatt

SEQ ID NO: 1837480 - DNA, 15 bp, Homo sapiens
gtccccatccaattt

SEQ ID NO: 1837481 - DNA, 15 bp, Homo sapiens
tccccatccaatttt

SEQ ID NO: 1837482 - DNA, 15 bp, Homo sapiens
ccccatccaattttg

SEQ ID NO: 1837483 - DNA, 15 bp, Homo sapiens
cccatccaattttga

SEQ ID NO: 1837484 - DNA, 15 bp, Homo sapiens
ccatccaattttgac

SEQ ID NO: 1837485 - DNA, 15 bp, Homo sapiens
catccaattttgact

SEQ ID NO: 1837486 - DNA, 15 bp, Homo sapiens
atccaattttgactt

SEQ ID NO: 1837487 - DNA, 15 bp, Homo sapiens
tccaattttgacttt

SEQ ID NO: 1837488 - DNA, 15 bp, Homo sapiens
ccaattttgactttg

SEQ ID NO: 1837489 - DNA, 15 bp, Homo sapiens
caattttgactttgt

SEQ ID NO: 1837490 - DNA, 15 bp, Homo sapiens
aattttgactttgtc

SEQ ID NO: 1837491 - DNA, 15 bp, Homo sapiens
attttgactttgtcc

SEQ ID NO: 1837492 - DNA, 15 bp, Homo sapiens
ttttgactttgtccc

SEQ ID NO: 1837493 - DNA, 15 bp, Homo sapiens
tttgactttgtcccg

SEQ ID NO: 1837494 - DNA, 15 bp, Homo sapiens
ttgactttgtcccga

SEQ ID NO: 1837495 - DNA, 15 bp, Homo sapiens
tgactttgtcccgac

SEQ ID NO: 1837496 - DNA, 15 bp, Homo sapiens
gactttgtcccgacc

SEQ ID NO: 1837497 - DNA, 15 bp, Homo sapiens
actttgtcccgaccc

SEQ ID NO: 1837498 - DNA, 15 bp, Homo sapiens
ctttgtcccgacccc

SEQ ID NO: 1837499 - DNA, 15 bp, Homo sapiens
tttgtcccgacccct

SEQ ID NO: 1837500 - DNA, 15 bp, Homo sapiens
ttgtcccgacccctc

SEQ ID NO: 1837501 - DNA, 15 bp, Homo sapiens
tgtcccgacccctcc

SEQ ID NO: 1837502 - DNA, 15 bp, Homo sapiens
gtcccgacccctccc

SEQ ID NO: 1837503 - DNA, 15 bp, Homo sapiens
tcccgacccctccca

SEQ ID NO: 1837504 - DNA, 15 bp, Homo sapiens
cccgacccctcccat

SEQ ID NO: 1837505 - DNA, 15 bp, Homo sapiens
ccgacccctcccatt

SEQ ID NO: 1837506 - DNA, 15 bp, Homo sapiens
cgacccctcccattg

SEQ ID NO: 1837507 - DNA, 15 bp, Homo sapiens
gacccctcccattgc

SEQ ID NO: 1837508 - DNA, 15 bp, Homo sapiens
acccctcccattgca

SEQ ID NO: 1837509 - DNA, 15 bp, Homo sapiens
cccctcccattgcaa

SEQ ID NO: 1837510 - DNA, 15 bp, Homo sapiens
ccctcccattgcaaa

SEQ ID NO: 1837511 - DNA, 15 bp, Homo sapiens
cctcccattgcaaac

SEQ ID NO: 1837512 - DNA, 15 bp, Homo sapiens
ctcccattgcaaaca

SEQ ID NO: 1837513 - DNA, 15 bp, Homo sapiens
tcccattgcaaacat

SEQ ID NO: 1837514 - DNA, 15 bp, Homo sapiens
cccattgcaaacata

SEQ ID NO: 1837515 - DNA, 15 bp, Homo sapiens
ccattgcaaacatat

SEQ ID NO: 1837516 - DNA, 15 bp, Homo sapiens
cattgcaaacatatc

SEQ ID NO: 1837517 - DNA, 15 bp, Homo sapiens
attgcaaacatatca

SEQ ID NO: 1837518 - DNA, 15 bp, Homo sapiens
ttgcaaacatatcaa

SEQ ID NO: 1837519 - DNA, 15 bp, Homo sapiens
tgcaaacatatcaaa

SEQ ID NO: 1837520 - DNA, 15 bp, Homo sapiens
gcaaacatatcaaaa

SEQ ID NO: 1837521 - DNA, 15 bp, Homo sapiens
caaacatatcaaaac

SEQ ID NO: 1837522 - DNA, 15 bp, Homo sapiens
aaacatatcaaaaca

SEQ ID NO: 1837523 - DNA, 15 bp, Homo sapiens
aacatatcaaaacac

SEQ ID NO: 1837524 - DNA, 15 bp, Homo sapiens
acatatcaaaacaca

SEQ ID NO: 1837525 - DNA, 15 bp, Homo sapiens
catatcaaaacacac

SEQ ID NO: 1837526 - DNA, 15 bp, Homo sapiens
atatcaaaacacacc

SEQ ID NO: 1837527 - DNA, 15 bp, Homo sapiens
tatcaaaacacaccc

SEQ ID NO: 1837528 - DNA, 15 bp, Homo sapiens
atcaaaacacaccca

SEQ ID NO: 1837529 - DNA, 15 bp, Homo sapiens
tcaaaacacacccac

SEQ ID NO: 1837530 - DNA, 15 bp, Homo sapiens
caaaacacacccaca

SEQ ID NO: 1837531 - DNA, 15 bp, Homo sapiens
aaaacacacccacat

SEQ ID NO: 1837532 - DNA, 15 bp, Homo sapiens
aaacacacccacatc

SEQ ID NO: 1837533 - DNA, 15 bp, Homo sapiens
aacacacccacatcc

SEQ ID NO: 1837534 - DNA, 15 bp, Homo sapiens
acacacccacatccc

SEQ ID NO: 1837535 - DNA, 15 bp, Homo sapiens
cacacccacatcccg

SEQ ID NO: 1837536 - DNA, 15 bp, Homo sapiens
acacccacatcccga

SEQ ID NO: 1837537 - DNA, 15 bp, Homo sapiens
cacccacatcccgaa

SEQ ID NO: 1837538 - DNA, 15 bp, Homo sapiens
acccacatcccgaat

SEQ ID NO: 1837539 - DNA, 15 bp, Homo sapiens
cccacatcccgaatg

SEQ ID NO: 1837540 - DNA, 15 bp, Homo sapiens
ccacatcccgaatga

SEQ ID NO: 1837541 - DNA, 15 bp, Homo sapiens
cacatcccgaatgag

SEQ ID NO: 1837542 - DNA, 15 bp, Homo sapiens
acatcccgaatgagg

SEQ ID NO: 1837543 - DNA, 15 bp, Homo sapiens
catcccgaatgaggt

SEQ ID NO: 1837544 - DNA, 15 bp, Homo sapiens
atcccgaatgaggta

SEQ ID NO: 1837545 - DNA, 15 bp, Homo sapiens
tcccgaatgaggtat

SEQ ID NO: 1837546 - DNA, 15 bp, Homo sapiens
cccgaatgaggtatc

SEQ ID NO: 1837547 - DNA, 15 bp, Homo sapiens
ccgaatgaggtatct

SEQ ID NO: 1837548 - DNA, 15 bp, Homo sapiens
cgaatgaggtatctc

SEQ ID NO: 1837549 - DNA, 15 bp, Homo sapiens
gaatgaggtatctct

SEQ ID NO: 1837550 - DNA, 15 bp, Homo sapiens
aatgaggtatctctt

SEQ ID NO: 1837551 - DNA, 15 bp, Homo sapiens
atgaggtatctcttt

SEQ ID NO: 1837552 - DNA, 15 bp, Homo sapiens
tgaggtatctctttt

SEQ ID NO: 1837553 - DNA, 15 bp, Homo sapiens
gaggtatctcttttt

SEQ ID NO: 1837554 - DNA, 15 bp, Homo sapiens
aggtatctctttttt

SEQ ID NO: 1837555 - DNA, 15 bp, Homo sapiens
ggtatctctttttta

SEQ ID NO: 1837556 - DNA, 15 bp, Homo sapiens
gtatctcttttttag

SEQ ID NO: 1837557 - DNA, 15 bp, Homo sapiens
tatctcttttttagc

SEQ ID NO: 1837558 - DNA, 15 bp, Homo sapiens
atctcttttttagcc

SEQ ID NO: 1837559 - DNA, 15 bp, Homo sapiens
tctcttttttagcca

SEQ ID NO: 1837560 - DNA, 15 bp, Homo sapiens
ctcttttttagccac

SEQ ID NO: 1837561 - DNA, 15 bp, Homo sapiens
tcttttttagccacc

SEQ ID NO: 1837562 - DNA, 15 bp, Homo sapiens
cttttttagccaccc

SEQ ID NO: 1837563 - DNA, 15 bp, Homo sapiens
ttttttagccaccca

SEQ ID NO: 1837564 - DNA, 15 bp, Homo sapiens
tttttagccacccac

SEQ ID NO: 1837565 - DNA, 15 bp, Homo sapiens
ttttagccacccaca

SEQ ID NO: 1837566 - DNA, 15 bp, Homo sapiens
tttagccacccacac

SEQ ID NO: 1837567 - DNA, 15 bp, Homo sapiens
ttagccacccacact

SEQ ID NO: 1837568 - DNA, 15 bp, Homo sapiens
tagccacccacactt

SEQ ID NO: 1837569 - DNA, 15 bp, Homo sapiens
agccacccacacttc

SEQ ID NO: 1837570 - DNA, 15 bp, Homo sapiens
gccacccacacttct

SEQ ID NO: 1837571 - DNA, 15 bp, Homo sapiens
ccacccacacttctt

SEQ ID NO: 1837572 - DNA, 15 bp, Homo sapiens
cacccacacttcttg

SEQ ID NO: 1837573 - DNA, 15 bp, Homo sapiens
acccacacttcttga

SEQ ID NO: 1837574 - DNA, 15 bp, Homo sapiens
cccacacttcttgaa

SEQ ID NO: 1837575 - DNA, 15 bp, Homo sapiens
ccacacttcttgaaa

SEQ ID NO: 1837576 - DNA, 15 bp, Homo sapiens
cacacttcttgaaag

SEQ ID NO: 1837577 - DNA, 15 bp, Homo sapiens
acacttcttgaaaga

SEQ ID NO: 1837578 - DNA, 15 bp, Homo sapiens
cacttcttgaaagat

SEQ ID NO: 1837579 - DNA, 15 bp, Homo sapiens
acttcttgaaagatt

SEQ ID NO: 1837580 - DNA, 15 bp, Homo sapiens
cttcttgaaagattt

SEQ ID NO: 1837581 - DNA, 15 bp, Homo sapiens
ttcttgaaagattta

SEQ ID NO: 1837582 - DNA, 15 bp, Homo sapiens
tcttgaaagatttac

SEQ ID NO: 1837583 - DNA, 15 bp, Homo sapiens
cttgaaagatttact

SEQ ID NO: 1837584 - DNA, 15 bp, Homo sapiens
ttgaaagatttactt

SEQ ID NO: 1837585 - DNA, 15 bp, Homo sapiens
tgaaagatttactta

SEQ ID NO: 1837586 - DNA, 15 bp, Homo sapiens
gaaagatttacttaa

SEQ ID NO: 1837587 - DNA, 15 bp, Homo sapiens
aaagatttacttaaa

SEQ ID NO: 1837588 - DNA, 15 bp, Homo sapiens
aagatttacttaaat

SEQ ID NO: 1837589 - DNA, 15 bp, Homo sapiens
agatttacttaaata

SEQ ID NO: 1837590 - DNA, 15 bp, Homo sapiens
gatttacttaaatat

SEQ ID NO: 1837591 - DNA, 15 bp, Homo sapiens
atttacttaaatatt

SEQ ID NO: 1837592 - DNA, 15 bp, Homo sapiens
tttacttaaatatta

SEQ ID NO: 1837593 - DNA, 15 bp, Homo sapiens
ttacttaaatattaa

SEQ ID NO: 1837594 - DNA, 15 bp, Homo sapiens
tacttaaatattaaa

SEQ ID NO: 1837595 - DNA, 15 bp, Homo sapiens
acttaaatattaaat

SEQ ID NO: 1837596 - DNA, 15 bp, Homo sapiens
cttaaatattaaata

SEQ ID NO: 1837597 - DNA, 15 bp, Homo sapiens
taaatattaaatata

SEQ ID NO: 1837598 - DNA, 15 bp, Homo sapiens
aaatattaaatataa

SEQ ID NO: 1837599 - DNA, 15 bp, Homo sapiens
aatattaaatataac

SEQ ID NO: 1837600 - DNA, 15 bp, Homo sapiens
atattaaatataact

SEQ ID NO: 1837601 - DNA, 15 bp, Homo sapiens
tattaaatataacta

SEQ ID NO: 1837602 - DNA, 15 bp, Homo sapiens
attaaatataactat

SEQ ID NO: 1837603 - DNA, 15 bp, Homo sapiens
ttaaatataactatg

SEQ ID NO: 1837604 - DNA, 15 bp, Homo sapiens
taaatataactatgc

SEQ ID NO: 1837605 - DNA, 15 bp, Homo sapiens
aaatataactatgct

SEQ ID NO: 1837606 - DNA, 15 bp, Homo sapiens
aatataactatgctt

SEQ ID NO: 1837607 - DNA, 15 bp, Homo sapiens
atataactatgcttt

SEQ ID NO: 1837608 - DNA, 15 bp, Homo sapiens
tataactatgctttg

SEQ ID NO: 1837609 - DNA, 15 bp, Homo sapiens
ataactatgctttgg

SEQ ID NO: 1837610 - DNA, 15 bp, Homo sapiens
taactatgctttgga

SEQ ID NO: 1837611 - DNA, 15 bp, Homo sapiens
aactatgctttggaa

SEQ ID NO: 1837612 - DNA, 15 bp, Homo sapiens
actatgctttggaaa

SEQ ID NO: 1837613 - DNA, 15 bp, Homo sapiens
ctatgctttggaaat

SEQ ID NO: 1837614 - DNA, 15 bp, Homo sapiens
tatgctttggaaatt

SEQ ID NO: 1837615 - DNA, 15 bp, Homo sapiens
atgctttggaaatta

SEQ ID NO: 1837616 - DNA, 15 bp, Homo sapiens
tgctttggaaattaa

SEQ ID NO: 1837617 - DNA, 15 bp, Homo sapiens
gctttggaaattaag

SEQ ID NO: 1837618 - DNA, 15 bp, Homo sapiens
ctttggaaattaagc

SEQ ID NO: 1837619 - DNA, 15 bp, Homo sapiens
tttggaaattaagca

SEQ ID NO: 1837620 - DNA, 15 bp, Homo sapiens
ttggaaattaagcaa

SEQ ID NO: 1837621 - DNA, 15 bp, Homo sapiens
tggaaattaagcaat

SEQ ID NO: 1837622 - DNA, 15 bp, Homo sapiens
ggaaattaagcaatc

SEQ ID NO: 1837623 - DNA, 15 bp, Homo sapiens
gaaattaagcaatca

SEQ ID NO: 1837624 - DNA, 15 bp, Homo sapiens
aaattaagcaatcat

SEQ ID NO: 1837625 - DNA, 15 bp, Homo sapiens
aattaagcaatcata

SEQ ID NO: 1837626 - DNA, 15 bp, Homo sapiens
attaagcaatcatat

SEQ ID NO: 1837627 - DNA, 15 bp, Homo sapiens
ttaagcaatcatatg

SEQ ID NO: 1837628 - DNA, 15 bp, Homo sapiens
taagcaatcatatgg

SEQ ID NO: 1837629 - DNA, 15 bp, Homo sapiens
aagcaatcatatggc

SEQ ID NO: 1837630 - DNA, 15 bp, Homo sapiens
agcaatcatatggct

SEQ ID NO: 1837631 - DNA, 15 bp, Homo sapiens
gcaatcatatggctt

SEQ ID NO: 1837632 - DNA, 15 bp, Homo sapiens
caatcatatggcttg

SEQ ID NO: 1837633 - DNA, 15 bp, Homo sapiens
aatcatatggcttgg

SEQ ID NO: 1837634 - DNA, 15 bp, Homo sapiens
atcatatggcttggt

SEQ ID NO: 1837635 - DNA, 15 bp, Homo sapiens
tcatatggcttggtt

SEQ ID NO: 1837636 - DNA, 15 bp, Homo sapiens
catatggcttggttt

SEQ ID NO: 1837637 - DNA, 15 bp, Homo sapiens
atatggcttggttta

SEQ ID NO: 1837638 - DNA, 15 bp, Homo sapiens
tatggcttggtttac

SEQ ID NO: 1837639 - DNA, 15 bp, Homo sapiens
atggcttggtttacc

SEQ ID NO: 1837640 - DNA, 15 bp, Homo sapiens
tggcttggtttacca

SEQ ID NO: 1837641 - DNA, 15 bp, Homo sapiens
ggcttggtttaccag

SEQ ID NO: 1837642 - DNA, 15 bp, Homo sapiens
gcttggtttaccagt

SEQ ID NO: 1837643 - DNA, 15 bp, Homo sapiens
cttggtttaccagtg

SEQ ID NO: 1837644 - DNA, 15 bp, Homo sapiens
ttggtttaccagtgg

SEQ ID NO: 1837645 - DNA, 15 bp, Homo sapiens
tggtttaccagtggc

SEQ ID NO: 1837646 - DNA, 15 bp, Homo sapiens
ggtttaccagtggct

SEQ ID NO: 1837647 - DNA, 15 bp, Homo sapiens
gtttaccagtggcta

SEQ ID NO: 1837648 - DNA, 15 bp, Homo sapiens
tttaccagtggctac

SEQ ID NO: 1837649 - DNA, 15 bp, Homo sapiens
ttaccagtggctact

SEQ ID NO: 1837650 - DNA, 15 bp, Homo sapiens
taccagtggctacta

SEQ ID NO: 1837651 - DNA, 15 bp, Homo sapiens
accagtggctactac

SEQ ID NO: 1837652 - DNA, 15 bp, Homo sapiens
ccagtggctactact

SEQ ID NO: 1837653 - DNA, 15 bp, Homo sapiens
cagtggctactactt

SEQ ID NO: 1837654 - DNA, 15 bp, Homo sapiens
agtggctactacttc

SEQ ID NO: 1837655 - DNA, 15 bp, Homo sapiens
gtggctactacttct

SEQ ID NO: 1837656 - DNA, 15 bp, Homo sapiens
tggctactacttctg

SEQ ID NO: 1837657 - DNA, 15 bp, Homo sapiens
ggctactacttctga

SEQ ID NO: 1837658 - DNA, 15 bp, Homo sapiens
gctactacttctgag

SEQ ID NO: 1837659 - DNA, 15 bp, Homo sapiens
ctactacttctgagg

SEQ ID NO: 1837660 - DNA, 15 bp, Homo sapiens
tactacttctgagga

SEQ ID NO: 1837661 - DNA, 15 bp, Homo sapiens
actacttctgaggaa

SEQ ID NO: 1837662 - DNA, 15 bp, Homo sapiens
ctacttctgaggaat

SEQ ID NO: 1837663 - DNA, 15 bp, Homo sapiens
tacttctgaggaatg

SEQ ID NO: 1837664 - DNA, 15 bp, Homo sapiens
acttctgaggaatgc

SEQ ID NO: 1837665 - DNA, 15 bp, Homo sapiens
cttctgaggaatgct

SEQ ID NO: 1837666 - DNA, 15 bp, Homo sapiens
ttctgaggaatgctt

SEQ ID NO: 1837667 - DNA, 15 bp, Homo sapiens
tctgaggaatgcttg

SEQ ID NO: 1837668 - DNA, 15 bp, Homo sapiens
ctgaggaatgcttgg

SEQ ID NO: 1837669 - DNA, 15 bp, Homo sapiens
tgaggaatgcttggg

SEQ ID NO: 1837670 - DNA, 15 bp, Homo sapiens
gaggaatgcttgggg

SEQ ID NO: 1837671 - DNA, 15 bp, Homo sapiens
aggaatgcttgggga

SEQ ID NO: 1837672 - DNA, 15 bp, Homo sapiens
ggaatgcttggggaa

SEQ ID NO: 1837673 - DNA, 15 bp, Homo sapiens
gaatgcttggggaaa

SEQ ID NO: 1837674 - DNA, 15 bp, Homo sapiens
aatgcttggggaaaa

SEQ ID NO: 1837675 - DNA, 15 bp, Homo sapiens
atgcttggggaaaaa

SEQ ID NO: 1837676 - DNA, 15 bp, Homo sapiens
tgcttggggaaaaaa

SEQ ID NO: 1837677 - DNA, 15 bp, Homo sapiens
gcttggggaaaaaaa

SEQ ID NO: 1837678 - DNA, 15 bp, Homo sapiens
cttggggaaaaaaag

SEQ ID NO: 1837679 - DNA, 15 bp, Homo sapiens
tggggaaaaaaagca

SEQ ID NO: 1837680 - DNA, 15 bp, Homo sapiens
ggggaaaaaaagcat

SEQ ID NO: 1837681 - DNA, 15 bp, Homo sapiens
gggaaaaaaagcatt

SEQ ID NO: 1837682 - DNA, 15 bp, Homo sapiens
ggaaaaaaagcattc

SEQ ID NO: 1837683 - DNA, 15 bp, Homo sapiens
gaaaaaaagcattca

SEQ ID NO: 1837684 - DNA, 15 bp, Homo sapiens
aaaaaaagcattcag

SEQ ID NO: 1837685 - DNA, 15 bp, Homo sapiens
aaaaaagcattcagg

SEQ ID NO: 1837686 - DNA, 15 bp, Homo sapiens
aaaaagcattcagga

SEQ ID NO: 1837687 - DNA, 15 bp, Homo sapiens
aaaagcattcaggag

SEQ ID NO: 1837688 - DNA, 15 bp, Homo sapiens
aaagcattcaggagt

SEQ ID NO: 1837689 - DNA, 15 bp, Homo sapiens
aagcattcaggagtt

SEQ ID NO: 1837690 - DNA, 15 bp, Homo sapiens
agcattcaggagttg

SEQ ID NO: 1837691 - DNA, 15 bp, Homo sapiens
gcattcaggagttga

SEQ ID NO: 1837692 - DNA, 15 bp, Homo sapiens
cattcaggagttgac

SEQ ID NO: 1837693 - DNA, 15 bp, Homo sapiens
attcaggagttgacc

SEQ ID NO: 1837694 - DNA, 15 bp, Homo sapiens
ttcaggagttgaccc

SEQ ID NO: 1837695 - DNA, 15 bp, Homo sapiens
tcaggagttgacccc

SEQ ID NO: 1837696 - DNA, 15 bp, Homo sapiens
caggagttgacccct

SEQ ID NO: 1837697 - DNA, 15 bp, Homo sapiens
aggagttgacccctg

SEQ ID NO: 1837698 - DNA, 15 bp, Homo sapiens
ggagttgacccctga

SEQ ID NO: 1837699 - DNA, 15 bp, Homo sapiens
gagttgacccctgaa

SEQ ID NO: 1837700 - DNA, 15 bp, Homo sapiens
agttgacccctgaaa

SEQ ID NO: 1837701 - DNA, 15 bp, Homo sapiens
gttgacccctgaaaa

SEQ ID NO: 1837702 - DNA, 15 bp, Homo sapiens
ttgacccctgaaaaa

SEQ ID NO: 1837703 - DNA, 15 bp, Homo sapiens
tgacccctgaaaaat

SEQ ID NO: 1837704 - DNA, 15 bp, Homo sapiens
gacccctgaaaaata

SEQ ID NO: 1837705 - DNA, 15 bp, Homo sapiens
acccctgaaaaatat

SEQ ID NO: 1837706 - DNA, 15 bp, Homo sapiens
cccctgaaaaatatg

SEQ ID NO: 1837707 - DNA, 15 bp, Homo sapiens
ccctgaaaaatatgg

SEQ ID NO: 1837708 - DNA, 15 bp, Homo sapiens
cctgaaaaatatggg

SEQ ID NO: 1837709 - DNA, 15 bp, Homo sapiens
ctgaaaaatatgggt

SEQ ID NO: 1837710 - DNA, 15 bp, Homo sapiens
tgaaaaatatgggtt

SEQ ID NO: 1837711 - DNA, 15 bp, Homo sapiens
gaaaaatatgggttt

SEQ ID NO: 1837712 - DNA, 15 bp, Homo sapiens
aaaaatatgggtttg

SEQ ID NO: 1837713 - DNA, 15 bp, Homo sapiens
aaaatatgggtttga

SEQ ID NO: 1837714 - DNA, 15 bp, Homo sapiens
aaatatgggtttgaa

SEQ ID NO: 1837715 - DNA, 15 bp, Homo sapiens
aatatgggtttgaat

SEQ ID NO: 1837716 - DNA, 15 bp, Homo sapiens
atatgggtttgaatg

SEQ ID NO: 1837717 - DNA, 15 bp, Homo sapiens
tatgggtttgaatgc

SEQ ID NO: 1837718 - DNA, 15 bp, Homo sapiens
atgggtttgaatgcc

SEQ ID NO: 1837719 - DNA, 15 bp, Homo sapiens
tgggtttgaatgccc

SEQ ID NO: 1837720 - DNA, 15 bp, Homo sapiens
gggtttgaatgccca

SEQ ID NO: 1837721 - DNA, 15 bp, Homo sapiens
ggtttgaatgcccag

SEQ ID NO: 1837722 - DNA, 15 bp, Homo sapiens
gtttgaatgcccagg

SEQ ID NO: 1837723 - DNA, 15 bp, Homo sapiens
tttgaatgcccaggt

SEQ ID NO: 1837724 - DNA, 15 bp, Homo sapiens
ttgaatgcccaggtc

SEQ ID NO: 1837725 - DNA, 15 bp, Homo sapiens
tgaatgcccaggtcc

SEQ ID NO: 1837726 - DNA, 15 bp, Homo sapiens
gaatgcccaggtcca

SEQ ID NO: 1837727 - DNA, 15 bp, Homo sapiens
aatgcccaggtccac

SEQ ID NO: 1837728 - DNA, 15 bp, Homo sapiens
atgcccaggtccact

SEQ ID NO: 1837729 - DNA, 15 bp, Homo sapiens
tgcccaggtccactt

SEQ ID NO: 1837730 - DNA, 15 bp, Homo sapiens
gcccaggtccactta

SEQ ID NO: 1837731 - DNA, 15 bp, Homo sapiens
cccaggtccacttac

SEQ ID NO: 1837732 - DNA, 15 bp, Homo sapiens
ccaggtccacttaca

SEQ ID NO: 1837733 - DNA, 15 bp, Homo sapiens
caggtccacttacac

SEQ ID NO: 1837734 - DNA, 15 bp, Homo sapiens
aggtccacttacaca

SEQ ID NO: 1837735 - DNA, 15 bp, Homo sapiens
ggtccacttacacat

SEQ ID NO: 1837736 - DNA, 15 bp, Homo sapiens
gtccacttacacatg

SEQ ID NO: 1837737 - DNA, 15 bp, Homo sapiens
tccacttacacatgg

SEQ ID NO: 1837738 - DNA, 15 bp, Homo sapiens
ccacttacacatgga

SEQ ID NO: 1837739 - DNA, 15 bp, Homo sapiens
cacttacacatggat

SEQ ID NO: 1837740 - DNA, 15 bp, Homo sapiens
acttacacatggatt

SEQ ID NO: 1837741 - DNA, 15 bp, Homo sapiens
cttacacatggattt

SEQ ID NO: 1837742 - DNA, 15 bp, Homo sapiens
ttacacatggatttt

SEQ ID NO: 1837743 - DNA, 15 bp, Homo sapiens
tacacatggattttt

SEQ ID NO: 1837744 - DNA, 15 bp, Homo sapiens
acacatggatttttt

SEQ ID NO: 1837745 - DNA, 15 bp, Homo sapiens
cacatggattttttt

SEQ ID NO: 1837746 - DNA, 15 bp, Homo sapiens
acatggatttttttg

SEQ ID NO: 1837747 - DNA, 15 bp, Homo sapiens
catggatttttttgt

SEQ ID NO: 1837748 - DNA, 15 bp, Homo sapiens
atggatttttttgtt

SEQ ID NO: 1837749 - DNA, 15 bp, Homo sapiens
tggatttttttgttc

SEQ ID NO: 1837750 - DNA, 15 bp, Homo sapiens
ggatttttttgttcg

SEQ ID NO: 1837751 - DNA, 15 bp, Homo sapiens
gatttttttgttcgt

SEQ ID NO: 1837752 - DNA, 15 bp, Homo sapiens
atttttttgttcgtt

SEQ ID NO: 1837753 - DNA, 15 bp, Homo sapiens
tttttttgttcgttt

SEQ ID NO: 1837754 - DNA, 15 bp, Homo sapiens
ttttttgttcgtttt

SEQ ID NO: 1837755 - DNA, 15 bp, Homo sapiens
tttttgttcgttttt

SEQ ID NO: 1837756 - DNA, 15 bp, Homo sapiens
ttttgttcgtttttt

SEQ ID NO: 1837757 - DNA, 15 bp, Homo sapiens
tttgttcgttttttg

SEQ ID NO: 1837758 - DNA, 15 bp, Homo sapiens
ttgttcgttttttga

SEQ ID NO: 1837759 - DNA, 15 bp, Homo sapiens
tgttcgttttttgag

SEQ ID NO: 1837760 - DNA, 15 bp, Homo sapiens
gttcgttttttgaga

SEQ ID NO: 1837761 - DNA, 15 bp, Homo sapiens
ttcgttttttgagac

SEQ ID NO: 1837762 - DNA, 15 bp, Homo sapiens
tcgttttttgagacg

SEQ ID NO: 1837763 - DNA, 15 bp, Homo sapiens
cgttttttgagacgg

SEQ ID NO: 1837764 - DNA, 15 bp, Homo sapiens
gttttttgagacgga

SEQ ID NO: 1837765 - DNA, 15 bp, Homo sapiens
gtcacccaggctggg

SEQ ID NO: 1837766 - DNA, 15 bp, Homo sapiens
tcacccaggctgggc

SEQ ID NO: 1837767 - DNA, 15 bp, Homo sapiens
cacccaggctgggca

SEQ ID NO: 1837768 - DNA, 15 bp, Homo sapiens
acccaggctgggcaa

SEQ ID NO: 1837769 - DNA, 15 bp, Homo sapiens
cccaggctgggcaat

SEQ ID NO: 1837770 - DNA, 15 bp, Homo sapiens
ccaggctgggcaatc

SEQ ID NO: 1837771 - DNA, 15 bp, Homo sapiens
caggctgggcaatcg

SEQ ID NO: 1837772 - DNA, 15 bp, Homo sapiens
aggctgggcaatcgt

SEQ ID NO: 1837773 - DNA, 15 bp, Homo sapiens
ggctgggcaatcgtg

SEQ ID NO: 1837774 - DNA, 15 bp, Homo sapiens
gctgggcaatcgtgc

SEQ ID NO: 1837775 - DNA, 15 bp, Homo sapiens
ctgggcaatcgtgca

SEQ ID NO: 1837776 - DNA, 15 bp, Homo sapiens
tgggcaatcgtgcaa

SEQ ID NO: 1837777 - DNA, 15 bp, Homo sapiens
gggcaatcgtgcaat

SEQ ID NO: 1837778 - DNA, 15 bp, Homo sapiens
ggcaatcgtgcaatg

SEQ ID NO: 1837779 - DNA, 15 bp, Homo sapiens
gcaatcgtgcaatgg

SEQ ID NO: 1837780 - DNA, 15 bp, Homo sapiens
caatcgtgcaatggc

SEQ ID NO: 1837781 - DNA, 15 bp, Homo sapiens
aatcgtgcaatggcg

SEQ ID NO: 1837782 - DNA, 15 bp, Homo sapiens
atcgtgcaatggcgt

SEQ ID NO: 1837783 - DNA, 15 bp, Homo sapiens
tcgtgcaatggcgtg

SEQ ID NO: 1837784 - DNA, 15 bp, Homo sapiens
cgtgcaatggcgtga

SEQ ID NO: 1837785 - DNA, 15 bp, Homo sapiens
cggctcactgcaact

SEQ ID NO: 1837786 - DNA, 15 bp, Homo sapiens
ctcactgcaacttct

SEQ ID NO: 1837787 - DNA, 15 bp, Homo sapiens
tcactgcaacttctg

SEQ ID NO: 1837788 - DNA, 15 bp, Homo sapiens
cactgcaacttctgc

SEQ ID NO: 1837789 - DNA, 15 bp, Homo sapiens
actgcaacttctgcc

SEQ ID NO: 1837790 - DNA, 15 bp, Homo sapiens
ctgcaacttctgcct

SEQ ID NO: 1837791 - DNA, 15 bp, Homo sapiens
tgcaacttctgcctc

SEQ ID NO: 1837792 - DNA, 15 bp, Homo sapiens
gcaacttctgcctcc

SEQ ID NO: 1837793 - DNA, 15 bp, Homo sapiens
caacttctgcctcct

SEQ ID NO: 1837794 - DNA, 15 bp, Homo sapiens
aacttctgcctcctg

SEQ ID NO: 1837795 - DNA, 15 bp, Homo sapiens
acttctgcctcctgg

SEQ ID NO: 1837796 - DNA, 15 bp, Homo sapiens
cttctgcctcctggg

SEQ ID NO: 1837797 - DNA, 15 bp, Homo sapiens
ttctgcctcctgggt

SEQ ID NO: 1837798 - DNA, 15 bp, Homo sapiens
gggttcaagagattt

SEQ ID NO: 1837799 - DNA, 15 bp, Homo sapiens
ggttcaagagatttt

SEQ ID NO: 1837800 - DNA, 15 bp, Homo sapiens
gttcaagagattttc

SEQ ID NO: 1837801 - DNA, 15 bp, Homo sapiens
ttcaagagattttcc

SEQ ID NO: 1837802 - DNA, 15 bp, Homo sapiens
tcaagagattttcct

SEQ ID NO: 1837803 - DNA, 15 bp, Homo sapiens
caagagattttcctt

SEQ ID NO: 1837804 - DNA, 15 bp, Homo sapiens
aagagattttccttc

SEQ ID NO: 1837805 - DNA, 15 bp, Homo sapiens
agagattttccttcc

SEQ ID NO: 1837806 - DNA, 15 bp, Homo sapiens
gagattttccttcct

SEQ ID NO: 1837807 - DNA, 15 bp, Homo sapiens
agattttccttcctc

SEQ ID NO: 1837808 - DNA, 15 bp, Homo sapiens
gattttccttcctca

SEQ ID NO: 1837809 - DNA, 15 bp, Homo sapiens
attttccttcctcag

SEQ ID NO: 1837810 - DNA, 15 bp, Homo sapiens
ttttccttcctcagc

SEQ ID NO: 1837811 - DNA, 15 bp, Homo sapiens
tttccttcctcagcc

SEQ ID NO: 1837812 - DNA, 15 bp, Homo sapiens
ttccttcctcagcct

SEQ ID NO: 1837813 - DNA, 15 bp, Homo sapiens
tccttcctcagcctc

SEQ ID NO: 1837814 - DNA, 15 bp, Homo sapiens
ccttcctcagcctcc

SEQ ID NO: 1837815 - DNA, 15 bp, Homo sapiens
ggtgcccaccaccat

SEQ ID NO: 1837816 - DNA, 15 bp, Homo sapiens
gtgcccaccaccatg

SEQ ID NO: 1837817 - DNA, 15 bp, Homo sapiens
tgcccaccaccatgc

SEQ ID NO: 1837818 - DNA, 15 bp, Homo sapiens
gcccaccaccatgcc

SEQ ID NO: 1837819 - DNA, 15 bp, Homo sapiens
cccaccaccatgccc

SEQ ID NO: 1837820 - DNA, 15 bp, Homo sapiens
ccaccaccatgcccg

SEQ ID NO: 1837821 - DNA, 15 bp, Homo sapiens
caccatgcccggctg

SEQ ID NO: 1837822 - DNA, 15 bp, Homo sapiens
accatgcccggctgc

SEQ ID NO: 1837823 - DNA, 15 bp, Homo sapiens
ccatgcccggctgcc

SEQ ID NO: 1837824 - DNA, 15 bp, Homo sapiens
catgcccggctgcct

SEQ ID NO: 1837825 - DNA, 15 bp, Homo sapiens
atgcccggctgcctg

SEQ ID NO: 1837826 - DNA, 15 bp, Homo sapiens
tgcccggctgcctgg

SEQ ID NO: 1837827 - DNA, 15 bp, Homo sapiens
gcccggctgcctggc

SEQ ID NO: 1837828 - DNA, 15 bp, Homo sapiens
cccggctgcctggct

SEQ ID NO: 1837829 - DNA, 15 bp, Homo sapiens
ccggctgcctggcta

SEQ ID NO: 1837830 - DNA, 15 bp, Homo sapiens
cggctgcctggctaa

SEQ ID NO: 1837831 - DNA, 15 bp, Homo sapiens
ggctgcctggctaat

SEQ ID NO: 1837832 - DNA, 15 bp, Homo sapiens
gctgcctggctaatt

SEQ ID NO: 1837833 - DNA, 15 bp, Homo sapiens
ctgcctggctaattt

SEQ ID NO: 1837834 - DNA, 15 bp, Homo sapiens
ctggctaatttttgc

SEQ ID NO: 1837835 - DNA, 15 bp, Homo sapiens
tggctaatttttgca

SEQ ID NO: 1837836 - DNA, 15 bp, Homo sapiens
ggctaatttttgcat

SEQ ID NO: 1837837 - DNA, 15 bp, Homo sapiens
tttttagtagagagg

SEQ ID NO: 1837838 - DNA, 15 bp, Homo sapiens
ttttagtagagaggg

SEQ ID NO: 1837839 - DNA, 15 bp, Homo sapiens
tttagtagagagggg

SEQ ID NO: 1837840 - DNA, 15 bp, Homo sapiens
ttagtagagaggggg

SEQ ID NO: 1837841 - DNA, 15 bp, Homo sapiens
tagtagagagggggt

SEQ ID NO: 1837842 - DNA, 15 bp, Homo sapiens
agtagagagggggtt

SEQ ID NO: 1837843 - DNA, 15 bp, Homo sapiens
gtagagagggggttt

SEQ ID NO: 1837844 - DNA, 15 bp, Homo sapiens
tagagagggggtttc

SEQ ID NO: 1837845 - DNA, 15 bp, Homo sapiens
agagagggggtttca

SEQ ID NO: 1837846 - DNA, 15 bp, Homo sapiens
gagagggggtttcac

SEQ ID NO: 1837847 - DNA, 15 bp, Homo sapiens
agagggggtttcacc

SEQ ID NO: 1837848 - DNA, 15 bp, Homo sapiens
gagggggtttcacca

SEQ ID NO: 1837849 - DNA, 15 bp, Homo sapiens
agggggtttcaccat

SEQ ID NO: 1837850 - DNA, 15 bp, Homo sapiens
gggggtttcaccatg

SEQ ID NO: 1837851 - DNA, 15 bp, Homo sapiens
tgagccaccatgccg

SEQ ID NO: 1837852 - DNA, 15 bp, Homo sapiens
gagccaccatgccga

SEQ ID NO: 1837853 - DNA, 15 bp, Homo sapiens
agccaccatgccgag

SEQ ID NO: 1837854 - DNA, 15 bp, Homo sapiens
gccaccatgccgagc

SEQ ID NO: 1837855 - DNA, 15 bp, Homo sapiens
ccaccatgccgagcc

SEQ ID NO: 1837856 - DNA, 15 bp, Homo sapiens
caccatgccgagcca

SEQ ID NO: 1837857 - DNA, 15 bp, Homo sapiens
accatgccgagccag

SEQ ID NO: 1837858 - DNA, 15 bp, Homo sapiens
ccatgccgagccaga

SEQ ID NO: 1837859 - DNA, 15 bp, Homo sapiens
catgccgagccagat

SEQ ID NO: 1837860 - DNA, 15 bp, Homo sapiens
atgccgagccagatt

SEQ ID NO: 1837861 - DNA, 15 bp, Homo sapiens
tgccgagccagattt

SEQ ID NO: 1837862 - DNA, 15 bp, Homo sapiens
gccgagccagatttt

SEQ ID NO: 1837863 - DNA, 15 bp, Homo sapiens
ccgagccagattttt

SEQ ID NO: 1837864 - DNA, 15 bp, Homo sapiens
cgagccagatttttt

SEQ ID NO: 1837865 - DNA, 15 bp, Homo sapiens
gagccagattttttt

SEQ ID NO: 1837866 - DNA, 15 bp, Homo sapiens
agccagatttttttt

SEQ ID NO: 1837867 - DNA, 15 bp, Homo sapiens
gccagattttttttt

SEQ ID NO: 1837868 - DNA, 15 bp, Homo sapiens
ccagatttttttttt

SEQ ID NO: 1837869 - DNA, 15 bp, Homo sapiens
tttttttttttttcg

SEQ ID NO: 1837870 - DNA, 15 bp, Homo sapiens
ttttttttttttcga

SEQ ID NO: 1837871 - DNA, 15 bp, Homo sapiens
tttttttttttcgag

SEQ ID NO: 1837872 - DNA, 15 bp, Homo sapiens
ttttttttttcgaga

SEQ ID NO: 1837873 - DNA, 15 bp, Homo sapiens
tttttttttcgagac

SEQ ID NO: 1837874 - DNA, 15 bp, Homo sapiens
ttttttttcgagacg

SEQ ID NO: 1837875 - DNA, 15 bp, Homo sapiens
tttttttcgagacgg

SEQ ID NO: 1837876 - DNA, 15 bp, Homo sapiens
ttttttcgagacgga

SEQ ID NO: 1837877 - DNA, 15 bp, Homo sapiens
tttttcgagacggag

SEQ ID NO: 1837878 - DNA, 15 bp, Homo sapiens
ttttcgagacggagt

SEQ ID NO: 1837879 - DNA, 15 bp, Homo sapiens
tttcgagacggagtc

SEQ ID NO: 1837880 - DNA, 15 bp, Homo sapiens
ttcgagacggagtct

SEQ ID NO: 1837881 - DNA, 15 bp, Homo sapiens
tcgagacggagtctc

SEQ ID NO: 1837882 - DNA, 15 bp, Homo sapiens
cgagacggagtctcg

SEQ ID NO: 1837883 - DNA, 15 bp, Homo sapiens
tggagtgcaatggct

SEQ ID NO: 1837884 - DNA, 15 bp, Homo sapiens
ggagtgcaatggctc

SEQ ID NO: 1837885 - DNA, 15 bp, Homo sapiens
gagtgcaatggctcc

SEQ ID NO: 1837886 - DNA, 15 bp, Homo sapiens
agtgcaatggctcca

SEQ ID NO: 1837887 - DNA, 15 bp, Homo sapiens
gtgcaatggctccat

SEQ ID NO: 1837888 - DNA, 15 bp, Homo sapiens
tgcaatggctccatc

SEQ ID NO: 1837889 - DNA, 15 bp, Homo sapiens
gcaatggctccatct

SEQ ID NO: 1837890 - DNA, 15 bp, Homo sapiens
caatggctccatctc

SEQ ID NO: 1837891 - DNA, 15 bp, Homo sapiens
aatggctccatctcg

SEQ ID NO: 1837892 - DNA, 15 bp, Homo sapiens
atggctccatctcgg

SEQ ID NO: 1837893 - DNA, 15 bp, Homo sapiens
tggctccatctcggc

SEQ ID NO: 1837894 - DNA, 15 bp, Homo sapiens
ggctccatctcggct

SEQ ID NO: 1837895 - DNA, 15 bp, Homo sapiens
gctccatctcggctc

SEQ ID NO: 1837896 - DNA, 15 bp, Homo sapiens
ctccatctcggctca

SEQ ID NO: 1837897 - DNA, 15 bp, Homo sapiens
tccatctcggctcac

SEQ ID NO: 1837898 - DNA, 15 bp, Homo sapiens
aagctccacctccca

SEQ ID NO: 1837899 - DNA, 15 bp, Homo sapiens
agctccacctcccag

SEQ ID NO: 1837900 - DNA, 15 bp, Homo sapiens
gctccacctcccagg

SEQ ID NO: 1837901 - DNA, 15 bp, Homo sapiens
cccaggttcatgcct

SEQ ID NO: 1837902 - DNA, 15 bp, Homo sapiens
ccaggttcatgcctc

SEQ ID NO: 1837903 - DNA, 15 bp, Homo sapiens
caggttcatgcctca

SEQ ID NO: 1837904 - DNA, 15 bp, Homo sapiens
aggttcatgcctcag

SEQ ID NO: 1837905 - DNA, 15 bp, Homo sapiens
ggttcatgcctcagc

SEQ ID NO: 1837906 - DNA, 15 bp, Homo sapiens
gttcatgcctcagcc

SEQ ID NO: 1837907 - DNA, 15 bp, Homo sapiens
ttcatgcctcagcct

SEQ ID NO: 1837908 - DNA, 15 bp, Homo sapiens
caccacgcccggctg

SEQ ID NO: 1837909 - DNA, 15 bp, Homo sapiens
accacgcccggctga

SEQ ID NO: 1837910 - DNA, 15 bp, Homo sapiens
ccacgcccggctgat

SEQ ID NO: 1837911 - DNA, 15 bp, Homo sapiens
cacgcccggctgatt

SEQ ID NO: 1837912 - DNA, 15 bp, Homo sapiens
acgcccggctgattt

SEQ ID NO: 1837913 - DNA, 15 bp, Homo sapiens
cgcccggctgatttt

SEQ ID NO: 1837914 - DNA, 15 bp, Homo sapiens
gcccggctgattttt

SEQ ID NO: 1837915 - DNA, 15 bp, Homo sapiens
cccggctgatttttt

SEQ ID NO: 1837916 - DNA, 15 bp, Homo sapiens
gtttcaccgtgttaa

SEQ ID NO: 1837917 - DNA, 15 bp, Homo sapiens
tttcaccgtgttaat

SEQ ID NO: 1837918 - DNA, 15 bp, Homo sapiens
ttcaccgtgttaatg

SEQ ID NO: 1837919 - DNA, 15 bp, Homo sapiens
tcaccgtgttaatga

SEQ ID NO: 1837920 - DNA, 15 bp, Homo sapiens
caccgtgttaatgag

SEQ ID NO: 1837921 - DNA, 15 bp, Homo sapiens
accgtgttaatgagg

SEQ ID NO: 1837922 - DNA, 15 bp, Homo sapiens
ccgtgttaatgagga

SEQ ID NO: 1837923 - DNA, 15 bp, Homo sapiens
cgtgttaatgaggat

SEQ ID NO: 1837924 - DNA, 15 bp, Homo sapiens
gtgttaatgaggatg

SEQ ID NO: 1837925 - DNA, 15 bp, Homo sapiens
tgttaatgaggatgg

SEQ ID NO: 1837926 - DNA, 15 bp, Homo sapiens
gttaatgaggatggc

SEQ ID NO: 1837927 - DNA, 15 bp, Homo sapiens
ttaatgaggatggcc

SEQ ID NO: 1837928 - DNA, 15 bp, Homo sapiens
taatgaggatggcct

SEQ ID NO: 1837929 - DNA, 15 bp, Homo sapiens
aatgaggatggcctc

SEQ ID NO: 1837930 - DNA, 15 bp, Homo sapiens
atgaggatggcctcg

SEQ ID NO: 1837931 - DNA, 15 bp, Homo sapiens
tgaggatggcctcga

SEQ ID NO: 1837932 - DNA, 15 bp, Homo sapiens
gaggatggcctcgat

SEQ ID NO: 1837933 - DNA, 15 bp, Homo sapiens
aggatggcctcgatc

SEQ ID NO: 1837934 - DNA, 15 bp, Homo sapiens
ggatggcctcgatct

SEQ ID NO: 1837935 - DNA, 15 bp, Homo sapiens
gatggcctcgatctc

SEQ ID NO: 1837936 - DNA, 15 bp, Homo sapiens
atggcctcgatctcc

SEQ ID NO: 1837937 - DNA, 15 bp, Homo sapiens
tggcctcgatctcct

SEQ ID NO: 1837938 - DNA, 15 bp, Homo sapiens
ggcctcgatctcctg

SEQ ID NO: 1837939 - DNA, 15 bp, Homo sapiens
gcctcgatctcctga

SEQ ID NO: 1837940 - DNA, 15 bp, Homo sapiens
cctcgatctcctgac

SEQ ID NO: 1837941 - DNA, 15 bp, Homo sapiens
tcctgacctcgtgac

SEQ ID NO: 1837942 - DNA, 15 bp, Homo sapiens
cctgacctcgtgacc

SEQ ID NO: 1837943 - DNA, 15 bp, Homo sapiens
ctgacctcgtgaccc

SEQ ID NO: 1837944 - DNA, 15 bp, Homo sapiens
tgacctcgtgaccca

SEQ ID NO: 1837945 - DNA, 15 bp, Homo sapiens
gacctcgtgacccac

SEQ ID NO: 1837946 - DNA, 15 bp, Homo sapiens
acctcgtgacccacc

SEQ ID NO: 1837947 - DNA, 15 bp, Homo sapiens
cctcgtgacccaccc

SEQ ID NO: 1837948 - DNA, 15 bp, Homo sapiens
ctcgtgacccaccca

SEQ ID NO: 1837949 - DNA, 15 bp, Homo sapiens
tcgtgacccacccac

SEQ ID NO: 1837950 - DNA, 15 bp, Homo sapiens
cgtgacccacccacc

SEQ ID NO: 1837951 - DNA, 15 bp, Homo sapiens
gtgacccacccacct

SEQ ID NO: 1837952 - DNA, 15 bp, Homo sapiens
tgacccacccacctc

SEQ ID NO: 1837953 - DNA, 15 bp, Homo sapiens
gacccacccacctcg

SEQ ID NO: 1837954 - DNA, 15 bp, Homo sapiens
acccacccacctcgg

SEQ ID NO: 1837955 - DNA, 15 bp, Homo sapiens
cccacccacctcggc

SEQ ID NO: 1837956 - DNA, 15 bp, Homo sapiens
acccacctcggcctt

SEQ ID NO: 1837957 - DNA, 15 bp, Homo sapiens
cccacctcggccttc

SEQ ID NO: 1837958 - DNA, 15 bp, Homo sapiens
ccacctcggccttcc

SEQ ID NO: 1837959 - DNA, 15 bp, Homo sapiens
cacctcggccttcca

SEQ ID NO: 1837960 - DNA, 15 bp, Homo sapiens
acctcggccttccaa

SEQ ID NO: 1837961 - DNA, 15 bp, Homo sapiens
gatgtgagccaccac

SEQ ID NO: 1837962 - DNA, 15 bp, Homo sapiens
atgtgagccaccacg

SEQ ID NO: 1837963 - DNA, 15 bp, Homo sapiens
accacgcccagccta

SEQ ID NO: 1837964 - DNA, 15 bp, Homo sapiens
ccacgcccagcctat

SEQ ID NO: 1837965 - DNA, 15 bp, Homo sapiens
cacgcccagcctata

SEQ ID NO: 1837966 - DNA, 15 bp, Homo sapiens
acgcccagcctatac

SEQ ID NO: 1837967 - DNA, 15 bp, Homo sapiens
cgcccagcctataca

SEQ ID NO: 1837968 - DNA, 15 bp, Homo sapiens
gcccagcctatacat

SEQ ID NO: 1837969 - DNA, 15 bp, Homo sapiens
cccagcctatacatg

SEQ ID NO: 1837970 - DNA, 15 bp, Homo sapiens
ccagcctatacatgg

SEQ ID NO: 1837971 - DNA, 15 bp, Homo sapiens
cagcctatacatgga

SEQ ID NO: 1837972 - DNA, 15 bp, Homo sapiens
agcctatacatggat

SEQ ID NO: 1837973 - DNA, 15 bp, Homo sapiens
gcctatacatggatt

SEQ ID NO: 1837974 - DNA, 15 bp, Homo sapiens
cctatacatggattt

SEQ ID NO: 1837975 - DNA, 15 bp, Homo sapiens
ctatacatggatttt

SEQ ID NO: 1837976 - DNA, 15 bp, Homo sapiens
tatacatggattttt

SEQ ID NO: 1837977 - DNA, 15 bp, Homo sapiens
atacatggatttttg

SEQ ID NO: 1837978 - DNA, 15 bp, Homo sapiens
tacatggatttttga

SEQ ID NO: 1837979 - DNA, 15 bp, Homo sapiens
acatggatttttgac

SEQ ID NO: 1837980 - DNA, 15 bp, Homo sapiens
catggatttttgact

SEQ ID NO: 1837981 - DNA, 15 bp, Homo sapiens
atggatttttgactg

SEQ ID NO: 1837982 - DNA, 15 bp, Homo sapiens
tggatttttgactgt

SEQ ID NO: 1837983 - DNA, 15 bp, Homo sapiens
ggatttttgactgtg

SEQ ID NO: 1837984 - DNA, 15 bp, Homo sapiens
gatttttgactgtgc

SEQ ID NO: 1837985 - DNA, 15 bp, Homo sapiens
atttttgactgtgca

SEQ ID NO: 1837986 - DNA, 15 bp, Homo sapiens
tttttgactgtgcag

SEQ ID NO: 1837987 - DNA, 15 bp, Homo sapiens
ttttgactgtgcagg

SEQ ID NO: 1837988 - DNA, 15 bp, Homo sapiens
tttgactgtgcagga

SEQ ID NO: 1837989 - DNA, 15 bp, Homo sapiens
ttgactgtgcaggag

SEQ ID NO: 1837990 - DNA, 15 bp, Homo sapiens
tgactgtgcaggagg

SEQ ID NO: 1837991 - DNA, 15 bp, Homo sapiens
gactgtgcaggaggg

SEQ ID NO: 1837992 - DNA, 15 bp, Homo sapiens
actgtgcaggagggt

SEQ ID NO: 1837993 - DNA, 15 bp, Homo sapiens
ctgtgcaggagggtg

SEQ ID NO: 1837994 - DNA, 15 bp, Homo sapiens
tgtgcaggagggtgg

SEQ ID NO: 1837995 - DNA, 15 bp, Homo sapiens
gtgcaggagggtggg

SEQ ID NO: 1837996 - DNA, 15 bp, Homo sapiens
tgcaggagggtgggc

SEQ ID NO: 1837997 - DNA, 15 bp, Homo sapiens
gcaggagggtgggct

SEQ ID NO: 1837998 - DNA, 15 bp, Homo sapiens
caggagggtgggctg

SEQ ID NO: 1837999 - DNA, 15 bp, Homo sapiens
aggagggtgggctgt

SEQ ID NO: 1838000 - DNA, 15 bp, Homo sapiens
ggagggtgggctgta

SEQ ID NO: 1838001 - DNA, 15 bp, Homo sapiens
gagggtgggctgtaa

SEQ ID NO: 1838002 - DNA, 15 bp, Homo sapiens
agggtgggctgtaat

SEQ ID NO: 1838003 - DNA, 15 bp, Homo sapiens
gggtgggctgtaatt

SEQ ID NO: 1838004 - DNA, 15 bp, Homo sapiens
ggtgggctgtaattg

SEQ ID NO: 1838005 - DNA, 15 bp, Homo sapiens
gtgggctgtaattgt

SEQ ID NO: 1838006 - DNA, 15 bp, Homo sapiens
tgggctgtaattgtt

SEQ ID NO: 1838007 - DNA, 15 bp, Homo sapiens
gggctgtaattgttc

SEQ ID NO: 1838008 - DNA, 15 bp, Homo sapiens
ggctgtaattgttca

SEQ ID NO: 1838009 - DNA, 15 bp, Homo sapiens
gctgtaattgttcaa

SEQ ID NO: 1838010 - DNA, 15 bp, Homo sapiens
ctgtaattgttcaag

SEQ ID NO: 1838011 - DNA, 15 bp, Homo sapiens
tgtaattgttcaagg

SEQ ID NO: 1838012 - DNA, 15 bp, Homo sapiens
gtaattgttcaaggg

SEQ ID NO: 1838013 - DNA, 15 bp, Homo sapiens
taattgttcaagggt

SEQ ID NO: 1838014 - DNA, 15 bp, Homo sapiens
aattgttcaagggtc

SEQ ID NO: 1838015 - DNA, 15 bp, Homo sapiens
attgttcaagggtca

SEQ ID NO: 1838016 - DNA, 15 bp, Homo sapiens
ttgttcaagggtcaa

SEQ ID NO: 1838017 - DNA, 15 bp, Homo sapiens
ttcaagggtcaacta

SEQ ID NO: 1838018 - DNA, 15 bp, Homo sapiens
tcaagggtcaactat

SEQ ID NO: 1838019 - DNA, 15 bp, Homo sapiens
caagggtcaactatc

SEQ ID NO: 1838020 - DNA, 15 bp, Homo sapiens
aagggtcaactatca

SEQ ID NO: 1838021 - DNA, 15 bp, Homo sapiens
agggtcaactatcat

SEQ ID NO: 1838022 - DNA, 15 bp, Homo sapiens
gggtcaactatcatc

SEQ ID NO: 1838023 - DNA, 15 bp, Homo sapiens
ggtcaactatcatcg

SEQ ID NO: 1838024 - DNA, 15 bp, Homo sapiens
gtcaactatcatcga

SEQ ID NO: 1838025 - DNA, 15 bp, Homo sapiens
tcaactatcatcgag

SEQ ID NO: 1838026 - DNA, 15 bp, Homo sapiens
caactatcatcgagg

SEQ ID NO: 1838027 - DNA, 15 bp, Homo sapiens
aactatcatcgagga

SEQ ID NO: 1838028 - DNA, 15 bp, Homo sapiens
actatcatcgaggaa

SEQ ID NO: 1838029 - DNA, 15 bp, Homo sapiens
ctatcatcgaggaat

SEQ ID NO: 1838030 - DNA, 15 bp, Homo sapiens
tatcatcgaggaatt

SEQ ID NO: 1838031 - DNA, 15 bp, Homo sapiens
atcatcgaggaattg

SEQ ID NO: 1838032 - DNA, 15 bp, Homo sapiens
tcatcgaggaattga

SEQ ID NO: 1838033 - DNA, 15 bp, Homo sapiens
catcgaggaattgag

SEQ ID NO: 1838034 - DNA, 15 bp, Homo sapiens
atcgaggaattgagt

SEQ ID NO: 1838035 - DNA, 15 bp, Homo sapiens
tcgaggaattgagtc

SEQ ID NO: 1838036 - DNA, 15 bp, Homo sapiens
cgaggaattgagtcc

SEQ ID NO: 1838037 - DNA, 15 bp, Homo sapiens
gaggaattgagtcca

SEQ ID NO: 1838038 - DNA, 15 bp, Homo sapiens
aggaattgagtccac

SEQ ID NO: 1838039 - DNA, 15 bp, Homo sapiens
ggaattgagtccacg

SEQ ID NO: 1838040 - DNA, 15 bp, Homo sapiens
gaattgagtccacgt

SEQ ID NO: 1838041 - DNA, 15 bp, Homo sapiens
aattgagtccacgtg

SEQ ID NO: 1838042 - DNA, 15 bp, Homo sapiens
attgagtccacgtgg

SEQ ID NO: 1838043 - DNA, 15 bp, Homo sapiens
ttgagtccacgtggg

SEQ ID NO: 1838044 - DNA, 15 bp, Homo sapiens
tgagtccacgtggga

SEQ ID NO: 1838045 - DNA, 15 bp, Homo sapiens
gagtccacgtgggaa

SEQ ID NO: 1838046 - DNA, 15 bp, Homo sapiens
agtccacgtgggaag

SEQ ID NO: 1838047 - DNA, 15 bp, Homo sapiens
gtccacgtgggaaga

SEQ ID NO: 1838048 - DNA, 15 bp, Homo sapiens
tccacgtgggaagaa

SEQ ID NO: 1838049 - DNA, 15 bp, Homo sapiens
ccacgtgggaagaaa

SEQ ID NO: 1838050 - DNA, 15 bp, Homo sapiens
cacgtgggaagaaaa

SEQ ID NO: 1838051 - DNA, 15 bp, Homo sapiens
acgtgggaagaaaaa

SEQ ID NO: 1838052 - DNA, 15 bp, Homo sapiens
cgtgggaagaaaaat

SEQ ID NO: 1838053 - DNA, 15 bp, Homo sapiens
gtgggaagaaaaatt

SEQ ID NO: 1838054 - DNA, 15 bp, Homo sapiens
tgggaagaaaaattt

SEQ ID NO: 1838055 - DNA, 15 bp, Homo sapiens
gggaagaaaaatttt

SEQ ID NO: 1838056 - DNA, 15 bp, Homo sapiens
ggaagaaaaatttta

SEQ ID NO: 1838057 - DNA, 15 bp, Homo sapiens
gaagaaaaattttag

SEQ ID NO: 1838058 - DNA, 15 bp, Homo sapiens
aagaaaaattttagg

SEQ ID NO: 1838059 - DNA, 15 bp, Homo sapiens
agaaaaattttagga

SEQ ID NO: 1838060 - DNA, 15 bp, Homo sapiens
gaaaaattttaggat

SEQ ID NO: 1838061 - DNA, 15 bp, Homo sapiens
aaaaattttaggatc

SEQ ID NO: 1838062 - DNA, 15 bp, Homo sapiens
aaaattttaggatca

SEQ ID NO: 1838063 - DNA, 15 bp, Homo sapiens
aaattttaggatcac

SEQ ID NO: 1838064 - DNA, 15 bp, Homo sapiens
aattttaggatcact

SEQ ID NO: 1838065 - DNA, 15 bp, Homo sapiens
attttaggatcactc

SEQ ID NO: 1838066 - DNA, 15 bp, Homo sapiens
ttttaggatcactcc

SEQ ID NO: 1838067 - DNA, 15 bp, Homo sapiens
tttaggatcactcca

SEQ ID NO: 1838068 - DNA, 15 bp, Homo sapiens
ttaggatcactccac

SEQ ID NO: 1838069 - DNA, 15 bp, Homo sapiens
taggatcactccaca

SEQ ID NO: 1838070 - DNA, 15 bp, Homo sapiens
aggatcactccacag

SEQ ID NO: 1838071 - DNA, 15 bp, Homo sapiens
ggatcactccacagt

SEQ ID NO: 1838072 - DNA, 15 bp, Homo sapiens
gatcactccacagtg

SEQ ID NO: 1838073 - DNA, 15 bp, Homo sapiens
atcactccacagtga

SEQ ID NO: 1838074 - DNA, 15 bp, Homo sapiens
tcactccacagtgaa

SEQ ID NO: 1838075 - DNA, 15 bp, Homo sapiens
cactccacagtgaat

SEQ ID NO: 1838076 - DNA, 15 bp, Homo sapiens
actccacagtgaatg

SEQ ID NO: 1838077 - DNA, 15 bp, Homo sapiens
ctccacagtgaatga

SEQ ID NO: 1838078 - DNA, 15 bp, Homo sapiens
tccacagtgaatgaa

SEQ ID NO: 1838079 - DNA, 15 bp, Homo sapiens
ccacagtgaatgaag

SEQ ID NO: 1838080 - DNA, 15 bp, Homo sapiens
cacagtgaatgaagc

SEQ ID NO: 1838081 - DNA, 15 bp, Homo sapiens
acagtgaatgaagct

SEQ ID NO: 1838082 - DNA, 15 bp, Homo sapiens
cagtgaatgaagctc

SEQ ID NO: 1838083 - DNA, 15 bp, Homo sapiens
agtgaatgaagctca

SEQ ID NO: 1838084 - DNA, 15 bp, Homo sapiens
gtgaatgaagctcac

SEQ ID NO: 1838085 - DNA, 15 bp, Homo sapiens
tgaatgaagctcacc

SEQ ID NO: 1838086 - DNA, 15 bp, Homo sapiens
gaatgaagctcaccc

SEQ ID NO: 1838087 - DNA, 15 bp, Homo sapiens
aatgaagctcaccca

SEQ ID NO: 1838088 - DNA, 15 bp, Homo sapiens
atgaagctcacccaa

SEQ ID NO: 1838089 - DNA, 15 bp, Homo sapiens
tgaagctcacccaat

SEQ ID NO: 1838090 - DNA, 15 bp, Homo sapiens
gaagctcacccaatg

SEQ ID NO: 1838091 - DNA, 15 bp, Homo sapiens
aagctcacccaatgc

SEQ ID NO: 1838092 - DNA, 15 bp, Homo sapiens
agctcacccaatgcc

SEQ ID NO: 1838093 - DNA, 15 bp, Homo sapiens
gctcacccaatgcca

SEQ ID NO: 1838094 - DNA, 15 bp, Homo sapiens
ctcacccaatgccac

SEQ ID NO: 1838095 - DNA, 15 bp, Homo sapiens
tcacccaatgccaca

SEQ ID NO: 1838096 - DNA, 15 bp, Homo sapiens
cacccaatgccacat

SEQ ID NO: 1838097 - DNA, 15 bp, Homo sapiens
acccaatgccacatt

SEQ ID NO: 1838098 - DNA, 15 bp, Homo sapiens
cccaatgccacattt

SEQ ID NO: 1838099 - DNA, 15 bp, Homo sapiens
ccaatgccacatttt

SEQ ID NO: 1838100 - DNA, 15 bp, Homo sapiens
caatgccacattttg

SEQ ID NO: 1838101 - DNA, 15 bp, Homo sapiens
aatgccacattttgt

SEQ ID NO: 1838102 - DNA, 15 bp, Homo sapiens
atgccacattttgta

SEQ ID NO: 1838103 - DNA, 15 bp, Homo sapiens
tgccacattttgtag

SEQ ID NO: 1838104 - DNA, 15 bp, Homo sapiens
gccacattttgtagg

SEQ ID NO: 1838105 - DNA, 15 bp, Homo sapiens
ccacattttgtaggc

SEQ ID NO: 1838106 - DNA, 15 bp, Homo sapiens
cacattttgtaggca

SEQ ID NO: 1838107 - DNA, 15 bp, Homo sapiens
acattttgtaggcag

SEQ ID NO: 1838108 - DNA, 15 bp, Homo sapiens
cattttgtaggcagt

SEQ ID NO: 1838109 - DNA, 15 bp, Homo sapiens
attttgtaggcagtt

SEQ ID NO: 1838110 - DNA, 15 bp, Homo sapiens
ttttgtaggcagtta

SEQ ID NO: 1838111 - DNA, 15 bp, Homo sapiens
tttgtaggcagttaa

SEQ ID NO: 1838112 - DNA, 15 bp, Homo sapiens
ttgtaggcagttaat

SEQ ID NO: 1838113 - DNA, 15 bp, Homo sapiens
tgtaggcagttaatg

SEQ ID NO: 1838114 - DNA, 15 bp, Homo sapiens
gtaggcagttaatgg

SEQ ID NO: 1838115 - DNA, 15 bp, Homo sapiens
taggcagttaatgga

SEQ ID NO: 1838116 - DNA, 15 bp, Homo sapiens
aggcagttaatggac

SEQ ID NO: 1838117 - DNA, 15 bp, Homo sapiens
ggcagttaatggacc

SEQ ID NO: 1838118 - DNA, 15 bp, Homo sapiens
gcagttaatggaccg

SEQ ID NO: 1838119 - DNA, 15 bp, Homo sapiens
cagttaatggaccgt

SEQ ID NO: 1838120 - DNA, 15 bp, Homo sapiens
agttaatggaccgtt

SEQ ID NO: 1838121 - DNA, 15 bp, Homo sapiens
gttaatggaccgttt

SEQ ID NO: 1838122 - DNA, 15 bp, Homo sapiens
ttaatggaccgtttt

SEQ ID NO: 1838123 - DNA, 15 bp, Homo sapiens
taatggaccgttttt

SEQ ID NO: 1838124 - DNA, 15 bp, Homo sapiens
aatggaccgtttttc

SEQ ID NO: 1838125 - DNA, 15 bp, Homo sapiens
atggaccgtttttca

SEQ ID NO: 1838126 - DNA, 15 bp, Homo sapiens
tggaccgtttttcac

SEQ ID NO: 1838127 - DNA, 15 bp, Homo sapiens
ggaccgtttttcacc

SEQ ID NO: 1838128 - DNA, 15 bp, Homo sapiens
gaccgtttttcacct

SEQ ID NO: 1838129 - DNA, 15 bp, Homo sapiens
accgtttttcacctc

SEQ ID NO: 1838130 - DNA, 15 bp, Homo sapiens
ccgtttttcacctct

SEQ ID NO: 1838131 - DNA, 15 bp, Homo sapiens
cgtttttcacctctt

SEQ ID NO: 1838132 - DNA, 15 bp, Homo sapiens
gtttttcacctcttt

SEQ ID NO: 1838133 - DNA, 15 bp, Homo sapiens
tttttcacctctttc

SEQ ID NO: 1838134 - DNA, 15 bp, Homo sapiens
ttttcacctctttct

SEQ ID NO: 1838135 - DNA, 15 bp, Homo sapiens
tttcacctctttctc

SEQ ID NO: 1838136 - DNA, 15 bp, Homo sapiens
ttcacctctttctct

SEQ ID NO: 1838137 - DNA, 15 bp, Homo sapiens
tcacctctttctctc

SEQ ID NO: 1838138 - DNA, 15 bp, Homo sapiens
cacctctttctctcc

SEQ ID NO: 1838139 - DNA, 15 bp, Homo sapiens
acctctttctctccc

SEQ ID NO: 1838140 - DNA, 15 bp, Homo sapiens
cctctttctctcccg

SEQ ID NO: 1838141 - DNA, 15 bp, Homo sapiens
ctctttctctcccgc

SEQ ID NO: 1838142 - DNA, 15 bp, Homo sapiens
tctttctctcccgct

SEQ ID NO: 1838143 - DNA, 15 bp, Homo sapiens
ctttctctcccgctg

SEQ ID NO: 1838144 - DNA, 15 bp, Homo sapiens
tttctctcccgctgt

SEQ ID NO: 1838145 - DNA, 15 bp, Homo sapiens
ttctctcccgctgtc

SEQ ID NO: 1838146 - DNA, 15 bp, Homo sapiens
tctctcccgctgtct

SEQ ID NO: 1838147 - DNA, 15 bp, Homo sapiens
ctctcccgctgtctg

SEQ ID NO: 1838148 - DNA, 15 bp, Homo sapiens
tctcccgctgtctgt

SEQ ID NO: 1838149 - DNA, 15 bp, Homo sapiens
ctcccgctgtctgtc

SEQ ID NO: 1838150 - DNA, 15 bp, Homo sapiens
tcccgctgtctgtct

SEQ ID NO: 1838151 - DNA, 15 bp, Homo sapiens
cccgctgtctgtctc

SEQ ID NO: 1838152 - DNA, 15 bp, Homo sapiens
ccgctgtctgtctcc

SEQ ID NO: 1838153 - DNA, 15 bp, Homo sapiens
cgctgtctgtctcca

SEQ ID NO: 1838154 - DNA, 15 bp, Homo sapiens
gctgtctgtctccac

SEQ ID NO: 1838155 - DNA, 15 bp, Homo sapiens
ctgtctgtctccacc

SEQ ID NO: 1838156 - DNA, 15 bp, Homo sapiens
tgtctgtctccaccc

SEQ ID NO: 1838157 - DNA, 15 bp, Homo sapiens
gtctgtctccaccca

SEQ ID NO: 1838158 - DNA, 15 bp, Homo sapiens
tctgtctccacccat

SEQ ID NO: 1838159 - DNA, 15 bp, Homo sapiens
ctgtctccacccatt

SEQ ID NO: 1838160 - DNA, 15 bp, Homo sapiens
tgtctccacccattc

SEQ ID NO: 1838161 - DNA, 15 bp, Homo sapiens
gtctccacccattct

SEQ ID NO: 1838162 - DNA, 15 bp, Homo sapiens
tctccacccattctc

SEQ ID NO: 1838163 - DNA, 15 bp, Homo sapiens
ctccacccattctct

SEQ ID NO: 1838164 - DNA, 15 bp, Homo sapiens
tccacccattctctt

SEQ ID NO: 1838165 - DNA, 15 bp, Homo sapiens
ccacccattctcttt

SEQ ID NO: 1838166 - DNA, 15 bp, Homo sapiens
cacccattctctttt

SEQ ID NO: 1838167 - DNA, 15 bp, Homo sapiens
acccattctcttttc

SEQ ID NO: 1838168 - DNA, 15 bp, Homo sapiens
cccattctcttttca

SEQ ID NO: 1838169 - DNA, 15 bp, Homo sapiens
ccattctcttttcaa

SEQ ID NO: 1838170 - DNA, 15 bp, Homo sapiens
cattctcttttcaat

SEQ ID NO: 1838171 - DNA, 15 bp, Homo sapiens
attctcttttcaatc

SEQ ID NO: 1838172 - DNA, 15 bp, Homo sapiens
ttctcttttcaatca

SEQ ID NO: 1838173 - DNA, 15 bp, Homo sapiens
tctcttttcaatcaa

SEQ ID NO: 1838174 - DNA, 15 bp, Homo sapiens
ctcttttcaatcaat

SEQ ID NO: 1838175 - DNA, 15 bp, Homo sapiens
tcttttcaatcaatg

SEQ ID NO: 1838176 - DNA, 15 bp, Homo sapiens
cttttcaatcaatgc

SEQ ID NO: 1838177 - DNA, 15 bp, Homo sapiens
ttttcaatcaatgca

SEQ ID NO: 1838178 - DNA, 15 bp, Homo sapiens
tttcaatcaatgcac

SEQ ID NO: 1838179 - DNA, 15 bp, Homo sapiens
ttcaatcaatgcact

SEQ ID NO: 1838180 - DNA, 15 bp, Homo sapiens
tcaatcaatgcactc

SEQ ID NO: 1838181 - DNA, 15 bp, Homo sapiens
caatcaatgcactcc

SEQ ID NO: 1838182 - DNA, 15 bp, Homo sapiens
aatcaatgcactccc

SEQ ID NO: 1838183 - DNA, 15 bp, Homo sapiens
atcaatgcactcccc

SEQ ID NO: 1838184 - DNA, 15 bp, Homo sapiens
tcaatgcactcccct

SEQ ID NO: 1838185 - DNA, 15 bp, Homo sapiens
caatgcactcccctc

SEQ ID NO: 1838186 - DNA, 15 bp, Homo sapiens
aatgcactcccctcc

SEQ ID NO: 1838187 - DNA, 15 bp, Homo sapiens
atgcactcccctccc

SEQ ID NO: 1838188 - DNA, 15 bp, Homo sapiens
tgcactcccctccca

SEQ ID NO: 1838189 - DNA, 15 bp, Homo sapiens
gcactcccctcccac

SEQ ID NO: 1838190 - DNA, 15 bp, Homo sapiens
cactcccctcccacc

SEQ ID NO: 1838191 - DNA, 15 bp, Homo sapiens
actcccctcccacct

SEQ ID NO: 1838192 - DNA, 15 bp, Homo sapiens
ctcccctcccacctc

SEQ ID NO: 1838193 - DNA, 15 bp, Homo sapiens
tcccctcccacctcc

SEQ ID NO: 1838194 - DNA, 15 bp, Homo sapiens
cccctcccacctcca

SEQ ID NO: 1838195 - DNA, 15 bp, Homo sapiens
ccctcccacctccag

SEQ ID NO: 1838196 - DNA, 15 bp, Homo sapiens
cctcccacctccagg

SEQ ID NO: 1838197 - DNA, 15 bp, Homo sapiens
ctcccacctccaggc

SEQ ID NO: 1838198 - DNA, 15 bp, Homo sapiens
tcccacctccaggcc

SEQ ID NO: 1838199 - DNA, 15 bp, Homo sapiens
cccacctccaggcca

SEQ ID NO: 1838200 - DNA, 15 bp, Homo sapiens
ccacctccaggccaa

SEQ ID NO: 1838201 - DNA, 15 bp, Homo sapiens
cacctccaggccaat

SEQ ID NO: 1838202 - DNA, 15 bp, Homo sapiens
acctccaggccaatc

SEQ ID NO: 1838203 - DNA, 15 bp, Homo sapiens
cctccaggccaatca

SEQ ID NO: 1838204 - DNA, 15 bp, Homo sapiens
ctccaggccaatcat

SEQ ID NO: 1838205 - DNA, 15 bp, Homo sapiens
tccaggccaatcatg

SEQ ID NO: 1838206 - DNA, 15 bp, Homo sapiens
ccaggccaatcatgt

SEQ ID NO: 1838207 - DNA, 15 bp, Homo sapiens
caggccaatcatgtt

SEQ ID NO: 1838208 - DNA, 15 bp, Homo sapiens
aggccaatcatgttc

SEQ ID NO: 1838209 - DNA, 15 bp, Homo sapiens
ggccaatcatgttca

SEQ ID NO: 1838210 - DNA, 15 bp, Homo sapiens
gccaatcatgttcat

SEQ ID NO: 1838211 - DNA, 15 bp, Homo sapiens
ccaatcatgttcata

SEQ ID NO: 1838212 - DNA, 15 bp, Homo sapiens
caatcatgttcatag

SEQ ID NO: 1838213 - DNA, 15 bp, Homo sapiens
aatcatgttcatagt

SEQ ID NO: 1838214 - DNA, 15 bp, Homo sapiens
atcatgttcatagta

SEQ ID NO: 1838215 - DNA, 15 bp, Homo sapiens
tcatgttcatagtaa

SEQ ID NO: 1838216 - DNA, 15 bp, Homo sapiens
catgttcatagtaac

SEQ ID NO: 1838217 - DNA, 15 bp, Homo sapiens
atgttcatagtaacg

SEQ ID NO: 1838218 - DNA, 15 bp, Homo sapiens
tgttcatagtaacgc

SEQ ID NO: 1838219 - DNA, 15 bp, Homo sapiens
gttcatagtaacgca

SEQ ID NO: 1838220 - DNA, 15 bp, Homo sapiens
ttcatagtaacgcag

SEQ ID NO: 1838221 - DNA, 15 bp, Homo sapiens
tcatagtaacgcagc

SEQ ID NO: 1838222 - DNA, 15 bp, Homo sapiens
catagtaacgcagcc

SEQ ID NO: 1838223 - DNA, 15 bp, Homo sapiens
atagtaacgcagccc

SEQ ID NO: 1838224 - DNA, 15 bp, Homo sapiens
tagtaacgcagccct

SEQ ID NO: 1838225 - DNA, 15 bp, Homo sapiens
agtaacgcagccctg

SEQ ID NO: 1838226 - DNA, 15 bp, Homo sapiens
gtaacgcagccctgg

SEQ ID NO: 1838227 - DNA, 15 bp, Homo sapiens
taacgcagccctggg

SEQ ID NO: 1838228 - DNA, 15 bp, Homo sapiens
aacgcagccctgggg

SEQ ID NO: 1838229 - DNA, 15 bp, Homo sapiens
acgcagccctggggg

SEQ ID NO: 1838230 - DNA, 15 bp, Homo sapiens
cgcagccctggggga

SEQ ID NO: 1838231 - DNA, 15 bp, Homo sapiens
gcagccctgggggaa

SEQ ID NO: 1838232 - DNA, 15 bp, Homo sapiens
cagccctgggggaag

SEQ ID NO: 1838233 - DNA, 15 bp, Homo sapiens
agccctgggggaagg

SEQ ID NO: 1838234 - DNA, 15 bp, Homo sapiens
gccctgggggaaggc

SEQ ID NO: 1838235 - DNA, 15 bp, Homo sapiens
ccctgggggaaggct

SEQ ID NO: 1838236 - DNA, 15 bp, Homo sapiens
cctgggggaaggctt

SEQ ID NO: 1838237 - DNA, 15 bp, Homo sapiens
ctgggggaaggcttg

SEQ ID NO: 1838238 - DNA, 15 bp, Homo sapiens
tgggggaaggcttgt

SEQ ID NO: 1838239 - DNA, 15 bp, Homo sapiens
gggggaaggcttgtg

SEQ ID NO: 1838240 - DNA, 15 bp, Homo sapiens
ggggaaggcttgtgt

SEQ ID NO: 1838241 - DNA, 15 bp, Homo sapiens
gggaaggcttgtgtc

SEQ ID NO: 1838242 - DNA, 15 bp, Homo sapiens
ggaaggcttgtgtct

SEQ ID NO: 1838243 - DNA, 15 bp, Homo sapiens
gaaggcttgtgtctc

SEQ ID NO: 1838244 - DNA, 15 bp, Homo sapiens
aaggcttgtgtctca

SEQ ID NO: 1838245 - DNA, 15 bp, Homo sapiens
aggcttgtgtctcac

SEQ ID NO: 1838246 - DNA, 15 bp, Homo sapiens
ggcttgtgtctcact

SEQ ID NO: 1838247 - DNA, 15 bp, Homo sapiens
gcttgtgtctcactt

SEQ ID NO: 1838248 - DNA, 15 bp, Homo sapiens
cttgtgtctcacttc

SEQ ID NO: 1838249 - DNA, 15 bp, Homo sapiens
ttgtgtctcacttcc

SEQ ID NO: 1838250 - DNA, 15 bp, Homo sapiens
tgtgtctcacttcct

SEQ ID NO: 1838251 - DNA, 15 bp, Homo sapiens
gtgtctcacttccta

SEQ ID NO: 1838252 - DNA, 15 bp, Homo sapiens
tgtctcacttcctag

SEQ ID NO: 1838253 - DNA, 15 bp, Homo sapiens
gtctcacttcctagc

SEQ ID NO: 1838254 - DNA, 15 bp, Homo sapiens
tctcacttcctagct

SEQ ID NO: 1838255 - DNA, 15 bp, Homo sapiens
ctcacttcctagctg

SEQ ID NO: 1838256 - DNA, 15 bp, Homo sapiens
tcacttcctagctgt

SEQ ID NO: 1838257 - DNA, 15 bp, Homo sapiens
cacttcctagctgtg

SEQ ID NO: 1838258 - DNA, 15 bp, Homo sapiens
acttcctagctgtgt

SEQ ID NO: 1838259 - DNA, 15 bp, Homo sapiens
cttcctagctgtgtg

SEQ ID NO: 1838260 - DNA, 15 bp, Homo sapiens
ttcctagctgtgtga

SEQ ID NO: 1838261 - DNA, 15 bp, Homo sapiens
tcctagctgtgtgac

SEQ ID NO: 1838262 - DNA, 15 bp, Homo sapiens
cctagctgtgtgacc

SEQ ID NO: 1838263 - DNA, 15 bp, Homo sapiens
ctagctgtgtgacct

SEQ ID NO: 1838264 - DNA, 15 bp, Homo sapiens
tagctgtgtgacctt

SEQ ID NO: 1838265 - DNA, 15 bp, Homo sapiens
agctgtgtgaccttg

SEQ ID NO: 1838266 - DNA, 15 bp, Homo sapiens
tgtgaccttgagcag

SEQ ID NO: 1838267 - DNA, 15 bp, Homo sapiens
gtgaccttgagcagg

SEQ ID NO: 1838268 - DNA, 15 bp, Homo sapiens
tgaccttgagcaggt

SEQ ID NO: 1838269 - DNA, 15 bp, Homo sapiens
gaccttgagcaggtg

SEQ ID NO: 1838270 - DNA, 15 bp, Homo sapiens
accttgagcaggtgt

SEQ ID NO: 1838271 - DNA, 15 bp, Homo sapiens
ccttgagcaggtgtc

SEQ ID NO: 1838272 - DNA, 15 bp, Homo sapiens
cttgagcaggtgtct

SEQ ID NO: 1838273 - DNA, 15 bp, Homo sapiens
ttgagcaggtgtctt

SEQ ID NO: 1838274 - DNA, 15 bp, Homo sapiens
tgagcaggtgtctta

SEQ ID NO: 1838275 - DNA, 15 bp, Homo sapiens
gagcaggtgtcttaa

SEQ ID NO: 1838276 - DNA, 15 bp, Homo sapiens
agcaggtgtcttaac

SEQ ID NO: 1838277 - DNA, 15 bp, Homo sapiens
gcaggtgtcttaacc

SEQ ID NO: 1838278 - DNA, 15 bp, Homo sapiens
caggtgtcttaacct

SEQ ID NO: 1838279 - DNA, 15 bp, Homo sapiens
aggtgtcttaacctc

SEQ ID NO: 1838280 - DNA, 15 bp, Homo sapiens
ggtgtcttaacctct

SEQ ID NO: 1838281 - DNA, 15 bp, Homo sapiens
gtgtcttaacctctc

SEQ ID NO: 1838282 - DNA, 15 bp, Homo sapiens
tgtcttaacctctct

SEQ ID NO: 1838283 - DNA, 15 bp, Homo sapiens
gtcttaacctctctg

SEQ ID NO: 1838284 - DNA, 15 bp, Homo sapiens
tcttaacctctctgg

SEQ ID NO: 1838285 - DNA, 15 bp, Homo sapiens
cttaacctctctggg

SEQ ID NO: 1838286 - DNA, 15 bp, Homo sapiens
ttaacctctctgggc

SEQ ID NO: 1838287 - DNA, 15 bp, Homo sapiens
taacctctctgggct

SEQ ID NO: 1838288 - DNA, 15 bp, Homo sapiens
aacctctctgggctt

SEQ ID NO: 1838289 - DNA, 15 bp, Homo sapiens
acctctctgggcttc

SEQ ID NO: 1838290 - DNA, 15 bp, Homo sapiens
cctctctgggcttcc

SEQ ID NO: 1838291 - DNA, 15 bp, Homo sapiens
ctctctgggcttccc

SEQ ID NO: 1838292 - DNA, 15 bp, Homo sapiens
tctctgggcttccct

SEQ ID NO: 1838293 - DNA, 15 bp, Homo sapiens
ctctgggcttccctc

SEQ ID NO: 1838294 - DNA, 15 bp, Homo sapiens
tctgggcttccctcc

SEQ ID NO: 1838295 - DNA, 15 bp, Homo sapiens
ctgggcttccctccc

SEQ ID NO: 1838296 - DNA, 15 bp, Homo sapiens
tgggcttccctccct

SEQ ID NO: 1838297 - DNA, 15 bp, Homo sapiens
gggcttccctccctc

SEQ ID NO: 1838298 - DNA, 15 bp, Homo sapiens
ggcttccctccctca

SEQ ID NO: 1838299 - DNA, 15 bp, Homo sapiens
gcttccctccctcat

SEQ ID NO: 1838300 - DNA, 15 bp, Homo sapiens
cttccctccctcatc

SEQ ID NO: 1838301 - DNA, 15 bp, Homo sapiens
ttccctccctcatct

SEQ ID NO: 1838302 - DNA, 15 bp, Homo sapiens
tccctccctcatcta

SEQ ID NO: 1838303 - DNA, 15 bp, Homo sapiens
ccctccctcatctat

SEQ ID NO: 1838304 - DNA, 15 bp, Homo sapiens
cctccctcatctata

SEQ ID NO: 1838305 - DNA, 15 bp, Homo sapiens
ctccctcatctataa

SEQ ID NO: 1838306 - DNA, 15 bp, Homo sapiens
tccctcatctataaa

SEQ ID NO: 1838307 - DNA, 15 bp, Homo sapiens
ccctcatctataaaa

SEQ ID NO: 1838308 - DNA, 15 bp, Homo sapiens
tcatctataaaatga

SEQ ID NO: 1838309 - DNA, 15 bp, Homo sapiens
catctataaaatgaa

SEQ ID NO: 1838310 - DNA, 15 bp, Homo sapiens
atctataaaatgaag

SEQ ID NO: 1838311 - DNA, 15 bp, Homo sapiens
tctataaaatgaaga

SEQ ID NO: 1838312 - DNA, 15 bp, Homo sapiens
ctataaaatgaagat

SEQ ID NO: 1838313 - DNA, 15 bp, Homo sapiens
tataaaatgaagata

SEQ ID NO: 1838314 - DNA, 15 bp, Homo sapiens
ataaaatgaagataa

SEQ ID NO: 1838315 - DNA, 15 bp, Homo sapiens
taaaatgaagataat

SEQ ID NO: 1838316 - DNA, 15 bp, Homo sapiens
aaaatgaagataata

SEQ ID NO: 1838317 - DNA, 15 bp, Homo sapiens
aaatgaagataataa

SEQ ID NO: 1838318 - DNA, 15 bp, Homo sapiens
aatgaagataataaa

SEQ ID NO: 1838319 - DNA, 15 bp, Homo sapiens
atgaagataataaaa

SEQ ID NO: 1838320 - DNA, 15 bp, Homo sapiens
tgaagataataaaag

SEQ ID NO: 1838321 - DNA, 15 bp, Homo sapiens
gaagataataaaagc

SEQ ID NO: 1838322 - DNA, 15 bp, Homo sapiens
aagataataaaagct

SEQ ID NO: 1838323 - DNA, 15 bp, Homo sapiens
agataataaaagctc

SEQ ID NO: 1838324 - DNA, 15 bp, Homo sapiens
gataataaaagctcc

SEQ ID NO: 1838325 - DNA, 15 bp, Homo sapiens
ataataaaagctcct

SEQ ID NO: 1838326 - DNA, 15 bp, Homo sapiens
taataaaagctcctg

SEQ ID NO: 1838327 - DNA, 15 bp, Homo sapiens
aataaaagctcctgc

SEQ ID NO: 1838328 - DNA, 15 bp, Homo sapiens
ataaaagctcctgcc

SEQ ID NO: 1838329 - DNA, 15 bp, Homo sapiens
taaaagctcctgcct

SEQ ID NO: 1838330 - DNA, 15 bp, Homo sapiens
aaaagctcctgcctc

SEQ ID NO: 1838331 - DNA, 15 bp, Homo sapiens
aaagctcctgcctca

SEQ ID NO: 1838332 - DNA, 15 bp, Homo sapiens
aagctcctgcctcat

SEQ ID NO: 1838333 - DNA, 15 bp, Homo sapiens
agctcctgcctcata

SEQ ID NO: 1838334 - DNA, 15 bp, Homo sapiens
gctcctgcctcataa

SEQ ID NO: 1838335 - DNA, 15 bp, Homo sapiens
ctcctgcctcataac

SEQ ID NO: 1838336 - DNA, 15 bp, Homo sapiens
tcctgcctcataaca

SEQ ID NO: 1838337 - DNA, 15 bp, Homo sapiens
cctgcctcataacac

SEQ ID NO: 1838338 - DNA, 15 bp, Homo sapiens
ctgcctcataacacg

SEQ ID NO: 1838339 - DNA, 15 bp, Homo sapiens
tgcctcataacacgg

SEQ ID NO: 1838340 - DNA, 15 bp, Homo sapiens
gcctcataacacggt

SEQ ID NO: 1838341 - DNA, 15 bp, Homo sapiens
cctcataacacggtg

SEQ ID NO: 1838342 - DNA, 15 bp, Homo sapiens
ctcataacacggtgg

SEQ ID NO: 1838343 - DNA, 15 bp, Homo sapiens
tcataacacggtggt

SEQ ID NO: 1838344 - DNA, 15 bp, Homo sapiens
cataacacggtggtg

SEQ ID NO: 1838345 - DNA, 15 bp, Homo sapiens
ataacacggtggtga

SEQ ID NO: 1838346 - DNA, 15 bp, Homo sapiens
taacacggtggtgag

SEQ ID NO: 1838347 - DNA, 15 bp, Homo sapiens
aacacggtggtgagg

SEQ ID NO: 1838348 - DNA, 15 bp, Homo sapiens
acacggtggtgagga

SEQ ID NO: 1838349 - DNA, 15 bp, Homo sapiens
cacggtggtgaggat

SEQ ID NO: 1838350 - DNA, 15 bp, Homo sapiens
acggtggtgaggatt

SEQ ID NO: 1838351 - DNA, 15 bp, Homo sapiens
cggtggtgaggatta

SEQ ID NO: 1838352 - DNA, 15 bp, Homo sapiens
ggtggtgaggattaa

SEQ ID NO: 1838353 - DNA, 15 bp, Homo sapiens
gaggattaaatgagc

SEQ ID NO: 1838354 - DNA, 15 bp, Homo sapiens
aggattaaatgagct

SEQ ID NO: 1838355 - DNA, 15 bp, Homo sapiens
ggattaaatgagctg

SEQ ID NO: 1838356 - DNA, 15 bp, Homo sapiens
gattaaatgagctga

SEQ ID NO: 1838357 - DNA, 15 bp, Homo sapiens
attaaatgagctgac

SEQ ID NO: 1838358 - DNA, 15 bp, Homo sapiens
ttaaatgagctgaca

SEQ ID NO: 1838359 - DNA, 15 bp, Homo sapiens
taaatgagctgacac

SEQ ID NO: 1838360 - DNA, 15 bp, Homo sapiens
aaatgagctgacacc

SEQ ID NO: 1838361 - DNA, 15 bp, Homo sapiens
aatgagctgacacct

SEQ ID NO: 1838362 - DNA, 15 bp, Homo sapiens
atgagctgacacctg

SEQ ID NO: 1838363 - DNA, 15 bp, Homo sapiens
tgagctgacacctgc

SEQ ID NO: 1838364 - DNA, 15 bp, Homo sapiens
gagctgacacctgca

SEQ ID NO: 1838365 - DNA, 15 bp, Homo sapiens
agctgacacctgcaa

SEQ ID NO: 1838366 - DNA, 15 bp, Homo sapiens
gctgacacctgcaaa

SEQ ID NO: 1838367 - DNA, 15 bp, Homo sapiens
ctgacacctgcaaag

SEQ ID NO: 1838368 - DNA, 15 bp, Homo sapiens
tgacacctgcaaagc

SEQ ID NO: 1838369 - DNA, 15 bp, Homo sapiens
gacacctgcaaagca

SEQ ID NO: 1838370 - DNA, 15 bp, Homo sapiens
acacctgcaaagcac

SEQ ID NO: 1838371 - DNA, 15 bp, Homo sapiens
acctgcaaagcacat

SEQ ID NO: 1838372 - DNA, 15 bp, Homo sapiens
cctgcaaagcacatc

SEQ ID NO: 1838373 - DNA, 15 bp, Homo sapiens
ctgcaaagcacatct

SEQ ID NO: 1838374 - DNA, 15 bp, Homo sapiens
tgcaaagcacatctt

SEQ ID NO: 1838375 - DNA, 15 bp, Homo sapiens
gcaaagcacatctta

SEQ ID NO: 1838376 - DNA, 15 bp, Homo sapiens
caaagcacatcttat

SEQ ID NO: 1838377 - DNA, 15 bp, Homo sapiens
aaagcacatcttata

SEQ ID NO: 1838378 - DNA, 15 bp, Homo sapiens
aagcacatcttatat

SEQ ID NO: 1838379 - DNA, 15 bp, Homo sapiens
agcacatcttatatt

SEQ ID NO: 1838380 - DNA, 15 bp, Homo sapiens
gcacatcttatattt

SEQ ID NO: 1838381 - DNA, 15 bp, Homo sapiens
cacatcttatatttt

SEQ ID NO: 1838382 - DNA, 15 bp, Homo sapiens
acatcttatattttt

SEQ ID NO: 1838383 - DNA, 15 bp, Homo sapiens
catcttatatttttt

SEQ ID NO: 1838384 - DNA, 15 bp, Homo sapiens
atcttatatttttta

SEQ ID NO: 1838385 - DNA, 15 bp, Homo sapiens
tcttatattttttat

SEQ ID NO: 1838386 - DNA, 15 bp, Homo sapiens
cttatattttttata

SEQ ID NO: 1838387 - DNA, 15 bp, Homo sapiens
ttatattttttatag

SEQ ID NO: 1838388 - DNA, 15 bp, Homo sapiens
tatattttttatagt

SEQ ID NO: 1838389 - DNA, 15 bp, Homo sapiens
atattttttatagtg

SEQ ID NO: 1838390 - DNA, 15 bp, Homo sapiens
tattttttatagtgc

SEQ ID NO: 1838391 - DNA, 15 bp, Homo sapiens
attttttatagtgct

SEQ ID NO: 1838392 - DNA, 15 bp, Homo sapiens
ttttttatagtgctc

SEQ ID NO: 1838393 - DNA, 15 bp, Homo sapiens
tttttatagtgctca

SEQ ID NO: 1838394 - DNA, 15 bp, Homo sapiens
ttttatagtgctcaa

SEQ ID NO: 1838395 - DNA, 15 bp, Homo sapiens
tttatagtgctcaaa

SEQ ID NO: 1838396 - DNA, 15 bp, Homo sapiens
ttatagtgctcaaaa

SEQ ID NO: 1838397 - DNA, 15 bp, Homo sapiens
tatagtgctcaaaaa

SEQ ID NO: 1838398 - DNA, 15 bp, Homo sapiens
atagtgctcaaaaat

SEQ ID NO: 1838399 - DNA, 15 bp, Homo sapiens
tagtgctcaaaaatc

SEQ ID NO: 1838400 - DNA, 15 bp, Homo sapiens
agtgctcaaaaatca

SEQ ID NO: 1838401 - DNA, 15 bp, Homo sapiens
gtgctcaaaaatcaa

SEQ ID NO: 1838402 - DNA, 15 bp, Homo sapiens
tgctcaaaaatcaac

SEQ ID NO: 1838403 - DNA, 15 bp, Homo sapiens
gctcaaaaatcaaca

SEQ ID NO: 1838404 - DNA, 15 bp, Homo sapiens
ctcaaaaatcaacaa

SEQ ID NO: 1838405 - DNA, 15 bp, Homo sapiens
tcaaaaatcaacaaa

SEQ ID NO: 1838406 - DNA, 15 bp, Homo sapiens
caaaaatcaacaaaa

SEQ ID NO: 1838407 - DNA, 15 bp, Homo sapiens
aaaaatcaacaaaaa

SEQ ID NO: 1838408 - DNA, 15 bp, Homo sapiens
aaaatcaacaaaaat

SEQ ID NO: 1838409 - DNA, 15 bp, Homo sapiens
aaatcaacaaaaatg

SEQ ID NO: 1838410 - DNA, 15 bp, Homo sapiens
aatcaacaaaaatga

SEQ ID NO: 1838411 - DNA, 15 bp, Homo sapiens
atcaacaaaaatgaa

SEQ ID NO: 1838412 - DNA, 15 bp, Homo sapiens
tcaacaaaaatgaaa

SEQ ID NO: 1838413 - DNA, 15 bp, Homo sapiens
caacaaaaatgaaaa

SEQ ID NO: 1838414 - DNA, 15 bp, Homo sapiens
aacaaaaatgaaaat

SEQ ID NO: 1838415 - DNA, 15 bp, Homo sapiens
acaaaaatgaaaata

SEQ ID NO: 1838416 - DNA, 15 bp, Homo sapiens
caaaaatgaaaataa

SEQ ID NO: 1838417 - DNA, 15 bp, Homo sapiens
aaaaatgaaaataaa

SEQ ID NO: 1838418 - DNA, 15 bp, Homo sapiens
aaaatgaaaataaat

SEQ ID NO: 1838419 - DNA, 15 bp, Homo sapiens
aaatgaaaataaata

SEQ ID NO: 1838420 - DNA, 15 bp, Homo sapiens
aatgaaaataaataa

SEQ ID NO: 1838421 - DNA, 15 bp, Homo sapiens
atgaaaataaataag

SEQ ID NO: 1838422 - DNA, 15 bp, Homo sapiens
tgaaaataaataagc

SEQ ID NO: 1838423 - DNA, 15 bp, Homo sapiens
gaaaataaataagcc

SEQ ID NO: 1838424 - DNA, 15 bp, Homo sapiens
aaaataaataagccg

SEQ ID NO: 1838425 - DNA, 15 bp, Homo sapiens
aaataaataagccgg

SEQ ID NO: 1838426 - DNA, 15 bp, Homo sapiens
aataaataagccggg

SEQ ID NO: 1838427 - DNA, 15 bp, Homo sapiens
ataaataagccgggc

SEQ ID NO: 1838428 - DNA, 15 bp, Homo sapiens
taaataagccgggca

SEQ ID NO: 1838429 - DNA, 15 bp, Homo sapiens
aaataagccgggcac

SEQ ID NO: 1838430 - DNA, 15 bp, Homo sapiens
aataagccgggcaca

SEQ ID NO: 1838431 - DNA, 15 bp, Homo sapiens
ataagccgggcacag

SEQ ID NO: 1838432 - DNA, 15 bp, Homo sapiens
taagccgggcacagt

SEQ ID NO: 1838433 - DNA, 15 bp, Homo sapiens
aagccgggcacagta

SEQ ID NO: 1838434 - DNA, 15 bp, Homo sapiens
agccgggcacagtac

SEQ ID NO: 1838435 - DNA, 15 bp, Homo sapiens
gccgggcacagtact

SEQ ID NO: 1838436 - DNA, 15 bp, Homo sapiens
ccgggcacagtactg

SEQ ID NO: 1838437 - DNA, 15 bp, Homo sapiens
cgggcacagtactgc

SEQ ID NO: 1838438 - DNA, 15 bp, Homo sapiens
gggcacagtactgca

SEQ ID NO: 1838439 - DNA, 15 bp, Homo sapiens
ggcacagtactgcac

SEQ ID NO: 1838440 - DNA, 15 bp, Homo sapiens
gcacagtactgcaca

SEQ ID NO: 1838441 - DNA, 15 bp, Homo sapiens
cacagtactgcacat

SEQ ID NO: 1838442 - DNA, 15 bp, Homo sapiens
acagtactgcacatc

SEQ ID NO: 1838443 - DNA, 15 bp, Homo sapiens
cagtactgcacatct

SEQ ID NO: 1838444 - DNA, 15 bp, Homo sapiens
agtactgcacatctg

SEQ ID NO: 1838445 - DNA, 15 bp, Homo sapiens
gtactgcacatctgt

SEQ ID NO: 1838446 - DNA, 15 bp, Homo sapiens
tactgcacatctgta

SEQ ID NO: 1838447 - DNA, 15 bp, Homo sapiens
actgcacatctgtag

SEQ ID NO: 1838448 - DNA, 15 bp, Homo sapiens
ctgcacatctgtagt

SEQ ID NO: 1838449 - DNA, 15 bp, Homo sapiens
tgcacatctgtagtc

SEQ ID NO: 1838450 - DNA, 15 bp, Homo sapiens
gcacatctgtagtcc

SEQ ID NO: 1838451 - DNA, 15 bp, Homo sapiens
cccagctacttggct

SEQ ID NO: 1838452 - DNA, 15 bp, Homo sapiens
ccagctacttggctg

SEQ ID NO: 1838453 - DNA, 15 bp, Homo sapiens
cagctacttggctga

SEQ ID NO: 1838454 - DNA, 15 bp, Homo sapiens
agctacttggctgaa

SEQ ID NO: 1838455 - DNA, 15 bp, Homo sapiens
gctacttggctgaag

SEQ ID NO: 1838456 - DNA, 15 bp, Homo sapiens
ctacttggctgaagc

SEQ ID NO: 1838457 - DNA, 15 bp, Homo sapiens
tacttggctgaagcg

SEQ ID NO: 1838458 - DNA, 15 bp, Homo sapiens
acttggctgaagcgg

SEQ ID NO: 1838459 - DNA, 15 bp, Homo sapiens
cttggctgaagcggg

SEQ ID NO: 1838460 - DNA, 15 bp, Homo sapiens
ttggctgaagcggga

SEQ ID NO: 1838461 - DNA, 15 bp, Homo sapiens
tggctgaagcgggag

SEQ ID NO: 1838462 - DNA, 15 bp, Homo sapiens
ggctgaagcgggagg

SEQ ID NO: 1838463 - DNA, 15 bp, Homo sapiens
gctgaagcgggagga

SEQ ID NO: 1838464 - DNA, 15 bp, Homo sapiens
ctgaagcgggaggat

SEQ ID NO: 1838465 - DNA, 15 bp, Homo sapiens
tgaagcgggaggatc

SEQ ID NO: 1838466 - DNA, 15 bp, Homo sapiens
gaagcgggaggatct

SEQ ID NO: 1838467 - DNA, 15 bp, Homo sapiens
aagcgggaggatctc

SEQ ID NO: 1838468 - DNA, 15 bp, Homo sapiens
agcgggaggatctct

SEQ ID NO: 1838469 - DNA, 15 bp, Homo sapiens
gcgggaggatctctt

SEQ ID NO: 1838470 - DNA, 15 bp, Homo sapiens
cgggaggatctcttg

SEQ ID NO: 1838471 - DNA, 15 bp, Homo sapiens
tgagaccagcctgga

SEQ ID NO: 1838472 - DNA, 15 bp, Homo sapiens
gagaccagcctggac

SEQ ID NO: 1838473 - DNA, 15 bp, Homo sapiens
agaccagcctggaca

SEQ ID NO: 1838474 - DNA, 15 bp, Homo sapiens
gaccagcctggacaa

SEQ ID NO: 1838475 - DNA, 15 bp, Homo sapiens
accagcctggacaac

SEQ ID NO: 1838476 - DNA, 15 bp, Homo sapiens
cagcctggacaacat

SEQ ID NO: 1838477 - DNA, 15 bp, Homo sapiens
agcctggacaacata

SEQ ID NO: 1838478 - DNA, 15 bp, Homo sapiens
gcctggacaacatag

SEQ ID NO: 1838479 - DNA, 15 bp, Homo sapiens
cctggacaacatagt

SEQ ID NO: 1838480 - DNA, 15 bp, Homo sapiens
ctggacaacatagtg

SEQ ID NO: 1838481 - DNA, 15 bp, Homo sapiens
tggacaacatagtga

SEQ ID NO: 1838482 - DNA, 15 bp, Homo sapiens
ggacaacatagtgag

SEQ ID NO: 1838483 - DNA, 15 bp, Homo sapiens
gacaacatagtgaga

SEQ ID NO: 1838484 - DNA, 15 bp, Homo sapiens
acaacatagtgagac

SEQ ID NO: 1838485 - DNA, 15 bp, Homo sapiens
gagaccccatctctt

SEQ ID NO: 1838486 - DNA, 15 bp, Homo sapiens
agaccccatctctta

SEQ ID NO: 1838487 - DNA, 15 bp, Homo sapiens
gaccccatctcttaa

SEQ ID NO: 1838488 - DNA, 15 bp, Homo sapiens
accccatctcttaaa

SEQ ID NO: 1838489 - DNA, 15 bp, Homo sapiens
ccccatctcttaaaa

SEQ ID NO: 1838490 - DNA, 15 bp, Homo sapiens
cccatctcttaaaaa

SEQ ID NO: 1838491 - DNA, 15 bp, Homo sapiens
cttaaaaaaaaaaac

SEQ ID NO: 1838492 - DNA, 15 bp, Homo sapiens
ttaaaaaaaaaaact

SEQ ID NO: 1838493 - DNA, 15 bp, Homo sapiens
taaaaaaaaaaactt

SEQ ID NO: 1838494 - DNA, 15 bp, Homo sapiens
aaaaaaacttagggc

SEQ ID NO: 1838495 - DNA, 15 bp, Homo sapiens
aaaaaacttagggcc

SEQ ID NO: 1838496 - DNA, 15 bp, Homo sapiens
aaaaacttagggccg

SEQ ID NO: 1838497 - DNA, 15 bp, Homo sapiens
aaaacttagggccgg

SEQ ID NO: 1838498 - DNA, 15 bp, Homo sapiens
aaacttagggccggg

SEQ ID NO: 1838499 - DNA, 15 bp, Homo sapiens
aacttagggccgggc

SEQ ID NO: 1838500 - DNA, 15 bp, Homo sapiens
acttagggccgggca

SEQ ID NO: 1838501 - DNA, 15 bp, Homo sapiens
cttagggccgggcat

SEQ ID NO: 1838502 - DNA, 15 bp, Homo sapiens
ttagggccgggcatg

SEQ ID NO: 1838503 - DNA, 15 bp, Homo sapiens
tagggccgggcatgg

SEQ ID NO: 1838504 - DNA, 15 bp, Homo sapiens
agggccgggcatggt

SEQ ID NO: 1838505 - DNA, 15 bp, Homo sapiens
gggccgggcatggtg

SEQ ID NO: 1838506 - DNA, 15 bp, Homo sapiens
ctcatgcctataatg

SEQ ID NO: 1838507 - DNA, 15 bp, Homo sapiens
tcatgcctataatgg

SEQ ID NO: 1838508 - DNA, 15 bp, Homo sapiens
catgcctataatggc

SEQ ID NO: 1838509 - DNA, 15 bp, Homo sapiens
atgcctataatggca

SEQ ID NO: 1838510 - DNA, 15 bp, Homo sapiens
tgcctataatggcaa

SEQ ID NO: 1838511 - DNA, 15 bp, Homo sapiens
gcctataatggcaac

SEQ ID NO: 1838512 - DNA, 15 bp, Homo sapiens
cctataatggcaacc

SEQ ID NO: 1838513 - DNA, 15 bp, Homo sapiens
ctataatggcaaccc

SEQ ID NO: 1838514 - DNA, 15 bp, Homo sapiens
tataatggcaaccct

SEQ ID NO: 1838515 - DNA, 15 bp, Homo sapiens
ataatggcaaccctt

SEQ ID NO: 1838516 - DNA, 15 bp, Homo sapiens
taatggcaacccttt

SEQ ID NO: 1838517 - DNA, 15 bp, Homo sapiens
aatggcaaccctttg

SEQ ID NO: 1838518 - DNA, 15 bp, Homo sapiens
atggcaaccctttgg

SEQ ID NO: 1838519 - DNA, 15 bp, Homo sapiens
tggcaaccctttgga

SEQ ID NO: 1838520 - DNA, 15 bp, Homo sapiens
ggcaaccctttggaa

SEQ ID NO: 1838521 - DNA, 15 bp, Homo sapiens
gcaaccctttggaag

SEQ ID NO: 1838522 - DNA, 15 bp, Homo sapiens
caaccctttggaagg

SEQ ID NO: 1838523 - DNA, 15 bp, Homo sapiens
aaccctttggaaggc

SEQ ID NO: 1838524 - DNA, 15 bp, Homo sapiens
accctttggaaggcc

SEQ ID NO: 1838525 - DNA, 15 bp, Homo sapiens
ccctttggaaggcca

SEQ ID NO: 1838526 - DNA, 15 bp, Homo sapiens
cctttggaaggccaa

SEQ ID NO: 1838527 - DNA, 15 bp, Homo sapiens
ttggaaggccaaggt

SEQ ID NO: 1838528 - DNA, 15 bp, Homo sapiens
tggaaggccaaggtg

SEQ ID NO: 1838529 - DNA, 15 bp, Homo sapiens
ggaaggccaaggtgg

SEQ ID NO: 1838530 - DNA, 15 bp, Homo sapiens
gaaggccaaggtggg

SEQ ID NO: 1838531 - DNA, 15 bp, Homo sapiens
aaggccaaggtgggt

SEQ ID NO: 1838532 - DNA, 15 bp, Homo sapiens
aggccaaggtgggtg

SEQ ID NO: 1838533 - DNA, 15 bp, Homo sapiens
ggccaaggtgggtgg

SEQ ID NO: 1838534 - DNA, 15 bp, Homo sapiens
gccaaggtgggtgga

SEQ ID NO: 1838535 - DNA, 15 bp, Homo sapiens
ccaaggtgggtggat

SEQ ID NO: 1838536 - DNA, 15 bp, Homo sapiens
caaggtgggtggatc

SEQ ID NO: 1838537 - DNA, 15 bp, Homo sapiens
aaggtgggtggatca

SEQ ID NO: 1838538 - DNA, 15 bp, Homo sapiens
ggtggatcacttgaa

SEQ ID NO: 1838539 - DNA, 15 bp, Homo sapiens
gtggatcacttgaag

SEQ ID NO: 1838540 - DNA, 15 bp, Homo sapiens
tggatcacttgaagt

SEQ ID NO: 1838541 - DNA, 15 bp, Homo sapiens
catggtgaaacccat

SEQ ID NO: 1838542 - DNA, 15 bp, Homo sapiens
atggtgaaacccatc

SEQ ID NO: 1838543 - DNA, 15 bp, Homo sapiens
tggtgaaacccatct

SEQ ID NO: 1838544 - DNA, 15 bp, Homo sapiens
ggtgaaacccatctc

SEQ ID NO: 1838545 - DNA, 15 bp, Homo sapiens
gtgaaacccatctct

SEQ ID NO: 1838546 - DNA, 15 bp, Homo sapiens
tgaaacccatctcta

SEQ ID NO: 1838547 - DNA, 15 bp, Homo sapiens
atacaaaaaaaattg

SEQ ID NO: 1838548 - DNA, 15 bp, Homo sapiens
tacaaaaaaaattgc

SEQ ID NO: 1838549 - DNA, 15 bp, Homo sapiens
acaaaaaaaattgct

SEQ ID NO: 1838550 - DNA, 15 bp, Homo sapiens
caaaaaaaattgctg

SEQ ID NO: 1838551 - DNA, 15 bp, Homo sapiens
aaaaaaaattgctgg

SEQ ID NO: 1838552 - DNA, 15 bp, Homo sapiens
aaaaaaattgctggg

SEQ ID NO: 1838553 - DNA, 15 bp, Homo sapiens
aaaaaattgctgggc

SEQ ID NO: 1838554 - DNA, 15 bp, Homo sapiens
aaaaattgctgggcg

SEQ ID NO: 1838555 - DNA, 15 bp, Homo sapiens
aaaattgctgggcgt

SEQ ID NO: 1838556 - DNA, 15 bp, Homo sapiens
aaattgctgggcgtg

SEQ ID NO: 1838557 - DNA, 15 bp, Homo sapiens
aattgctgggcgtgg

SEQ ID NO: 1838558 - DNA, 15 bp, Homo sapiens
attgctgggcgtggt

SEQ ID NO: 1838559 - DNA, 15 bp, Homo sapiens
ttgctgggcgtggta

SEQ ID NO: 1838560 - DNA, 15 bp, Homo sapiens
tgctgggcgtggtag

SEQ ID NO: 1838561 - DNA, 15 bp, Homo sapiens
tgggcgtggtagtgc

SEQ ID NO: 1838562 - DNA, 15 bp, Homo sapiens
gggcgtggtagtgcg

SEQ ID NO: 1838563 - DNA, 15 bp, Homo sapiens
ggcgtggtagtgcgt

SEQ ID NO: 1838564 - DNA, 15 bp, Homo sapiens
gcgtggtagtgcgtg

SEQ ID NO: 1838565 - DNA, 15 bp, Homo sapiens
cgtggtagtgcgtgc

SEQ ID NO: 1838566 - DNA, 15 bp, Homo sapiens
gtggtagtgcgtgcc

SEQ ID NO: 1838567 - DNA, 15 bp, Homo sapiens
tggtagtgcgtgcct

SEQ ID NO: 1838568 - DNA, 15 bp, Homo sapiens
ggtagtgcgtgcctg

SEQ ID NO: 1838569 - DNA, 15 bp, Homo sapiens
gtagtgcgtgcctgt

SEQ ID NO: 1838570 - DNA, 15 bp, Homo sapiens
tagtgcgtgcctgta

SEQ ID NO: 1838571 - DNA, 15 bp, Homo sapiens
agtgcgtgcctgtag

SEQ ID NO: 1838572 - DNA, 15 bp, Homo sapiens
gtgcgtgcctgtagt

SEQ ID NO: 1838573 - DNA, 15 bp, Homo sapiens
tgcgtgcctgtagtc

SEQ ID NO: 1838574 - DNA, 15 bp, Homo sapiens
gcgtgcctgtagtcc

SEQ ID NO: 1838575 - DNA, 15 bp, Homo sapiens
cgtgcctgtagtccc

SEQ ID NO: 1838576 - DNA, 15 bp, Homo sapiens
tgcctgtagtcccac

SEQ ID NO: 1838577 - DNA, 15 bp, Homo sapiens
gcctgtagtcccacc

SEQ ID NO: 1838578 - DNA, 15 bp, Homo sapiens
cctgtagtcccacct

SEQ ID NO: 1838579 - DNA, 15 bp, Homo sapiens
ctgtagtcccaccta

SEQ ID NO: 1838580 - DNA, 15 bp, Homo sapiens
tgtagtcccacctac

SEQ ID NO: 1838581 - DNA, 15 bp, Homo sapiens
gtagtcccacctact

SEQ ID NO: 1838582 - DNA, 15 bp, Homo sapiens
tagtcccacctactt

SEQ ID NO: 1838583 - DNA, 15 bp, Homo sapiens
agtcccacctacttg

SEQ ID NO: 1838584 - DNA, 15 bp, Homo sapiens
gtcccacctacttgg

SEQ ID NO: 1838585 - DNA, 15 bp, Homo sapiens
tcccacctacttggg

SEQ ID NO: 1838586 - DNA, 15 bp, Homo sapiens
cccacctacttggga

SEQ ID NO: 1838587 - DNA, 15 bp, Homo sapiens
ccacctacttgggag

SEQ ID NO: 1838588 - DNA, 15 bp, Homo sapiens
cacctacttgggagg

SEQ ID NO: 1838589 - DNA, 15 bp, Homo sapiens
acctacttgggaggc

SEQ ID NO: 1838590 - DNA, 15 bp, Homo sapiens
cctacttgggaggct

SEQ ID NO: 1838591 - DNA, 15 bp, Homo sapiens
tacttgggaggctgc

SEQ ID NO: 1838592 - DNA, 15 bp, Homo sapiens
acttgggaggctgcg

SEQ ID NO: 1838593 - DNA, 15 bp, Homo sapiens
cttgggaggctgcgg

SEQ ID NO: 1838594 - DNA, 15 bp, Homo sapiens
ttgggaggctgcggc

SEQ ID NO: 1838595 - DNA, 15 bp, Homo sapiens
tgggaggctgcggca

SEQ ID NO: 1838596 - DNA, 15 bp, Homo sapiens
gggaggctgcggcat

SEQ ID NO: 1838597 - DNA, 15 bp, Homo sapiens
ggaggctgcggcata

SEQ ID NO: 1838598 - DNA, 15 bp, Homo sapiens
gaggctgcggcataa

SEQ ID NO: 1838599 - DNA, 15 bp, Homo sapiens
aggctgcggcataag

SEQ ID NO: 1838600 - DNA, 15 bp, Homo sapiens
ggctgcggcataaga

SEQ ID NO: 1838601 - DNA, 15 bp, Homo sapiens
gctgcggcataagaa

SEQ ID NO: 1838602 - DNA, 15 bp, Homo sapiens
ctgcggcataagaaa

SEQ ID NO: 1838603 - DNA, 15 bp, Homo sapiens
tgcggcataagaaaa

SEQ ID NO: 1838604 - DNA, 15 bp, Homo sapiens
gcggcataagaaaag

SEQ ID NO: 1838605 - DNA, 15 bp, Homo sapiens
cggcataagaaaaga

SEQ ID NO: 1838606 - DNA, 15 bp, Homo sapiens
ggcataagaaaagaa

SEQ ID NO: 1838607 - DNA, 15 bp, Homo sapiens
gcataagaaaagaat

SEQ ID NO: 1838608 - DNA, 15 bp, Homo sapiens
cataagaaaagaata

SEQ ID NO: 1838609 - DNA, 15 bp, Homo sapiens
ataagaaaagaatag

SEQ ID NO: 1838610 - DNA, 15 bp, Homo sapiens
taagaaaagaatagc

SEQ ID NO: 1838611 - DNA, 15 bp, Homo sapiens
aagaaaagaatagct

SEQ ID NO: 1838612 - DNA, 15 bp, Homo sapiens
agaaaagaatagctt

SEQ ID NO: 1838613 - DNA, 15 bp, Homo sapiens
gaaaagaatagcttg

SEQ ID NO: 1838614 - DNA, 15 bp, Homo sapiens
aaaagaatagcttga

SEQ ID NO: 1838615 - DNA, 15 bp, Homo sapiens
aaagaatagcttgaa

SEQ ID NO: 1838616 - DNA, 15 bp, Homo sapiens
aagaatagcttgaat

SEQ ID NO: 1838617 - DNA, 15 bp, Homo sapiens
agaatagcttgaatc

SEQ ID NO: 1838618 - DNA, 15 bp, Homo sapiens
gaatagcttgaatcc

SEQ ID NO: 1838619 - DNA, 15 bp, Homo sapiens
aatagcttgaatcca

SEQ ID NO: 1838620 - DNA, 15 bp, Homo sapiens
atagcttgaatccag

SEQ ID NO: 1838621 - DNA, 15 bp, Homo sapiens
tagcttgaatccagg

SEQ ID NO: 1838622 - DNA, 15 bp, Homo sapiens
agcttgaatccagga

SEQ ID NO: 1838623 - DNA, 15 bp, Homo sapiens
gcttgaatccaggaa

SEQ ID NO: 1838624 - DNA, 15 bp, Homo sapiens
tccaggaagtggagc

SEQ ID NO: 1838625 - DNA, 15 bp, Homo sapiens
ccaggaagtggagct

SEQ ID NO: 1838626 - DNA, 15 bp, Homo sapiens
caggaagtggagctt

SEQ ID NO: 1838627 - DNA, 15 bp, Homo sapiens
aggaagtggagcttg

SEQ ID NO: 1838628 - DNA, 15 bp, Homo sapiens
ggaagtggagcttgc

SEQ ID NO: 1838629 - DNA, 15 bp, Homo sapiens
gaagtggagcttgca

SEQ ID NO: 1838630 - DNA, 15 bp, Homo sapiens
aagtggagcttgcag

SEQ ID NO: 1838631 - DNA, 15 bp, Homo sapiens
agtggagcttgcagt

SEQ ID NO: 1838632 - DNA, 15 bp, Homo sapiens
gagccaagatcacaa

SEQ ID NO: 1838633 - DNA, 15 bp, Homo sapiens
agccaagatcacaac

SEQ ID NO: 1838634 - DNA, 15 bp, Homo sapiens
gccaagatcacaaca

SEQ ID NO: 1838635 - DNA, 15 bp, Homo sapiens
ccaagatcacaacac

SEQ ID NO: 1838636 - DNA, 15 bp, Homo sapiens
caagatcacaacact

SEQ ID NO: 1838637 - DNA, 15 bp, Homo sapiens
aagatcacaacactg

SEQ ID NO: 1838638 - DNA, 15 bp, Homo sapiens
agatcacaacactgc

SEQ ID NO: 1838639 - DNA, 15 bp, Homo sapiens
gatcacaacactgca

SEQ ID NO: 1838640 - DNA, 15 bp, Homo sapiens
atcacaacactgcac

SEQ ID NO: 1838641 - DNA, 15 bp, Homo sapiens
tcacaacactgcact

SEQ ID NO: 1838642 - DNA, 15 bp, Homo sapiens
cacaacactgcactc

SEQ ID NO: 1838643 - DNA, 15 bp, Homo sapiens
acaacactgcactcc

SEQ ID NO: 1838644 - DNA, 15 bp, Homo sapiens
caacactgcactcca

SEQ ID NO: 1838645 - DNA, 15 bp, Homo sapiens
aacactgcactccag

SEQ ID NO: 1838646 - DNA, 15 bp, Homo sapiens
acactgcactccagc

SEQ ID NO: 1838647 - DNA, 15 bp, Homo sapiens
cagcctgagcaacag

SEQ ID NO: 1838648 - DNA, 15 bp, Homo sapiens
agcctgagcaacaga

SEQ ID NO: 1838649 - DNA, 15 bp, Homo sapiens
gcctgagcaacagag
